United States Patent Application Publication US 2026/0258423 A1 - sequence listing, part 2

SEQ ID NO: 30204 - DNA, 20 bp, synthetic construct
  source 1..20: mol_type = other DNA
tttatagtaagctactactg

SEQ ID NO: 30205 - DNA, 20 bp, synthetic construct
  source 1..20: mol_type = other DNA
atttatagtaagctactact

SEQ ID NO: 30206 - DNA, 20 bp, synthetic construct
  source 1..20: mol_type = other DNA
aatttatagtaagctactac

SEQ ID NO: 30207 - DNA, 20 bp, synthetic construct
  source 1..20: mol_type = other DNA
taatttatagtaagctacta

SEQ ID NO: 30208 - DNA, 20 bp, synthetic construct
  source 1..20: mol_type = other DNA
gtaatttatagtaagctact

SEQ ID NO: 30209 - DNA, 20 bp, synthetic construct
  source 1..20: mol_type = other DNA
tgtaatttatagtaagctac

SEQ ID NO: 30210 - DNA, 20 bp, synthetic construct
  source 1..20: mol_type = other DNA
ttgtaatttatagtaagcta

SEQ ID NO: 30211 - DNA, 20 bp, synthetic construct
  source 1..20: mol_type = other DNA
cttgtaatttatagtaagct

SEQ ID NO: 30212 - DNA, 20 bp, synthetic construct
  source 1..20: mol_type = other DNA
tcttgtaatttatagtaagc

SEQ ID NO: 30213 - DNA, 20 bp, synthetic construct
  source 1..20: mol_type = other DNA
ttcttgtaatttatagtaag

SEQ ID NO: 30214 - DNA, 20 bp, synthetic construct
  source 1..20: mol_type = other DNA
attcttgtaatttatagtaa

SEQ ID NO: 30215 - DNA, 20 bp, synthetic construct
  source 1..20: mol_type = other DNA
tattcttgtaatttatagta

SEQ ID NO: 30216 - DNA, 20 bp, synthetic construct
  source 1..20: mol_type = other DNA
ttattcttgtaatttatagt

SEQ ID NO: 30217 - DNA, 20 bp, synthetic construct
  source 1..20: mol_type = other DNA
tttattcttgtaatttatag

SEQ ID NO: 30218 - DNA, 20 bp, synthetic construct
  source 1..20: mol_type = other DNA
ttttattcttgtaatttata

SEQ ID NO: 30219 - DNA, 20 bp, synthetic construct
  source 1..20: mol_type = other DNA
tttttattcttgtaatttat

SEQ ID NO: 30220 - DNA, 20 bp, synthetic construct
  source 1..20: mol_type = other DNA
ctttttattcttgtaattta

SEQ ID NO: 30221 - DNA, 20 bp, synthetic construct
  source 1..20: mol_type = other DNA
tctttttattcttgtaattt

SEQ ID NO: 30222 - DNA, 20 bp, synthetic construct
  source 1..20: mol_type = other DNA
atctttttattcttgtaatt

SEQ ID NO: 30223 - DNA, 20 bp, synthetic construct
  source 1..20: mol_type = other DNA
aatctttttattcttgtaat

SEQ ID NO: 30224 - DNA, 20 bp, synthetic construct
  source 1..20: mol_type = other DNA
taatctttttattcttgtaa

SEQ ID NO: 30225 - DNA, 20 bp, synthetic construct
  source 1..20: mol_type = other DNA
gtaatctttttattcttgta

SEQ ID NO: 30226 - DNA, 20 bp, synthetic construct
  source 1..20: mol_type = other DNA
ggtaatctttttattcttgt

SEQ ID NO: 30227 - DNA, 20 bp, synthetic construct
  source 1..20: mol_type = other DNA
tggtaatctttttattcttg

SEQ ID NO: 30228 - DNA, 20 bp, synthetic construct
  source 1..20: mol_type = other DNA
atggtaatctttttattctt

SEQ ID NO: 30229 - DNA, 20 bp, synthetic construct
  source 1..20: mol_type = other DNA
aatggtaatctttttattct

SEQ ID NO: 30230 - DNA, 20 bp, synthetic construct
  source 1..20: mol_type = other DNA
aaatggtaatctttttattc

SEQ ID NO: 30231 - DNA, 20 bp, synthetic construct
  source 1..20: mol_type = other DNA
aaaatggtaatctttttatt

SEQ ID NO: 30232 - DNA, 20 bp, synthetic construct
  source 1..20: mol_type = other DNA
gaaaatggtaatctttttat

SEQ ID NO: 30233 - DNA, 20 bp, synthetic construct
  source 1..20: mol_type = other DNA
ggaaaatggtaatcttttta

SEQ ID NO: 30234 - DNA, 20 bp, synthetic construct
  source 1..20: mol_type = other DNA
gggaaaatggtaatcttttt

SEQ ID NO: 30235 - DNA, 20 bp, synthetic construct
  source 1..20: mol_type = other DNA
agggaaaatggtaatctttt

SEQ ID NO: 30236 - DNA, 20 bp, synthetic construct
  source 1..20: mol_type = other DNA
gagggaaaatggtaatcttt

SEQ ID NO: 30237 - DNA, 20 bp, synthetic construct
  source 1..20: mol_type = other DNA
tgagggaaaatggtaatctt

SEQ ID NO: 30238 - DNA, 20 bp, synthetic construct
  source 1..20: mol_type = other DNA
gtgagggaaaatggtaatct

SEQ ID NO: 30239 - DNA, 20 bp, synthetic construct
  source 1..20: mol_type = other DNA
tgtgagggaaaatggtaatc

SEQ ID NO: 30240 - DNA, 20 bp, synthetic construct
  source 1..20: mol_type = other DNA
gtgtgagggaaaatggtaat

SEQ ID NO: 30241 - DNA, 20 bp, synthetic construct
  source 1..20: mol_type = other DNA
agtgtgagggaaaatggtaa

SEQ ID NO: 30242 - DNA, 20 bp, synthetic construct
  source 1..20: mol_type = other DNA
cagtgtgagggaaaatggta

SEQ ID NO: 30243 - DNA, 20 bp, synthetic construct
  source 1..20: mol_type = other DNA
acagtgtgagggaaaatggt

SEQ ID NO: 30244 - DNA, 20 bp, synthetic construct
  source 1..20: mol_type = other DNA
aacagtgtgagggaaaatgg

SEQ ID NO: 30245 - DNA, 20 bp, synthetic construct
  source 1..20: mol_type = other DNA
aaacagtgtgagggaaaatg

SEQ ID NO: 30246 - DNA, 20 bp, synthetic construct
  source 1..20: mol_type = other DNA
aaaacagtgtgagggaaaat

SEQ ID NO: 30247 - DNA, 20 bp, synthetic construct
  source 1..20: mol_type = other DNA
caaaacagtgtgagggaaaa

SEQ ID NO: 30248 - DNA, 20 bp, synthetic construct
  source 1..20: mol_type = other DNA
acaaaacagtgtgagggaaa

SEQ ID NO: 30249 - DNA, 20 bp, synthetic construct
  source 1..20: mol_type = other DNA
cacaaaacagtgtgagggaa

SEQ ID NO: 30250 - DNA, 20 bp, synthetic construct
  source 1..20: mol_type = other DNA
ccacaaaacagtgtgaggga

SEQ ID NO: 30251 - DNA, 20 bp, synthetic construct
  source 1..20: mol_type = other DNA
tccacaaaacagtgtgaggg

SEQ ID NO: 30252 - DNA, 20 bp, synthetic construct
  source 1..20: mol_type = other DNA
ctccacaaaacagtgtgagg

SEQ ID NO: 30253 - DNA, 20 bp, synthetic construct
  source 1..20: mol_type = other DNA
tctccacaaaacagtgtgag

SEQ ID NO: 30254 - DNA, 20 bp, synthetic construct
  source 1..20: mol_type = other DNA
ttctccacaaaacagtgtga

SEQ ID NO: 30255 - DNA, 20 bp, synthetic construct
  source 1..20: mol_type = other DNA
attctccacaaaacagtgtg

SEQ ID NO: 30256 - DNA, 20 bp, synthetic construct
  source 1..20: mol_type = other DNA
cattctccacaaaacagtgt

SEQ ID NO: 30257 - DNA, 20 bp, synthetic construct
  source 1..20: mol_type = other DNA
gcattctccacaaaacagtg

SEQ ID NO: 30258 - DNA, 20 bp, synthetic construct
  source 1..20: mol_type = other DNA
ggcattctccacaaaacagt

SEQ ID NO: 30259 - DNA, 20 bp, synthetic construct
  source 1..20: mol_type = other DNA
aggcattctccacaaaacag

SEQ ID NO: 30260 - DNA, 20 bp, synthetic construct
  source 1..20: mol_type = other DNA
taggcattctccacaaaaca

SEQ ID NO: 30261 - DNA, 20 bp, synthetic construct
  source 1..20: mol_type = other DNA
ttaggcattctccacaaaac

SEQ ID NO: 30262 - DNA, 20 bp, synthetic construct
  source 1..20: mol_type = other DNA
tttaggcattctccacaaaa

SEQ ID NO: 30263 - DNA, 20 bp, synthetic construct
  source 1..20: mol_type = other DNA
ctttaggcattctccacaaa

SEQ ID NO: 30264 - DNA, 20 bp, synthetic construct
  source 1..20: mol_type = other DNA
actttaggcattctccacaa

SEQ ID NO: 30265 - DNA, 20 bp, synthetic construct
  source 1..20: mol_type = other DNA
aactttaggcattctccaca

SEQ ID NO: 30266 - DNA, 20 bp, synthetic construct
  source 1..20: mol_type = other DNA
taactttaggcattctccac

SEQ ID NO: 30267 - DNA, 20 bp, synthetic construct
  source 1..20: mol_type = other DNA
gtaactttaggcattctcca

SEQ ID NO: 30268 - DNA, 20 bp, synthetic construct
  source 1..20: mol_type = other DNA
agtaactttaggcattctcc

SEQ ID NO: 30269 - DNA, 20 bp, synthetic construct
  source 1..20: mol_type = other DNA
aagtaactttaggcattctc

SEQ ID NO: 30270 - DNA, 20 bp, synthetic construct
  source 1..20: mol_type = other DNA
aaagtaactttaggcattct

SEQ ID NO: 30271 - DNA, 20 bp, synthetic construct
  source 1..20: mol_type = other DNA
aaaagtaactttaggcattc

SEQ ID NO: 30272 - DNA, 20 bp, synthetic construct
  source 1..20: mol_type = other DNA
aaaaagtaactttaggcatt

SEQ ID NO: 30273 - DNA, 20 bp, synthetic construct
  source 1..20: mol_type = other DNA
gaaaaagtaactttaggcat

SEQ ID NO: 30274 - DNA, 20 bp, synthetic construct
  source 1..20: mol_type = other DNA
agaaaaagtaactttaggca

SEQ ID NO: 30275 - DNA, 20 bp, synthetic construct
  source 1..20: mol_type = other DNA
aagaaaaagtaactttaggc

SEQ ID NO: 30276 - DNA, 20 bp, synthetic construct
  source 1..20: mol_type = other DNA
aaagaaaaagtaactttagg

SEQ ID NO: 30277 - DNA, 20 bp, synthetic construct
  source 1..20: mol_type = other DNA
aaaagaaaaagtaactttag

SEQ ID NO: 30278 - DNA, 20 bp, synthetic construct
  source 1..20: mol_type = other DNA
aaaaagaaaaagtaacttta

SEQ ID NO: 30279 - DNA, 20 bp, synthetic construct
  source 1..20: mol_type = other DNA
taaaaagaaaaagtaacttt

SEQ ID NO: 30280 - DNA, 20 bp, synthetic construct
  source 1..20: mol_type = other DNA
gtaaaaagaaaaagtaactt

SEQ ID NO: 30281 - DNA, 20 bp, synthetic construct
  source 1..20: mol_type = other DNA
tgtaaaaagaaaaagtaact

SEQ ID NO: 30282 - DNA, 20 bp, synthetic construct
  source 1..20: mol_type = other DNA
ctgtaaaaagaaaaagtaac

SEQ ID NO: 30283 - DNA, 20 bp, synthetic construct
  source 1..20: mol_type = other DNA
cctgtaaaaagaaaaagtaa

SEQ ID NO: 30284 - DNA, 20 bp, synthetic construct
  source 1..20: mol_type = other DNA
acctgtaaaaagaaaaagta

SEQ ID NO: 30285 - DNA, 20 bp, synthetic construct
  source 1..20: mol_type = other DNA
gacctgtaaaaagaaaaagt

SEQ ID NO: 30286 - DNA, 20 bp, synthetic construct
  source 1..20: mol_type = other DNA
tgacctgtaaaaagaaaaag

SEQ ID NO: 30287 - DNA, 20 bp, synthetic construct
  source 1..20: mol_type = other DNA
ctgacctgtaaaaagaaaaa

SEQ ID NO: 30288 - DNA, 20 bp, synthetic construct
  source 1..20: mol_type = other DNA
actgacctgtaaaaagaaaa

SEQ ID NO: 30289 - DNA, 20 bp, synthetic construct
  source 1..20: mol_type = other DNA
tactgacctgtaaaaagaaa

SEQ ID NO: 30290 - DNA, 20 bp, synthetic construct
  source 1..20: mol_type = other DNA
atactgacctgtaaaaagaa

SEQ ID NO: 30291 - DNA, 20 bp, synthetic construct
  source 1..20: mol_type = other DNA
aatactgacctgtaaaaaga

SEQ ID NO: 30292 - DNA, 20 bp, synthetic construct
  source 1..20: mol_type = other DNA
gaatactgacctgtaaaaag

SEQ ID NO: 30293 - DNA, 20 bp, synthetic construct
  source 1..20: mol_type = other DNA
ggaatactgacctgtaaaaa

SEQ ID NO: 30294 - DNA, 20 bp, synthetic construct
  source 1..20: mol_type = other DNA
aggaatactgacctgtaaaa

SEQ ID NO: 30295 - DNA, 20 bp, synthetic construct
  source 1..20: mol_type = other DNA
taggaatactgacctgtaaa

SEQ ID NO: 30296 - DNA, 20 bp, synthetic construct
  source 1..20: mol_type = other DNA
ataggaatactgacctgtaa

SEQ ID NO: 30297 - DNA, 20 bp, synthetic construct
  source 1..20: mol_type = other DNA
aataggaatactgacctgta

SEQ ID NO: 30298 - DNA, 20 bp, synthetic construct
  source 1..20: mol_type = other DNA
aaataggaatactgacctgt

SEQ ID NO: 30299 - DNA, 20 bp, synthetic construct
  source 1..20: mol_type = other DNA
caaataggaatactgacctg

SEQ ID NO: 30300 - DNA, 20 bp, synthetic construct
  source 1..20: mol_type = other DNA
ccaaataggaatactgacct

SEQ ID NO: 30301 - DNA, 20 bp, synthetic construct
  source 1..20: mol_type = other DNA
gccaaataggaatactgacc

SEQ ID NO: 30302 - DNA, 20 bp, synthetic construct
  source 1..20: mol_type = other DNA
tgccaaataggaatactgac

SEQ ID NO: 30303 - DNA, 20 bp, synthetic construct
  source 1..20: mol_type = other DNA
atgccaaataggaatactga

SEQ ID NO: 30304 - DNA, 20 bp, synthetic construct
  source 1..20: mol_type = other DNA
gatgccaaataggaatactg

SEQ ID NO: 30305 - DNA, 20 bp, synthetic construct
  source 1..20: mol_type = other DNA
ggatgccaaataggaatact

SEQ ID NO: 30306 - DNA, 20 bp, synthetic construct
  source 1..20: mol_type = other DNA
aggatgccaaataggaatac

SEQ ID NO: 30307 - DNA, 20 bp, synthetic construct
  source 1..20: mol_type = other DNA
taggatgccaaataggaata

SEQ ID NO: 30308 - DNA, 20 bp, synthetic construct
  source 1..20: mol_type = other DNA
ttaggatgccaaataggaat

SEQ ID NO: 30309 - DNA, 20 bp, synthetic construct
  source 1..20: mol_type = other DNA
attaggatgccaaataggaa

SEQ ID NO: 30310 - DNA, 20 bp, synthetic construct
  source 1..20: mol_type = other DNA
gattaggatgccaaatagga

SEQ ID NO: 30311 - DNA, 20 bp, synthetic construct
  source 1..20: mol_type = other DNA
ggattaggatgccaaatagg

SEQ ID NO: 30312 - DNA, 20 bp, synthetic construct
  source 1..20: mol_type = other DNA
gggattaggatgccaaatag

SEQ ID NO: 30313 - DNA, 20 bp, synthetic construct
  source 1..20: mol_type = other DNA
ggggattaggatgccaaata

SEQ ID NO: 30314 - DNA, 20 bp, synthetic construct
  source 1..20: mol_type = other DNA
aggggattaggatgccaaat

SEQ ID NO: 30315 - DNA, 20 bp, synthetic construct
  source 1..20: mol_type = other DNA
aaggggattaggatgccaaa

SEQ ID NO: 30316 - DNA, 20 bp, synthetic construct
  source 1..20: mol_type = other DNA
aaaggggattaggatgccaa

SEQ ID NO: 30317 - DNA, 20 bp, synthetic construct
  source 1..20: mol_type = other DNA
gaaaggggattaggatgcca

SEQ ID NO: 30318 - DNA, 20 bp, synthetic construct
  source 1..20: mol_type = other DNA
ggaaaggggattaggatgcc

SEQ ID NO: 30319 - DNA, 20 bp, synthetic construct
  source 1..20: mol_type = other DNA
gggaaaggggattaggatgc

SEQ ID NO: 30320 - DNA, 20 bp, synthetic construct
  source 1..20: mol_type = other DNA
tgggaaaggggattaggatg

SEQ ID NO: 30321 - DNA, 20 bp, synthetic construct
  source 1..20: mol_type = other DNA
ttgggaaaggggattaggat

SEQ ID NO: 30322 - DNA, 20 bp, synthetic construct
  source 1..20: mol_type = other DNA
tttgggaaaggggattagga

SEQ ID NO: 30323 - DNA, 20 bp, synthetic construct
  source 1..20: mol_type = other DNA
atttgggaaaggggattagg

SEQ ID NO: 30324 - DNA, 20 bp, synthetic construct
  source 1..20: mol_type = other DNA
gatttgggaaaggggattag

SEQ ID NO: 30325 - DNA, 20 bp, synthetic construct
  source 1..20: mol_type = other DNA
agatttgggaaaggggatta

SEQ ID NO: 30326 - DNA, 20 bp, synthetic construct
  source 1..20: mol_type = other DNA
cagatttgggaaaggggatt

SEQ ID NO: 30327 - DNA, 20 bp, synthetic construct
  source 1..20: mol_type = other DNA
tcagatttgggaaaggggat

SEQ ID NO: 30328 - DNA, 20 bp, synthetic construct
  source 1..20: mol_type = other DNA
ttcagatttgggaaagggga

SEQ ID NO: 30329 - DNA, 20 bp, synthetic construct
  source 1..20: mol_type = other DNA
attcagatttgggaaagggg

SEQ ID NO: 30330 - DNA, 20 bp, synthetic construct
  source 1..20: mol_type = other DNA
aattcagatttgggaaaggg

SEQ ID NO: 30331 - DNA, 20 bp, synthetic construct
  source 1..20: mol_type = other DNA
aaattcagatttgggaaagg

SEQ ID NO: 30332 - DNA, 20 bp, synthetic construct
  source 1..20: mol_type = other DNA
aaaattcagatttgggaaag

SEQ ID NO: 30333 - DNA, 20 bp, synthetic construct
  source 1..20: mol_type = other DNA
caaaattcagatttgggaaa

SEQ ID NO: 30334 - DNA, 20 bp, synthetic construct
  source 1..20: mol_type = other DNA
ccaaaattcagatttgggaa

SEQ ID NO: 30335 - DNA, 20 bp, synthetic construct
  source 1..20: mol_type = other DNA
cccaaaattcagatttggga

SEQ ID NO: 30336 - DNA, 20 bp, synthetic construct
  source 1..20: mol_type = other DNA
tcccaaaattcagatttggg

SEQ ID NO: 30337 - DNA, 20 bp, synthetic construct
  source 1..20: mol_type = other DNA
atcccaaaattcagatttgg

SEQ ID NO: 30338 - DNA, 20 bp, synthetic construct
  source 1..20: mol_type = other DNA
aatcccaaaattcagatttg

SEQ ID NO: 30339 - DNA, 20 bp, synthetic construct
  source 1..20: mol_type = other DNA
aaatcccaaaattcagattt

SEQ ID NO: 30340 - DNA, 20 bp, synthetic construct
  source 1..20: mol_type = other DNA
caaatcccaaaattcagatt

SEQ ID NO: 30341 - DNA, 20 bp, synthetic construct
  source 1..20: mol_type = other DNA
tcaaatcccaaaattcagat

SEQ ID NO: 30342 - DNA, 20 bp, synthetic construct
  source 1..20: mol_type = other DNA
ttcaaatcccaaaattcaga

SEQ ID NO: 30343 - DNA, 20 bp, synthetic construct
  source 1..20: mol_type = other DNA
cttcaaatcccaaaattcag

SEQ ID NO: 30344 - DNA, 20 bp, synthetic construct
  source 1..20: mol_type = other DNA
gcttcaaatcccaaaattca

SEQ ID NO: 30345 - DNA, 20 bp, synthetic construct
  source 1..20: mol_type = other DNA
agcttcaaatcccaaaattc

SEQ ID NO: 30346 - DNA, 20 bp, synthetic construct
  source 1..20: mol_type = other DNA
aagcttcaaatcccaaaatt

SEQ ID NO: 30347 - DNA, 20 bp, synthetic construct
  source 1..20: mol_type = other DNA
caagcttcaaatcccaaaat

SEQ ID NO: 30348 - DNA, 20 bp, synthetic construct
  source 1..20: mol_type = other DNA
gcaagcttcaaatcccaaaa

SEQ ID NO: 30349 - DNA, 20 bp, synthetic construct
  source 1..20: mol_type = other DNA
tgcaagcttcaaatcccaaa

SEQ ID NO: 30350 - DNA, 20 bp, synthetic construct
  source 1..20: mol_type = other DNA
atgcaagcttcaaatcccaa

SEQ ID NO: 30351 - DNA, 20 bp, synthetic construct
  source 1..20: mol_type = other DNA
aatgcaagcttcaaatccca

SEQ ID NO: 30352 - DNA, 20 bp, synthetic construct
  source 1..20: mol_type = other DNA
aaatgcaagcttcaaatccc

SEQ ID NO: 30353 - DNA, 20 bp, synthetic construct
  source 1..20: mol_type = other DNA
caaatgcaagcttcaaatcc

SEQ ID NO: 30354 - DNA, 20 bp, synthetic construct
  source 1..20: mol_type = other DNA
tcaaatgcaagcttcaaatc

SEQ ID NO: 30355 - DNA, 20 bp, synthetic construct
  source 1..20: mol_type = other DNA
ctcaaatgcaagcttcaaat

SEQ ID NO: 30356 - DNA, 20 bp, synthetic construct
  source 1..20: mol_type = other DNA
tctcaaatgcaagcttcaaa

SEQ ID NO: 30357 - DNA, 20 bp, synthetic construct
  source 1..20: mol_type = other DNA
atctcaaatgcaagcttcaa

SEQ ID NO: 30358 - DNA, 20 bp, synthetic construct
  source 1..20: mol_type = other DNA
aatctcaaatgcaagcttca

SEQ ID NO: 30359 - DNA, 20 bp, synthetic construct
  source 1..20: mol_type = other DNA
taatctcaaatgcaagcttc

SEQ ID NO: 30360 - DNA, 20 bp, synthetic construct
  source 1..20: mol_type = other DNA
ataatctcaaatgcaagctt

SEQ ID NO: 30361 - DNA, 20 bp, synthetic construct
  source 1..20: mol_type = other DNA
cataatctcaaatgcaagct

SEQ ID NO: 30362 - DNA, 20 bp, synthetic construct
  source 1..20: mol_type = other DNA
tcataatctcaaatgcaagc

SEQ ID NO: 30363 - DNA, 20 bp, synthetic construct
  source 1..20: mol_type = other DNA
atcataatctcaaatgcaag

SEQ ID NO: 30364 - DNA, 20 bp, synthetic construct
  source 1..20: mol_type = other DNA
aatcataatctcaaatgcaa

SEQ ID NO: 30365 - DNA, 20 bp, synthetic construct
  source 1..20: mol_type = other DNA
aaatcataatctcaaatgca

SEQ ID NO: 30366 - DNA, 20 bp, synthetic construct
  source 1..20: mol_type = other DNA
caaatcataatctcaaatgc

SEQ ID NO: 30367 - DNA, 20 bp, synthetic construct
  source 1..20: mol_type = other DNA
acaaatcataatctcaaatg

SEQ ID NO: 30368 - DNA, 20 bp, synthetic construct
  source 1..20: mol_type = other DNA
gacaaatcataatctcaaat

SEQ ID NO: 30369 - DNA, 20 bp, synthetic construct
  source 1..20: mol_type = other DNA
agacaaatcataatctcaaa

SEQ ID NO: 30370 - DNA, 20 bp, synthetic construct
  source 1..20: mol_type = other DNA
aagacaaatcataatctcaa

SEQ ID NO: 30371 - DNA, 20 bp, synthetic construct
  source 1..20: mol_type = other DNA
gaagacaaatcataatctca

SEQ ID NO: 30372 - DNA, 20 bp, synthetic construct
  source 1..20: mol_type = other DNA
ggaagacaaatcataatctc

SEQ ID NO: 30373 - DNA, 20 bp, synthetic construct
  source 1..20: mol_type = other DNA
aggaagacaaatcataatct

SEQ ID NO: 30374 - DNA, 20 bp, synthetic construct
  source 1..20: mol_type = other DNA
aaggaagacaaatcataatc

SEQ ID NO: 30375 - DNA, 20 bp, synthetic construct
  source 1..20: mol_type = other DNA
caaggaagacaaatcataat

SEQ ID NO: 30376 - DNA, 20 bp, synthetic construct
  source 1..20: mol_type = other DNA
acaaggaagacaaatcataa

SEQ ID NO: 30377 - DNA, 20 bp, synthetic construct
  source 1..20: mol_type = other DNA
aacaaggaagacaaatcata

SEQ ID NO: 30378 - DNA, 20 bp, synthetic construct
  source 1..20: mol_type = other DNA
caacaaggaagacaaatcat

SEQ ID NO: 30379 - DNA, 20 bp, synthetic construct
  source 1..20: mol_type = other DNA
acaacaaggaagacaaatca

SEQ ID NO: 30380 - DNA, 20 bp, synthetic construct
  source 1..20: mol_type = other DNA
tacaacaaggaagacaaatc

SEQ ID NO: 30381 - DNA, 20 bp, synthetic construct
  source 1..20: mol_type = other DNA
gtacaacaaggaagacaaat

SEQ ID NO: 30382 - DNA, 20 bp, synthetic construct
  source 1..20: mol_type = other DNA
tgtacaacaaggaagacaaa

SEQ ID NO: 30383 - DNA, 20 bp, synthetic construct
  source 1..20: mol_type = other DNA
gtgtacaacaaggaagacaa

SEQ ID NO: 30384 - DNA, 20 bp, synthetic construct
  source 1..20: mol_type = other DNA
tgtgtacaacaaggaagaca

SEQ ID NO: 30385 - DNA, 20 bp, synthetic construct
  source 1..20: mol_type = other DNA
ctgtgtacaacaaggaagac

SEQ ID NO: 30386 - DNA, 20 bp, synthetic construct
  source 1..20: mol_type = other DNA
cctgtgtacaacaaggaaga

SEQ ID NO: 30387 - DNA, 20 bp, synthetic construct
  source 1..20: mol_type = other DNA
tcctgtgtacaacaaggaag

SEQ ID NO: 30388 - DNA, 20 bp, synthetic construct
  source 1..20: mol_type = other DNA
ctcctgtgtacaacaaggaa

SEQ ID NO: 30389 - DNA, 20 bp, synthetic construct
  source 1..20: mol_type = other DNA
gctcctgtgtacaacaagga

SEQ ID NO: 30390 - DNA, 20 bp, synthetic construct
  source 1..20: mol_type = other DNA
tgctcctgtgtacaacaagg

SEQ ID NO: 30391 - DNA, 20 bp, synthetic construct
  source 1..20: mol_type = other DNA
ctgctcctgtgtacaacaag

SEQ ID NO: 30392 - DNA, 20 bp, synthetic construct
  source 1..20: mol_type = other DNA
cctgctcctgtgtacaacaa

SEQ ID NO: 30393 - DNA, 20 bp, synthetic construct
  source 1..20: mol_type = other DNA
ccctgctcctgtgtacaaca

SEQ ID NO: 30394 - DNA, 20 bp, synthetic construct
  source 1..20: mol_type = other DNA
tccctgctcctgtgtacaac

SEQ ID NO: 30395 - DNA, 20 bp, synthetic construct
  source 1..20: mol_type = other DNA
gtccctgctcctgtgtacaa

SEQ ID NO: 30396 - DNA, 20 bp, synthetic construct
  source 1..20: mol_type = other DNA
agtccctgctcctgtgtaca

SEQ ID NO: 30397 - DNA, 20 bp, synthetic construct
  source 1..20: mol_type = other DNA
aagtccctgctcctgtgtac

SEQ ID NO: 30398 - DNA, 20 bp, synthetic construct
  source 1..20: mol_type = other DNA
aaagtccctgctcctgtgta

SEQ ID NO: 30399 - DNA, 20 bp, synthetic construct
  source 1..20: mol_type = other DNA
taaagtccctgctcctgtgt

SEQ ID NO: 30400 - DNA, 20 bp, synthetic construct
  source 1..20: mol_type = other DNA
gtaaagtccctgctcctgtg

SEQ ID NO: 30401 - DNA, 20 bp, synthetic construct
  source 1..20: mol_type = other DNA
tgtaaagtccctgctcctgt

SEQ ID NO: 30402 - DNA, 20 bp, synthetic construct
  source 1..20: mol_type = other DNA
ttgtaaagtccctgctcctg

SEQ ID NO: 30403 - DNA, 20 bp, synthetic construct
  source 1..20: mol_type = other DNA
attgtaaagtccctgctcct

SEQ ID NO: 30404 - DNA, 20 bp, synthetic construct
  source 1..20: mol_type = other DNA
aattgtaaagtccctgctcc

SEQ ID NO: 30405 - DNA, 20 bp, synthetic construct
  source 1..20: mol_type = other DNA
taattgtaaagtccctgctc

SEQ ID NO: 30406 - DNA, 20 bp, synthetic construct
  source 1..20: mol_type = other DNA
ctaattgtaaagtccctgct

SEQ ID NO: 30407 - DNA, 20 bp, synthetic construct
  source 1..20: mol_type = other DNA
actaattgtaaagtccctgc

SEQ ID NO: 30408 - DNA, 20 bp, synthetic construct
  source 1..20: mol_type = other DNA
tactaattgtaaagtccctg

SEQ ID NO: 30409 - DNA, 20 bp, synthetic construct
  source 1..20: mol_type = other DNA
atactaattgtaaagtccct

SEQ ID NO: 30410 - DNA, 20 bp, synthetic construct
  source 1..20: mol_type = other DNA
aatactaattgtaaagtccc

SEQ ID NO: 30411 - DNA, 20 bp, synthetic construct
  source 1..20: mol_type = other DNA
gaatactaattgtaaagtcc

SEQ ID NO: 30412 - DNA, 20 bp, synthetic construct
  source 1..20: mol_type = other DNA
cgaatactaattgtaaagtc

SEQ ID NO: 30413 - DNA, 20 bp, synthetic construct
  source 1..20: mol_type = other DNA
gcgaatactaattgtaaagt

SEQ ID NO: 30414 - DNA, 20 bp, synthetic construct
  source 1..20: mol_type = other DNA
tgcgaatactaattgtaaag

SEQ ID NO: 30415 - DNA, 20 bp, synthetic construct
  source 1..20: mol_type = other DNA
atgcgaatactaattgtaaa

SEQ ID NO: 30416 - DNA, 20 bp, synthetic construct
  source 1..20: mol_type = other DNA
gatgcgaatactaattgtaa

SEQ ID NO: 30417 - DNA, 20 bp, synthetic construct
  source 1..20: mol_type = other DNA
ggatgcgaatactaattgta

SEQ ID NO: 30418 - DNA, 20 bp, synthetic construct
  source 1..20: mol_type = other DNA
gggatgcgaatactaattgt

SEQ ID NO: 30419 - DNA, 20 bp, synthetic construct
  source 1..20: mol_type = other DNA
agggatgcgaatactaattg

SEQ ID NO: 30420 - DNA, 20 bp, synthetic construct
  source 1..20: mol_type = other DNA
cagggatgcgaatactaatt

SEQ ID NO: 30421 - DNA, 20 bp, synthetic construct
  source 1..20: mol_type = other DNA
gcagggatgcgaatactaat

SEQ ID NO: 30422 - DNA, 20 bp, synthetic construct
  source 1..20: mol_type = other DNA
agcagggatgcgaatactaa

SEQ ID NO: 30423 - DNA, 20 bp, synthetic construct
  source 1..20: mol_type = other DNA
gagcagggatgcgaatacta

SEQ ID NO: 30424 - DNA, 20 bp, synthetic construct
  source 1..20: mol_type = other DNA
ggagcagggatgcgaatact

SEQ ID NO: 30425 - DNA, 20 bp, synthetic construct
  source 1..20: mol_type = other DNA
aggagcagggatgcgaatac

SEQ ID NO: 30426 - DNA, 20 bp, synthetic construct
  source 1..20: mol_type = other DNA
aaggagcagggatgcgaata

SEQ ID NO: 30427 - DNA, 20 bp, synthetic construct
  source 1..20: mol_type = other DNA
gaaggagcagggatgcgaat

SEQ ID NO: 30428 - DNA, 20 bp, synthetic construct
  source 1..20: mol_type = other DNA
tgaaggagcagggatgcgaa

SEQ ID NO: 30429 - DNA, 20 bp, synthetic construct
  source 1..20: mol_type = other DNA
atgaaggagcagggatgcga

SEQ ID NO: 30430 - DNA, 20 bp, synthetic construct
  source 1..20: mol_type = other DNA
tatgaaggagcagggatgcg

SEQ ID NO: 30431 - DNA, 20 bp, synthetic construct
  source 1..20: mol_type = other DNA
gtatgaaggagcagggatgc

SEQ ID NO: 30432 - DNA, 20 bp, synthetic construct
  source 1..20: mol_type = other DNA
agtatgaaggagcagggatg

SEQ ID NO: 30433 - DNA, 20 bp, synthetic construct
  source 1..20: mol_type = other DNA
aagtatgaaggagcagggat

SEQ ID NO: 30434 - DNA, 20 bp, synthetic construct
  source 1..20: mol_type = other DNA
gaagtatgaaggagcaggga

SEQ ID NO: 30435 - DNA, 20 bp, synthetic construct
  source 1..20: mol_type = other DNA
cgaagtatgaaggagcaggg

SEQ ID NO: 30436 - DNA, 20 bp, synthetic construct
  source 1..20: mol_type = other DNA
acgaagtatgaaggagcagg

SEQ ID NO: 30437 - DNA, 20 bp, synthetic construct
  source 1..20: mol_type = other DNA
cacgaagtatgaaggagcag

SEQ ID NO: 30438 - DNA, 20 bp, synthetic construct
  source 1..20: mol_type = other DNA
tcacgaagtatgaaggagca

SEQ ID NO: 30439 - DNA, 20 bp, synthetic construct
  source 1..20: mol_type = other DNA
atcacgaagtatgaaggagc

SEQ ID NO: 30440 - DNA, 20 bp, synthetic construct
  source 1..20: mol_type = other DNA
catcacgaagtatgaaggag

SEQ ID NO: 30441 - DNA, 20 bp, synthetic construct
  source 1..20: mol_type = other DNA
acatcacgaagtatgaagga

SEQ ID NO: 30442 - DNA, 20 bp, synthetic construct
  source 1..20: mol_type = other DNA
tacatcacgaagtatgaagg

SEQ ID NO: 30443 - DNA, 20 bp, synthetic construct
  source 1..20: mol_type = other DNA
ttacatcacgaagtatgaag

SEQ ID NO: 30444 - DNA, 20 bp, synthetic construct
  source 1..20: mol_type = other DNA
cttacatcacgaagtatgaa

SEQ ID NO: 30445 - DNA, 20 bp, synthetic construct
  source 1..20: mol_type = other DNA
ccttacatcacgaagtatga

SEQ ID NO: 30446 - DNA, 20 bp, synthetic construct
  source 1..20: mol_type = other DNA
gccttacatcacgaagtatg

SEQ ID NO: 30447 - DNA, 20 bp, synthetic construct
  source 1..20: mol_type = other DNA
tgccttacatcacgaagtat

SEQ ID NO: 30448 - DNA, 20 bp, synthetic construct
  source 1..20: mol_type = other DNA
ttgccttacatcacgaagta

SEQ ID NO: 30449 - DNA, 20 bp, synthetic construct
  source 1..20: mol_type = other DNA
cttgccttacatcacgaagt

SEQ ID NO: 30450 - DNA, 20 bp, synthetic construct
  source 1..20: mol_type = other DNA
acttgccttacatcacgaag

SEQ ID NO: 30451 - DNA, 20 bp, synthetic construct
  source 1..20: mol_type = other DNA
aacttgccttacatcacgaa

SEQ ID NO: 30452 - DNA, 20 bp, synthetic construct
  source 1..20: mol_type = other DNA
taacttgccttacatcacga

SEQ ID NO: 30453 - DNA, 20 bp, synthetic construct
  source 1..20: mol_type = other DNA
ataacttgccttacatcacg

SEQ ID NO: 30454 - DNA, 20 bp, synthetic construct
  source 1..20: mol_type = other DNA
aataacttgccttacatcac

SEQ ID NO: 30455 - DNA, 20 bp, synthetic construct
  source 1..20: mol_type = other DNA
aaataacttgccttacatca

SEQ ID NO: 30456 - DNA, 20 bp, synthetic construct
  source 1..20: mol_type = other DNA
aaaataacttgccttacatc

SEQ ID NO: 30457 - DNA, 20 bp, synthetic construct
  source 1..20: mol_type = other DNA
gaaaataacttgccttacat

SEQ ID NO: 30458 - DNA, 20 bp, synthetic construct
  source 1..20: mol_type = other DNA
tgaaaataacttgccttaca

SEQ ID NO: 30459 - DNA, 20 bp, synthetic construct
  source 1..20: mol_type = other DNA
gtgaaaataacttgccttac

SEQ ID NO: 30460 - DNA, 20 bp, synthetic construct
  source 1..20: mol_type = other DNA
agtgaaaataacttgcctta

SEQ ID NO: 30461 - DNA, 20 bp, synthetic construct
  source 1..20: mol_type = other DNA
aagtgaaaataacttgcctt

SEQ ID NO: 30462 - DNA, 20 bp, synthetic construct
  source 1..20: mol_type = other DNA
taagtgaaaataacttgcct

SEQ ID NO: 30463 - DNA, 20 bp, synthetic construct
  source 1..20: mol_type = other DNA
ataagtgaaaataacttgcc

SEQ ID NO: 30464 - DNA, 20 bp, synthetic construct
  source 1..20: mol_type = other DNA
cataagtgaaaataacttgc

SEQ ID NO: 30465 - DNA, 20 bp, synthetic construct
  source 1..20: mol_type = other DNA
gcataagtgaaaataacttg

SEQ ID NO: 30466 - DNA, 20 bp, synthetic construct
  source 1..20: mol_type = other DNA
agcataagtgaaaataactt

SEQ ID NO: 30467 - DNA, 20 bp, synthetic construct
  source 1..20: mol_type = other DNA
aagcataagtgaaaataact

SEQ ID NO: 30468 - DNA, 20 bp, synthetic construct
  source 1..20: mol_type = other DNA
taagcataagtgaaaataac

SEQ ID NO: 30469 - DNA, 20 bp, synthetic construct
  source 1..20: mol_type = other DNA
ttaagcataagtgaaaataa

SEQ ID NO: 30470 - DNA, 20 bp, synthetic construct
  source 1..20: mol_type = other DNA
cttaagcataagtgaaaata

SEQ ID NO: 30471 - DNA, 20 bp, synthetic construct
  source 1..20: mol_type = other DNA
acttaagcataagtgaaaat

SEQ ID NO: 30472 - DNA, 20 bp, synthetic construct
  source 1..20: mol_type = other DNA
aacttaagcataagtgaaaa

SEQ ID NO: 30473 - DNA, 20 bp, synthetic construct
  source 1..20: mol_type = other DNA
aaacttaagcataagtgaaa

SEQ ID NO: 30474 - DNA, 20 bp, synthetic construct
  source 1..20: mol_type = other DNA
gaaacttaagcataagtgaa

SEQ ID NO: 30475 - DNA, 20 bp, synthetic construct
  source 1..20: mol_type = other DNA
agaaacttaagcataagtga

SEQ ID NO: 30476 - DNA, 20 bp, synthetic construct
  source 1..20: mol_type = other DNA
aagaaacttaagcataagtg

SEQ ID NO: 30477 - DNA, 20 bp, synthetic construct
  source 1..20: mol_type = other DNA
gaagaaacttaagcataagt

SEQ ID NO: 30478 - DNA, 20 bp, synthetic construct
  source 1..20: mol_type = other DNA
ggaagaaacttaagcataag

SEQ ID NO: 30479 - DNA, 20 bp, synthetic construct
  source 1..20: mol_type = other DNA
gggaagaaacttaagcataa

SEQ ID NO: 30480 - DNA, 20 bp, synthetic construct
  source 1..20: mol_type = other DNA
ggggaagaaacttaagcata

SEQ ID NO: 30481 - DNA, 20 bp, synthetic construct
  source 1..20: mol_type = other DNA
aggggaagaaacttaagcat

SEQ ID NO: 30482 - DNA, 20 bp, synthetic construct
  source 1..20: mol_type = other DNA
caggggaagaaacttaagca

SEQ ID NO: 30483 - DNA, 20 bp, synthetic construct
  source 1..20: mol_type = other DNA
acaggggaagaaacttaagc

SEQ ID NO: 30484 - DNA, 20 bp, synthetic construct
  source 1..20: mol_type = other DNA
tacaggggaagaaacttaag

SEQ ID NO: 30485 - DNA, 20 bp, synthetic construct
  source 1..20: mol_type = other DNA
ttacaggggaagaaacttaa

SEQ ID NO: 30486 - DNA, 20 bp, synthetic construct
  source 1..20: mol_type = other DNA
tttacaggggaagaaactta

SEQ ID NO: 30487 - DNA, 20 bp, synthetic construct
  source 1..20: mol_type = other DNA
ttttacaggggaagaaactt

SEQ ID NO: 30488 - DNA, 20 bp, synthetic construct
  source 1..20: mol_type = other DNA
tttttacaggggaagaaact

SEQ ID NO: 30489 - DNA, 20 bp, synthetic construct
  source 1..20: mol_type = other DNA
ctttttacaggggaagaaac

SEQ ID NO: 30490 - DNA, 20 bp, synthetic construct
  source 1..20: mol_type = other DNA
cctttttacaggggaagaaa

SEQ ID NO: 30491 - DNA, 20 bp, synthetic construct
  source 1..20: mol_type = other DNA
ccctttttacaggggaagaa

SEQ ID NO: 30492 - DNA, 20 bp, synthetic construct
  source 1..20: mol_type = other DNA
cccctttttacaggggaaga

SEQ ID NO: 30493 - DNA, 20 bp, synthetic construct
  source 1..20: mol_type = other DNA
tcccctttttacaggggaag

SEQ ID NO: 30494 - DNA, 20 bp, synthetic construct
  source 1..20: mol_type = other DNA
atcccctttttacaggggaa

SEQ ID NO: 30495 - DNA, 20 bp, synthetic construct
  source 1..20: mol_type = other DNA
catcccctttttacagggga

SEQ ID NO: 30496 - DNA, 20 bp, synthetic construct
  source 1..20: mol_type = other DNA
ccatcccctttttacagggg

SEQ ID NO: 30497 - DNA, 20 bp, synthetic construct
  source 1..20: mol_type = other DNA
tccatcccctttttacaggg

SEQ ID NO: 30498 - DNA, 20 bp, synthetic construct
  source 1..20: mol_type = other DNA
ttccatcccctttttacagg

SEQ ID NO: 30499 - DNA, 20 bp, synthetic construct
  source 1..20: mol_type = other DNA
cttccatcccctttttacag

SEQ ID NO: 30500 - DNA, 20 bp, synthetic construct
  source 1..20: mol_type = other DNA
tcttccatcccctttttaca

SEQ ID NO: 30501 - DNA, 20 bp, synthetic construct
  source 1..20: mol_type = other DNA
ctcttccatcccctttttac

SEQ ID NO: 30502 - DNA, 20 bp, synthetic construct
  source 1..20: mol_type = other DNA
cctcttccatccccttttta

SEQ ID NO: 30503 - DNA, 20 bp, synthetic construct
  source 1..20: mol_type = other DNA
tcctcttccatccccttttt

SEQ ID NO: 30504 - DNA, 20 bp, synthetic construct
  source 1..20: mol_type = other DNA
atcctcttccatcccctttt

SEQ ID NO: 30505 - DNA, 20 bp, synthetic construct
  source 1..20: mol_type = other DNA
aatcctcttccatccccttt

SEQ ID NO: 30506 - DNA, 20 bp, synthetic construct
  source 1..20: mol_type = other DNA
taatcctcttccatcccctt

SEQ ID NO: 30507 - DNA, 20 bp, synthetic construct
  source 1..20: mol_type = other DNA
ttaatcctcttccatcccct

SEQ ID NO: 30508 - DNA, 20 bp, synthetic construct
  source 1..20: mol_type = other DNA
tttaatcctcttccatcccc

SEQ ID NO: 30509 - DNA, 20 bp, synthetic construct
  source 1..20: mol_type = other DNA
atttaatcctcttccatccc

SEQ ID NO: 30510 - DNA, 20 bp, synthetic construct
  source 1..20: mol_type = other DNA
catttaatcctcttccatcc

SEQ ID NO: 30511 - DNA, 20 bp, synthetic construct
  source 1..20: mol_type = other DNA
tcatttaatcctcttccatc

SEQ ID NO: 30512 - DNA, 20 bp, synthetic construct
  source 1..20: mol_type = other DNA
ttcatttaatcctcttccat

SEQ ID NO: 30513 - DNA, 20 bp, synthetic construct
  source 1..20: mol_type = other DNA
attcatttaatcctcttcca

SEQ ID NO: 30514 - DNA, 20 bp, synthetic construct
  source 1..20: mol_type = other DNA
aattcatttaatcctcttcc

SEQ ID NO: 30515 - DNA, 20 bp, synthetic construct
  source 1..20: mol_type = other DNA
taattcatttaatcctcttc

SEQ ID NO: 30516 - DNA, 20 bp, synthetic construct
  source 1..20: mol_type = other DNA
ttaattcatttaatcctctt

SEQ ID NO: 30517 - DNA, 20 bp, synthetic construct
  source 1..20: mol_type = other DNA
tttaattcatttaatcctct

SEQ ID NO: 30518 - DNA, 20 bp, synthetic construct
  source 1..20: mol_type = other DNA
gtttaattcatttaatcctc

SEQ ID NO: 30519 - DNA, 20 bp, synthetic construct
  source 1..20: mol_type = other DNA
tgtttaattcatttaatcct

SEQ ID NO: 30520 - DNA, 20 bp, synthetic construct
  source 1..20: mol_type = other DNA
atgtttaattcatttaatcc

SEQ ID NO: 30521 - DNA, 20 bp, synthetic construct
  source 1..20: mol_type = other DNA
catgtttaattcatttaatc

SEQ ID NO: 30522 - DNA, 20 bp, synthetic construct
  source 1..20: mol_type = other DNA
acatgtttaattcatttaat

SEQ ID NO: 30523 - DNA, 20 bp, synthetic construct
  source 1..20: mol_type = other DNA
tacatgtttaattcatttaa

SEQ ID NO: 30524 - DNA, 20 bp, synthetic construct
  source 1..20: mol_type = other DNA
ttacatgtttaattcattta

SEQ ID NO: 30525 - DNA, 20 bp, synthetic construct
  source 1..20: mol_type = other DNA
gttacatgtttaattcattt

SEQ ID NO: 30526 - DNA, 20 bp, synthetic construct
  source 1..20: mol_type = other DNA
tgttacatgtttaattcatt

SEQ ID NO: 30527 - DNA, 20 bp, synthetic construct
  source 1..20: mol_type = other DNA
gtgttacatgtttaattcat

SEQ ID NO: 30528 - DNA, 20 bp, synthetic construct
  source 1..20: mol_type = other DNA
cgtgttacatgtttaattca

SEQ ID NO: 30529 - DNA, 20 bp, synthetic construct
  source 1..20: mol_type = other DNA
gcgtgttacatgtttaattc

SEQ ID NO: 30530 - DNA, 20 bp, synthetic construct
  source 1..20: mol_type = other DNA
agcgtgttacatgtttaatt

SEQ ID NO: 30531 - DNA, 20 bp, synthetic construct
  source 1..20: mol_type = other DNA
aagcgtgttacatgtttaat

SEQ ID NO: 30532 - DNA, 20 bp, synthetic construct
  source 1..20: mol_type = other DNA
taagcgtgttacatgtttaa

SEQ ID NO: 30533 - DNA, 20 bp, synthetic construct
  source 1..20: mol_type = other DNA
ttaagcgtgttacatgttta

SEQ ID NO: 30534 - DNA, 20 bp, synthetic construct
  source 1..20: mol_type = other DNA
tttaagcgtgttacatgttt

SEQ ID NO: 30535 - DNA, 20 bp, synthetic construct
  source 1..20: mol_type = other DNA
ctttaagcgtgttacatgtt

SEQ ID NO: 30536 - DNA, 20 bp, synthetic construct
  source 1..20: mol_type = other DNA
gctttaagcgtgttacatgt

SEQ ID NO: 30537 - DNA, 20 bp, synthetic construct
  source 1..20: mol_type = other DNA
tgctttaagcgtgttacatg

SEQ ID NO: 30538 - DNA, 20 bp, synthetic construct
  source 1..20: mol_type = other DNA
ttgctttaagcgtgttacat

SEQ ID NO: 30539 - DNA, 20 bp, synthetic construct
  source 1..20: mol_type = other DNA
attgctttaagcgtgttaca

SEQ ID NO: 30540 - DNA, 20 bp, synthetic construct
  source 1..20: mol_type = other DNA
cattgctttaagcgtgttac

SEQ ID NO: 30541 - DNA, 20 bp, synthetic construct
  source 1..20: mol_type = other DNA
gcattgctttaagcgtgtta

SEQ ID NO: 30542 - DNA, 20 bp, synthetic construct
  source 1..20: mol_type = other DNA
ggcattgctttaagcgtgtt

SEQ ID NO: 30543 - DNA, 20 bp, synthetic construct
  source 1..20: mol_type = other DNA
aggcattgctttaagcgtgt

SEQ ID NO: 30544 - DNA, 20 bp, synthetic construct
  source 1..20: mol_type = other DNA
caggcattgctttaagcgtg

SEQ ID NO: 30545 - DNA, 20 bp, synthetic construct
  source 1..20: mol_type = other DNA
ccaggcattgctttaagcgt

SEQ ID NO: 30546 - DNA, 20 bp, synthetic construct
  source 1..20: mol_type = other DNA
gccaggcattgctttaagcg

SEQ ID NO: 30547 - DNA, 20 bp, synthetic construct
  source 1..20: mol_type = other DNA
tgccaggcattgctttaagc

SEQ ID NO: 30548 - DNA, 20 bp, synthetic construct
  source 1..20: mol_type = other DNA
ttgccaggcattgctttaag

SEQ ID NO: 30549 - DNA, 20 bp, synthetic construct
  source 1..20: mol_type = other DNA
cttgccaggcattgctttaa

SEQ ID NO: 30550 - DNA, 20 bp, synthetic construct
  source 1..20: mol_type = other DNA
acttgccaggcattgcttta

SEQ ID NO: 30551 - DNA, 20 bp, synthetic construct
  source 1..20: mol_type = other DNA
tacttgccaggcattgcttt

SEQ ID NO: 30552 - DNA, 20 bp, synthetic construct
  source 1..20: mol_type = other DNA
ttacttgccaggcattgctt

SEQ ID NO: 30553 - DNA, 20 bp, synthetic construct
  source 1..20: mol_type = other DNA
attacttgccaggcattgct

SEQ ID NO: 30554 - DNA, 20 bp, synthetic construct
  source 1..20: mol_type = other DNA
tattacttgccaggcattgc

SEQ ID NO: 30555 - DNA, 20 bp, synthetic construct
  source 1..20: mol_type = other DNA
ttattacttgccaggcattg

SEQ ID NO: 30556 - DNA, 20 bp, synthetic construct
  source 1..20: mol_type = other DNA
cttattacttgccaggcatt

SEQ ID NO: 30557 - DNA, 20 bp, synthetic construct
  source 1..20: mol_type = other DNA
acttattacttgccaggcat

SEQ ID NO: 30558 - DNA, 20 bp, synthetic construct
  source 1..20: mol_type = other DNA
cacttattacttgccaggca

SEQ ID NO: 30559 - DNA, 20 bp, synthetic construct
  source 1..20: mol_type = other DNA
gcacttattacttgccaggc

SEQ ID NO: 30560 - DNA, 20 bp, synthetic construct
  source 1..20: mol_type = other DNA
agcacttattacttgccagg

SEQ ID NO: 30561 - DNA, 20 bp, synthetic construct
  source 1..20: mol_type = other DNA
gagcacttattacttgccag

SEQ ID NO: 30562 - DNA, 20 bp, synthetic construct
  source 1..20: mol_type = other DNA
tgagcacttattacttgcca

SEQ ID NO: 30563 - DNA, 20 bp, synthetic construct
  source 1..20: mol_type = other DNA
ctgagcacttattacttgcc

SEQ ID NO: 30564 - DNA, 20 bp, synthetic construct
  source 1..20: mol_type = other DNA
actgagcacttattacttgc

SEQ ID NO: 30565 - DNA, 20 bp, synthetic construct
  source 1..20: mol_type = other DNA
tactgagcacttattacttg

SEQ ID NO: 30566 - DNA, 20 bp, synthetic construct
  source 1..20: mol_type = other DNA
ttactgagcacttattactt

SEQ ID NO: 30567 - DNA, 20 bp, synthetic construct
  source 1..20: mol_type = other DNA
gttactgagcacttattact

SEQ ID NO: 30568 - DNA, 20 bp, synthetic construct
  source 1..20: mol_type = other DNA
agttactgagcacttattac

SEQ ID NO: 30569 - DNA, 20 bp, synthetic construct
  source 1..20: mol_type = other DNA
aagttactgagcacttatta

SEQ ID NO: 30570 - DNA, 20 bp, synthetic construct
  source 1..20: mol_type = other DNA
aaagttactgagcacttatt

SEQ ID NO: 30571 - DNA, 20 bp, synthetic construct
  source 1..20: mol_type = other DNA
aaaagttactgagcacttat

SEQ ID NO: 30572 - DNA, 20 bp, synthetic construct
  source 1..20: mol_type = other DNA
taaaagttactgagcactta

SEQ ID NO: 30573 - DNA, 20 bp, synthetic construct
  source 1..20: mol_type = other DNA
ctaaaagttactgagcactt

SEQ ID NO: 30574 - DNA, 20 bp, synthetic construct
  source 1..20: mol_type = other DNA
gctaaaagttactgagcact

SEQ ID NO: 30575 - DNA, 20 bp, synthetic construct
  source 1..20: mol_type = other DNA
agctaaaagttactgagcac

SEQ ID NO: 30576 - DNA, 20 bp, synthetic construct
  source 1..20: mol_type = other DNA
cagctaaaagttactgagca

SEQ ID NO: 30577 - DNA, 20 bp, synthetic construct
  source 1..20: mol_type = other DNA
acagctaaaagttactgagc

SEQ ID NO: 30578 - DNA, 20 bp, synthetic construct
  source 1..20: mol_type = other DNA
aacagctaaaagttactgag

SEQ ID NO: 30579 - DNA, 20 bp, synthetic construct
  source 1..20: mol_type = other DNA
gaacagctaaaagttactga

SEQ ID NO: 30580 - DNA, 20 bp, synthetic construct
  source 1..20: mol_type = other DNA
agaacagctaaaagttactg

SEQ ID NO: 30581 - DNA, 20 bp, synthetic construct
  source 1..20: mol_type = other DNA
aagaacagctaaaagttact

SEQ ID NO: 30582 - DNA, 20 bp, synthetic construct
  source 1..20: mol_type = other DNA
taagaacagctaaaagttac

SEQ ID NO: 30583 - DNA, 20 bp, synthetic construct
  source 1..20: mol_type = other DNA
ataagaacagctaaaagtta

SEQ ID NO: 30584 - DNA, 20 bp, synthetic construct
  source 1..20: mol_type = other DNA
aataagaacagctaaaagtt

SEQ ID NO: 30585 - DNA, 20 bp, synthetic construct
  source 1..20: mol_type = other DNA
taataagaacagctaaaagt

SEQ ID NO: 30586 - DNA, 20 bp, synthetic construct
  source 1..20: mol_type = other DNA
ctaataagaacagctaaaag

SEQ ID NO: 30587 - DNA, 20 bp, synthetic construct
  source 1..20: mol_type = other DNA
gctaataagaacagctaaaa

SEQ ID NO: 30588 - DNA, 20 bp, synthetic construct
  source 1..20: mol_type = other DNA
tgctaataagaacagctaaa

SEQ ID NO: 30589 - DNA, 20 bp, synthetic construct
  source 1..20: mol_type = other DNA
atgctaataagaacagctaa

SEQ ID NO: 30590 - DNA, 20 bp, synthetic construct
  source 1..20: mol_type = other DNA
catgctaataagaacagcta

SEQ ID NO: 30591 - DNA, 20 bp, synthetic construct
  source 1..20: mol_type = other DNA
acatgctaataagaacagct

SEQ ID NO: 30592 - DNA, 20 bp, synthetic construct
  source 1..20: mol_type = other DNA
aacatgctaataagaacagc

SEQ ID NO: 30593 - DNA, 20 bp, synthetic construct
  source 1..20: mol_type = other DNA
aaacatgctaataagaacag

SEQ ID NO: 30594 - DNA, 20 bp, synthetic construct
  source 1..20: mol_type = other DNA
caaacatgctaataagaaca

SEQ ID NO: 30595 - DNA, 20 bp, synthetic construct
  source 1..20: mol_type = other DNA
ccaaacatgctaataagaac

SEQ ID NO: 30596 - DNA, 20 bp, synthetic construct
  source 1..20: mol_type = other DNA
tccaaacatgctaataagaa

SEQ ID NO: 30597 - DNA, 20 bp, synthetic construct
  source 1..20: mol_type = other DNA
ttccaaacatgctaataaga

SEQ ID NO: 30598 - DNA, 20 bp, synthetic construct
  source 1..20: mol_type = other DNA
tttccaaacatgctaataag

SEQ ID NO: 30599 - DNA, 20 bp, synthetic construct
  source 1..20: mol_type = other DNA
gtttccaaacatgctaataa

SEQ ID NO: 30600 - DNA, 20 bp, synthetic construct
  source 1..20: mol_type = other DNA
ggtttccaaacatgctaata

SEQ ID NO: 30601 - DNA, 20 bp, synthetic construct
  source 1..20: mol_type = other DNA
tggtttccaaacatgctaat

SEQ ID NO: 30602 - DNA, 20 bp, synthetic construct
  source 1..20: mol_type = other DNA
ctggtttccaaacatgctaa

SEQ ID NO: 30603 - DNA, 20 bp, synthetic construct
  source 1..20: mol_type = other DNA
actggtttccaaacatgcta

SEQ ID NO: 30604 - DNA, 20 bp, synthetic construct
  source 1..20: mol_type = other DNA
tactggtttccaaacatgct

SEQ ID NO: 30605 - DNA, 20 bp, synthetic construct
  source 1..20: mol_type = other DNA
ctactggtttccaaacatgc

SEQ ID NO: 30606 - DNA, 20 bp, synthetic construct
  source 1..20: mol_type = other DNA
tctactggtttccaaacatg

SEQ ID NO: 30607 - DNA, 20 bp, synthetic construct
  source 1..20: mol_type = other DNA
ttctactggtttccaaacat

SEQ ID NO: 30608 - DNA, 20 bp, synthetic construct
  source 1..20: mol_type = other DNA
tttctactggtttccaaaca

SEQ ID NO: 30609 - DNA, 20 bp, synthetic construct
  source 1..20: mol_type = other DNA
gtttctactggtttccaaac

SEQ ID NO: 30610 - DNA, 20 bp, synthetic construct
  source 1..20: mol_type = other DNA
agtttctactggtttccaaa

SEQ ID NO: 30611 - DNA, 20 bp, synthetic construct
  source 1..20: mol_type = other DNA
tagtttctactggtttccaa

SEQ ID NO: 30612 - DNA, 20 bp, synthetic construct
  source 1..20: mol_type = other DNA
gtagtttctactggtttcca

SEQ ID NO: 30613 - DNA, 20 bp, synthetic construct
  source 1..20: mol_type = other DNA
tgtagtttctactggtttcc

SEQ ID NO: 30614 - DNA, 20 bp, synthetic construct
  source 1..20: mol_type = other DNA
gtgtagtttctactggtttc

SEQ ID NO: 30615 - DNA, 20 bp, synthetic construct
  source 1..20: mol_type = other DNA
ggtgtagtttctactggttt

SEQ ID NO: 30616 - DNA, 20 bp, synthetic construct
  source 1..20: mol_type = other DNA
tggtgtagtttctactggtt

SEQ ID NO: 30617 - DNA, 20 bp, synthetic construct
  source 1..20: mol_type = other DNA
ctggtgtagtttctactggt

SEQ ID NO: 30618 - DNA, 20 bp, synthetic construct
  source 1..20: mol_type = other DNA
gctggtgtagtttctactgg

SEQ ID NO: 30619 - DNA, 20 bp, synthetic construct
  source 1..20: mol_type = other DNA
tgctggtgtagtttctactg

SEQ ID NO: 30620 - DNA, 20 bp, synthetic construct
  source 1..20: mol_type = other DNA
ttgctggtgtagtttctact

SEQ ID NO: 30621 - DNA, 20 bp, synthetic construct
  source 1..20: mol_type = other DNA
cttgctggtgtagtttctac

SEQ ID NO: 30622 - DNA, 20 bp, synthetic construct
  source 1..20: mol_type = other DNA
acttgctggtgtagtttcta

SEQ ID NO: 30623 - DNA, 20 bp, synthetic construct
  source 1..20: mol_type = other DNA
aacttgctggtgtagtttct

SEQ ID NO: 30624 - DNA, 20 bp, synthetic construct
  source 1..20: mol_type = other DNA
taacttgctggtgtagtttc

SEQ ID NO: 30625 - DNA, 20 bp, synthetic construct
  source 1..20: mol_type = other DNA
ttaacttgctggtgtagttt

SEQ ID NO: 30626 - DNA, 20 bp, synthetic construct
  source 1..20: mol_type = other DNA
cttaacttgctggtgtagtt

SEQ ID NO: 30627 - DNA, 20 bp, synthetic construct
  source 1..20: mol_type = other DNA
ccttaacttgctggtgtagt

SEQ ID NO: 30628 - DNA, 20 bp, synthetic construct
  source 1..20: mol_type = other DNA
accttaacttgctggtgtag

SEQ ID NO: 30629 - DNA, 20 bp, synthetic construct
  source 1..20: mol_type = other DNA
aaccttaacttgctggtgta

SEQ ID NO: 30630 - DNA, 20 bp, synthetic construct
  source 1..20: mol_type = other DNA
caaccttaacttgctggtgt

SEQ ID NO: 30631 - DNA, 20 bp, synthetic construct
  source 1..20: mol_type = other DNA
tcaaccttaacttgctggtg

SEQ ID NO: 30632 - DNA, 20 bp, synthetic construct
  source 1..20: mol_type = other DNA
ttcaaccttaacttgctggt

SEQ ID NO: 30633 - DNA, 20 bp, synthetic construct
  source 1..20: mol_type = other DNA
tttcaaccttaacttgctgg

SEQ ID NO: 30634 - DNA, 20 bp, synthetic construct
  source 1..20: mol_type = other DNA
ttttcaaccttaacttgctg

SEQ ID NO: 30635 - DNA, 20 bp, synthetic construct
  source 1..20: mol_type = other DNA
cttttcaaccttaacttgct

SEQ ID NO: 30636 - DNA, 20 bp, synthetic construct
  source 1..20: mol_type = other DNA
acttttcaaccttaacttgc

SEQ ID NO: 30637 - DNA, 20 bp, synthetic construct
  source 1..20: mol_type = other DNA
cacttttcaaccttaacttg

SEQ ID NO: 30638 - DNA, 20 bp, synthetic construct
  source 1..20: mol_type = other DNA
ccacttttcaaccttaactt

SEQ ID NO: 30639 - DNA, 20 bp, synthetic construct
  source 1..20: mol_type = other DNA
accacttttcaaccttaact

SEQ ID NO: 30640 - DNA, 20 bp, synthetic construct
  source 1..20: mol_type = other DNA
taccacttttcaaccttaac

SEQ ID NO: 30641 - DNA, 20 bp, synthetic construct
  source 1..20: mol_type = other DNA
ataccacttttcaaccttaa

SEQ ID NO: 30642 - DNA, 20 bp, synthetic construct
  source 1..20: mol_type = other DNA
aataccacttttcaacctta

SEQ ID NO: 30643 - DNA, 20 bp, synthetic construct
  source 1..20: mol_type = other DNA
caataccacttttcaacctt

SEQ ID NO: 30644 - DNA, 20 bp, synthetic construct
  source 1..20: mol_type = other DNA
tcaataccacttttcaacct

SEQ ID NO: 30645 - DNA, 20 bp, synthetic construct
  source 1..20: mol_type = other DNA
atcaataccacttttcaacc

SEQ ID NO: 30646 - DNA, 20 bp, synthetic construct
  source 1..20: mol_type = other DNA
catcaataccacttttcaac

SEQ ID NO: 30647 - DNA, 20 bp, synthetic construct
  source 1..20: mol_type = other DNA
ccatcaataccacttttcaa

SEQ ID NO: 30648 - DNA, 20 bp, synthetic construct
  source 1..20: mol_type = other DNA
cccatcaataccacttttca

SEQ ID NO: 30649 - DNA, 20 bp, synthetic construct
  source 1..20: mol_type = other DNA
gcccatcaataccacttttc

SEQ ID NO: 30650 - DNA, 20 bp, synthetic construct
  source 1..20: mol_type = other DNA
agcccatcaataccactttt

SEQ ID NO: 30651 - DNA, 20 bp, synthetic construct
  source 1..20: mol_type = other DNA
aagcccatcaataccacttt

SEQ ID NO: 30652 - DNA, 20 bp, synthetic construct
  source 1..20: mol_type = other DNA
caagcccatcaataccactt

SEQ ID NO: 30653 - DNA, 20 bp, synthetic construct
  source 1..20: mol_type = other DNA
ccaagcccatcaataccact

SEQ ID NO: 30654 - DNA, 20 bp, synthetic construct
  source 1..20: mol_type = other DNA
cccaagcccatcaataccac

SEQ ID NO: 30655 - DNA, 20 bp, synthetic construct
  source 1..20: mol_type = other DNA
ccccaagcccatcaatacca

SEQ ID NO: 30656 - DNA, 20 bp, synthetic construct
  source 1..20: mol_type = other DNA
accccaagcccatcaatacc

SEQ ID NO: 30657 - DNA, 20 bp, synthetic construct
  source 1..20: mol_type = other DNA
taccccaagcccatcaatac

SEQ ID NO: 30658 - DNA, 20 bp, synthetic construct
  source 1..20: mol_type = other DNA
ctaccccaagcccatcaata

SEQ ID NO: 30659 - DNA, 20 bp, synthetic construct
  source 1..20: mol_type = other DNA
actaccccaagcccatcaat

SEQ ID NO: 30660 - DNA, 20 bp, synthetic construct
  source 1..20: mol_type = other DNA
tactaccccaagcccatcaa

SEQ ID NO: 30661 - DNA, 20 bp, synthetic construct
  source 1..20: mol_type = other DNA
gtactaccccaagcccatca

SEQ ID NO: 30662 - DNA, 20 bp, synthetic construct
  source 1..20: mol_type = other DNA
tgtactaccccaagcccatc

SEQ ID NO: 30663 - DNA, 20 bp, synthetic construct
  source 1..20: mol_type = other DNA
ctgtactaccccaagcccat

SEQ ID NO: 30664 - DNA, 20 bp, synthetic construct
  source 1..20: mol_type = other DNA
actgtactaccccaagccca

SEQ ID NO: 30665 - DNA, 20 bp, synthetic construct
  source 1..20: mol_type = other DNA
tactgtactaccccaagccc

SEQ ID NO: 30666 - DNA, 20 bp, synthetic construct
  source 1..20: mol_type = other DNA
atactgtactaccccaagcc

SEQ ID NO: 30667 - DNA, 20 bp, synthetic construct
  source 1..20: mol_type = other DNA
catactgtactaccccaagc

SEQ ID NO: 30668 - DNA, 20 bp, synthetic construct
  source 1..20: mol_type = other DNA
tcatactgtactaccccaag

SEQ ID NO: 30669 - DNA, 20 bp, synthetic construct
  source 1..20: mol_type = other DNA
ttcatactgtactaccccaa

SEQ ID NO: 30670 - DNA, 20 bp, synthetic construct
  source 1..20: mol_type = other DNA
attcatactgtactacccca

SEQ ID NO: 30671 - DNA, 20 bp, synthetic construct
  source 1..20: mol_type = other DNA
cattcatactgtactacccc

SEQ ID NO: 30672 - DNA, 20 bp, synthetic construct
  source 1..20: mol_type = other DNA
ccattcatactgtactaccc

SEQ ID NO: 30673 - DNA, 20 bp, synthetic construct
  source 1..20: mol_type = other DNA
gccattcatactgtactacc

SEQ ID NO: 30674 - DNA, 20 bp, synthetic construct
  source 1..20: mol_type = other DNA
agccattcatactgtactac

SEQ ID NO: 30675 - DNA, 20 bp, synthetic construct
  source 1..20: mol_type = other DNA
tagccattcatactgtacta

SEQ ID NO: 30676 - DNA, 20 bp, synthetic construct
  source 1..20: mol_type = other DNA
gtagccattcatactgtact

SEQ ID NO: 30677 - DNA, 20 bp, synthetic construct
  source 1..20: mol_type = other DNA
tgtagccattcatactgtac

SEQ ID NO: 30678 - DNA, 20 bp, synthetic construct
  source 1..20: mol_type = other DNA
ctgtagccattcatactgta

SEQ ID NO: 30679 - DNA, 20 bp, synthetic construct
  source 1..20: mol_type = other DNA
actgtagccattcatactgt

SEQ ID NO: 30680 - DNA, 20 bp, synthetic construct
  source 1..20: mol_type = other DNA
aactgtagccattcatactg

SEQ ID NO: 30681 - DNA, 20 bp, synthetic construct
  source 1..20: mol_type = other DNA
aaactgtagccattcatact

SEQ ID NO: 30682 - DNA, 20 bp, synthetic construct
  source 1..20: mol_type = other DNA
taaactgtagccattcatac

SEQ ID NO: 30683 - DNA, 20 bp, synthetic construct
  source 1..20: mol_type = other DNA
ctaaactgtagccattcata

SEQ ID NO: 30684 - DNA, 20 bp, synthetic construct
  source 1..20: mol_type = other DNA
gctaaactgtagccattcat

SEQ ID NO: 30685 - DNA, 20 bp, synthetic construct
  source 1..20: mol_type = other DNA
cgctaaactgtagccattca

SEQ ID NO: 30686 - DNA, 20 bp, synthetic construct
  source 1..20: mol_type = other DNA
acgctaaactgtagccattc

SEQ ID NO: 30687 - DNA, 20 bp, synthetic construct
  source 1..20: mol_type = other DNA
aacgctaaactgtagccatt

SEQ ID NO: 30688 - DNA, 20 bp, synthetic construct
  source 1..20: mol_type = other DNA
aaacgctaaactgtagccat

SEQ ID NO: 30689 - DNA, 20 bp, synthetic construct
  source 1..20: mol_type = other DNA
gaaacgctaaactgtagcca

SEQ ID NO: 30690 - DNA, 20 bp, synthetic construct
  source 1..20: mol_type = other DNA
tgaaacgctaaactgtagcc

SEQ ID NO: 30691 - DNA, 20 bp, synthetic construct
  source 1..20: mol_type = other DNA
atgaaacgctaaactgtagc

SEQ ID NO: 30692 - DNA, 20 bp, synthetic construct
  source 1..20: mol_type = other DNA
aatgaaacgctaaactgtag

SEQ ID NO: 30693 - DNA, 20 bp, synthetic construct
  source 1..20: mol_type = other DNA
taatgaaacgctaaactgta

SEQ ID NO: 30694 - DNA, 20 bp, synthetic construct
  source 1..20: mol_type = other DNA
ttaatgaaacgctaaactgt

SEQ ID NO: 30695 - DNA, 20 bp, synthetic construct
  source 1..20: mol_type = other DNA
cttaatgaaacgctaaactg

SEQ ID NO: 30696 - DNA, 20 bp, synthetic construct
  source 1..20: mol_type = other DNA
acttaatgaaacgctaaact

SEQ ID NO: 30697 - DNA, 20 bp, synthetic construct
  source 1..20: mol_type = other DNA
aacttaatgaaacgctaaac

SEQ ID NO: 30698 - DNA, 20 bp, synthetic construct
  source 1..20: mol_type = other DNA
aaacttaatgaaacgctaaa

SEQ ID NO: 30699 - DNA, 20 bp, synthetic construct
  source 1..20: mol_type = other DNA
caaacttaatgaaacgctaa

SEQ ID NO: 30700 - DNA, 20 bp, synthetic construct
  source 1..20: mol_type = other DNA
acaaacttaatgaaacgcta

SEQ ID NO: 30701 - DNA, 20 bp, synthetic construct
  source 1..20: mol_type = other DNA
tacaaacttaatgaaacgct

SEQ ID NO: 30702 - DNA, 20 bp, synthetic construct
  source 1..20: mol_type = other DNA
atacaaacttaatgaaacgc

SEQ ID NO: 30703 - DNA, 20 bp, synthetic construct
  source 1..20: mol_type = other DNA
tatacaaacttaatgaaacg

SEQ ID NO: 30704 - DNA, 20 bp, synthetic construct
  source 1..20: mol_type = other DNA
atatacaaacttaatgaaac

SEQ ID NO: 30705 - DNA, 20 bp, synthetic construct
  source 1..20: mol_type = other DNA
aatatacaaacttaatgaaa

SEQ ID NO: 30706 - DNA, 20 bp, synthetic construct
  source 1..20: mol_type = other DNA
gaatatacaaacttaatgaa

SEQ ID NO: 30707 - DNA, 20 bp, synthetic construct
  source 1..20: mol_type = other DNA
tgaatatacaaacttaatga

SEQ ID NO: 30708 - DNA, 20 bp, synthetic construct
  source 1..20: mol_type = other DNA
atgaatatacaaacttaatg

SEQ ID NO: 30709 - DNA, 20 bp, synthetic construct
  source 1..20: mol_type = other DNA
aatgaatatacaaacttaat

SEQ ID NO: 30710 - DNA, 20 bp, synthetic construct
  source 1..20: mol_type = other DNA
taatgaatatacaaacttaa

SEQ ID NO: 30711 - DNA, 20 bp, synthetic construct
  source 1..20: mol_type = other DNA
ttaatgaatatacaaactta

SEQ ID NO: 30712 - DNA, 20 bp, synthetic construct
  source 1..20: mol_type = other DNA
attaatgaatatacaaactt

SEQ ID NO: 30713 - DNA, 20 bp, synthetic construct
  source 1..20: mol_type = other DNA
aattaatgaatatacaaact

SEQ ID NO: 30714 - DNA, 20 bp, synthetic construct
  source 1..20: mol_type = other DNA
gaattaatgaatatacaaac

SEQ ID NO: 30715 - DNA, 20 bp, synthetic construct
  source 1..20: mol_type = other DNA
tgaattaatgaatatacaaa

SEQ ID NO: 30716 - DNA, 20 bp, synthetic construct
  source 1..20: mol_type = other DNA
atgaattaatgaatatacaa

SEQ ID NO: 30717 - DNA, 20 bp, synthetic construct
  source 1..20: mol_type = other DNA
aatgaattaatgaatataca

SEQ ID NO: 30718 - DNA, 20 bp, synthetic construct
  source 1..20: mol_type = other DNA
taatgaattaatgaatatac

SEQ ID NO: 30719 - DNA, 20 bp, synthetic construct
  source 1..20: mol_type = other DNA
gtaatgaattaatgaatata

SEQ ID NO: 30720 - DNA, 20 bp, synthetic construct
  source 1..20: mol_type = other DNA
tgtaatgaattaatgaatat

SEQ ID NO: 30721 - DNA, 20 bp, synthetic construct
  source 1..20: mol_type = other DNA
gtgtaatgaattaatgaata

SEQ ID NO: 30722 - DNA, 20 bp, synthetic construct
  source 1..20: mol_type = other DNA
tgtgtaatgaattaatgaat

SEQ ID NO: 30723 - DNA, 20 bp, synthetic construct
  source 1..20: mol_type = other DNA
atgtgtaatgaattaatgaa

SEQ ID NO: 30724 - DNA, 20 bp, synthetic construct
  source 1..20: mol_type = other DNA
aatgtgtaatgaattaatga

SEQ ID NO: 30725 - DNA, 20 bp, synthetic construct
  source 1..20: mol_type = other DNA
aaatgtgtaatgaattaatg

SEQ ID NO: 30726 - DNA, 20 bp, synthetic construct
  source 1..20: mol_type = other DNA
caaatgtgtaatgaattaat

SEQ ID NO: 30727 - DNA, 20 bp, synthetic construct
  source 1..20: mol_type = other DNA
tcaaatgtgtaatgaattaa

SEQ ID NO: 30728 - DNA, 20 bp, synthetic construct
  source 1..20: mol_type = other DNA
atcaaatgtgtaatgaatta

SEQ ID NO: 30729 - DNA, 20 bp, synthetic construct
  source 1..20: mol_type = other DNA
catcaaatgtgtaatgaatt

SEQ ID NO: 30730 - DNA, 20 bp, synthetic construct
  source 1..20: mol_type = other DNA
gcatcaaatgtgtaatgaat

SEQ ID NO: 30731 - DNA, 20 bp, synthetic construct
  source 1..20: mol_type = other DNA
agcatcaaatgtgtaatgaa

SEQ ID NO: 30732 - DNA, 20 bp, synthetic construct
  source 1..20: mol_type = other DNA
cagcatcaaatgtgtaatga

SEQ ID NO: 30733 - DNA, 20 bp, synthetic construct
  source 1..20: mol_type = other DNA
acagcatcaaatgtgtaatg

SEQ ID NO: 30734 - DNA, 20 bp, synthetic construct
  source 1..20: mol_type = other DNA
gacagcatcaaatgtgtaat

SEQ ID NO: 30735 - DNA, 20 bp, synthetic construct
  source 1..20: mol_type = other DNA
tgacagcatcaaatgtgtaa

SEQ ID NO: 30736 - DNA, 20 bp, synthetic construct
  source 1..20: mol_type = other DNA
ctgacagcatcaaatgtgta

SEQ ID NO: 30737 - DNA, 20 bp, synthetic construct
  source 1..20: mol_type = other DNA
tctgacagcatcaaatgtgt

SEQ ID NO: 30738 - DNA, 20 bp, synthetic construct
  source 1..20: mol_type = other DNA
gtctgacagcatcaaatgtg

SEQ ID NO: 30739 - DNA, 20 bp, synthetic construct
  source 1..20: mol_type = other DNA
agtctgacagcatcaaatgt

SEQ ID NO: 30740 - DNA, 20 bp, synthetic construct
  source 1..20: mol_type = other DNA
tagtctgacagcatcaaatg

SEQ ID NO: 30741 - DNA, 20 bp, synthetic construct
  source 1..20: mol_type = other DNA
ctagtctgacagcatcaaat

SEQ ID NO: 30742 - DNA, 20 bp, synthetic construct
  source 1..20: mol_type = other DNA
cctagtctgacagcatcaaa

SEQ ID NO: 30743 - DNA, 20 bp, synthetic construct
  source 1..20: mol_type = other DNA
tcctagtctgacagcatcaa

SEQ ID NO: 30744 - DNA, 20 bp, synthetic construct
  source 1..20: mol_type = other DNA
gtcctagtctgacagcatca

SEQ ID NO: 30745 - DNA, 20 bp, synthetic construct
  source 1..20: mol_type = other DNA
tgtcctagtctgacagcatc

SEQ ID NO: 30746 - DNA, 20 bp, synthetic construct
  source 1..20: mol_type = other DNA
ctgtcctagtctgacagcat

SEQ ID NO: 30747 - DNA, 20 bp, synthetic construct
  source 1..20: mol_type = other DNA
tctgtcctagtctgacagca

SEQ ID NO: 30748 - DNA, 20 bp, synthetic construct
  source 1..20: mol_type = other DNA
ctctgtcctagtctgacagc

SEQ ID NO: 30749 - DNA, 20 bp, synthetic construct
  source 1..20: mol_type = other DNA
tctctgtcctagtctgacag

SEQ ID NO: 30750 - DNA, 20 bp, synthetic construct
  source 1..20: mol_type = other DNA
gtctctgtcctagtctgaca

SEQ ID NO: 30751 - DNA, 20 bp, synthetic construct
  source 1..20: mol_type = other DNA
tgtctctgtcctagtctgac

SEQ ID NO: 30752 - DNA, 20 bp, synthetic construct
  source 1..20: mol_type = other DNA
ttgtctctgtcctagtctga

SEQ ID NO: 30753 - DNA, 20 bp, synthetic construct
  source 1..20: mol_type = other DNA
tttgtctctgtcctagtctg

SEQ ID NO: 30754 - DNA, 20 bp, synthetic construct
  source 1..20: mol_type = other DNA
ctttgtctctgtcctagtct

SEQ ID NO: 30755 - DNA, 20 bp, synthetic construct
  source 1..20: mol_type = other DNA
tctttgtctctgtcctagtc

SEQ ID NO: 30756 - DNA, 20 bp, synthetic construct
  source 1..20: mol_type = other DNA
atctttgtctctgtcctagt

SEQ ID NO: 30757 - DNA, 20 bp, synthetic construct
  source 1..20: mol_type = other DNA
catctttgtctctgtcctag

SEQ ID NO: 30758 - DNA, 20 bp, synthetic construct
  source 1..20: mol_type = other DNA
tcatctttgtctctgtccta

SEQ ID NO: 30759 - DNA, 20 bp, synthetic construct
  source 1..20: mol_type = other DNA
ttcatctttgtctctgtcct

SEQ ID NO: 30760 - DNA, 20 bp, synthetic construct
  source 1..20: mol_type = other DNA
attcatctttgtctctgtcc

SEQ ID NO: 30761 - DNA, 20 bp, synthetic construct
  source 1..20: mol_type = other DNA
cattcatctttgtctctgtc

SEQ ID NO: 30762 - DNA, 20 bp, synthetic construct
  source 1..20: mol_type = other DNA
tcattcatctttgtctctgt

SEQ ID NO: 30763 - DNA, 20 bp, synthetic construct
  source 1..20: mol_type = other DNA
ttcattcatctttgtctctg

SEQ ID NO: 30764 - DNA, 20 bp, synthetic construct
  source 1..20: mol_type = other DNA
tttcattcatctttgtctct

SEQ ID NO: 30765 - DNA, 20 bp, synthetic construct
  source 1..20: mol_type = other DNA
gtttcattcatctttgtctc

SEQ ID NO: 30766 - DNA, 20 bp, synthetic construct
  source 1..20: mol_type = other DNA
tgtttcattcatctttgtct

SEQ ID NO: 30767 - DNA, 20 bp, synthetic construct
  source 1..20: mol_type = other DNA
atgtttcattcatctttgtc

SEQ ID NO: 30768 - DNA, 20 bp, synthetic construct
  source 1..20: mol_type = other DNA
aatgtttcattcatctttgt

SEQ ID NO: 30769 - DNA, 20 bp, synthetic construct
  source 1..20: mol_type = other DNA
taatgtttcattcatctttg

SEQ ID NO: 30770 - DNA, 20 bp, synthetic construct
  source 1..20: mol_type = other DNA
ataatgtttcattcatcttt

SEQ ID NO: 30771 - DNA, 20 bp, synthetic construct
  source 1..20: mol_type = other DNA
gataatgtttcattcatctt

SEQ ID NO: 30772 - DNA, 20 bp, synthetic construct
  source 1..20: mol_type = other DNA
agataatgtttcattcatct

SEQ ID NO: 30773 - DNA, 20 bp, synthetic construct
  source 1..20: mol_type = other DNA
gagataatgtttcattcatc

SEQ ID NO: 30774 - DNA, 20 bp, synthetic construct
  source 1..20: mol_type = other DNA
agagataatgtttcattcat

SEQ ID NO: 30775 - DNA, 20 bp, synthetic construct
  source 1..20: mol_type = other DNA
cagagataatgtttcattca

SEQ ID NO: 30776 - DNA, 20 bp, synthetic construct
  source 1..20: mol_type = other DNA
gcagagataatgtttcattc

SEQ ID NO: 30777 - DNA, 20 bp, synthetic construct
  source 1..20: mol_type = other DNA
agcagagataatgtttcatt

SEQ ID NO: 30778 - DNA, 20 bp, synthetic construct
  source 1..20: mol_type = other DNA
aagcagagataatgtttcat

SEQ ID NO: 30779 - DNA, 20 bp, synthetic construct
  source 1..20: mol_type = other DNA
gaagcagagataatgtttca

SEQ ID NO: 30780 - DNA, 20 bp, synthetic construct
  source 1..20: mol_type = other DNA
ggaagcagagataatgtttc

SEQ ID NO: 30781 - DNA, 20 bp, synthetic construct
  source 1..20: mol_type = other DNA
tggaagcagagataatgttt

SEQ ID NO: 30782 - DNA, 20 bp, synthetic construct
  source 1..20: mol_type = other DNA
ctggaagcagagataatgtt

SEQ ID NO: 30783 - DNA, 20 bp, synthetic construct
  source 1..20: mol_type = other DNA
cctggaagcagagataatgt

SEQ ID NO: 30784 - DNA, 20 bp, synthetic construct
  source 1..20: mol_type = other DNA
acctggaagcagagataatg

SEQ ID NO: 30785 - DNA, 20 bp, synthetic construct
  source 1..20: mol_type = other DNA
aacctggaagcagagataat

SEQ ID NO: 30786 - DNA, 20 bp, synthetic construct
  source 1..20: mol_type = other DNA
taacctggaagcagagataa

SEQ ID NO: 30787 - DNA, 20 bp, synthetic construct
  source 1..20: mol_type = other DNA
gtaacctggaagcagagata

SEQ ID NO: 30788 - DNA, 20 bp, synthetic construct
  source 1..20: mol_type = other DNA
ggtaacctggaagcagagat

SEQ ID NO: 30789 - DNA, 20 bp, synthetic construct
  source 1..20: mol_type = other DNA
gggtaacctggaagcagaga

SEQ ID NO: 30790 - DNA, 20 bp, synthetic construct
  source 1..20: mol_type = other DNA
tgggtaacctggaagcagag

SEQ ID NO: 30791 - DNA, 20 bp, synthetic construct
  source 1..20: mol_type = other DNA
ctgggtaacctggaagcaga

SEQ ID NO: 30792 - DNA, 20 bp, synthetic construct
  source 1..20: mol_type = other DNA
actgggtaacctggaagcag

SEQ ID NO: 30793 - DNA, 20 bp, synthetic construct
  source 1..20: mol_type = other DNA
cactgggtaacctggaagca

SEQ ID NO: 30794 - DNA, 20 bp, synthetic construct
  source 1..20: mol_type = other DNA
acactgggtaacctggaagc

SEQ ID NO: 30795 - DNA, 20 bp, synthetic construct
  source 1..20: mol_type = other DNA
tacactgggtaacctggaag

SEQ ID NO: 30796 - DNA, 20 bp, synthetic construct
  source 1..20: mol_type = other DNA
ctacactgggtaacctggaa

SEQ ID NO: 30797 - DNA, 20 bp, synthetic construct
  source 1..20: mol_type = other DNA
actacactgggtaacctgga

SEQ ID NO: 30798 - DNA, 20 bp, synthetic construct
  source 1..20: mol_type = other DNA
tactacactgggtaacctgg

SEQ ID NO: 30799 - DNA, 20 bp, synthetic construct
  source 1..20: mol_type = other DNA
ctactacactgggtaacctg

SEQ ID NO: 30800 - DNA, 20 bp, synthetic construct
  source 1..20: mol_type = other DNA
tctactacactgggtaacct

SEQ ID NO: 30801 - DNA, 20 bp, synthetic construct
  source 1..20: mol_type = other DNA
ctctactacactgggtaacc

SEQ ID NO: 30802 - DNA, 20 bp, synthetic construct
  source 1..20: mol_type = other DNA
tctctactacactgggtaac

SEQ ID NO: 30803 - DNA, 20 bp, synthetic construct
  source 1..20: mol_type = other DNA
ttctctactacactgggtaa

SEQ ID NO: 30804 - DNA, 20 bp, synthetic construct
  source 1..20: mol_type = other DNA
cttctctactacactgggta

SEQ ID NO: 30805 - DNA, 20 bp, synthetic construct
  source 1..20: mol_type = other DNA
ccttctctactacactgggt

SEQ ID NO: 30806 - DNA, 20 bp, synthetic construct
  source 1..20: mol_type = other DNA
gccttctctactacactggg

SEQ ID NO: 30807 - DNA, 20 bp, synthetic construct
  source 1..20: mol_type = other DNA
tgccttctctactacactgg

SEQ ID NO: 30808 - DNA, 20 bp, synthetic construct
  source 1..20: mol_type = other DNA
ctgccttctctactacactg

SEQ ID NO: 30809 - DNA, 20 bp, synthetic construct
  source 1..20: mol_type = other DNA
cctgccttctctactacact

SEQ ID NO: 30810 - DNA, 20 bp, synthetic construct
  source 1..20: mol_type = other DNA
gcctgccttctctactacac

SEQ ID NO: 30811 - DNA, 20 bp, synthetic construct
  source 1..20: mol_type = other DNA
tgcctgccttctctactaca

SEQ ID NO: 30812 - DNA, 20 bp, synthetic construct
  source 1..20: mol_type = other DNA
atgcctgccttctctactac

SEQ ID NO: 30813 - DNA, 20 bp, synthetic construct
  source 1..20: mol_type = other DNA
catgcctgccttctctacta

SEQ ID NO: 30814 - DNA, 20 bp, synthetic construct
  source 1..20: mol_type = other DNA
gcatgcctgccttctctact

SEQ ID NO: 30815 - DNA, 20 bp, synthetic construct
  source 1..20: mol_type = other DNA
tgcatgcctgccttctctac

SEQ ID NO: 30816 - DNA, 20 bp, synthetic construct
  source 1..20: mol_type = other DNA
ctgcatgcctgccttctcta

SEQ ID NO: 30817 - DNA, 20 bp, synthetic construct
  source 1..20: mol_type = other DNA
tctgcatgcctgccttctct

SEQ ID NO: 30818 - DNA, 20 bp, synthetic construct
  source 1..20: mol_type = other DNA
atctgcatgcctgccttctc

SEQ ID NO: 30819 - DNA, 20 bp, synthetic construct
  source 1..20: mol_type = other DNA
tatctgcatgcctgccttct

SEQ ID NO: 30820 - DNA, 20 bp, synthetic construct
  source 1..20: mol_type = other DNA
ctatctgcatgcctgccttc

SEQ ID NO: 30821 - DNA, 20 bp, synthetic construct
  source 1..20: mol_type = other DNA
actatctgcatgcctgcctt

SEQ ID NO: 30822 - DNA, 20 bp, synthetic construct
  source 1..20: mol_type = other DNA
aactatctgcatgcctgcct

SEQ ID NO: 30823 - DNA, 20 bp, synthetic construct
  source 1..20: mol_type = other DNA
aaactatctgcatgcctgcc

SEQ ID NO: 30824 - DNA, 20 bp, synthetic construct
  source 1..20: mol_type = other DNA
taaactatctgcatgcctgc

SEQ ID NO: 30825 - DNA, 20 bp, synthetic construct
  source 1..20: mol_type = other DNA
ttaaactatctgcatgcctg

SEQ ID NO: 30826 - DNA, 20 bp, synthetic construct
  source 1..20: mol_type = other DNA
tttaaactatctgcatgcct

SEQ ID NO: 30827 - DNA, 20 bp, synthetic construct
  source 1..20: mol_type = other DNA
atttaaactatctgcatgcc

SEQ ID NO: 30828 - DNA, 20 bp, synthetic construct
  source 1..20: mol_type = other DNA
aatttaaactatctgcatgc

SEQ ID NO: 30829 - DNA, 20 bp, synthetic construct
  source 1..20: mol_type = other DNA
caatttaaactatctgcatg

SEQ ID NO: 30830 - DNA, 20 bp, synthetic construct
  source 1..20: mol_type = other DNA
ccaatttaaactatctgcat

SEQ ID NO: 30831 - DNA, 20 bp, synthetic construct
  source 1..20: mol_type = other DNA
accaatttaaactatctgca

SEQ ID NO: 30832 - DNA, 20 bp, synthetic construct
  source 1..20: mol_type = other DNA
taccaatttaaactatctgc

SEQ ID NO: 30833 - DNA, 20 bp, synthetic construct
  source 1..20: mol_type = other DNA
ctaccaatttaaactatctg

SEQ ID NO: 30834 - DNA, 20 bp, synthetic construct
  source 1..20: mol_type = other DNA
gctaccaatttaaactatct

SEQ ID NO: 30835 - DNA, 20 bp, synthetic construct
  source 1..20: mol_type = other DNA
tgctaccaatttaaactatc

SEQ ID NO: 30836 - DNA, 20 bp, synthetic construct
  source 1..20: mol_type = other DNA
gtgctaccaatttaaactat

SEQ ID NO: 30837 - DNA, 20 bp, synthetic construct
  source 1..20: mol_type = other DNA
agtgctaccaatttaaacta

SEQ ID NO: 30838 - DNA, 20 bp, synthetic construct
  source 1..20: mol_type = other DNA
cagtgctaccaatttaaact

SEQ ID NO: 30839 - DNA, 20 bp, synthetic construct
  source 1..20: mol_type = other DNA
ccagtgctaccaatttaaac

SEQ ID NO: 30840 - DNA, 20 bp, synthetic construct
  source 1..20: mol_type = other DNA
cccagtgctaccaatttaaa

SEQ ID NO: 30841 - DNA, 20 bp, synthetic construct
  source 1..20: mol_type = other DNA
tcccagtgctaccaatttaa

SEQ ID NO: 30842 - DNA, 20 bp, synthetic construct
  source 1..20: mol_type = other DNA
ctcccagtgctaccaattta

SEQ ID NO: 30843 - DNA, 20 bp, synthetic construct
  source 1..20: mol_type = other DNA
cctcccagtgctaccaattt

SEQ ID NO: 30844 - DNA, 20 bp, synthetic construct
  source 1..20: mol_type = other DNA
ccctcccagtgctaccaatt

SEQ ID NO: 30845 - DNA, 20 bp, synthetic construct
  source 1..20: mol_type = other DNA
cccctcccagtgctaccaat

SEQ ID NO: 30846 - DNA, 20 bp, synthetic construct
  source 1..20: mol_type = other DNA
tcccctcccagtgctaccaa

SEQ ID NO: 30847 - DNA, 20 bp, synthetic construct
  source 1..20: mol_type = other DNA
gtcccctcccagtgctacca

SEQ ID NO: 30848 - DNA, 20 bp, synthetic construct
  source 1..20: mol_type = other DNA
agtcccctcccagtgctacc

SEQ ID NO: 30849 - DNA, 20 bp, synthetic construct
  source 1..20: mol_type = other DNA
cagtcccctcccagtgctac

SEQ ID NO: 30850 - DNA, 20 bp, synthetic construct
  source 1..20: mol_type = other DNA
gcagtcccctcccagtgcta

SEQ ID NO: 30851 - DNA, 20 bp, synthetic construct
  source 1..20: mol_type = other DNA
ggcagtcccctcccagtgct

SEQ ID NO: 30852 - DNA, 20 bp, synthetic construct
  source 1..20: mol_type = other DNA
tggcagtcccctcccagtgc

SEQ ID NO: 30853 - DNA, 20 bp, synthetic construct
  source 1..20: mol_type = other DNA
atggcagtcccctcccagtg

SEQ ID NO: 30854 - DNA, 20 bp, synthetic construct
  source 1..20: mol_type = other DNA
catggcagtcccctcccagt

SEQ ID NO: 30855 - DNA, 20 bp, synthetic construct
  source 1..20: mol_type = other DNA
ccatggcagtcccctcccag

SEQ ID NO: 30856 - DNA, 20 bp, synthetic construct
  source 1..20: mol_type = other DNA
cccatggcagtcccctccca

SEQ ID NO: 30857 - DNA, 20 bp, synthetic construct
  source 1..20: mol_type = other DNA
acccatggcagtcccctccc

SEQ ID NO: 30858 - DNA, 20 bp, synthetic construct
  source 1..20: mol_type = other DNA
cacccatggcagtcccctcc

SEQ ID NO: 30859 - DNA, 20 bp, synthetic construct
  source 1..20: mol_type = other DNA
ccacccatggcagtcccctc

SEQ ID NO: 30860 - DNA, 20 bp, synthetic construct
  source 1..20: mol_type = other DNA
cccacccatggcagtcccct

SEQ ID NO: 30861 - DNA, 20 bp, synthetic construct
  source 1..20: mol_type = other DNA
gcccacccatggcagtcccc

SEQ ID NO: 30862 - DNA, 20 bp, synthetic construct
  source 1..20: mol_type = other DNA
tgcccacccatggcagtccc

SEQ ID NO: 30863 - DNA, 20 bp, synthetic construct
  source 1..20: mol_type = other DNA
ctgcccacccatggcagtcc

SEQ ID NO: 30864 - DNA, 20 bp, synthetic construct
  source 1..20: mol_type = other DNA
actgcccacccatggcagtc

SEQ ID NO: 30865 - DNA, 20 bp, synthetic construct
  source 1..20: mol_type = other DNA
cactgcccacccatggcagt

SEQ ID NO: 30866 - DNA, 20 bp, synthetic construct
  source 1..20: mol_type = other DNA
tcactgcccacccatggcag

SEQ ID NO: 30867 - DNA, 20 bp, synthetic construct
  source 1..20: mol_type = other DNA
ttcactgcccacccatggca

SEQ ID NO: 30868 - DNA, 20 bp, synthetic construct
  source 1..20: mol_type = other DNA
cttcactgcccacccatggc

SEQ ID NO: 30869 - DNA, 20 bp, synthetic construct
  source 1..20: mol_type = other DNA
tcttcactgcccacccatgg

SEQ ID NO: 30870 - DNA, 20 bp, synthetic construct
  source 1..20: mol_type = other DNA
ttcttcactgcccacccatg

SEQ ID NO: 30871 - DNA, 20 bp, synthetic construct
  source 1..20: mol_type = other DNA
tttcttcactgcccacccat

SEQ ID NO: 30872 - DNA, 20 bp, synthetic construct
  source 1..20: mol_type = other DNA
ttttcttcactgcccaccca

SEQ ID NO: 30873 - DNA, 20 bp, synthetic construct
  source 1..20: mol_type = other DNA
tttttcttcactgcccaccc

SEQ ID NO: 30874 - DNA, 20 bp, synthetic construct
  source 1..20: mol_type = other DNA
ctttttcttcactgcccacc

SEQ ID NO: 30875 - DNA, 20 bp, synthetic construct
  source 1..20: mol_type = other DNA
cctttttcttcactgcccac

SEQ ID NO: 30876 - DNA, 20 bp, synthetic construct
  source 1..20: mol_type = other DNA
ccctttttcttcactgccca

SEQ ID NO: 30877 - DNA, 20 bp, synthetic construct
  source 1..20: mol_type = other DNA
gccctttttcttcactgccc

SEQ ID NO: 30878 - DNA, 20 bp, synthetic construct
  source 1..20: mol_type = other DNA
agccctttttcttcactgcc

SEQ ID NO: 30879 - DNA, 20 bp, synthetic construct
  source 1..20: mol_type = other DNA
aagccctttttcttcactgc

SEQ ID NO: 30880 - DNA, 20 bp, synthetic construct
  source 1..20: mol_type = other DNA
gaagccctttttcttcactg

SEQ ID NO: 30881 - DNA, 20 bp, synthetic construct
  source 1..20: mol_type = other DNA
tgaagccctttttcttcact

SEQ ID NO: 30882 - DNA, 20 bp, synthetic construct
  source 1..20: mol_type = other DNA
ttgaagccctttttcttcac

SEQ ID NO: 30883 - DNA, 20 bp, synthetic construct
  source 1..20: mol_type = other DNA
tttgaagccctttttcttca

SEQ ID NO: 30884 - DNA, 20 bp, synthetic construct
  source 1..20: mol_type = other DNA
ttttgaagccctttttcttc

SEQ ID NO: 30885 - DNA, 20 bp, synthetic construct
  source 1..20: mol_type = other DNA
attttgaagccctttttctt

SEQ ID NO: 30886 - DNA, 20 bp, synthetic construct
  source 1..20: mol_type = other DNA
tattttgaagccctttttct

SEQ ID NO: 30887 - DNA, 20 bp, synthetic construct
  source 1..20: mol_type = other DNA
ttattttgaagccctttttc

SEQ ID NO: 30888 - DNA, 20 bp, synthetic construct
  source 1..20: mol_type = other DNA
attattttgaagcccttttt

SEQ ID NO: 30889 - DNA, 20 bp, synthetic construct
  source 1..20: mol_type = other DNA
cattattttgaagccctttt

SEQ ID NO: 30890 - DNA, 20 bp, synthetic construct
  source 1..20: mol_type = other DNA
tcattattttgaagcccttt

SEQ ID NO: 30891 - DNA, 20 bp, synthetic construct
  source 1..20: mol_type = other DNA
ctcattattttgaagccctt

SEQ ID NO: 30892 - DNA, 20 bp, synthetic construct
  source 1..20: mol_type = other DNA
tctcattattttgaagccct

SEQ ID NO: 30893 - DNA, 20 bp, synthetic construct
  source 1..20: mol_type = other DNA
ctctcattattttgaagccc

SEQ ID NO: 30894 - DNA, 20 bp, synthetic construct
  source 1..20: mol_type = other DNA
actctcattattttgaagcc

SEQ ID NO: 30895 - DNA, 20 bp, synthetic construct
  source 1..20: mol_type = other DNA
aactctcattattttgaagc

SEQ ID NO: 30896 - DNA, 20 bp, synthetic construct
  source 1..20: mol_type = other DNA
caactctcattattttgaag

SEQ ID NO: 30897 - DNA, 20 bp, synthetic construct
  source 1..20: mol_type = other DNA
tcaactctcattattttgaa

SEQ ID NO: 30898 - DNA, 20 bp, synthetic construct
  source 1..20: mol_type = other DNA
ctcaactctcattattttga

SEQ ID NO: 30899 - DNA, 20 bp, synthetic construct
  source 1..20: mol_type = other DNA
tctcaactctcattattttg

SEQ ID NO: 30900 - DNA, 20 bp, synthetic construct
  source 1..20: mol_type = other DNA
atctcaactctcattatttt

SEQ ID NO: 30901 - DNA, 20 bp, synthetic construct
  source 1..20: mol_type = other DNA
catctcaactctcattattt

SEQ ID NO: 30902 - DNA, 20 bp, synthetic construct
  source 1..20: mol_type = other DNA
ccatctcaactctcattatt

SEQ ID NO: 30903 - DNA, 20 bp, synthetic construct
  source 1..20: mol_type = other DNA
tccatctcaactctcattat

SEQ ID NO: 30904 - DNA, 20 bp, synthetic construct
  source 1..20: mol_type = other DNA
atccatctcaactctcatta

SEQ ID NO: 30905 - DNA, 20 bp, synthetic construct
  source 1..20: mol_type = other DNA
gatccatctcaactctcatt

SEQ ID NO: 30906 - DNA, 20 bp, synthetic construct
  source 1..20: mol_type = other DNA
agatccatctcaactctcat

SEQ ID NO: 30907 - DNA, 20 bp, synthetic construct
  source 1..20: mol_type = other DNA
aagatccatctcaactctca

SEQ ID NO: 30908 - DNA, 20 bp, synthetic construct
  source 1..20: mol_type = other DNA
gaagatccatctcaactctc

SEQ ID NO: 30909 - DNA, 20 bp, synthetic construct
  source 1..20: mol_type = other DNA
tgaagatccatctcaactct

SEQ ID NO: 30910 - DNA, 20 bp, synthetic construct
  source 1..20: mol_type = other DNA
ttgaagatccatctcaactc

SEQ ID NO: 30911 - DNA, 20 bp, synthetic construct
  source 1..20: mol_type = other DNA
cttgaagatccatctcaact

SEQ ID NO: 30912 - DNA, 20 bp, synthetic construct
  source 1..20: mol_type = other DNA
ccttgaagatccatctcaac

SEQ ID NO: 30913 - DNA, 20 bp, synthetic construct
  source 1..20: mol_type = other DNA
tccttgaagatccatctcaa

SEQ ID NO: 30914 - DNA, 20 bp, synthetic construct
  source 1..20: mol_type = other DNA
ttccttgaagatccatctca

SEQ ID NO: 30915 - DNA, 20 bp, synthetic construct
  source 1..20: mol_type = other DNA
cttccttgaagatccatctc

SEQ ID NO: 30916 - DNA, 20 bp, synthetic construct
  source 1..20: mol_type = other DNA
tcttccttgaagatccatct

SEQ ID NO: 30917 - DNA, 20 bp, synthetic construct
  source 1..20: mol_type = other DNA
atcttccttgaagatccatc

SEQ ID NO: 30918 - DNA, 20 bp, synthetic construct
  source 1..20: mol_type = other DNA
tatcttccttgaagatccat

SEQ ID NO: 30919 - DNA, 20 bp, synthetic construct
  source 1..20: mol_type = other DNA
ttatcttccttgaagatcca

SEQ ID NO: 30920 - DNA, 20 bp, synthetic construct
  source 1..20: mol_type = other DNA
cttatcttccttgaagatcc

SEQ ID NO: 30921 - DNA, 20 bp, synthetic construct
  source 1..20: mol_type = other DNA
gcttatcttccttgaagatc

SEQ ID NO: 30922 - DNA, 20 bp, synthetic construct
  source 1..20: mol_type = other DNA
tgcttatcttccttgaagat

SEQ ID NO: 30923 - DNA, 20 bp, synthetic construct
  source 1..20: mol_type = other DNA
ctgcttatcttccttgaaga

SEQ ID NO: 30924 - DNA, 20 bp, synthetic construct
  source 1..20: mol_type = other DNA
actgcttatcttccttgaag

SEQ ID NO: 30925 - DNA, 20 bp, synthetic construct
  source 1..20: mol_type = other DNA
aactgcttatcttccttgaa

SEQ ID NO: 30926 - DNA, 20 bp, synthetic construct
  source 1..20: mol_type = other DNA
aaactgcttatcttccttga

SEQ ID NO: 30927 - DNA, 20 bp, synthetic construct
  source 1..20: mol_type = other DNA
aaaactgcttatcttccttg

SEQ ID NO: 30928 - DNA, 20 bp, synthetic construct
  source 1..20: mol_type = other DNA
gaaaactgcttatcttcctt

SEQ ID NO: 30929 - DNA, 20 bp, synthetic construct
  source 1..20: mol_type = other DNA
tgaaaactgcttatcttcct

SEQ ID NO: 30930 - DNA, 20 bp, synthetic construct
  source 1..20: mol_type = other DNA
ctgaaaactgcttatcttcc

SEQ ID NO: 30931 - DNA, 20 bp, synthetic construct
  source 1..20: mol_type = other DNA
actgaaaactgcttatcttc

SEQ ID NO: 30932 - DNA, 20 bp, synthetic construct
  source 1..20: mol_type = other DNA
tactgaaaactgcttatctt

SEQ ID NO: 30933 - DNA, 20 bp, synthetic construct
  source 1..20: mol_type = other DNA
ttactgaaaactgcttatct

SEQ ID NO: 30934 - DNA, 20 bp, synthetic construct
  source 1..20: mol_type = other DNA
cttactgaaaactgcttatc

SEQ ID NO: 30935 - DNA, 20 bp, synthetic construct
  source 1..20: mol_type = other DNA
ccttactgaaaactgcttat

SEQ ID NO: 30936 - DNA, 20 bp, synthetic construct
  source 1..20: mol_type = other DNA
gccttactgaaaactgctta

SEQ ID NO: 30937 - DNA, 20 bp, synthetic construct
  source 1..20: mol_type = other DNA
ggccttactgaaaactgctt

SEQ ID NO: 30938 - DNA, 20 bp, synthetic construct
  source 1..20: mol_type = other DNA
tggccttactgaaaactgct

SEQ ID NO: 30939 - DNA, 20 bp, synthetic construct
  source 1..20: mol_type = other DNA
atggccttactgaaaactgc

SEQ ID NO: 30940 - DNA, 20 bp, synthetic construct
  source 1..20: mol_type = other DNA
catggccttactgaaaactg

SEQ ID NO: 30941 - DNA, 20 bp, synthetic construct
  source 1..20: mol_type = other DNA
tcatggccttactgaaaact

SEQ ID NO: 30942 - DNA, 20 bp, synthetic construct
  source 1..20: mol_type = other DNA
ttcatggccttactgaaaac

SEQ ID NO: 30943 - DNA, 20 bp, synthetic construct
  source 1..20: mol_type = other DNA
cttcatggccttactgaaaa

SEQ ID NO: 30944 - DNA, 20 bp, synthetic construct
  source 1..20: mol_type = other DNA
tcttcatggccttactgaaa

SEQ ID NO: 30945 - DNA, 20 bp, synthetic construct
  source 1..20: mol_type = other DNA
ctcttcatggccttactgaa

SEQ ID NO: 30946 - DNA, 20 bp, synthetic construct
  source 1..20: mol_type = other DNA
tctcttcatggccttactga

SEQ ID NO: 30947 - DNA, 20 bp, synthetic construct
  source 1..20: mol_type = other DNA
ctctcttcatggccttactg

SEQ ID NO: 30948 - DNA, 20 bp, synthetic construct
  source 1..20: mol_type = other DNA
cctctcttcatggccttact

SEQ ID NO: 30949 - DNA, 20 bp, synthetic construct
  source 1..20: mol_type = other DNA
tcctctcttcatggccttac

SEQ ID NO: 30950 - DNA, 20 bp, synthetic construct
  source 1..20: mol_type = other DNA
ctcctctcttcatggcctta

SEQ ID NO: 30951 - DNA, 20 bp, synthetic construct
  source 1..20: mol_type = other DNA
cctcctctcttcatggcctt

SEQ ID NO: 30952 - DNA, 20 bp, synthetic construct
  source 1..20: mol_type = other DNA
tcctcctctcttcatggcct

SEQ ID NO: 30953 - DNA, 20 bp, synthetic construct
  source 1..20: mol_type = other DNA
ttcctcctctcttcatggcc

SEQ ID NO: 30954 - DNA, 20 bp, synthetic construct
  source 1..20: mol_type = other DNA
cttcctcctctcttcatggc

SEQ ID NO: 30955 - DNA, 20 bp, synthetic construct
  source 1..20: mol_type = other DNA
acttcctcctctcttcatgg

SEQ ID NO: 30956 - DNA, 20 bp, synthetic construct
  source 1..20: mol_type = other DNA
aacttcctcctctcttcatg

SEQ ID NO: 30957 - DNA, 20 bp, synthetic construct
  source 1..20: mol_type = other DNA
gaacttcctcctctcttcat

SEQ ID NO: 30958 - DNA, 20 bp, synthetic construct
  source 1..20: mol_type = other DNA
ggaacttcctcctctcttca

SEQ ID NO: 30959 - DNA, 20 bp, synthetic construct
  source 1..20: mol_type = other DNA
tggaacttcctcctctcttc

SEQ ID NO: 30960 - DNA, 20 bp, synthetic construct
  source 1..20: mol_type = other DNA
ctggaacttcctcctctctt

SEQ ID NO: 30961 - DNA, 20 bp, synthetic construct
  source 1..20: mol_type = other DNA
cctggaacttcctcctctct

SEQ ID NO: 30962 - DNA, 20 bp, synthetic construct
  source 1..20: mol_type = other DNA
gcctggaacttcctcctctc

SEQ ID NO: 30963 - DNA, 20 bp, synthetic construct
  source 1..20: mol_type = other DNA
cgcctggaacttcctcctct

SEQ ID NO: 30964 - DNA, 20 bp, synthetic construct
  source 1..20: mol_type = other DNA
ccgcctggaacttcctcctc

SEQ ID NO: 30965 - DNA, 20 bp, synthetic construct
  source 1..20: mol_type = other DNA
cccgcctggaacttcctcct

SEQ ID NO: 30966 - DNA, 20 bp, synthetic construct
  source 1..20: mol_type = other DNA
tcccgcctggaacttcctcc

SEQ ID NO: 30967 - DNA, 20 bp, synthetic construct
  source 1..20: mol_type = other DNA
ttcccgcctggaacttcctc

SEQ ID NO: 30968 - DNA, 20 bp, synthetic construct
  source 1..20: mol_type = other DNA
cttcccgcctggaacttcct

SEQ ID NO: 30969 - DNA, 20 bp, synthetic construct
  source 1..20: mol_type = other DNA
tcttcccgcctggaacttcc

SEQ ID NO: 30970 - DNA, 20 bp, synthetic construct
  source 1..20: mol_type = other DNA
ctcttcccgcctggaacttc

SEQ ID NO: 30971 - DNA, 20 bp, synthetic construct
  source 1..20: mol_type = other DNA
actcttcccgcctggaactt

SEQ ID NO: 30972 - DNA, 20 bp, synthetic construct
  source 1..20: mol_type = other DNA
aactcttcccgcctggaact

SEQ ID NO: 30973 - DNA, 20 bp, synthetic construct
  source 1..20: mol_type = other DNA
aaactcttcccgcctggaac

SEQ ID NO: 30974 - DNA, 20 bp, synthetic construct
  source 1..20: mol_type = other DNA
caaactcttcccgcctggaa

SEQ ID NO: 30975 - DNA, 20 bp, synthetic construct
  source 1..20: mol_type = other DNA
acaaactcttcccgcctgga

SEQ ID NO: 30976 - DNA, 20 bp, synthetic construct
  source 1..20: mol_type = other DNA
cacaaactcttcccgcctgg

SEQ ID NO: 30977 - DNA, 20 bp, synthetic construct
  source 1..20: mol_type = other DNA
gcacaaactcttcccgcctg

SEQ ID NO: 30978 - DNA, 20 bp, synthetic construct
  source 1..20: mol_type = other DNA
agcacaaactcttcccgcct

SEQ ID NO: 30979 - DNA, 20 bp, synthetic construct
  source 1..20: mol_type = other DNA
tagcacaaactcttcccgcc

SEQ ID NO: 30980 - DNA, 20 bp, synthetic construct
  source 1..20: mol_type = other DNA
ttagcacaaactcttcccgc

SEQ ID NO: 30981 - DNA, 20 bp, synthetic construct
  source 1..20: mol_type = other DNA
tttagcacaaactcttcccg

SEQ ID NO: 30982 - DNA, 20 bp, synthetic construct
  source 1..20: mol_type = other DNA
ctttagcacaaactcttccc

SEQ ID NO: 30983 - DNA, 20 bp, synthetic construct
  source 1..20: mol_type = other DNA
actttagcacaaactcttcc

SEQ ID NO: 30984 - DNA, 20 bp, synthetic construct
  source 1..20: mol_type = other DNA
tactttagcacaaactcttc

SEQ ID NO: 30985 - DNA, 20 bp, synthetic construct
  source 1..20: mol_type = other DNA
gtactttagcacaaactctt

SEQ ID NO: 30986 - DNA, 20 bp, synthetic construct
  source 1..20: mol_type = other DNA
tgtactttagcacaaactct

SEQ ID NO: 30987 - DNA, 20 bp, synthetic construct
  source 1..20: mol_type = other DNA
ctgtactttagcacaaactc

SEQ ID NO: 30988 - DNA, 20 bp, synthetic construct
  source 1..20: mol_type = other DNA
cctgtactttagcacaaact

SEQ ID NO: 30989 - DNA, 20 bp, synthetic construct
  source 1..20: mol_type = other DNA
ccctgtactttagcacaaac

SEQ ID NO: 30990 - DNA, 20 bp, synthetic construct
  source 1..20: mol_type = other DNA
tccctgtactttagcacaaa

SEQ ID NO: 30991 - DNA, 20 bp, synthetic construct
  source 1..20: mol_type = other DNA
atccctgtactttagcacaa

SEQ ID NO: 30992 - DNA, 20 bp, synthetic construct
  source 1..20: mol_type = other DNA
aatccctgtactttagcaca

SEQ ID NO: 30993 - DNA, 20 bp, synthetic construct
  source 1..20: mol_type = other DNA
caatccctgtactttagcac

SEQ ID NO: 30994 - DNA, 20 bp, synthetic construct
  source 1..20: mol_type = other DNA
gcaatccctgtactttagca

SEQ ID NO: 30995 - DNA, 20 bp, synthetic construct
  source 1..20: mol_type = other DNA
agcaatccctgtactttagc

SEQ ID NO: 30996 - DNA, 20 bp, synthetic construct
  source 1..20: mol_type = other DNA
tagcaatccctgtactttag

SEQ ID NO: 30997 - DNA, 20 bp, synthetic construct
  source 1..20: mol_type = other DNA
atagcaatccctgtacttta

SEQ ID NO: 30998 - DNA, 20 bp, synthetic construct
  source 1..20: mol_type = other DNA
tatagcaatccctgtacttt

SEQ ID NO: 30999 - DNA, 20 bp, synthetic construct
  source 1..20: mol_type = other DNA
gtatagcaatccctgtactt

SEQ ID NO: 31000 - DNA, 20 bp, synthetic construct
  source 1..20: mol_type = other DNA
tgtatagcaatccctgtact

SEQ ID NO: 31001 - DNA, 20 bp, synthetic construct
  source 1..20: mol_type = other DNA
gtgtatagcaatccctgtac

SEQ ID NO: 31002 - DNA, 20 bp, synthetic construct
  source 1..20: mol_type = other DNA
tgtgtatagcaatccctgta

SEQ ID NO: 31003 - DNA, 20 bp, synthetic construct
  source 1..20: mol_type = other DNA
atgtgtatagcaatccctgt

SEQ ID NO: 31004 - DNA, 20 bp, synthetic construct
  source 1..20: mol_type = other DNA
catgtgtatagcaatccctg

SEQ ID NO: 31005 - DNA, 20 bp, synthetic construct
  source 1..20: mol_type = other DNA
ccatgtgtatagcaatccct

SEQ ID NO: 31006 - DNA, 20 bp, synthetic construct
  source 1..20: mol_type = other DNA
accatgtgtatagcaatccc

SEQ ID NO: 31007 - DNA, 20 bp, synthetic construct
  source 1..20: mol_type = other DNA
caccatgtgtatagcaatcc

SEQ ID NO: 31008 - DNA, 20 bp, synthetic construct
  source 1..20: mol_type = other DNA
acaccatgtgtatagcaatc

SEQ ID NO: 31009 - DNA, 20 bp, synthetic construct
  source 1..20: mol_type = other DNA
tacaccatgtgtatagcaat

SEQ ID NO: 31010 - DNA, 20 bp, synthetic construct
  source 1..20: mol_type = other DNA
atacaccatgtgtatagcaa

SEQ ID NO: 31011 - DNA, 20 bp, synthetic construct
  source 1..20: mol_type = other DNA
catacaccatgtgtatagca

SEQ ID NO: 31012 - DNA, 20 bp, synthetic construct
  source 1..20: mol_type = other DNA
acatacaccatgtgtatagc

SEQ ID NO: 31013 - DNA, 20 bp, synthetic construct
  source 1..20: mol_type = other DNA
tacatacaccatgtgtatag

SEQ ID NO: 31014 - DNA, 20 bp, synthetic construct
  source 1..20: mol_type = other DNA
ctacatacaccatgtgtata

SEQ ID NO: 31015 - DNA, 20 bp, synthetic construct
  source 1..20: mol_type = other DNA
tctacatacaccatgtgtat

SEQ ID NO: 31016 - DNA, 20 bp, synthetic construct
  source 1..20: mol_type = other DNA
ttctacatacaccatgtgta

SEQ ID NO: 31017 - DNA, 20 bp, synthetic construct
  source 1..20: mol_type = other DNA
tttctacatacaccatgtgt

SEQ ID NO: 31018 - DNA, 20 bp, synthetic construct
  source 1..20: mol_type = other DNA
ttttctacatacaccatgtg

SEQ ID NO: 31019 - DNA, 20 bp, synthetic construct
  source 1..20: mol_type = other DNA
tttttctacatacaccatgt

SEQ ID NO: 31020 - DNA, 20 bp, synthetic construct
  source 1..20: mol_type = other DNA
ttttttctacatacaccatg

SEQ ID NO: 31021 - DNA, 20 bp, synthetic construct
  source 1..20: mol_type = other DNA
attttttctacatacaccat

SEQ ID NO: 31022 - DNA, 20 bp, synthetic construct
  source 1..20: mol_type = other DNA
aattttttctacatacacca

SEQ ID NO: 31023 - DNA, 20 bp, synthetic construct
  source 1..20: mol_type = other DNA
aaattttttctacatacacc

SEQ ID NO: 31024 - DNA, 20 bp, synthetic construct
  source 1..20: mol_type = other DNA
caaattttttctacatacac

SEQ ID NO: 31025 - DNA, 20 bp, synthetic construct
  source 1..20: mol_type = other DNA
ccaaattttttctacataca

SEQ ID NO: 31026 - DNA, 20 bp, synthetic construct
  source 1..20: mol_type = other DNA
accaaattttttctacatac

SEQ ID NO: 31027 - DNA, 20 bp, synthetic construct
  source 1..20: mol_type = other DNA
aaccaaattttttctacata

SEQ ID NO: 31028 - DNA, 20 bp, synthetic construct
  source 1..20: mol_type = other DNA
gaaccaaattttttctacat

SEQ ID NO: 31029 - DNA, 20 bp, synthetic construct
  source 1..20: mol_type = other DNA
tgaaccaaattttttctaca

SEQ ID NO: 31030 - DNA, 20 bp, synthetic construct
  source 1..20: mol_type = other DNA
gtgaaccaaattttttctac

SEQ ID NO: 31031 - DNA, 20 bp, synthetic construct
  source 1..20: mol_type = other DNA
tgtgaaccaaattttttcta

SEQ ID NO: 31032 - DNA, 20 bp, synthetic construct
  source 1..20: mol_type = other DNA
ctgtgaaccaaattttttct

SEQ ID NO: 31033 - DNA, 20 bp, synthetic construct
  source 1..20: mol_type = other DNA
actgtgaaccaaattttttc

SEQ ID NO: 31034 - DNA, 20 bp, synthetic construct
  source 1..20: mol_type = other DNA
cactgtgaaccaaatttttt

SEQ ID NO: 31035 - DNA, 20 bp, synthetic construct
  source 1..20: mol_type = other DNA
acactgtgaaccaaattttt

SEQ ID NO: 31036 - DNA, 20 bp, synthetic construct
  source 1..20: mol_type = other DNA
cacactgtgaaccaaatttt

SEQ ID NO: 31037 - DNA, 20 bp, synthetic construct
  source 1..20: mol_type = other DNA
tcacactgtgaaccaaattt

SEQ ID NO: 31038 - DNA, 20 bp, synthetic construct
  source 1..20: mol_type = other DNA
atcacactgtgaaccaaatt

SEQ ID NO: 31039 - DNA, 20 bp, synthetic construct
  source 1..20: mol_type = other DNA
tatcacactgtgaaccaaat

SEQ ID NO: 31040 - DNA, 20 bp, synthetic construct
  source 1..20: mol_type = other DNA
ctatcacactgtgaaccaaa

SEQ ID NO: 31041 - DNA, 20 bp, synthetic construct
  source 1..20: mol_type = other DNA
tctatcacactgtgaaccaa

SEQ ID NO: 31042 - DNA, 20 bp, synthetic construct
  source 1..20: mol_type = other DNA
ttctatcacactgtgaacca

SEQ ID NO: 31043 - DNA, 20 bp, synthetic construct
  source 1..20: mol_type = other DNA
cttctatcacactgtgaacc

SEQ ID NO: 31044 - DNA, 20 bp, synthetic construct
  source 1..20: mol_type = other DNA
tcttctatcacactgtgaac

SEQ ID NO: 31045 - DNA, 20 bp, synthetic construct
  source 1..20: mol_type = other DNA
ttcttctatcacactgtgaa

SEQ ID NO: 31046 - DNA, 20 bp, synthetic construct
  source 1..20: mol_type = other DNA
attcttctatcacactgtga

SEQ ID NO: 31047 - DNA, 20 bp, synthetic construct
  source 1..20: mol_type = other DNA
aattcttctatcacactgtg

SEQ ID NO: 31048 - DNA, 20 bp, synthetic construct
  source 1..20: mol_type = other DNA
caattcttctatcacactgt

SEQ ID NO: 31049 - DNA, 20 bp, synthetic construct
  source 1..20: mol_type = other DNA
ccaattcttctatcacactg

SEQ ID NO: 31050 - DNA, 20 bp, synthetic construct
  source 1..20: mol_type = other DNA
tccaattcttctatcacact

SEQ ID NO: 31051 - DNA, 20 bp, synthetic construct
  source 1..20: mol_type = other DNA
ctccaattcttctatcacac

SEQ ID NO: 31052 - DNA, 20 bp, synthetic construct
  source 1..20: mol_type = other DNA
cctccaattcttctatcaca

SEQ ID NO: 31053 - DNA, 20 bp, synthetic construct
  source 1..20: mol_type = other DNA
ccctccaattcttctatcac

SEQ ID NO: 31054 - DNA, 20 bp, synthetic construct
  source 1..20: mol_type = other DNA
cccctccaattcttctatca

SEQ ID NO: 31055 - DNA, 20 bp, synthetic construct
  source 1..20: mol_type = other DNA
ccccctccaattcttctatc

SEQ ID NO: 31056 - DNA, 20 bp, synthetic construct
  source 1..20: mol_type = other DNA
accccctccaattcttctat

SEQ ID NO: 31057 - DNA, 20 bp, synthetic construct
  source 1..20: mol_type = other DNA
gaccccctccaattcttcta

SEQ ID NO: 31058 - DNA, 20 bp, synthetic construct
  source 1..20: mol_type = other DNA
ggaccccctccaattcttct

SEQ ID NO: 31059 - DNA, 20 bp, synthetic construct
  source 1..20: mol_type = other DNA
aggaccccctccaattcttc

SEQ ID NO: 31060 - DNA, 20 bp, synthetic construct
  source 1..20: mol_type = other DNA
gaggaccccctccaattctt

SEQ ID NO: 31061 - DNA, 20 bp, synthetic construct
  source 1..20: mol_type = other DNA
tgaggaccccctccaattct

SEQ ID NO: 31062 - DNA, 20 bp, synthetic construct
  source 1..20: mol_type = other DNA
gtgaggaccccctccaattc

SEQ ID NO: 31063 - DNA, 20 bp, synthetic construct
  source 1..20: mol_type = other DNA
agtgaggaccccctccaatt

SEQ ID NO: 31064 - DNA, 20 bp, synthetic construct
  source 1..20: mol_type = other DNA
cagtgaggaccccctccaat

SEQ ID NO: 31065 - DNA, 20 bp, synthetic construct
  source 1..20: mol_type = other DNA
tcagtgaggaccccctccaa

SEQ ID NO: 31066 - DNA, 20 bp, synthetic construct
  source 1..20: mol_type = other DNA
ttcagtgaggaccccctcca

SEQ ID NO: 31067 - DNA, 20 bp, synthetic construct
  source 1..20: mol_type = other DNA
tttcagtgaggaccccctcc

SEQ ID NO: 31068 - DNA, 20 bp, synthetic construct
  source 1..20: mol_type = other DNA
ctttcagtgaggaccccctc

SEQ ID NO: 31069 - DNA, 20 bp, synthetic construct
  source 1..20: mol_type = other DNA
actttcagtgaggaccccct

SEQ ID NO: 31070 - DNA, 20 bp, synthetic construct
  source 1..20: mol_type = other DNA
tactttcagtgaggaccccc

SEQ ID NO: 31071 - DNA, 20 bp, synthetic construct
  source 1..20: mol_type = other DNA
ttactttcagtgaggacccc

SEQ ID NO: 31072 - DNA, 20 bp, synthetic construct
  source 1..20: mol_type = other DNA
cttactttcagtgaggaccc

SEQ ID NO: 31073 - DNA, 20 bp, synthetic construct
  source 1..20: mol_type = other DNA
ccttactttcagtgaggacc

SEQ ID NO: 31074 - DNA, 20 bp, synthetic construct
  source 1..20: mol_type = other DNA
tccttactttcagtgaggac

SEQ ID NO: 31075 - DNA, 20 bp, synthetic construct
  source 1..20: mol_type = other DNA
ttccttactttcagtgagga

SEQ ID NO: 31076 - DNA, 20 bp, synthetic construct
  source 1..20: mol_type = other DNA
tttccttactttcagtgagg

SEQ ID NO: 31077 - DNA, 20 bp, synthetic construct
  source 1..20: mol_type = other DNA
gtttccttactttcagtgag

SEQ ID NO: 31078 - DNA, 20 bp, synthetic construct
  source 1..20: mol_type = other DNA
tgtttccttactttcagtga

SEQ ID NO: 31079 - DNA, 20 bp, synthetic construct
  source 1..20: mol_type = other DNA
gtgtttccttactttcagtg

SEQ ID NO: 31080 - DNA, 20 bp, synthetic construct
  source 1..20: mol_type = other DNA
tgtgtttccttactttcagt

SEQ ID NO: 31081 - DNA, 20 bp, synthetic construct
  source 1..20: mol_type = other DNA
atgtgtttccttactttcag

SEQ ID NO: 31082 - DNA, 20 bp, synthetic construct
  source 1..20: mol_type = other DNA
aatgtgtttccttactttca

SEQ ID NO: 31083 - DNA, 20 bp, synthetic construct
  source 1..20: mol_type = other DNA
aaatgtgtttccttactttc

SEQ ID NO: 31084 - DNA, 20 bp, synthetic construct
  source 1..20: mol_type = other DNA
caaatgtgtttccttacttt

SEQ ID NO: 31085 - DNA, 20 bp, synthetic construct
  source 1..20: mol_type = other DNA
ccaaatgtgtttccttactt

SEQ ID NO: 31086 - DNA, 20 bp, synthetic construct
  source 1..20: mol_type = other DNA
tccaaatgtgtttccttact

SEQ ID NO: 31087 - DNA, 20 bp, synthetic construct
  source 1..20: mol_type = other DNA
ttccaaatgtgtttccttac

SEQ ID NO: 31088 - DNA, 20 bp, synthetic construct
  source 1..20: mol_type = other DNA
cttccaaatgtgtttcctta

SEQ ID NO: 31089 - DNA, 20 bp, synthetic construct
  source 1..20: mol_type = other DNA
tcttccaaatgtgtttcctt

SEQ ID NO: 31090 - DNA, 20 bp, synthetic construct
  source 1..20: mol_type = other DNA
ttcttccaaatgtgtttcct

SEQ ID NO: 31091 - DNA, 20 bp, synthetic construct
  source 1..20: mol_type = other DNA
attcttccaaatgtgtttcc

SEQ ID NO: 31092 - DNA, 20 bp, synthetic construct
  source 1..20: mol_type = other DNA
tattcttccaaatgtgtttc

SEQ ID NO: 31093 - DNA, 20 bp, synthetic construct
  source 1..20: mol_type = other DNA
atattcttccaaatgtgttt

SEQ ID NO: 31094 - DNA, 20 bp, synthetic construct
  source 1..20: mol_type = other DNA
catattcttccaaatgtgtt

SEQ ID NO: 31095 - DNA, 20 bp, synthetic construct
  source 1..20: mol_type = other DNA
acatattcttccaaatgtgt

SEQ ID NO: 31096 - DNA, 20 bp, synthetic construct
  source 1..20: mol_type = other DNA
aacatattcttccaaatgtg

SEQ ID NO: 31097 - DNA, 20 bp, synthetic construct
  source 1..20: mol_type = other DNA
aaacatattcttccaaatgt

SEQ ID NO: 31098 - DNA, 20 bp, synthetic construct
  source 1..20: mol_type = other DNA
gaaacatattcttccaaatg

SEQ ID NO: 31099 - DNA, 20 bp, synthetic construct
  source 1..20: mol_type = other DNA
tgaaacatattcttccaaat

SEQ ID NO: 31100 - DNA, 20 bp, synthetic construct
  source 1..20: mol_type = other DNA
ctgaaacatattcttccaaa

SEQ ID NO: 31101 - DNA, 20 bp, synthetic construct
  source 1..20: mol_type = other DNA
actgaaacatattcttccaa

SEQ ID NO: 31102 - DNA, 20 bp, synthetic construct
  source 1..20: mol_type = other DNA
aactgaaacatattcttcca

SEQ ID NO: 31103 - DNA, 20 bp, synthetic construct
  source 1..20: mol_type = other DNA
taactgaaacatattcttcc

SEQ ID NO: 31104 - DNA, 20 bp, synthetic construct
  source 1..20: mol_type = other DNA
ctaactgaaacatattcttc

SEQ ID NO: 31105 - DNA, 20 bp, synthetic construct
  source 1..20: mol_type = other DNA
tctaactgaaacatattctt

SEQ ID NO: 31106 - DNA, 20 bp, synthetic construct
  source 1..20: mol_type = other DNA
ttctaactgaaacatattct

SEQ ID NO: 31107 - DNA, 20 bp, synthetic construct
  source 1..20: mol_type = other DNA
tttctaactgaaacatattc

SEQ ID NO: 31108 - DNA, 20 bp, synthetic construct
  source 1..20: mol_type = other DNA
ttttctaactgaaacatatt

SEQ ID NO: 31109 - DNA, 20 bp, synthetic construct
  source 1..20: mol_type = other DNA
attttctaactgaaacatat

SEQ ID NO: 31110 - DNA, 20 bp, synthetic construct
  source 1..20: mol_type = other DNA
cattttctaactgaaacata

SEQ ID NO: 31111 - DNA, 20 bp, synthetic construct
  source 1..20: mol_type = other DNA
tcattttctaactgaaacat

SEQ ID NO: 31112 - DNA, 20 bp, synthetic construct
  source 1..20: mol_type = other DNA
ttcattttctaactgaaaca

SEQ ID NO: 31113 - DNA, 20 bp, synthetic construct
  source 1..20: mol_type = other DNA
tttcattttctaactgaaac

SEQ ID NO: 31114 - DNA, 20 bp, synthetic construct
  source 1..20: mol_type = other DNA
atttcattttctaactgaaa

SEQ ID NO: 31115 - DNA, 20 bp, synthetic construct
  source 1..20: mol_type = other DNA
catttcattttctaactgaa

SEQ ID NO: 31116 - DNA, 20 bp, synthetic construct
  source 1..20: mol_type = other DNA
tcatttcattttctaactga

SEQ ID NO: 31117 - DNA, 20 bp, synthetic construct
  source 1..20: mol_type = other DNA
ctcatttcattttctaactg

SEQ ID NO: 31118 - DNA, 20 bp, synthetic construct
  source 1..20: mol_type = other DNA
gctcatttcattttctaact

SEQ ID NO: 31119 - DNA, 20 bp, synthetic construct
  source 1..20: mol_type = other DNA
agctcatttcattttctaac

SEQ ID NO: 31120 - DNA, 20 bp, synthetic construct
  source 1..20: mol_type = other DNA
aagctcatttcattttctaa

SEQ ID NO: 31121 - DNA, 20 bp, synthetic construct
  source 1..20: mol_type = other DNA
taagctcatttcattttcta

SEQ ID NO: 31122 - DNA, 20 bp, synthetic construct
  source 1..20: mol_type = other DNA
ttaagctcatttcattttct

SEQ ID NO: 31123 - DNA, 20 bp, synthetic construct
  source 1..20: mol_type = other DNA
tttaagctcatttcattttc

SEQ ID NO: 31124 - DNA, 20 bp, synthetic construct
  source 1..20: mol_type = other DNA
ctttaagctcatttcatttt

SEQ ID NO: 31125 - DNA, 20 bp, synthetic construct
  source 1..20: mol_type = other DNA
actttaagctcatttcattt

SEQ ID NO: 31126 - DNA, 20 bp, synthetic construct
  source 1..20: mol_type = other DNA
tactttaagctcatttcatt

SEQ ID NO: 31127 - DNA, 20 bp, synthetic construct
  source 1..20: mol_type = other DNA
ttactttaagctcatttcat

SEQ ID NO: 31128 - DNA, 20 bp, synthetic construct
  source 1..20: mol_type = other DNA
tttactttaagctcatttca

SEQ ID NO: 31129 - DNA, 20 bp, synthetic construct
  source 1..20: mol_type = other DNA
gtttactttaagctcatttc

SEQ ID NO: 31130 - DNA, 20 bp, synthetic construct
  source 1..20: mol_type = other DNA
cgtttactttaagctcattt

SEQ ID NO: 31131 - DNA, 20 bp, synthetic construct
  source 1..20: mol_type = other DNA
gcgtttactttaagctcatt

SEQ ID NO: 31132 - DNA, 20 bp, synthetic construct
  source 1..20: mol_type = other DNA
agcgtttactttaagctcat

SEQ ID NO: 31133 - DNA, 20 bp, synthetic construct
  source 1..20: mol_type = other DNA
tagcgtttactttaagctca

SEQ ID NO: 31134 - DNA, 20 bp, synthetic construct
  source 1..20: mol_type = other DNA
ttagcgtttactttaagctc

SEQ ID NO: 31135 - DNA, 20 bp, synthetic construct
  source 1..20: mol_type = other DNA
attagcgtttactttaagct

SEQ ID NO: 31136 - DNA, 20 bp, synthetic construct
  source 1..20: mol_type = other DNA
tattagcgtttactttaagc

SEQ ID NO: 31137 - DNA, 20 bp, synthetic construct
  source 1..20: mol_type = other DNA
ttattagcgtttactttaag

SEQ ID NO: 31138 - DNA, 20 bp, synthetic construct
  source 1..20: mol_type = other DNA
cttattagcgtttactttaa

SEQ ID NO: 31139 - DNA, 20 bp, synthetic construct
  source 1..20: mol_type = other DNA
ccttattagcgtttacttta

SEQ ID NO: 31140 - DNA, 20 bp, synthetic construct
  source 1..20: mol_type = other DNA
accttattagcgtttacttt

SEQ ID NO: 31141 - DNA, 20 bp, synthetic construct
  source 1..20: mol_type = other DNA
aaccttattagcgtttactt

SEQ ID NO: 31142 - DNA, 20 bp, synthetic construct
  source 1..20: mol_type = other DNA
aaaccttattagcgtttact

SEQ ID NO: 31143 - DNA, 20 bp, synthetic construct
  source 1..20: mol_type = other DNA
aaaaccttattagcgtttac

SEQ ID NO: 31144 - DNA, 20 bp, synthetic construct
  source 1..20: mol_type = other DNA
aaaaaccttattagcgttta

SEQ ID NO: 31145 - DNA, 20 bp, synthetic construct
  source 1..20: mol_type = other DNA
taaaaaccttattagcgttt

SEQ ID NO: 31146 - DNA, 20 bp, synthetic construct
  source 1..20: mol_type = other DNA
ttaaaaaccttattagcgtt

SEQ ID NO: 31147 - DNA, 20 bp, synthetic construct
  source 1..20: mol_type = other DNA
tttaaaaaccttattagcgt

SEQ ID NO: 31148 - DNA, 20 bp, synthetic construct
  source 1..20: mol_type = other DNA
ttttaaaaaccttattagcg

SEQ ID NO: 31149 - DNA, 20 bp, synthetic construct
  source 1..20: mol_type = other DNA
attttaaaaaccttattagc

SEQ ID NO: 31150 - DNA, 20 bp, synthetic construct
  source 1..20: mol_type = other DNA
cattttaaaaaccttattag

SEQ ID NO: 31151 - DNA, 20 bp, synthetic construct
  source 1..20: mol_type = other DNA
acattttaaaaaccttatta

SEQ ID NO: 31152 - DNA, 20 bp, synthetic construct
  source 1..20: mol_type = other DNA
tacattttaaaaaccttatt

SEQ ID NO: 31153 - DNA, 20 bp, synthetic construct
  source 1..20: mol_type = other DNA
ttacattttaaaaaccttat

SEQ ID NO: 31154 - DNA, 20 bp, synthetic construct
  source 1..20: mol_type = other DNA
tttacattttaaaaacctta

SEQ ID NO: 31155 - DNA, 20 bp, synthetic construct
  source 1..20: mol_type = other DNA
ttttacattttaaaaacctt

SEQ ID NO: 31156 - DNA, 20 bp, synthetic construct
  source 1..20: mol_type = other DNA
attttacattttaaaaacct

SEQ ID NO: 31157 - DNA, 20 bp, synthetic construct
  source 1..20: mol_type = other DNA
aattttacattttaaaaacc

SEQ ID NO: 31158 - DNA, 20 bp, synthetic construct
  source 1..20: mol_type = other DNA
aaattttacattttaaaaac

SEQ ID NO: 31159 - DNA, 20 bp, synthetic construct
  source 1..20: mol_type = other DNA
gaaattttacattttaaaaa

SEQ ID NO: 31160 - DNA, 20 bp, synthetic construct
  source 1..20: mol_type = other DNA
tgaaattttacattttaaaa

SEQ ID NO: 31161 - DNA, 20 bp, synthetic construct
  source 1..20: mol_type = other DNA
ttgaaattttacattttaaa

SEQ ID NO: 31162 - DNA, 20 bp, synthetic construct
  source 1..20: mol_type = other DNA
gttgaaattttacattttaa

SEQ ID NO: 31163 - DNA, 20 bp, synthetic construct
  source 1..20: mol_type = other DNA
cgttgaaattttacatttta

SEQ ID NO: 31164 - DNA, 20 bp, synthetic construct
  source 1..20: mol_type = other DNA
acgttgaaattttacatttt

SEQ ID NO: 31165 - DNA, 20 bp, synthetic construct
  source 1..20: mol_type = other DNA
tacgttgaaattttacattt

SEQ ID NO: 31166 - DNA, 20 bp, synthetic construct
  source 1..20: mol_type = other DNA
atacgttgaaattttacatt

SEQ ID NO: 31167 - DNA, 20 bp, synthetic construct
  source 1..20: mol_type = other DNA
aatacgttgaaattttacat

SEQ ID NO: 31168 - DNA, 20 bp, synthetic construct
  source 1..20: mol_type = other DNA
aaatacgttgaaattttaca

SEQ ID NO: 31169 - DNA, 20 bp, synthetic construct
  source 1..20: mol_type = other DNA
taaatacgttgaaattttac

SEQ ID NO: 31170 - DNA, 20 bp, synthetic construct
  source 1..20: mol_type = other DNA
ctaaatacgttgaaatttta

SEQ ID NO: 31171 - DNA, 20 bp, synthetic construct
  source 1..20: mol_type = other DNA
tctaaatacgttgaaatttt

SEQ ID NO: 31172 - DNA, 20 bp, synthetic construct
  source 1..20: mol_type = other DNA
ttctaaatacgttgaaattt

SEQ ID NO: 31173 - DNA, 20 bp, synthetic construct
  source 1..20: mol_type = other DNA
tttctaaatacgttgaaatt

SEQ ID NO: 31174 - DNA, 20 bp, synthetic construct
  source 1..20: mol_type = other DNA
ctttctaaatacgttgaaat

SEQ ID NO: 31175 - DNA, 20 bp, synthetic construct
  source 1..20: mol_type = other DNA
tctttctaaatacgttgaaa

SEQ ID NO: 31176 - DNA, 20 bp, synthetic construct
  source 1..20: mol_type = other DNA
ctctttctaaatacgttgaa

SEQ ID NO: 31177 - DNA, 20 bp, synthetic construct
  source 1..20: mol_type = other DNA
tctctttctaaatacgttga

SEQ ID NO: 31178 - DNA, 20 bp, synthetic construct
  source 1..20: mol_type = other DNA
ttctctttctaaatacgttg

SEQ ID NO: 31179 - DNA, 20 bp, synthetic construct
  source 1..20: mol_type = other DNA
gttctctttctaaatacgtt

SEQ ID NO: 31180 - DNA, 20 bp, synthetic construct
  source 1..20: mol_type = other DNA
tgttctctttctaaatacgt

SEQ ID NO: 31181 - DNA, 20 bp, synthetic construct
  source 1..20: mol_type = other DNA
ctgttctctttctaaatacg

SEQ ID NO: 31182 - DNA, 20 bp, synthetic construct
  source 1..20: mol_type = other DNA
gctgttctctttctaaatac

SEQ ID NO: 31183 - DNA, 20 bp, synthetic construct
  source 1..20: mol_type = other DNA
agctgttctctttctaaata

SEQ ID NO: 31184 - DNA, 20 bp, synthetic construct
  source 1..20: mol_type = other DNA
cagctgttctctttctaaat

SEQ ID NO: 31185 - DNA, 20 bp, synthetic construct
  source 1..20: mol_type = other DNA
ccagctgttctctttctaaa

SEQ ID NO: 31186 - DNA, 20 bp, synthetic construct
  source 1..20: mol_type = other DNA
tccagctgttctctttctaa

SEQ ID NO: 31187 - DNA, 20 bp, synthetic construct
  source 1..20: mol_type = other DNA
atccagctgttctctttcta

SEQ ID NO: 31188 - DNA, 20 bp, synthetic construct
  source 1..20: mol_type = other DNA
catccagctgttctctttct

SEQ ID NO: 31189 - DNA, 20 bp, synthetic construct
  source 1..20: mol_type = other DNA
tcatccagctgttctctttc

SEQ ID NO: 31190 - DNA, 20 bp, synthetic construct
  source 1..20: mol_type = other DNA
ttcatccagctgttctcttt

SEQ ID NO: 31191 - DNA, 20 bp, synthetic construct
  source 1..20: mol_type = other DNA
attcatccagctgttctctt

SEQ ID NO: 31192 - DNA, 20 bp, synthetic construct
  source 1..20: mol_type = other DNA
gattcatccagctgttctct

SEQ ID NO: 31193 - DNA, 20 bp, synthetic construct
  source 1..20: mol_type = other DNA
agattcatccagctgttctc

SEQ ID NO: 31194 - DNA, 20 bp, synthetic construct
  source 1..20: mol_type = other DNA
aagattcatccagctgttct

SEQ ID NO: 31195 - DNA, 20 bp, synthetic construct
  source 1..20: mol_type = other DNA
taagattcatccagctgttc

SEQ ID NO: 31196 - DNA, 20 bp, synthetic construct
  source 1..20: mol_type = other DNA
ataagattcatccagctgtt

SEQ ID NO: 31197 - DNA, 20 bp, synthetic construct
  source 1..20: mol_type = other DNA
cataagattcatccagctgt

SEQ ID NO: 31198 - DNA, 20 bp, synthetic construct
  source 1..20: mol_type = other DNA
acataagattcatccagctg

SEQ ID NO: 31199 - DNA, 20 bp, synthetic construct
  source 1..20: mol_type = other DNA
tacataagattcatccagct

SEQ ID NO: 31200 - DNA, 20 bp, synthetic construct
  source 1..20: mol_type = other DNA
gtacataagattcatccagc

SEQ ID NO: 31201 - DNA, 20 bp, synthetic construct
  source 1..20: mol_type = other DNA
ggtacataagattcatccag

SEQ ID NO: 31202 - DNA, 20 bp, synthetic construct
  source 1..20: mol_type = other DNA
aggtacataagattcatcca

SEQ ID NO: 31203 - DNA, 20 bp, synthetic construct
  source 1..20: mol_type = other DNA
caggtacataagattcatcc

SEQ ID NO: 31204 - DNA, 20 bp, synthetic construct
  source 1..20: mol_type = other DNA
acaggtacataagattcatc

SEQ ID NO: 31205 - DNA, 20 bp, synthetic construct
  source 1..20: mol_type = other DNA
gacaggtacataagattcat

SEQ ID NO: 31206 - DNA, 20 bp, synthetic construct
  source 1..20: mol_type = other DNA
tgacaggtacataagattca

SEQ ID NO: 31207 - DNA, 20 bp, synthetic construct
  source 1..20: mol_type = other DNA
gtgacaggtacataagattc

SEQ ID NO: 31208 - DNA, 20 bp, synthetic construct
  source 1..20: mol_type = other DNA
agtgacaggtacataagatt

SEQ ID NO: 31209 - DNA, 20 bp, synthetic construct
  source 1..20: mol_type = other DNA
gagtgacaggtacataagat

SEQ ID NO: 31210 - DNA, 20 bp, synthetic construct
  source 1..20: mol_type = other DNA
tgagtgacaggtacataaga

SEQ ID NO: 31211 - DNA, 20 bp, synthetic construct
  source 1..20: mol_type = other DNA
ctgagtgacaggtacataag

SEQ ID NO: 31212 - DNA, 20 bp, synthetic construct
  source 1..20: mol_type = other DNA
gctgagtgacaggtacataa

SEQ ID NO: 31213 - DNA, 20 bp, synthetic construct
  source 1..20: mol_type = other DNA
agctgagtgacaggtacata

SEQ ID NO: 31214 - DNA, 20 bp, synthetic construct
  source 1..20: mol_type = other DNA
aagctgagtgacaggtacat

SEQ ID NO: 31215 - DNA, 20 bp, synthetic construct
  source 1..20: mol_type = other DNA
aaagctgagtgacaggtaca

SEQ ID NO: 31216 - DNA, 20 bp, synthetic construct
  source 1..20: mol_type = other DNA
taaagctgagtgacaggtac

SEQ ID NO: 31217 - DNA, 20 bp, synthetic construct
  source 1..20: mol_type = other DNA
ctaaagctgagtgacaggta

SEQ ID NO: 31218 - DNA, 20 bp, synthetic construct
  source 1..20: mol_type = other DNA
gctaaagctgagtgacaggt

SEQ ID NO: 31219 - DNA, 20 bp, synthetic construct
  source 1..20: mol_type = other DNA
tgctaaagctgagtgacagg

SEQ ID NO: 31220 - DNA, 20 bp, synthetic construct
  source 1..20: mol_type = other DNA
ctgctaaagctgagtgacag

SEQ ID NO: 31221 - DNA, 20 bp, synthetic construct
  source 1..20: mol_type = other DNA
actgctaaagctgagtgaca

SEQ ID NO: 31222 - DNA, 20 bp, synthetic construct
  source 1..20: mol_type = other DNA
aactgctaaagctgagtgac

SEQ ID NO: 31223 - DNA, 20 bp, synthetic construct
  source 1..20: mol_type = other DNA
taactgctaaagctgagtga

SEQ ID NO: 31224 - DNA, 20 bp, synthetic construct
  source 1..20: mol_type = other DNA
ataactgctaaagctgagtg

SEQ ID NO: 31225 - DNA, 20 bp, synthetic construct
  source 1..20: mol_type = other DNA
gataactgctaaagctgagt

SEQ ID NO: 31226 - DNA, 20 bp, synthetic construct
  source 1..20: mol_type = other DNA
tgataactgctaaagctgag

SEQ ID NO: 31227 - DNA, 20 bp, synthetic construct
  source 1..20: mol_type = other DNA
ctgataactgctaaagctga

SEQ ID NO: 31228 - DNA, 20 bp, synthetic construct
  source 1..20: mol_type = other DNA
actgataactgctaaagctg

SEQ ID NO: 31229 - DNA, 20 bp, synthetic construct
  source 1..20: mol_type = other DNA
tactgataactgctaaagct

SEQ ID NO: 31230 - DNA, 20 bp, synthetic construct
  source 1..20: mol_type = other DNA
ttactgataactgctaaagc

SEQ ID NO: 31231 - DNA, 20 bp, synthetic construct
  source 1..20: mol_type = other DNA
tttactgataactgctaaag

SEQ ID NO: 31232 - DNA, 20 bp, synthetic construct
  source 1..20: mol_type = other DNA
atttactgataactgctaaa

SEQ ID NO: 31233 - DNA, 20 bp, synthetic construct
  source 1..20: mol_type = other DNA
catttactgataactgctaa

SEQ ID NO: 31234 - DNA, 20 bp, synthetic construct
  source 1..20: mol_type = other DNA
ccatttactgataactgcta

SEQ ID NO: 31235 - DNA, 20 bp, synthetic construct
  source 1..20: mol_type = other DNA
gccatttactgataactgct

SEQ ID NO: 31236 - DNA, 20 bp, synthetic construct
  source 1..20: mol_type = other DNA
ggccatttactgataactgc

SEQ ID NO: 31237 - DNA, 20 bp, synthetic construct
  source 1..20: mol_type = other DNA
tggccatttactgataactg

SEQ ID NO: 31238 - DNA, 20 bp, synthetic construct
  source 1..20: mol_type = other DNA
ttggccatttactgataact

SEQ ID NO: 31239 - DNA, 20 bp, synthetic construct
  source 1..20: mol_type = other DNA
gttggccatttactgataac

SEQ ID NO: 31240 - DNA, 20 bp, synthetic construct
  source 1..20: mol_type = other DNA
cgttggccatttactgataa

SEQ ID NO: 31241 - DNA, 20 bp, synthetic construct
  source 1..20: mol_type = other DNA
acgttggccatttactgata

SEQ ID NO: 31242 - DNA, 20 bp, synthetic construct
  source 1..20: mol_type = other DNA
aacgttggccatttactgat

SEQ ID NO: 31243 - DNA, 20 bp, synthetic construct
  source 1..20: mol_type = other DNA
caacgttggccatttactga

SEQ ID NO: 31244 - DNA, 20 bp, synthetic construct
  source 1..20: mol_type = other DNA
acaacgttggccatttactg

SEQ ID NO: 31245 - DNA, 20 bp, synthetic construct
  source 1..20: mol_type = other DNA
aacaacgttggccatttact

SEQ ID NO: 31246 - DNA, 20 bp, synthetic construct
  source 1..20: mol_type = other DNA
aaacaacgttggccatttac

SEQ ID NO: 31247 - DNA, 20 bp, synthetic construct
  source 1..20: mol_type = other DNA
gaaacaacgttggccattta

SEQ ID NO: 31248 - DNA, 20 bp, synthetic construct
  source 1..20: mol_type = other DNA
tgaaacaacgttggccattt

SEQ ID NO: 31249 - DNA, 20 bp, synthetic construct
  source 1..20: mol_type = other DNA
ctgaaacaacgttggccatt

SEQ ID NO: 31250 - DNA, 20 bp, synthetic construct
  source 1..20: mol_type = other DNA
gctgaaacaacgttggccat

SEQ ID NO: 31251 - DNA, 20 bp, synthetic construct
  source 1..20: mol_type = other DNA
agctgaaacaacgttggcca

SEQ ID NO: 31252 - DNA, 20 bp, synthetic construct
  source 1..20: mol_type = other DNA
tagctgaaacaacgttggcc

SEQ ID NO: 31253 - DNA, 20 bp, synthetic construct
  source 1..20: mol_type = other DNA
atagctgaaacaacgttggc

SEQ ID NO: 31254 - DNA, 20 bp, synthetic construct
  source 1..20: mol_type = other DNA
tatagctgaaacaacgttgg

SEQ ID NO: 31255 - DNA, 20 bp, synthetic construct
  source 1..20: mol_type = other DNA
gtatagctgaaacaacgttg

SEQ ID NO: 31256 - DNA, 20 bp, synthetic construct
  source 1..20: mol_type = other DNA
agtatagctgaaacaacgtt

SEQ ID NO: 31257 - DNA, 20 bp, synthetic construct
  source 1..20: mol_type = other DNA
gagtatagctgaaacaacgt

SEQ ID NO: 31258 - DNA, 20 bp, synthetic construct
  source 1..20: mol_type = other DNA
ggagtatagctgaaacaacg

SEQ ID NO: 31259 - DNA, 20 bp, synthetic construct
  source 1..20: mol_type = other DNA
gggagtatagctgaaacaac

SEQ ID NO: 31260 - DNA, 20 bp, synthetic construct
  source 1..20: mol_type = other DNA
ggggagtatagctgaaacaa

SEQ ID NO: 31261 - DNA, 20 bp, synthetic construct
  source 1..20: mol_type = other DNA
aggggagtatagctgaaaca

SEQ ID NO: 31262 - DNA, 20 bp, synthetic construct
  source 1..20: mol_type = other DNA
gaggggagtatagctgaaac

SEQ ID NO: 31263 - DNA, 20 bp, synthetic construct
  source 1..20: mol_type = other DNA
agaggggagtatagctgaaa

SEQ ID NO: 31264 - DNA, 20 bp, synthetic construct
  source 1..20: mol_type = other DNA
gagaggggagtatagctgaa

SEQ ID NO: 31265 - DNA, 20 bp, synthetic construct
  source 1..20: mol_type = other DNA
ggagaggggagtatagctga

SEQ ID NO: 31266 - DNA, 20 bp, synthetic construct
  source 1..20: mol_type = other DNA
aggagaggggagtatagctg

SEQ ID NO: 31267 - DNA, 20 bp, synthetic construct
  source 1..20: mol_type = other DNA
gaggagaggggagtatagct

SEQ ID NO: 31268 - DNA, 20 bp, synthetic construct
  source 1..20: mol_type = other DNA
ggaggagaggggagtatagc

SEQ ID NO: 31269 - DNA, 20 bp, synthetic construct
  source 1..20: mol_type = other DNA
tggaggagaggggagtatag

SEQ ID NO: 31270 - DNA, 20 bp, synthetic construct
  source 1..20: mol_type = other DNA
gtggaggagaggggagtata

SEQ ID NO: 31271 - DNA, 20 bp, synthetic construct
  source 1..20: mol_type = other DNA
agtggaggagaggggagtat

SEQ ID NO: 31272 - DNA, 20 bp, synthetic construct
  source 1..20: mol_type = other DNA
cagtggaggagaggggagta

SEQ ID NO: 31273 - DNA, 20 bp, synthetic construct
  source 1..20: mol_type = other DNA
tcagtggaggagaggggagt

SEQ ID NO: 31274 - DNA, 20 bp, synthetic construct
  source 1..20: mol_type = other DNA
atcagtggaggagaggggag

SEQ ID NO: 31275 - DNA, 20 bp, synthetic construct
  source 1..20: mol_type = other DNA
tatcagtggaggagagggga

SEQ ID NO: 31276 - DNA, 20 bp, synthetic construct
  source 1..20: mol_type = other DNA
ctatcagtggaggagagggg

SEQ ID NO: 31277 - DNA, 20 bp, synthetic construct
  source 1..20: mol_type = other DNA
actatcagtggaggagaggg

SEQ ID NO: 31278 - DNA, 20 bp, synthetic construct
  source 1..20: mol_type = other DNA
gactatcagtggaggagagg

SEQ ID NO: 31279 - DNA, 20 bp, synthetic construct
  source 1..20: mol_type = other DNA
agactatcagtggaggagag

SEQ ID NO: 31280 - DNA, 20 bp, synthetic construct
  source 1..20: mol_type = other DNA
aagactatcagtggaggaga

SEQ ID NO: 31281 - DNA, 20 bp, synthetic construct
  source 1..20: mol_type = other DNA
aaagactatcagtggaggag

SEQ ID NO: 31282 - DNA, 20 bp, synthetic construct
  source 1..20: mol_type = other DNA
aaaagactatcagtggagga

SEQ ID NO: 31283 - DNA, 20 bp, synthetic construct
  source 1..20: mol_type = other DNA
caaaagactatcagtggagg

SEQ ID NO: 31284 - DNA, 20 bp, synthetic construct
  source 1..20: mol_type = other DNA
tcaaaagactatcagtggag

SEQ ID NO: 31285 - DNA, 20 bp, synthetic construct
  source 1..20: mol_type = other DNA
ttcaaaagactatcagtgga

SEQ ID NO: 31286 - DNA, 20 bp, synthetic construct
  source 1..20: mol_type = other DNA
cttcaaaagactatcagtgg

SEQ ID NO: 31287 - DNA, 20 bp, synthetic construct
  source 1..20: mol_type = other DNA
ccttcaaaagactatcagtg

SEQ ID NO: 31288 - DNA, 20 bp, synthetic construct
  source 1..20: mol_type = other DNA
cccttcaaaagactatcagt

SEQ ID NO: 31289 - DNA, 20 bp, synthetic construct
  source 1..20: mol_type = other DNA
ccccttcaaaagactatcag

SEQ ID NO: 31290 - DNA, 20 bp, synthetic construct
  source 1..20: mol_type = other DNA
tccccttcaaaagactatca

SEQ ID NO: 31291 - DNA, 20 bp, synthetic construct
  source 1..20: mol_type = other DNA
ttccccttcaaaagactatc

SEQ ID NO: 31292 - DNA, 20 bp, synthetic construct
  source 1..20: mol_type = other DNA
attccccttcaaaagactat

SEQ ID NO: 31293 - DNA, 20 bp, synthetic construct
  source 1..20: mol_type = other DNA
tattccccttcaaaagacta

SEQ ID NO: 31294 - DNA, 20 bp, synthetic construct
  source 1..20: mol_type = other DNA
gtattccccttcaaaagact

SEQ ID NO: 31295 - DNA, 20 bp, synthetic construct
  source 1..20: mol_type = other DNA
tgtattccccttcaaaagac

SEQ ID NO: 31296 - DNA, 20 bp, synthetic construct
  source 1..20: mol_type = other DNA
ttgtattccccttcaaaaga

SEQ ID NO: 31297 - DNA, 20 bp, synthetic construct
  source 1..20: mol_type = other DNA
attgtattccccttcaaaag

SEQ ID NO: 31298 - DNA, 20 bp, synthetic construct
  source 1..20: mol_type = other DNA
aattgtattccccttcaaaa

SEQ ID NO: 31299 - DNA, 20 bp, synthetic construct
  source 1..20: mol_type = other DNA
caattgtattccccttcaaa

SEQ ID NO: 31300 - DNA, 20 bp, synthetic construct
  source 1..20: mol_type = other DNA
acaattgtattccccttcaa

SEQ ID NO: 31301 - DNA, 20 bp, synthetic construct
  source 1..20: mol_type = other DNA
aacaattgtattccccttca

SEQ ID NO: 31302 - DNA, 20 bp, synthetic construct
  source 1..20: mol_type = other DNA
aaacaattgtattccccttc

SEQ ID NO: 31303 - DNA, 20 bp, synthetic construct
  source 1..20: mol_type = other DNA
aaaacaattgtattcccctt

SEQ ID NO: 31304 - DNA, 20 bp, synthetic construct
  source 1..20: mol_type = other DNA
caaaacaattgtattcccct

SEQ ID NO: 31305 - DNA, 20 bp, synthetic construct
  source 1..20: mol_type = other DNA
acaaaacaattgtattcccc

SEQ ID NO: 31306 - DNA, 20 bp, synthetic construct
  source 1..20: mol_type = other DNA
cacaaaacaattgtattccc

SEQ ID NO: 31307 - DNA, 20 bp, synthetic construct
  source 1..20: mol_type = other DNA
ccacaaaacaattgtattcc

SEQ ID NO: 31308 - DNA, 20 bp, synthetic construct
  source 1..20: mol_type = other DNA
gccacaaaacaattgtattc

SEQ ID NO: 31309 - DNA, 20 bp, synthetic construct
  source 1..20: mol_type = other DNA
ggccacaaaacaattgtatt

SEQ ID NO: 31310 - DNA, 20 bp, synthetic construct
  source 1..20: mol_type = other DNA
aggccacaaaacaattgtat

SEQ ID NO: 31311 - DNA, 20 bp, synthetic construct
  source 1..20: mol_type = other DNA
gaggccacaaaacaattgta

SEQ ID NO: 31312 - DNA, 20 bp, synthetic construct
  source 1..20: mol_type = other DNA
ggaggccacaaaacaattgt

SEQ ID NO: 31313 - DNA, 20 bp, synthetic construct
  source 1..20: mol_type = other DNA
tggaggccacaaaacaattg

SEQ ID NO: 31314 - DNA, 20 bp, synthetic construct
  source 1..20: mol_type = other DNA
ctggaggccacaaaacaatt

SEQ ID NO: 31315 - DNA, 20 bp, synthetic construct
  source 1..20: mol_type = other DNA
tctggaggccacaaaacaat

SEQ ID NO: 31316 - DNA, 20 bp, synthetic construct
  source 1..20: mol_type = other DNA
ttctggaggccacaaaacaa

SEQ ID NO: 31317 - DNA, 20 bp, synthetic construct
  source 1..20: mol_type = other DNA
tttctggaggccacaaaaca

SEQ ID NO: 31318 - DNA, 20 bp, synthetic construct
  source 1..20: mol_type = other DNA
ctttctggaggccacaaaac

SEQ ID NO: 31319 - DNA, 20 bp, synthetic construct
  source 1..20: mol_type = other DNA
cctttctggaggccacaaaa

SEQ ID NO: 31320 - DNA, 20 bp, synthetic construct
  source 1..20: mol_type = other DNA
ccctttctggaggccacaaa

SEQ ID NO: 31321 - DNA, 20 bp, synthetic construct
  source 1..20: mol_type = other DNA
tccctttctggaggccacaa

SEQ ID NO: 31322 - DNA, 20 bp, synthetic construct
  source 1..20: mol_type = other DNA
atccctttctggaggccaca

SEQ ID NO: 31323 - DNA, 20 bp, synthetic construct
  source 1..20: mol_type = other DNA
tatccctttctggaggccac

SEQ ID NO: 31324 - DNA, 20 bp, synthetic construct
  source 1..20: mol_type = other DNA
ttatccctttctggaggcca

SEQ ID NO: 31325 - DNA, 20 bp, synthetic construct
  source 1..20: mol_type = other DNA
cttatccctttctggaggcc

SEQ ID NO: 31326 - DNA, 20 bp, synthetic construct
  source 1..20: mol_type = other DNA
acttatccctttctggaggc

SEQ ID NO: 31327 - DNA, 20 bp, synthetic construct
  source 1..20: mol_type = other DNA
aacttatccctttctggagg

SEQ ID NO: 31328 - DNA, 20 bp, synthetic construct
  source 1..20: mol_type = other DNA
aaacttatccctttctggag

SEQ ID NO: 31329 - DNA, 20 bp, synthetic construct
  source 1..20: mol_type = other DNA
taaacttatccctttctgga

SEQ ID NO: 31330 - DNA, 20 bp, synthetic construct
  source 1..20: mol_type = other DNA
ataaacttatccctttctgg

SEQ ID NO: 31331 - DNA, 20 bp, synthetic construct
  source 1..20: mol_type = other DNA
cataaacttatccctttctg

SEQ ID NO: 31332 - DNA, 20 bp, synthetic construct
  source 1..20: mol_type = other DNA
tcataaacttatccctttct

SEQ ID NO: 31333 - DNA, 20 bp, synthetic construct
  source 1..20: mol_type = other DNA
ctcataaacttatccctttc

SEQ ID NO: 31334 - DNA, 20 bp, synthetic construct
  source 1..20: mol_type = other DNA
gctcataaacttatcccttt

SEQ ID NO: 31335 - DNA, 20 bp, synthetic construct
  source 1..20: mol_type = other DNA
tgctcataaacttatccctt

SEQ ID NO: 31336 - DNA, 20 bp, synthetic construct
  source 1..20: mol_type = other DNA
ttgctcataaacttatccct

SEQ ID NO: 31337 - DNA, 20 bp, synthetic construct
  source 1..20: mol_type = other DNA
gttgctcataaacttatccc

SEQ ID NO: 31338 - DNA, 20 bp, synthetic construct
  source 1..20: mol_type = other DNA
cgttgctcataaacttatcc

SEQ ID NO: 31339 - DNA, 20 bp, synthetic construct
  source 1..20: mol_type = other DNA
ccgttgctcataaacttatc

SEQ ID NO: 31340 - DNA, 20 bp, synthetic construct
  source 1..20: mol_type = other DNA
cccgttgctcataaacttat

SEQ ID NO: 31341 - DNA, 20 bp, synthetic construct
  source 1..20: mol_type = other DNA
acccgttgctcataaactta

SEQ ID NO: 31342 - DNA, 20 bp, synthetic construct
  source 1..20: mol_type = other DNA
tacccgttgctcataaactt

SEQ ID NO: 31343 - DNA, 20 bp, synthetic construct
  source 1..20: mol_type = other DNA
ctacccgttgctcataaact

SEQ ID NO: 31344 - DNA, 20 bp, synthetic construct
  source 1..20: mol_type = other DNA
tctacccgttgctcataaac

SEQ ID NO: 31345 - DNA, 20 bp, synthetic construct
  source 1..20: mol_type = other DNA
atctacccgttgctcataaa

SEQ ID NO: 31346 - DNA, 20 bp, synthetic construct
  source 1..20: mol_type = other DNA
gatctacccgttgctcataa

SEQ ID NO: 31347 - DNA, 20 bp, synthetic construct
  source 1..20: mol_type = other DNA
cgatctacccgttgctcata

SEQ ID NO: 31348 - DNA, 20 bp, synthetic construct
  source 1..20: mol_type = other DNA
acgatctacccgttgctcat

SEQ ID NO: 31349 - DNA, 20 bp, synthetic construct
  source 1..20: mol_type = other DNA
aacgatctacccgttgctca

SEQ ID NO: 31350 - DNA, 20 bp, synthetic construct
  source 1..20: mol_type = other DNA
caacgatctacccgttgctc

SEQ ID NO: 31351 - DNA, 20 bp, synthetic construct
  source 1..20: mol_type = other DNA
ccaacgatctacccgttgct

SEQ ID NO: 31352 - DNA, 20 bp, synthetic construct
  source 1..20: mol_type = other DNA
cccaacgatctacccgttgc

SEQ ID NO: 31353 - DNA, 20 bp, synthetic construct
  source 1..20: mol_type = other DNA
tcccaacgatctacccgttg

SEQ ID NO: 31354 - DNA, 20 bp, synthetic construct
  source 1..20: mol_type = other DNA
ctcccaacgatctacccgtt

SEQ ID NO: 31355 - DNA, 20 bp, synthetic construct
  source 1..20: mol_type = other DNA
tctcccaacgatctacccgt

SEQ ID NO: 31356 - DNA, 20 bp, synthetic construct
  source 1..20: mol_type = other DNA
ctctcccaacgatctacccg

SEQ ID NO: 31357 - DNA, 20 bp, synthetic construct
  source 1..20: mol_type = other DNA
tctctcccaacgatctaccc

SEQ ID NO: 31358 - DNA, 20 bp, synthetic construct
  source 1..20: mol_type = other DNA
gtctctcccaacgatctacc

SEQ ID NO: 31359 - DNA, 20 bp, synthetic construct
  source 1..20: mol_type = other DNA
agtctctcccaacgatctac

SEQ ID NO: 31360 - DNA, 20 bp, synthetic construct
  source 1..20: mol_type = other DNA
aagtctctcccaacgatcta

SEQ ID NO: 31361 - DNA, 20 bp, synthetic construct
  source 1..20: mol_type = other DNA
caagtctctcccaacgatct

SEQ ID NO: 31362 - DNA, 20 bp, synthetic construct
  source 1..20: mol_type = other DNA
tcaagtctctcccaacgatc

SEQ ID NO: 31363 - DNA, 20 bp, synthetic construct
  source 1..20: mol_type = other DNA
ctcaagtctctcccaacgat

SEQ ID NO: 31364 - DNA, 20 bp, synthetic construct
  source 1..20: mol_type = other DNA
actcaagtctctcccaacga

SEQ ID NO: 31365 - DNA, 20 bp, synthetic construct
  source 1..20: mol_type = other DNA
aactcaagtctctcccaacg

SEQ ID NO: 31366 - DNA, 20 bp, synthetic construct
  source 1..20: mol_type = other DNA
aaactcaagtctctcccaac

SEQ ID NO: 31367 - DNA, 20 bp, synthetic construct
  source 1..20: mol_type = other DNA
gaaactcaagtctctcccaa

SEQ ID NO: 31368 - DNA, 20 bp, synthetic construct
  source 1..20: mol_type = other DNA
ggaaactcaagtctctccca

SEQ ID NO: 31369 - DNA, 20 bp, synthetic construct
  source 1..20: mol_type = other DNA
aggaaactcaagtctctccc

SEQ ID NO: 31370 - DNA, 20 bp, synthetic construct
  source 1..20: mol_type = other DNA
caggaaactcaagtctctcc

SEQ ID NO: 31371 - DNA, 20 bp, synthetic construct
  source 1..20: mol_type = other DNA
acaggaaactcaagtctctc

SEQ ID NO: 31372 - DNA, 20 bp, synthetic construct
  source 1..20: mol_type = other DNA
gacaggaaactcaagtctct

SEQ ID NO: 31373 - DNA, 20 bp, synthetic construct
  source 1..20: mol_type = other DNA
tgacaggaaactcaagtctc

SEQ ID NO: 31374 - DNA, 20 bp, synthetic construct
  source 1..20: mol_type = other DNA
ctgacaggaaactcaagtct

SEQ ID NO: 31375 - DNA, 20 bp, synthetic construct
  source 1..20: mol_type = other DNA
cctgacaggaaactcaagtc

SEQ ID NO: 31376 - DNA, 20 bp, synthetic construct
  source 1..20: mol_type = other DNA
tcctgacaggaaactcaagt

SEQ ID NO: 31377 - DNA, 20 bp, synthetic construct
  source 1..20: mol_type = other DNA
ttcctgacaggaaactcaag

SEQ ID NO: 31378 - DNA, 20 bp, synthetic construct
  source 1..20: mol_type = other DNA
cttcctgacaggaaactcaa

SEQ ID NO: 31379 - DNA, 20 bp, synthetic construct
  source 1..20: mol_type = other DNA
gcttcctgacaggaaactca

SEQ ID NO: 31380 - DNA, 20 bp, synthetic construct
  source 1..20: mol_type = other DNA
tgcttcctgacaggaaactc

SEQ ID NO: 31381 - DNA, 20 bp, synthetic construct
  source 1..20: mol_type = other DNA
atgcttcctgacaggaaact

SEQ ID NO: 31382 - DNA, 20 bp, synthetic construct
  source 1..20: mol_type = other DNA
aatgcttcctgacaggaaac

SEQ ID NO: 31383 - DNA, 20 bp, synthetic construct
  source 1..20: mol_type = other DNA
gaatgcttcctgacaggaaa

SEQ ID NO: 31384 - DNA, 20 bp, synthetic construct
  source 1..20: mol_type = other DNA
agaatgcttcctgacaggaa

SEQ ID NO: 31385 - DNA, 20 bp, synthetic construct
  source 1..20: mol_type = other DNA
aagaatgcttcctgacagga

SEQ ID NO: 31386 - DNA, 20 bp, synthetic construct
  source 1..20: mol_type = other DNA
caagaatgcttcctgacagg

SEQ ID NO: 31387 - DNA, 20 bp, synthetic construct
  source 1..20: mol_type = other DNA
ccaagaatgcttcctgacag

SEQ ID NO: 31388 - DNA, 20 bp, synthetic construct
  source 1..20: mol_type = other DNA
accaagaatgcttcctgaca

SEQ ID NO: 31389 - DNA, 20 bp, synthetic construct
  source 1..20: mol_type = other DNA
caccaagaatgcttcctgac

SEQ ID NO: 31390 - DNA, 20 bp, synthetic construct
  source 1..20: mol_type = other DNA
gcaccaagaatgcttcctga

SEQ ID NO: 31391 - DNA, 20 bp, synthetic construct
  source 1..20: mol_type = other DNA
tgcaccaagaatgcttcctg

SEQ ID NO: 31392 - DNA, 20 bp, synthetic construct
  source 1..20: mol_type = other DNA
atgcaccaagaatgcttcct

SEQ ID NO: 31393 - DNA, 20 bp, synthetic construct
  source 1..20: mol_type = other DNA
tatgcaccaagaatgcttcc

SEQ ID NO: 31394 - DNA, 20 bp, synthetic construct
  source 1..20: mol_type = other DNA
ttatgcaccaagaatgcttc

SEQ ID NO: 31395 - DNA, 20 bp, synthetic construct
  source 1..20: mol_type = other DNA
cttatgcaccaagaatgctt

SEQ ID NO: 31396 - DNA, 20 bp, synthetic construct
  source 1..20: mol_type = other DNA
acttatgcaccaagaatgct

SEQ ID NO: 31397 - DNA, 20 bp, synthetic construct
  source 1..20: mol_type = other DNA
gacttatgcaccaagaatgc

SEQ ID NO: 31398 - DNA, 20 bp, synthetic construct
  source 1..20: mol_type = other DNA
tgacttatgcaccaagaatg

SEQ ID NO: 31399 - DNA, 20 bp, synthetic construct
  source 1..20: mol_type = other DNA
ctgacttatgcaccaagaat

SEQ ID NO: 31400 - DNA, 20 bp, synthetic construct
  source 1..20: mol_type = other DNA
tctgacttatgcaccaagaa

SEQ ID NO: 31401 - DNA, 20 bp, synthetic construct
  source 1..20: mol_type = other DNA
ctctgacttatgcaccaaga

SEQ ID NO: 31402 - DNA, 20 bp, synthetic construct
  source 1..20: mol_type = other DNA
cctctgacttatgcaccaag

SEQ ID NO: 31403 - DNA, 20 bp, synthetic construct
  source 1..20: mol_type = other DNA
acctctgacttatgcaccaa

SEQ ID NO: 31404 - DNA, 20 bp, synthetic construct
  source 1..20: mol_type = other DNA
cacctctgacttatgcacca

SEQ ID NO: 31405 - DNA, 20 bp, synthetic construct
  source 1..20: mol_type = other DNA
tcacctctgacttatgcacc

SEQ ID NO: 31406 - DNA, 20 bp, synthetic construct
  source 1..20: mol_type = other DNA
atcacctctgacttatgcac

SEQ ID NO: 31407 - DNA, 20 bp, synthetic construct
  source 1..20: mol_type = other DNA
tatcacctctgacttatgca

SEQ ID NO: 31408 - DNA, 20 bp, synthetic construct
  source 1..20: mol_type = other DNA
atatcacctctgacttatgc

SEQ ID NO: 31409 - DNA, 20 bp, synthetic construct
  source 1..20: mol_type = other DNA
catatcacctctgacttatg

SEQ ID NO: 31410 - DNA, 20 bp, synthetic construct
  source 1..20: mol_type = other DNA
tcatatcacctctgacttat

SEQ ID NO: 31411 - DNA, 20 bp, synthetic construct
  source 1..20: mol_type = other DNA
ttcatatcacctctgactta

SEQ ID NO: 31412 - DNA, 20 bp, synthetic construct
  source 1..20: mol_type = other DNA
attcatatcacctctgactt

SEQ ID NO: 31413 - DNA, 20 bp, synthetic construct
  source 1..20: mol_type = other DNA
cattcatatcacctctgact

SEQ ID NO: 31414 - DNA, 20 bp, synthetic construct
  source 1..20: mol_type = other DNA
gcattcatatcacctctgac

SEQ ID NO: 31415 - DNA, 20 bp, synthetic construct
  source 1..20: mol_type = other DNA
ggcattcatatcacctctga

SEQ ID NO: 31416 - DNA, 20 bp, synthetic construct
  source 1..20: mol_type = other DNA
cggcattcatatcacctctg

SEQ ID NO: 31417 - DNA, 20 bp, synthetic construct
  source 1..20: mol_type = other DNA
acggcattcatatcacctct

SEQ ID NO: 31418 - DNA, 20 bp, synthetic construct
  source 1..20: mol_type = other DNA
cacggcattcatatcacctc

SEQ ID NO: 31419 - DNA, 20 bp, synthetic construct
  source 1..20: mol_type = other DNA
ccacggcattcatatcacct

SEQ ID NO: 31420 - DNA, 20 bp, synthetic construct
  source 1..20: mol_type = other DNA
tccacggcattcatatcacc

SEQ ID NO: 31421 - DNA, 20 bp, synthetic construct
  source 1..20: mol_type = other DNA
ttccacggcattcatatcac

SEQ ID NO: 31422 - DNA, 20 bp, synthetic construct
  source 1..20: mol_type = other DNA
cttccacggcattcatatca

SEQ ID NO: 31423 - DNA, 20 bp, synthetic construct
  source 1..20: mol_type = other DNA
ccttccacggcattcatatc

SEQ ID NO: 31424 - DNA, 20 bp, synthetic construct
  source 1..20: mol_type = other DNA
cccttccacggcattcatat

SEQ ID NO: 31425 - DNA, 20 bp, synthetic construct
  source 1..20: mol_type = other DNA
ccccttccacggcattcata

SEQ ID NO: 31426 - DNA, 20 bp, synthetic construct
  source 1..20: mol_type = other DNA
cccccttccacggcattcat

SEQ ID NO: 31427 - DNA, 20 bp, synthetic construct
  source 1..20: mol_type = other DNA
acccccttccacggcattca

SEQ ID NO: 31428 - DNA, 20 bp, synthetic construct
  source 1..20: mol_type = other DNA
cacccccttccacggcattc

SEQ ID NO: 31429 - DNA, 20 bp, synthetic construct
  source 1..20: mol_type = other DNA
ccacccccttccacggcatt

SEQ ID NO: 31430 - DNA, 20 bp, synthetic construct
  source 1..20: mol_type = other DNA
gccacccccttccacggcat

SEQ ID NO: 31431 - DNA, 20 bp, synthetic construct
  source 1..20: mol_type = other DNA
agccacccccttccacggca

SEQ ID NO: 31432 - DNA, 20 bp, synthetic construct
  source 1..20: mol_type = other DNA
aagccacccccttccacggc

SEQ ID NO: 31433 - DNA, 20 bp, synthetic construct
  source 1..20: mol_type = other DNA
taagccacccccttccacgg

SEQ ID NO: 31434 - DNA, 20 bp, synthetic construct
  source 1..20: mol_type = other DNA
gtaagccacccccttccacg

SEQ ID NO: 31435 - DNA, 20 bp, synthetic construct
  source 1..20: mol_type = other DNA
agtaagccacccccttccac

SEQ ID NO: 31436 - DNA, 20 bp, synthetic construct
  source 1..20: mol_type = other DNA
cagtaagccacccccttcca

SEQ ID NO: 31437 - DNA, 20 bp, synthetic construct
  source 1..20: mol_type = other DNA
acagtaagccacccccttcc

SEQ ID NO: 31438 - DNA, 20 bp, synthetic construct
  source 1..20: mol_type = other DNA
gacagtaagccacccccttc

SEQ ID NO: 31439 - DNA, 20 bp, synthetic construct
  source 1..20: mol_type = other DNA
agacagtaagccaccccctt

SEQ ID NO: 31440 - DNA, 20 bp, synthetic construct
  source 1..20: mol_type = other DNA
cagacagtaagccaccccct

SEQ ID NO: 31441 - DNA, 20 bp, synthetic construct
  source 1..20: mol_type = other DNA
ccagacagtaagccaccccc

SEQ ID NO: 31442 - DNA, 20 bp, synthetic construct
  source 1..20: mol_type = other DNA
tccagacagtaagccacccc

SEQ ID NO: 31443 - DNA, 20 bp, synthetic construct
  source 1..20: mol_type = other DNA
ctccagacagtaagccaccc

SEQ ID NO: 31444 - DNA, 20 bp, synthetic construct
  source 1..20: mol_type = other DNA
tctccagacagtaagccacc

SEQ ID NO: 31445 - DNA, 20 bp, synthetic construct
  source 1..20: mol_type = other DNA
ttctccagacagtaagccac

SEQ ID NO: 31446 - DNA, 20 bp, synthetic construct
  source 1..20: mol_type = other DNA
gttctccagacagtaagcca

SEQ ID NO: 31447 - DNA, 20 bp, synthetic construct
  source 1..20: mol_type = other DNA
agttctccagacagtaagcc

SEQ ID NO: 31448 - DNA, 20 bp, synthetic construct
  source 1..20: mol_type = other DNA
gagttctccagacagtaagc

SEQ ID NO: 31449 - DNA, 20 bp, synthetic construct
  source 1..20: mol_type = other DNA
cgagttctccagacagtaag

SEQ ID NO: 31450 - DNA, 20 bp, synthetic construct
  source 1..20: mol_type = other DNA
tcgagttctccagacagtaa

SEQ ID NO: 31451 - DNA, 20 bp, synthetic construct
  source 1..20: mol_type = other DNA
ctcgagttctccagacagta

SEQ ID NO: 31452 - DNA, 20 bp, synthetic construct
  source 1..20: mol_type = other DNA
tctcgagttctccagacagt

SEQ ID NO: 31453 - DNA, 20 bp, synthetic construct
  source 1..20: mol_type = other DNA
ttctcgagttctccagacag

SEQ ID NO: 31454 - DNA, 20 bp, synthetic construct
  source 1..20: mol_type = other DNA
cttctcgagttctccagaca

SEQ ID NO: 31455 - DNA, 20 bp, synthetic construct
  source 1..20: mol_type = other DNA
tcttctcgagttctccagac

SEQ ID NO: 31456 - DNA, 20 bp, synthetic construct
  source 1..20: mol_type = other DNA
atcttctcgagttctccaga

SEQ ID NO: 31457 - DNA, 20 bp, synthetic construct
  source 1..20: mol_type = other DNA
catcttctcgagttctccag

SEQ ID NO: 31458 - DNA, 20 bp, synthetic construct
  source 1..20: mol_type = other DNA
ccatcttctcgagttctcca

SEQ ID NO: 31459 - DNA, 20 bp, synthetic construct
  source 1..20: mol_type = other DNA
cccatcttctcgagttctcc

SEQ ID NO: 31460 - DNA, 20 bp, synthetic construct
  source 1..20: mol_type = other DNA
tcccatcttctcgagttctc

SEQ ID NO: 31461 - DNA, 20 bp, synthetic construct
  source 1..20: mol_type = other DNA
ttcccatcttctcgagttct

SEQ ID NO: 31462 - DNA, 20 bp, synthetic construct
  source 1..20: mol_type = other DNA
attcccatcttctcgagttc

SEQ ID NO: 31463 - DNA, 20 bp, synthetic construct
  source 1..20: mol_type = other DNA
cattcccatcttctcgagtt

SEQ ID NO: 31464 - DNA, 20 bp, synthetic construct
  source 1..20: mol_type = other DNA
ccattcccatcttctcgagt

SEQ ID NO: 31465 - DNA, 20 bp, synthetic construct
  source 1..20: mol_type = other DNA
cccattcccatcttctcgag

SEQ ID NO: 31466 - DNA, 20 bp, synthetic construct
  source 1..20: mol_type = other DNA
gcccattcccatcttctcga

SEQ ID NO: 31467 - DNA, 20 bp, synthetic construct
  source 1..20: mol_type = other DNA
tgcccattcccatcttctcg

SEQ ID NO: 31468 - DNA, 20 bp, synthetic construct
  source 1..20: mol_type = other DNA
gtgcccattcccatcttctc

SEQ ID NO: 31469 - DNA, 20 bp, synthetic construct
  source 1..20: mol_type = other DNA
agtgcccattcccatcttct

SEQ ID NO: 31470 - DNA, 20 bp, synthetic construct
  source 1..20: mol_type = other DNA
cagtgcccattcccatcttc

SEQ ID NO: 31471 - DNA, 20 bp, synthetic construct
  source 1..20: mol_type = other DNA
acagtgcccattcccatctt

SEQ ID NO: 31472 - DNA, 20 bp, synthetic construct
  source 1..20: mol_type = other DNA
gacagtgcccattcccatct

SEQ ID NO: 31473 - DNA, 20 bp, synthetic construct
  source 1..20: mol_type = other DNA
ggacagtgcccattcccatc

SEQ ID NO: 31474 - DNA, 20 bp, synthetic construct
  source 1..20: mol_type = other DNA
tggacagtgcccattcccat

SEQ ID NO: 31475 - DNA, 20 bp, synthetic construct
  source 1..20: mol_type = other DNA
ctggacagtgcccattccca

SEQ ID NO: 31476 - DNA, 20 bp, synthetic construct
  source 1..20: mol_type = other DNA
actggacagtgcccattccc

SEQ ID NO: 31477 - DNA, 20 bp, synthetic construct
  source 1..20: mol_type = other DNA
tactggacagtgcccattcc

SEQ ID NO: 31478 - DNA, 20 bp, synthetic construct
  source 1..20: mol_type = other DNA
atactggacagtgcccattc

SEQ ID NO: 31479 - DNA, 20 bp, synthetic construct
  source 1..20: mol_type = other DNA
aatactggacagtgcccatt

SEQ ID NO: 31480 - DNA, 20 bp, synthetic construct
  source 1..20: mol_type = other DNA
caatactggacagtgcccat

SEQ ID NO: 31481 - DNA, 20 bp, synthetic construct
  source 1..20: mol_type = other DNA
acaatactggacagtgccca

SEQ ID NO: 31482 - DNA, 20 bp, synthetic construct
  source 1..20: mol_type = other DNA
cacaatactggacagtgccc

SEQ ID NO: 31483 - DNA, 20 bp, synthetic construct
  source 1..20: mol_type = other DNA
ccacaatactggacagtgcc

SEQ ID NO: 31484 - DNA, 20 bp, synthetic construct
  source 1..20: mol_type = other DNA
gccacaatactggacagtgc

SEQ ID NO: 31485 - DNA, 20 bp, synthetic construct
  source 1..20: mol_type = other DNA
agccacaatactggacagtg

SEQ ID NO: 31486 - DNA, 20 bp, synthetic construct
  source 1..20: mol_type = other DNA
tagccacaatactggacagt

SEQ ID NO: 31487 - DNA, 20 bp, synthetic construct
  source 1..20: mol_type = other DNA
gtagccacaatactggacag

SEQ ID NO: 31488 - DNA, 20 bp, synthetic construct
  source 1..20: mol_type = other DNA
agtagccacaatactggaca

SEQ ID NO: 31489 - DNA, 20 bp, synthetic construct
  source 1..20: mol_type = other DNA
aagtagccacaatactggac

SEQ ID NO: 31490 - DNA, 20 bp, synthetic construct
  source 1..20: mol_type = other DNA
gaagtagccacaatactgga

SEQ ID NO: 31491 - DNA, 20 bp, synthetic construct
  source 1..20: mol_type = other DNA
ggaagtagccacaatactgg

SEQ ID NO: 31492 - DNA, 20 bp, synthetic construct
  source 1..20: mol_type = other DNA
tggaagtagccacaatactg

SEQ ID NO: 31493 - DNA, 20 bp, synthetic construct
  source 1..20: mol_type = other DNA
gtggaagtagccacaatact

SEQ ID NO: 31494 - DNA, 20 bp, synthetic construct
  source 1..20: mol_type = other DNA
tgtggaagtagccacaatac

SEQ ID NO: 31495 - DNA, 20 bp, synthetic construct
  source 1..20: mol_type = other DNA
gtgtggaagtagccacaata

SEQ ID NO: 31496 - DNA, 20 bp, synthetic construct
  source 1..20: mol_type = other DNA
tgtgtggaagtagccacaat

SEQ ID NO: 31497 - DNA, 20 bp, synthetic construct
  source 1..20: mol_type = other DNA
atgtgtggaagtagccacaa

SEQ ID NO: 31498 - DNA, 20 bp, synthetic construct
  source 1..20: mol_type = other DNA
catgtgtggaagtagccaca

SEQ ID NO: 31499 - DNA, 20 bp, synthetic construct
  source 1..20: mol_type = other DNA
ccatgtgtggaagtagccac

SEQ ID NO: 31500 - DNA, 20 bp, synthetic construct
  source 1..20: mol_type = other DNA
accatgtgtggaagtagcca

SEQ ID NO: 31501 - DNA, 20 bp, synthetic construct
  source 1..20: mol_type = other DNA
aaccatgtgtggaagtagcc

SEQ ID NO: 31502 - DNA, 20 bp, synthetic construct
  source 1..20: mol_type = other DNA
gaaccatgtgtggaagtagc

SEQ ID NO: 31503 - DNA, 20 bp, synthetic construct
  source 1..20: mol_type = other DNA
agaaccatgtgtggaagtag

SEQ ID NO: 31504 - DNA, 20 bp, synthetic construct
  source 1..20: mol_type = other DNA
aagaaccatgtgtggaagta

SEQ ID NO: 31505 - DNA, 20 bp, synthetic construct
  source 1..20: mol_type = other DNA
aaagaaccatgtgtggaagt

SEQ ID NO: 31506 - DNA, 20 bp, synthetic construct
  source 1..20: mol_type = other DNA
taaagaaccatgtgtggaag

SEQ ID NO: 31507 - DNA, 20 bp, synthetic construct
  source 1..20: mol_type = other DNA
ttaaagaaccatgtgtggaa

SEQ ID NO: 31508 - DNA, 20 bp, synthetic construct
  source 1..20: mol_type = other DNA
tttaaagaaccatgtgtgga

SEQ ID NO: 31509 - DNA, 20 bp, synthetic construct
  source 1..20: mol_type = other DNA
atttaaagaaccatgtgtgg

SEQ ID NO: 31510 - DNA, 20 bp, synthetic construct
  source 1..20: mol_type = other DNA
aatttaaagaaccatgtgtg

SEQ ID NO: 31511 - DNA, 20 bp, synthetic construct
  source 1..20: mol_type = other DNA
aaatttaaagaaccatgtgt

SEQ ID NO: 31512 - DNA, 20 bp, synthetic construct
  source 1..20: mol_type = other DNA
taaatttaaagaaccatgtg

SEQ ID NO: 31513 - DNA, 20 bp, synthetic construct
  source 1..20: mol_type = other DNA
ttaaatttaaagaaccatgt

SEQ ID NO: 31514 - DNA, 20 bp, synthetic construct
  source 1..20: mol_type = other DNA
tttaaatttaaagaaccatg

SEQ ID NO: 31515 - DNA, 20 bp, synthetic construct
  source 1..20: mol_type = other DNA
ttttaaatttaaagaaccat

SEQ ID NO: 31516 - DNA, 20 bp, synthetic construct
  source 1..20: mol_type = other DNA
attttaaatttaaagaacca

SEQ ID NO: 31517 - DNA, 20 bp, synthetic construct
  source 1..20: mol_type = other DNA
aattttaaatttaaagaacc

SEQ ID NO: 31518 - DNA, 20 bp, synthetic construct
  source 1..20: mol_type = other DNA
taattttaaatttaaagaac

SEQ ID NO: 31519 - DNA, 20 bp, synthetic construct
  source 1..20: mol_type = other DNA
ataattttaaatttaaagaa

SEQ ID NO: 31520 - DNA, 20 bp, synthetic construct
  source 1..20: mol_type = other DNA
cataattttaaatttaaaga

SEQ ID NO: 31521 - DNA, 20 bp, synthetic construct
  source 1..20: mol_type = other DNA
acataattttaaatttaaag

SEQ ID NO: 31522 - DNA, 20 bp, synthetic construct
  source 1..20: mol_type = other DNA
aacataattttaaatttaaa

SEQ ID NO: 31523 - DNA, 20 bp, synthetic construct
  source 1..20: mol_type = other DNA
caacataattttaaatttaa

SEQ ID NO: 31524 - DNA, 20 bp, synthetic construct
  source 1..20: mol_type = other DNA
tcaacataattttaaattta

SEQ ID NO: 31525 - DNA, 20 bp, synthetic construct
  source 1..20: mol_type = other DNA
atcaacataattttaaattt

SEQ ID NO: 31526 - DNA, 20 bp, synthetic construct
  source 1..20: mol_type = other DNA
aatcaacataattttaaatt

SEQ ID NO: 31527 - DNA, 20 bp, synthetic construct
  source 1..20: mol_type = other DNA
taatcaacataattttaaat

SEQ ID NO: 31528 - DNA, 20 bp, synthetic construct
  source 1..20: mol_type = other DNA
ttaatcaacataattttaaa

SEQ ID NO: 31529 - DNA, 20 bp, synthetic construct
  source 1..20: mol_type = other DNA
tttaatcaacataattttaa

SEQ ID NO: 31530 - DNA, 20 bp, synthetic construct
  source 1..20: mol_type = other DNA
ttttaatcaacataatttta

SEQ ID NO: 31531 - DNA, 20 bp, synthetic construct
  source 1..20: mol_type = other DNA
attttaatcaacataatttt

SEQ ID NO: 31532 - DNA, 20 bp, synthetic construct
  source 1..20: mol_type = other DNA
aattttaatcaacataattt

SEQ ID NO: 31533 - DNA, 20 bp, synthetic construct
  source 1..20: mol_type = other DNA
aaattttaatcaacataatt

SEQ ID NO: 31534 - DNA, 20 bp, synthetic construct
  source 1..20: mol_type = other DNA
taaattttaatcaacataat

SEQ ID NO: 31535 - DNA, 20 bp, synthetic construct
  source 1..20: mol_type = other DNA
ttaaattttaatcaacataa

SEQ ID NO: 31536 - DNA, 20 bp, synthetic construct
  source 1..20: mol_type = other DNA
tttaaattttaatcaacata

SEQ ID NO: 31537 - DNA, 20 bp, synthetic construct
  source 1..20: mol_type = other DNA
atttaaattttaatcaacat

SEQ ID NO: 31538 - DNA, 20 bp, synthetic construct
  source 1..20: mol_type = other DNA
tatttaaattttaatcaaca

SEQ ID NO: 31539 - DNA, 20 bp, synthetic construct
  source 1..20: mol_type = other DNA
atatttaaattttaatcaac

SEQ ID NO: 31540 - DNA, 20 bp, synthetic construct
  source 1..20: mol_type = other DNA
aatatttaaattttaatcaa

SEQ ID NO: 31541 - DNA, 20 bp, synthetic construct
  source 1..20: mol_type = other DNA
aaatatttaaattttaatca

SEQ ID NO: 31542 - DNA, 20 bp, synthetic construct
  source 1..20: mol_type = other DNA
gaaatatttaaattttaatc

SEQ ID NO: 31543 - DNA, 20 bp, synthetic construct
  source 1..20: mol_type = other DNA
tgaaatatttaaattttaat

SEQ ID NO: 31544 - DNA, 20 bp, synthetic construct
  source 1..20: mol_type = other DNA
ctgaaatatttaaattttaa

SEQ ID NO: 31545 - DNA, 20 bp, synthetic construct
  source 1..20: mol_type = other DNA
actgaaatatttaaatttta

SEQ ID NO: 31546 - DNA, 20 bp, synthetic construct
  source 1..20: mol_type = other DNA
aactgaaatatttaaatttt

SEQ ID NO: 31547 - DNA, 20 bp, synthetic construct
  source 1..20: mol_type = other DNA
gaactgaaatatttaaattt

SEQ ID NO: 31548 - DNA, 20 bp, synthetic construct
  source 1..20: mol_type = other DNA
ggaactgaaatatttaaatt

SEQ ID NO: 31549 - DNA, 20 bp, synthetic construct
  source 1..20: mol_type = other DNA
aggaactgaaatatttaaat

SEQ ID NO: 31550 - DNA, 20 bp, synthetic construct
  source 1..20: mol_type = other DNA
gaggaactgaaatatttaaa

SEQ ID NO: 31551 - DNA, 20 bp, synthetic construct
  source 1..20: mol_type = other DNA
tgaggaactgaaatatttaa

SEQ ID NO: 31552 - DNA, 20 bp, synthetic construct
  source 1..20: mol_type = other DNA
ctgaggaactgaaatattta

SEQ ID NO: 31553 - DNA, 20 bp, synthetic construct
  source 1..20: mol_type = other DNA
gctgaggaactgaaatattt

SEQ ID NO: 31554 - DNA, 20 bp, synthetic construct
  source 1..20: mol_type = other DNA
ggctgaggaactgaaatatt

SEQ ID NO: 31555 - DNA, 20 bp, synthetic construct
  source 1..20: mol_type = other DNA
tggctgaggaactgaaatat

SEQ ID NO: 31556 - DNA, 20 bp, synthetic construct
  source 1..20: mol_type = other DNA
atggctgaggaactgaaata

SEQ ID NO: 31557 - DNA, 20 bp, synthetic construct
  source 1..20: mol_type = other DNA
tatggctgaggaactgaaat

SEQ ID NO: 31558 - DNA, 20 bp, synthetic construct
  source 1..20: mol_type = other DNA
gtatggctgaggaactgaaa

SEQ ID NO: 31559 - DNA, 20 bp, synthetic construct
  source 1..20: mol_type = other DNA
agtatggctgaggaactgaa

SEQ ID NO: 31560 - DNA, 20 bp, synthetic construct
  source 1..20: mol_type = other DNA
tagtatggctgaggaactga

SEQ ID NO: 31561 - DNA, 20 bp, synthetic construct
  source 1..20: mol_type = other DNA
ttagtatggctgaggaactg

SEQ ID NO: 31562 - DNA, 20 bp, synthetic construct
  source 1..20: mol_type = other DNA
attagtatggctgaggaact

SEQ ID NO: 31563 - DNA, 20 bp, synthetic construct
  source 1..20: mol_type = other DNA
gattagtatggctgaggaac

SEQ ID NO: 31564 - DNA, 20 bp, synthetic construct
  source 1..20: mol_type = other DNA
cgattagtatggctgaggaa

SEQ ID NO: 31565 - DNA, 20 bp, synthetic construct
  source 1..20: mol_type = other DNA
acgattagtatggctgagga

SEQ ID NO: 31566 - DNA, 20 bp, synthetic construct
  source 1..20: mol_type = other DNA
tacgattagtatggctgagg

SEQ ID NO: 31567 - DNA, 20 bp, synthetic construct
  source 1..20: mol_type = other DNA
atacgattagtatggctgag

SEQ ID NO: 31568 - DNA, 20 bp, synthetic construct
  source 1..20: mol_type = other DNA
aatacgattagtatggctga

SEQ ID NO: 31569 - DNA, 20 bp, synthetic construct
  source 1..20: mol_type = other DNA
aaatacgattagtatggctg

SEQ ID NO: 31570 - DNA, 20 bp, synthetic construct
  source 1..20: mol_type = other DNA
gaaatacgattagtatggct

SEQ ID NO: 31571 - DNA, 20 bp, synthetic construct
  source 1..20: mol_type = other DNA
tgaaatacgattagtatggc

SEQ ID NO: 31572 - DNA, 20 bp, synthetic construct
  source 1..20: mol_type = other DNA
ttgaaatacgattagtatgg

SEQ ID NO: 31573 - DNA, 20 bp, synthetic construct
  source 1..20: mol_type = other DNA
cttgaaatacgattagtatg

SEQ ID NO: 31574 - DNA, 20 bp, synthetic construct
  source 1..20: mol_type = other DNA
acttgaaatacgattagtat

SEQ ID NO: 31575 - DNA, 20 bp, synthetic construct
  source 1..20: mol_type = other DNA
cacttgaaatacgattagta

SEQ ID NO: 31576 - DNA, 20 bp, synthetic construct
  source 1..20: mol_type = other DNA
gcacttgaaatacgattagt

SEQ ID NO: 31577 - DNA, 20 bp, synthetic construct
  source 1..20: mol_type = other DNA
agcacttgaaatacgattag

SEQ ID NO: 31578 - DNA, 20 bp, synthetic construct
  source 1..20: mol_type = other DNA
aagcacttgaaatacgatta

SEQ ID NO: 31579 - DNA, 20 bp, synthetic construct
  source 1..20: mol_type = other DNA
taagcacttgaaatacgatt

SEQ ID NO: 31580 - DNA, 20 bp, synthetic construct
  source 1..20: mol_type = other DNA
ctaagcacttgaaatacgat

SEQ ID NO: 31581 - DNA, 20 bp, synthetic construct
  source 1..20: mol_type = other DNA
gctaagcacttgaaatacga

SEQ ID NO: 31582 - DNA, 20 bp, synthetic construct
  source 1..20: mol_type = other DNA
agctaagcacttgaaatacg

SEQ ID NO: 31583 - DNA, 20 bp, synthetic construct
  source 1..20: mol_type = other DNA
cagctaagcacttgaaatac

SEQ ID NO: 31584 - DNA, 20 bp, synthetic construct
  source 1..20: mol_type = other DNA
gcagctaagcacttgaaata

SEQ ID NO: 31585 - DNA, 20 bp, synthetic construct
  source 1..20: mol_type = other DNA
ggcagctaagcacttgaaat

SEQ ID NO: 31586 - DNA, 20 bp, synthetic construct
  source 1..20: mol_type = other DNA
tggcagctaagcacttgaaa

SEQ ID NO: 31587 - DNA, 20 bp, synthetic construct
  source 1..20: mol_type = other DNA
gtggcagctaagcacttgaa

SEQ ID NO: 31588 - DNA, 20 bp, synthetic construct
  source 1..20: mol_type = other DNA
tgtggcagctaagcacttga

SEQ ID NO: 31589 - DNA, 20 bp, synthetic construct
  source 1..20: mol_type = other DNA
atgtggcagctaagcacttg

SEQ ID NO: 31590 - DNA, 20 bp, synthetic construct
  source 1..20: mol_type = other DNA
catgtggcagctaagcactt

SEQ ID NO: 31591 - DNA, 20 bp, synthetic construct
  source 1..20: mol_type = other DNA
acatgtggcagctaagcact

SEQ ID NO: 31592 - DNA, 20 bp, synthetic construct
  source 1..20: mol_type = other DNA
cacatgtggcagctaagcac

SEQ ID NO: 31593 - DNA, 20 bp, synthetic construct
  source 1..20: mol_type = other DNA
gcacatgtggcagctaagca

SEQ ID NO: 31594 - DNA, 20 bp, synthetic construct
  source 1..20: mol_type = other DNA
ggcacatgtggcagctaagc

SEQ ID NO: 31595 - DNA, 20 bp, synthetic construct
  source 1..20: mol_type = other DNA
aggcacatgtggcagctaag

SEQ ID NO: 31596 - DNA, 20 bp, synthetic construct
  source 1..20: mol_type = other DNA
taggcacatgtggcagctaa

SEQ ID NO: 31597 - DNA, 20 bp, synthetic construct
  source 1..20: mol_type = other DNA
ttaggcacatgtggcagcta

SEQ ID NO: 31598 - DNA, 20 bp, synthetic construct
  source 1..20: mol_type = other DNA
attaggcacatgtggcagct

SEQ ID NO: 31599 - DNA, 20 bp, synthetic construct
  source 1..20: mol_type = other DNA
cattaggcacatgtggcagc

SEQ ID NO: 31600 - DNA, 20 bp, synthetic construct
  source 1..20: mol_type = other DNA
ccattaggcacatgtggcag

SEQ ID NO: 31601 - DNA, 20 bp, synthetic construct
  source 1..20: mol_type = other DNA
gccattaggcacatgtggca

SEQ ID NO: 31602 - DNA, 20 bp, synthetic construct
  source 1..20: mol_type = other DNA
agccattaggcacatgtggc

SEQ ID NO: 31603 - DNA, 20 bp, synthetic construct
  source 1..20: mol_type = other DNA
cagccattaggcacatgtgg

SEQ ID NO: 31604 - DNA, 20 bp, synthetic construct
  source 1..20: mol_type = other DNA
gcagccattaggcacatgtg

SEQ ID NO: 31605 - DNA, 20 bp, synthetic construct
  source 1..20: mol_type = other DNA
tgcagccattaggcacatgt

SEQ ID NO: 31606 - DNA, 20 bp, synthetic construct
  source 1..20: mol_type = other DNA
ttgcagccattaggcacatg

SEQ ID NO: 31607 - DNA, 20 bp, synthetic construct
  source 1..20: mol_type = other DNA
attgcagccattaggcacat

SEQ ID NO: 31608 - DNA, 20 bp, synthetic construct
  source 1..20: mol_type = other DNA
tattgcagccattaggcaca

SEQ ID NO: 31609 - DNA, 20 bp, synthetic construct
  source 1..20: mol_type = other DNA
atattgcagccattaggcac

SEQ ID NO: 31610 - DNA, 20 bp, synthetic construct
  source 1..20: mol_type = other DNA
aatattgcagccattaggca

SEQ ID NO: 31611 - DNA, 20 bp, synthetic construct
  source 1..20: mol_type = other DNA
caatattgcagccattaggc

SEQ ID NO: 31612 - DNA, 20 bp, synthetic construct
  source 1..20: mol_type = other DNA
ccaatattgcagccattagg

SEQ ID NO: 31613 - DNA, 20 bp, synthetic construct
  source 1..20: mol_type = other DNA
tccaatattgcagccattag

SEQ ID NO: 31614 - DNA, 20 bp, synthetic construct
  source 1..20: mol_type = other DNA
gtccaatattgcagccatta

SEQ ID NO: 31615 - DNA, 20 bp, synthetic construct
  source 1..20: mol_type = other DNA
tgtccaatattgcagccatt

SEQ ID NO: 31616 - DNA, 20 bp, synthetic construct
  source 1..20: mol_type = other DNA
ctgtccaatattgcagccat

SEQ ID NO: 31617 - DNA, 20 bp, synthetic construct
  source 1..20: mol_type = other DNA
gctgtccaatattgcagcca

SEQ ID NO: 31618 - DNA, 20 bp, synthetic construct
  source 1..20: mol_type = other DNA
tgctgtccaatattgcagcc

SEQ ID NO: 31619 - DNA, 20 bp, synthetic construct
  source 1..20: mol_type = other DNA
atgctgtccaatattgcagc

SEQ ID NO: 31620 - DNA, 20 bp, synthetic construct
  source 1..20: mol_type = other DNA
catgctgtccaatattgcag

SEQ ID NO: 31621 - DNA, 20 bp, synthetic construct
  source 1..20: mol_type = other DNA
tcatgctgtccaatattgca

SEQ ID NO: 31622 - DNA, 20 bp, synthetic construct
  source 1..20: mol_type = other DNA
gtcatgctgtccaatattgc

SEQ ID NO: 31623 - DNA, 20 bp, synthetic construct
  source 1..20: mol_type = other DNA
tgtcatgctgtccaatattg

SEQ ID NO: 31624 - DNA, 20 bp, synthetic construct
  source 1..20: mol_type = other DNA
atgtcatgctgtccaatatt

SEQ ID NO: 31625 - DNA, 20 bp, synthetic construct
  source 1..20: mol_type = other DNA
tatgtcatgctgtccaatat

SEQ ID NO: 31626 - DNA, 20 bp, synthetic construct
  source 1..20: mol_type = other DNA
ctatgtcatgctgtccaata

SEQ ID NO: 31627 - DNA, 20 bp, synthetic construct
  source 1..20: mol_type = other DNA
cctatgtcatgctgtccaat

SEQ ID NO: 31628 - DNA, 20 bp, synthetic construct
  source 1..20: mol_type = other DNA
tcctatgtcatgctgtccaa

SEQ ID NO: 31629 - DNA, 20 bp, synthetic construct
  source 1..20: mol_type = other DNA
gtcctatgtcatgctgtcca

SEQ ID NO: 31630 - DNA, 20 bp, synthetic construct
  source 1..20: mol_type = other DNA
tgtcctatgtcatgctgtcc

SEQ ID NO: 31631 - DNA, 20 bp, synthetic construct
  source 1..20: mol_type = other DNA
atgtcctatgtcatgctgtc

SEQ ID NO: 31632 - DNA, 20 bp, synthetic construct
  source 1..20: mol_type = other DNA
gatgtcctatgtcatgctgt

SEQ ID NO: 31633 - DNA, 20 bp, synthetic construct
  source 1..20: mol_type = other DNA
agatgtcctatgtcatgctg

SEQ ID NO: 31634 - DNA, 20 bp, synthetic construct
  source 1..20: mol_type = other DNA
aagatgtcctatgtcatgct

SEQ ID NO: 31635 - DNA, 20 bp, synthetic construct
  source 1..20: mol_type = other DNA
gaagatgtcctatgtcatgc

SEQ ID NO: 31636 - DNA, 20 bp, synthetic construct
  source 1..20: mol_type = other DNA
tgaagatgtcctatgtcatg

SEQ ID NO: 31637 - DNA, 20 bp, synthetic construct
  source 1..20: mol_type = other DNA
atgaagatgtcctatgtcat

SEQ ID NO: 31638 - DNA, 20 bp, synthetic construct
  source 1..20: mol_type = other DNA
gatgaagatgtcctatgtca

SEQ ID NO: 31639 - DNA, 20 bp, synthetic construct
  source 1..20: mol_type = other DNA
tgatgaagatgtcctatgtc

SEQ ID NO: 31640 - DNA, 20 bp, synthetic construct
  source 1..20: mol_type = other DNA
atgatgaagatgtcctatgt

SEQ ID NO: 31641 - DNA, 20 bp, synthetic construct
  source 1..20: mol_type = other DNA
aatgatgaagatgtcctatg

SEQ ID NO: 31642 - DNA, 20 bp, synthetic construct
  source 1..20: mol_type = other DNA
caatgatgaagatgtcctat

SEQ ID NO: 31643 - DNA, 20 bp, synthetic construct
  source 1..20: mol_type = other DNA
acaatgatgaagatgtccta

SEQ ID NO: 31644 - DNA, 20 bp, synthetic construct
  source 1..20: mol_type = other DNA
tacaatgatgaagatgtcct

SEQ ID NO: 31645 - DNA, 20 bp, synthetic construct
  source 1..20: mol_type = other DNA
gtacaatgatgaagatgtcc

SEQ ID NO: 31646 - DNA, 20 bp, synthetic construct
  source 1..20: mol_type = other DNA
tgtacaatgatgaagatgtc

SEQ ID NO: 31647 - DNA, 20 bp, synthetic construct
  source 1..20: mol_type = other DNA
ttgtacaatgatgaagatgt

SEQ ID NO: 31648 - DNA, 20 bp, synthetic construct
  source 1..20: mol_type = other DNA
tttgtacaatgatgaagatg

SEQ ID NO: 31649 - DNA, 20 bp, synthetic construct
  source 1..20: mol_type = other DNA
ctttgtacaatgatgaagat

SEQ ID NO: 31650 - DNA, 20 bp, synthetic construct
  source 1..20: mol_type = other DNA
actttgtacaatgatgaaga

SEQ ID NO: 31651 - DNA, 20 bp, synthetic construct
  source 1..20: mol_type = other DNA
aactttgtacaatgatgaag

SEQ ID NO: 31652 - DNA, 20 bp, synthetic construct
  source 1..20: mol_type = other DNA
gaactttgtacaatgatgaa

SEQ ID NO: 31653 - DNA, 20 bp, synthetic construct
  source 1..20: mol_type = other DNA
agaactttgtacaatgatga

SEQ ID NO: 31654 - DNA, 20 bp, synthetic construct
  source 1..20: mol_type = other DNA
gagaactttgtacaatgatg

SEQ ID NO: 31655 - DNA, 20 bp, synthetic construct
  source 1..20: mol_type = other DNA
agagaactttgtacaatgat

SEQ ID NO: 31656 - DNA, 20 bp, synthetic construct
  source 1..20: mol_type = other DNA
aagagaactttgtacaatga

SEQ ID NO: 31657 - DNA, 20 bp, synthetic construct
  source 1..20: mol_type = other DNA
caagagaactttgtacaatg

SEQ ID NO: 31658 - DNA, 20 bp, synthetic construct
  source 1..20: mol_type = other DNA
ccaagagaactttgtacaat

SEQ ID NO: 31659 - DNA, 20 bp, synthetic construct
  source 1..20: mol_type = other DNA
tccaagagaactttgtacaa

SEQ ID NO: 31660 - DNA, 20 bp, synthetic construct
  source 1..20: mol_type = other DNA
gtccaagagaactttgtaca

SEQ ID NO: 31661 - DNA, 20 bp, synthetic construct
  source 1..20: mol_type = other DNA
tgtccaagagaactttgtac

SEQ ID NO: 31662 - DNA, 20 bp, synthetic construct
  source 1..20: mol_type = other DNA
ctgtccaagagaactttgta

SEQ ID NO: 31663 - DNA, 20 bp, synthetic construct
  source 1..20: mol_type = other DNA
gctgtccaagagaactttgt

SEQ ID NO: 31664 - DNA, 20 bp, synthetic construct
  source 1..20: mol_type = other DNA
tgctgtccaagagaactttg

SEQ ID NO: 31665 - DNA, 20 bp, synthetic construct
  source 1..20: mol_type = other DNA
atgctgtccaagagaacttt

SEQ ID NO: 31666 - DNA, 20 bp, synthetic construct
  source 1..20: mol_type = other DNA
catgctgtccaagagaactt

SEQ ID NO: 31667 - DNA, 20 bp, synthetic construct
  source 1..20: mol_type = other DNA
ccatgctgtccaagagaact

SEQ ID NO: 31668 - DNA, 20 bp, synthetic construct
  source 1..20: mol_type = other DNA
cccatgctgtccaagagaac

SEQ ID NO: 31669 - DNA, 20 bp, synthetic construct
  source 1..20: mol_type = other DNA
tcccatgctgtccaagagaa

SEQ ID NO: 31670 - DNA, 20 bp, synthetic construct
  source 1..20: mol_type = other DNA
gtcccatgctgtccaagaga

SEQ ID NO: 31671 - DNA, 20 bp, synthetic construct
  source 1..20: mol_type = other DNA
agtcccatgctgtccaagag

SEQ ID NO: 31672 - DNA, 20 bp, synthetic construct
  source 1..20: mol_type = other DNA
tagtcccatgctgtccaaga

SEQ ID NO: 31673 - DNA, 20 bp, synthetic construct
  source 1..20: mol_type = other DNA
ctagtcccatgctgtccaag

SEQ ID NO: 31674 - DNA, 20 bp, synthetic construct
  source 1..20: mol_type = other DNA
tctagtcccatgctgtccaa

SEQ ID NO: 31675 - DNA, 20 bp, synthetic construct
  source 1..20: mol_type = other DNA
ctctagtcccatgctgtcca

SEQ ID NO: 31676 - DNA, 20 bp, synthetic construct
  source 1..20: mol_type = other DNA
gctctagtcccatgctgtcc

SEQ ID NO: 31677 - DNA, 20 bp, synthetic construct
  source 1..20: mol_type = other DNA
ggctctagtcccatgctgtc

SEQ ID NO: 31678 - DNA, 20 bp, synthetic construct
  source 1..20: mol_type = other DNA
gggctctagtcccatgctgt

SEQ ID NO: 31679 - DNA, 20 bp, synthetic construct
  source 1..20: mol_type = other DNA
agggctctagtcccatgctg

SEQ ID NO: 31680 - DNA, 20 bp, synthetic construct
  source 1..20: mol_type = other DNA
tagggctctagtcccatgct

SEQ ID NO: 31681 - DNA, 20 bp, synthetic construct
  source 1..20: mol_type = other DNA
ttagggctctagtcccatgc

SEQ ID NO: 31682 - DNA, 20 bp, synthetic construct
  source 1..20: mol_type = other DNA
cttagggctctagtcccatg

SEQ ID NO: 31683 - DNA, 20 bp, synthetic construct
  source 1..20: mol_type = other DNA
tcttagggctctagtcccat

SEQ ID NO: 31684 - DNA, 20 bp, synthetic construct
  source 1..20: mol_type = other DNA
atcttagggctctagtccca

SEQ ID NO: 31685 - DNA, 20 bp, synthetic construct
  source 1..20: mol_type = other DNA
gatcttagggctctagtccc

SEQ ID NO: 31686 - DNA, 20 bp, synthetic construct
  source 1..20: mol_type = other DNA
ggatcttagggctctagtcc

SEQ ID NO: 31687 - DNA, 20 bp, synthetic construct
  source 1..20: mol_type = other DNA
aggatcttagggctctagtc

SEQ ID NO: 31688 - DNA, 20 bp, synthetic construct
  source 1..20: mol_type = other DNA
aaggatcttagggctctagt

SEQ ID NO: 31689 - DNA, 20 bp, synthetic construct
  source 1..20: mol_type = other DNA
aaaggatcttagggctctag

SEQ ID NO: 31690 - DNA, 20 bp, synthetic construct
  source 1..20: mol_type = other DNA
aaaaggatcttagggctcta

SEQ ID NO: 31691 - DNA, 20 bp, synthetic construct
  source 1..20: mol_type = other DNA
gaaaaggatcttagggctct

SEQ ID NO: 31692 - DNA, 20 bp, synthetic construct
  source 1..20: mol_type = other DNA
agaaaaggatcttagggctc

SEQ ID NO: 31693 - DNA, 20 bp, synthetic construct
  source 1..20: mol_type = other DNA
tagaaaaggatcttagggct

SEQ ID NO: 31694 - DNA, 20 bp, synthetic construct
  source 1..20: mol_type = other DNA
gtagaaaaggatcttagggc

SEQ ID NO: 31695 - DNA, 20 bp, synthetic construct
  source 1..20: mol_type = other DNA
ggtagaaaaggatcttaggg

SEQ ID NO: 31696 - DNA, 20 bp, synthetic construct
  source 1..20: mol_type = other DNA
aggtagaaaaggatcttagg

SEQ ID NO: 31697 - DNA, 20 bp, synthetic construct
  source 1..20: mol_type = other DNA
caggtagaaaaggatcttag

SEQ ID NO: 31698 - DNA, 20 bp, synthetic construct
  source 1..20: mol_type = other DNA
tcaggtagaaaaggatctta

SEQ ID NO: 31699 - DNA, 20 bp, synthetic construct
  source 1..20: mol_type = other DNA
ctcaggtagaaaaggatctt

SEQ ID NO: 31700 - DNA, 20 bp, synthetic construct
  source 1..20: mol_type = other DNA
actcaggtagaaaaggatct

SEQ ID NO: 31701 - DNA, 20 bp, synthetic construct
  source 1..20: mol_type = other DNA
aactcaggtagaaaaggatc

SEQ ID NO: 31702 - DNA, 20 bp, synthetic construct
  source 1..20: mol_type = other DNA
caactcaggtagaaaaggat

SEQ ID NO: 31703 - DNA, 20 bp, synthetic construct
  source 1..20: mol_type = other DNA
acaactcaggtagaaaagga

SEQ ID NO: 31704 - DNA, 20 bp, synthetic construct
  source 1..20: mol_type = other DNA
aacaactcaggtagaaaagg

SEQ ID NO: 31705 - DNA, 20 bp, synthetic construct
  source 1..20: mol_type = other DNA
aaacaactcaggtagaaaag

SEQ ID NO: 31706 - DNA, 20 bp, synthetic construct
  source 1..20: mol_type = other DNA
caaacaactcaggtagaaaa

SEQ ID NO: 31707 - DNA, 20 bp, synthetic construct
  source 1..20: mol_type = other DNA
ccaaacaactcaggtagaaa

SEQ ID NO: 31708 - DNA, 20 bp, synthetic construct
  source 1..20: mol_type = other DNA
tccaaacaactcaggtagaa

SEQ ID NO: 31709 - DNA, 20 bp, synthetic construct
  source 1..20: mol_type = other DNA
atccaaacaactcaggtaga

SEQ ID NO: 31710 - DNA, 20 bp, synthetic construct
  source 1..20: mol_type = other DNA
aatccaaacaactcaggtag

SEQ ID NO: 31711 - DNA, 20 bp, synthetic construct
  source 1..20: mol_type = other DNA
aaatccaaacaactcaggta

SEQ ID NO: 31712 - DNA, 20 bp, synthetic construct
  source 1..20: mol_type = other DNA
aaaatccaaacaactcaggt

SEQ ID NO: 31713 - DNA, 20 bp, synthetic construct
  source 1..20: mol_type = other DNA
aaaaatccaaacaactcagg

SEQ ID NO: 31714 - DNA, 20 bp, synthetic construct
  source 1..20: mol_type = other DNA
aaaaaatccaaacaactcag

SEQ ID NO: 31715 - DNA, 20 bp, synthetic construct
  source 1..20: mol_type = other DNA
caaaaaatccaaacaactca

SEQ ID NO: 31716 - DNA, 20 bp, synthetic construct
  source 1..20: mol_type = other DNA
ccaaaaaatccaaacaactc

SEQ ID NO: 31717 - DNA, 20 bp, synthetic construct
  source 1..20: mol_type = other DNA
accaaaaaatccaaacaact

SEQ ID NO: 31718 - DNA, 20 bp, synthetic construct
  source 1..20: mol_type = other DNA
caccaaaaaatccaaacaac

SEQ ID NO: 31719 - DNA, 20 bp, synthetic construct
  source 1..20: mol_type = other DNA
acaccaaaaaatccaaacaa

SEQ ID NO: 31720 - DNA, 20 bp, synthetic construct
  source 1..20: mol_type = other DNA
cacaccaaaaaatccaaaca

SEQ ID NO: 31721 - DNA, 20 bp, synthetic construct
  source 1..20: mol_type = other DNA
acacaccaaaaaatccaaac

SEQ ID NO: 31722 - DNA, 20 bp, synthetic construct
  source 1..20: mol_type = other DNA
gacacaccaaaaaatccaaa

SEQ ID NO: 31723 - DNA, 20 bp, synthetic construct
  source 1..20: mol_type = other DNA
agacacaccaaaaaatccaa

SEQ ID NO: 31724 - DNA, 20 bp, synthetic construct
  source 1..20: mol_type = other DNA
tagacacaccaaaaaatcca

SEQ ID NO: 31725 - DNA, 20 bp, synthetic construct
  source 1..20: mol_type = other DNA
ctagacacaccaaaaaatcc

SEQ ID NO: 31726 - DNA, 20 bp, synthetic construct
  source 1..20: mol_type = other DNA
cctagacacaccaaaaaatc

SEQ ID NO: 31727 - DNA, 20 bp, synthetic construct
  source 1..20: mol_type = other DNA
acctagacacaccaaaaaat

SEQ ID NO: 31728 - DNA, 20 bp, synthetic construct
  source 1..20: mol_type = other DNA
aacctagacacaccaaaaaa

SEQ ID NO: 31729 - DNA, 20 bp, synthetic construct
  source 1..20: mol_type = other DNA
caacctagacacaccaaaaa

SEQ ID NO: 31730 - DNA, 20 bp, synthetic construct
  source 1..20: mol_type = other DNA
ccaacctagacacaccaaaa

SEQ ID NO: 31731 - DNA, 20 bp, synthetic construct
  source 1..20: mol_type = other DNA
tccaacctagacacaccaaa

SEQ ID NO: 31732 - DNA, 20 bp, synthetic construct
  source 1..20: mol_type = other DNA
atccaacctagacacaccaa

SEQ ID NO: 31733 - DNA, 20 bp, synthetic construct
  source 1..20: mol_type = other DNA
gatccaacctagacacacca

SEQ ID NO: 31734 - DNA, 20 bp, synthetic construct
  source 1..20: mol_type = other DNA
agatccaacctagacacacc

SEQ ID NO: 31735 - DNA, 20 bp, synthetic construct
  source 1..20: mol_type = other DNA
tagatccaacctagacacac

SEQ ID NO: 31736 - DNA, 20 bp, synthetic construct
  source 1..20: mol_type = other DNA
ctagatccaacctagacaca

SEQ ID NO: 31737 - DNA, 20 bp, synthetic construct
  source 1..20: mol_type = other DNA
actagatccaacctagacac

SEQ ID NO: 31738 - DNA, 20 bp, synthetic construct
  source 1..20: mol_type = other DNA
aactagatccaacctagaca

SEQ ID NO: 31739 - DNA, 20 bp, synthetic construct
  source 1..20: mol_type = other DNA
caactagatccaacctagac

SEQ ID NO: 31740 - DNA, 20 bp, synthetic construct
  source 1..20: mol_type = other DNA
acaactagatccaacctaga

SEQ ID NO: 31741 - DNA, 20 bp, synthetic construct
  source 1..20: mol_type = other DNA
aacaactagatccaacctag

SEQ ID NO: 31742 - DNA, 20 bp, synthetic construct
  source 1..20: mol_type = other DNA
gaacaactagatccaaccta

SEQ ID NO: 31743 - DNA, 20 bp, synthetic construct
  source 1..20: mol_type = other DNA
tgaacaactagatccaacct

SEQ ID NO: 31744 - DNA, 20 bp, synthetic construct
  source 1..20: mol_type = other DNA
atgaacaactagatccaacc

SEQ ID NO: 31745 - DNA, 20 bp, synthetic construct
  source 1..20: mol_type = other DNA
catgaacaactagatccaac

SEQ ID NO: 31746 - DNA, 20 bp, synthetic construct
  source 1..20: mol_type = other DNA
ccatgaacaactagatccaa

SEQ ID NO: 31747 - DNA, 20 bp, synthetic construct
  source 1..20: mol_type = other DNA
gccatgaacaactagatcca

SEQ ID NO: 31748 - DNA, 20 bp, synthetic construct
  source 1..20: mol_type = other DNA
agccatgaacaactagatcc

SEQ ID NO: 31749 - DNA, 20 bp, synthetic construct
  source 1..20: mol_type = other DNA
aagccatgaacaactagatc

SEQ ID NO: 31750 - DNA, 20 bp, synthetic construct
  source 1..20: mol_type = other DNA
gaagccatgaacaactagat

SEQ ID NO: 31751 - DNA, 20 bp, synthetic construct
  source 1..20: mol_type = other DNA
tgaagccatgaacaactaga

SEQ ID NO: 31752 - DNA, 20 bp, synthetic construct
  source 1..20: mol_type = other DNA
atgaagccatgaacaactag

SEQ ID NO: 31753 - DNA, 20 bp, synthetic construct
  source 1..20: mol_type = other DNA
catgaagccatgaacaacta

SEQ ID NO: 31754 - DNA, 20 bp, synthetic construct
  source 1..20: mol_type = other DNA
tcatgaagccatgaacaact

SEQ ID NO: 31755 - DNA, 20 bp, synthetic construct
  source 1..20: mol_type = other DNA
gtcatgaagccatgaacaac

SEQ ID NO: 31756 - DNA, 20 bp, synthetic construct
  source 1..20: mol_type = other DNA
ggtcatgaagccatgaacaa

SEQ ID NO: 31757 - DNA, 20 bp, synthetic construct
  source 1..20: mol_type = other DNA
tggtcatgaagccatgaaca

SEQ ID NO: 31758 - DNA, 20 bp, synthetic construct
  source 1..20: mol_type = other DNA
ttggtcatgaagccatgaac

SEQ ID NO: 31759 - DNA, 20 bp, synthetic construct
  source 1..20: mol_type = other DNA
cttggtcatgaagccatgaa

SEQ ID NO: 31760 - DNA, 20 bp, synthetic construct
  source 1..20: mol_type = other DNA
gcttggtcatgaagccatga

SEQ ID NO: 31761 - DNA, 20 bp, synthetic construct
  source 1..20: mol_type = other DNA
ggcttggtcatgaagccatg

SEQ ID NO: 31762 - DNA, 20 bp, synthetic construct
  source 1..20: mol_type = other DNA
aggcttggtcatgaagccat

SEQ ID NO: 31763 - DNA, 20 bp, synthetic construct
  source 1..20: mol_type = other DNA
aaggcttggtcatgaagcca

SEQ ID NO: 31764 - DNA, 20 bp, synthetic construct
  source 1..20: mol_type = other DNA
aaaggcttggtcatgaagcc

SEQ ID NO: 31765 - DNA, 20 bp, synthetic construct
  source 1..20: mol_type = other DNA
aaaaggcttggtcatgaagc

SEQ ID NO: 31766 - DNA, 20 bp, synthetic construct
  source 1..20: mol_type = other DNA
taaaaggcttggtcatgaag

SEQ ID NO: 31767 - DNA, 20 bp, synthetic construct
  source 1..20: mol_type = other DNA
ataaaaggcttggtcatgaa

SEQ ID NO: 31768 - DNA, 20 bp, synthetic construct
  source 1..20: mol_type = other DNA
gataaaaggcttggtcatga

SEQ ID NO: 31769 - DNA, 20 bp, synthetic construct
  source 1..20: mol_type = other DNA
ggataaaaggcttggtcatg

SEQ ID NO: 31770 - DNA, 20 bp, synthetic construct
  source 1..20: mol_type = other DNA
gggataaaaggcttggtcat

SEQ ID NO: 31771 - DNA, 20 bp, synthetic construct
  source 1..20: mol_type = other DNA
agggataaaaggcttggtca

SEQ ID NO: 31772 - DNA, 20 bp, synthetic construct
  source 1..20: mol_type = other DNA
aagggataaaaggcttggtc

SEQ ID NO: 31773 - DNA, 20 bp, synthetic construct
  source 1..20: mol_type = other DNA
aaagggataaaaggcttggt

SEQ ID NO: 31774 - DNA, 20 bp, synthetic construct
  source 1..20: mol_type = other DNA
gaaagggataaaaggcttgg

SEQ ID NO: 31775 - DNA, 20 bp, synthetic construct
  source 1..20: mol_type = other DNA
agaaagggataaaaggcttg

SEQ ID NO: 31776 - DNA, 20 bp, synthetic construct
  source 1..20: mol_type = other DNA
gagaaagggataaaaggctt

SEQ ID NO: 31777 - DNA, 20 bp, synthetic construct
  source 1..20: mol_type = other DNA
agagaaagggataaaaggct

SEQ ID NO: 31778 - DNA, 20 bp, synthetic construct
  source 1..20: mol_type = other DNA
tagagaaagggataaaaggc

SEQ ID NO: 31779 - DNA, 20 bp, synthetic construct
  source 1..20: mol_type = other DNA
ctagagaaagggataaaagg

SEQ ID NO: 31780 - DNA, 20 bp, synthetic construct
  source 1..20: mol_type = other DNA
tctagagaaagggataaaag

SEQ ID NO: 31781 - DNA, 20 bp, synthetic construct
  source 1..20: mol_type = other DNA
ctctagagaaagggataaaa

SEQ ID NO: 31782 - DNA, 20 bp, synthetic construct
  source 1..20: mol_type = other DNA
cctctagagaaagggataaa

SEQ ID NO: 31783 - DNA, 20 bp, synthetic construct
  source 1..20: mol_type = other DNA
ccctctagagaaagggataa

SEQ ID NO: 31784 - DNA, 20 bp, synthetic construct
  source 1..20: mol_type = other DNA
tccctctagagaaagggata

SEQ ID NO: 31785 - DNA, 20 bp, synthetic construct
  source 1..20: mol_type = other DNA
gtccctctagagaaagggat

SEQ ID NO: 31786 - DNA, 20 bp, synthetic construct
  source 1..20: mol_type = other DNA
agtccctctagagaaaggga

SEQ ID NO: 31787 - DNA, 20 bp, synthetic construct
  source 1..20: mol_type = other DNA
gagtccctctagagaaaggg

SEQ ID NO: 31788 - DNA, 20 bp, synthetic construct
  source 1..20: mol_type = other DNA
tgagtccctctagagaaagg

SEQ ID NO: 31789 - DNA, 20 bp, synthetic construct
  source 1..20: mol_type = other DNA
ttgagtccctctagagaaag

SEQ ID NO: 31790 - DNA, 20 bp, synthetic construct
  source 1..20: mol_type = other DNA
cttgagtccctctagagaaa

SEQ ID NO: 31791 - DNA, 20 bp, synthetic construct
  source 1..20: mol_type = other DNA
ccttgagtccctctagagaa

SEQ ID NO: 31792 - DNA, 20 bp, synthetic construct
  source 1..20: mol_type = other DNA
cccttgagtccctctagaga

SEQ ID NO: 31793 - DNA, 20 bp, synthetic construct
  source 1..20: mol_type = other DNA
ccccttgagtccctctagag

SEQ ID NO: 31794 - DNA, 20 bp, synthetic construct
  source 1..20: mol_type = other DNA
accccttgagtccctctaga

SEQ ID NO: 31795 - DNA, 20 bp, synthetic construct
  source 1..20: mol_type = other DNA
taccccttgagtccctctag

SEQ ID NO: 31796 - DNA, 20 bp, synthetic construct
  source 1..20: mol_type = other DNA
ttaccccttgagtccctcta

SEQ ID NO: 31797 - DNA, 20 bp, synthetic construct
  source 1..20: mol_type = other DNA
tttaccccttgagtccctct

SEQ ID NO: 31798 - DNA, 20 bp, synthetic construct
  source 1..20: mol_type = other DNA
ctttaccccttgagtccctc

SEQ ID NO: 31799 - DNA, 20 bp, synthetic construct
  source 1..20: mol_type = other DNA
cctttaccccttgagtccct

SEQ ID NO: 31800 - DNA, 20 bp, synthetic construct
  source 1..20: mol_type = other DNA
gcctttaccccttgagtccc

SEQ ID NO: 31801 - DNA, 20 bp, synthetic construct
  source 1..20: mol_type = other DNA
tgcctttaccccttgagtcc

SEQ ID NO: 31802 - DNA, 20 bp, synthetic construct
  source 1..20: mol_type = other DNA
gtgcctttaccccttgagtc

SEQ ID NO: 31803 - DNA, 20 bp, synthetic construct
  source 1..20: mol_type = other DNA
agtgcctttaccccttgagt

SEQ ID NO: 31804 - DNA, 20 bp, synthetic construct
  source 1..20: mol_type = other DNA
cagtgcctttaccccttgag

SEQ ID NO: 31805 - DNA, 20 bp, synthetic construct
  source 1..20: mol_type = other DNA
tcagtgcctttaccccttga

SEQ ID NO: 31806 - DNA, 20 bp, synthetic construct
  source 1..20: mol_type = other DNA
ttcagtgcctttaccccttg

SEQ ID NO: 31807 - DNA, 20 bp, synthetic construct
  source 1..20: mol_type = other DNA
cttcagtgcctttacccctt

SEQ ID NO: 31808 - DNA, 20 bp, synthetic construct
  source 1..20: mol_type = other DNA
ccttcagtgcctttacccct

SEQ ID NO: 31809 - DNA, 20 bp, synthetic construct
  source 1..20: mol_type = other DNA
cccttcagtgcctttacccc

SEQ ID NO: 31810 - DNA, 20 bp, synthetic construct
  source 1..20: mol_type = other DNA
ccccttcagtgcctttaccc

SEQ ID NO: 31811 - DNA, 20 bp, synthetic construct
  source 1..20: mol_type = other DNA
accccttcagtgcctttacc

SEQ ID NO: 31812 - DNA, 20 bp, synthetic construct
  source 1..20: mol_type = other DNA
taccccttcagtgcctttac

SEQ ID NO: 31813 - DNA, 20 bp, synthetic construct
  source 1..20: mol_type = other DNA
ttaccccttcagtgccttta

SEQ ID NO: 31814 - DNA, 20 bp, synthetic construct
  source 1..20: mol_type = other DNA
tttaccccttcagtgccttt

SEQ ID NO: 31815 - DNA, 20 bp, synthetic construct
  source 1..20: mol_type = other DNA
ttttaccccttcagtgcctt

SEQ ID NO: 31816 - DNA, 20 bp, synthetic construct
  source 1..20: mol_type = other DNA
gttttaccccttcagtgcct

SEQ ID NO: 31817 - DNA, 20 bp, synthetic construct
  source 1..20: mol_type = other DNA
agttttaccccttcagtgcc

SEQ ID NO: 31818 - DNA, 20 bp, synthetic construct
  source 1..20: mol_type = other DNA
aagttttaccccttcagtgc

SEQ ID NO: 31819 - DNA, 20 bp, synthetic construct
  source 1..20: mol_type = other DNA
gaagttttaccccttcagtg

SEQ ID NO: 31820 - DNA, 20 bp, synthetic construct
  source 1..20: mol_type = other DNA
tgaagttttaccccttcagt

SEQ ID NO: 31821 - DNA, 20 bp, synthetic construct
  source 1..20: mol_type = other DNA
atgaagttttaccccttcag

SEQ ID NO: 31822 - DNA, 20 bp, synthetic construct
  source 1..20: mol_type = other DNA
tatgaagttttaccccttca

SEQ ID NO: 31823 - DNA, 20 bp, synthetic construct
  source 1..20: mol_type = other DNA
atatgaagttttaccccttc

SEQ ID NO: 31824 - DNA, 20 bp, synthetic construct
  source 1..20: mol_type = other DNA
catatgaagttttacccctt

SEQ ID NO: 31825 - DNA, 20 bp, synthetic construct
  source 1..20: mol_type = other DNA
tcatatgaagttttacccct

SEQ ID NO: 31826 - DNA, 20 bp, synthetic construct
  source 1..20: mol_type = other DNA
ttcatatgaagttttacccc

SEQ ID NO: 31827 - DNA, 20 bp, synthetic construct
  source 1..20: mol_type = other DNA
cttcatatgaagttttaccc

SEQ ID NO: 31828 - DNA, 20 bp, synthetic construct
  source 1..20: mol_type = other DNA
tcttcatatgaagttttacc

SEQ ID NO: 31829 - DNA, 20 bp, synthetic construct
  source 1..20: mol_type = other DNA
ctcttcatatgaagttttac

SEQ ID NO: 31830 - DNA, 20 bp, synthetic construct
  source 1..20: mol_type = other DNA
actcttcatatgaagtttta

SEQ ID NO: 31831 - DNA, 20 bp, synthetic construct
  source 1..20: mol_type = other DNA
cactcttcatatgaagtttt

SEQ ID NO: 31832 - DNA, 20 bp, synthetic construct
  source 1..20: mol_type = other DNA
acactcttcatatgaagttt

SEQ ID NO: 31833 - DNA, 20 bp, synthetic construct
  source 1..20: mol_type = other DNA
cacactcttcatatgaagtt

SEQ ID NO: 31834 - DNA, 20 bp, synthetic construct
  source 1..20: mol_type = other DNA
ccacactcttcatatgaagt

SEQ ID NO: 31835 - DNA, 20 bp, synthetic construct
  source 1..20: mol_type = other DNA
accacactcttcatatgaag

SEQ ID NO: 31836 - DNA, 20 bp, synthetic construct
  source 1..20: mol_type = other DNA
caccacactcttcatatgaa

SEQ ID NO: 31837 - DNA, 20 bp, synthetic construct
  source 1..20: mol_type = other DNA
ccaccacactcttcatatga

SEQ ID NO: 31838 - DNA, 20 bp, synthetic construct
  source 1..20: mol_type = other DNA
accaccacactcttcatatg

SEQ ID NO: 31839 - DNA, 20 bp, synthetic construct
  source 1..20: mol_type = other DNA
caccaccacactcttcatat

SEQ ID NO: 31840 - DNA, 20 bp, synthetic construct
  source 1..20: mol_type = other DNA
ccaccaccacactcttcata

SEQ ID NO: 31841 - DNA, 20 bp, synthetic construct
  source 1..20: mol_type = other DNA
accaccaccacactcttcat

SEQ ID NO: 31842 - DNA, 20 bp, synthetic construct
  source 1..20: mol_type = other DNA
caccaccaccacactcttca

SEQ ID NO: 31843 - DNA, 20 bp, synthetic construct
  source 1..20: mol_type = other DNA
ccaccaccaccacactcttc

SEQ ID NO: 31844 - DNA, 20 bp, synthetic construct
  source 1..20: mol_type = other DNA
accaccaccaccacactctt

SEQ ID NO: 31845 - DNA, 20 bp, synthetic construct
  source 1..20: mol_type = other DNA
caccaccaccaccacactct

SEQ ID NO: 31846 - DNA, 20 bp, synthetic construct
  source 1..20: mol_type = other DNA
ccaccaccaccaccacactc

SEQ ID NO: 31847 - DNA, 20 bp, synthetic construct
  source 1..20: mol_type = other DNA
accaccaccaccaccacact

SEQ ID NO: 31848 - DNA, 20 bp, synthetic construct
  source 1..20: mol_type = other DNA
caccaccaccaccaccacac

SEQ ID NO: 31849 - DNA, 20 bp, synthetic construct
  source 1..20: mol_type = other DNA
acaccaccaccaccaccaca

SEQ ID NO: 31850 - DNA, 20 bp, synthetic construct
  source 1..20: mol_type = other DNA
aacaccaccaccaccaccac

SEQ ID NO: 31851 - DNA, 20 bp, synthetic construct
  source 1..20: mol_type = other DNA
aaacaccaccaccaccacca

SEQ ID NO: 31852 - DNA, 20 bp, synthetic construct
  source 1..20: mol_type = other DNA
aaaacaccaccaccaccacc

SEQ ID NO: 31853 - DNA, 20 bp, synthetic construct
  source 1..20: mol_type = other DNA
taaaacaccaccaccaccac

SEQ ID NO: 31854 - DNA, 20 bp, synthetic construct
  source 1..20: mol_type = other DNA
ttaaaacaccaccaccacca

SEQ ID NO: 31855 - DNA, 20 bp, synthetic construct
  source 1..20: mol_type = other DNA
cttaaaacaccaccaccacc

SEQ ID NO: 31856 - DNA, 20 bp, synthetic construct
  source 1..20: mol_type = other DNA
tcttaaaacaccaccaccac

SEQ ID NO: 31857 - DNA, 20 bp, synthetic construct
  source 1..20: mol_type = other DNA
gtcttaaaacaccaccacca

SEQ ID NO: 31858 - DNA, 20 bp, synthetic construct
  source 1..20: mol_type = other DNA
tgtcttaaaacaccaccacc

SEQ ID NO: 31859 - DNA, 20 bp, synthetic construct
  source 1..20: mol_type = other DNA
ctgtcttaaaacaccaccac

SEQ ID NO: 31860 - DNA, 20 bp, synthetic construct
  source 1..20: mol_type = other DNA
cctgtcttaaaacaccacca

SEQ ID NO: 31861 - DNA, 20 bp, synthetic construct
  source 1..20: mol_type = other DNA
ccctgtcttaaaacaccacc

SEQ ID NO: 31862 - DNA, 20 bp, synthetic construct
  source 1..20: mol_type = other DNA
accctgtcttaaaacaccac

SEQ ID NO: 31863 - DNA, 20 bp, synthetic construct
  source 1..20: mol_type = other DNA
gaccctgtcttaaaacacca

SEQ ID NO: 31864 - DNA, 20 bp, synthetic construct
  source 1..20: mol_type = other DNA
agaccctgtcttaaaacacc

SEQ ID NO: 31865 - DNA, 20 bp, synthetic construct
  source 1..20: mol_type = other DNA
gagaccctgtcttaaaacac

SEQ ID NO: 31866 - DNA, 20 bp, synthetic construct
  source 1..20: mol_type = other DNA
cgagaccctgtcttaaaaca

SEQ ID NO: 31867 - DNA, 20 bp, synthetic construct
  source 1..20: mol_type = other DNA
gcgagaccctgtcttaaaac

SEQ ID NO: 31868 - DNA, 20 bp, synthetic construct
  source 1..20: mol_type = other DNA
agcgagaccctgtcttaaaa

SEQ ID NO: 31869 - DNA, 20 bp, synthetic construct
  source 1..20: mol_type = other DNA
gagcgagaccctgtcttaaa

SEQ ID NO: 31870 - DNA, 20 bp, synthetic construct
  source 1..20: mol_type = other DNA
agagcgagaccctgtcttaa

SEQ ID NO: 31871 - DNA, 20 bp, synthetic construct
  source 1..20: mol_type = other DNA
cagagcgagaccctgtctta

SEQ ID NO: 31872 - DNA, 20 bp, synthetic construct
  source 1..20: mol_type = other DNA
acagagcgagaccctgtctt

SEQ ID NO: 31873 - DNA, 20 bp, synthetic construct
  source 1..20: mol_type = other DNA
gacagagcgagaccctgtct

SEQ ID NO: 31874 - DNA, 20 bp, synthetic construct
  source 1..20: mol_type = other DNA
tgacagagcgagaccctgtc

SEQ ID NO: 31875 - DNA, 20 bp, synthetic construct
  source 1..20: mol_type = other DNA
gtgacagagcgagaccctgt

SEQ ID NO: 31876 - DNA, 20 bp, synthetic construct
  source 1..20: mol_type = other DNA
agtgacagagcgagaccctg

SEQ ID NO: 31877 - DNA, 20 bp, synthetic construct
  source 1..20: mol_type = other DNA
gagtgacagagcgagaccct

SEQ ID NO: 31878 - DNA, 20 bp, synthetic construct
  source 1..20: mol_type = other DNA
tgagtgacagagcgagaccc

SEQ ID NO: 31879 - DNA, 20 bp, synthetic construct
  source 1..20: mol_type = other DNA
ctgagtgacagagcgagacc

SEQ ID NO: 31880 - DNA, 20 bp, synthetic construct
  source 1..20: mol_type = other DNA
cctgagtgacagagcgagac

SEQ ID NO: 31881 - DNA, 20 bp, synthetic construct
  source 1..20: mol_type = other DNA
gcctgagtgacagagcgaga

SEQ ID NO: 31882 - DNA, 20 bp, synthetic construct
  source 1..20: mol_type = other DNA
agcctgagtgacagagcgag

SEQ ID NO: 31883 - DNA, 20 bp, synthetic construct
  source 1..20: mol_type = other DNA
cagcctgagtgacagagcga

SEQ ID NO: 31884 - DNA, 20 bp, synthetic construct
  source 1..20: mol_type = other DNA
ccagcctgagtgacagagcg

SEQ ID NO: 31885 - DNA, 20 bp, synthetic construct
  source 1..20: mol_type = other DNA
tccagcctgagtgacagagc

SEQ ID NO: 31886 - DNA, 20 bp, synthetic construct
  source 1..20: mol_type = other DNA
ctccagcctgagtgacagag

SEQ ID NO: 31887 - DNA, 20 bp, synthetic construct
  source 1..20: mol_type = other DNA
actccagcctgagtgacaga

SEQ ID NO: 31888 - DNA, 20 bp, synthetic construct
  source 1..20: mol_type = other DNA
gactccagcctgagtgacag

SEQ ID NO: 31889 - DNA, 20 bp, synthetic construct
  source 1..20: mol_type = other DNA
ggactccagcctgagtgaca

SEQ ID NO: 31890 - DNA, 20 bp, synthetic construct
  source 1..20: mol_type = other DNA
tggactccagcctgagtgac

SEQ ID NO: 31891 - DNA, 20 bp, synthetic construct
  source 1..20: mol_type = other DNA
ctggactccagcctgagtga

SEQ ID NO: 31892 - DNA, 20 bp, synthetic construct
  source 1..20: mol_type = other DNA
actggactccagcctgagtg

SEQ ID NO: 31893 - DNA, 20 bp, synthetic construct
  source 1..20: mol_type = other DNA
cactggactccagcctgagt

SEQ ID NO: 31894 - DNA, 20 bp, synthetic construct
  source 1..20: mol_type = other DNA
ccactggactccagcctgag

SEQ ID NO: 31895 - DNA, 20 bp, synthetic construct
  source 1..20: mol_type = other DNA
gccactggactccagcctga

SEQ ID NO: 31896 - DNA, 20 bp, synthetic construct
  source 1..20: mol_type = other DNA
tgccactggactccagcctg

SEQ ID NO: 31897 - DNA, 20 bp, synthetic construct
  source 1..20: mol_type = other DNA
atgccactggactccagcct

SEQ ID NO: 31898 - DNA, 20 bp, synthetic construct
  source 1..20: mol_type = other DNA
catgccactggactccagcc

SEQ ID NO: 31899 - DNA, 20 bp, synthetic construct
  source 1..20: mol_type = other DNA
tcatgccactggactccagc

SEQ ID NO: 31900 - DNA, 20 bp, synthetic construct
  source 1..20: mol_type = other DNA
atcatgccactggactccag

SEQ ID NO: 31901 - DNA, 20 bp, synthetic construct
  source 1..20: mol_type = other DNA
gatcatgccactggactcca

SEQ ID NO: 31902 - DNA, 20 bp, synthetic construct
  source 1..20: mol_type = other DNA
ggatcatgccactggactcc

SEQ ID NO: 31903 - DNA, 20 bp, synthetic construct
  source 1..20: mol_type = other DNA
aggatcatgccactggactc

SEQ ID NO: 31904 - DNA, 20 bp, synthetic construct
  source 1..20: mol_type = other DNA
caggatcatgccactggact

SEQ ID NO: 31905 - DNA, 20 bp, synthetic construct
  source 1..20: mol_type = other DNA
ccaggatcatgccactggac

SEQ ID NO: 31906 - DNA, 20 bp, synthetic construct
  source 1..20: mol_type = other DNA
gccaggatcatgccactgga

SEQ ID NO: 31907 - DNA, 20 bp, synthetic construct
  source 1..20: mol_type = other DNA
agccaggatcatgccactgg

SEQ ID NO: 31908 - DNA, 20 bp, synthetic construct
  source 1..20: mol_type = other DNA
gagccaggatcatgccactg

SEQ ID NO: 31909 - DNA, 20 bp, synthetic construct
  source 1..20: mol_type = other DNA
tgagccaggatcatgccact

SEQ ID NO: 31910 - DNA, 20 bp, synthetic construct
  source 1..20: mol_type = other DNA
gtgagccaggatcatgccac

SEQ ID NO: 31911 - DNA, 20 bp, synthetic construct
  source 1..20: mol_type = other DNA
agtgagccaggatcatgcca

SEQ ID NO: 31912 - DNA, 20 bp, synthetic construct
  source 1..20: mol_type = other DNA
cagtgagccaggatcatgcc

SEQ ID NO: 31913 - DNA, 20 bp, synthetic construct
  source 1..20: mol_type = other DNA
gcagtgagccaggatcatgc

SEQ ID NO: 31914 - DNA, 20 bp, synthetic construct
  source 1..20: mol_type = other DNA
tgcagtgagccaggatcatg

SEQ ID NO: 31915 - DNA, 20 bp, synthetic construct
  source 1..20: mol_type = other DNA
ctgcagtgagccaggatcat

SEQ ID NO: 31916 - DNA, 20 bp, synthetic construct
  source 1..20: mol_type = other DNA
gctgcagtgagccaggatca

SEQ ID NO: 31917 - DNA, 20 bp, synthetic construct
  source 1..20: mol_type = other DNA
ggctgcagtgagccaggatc

SEQ ID NO: 31918 - DNA, 20 bp, synthetic construct
  source 1..20: mol_type = other DNA
aggctgcagtgagccaggat

SEQ ID NO: 31919 - DNA, 20 bp, synthetic construct
  source 1..20: mol_type = other DNA
gaggctgcagtgagccagga

SEQ ID NO: 31920 - DNA, 20 bp, synthetic construct
  source 1..20: mol_type = other DNA
cgaggctgcagtgagccagg

SEQ ID NO: 31921 - DNA, 20 bp, synthetic construct
  source 1..20: mol_type = other DNA
tcgaggctgcagtgagccag

SEQ ID NO: 31922 - DNA, 20 bp, synthetic construct
  source 1..20: mol_type = other DNA
gtcgaggctgcagtgagcca

SEQ ID NO: 31923 - DNA, 20 bp, synthetic construct
  source 1..20: mol_type = other DNA
agtcgaggctgcagtgagcc

SEQ ID NO: 31924 - DNA, 20 bp, synthetic construct
  source 1..20: mol_type = other DNA
aagtcgaggctgcagtgagc

SEQ ID NO: 31925 - DNA, 20 bp, synthetic construct
  source 1..20: mol_type = other DNA
gaagtcgaggctgcagtgag

SEQ ID NO: 31926 - DNA, 20 bp, synthetic construct
  source 1..20: mol_type = other DNA
ggaagtcgaggctgcagtga

SEQ ID NO: 31927 - DNA, 20 bp, synthetic construct
  source 1..20: mol_type = other DNA
aggaagtcgaggctgcagtg

SEQ ID NO: 31928 - DNA, 20 bp, synthetic construct
  source 1..20: mol_type = other DNA
caggaagtcgaggctgcagt

SEQ ID NO: 31929 - DNA, 20 bp, synthetic construct
  source 1..20: mol_type = other DNA
ccaggaagtcgaggctgcag

SEQ ID NO: 31930 - DNA, 20 bp, synthetic construct
  source 1..20: mol_type = other DNA
cccaggaagtcgaggctgca

SEQ ID NO: 31931 - DNA, 20 bp, synthetic construct
  source 1..20: mol_type = other DNA
gcccaggaagtcgaggctgc

SEQ ID NO: 31932 - DNA, 20 bp, synthetic construct
  source 1..20: mol_type = other DNA
agcccaggaagtcgaggctg

SEQ ID NO: 31933 - DNA, 20 bp, synthetic construct
  source 1..20: mol_type = other DNA
aagcccaggaagtcgaggct

SEQ ID NO: 31934 - DNA, 20 bp, synthetic construct
  source 1..20: mol_type = other DNA
taagcccaggaagtcgaggc

SEQ ID NO: 31935 - DNA, 20 bp, synthetic construct
  source 1..20: mol_type = other DNA
ttaagcccaggaagtcgagg

SEQ ID NO: 31936 - DNA, 20 bp, synthetic construct
  source 1..20: mol_type = other DNA
cttaagcccaggaagtcgag

SEQ ID NO: 31937 - DNA, 20 bp, synthetic construct
  source 1..20: mol_type = other DNA
acttaagcccaggaagtcga

SEQ ID NO: 31938 - DNA, 20 bp, synthetic construct
  source 1..20: mol_type = other DNA
cacttaagcccaggaagtcg

SEQ ID NO: 31939 - DNA, 20 bp, synthetic construct
  source 1..20: mol_type = other DNA
tcacttaagcccaggaagtc

SEQ ID NO: 31940 - DNA, 20 bp, synthetic construct
  source 1..20: mol_type = other DNA
atcacttaagcccaggaagt

SEQ ID NO: 31941 - DNA, 20 bp, synthetic construct
  source 1..20: mol_type = other DNA
gatcacttaagcccaggaag

SEQ ID NO: 31942 - DNA, 20 bp, synthetic construct
  source 1..20: mol_type = other DNA
ggatcacttaagcccaggaa

SEQ ID NO: 31943 - DNA, 20 bp, synthetic construct
  source 1..20: mol_type = other DNA
aggatcacttaagcccagga

SEQ ID NO: 31944 - DNA, 20 bp, synthetic construct
  source 1..20: mol_type = other DNA
gaggatcacttaagcccagg

SEQ ID NO: 31945 - DNA, 20 bp, synthetic construct
  source 1..20: mol_type = other DNA
ggaggatcacttaagcccag

SEQ ID NO: 31946 - DNA, 20 bp, synthetic construct
  source 1..20: mol_type = other DNA
gggaggatcacttaagccca

SEQ ID NO: 31947 - DNA, 20 bp, synthetic construct
  source 1..20: mol_type = other DNA
tgggaggatcacttaagccc

SEQ ID NO: 31948 - DNA, 20 bp, synthetic construct
  source 1..20: mol_type = other DNA
gtgggaggatcacttaagcc

SEQ ID NO: 31949 - DNA, 20 bp, synthetic construct
  source 1..20: mol_type = other DNA
ggtgggaggatcacttaagc

SEQ ID NO: 31950 - DNA, 20 bp, synthetic construct
  source 1..20: mol_type = other DNA
aggtgggaggatcacttaag

SEQ ID NO: 31951 - DNA, 20 bp, synthetic construct
  source 1..20: mol_type = other DNA
gaggtgggaggatcacttaa

SEQ ID NO: 31952 - DNA, 20 bp, synthetic construct
  source 1..20: mol_type = other DNA
tgaggtgggaggatcactta

SEQ ID NO: 31953 - DNA, 20 bp, synthetic construct
  source 1..20: mol_type = other DNA
ctgaggtgggaggatcactt

SEQ ID NO: 31954 - DNA, 20 bp, synthetic construct
  source 1..20: mol_type = other DNA
gctgaggtgggaggatcact

SEQ ID NO: 31955 - DNA, 20 bp, synthetic construct
  source 1..20: mol_type = other DNA
agctgaggtgggaggatcac

SEQ ID NO: 31956 - DNA, 20 bp, synthetic construct
  source 1..20: mol_type = other DNA
gagctgaggtgggaggatca

SEQ ID NO: 31957 - DNA, 20 bp, synthetic construct
  source 1..20: mol_type = other DNA
ggagctgaggtgggaggatc

SEQ ID NO: 31958 - DNA, 20 bp, synthetic construct
  source 1..20: mol_type = other DNA
gggagctgaggtgggaggat

SEQ ID NO: 31959 - DNA, 20 bp, synthetic construct
  source 1..20: mol_type = other DNA
tgggagctgaggtgggagga

SEQ ID NO: 31960 - DNA, 20 bp, synthetic construct
  source 1..20: mol_type = other DNA
ttgggagctgaggtgggagg

SEQ ID NO: 31961 - DNA, 20 bp, synthetic construct
  source 1..20: mol_type = other DNA
cttgggagctgaggtgggag

SEQ ID NO: 31962 - DNA, 20 bp, synthetic construct
  source 1..20: mol_type = other DNA
acttgggagctgaggtggga

SEQ ID NO: 31963 - DNA, 20 bp, synthetic construct
  source 1..20: mol_type = other DNA
tacttgggagctgaggtggg

SEQ ID NO: 31964 - DNA, 20 bp, synthetic construct
  source 1..20: mol_type = other DNA
ttacttgggagctgaggtgg

SEQ ID NO: 31965 - DNA, 20 bp, synthetic construct
  source 1..20: mol_type = other DNA
gttacttgggagctgaggtg

SEQ ID NO: 31966 - DNA, 20 bp, synthetic construct
  source 1..20: mol_type = other DNA
agttacttgggagctgaggt

SEQ ID NO: 31967 - DNA, 20 bp, synthetic construct
  source 1..20: mol_type = other DNA
cagttacttgggagctgagg

SEQ ID NO: 31968 - DNA, 20 bp, synthetic construct
  source 1..20: mol_type = other DNA
ccagttacttgggagctgag

SEQ ID NO: 31969 - DNA, 20 bp, synthetic construct
  source 1..20: mol_type = other DNA
tccagttacttgggagctga

SEQ ID NO: 31970 - DNA, 20 bp, synthetic construct
  source 1..20: mol_type = other DNA
ttccagttacttgggagctg

SEQ ID NO: 31971 - DNA, 20 bp, synthetic construct
  source 1..20: mol_type = other DNA
gttccagttacttgggagct

SEQ ID NO: 31972 - DNA, 20 bp, synthetic construct
  source 1..20: mol_type = other DNA
agttccagttacttgggagc

SEQ ID NO: 31973 - DNA, 20 bp, synthetic construct
  source 1..20: mol_type = other DNA
cagttccagttacttgggag

SEQ ID NO: 31974 - DNA, 20 bp, synthetic construct
  source 1..20: mol_type = other DNA
acagttccagttacttggga

SEQ ID NO: 31975 - DNA, 20 bp, synthetic construct
  source 1..20: mol_type = other DNA
tacagttccagttacttggg

SEQ ID NO: 31976 - DNA, 20 bp, synthetic construct
  source 1..20: mol_type = other DNA
ctacagttccagttacttgg

SEQ ID NO: 31977 - DNA, 20 bp, synthetic construct
  source 1..20: mol_type = other DNA
cctacagttccagttacttg

SEQ ID NO: 31978 - DNA, 20 bp, synthetic construct
  source 1..20: mol_type = other DNA
gcctacagttccagttactt

SEQ ID NO: 31979 - DNA, 20 bp, synthetic construct
  source 1..20: mol_type = other DNA
tgcctacagttccagttact

SEQ ID NO: 31980 - DNA, 20 bp, synthetic construct
  source 1..20: mol_type = other DNA
atgcctacagttccagttac

SEQ ID NO: 31981 - DNA, 20 bp, synthetic construct
  source 1..20: mol_type = other DNA
catgcctacagttccagtta

SEQ ID NO: 31982 - DNA, 20 bp, synthetic construct
  source 1..20: mol_type = other DNA
tcatgcctacagttccagtt

SEQ ID NO: 31983 - DNA, 20 bp, synthetic construct
  source 1..20: mol_type = other DNA
ctcatgcctacagttccagt

SEQ ID NO: 31984 - DNA, 20 bp, synthetic construct
  source 1..20: mol_type = other DNA
gctcatgcctacagttccag

SEQ ID NO: 31985 - DNA, 20 bp, synthetic construct
  source 1..20: mol_type = other DNA
ggctcatgcctacagttcca

SEQ ID NO: 31986 - DNA, 20 bp, synthetic construct
  source 1..20: mol_type = other DNA
tggctcatgcctacagttcc

SEQ ID NO: 31987 - DNA, 20 bp, synthetic construct
  source 1..20: mol_type = other DNA
gtggctcatgcctacagttc

SEQ ID NO: 31988 - DNA, 20 bp, synthetic construct
  source 1..20: mol_type = other DNA
ggtggctcatgcctacagtt

SEQ ID NO: 31989 - DNA, 20 bp, synthetic construct
  source 1..20: mol_type = other DNA
tggtggctcatgcctacagt

SEQ ID NO: 31990 - DNA, 20 bp, synthetic construct
  source 1..20: mol_type = other DNA
gtggtggctcatgcctacag

SEQ ID NO: 31991 - DNA, 20 bp, synthetic construct
  source 1..20: mol_type = other DNA
tgtggtggctcatgcctaca

SEQ ID NO: 31992 - DNA, 20 bp, synthetic construct
  source 1..20: mol_type = other DNA
gtgtggtggctcatgcctac

SEQ ID NO: 31993 - DNA, 20 bp, synthetic construct
  source 1..20: mol_type = other DNA
ggtgtggtggctcatgccta

SEQ ID NO: 31994 - DNA, 20 bp, synthetic construct
  source 1..20: mol_type = other DNA
aggtgtggtggctcatgcct

SEQ ID NO: 31995 - DNA, 20 bp, synthetic construct
  source 1..20: mol_type = other DNA
caggtgtggtggctcatgcc

SEQ ID NO: 31996 - DNA, 20 bp, synthetic construct
  source 1..20: mol_type = other DNA
gcaggtgtggtggctcatgc

SEQ ID NO: 31997 - DNA, 20 bp, synthetic construct
  source 1..20: mol_type = other DNA
ggcaggtgtggtggctcatg

SEQ ID NO: 31998 - DNA, 20 bp, synthetic construct
  source 1..20: mol_type = other DNA
aggcaggtgtggtggctcat

SEQ ID NO: 31999 - DNA, 20 bp, synthetic construct
  source 1..20: mol_type = other DNA
taggcaggtgtggtggctca

SEQ ID NO: 32000 - DNA, 20 bp, synthetic construct
  source 1..20: mol_type = other DNA
ttaggcaggtgtggtggctc

SEQ ID NO: 32001 - DNA, 20 bp, synthetic construct
  source 1..20: mol_type = other DNA
attaggcaggtgtggtggct

SEQ ID NO: 32002 - DNA, 20 bp, synthetic construct
  source 1..20: mol_type = other DNA
aattaggcaggtgtggtggc

SEQ ID NO: 32003 - DNA, 20 bp, synthetic construct
  source 1..20: mol_type = other DNA
aaattaggcaggtgtggtgg

SEQ ID NO: 32004 - DNA, 20 bp, synthetic construct
  source 1..20: mol_type = other DNA
aaaattaggcaggtgtggtg

SEQ ID NO: 32005 - DNA, 20 bp, synthetic construct
  source 1..20: mol_type = other DNA
aaaaattaggcaggtgtggt

SEQ ID NO: 32006 - DNA, 20 bp, synthetic construct
  source 1..20: mol_type = other DNA
taaaaattaggcaggtgtgg

SEQ ID NO: 32007 - DNA, 20 bp, synthetic construct
  source 1..20: mol_type = other DNA
ttaaaaattaggcaggtgtg

SEQ ID NO: 32008 - DNA, 20 bp, synthetic construct
  source 1..20: mol_type = other DNA
tttaaaaattaggcaggtgt

SEQ ID NO: 32009 - DNA, 20 bp, synthetic construct
  source 1..20: mol_type = other DNA
ttttaaaaattaggcaggtg

SEQ ID NO: 32010 - DNA, 20 bp, synthetic construct
  source 1..20: mol_type = other DNA
gttttaaaaattaggcaggt

SEQ ID NO: 32011 - DNA, 20 bp, synthetic construct
  source 1..20: mol_type = other DNA
agttttaaaaattaggcagg

SEQ ID NO: 32012 - DNA, 20 bp, synthetic construct
  source 1..20: mol_type = other DNA
aagttttaaaaattaggcag

SEQ ID NO: 32013 - DNA, 20 bp, synthetic construct
  source 1..20: mol_type = other DNA
aaagttttaaaaattaggca

SEQ ID NO: 32014 - DNA, 20 bp, synthetic construct
  source 1..20: mol_type = other DNA
gaaagttttaaaaattaggc

SEQ ID NO: 32015 - DNA, 20 bp, synthetic construct
  source 1..20: mol_type = other DNA
agaaagttttaaaaattagg

SEQ ID NO: 32016 - DNA, 20 bp, synthetic construct
  source 1..20: mol_type = other DNA
cagaaagttttaaaaattag

SEQ ID NO: 32017 - DNA, 20 bp, synthetic construct
  source 1..20: mol_type = other DNA
acagaaagttttaaaaatta

SEQ ID NO: 32018 - DNA, 20 bp, synthetic construct
  source 1..20: mol_type = other DNA
tacagaaagttttaaaaatt

SEQ ID NO: 32019 - DNA, 20 bp, synthetic construct
  source 1..20: mol_type = other DNA
ctacagaaagttttaaaaat

SEQ ID NO: 32020 - DNA, 20 bp, synthetic construct
  source 1..20: mol_type = other DNA
tctacagaaagttttaaaaa

SEQ ID NO: 32021 - DNA, 20 bp, synthetic construct
  source 1..20: mol_type = other DNA
ctctacagaaagttttaaaa

SEQ ID NO: 32022 - DNA, 20 bp, synthetic construct
  source 1..20: mol_type = other DNA
tctctacagaaagttttaaa

SEQ ID NO: 32023 - DNA, 20 bp, synthetic construct
  source 1..20: mol_type = other DNA
gtctctacagaaagttttaa

SEQ ID NO: 32024 - DNA, 20 bp, synthetic construct
  source 1..20: mol_type = other DNA
cgtctctacagaaagtttta

SEQ ID NO: 32025 - DNA, 20 bp, synthetic construct
  source 1..20: mol_type = other DNA
tcgtctctacagaaagtttt

SEQ ID NO: 32026 - DNA, 20 bp, synthetic construct
  source 1..20: mol_type = other DNA
ctcgtctctacagaaagttt

SEQ ID NO: 32027 - DNA, 20 bp, synthetic construct
  source 1..20: mol_type = other DNA
tctcgtctctacagaaagtt

SEQ ID NO: 32028 - DNA, 20 bp, synthetic construct
  source 1..20: mol_type = other DNA
atctcgtctctacagaaagt

SEQ ID NO: 32029 - DNA, 20 bp, synthetic construct
  source 1..20: mol_type = other DNA
aatctcgtctctacagaaag

SEQ ID NO: 32030 - DNA, 20 bp, synthetic construct
  source 1..20: mol_type = other DNA
aaatctcgtctctacagaaa

SEQ ID NO: 32031 - DNA, 20 bp, synthetic construct
  source 1..20: mol_type = other DNA
gaaatctcgtctctacagaa

SEQ ID NO: 32032 - DNA, 20 bp, synthetic construct
  source 1..20: mol_type = other DNA
cgaaatctcgtctctacaga

SEQ ID NO: 32033 - DNA, 20 bp, synthetic construct
  source 1..20: mol_type = other DNA
gcgaaatctcgtctctacag

SEQ ID NO: 32034 - DNA, 20 bp, synthetic construct
  source 1..20: mol_type = other DNA
ggcgaaatctcgtctctaca

SEQ ID NO: 32035 - DNA, 20 bp, synthetic construct
  source 1..20: mol_type = other DNA
tggcgaaatctcgtctctac

SEQ ID NO: 32036 - DNA, 20 bp, synthetic construct
  source 1..20: mol_type = other DNA
atggcgaaatctcgtctcta

SEQ ID NO: 32037 - DNA, 20 bp, synthetic construct
  source 1..20: mol_type = other DNA
catggcgaaatctcgtctct

SEQ ID NO: 32038 - DNA, 20 bp, synthetic construct
  source 1..20: mol_type = other DNA
acatggcgaaatctcgtctc

SEQ ID NO: 32039 - DNA, 20 bp, synthetic construct
  source 1..20: mol_type = other DNA
aacatggcgaaatctcgtct

SEQ ID NO: 32040 - DNA, 20 bp, synthetic construct
  source 1..20: mol_type = other DNA
caacatggcgaaatctcgtc

SEQ ID NO: 32041 - DNA, 20 bp, synthetic construct
  source 1..20: mol_type = other DNA
acaacatggcgaaatctcgt

SEQ ID NO: 32042 - DNA, 20 bp, synthetic construct
  source 1..20: mol_type = other DNA
gacaacatggcgaaatctcg

SEQ ID NO: 32043 - DNA, 20 bp, synthetic construct
  source 1..20: mol_type = other DNA
ggacaacatggcgaaatctc

SEQ ID NO: 32044 - DNA, 20 bp, synthetic construct
  source 1..20: mol_type = other DNA
tggacaacatggcgaaatct

SEQ ID NO: 32045 - DNA, 20 bp, synthetic construct
  source 1..20: mol_type = other DNA
ctggacaacatggcgaaatc

SEQ ID NO: 32046 - DNA, 20 bp, synthetic construct
  source 1..20: mol_type = other DNA
cctggacaacatggcgaaat

SEQ ID NO: 32047 - DNA, 20 bp, synthetic construct
  source 1..20: mol_type = other DNA
gcctggacaacatggcgaaa

SEQ ID NO: 32048 - DNA, 20 bp, synthetic construct
  source 1..20: mol_type = other DNA
agcctggacaacatggcgaa

SEQ ID NO: 32049 - DNA, 20 bp, synthetic construct
  source 1..20: mol_type = other DNA
cagcctggacaacatggcga

SEQ ID NO: 32050 - DNA, 20 bp, synthetic construct
  source 1..20: mol_type = other DNA
ccagcctggacaacatggcg

SEQ ID NO: 32051 - DNA, 20 bp, synthetic construct
  source 1..20: mol_type = other DNA
accagcctggacaacatggc

SEQ ID NO: 32052 - DNA, 20 bp, synthetic construct
  source 1..20: mol_type = other DNA
gaccagcctggacaacatgg

SEQ ID NO: 32053 - DNA, 20 bp, synthetic construct
  source 1..20: mol_type = other DNA
agaccagcctggacaacatg

SEQ ID NO: 32054 - DNA, 20 bp, synthetic construct
  source 1..20: mol_type = other DNA
gagaccagcctggacaacat

SEQ ID NO: 32055 - DNA, 20 bp, synthetic construct
  source 1..20: mol_type = other DNA
tgagaccagcctggacaaca

SEQ ID NO: 32056 - DNA, 20 bp, synthetic construct
  source 1..20: mol_type = other DNA
ttgagaccagcctggacaac

SEQ ID NO: 32057 - DNA, 20 bp, synthetic construct
  source 1..20: mol_type = other DNA
tttgagaccagcctggacaa

SEQ ID NO: 32058 - DNA, 20 bp, synthetic construct
  source 1..20: mol_type = other DNA
atttgagaccagcctggaca

SEQ ID NO: 32059 - DNA, 20 bp, synthetic construct
  source 1..20: mol_type = other DNA
aatttgagaccagcctggac

SEQ ID NO: 32060 - DNA, 20 bp, synthetic construct
  source 1..20: mol_type = other DNA
gaatttgagaccagcctgga

SEQ ID NO: 32061 - DNA, 20 bp, synthetic construct
  source 1..20: mol_type = other DNA
ggaatttgagaccagcctgg

SEQ ID NO: 32062 - DNA, 20 bp, synthetic construct
  source 1..20: mol_type = other DNA
aggaatttgagaccagcctg

SEQ ID NO: 32063 - DNA, 20 bp, synthetic construct
  source 1..20: mol_type = other DNA
caggaatttgagaccagcct

SEQ ID NO: 32064 - DNA, 20 bp, synthetic construct
  source 1..20: mol_type = other DNA
ccaggaatttgagaccagcc

SEQ ID NO: 32065 - DNA, 20 bp, synthetic construct
  source 1..20: mol_type = other DNA
tccaggaatttgagaccagc

SEQ ID NO: 32066 - DNA, 20 bp, synthetic construct
  source 1..20: mol_type = other DNA
gtccaggaatttgagaccag

SEQ ID NO: 32067 - DNA, 20 bp, synthetic construct
  source 1..20: mol_type = other DNA
agtccaggaatttgagacca

SEQ ID NO: 32068 - DNA, 20 bp, synthetic construct
  source 1..20: mol_type = other DNA
gagtccaggaatttgagacc

SEQ ID NO: 32069 - DNA, 20 bp, synthetic construct
  source 1..20: mol_type = other DNA
tgagtccaggaatttgagac

SEQ ID NO: 32070 - DNA, 20 bp, synthetic construct
  source 1..20: mol_type = other DNA
gtgagtccaggaatttgaga

SEQ ID NO: 32071 - DNA, 20 bp, synthetic construct
  source 1..20: mol_type = other DNA
ggtgagtccaggaatttgag

SEQ ID NO: 32072 - DNA, 20 bp, synthetic construct
  source 1..20: mol_type = other DNA
aggtgagtccaggaatttga

SEQ ID NO: 32073 - DNA, 20 bp, synthetic construct
  source 1..20: mol_type = other DNA
aaggtgagtccaggaatttg

SEQ ID NO: 32074 - DNA, 20 bp, synthetic construct
  source 1..20: mol_type = other DNA
caaggtgagtccaggaattt

SEQ ID NO: 32075 - DNA, 20 bp, synthetic construct
  source 1..20: mol_type = other DNA
ccaaggtgagtccaggaatt

SEQ ID NO: 32076 - DNA, 20 bp, synthetic construct
  source 1..20: mol_type = other DNA
gccaaggtgagtccaggaat

SEQ ID NO: 32077 - DNA, 20 bp, synthetic construct
  source 1..20: mol_type = other DNA
ggccaaggtgagtccaggaa

SEQ ID NO: 32078 - DNA, 20 bp, synthetic construct
  source 1..20: mol_type = other DNA
aggccaaggtgagtccagga

SEQ ID NO: 32079 - DNA, 20 bp, synthetic construct
  source 1..20: mol_type = other DNA
gaggccaaggtgagtccagg

SEQ ID NO: 32080 - DNA, 20 bp, synthetic construct
  source 1..20: mol_type = other DNA
ggaggccaaggtgagtccag

SEQ ID NO: 32081 - DNA, 20 bp, synthetic construct
  source 1..20: mol_type = other DNA
gggaggccaaggtgagtcca

SEQ ID NO: 32082 - DNA, 20 bp, synthetic construct
  source 1..20: mol_type = other DNA
tgggaggccaaggtgagtcc

SEQ ID NO: 32083 - DNA, 20 bp, synthetic construct
  source 1..20: mol_type = other DNA
ctgggaggccaaggtgagtc

SEQ ID NO: 32084 - DNA, 20 bp, synthetic construct
  source 1..20: mol_type = other DNA
tctgggaggccaaggtgagt

SEQ ID NO: 32085 - DNA, 20 bp, synthetic construct
  source 1..20: mol_type = other DNA
ctctgggaggccaaggtgag

SEQ ID NO: 32086 - DNA, 20 bp, synthetic construct
  source 1..20: mol_type = other DNA
actctgggaggccaaggtga

SEQ ID NO: 32087 - DNA, 20 bp, synthetic construct
  source 1..20: mol_type = other DNA
cactctgggaggccaaggtg

SEQ ID NO: 32088 - DNA, 20 bp, synthetic construct
  source 1..20: mol_type = other DNA
gcactctgggaggccaaggt

SEQ ID NO: 32089 - DNA, 20 bp, synthetic construct
  source 1..20: mol_type = other DNA
agcactctgggaggccaagg

SEQ ID NO: 32090 - DNA, 20 bp, synthetic construct
  source 1..20: mol_type = other DNA
cagcactctgggaggccaag

SEQ ID NO: 32091 - DNA, 20 bp, synthetic construct
  source 1..20: mol_type = other DNA
ccagcactctgggaggccaa

SEQ ID NO: 32092 - DNA, 20 bp, synthetic construct
  source 1..20: mol_type = other DNA
cccagcactctgggaggcca

SEQ ID NO: 32093 - DNA, 20 bp, synthetic construct
  source 1..20: mol_type = other DNA
tcccagcactctgggaggcc

SEQ ID NO: 32094 - DNA, 20 bp, synthetic construct
  source 1..20: mol_type = other DNA
atcccagcactctgggaggc

SEQ ID NO: 32095 - DNA, 20 bp, synthetic construct
  source 1..20: mol_type = other DNA
aatcccagcactctgggagg

SEQ ID NO: 32096 - DNA, 20 bp, synthetic construct
  source 1..20: mol_type = other DNA
caatcccagcactctgggag

SEQ ID NO: 32097 - DNA, 20 bp, synthetic construct
  source 1..20: mol_type = other DNA
gcaatcccagcactctggga

SEQ ID NO: 32098 - DNA, 20 bp, synthetic construct
  source 1..20: mol_type = other DNA
tgcaatcccagcactctggg

SEQ ID NO: 32099 - DNA, 20 bp, synthetic construct
  source 1..20: mol_type = other DNA
ctgcaatcccagcactctgg

SEQ ID NO: 32100 - DNA, 20 bp, synthetic construct
  source 1..20: mol_type = other DNA
cctgcaatcccagcactctg

SEQ ID NO: 32101 - DNA, 20 bp, synthetic construct
  source 1..20: mol_type = other DNA
acctgcaatcccagcactct

SEQ ID NO: 32102 - DNA, 20 bp, synthetic construct
  source 1..20: mol_type = other DNA
cacctgcaatcccagcactc

SEQ ID NO: 32103 - DNA, 20 bp, synthetic construct
  source 1..20: mol_type = other DNA
acacctgcaatcccagcact

SEQ ID NO: 32104 - DNA, 20 bp, synthetic construct
  source 1..20: mol_type = other DNA
cacacctgcaatcccagcac

SEQ ID NO: 32105 - DNA, 20 bp, synthetic construct
  source 1..20: mol_type = other DNA
ccacacctgcaatcccagca

SEQ ID NO: 32106 - DNA, 20 bp, synthetic construct
  source 1..20: mol_type = other DNA
cccacacctgcaatcccagc

SEQ ID NO: 32107 - DNA, 20 bp, synthetic construct
  source 1..20: mol_type = other DNA
gcccacacctgcaatcccag

SEQ ID NO: 32108 - DNA, 20 bp, synthetic construct
  source 1..20: mol_type = other DNA
ggcccacacctgcaatccca

SEQ ID NO: 32109 - DNA, 20 bp, synthetic construct
  source 1..20: mol_type = other DNA
tggcccacacctgcaatccc

SEQ ID NO: 32110 - DNA, 20 bp, synthetic construct
  source 1..20: mol_type = other DNA
gtggcccacacctgcaatcc

SEQ ID NO: 32111 - DNA, 20 bp, synthetic construct
  source 1..20: mol_type = other DNA
agtggcccacacctgcaatc

SEQ ID NO: 32112 - DNA, 20 bp, synthetic construct
  source 1..20: mol_type = other DNA
cagtggcccacacctgcaat

SEQ ID NO: 32113 - DNA, 20 bp, synthetic construct
  source 1..20: mol_type = other DNA
gcagtggcccacacctgcaa

SEQ ID NO: 32114 - DNA, 20 bp, synthetic construct
  source 1..20: mol_type = other DNA
cgcagtggcccacacctgca

SEQ ID NO: 32115 - DNA, 20 bp, synthetic construct
  source 1..20: mol_type = other DNA
tcgcagtggcccacacctgc

SEQ ID NO: 32116 - DNA, 20 bp, synthetic construct
  source 1..20: mol_type = other DNA
gtcgcagtggcccacacctg

SEQ ID NO: 32117 - DNA, 20 bp, synthetic construct
  source 1..20: mol_type = other DNA
agtcgcagtggcccacacct

SEQ ID NO: 32118 - DNA, 20 bp, synthetic construct
  source 1..20: mol_type = other DNA
cagtcgcagtggcccacacc

SEQ ID NO: 32119 - DNA, 20 bp, synthetic construct
  source 1..20: mol_type = other DNA
ccagtcgcagtggcccacac

SEQ ID NO: 32120 - DNA, 20 bp, synthetic construct
  source 1..20: mol_type = other DNA
gccagtcgcagtggcccaca

SEQ ID NO: 32121 - DNA, 20 bp, synthetic construct
  source 1..20: mol_type = other DNA
ggccagtcgcagtggcccac

SEQ ID NO: 32122 - DNA, 20 bp, synthetic construct
  source 1..20: mol_type = other DNA
aggccagtcgcagtggccca

SEQ ID NO: 32123 - DNA, 20 bp, synthetic construct
  source 1..20: mol_type = other DNA
aaggccagtcgcagtggccc

SEQ ID NO: 32124 - DNA, 20 bp, synthetic construct
  source 1..20: mol_type = other DNA
aaaggccagtcgcagtggcc

SEQ ID NO: 32125 - DNA, 20 bp, synthetic construct
  source 1..20: mol_type = other DNA
aaaaggccagtcgcagtggc

SEQ ID NO: 32126 - DNA, 20 bp, synthetic construct
  source 1..20: mol_type = other DNA
aaaaaggccagtcgcagtgg

SEQ ID NO: 32127 - DNA, 20 bp, synthetic construct
  source 1..20: mol_type = other DNA
aaaaaaggccagtcgcagtg

SEQ ID NO: 32128 - DNA, 20 bp, synthetic construct
  source 1..20: mol_type = other DNA
aaaaaaaggccagtcgcagt

SEQ ID NO: 32129 - DNA, 20 bp, synthetic construct
  source 1..20: mol_type = other DNA
aaaaaaaaggccagtcgcag

SEQ ID NO: 32130 - DNA, 20 bp, synthetic construct
  source 1..20: mol_type = other DNA
gaaaaaaaaggccagtcgca

SEQ ID NO: 32131 - DNA, 20 bp, synthetic construct
  source 1..20: mol_type = other DNA
agaaaaaaaaggccagtcgc

SEQ ID NO: 32132 - DNA, 20 bp, synthetic construct
  source 1..20: mol_type = other DNA
gagaaaaaaaaggccagtcg

SEQ ID NO: 32133 - DNA, 20 bp, synthetic construct
  source 1..20: mol_type = other DNA
ggagaaaaaaaaggccagtc

SEQ ID NO: 32134 - DNA, 20 bp, synthetic construct
  source 1..20: mol_type = other DNA
aggagaaaaaaaaggccagt

SEQ ID NO: 32135 - DNA, 20 bp, synthetic construct
  source 1..20: mol_type = other DNA
aaggagaaaaaaaaggccag

SEQ ID NO: 32136 - DNA, 20 bp, synthetic construct
  source 1..20: mol_type = other DNA
aaaggagaaaaaaaaggcca

SEQ ID NO: 32137 - DNA, 20 bp, synthetic construct
  source 1..20: mol_type = other DNA
taaaggagaaaaaaaaggcc

SEQ ID NO: 32138 - DNA, 20 bp, synthetic construct
  source 1..20: mol_type = other DNA
gtaaaggagaaaaaaaaggc

SEQ ID NO: 32139 - DNA, 20 bp, synthetic construct
  source 1..20: mol_type = other DNA
agtaaaggagaaaaaaaagg

SEQ ID NO: 32140 - DNA, 20 bp, synthetic construct
  source 1..20: mol_type = other DNA
tagtaaaggagaaaaaaaag

SEQ ID NO: 32141 - DNA, 20 bp, synthetic construct
  source 1..20: mol_type = other DNA
gtagtaaaggagaaaaaaaa

SEQ ID NO: 32142 - DNA, 20 bp, synthetic construct
  source 1..20: mol_type = other DNA
agtagtaaaggagaaaaaaa

SEQ ID NO: 32143 - DNA, 20 bp, synthetic construct
  source 1..20: mol_type = other DNA
gagtagtaaaggagaaaaaa

SEQ ID NO: 32144 - DNA, 20 bp, synthetic construct
  source 1..20: mol_type = other DNA
agagtagtaaaggagaaaaa

SEQ ID NO: 32145 - DNA, 20 bp, synthetic construct
  source 1..20: mol_type = other DNA
tagagtagtaaaggagaaaa

SEQ ID NO: 32146 - DNA, 20 bp, synthetic construct
  source 1..20: mol_type = other DNA
ctagagtagtaaaggagaaa

SEQ ID NO: 32147 - DNA, 20 bp, synthetic construct
  source 1..20: mol_type = other DNA
actagagtagtaaaggagaa

SEQ ID NO: 32148 - DNA, 20 bp, synthetic construct
  source 1..20: mol_type = other DNA
cactagagtagtaaaggaga

SEQ ID NO: 32149 - DNA, 20 bp, synthetic construct
  source 1..20: mol_type = other DNA
acactagagtagtaaaggag

SEQ ID NO: 32150 - DNA, 20 bp, synthetic construct
  source 1..20: mol_type = other DNA
tacactagagtagtaaagga

SEQ ID NO: 32151 - DNA, 20 bp, synthetic construct
  source 1..20: mol_type = other DNA
atacactagagtagtaaagg

SEQ ID NO: 32152 - DNA, 20 bp, synthetic construct
  source 1..20: mol_type = other DNA
catacactagagtagtaaag

SEQ ID NO: 32153 - DNA, 20 bp, synthetic construct
  source 1..20: mol_type = other DNA
gcatacactagagtagtaaa

SEQ ID NO: 32154 - DNA, 20 bp, synthetic construct
  source 1..20: mol_type = other DNA
agcatacactagagtagtaa

SEQ ID NO: 32155 - DNA, 20 bp, synthetic construct
  source 1..20: mol_type = other DNA
cagcatacactagagtagta

SEQ ID NO: 32156 - DNA, 20 bp, synthetic construct
  source 1..20: mol_type = other DNA
ccagcatacactagagtagt

SEQ ID NO: 32157 - DNA, 20 bp, synthetic construct
  source 1..20: mol_type = other DNA
tccagcatacactagagtag

SEQ ID NO: 32158 - DNA, 20 bp, synthetic construct
  source 1..20: mol_type = other DNA
ttccagcatacactagagta

SEQ ID NO: 32159 - DNA, 20 bp, synthetic construct
  source 1..20: mol_type = other DNA
attccagcatacactagagt

SEQ ID NO: 32160 - DNA, 20 bp, synthetic construct
  source 1..20: mol_type = other DNA
tattccagcatacactagag

SEQ ID NO: 32161 - DNA, 20 bp, synthetic construct
  source 1..20: mol_type = other DNA
atattccagcatacactaga

SEQ ID NO: 32162 - DNA, 20 bp, synthetic construct
  source 1..20: mol_type = other DNA
catattccagcatacactag

SEQ ID NO: 32163 - DNA, 20 bp, synthetic construct
  source 1..20: mol_type = other DNA
tcatattccagcatacacta

SEQ ID NO: 32164 - DNA, 20 bp, synthetic construct
  source 1..20: mol_type = other DNA
ctcatattccagcatacact

SEQ ID NO: 32165 - DNA, 20 bp, synthetic construct
  source 1..20: mol_type = other DNA
cctcatattccagcatacac

SEQ ID NO: 32166 - DNA, 20 bp, synthetic construct
  source 1..20: mol_type = other DNA
tcctcatattccagcataca

SEQ ID NO: 32167 - DNA, 20 bp, synthetic construct
  source 1..20: mol_type = other DNA
ttcctcatattccagcatac

SEQ ID NO: 32168 - DNA, 20 bp, synthetic construct
  source 1..20: mol_type = other DNA
tttcctcatattccagcata

SEQ ID NO: 32169 - DNA, 20 bp, synthetic construct
  source 1..20: mol_type = other DNA
atttcctcatattccagcat

SEQ ID NO: 32170 - DNA, 20 bp, synthetic construct
  source 1..20: mol_type = other DNA
tatttcctcatattccagca

SEQ ID NO: 32171 - DNA, 20 bp, synthetic construct
  source 1..20: mol_type = other DNA
ttatttcctcatattccagc

SEQ ID NO: 32172 - DNA, 20 bp, synthetic construct
  source 1..20: mol_type = other DNA
attatttcctcatattccag

SEQ ID NO: 32173 - DNA, 20 bp, synthetic construct
  source 1..20: mol_type = other DNA
aattatttcctcatattcca

SEQ ID NO: 32174 - DNA, 20 bp, synthetic construct
  source 1..20: mol_type = other DNA
taattatttcctcatattcc

SEQ ID NO: 32175 - DNA, 20 bp, synthetic construct
  source 1..20: mol_type = other DNA
ataattatttcctcatattc

SEQ ID NO: 32176 - DNA, 20 bp, synthetic construct
  source 1..20: mol_type = other DNA
tataattatttcctcatatt

SEQ ID NO: 32177 - DNA, 20 bp, synthetic construct
  source 1..20: mol_type = other DNA
atataattatttcctcatat

SEQ ID NO: 32178 - DNA, 20 bp, synthetic construct
  source 1..20: mol_type = other DNA
aatataattatttcctcata

SEQ ID NO: 32179 - DNA, 20 bp, synthetic construct
  source 1..20: mol_type = other DNA
taatataattatttcctcat

SEQ ID NO: 32180 - DNA, 20 bp, synthetic construct
  source 1..20: mol_type = other DNA
ctaatataattatttcctca

SEQ ID NO: 32181 - DNA, 20 bp, synthetic construct
  source 1..20: mol_type = other DNA
gctaatataattatttcctc

SEQ ID NO: 32182 - DNA, 20 bp, synthetic construct
  source 1..20: mol_type = other DNA
agctaatataattatttcct

SEQ ID NO: 32183 - DNA, 20 bp, synthetic construct
  source 1..20: mol_type = other DNA
tagctaatataattatttcc

SEQ ID NO: 32184 - DNA, 20 bp, synthetic construct
  source 1..20: mol_type = other DNA
ctagctaatataattatttc

SEQ ID NO: 32185 - DNA, 20 bp, synthetic construct
  source 1..20: mol_type = other DNA
gctagctaatataattattt

SEQ ID NO: 32186 - DNA, 20 bp, synthetic construct
  source 1..20: mol_type = other DNA
tgctagctaatataattatt

SEQ ID NO: 32187 - DNA, 20 bp, synthetic construct
  source 1..20: mol_type = other DNA
ctgctagctaatataattat

SEQ ID NO: 32188 - DNA, 20 bp, synthetic construct
  source 1..20: mol_type = other DNA
actgctagctaatataatta

SEQ ID NO: 32189 - DNA, 20 bp, synthetic construct
  source 1..20: mol_type = other DNA
aactgctagctaatataatt

SEQ ID NO: 32190 - DNA, 20 bp, synthetic construct
  source 1..20: mol_type = other DNA
taactgctagctaatataat

SEQ ID NO: 32191 - DNA, 20 bp, synthetic construct
  source 1..20: mol_type = other DNA
ataactgctagctaatataa

SEQ ID NO: 32192 - DNA, 20 bp, synthetic construct
  source 1..20: mol_type = other DNA
aataactgctagctaatata

SEQ ID NO: 32193 - DNA, 20 bp, synthetic construct
  source 1..20: mol_type = other DNA
taataactgctagctaatat

SEQ ID NO: 32194 - DNA, 20 bp, synthetic construct
  source 1..20: mol_type = other DNA
ttaataactgctagctaata

SEQ ID NO: 32195 - DNA, 20 bp, synthetic construct
  source 1..20: mol_type = other DNA
tttaataactgctagctaat

SEQ ID NO: 32196 - DNA, 20 bp, synthetic construct
  source 1..20: mol_type = other DNA
gtttaataactgctagctaa

SEQ ID NO: 32197 - DNA, 20 bp, synthetic construct
  source 1..20: mol_type = other DNA
tgtttaataactgctagcta

SEQ ID NO: 32198 - DNA, 20 bp, synthetic construct
  source 1..20: mol_type = other DNA
gtgtttaataactgctagct

SEQ ID NO: 32199 - DNA, 20 bp, synthetic construct
  source 1..20: mol_type = other DNA
agtgtttaataactgctagc

SEQ ID NO: 32200 - DNA, 20 bp, synthetic construct
  source 1..20: mol_type = other DNA
aagtgtttaataactgctag

SEQ ID NO: 32201 - DNA, 20 bp, synthetic construct
  source 1..20: mol_type = other DNA
taagtgtttaataactgcta

SEQ ID NO: 32202 - DNA, 20 bp, synthetic construct
  source 1..20: mol_type = other DNA
ttaagtgtttaataactgct

SEQ ID NO: 32203 - DNA, 20 bp, synthetic construct
  source 1..20: mol_type = other DNA
attaagtgtttaataactgc

SEQ ID NO: 32204 - DNA, 20 bp, synthetic construct
  source 1..20: mol_type = other DNA
tattaagtgtttaataactg

SEQ ID NO: 32205 - DNA, 20 bp, synthetic construct
  source 1..20: mol_type = other DNA
ttattaagtgtttaataact

SEQ ID NO: 32206 - DNA, 20 bp, synthetic construct
  source 1..20: mol_type = other DNA
gttattaagtgtttaataac

SEQ ID NO: 32207 - DNA, 20 bp, synthetic construct
  source 1..20: mol_type = other DNA
tgttattaagtgtttaataa

SEQ ID NO: 32208 - DNA, 20 bp, synthetic construct
  source 1..20: mol_type = other DNA
atgttattaagtgtttaata

SEQ ID NO: 32209 - DNA, 20 bp, synthetic construct
  source 1..20: mol_type = other DNA
tatgttattaagtgtttaat

SEQ ID NO: 32210 - DNA, 20 bp, synthetic construct
  source 1..20: mol_type = other DNA
gtatgttattaagtgtttaa

SEQ ID NO: 32211 - DNA, 20 bp, synthetic construct
  source 1..20: mol_type = other DNA
ggtatgttattaagtgttta

SEQ ID NO: 32212 - DNA, 20 bp, synthetic construct
  source 1..20: mol_type = other DNA
tggtatgttattaagtgttt

SEQ ID NO: 32213 - DNA, 20 bp, synthetic construct
  source 1..20: mol_type = other DNA
ctggtatgttattaagtgtt

SEQ ID NO: 32214 - DNA, 20 bp, synthetic construct
  source 1..20: mol_type = other DNA
cctggtatgttattaagtgt

SEQ ID NO: 32215 - DNA, 20 bp, synthetic construct
  source 1..20: mol_type = other DNA
gcctggtatgttattaagtg

SEQ ID NO: 32216 - DNA, 20 bp, synthetic construct
  source 1..20: mol_type = other DNA
tgcctggtatgttattaagt

SEQ ID NO: 32217 - DNA, 20 bp, synthetic construct
  source 1..20: mol_type = other DNA
gtgcctggtatgttattaag

SEQ ID NO: 32218 - DNA, 20 bp, synthetic construct
  source 1..20: mol_type = other DNA
agtgcctggtatgttattaa

SEQ ID NO: 32219 - DNA, 20 bp, synthetic construct
  source 1..20: mol_type = other DNA
cagtgcctggtatgttatta

SEQ ID NO: 32220 - DNA, 20 bp, synthetic construct
  source 1..20: mol_type = other DNA
acagtgcctggtatgttatt

SEQ ID NO: 32221 - DNA, 20 bp, synthetic construct
  source 1..20: mol_type = other DNA
aacagtgcctggtatgttat

SEQ ID NO: 32222 - DNA, 20 bp, synthetic construct
  source 1..20: mol_type = other DNA
aaacagtgcctggtatgtta

SEQ ID NO: 32223 - DNA, 20 bp, synthetic construct
  source 1..20: mol_type = other DNA
aaaacagtgcctggtatgtt

SEQ ID NO: 32224 - DNA, 20 bp, synthetic construct
  source 1..20: mol_type = other DNA
taaaacagtgcctggtatgt

SEQ ID NO: 32225 - DNA, 20 bp, synthetic construct
  source 1..20: mol_type = other DNA
ttaaaacagtgcctggtatg

SEQ ID NO: 32226 - DNA, 20 bp, synthetic construct
  source 1..20: mol_type = other DNA
cttaaaacagtgcctggtat

SEQ ID NO: 32227 - DNA, 20 bp, synthetic construct
  source 1..20: mol_type = other DNA
gcttaaaacagtgcctggta

SEQ ID NO: 32228 - DNA, 20 bp, synthetic construct
  source 1..20: mol_type = other DNA
agcttaaaacagtgcctggt

SEQ ID NO: 32229 - DNA, 20 bp, synthetic construct
  source 1..20: mol_type = other DNA
tagcttaaaacagtgcctgg

SEQ ID NO: 32230 - DNA, 20 bp, synthetic construct
  source 1..20: mol_type = other DNA
atagcttaaaacagtgcctg

SEQ ID NO: 32231 - DNA, 20 bp, synthetic construct
  source 1..20: mol_type = other DNA
catagcttaaaacagtgcct

SEQ ID NO: 32232 - DNA, 20 bp, synthetic construct
  source 1..20: mol_type = other DNA
gcatagcttaaaacagtgcc

SEQ ID NO: 32233 - DNA, 20 bp, synthetic construct
  source 1..20: mol_type = other DNA
cgcatagcttaaaacagtgc

SEQ ID NO: 32234 - DNA, 20 bp, synthetic construct
  source 1..20: mol_type = other DNA
tcgcatagcttaaaacagtg

SEQ ID NO: 32235 - DNA, 20 bp, synthetic construct
  source 1..20: mol_type = other DNA
atcgcatagcttaaaacagt

SEQ ID NO: 32236 - DNA, 20 bp, synthetic construct
  source 1..20: mol_type = other DNA
gatcgcatagcttaaaacag

SEQ ID NO: 32237 - DNA, 20 bp, synthetic construct
  source 1..20: mol_type = other DNA
agatcgcatagcttaaaaca

SEQ ID NO: 32238 - DNA, 20 bp, synthetic construct
  source 1..20: mol_type = other DNA
cagatcgcatagcttaaaac

SEQ ID NO: 32239 - DNA, 20 bp, synthetic construct
  source 1..20: mol_type = other DNA
acagatcgcatagcttaaaa

SEQ ID NO: 32240 - DNA, 20 bp, synthetic construct
  source 1..20: mol_type = other DNA
tacagatcgcatagcttaaa

SEQ ID NO: 32241 - DNA, 20 bp, synthetic construct
  source 1..20: mol_type = other DNA
atacagatcgcatagcttaa

SEQ ID NO: 32242 - DNA, 20 bp, synthetic construct
  source 1..20: mol_type = other DNA
catacagatcgcatagctta

SEQ ID NO: 32243 - DNA, 20 bp, synthetic construct
  source 1..20: mol_type = other DNA
ccatacagatcgcatagctt

SEQ ID NO: 32244 - DNA, 20 bp, synthetic construct
  source 1..20: mol_type = other DNA
tccatacagatcgcatagct

SEQ ID NO: 32245 - DNA, 20 bp, synthetic construct
  source 1..20: mol_type = other DNA
ttccatacagatcgcatagc

SEQ ID NO: 32246 - DNA, 20 bp, synthetic construct
  source 1..20: mol_type = other DNA
attccatacagatcgcatag

SEQ ID NO: 32247 - DNA, 20 bp, synthetic construct
  source 1..20: mol_type = other DNA
tattccatacagatcgcata

SEQ ID NO: 32248 - DNA, 20 bp, synthetic construct
  source 1..20: mol_type = other DNA
atattccatacagatcgcat

SEQ ID NO: 32249 - DNA, 20 bp, synthetic construct
  source 1..20: mol_type = other DNA
aatattccatacagatcgca

SEQ ID NO: 32250 - DNA, 20 bp, synthetic construct
  source 1..20: mol_type = other DNA
taatattccatacagatcgc

SEQ ID NO: 32251 - DNA, 20 bp, synthetic construct
  source 1..20: mol_type = other DNA
gtaatattccatacagatcg

SEQ ID NO: 32252 - DNA, 20 bp, synthetic construct
  source 1..20: mol_type = other DNA
agtaatattccatacagatc

SEQ ID NO: 32253 - DNA, 20 bp, synthetic construct
  source 1..20: mol_type = other DNA
aagtaatattccatacagat

SEQ ID NO: 32254 - DNA, 20 bp, synthetic construct
  source 1..20: mol_type = other DNA
taagtaatattccatacaga

SEQ ID NO: 32255 - DNA, 20 bp, synthetic construct
  source 1..20: mol_type = other DNA
ttaagtaatattccatacag

SEQ ID NO: 32256 - DNA, 20 bp, synthetic construct
  source 1..20: mol_type = other DNA
attaagtaatattccataca

SEQ ID NO: 32257 - DNA, 20 bp, synthetic construct
  source 1..20: mol_type = other DNA
aattaagtaatattccatac

SEQ ID NO: 32258 - DNA, 20 bp, synthetic construct
  source 1..20: mol_type = other DNA
aaattaagtaatattccata

SEQ ID NO: 32259 - DNA, 20 bp, synthetic construct
  source 1..20: mol_type = other DNA
gaaattaagtaatattccat

SEQ ID NO: 32260 - DNA, 20 bp, synthetic construct
  source 1..20: mol_type = other DNA
ggaaattaagtaatattcca

SEQ ID NO: 32261 - DNA, 20 bp, synthetic construct
  source 1..20: mol_type = other DNA
tggaaattaagtaatattcc

SEQ ID NO: 32262 - DNA, 20 bp, synthetic construct
  source 1..20: mol_type = other DNA
gtggaaattaagtaatattc

SEQ ID NO: 32263 - DNA, 20 bp, synthetic construct
  source 1..20: mol_type = other DNA
tgtggaaattaagtaatatt

SEQ ID NO: 32264 - DNA, 20 bp, synthetic construct
  source 1..20: mol_type = other DNA
ttgtggaaattaagtaatat

SEQ ID NO: 32265 - DNA, 20 bp, synthetic construct
  source 1..20: mol_type = other DNA
gttgtggaaattaagtaata

SEQ ID NO: 32266 - DNA, 20 bp, synthetic construct
  source 1..20: mol_type = other DNA
ggttgtggaaattaagtaat

SEQ ID NO: 32267 - DNA, 20 bp, synthetic construct
  source 1..20: mol_type = other DNA
aggttgtggaaattaagtaa

SEQ ID NO: 32268 - DNA, 20 bp, synthetic construct
  source 1..20: mol_type = other DNA
aaggttgtggaaattaagta

SEQ ID NO: 32269 - DNA, 20 bp, synthetic construct
  source 1..20: mol_type = other DNA
taaggttgtggaaattaagt

SEQ ID NO: 32270 - DNA, 20 bp, synthetic construct
  source 1..20: mol_type = other DNA
ataaggttgtggaaattaag

SEQ ID NO: 32271 - DNA, 20 bp, synthetic construct
  source 1..20: mol_type = other DNA
cataaggttgtggaaattaa

SEQ ID NO: 32272 - DNA, 20 bp, synthetic construct
  source 1..20: mol_type = other DNA
tcataaggttgtggaaatta

SEQ ID NO: 32273 - DNA, 20 bp, synthetic construct
  source 1..20: mol_type = other DNA
ttcataaggttgtggaaatt

SEQ ID NO: 32274 - DNA, 20 bp, synthetic construct
  source 1..20: mol_type = other DNA
tttcataaggttgtggaaat

SEQ ID NO: 32275 - DNA, 20 bp, synthetic construct
  source 1..20: mol_type = other DNA
ttttcataaggttgtggaaa

SEQ ID NO: 32276 - DNA, 20 bp, synthetic construct
  source 1..20: mol_type = other DNA
cttttcataaggttgtggaa

SEQ ID NO: 32277 - DNA, 20 bp, synthetic construct
  source 1..20: mol_type = other DNA
tcttttcataaggttgtgga

SEQ ID NO: 32278 - DNA, 20 bp, synthetic construct
  source 1..20: mol_type = other DNA
atcttttcataaggttgtgg

SEQ ID NO: 32279 - DNA, 20 bp, synthetic construct
  source 1..20: mol_type = other DNA
tatcttttcataaggttgtg

SEQ ID NO: 32280 - DNA, 20 bp, synthetic construct
  source 1..20: mol_type = other DNA
gtatcttttcataaggttgt

SEQ ID NO: 32281 - DNA, 20 bp, synthetic construct
  source 1..20: mol_type = other DNA
agtatcttttcataaggttg

SEQ ID NO: 32282 - DNA, 20 bp, synthetic construct
  source 1..20: mol_type = other DNA
tagtatcttttcataaggtt

SEQ ID NO: 32283 - DNA, 20 bp, synthetic construct
  source 1..20: mol_type = other DNA
atagtatcttttcataaggt

SEQ ID NO: 32284 - DNA, 20 bp, synthetic construct
  source 1..20: mol_type = other DNA
aatagtatcttttcataagg

SEQ ID NO: 32285 - DNA, 20 bp, synthetic construct
  source 1..20: mol_type = other DNA
aaatagtatcttttcataag

SEQ ID NO: 32286 - DNA, 20 bp, synthetic construct
  source 1..20: mol_type = other DNA
aaaatagtatcttttcataa

SEQ ID NO: 32287 - DNA, 20 bp, synthetic construct
  source 1..20: mol_type = other DNA
aaaaatagtatcttttcata

SEQ ID NO: 32288 - DNA, 20 bp, synthetic construct
  source 1..20: mol_type = other DNA
aaaaaatagtatcttttcat

SEQ ID NO: 32289 - DNA, 20 bp, synthetic construct
  source 1..20: mol_type = other DNA
aaaaaaatagtatcttttca

SEQ ID NO: 32290 - DNA, 20 bp, synthetic construct
  source 1..20: mol_type = other DNA
aaaaaaaatagtatcttttc

SEQ ID NO: 32291 - DNA, 20 bp, synthetic construct
  source 1..20: mol_type = other DNA
gaaaaaaaatagtatctttt

SEQ ID NO: 32292 - DNA, 20 bp, synthetic construct
  source 1..20: mol_type = other DNA
agaaaaaaaatagtatcttt

SEQ ID NO: 32293 - DNA, 20 bp, synthetic construct
  source 1..20: mol_type = other DNA
aagaaaaaaaatagtatctt

SEQ ID NO: 32294 - DNA, 20 bp, synthetic construct
  source 1..20: mol_type = other DNA
aaagaaaaaaaatagtatct

SEQ ID NO: 32295 - DNA, 20 bp, synthetic construct
  source 1..20: mol_type = other DNA
aaaagaaaaaaaatagtatc

SEQ ID NO: 32296 - DNA, 20 bp, synthetic construct
  source 1..20: mol_type = other DNA
caaaagaaaaaaaatagtat

SEQ ID NO: 32297 - DNA, 20 bp, synthetic construct
  source 1..20: mol_type = other DNA
tcaaaagaaaaaaaatagta

SEQ ID NO: 32298 - DNA, 20 bp, synthetic construct
  source 1..20: mol_type = other DNA
ctcaaaagaaaaaaaatagt

SEQ ID NO: 32299 - DNA, 20 bp, synthetic construct
  source 1..20: mol_type = other DNA
tctcaaaagaaaaaaaatag

SEQ ID NO: 32300 - DNA, 20 bp, synthetic construct
  source 1..20: mol_type = other DNA
ttctcaaaagaaaaaaaata

SEQ ID NO: 32301 - DNA, 20 bp, synthetic construct
  source 1..20: mol_type = other DNA
cttctcaaaagaaaaaaaat

SEQ ID NO: 32302 - DNA, 20 bp, synthetic construct
  source 1..20: mol_type = other DNA
ccttctcaaaagaaaaaaaa

SEQ ID NO: 32303 - DNA, 20 bp, synthetic construct
  source 1..20: mol_type = other DNA
accttctcaaaagaaaaaaa

SEQ ID NO: 32304 - DNA, 20 bp, synthetic construct
  source 1..20: mol_type = other DNA
taccttctcaaaagaaaaaa

SEQ ID NO: 32305 - DNA, 20 bp, synthetic construct
  source 1..20: mol_type = other DNA
gtaccttctcaaaagaaaaa

SEQ ID NO: 32306 - DNA, 20 bp, synthetic construct
  source 1..20: mol_type = other DNA
agtaccttctcaaaagaaaa

SEQ ID NO: 32307 - DNA, 20 bp, synthetic construct
  source 1..20: mol_type = other DNA
tagtaccttctcaaaagaaa

SEQ ID NO: 32308 - DNA, 20 bp, synthetic construct
  source 1..20: mol_type = other DNA
atagtaccttctcaaaagaa

SEQ ID NO: 32309 - DNA, 20 bp, synthetic construct
  source 1..20: mol_type = other DNA
aatagtaccttctcaaaaga

SEQ ID NO: 32310 - DNA, 20 bp, synthetic construct
  source 1..20: mol_type = other DNA
aaatagtaccttctcaaaag

SEQ ID NO: 32311 - DNA, 20 bp, synthetic construct
  source 1..20: mol_type = other DNA
aaaatagtaccttctcaaaa

SEQ ID NO: 32312 - DNA, 20 bp, synthetic construct
  source 1..20: mol_type = other DNA
gaaaatagtaccttctcaaa

SEQ ID NO: 32313 - DNA, 20 bp, synthetic construct
  source 1..20: mol_type = other DNA
tgaaaatagtaccttctcaa

SEQ ID NO: 32314 - DNA, 20 bp, synthetic construct
  source 1..20: mol_type = other DNA
atgaaaatagtaccttctca

SEQ ID NO: 32315 - DNA, 20 bp, synthetic construct
  source 1..20: mol_type = other DNA
gatgaaaatagtaccttctc

SEQ ID NO: 32316 - DNA, 20 bp, synthetic construct
  source 1..20: mol_type = other DNA
agatgaaaatagtaccttct

SEQ ID NO: 32317 - DNA, 20 bp, synthetic construct
  source 1..20: mol_type = other DNA
aagatgaaaatagtaccttc

SEQ ID NO: 32318 - DNA, 20 bp, synthetic construct
  source 1..20: mol_type = other DNA
gaagatgaaaatagtacctt

SEQ ID NO: 32319 - DNA, 20 bp, synthetic construct
  source 1..20: mol_type = other DNA
tgaagatgaaaatagtacct

SEQ ID NO: 32320 - DNA, 20 bp, synthetic construct
  source 1..20: mol_type = other DNA
atgaagatgaaaatagtacc

SEQ ID NO: 32321 - DNA, 20 bp, synthetic construct
  source 1..20: mol_type = other DNA
aatgaagatgaaaatagtac

SEQ ID NO: 32322 - DNA, 20 bp, synthetic construct
  source 1..20: mol_type = other DNA
aaatgaagatgaaaatagta

SEQ ID NO: 32323 - DNA, 20 bp, synthetic construct
  source 1..20: mol_type = other DNA
gaaatgaagatgaaaatagt

SEQ ID NO: 32324 - DNA, 20 bp, synthetic construct
  source 1..20: mol_type = other DNA
tgaaatgaagatgaaaatag

SEQ ID NO: 32325 - DNA, 20 bp, synthetic construct
  source 1..20: mol_type = other DNA
atgaaatgaagatgaaaata

SEQ ID NO: 32326 - DNA, 20 bp, synthetic construct
  source 1..20: mol_type = other DNA
tatgaaatgaagatgaaaat

SEQ ID NO: 32327 - DNA, 20 bp, synthetic construct
  source 1..20: mol_type = other DNA
ctatgaaatgaagatgaaaa

SEQ ID NO: 32328 - DNA, 20 bp, synthetic construct
  source 1..20: mol_type = other DNA
tctatgaaatgaagatgaaa

SEQ ID NO: 32329 - DNA, 20 bp, synthetic construct
  source 1..20: mol_type = other DNA
atctatgaaatgaagatgaa

SEQ ID NO: 32330 - DNA, 20 bp, synthetic construct
  source 1..20: mol_type = other DNA
catctatgaaatgaagatga

SEQ ID NO: 32331 - DNA, 20 bp, synthetic construct
  source 1..20: mol_type = other DNA
acatctatgaaatgaagatg

SEQ ID NO: 32332 - DNA, 20 bp, synthetic construct
  source 1..20: mol_type = other DNA
aacatctatgaaatgaagat

SEQ ID NO: 32333 - DNA, 20 bp, synthetic construct
  source 1..20: mol_type = other DNA
caacatctatgaaatgaaga

SEQ ID NO: 32334 - DNA, 20 bp, synthetic construct
  source 1..20: mol_type = other DNA
tcaacatctatgaaatgaag

SEQ ID NO: 32335 - DNA, 20 bp, synthetic construct
  source 1..20: mol_type = other DNA
ttcaacatctatgaaatgaa

SEQ ID NO: 32336 - DNA, 20 bp, synthetic construct
  source 1..20: mol_type = other DNA
tttcaacatctatgaaatga

SEQ ID NO: 32337 - DNA, 20 bp, synthetic construct
  source 1..20: mol_type = other DNA
atttcaacatctatgaaatg

SEQ ID NO: 32338 - DNA, 20 bp, synthetic construct
  source 1..20: mol_type = other DNA
aatttcaacatctatgaaat

SEQ ID NO: 32339 - DNA, 20 bp, synthetic construct
  source 1..20: mol_type = other DNA
caatttcaacatctatgaaa

SEQ ID NO: 32340 - DNA, 20 bp, synthetic construct
  source 1..20: mol_type = other DNA
tcaatttcaacatctatgaa

SEQ ID NO: 32341 - DNA, 20 bp, synthetic construct
  source 1..20: mol_type = other DNA
ttcaatttcaacatctatga

SEQ ID NO: 32342 - DNA, 20 bp, synthetic construct
  source 1..20: mol_type = other DNA
tttcaatttcaacatctatg

SEQ ID NO: 32343 - DNA, 20 bp, synthetic construct
  source 1..20: mol_type = other DNA
gtttcaatttcaacatctat

SEQ ID NO: 32344 - DNA, 20 bp, synthetic construct
  source 1..20: mol_type = other DNA
tgtttcaatttcaacatcta

SEQ ID NO: 32345 - DNA, 20 bp, synthetic construct
  source 1..20: mol_type = other DNA
gtgtttcaatttcaacatct

SEQ ID NO: 32346 - DNA, 20 bp, synthetic construct
  source 1..20: mol_type = other DNA
tgtgtttcaatttcaacatc

SEQ ID NO: 32347 - DNA, 20 bp, synthetic construct
  source 1..20: mol_type = other DNA
ctgtgtttcaatttcaacat

SEQ ID NO: 32348 - DNA, 20 bp, synthetic construct
  source 1..20: mol_type = other DNA
tctgtgtttcaatttcaaca

SEQ ID NO: 32349 - DNA, 20 bp, synthetic construct
  source 1..20: mol_type = other DNA
ctctgtgtttcaatttcaac

SEQ ID NO: 32350 - DNA, 20 bp, synthetic construct
  source 1..20: mol_type = other DNA
tctctgtgtttcaatttcaa

SEQ ID NO: 32351 - DNA, 20 bp, synthetic construct
  source 1..20: mol_type = other DNA
ctctctgtgtttcaatttca

SEQ ID NO: 32352 - DNA, 20 bp, synthetic construct
  source 1..20: mol_type = other DNA
gctctctgtgtttcaatttc

SEQ ID NO: 32353 - DNA, 20 bp, synthetic construct
  source 1..20: mol_type = other DNA
agctctctgtgtttcaattt

SEQ ID NO: 32354 - DNA, 20 bp, synthetic construct
  source 1..20: mol_type = other DNA
cagctctctgtgtttcaatt

SEQ ID NO: 32355 - DNA, 20 bp, synthetic construct
  source 1..20: mol_type = other DNA
tcagctctctgtgtttcaat

SEQ ID NO: 32356 - DNA, 20 bp, synthetic construct
  source 1..20: mol_type = other DNA
ttcagctctctgtgtttcaa

SEQ ID NO: 32357 - DNA, 20 bp, synthetic construct
  source 1..20: mol_type = other DNA
cttcagctctctgtgtttca

SEQ ID NO: 32358 - DNA, 20 bp, synthetic construct
  source 1..20: mol_type = other DNA
acttcagctctctgtgtttc

SEQ ID NO: 32359 - DNA, 20 bp, synthetic construct
  source 1..20: mol_type = other DNA
gacttcagctctctgtgttt

SEQ ID NO: 32360 - DNA, 20 bp, synthetic construct
  source 1..20: mol_type = other DNA
tgacttcagctctctgtgtt

SEQ ID NO: 32361 - DNA, 20 bp, synthetic construct
  source 1..20: mol_type = other DNA
gtgacttcagctctctgtgt

SEQ ID NO: 32362 - DNA, 20 bp, synthetic construct
  source 1..20: mol_type = other DNA
tgtgacttcagctctctgtg

SEQ ID NO: 32363 - DNA, 20 bp, synthetic construct
  source 1..20: mol_type = other DNA
ctgtgacttcagctctctgt

SEQ ID NO: 32364 - DNA, 20 bp, synthetic construct
  source 1..20: mol_type = other DNA
cctgtgacttcagctctctg

SEQ ID NO: 32365 - DNA, 20 bp, synthetic construct
  source 1..20: mol_type = other DNA
tcctgtgacttcagctctct

SEQ ID NO: 32366 - DNA, 20 bp, synthetic construct
  source 1..20: mol_type = other DNA
atcctgtgacttcagctctc

SEQ ID NO: 32367 - DNA, 20 bp, synthetic construct
  source 1..20: mol_type = other DNA
aatcctgtgacttcagctct

SEQ ID NO: 32368 - DNA, 20 bp, synthetic construct
  source 1..20: mol_type = other DNA
taatcctgtgacttcagctc

SEQ ID NO: 32369 - DNA, 20 bp, synthetic construct
  source 1..20: mol_type = other DNA
ttaatcctgtgacttcagct

SEQ ID NO: 32370 - DNA, 20 bp, synthetic construct
  source 1..20: mol_type = other DNA
cttaatcctgtgacttcagc

SEQ ID NO: 32371 - DNA, 20 bp, synthetic construct
  source 1..20: mol_type = other DNA
ccttaatcctgtgacttcag

SEQ ID NO: 32372 - DNA, 20 bp, synthetic construct
  source 1..20: mol_type = other DNA
gccttaatcctgtgacttca

SEQ ID NO: 32373 - DNA, 20 bp, synthetic construct
  source 1..20: mol_type = other DNA
ggccttaatcctgtgacttc

SEQ ID NO: 32374 - DNA, 20 bp, synthetic construct
  source 1..20: mol_type = other DNA
tggccttaatcctgtgactt

SEQ ID NO: 32375 - DNA, 20 bp, synthetic construct
  source 1..20: mol_type = other DNA
gtggccttaatcctgtgact

SEQ ID NO: 32376 - DNA, 20 bp, synthetic construct
  source 1..20: mol_type = other DNA
tgtggccttaatcctgtgac

SEQ ID NO: 32377 - DNA, 20 bp, synthetic construct
  source 1..20: mol_type = other DNA
ctgtggccttaatcctgtga

SEQ ID NO: 32378 - DNA, 20 bp, synthetic construct
  source 1..20: mol_type = other DNA
tctgtggccttaatcctgtg

SEQ ID NO: 32379 - DNA, 20 bp, synthetic construct
  source 1..20: mol_type = other DNA
ctctgtggccttaatcctgt

SEQ ID NO: 32380 - DNA, 20 bp, synthetic construct
  source 1..20: mol_type = other DNA
gctctgtggccttaatcctg

SEQ ID NO: 32381 - DNA, 20 bp, synthetic construct
  source 1..20: mol_type = other DNA
agctctgtggccttaatcct

SEQ ID NO: 32382 - DNA, 20 bp, synthetic construct
  source 1..20: mol_type = other DNA
cagctctgtggccttaatcc

SEQ ID NO: 32383 - DNA, 20 bp, synthetic construct
  source 1..20: mol_type = other DNA
tcagctctgtggccttaatc

SEQ ID NO: 32384 - DNA, 20 bp, synthetic construct
  source 1..20: mol_type = other DNA
ctcagctctgtggccttaat

SEQ ID NO: 32385 - DNA, 20 bp, synthetic construct
  source 1..20: mol_type = other DNA
tctcagctctgtggccttaa

SEQ ID NO: 32386 - DNA, 20 bp, synthetic construct
  source 1..20: mol_type = other DNA
ttctcagctctgtggcctta

SEQ ID NO: 32387 - DNA, 20 bp, synthetic construct
  source 1..20: mol_type = other DNA
cttctcagctctgtggcctt

SEQ ID NO: 32388 - DNA, 20 bp, synthetic construct
  source 1..20: mol_type = other DNA
acttctcagctctgtggcct

SEQ ID NO: 32389 - DNA, 20 bp, synthetic construct
  source 1..20: mol_type = other DNA
cacttctcagctctgtggcc

SEQ ID NO: 32390 - DNA, 20 bp, synthetic construct
  source 1..20: mol_type = other DNA
tcacttctcagctctgtggc

SEQ ID NO: 32391 - DNA, 20 bp, synthetic construct
  source 1..20: mol_type = other DNA
atcacttctcagctctgtgg

SEQ ID NO: 32392 - DNA, 20 bp, synthetic construct
  source 1..20: mol_type = other DNA
catcacttctcagctctgtg

SEQ ID NO: 32393 - DNA, 20 bp, synthetic construct
  source 1..20: mol_type = other DNA
ccatcacttctcagctctgt

SEQ ID NO: 32394 - DNA, 20 bp, synthetic construct
  source 1..20: mol_type = other DNA
tccatcacttctcagctctg

SEQ ID NO: 32395 - DNA, 20 bp, synthetic construct
  source 1..20: mol_type = other DNA
ctccatcacttctcagctct

SEQ ID NO: 32396 - DNA, 20 bp, synthetic construct
  source 1..20: mol_type = other DNA
gctccatcacttctcagctc

SEQ ID NO: 32397 - DNA, 20 bp, synthetic construct
  source 1..20: mol_type = other DNA
ggctccatcacttctcagct

SEQ ID NO: 32398 - DNA, 20 bp, synthetic construct
  source 1..20: mol_type = other DNA
cggctccatcacttctcagc

SEQ ID NO: 32399 - DNA, 20 bp, synthetic construct
  source 1..20: mol_type = other DNA
ccggctccatcacttctcag

SEQ ID NO: 32400 - DNA, 20 bp, synthetic construct
  source 1..20: mol_type = other DNA
tccggctccatcacttctca

SEQ ID NO: 32401 - DNA, 20 bp, synthetic construct
  source 1..20: mol_type = other DNA
ttccggctccatcacttctc

SEQ ID NO: 32402 - DNA, 20 bp, synthetic construct
  source 1..20: mol_type = other DNA
attccggctccatcacttct

SEQ ID NO: 32403 - DNA, 20 bp, synthetic construct
  source 1..20: mol_type = other DNA
aattccggctccatcacttc

SEQ ID NO: 32404 - DNA, 20 bp, synthetic construct
  source 1..20: mol_type = other DNA
aaattccggctccatcactt

SEQ ID NO: 32405 - DNA, 20 bp, synthetic construct
  source 1..20: mol_type = other DNA
caaattccggctccatcact

SEQ ID NO: 32406 - DNA, 20 bp, synthetic construct
  source 1..20: mol_type = other DNA
tcaaattccggctccatcac

SEQ ID NO: 32407 - DNA, 20 bp, synthetic construct
  source 1..20: mol_type = other DNA
ttcaaattccggctccatca

SEQ ID NO: 32408 - DNA, 20 bp, synthetic construct
  source 1..20: mol_type = other DNA
gttcaaattccggctccatc

SEQ ID NO: 32409 - DNA, 20 bp, synthetic construct
  source 1..20: mol_type = other DNA
ggttcaaattccggctccat

SEQ ID NO: 32410 - DNA, 20 bp, synthetic construct
  source 1..20: mol_type = other DNA
gggttcaaattccggctcca

SEQ ID NO: 32411 - DNA, 20 bp, synthetic construct
  source 1..20: mol_type = other DNA
tgggttcaaattccggctcc

SEQ ID NO: 32412 - DNA, 20 bp, synthetic construct
  source 1..20: mol_type = other DNA
ttgggttcaaattccggctc

SEQ ID NO: 32413 - DNA, 20 bp, synthetic construct
  source 1..20: mol_type = other DNA
cttgggttcaaattccggct

SEQ ID NO: 32414 - DNA, 20 bp, synthetic construct
  source 1..20: mol_type = other DNA
gcttgggttcaaattccggc

SEQ ID NO: 32415 - DNA, 20 bp, synthetic construct
  source 1..20: mol_type = other DNA
tgcttgggttcaaattccgg

SEQ ID NO: 32416 - DNA, 20 bp, synthetic construct
  source 1..20: mol_type = other DNA
ttgcttgggttcaaattccg

SEQ ID NO: 32417 - DNA, 20 bp, synthetic construct
  source 1..20: mol_type = other DNA
attgcttgggttcaaattcc

SEQ ID NO: 32418 - DNA, 20 bp, synthetic construct
  source 1..20: mol_type = other DNA
aattgcttgggttcaaattc

SEQ ID NO: 32419 - DNA, 20 bp, synthetic construct
  source 1..20: mol_type = other DNA
taattgcttgggttcaaatt

SEQ ID NO: 32420 - DNA, 20 bp, synthetic construct
  source 1..20: mol_type = other DNA
ttaattgcttgggttcaaat

SEQ ID NO: 32421 - DNA, 20 bp, synthetic construct
  source 1..20: mol_type = other DNA
attaattgcttgggttcaaa

SEQ ID NO: 32422 - DNA, 20 bp, synthetic construct
  source 1..20: mol_type = other DNA
cattaattgcttgggttcaa

SEQ ID NO: 32423 - DNA, 20 bp, synthetic construct
  source 1..20: mol_type = other DNA
gcattaattgcttgggttca

SEQ ID NO: 32424 - DNA, 20 bp, synthetic construct
  source 1..20: mol_type = other DNA
agcattaattgcttgggttc

SEQ ID NO: 32425 - DNA, 20 bp, synthetic construct
  source 1..20: mol_type = other DNA
cagcattaattgcttgggtt

SEQ ID NO: 32426 - DNA, 20 bp, synthetic construct
  source 1..20: mol_type = other DNA
tcagcattaattgcttgggt

SEQ ID NO: 32427 - DNA, 20 bp, synthetic construct
  source 1..20: mol_type = other DNA
atcagcattaattgcttggg

SEQ ID NO: 32428 - DNA, 20 bp, synthetic construct
  source 1..20: mol_type = other DNA
tatcagcattaattgcttgg

SEQ ID NO: 32429 - DNA, 20 bp, synthetic construct
  source 1..20: mol_type = other DNA
atatcagcattaattgcttg

SEQ ID NO: 32430 - DNA, 20 bp, synthetic construct
  source 1..20: mol_type = other DNA
aatatcagcattaattgctt

SEQ ID NO: 32431 - DNA, 20 bp, synthetic construct
  source 1..20: mol_type = other DNA
taatatcagcattaattgct

SEQ ID NO: 32432 - DNA, 20 bp, synthetic construct
  source 1..20: mol_type = other DNA
ctaatatcagcattaattgc

SEQ ID NO: 32433 - DNA, 20 bp, synthetic construct
  source 1..20: mol_type = other DNA
actaatatcagcattaattg

SEQ ID NO: 32434 - DNA, 20 bp, synthetic construct
  source 1..20: mol_type = other DNA
aactaatatcagcattaatt

SEQ ID NO: 32435 - DNA, 20 bp, synthetic construct
  source 1..20: mol_type = other DNA
gaactaatatcagcattaat

SEQ ID NO: 32436 - DNA, 20 bp, synthetic construct
  source 1..20: mol_type = other DNA
agaactaatatcagcattaa

SEQ ID NO: 32437 - DNA, 20 bp, synthetic construct
  source 1..20: mol_type = other DNA
aagaactaatatcagcatta

SEQ ID NO: 32438 - DNA, 20 bp, synthetic construct
  source 1..20: mol_type = other DNA
caagaactaatatcagcatt

SEQ ID NO: 32439 - DNA, 20 bp, synthetic construct
  source 1..20: mol_type = other DNA
acaagaactaatatcagcat

SEQ ID NO: 32440 - DNA, 20 bp, synthetic construct
  source 1..20: mol_type = other DNA
cacaagaactaatatcagca

SEQ ID NO: 32441 - DNA, 20 bp, synthetic construct
  source 1..20: mol_type = other DNA
acacaagaactaatatcagc

SEQ ID NO: 32442 - DNA, 20 bp, synthetic construct
  source 1..20: mol_type = other DNA
cacacaagaactaatatcag

SEQ ID NO: 32443 - DNA, 20 bp, synthetic construct
  source 1..20: mol_type = other DNA
tcacacaagaactaatatca

SEQ ID NO: 32444 - DNA, 20 bp, synthetic construct
  source 1..20: mol_type = other DNA
ttcacacaagaactaatatc

SEQ ID NO: 32445 - DNA, 20 bp, synthetic construct
  source 1..20: mol_type = other DNA
attcacacaagaactaatat

SEQ ID NO: 32446 - DNA, 20 bp, synthetic construct
  source 1..20: mol_type = other DNA
cattcacacaagaactaata

SEQ ID NO: 32447 - DNA, 20 bp, synthetic construct
  source 1..20: mol_type = other DNA
ccattcacacaagaactaat

SEQ ID NO: 32448 - DNA, 20 bp, synthetic construct
  source 1..20: mol_type = other DNA
accattcacacaagaactaa

SEQ ID NO: 32449 - DNA, 20 bp, synthetic construct
  source 1..20: mol_type = other DNA
taccattcacacaagaacta

SEQ ID NO: 32450 - DNA, 20 bp, synthetic construct
  source 1..20: mol_type = other DNA
ttaccattcacacaagaact

SEQ ID NO: 32451 - DNA, 20 bp, synthetic construct
  source 1..20: mol_type = other DNA
attaccattcacacaagaac

SEQ ID NO: 32452 - DNA, 20 bp, synthetic construct
  source 1..20: mol_type = other DNA
aattaccattcacacaagaa

SEQ ID NO: 32453 - DNA, 20 bp, synthetic construct
  source 1..20: mol_type = other DNA
caattaccattcacacaaga

SEQ ID NO: 32454 - DNA, 20 bp, synthetic construct
  source 1..20: mol_type = other DNA
acaattaccattcacacaag

SEQ ID NO: 32455 - DNA, 20 bp, synthetic construct
  source 1..20: mol_type = other DNA
aacaattaccattcacacaa

SEQ ID NO: 32456 - DNA, 20 bp, synthetic construct
  source 1..20: mol_type = other DNA
aaacaattaccattcacaca

SEQ ID NO: 32457 - DNA, 20 bp, synthetic construct
  source 1..20: mol_type = other DNA
aaaacaattaccattcacac

SEQ ID NO: 32458 - DNA, 20 bp, synthetic construct
  source 1..20: mol_type = other DNA
caaaacaattaccattcaca

SEQ ID NO: 32459 - DNA, 20 bp, synthetic construct
  source 1..20: mol_type = other DNA
tcaaaacaattaccattcac

SEQ ID NO: 32460 - DNA, 20 bp, synthetic construct
  source 1..20: mol_type = other DNA
ttcaaaacaattaccattca

SEQ ID NO: 32461 - DNA, 20 bp, synthetic construct
  source 1..20: mol_type = other DNA
tttcaaaacaattaccattc

SEQ ID NO: 32462 - DNA, 20 bp, synthetic construct
  source 1..20: mol_type = other DNA
gtttcaaaacaattaccatt

SEQ ID NO: 32463 - DNA, 20 bp, synthetic construct
  source 1..20: mol_type = other DNA
tgtttcaaaacaattaccat

SEQ ID NO: 32464 - DNA, 20 bp, synthetic construct
  source 1..20: mol_type = other DNA
ttgtttcaaaacaattacca

SEQ ID NO: 32465 - DNA, 20 bp, synthetic construct
  source 1..20: mol_type = other DNA
attgtttcaaaacaattacc

SEQ ID NO: 32466 - DNA, 20 bp, synthetic construct
  source 1..20: mol_type = other DNA
cattgtttcaaaacaattac

SEQ ID NO: 32467 - DNA, 20 bp, synthetic construct
  source 1..20: mol_type = other DNA
tcattgtttcaaaacaatta

SEQ ID NO: 32468 - DNA, 20 bp, synthetic construct
  source 1..20: mol_type = other DNA
atcattgtttcaaaacaatt

SEQ ID NO: 32469 - DNA, 20 bp, synthetic construct
  source 1..20: mol_type = other DNA
gatcattgtttcaaaacaat

SEQ ID NO: 32470 - DNA, 20 bp, synthetic construct
  source 1..20: mol_type = other DNA
ggatcattgtttcaaaacaa

SEQ ID NO: 32471 - DNA, 20 bp, synthetic construct
  source 1..20: mol_type = other DNA
aggatcattgtttcaaaaca

SEQ ID NO: 32472 - DNA, 20 bp, synthetic construct
  source 1..20: mol_type = other DNA
taggatcattgtttcaaaac

SEQ ID NO: 32473 - DNA, 20 bp, synthetic construct
  source 1..20: mol_type = other DNA
ctaggatcattgtttcaaaa

SEQ ID NO: 32474 - DNA, 20 bp, synthetic construct
  source 1..20: mol_type = other DNA
tctaggatcattgtttcaaa

SEQ ID NO: 32475 - DNA, 20 bp, synthetic construct
  source 1..20: mol_type = other DNA
atctaggatcattgtttcaa

SEQ ID NO: 32476 - DNA, 20 bp, synthetic construct
  source 1..20: mol_type = other DNA
catctaggatcattgtttca

SEQ ID NO: 32477 - DNA, 20 bp, synthetic construct
  source 1..20: mol_type = other DNA
tcatctaggatcattgtttc

SEQ ID NO: 32478 - DNA, 20 bp, synthetic construct
  source 1..20: mol_type = other DNA
atcatctaggatcattgttt

SEQ ID NO: 32479 - DNA, 20 bp, synthetic construct
  source 1..20: mol_type = other DNA
aatcatctaggatcattgtt

SEQ ID NO: 32480 - DNA, 20 bp, synthetic construct
  source 1..20: mol_type = other DNA
taatcatctaggatcattgt

SEQ ID NO: 32481 - DNA, 20 bp, synthetic construct
  source 1..20: mol_type = other DNA
ataatcatctaggatcattg

SEQ ID NO: 32482 - DNA, 20 bp, synthetic construct
  source 1..20: mol_type = other DNA
tataatcatctaggatcatt

SEQ ID NO: 32483 - DNA, 20 bp, synthetic construct
  source 1..20: mol_type = other DNA
atataatcatctaggatcat

SEQ ID NO: 32484 - DNA, 20 bp, synthetic construct
  source 1..20: mol_type = other DNA
catataatcatctaggatca

SEQ ID NO: 32485 - DNA, 20 bp, synthetic construct
  source 1..20: mol_type = other DNA
tcatataatcatctaggatc

SEQ ID NO: 32486 - DNA, 20 bp, synthetic construct
  source 1..20: mol_type = other DNA
gtcatataatcatctaggat

SEQ ID NO: 32487 - DNA, 20 bp, synthetic construct
  source 1..20: mol_type = other DNA
ggtcatataatcatctagga

SEQ ID NO: 32488 - DNA, 20 bp, synthetic construct
  source 1..20: mol_type = other DNA
cggtcatataatcatctagg

SEQ ID NO: 32489 - DNA, 20 bp, synthetic construct
  source 1..20: mol_type = other DNA
ccggtcatataatcatctag

SEQ ID NO: 32490 - DNA, 20 bp, synthetic construct
  source 1..20: mol_type = other DNA
tccggtcatataatcatcta

SEQ ID NO: 32491 - DNA, 20 bp, synthetic construct
  source 1..20: mol_type = other DNA
atccggtcatataatcatct

SEQ ID NO: 32492 - DNA, 20 bp, synthetic construct
  source 1..20: mol_type = other DNA
aatccggtcatataatcatc

SEQ ID NO: 32493 - DNA, 20 bp, synthetic construct
  source 1..20: mol_type = other DNA
taatccggtcatataatcat

SEQ ID NO: 32494 - DNA, 20 bp, synthetic construct
  source 1..20: mol_type = other DNA
ttaatccggtcatataatca

SEQ ID NO: 32495 - DNA, 20 bp, synthetic construct
  source 1..20: mol_type = other DNA
attaatccggtcatataatc

SEQ ID NO: 32496 - DNA, 20 bp, synthetic construct
  source 1..20: mol_type = other DNA
gattaatccggtcatataat

SEQ ID NO: 32497 - DNA, 20 bp, synthetic construct
  source 1..20: mol_type = other DNA
agattaatccggtcatataa

SEQ ID NO: 32498 - DNA, 20 bp, synthetic construct
  source 1..20: mol_type = other DNA
cagattaatccggtcatata

SEQ ID NO: 32499 - DNA, 20 bp, synthetic construct
  source 1..20: mol_type = other DNA
ccagattaatccggtcatat

SEQ ID NO: 32500 - DNA, 20 bp, synthetic construct
  source 1..20: mol_type = other DNA
gccagattaatccggtcata

SEQ ID NO: 32501 - DNA, 20 bp, synthetic construct
  source 1..20: mol_type = other DNA
tgccagattaatccggtcat

SEQ ID NO: 32502 - DNA, 20 bp, synthetic construct
  source 1..20: mol_type = other DNA
ctgccagattaatccggtca

SEQ ID NO: 32503 - DNA, 20 bp, synthetic construct
  source 1..20: mol_type = other DNA
actgccagattaatccggtc

SEQ ID NO: 32504 - DNA, 20 bp, synthetic construct
  source 1..20: mol_type = other DNA
aactgccagattaatccggt

SEQ ID NO: 32505 - DNA, 20 bp, synthetic construct
  source 1..20: mol_type = other DNA
caactgccagattaatccgg

SEQ ID NO: 32506 - DNA, 20 bp, synthetic construct
  source 1..20: mol_type = other DNA
acaactgccagattaatccg

SEQ ID NO: 32507 - DNA, 20 bp, synthetic construct
  source 1..20: mol_type = other DNA
aacaactgccagattaatcc

SEQ ID NO: 32508 - DNA, 20 bp, synthetic construct
  source 1..20: mol_type = other DNA
gaacaactgccagattaatc

SEQ ID NO: 32509 - DNA, 20 bp, synthetic construct
  source 1..20: mol_type = other DNA
agaacaactgccagattaat

SEQ ID NO: 32510 - DNA, 20 bp, synthetic construct
  source 1..20: mol_type = other DNA
cagaacaactgccagattaa

SEQ ID NO: 32511 - DNA, 20 bp, synthetic construct
  source 1..20: mol_type = other DNA
acagaacaactgccagatta

SEQ ID NO: 32512 - DNA, 20 bp, synthetic construct
  source 1..20: mol_type = other DNA
cacagaacaactgccagatt

SEQ ID NO: 32513 - DNA, 20 bp, synthetic construct
  source 1..20: mol_type = other DNA
acacagaacaactgccagat

SEQ ID NO: 32514 - DNA, 20 bp, synthetic construct
  source 1..20: mol_type = other DNA
cacacagaacaactgccaga

SEQ ID NO: 32515 - DNA, 20 bp, synthetic construct
  source 1..20: mol_type = other DNA
tcacacagaacaactgccag

SEQ ID NO: 32516 - DNA, 20 bp, synthetic construct
  source 1..20: mol_type = other DNA
ttcacacagaacaactgcca

SEQ ID NO: 32517 - DNA, 20 bp, synthetic construct
  source 1..20: mol_type = other DNA
attcacacagaacaactgcc

SEQ ID NO: 32518 - DNA, 20 bp, synthetic construct
  source 1..20: mol_type = other DNA
aattcacacagaacaactgc

SEQ ID NO: 32519 - DNA, 20 bp, synthetic construct
  source 1..20: mol_type = other DNA
aaattcacacagaacaactg

SEQ ID NO: 32520 - DNA, 20 bp, synthetic construct
  source 1..20: mol_type = other DNA
taaattcacacagaacaact

SEQ ID NO: 32521 - DNA, 20 bp, synthetic construct
  source 1..20: mol_type = other DNA
ctaaattcacacagaacaac

SEQ ID NO: 32522 - DNA, 20 bp, synthetic construct
  source 1..20: mol_type = other DNA
tctaaattcacacagaacaa

SEQ ID NO: 32523 - DNA, 20 bp, synthetic construct
  source 1..20: mol_type = other DNA
ctctaaattcacacagaaca

SEQ ID NO: 32524 - DNA, 20 bp, synthetic construct
  source 1..20: mol_type = other DNA
actctaaattcacacagaac

SEQ ID NO: 32525 - DNA, 20 bp, synthetic construct
  source 1..20: mol_type = other DNA
aactctaaattcacacagaa

SEQ ID NO: 32526 - DNA, 20 bp, synthetic construct
  source 1..20: mol_type = other DNA
caactctaaattcacacaga

SEQ ID NO: 32527 - DNA, 20 bp, synthetic construct
  source 1..20: mol_type = other DNA
gcaactctaaattcacacag

SEQ ID NO: 32528 - DNA, 20 bp, synthetic construct
  source 1..20: mol_type = other DNA
ggcaactctaaattcacaca

SEQ ID NO: 32529 - DNA, 20 bp, synthetic construct
  source 1..20: mol_type = other DNA
aggcaactctaaattcacac

SEQ ID NO: 32530 - DNA, 20 bp, synthetic construct
  source 1..20: mol_type = other DNA
aaggcaactctaaattcaca

SEQ ID NO: 32531 - DNA, 20 bp, synthetic construct
  source 1..20: mol_type = other DNA
gaaggcaactctaaattcac

SEQ ID NO: 32532 - DNA, 20 bp, synthetic construct
  source 1..20: mol_type = other DNA
ggaaggcaactctaaattca

SEQ ID NO: 32533 - DNA, 20 bp, synthetic construct
  source 1..20: mol_type = other DNA
gggaaggcaactctaaattc

SEQ ID NO: 32534 - DNA, 20 bp, synthetic construct
  source 1..20: mol_type = other DNA
tgggaaggcaactctaaatt

SEQ ID NO: 32535 - DNA, 20 bp, synthetic construct
  source 1..20: mol_type = other DNA
gtgggaaggcaactctaaat

SEQ ID NO: 32536 - DNA, 20 bp, synthetic construct
  source 1..20: mol_type = other DNA
ggtgggaaggcaactctaaa

SEQ ID NO: 32537 - DNA, 20 bp, synthetic construct
  source 1..20: mol_type = other DNA
aggtgggaaggcaactctaa

SEQ ID NO: 32538 - DNA, 20 bp, synthetic construct
  source 1..20: mol_type = other DNA
gaggtgggaaggcaactcta

SEQ ID NO: 32539 - DNA, 20 bp, synthetic construct
  source 1..20: mol_type = other DNA
tgaggtgggaaggcaactct

SEQ ID NO: 32540 - DNA, 20 bp, synthetic construct
  source 1..20: mol_type = other DNA
ctgaggtgggaaggcaactc

SEQ ID NO: 32541 - DNA, 20 bp, synthetic construct
  source 1..20: mol_type = other DNA
actgaggtgggaaggcaact

SEQ ID NO: 32542 - DNA, 20 bp, synthetic construct
  source 1..20: mol_type = other DNA
aactgaggtgggaaggcaac

SEQ ID NO: 32543 - DNA, 20 bp, synthetic construct
  source 1..20: mol_type = other DNA
aaactgaggtgggaaggcaa

SEQ ID NO: 32544 - DNA, 20 bp, synthetic construct
  source 1..20: mol_type = other DNA
gaaactgaggtgggaaggca

SEQ ID NO: 32545 - DNA, 20 bp, synthetic construct
  source 1..20: mol_type = other DNA
ggaaactgaggtgggaaggc

SEQ ID NO: 32546 - DNA, 20 bp, synthetic construct
  source 1..20: mol_type = other DNA
aggaaactgaggtgggaagg

SEQ ID NO: 32547 - DNA, 20 bp, synthetic construct
  source 1..20: mol_type = other DNA
taggaaactgaggtgggaag

SEQ ID NO: 32548 - DNA, 20 bp, synthetic construct
  source 1..20: mol_type = other DNA
ttaggaaactgaggtgggaa

SEQ ID NO: 32549 - DNA, 20 bp, synthetic construct
  source 1..20: mol_type = other DNA
tttaggaaactgaggtggga

SEQ ID NO: 32550 - DNA, 20 bp, synthetic construct
  source 1..20: mol_type = other DNA
ttttaggaaactgaggtggg

SEQ ID NO: 32551 - DNA, 20 bp, synthetic construct
  source 1..20: mol_type = other DNA
tttttaggaaactgaggtgg

SEQ ID NO: 32552 - DNA, 20 bp, synthetic construct
  source 1..20: mol_type = other DNA
gtttttaggaaactgaggtg

SEQ ID NO: 32553 - DNA, 20 bp, synthetic construct
  source 1..20: mol_type = other DNA
tgtttttaggaaactgaggt

SEQ ID NO: 32554 - DNA, 20 bp, synthetic construct
  source 1..20: mol_type = other DNA
ttgtttttaggaaactgagg

SEQ ID NO: 32555 - DNA, 20 bp, synthetic construct
  source 1..20: mol_type = other DNA
tttgtttttaggaaactgag

SEQ ID NO: 32556 - DNA, 20 bp, synthetic construct
  source 1..20: mol_type = other DNA
ttttgtttttaggaaactga

SEQ ID NO: 32557 - DNA, 20 bp, synthetic construct
  source 1..20: mol_type = other DNA
gttttgtttttaggaaactg

SEQ ID NO: 32558 - DNA, 20 bp, synthetic construct
  source 1..20: mol_type = other DNA
tgttttgtttttaggaaact

SEQ ID NO: 32559 - DNA, 20 bp, synthetic construct
  source 1..20: mol_type = other DNA
ttgttttgtttttaggaaac

SEQ ID NO: 32560 - DNA, 20 bp, synthetic construct
  source 1..20: mol_type = other DNA
tttgttttgtttttaggaaa

SEQ ID NO: 32561 - DNA, 20 bp, synthetic construct
  source 1..20: mol_type = other DNA
ttttgttttgtttttaggaa

SEQ ID NO: 32562 - DNA, 20 bp, synthetic construct
  source 1..20: mol_type = other DNA
gttttgttttgtttttagga

SEQ ID NO: 32563 - DNA, 20 bp, synthetic construct
  source 1..20: mol_type = other DNA
tgttttgttttgtttttagg

SEQ ID NO: 32564 - DNA, 20 bp, synthetic construct
  source 1..20: mol_type = other DNA
ttgttttgttttgtttttag

SEQ ID NO: 32565 - DNA, 20 bp, synthetic construct
  source 1..20: mol_type = other DNA
tttgttttgttttgttttta

SEQ ID NO: 32566 - DNA, 20 bp, synthetic construct
  source 1..20: mol_type = other DNA
ttttgttttgttttgttttt

SEQ ID NO: 32567 - DNA, 20 bp, synthetic construct
  source 1..20: mol_type = other DNA
gttttgttttgttttgtttt

SEQ ID NO: 32568 - DNA, 20 bp, synthetic construct
  source 1..20: mol_type = other DNA
tgttttgttttgttttgttt

SEQ ID NO: 32569 - DNA, 20 bp, synthetic construct
  source 1..20: mol_type = other DNA
ttgttttgttttgttttgtt

SEQ ID NO: 32570 - DNA, 20 bp, synthetic construct
  source 1..20: mol_type = other DNA
tttgttttgttttgttttgt

SEQ ID NO: 32571 - DNA, 20 bp, synthetic construct
  source 1..20: mol_type = other DNA
ttttgttttgttttgttttg

SEQ ID NO: 32572 - DNA, 20 bp, synthetic construct
  source 1..20: mol_type = other DNA
gttttgttttgttttgtttt

SEQ ID NO: 32573 - DNA, 20 bp, synthetic construct
  source 1..20: mol_type = other DNA
tgttttgttttgttttgttt

SEQ ID NO: 32574 - DNA, 20 bp, synthetic construct
  source 1..20: mol_type = other DNA
ttgttttgttttgttttgtt

SEQ ID NO: 32575 - DNA, 20 bp, synthetic construct
  source 1..20: mol_type = other DNA
tttgttttgttttgttttgt

SEQ ID NO: 32576 - DNA, 20 bp, synthetic construct
  source 1..20: mol_type = other DNA
ttttgttttgttttgttttg

SEQ ID NO: 32577 - DNA, 20 bp, synthetic construct
  source 1..20: mol_type = other DNA
tttttgttttgttttgtttt

SEQ ID NO: 32578 - DNA, 20 bp, synthetic construct
  source 1..20: mol_type = other DNA
ttttttgttttgttttgttt

SEQ ID NO: 32579 - DNA, 20 bp, synthetic construct
  source 1..20: mol_type = other DNA
tttttttgttttgttttgtt

SEQ ID NO: 32580 - DNA, 20 bp, synthetic construct
  source 1..20: mol_type = other DNA
ttttttttgttttgttttgt

SEQ ID NO: 32581 - DNA, 20 bp, synthetic construct
  source 1..20: mol_type = other DNA
gttttttttgttttgttttg

SEQ ID NO: 32582 - DNA, 20 bp, synthetic construct
  source 1..20: mol_type = other DNA
agttttttttgttttgtttt

SEQ ID NO: 32583 - DNA, 20 bp, synthetic construct
  source 1..20: mol_type = other DNA
gagttttttttgttttgttt

SEQ ID NO: 32584 - DNA, 20 bp, synthetic construct
  source 1..20: mol_type = other DNA
agagttttttttgttttgtt

SEQ ID NO: 32585 - DNA, 20 bp, synthetic construct
  source 1..20: mol_type = other DNA
tagagttttttttgttttgt

SEQ ID NO: 32586 - DNA, 20 bp, synthetic construct
  source 1..20: mol_type = other DNA
ctagagttttttttgttttg

SEQ ID NO: 32587 - DNA, 20 bp, synthetic construct
  source 1..20: mol_type = other DNA
gctagagttttttttgtttt

SEQ ID NO: 32588 - DNA, 20 bp, synthetic construct
  source 1..20: mol_type = other DNA
agctagagttttttttgttt

SEQ ID NO: 32589 - DNA, 20 bp, synthetic construct
  source 1..20: mol_type = other DNA
aagctagagttttttttgtt

SEQ ID NO: 32590 - DNA, 20 bp, synthetic construct
  source 1..20: mol_type = other DNA
gaagctagagttttttttgt

SEQ ID NO: 32591 - DNA, 20 bp, synthetic construct
  source 1..20: mol_type = other DNA
tgaagctagagttttttttg

SEQ ID NO: 32592 - DNA, 20 bp, synthetic construct
  source 1..20: mol_type = other DNA
gtgaagctagagtttttttt

SEQ ID NO: 32593 - DNA, 20 bp, synthetic construct
  source 1..20: mol_type = other DNA
agtgaagctagagttttttt

SEQ ID NO: 32594 - DNA, 20 bp, synthetic construct
  source 1..20: mol_type = other DNA
cagtgaagctagagtttttt

SEQ ID NO: 32595 - DNA, 20 bp, synthetic construct
  source 1..20: mol_type = other DNA
acagtgaagctagagttttt

SEQ ID NO: 32596 - DNA, 20 bp, synthetic construct
  source 1..20: mol_type = other DNA
cacagtgaagctagagtttt

SEQ ID NO: 32597 - DNA, 20 bp, synthetic construct
  source 1..20: mol_type = other DNA
acacagtgaagctagagttt

SEQ ID NO: 32598 - DNA, 20 bp, synthetic construct
  source 1..20: mol_type = other DNA
aacacagtgaagctagagtt

SEQ ID NO: 32599 - DNA, 20 bp, synthetic construct
  source 1..20: mol_type = other DNA
aaacacagtgaagctagagt

SEQ ID NO: 32600 - DNA, 20 bp, synthetic construct
  source 1..20: mol_type = other DNA
caaacacagtgaagctagag

SEQ ID NO: 32601 - DNA, 20 bp, synthetic construct
  source 1..20: mol_type = other DNA
ccaaacacagtgaagctaga

SEQ ID NO: 32602 - DNA, 20 bp, synthetic construct
  source 1..20: mol_type = other DNA
cccaaacacagtgaagctag

SEQ ID NO: 32603 - DNA, 20 bp, synthetic construct
  source 1..20: mol_type = other DNA
acccaaacacagtgaagcta

SEQ ID NO: 32604 - DNA, 20 bp, synthetic construct
  source 1..20: mol_type = other DNA
aacccaaacacagtgaagct

SEQ ID NO: 32605 - DNA, 20 bp, synthetic construct
  source 1..20: mol_type = other DNA
caacccaaacacagtgaagc

SEQ ID NO: 32606 - DNA, 20 bp, synthetic construct
  source 1..20: mol_type = other DNA
acaacccaaacacagtgaag

SEQ ID NO: 32607 - DNA, 20 bp, synthetic construct
  source 1..20: mol_type = other DNA
gacaacccaaacacagtgaa

SEQ ID NO: 32608 - DNA, 20 bp, synthetic construct
  source 1..20: mol_type = other DNA
tgacaacccaaacacagtga

SEQ ID NO: 32609 - DNA, 20 bp, synthetic construct
  source 1..20: mol_type = other DNA
atgacaacccaaacacagtg

SEQ ID NO: 32610 - DNA, 20 bp, synthetic construct
  source 1..20: mol_type = other DNA
catgacaacccaaacacagt

SEQ ID NO: 32611 - DNA, 20 bp, synthetic construct
  source 1..20: mol_type = other DNA
ccatgacaacccaaacacag

SEQ ID NO: 32612 - DNA, 20 bp, synthetic construct
  source 1..20: mol_type = other DNA
gccatgacaacccaaacaca

SEQ ID NO: 32613 - DNA, 20 bp, synthetic construct
  source 1..20: mol_type = other DNA
ggccatgacaacccaaacac

SEQ ID NO: 32614 - DNA, 20 bp, synthetic construct
  source 1..20: mol_type = other DNA
aggccatgacaacccaaaca

SEQ ID NO: 32615 - DNA, 20 bp, synthetic construct
  source 1..20: mol_type = other DNA
taggccatgacaacccaaac

SEQ ID NO: 32616 - DNA, 20 bp, synthetic construct
  source 1..20: mol_type = other DNA
gtaggccatgacaacccaaa

SEQ ID NO: 32617 - DNA, 20 bp, synthetic construct
  source 1..20: mol_type = other DNA
ggtaggccatgacaacccaa

SEQ ID NO: 32618 - DNA, 20 bp, synthetic construct
  source 1..20: mol_type = other DNA
gggtaggccatgacaaccca

SEQ ID NO: 32619 - DNA, 20 bp, synthetic construct
  source 1..20: mol_type = other DNA
ggggtaggccatgacaaccc

SEQ ID NO: 32620 - DNA, 20 bp, synthetic construct
  source 1..20: mol_type = other DNA
gggggtaggccatgacaacc

SEQ ID NO: 32621 - DNA, 20 bp, synthetic construct
  source 1..20: mol_type = other DNA
agggggtaggccatgacaac

SEQ ID NO: 32622 - DNA, 20 bp, synthetic construct
  source 1..20: mol_type = other DNA
gagggggtaggccatgacaa

SEQ ID NO: 32623 - DNA, 20 bp, synthetic construct
  source 1..20: mol_type = other DNA
agagggggtaggccatgaca

SEQ ID NO: 32624 - DNA, 20 bp, synthetic construct
  source 1..20: mol_type = other DNA
aagagggggtaggccatgac

SEQ ID NO: 32625 - DNA, 20 bp, synthetic construct
  source 1..20: mol_type = other DNA
caagagggggtaggccatga

SEQ ID NO: 32626 - DNA, 20 bp, synthetic construct
  source 1..20: mol_type = other DNA
gcaagagggggtaggccatg

SEQ ID NO: 32627 - DNA, 20 bp, synthetic construct
  source 1..20: mol_type = other DNA
ggcaagagggggtaggccat

SEQ ID NO: 32628 - DNA, 20 bp, synthetic construct
  source 1..20: mol_type = other DNA
tggcaagagggggtaggcca

SEQ ID NO: 32629 - DNA, 20 bp, synthetic construct
  source 1..20: mol_type = other DNA
gtggcaagagggggtaggcc

SEQ ID NO: 32630 - DNA, 20 bp, synthetic construct
  source 1..20: mol_type = other DNA
ggtggcaagagggggtaggc

SEQ ID NO: 32631 - DNA, 20 bp, synthetic construct
  source 1..20: mol_type = other DNA
aggtggcaagagggggtagg

SEQ ID NO: 32632 - DNA, 20 bp, synthetic construct
  source 1..20: mol_type = other DNA
gaggtggcaagagggggtag

SEQ ID NO: 32633 - DNA, 20 bp, synthetic construct
  source 1..20: mol_type = other DNA
tgaggtggcaagagggggta

SEQ ID NO: 32634 - DNA, 20 bp, synthetic construct
  source 1..20: mol_type = other DNA
atgaggtggcaagagggggt

SEQ ID NO: 32635 - DNA, 20 bp, synthetic construct
  source 1..20: mol_type = other DNA
aatgaggtggcaagaggggg

SEQ ID NO: 32636 - DNA, 20 bp, synthetic construct
  source 1..20: mol_type = other DNA
aaatgaggtggcaagagggg

SEQ ID NO: 32637 - DNA, 20 bp, synthetic construct
  source 1..20: mol_type = other DNA
caaatgaggtggcaagaggg

SEQ ID NO: 32638 - DNA, 20 bp, synthetic construct
  source 1..20: mol_type = other DNA
tcaaatgaggtggcaagagg

SEQ ID NO: 32639 - DNA, 20 bp, synthetic construct
  source 1..20: mol_type = other DNA
gtcaaatgaggtggcaagag

SEQ ID NO: 32640 - DNA, 20 bp, synthetic construct
  source 1..20: mol_type = other DNA
agtcaaatgaggtggcaaga

SEQ ID NO: 32641 - DNA, 20 bp, synthetic construct
  source 1..20: mol_type = other DNA
gagtcaaatgaggtggcaag

SEQ ID NO: 32642 - DNA, 20 bp, synthetic construct
  source 1..20: mol_type = other DNA
tgagtcaaatgaggtggcaa

SEQ ID NO: 32643 - DNA, 20 bp, synthetic construct
  source 1..20: mol_type = other DNA
ttgagtcaaatgaggtggca

SEQ ID NO: 32644 - DNA, 20 bp, synthetic construct
  source 1..20: mol_type = other DNA
gttgagtcaaatgaggtggc

SEQ ID NO: 32645 - DNA, 20 bp, synthetic construct
  source 1..20: mol_type = other DNA
agttgagtcaaatgaggtgg

SEQ ID NO: 32646 - DNA, 20 bp, synthetic construct
  source 1..20: mol_type = other DNA
aagttgagtcaaatgaggtg

SEQ ID NO: 32647 - DNA, 20 bp, synthetic construct
  source 1..20: mol_type = other DNA
aaagttgagtcaaatgaggt

SEQ ID NO: 32648 - DNA, 20 bp, synthetic construct
  source 1..20: mol_type = other DNA
aaaagttgagtcaaatgagg

SEQ ID NO: 32649 - DNA, 20 bp, synthetic construct
  source 1..20: mol_type = other DNA
aaaaagttgagtcaaatgag

SEQ ID NO: 32650 - DNA, 20 bp, synthetic construct
  source 1..20: mol_type = other DNA
taaaaagttgagtcaaatga

SEQ ID NO: 32651 - DNA, 20 bp, synthetic construct
  source 1..20: mol_type = other DNA
ctaaaaagttgagtcaaatg

SEQ ID NO: 32652 - DNA, 20 bp, synthetic construct
  source 1..20: mol_type = other DNA
cctaaaaagttgagtcaaat

SEQ ID NO: 32653 - DNA, 20 bp, synthetic construct
  source 1..20: mol_type = other DNA
ccctaaaaagttgagtcaaa

SEQ ID NO: 32654 - DNA, 20 bp, synthetic construct
  source 1..20: mol_type = other DNA
tccctaaaaagttgagtcaa

SEQ ID NO: 32655 - DNA, 20 bp, synthetic construct
  source 1..20: mol_type = other DNA
ctccctaaaaagttgagtca

SEQ ID NO: 32656 - DNA, 20 bp, synthetic construct
  source 1..20: mol_type = other DNA
tctccctaaaaagttgagtc

SEQ ID NO: 32657 - DNA, 20 bp, synthetic construct
  source 1..20: mol_type = other DNA
ttctccctaaaaagttgagt

SEQ ID NO: 32658 - DNA, 20 bp, synthetic construct
  source 1..20: mol_type = other DNA
tttctccctaaaaagttgag

SEQ ID NO: 32659 - DNA, 20 bp, synthetic construct
  source 1..20: mol_type = other DNA
ttttctccctaaaaagttga

SEQ ID NO: 32660 - DNA, 20 bp, synthetic construct
  source 1..20: mol_type = other DNA
attttctccctaaaaagttg

SEQ ID NO: 32661 - DNA, 20 bp, synthetic construct
  source 1..20: mol_type = other DNA
tattttctccctaaaaagtt

SEQ ID NO: 32662 - DNA, 20 bp, synthetic construct
  source 1..20: mol_type = other DNA
atattttctccctaaaaagt

SEQ ID NO: 32663 - DNA, 20 bp, synthetic construct
  source 1..20: mol_type = other DNA
aatattttctccctaaaaag

SEQ ID NO: 32664 - DNA, 20 bp, synthetic construct
  source 1..20: mol_type = other DNA
gaatattttctccctaaaaa

SEQ ID NO: 32665 - DNA, 20 bp, synthetic construct
  source 1..20: mol_type = other DNA
tgaatattttctccctaaaa

SEQ ID NO: 32666 - DNA, 20 bp, synthetic construct
  source 1..20: mol_type = other DNA
ttgaatattttctccctaaa

SEQ ID NO: 32667 - DNA, 20 bp, synthetic construct
  source 1..20: mol_type = other DNA
attgaatattttctccctaa

SEQ ID NO: 32668 - DNA, 20 bp, synthetic construct
  source 1..20: mol_type = other DNA
tattgaatattttctcccta

SEQ ID NO: 32669 - DNA, 20 bp, synthetic construct
  source 1..20: mol_type = other DNA
gtattgaatattttctccct

SEQ ID NO: 32670 - DNA, 20 bp, synthetic construct
  source 1..20: mol_type = other DNA
cgtattgaatattttctccc

SEQ ID NO: 32671 - DNA, 20 bp, synthetic construct
  source 1..20: mol_type = other DNA
acgtattgaatattttctcc

SEQ ID NO: 32672 - DNA, 20 bp, synthetic construct
  source 1..20: mol_type = other DNA
cacgtattgaatattttctc

SEQ ID NO: 32673 - DNA, 20 bp, synthetic construct
  source 1..20: mol_type = other DNA
ccacgtattgaatattttct

SEQ ID NO: 32674 - DNA, 20 bp, synthetic construct
  source 1..20: mol_type = other DNA
accacgtattgaatattttc

SEQ ID NO: 32675 - DNA, 20 bp, synthetic construct
  source 1..20: mol_type = other DNA
taccacgtattgaatatttt

SEQ ID NO: 32676 - DNA, 20 bp, synthetic construct
  source 1..20: mol_type = other DNA
ataccacgtattgaatattt

SEQ ID NO: 32677 - DNA, 20 bp, synthetic construct
  source 1..20: mol_type = other DNA
tataccacgtattgaatatt

SEQ ID NO: 32678 - DNA, 20 bp, synthetic construct
  source 1..20: mol_type = other DNA
ctataccacgtattgaatat

SEQ ID NO: 32679 - DNA, 20 bp, synthetic construct
  source 1..20: mol_type = other DNA
cctataccacgtattgaata

SEQ ID NO: 32680 - DNA, 20 bp, synthetic construct
  source 1..20: mol_type = other DNA
tcctataccacgtattgaat

SEQ ID NO: 32681 - DNA, 20 bp, synthetic construct
  source 1..20: mol_type = other DNA
atcctataccacgtattgaa

SEQ ID NO: 32682 - DNA, 20 bp, synthetic construct
  source 1..20: mol_type = other DNA
aatcctataccacgtattga

SEQ ID NO: 32683 - DNA, 20 bp, synthetic construct
  source 1..20: mol_type = other DNA
aaatcctataccacgtattg

SEQ ID NO: 32684 - DNA, 20 bp, synthetic construct
  source 1..20: mol_type = other DNA
gaaatcctataccacgtatt

SEQ ID NO: 32685 - DNA, 20 bp, synthetic construct
  source 1..20: mol_type = other DNA
ggaaatcctataccacgtat

SEQ ID NO: 32686 - DNA, 20 bp, synthetic construct
  source 1..20: mol_type = other DNA
gggaaatcctataccacgta

SEQ ID NO: 32687 - DNA, 20 bp, synthetic construct
  source 1..20: mol_type = other DNA
agggaaatcctataccacgt

SEQ ID NO: 32688 - DNA, 20 bp, synthetic construct
  source 1..20: mol_type = other DNA
aagggaaatcctataccacg

SEQ ID NO: 32689 - DNA, 20 bp, synthetic construct
  source 1..20: mol_type = other DNA
aaagggaaatcctataccac

SEQ ID NO: 32690 - DNA, 20 bp, synthetic construct
  source 1..20: mol_type = other DNA
gaaagggaaatcctatacca

SEQ ID NO: 32691 - DNA, 20 bp, synthetic construct
  source 1..20: mol_type = other DNA
agaaagggaaatcctatacc

SEQ ID NO: 32692 - DNA, 20 bp, synthetic construct
  source 1..20: mol_type = other DNA
tagaaagggaaatcctatac

SEQ ID NO: 32693 - DNA, 20 bp, synthetic construct
  source 1..20: mol_type = other DNA
ttagaaagggaaatcctata

SEQ ID NO: 32694 - DNA, 20 bp, synthetic construct
  source 1..20: mol_type = other DNA
attagaaagggaaatcctat

SEQ ID NO: 32695 - DNA, 20 bp, synthetic construct
  source 1..20: mol_type = other DNA
tattagaaagggaaatccta

SEQ ID NO: 32696 - DNA, 20 bp, synthetic construct
  source 1..20: mol_type = other DNA
ttattagaaagggaaatcct

SEQ ID NO: 32697 - DNA, 20 bp, synthetic construct
  source 1..20: mol_type = other DNA
attattagaaagggaaatcc

SEQ ID NO: 32698 - DNA, 20 bp, synthetic construct
  source 1..20: mol_type = other DNA
tattattagaaagggaaatc

SEQ ID NO: 32699 - DNA, 20 bp, synthetic construct
  source 1..20: mol_type = other DNA
ttattattagaaagggaaat

SEQ ID NO: 32700 - DNA, 20 bp, synthetic construct
  source 1..20: mol_type = other DNA
attattattagaaagggaaa

SEQ ID NO: 32701 - DNA, 20 bp, synthetic construct
  source 1..20: mol_type = other DNA
cattattattagaaagggaa

SEQ ID NO: 32702 - DNA, 20 bp, synthetic construct
  source 1..20: mol_type = other DNA
acattattattagaaaggga

SEQ ID NO: 32703 - DNA, 20 bp, synthetic construct
  source 1..20: mol_type = other DNA
tacattattattagaaaggg

SEQ ID NO: 32704 - DNA, 20 bp, synthetic construct
  source 1..20: mol_type = other DNA
ttacattattattagaaagg

SEQ ID NO: 32705 - DNA, 20 bp, synthetic construct
  source 1..20: mol_type = other DNA
tttacattattattagaaag

SEQ ID NO: 32706 - DNA, 20 bp, synthetic construct
  source 1..20: mol_type = other DNA
gtttacattattattagaaa

SEQ ID NO: 32707 - DNA, 20 bp, synthetic construct
  source 1..20: mol_type = other DNA
tgtttacattattattagaa

SEQ ID NO: 32708 - DNA, 20 bp, synthetic construct
  source 1..20: mol_type = other DNA
ttgtttacattattattaga

SEQ ID NO: 32709 - DNA, 20 bp, synthetic construct
  source 1..20: mol_type = other DNA
gttgtttacattattattag

SEQ ID NO: 32710 - DNA, 20 bp, synthetic construct
  source 1..20: mol_type = other DNA
tgttgtttacattattatta

SEQ ID NO: 32711 - DNA, 20 bp, synthetic construct
  source 1..20: mol_type = other DNA
ttgttgtttacattattatt

SEQ ID NO: 32712 - DNA, 20 bp, synthetic construct
  source 1..20: mol_type = other DNA
gttgttgtttacattattat

SEQ ID NO: 32713 - DNA, 20 bp, synthetic construct
  source 1..20: mol_type = other DNA
tgttgttgtttacattatta

SEQ ID NO: 32714 - DNA, 20 bp, synthetic construct
  source 1..20: mol_type = other DNA
ttgttgttgtttacattatt

SEQ ID NO: 32715 - DNA, 20 bp, synthetic construct
  source 1..20: mol_type = other DNA
cttgttgttgtttacattat

SEQ ID NO: 32716 - DNA, 20 bp, synthetic construct
  source 1..20: mol_type = other DNA
tcttgttgttgtttacatta

SEQ ID NO: 32717 - DNA, 20 bp, synthetic construct
  source 1..20: mol_type = other DNA
ttcttgttgttgtttacatt

SEQ ID NO: 32718 - DNA, 20 bp, synthetic construct
  source 1..20: mol_type = other DNA
cttcttgttgttgtttacat

SEQ ID NO: 32719 - DNA, 20 bp, synthetic construct
  source 1..20: mol_type = other DNA
acttcttgttgttgtttaca

SEQ ID NO: 32720 - DNA, 20 bp, synthetic construct
  source 1..20: mol_type = other DNA
gacttcttgttgttgtttac

SEQ ID NO: 32721 - DNA, 20 bp, synthetic construct
  source 1..20: mol_type = other DNA
agacttcttgttgttgttta

SEQ ID NO: 32722 - DNA, 20 bp, synthetic construct
  source 1..20: mol_type = other DNA
cagacttcttgttgttgttt

SEQ ID NO: 32723 - DNA, 20 bp, synthetic construct
  source 1..20: mol_type = other DNA
tcagacttcttgttgttgtt

SEQ ID NO: 32724 - DNA, 20 bp, synthetic construct
  source 1..20: mol_type = other DNA
ttcagacttcttgttgttgt

SEQ ID NO: 32725 - DNA, 20 bp, synthetic construct
  source 1..20: mol_type = other DNA
tttcagacttcttgttgttg

SEQ ID NO: 32726 - DNA, 20 bp, synthetic construct
  source 1..20: mol_type = other DNA
atttcagacttcttgttgtt

SEQ ID NO: 32727 - DNA, 20 bp, synthetic construct
  source 1..20: mol_type = other DNA
aatttcagacttcttgttgt

SEQ ID NO: 32728 - DNA, 20 bp, synthetic construct
  source 1..20: mol_type = other DNA
caatttcagacttcttgttg

SEQ ID NO: 32729 - DNA, 20 bp, synthetic construct
  source 1..20: mol_type = other DNA
ccaatttcagacttcttgtt

SEQ ID NO: 32730 - DNA, 20 bp, synthetic construct
  source 1..20: mol_type = other DNA
tccaatttcagacttcttgt

SEQ ID NO: 32731 - DNA, 20 bp, synthetic construct
  source 1..20: mol_type = other DNA
ttccaatttcagacttcttg

SEQ ID NO: 32732 - DNA, 20 bp, synthetic construct
  source 1..20: mol_type = other DNA
cttccaatttcagacttctt

SEQ ID NO: 32733 - DNA, 20 bp, synthetic construct
  source 1..20: mol_type = other DNA
tcttccaatttcagacttct

SEQ ID NO: 32734 - DNA, 20 bp, synthetic construct
  source 1..20: mol_type = other DNA
ttcttccaatttcagacttc

SEQ ID NO: 32735 - DNA, 20 bp, synthetic construct
  source 1..20: mol_type = other DNA
gttcttccaatttcagactt

SEQ ID NO: 32736 - DNA, 20 bp, synthetic construct
  source 1..20: mol_type = other DNA
tgttcttccaatttcagact

SEQ ID NO: 32737 - DNA, 20 bp, synthetic construct
  source 1..20: mol_type = other DNA
ttgttcttccaatttcagac

SEQ ID NO: 32738 - DNA, 20 bp, synthetic construct
  source 1..20: mol_type = other DNA
tttgttcttccaatttcaga

SEQ ID NO: 32739 - DNA, 20 bp, synthetic construct
  source 1..20: mol_type = other DNA
ttttgttcttccaatttcag

SEQ ID NO: 32740 - DNA, 20 bp, synthetic construct
  source 1..20: mol_type = other DNA
attttgttcttccaatttca

SEQ ID NO: 32741 - DNA, 20 bp, synthetic construct
  source 1..20: mol_type = other DNA
cattttgttcttccaatttc

SEQ ID NO: 32742 - DNA, 20 bp, synthetic construct
  source 1..20: mol_type = other DNA
tcattttgttcttccaattt

SEQ ID NO: 32743 - DNA, 20 bp, synthetic construct
  source 1..20: mol_type = other DNA
gtcattttgttcttccaatt

SEQ ID NO: 32744 - DNA, 20 bp, synthetic construct
  source 1..20: mol_type = other DNA
agtcattttgttcttccaat

SEQ ID NO: 32745 - DNA, 20 bp, synthetic construct
  source 1..20: mol_type = other DNA
gagtcattttgttcttccaa

SEQ ID NO: 32746 - DNA, 20 bp, synthetic construct
  source 1..20: mol_type = other DNA
tgagtcattttgttcttcca

SEQ ID NO: 32747 - DNA, 20 bp, synthetic construct
  source 1..20: mol_type = other DNA
gtgagtcattttgttcttcc

SEQ ID NO: 32748 - DNA, 20 bp, synthetic construct
  source 1..20: mol_type = other DNA
ggtgagtcattttgttcttc

SEQ ID NO: 32749 - DNA, 20 bp, synthetic construct
  source 1..20: mol_type = other DNA
aggtgagtcattttgttctt

SEQ ID NO: 32750 - DNA, 20 bp, synthetic construct
  source 1..20: mol_type = other DNA
taggtgagtcattttgttct

SEQ ID NO: 32751 - DNA, 20 bp, synthetic construct
  source 1..20: mol_type = other DNA
ttaggtgagtcattttgttc

SEQ ID NO: 32752 - DNA, 20 bp, synthetic construct
  source 1..20: mol_type = other DNA
cttaggtgagtcattttgtt

SEQ ID NO: 32753 - DNA, 20 bp, synthetic construct
  source 1..20: mol_type = other DNA
acttaggtgagtcattttgt

SEQ ID NO: 32754 - DNA, 20 bp, synthetic construct
  source 1..20: mol_type = other DNA
cacttaggtgagtcattttg

SEQ ID NO: 32755 - DNA, 20 bp, synthetic construct
  source 1..20: mol_type = other DNA
tcacttaggtgagtcatttt

SEQ ID NO: 32756 - DNA, 20 bp, synthetic construct
  source 1..20: mol_type = other DNA
ctcacttaggtgagtcattt

SEQ ID NO: 32757 - DNA, 20 bp, synthetic construct
  source 1..20: mol_type = other DNA
actcacttaggtgagtcatt

SEQ ID NO: 32758 - DNA, 20 bp, synthetic construct
  source 1..20: mol_type = other DNA
aactcacttaggtgagtcat

SEQ ID NO: 32759 - DNA, 20 bp, synthetic construct
  source 1..20: mol_type = other DNA
taactcacttaggtgagtca

SEQ ID NO: 32760 - DNA, 20 bp, synthetic construct
  source 1..20: mol_type = other DNA
ttaactcacttaggtgagtc

SEQ ID NO: 32761 - DNA, 20 bp, synthetic construct
  source 1..20: mol_type = other DNA
gttaactcacttaggtgagt

SEQ ID NO: 32762 - DNA, 20 bp, synthetic construct
  source 1..20: mol_type = other DNA
ggttaactcacttaggtgag

SEQ ID NO: 32763 - DNA, 20 bp, synthetic construct
  source 1..20: mol_type = other DNA
aggttaactcacttaggtga

SEQ ID NO: 32764 - DNA, 20 bp, synthetic construct
  source 1..20: mol_type = other DNA
aaggttaactcacttaggtg

SEQ ID NO: 32765 - DNA, 20 bp, synthetic construct
  source 1..20: mol_type = other DNA
taaggttaactcacttaggt

SEQ ID NO: 32766 - DNA, 20 bp, synthetic construct
  source 1..20: mol_type = other DNA
ttaaggttaactcacttagg

SEQ ID NO: 32767 - DNA, 20 bp, synthetic construct
  source 1..20: mol_type = other DNA
cttaaggttaactcacttag

SEQ ID NO: 32768 - DNA, 20 bp, synthetic construct
  source 1..20: mol_type = other DNA
tcttaaggttaactcactta

SEQ ID NO: 32769 - DNA, 20 bp, synthetic construct
  source 1..20: mol_type = other DNA
ctcttaaggttaactcactt

SEQ ID NO: 32770 - DNA, 20 bp, synthetic construct
  source 1..20: mol_type = other DNA
cctcttaaggttaactcact

SEQ ID NO: 32771 - DNA, 20 bp, synthetic construct
  source 1..20: mol_type = other DNA
acctcttaaggttaactcac

SEQ ID NO: 32772 - DNA, 20 bp, synthetic construct
  source 1..20: mol_type = other DNA
cacctcttaaggttaactca

SEQ ID NO: 32773 - DNA, 20 bp, synthetic construct
  source 1..20: mol_type = other DNA
ccacctcttaaggttaactc

SEQ ID NO: 32774 - DNA, 20 bp, synthetic construct
  source 1..20: mol_type = other DNA
tccacctcttaaggttaact

SEQ ID NO: 32775 - DNA, 20 bp, synthetic construct
  source 1..20: mol_type = other DNA
ttccacctcttaaggttaac

SEQ ID NO: 32776 - DNA, 20 bp, synthetic construct
  source 1..20: mol_type = other DNA
gttccacctcttaaggttaa

SEQ ID NO: 32777 - DNA, 20 bp, synthetic construct
  source 1..20: mol_type = other DNA
agttccacctcttaaggtta

SEQ ID NO: 32778 - DNA, 20 bp, synthetic construct
  source 1..20: mol_type = other DNA
aagttccacctcttaaggtt

SEQ ID NO: 32779 - DNA, 20 bp, synthetic construct
  source 1..20: mol_type = other DNA
caagttccacctcttaaggt

SEQ ID NO: 32780 - DNA, 20 bp, synthetic construct
  source 1..20: mol_type = other DNA
tcaagttccacctcttaagg

SEQ ID NO: 32781 - DNA, 20 bp, synthetic construct
  source 1..20: mol_type = other DNA
atcaagttccacctcttaag

SEQ ID NO: 32782 - DNA, 20 bp, synthetic construct
  source 1..20: mol_type = other DNA
aatcaagttccacctcttaa

SEQ ID NO: 32783 - DNA, 20 bp, synthetic construct
  source 1..20: mol_type = other DNA
aaatcaagttccacctctta

SEQ ID NO: 32784 - DNA, 20 bp, synthetic construct
  source 1..20: mol_type = other DNA
gaaatcaagttccacctctt

SEQ ID NO: 32785 - DNA, 20 bp, synthetic construct
  source 1..20: mol_type = other DNA
agaaatcaagttccacctct

SEQ ID NO: 32786 - DNA, 20 bp, synthetic construct
  source 1..20: mol_type = other DNA
tagaaatcaagttccacctc

SEQ ID NO: 32787 - DNA, 20 bp, synthetic construct
  source 1..20: mol_type = other DNA
ctagaaatcaagttccacct

SEQ ID NO: 32788 - DNA, 20 bp, synthetic construct
  source 1..20: mol_type = other DNA
tctagaaatcaagttccacc

SEQ ID NO: 32789 - DNA, 20 bp, synthetic construct
  source 1..20: mol_type = other DNA
atctagaaatcaagttccac

SEQ ID NO: 32790 - DNA, 20 bp, synthetic construct
  source 1..20: mol_type = other DNA
aatctagaaatcaagttcca

SEQ ID NO: 32791 - DNA, 20 bp, synthetic construct
  source 1..20: mol_type = other DNA
aaatctagaaatcaagttcc

SEQ ID NO: 32792 - DNA, 20 bp, synthetic construct
  source 1..20: mol_type = other DNA
aaaatctagaaatcaagttc

SEQ ID NO: 32793 - DNA, 20 bp, synthetic construct
  source 1..20: mol_type = other DNA
taaaatctagaaatcaagtt

SEQ ID NO: 32794 - DNA, 20 bp, synthetic construct
  source 1..20: mol_type = other DNA
ctaaaatctagaaatcaagt

SEQ ID NO: 32795 - DNA, 20 bp, synthetic construct
  source 1..20: mol_type = other DNA
actaaaatctagaaatcaag

SEQ ID NO: 32796 - DNA, 20 bp, synthetic construct
  source 1..20: mol_type = other DNA
aactaaaatctagaaatcaa

SEQ ID NO: 32797 - DNA, 20 bp, synthetic construct
  source 1..20: mol_type = other DNA
taactaaaatctagaaatca

SEQ ID NO: 32798 - DNA, 20 bp, synthetic construct
  source 1..20: mol_type = other DNA
ttaactaaaatctagaaatc

SEQ ID NO: 32799 - DNA, 20 bp, synthetic construct
  source 1..20: mol_type = other DNA
attaactaaaatctagaaat

SEQ ID NO: 32800 - DNA, 20 bp, synthetic construct
  source 1..20: mol_type = other DNA
aattaactaaaatctagaaa

SEQ ID NO: 32801 - DNA, 20 bp, synthetic construct
  source 1..20: mol_type = other DNA
caattaactaaaatctagaa

SEQ ID NO: 32802 - DNA, 20 bp, synthetic construct
  source 1..20: mol_type = other DNA
acaattaactaaaatctaga

SEQ ID NO: 32803 - DNA, 20 bp, synthetic construct
  source 1..20: mol_type = other DNA
gacaattaactaaaatctag

SEQ ID NO: 32804 - DNA, 20 bp, synthetic construct
  source 1..20: mol_type = other DNA
agacaattaactaaaatcta

SEQ ID NO: 32805 - DNA, 20 bp, synthetic construct
  source 1..20: mol_type = other DNA
tagacaattaactaaaatct

SEQ ID NO: 32806 - DNA, 20 bp, synthetic construct
  source 1..20: mol_type = other DNA
ttagacaattaactaaaatc

SEQ ID NO: 32807 - DNA, 20 bp, synthetic construct
  source 1..20: mol_type = other DNA
gttagacaattaactaaaat

SEQ ID NO: 32808 - DNA, 20 bp, synthetic construct
  source 1..20: mol_type = other DNA
agttagacaattaactaaaa

SEQ ID NO: 32809 - DNA, 20 bp, synthetic construct
  source 1..20: mol_type = other DNA
cagttagacaattaactaaa

SEQ ID NO: 32810 - DNA, 20 bp, synthetic construct
  source 1..20: mol_type = other DNA
tcagttagacaattaactaa

SEQ ID NO: 32811 - DNA, 20 bp, synthetic construct
  source 1..20: mol_type = other DNA
atcagttagacaattaacta

SEQ ID NO: 32812 - DNA, 20 bp, synthetic construct
  source 1..20: mol_type = other DNA
catcagttagacaattaact

SEQ ID NO: 32813 - DNA, 20 bp, synthetic construct
  source 1..20: mol_type = other DNA
acatcagttagacaattaac

SEQ ID NO: 32814 - DNA, 20 bp, synthetic construct
  source 1..20: mol_type = other DNA
tacatcagttagacaattaa

SEQ ID NO: 32815 - DNA, 20 bp, synthetic construct
  source 1..20: mol_type = other DNA
gtacatcagttagacaatta

SEQ ID NO: 32816 - DNA, 20 bp, synthetic construct
  source 1..20: mol_type = other DNA
agtacatcagttagacaatt

SEQ ID NO: 32817 - DNA, 20 bp, synthetic construct
  source 1..20: mol_type = other DNA
tagtacatcagttagacaat

SEQ ID NO: 32818 - DNA, 20 bp, synthetic construct
  source 1..20: mol_type = other DNA
ttagtacatcagttagacaa

SEQ ID NO: 32819 - DNA, 20 bp, synthetic construct
  source 1..20: mol_type = other DNA
tttagtacatcagttagaca

SEQ ID NO: 32820 - DNA, 20 bp, synthetic construct
  source 1..20: mol_type = other DNA
atttagtacatcagttagac

SEQ ID NO: 32821 - DNA, 20 bp, synthetic construct
  source 1..20: mol_type = other DNA
tatttagtacatcagttaga

SEQ ID NO: 32822 - DNA, 20 bp, synthetic construct
  source 1..20: mol_type = other DNA
atatttagtacatcagttag

SEQ ID NO: 32823 - DNA, 20 bp, synthetic construct
  source 1..20: mol_type = other DNA
aatatttagtacatcagtta

SEQ ID NO: 32824 - DNA, 20 bp, synthetic construct
  source 1..20: mol_type = other DNA
taatatttagtacatcagtt

SEQ ID NO: 32825 - DNA, 20 bp, synthetic construct
  source 1..20: mol_type = other DNA
ctaatatttagtacatcagt

SEQ ID NO: 32826 - DNA, 20 bp, synthetic construct
  source 1..20: mol_type = other DNA
actaatatttagtacatcag

SEQ ID NO: 32827 - DNA, 20 bp, synthetic construct
  source 1..20: mol_type = other DNA
aactaatatttagtacatca

SEQ ID NO: 32828 - DNA, 20 bp, synthetic construct
  source 1..20: mol_type = other DNA
taactaatatttagtacatc

SEQ ID NO: 32829 - DNA, 20 bp, synthetic construct
  source 1..20: mol_type = other DNA
gtaactaatatttagtacat

SEQ ID NO: 32830 - DNA, 20 bp, synthetic construct
  source 1..20: mol_type = other DNA
agtaactaatatttagtaca

SEQ ID NO: 32831 - DNA, 20 bp, synthetic construct
  source 1..20: mol_type = other DNA
aagtaactaatatttagtac

SEQ ID NO: 32832 - DNA, 20 bp, synthetic construct
  source 1..20: mol_type = other DNA
taagtaactaatatttagta

SEQ ID NO: 32833 - DNA, 20 bp, synthetic construct
  source 1..20: mol_type = other DNA
ttaagtaactaatatttagt

SEQ ID NO: 32834 - DNA, 20 bp, synthetic construct
  source 1..20: mol_type = other DNA
cttaagtaactaatatttag

SEQ ID NO: 32835 - DNA, 20 bp, synthetic construct
  source 1..20: mol_type = other DNA
acttaagtaactaatattta

SEQ ID NO: 32836 - DNA, 20 bp, synthetic construct
  source 1..20: mol_type = other DNA
tacttaagtaactaatattt

SEQ ID NO: 32837 - DNA, 20 bp, synthetic construct
  source 1..20: mol_type = other DNA
atacttaagtaactaatatt

SEQ ID NO: 32838 - DNA, 20 bp, synthetic construct
  source 1..20: mol_type = other DNA
aatacttaagtaactaatat

SEQ ID NO: 32839 - DNA, 20 bp, synthetic construct
  source 1..20: mol_type = other DNA
taatacttaagtaactaata

SEQ ID NO: 32840 - DNA, 20 bp, synthetic construct
  source 1..20: mol_type = other DNA
ttaatacttaagtaactaat

SEQ ID NO: 32841 - DNA, 20 bp, synthetic construct
  source 1..20: mol_type = other DNA
tttaatacttaagtaactaa

SEQ ID NO: 32842 - DNA, 20 bp, synthetic construct
  source 1..20: mol_type = other DNA
ttttaatacttaagtaacta

SEQ ID NO: 32843 - DNA, 20 bp, synthetic construct
  source 1..20: mol_type = other DNA
gttttaatacttaagtaact

SEQ ID NO: 32844 - DNA, 20 bp, synthetic construct
  source 1..20: mol_type = other DNA
cgttttaatacttaagtaac

SEQ ID NO: 32845 - DNA, 20 bp, synthetic construct
  source 1..20: mol_type = other DNA
ccgttttaatacttaagtaa

SEQ ID NO: 32846 - DNA, 20 bp, synthetic construct
  source 1..20: mol_type = other DNA
cccgttttaatacttaagta

SEQ ID NO: 32847 - DNA, 20 bp, synthetic construct
  source 1..20: mol_type = other DNA
acccgttttaatacttaagt

SEQ ID NO: 32848 - DNA, 20 bp, synthetic construct
  source 1..20: mol_type = other DNA
tacccgttttaatacttaag

SEQ ID NO: 32849 - DNA, 20 bp, synthetic construct
  source 1..20: mol_type = other DNA
ctacccgttttaatacttaa

SEQ ID NO: 32850 - DNA, 20 bp, synthetic construct
  source 1..20: mol_type = other DNA
tctacccgttttaatactta

SEQ ID NO: 32851 - DNA, 20 bp, synthetic construct
  source 1..20: mol_type = other DNA
gtctacccgttttaatactt

SEQ ID NO: 32852 - DNA, 20 bp, synthetic construct
  source 1..20: mol_type = other DNA
tgtctacccgttttaatact

SEQ ID NO: 32853 - DNA, 20 bp, synthetic construct
  source 1..20: mol_type = other DNA
atgtctacccgttttaatac

SEQ ID NO: 32854 - DNA, 20 bp, synthetic construct
  source 1..20: mol_type = other DNA
tatgtctacccgttttaata

SEQ ID NO: 32855 - DNA, 20 bp, synthetic construct
  source 1..20: mol_type = other DNA
ttatgtctacccgttttaat

SEQ ID NO: 32856 - DNA, 20 bp, synthetic construct
  source 1..20: mol_type = other DNA
attatgtctacccgttttaa

SEQ ID NO: 32857 - DNA, 20 bp, synthetic construct
  source 1..20: mol_type = other DNA
tattatgtctacccgtttta

SEQ ID NO: 32858 - DNA, 20 bp, synthetic construct
  source 1..20: mol_type = other DNA
ctattatgtctacccgtttt

SEQ ID NO: 32859 - DNA, 20 bp, synthetic construct
  source 1..20: mol_type = other DNA
actattatgtctacccgttt

SEQ ID NO: 32860 - DNA, 20 bp, synthetic construct
  source 1..20: mol_type = other DNA
aactattatgtctacccgtt

SEQ ID NO: 32861 - DNA, 20 bp, synthetic construct
  source 1..20: mol_type = other DNA
caactattatgtctacccgt

SEQ ID NO: 32862 - DNA, 20 bp, synthetic construct
  source 1..20: mol_type = other DNA
ccaactattatgtctacccg

SEQ ID NO: 32863 - DNA, 20 bp, synthetic construct
  source 1..20: mol_type = other DNA
cccaactattatgtctaccc

SEQ ID NO: 32864 - DNA, 20 bp, synthetic construct
  source 1..20: mol_type = other DNA
ccccaactattatgtctacc

SEQ ID NO: 32865 - DNA, 20 bp, synthetic construct
  source 1..20: mol_type = other DNA
tccccaactattatgtctac

SEQ ID NO: 32866 - DNA, 20 bp, synthetic construct
  source 1..20: mol_type = other DNA
ctccccaactattatgtcta

SEQ ID NO: 32867 - DNA, 20 bp, synthetic construct
  source 1..20: mol_type = other DNA
gctccccaactattatgtct

SEQ ID NO: 32868 - DNA, 20 bp, synthetic construct
  source 1..20: mol_type = other DNA
agctccccaactattatgtc

SEQ ID NO: 32869 - DNA, 20 bp, synthetic construct
  source 1..20: mol_type = other DNA
cagctccccaactattatgt

SEQ ID NO: 32870 - DNA, 20 bp, synthetic construct
  source 1..20: mol_type = other DNA
gcagctccccaactattatg

SEQ ID NO: 32871 - DNA, 20 bp, synthetic construct
  source 1..20: mol_type = other DNA
agcagctccccaactattat

SEQ ID NO: 32872 - DNA, 20 bp, synthetic construct
  source 1..20: mol_type = other DNA
cagcagctccccaactatta

SEQ ID NO: 32873 - DNA, 20 bp, synthetic construct
  source 1..20: mol_type = other DNA
acagcagctccccaactatt

SEQ ID NO: 32874 - DNA, 20 bp, synthetic construct
  source 1..20: mol_type = other DNA
tacagcagctccccaactat

SEQ ID NO: 32875 - DNA, 20 bp, synthetic construct
  source 1..20: mol_type = other DNA
ctacagcagctccccaacta

SEQ ID NO: 32876 - DNA, 20 bp, synthetic construct
  source 1..20: mol_type = other DNA
tctacagcagctccccaact

SEQ ID NO: 32877 - DNA, 20 bp, synthetic construct
  source 1..20: mol_type = other DNA
ctctacagcagctccccaac

SEQ ID NO: 32878 - DNA, 20 bp, synthetic construct
  source 1..20: mol_type = other DNA
cctctacagcagctccccaa

SEQ ID NO: 32879 - DNA, 20 bp, synthetic construct
  source 1..20: mol_type = other DNA
ccctctacagcagctcccca

SEQ ID NO: 32880 - DNA, 20 bp, synthetic construct
  source 1..20: mol_type = other DNA
cccctctacagcagctcccc

SEQ ID NO: 32881 - DNA, 20 bp, synthetic construct
  source 1..20: mol_type = other DNA
ccccctctacagcagctccc

SEQ ID NO: 32882 - DNA, 20 bp, synthetic construct
  source 1..20: mol_type = other DNA
accccctctacagcagctcc

SEQ ID NO: 32883 - DNA, 20 bp, synthetic construct
  source 1..20: mol_type = other DNA
taccccctctacagcagctc

SEQ ID NO: 32884 - DNA, 20 bp, synthetic construct
  source 1..20: mol_type = other DNA
ctaccccctctacagcagct

SEQ ID NO: 32885 - DNA, 20 bp, synthetic construct
  source 1..20: mol_type = other DNA
actaccccctctacagcagc

SEQ ID NO: 32886 - DNA, 20 bp, synthetic construct
  source 1..20: mol_type = other DNA
aactaccccctctacagcag

SEQ ID NO: 32887 - DNA, 20 bp, synthetic construct
  source 1..20: mol_type = other DNA
aaactaccccctctacagca

SEQ ID NO: 32888 - DNA, 20 bp, synthetic construct
  source 1..20: mol_type = other DNA
caaactaccccctctacagc

SEQ ID NO: 32889 - DNA, 20 bp, synthetic construct
  source 1..20: mol_type = other DNA
tcaaactaccccctctacag

SEQ ID NO: 32890 - DNA, 20 bp, synthetic construct
  source 1..20: mol_type = other DNA
ctcaaactaccccctctaca

SEQ ID NO: 32891 - DNA, 20 bp, synthetic construct
  source 1..20: mol_type = other DNA
tctcaaactaccccctctac

SEQ ID NO: 32892 - DNA, 20 bp, synthetic construct
  source 1..20: mol_type = other DNA
ttctcaaactaccccctcta

SEQ ID NO: 32893 - DNA, 20 bp, synthetic construct
  source 1..20: mol_type = other DNA
cttctcaaactaccccctct

SEQ ID NO: 32894 - DNA, 20 bp, synthetic construct
  source 1..20: mol_type = other DNA
ccttctcaaactaccccctc

SEQ ID NO: 32895 - DNA, 20 bp, synthetic construct
  source 1..20: mol_type = other DNA
gccttctcaaactaccccct

SEQ ID NO: 32896 - DNA, 20 bp, synthetic construct
  source 1..20: mol_type = other DNA
agccttctcaaactaccccc

SEQ ID NO: 32897 - DNA, 20 bp, synthetic construct
  source 1..20: mol_type = other DNA
aagccttctcaaactacccc

SEQ ID NO: 32898 - DNA, 20 bp, synthetic construct
  source 1..20: mol_type = other DNA
gaagccttctcaaactaccc

SEQ ID NO: 32899 - DNA, 20 bp, synthetic construct
  source 1..20: mol_type = other DNA
agaagccttctcaaactacc

SEQ ID NO: 32900 - DNA, 20 bp, synthetic construct
  source 1..20: mol_type = other DNA
aagaagccttctcaaactac

SEQ ID NO: 32901 - DNA, 20 bp, synthetic construct
  source 1..20: mol_type = other DNA
aaagaagccttctcaaacta

SEQ ID NO: 32902 - DNA, 20 bp, synthetic construct
  source 1..20: mol_type = other DNA
gaaagaagccttctcaaact

SEQ ID NO: 32903 - DNA, 20 bp, synthetic construct
  source 1..20: mol_type = other DNA
tgaaagaagccttctcaaac

SEQ ID NO: 32904 - DNA, 20 bp, synthetic construct
  source 1..20: mol_type = other DNA
ctgaaagaagccttctcaaa

SEQ ID NO: 32905 - DNA, 20 bp, synthetic construct
  source 1..20: mol_type = other DNA
cctgaaagaagccttctcaa

SEQ ID NO: 32906 - DNA, 20 bp, synthetic construct
  source 1..20: mol_type = other DNA
tcctgaaagaagccttctca

SEQ ID NO: 32907 - DNA, 20 bp, synthetic construct
  source 1..20: mol_type = other DNA
ctcctgaaagaagccttctc

SEQ ID NO: 32908 - DNA, 20 bp, synthetic construct
  source 1..20: mol_type = other DNA
cctcctgaaagaagccttct

SEQ ID NO: 32909 - DNA, 20 bp, synthetic construct
  source 1..20: mol_type = other DNA
acctcctgaaagaagccttc

SEQ ID NO: 32910 - DNA, 20 bp, synthetic construct
  source 1..20: mol_type = other DNA
cacctcctgaaagaagcctt

SEQ ID NO: 32911 - DNA, 20 bp, synthetic construct
  source 1..20: mol_type = other DNA
tcacctcctgaaagaagcct

SEQ ID NO: 32912 - DNA, 20 bp, synthetic construct
  source 1..20: mol_type = other DNA
gtcacctcctgaaagaagcc

SEQ ID NO: 32913 - DNA, 20 bp, synthetic construct
  source 1..20: mol_type = other DNA
tgtcacctcctgaaagaagc

SEQ ID NO: 32914 - DNA, 20 bp, synthetic construct
  source 1..20: mol_type = other DNA
atgtcacctcctgaaagaag

SEQ ID NO: 32915 - DNA, 20 bp, synthetic construct
  source 1..20: mol_type = other DNA
aatgtcacctcctgaaagaa

SEQ ID NO: 32916 - DNA, 20 bp, synthetic construct
  source 1..20: mol_type = other DNA
aaatgtcacctcctgaaaga

SEQ ID NO: 32917 - DNA, 20 bp, synthetic construct
  source 1..20: mol_type = other DNA
taaatgtcacctcctgaaag

SEQ ID NO: 32918 - DNA, 20 bp, synthetic construct
  source 1..20: mol_type = other DNA
ttaaatgtcacctcctgaaa

SEQ ID NO: 32919 - DNA, 20 bp, synthetic construct
  source 1..20: mol_type = other DNA
cttaaatgtcacctcctgaa

SEQ ID NO: 32920 - DNA, 20 bp, synthetic construct
  source 1..20: mol_type = other DNA
acttaaatgtcacctcctga

SEQ ID NO: 32921 - DNA, 20 bp, synthetic construct
  source 1..20: mol_type = other DNA
aacttaaatgtcacctcctg

SEQ ID NO: 32922 - DNA, 20 bp, synthetic construct
  source 1..20: mol_type = other DNA
caacttaaatgtcacctcct

SEQ ID NO: 32923 - DNA, 20 bp, synthetic construct
  source 1..20: mol_type = other DNA
ccaacttaaatgtcacctcc

SEQ ID NO: 32924 - DNA, 20 bp, synthetic construct
  source 1..20: mol_type = other DNA
accaacttaaatgtcacctc

SEQ ID NO: 32925 - DNA, 20 bp, synthetic construct
  source 1..20: mol_type = other DNA
taccaacttaaatgtcacct

SEQ ID NO: 32926 - DNA, 20 bp, synthetic construct
  source 1..20: mol_type = other DNA
ttaccaacttaaatgtcacc

SEQ ID NO: 32927 - DNA, 20 bp, synthetic construct
  source 1..20: mol_type = other DNA
gttaccaacttaaatgtcac

SEQ ID NO: 32928 - DNA, 20 bp, synthetic construct
  source 1..20: mol_type = other DNA
agttaccaacttaaatgtca

SEQ ID NO: 32929 - DNA, 20 bp, synthetic construct
  source 1..20: mol_type = other DNA
tagttaccaacttaaatgtc

SEQ ID NO: 32930 - DNA, 20 bp, synthetic construct
  source 1..20: mol_type = other DNA
ttagttaccaacttaaatgt

SEQ ID NO: 32931 - DNA, 20 bp, synthetic construct
  source 1..20: mol_type = other DNA
gttagttaccaacttaaatg

SEQ ID NO: 32932 - DNA, 20 bp, synthetic construct
  source 1..20: mol_type = other DNA
tgttagttaccaacttaaat

SEQ ID NO: 32933 - DNA, 20 bp, synthetic construct
  source 1..20: mol_type = other DNA
ttgttagttaccaacttaaa

SEQ ID NO: 32934 - DNA, 20 bp, synthetic construct
  source 1..20: mol_type = other DNA
cttgttagttaccaacttaa

SEQ ID NO: 32935 - DNA, 20 bp, synthetic construct
  source 1..20: mol_type = other DNA
tcttgttagttaccaactta

SEQ ID NO: 32936 - DNA, 20 bp, synthetic construct
  source 1..20: mol_type = other DNA
ttcttgttagttaccaactt

SEQ ID NO: 32937 - DNA, 20 bp, synthetic construct
  source 1..20: mol_type = other DNA
tttcttgttagttaccaact

SEQ ID NO: 32938 - DNA, 20 bp, synthetic construct
  source 1..20: mol_type = other DNA
ctttcttgttagttaccaac

SEQ ID NO: 32939 - DNA, 20 bp, synthetic construct
  source 1..20: mol_type = other DNA
cctttcttgttagttaccaa

SEQ ID NO: 32940 - DNA, 20 bp, synthetic construct
  source 1..20: mol_type = other DNA
ccctttcttgttagttacca

SEQ ID NO: 32941 - DNA, 20 bp, synthetic construct
  source 1..20: mol_type = other DNA
cccctttcttgttagttacc

SEQ ID NO: 32942 - DNA, 20 bp, synthetic construct
  source 1..20: mol_type = other DNA
gcccctttcttgttagttac

SEQ ID NO: 32943 - DNA, 20 bp, synthetic construct
  source 1..20: mol_type = other DNA
tgcccctttcttgttagtta

SEQ ID NO: 32944 - DNA, 20 bp, synthetic construct
  source 1..20: mol_type = other DNA
ctgcccctttcttgttagtt

SEQ ID NO: 32945 - DNA, 20 bp, synthetic construct
  source 1..20: mol_type = other DNA
gctgcccctttcttgttagt

SEQ ID NO: 32946 - DNA, 20 bp, synthetic construct
  source 1..20: mol_type = other DNA
ggctgcccctttcttgttag

SEQ ID NO: 32947 - DNA, 20 bp, synthetic construct
  source 1..20: mol_type = other DNA
tggctgcccctttcttgtta

SEQ ID NO: 32948 - DNA, 20 bp, synthetic construct
  source 1..20: mol_type = other DNA
atggctgcccctttcttgtt

SEQ ID NO: 32949 - DNA, 20 bp, synthetic construct
  source 1..20: mol_type = other DNA
catggctgcccctttcttgt

SEQ ID NO: 32950 - DNA, 20 bp, synthetic construct
  source 1..20: mol_type = other DNA
acatggctgcccctttcttg

SEQ ID NO: 32951 - DNA, 20 bp, synthetic construct
  source 1..20: mol_type = other DNA
cacatggctgcccctttctt

SEQ ID NO: 32952 - DNA, 20 bp, synthetic construct
  source 1..20: mol_type = other DNA
tcacatggctgcccctttct

SEQ ID NO: 32953 - DNA, 20 bp, synthetic construct
  source 1..20: mol_type = other DNA
ttcacatggctgcccctttc

SEQ ID NO: 32954 - DNA, 20 bp, synthetic construct
  source 1..20: mol_type = other DNA
attcacatggctgccccttt

SEQ ID NO: 32955 - DNA, 20 bp, synthetic construct
  source 1..20: mol_type = other DNA
tattcacatggctgcccctt

SEQ ID NO: 32956 - DNA, 20 bp, synthetic construct
  source 1..20: mol_type = other DNA
ctattcacatggctgcccct

SEQ ID NO: 32957 - DNA, 20 bp, synthetic construct
  source 1..20: mol_type = other DNA
gctattcacatggctgcccc

SEQ ID NO: 32958 - DNA, 20 bp, synthetic construct
  source 1..20: mol_type = other DNA
agctattcacatggctgccc

SEQ ID NO: 32959 - DNA, 20 bp, synthetic construct
  source 1..20: mol_type = other DNA
cagctattcacatggctgcc

SEQ ID NO: 32960 - DNA, 20 bp, synthetic construct
  source 1..20: mol_type = other DNA
ccagctattcacatggctgc

SEQ ID NO: 32961 - DNA, 20 bp, synthetic construct
  source 1..20: mol_type = other DNA
tccagctattcacatggctg

SEQ ID NO: 32962 - DNA, 20 bp, synthetic construct
  source 1..20: mol_type = other DNA
ctccagctattcacatggct

SEQ ID NO: 32963 - DNA, 20 bp, synthetic construct
  source 1..20: mol_type = other DNA
cctccagctattcacatggc

SEQ ID NO: 32964 - DNA, 20 bp, synthetic construct
  source 1..20: mol_type = other DNA
ccctccagctattcacatgg

SEQ ID NO: 32965 - DNA, 20 bp, synthetic construct
  source 1..20: mol_type = other DNA
tccctccagctattcacatg

SEQ ID NO: 32966 - DNA, 20 bp, synthetic construct
  source 1..20: mol_type = other DNA
ttccctccagctattcacat

SEQ ID NO: 32967 - DNA, 20 bp, synthetic construct
  source 1..20: mol_type = other DNA
cttccctccagctattcaca

SEQ ID NO: 32968 - DNA, 20 bp, synthetic construct
  source 1..20: mol_type = other DNA
tcttccctccagctattcac

SEQ ID NO: 32969 - DNA, 20 bp, synthetic construct
  source 1..20: mol_type = other DNA
ctcttccctccagctattca

SEQ ID NO: 32970 - DNA, 20 bp, synthetic construct
  source 1..20: mol_type = other DNA
gctcttccctccagctattc

SEQ ID NO: 32971 - DNA, 20 bp, synthetic construct
  source 1..20: mol_type = other DNA
tgctcttccctccagctatt

SEQ ID NO: 32972 - DNA, 20 bp, synthetic construct
  source 1..20: mol_type = other DNA
atgctcttccctccagctat

SEQ ID NO: 32973 - DNA, 20 bp, synthetic construct
  source 1..20: mol_type = other DNA
aatgctcttccctccagcta

SEQ ID NO: 32974 - DNA, 20 bp, synthetic construct
  source 1..20: mol_type = other DNA
gaatgctcttccctccagct

SEQ ID NO: 32975 - DNA, 20 bp, synthetic construct
  source 1..20: mol_type = other DNA
agaatgctcttccctccagc

SEQ ID NO: 32976 - DNA, 20 bp, synthetic construct
  source 1..20: mol_type = other DNA
aagaatgctcttccctccag

SEQ ID NO: 32977 - DNA, 20 bp, synthetic construct
  source 1..20: mol_type = other DNA
taagaatgctcttccctcca

SEQ ID NO: 32978 - DNA, 20 bp, synthetic construct
  source 1..20: mol_type = other DNA
gtaagaatgctcttccctcc

SEQ ID NO: 32979 - DNA, 20 bp, synthetic construct
  source 1..20: mol_type = other DNA
tgtaagaatgctcttccctc

SEQ ID NO: 32980 - DNA, 20 bp, synthetic construct
  source 1..20: mol_type = other DNA
ctgtaagaatgctcttccct

SEQ ID NO: 32981 - DNA, 20 bp, synthetic construct
  source 1..20: mol_type = other DNA
actgtaagaatgctcttccc

SEQ ID NO: 32982 - DNA, 20 bp, synthetic construct
  source 1..20: mol_type = other DNA
aactgtaagaatgctcttcc

SEQ ID NO: 32983 - DNA, 20 bp, synthetic construct
  source 1..20: mol_type = other DNA
aaactgtaagaatgctcttc

SEQ ID NO: 32984 - DNA, 20 bp, synthetic construct
  source 1..20: mol_type = other DNA
aaaactgtaagaatgctctt

SEQ ID NO: 32985 - DNA, 20 bp, synthetic construct
  source 1..20: mol_type = other DNA
taaaactgtaagaatgctct

SEQ ID NO: 32986 - DNA, 20 bp, synthetic construct
  source 1..20: mol_type = other DNA
gtaaaactgtaagaatgctc

SEQ ID NO: 32987 - DNA, 20 bp, synthetic construct
  source 1..20: mol_type = other DNA
agtaaaactgtaagaatgct

SEQ ID NO: 32988 - DNA, 20 bp, synthetic construct
  source 1..20: mol_type = other DNA
cagtaaaactgtaagaatgc

SEQ ID NO: 32989 - DNA, 20 bp, synthetic construct
  source 1..20: mol_type = other DNA
ccagtaaaactgtaagaatg

SEQ ID NO: 32990 - DNA, 20 bp, synthetic construct
  source 1..20: mol_type = other DNA
tccagtaaaactgtaagaat

SEQ ID NO: 32991 - DNA, 20 bp, synthetic construct
  source 1..20: mol_type = other DNA
ttccagtaaaactgtaagaa

SEQ ID NO: 32992 - DNA, 20 bp, synthetic construct
  source 1..20: mol_type = other DNA
cttccagtaaaactgtaaga

SEQ ID NO: 32993 - DNA, 20 bp, synthetic construct
  source 1..20: mol_type = other DNA
ccttccagtaaaactgtaag

SEQ ID NO: 32994 - DNA, 20 bp, synthetic construct
  source 1..20: mol_type = other DNA
cccttccagtaaaactgtaa

SEQ ID NO: 32995 - DNA, 20 bp, synthetic construct
  source 1..20: mol_type = other DNA
ccccttccagtaaaactgta

SEQ ID NO: 32996 - DNA, 20 bp, synthetic construct
  source 1..20: mol_type = other DNA
cccccttccagtaaaactgt

SEQ ID NO: 32997 - DNA, 20 bp, synthetic construct
  source 1..20: mol_type = other DNA
acccccttccagtaaaactg

SEQ ID NO: 32998 - DNA, 20 bp, synthetic construct
  source 1..20: mol_type = other DNA
aacccccttccagtaaaact

SEQ ID NO: 32999 - DNA, 20 bp, synthetic construct
  source 1..20: mol_type = other DNA
taacccccttccagtaaaac

SEQ ID NO: 33000 - DNA, 20 bp, synthetic construct
  source 1..20: mol_type = other DNA
ctaacccccttccagtaaaa

SEQ ID NO: 33001 - DNA, 20 bp, synthetic construct
  source 1..20: mol_type = other DNA
tctaacccccttccagtaaa

SEQ ID NO: 33002 - DNA, 20 bp, synthetic construct
  source 1..20: mol_type = other DNA
ctctaacccccttccagtaa

SEQ ID NO: 33003 - DNA, 20 bp, synthetic construct
  source 1..20: mol_type = other DNA
cctctaacccccttccagta

SEQ ID NO: 33004 - DNA, 20 bp, synthetic construct
  source 1..20: mol_type = other DNA
acctctaacccccttccagt

SEQ ID NO: 33005 - DNA, 20 bp, synthetic construct
  source 1..20: mol_type = other DNA
tacctctaacccccttccag

SEQ ID NO: 33006 - DNA, 20 bp, synthetic construct
  source 1..20: mol_type = other DNA
atacctctaacccccttcca

SEQ ID NO: 33007 - DNA, 20 bp, synthetic construct
  source 1..20: mol_type = other DNA
catacctctaacccccttcc

SEQ ID NO: 33008 - DNA, 20 bp, synthetic construct
  source 1..20: mol_type = other DNA
acatacctctaacccccttc

SEQ ID NO: 33009 - DNA, 20 bp, synthetic construct
  source 1..20: mol_type = other DNA
cacatacctctaaccccctt

SEQ ID NO: 33010 - DNA, 20 bp, synthetic construct
  source 1..20: mol_type = other DNA
ccacatacctctaaccccct

SEQ ID NO: 33011 - DNA, 20 bp, synthetic construct
  source 1..20: mol_type = other DNA
accacatacctctaaccccc

SEQ ID NO: 33012 - DNA, 20 bp, synthetic construct
  source 1..20: mol_type = other DNA
taccacatacctctaacccc

SEQ ID NO: 33013 - DNA, 20 bp, synthetic construct
  source 1..20: mol_type = other DNA
gtaccacatacctctaaccc

SEQ ID NO: 33014 - DNA, 20 bp, synthetic construct
  source 1..20: mol_type = other DNA
ggtaccacatacctctaacc

SEQ ID NO: 33015 - DNA, 20 bp, synthetic construct
  source 1..20: mol_type = other DNA
gggtaccacatacctctaac

SEQ ID NO: 33016 - DNA, 20 bp, synthetic construct
  source 1..20: mol_type = other DNA
agggtaccacatacctctaa

SEQ ID NO: 33017 - DNA, 20 bp, synthetic construct
  source 1..20: mol_type = other DNA
aagggtaccacatacctcta

SEQ ID NO: 33018 - DNA, 20 bp, synthetic construct
  source 1..20: mol_type = other DNA
taagggtaccacatacctct

SEQ ID NO: 33019 - DNA, 20 bp, synthetic construct
  source 1..20: mol_type = other DNA
ataagggtaccacatacctc

SEQ ID NO: 33020 - DNA, 20 bp, synthetic construct
  source 1..20: mol_type = other DNA
cataagggtaccacatacct

SEQ ID NO: 33021 - DNA, 20 bp, synthetic construct
  source 1..20: mol_type = other DNA
gcataagggtaccacatacc

SEQ ID NO: 33022 - DNA, 20 bp, synthetic construct
  source 1..20: mol_type = other DNA
ggcataagggtaccacatac

SEQ ID NO: 33023 - DNA, 20 bp, synthetic construct
  source 1..20: mol_type = other DNA
tggcataagggtaccacata

SEQ ID NO: 33024 - DNA, 20 bp, synthetic construct
  source 1..20: mol_type = other DNA
ttggcataagggtaccacat

SEQ ID NO: 33025 - DNA, 20 bp, synthetic construct
  source 1..20: mol_type = other DNA
tttggcataagggtaccaca

SEQ ID NO: 33026 - DNA, 20 bp, synthetic construct
  source 1..20: mol_type = other DNA
ctttggcataagggtaccac

SEQ ID NO: 33027 - DNA, 20 bp, synthetic construct
  source 1..20: mol_type = other DNA
tctttggcataagggtacca

SEQ ID NO: 33028 - DNA, 20 bp, synthetic construct
  source 1..20: mol_type = other DNA
ttctttggcataagggtacc

SEQ ID NO: 33029 - DNA, 20 bp, synthetic construct
  source 1..20: mol_type = other DNA
tttctttggcataagggtac

SEQ ID NO: 33030 - DNA, 20 bp, synthetic construct
  source 1..20: mol_type = other DNA
ttttctttggcataagggta

SEQ ID NO: 33031 - DNA, 20 bp, synthetic construct
  source 1..20: mol_type = other DNA
attttctttggcataagggt

SEQ ID NO: 33032 - DNA, 20 bp, synthetic construct
  source 1..20: mol_type = other DNA
aattttctttggcataaggg

SEQ ID NO: 33033 - DNA, 20 bp, synthetic construct
  source 1..20: mol_type = other DNA
taattttctttggcataagg

SEQ ID NO: 33034 - DNA, 20 bp, synthetic construct
  source 1..20: mol_type = other DNA
ctaattttctttggcataag

SEQ ID NO: 33035 - DNA, 20 bp, synthetic construct
  source 1..20: mol_type = other DNA
actaattttctttggcataa

SEQ ID NO: 33036 - DNA, 20 bp, synthetic construct
  source 1..20: mol_type = other DNA
aactaattttctttggcata

SEQ ID NO: 33037 - DNA, 20 bp, synthetic construct
  source 1..20: mol_type = other DNA
taactaattttctttggcat

SEQ ID NO: 33038 - DNA, 20 bp, synthetic construct
  source 1..20: mol_type = other DNA
gtaactaattttctttggca

SEQ ID NO: 33039 - DNA, 20 bp, synthetic construct
  source 1..20: mol_type = other DNA
agtaactaattttctttggc

SEQ ID NO: 33040 - DNA, 20 bp, synthetic construct
  source 1..20: mol_type = other DNA
aagtaactaattttctttgg

SEQ ID NO: 33041 - DNA, 20 bp, synthetic construct
  source 1..20: mol_type = other DNA
gaagtaactaattttctttg

SEQ ID NO: 33042 - DNA, 20 bp, synthetic construct
  source 1..20: mol_type = other DNA
agaagtaactaattttcttt

SEQ ID NO: 33043 - DNA, 20 bp, synthetic construct
  source 1..20: mol_type = other DNA
tagaagtaactaattttctt

SEQ ID NO: 33044 - DNA, 20 bp, synthetic construct
  source 1..20: mol_type = other DNA
atagaagtaactaattttct

SEQ ID NO: 33045 - DNA, 20 bp, synthetic construct
  source 1..20: mol_type = other DNA
tatagaagtaactaattttc

SEQ ID NO: 33046 - DNA, 20 bp, synthetic construct
  source 1..20: mol_type = other DNA
gtatagaagtaactaatttt

SEQ ID NO: 33047 - DNA, 20 bp, synthetic construct
  source 1..20: mol_type = other DNA
tgtatagaagtaactaattt

SEQ ID NO: 33048 - DNA, 20 bp, synthetic construct
  source 1..20: mol_type = other DNA
ttgtatagaagtaactaatt

SEQ ID NO: 33049 - DNA, 20 bp, synthetic construct
  source 1..20: mol_type = other DNA
gttgtatagaagtaactaat

SEQ ID NO: 33050 - DNA, 20 bp, synthetic construct
  source 1..20: mol_type = other DNA
ggttgtatagaagtaactaa

SEQ ID NO: 33051 - DNA, 20 bp, synthetic construct
  source 1..20: mol_type = other DNA
tggttgtatagaagtaacta

SEQ ID NO: 33052 - DNA, 20 bp, synthetic construct
  source 1..20: mol_type = other DNA
ctggttgtatagaagtaact

SEQ ID NO: 33053 - DNA, 20 bp, synthetic construct
  source 1..20: mol_type = other DNA
actggttgtatagaagtaac

SEQ ID NO: 33054 - DNA, 20 bp, synthetic construct
  source 1..20: mol_type = other DNA
gactggttgtatagaagtaa

SEQ ID NO: 33055 - DNA, 20 bp, synthetic construct
  source 1..20: mol_type = other DNA
agactggttgtatagaagta

SEQ ID NO: 33056 - DNA, 20 bp, synthetic construct
  source 1..20: mol_type = other DNA
cagactggttgtatagaagt

SEQ ID NO: 33057 - DNA, 20 bp, synthetic construct
  source 1..20: mol_type = other DNA
tcagactggttgtatagaag

SEQ ID NO: 33058 - DNA, 20 bp, synthetic construct
  source 1..20: mol_type = other DNA
atcagactggttgtatagaa

SEQ ID NO: 33059 - DNA, 20 bp, synthetic construct
  source 1..20: mol_type = other DNA
aatcagactggttgtataga

SEQ ID NO: 33060 - DNA, 20 bp, synthetic construct
  source 1..20: mol_type = other DNA
gaatcagactggttgtatag

SEQ ID NO: 33061 - DNA, 20 bp, synthetic construct
  source 1..20: mol_type = other DNA
agaatcagactggttgtata

SEQ ID NO: 33062 - DNA, 20 bp, synthetic construct
  source 1..20: mol_type = other DNA
tagaatcagactggttgtat

SEQ ID NO: 33063 - DNA, 20 bp, synthetic construct
  source 1..20: mol_type = other DNA
ctagaatcagactggttgta

SEQ ID NO: 33064 - DNA, 20 bp, synthetic construct
  source 1..20: mol_type = other DNA
tctagaatcagactggttgt

SEQ ID NO: 33065 - DNA, 20 bp, synthetic construct
  source 1..20: mol_type = other DNA
ttctagaatcagactggttg

SEQ ID NO: 33066 - DNA, 20 bp, synthetic construct
  source 1..20: mol_type = other DNA
tttctagaatcagactggtt

SEQ ID NO: 33067 - DNA, 20 bp, synthetic construct
  source 1..20: mol_type = other DNA
gtttctagaatcagactggt

SEQ ID NO: 33068 - DNA, 20 bp, synthetic construct
  source 1..20: mol_type = other DNA
ggtttctagaatcagactgg

SEQ ID NO: 33069 - DNA, 20 bp, synthetic construct
  source 1..20: mol_type = other DNA
aggtttctagaatcagactg

SEQ ID NO: 33070 - DNA, 20 bp, synthetic construct
  source 1..20: mol_type = other DNA
caggtttctagaatcagact

SEQ ID NO: 33071 - DNA, 20 bp, synthetic construct
  source 1..20: mol_type = other DNA
ccaggtttctagaatcagac

SEQ ID NO: 33072 - DNA, 20 bp, synthetic construct
  source 1..20: mol_type = other DNA
tccaggtttctagaatcaga

SEQ ID NO: 33073 - DNA, 20 bp, synthetic construct
  source 1..20: mol_type = other DNA
atccaggtttctagaatcag

SEQ ID NO: 33074 - DNA, 20 bp, synthetic construct
  source 1..20: mol_type = other DNA
gatccaggtttctagaatca

SEQ ID NO: 33075 - DNA, 20 bp, synthetic construct
  source 1..20: mol_type = other DNA
tgatccaggtttctagaatc

SEQ ID NO: 33076 - DNA, 20 bp, synthetic construct
  source 1..20: mol_type = other DNA
ttgatccaggtttctagaat

SEQ ID NO: 33077 - DNA, 20 bp, synthetic construct
  source 1..20: mol_type = other DNA
attgatccaggtttctagaa

SEQ ID NO: 33078 - DNA, 20 bp, synthetic construct
  source 1..20: mol_type = other DNA
cattgatccaggtttctaga

SEQ ID NO: 33079 - DNA, 20 bp, synthetic construct
  source 1..20: mol_type = other DNA
tcattgatccaggtttctag

SEQ ID NO: 33080 - DNA, 20 bp, synthetic construct
  source 1..20: mol_type = other DNA
ttcattgatccaggtttcta

SEQ ID NO: 33081 - DNA, 20 bp, synthetic construct
  source 1..20: mol_type = other DNA
tttcattgatccaggtttct

SEQ ID NO: 33082 - DNA, 20 bp, synthetic construct
  source 1..20: mol_type = other DNA
atttcattgatccaggtttc

SEQ ID NO: 33083 - DNA, 20 bp, synthetic construct
  source 1..20: mol_type = other DNA
tatttcattgatccaggttt

SEQ ID NO: 33084 - DNA, 20 bp, synthetic construct
  source 1..20: mol_type = other DNA
atatttcattgatccaggtt

SEQ ID NO: 33085 - DNA, 20 bp, synthetic construct
  source 1..20: mol_type = other DNA
aatatttcattgatccaggt

SEQ ID NO: 33086 - DNA, 20 bp, synthetic construct
  source 1..20: mol_type = other DNA
aaatatttcattgatccagg

SEQ ID NO: 33087 - DNA, 20 bp, synthetic construct
  source 1..20: mol_type = other DNA
aaaatatttcattgatccag

SEQ ID NO: 33088 - DNA, 20 bp, synthetic construct
  source 1..20: mol_type = other DNA
caaaatatttcattgatcca

SEQ ID NO: 33089 - DNA, 20 bp, synthetic construct
  source 1..20: mol_type = other DNA
tcaaaatatttcattgatcc

SEQ ID NO: 33090 - DNA, 20 bp, synthetic construct
  source 1..20: mol_type = other DNA
atcaaaatatttcattgatc

SEQ ID NO: 33091 - DNA, 20 bp, synthetic construct
  source 1..20: mol_type = other DNA
aatcaaaatatttcattgat

SEQ ID NO: 33092 - DNA, 20 bp, synthetic construct
  source 1..20: mol_type = other DNA
taatcaaaatatttcattga

SEQ ID NO: 33093 - DNA, 20 bp, synthetic construct
  source 1..20: mol_type = other DNA
ataatcaaaatatttcattg

SEQ ID NO: 33094 - DNA, 20 bp, synthetic construct
  source 1..20: mol_type = other DNA
tataatcaaaatatttcatt

SEQ ID NO: 33095 - DNA, 20 bp, synthetic construct
  source 1..20: mol_type = other DNA
atataatcaaaatatttcat

SEQ ID NO: 33096 - DNA, 20 bp, synthetic construct
  source 1..20: mol_type = other DNA
tatataatcaaaatatttca

SEQ ID NO: 33097 - DNA, 20 bp, synthetic construct
  source 1..20: mol_type = other DNA
ttatataatcaaaatatttc

SEQ ID NO: 33098 - DNA, 20 bp, synthetic construct
  source 1..20: mol_type = other DNA
tttatataatcaaaatattt

SEQ ID NO: 33099 - DNA, 20 bp, synthetic construct
  source 1..20: mol_type = other DNA
ttttatataatcaaaatatt

SEQ ID NO: 33100 - DNA, 20 bp, synthetic construct
  source 1..20: mol_type = other DNA
tttttatataatcaaaatat

SEQ ID NO: 33101 - DNA, 20 bp, synthetic construct
  source 1..20: mol_type = other DNA
ttttttatataatcaaaata

SEQ ID NO: 33102 - DNA, 20 bp, synthetic construct
  source 1..20: mol_type = other DNA
tttttttatataatcaaaat

SEQ ID NO: 33103 - DNA, 20 bp, synthetic construct
  source 1..20: mol_type = other DNA
atttttttatataatcaaaa

SEQ ID NO: 33104 - DNA, 20 bp, synthetic construct
  source 1..20: mol_type = other DNA
gatttttttatataatcaaa

SEQ ID NO: 33105 - DNA, 20 bp, synthetic construct
  source 1..20: mol_type = other DNA
agatttttttatataatcaa

SEQ ID NO: 33106 - DNA, 20 bp, synthetic construct
  source 1..20: mol_type = other DNA
cagatttttttatataatca

SEQ ID NO: 33107 - DNA, 20 bp, synthetic construct
  source 1..20: mol_type = other DNA
acagatttttttatataatc

SEQ ID NO: 33108 - DNA, 20 bp, synthetic construct
  source 1..20: mol_type = other DNA
aacagatttttttatataat

SEQ ID NO: 33109 - DNA, 20 bp, synthetic construct
  source 1..20: mol_type = other DNA
taacagatttttttatataa

SEQ ID NO: 33110 - DNA, 20 bp, synthetic construct
  source 1..20: mol_type = other DNA
gtaacagatttttttatata

SEQ ID NO: 33111 - DNA, 20 bp, synthetic construct
  source 1..20: mol_type = other DNA
ggtaacagatttttttatat

SEQ ID NO: 33112 - DNA, 20 bp, synthetic construct
  source 1..20: mol_type = other DNA
gggtaacagatttttttata

SEQ ID NO: 33113 - DNA, 20 bp, synthetic construct
  source 1..20: mol_type = other DNA
tgggtaacagatttttttat

SEQ ID NO: 33114 - DNA, 20 bp, synthetic construct
  source 1..20: mol_type = other DNA
ctgggtaacagattttttta

SEQ ID NO: 33115 - DNA, 20 bp, synthetic construct
  source 1..20: mol_type = other DNA
cctgggtaacagattttttt

SEQ ID NO: 33116 - DNA, 20 bp, synthetic construct
  source 1..20: mol_type = other DNA
acctgggtaacagatttttt

SEQ ID NO: 33117 - DNA, 20 bp, synthetic construct
  source 1..20: mol_type = other DNA
gacctgggtaacagattttt

SEQ ID NO: 33118 - DNA, 20 bp, synthetic construct
  source 1..20: mol_type = other DNA
agacctgggtaacagatttt

SEQ ID NO: 33119 - DNA, 20 bp, synthetic construct
  source 1..20: mol_type = other DNA
aagacctgggtaacagattt

SEQ ID NO: 33120 - DNA, 20 bp, synthetic construct
  source 1..20: mol_type = other DNA
caagacctgggtaacagatt

SEQ ID NO: 33121 - DNA, 20 bp, synthetic construct
  source 1..20: mol_type = other DNA
acaagacctgggtaacagat

SEQ ID NO: 33122 - DNA, 20 bp, synthetic construct
  source 1..20: mol_type = other DNA
aacaagacctgggtaacaga

SEQ ID NO: 33123 - DNA, 20 bp, synthetic construct
  source 1..20: mol_type = other DNA
caacaagacctgggtaacag

SEQ ID NO: 33124 - DNA, 20 bp, synthetic construct
  source 1..20: mol_type = other DNA
tcaacaagacctgggtaaca

SEQ ID NO: 33125 - DNA, 20 bp, synthetic construct
  source 1..20: mol_type = other DNA
ttcaacaagacctgggtaac

SEQ ID NO: 33126 - DNA, 20 bp, synthetic construct
  source 1..20: mol_type = other DNA
tttcaacaagacctgggtaa

SEQ ID NO: 33127 - DNA, 20 bp, synthetic construct
  source 1..20: mol_type = other DNA
atttcaacaagacctgggta

SEQ ID NO: 33128 - DNA, 20 bp, synthetic construct
  source 1..20: mol_type = other DNA
tatttcaacaagacctgggt

SEQ ID NO: 33129 - DNA, 20 bp, synthetic construct
  source 1..20: mol_type = other DNA
ctatttcaacaagacctggg

SEQ ID NO: 33130 - DNA, 20 bp, synthetic construct
  source 1..20: mol_type = other DNA
gctatttcaacaagacctgg

SEQ ID NO: 33131 - DNA, 20 bp, synthetic construct
  source 1..20: mol_type = other DNA
tgctatttcaacaagacctg

SEQ ID NO: 33132 - DNA, 20 bp, synthetic construct
  source 1..20: mol_type = other DNA
atgctatttcaacaagacct

SEQ ID NO: 33133 - DNA, 20 bp, synthetic construct
  source 1..20: mol_type = other DNA
aatgctatttcaacaagacc

SEQ ID NO: 33134 - DNA, 20 bp, synthetic construct
  source 1..20: mol_type = other DNA
taatgctatttcaacaagac

SEQ ID NO: 33135 - DNA, 20 bp, synthetic construct
  source 1..20: mol_type = other DNA
ctaatgctatttcaacaaga

SEQ ID NO: 33136 - DNA, 20 bp, synthetic construct
  source 1..20: mol_type = other DNA
tctaatgctatttcaacaag

SEQ ID NO: 33137 - DNA, 20 bp, synthetic construct
  source 1..20: mol_type = other DNA
ttctaatgctatttcaacaa

SEQ ID NO: 33138 - DNA, 20 bp, synthetic construct
  source 1..20: mol_type = other DNA
tttctaatgctatttcaaca

SEQ ID NO: 33139 - DNA, 20 bp, synthetic construct
  source 1..20: mol_type = other DNA
gtttctaatgctatttcaac

SEQ ID NO: 33140 - DNA, 20 bp, synthetic construct
  source 1..20: mol_type = other DNA
agtttctaatgctatttcaa

SEQ ID NO: 33141 - DNA, 20 bp, synthetic construct
  source 1..20: mol_type = other DNA
tagtttctaatgctatttca

SEQ ID NO: 33142 - DNA, 20 bp, synthetic construct
  source 1..20: mol_type = other DNA
gtagtttctaatgctatttc

SEQ ID NO: 33143 - DNA, 20 bp, synthetic construct
  source 1..20: mol_type = other DNA
agtagtttctaatgctattt

SEQ ID NO: 33144 - DNA, 20 bp, synthetic construct
  source 1..20: mol_type = other DNA
cagtagtttctaatgctatt

SEQ ID NO: 33145 - DNA, 20 bp, synthetic construct
  source 1..20: mol_type = other DNA
tcagtagtttctaatgctat

SEQ ID NO: 33146 - DNA, 20 bp, synthetic construct
  source 1..20: mol_type = other DNA
ttcagtagtttctaatgcta

SEQ ID NO: 33147 - DNA, 20 bp, synthetic construct
  source 1..20: mol_type = other DNA
cttcagtagtttctaatgct

SEQ ID NO: 33148 - DNA, 20 bp, synthetic construct
  source 1..20: mol_type = other DNA
ccttcagtagtttctaatgc

SEQ ID NO: 33149 - DNA, 20 bp, synthetic construct
  source 1..20: mol_type = other DNA
tccttcagtagtttctaatg

SEQ ID NO: 33150 - DNA, 20 bp, synthetic construct
  source 1..20: mol_type = other DNA
gtccttcagtagtttctaat

SEQ ID NO: 33151 - DNA, 20 bp, synthetic construct
  source 1..20: mol_type = other DNA
tgtccttcagtagtttctaa

SEQ ID NO: 33152 - DNA, 20 bp, synthetic construct
  source 1..20: mol_type = other DNA
atgtccttcagtagtttcta

SEQ ID NO: 33153 - DNA, 20 bp, synthetic construct
  source 1..20: mol_type = other DNA
tatgtccttcagtagtttct

SEQ ID NO: 33154 - DNA, 20 bp, synthetic construct
  source 1..20: mol_type = other DNA
atatgtccttcagtagtttc

SEQ ID NO: 33155 - DNA, 20 bp, synthetic construct
  source 1..20: mol_type = other DNA
tatatgtccttcagtagttt

SEQ ID NO: 33156 - DNA, 20 bp, synthetic construct
  source 1..20: mol_type = other DNA
ctatatgtccttcagtagtt

SEQ ID NO: 33157 - DNA, 20 bp, synthetic construct
  source 1..20: mol_type = other DNA
tctatatgtccttcagtagt

SEQ ID NO: 33158 - DNA, 20 bp, synthetic construct
  source 1..20: mol_type = other DNA
ctctatatgtccttcagtag

SEQ ID NO: 33159 - DNA, 20 bp, synthetic construct
  source 1..20: mol_type = other DNA
cctctatatgtccttcagta

SEQ ID NO: 33160 - DNA, 20 bp, synthetic construct
  source 1..20: mol_type = other DNA
tcctctatatgtccttcagt

SEQ ID NO: 33161 - DNA, 20 bp, synthetic construct
  source 1..20: mol_type = other DNA
ctcctctatatgtccttcag

SEQ ID NO: 33162 - DNA, 20 bp, synthetic construct
  source 1..20: mol_type = other DNA
cctcctctatatgtccttca

SEQ ID NO: 33163 - DNA, 20 bp, synthetic construct
  source 1..20: mol_type = other DNA
tcctcctctatatgtccttc

SEQ ID NO: 33164 - DNA, 20 bp, synthetic construct
  source 1..20: mol_type = other DNA
ctcctcctctatatgtcctt

SEQ ID NO: 33165 - DNA, 20 bp, synthetic construct
  source 1..20: mol_type = other DNA
actcctcctctatatgtcct

SEQ ID NO: 33166 - DNA, 20 bp, synthetic construct
  source 1..20: mol_type = other DNA
cactcctcctctatatgtcc

SEQ ID NO: 33167 - DNA, 20 bp, synthetic construct
  source 1..20: mol_type = other DNA
acactcctcctctatatgtc

SEQ ID NO: 33168 - DNA, 20 bp, synthetic construct
  source 1..20: mol_type = other DNA
aacactcctcctctatatgt

SEQ ID NO: 33169 - DNA, 20 bp, synthetic construct
  source 1..20: mol_type = other DNA
caacactcctcctctatatg

SEQ ID NO: 33170 - DNA, 20 bp, synthetic construct
  source 1..20: mol_type = other DNA
tcaacactcctcctctatat

SEQ ID NO: 33171 - DNA, 20 bp, synthetic construct
  source 1..20: mol_type = other DNA
ttcaacactcctcctctata

SEQ ID NO: 33172 - DNA, 20 bp, synthetic construct
  source 1..20: mol_type = other DNA
tttcaacactcctcctctat

SEQ ID NO: 33173 - DNA, 20 bp, synthetic construct
  source 1..20: mol_type = other DNA
ttttcaacactcctcctcta

SEQ ID NO: 33174 - DNA, 20 bp, synthetic construct
  source 1..20: mol_type = other DNA
tttttcaacactcctcctct

SEQ ID NO: 33175 - DNA, 20 bp, synthetic construct
  source 1..20: mol_type = other DNA
atttttcaacactcctcctc

SEQ ID NO: 33176 - DNA, 20 bp, synthetic construct
  source 1..20: mol_type = other DNA
catttttcaacactcctcct

SEQ ID NO: 33177 - DNA, 20 bp, synthetic construct
  source 1..20: mol_type = other DNA
ccatttttcaacactcctcc

SEQ ID NO: 33178 - DNA, 20 bp, synthetic construct
  source 1..20: mol_type = other DNA
accatttttcaacactcctc

SEQ ID NO: 33179 - DNA, 20 bp, synthetic construct
  source 1..20: mol_type = other DNA
caccatttttcaacactcct

SEQ ID NO: 33180 - DNA, 20 bp, synthetic construct
  source 1..20: mol_type = other DNA
tcaccatttttcaacactcc

SEQ ID NO: 33181 - DNA, 20 bp, synthetic construct
  source 1..20: mol_type = other DNA
atcaccatttttcaacactc

SEQ ID NO: 33182 - DNA, 20 bp, synthetic construct
  source 1..20: mol_type = other DNA
catcaccatttttcaacact

SEQ ID NO: 33183 - DNA, 20 bp, synthetic construct
  source 1..20: mol_type = other DNA
ccatcaccatttttcaacac

SEQ ID NO: 33184 - DNA, 20 bp, synthetic construct
  source 1..20: mol_type = other DNA
tccatcaccatttttcaaca

SEQ ID NO: 33185 - DNA, 20 bp, synthetic construct
  source 1..20: mol_type = other DNA
atccatcaccatttttcaac

SEQ ID NO: 33186 - DNA, 20 bp, synthetic construct
  source 1..20: mol_type = other DNA
catccatcaccatttttcaa

SEQ ID NO: 33187 - DNA, 20 bp, synthetic construct
  source 1..20: mol_type = other DNA
tcatccatcaccatttttca

SEQ ID NO: 33188 - DNA, 20 bp, synthetic construct
  source 1..20: mol_type = other DNA
ctcatccatcaccatttttc

SEQ ID NO: 33189 - DNA, 20 bp, synthetic construct
  source 1..20: mol_type = other DNA
gctcatccatcaccattttt

SEQ ID NO: 33190 - DNA, 20 bp, synthetic construct
  source 1..20: mol_type = other DNA
tgctcatccatcaccatttt

SEQ ID NO: 33191 - DNA, 20 bp, synthetic construct
  source 1..20: mol_type = other DNA
ctgctcatccatcaccattt

SEQ ID NO: 33192 - DNA, 20 bp, synthetic construct
  source 1..20: mol_type = other DNA
tctgctcatccatcaccatt

SEQ ID NO: 33193 - DNA, 20 bp, synthetic construct
  source 1..20: mol_type = other DNA
ttctgctcatccatcaccat

SEQ ID NO: 33194 - DNA, 20 bp, synthetic construct
  source 1..20: mol_type = other DNA
attctgctcatccatcacca

SEQ ID NO: 33195 - DNA, 20 bp, synthetic construct
  source 1..20: mol_type = other DNA
cattctgctcatccatcacc

SEQ ID NO: 33196 - DNA, 20 bp, synthetic construct
  source 1..20: mol_type = other DNA
ccattctgctcatccatcac

SEQ ID NO: 33197 - DNA, 20 bp, synthetic construct
  source 1..20: mol_type = other DNA
accattctgctcatccatca

SEQ ID NO: 33198 - DNA, 20 bp, synthetic construct
  source 1..20: mol_type = other DNA
caccattctgctcatccatc

SEQ ID NO: 33199 - DNA, 20 bp, synthetic construct
  source 1..20: mol_type = other DNA
tcaccattctgctcatccat

SEQ ID NO: 33200 - DNA, 20 bp, synthetic construct
  source 1..20: mol_type = other DNA
ttcaccattctgctcatcca

SEQ ID NO: 33201 - DNA, 20 bp, synthetic construct
  source 1..20: mol_type = other DNA
tttcaccattctgctcatcc

SEQ ID NO: 33202 - DNA, 20 bp, synthetic construct
  source 1..20: mol_type = other DNA
ttttcaccattctgctcatc

SEQ ID NO: 33203 - DNA, 20 bp, synthetic construct
  source 1..20: mol_type = other DNA
tttttcaccattctgctcat

SEQ ID NO: 33204 - DNA, 20 bp, synthetic construct
  source 1..20: mol_type = other DNA
atttttcaccattctgctca

SEQ ID NO: 33205 - DNA, 20 bp, synthetic construct
  source 1..20: mol_type = other DNA
tatttttcaccattctgctc

SEQ ID NO: 33206 - DNA, 20 bp, synthetic construct
  source 1..20: mol_type = other DNA
ttatttttcaccattctgct

SEQ ID NO: 33207 - DNA, 20 bp, synthetic construct
  source 1..20: mol_type = other DNA
tttatttttcaccattctgc

SEQ ID NO: 33208 - DNA, 20 bp, synthetic construct
  source 1..20: mol_type = other DNA
ttttatttttcaccattctg

SEQ ID NO: 33209 - DNA, 20 bp, synthetic construct
  source 1..20: mol_type = other DNA
tttttatttttcaccattct

SEQ ID NO: 33210 - DNA, 20 bp, synthetic construct
  source 1..20: mol_type = other DNA
ctttttatttttcaccattc

SEQ ID NO: 33211 - DNA, 20 bp, synthetic construct
  source 1..20: mol_type = other DNA
tctttttatttttcaccatt

SEQ ID NO: 33212 - DNA, 20 bp, synthetic construct
  source 1..20: mol_type = other DNA
gtctttttatttttcaccat

SEQ ID NO: 33213 - DNA, 20 bp, synthetic construct
  source 1..20: mol_type = other DNA
tgtctttttatttttcacca

SEQ ID NO: 33214 - DNA, 20 bp, synthetic construct
  source 1..20: mol_type = other DNA
atgtctttttatttttcacc

SEQ ID NO: 33215 - DNA, 20 bp, synthetic construct
  source 1..20: mol_type = other DNA
catgtctttttatttttcac

SEQ ID NO: 33216 - DNA, 20 bp, synthetic construct
  source 1..20: mol_type = other DNA
tcatgtctttttatttttca

SEQ ID NO: 33217 - DNA, 20 bp, synthetic construct
  source 1..20: mol_type = other DNA
ttcatgtctttttatttttc

SEQ ID NO: 33218 - DNA, 20 bp, synthetic construct
  source 1..20: mol_type = other DNA
cttcatgtctttttattttt

SEQ ID NO: 33219 - DNA, 20 bp, synthetic construct
  source 1..20: mol_type = other DNA
gcttcatgtctttttatttt

SEQ ID NO: 33220 - DNA, 20 bp, synthetic construct
  source 1..20: mol_type = other DNA
agcttcatgtctttttattt

SEQ ID NO: 33221 - DNA, 20 bp, synthetic construct
  source 1..20: mol_type = other DNA
gagcttcatgtctttttatt

SEQ ID NO: 33222 - DNA, 20 bp, synthetic construct
  source 1..20: mol_type = other DNA
agagcttcatgtctttttat

SEQ ID NO: 33223 - DNA, 20 bp, synthetic construct
  source 1..20: mol_type = other DNA
tagagcttcatgtcttttta

SEQ ID NO: 33224 - DNA, 20 bp, synthetic construct
  source 1..20: mol_type = other DNA
atagagcttcatgtcttttt

SEQ ID NO: 33225 - DNA, 20 bp, synthetic construct
  source 1..20: mol_type = other DNA
tatagagcttcatgtctttt

SEQ ID NO: 33226 - DNA, 20 bp, synthetic construct
  source 1..20: mol_type = other DNA
ttatagagcttcatgtcttt

SEQ ID NO: 33227 - DNA, 20 bp, synthetic construct
  source 1..20: mol_type = other DNA
attatagagcttcatgtctt

SEQ ID NO: 33228 - DNA, 20 bp, synthetic construct
  source 1..20: mol_type = other DNA
aattatagagcttcatgtct

SEQ ID NO: 33229 - DNA, 20 bp, synthetic construct
  source 1..20: mol_type = other DNA
taattatagagcttcatgtc

SEQ ID NO: 33230 - DNA, 20 bp, synthetic construct
  source 1..20: mol_type = other DNA
ataattatagagcttcatgt

SEQ ID NO: 33231 - DNA, 20 bp, synthetic construct
  source 1..20: mol_type = other DNA
tataattatagagcttcatg

SEQ ID NO: 33232 - DNA, 20 bp, synthetic construct
  source 1..20: mol_type = other DNA
atataattatagagcttcat

SEQ ID NO: 33233 - DNA, 20 bp, synthetic construct
  source 1..20: mol_type = other DNA
aatataattatagagcttca

SEQ ID NO: 33234 - DNA, 20 bp, synthetic construct
  source 1..20: mol_type = other DNA
caatataattatagagcttc

SEQ ID NO: 33235 - DNA, 20 bp, synthetic construct
  source 1..20: mol_type = other DNA
acaatataattatagagctt

SEQ ID NO: 33236 - DNA, 20 bp, synthetic construct
  source 1..20: mol_type = other DNA
tacaatataattatagagct

SEQ ID NO: 33237 - DNA, 20 bp, synthetic construct
  source 1..20: mol_type = other DNA
atacaatataattatagagc

SEQ ID NO: 33238 - DNA, 20 bp, synthetic construct
  source 1..20: mol_type = other DNA
catacaatataattatagag

SEQ ID NO: 33239 - DNA, 20 bp, synthetic construct
  source 1..20: mol_type = other DNA
ccatacaatataattataga

SEQ ID NO: 33240 - DNA, 20 bp, synthetic construct
  source 1..20: mol_type = other DNA
accatacaatataattatag

SEQ ID NO: 33241 - DNA, 20 bp, synthetic construct
  source 1..20: mol_type = other DNA
caccatacaatataattata

SEQ ID NO: 33242 - DNA, 20 bp, synthetic construct
  source 1..20: mol_type = other DNA
tcaccatacaatataattat

SEQ ID NO: 33243 - DNA, 20 bp, synthetic construct
  source 1..20: mol_type = other DNA
gtcaccatacaatataatta

SEQ ID NO: 33244 - DNA, 20 bp, synthetic construct
  source 1..20: mol_type = other DNA
tgtcaccatacaatataatt

SEQ ID NO: 33245 - DNA, 20 bp, synthetic construct
  source 1..20: mol_type = other DNA
ctgtcaccatacaatataat

SEQ ID NO: 33246 - DNA, 20 bp, synthetic construct
  source 1..20: mol_type = other DNA
actgtcaccatacaatataa

SEQ ID NO: 33247 - DNA, 20 bp, synthetic construct
  source 1..20: mol_type = other DNA
tactgtcaccatacaatata

SEQ ID NO: 33248 - DNA, 20 bp, synthetic construct
  source 1..20: mol_type = other DNA
gtactgtcaccatacaatat

SEQ ID NO: 33249 - DNA, 20 bp, synthetic construct
  source 1..20: mol_type = other DNA
ggtactgtcaccatacaata

SEQ ID NO: 33250 - DNA, 20 bp, synthetic construct
  source 1..20: mol_type = other DNA
tggtactgtcaccatacaat

SEQ ID NO: 33251 - DNA, 20 bp, synthetic construct
  source 1..20: mol_type = other DNA
ttggtactgtcaccatacaa

SEQ ID NO: 33252 - DNA, 20 bp, synthetic construct
  source 1..20: mol_type = other DNA
attggtactgtcaccataca

SEQ ID NO: 33253 - DNA, 20 bp, synthetic construct
  source 1..20: mol_type = other DNA
tattggtactgtcaccatac

SEQ ID NO: 33254 - DNA, 20 bp, synthetic construct
  source 1..20: mol_type = other DNA
ctattggtactgtcaccata

SEQ ID NO: 33255 - DNA, 20 bp, synthetic construct
  source 1..20: mol_type = other DNA
tctattggtactgtcaccat

SEQ ID NO: 33256 - DNA, 20 bp, synthetic construct
  source 1..20: mol_type = other DNA
ctctattggtactgtcacca

SEQ ID NO: 33257 - DNA, 20 bp, synthetic construct
  source 1..20: mol_type = other DNA
tctctattggtactgtcacc

SEQ ID NO: 33258 - DNA, 20 bp, synthetic construct
  source 1..20: mol_type = other DNA
atctctattggtactgtcac

SEQ ID NO: 33259 - DNA, 20 bp, synthetic construct
  source 1..20: mol_type = other DNA
aatctctattggtactgtca

SEQ ID NO: 33260 - DNA, 20 bp, synthetic construct
  source 1..20: mol_type = other DNA
caatctctattggtactgtc

SEQ ID NO: 33261 - DNA, 20 bp, synthetic construct
  source 1..20: mol_type = other DNA
gcaatctctattggtactgt

SEQ ID NO: 33262 - DNA, 20 bp, synthetic construct
  source 1..20: mol_type = other DNA
tgcaatctctattggtactg

SEQ ID NO: 33263 - DNA, 20 bp, synthetic construct
  source 1..20: mol_type = other DNA
atgcaatctctattggtact

SEQ ID NO: 33264 - DNA, 20 bp, synthetic construct
  source 1..20: mol_type = other DNA
catgcaatctctattggtac

SEQ ID NO: 33265 - DNA, 20 bp, synthetic construct
  source 1..20: mol_type = other DNA
acatgcaatctctattggta

SEQ ID NO: 33266 - DNA, 20 bp, synthetic construct
  source 1..20: mol_type = other DNA
aacatgcaatctctattggt

SEQ ID NO: 33267 - DNA, 20 bp, synthetic construct
  source 1..20: mol_type = other DNA
aaacatgcaatctctattgg

SEQ ID NO: 33268 - DNA, 20 bp, synthetic construct
  source 1..20: mol_type = other DNA
aaaacatgcaatctctattg

SEQ ID NO: 33269 - DNA, 20 bp, synthetic construct
  source 1..20: mol_type = other DNA
aaaaacatgcaatctctatt

SEQ ID NO: 33270 - DNA, 20 bp, synthetic construct
  source 1..20: mol_type = other DNA
aaaaaacatgcaatctctat

SEQ ID NO: 33271 - DNA, 20 bp, synthetic construct
  source 1..20: mol_type = other DNA
gaaaaaacatgcaatctcta

SEQ ID NO: 33272 - DNA, 20 bp, synthetic construct
  source 1..20: mol_type = other DNA
agaaaaaacatgcaatctct

SEQ ID NO: 33273 - DNA, 20 bp, synthetic construct
  source 1..20: mol_type = other DNA
gagaaaaaacatgcaatctc

SEQ ID NO: 33274 - DNA, 20 bp, synthetic construct
  source 1..20: mol_type = other DNA
ggagaaaaaacatgcaatct

SEQ ID NO: 33275 - DNA, 20 bp, synthetic construct
  source 1..20: mol_type = other DNA
gggagaaaaaacatgcaatc

SEQ ID NO: 33276 - DNA, 20 bp, synthetic construct
  source 1..20: mol_type = other DNA
ggggagaaaaaacatgcaat

SEQ ID NO: 33277 - DNA, 20 bp, synthetic construct
  source 1..20: mol_type = other DNA
tggggagaaaaaacatgcaa

SEQ ID NO: 33278 - DNA, 20 bp, synthetic construct
  source 1..20: mol_type = other DNA
ctggggagaaaaaacatgca

SEQ ID NO: 33279 - DNA, 20 bp, synthetic construct
  source 1..20: mol_type = other DNA
actggggagaaaaaacatgc

SEQ ID NO: 33280 - DNA, 20 bp, synthetic construct
  source 1..20: mol_type = other DNA
aactggggagaaaaaacatg

SEQ ID NO: 33281 - DNA, 20 bp, synthetic construct
  source 1..20: mol_type = other DNA
aaactggggagaaaaaacat

SEQ ID NO: 33282 - DNA, 20 bp, synthetic construct
  source 1..20: mol_type = other DNA
aaaactggggagaaaaaaca

SEQ ID NO: 33283 - DNA, 20 bp, synthetic construct
  source 1..20: mol_type = other DNA
aaaaactggggagaaaaaac

SEQ ID NO: 33284 - DNA, 20 bp, synthetic construct
  source 1..20: mol_type = other DNA
aaaaaactggggagaaaaaa

SEQ ID NO: 33285 - DNA, 20 bp, synthetic construct
  source 1..20: mol_type = other DNA
aaaaaaactggggagaaaaa

SEQ ID NO: 33286 - DNA, 20 bp, synthetic construct
  source 1..20: mol_type = other DNA
aaaaaaaactggggagaaaa

SEQ ID NO: 33287 - DNA, 20 bp, synthetic construct
  source 1..20: mol_type = other DNA
aaaaaaaaactggggagaaa

SEQ ID NO: 33288 - DNA, 20 bp, synthetic construct
  source 1..20: mol_type = other DNA
aaaaaaaaaactggggagaa

SEQ ID NO: 33289 - DNA, 20 bp, synthetic construct
  source 1..20: mol_type = other DNA
aaaaaaaaaaactggggaga

SEQ ID NO: 33290 - DNA, 20 bp, synthetic construct
  source 1..20: mol_type = other DNA
caaaaaaaaaaactggggag

SEQ ID NO: 33291 - DNA, 20 bp, synthetic construct
  source 1..20: mol_type = other DNA
acaaaaaaaaaaactgggga

SEQ ID NO: 33292 - DNA, 20 bp, synthetic construct
  source 1..20: mol_type = other DNA
aacaaaaaaaaaaactgggg

SEQ ID NO: 33293 - DNA, 20 bp, synthetic construct
  source 1..20: mol_type = other DNA
aaacaaaaaaaaaaactggg

SEQ ID NO: 33294 - DNA, 20 bp, synthetic construct
  source 1..20: mol_type = other DNA
aaaacaaaaaaaaaaactgg

SEQ ID NO: 33295 - DNA, 20 bp, synthetic construct
  source 1..20: mol_type = other DNA
caaaacaaaaaaaaaaactg

SEQ ID NO: 33296 - DNA, 20 bp, synthetic construct
  source 1..20: mol_type = other DNA
acaaaacaaaaaaaaaaact

SEQ ID NO: 33297 - DNA, 20 bp, synthetic construct
  source 1..20: mol_type = other DNA
aacaaaacaaaaaaaaaaac

SEQ ID NO: 33298 - DNA, 20 bp, synthetic construct
  source 1..20: mol_type = other DNA
aaacaaaacaaaaaaaaaaa

SEQ ID NO: 33299 - DNA, 20 bp, synthetic construct
  source 1..20: mol_type = other DNA
aaaacaaaacaaaaaaaaaa

SEQ ID NO: 33300 - DNA, 20 bp, synthetic construct
  source 1..20: mol_type = other DNA
aaaaacaaaacaaaaaaaaa

SEQ ID NO: 33301 - DNA, 20 bp, synthetic construct
  source 1..20: mol_type = other DNA
aaaaaacaaaacaaaaaaaa

SEQ ID NO: 33302 - DNA, 20 bp, synthetic construct
  source 1..20: mol_type = other DNA
caaaaaacaaaacaaaaaaa

SEQ ID NO: 33303 - DNA, 20 bp, synthetic construct
  source 1..20: mol_type = other DNA
acaaaaaacaaaacaaaaaa

SEQ ID NO: 33304 - DNA, 20 bp, synthetic construct
  source 1..20: mol_type = other DNA
aacaaaaaacaaaacaaaaa

SEQ ID NO: 33305 - DNA, 20 bp, synthetic construct
  source 1..20: mol_type = other DNA
aaacaaaaaacaaaacaaaa

SEQ ID NO: 33306 - DNA, 20 bp, synthetic construct
  source 1..20: mol_type = other DNA
aaaacaaaaaacaaaacaaa

SEQ ID NO: 33307 - DNA, 20 bp, synthetic construct
  source 1..20: mol_type = other DNA
aaaaacaaaaaacaaaacaa

SEQ ID NO: 33308 - DNA, 20 bp, synthetic construct
  source 1..20: mol_type = other DNA
caaaaacaaaaaacaaaaca

SEQ ID NO: 33309 - DNA, 20 bp, synthetic construct
  source 1..20: mol_type = other DNA
tcaaaaacaaaaaacaaaac

SEQ ID NO: 33310 - DNA, 20 bp, synthetic construct
  source 1..20: mol_type = other DNA
ctcaaaaacaaaaaacaaaa

SEQ ID NO: 33311 - DNA, 20 bp, synthetic construct
  source 1..20: mol_type = other DNA
tctcaaaaacaaaaaacaaa

SEQ ID NO: 33312 - DNA, 20 bp, synthetic construct
  source 1..20: mol_type = other DNA
gtctcaaaaacaaaaaacaa

SEQ ID NO: 33313 - DNA, 20 bp, synthetic construct
  source 1..20: mol_type = other DNA
tgtctcaaaaacaaaaaaca

SEQ ID NO: 33314 - DNA, 20 bp, synthetic construct
  source 1..20: mol_type = other DNA
ctgtctcaaaaacaaaaaac

SEQ ID NO: 33315 - DNA, 20 bp, synthetic construct
  source 1..20: mol_type = other DNA
tctgtctcaaaaacaaaaaa

SEQ ID NO: 33316 - DNA, 20 bp, synthetic construct
  source 1..20: mol_type = other DNA
ctctgtctcaaaaacaaaaa

SEQ ID NO: 33317 - DNA, 20 bp, synthetic construct
  source 1..20: mol_type = other DNA
actctgtctcaaaaacaaaa

SEQ ID NO: 33318 - DNA, 20 bp, synthetic construct
  source 1..20: mol_type = other DNA
gactctgtctcaaaaacaaa

SEQ ID NO: 33319 - DNA, 20 bp, synthetic construct
  source 1..20: mol_type = other DNA
agactctgtctcaaaaacaa

SEQ ID NO: 33320 - DNA, 20 bp, synthetic construct
  source 1..20: mol_type = other DNA
gagactctgtctcaaaaaca

SEQ ID NO: 33321 - DNA, 20 bp, synthetic construct
  source 1..20: mol_type = other DNA
tgagactctgtctcaaaaac

SEQ ID NO: 33322 - DNA, 20 bp, synthetic construct
  source 1..20: mol_type = other DNA
gtgagactctgtctcaaaaa

SEQ ID NO: 33323 - DNA, 20 bp, synthetic construct
  source 1..20: mol_type = other DNA
agtgagactctgtctcaaaa

SEQ ID NO: 33324 - DNA, 20 bp, synthetic construct
  source 1..20: mol_type = other DNA
cagtgagactctgtctcaaa

SEQ ID NO: 33325 - DNA, 20 bp, synthetic construct
  source 1..20: mol_type = other DNA
acagtgagactctgtctcaa

SEQ ID NO: 33326 - DNA, 20 bp, synthetic construct
  source 1..20: mol_type = other DNA
cacagtgagactctgtctca

SEQ ID NO: 33327 - DNA, 20 bp, synthetic construct
  source 1..20: mol_type = other DNA
acacagtgagactctgtctc

SEQ ID NO: 33328 - DNA, 20 bp, synthetic construct
  source 1..20: mol_type = other DNA
gacacagtgagactctgtct

SEQ ID NO: 33329 - DNA, 20 bp, synthetic construct
  source 1..20: mol_type = other DNA
tgacacagtgagactctgtc

SEQ ID NO: 33330 - DNA, 20 bp, synthetic construct
  source 1..20: mol_type = other DNA
gtgacacagtgagactctgt

SEQ ID NO: 33331 - DNA, 20 bp, synthetic construct
  source 1..20: mol_type = other DNA
agtgacacagtgagactctg

SEQ ID NO: 33332 - DNA, 20 bp, synthetic construct
  source 1..20: mol_type = other DNA
gagtgacacagtgagactct

SEQ ID NO: 33333 - DNA, 20 bp, synthetic construct
  source 1..20: mol_type = other DNA
tgagtgacacagtgagactc

SEQ ID NO: 33334 - DNA, 20 bp, synthetic construct
  source 1..20: mol_type = other DNA
ctgagtgacacagtgagact

SEQ ID NO: 33335 - DNA, 20 bp, synthetic construct
  source 1..20: mol_type = other DNA
cctgagtgacacagtgagac

SEQ ID NO: 33336 - DNA, 20 bp, synthetic construct
  source 1..20: mol_type = other DNA
gcctgagtgacacagtgaga

SEQ ID NO: 33337 - DNA, 20 bp, synthetic construct
  source 1..20: mol_type = other DNA
agcctgagtgacacagtgag

SEQ ID NO: 33338 - DNA, 20 bp, synthetic construct
  source 1..20: mol_type = other DNA
cagcctgagtgacacagtga

SEQ ID NO: 33339 - DNA, 20 bp, synthetic construct
  source 1..20: mol_type = other DNA
ccagcctgagtgacacagtg

SEQ ID NO: 33340 - DNA, 20 bp, synthetic construct
  source 1..20: mol_type = other DNA
tccagcctgagtgacacagt

SEQ ID NO: 33341 - DNA, 20 bp, synthetic construct
  source 1..20: mol_type = other DNA
ctccagcctgagtgacacag

SEQ ID NO: 33342 - DNA, 20 bp, synthetic construct
  source 1..20: mol_type = other DNA
actccagcctgagtgacaca

SEQ ID NO: 33343 - DNA, 20 bp, synthetic construct
  source 1..20: mol_type = other DNA
cactccagcctgagtgacac

SEQ ID NO: 33344 - DNA, 20 bp, synthetic construct
  source 1..20: mol_type = other DNA
gcactccagcctgagtgaca

SEQ ID NO: 33345 - DNA, 20 bp, synthetic construct
  source 1..20: mol_type = other DNA
tgcactccagcctgagtgac

SEQ ID NO: 33346 - DNA, 20 bp, synthetic construct
  source 1..20: mol_type = other DNA
atgcactccagcctgagtga

SEQ ID NO: 33347 - DNA, 20 bp, synthetic construct
  source 1..20: mol_type = other DNA
aatgcactccagcctgagtg

SEQ ID NO: 33348 - DNA, 20 bp, synthetic construct
  source 1..20: mol_type = other DNA
caatgcactccagcctgagt

SEQ ID NO: 33349 - DNA, 20 bp, synthetic construct
  source 1..20: mol_type = other DNA
acaatgcactccagcctgag

SEQ ID NO: 33350 - DNA, 20 bp, synthetic construct
  source 1..20: mol_type = other DNA
gacaatgcactccagcctga

SEQ ID NO: 33351 - DNA, 20 bp, synthetic construct
  source 1..20: mol_type = other DNA
cgacaatgcactccagcctg

SEQ ID NO: 33352 - DNA, 20 bp, synthetic construct
  source 1..20: mol_type = other DNA
acgacaatgcactccagcct

SEQ ID NO: 33353 - DNA, 20 bp, synthetic construct
  source 1..20: mol_type = other DNA
cacgacaatgcactccagcc

SEQ ID NO: 33354 - DNA, 20 bp, synthetic construct
  source 1..20: mol_type = other DNA
tcacgacaatgcactccagc

SEQ ID NO: 33355 - DNA, 20 bp, synthetic construct
  source 1..20: mol_type = other DNA
atcacgacaatgcactccag

SEQ ID NO: 33356 - DNA, 20 bp, synthetic construct
  source 1..20: mol_type = other DNA
tatcacgacaatgcactcca

SEQ ID NO: 33357 - DNA, 20 bp, synthetic construct
  source 1..20: mol_type = other DNA
atatcacgacaatgcactcc

SEQ ID NO: 33358 - DNA, 20 bp, synthetic construct
  source 1..20: mol_type = other DNA
aatatcacgacaatgcactc

SEQ ID NO: 33359 - DNA, 20 bp, synthetic construct
  source 1..20: mol_type = other DNA
caatatcacgacaatgcact

SEQ ID NO: 33360 - DNA, 20 bp, synthetic construct
  source 1..20: mol_type = other DNA
ccaatatcacgacaatgcac

SEQ ID NO: 33361 - DNA, 20 bp, synthetic construct
  source 1..20: mol_type = other DNA
gccaatatcacgacaatgca

SEQ ID NO: 33362 - DNA, 20 bp, synthetic construct
  source 1..20: mol_type = other DNA
agccaatatcacgacaatgc

SEQ ID NO: 33363 - DNA, 20 bp, synthetic construct
  source 1..20: mol_type = other DNA
aagccaatatcacgacaatg

SEQ ID NO: 33364 - DNA, 20 bp, synthetic construct
  source 1..20: mol_type = other DNA
taagccaatatcacgacaat

SEQ ID NO: 33365 - DNA, 20 bp, synthetic construct
  source 1..20: mol_type = other DNA
gtaagccaatatcacgacaa

SEQ ID NO: 33366 - DNA, 20 bp, synthetic construct
  source 1..20: mol_type = other DNA
agtaagccaatatcacgaca

SEQ ID NO: 33367 - DNA, 20 bp, synthetic construct
  source 1..20: mol_type = other DNA
cagtaagccaatatcacgac

SEQ ID NO: 33368 - DNA, 20 bp, synthetic construct
  source 1..20: mol_type = other DNA
gcagtaagccaatatcacga

SEQ ID NO: 33369 - DNA, 20 bp, synthetic construct
  source 1..20: mol_type = other DNA
tgcagtaagccaatatcacg

SEQ ID NO: 33370 - DNA, 20 bp, synthetic construct
  source 1..20: mol_type = other DNA
ttgcagtaagccaatatcac

SEQ ID NO: 33371 - DNA, 20 bp, synthetic construct
  source 1..20: mol_type = other DNA
gttgcagtaagccaatatca

SEQ ID NO: 33372 - DNA, 20 bp, synthetic construct
  source 1..20: mol_type = other DNA
ggttgcagtaagccaatatc

SEQ ID NO: 33373 - DNA, 20 bp, synthetic construct
  source 1..20: mol_type = other DNA
aggttgcagtaagccaatat

SEQ ID NO: 33374 - DNA, 20 bp, synthetic construct
  source 1..20: mol_type = other DNA
gaggttgcagtaagccaata

SEQ ID NO: 33375 - DNA, 20 bp, synthetic construct
  source 1..20: mol_type = other DNA
agaggttgcagtaagccaat

SEQ ID NO: 33376 - DNA, 20 bp, synthetic construct
  source 1..20: mol_type = other DNA
cagaggttgcagtaagccaa

SEQ ID NO: 33377 - DNA, 20 bp, synthetic construct
  source 1..20: mol_type = other DNA
gcagaggttgcagtaagcca

SEQ ID NO: 33378 - DNA, 20 bp, synthetic construct
  source 1..20: mol_type = other DNA
agcagaggttgcagtaagcc

SEQ ID NO: 33379 - DNA, 20 bp, synthetic construct
  source 1..20: mol_type = other DNA
aagcagaggttgcagtaagc

SEQ ID NO: 33380 - DNA, 20 bp, synthetic construct
  source 1..20: mol_type = other DNA
gaagcagaggttgcagtaag

SEQ ID NO: 33381 - DNA, 20 bp, synthetic construct
  source 1..20: mol_type = other DNA
ggaagcagaggttgcagtaa

SEQ ID NO: 33382 - DNA, 20 bp, synthetic construct
  source 1..20: mol_type = other DNA
aggaagcagaggttgcagta

SEQ ID NO: 33383 - DNA, 20 bp, synthetic construct
  source 1..20: mol_type = other DNA
caggaagcagaggttgcagt

SEQ ID NO: 33384 - DNA, 20 bp, synthetic construct
  source 1..20: mol_type = other DNA
ccaggaagcagaggttgcag

SEQ ID NO: 33385 - DNA, 20 bp, synthetic construct
  source 1..20: mol_type = other DNA
cccaggaagcagaggttgca

SEQ ID NO: 33386 - DNA, 20 bp, synthetic construct
  source 1..20: mol_type = other DNA
acccaggaagcagaggttgc

SEQ ID NO: 33387 - DNA, 20 bp, synthetic construct
  source 1..20: mol_type = other DNA
aacccaggaagcagaggttg

SEQ ID NO: 33388 - DNA, 20 bp, synthetic construct
  source 1..20: mol_type = other DNA
gaacccaggaagcagaggtt

SEQ ID NO: 33389 - DNA, 20 bp, synthetic construct
  source 1..20: mol_type = other DNA
tgaacccaggaagcagaggt

SEQ ID NO: 33390 - DNA, 20 bp, synthetic construct
  source 1..20: mol_type = other DNA
ttgaacccaggaagcagagg

SEQ ID NO: 33391 - DNA, 20 bp, synthetic construct
  source 1..20: mol_type = other DNA
cttgaacccaggaagcagag

SEQ ID NO: 33392 - DNA, 20 bp, synthetic construct
  source 1..20: mol_type = other DNA
gcttgaacccaggaagcaga

SEQ ID NO: 33393 - DNA, 20 bp, synthetic construct
  source 1..20: mol_type = other DNA
cgcttgaacccaggaagcag

SEQ ID NO: 33394 - DNA, 20 bp, synthetic construct
  source 1..20: mol_type = other DNA
tcgcttgaacccaggaagca

SEQ ID NO: 33395 - DNA, 20 bp, synthetic construct
  source 1..20: mol_type = other DNA
atcgcttgaacccaggaagc

SEQ ID NO: 33396 - DNA, 20 bp, synthetic construct
  source 1..20: mol_type = other DNA
aatcgcttgaacccaggaag

SEQ ID NO: 33397 - DNA, 20 bp, synthetic construct
  source 1..20: mol_type = other DNA
gaatcgcttgaacccaggaa

SEQ ID NO: 33398 - DNA, 20 bp, synthetic construct
  source 1..20: mol_type = other DNA
agaatcgcttgaacccagga

SEQ ID NO: 33399 - DNA, 20 bp, synthetic construct
  source 1..20: mol_type = other DNA
gagaatcgcttgaacccagg

SEQ ID NO: 33400 - DNA, 20 bp, synthetic construct
  source 1..20: mol_type = other DNA
ggagaatcgcttgaacccag

SEQ ID NO: 33401 - DNA, 20 bp, synthetic construct
  source 1..20: mol_type = other DNA
aggagaatcgcttgaaccca

SEQ ID NO: 33402 - DNA, 20 bp, synthetic construct
  source 1..20: mol_type = other DNA
caggagaatcgcttgaaccc

SEQ ID NO: 33403 - DNA, 20 bp, synthetic construct
  source 1..20: mol_type = other DNA
gcaggagaatcgcttgaacc

SEQ ID NO: 33404 - DNA, 20 bp, synthetic construct
  source 1..20: mol_type = other DNA
ggcaggagaatcgcttgaac

SEQ ID NO: 33405 - DNA, 20 bp, synthetic construct
  source 1..20: mol_type = other DNA
aggcaggagaatcgcttgaa

SEQ ID NO: 33406 - DNA, 20 bp, synthetic construct
  source 1..20: mol_type = other DNA
gaggcaggagaatcgcttga

SEQ ID NO: 33407 - DNA, 20 bp, synthetic construct
  source 1..20: mol_type = other DNA
tgaggcaggagaatcgcttg

SEQ ID NO: 33408 - DNA, 20 bp, synthetic construct
  source 1..20: mol_type = other DNA
ctgaggcaggagaatcgctt

SEQ ID NO: 33409 - DNA, 20 bp, synthetic construct
  source 1..20: mol_type = other DNA
gctgaggcaggagaatcgct

SEQ ID NO: 33410 - DNA, 20 bp, synthetic construct
  source 1..20: mol_type = other DNA
ggctgaggcaggagaatcgc

SEQ ID NO: 33411 - DNA, 20 bp, synthetic construct
  source 1..20: mol_type = other DNA
aggctgaggcaggagaatcg

SEQ ID NO: 33412 - DNA, 20 bp, synthetic construct
  source 1..20: mol_type = other DNA
gaggctgaggcaggagaatc

SEQ ID NO: 33413 - DNA, 20 bp, synthetic construct
  source 1..20: mol_type = other DNA
ggaggctgaggcaggagaat

SEQ ID NO: 33414 - DNA, 20 bp, synthetic construct
  source 1..20: mol_type = other DNA
aggaggctgaggcaggagaa

SEQ ID NO: 33415 - DNA, 20 bp, synthetic construct
  source 1..20: mol_type = other DNA
caggaggctgaggcaggaga

SEQ ID NO: 33416 - DNA, 20 bp, synthetic construct
  source 1..20: mol_type = other DNA
tcaggaggctgaggcaggag

SEQ ID NO: 33417 - DNA, 20 bp, synthetic construct
  source 1..20: mol_type = other DNA
ctcaggaggctgaggcagga

SEQ ID NO: 33418 - DNA, 20 bp, synthetic construct
  source 1..20: mol_type = other DNA
actcaggaggctgaggcagg

SEQ ID NO: 33419 - DNA, 20 bp, synthetic construct
  source 1..20: mol_type = other DNA
tactcaggaggctgaggcag

SEQ ID NO: 33420 - DNA, 20 bp, synthetic construct
  source 1..20: mol_type = other DNA
ctactcaggaggctgaggca

SEQ ID NO: 33421 - DNA, 20 bp, synthetic construct
  source 1..20: mol_type = other DNA
gctactcaggaggctgaggc

SEQ ID NO: 33422 - DNA, 20 bp, synthetic construct
  source 1..20: mol_type = other DNA
agctactcaggaggctgagg

SEQ ID NO: 33423 - DNA, 20 bp, synthetic construct
  source 1..20: mol_type = other DNA
cagctactcaggaggctgag

SEQ ID NO: 33424 - DNA, 20 bp, synthetic construct
  source 1..20: mol_type = other DNA
ccagctactcaggaggctga

SEQ ID NO: 33425 - DNA, 20 bp, synthetic construct
  source 1..20: mol_type = other DNA
cccagctactcaggaggctg

SEQ ID NO: 33426 - DNA, 20 bp, synthetic construct
  source 1..20: mol_type = other DNA
tcccagctactcaggaggct

SEQ ID NO: 33427 - DNA, 20 bp, synthetic construct
  source 1..20: mol_type = other DNA
atcccagctactcaggaggc

SEQ ID NO: 33428 - DNA, 20 bp, synthetic construct
  source 1..20: mol_type = other DNA
aatcccagctactcaggagg

SEQ ID NO: 33429 - DNA, 20 bp, synthetic construct
  source 1..20: mol_type = other DNA
taatcccagctactcaggag

SEQ ID NO: 33430 - DNA, 20 bp, synthetic construct
  source 1..20: mol_type = other DNA
gtaatcccagctactcagga

SEQ ID NO: 33431 - DNA, 20 bp, synthetic construct
  source 1..20: mol_type = other DNA
tgtaatcccagctactcagg

SEQ ID NO: 33432 - DNA, 20 bp, synthetic construct
  source 1..20: mol_type = other DNA
ctgtaatcccagctactcag

SEQ ID NO: 33433 - DNA, 20 bp, synthetic construct
  source 1..20: mol_type = other DNA
cctgtaatcccagctactca

SEQ ID NO: 33434 - DNA, 20 bp, synthetic construct
  source 1..20: mol_type = other DNA
gcctgtaatcccagctactc

SEQ ID NO: 33435 - DNA, 20 bp, synthetic construct
  source 1..20: mol_type = other DNA
tgcctgtaatcccagctact

SEQ ID NO: 33436 - DNA, 20 bp, synthetic construct
  source 1..20: mol_type = other DNA
atgcctgtaatcccagctac

SEQ ID NO: 33437 - DNA, 20 bp, synthetic construct
  source 1..20: mol_type = other DNA
catgcctgtaatcccagcta

SEQ ID NO: 33438 - DNA, 20 bp, synthetic construct
  source 1..20: mol_type = other DNA
acatgcctgtaatcccagct

SEQ ID NO: 33439 - DNA, 20 bp, synthetic construct
  source 1..20: mol_type = other DNA
cacatgcctgtaatcccagc

SEQ ID NO: 33440 - DNA, 20 bp, synthetic construct
  source 1..20: mol_type = other DNA
gcacatgcctgtaatcccag

SEQ ID NO: 33441 - DNA, 20 bp, synthetic construct
  source 1..20: mol_type = other DNA
ggcacatgcctgtaatccca

SEQ ID NO: 33442 - DNA, 20 bp, synthetic construct
  source 1..20: mol_type = other DNA
tggcacatgcctgtaatccc

SEQ ID NO: 33443 - DNA, 20 bp, synthetic construct
  source 1..20: mol_type = other DNA
gtggcacatgcctgtaatcc

SEQ ID NO: 33444 - DNA, 20 bp, synthetic construct
  source 1..20: mol_type = other DNA
ggtggcacatgcctgtaatc

SEQ ID NO: 33445 - DNA, 20 bp, synthetic construct
  source 1..20: mol_type = other DNA
tggtggcacatgcctgtaat

SEQ ID NO: 33446 - DNA, 20 bp, synthetic construct
  source 1..20: mol_type = other DNA
gtggtggcacatgcctgtaa

SEQ ID NO: 33447 - DNA, 20 bp, synthetic construct
  source 1..20: mol_type = other DNA
cgtggtggcacatgcctgta

SEQ ID NO: 33448 - DNA, 20 bp, synthetic construct
  source 1..20: mol_type = other DNA
gcgtggtggcacatgcctgt

SEQ ID NO: 33449 - DNA, 20 bp, synthetic construct
  source 1..20: mol_type = other DNA
ggcgtggtggcacatgcctg

SEQ ID NO: 33450 - DNA, 20 bp, synthetic construct
  source 1..20: mol_type = other DNA
gggcgtggtggcacatgcct

SEQ ID NO: 33451 - DNA, 20 bp, synthetic construct
  source 1..20: mol_type = other DNA
cgggcgtggtggcacatgcc

SEQ ID NO: 33452 - DNA, 20 bp, synthetic construct
  source 1..20: mol_type = other DNA
ccgggcgtggtggcacatgc

SEQ ID NO: 33453 - DNA, 20 bp, synthetic construct
  source 1..20: mol_type = other DNA
gccgggcgtggtggcacatg

SEQ ID NO: 33454 - DNA, 20 bp, synthetic construct
  source 1..20: mol_type = other DNA
agccgggcgtggtggcacat

SEQ ID NO: 33455 - DNA, 20 bp, synthetic construct
  source 1..20: mol_type = other DNA
tagccgggcgtggtggcaca

SEQ ID NO: 33456 - DNA, 20 bp, synthetic construct
  source 1..20: mol_type = other DNA
ttagccgggcgtggtggcac

SEQ ID NO: 33457 - DNA, 20 bp, synthetic construct
  source 1..20: mol_type = other DNA
attagccgggcgtggtggca

SEQ ID NO: 33458 - DNA, 20 bp, synthetic construct
  source 1..20: mol_type = other DNA
aattagccgggcgtggtggc

SEQ ID NO: 33459 - DNA, 20 bp, synthetic construct
  source 1..20: mol_type = other DNA
aaattagccgggcgtggtgg

SEQ ID NO: 33460 - DNA, 20 bp, synthetic construct
  source 1..20: mol_type = other DNA
aaaattagccgggcgtggtg

SEQ ID NO: 33461 - DNA, 20 bp, synthetic construct
  source 1..20: mol_type = other DNA
aaaaattagccgggcgtggt

SEQ ID NO: 33462 - DNA, 20 bp, synthetic construct
  source 1..20: mol_type = other DNA
caaaaattagccgggcgtgg

SEQ ID NO: 33463 - DNA, 20 bp, synthetic construct
  source 1..20: mol_type = other DNA
acaaaaattagccgggcgtg

SEQ ID NO: 33464 - DNA, 20 bp, synthetic construct
  source 1..20: mol_type = other DNA
tacaaaaattagccgggcgt

SEQ ID NO: 33465 - DNA, 20 bp, synthetic construct
  source 1..20: mol_type = other DNA
atacaaaaattagccgggcg

SEQ ID NO: 33466 - DNA, 20 bp, synthetic construct
  source 1..20: mol_type = other DNA
aatacaaaaattagccgggc

SEQ ID NO: 33467 - DNA, 20 bp, synthetic construct
  source 1..20: mol_type = other DNA
aaatacaaaaattagccggg

SEQ ID NO: 33468 - DNA, 20 bp, synthetic construct
  source 1..20: mol_type = other DNA
aaaatacaaaaattagccgg

SEQ ID NO: 33469 - DNA, 20 bp, synthetic construct
  source 1..20: mol_type = other DNA
aaaaatacaaaaattagccg

SEQ ID NO: 33470 - DNA, 20 bp, synthetic construct
  source 1..20: mol_type = other DNA
taaaaatacaaaaattagcc

SEQ ID NO: 33471 - DNA, 20 bp, synthetic construct
  source 1..20: mol_type = other DNA
ataaaaatacaaaaattagc

SEQ ID NO: 33472 - DNA, 20 bp, synthetic construct
  source 1..20: mol_type = other DNA
aataaaaatacaaaaattag

SEQ ID NO: 33473 - DNA, 20 bp, synthetic construct
  source 1..20: mol_type = other DNA
aaataaaaatacaaaaatta

SEQ ID NO: 33474 - DNA, 20 bp, synthetic construct
  source 1..20: mol_type = other DNA
caaataaaaatacaaaaatt

SEQ ID NO: 33475 - DNA, 20 bp, synthetic construct
  source 1..20: mol_type = other DNA
tcaaataaaaatacaaaaat

SEQ ID NO: 33476 - DNA, 20 bp, synthetic construct
  source 1..20: mol_type = other DNA
ctcaaataaaaatacaaaaa

SEQ ID NO: 33477 - DNA, 20 bp, synthetic construct
  source 1..20: mol_type = other DNA
tctcaaataaaaatacaaaa

SEQ ID NO: 33478 - DNA, 20 bp, synthetic construct
  source 1..20: mol_type = other DNA
ctctcaaataaaaatacaaa

SEQ ID NO: 33479 - DNA, 20 bp, synthetic construct
  source 1..20: mol_type = other DNA
cctctcaaataaaaatacaa

SEQ ID NO: 33480 - DNA, 20 bp, synthetic construct
  source 1..20: mol_type = other DNA
ccctctcaaataaaaataca

SEQ ID NO: 33481 - DNA, 20 bp, synthetic construct
  source 1..20: mol_type = other DNA
cccctctcaaataaaaatac

SEQ ID NO: 33482 - DNA, 20 bp, synthetic construct
  source 1..20: mol_type = other DNA
tcccctctcaaataaaaata

SEQ ID NO: 33483 - DNA, 20 bp, synthetic construct
  source 1..20: mol_type = other DNA
atcccctctcaaataaaaat

SEQ ID NO: 33484 - DNA, 20 bp, synthetic construct
  source 1..20: mol_type = other DNA
aatcccctctcaaataaaaa

SEQ ID NO: 33485 - DNA, 20 bp, synthetic construct
  source 1..20: mol_type = other DNA
aaatcccctctcaaataaaa

SEQ ID NO: 33486 - DNA, 20 bp, synthetic construct
  source 1..20: mol_type = other DNA
gaaatcccctctcaaataaa

SEQ ID NO: 33487 - DNA, 20 bp, synthetic construct
  source 1..20: mol_type = other DNA
tgaaatcccctctcaaataa

SEQ ID NO: 33488 - DNA, 20 bp, synthetic construct
  source 1..20: mol_type = other DNA
gtgaaatcccctctcaaata

SEQ ID NO: 33489 - DNA, 20 bp, synthetic construct
  source 1..20: mol_type = other DNA
ggtgaaatcccctctcaaat

SEQ ID NO: 33490 - DNA, 20 bp, synthetic construct
  source 1..20: mol_type = other DNA
tggtgaaatcccctctcaaa

SEQ ID NO: 33491 - DNA, 20 bp, synthetic construct
  source 1..20: mol_type = other DNA
atggtgaaatcccctctcaa

SEQ ID NO: 33492 - DNA, 20 bp, synthetic construct
  source 1..20: mol_type = other DNA
catggtgaaatcccctctca

SEQ ID NO: 33493 - DNA, 20 bp, synthetic construct
  source 1..20: mol_type = other DNA
acatggtgaaatcccctctc

SEQ ID NO: 33494 - DNA, 20 bp, synthetic construct
  source 1..20: mol_type = other DNA
aacatggtgaaatcccctct

SEQ ID NO: 33495 - DNA, 20 bp, synthetic construct
  source 1..20: mol_type = other DNA
caacatggtgaaatcccctc

SEQ ID NO: 33496 - DNA, 20 bp, synthetic construct
  source 1..20: mol_type = other DNA
ccaacatggtgaaatcccct

SEQ ID NO: 33497 - DNA, 20 bp, synthetic construct
  source 1..20: mol_type = other DNA
gccaacatggtgaaatcccc

SEQ ID NO: 33498 - DNA, 20 bp, synthetic construct
  source 1..20: mol_type = other DNA
tgccaacatggtgaaatccc

SEQ ID NO: 33499 - DNA, 20 bp, synthetic construct
  source 1..20: mol_type = other DNA
ttgccaacatggtgaaatcc

SEQ ID NO: 33500 - DNA, 20 bp, synthetic construct
  source 1..20: mol_type = other DNA
cttgccaacatggtgaaatc

SEQ ID NO: 33501 - DNA, 20 bp, synthetic construct
  source 1..20: mol_type = other DNA
ccttgccaacatggtgaaat

SEQ ID NO: 33502 - DNA, 20 bp, synthetic construct
  source 1..20: mol_type = other DNA
gccttgccaacatggtgaaa

SEQ ID NO: 33503 - DNA, 20 bp, synthetic construct
  source 1..20: mol_type = other DNA
agccttgccaacatggtgaa

SEQ ID NO: 33504 - DNA, 20 bp, synthetic construct
  source 1..20: mol_type = other DNA
cagccttgccaacatggtga

SEQ ID NO: 33505 - DNA, 20 bp, synthetic construct
  source 1..20: mol_type = other DNA
ccagccttgccaacatggtg

SEQ ID NO: 33506 - DNA, 20 bp, synthetic construct
  source 1..20: mol_type = other DNA
accagccttgccaacatggt

SEQ ID NO: 33507 - DNA, 20 bp, synthetic construct
  source 1..20: mol_type = other DNA
gaccagccttgccaacatgg

SEQ ID NO: 33508 - DNA, 20 bp, synthetic construct
  source 1..20: mol_type = other DNA
agaccagccttgccaacatg

SEQ ID NO: 33509 - DNA, 20 bp, synthetic construct
  source 1..20: mol_type = other DNA
aagaccagccttgccaacat

SEQ ID NO: 33510 - DNA, 20 bp, synthetic construct
  source 1..20: mol_type = other DNA
caagaccagccttgccaaca

SEQ ID NO: 33511 - DNA, 20 bp, synthetic construct
  source 1..20: mol_type = other DNA
tcaagaccagccttgccaac

SEQ ID NO: 33512 - DNA, 20 bp, synthetic construct
  source 1..20: mol_type = other DNA
ctcaagaccagccttgccaa

SEQ ID NO: 33513 - DNA, 20 bp, synthetic construct
  source 1..20: mol_type = other DNA
actcaagaccagccttgcca

SEQ ID NO: 33514 - DNA, 20 bp, synthetic construct
  source 1..20: mol_type = other DNA
aactcaagaccagccttgcc

SEQ ID NO: 33515 - DNA, 20 bp, synthetic construct
  source 1..20: mol_type = other DNA
gaactcaagaccagccttgc

SEQ ID NO: 33516 - DNA, 20 bp, synthetic construct
  source 1..20: mol_type = other DNA
ggaactcaagaccagccttg

SEQ ID NO: 33517 - DNA, 20 bp, synthetic construct
  source 1..20: mol_type = other DNA
aggaactcaagaccagcctt

SEQ ID NO: 33518 - DNA, 20 bp, synthetic construct
  source 1..20: mol_type = other DNA
caggaactcaagaccagcct

SEQ ID NO: 33519 - DNA, 20 bp, synthetic construct
  source 1..20: mol_type = other DNA
tcaggaactcaagaccagcc

SEQ ID NO: 33520 - DNA, 20 bp, synthetic construct
  source 1..20: mol_type = other DNA
gtcaggaactcaagaccagc

SEQ ID NO: 33521 - DNA, 20 bp, synthetic construct
  source 1..20: mol_type = other DNA
ggtcaggaactcaagaccag

SEQ ID NO: 33522 - DNA, 20 bp, synthetic construct
  source 1..20: mol_type = other DNA
aggtcaggaactcaagacca

SEQ ID NO: 33523 - DNA, 20 bp, synthetic construct
  source 1..20: mol_type = other DNA
gaggtcaggaactcaagacc

SEQ ID NO: 33524 - DNA, 20 bp, synthetic construct
  source 1..20: mol_type = other DNA
tgaggtcaggaactcaagac

SEQ ID NO: 33525 - DNA, 20 bp, synthetic construct
  source 1..20: mol_type = other DNA
ctgaggtcaggaactcaaga

SEQ ID NO: 33526 - DNA, 20 bp, synthetic construct
  source 1..20: mol_type = other DNA
tctgaggtcaggaactcaag

SEQ ID NO: 33527 - DNA, 20 bp, synthetic construct
  source 1..20: mol_type = other DNA
atctgaggtcaggaactcaa

SEQ ID NO: 33528 - DNA, 20 bp, synthetic construct
  source 1..20: mol_type = other DNA
tatctgaggtcaggaactca

SEQ ID NO: 33529 - DNA, 20 bp, synthetic construct
  source 1..20: mol_type = other DNA
ttatctgaggtcaggaactc

SEQ ID NO: 33530 - DNA, 20 bp, synthetic construct
  source 1..20: mol_type = other DNA
attatctgaggtcaggaact

SEQ ID NO: 33531 - DNA, 20 bp, synthetic construct
  source 1..20: mol_type = other DNA
gattatctgaggtcaggaac

SEQ ID NO: 33532 - DNA, 20 bp, synthetic construct
  source 1..20: mol_type = other DNA
ggattatctgaggtcaggaa

SEQ ID NO: 33533 - DNA, 20 bp, synthetic construct
  source 1..20: mol_type = other DNA
tggattatctgaggtcagga

SEQ ID NO: 33534 - DNA, 20 bp, synthetic construct
  source 1..20: mol_type = other DNA
gtggattatctgaggtcagg

SEQ ID NO: 33535 - DNA, 20 bp, synthetic construct
  source 1..20: mol_type = other DNA
ggtggattatctgaggtcag

SEQ ID NO: 33536 - DNA, 20 bp, synthetic construct
  source 1..20: mol_type = other DNA
aggtggattatctgaggtca

SEQ ID NO: 33537 - DNA, 20 bp, synthetic construct
  source 1..20: mol_type = other DNA
caggtggattatctgaggtc

SEQ ID NO: 33538 - DNA, 20 bp, synthetic construct
  source 1..20: mol_type = other DNA
gcaggtggattatctgaggt

SEQ ID NO: 33539 - DNA, 20 bp, synthetic construct
  source 1..20: mol_type = other DNA
ggcaggtggattatctgagg

SEQ ID NO: 33540 - DNA, 20 bp, synthetic construct
  source 1..20: mol_type = other DNA
aggcaggtggattatctgag

SEQ ID NO: 33541 - DNA, 20 bp, synthetic construct
  source 1..20: mol_type = other DNA
gaggcaggtggattatctga

SEQ ID NO: 33542 - DNA, 20 bp, synthetic construct
  source 1..20: mol_type = other DNA
tgaggcaggtggattatctg

SEQ ID NO: 33543 - DNA, 20 bp, synthetic construct
  source 1..20: mol_type = other DNA
ctgaggcaggtggattatct

SEQ ID NO: 33544 - DNA, 20 bp, synthetic construct
  source 1..20: mol_type = other DNA
gctgaggcaggtggattatc

SEQ ID NO: 33545 - DNA, 20 bp, synthetic construct
  source 1..20: mol_type = other DNA
ggctgaggcaggtggattat

SEQ ID NO: 33546 - DNA, 20 bp, synthetic construct
  source 1..20: mol_type = other DNA
aggctgaggcaggtggatta

SEQ ID NO: 33547 - DNA, 20 bp, synthetic construct
  source 1..20: mol_type = other DNA
gaggctgaggcaggtggatt

SEQ ID NO: 33548 - DNA, 20 bp, synthetic construct
  source 1..20: mol_type = other DNA
ggaggctgaggcaggtggat

SEQ ID NO: 33549 - DNA, 20 bp, synthetic construct
  source 1..20: mol_type = other DNA
gggaggctgaggcaggtgga

SEQ ID NO: 33550 - DNA, 20 bp, synthetic construct
  source 1..20: mol_type = other DNA
tgggaggctgaggcaggtgg

SEQ ID NO: 33551 - DNA, 20 bp, synthetic construct
  source 1..20: mol_type = other DNA
ttgggaggctgaggcaggtg

SEQ ID NO: 33552 - DNA, 20 bp, synthetic construct
  source 1..20: mol_type = other DNA
tttgggaggctgaggcaggt

SEQ ID NO: 33553 - DNA, 20 bp, synthetic construct
  source 1..20: mol_type = other DNA
ctttgggaggctgaggcagg

SEQ ID NO: 33554 - DNA, 20 bp, synthetic construct
  source 1..20: mol_type = other DNA
actttgggaggctgaggcag

SEQ ID NO: 33555 - DNA, 20 bp, synthetic construct
  source 1..20: mol_type = other DNA
cactttgggaggctgaggca

SEQ ID NO: 33556 - DNA, 20 bp, synthetic construct
  source 1..20: mol_type = other DNA
gcactttgggaggctgaggc

SEQ ID NO: 33557 - DNA, 20 bp, synthetic construct
  source 1..20: mol_type = other DNA
ggcactttgggaggctgagg

SEQ ID NO: 33558 - DNA, 20 bp, synthetic construct
  source 1..20: mol_type = other DNA
cggcactttgggaggctgag

SEQ ID NO: 33559 - DNA, 20 bp, synthetic construct
  source 1..20: mol_type = other DNA
ccggcactttgggaggctga

SEQ ID NO: 33560 - DNA, 20 bp, synthetic construct
  source 1..20: mol_type = other DNA
cccggcactttgggaggctg

SEQ ID NO: 33561 - DNA, 20 bp, synthetic construct
  source 1..20: mol_type = other DNA
tcccggcactttgggaggct

SEQ ID NO: 33562 - DNA, 20 bp, synthetic construct
  source 1..20: mol_type = other DNA
atcccggcactttgggaggc

SEQ ID NO: 33563 - DNA, 20 bp, synthetic construct
  source 1..20: mol_type = other DNA
aatcccggcactttgggagg

SEQ ID NO: 33564 - DNA, 20 bp, synthetic construct
  source 1..20: mol_type = other DNA
taatcccggcactttgggag

SEQ ID NO: 33565 - DNA, 20 bp, synthetic construct
  source 1..20: mol_type = other DNA
gtaatcccggcactttggga

SEQ ID NO: 33566 - DNA, 20 bp, synthetic construct
  source 1..20: mol_type = other DNA
tgtaatcccggcactttggg

SEQ ID NO: 33567 - DNA, 20 bp, synthetic construct
  source 1..20: mol_type = other DNA
ctgtaatcccggcactttgg

SEQ ID NO: 33568 - DNA, 20 bp, synthetic construct
  source 1..20: mol_type = other DNA
cctgtaatcccggcactttg

SEQ ID NO: 33569 - DNA, 20 bp, synthetic construct
  source 1..20: mol_type = other DNA
acctgtaatcccggcacttt

SEQ ID NO: 33570 - DNA, 20 bp, synthetic construct
  source 1..20: mol_type = other DNA
cacctgtaatcccggcactt

SEQ ID NO: 33571 - DNA, 20 bp, synthetic construct
  source 1..20: mol_type = other DNA
acacctgtaatcccggcact

SEQ ID NO: 33572 - DNA, 20 bp, synthetic construct
  source 1..20: mol_type = other DNA
cacacctgtaatcccggcac

SEQ ID NO: 33573 - DNA, 20 bp, synthetic construct
  source 1..20: mol_type = other DNA
tcacacctgtaatcccggca

SEQ ID NO: 33574 - DNA, 20 bp, synthetic construct
  source 1..20: mol_type = other DNA
ctcacacctgtaatcccggc

SEQ ID NO: 33575 - DNA, 20 bp, synthetic construct
  source 1..20: mol_type = other DNA
gctcacacctgtaatcccgg

SEQ ID NO: 33576 - DNA, 20 bp, synthetic construct
  source 1..20: mol_type = other DNA
ggctcacacctgtaatcccg

SEQ ID NO: 33577 - DNA, 20 bp, synthetic construct
  source 1..20: mol_type = other DNA
tggctcacacctgtaatccc

SEQ ID NO: 33578 - DNA, 20 bp, synthetic construct
  source 1..20: mol_type = other DNA
gtggctcacacctgtaatcc

SEQ ID NO: 33579 - DNA, 20 bp, synthetic construct
  source 1..20: mol_type = other DNA
agtggctcacacctgtaatc

SEQ ID NO: 33580 - DNA, 20 bp, synthetic construct
  source 1..20: mol_type = other DNA
cagtggctcacacctgtaat

SEQ ID NO: 33581 - DNA, 20 bp, synthetic construct
  source 1..20: mol_type = other DNA
gcagtggctcacacctgtaa

SEQ ID NO: 33582 - DNA, 20 bp, synthetic construct
  source 1..20: mol_type = other DNA
cgcagtggctcacacctgta

SEQ ID NO: 33583 - DNA, 20 bp, synthetic construct
  source 1..20: mol_type = other DNA
gcgcagtggctcacacctgt

SEQ ID NO: 33584 - DNA, 20 bp, synthetic construct
  source 1..20: mol_type = other DNA
ggcgcagtggctcacacctg

SEQ ID NO: 33585 - DNA, 20 bp, synthetic construct
  source 1..20: mol_type = other DNA
gggcgcagtggctcacacct

SEQ ID NO: 33586 - DNA, 20 bp, synthetic construct
  source 1..20: mol_type = other DNA
cgggcgcagtggctcacacc

SEQ ID NO: 33587 - DNA, 20 bp, synthetic construct
  source 1..20: mol_type = other DNA
ccgggcgcagtggctcacac

SEQ ID NO: 33588 - DNA, 20 bp, synthetic construct
  source 1..20: mol_type = other DNA
gccgggcgcagtggctcaca

SEQ ID NO: 33589 - DNA, 20 bp, synthetic construct
  source 1..20: mol_type = other DNA
ggccgggcgcagtggctcac

SEQ ID NO: 33590 - DNA, 20 bp, synthetic construct
  source 1..20: mol_type = other DNA
aggccgggcgcagtggctca

SEQ ID NO: 33591 - DNA, 20 bp, synthetic construct
  source 1..20: mol_type = other DNA
gaggccgggcgcagtggctc

SEQ ID NO: 33592 - DNA, 20 bp, synthetic construct
  source 1..20: mol_type = other DNA
ggaggccgggcgcagtggct

SEQ ID NO: 33593 - DNA, 20 bp, synthetic construct
  source 1..20: mol_type = other DNA
gggaggccgggcgcagtggc

SEQ ID NO: 33594 - DNA, 20 bp, synthetic construct
  source 1..20: mol_type = other DNA
ggggaggccgggcgcagtgg

SEQ ID NO: 33595 - DNA, 20 bp, synthetic construct
  source 1..20: mol_type = other DNA
gggggaggccgggcgcagtg

SEQ ID NO: 33596 - DNA, 20 bp, synthetic construct
  source 1..20: mol_type = other DNA
tgggggaggccgggcgcagt

SEQ ID NO: 33597 - DNA, 20 bp, synthetic construct
  source 1..20: mol_type = other DNA
ctgggggaggccgggcgcag

SEQ ID NO: 33598 - DNA, 20 bp, synthetic construct
  source 1..20: mol_type = other DNA
actgggggaggccgggcgca

SEQ ID NO: 33599 - DNA, 20 bp, synthetic construct
  source 1..20: mol_type = other DNA
aactgggggaggccgggcgc

SEQ ID NO: 33600 - DNA, 20 bp, synthetic construct
  source 1..20: mol_type = other DNA
caactgggggaggccgggcg

SEQ ID NO: 33601 - DNA, 20 bp, synthetic construct
  source 1..20: mol_type = other DNA
acaactgggggaggccgggc

SEQ ID NO: 33602 - DNA, 20 bp, synthetic construct
  source 1..20: mol_type = other DNA
aacaactgggggaggccggg

SEQ ID NO: 33603 - DNA, 20 bp, synthetic construct
  source 1..20: mol_type = other DNA
caacaactgggggaggccgg

SEQ ID NO: 33604 - DNA, 20 bp, synthetic construct
  source 1..20: mol_type = other DNA
tcaacaactgggggaggccg

SEQ ID NO: 33605 - DNA, 20 bp, synthetic construct
  source 1..20: mol_type = other DNA
ttcaacaactgggggaggcc

SEQ ID NO: 33606 - DNA, 20 bp, synthetic construct
  source 1..20: mol_type = other DNA
tttcaacaactgggggaggc

SEQ ID NO: 33607 - DNA, 20 bp, synthetic construct
  source 1..20: mol_type = other DNA
gtttcaacaactgggggagg

SEQ ID NO: 33608 - DNA, 20 bp, synthetic construct
  source 1..20: mol_type = other DNA
tgtttcaacaactgggggag

SEQ ID NO: 33609 - DNA, 20 bp, synthetic construct
  source 1..20: mol_type = other DNA
ttgtttcaacaactggggga

SEQ ID NO: 33610 - DNA, 20 bp, synthetic construct
  source 1..20: mol_type = other DNA
attgtttcaacaactggggg

SEQ ID NO: 33611 - DNA, 20 bp, synthetic construct
  source 1..20: mol_type = other DNA
tattgtttcaacaactgggg

SEQ ID NO: 33612 - DNA, 20 bp, synthetic construct
  source 1..20: mol_type = other DNA
ttattgtttcaacaactggg

SEQ ID NO: 33613 - DNA, 20 bp, synthetic construct
  source 1..20: mol_type = other DNA
attattgtttcaacaactgg

SEQ ID NO: 33614 - DNA, 20 bp, synthetic construct
  source 1..20: mol_type = other DNA
cattattgtttcaacaactg

SEQ ID NO: 33615 - DNA, 20 bp, synthetic construct
  source 1..20: mol_type = other DNA
ccattattgtttcaacaact

SEQ ID NO: 33616 - DNA, 20 bp, synthetic construct
  source 1..20: mol_type = other DNA
tccattattgtttcaacaac

SEQ ID NO: 33617 - DNA, 20 bp, synthetic construct
  source 1..20: mol_type = other DNA
ttccattattgtttcaacaa

SEQ ID NO: 33618 - DNA, 20 bp, synthetic construct
  source 1..20: mol_type = other DNA
cttccattattgtttcaaca

SEQ ID NO: 33619 - DNA, 20 bp, synthetic construct
  source 1..20: mol_type = other DNA
ccttccattattgtttcaac

SEQ ID NO: 33620 - DNA, 20 bp, synthetic construct
  source 1..20: mol_type = other DNA
accttccattattgtttcaa

SEQ ID NO: 33621 - DNA, 20 bp, synthetic construct
  source 1..20: mol_type = other DNA
taccttccattattgtttca

SEQ ID NO: 33622 - DNA, 20 bp, synthetic construct
  source 1..20: mol_type = other DNA
ttaccttccattattgtttc

SEQ ID NO: 33623 - DNA, 20 bp, synthetic construct
  source 1..20: mol_type = other DNA
attaccttccattattgttt

SEQ ID NO: 33624 - DNA, 20 bp, synthetic construct
  source 1..20: mol_type = other DNA
aattaccttccattattgtt

SEQ ID NO: 33625 - DNA, 20 bp, synthetic construct
  source 1..20: mol_type = other DNA
aaattaccttccattattgt

SEQ ID NO: 33626 - DNA, 20 bp, synthetic construct
  source 1..20: mol_type = other DNA
aaaattaccttccattattg

SEQ ID NO: 33627 - DNA, 20 bp, synthetic construct
  source 1..20: mol_type = other DNA
taaaattaccttccattatt

SEQ ID NO: 33628 - DNA, 20 bp, synthetic construct
  source 1..20: mol_type = other DNA
ataaaattaccttccattat

SEQ ID NO: 33629 - DNA, 20 bp, synthetic construct
  source 1..20: mol_type = other DNA
aataaaattaccttccatta

SEQ ID NO: 33630 - DNA, 20 bp, synthetic construct
  source 1..20: mol_type = other DNA
gaataaaattaccttccatt

SEQ ID NO: 33631 - DNA, 20 bp, synthetic construct
  source 1..20: mol_type = other DNA
agaataaaattaccttccat

SEQ ID NO: 33632 - DNA, 20 bp, synthetic construct
  source 1..20: mol_type = other DNA
aagaataaaattaccttcca

SEQ ID NO: 33633 - DNA, 20 bp, synthetic construct
  source 1..20: mol_type = other DNA
taagaataaaattaccttcc

SEQ ID NO: 33634 - DNA, 20 bp, synthetic construct
  source 1..20: mol_type = other DNA
ctaagaataaaattaccttc

SEQ ID NO: 33635 - DNA, 20 bp, synthetic construct
  source 1..20: mol_type = other DNA
tctaagaataaaattacctt

SEQ ID NO: 33636 - DNA, 20 bp, synthetic construct
  source 1..20: mol_type = other DNA
atctaagaataaaattacct

SEQ ID NO: 33637 - DNA, 20 bp, synthetic construct
  source 1..20: mol_type = other DNA
aatctaagaataaaattacc

SEQ ID NO: 33638 - DNA, 20 bp, synthetic construct
  source 1..20: mol_type = other DNA
taatctaagaataaaattac

SEQ ID NO: 33639 - DNA, 20 bp, synthetic construct
  source 1..20: mol_type = other DNA
ataatctaagaataaaatta

SEQ ID NO: 33640 - DNA, 20 bp, synthetic construct
  source 1..20: mol_type = other DNA
aataatctaagaataaaatt

SEQ ID NO: 33641 - DNA, 20 bp, synthetic construct
  source 1..20: mol_type = other DNA
aaataatctaagaataaaat

SEQ ID NO: 33642 - DNA, 20 bp, synthetic construct
  source 1..20: mol_type = other DNA
taaataatctaagaataaaa

SEQ ID NO: 33643 - DNA, 20 bp, synthetic construct
  source 1..20: mol_type = other DNA
ttaaataatctaagaataaa

SEQ ID NO: 33644 - DNA, 20 bp, synthetic construct
  source 1..20: mol_type = other DNA
attaaataatctaagaataa

SEQ ID NO: 33645 - DNA, 20 bp, synthetic construct
  source 1..20: mol_type = other DNA
cattaaataatctaagaata

SEQ ID NO: 33646 - DNA, 20 bp, synthetic construct
  source 1..20: mol_type = other DNA
acattaaataatctaagaat

SEQ ID NO: 33647 - DNA, 20 bp, synthetic construct
  source 1..20: mol_type = other DNA
aacattaaataatctaagaa

SEQ ID NO: 33648 - DNA, 20 bp, synthetic construct
  source 1..20: mol_type = other DNA
aaacattaaataatctaaga

SEQ ID NO: 33649 - DNA, 20 bp, synthetic construct
  source 1..20: mol_type = other DNA
aaaacattaaataatctaag

SEQ ID NO: 33650 - DNA, 20 bp, synthetic construct
  source 1..20: mol_type = other DNA
aaaaacattaaataatctaa

SEQ ID NO: 33651 - DNA, 20 bp, synthetic construct
  source 1..20: mol_type = other DNA
gaaaaacattaaataatcta

SEQ ID NO: 33652 - DNA, 20 bp, synthetic construct
  source 1..20: mol_type = other DNA
tgaaaaacattaaataatct

SEQ ID NO: 33653 - DNA, 20 bp, synthetic construct
  source 1..20: mol_type = other DNA
ctgaaaaacattaaataatc

SEQ ID NO: 33654 - DNA, 20 bp, synthetic construct
  source 1..20: mol_type = other DNA
actgaaaaacattaaataat

SEQ ID NO: 33655 - DNA, 20 bp, synthetic construct
  source 1..20: mol_type = other DNA
aactgaaaaacattaaataa

SEQ ID NO: 33656 - DNA, 20 bp, synthetic construct
  source 1..20: mol_type = other DNA
taactgaaaaacattaaata

SEQ ID NO: 33657 - DNA, 20 bp, synthetic construct
  source 1..20: mol_type = other DNA
ataactgaaaaacattaaat

SEQ ID NO: 33658 - DNA, 20 bp, synthetic construct
  source 1..20: mol_type = other DNA
gataactgaaaaacattaaa

SEQ ID NO: 33659 - DNA, 20 bp, synthetic construct
  source 1..20: mol_type = other DNA
tgataactgaaaaacattaa

SEQ ID NO: 33660 - DNA, 20 bp, synthetic construct
  source 1..20: mol_type = other DNA
ctgataactgaaaaacatta

SEQ ID NO: 33661 - DNA, 20 bp, synthetic construct
  source 1..20: mol_type = other DNA
cctgataactgaaaaacatt

SEQ ID NO: 33662 - DNA, 20 bp, synthetic construct
  source 1..20: mol_type = other DNA
tcctgataactgaaaaacat

SEQ ID NO: 33663 - DNA, 20 bp, synthetic construct
  source 1..20: mol_type = other DNA
atcctgataactgaaaaaca

SEQ ID NO: 33664 - DNA, 20 bp, synthetic construct
  source 1..20: mol_type = other DNA
catcctgataactgaaaaac

SEQ ID NO: 33665 - DNA, 20 bp, synthetic construct
  source 1..20: mol_type = other DNA
acatcctgataactgaaaaa

SEQ ID NO: 33666 - DNA, 20 bp, synthetic construct
  source 1..20: mol_type = other DNA
cacatcctgataactgaaaa

SEQ ID NO: 33667 - DNA, 20 bp, synthetic construct
  source 1..20: mol_type = other DNA
acacatcctgataactgaaa

SEQ ID NO: 33668 - DNA, 20 bp, synthetic construct
  source 1..20: mol_type = other DNA
aacacatcctgataactgaa

SEQ ID NO: 33669 - DNA, 20 bp, synthetic construct
  source 1..20: mol_type = other DNA
taacacatcctgataactga

SEQ ID NO: 33670 - DNA, 20 bp, synthetic construct
  source 1..20: mol_type = other DNA
ctaacacatcctgataactg

SEQ ID NO: 33671 - DNA, 20 bp, synthetic construct
  source 1..20: mol_type = other DNA
tctaacacatcctgataact

SEQ ID NO: 33672 - DNA, 20 bp, synthetic construct
  source 1..20: mol_type = other DNA
atctaacacatcctgataac

SEQ ID NO: 33673 - DNA, 20 bp, synthetic construct
  source 1..20: mol_type = other DNA
aatctaacacatcctgataa

SEQ ID NO: 33674 - DNA, 20 bp, synthetic construct
  source 1..20: mol_type = other DNA
caatctaacacatcctgata

SEQ ID NO: 33675 - DNA, 20 bp, synthetic construct
  source 1..20: mol_type = other DNA
acaatctaacacatcctgat

SEQ ID NO: 33676 - DNA, 20 bp, synthetic construct
  source 1..20: mol_type = other DNA
aacaatctaacacatcctga

SEQ ID NO: 33677 - DNA, 20 bp, synthetic construct
  source 1..20: mol_type = other DNA
aaacaatctaacacatcctg

SEQ ID NO: 33678 - DNA, 20 bp, synthetic construct
  source 1..20: mol_type = other DNA
caaacaatctaacacatcct

SEQ ID NO: 33679 - DNA, 20 bp, synthetic construct
  source 1..20: mol_type = other DNA
acaaacaatctaacacatcc

SEQ ID NO: 33680 - DNA, 20 bp, synthetic construct
  source 1..20: mol_type = other DNA
cacaaacaatctaacacatc

SEQ ID NO: 33681 - DNA, 20 bp, synthetic construct
  source 1..20: mol_type = other DNA
acacaaacaatctaacacat

SEQ ID NO: 33682 - DNA, 20 bp, synthetic construct
  source 1..20: mol_type = other DNA
tacacaaacaatctaacaca

SEQ ID NO: 33683 - DNA, 20 bp, synthetic construct
  source 1..20: mol_type = other DNA
atacacaaacaatctaacac

SEQ ID NO: 33684 - DNA, 20 bp, synthetic construct
  source 1..20: mol_type = other DNA
tatacacaaacaatctaaca

SEQ ID NO: 33685 - DNA, 20 bp, synthetic construct
  source 1..20: mol_type = other DNA
atatacacaaacaatctaac

SEQ ID NO: 33686 - DNA, 20 bp, synthetic construct
  source 1..20: mol_type = other DNA
aatatacacaaacaatctaa

SEQ ID NO: 33687 - DNA, 20 bp, synthetic construct
  source 1..20: mol_type = other DNA
caatatacacaaacaatcta

SEQ ID NO: 33688 - DNA, 20 bp, synthetic construct
  source 1..20: mol_type = other DNA
acaatatacacaaacaatct

SEQ ID NO: 33689 - DNA, 20 bp, synthetic construct
  source 1..20: mol_type = other DNA
aacaatatacacaaacaatc

SEQ ID NO: 33690 - DNA, 20 bp, synthetic construct
  source 1..20: mol_type = other DNA
aaacaatatacacaaacaat

SEQ ID NO: 33691 - DNA, 20 bp, synthetic construct
  source 1..20: mol_type = other DNA
aaaacaatatacacaaacaa

SEQ ID NO: 33692 - DNA, 20 bp, synthetic construct
  source 1..20: mol_type = other DNA
caaaacaatatacacaaaca

SEQ ID NO: 33693 - DNA, 20 bp, synthetic construct
  source 1..20: mol_type = other DNA
gcaaaacaatatacacaaac

SEQ ID NO: 33694 - DNA, 20 bp, synthetic construct
  source 1..20: mol_type = other DNA
agcaaaacaatatacacaaa

SEQ ID NO: 33695 - DNA, 20 bp, synthetic construct
  source 1..20: mol_type = other DNA
aagcaaaacaatatacacaa

SEQ ID NO: 33696 - DNA, 20 bp, synthetic construct
  source 1..20: mol_type = other DNA
caagcaaaacaatatacaca

SEQ ID NO: 33697 - DNA, 20 bp, synthetic construct
  source 1..20: mol_type = other DNA
acaagcaaaacaatatacac

SEQ ID NO: 33698 - DNA, 20 bp, synthetic construct
  source 1..20: mol_type = other DNA
aacaagcaaaacaatataca

SEQ ID NO: 33699 - DNA, 20 bp, synthetic construct
  source 1..20: mol_type = other DNA
taacaagcaaaacaatatac

SEQ ID NO: 33700 - DNA, 20 bp, synthetic construct
  source 1..20: mol_type = other DNA
ttaacaagcaaaacaatata

SEQ ID NO: 33701 - DNA, 20 bp, synthetic construct
  source 1..20: mol_type = other DNA
attaacaagcaaaacaatat

SEQ ID NO: 33702 - DNA, 20 bp, synthetic construct
  source 1..20: mol_type = other DNA
aattaacaagcaaaacaata

SEQ ID NO: 33703 - DNA, 20 bp, synthetic construct
  source 1..20: mol_type = other DNA
taattaacaagcaaaacaat

SEQ ID NO: 33704 - DNA, 20 bp, synthetic construct
  source 1..20: mol_type = other DNA
ttaattaacaagcaaaacaa

SEQ ID NO: 33705 - DNA, 20 bp, synthetic construct
  source 1..20: mol_type = other DNA
cttaattaacaagcaaaaca

SEQ ID NO: 33706 - DNA, 20 bp, synthetic construct
  source 1..20: mol_type = other DNA
acttaattaacaagcaaaac

SEQ ID NO: 33707 - DNA, 20 bp, synthetic construct
  source 1..20: mol_type = other DNA
tacttaattaacaagcaaaa

SEQ ID NO: 33708 - DNA, 20 bp, synthetic construct
  source 1..20: mol_type = other DNA
ttacttaattaacaagcaaa

SEQ ID NO: 33709 - DNA, 20 bp, synthetic construct
  source 1..20: mol_type = other DNA
gttacttaattaacaagcaa

SEQ ID NO: 33710 - DNA, 20 bp, synthetic construct
  source 1..20: mol_type = other DNA
tgttacttaattaacaagca

SEQ ID NO: 33711 - DNA, 20 bp, synthetic construct
  source 1..20: mol_type = other DNA
gtgttacttaattaacaagc

SEQ ID NO: 33712 - DNA, 20 bp, synthetic construct
  source 1..20: mol_type = other DNA
tgtgttacttaattaacaag

SEQ ID NO: 33713 - DNA, 20 bp, synthetic construct
  source 1..20: mol_type = other DNA
ctgtgttacttaattaacaa

SEQ ID NO: 33714 - DNA, 20 bp, synthetic construct
  source 1..20: mol_type = other DNA
actgtgttacttaattaaca

SEQ ID NO: 33715 - DNA, 20 bp, synthetic construct
  source 1..20: mol_type = other DNA
cactgtgttacttaattaac

SEQ ID NO: 33716 - DNA, 20 bp, synthetic construct
  source 1..20: mol_type = other DNA
tcactgtgttacttaattaa

SEQ ID NO: 33717 - DNA, 20 bp, synthetic construct
  source 1..20: mol_type = other DNA
ttcactgtgttacttaatta

SEQ ID NO: 33718 - DNA, 20 bp, synthetic construct
  source 1..20: mol_type = other DNA
attcactgtgttacttaatt

SEQ ID NO: 33719 - DNA, 20 bp, synthetic construct
  source 1..20: mol_type = other DNA
tattcactgtgttacttaat

SEQ ID NO: 33720 - DNA, 20 bp, synthetic construct
  source 1..20: mol_type = other DNA
ttattcactgtgttacttaa

SEQ ID NO: 33721 - DNA, 20 bp, synthetic construct
  source 1..20: mol_type = other DNA
cttattcactgtgttactta

SEQ ID NO: 33722 - DNA, 20 bp, synthetic construct
  source 1..20: mol_type = other DNA
tcttattcactgtgttactt

SEQ ID NO: 33723 - DNA, 20 bp, synthetic construct
  source 1..20: mol_type = other DNA
gtcttattcactgtgttact

SEQ ID NO: 33724 - DNA, 20 bp, synthetic construct
  source 1..20: mol_type = other DNA
tgtcttattcactgtgttac

SEQ ID NO: 33725 - DNA, 20 bp, synthetic construct
  source 1..20: mol_type = other DNA
ctgtcttattcactgtgtta

SEQ ID NO: 33726 - DNA, 20 bp, synthetic construct
  source 1..20: mol_type = other DNA
tctgtcttattcactgtgtt

SEQ ID NO: 33727 - DNA, 20 bp, synthetic construct
  source 1..20: mol_type = other DNA
gtctgtcttattcactgtgt

SEQ ID NO: 33728 - DNA, 20 bp, synthetic construct
  source 1..20: mol_type = other DNA
tgtctgtcttattcactgtg

SEQ ID NO: 33729 - DNA, 20 bp, synthetic construct
  source 1..20: mol_type = other DNA
ttgtctgtcttattcactgt

SEQ ID NO: 33730 - DNA, 20 bp, synthetic construct
  source 1..20: mol_type = other DNA
tttgtctgtcttattcactg

SEQ ID NO: 33731 - DNA, 20 bp, synthetic construct
  source 1..20: mol_type = other DNA
gtttgtctgtcttattcact

SEQ ID NO: 33732 - DNA, 20 bp, synthetic construct
  source 1..20: mol_type = other DNA
tgtttgtctgtcttattcac

SEQ ID NO: 33733 - DNA, 20 bp, synthetic construct
  source 1..20: mol_type = other DNA
atgtttgtctgtcttattca

SEQ ID NO: 33734 - DNA, 20 bp, synthetic construct
  source 1..20: mol_type = other DNA
tatgtttgtctgtcttattc

SEQ ID NO: 33735 - DNA, 20 bp, synthetic construct
  source 1..20: mol_type = other DNA
gtatgtttgtctgtcttatt

SEQ ID NO: 33736 - DNA, 20 bp, synthetic construct
  source 1..20: mol_type = other DNA
cgtatgtttgtctgtcttat

SEQ ID NO: 33737 - DNA, 20 bp, synthetic construct
  source 1..20: mol_type = other DNA
tcgtatgtttgtctgtctta

SEQ ID NO: 33738 - DNA, 20 bp, synthetic construct
  source 1..20: mol_type = other DNA
ttcgtatgtttgtctgtctt

SEQ ID NO: 33739 - DNA, 20 bp, synthetic construct
  source 1..20: mol_type = other DNA
tttcgtatgtttgtctgtct

SEQ ID NO: 33740 - DNA, 20 bp, synthetic construct
  source 1..20: mol_type = other DNA
ttttcgtatgtttgtctgtc

SEQ ID NO: 33741 - DNA, 20 bp, synthetic construct
  source 1..20: mol_type = other DNA
attttcgtatgtttgtctgt

SEQ ID NO: 33742 - DNA, 20 bp, synthetic construct
  source 1..20: mol_type = other DNA
cattttcgtatgtttgtctg

SEQ ID NO: 33743 - DNA, 20 bp, synthetic construct
  source 1..20: mol_type = other DNA
acattttcgtatgtttgtct

SEQ ID NO: 33744 - DNA, 20 bp, synthetic construct
  source 1..20: mol_type = other DNA
tacattttcgtatgtttgtc

SEQ ID NO: 33745 - DNA, 20 bp, synthetic construct
  source 1..20: mol_type = other DNA
gtacattttcgtatgtttgt

SEQ ID NO: 33746 - DNA, 20 bp, synthetic construct
  source 1..20: mol_type = other DNA
tgtacattttcgtatgtttg

SEQ ID NO: 33747 - DNA, 20 bp, synthetic construct
  source 1..20: mol_type = other DNA
atgtacattttcgtatgttt

SEQ ID NO: 33748 - DNA, 20 bp, synthetic construct
  source 1..20: mol_type = other DNA
aatgtacattttcgtatgtt

SEQ ID NO: 33749 - DNA, 20 bp, synthetic construct
  source 1..20: mol_type = other DNA
aaatgtacattttcgtatgt

SEQ ID NO: 33750 - DNA, 20 bp, synthetic construct
  source 1..20: mol_type = other DNA
taaatgtacattttcgtatg

SEQ ID NO: 33751 - DNA, 20 bp, synthetic construct
  source 1..20: mol_type = other DNA
ataaatgtacattttcgtat

SEQ ID NO: 33752 - DNA, 20 bp, synthetic construct
  source 1..20: mol_type = other DNA
aataaatgtacattttcgta

SEQ ID NO: 33753 - DNA, 20 bp, synthetic construct
  source 1..20: mol_type = other DNA
aaataaatgtacattttcgt

SEQ ID NO: 33754 - DNA, 20 bp, synthetic construct
  source 1..20: mol_type = other DNA
aaaataaatgtacattttcg

SEQ ID NO: 33755 - DNA, 20 bp, synthetic construct
  source 1..20: mol_type = other DNA
taaaataaatgtacattttc

SEQ ID NO: 33756 - DNA, 20 bp, synthetic construct
  source 1..20: mol_type = other DNA
ataaaataaatgtacatttt

SEQ ID NO: 33757 - DNA, 20 bp, synthetic construct
  source 1..20: mol_type = other DNA
aataaaataaatgtacattt

SEQ ID NO: 33758 - DNA, 20 bp, synthetic construct
  source 1..20: mol_type = other DNA
aaataaaataaatgtacatt

SEQ ID NO: 33759 - DNA, 20 bp, synthetic construct
  source 1..20: mol_type = other DNA
aaaataaaataaatgtacat

SEQ ID NO: 33760 - DNA, 20 bp, synthetic construct
  source 1..20: mol_type = other DNA
aaaaataaaataaatgtaca

SEQ ID NO: 33761 - DNA, 20 bp, synthetic construct
  source 1..20: mol_type = other DNA
aaaaaataaaataaatgtac

SEQ ID NO: 33762 - DNA, 20 bp, synthetic construct
  source 1..20: mol_type = other DNA
aaaaaaataaaataaatgta

SEQ ID NO: 33763 - DNA, 20 bp, synthetic construct
  source 1..20: mol_type = other DNA
caaaaaaataaaataaatgt

SEQ ID NO: 33764 - DNA, 20 bp, synthetic construct
  source 1..20: mol_type = other DNA
tcaaaaaaataaaataaatg

SEQ ID NO: 33765 - DNA, 20 bp, synthetic construct
  source 1..20: mol_type = other DNA
ctcaaaaaaataaaataaat

SEQ ID NO: 33766 - DNA, 20 bp, synthetic construct
  source 1..20: mol_type = other DNA
tctcaaaaaaataaaataaa

SEQ ID NO: 33767 - DNA, 20 bp, synthetic construct
  source 1..20: mol_type = other DNA
gtctcaaaaaaataaaataa

SEQ ID NO: 33768 - DNA, 20 bp, synthetic construct
  source 1..20: mol_type = other DNA
tgtctcaaaaaaataaaata

SEQ ID NO: 33769 - DNA, 20 bp, synthetic construct
  source 1..20: mol_type = other DNA
ctgtctcaaaaaaataaaat

SEQ ID NO: 33770 - DNA, 20 bp, synthetic construct
  source 1..20: mol_type = other DNA
actgtctcaaaaaaataaaa

SEQ ID NO: 33771 - DNA, 20 bp, synthetic construct
  source 1..20: mol_type = other DNA
gactgtctcaaaaaaataaa

SEQ ID NO: 33772 - DNA, 20 bp, synthetic construct
  source 1..20: mol_type = other DNA
agactgtctcaaaaaaataa

SEQ ID NO: 33773 - DNA, 20 bp, synthetic construct
  source 1..20: mol_type = other DNA
cagactgtctcaaaaaaata

SEQ ID NO: 33774 - DNA, 20 bp, synthetic construct
  source 1..20: mol_type = other DNA
acagactgtctcaaaaaaat

SEQ ID NO: 33775 - DNA, 20 bp, synthetic construct
  source 1..20: mol_type = other DNA
aacagactgtctcaaaaaaa

SEQ ID NO: 33776 - DNA, 20 bp, synthetic construct
  source 1..20: mol_type = other DNA
caacagactgtctcaaaaaa

SEQ ID NO: 33777 - DNA, 20 bp, synthetic construct
  source 1..20: mol_type = other DNA
gcaacagactgtctcaaaaa

SEQ ID NO: 33778 - DNA, 20 bp, synthetic construct
  source 1..20: mol_type = other DNA
ggcaacagactgtctcaaaa

SEQ ID NO: 33779 - DNA, 20 bp, synthetic construct
  source 1..20: mol_type = other DNA
gggcaacagactgtctcaaa

SEQ ID NO: 33780 - DNA, 20 bp, synthetic construct
  source 1..20: mol_type = other DNA
tgggcaacagactgtctcaa

SEQ ID NO: 33781 - DNA, 20 bp, synthetic construct
  source 1..20: mol_type = other DNA
ctgggcaacagactgtctca

SEQ ID NO: 33782 - DNA, 20 bp, synthetic construct
  source 1..20: mol_type = other DNA
cctgggcaacagactgtctc

SEQ ID NO: 33783 - DNA, 20 bp, synthetic construct
  source 1..20: mol_type = other DNA
gcctgggcaacagactgtct

SEQ ID NO: 33784 - DNA, 20 bp, synthetic construct
  source 1..20: mol_type = other DNA
agcctgggcaacagactgtc

SEQ ID NO: 33785 - DNA, 20 bp, synthetic construct
  source 1..20: mol_type = other DNA
cagcctgggcaacagactgt

SEQ ID NO: 33786 - DNA, 20 bp, synthetic construct
  source 1..20: mol_type = other DNA
ccagcctgggcaacagactg

SEQ ID NO: 33787 - DNA, 20 bp, synthetic construct
  source 1..20: mol_type = other DNA
tccagcctgggcaacagact

SEQ ID NO: 33788 - DNA, 20 bp, synthetic construct
  source 1..20: mol_type = other DNA
ctccagcctgggcaacagac

SEQ ID NO: 33789 - DNA, 20 bp, synthetic construct
  source 1..20: mol_type = other DNA
actccagcctgggcaacaga

SEQ ID NO: 33790 - DNA, 20 bp, synthetic construct
  source 1..20: mol_type = other DNA
cactccagcctgggcaacag

SEQ ID NO: 33791 - DNA, 20 bp, synthetic construct
  source 1..20: mol_type = other DNA
gcactccagcctgggcaaca

SEQ ID NO: 33792 - DNA, 20 bp, synthetic construct
  source 1..20: mol_type = other DNA
tgcactccagcctgggcaac

SEQ ID NO: 33793 - DNA, 20 bp, synthetic construct
  source 1..20: mol_type = other DNA
ctgcactccagcctgggcaa

SEQ ID NO: 33794 - DNA, 20 bp, synthetic construct
  source 1..20: mol_type = other DNA
actgcactccagcctgggca

SEQ ID NO: 33795 - DNA, 20 bp, synthetic construct
  source 1..20: mol_type = other DNA
cactgcactccagcctgggc

SEQ ID NO: 33796 - DNA, 20 bp, synthetic construct
  source 1..20: mol_type = other DNA
ccactgcactccagcctggg

SEQ ID NO: 33797 - DNA, 20 bp, synthetic construct
  source 1..20: mol_type = other DNA
gccactgcactccagcctgg

SEQ ID NO: 33798 - DNA, 20 bp, synthetic construct
  source 1..20: mol_type = other DNA
ggccactgcactccagcctg

SEQ ID NO: 33799 - DNA, 20 bp, synthetic construct
  source 1..20: mol_type = other DNA
gggccactgcactccagcct

SEQ ID NO: 33800 - DNA, 20 bp, synthetic construct
  source 1..20: mol_type = other DNA
tgggccactgcactccagcc

SEQ ID NO: 33801 - DNA, 20 bp, synthetic construct
  source 1..20: mol_type = other DNA
ttgggccactgcactccagc

SEQ ID NO: 33802 - DNA, 20 bp, synthetic construct
  source 1..20: mol_type = other DNA
attgggccactgcactccag

SEQ ID NO: 33803 - DNA, 20 bp, synthetic construct
  source 1..20: mol_type = other DNA
gattgggccactgcactcca

SEQ ID NO: 33804 - DNA, 20 bp, synthetic construct
  source 1..20: mol_type = other DNA
agattgggccactgcactcc

SEQ ID NO: 33805 - DNA, 20 bp, synthetic construct
  source 1..20: mol_type = other DNA
gagattgggccactgcactc

SEQ ID NO: 33806 - DNA, 20 bp, synthetic construct
  source 1..20: mol_type = other DNA
cgagattgggccactgcact

SEQ ID NO: 33807 - DNA, 20 bp, synthetic construct
  source 1..20: mol_type = other DNA
ccgagattgggccactgcac

SEQ ID NO: 33808 - DNA, 20 bp, synthetic construct
  source 1..20: mol_type = other DNA
gccgagattgggccactgca

SEQ ID NO: 33809 - DNA, 20 bp, synthetic construct
  source 1..20: mol_type = other DNA
ggccgagattgggccactgc

SEQ ID NO: 33810 - DNA, 20 bp, synthetic construct
  source 1..20: mol_type = other DNA
gggccgagattgggccactg

SEQ ID NO: 33811 - DNA, 20 bp, synthetic construct
  source 1..20: mol_type = other DNA
tgggccgagattgggccact

SEQ ID NO: 33812 - DNA, 20 bp, synthetic construct
  source 1..20: mol_type = other DNA
gtgggccgagattgggccac

SEQ ID NO: 33813 - DNA, 20 bp, synthetic construct
  source 1..20: mol_type = other DNA
agtgggccgagattgggcca

SEQ ID NO: 33814 - DNA, 20 bp, synthetic construct
  source 1..20: mol_type = other DNA
cagtgggccgagattgggcc

SEQ ID NO: 33815 - DNA, 20 bp, synthetic construct
  source 1..20: mol_type = other DNA
gcagtgggccgagattgggc

SEQ ID NO: 33816 - DNA, 20 bp, synthetic construct
  source 1..20: mol_type = other DNA
tgcagtgggccgagattggg

SEQ ID NO: 33817 - DNA, 20 bp, synthetic construct
  source 1..20: mol_type = other DNA
ttgcagtgggccgagattgg

SEQ ID NO: 33818 - DNA, 20 bp, synthetic construct
  source 1..20: mol_type = other DNA
gttgcagtgggccgagattg

SEQ ID NO: 33819 - DNA, 20 bp, synthetic construct
  source 1..20: mol_type = other DNA
ggttgcagtgggccgagatt

SEQ ID NO: 33820 - DNA, 20 bp, synthetic construct
  source 1..20: mol_type = other DNA
aggttgcagtgggccgagat

SEQ ID NO: 33821 - DNA, 20 bp, synthetic construct
  source 1..20: mol_type = other DNA
gaggttgcagtgggccgaga

SEQ ID NO: 33822 - DNA, 20 bp, synthetic construct
  source 1..20: mol_type = other DNA
agaggttgcagtgggccgag

SEQ ID NO: 33823 - DNA, 20 bp, synthetic construct
  source 1..20: mol_type = other DNA
cagaggttgcagtgggccga

SEQ ID NO: 33824 - DNA, 20 bp, synthetic construct
  source 1..20: mol_type = other DNA
gcagaggttgcagtgggccg

SEQ ID NO: 33825 - DNA, 20 bp, synthetic construct
  source 1..20: mol_type = other DNA
ggcagaggttgcagtgggcc

SEQ ID NO: 33826 - DNA, 20 bp, synthetic construct
  source 1..20: mol_type = other DNA
aggcagaggttgcagtgggc

SEQ ID NO: 33827 - DNA, 20 bp, synthetic construct
  source 1..20: mol_type = other DNA
gaggcagaggttgcagtggg

SEQ ID NO: 33828 - DNA, 20 bp, synthetic construct
  source 1..20: mol_type = other DNA
ggaggcagaggttgcagtgg

SEQ ID NO: 33829 - DNA, 20 bp, synthetic construct
  source 1..20: mol_type = other DNA
aggaggcagaggttgcagtg

SEQ ID NO: 33830 - DNA, 20 bp, synthetic construct
  source 1..20: mol_type = other DNA
caggaggcagaggttgcagt

SEQ ID NO: 33831 - DNA, 20 bp, synthetic construct
  source 1..20: mol_type = other DNA
tcaggaggcagaggttgcag

SEQ ID NO: 33832 - DNA, 20 bp, synthetic construct
  source 1..20: mol_type = other DNA
ctcaggaggcagaggttgca

SEQ ID NO: 33833 - DNA, 20 bp, synthetic construct
  source 1..20: mol_type = other DNA
actcaggaggcagaggttgc

SEQ ID NO: 33834 - DNA, 20 bp, synthetic construct
  source 1..20: mol_type = other DNA
aactcaggaggcagaggttg

SEQ ID NO: 33835 - DNA, 20 bp, synthetic construct
  source 1..20: mol_type = other DNA
caactcaggaggcagaggtt

SEQ ID NO: 33836 - DNA, 20 bp, synthetic construct
  source 1..20: mol_type = other DNA
tcaactcaggaggcagaggt

SEQ ID NO: 33837 - DNA, 20 bp, synthetic construct
  source 1..20: mol_type = other DNA
ttcaactcaggaggcagagg

SEQ ID NO: 33838 - DNA, 20 bp, synthetic construct
  source 1..20: mol_type = other DNA
cttcaactcaggaggcagag

SEQ ID NO: 33839 - DNA, 20 bp, synthetic construct
  source 1..20: mol_type = other DNA
gcttcaactcaggaggcaga

SEQ ID NO: 33840 - DNA, 20 bp, synthetic construct
  source 1..20: mol_type = other DNA
cgcttcaactcaggaggcag

SEQ ID NO: 33841 - DNA, 20 bp, synthetic construct
  source 1..20: mol_type = other DNA
tcgcttcaactcaggaggca

SEQ ID NO: 33842 - DNA, 20 bp, synthetic construct
  source 1..20: mol_type = other DNA
atcgcttcaactcaggaggc

SEQ ID NO: 33843 - DNA, 20 bp, synthetic construct
  source 1..20: mol_type = other DNA
aatcgcttcaactcaggagg

SEQ ID NO: 33844 - DNA, 20 bp, synthetic construct
  source 1..20: mol_type = other DNA
gaatcgcttcaactcaggag

SEQ ID NO: 33845 - DNA, 20 bp, synthetic construct
  source 1..20: mol_type = other DNA
agaatcgcttcaactcagga

SEQ ID NO: 33846 - DNA, 20 bp, synthetic construct
  source 1..20: mol_type = other DNA
gagaatcgcttcaactcagg

SEQ ID NO: 33847 - DNA, 20 bp, synthetic construct
  source 1..20: mol_type = other DNA
agagaatcgcttcaactcag

SEQ ID NO: 33848 - DNA, 20 bp, synthetic construct
  source 1..20: mol_type = other DNA
aagagaatcgcttcaactca

SEQ ID NO: 33849 - DNA, 20 bp, synthetic construct
  source 1..20: mol_type = other DNA
caagagaatcgcttcaactc

SEQ ID NO: 33850 - DNA, 20 bp, synthetic construct
  source 1..20: mol_type = other DNA
acaagagaatcgcttcaact

SEQ ID NO: 33851 - DNA, 20 bp, synthetic construct
  source 1..20: mol_type = other DNA
cacaagagaatcgcttcaac

SEQ ID NO: 33852 - DNA, 20 bp, synthetic construct
  source 1..20: mol_type = other DNA
acacaagagaatcgcttcaa

SEQ ID NO: 33853 - DNA, 20 bp, synthetic construct
  source 1..20: mol_type = other DNA
gacacaagagaatcgcttca

SEQ ID NO: 33854 - DNA, 20 bp, synthetic construct
  source 1..20: mol_type = other DNA
tgacacaagagaatcgcttc

SEQ ID NO: 33855 - DNA, 20 bp, synthetic construct
  source 1..20: mol_type = other DNA
ctgacacaagagaatcgctt

SEQ ID NO: 33856 - DNA, 20 bp, synthetic construct
  source 1..20: mol_type = other DNA
gctgacacaagagaatcgct

SEQ ID NO: 33857 - DNA, 20 bp, synthetic construct
  source 1..20: mol_type = other DNA
ggctgacacaagagaatcgc

SEQ ID NO: 33858 - DNA, 20 bp, synthetic construct
  source 1..20: mol_type = other DNA
aggctgacacaagagaatcg

SEQ ID NO: 33859 - DNA, 20 bp, synthetic construct
  source 1..20: mol_type = other DNA
gaggctgacacaagagaatc

SEQ ID NO: 33860 - DNA, 20 bp, synthetic construct
  source 1..20: mol_type = other DNA
tgaggctgacacaagagaat

SEQ ID NO: 33861 - DNA, 20 bp, synthetic construct
  source 1..20: mol_type = other DNA
atgaggctgacacaagagaa

SEQ ID NO: 33862 - DNA, 20 bp, synthetic construct
  source 1..20: mol_type = other DNA
catgaggctgacacaagaga

SEQ ID NO: 33863 - DNA, 20 bp, synthetic construct
  source 1..20: mol_type = other DNA
tcatgaggctgacacaagag

SEQ ID NO: 33864 - DNA, 20 bp, synthetic construct
  source 1..20: mol_type = other DNA
ctcatgaggctgacacaaga

SEQ ID NO: 33865 - DNA, 20 bp, synthetic construct
  source 1..20: mol_type = other DNA
actcatgaggctgacacaag

SEQ ID NO: 33866 - DNA, 20 bp, synthetic construct
  source 1..20: mol_type = other DNA
tactcatgaggctgacacaa

SEQ ID NO: 33867 - DNA, 20 bp, synthetic construct
  source 1..20: mol_type = other DNA
ctactcatgaggctgacaca

SEQ ID NO: 33868 - DNA, 20 bp, synthetic construct
  source 1..20: mol_type = other DNA
gctactcatgaggctgacac

SEQ ID NO: 33869 - DNA, 20 bp, synthetic construct
  source 1..20: mol_type = other DNA
agctactcatgaggctgaca

SEQ ID NO: 33870 - DNA, 20 bp, synthetic construct
  source 1..20: mol_type = other DNA
cagctactcatgaggctgac

SEQ ID NO: 33871 - DNA, 20 bp, synthetic construct
  source 1..20: mol_type = other DNA
ccagctactcatgaggctga

SEQ ID NO: 33872 - DNA, 20 bp, synthetic construct
  source 1..20: mol_type = other DNA
cccagctactcatgaggctg

SEQ ID NO: 33873 - DNA, 20 bp, synthetic construct
  source 1..20: mol_type = other DNA
ccccagctactcatgaggct

SEQ ID NO: 33874 - DNA, 20 bp, synthetic construct
  source 1..20: mol_type = other DNA
gccccagctactcatgaggc

SEQ ID NO: 33875 - DNA, 20 bp, synthetic construct
  source 1..20: mol_type = other DNA
ggccccagctactcatgagg

SEQ ID NO: 33876 - DNA, 20 bp, synthetic construct
  source 1..20: mol_type = other DNA
tggccccagctactcatgag

SEQ ID NO: 33877 - DNA, 20 bp, synthetic construct
  source 1..20: mol_type = other DNA
atggccccagctactcatga

SEQ ID NO: 33878 - DNA, 20 bp, synthetic construct
  source 1..20: mol_type = other DNA
catggccccagctactcatg

SEQ ID NO: 33879 - DNA, 20 bp, synthetic construct
  source 1..20: mol_type = other DNA
ccatggccccagctactcat

SEQ ID NO: 33880 - DNA, 20 bp, synthetic construct
  source 1..20: mol_type = other DNA
cccatggccccagctactca

SEQ ID NO: 33881 - DNA, 20 bp, synthetic construct
  source 1..20: mol_type = other DNA
acccatggccccagctactc

SEQ ID NO: 33882 - DNA, 20 bp, synthetic construct
  source 1..20: mol_type = other DNA
cacccatggccccagctact

SEQ ID NO: 33883 - DNA, 20 bp, synthetic construct
  source 1..20: mol_type = other DNA
gcacccatggccccagctac

SEQ ID NO: 33884 - DNA, 20 bp, synthetic construct
  source 1..20: mol_type = other DNA
tgcacccatggccccagcta

SEQ ID NO: 33885 - DNA, 20 bp, synthetic construct
  source 1..20: mol_type = other DNA
gtgcacccatggccccagct

SEQ ID NO: 33886 - DNA, 20 bp, synthetic construct
  source 1..20: mol_type = other DNA
cgtgcacccatggccccagc

SEQ ID NO: 33887 - DNA, 20 bp, synthetic construct
  source 1..20: mol_type = other DNA
gcgtgcacccatggccccag

SEQ ID NO: 33888 - DNA, 20 bp, synthetic construct
  source 1..20: mol_type = other DNA
ggcgtgcacccatggcccca

SEQ ID NO: 33889 - DNA, 20 bp, synthetic construct
  source 1..20: mol_type = other DNA
tggcgtgcacccatggcccc

SEQ ID NO: 33890 - DNA, 20 bp, synthetic construct
  source 1..20: mol_type = other DNA
gtggcgtgcacccatggccc

SEQ ID NO: 33891 - DNA, 20 bp, synthetic construct
  source 1..20: mol_type = other DNA
ggtggcgtgcacccatggcc

SEQ ID NO: 33892 - DNA, 20 bp, synthetic construct
  source 1..20: mol_type = other DNA
tggtggcgtgcacccatggc

SEQ ID NO: 33893 - DNA, 20 bp, synthetic construct
  source 1..20: mol_type = other DNA
atggtggcgtgcacccatgg

SEQ ID NO: 33894 - DNA, 20 bp, synthetic construct
  source 1..20: mol_type = other DNA
tatggtggcgtgcacccatg

SEQ ID NO: 33895 - DNA, 20 bp, synthetic construct
  source 1..20: mol_type = other DNA
gtatggtggcgtgcacccat

SEQ ID NO: 33896 - DNA, 20 bp, synthetic construct
  source 1..20: mol_type = other DNA
ggtatggtggcgtgcaccca

SEQ ID NO: 33897 - DNA, 20 bp, synthetic construct
  source 1..20: mol_type = other DNA
gggtatggtggcgtgcaccc

SEQ ID NO: 33898 - DNA, 20 bp, synthetic construct
  source 1..20: mol_type = other DNA
cgggtatggtggcgtgcacc

SEQ ID NO: 33899 - DNA, 20 bp, synthetic construct
  source 1..20: mol_type = other DNA
ccgggtatggtggcgtgcac

SEQ ID NO: 33900 - DNA, 20 bp, synthetic construct
  source 1..20: mol_type = other DNA
gccgggtatggtggcgtgca

SEQ ID NO: 33901 - DNA, 20 bp, synthetic construct
  source 1..20: mol_type = other DNA
agccgggtatggtggcgtgc

SEQ ID NO: 33902 - DNA, 20 bp, synthetic construct
  source 1..20: mol_type = other DNA
tagccgggtatggtggcgtg

SEQ ID NO: 33903 - DNA, 20 bp, synthetic construct
  source 1..20: mol_type = other DNA
ttagccgggtatggtggcgt

SEQ ID NO: 33904 - DNA, 20 bp, synthetic construct
  source 1..20: mol_type = other DNA
attagccgggtatggtggcg

SEQ ID NO: 33905 - DNA, 20 bp, synthetic construct
  source 1..20: mol_type = other DNA
aattagccgggtatggtggc

SEQ ID NO: 33906 - DNA, 20 bp, synthetic construct
  source 1..20: mol_type = other DNA
aaattagccgggtatggtgg

SEQ ID NO: 33907 - DNA, 20 bp, synthetic construct
  source 1..20: mol_type = other DNA
aaaattagccgggtatggtg

SEQ ID NO: 33908 - DNA, 20 bp, synthetic construct
  source 1..20: mol_type = other DNA
aaaaattagccgggtatggt

SEQ ID NO: 33909 - DNA, 20 bp, synthetic construct
  source 1..20: mol_type = other DNA
taaaaattagccgggtatgg

SEQ ID NO: 33910 - DNA, 20 bp, synthetic construct
  source 1..20: mol_type = other DNA
ataaaaattagccgggtatg

SEQ ID NO: 33911 - DNA, 20 bp, synthetic construct
  source 1..20: mol_type = other DNA
tataaaaattagccgggtat

SEQ ID NO: 33912 - DNA, 20 bp, synthetic construct
  source 1..20: mol_type = other DNA
atataaaaattagccgggta

SEQ ID NO: 33913 - DNA, 20 bp, synthetic construct
  source 1..20: mol_type = other DNA
aatataaaaattagccgggt

SEQ ID NO: 33914 - DNA, 20 bp, synthetic construct
  source 1..20: mol_type = other DNA
aaatataaaaattagccggg

SEQ ID NO: 33915 - DNA, 20 bp, synthetic construct
  source 1..20: mol_type = other DNA
aaaatataaaaattagccgg

SEQ ID NO: 33916 - DNA, 20 bp, synthetic construct
  source 1..20: mol_type = other DNA
aaaaatataaaaattagccg

SEQ ID NO: 33917 - DNA, 20 bp, synthetic construct
  source 1..20: mol_type = other DNA
taaaaatataaaaattagcc

SEQ ID NO: 33918 - DNA, 20 bp, synthetic construct
  source 1..20: mol_type = other DNA
ctaaaaatataaaaattagc

SEQ ID NO: 33919 - DNA, 20 bp, synthetic construct
  source 1..20: mol_type = other DNA
actaaaaatataaaaattag

SEQ ID NO: 33920 - DNA, 20 bp, synthetic construct
  source 1..20: mol_type = other DNA
tactaaaaatataaaaatta

SEQ ID NO: 33921 - DNA, 20 bp, synthetic construct
  source 1..20: mol_type = other DNA
ctactaaaaatataaaaatt

SEQ ID NO: 33922 - DNA, 20 bp, synthetic construct
  source 1..20: mol_type = other DNA
tctactaaaaatataaaaat

SEQ ID NO: 33923 - DNA, 20 bp, synthetic construct
  source 1..20: mol_type = other DNA
ctctactaaaaatataaaaa

SEQ ID NO: 33924 - DNA, 20 bp, synthetic construct
  source 1..20: mol_type = other DNA
tctctactaaaaatataaaa

SEQ ID NO: 33925 - DNA, 20 bp, synthetic construct
  source 1..20: mol_type = other DNA
atctctactaaaaatataaa

SEQ ID NO: 33926 - DNA, 20 bp, synthetic construct
  source 1..20: mol_type = other DNA
catctctactaaaaatataa

SEQ ID NO: 33927 - DNA, 20 bp, synthetic construct
  source 1..20: mol_type = other DNA
ccatctctactaaaaatata

SEQ ID NO: 33928 - DNA, 20 bp, synthetic construct
  source 1..20: mol_type = other DNA
cccatctctactaaaaatat

SEQ ID NO: 33929 - DNA, 20 bp, synthetic construct
  source 1..20: mol_type = other DNA
ccccatctctactaaaaata

SEQ ID NO: 33930 - DNA, 20 bp, synthetic construct
  source 1..20: mol_type = other DNA
accccatctctactaaaaat

SEQ ID NO: 33931 - DNA, 20 bp, synthetic construct
  source 1..20: mol_type = other DNA
aaccccatctctactaaaaa

SEQ ID NO: 33932 - DNA, 20 bp, synthetic construct
  source 1..20: mol_type = other DNA
aaaccccatctctactaaaa

SEQ ID NO: 33933 - DNA, 20 bp, synthetic construct
  source 1..20: mol_type = other DNA
gaaaccccatctctactaaa

SEQ ID NO: 33934 - DNA, 20 bp, synthetic construct
  source 1..20: mol_type = other DNA
tgaaaccccatctctactaa

SEQ ID NO: 33935 - DNA, 20 bp, synthetic construct
  source 1..20: mol_type = other DNA
gtgaaaccccatctctacta

SEQ ID NO: 33936 - DNA, 20 bp, synthetic construct
  source 1..20: mol_type = other DNA
ggtgaaaccccatctctact

SEQ ID NO: 33937 - DNA, 20 bp, synthetic construct
  source 1..20: mol_type = other DNA
tggtgaaaccccatctctac

SEQ ID NO: 33938 - DNA, 20 bp, synthetic construct
  source 1..20: mol_type = other DNA
atggtgaaaccccatctcta

SEQ ID NO: 33939 - DNA, 20 bp, synthetic construct
  source 1..20: mol_type = other DNA
tatggtgaaaccccatctct

SEQ ID NO: 33940 - DNA, 20 bp, synthetic construct
  source 1..20: mol_type = other DNA
atatggtgaaaccccatctc

SEQ ID NO: 33941 - DNA, 20 bp, synthetic construct
  source 1..20: mol_type = other DNA
aatatggtgaaaccccatct

SEQ ID NO: 33942 - DNA, 20 bp, synthetic construct
  source 1..20: mol_type = other DNA
caatatggtgaaaccccatc

SEQ ID NO: 33943 - DNA, 20 bp, synthetic construct
  source 1..20: mol_type = other DNA
ccaatatggtgaaaccccat

SEQ ID NO: 33944 - DNA, 20 bp, synthetic construct
  source 1..20: mol_type = other DNA
gccaatatggtgaaacccca

SEQ ID NO: 33945 - DNA, 20 bp, synthetic construct
  source 1..20: mol_type = other DNA
ggccaatatggtgaaacccc

SEQ ID NO: 33946 - DNA, 20 bp, synthetic construct
  source 1..20: mol_type = other DNA
tggccaatatggtgaaaccc

SEQ ID NO: 33947 - DNA, 20 bp, synthetic construct
  source 1..20: mol_type = other DNA
ctggccaatatggtgaaacc

SEQ ID NO: 33948 - DNA, 20 bp, synthetic construct
  source 1..20: mol_type = other DNA
cctggccaatatggtgaaac

SEQ ID NO: 33949 - DNA, 20 bp, synthetic construct
  source 1..20: mol_type = other DNA
gcctggccaatatggtgaaa

SEQ ID NO: 33950 - DNA, 20 bp, synthetic construct
  source 1..20: mol_type = other DNA
agcctggccaatatggtgaa

SEQ ID NO: 33951 - DNA, 20 bp, synthetic construct
  source 1..20: mol_type = other DNA
cagcctggccaatatggtga

SEQ ID NO: 33952 - DNA, 20 bp, synthetic construct
  source 1..20: mol_type = other DNA
ccagcctggccaatatggtg

SEQ ID NO: 33953 - DNA, 20 bp, synthetic construct
  source 1..20: mol_type = other DNA
accagcctggccaatatggt

SEQ ID NO: 33954 - DNA, 20 bp, synthetic construct
  source 1..20: mol_type = other DNA
gaccagcctggccaatatgg

SEQ ID NO: 33955 - DNA, 20 bp, synthetic construct
  source 1..20: mol_type = other DNA
agaccagcctggccaatatg

SEQ ID NO: 33956 - DNA, 20 bp, synthetic construct
  source 1..20: mol_type = other DNA
gagaccagcctggccaatat

SEQ ID NO: 33957 - DNA, 20 bp, synthetic construct
  source 1..20: mol_type = other DNA
cgagaccagcctggccaata

SEQ ID NO: 33958 - DNA, 20 bp, synthetic construct
  source 1..20: mol_type = other DNA
tcgagaccagcctggccaat

SEQ ID NO: 33959 - DNA, 20 bp, synthetic construct
  source 1..20: mol_type = other DNA
ttcgagaccagcctggccaa

SEQ ID NO: 33960 - DNA, 20 bp, synthetic construct
  source 1..20: mol_type = other DNA
attcgagaccagcctggcca

SEQ ID NO: 33961 - DNA, 20 bp, synthetic construct
  source 1..20: mol_type = other DNA
aattcgagaccagcctggcc

SEQ ID NO: 33962 - DNA, 20 bp, synthetic construct
  source 1..20: mol_type = other DNA
gaattcgagaccagcctggc

SEQ ID NO: 33963 - DNA, 20 bp, synthetic construct
  source 1..20: mol_type = other DNA
ggaattcgagaccagcctgg

SEQ ID NO: 33964 - DNA, 20 bp, synthetic construct
  source 1..20: mol_type = other DNA
aggaattcgagaccagcctg

SEQ ID NO: 33965 - DNA, 20 bp, synthetic construct
  source 1..20: mol_type = other DNA
caggaattcgagaccagcct

SEQ ID NO: 33966 - DNA, 20 bp, synthetic construct
  source 1..20: mol_type = other DNA
tcaggaattcgagaccagcc

SEQ ID NO: 33967 - DNA, 20 bp, synthetic construct
  source 1..20: mol_type = other DNA
gtcaggaattcgagaccagc

SEQ ID NO: 33968 - DNA, 20 bp, synthetic construct
  source 1..20: mol_type = other DNA
ggtcaggaattcgagaccag

SEQ ID NO: 33969 - DNA, 20 bp, synthetic construct
  source 1..20: mol_type = other DNA
aggtcaggaattcgagacca

SEQ ID NO: 33970 - DNA, 20 bp, synthetic construct
  source 1..20: mol_type = other DNA
gaggtcaggaattcgagacc

SEQ ID NO: 33971 - DNA, 20 bp, synthetic construct
  source 1..20: mol_type = other DNA
tgaggtcaggaattcgagac

SEQ ID NO: 33972 - DNA, 20 bp, synthetic construct
  source 1..20: mol_type = other DNA
ctgaggtcaggaattcgaga

SEQ ID NO: 33973 - DNA, 20 bp, synthetic construct
  source 1..20: mol_type = other DNA
cctgaggtcaggaattcgag

SEQ ID NO: 33974 - DNA, 20 bp, synthetic construct
  source 1..20: mol_type = other DNA
acctgaggtcaggaattcga

SEQ ID NO: 33975 - DNA, 20 bp, synthetic construct
  source 1..20: mol_type = other DNA
cacctgaggtcaggaattcg

SEQ ID NO: 33976 - DNA, 20 bp, synthetic construct
  source 1..20: mol_type = other DNA
tcacctgaggtcaggaattc

SEQ ID NO: 33977 - DNA, 20 bp, synthetic construct
  source 1..20: mol_type = other DNA
atcacctgaggtcaggaatt

SEQ ID NO: 33978 - DNA, 20 bp, synthetic construct
  source 1..20: mol_type = other DNA
gatcacctgaggtcaggaat

SEQ ID NO: 33979 - DNA, 20 bp, synthetic construct
  source 1..20: mol_type = other DNA
agatcacctgaggtcaggaa

SEQ ID NO: 33980 - DNA, 20 bp, synthetic construct
  source 1..20: mol_type = other DNA
cagatcacctgaggtcagga

SEQ ID NO: 33981 - DNA, 20 bp, synthetic construct
  source 1..20: mol_type = other DNA
gcagatcacctgaggtcagg

SEQ ID NO: 33982 - DNA, 20 bp, synthetic construct
  source 1..20: mol_type = other DNA
ggcagatcacctgaggtcag

SEQ ID NO: 33983 - DNA, 20 bp, synthetic construct
  source 1..20: mol_type = other DNA
gggcagatcacctgaggtca

SEQ ID NO: 33984 - DNA, 20 bp, synthetic construct
  source 1..20: mol_type = other DNA
cgggcagatcacctgaggtc

SEQ ID NO: 33985 - DNA, 20 bp, synthetic construct
  source 1..20: mol_type = other DNA
gcgggcagatcacctgaggt

SEQ ID NO: 33986 - DNA, 20 bp, synthetic construct
  source 1..20: mol_type = other DNA
ggcgggcagatcacctgagg

SEQ ID NO: 33987 - DNA, 20 bp, synthetic construct
  source 1..20: mol_type = other DNA
aggcgggcagatcacctgag

SEQ ID NO: 33988 - DNA, 20 bp, synthetic construct
  source 1..20: mol_type = other DNA
aaggcgggcagatcacctga

SEQ ID NO: 33989 - DNA, 20 bp, synthetic construct
  source 1..20: mol_type = other DNA
caaggcgggcagatcacctg

SEQ ID NO: 33990 - DNA, 20 bp, synthetic construct
  source 1..20: mol_type = other DNA
ccaaggcgggcagatcacct

SEQ ID NO: 33991 - DNA, 20 bp, synthetic construct
  source 1..20: mol_type = other DNA
accaaggcgggcagatcacc

SEQ ID NO: 33992 - DNA, 20 bp, synthetic construct
  source 1..20: mol_type = other DNA
gaccaaggcgggcagatcac

SEQ ID NO: 33993 - DNA, 20 bp, synthetic construct
  source 1..20: mol_type = other DNA
agaccaaggcgggcagatca

SEQ ID NO: 33994 - DNA, 20 bp, synthetic construct
  source 1..20: mol_type = other DNA
gagaccaaggcgggcagatc

SEQ ID NO: 33995 - DNA, 20 bp, synthetic construct
  source 1..20: mol_type = other DNA
ggagaccaaggcgggcagat

SEQ ID NO: 33996 - DNA, 20 bp, synthetic construct
  source 1..20: mol_type = other DNA
gggagaccaaggcgggcaga

SEQ ID NO: 33997 - DNA, 20 bp, synthetic construct
  source 1..20: mol_type = other DNA
tgggagaccaaggcgggcag

SEQ ID NO: 33998 - DNA, 20 bp, synthetic construct
  source 1..20: mol_type = other DNA
ttgggagaccaaggcgggca

SEQ ID NO: 33999 - DNA, 20 bp, synthetic construct
  source 1..20: mol_type = other DNA
tttgggagaccaaggcgggc

SEQ ID NO: 34000 - DNA, 20 bp, synthetic construct
  source 1..20: mol_type = other DNA
ctttgggagaccaaggcggg

SEQ ID NO: 34001 - DNA, 20 bp, synthetic construct
  source 1..20: mol_type = other DNA
actttgggagaccaaggcgg

SEQ ID NO: 34002 - DNA, 20 bp, synthetic construct
  source 1..20: mol_type = other DNA
cactttgggagaccaaggcg

SEQ ID NO: 34003 - DNA, 20 bp, synthetic construct
  source 1..20: mol_type = other DNA
gcactttgggagaccaaggc

SEQ ID NO: 34004 - DNA, 20 bp, synthetic construct
  source 1..20: mol_type = other DNA
agcactttgggagaccaagg

SEQ ID NO: 34005 - DNA, 20 bp, synthetic construct
  source 1..20: mol_type = other DNA
cagcactttgggagaccaag

SEQ ID NO: 34006 - DNA, 20 bp, synthetic construct
  source 1..20: mol_type = other DNA
ccagcactttgggagaccaa

SEQ ID NO: 34007 - DNA, 20 bp, synthetic construct
  source 1..20: mol_type = other DNA
cccagcactttgggagacca

SEQ ID NO: 34008 - DNA, 20 bp, synthetic construct
  source 1..20: mol_type = other DNA
tcccagcactttgggagacc

SEQ ID NO: 34009 - DNA, 20 bp, synthetic construct
  source 1..20: mol_type = other DNA
gtcccagcactttgggagac

SEQ ID NO: 34010 - DNA, 20 bp, synthetic construct
  source 1..20: mol_type = other DNA
agtcccagcactttgggaga

SEQ ID NO: 34011 - DNA, 20 bp, synthetic construct
  source 1..20: mol_type = other DNA
tagtcccagcactttgggag

SEQ ID NO: 34012 - DNA, 20 bp, synthetic construct
  source 1..20: mol_type = other DNA
gtagtcccagcactttggga

SEQ ID NO: 34013 - DNA, 20 bp, synthetic construct
  source 1..20: mol_type = other DNA
tgtagtcccagcactttggg

SEQ ID NO: 34014 - DNA, 20 bp, synthetic construct
  source 1..20: mol_type = other DNA
ctgtagtcccagcactttgg

SEQ ID NO: 34015 - DNA, 20 bp, synthetic construct
  source 1..20: mol_type = other DNA
cctgtagtcccagcactttg

SEQ ID NO: 34016 - DNA, 20 bp, synthetic construct
  source 1..20: mol_type = other DNA
gcctgtagtcccagcacttt

SEQ ID NO: 34017 - DNA, 20 bp, synthetic construct
  source 1..20: mol_type = other DNA
tgcctgtagtcccagcactt

SEQ ID NO: 34018 - DNA, 20 bp, synthetic construct
  source 1..20: mol_type = other DNA
atgcctgtagtcccagcact

SEQ ID NO: 34019 - DNA, 20 bp, synthetic construct
  source 1..20: mol_type = other DNA
catgcctgtagtcccagcac

SEQ ID NO: 34020 - DNA, 20 bp, synthetic construct
  source 1..20: mol_type = other DNA
tcatgcctgtagtcccagca

SEQ ID NO: 34021 - DNA, 20 bp, synthetic construct
  source 1..20: mol_type = other DNA
ctcatgcctgtagtcccagc

SEQ ID NO: 34022 - DNA, 20 bp, synthetic construct
  source 1..20: mol_type = other DNA
gctcatgcctgtagtcccag

SEQ ID NO: 34023 - DNA, 20 bp, synthetic construct
  source 1..20: mol_type = other DNA
ggctcatgcctgtagtccca

SEQ ID NO: 34024 - DNA, 20 bp, synthetic construct
  source 1..20: mol_type = other DNA
tggctcatgcctgtagtccc

SEQ ID NO: 34025 - DNA, 20 bp, synthetic construct
  source 1..20: mol_type = other DNA
gtggctcatgcctgtagtcc

SEQ ID NO: 34026 - DNA, 20 bp, synthetic construct
  source 1..20: mol_type = other DNA
agtggctcatgcctgtagtc

SEQ ID NO: 34027 - DNA, 20 bp, synthetic construct
  source 1..20: mol_type = other DNA
cagtggctcatgcctgtagt

SEQ ID NO: 34028 - DNA, 20 bp, synthetic construct
  source 1..20: mol_type = other DNA
acagtggctcatgcctgtag

SEQ ID NO: 34029 - DNA, 20 bp, synthetic construct
  source 1..20: mol_type = other DNA
cacagtggctcatgcctgta

SEQ ID NO: 34030 - DNA, 20 bp, synthetic construct
  source 1..20: mol_type = other DNA
gcacagtggctcatgcctgt

SEQ ID NO: 34031 - DNA, 20 bp, synthetic construct
  source 1..20: mol_type = other DNA
ggcacagtggctcatgcctg

SEQ ID NO: 34032 - DNA, 20 bp, synthetic construct
  source 1..20: mol_type = other DNA
tggcacagtggctcatgcct

SEQ ID NO: 34033 - DNA, 20 bp, synthetic construct
  source 1..20: mol_type = other DNA
ctggcacagtggctcatgcc

SEQ ID NO: 34034 - DNA, 20 bp, synthetic construct
  source 1..20: mol_type = other DNA
cctggcacagtggctcatgc

SEQ ID NO: 34035 - DNA, 20 bp, synthetic construct
  source 1..20: mol_type = other DNA
gcctggcacagtggctcatg

SEQ ID NO: 34036 - DNA, 20 bp, synthetic construct
  source 1..20: mol_type = other DNA
ggcctggcacagtggctcat

SEQ ID NO: 34037 - DNA, 20 bp, synthetic construct
  source 1..20: mol_type = other DNA
tggcctggcacagtggctca

SEQ ID NO: 34038 - DNA, 20 bp, synthetic construct
  source 1..20: mol_type = other DNA
atggcctggcacagtggctc

SEQ ID NO: 34039 - DNA, 20 bp, synthetic construct
  source 1..20: mol_type = other DNA
aatggcctggcacagtggct

SEQ ID NO: 34040 - DNA, 20 bp, synthetic construct
  source 1..20: mol_type = other DNA
aaatggcctggcacagtggc

SEQ ID NO: 34041 - DNA, 20 bp, synthetic construct
  source 1..20: mol_type = other DNA
gaaatggcctggcacagtgg

SEQ ID NO: 34042 - DNA, 20 bp, synthetic construct
  source 1..20: mol_type = other DNA
tgaaatggcctggcacagtg

SEQ ID NO: 34043 - DNA, 20 bp, synthetic construct
  source 1..20: mol_type = other DNA
atgaaatggcctggcacagt

SEQ ID NO: 34044 - DNA, 20 bp, synthetic construct
  source 1..20: mol_type = other DNA
aatgaaatggcctggcacag

SEQ ID NO: 34045 - DNA, 20 bp, synthetic construct
  source 1..20: mol_type = other DNA
aaatgaaatggcctggcaca

SEQ ID NO: 34046 - DNA, 20 bp, synthetic construct
  source 1..20: mol_type = other DNA
aaaatgaaatggcctggcac

SEQ ID NO: 34047 - DNA, 20 bp, synthetic construct
  source 1..20: mol_type = other DNA
aaaaatgaaatggcctggca

SEQ ID NO: 34048 - DNA, 20 bp, synthetic construct
  source 1..20: mol_type = other DNA
caaaaatgaaatggcctggc

SEQ ID NO: 34049 - DNA, 20 bp, synthetic construct
  source 1..20: mol_type = other DNA
ccaaaaatgaaatggcctgg

SEQ ID NO: 34050 - DNA, 20 bp, synthetic construct
  source 1..20: mol_type = other DNA
tccaaaaatgaaatggcctg

SEQ ID NO: 34051 - DNA, 20 bp, synthetic construct
  source 1..20: mol_type = other DNA
ttccaaaaatgaaatggcct

SEQ ID NO: 34052 - DNA, 20 bp, synthetic construct
  source 1..20: mol_type = other DNA
gttccaaaaatgaaatggcc

SEQ ID NO: 34053 - DNA, 20 bp, synthetic construct
  source 1..20: mol_type = other DNA
cgttccaaaaatgaaatggc

SEQ ID NO: 34054 - DNA, 20 bp, synthetic construct
  source 1..20: mol_type = other DNA
acgttccaaaaatgaaatgg

SEQ ID NO: 34055 - DNA, 20 bp, synthetic construct
  source 1..20: mol_type = other DNA
aacgttccaaaaatgaaatg

SEQ ID NO: 34056 - DNA, 20 bp, synthetic construct
  source 1..20: mol_type = other DNA
gaacgttccaaaaatgaaat

SEQ ID NO: 34057 - DNA, 20 bp, synthetic construct
  source 1..20: mol_type = other DNA
agaacgttccaaaaatgaaa

SEQ ID NO: 34058 - DNA, 20 bp, synthetic construct
  source 1..20: mol_type = other DNA
aagaacgttccaaaaatgaa

SEQ ID NO: 34059 - DNA, 20 bp, synthetic construct
  source 1..20: mol_type = other DNA
aaagaacgttccaaaaatga

SEQ ID NO: 34060 - DNA, 20 bp, synthetic construct
  source 1..20: mol_type = other DNA
aaaagaacgttccaaaaatg

SEQ ID NO: 34061 - DNA, 20 bp, synthetic construct
  source 1..20: mol_type = other DNA
aaaaagaacgttccaaaaat

SEQ ID NO: 34062 - DNA, 20 bp, synthetic construct
  source 1..20: mol_type = other DNA
aaaaaagaacgttccaaaaa

SEQ ID NO: 34063 - DNA, 20 bp, synthetic construct
  source 1..20: mol_type = other DNA
aaaaaaagaacgttccaaaa

SEQ ID NO: 34064 - DNA, 20 bp, synthetic construct
  source 1..20: mol_type = other DNA
aaaaaaaagaacgttccaaa

SEQ ID NO: 34065 - DNA, 20 bp, synthetic construct
  source 1..20: mol_type = other DNA
aaaaaaaaagaacgttccaa

SEQ ID NO: 34066 - DNA, 20 bp, synthetic construct
  source 1..20: mol_type = other DNA
aaaaaaaaaagaacgttcca

SEQ ID NO: 34067 - DNA, 20 bp, synthetic construct
  source 1..20: mol_type = other DNA
aaaaaaaaaaagaacgttcc

SEQ ID NO: 34068 - DNA, 20 bp, synthetic construct
  source 1..20: mol_type = other DNA
aaaaaaaaaaaagaacgttc

SEQ ID NO: 34069 - DNA, 20 bp, synthetic construct
  source 1..20: mol_type = other DNA
caaaaaaaaaaaagaacgtt

SEQ ID NO: 34070 - DNA, 20 bp, synthetic construct
  source 1..20: mol_type = other DNA
tcaaaaaaaaaaaagaacgt

SEQ ID NO: 34071 - DNA, 20 bp, synthetic construct
  source 1..20: mol_type = other DNA
ttcaaaaaaaaaaaagaacg

SEQ ID NO: 34072 - DNA, 20 bp, synthetic construct
  source 1..20: mol_type = other DNA
tttcaaaaaaaaaaaagaac

SEQ ID NO: 34073 - DNA, 20 bp, synthetic construct
  source 1..20: mol_type = other DNA
atttcaaaaaaaaaaaagaa

SEQ ID NO: 34074 - DNA, 20 bp, synthetic construct
  source 1..20: mol_type = other DNA
catttcaaaaaaaaaaaaga

SEQ ID NO: 34075 - DNA, 20 bp, synthetic construct
  source 1..20: mol_type = other DNA
ccatttcaaaaaaaaaaaag

SEQ ID NO: 34076 - DNA, 20 bp, synthetic construct
  source 1..20: mol_type = other DNA
cccatttcaaaaaaaaaaaa

SEQ ID NO: 34077 - DNA, 20 bp, synthetic construct
  source 1..20: mol_type = other DNA
ccccatttcaaaaaaaaaaa

SEQ ID NO: 34078 - DNA, 20 bp, synthetic construct
  source 1..20: mol_type = other DNA
accccatttcaaaaaaaaaa

SEQ ID NO: 34079 - DNA, 20 bp, synthetic construct
  source 1..20: mol_type = other DNA
gaccccatttcaaaaaaaaa

SEQ ID NO: 34080 - DNA, 20 bp, synthetic construct
  source 1..20: mol_type = other DNA
agaccccatttcaaaaaaaa

SEQ ID NO: 34081 - DNA, 20 bp, synthetic construct
  source 1..20: mol_type = other DNA
gagaccccatttcaaaaaaa

SEQ ID NO: 34082 - DNA, 20 bp, synthetic construct
  source 1..20: mol_type = other DNA
cgagaccccatttcaaaaaa

SEQ ID NO: 34083 - DNA, 20 bp, synthetic construct
  source 1..20: mol_type = other DNA
gcgagaccccatttcaaaaa

SEQ ID NO: 34084 - DNA, 20 bp, synthetic construct
  source 1..20: mol_type = other DNA
agcgagaccccatttcaaaa

SEQ ID NO: 34085 - DNA, 20 bp, synthetic construct
  source 1..20: mol_type = other DNA
gagcgagaccccatttcaaa

SEQ ID NO: 34086 - DNA, 20 bp, synthetic construct
  source 1..20: mol_type = other DNA
agagcgagaccccatttcaa

SEQ ID NO: 34087 - DNA, 20 bp, synthetic construct
  source 1..20: mol_type = other DNA
cagagcgagaccccatttca

SEQ ID NO: 34088 - DNA, 20 bp, synthetic construct
  source 1..20: mol_type = other DNA
acagagcgagaccccatttc

SEQ ID NO: 34089 - DNA, 20 bp, synthetic construct
  source 1..20: mol_type = other DNA
gacagagcgagaccccattt

SEQ ID NO: 34090 - DNA, 20 bp, synthetic construct
  source 1..20: mol_type = other DNA
agacagagcgagaccccatt

SEQ ID NO: 34091 - DNA, 20 bp, synthetic construct
  source 1..20: mol_type = other DNA
gagacagagcgagaccccat

SEQ ID NO: 34092 - DNA, 20 bp, synthetic construct
  source 1..20: mol_type = other DNA
ggagacagagcgagacccca

SEQ ID NO: 34093 - DNA, 20 bp, synthetic construct
  source 1..20: mol_type = other DNA
gggagacagagcgagacccc

SEQ ID NO: 34094 - DNA, 20 bp, synthetic construct
  source 1..20: mol_type = other DNA
tgggagacagagcgagaccc

SEQ ID NO: 34095 - DNA, 20 bp, synthetic construct
  source 1..20: mol_type = other DNA
ctgggagacagagcgagacc

SEQ ID NO: 34096 - DNA, 20 bp, synthetic construct
  source 1..20: mol_type = other DNA
cctgggagacagagcgagac

SEQ ID NO: 34097 - DNA, 20 bp, synthetic construct
  source 1..20: mol_type = other DNA
gcctgggagacagagcgaga

SEQ ID NO: 34098 - DNA, 20 bp, synthetic construct
  source 1..20: mol_type = other DNA
agcctgggagacagagcgag

SEQ ID NO: 34099 - DNA, 20 bp, synthetic construct
  source 1..20: mol_type = other DNA
cagcctgggagacagagcga

SEQ ID NO: 34100 - DNA, 20 bp, synthetic construct
  source 1..20: mol_type = other DNA
ccagcctgggagacagagcg

SEQ ID NO: 34101 - DNA, 20 bp, synthetic construct
  source 1..20: mol_type = other DNA
tccagcctgggagacagagc

SEQ ID NO: 34102 - DNA, 20 bp, synthetic construct
  source 1..20: mol_type = other DNA
ctccagcctgggagacagag

SEQ ID NO: 34103 - DNA, 20 bp, synthetic construct
  source 1..20: mol_type = other DNA
actccagcctgggagacaga

SEQ ID NO: 34104 - DNA, 20 bp, synthetic construct
  source 1..20: mol_type = other DNA
cactccagcctgggagacag

SEQ ID NO: 34105 - DNA, 20 bp, synthetic construct
  source 1..20: mol_type = other DNA
gcactccagcctgggagaca

SEQ ID NO: 34106 - DNA, 20 bp, synthetic construct
  source 1..20: mol_type = other DNA
tgcactccagcctgggagac

SEQ ID NO: 34107 - DNA, 20 bp, synthetic construct
  source 1..20: mol_type = other DNA
ctgcactccagcctgggaga

SEQ ID NO: 34108 - DNA, 20 bp, synthetic construct
  source 1..20: mol_type = other DNA
actgcactccagcctgggag

SEQ ID NO: 34109 - DNA, 20 bp, synthetic construct
  source 1..20: mol_type = other DNA
cactgcactccagcctggga

SEQ ID NO: 34110 - DNA, 20 bp, synthetic construct
  source 1..20: mol_type = other DNA
ccactgcactccagcctggg

SEQ ID NO: 34111 - DNA, 20 bp, synthetic construct
  source 1..20: mol_type = other DNA
gccactgcactccagcctgg

SEQ ID NO: 34112 - DNA, 20 bp, synthetic construct
  source 1..20: mol_type = other DNA
agccactgcactccagcctg

SEQ ID NO: 34113 - DNA, 20 bp, synthetic construct
  source 1..20: mol_type = other DNA
gagccactgcactccagcct

SEQ ID NO: 34114 - DNA, 20 bp, synthetic construct
  source 1..20: mol_type = other DNA
tgagccactgcactccagcc

SEQ ID NO: 34115 - DNA, 20 bp, synthetic construct
  source 1..20: mol_type = other DNA
ttgagccactgcactccagc

SEQ ID NO: 34116 - DNA, 20 bp, synthetic construct
  source 1..20: mol_type = other DNA
attgagccactgcactccag

SEQ ID NO: 34117 - DNA, 20 bp, synthetic construct
  source 1..20: mol_type = other DNA
gattgagccactgcactcca

SEQ ID NO: 34118 - DNA, 20 bp, synthetic construct
  source 1..20: mol_type = other DNA
agattgagccactgcactcc

SEQ ID NO: 34119 - DNA, 20 bp, synthetic construct
  source 1..20: mol_type = other DNA
gagattgagccactgcactc

SEQ ID NO: 34120 - DNA, 20 bp, synthetic construct
  source 1..20: mol_type = other DNA
tgagattgagccactgcact

SEQ ID NO: 34121 - DNA, 20 bp, synthetic construct
  source 1..20: mol_type = other DNA
ctgagattgagccactgcac

SEQ ID NO: 34122 - DNA, 20 bp, synthetic construct
  source 1..20: mol_type = other DNA
gctgagattgagccactgca

SEQ ID NO: 34123 - DNA, 20 bp, synthetic construct
  source 1..20: mol_type = other DNA
agctgagattgagccactgc

SEQ ID NO: 34124 - DNA, 20 bp, synthetic construct
  source 1..20: mol_type = other DNA
aagctgagattgagccactg

SEQ ID NO: 34125 - DNA, 20 bp, synthetic construct
  source 1..20: mol_type = other DNA
taagctgagattgagccact

SEQ ID NO: 34126 - DNA, 20 bp, synthetic construct
  source 1..20: mol_type = other DNA
gtaagctgagattgagccac

SEQ ID NO: 34127 - DNA, 20 bp, synthetic construct
  source 1..20: mol_type = other DNA
agtaagctgagattgagcca

SEQ ID NO: 34128 - DNA, 20 bp, synthetic construct
  source 1..20: mol_type = other DNA
cagtaagctgagattgagcc

SEQ ID NO: 34129 - DNA, 20 bp, synthetic construct
  source 1..20: mol_type = other DNA
gcagtaagctgagattgagc

SEQ ID NO: 34130 - DNA, 20 bp, synthetic construct
  source 1..20: mol_type = other DNA
tgcagtaagctgagattgag

SEQ ID NO: 34131 - DNA, 20 bp, synthetic construct
  source 1..20: mol_type = other DNA
ttgcagtaagctgagattga

SEQ ID NO: 34132 - DNA, 20 bp, synthetic construct
  source 1..20: mol_type = other DNA
gttgcagtaagctgagattg

SEQ ID NO: 34133 - DNA, 20 bp, synthetic construct
  source 1..20: mol_type = other DNA
ggttgcagtaagctgagatt

SEQ ID NO: 34134 - DNA, 20 bp, synthetic construct
  source 1..20: mol_type = other DNA
aggttgcagtaagctgagat

SEQ ID NO: 34135 - DNA, 20 bp, synthetic construct
  source 1..20: mol_type = other DNA
gaggttgcagtaagctgaga

SEQ ID NO: 34136 - DNA, 20 bp, synthetic construct
  source 1..20: mol_type = other DNA
agaggttgcagtaagctgag

SEQ ID NO: 34137 - DNA, 20 bp, synthetic construct
  source 1..20: mol_type = other DNA
cagaggttgcagtaagctga

SEQ ID NO: 34138 - DNA, 20 bp, synthetic construct
  source 1..20: mol_type = other DNA
gcagaggttgcagtaagctg

SEQ ID NO: 34139 - DNA, 20 bp, synthetic construct
  source 1..20: mol_type = other DNA
ggcagaggttgcagtaagct

SEQ ID NO: 34140 - DNA, 20 bp, synthetic construct
  source 1..20: mol_type = other DNA
aggcagaggttgcagtaagc

SEQ ID NO: 34141 - DNA, 20 bp, synthetic construct
  source 1..20: mol_type = other DNA
aaggcagaggttgcagtaag

SEQ ID NO: 34142 - DNA, 20 bp, synthetic construct
  source 1..20: mol_type = other DNA
gaaggcagaggttgcagtaa

SEQ ID NO: 34143 - DNA, 20 bp, synthetic construct
  source 1..20: mol_type = other DNA
ggaaggcagaggttgcagta

SEQ ID NO: 34144 - DNA, 20 bp, synthetic construct
  source 1..20: mol_type = other DNA
cggaaggcagaggttgcagt

SEQ ID NO: 34145 - DNA, 20 bp, synthetic construct
  source 1..20: mol_type = other DNA
ccggaaggcagaggttgcag

SEQ ID NO: 34146 - DNA, 20 bp, synthetic construct
  source 1..20: mol_type = other DNA
cccggaaggcagaggttgca

SEQ ID NO: 34147 - DNA, 20 bp, synthetic construct
  source 1..20: mol_type = other DNA
acccggaaggcagaggttgc

SEQ ID NO: 34148 - DNA, 20 bp, synthetic construct
  source 1..20: mol_type = other DNA
aacccggaaggcagaggttg

SEQ ID NO: 34149 - DNA, 20 bp, synthetic construct
  source 1..20: mol_type = other DNA
gaacccggaaggcagaggtt

SEQ ID NO: 34150 - DNA, 20 bp, synthetic construct
  source 1..20: mol_type = other DNA
tgaacccggaaggcagaggt

SEQ ID NO: 34151 - DNA, 20 bp, synthetic construct
  source 1..20: mol_type = other DNA
ttgaacccggaaggcagagg

SEQ ID NO: 34152 - DNA, 20 bp, synthetic construct
  source 1..20: mol_type = other DNA
cttgaacccggaaggcagag

SEQ ID NO: 34153 - DNA, 20 bp, synthetic construct
  source 1..20: mol_type = other DNA
acttgaacccggaaggcaga

SEQ ID NO: 34154 - DNA, 20 bp, synthetic construct
  source 1..20: mol_type = other DNA
cacttgaacccggaaggcag

SEQ ID NO: 34155 - DNA, 20 bp, synthetic construct
  source 1..20: mol_type = other DNA
tcacttgaacccggaaggca

SEQ ID NO: 34156 - DNA, 20 bp, synthetic construct
  source 1..20: mol_type = other DNA
atcacttgaacccggaaggc

SEQ ID NO: 34157 - DNA, 20 bp, synthetic construct
  source 1..20: mol_type = other DNA
aatcacttgaacccggaagg

SEQ ID NO: 34158 - DNA, 20 bp, synthetic construct
  source 1..20: mol_type = other DNA
gaatcacttgaacccggaag

SEQ ID NO: 34159 - DNA, 20 bp, synthetic construct
  source 1..20: mol_type = other DNA
agaatcacttgaacccggaa

SEQ ID NO: 34160 - DNA, 20 bp, synthetic construct
  source 1..20: mol_type = other DNA
gagaatcacttgaacccgga

SEQ ID NO: 34161 - DNA, 20 bp, synthetic construct
  source 1..20: mol_type = other DNA
ggagaatcacttgaacccgg

SEQ ID NO: 34162 - DNA, 20 bp, synthetic construct
  source 1..20: mol_type = other DNA
aggagaatcacttgaacccg

SEQ ID NO: 34163 - DNA, 20 bp, synthetic construct
  source 1..20: mol_type = other DNA
caggagaatcacttgaaccc

SEQ ID NO: 34164 - DNA, 20 bp, synthetic construct
  source 1..20: mol_type = other DNA
gcaggagaatcacttgaacc

SEQ ID NO: 34165 - DNA, 20 bp, synthetic construct
  source 1..20: mol_type = other DNA
ggcaggagaatcacttgaac

SEQ ID NO: 34166 - DNA, 20 bp, synthetic construct
  source 1..20: mol_type = other DNA
aggcaggagaatcacttgaa

SEQ ID NO: 34167 - DNA, 20 bp, synthetic construct
  source 1..20: mol_type = other DNA
gaggcaggagaatcacttga

SEQ ID NO: 34168 - DNA, 20 bp, synthetic construct
  source 1..20: mol_type = other DNA
tgaggcaggagaatcacttg

SEQ ID NO: 34169 - DNA, 20 bp, synthetic construct
  source 1..20: mol_type = other DNA
ctgaggcaggagaatcactt

SEQ ID NO: 34170 - DNA, 20 bp, synthetic construct
  source 1..20: mol_type = other DNA
gctgaggcaggagaatcact

SEQ ID NO: 34171 - DNA, 20 bp, synthetic construct
  source 1..20: mol_type = other DNA
ggctgaggcaggagaatcac

SEQ ID NO: 34172 - DNA, 20 bp, synthetic construct
  source 1..20: mol_type = other DNA
aggctgaggcaggagaatca

SEQ ID NO: 34173 - DNA, 20 bp, synthetic construct
  source 1..20: mol_type = other DNA
gaggctgaggcaggagaatc

SEQ ID NO: 34174 - DNA, 20 bp, synthetic construct
  source 1..20: mol_type = other DNA
ggaggctgaggcaggagaat

SEQ ID NO: 34175 - DNA, 20 bp, synthetic construct
  source 1..20: mol_type = other DNA
aggaggctgaggcaggagaa

SEQ ID NO: 34176 - DNA, 20 bp, synthetic construct
  source 1..20: mol_type = other DNA
caggaggctgaggcaggaga

SEQ ID NO: 34177 - DNA, 20 bp, synthetic construct
  source 1..20: mol_type = other DNA
tcaggaggctgaggcaggag

SEQ ID NO: 34178 - DNA, 20 bp, synthetic construct
  source 1..20: mol_type = other DNA
ctcaggaggctgaggcagga

SEQ ID NO: 34179 - DNA, 20 bp, synthetic construct
  source 1..20: mol_type = other DNA
actcaggaggctgaggcagg

SEQ ID NO: 34180 - DNA, 20 bp, synthetic construct
  source 1..20: mol_type = other DNA
tactcaggaggctgaggcag

SEQ ID NO: 34181 - DNA, 20 bp, synthetic construct
  source 1..20: mol_type = other DNA
atactcaggaggctgaggca

SEQ ID NO: 34182 - DNA, 20 bp, synthetic construct
  source 1..20: mol_type = other DNA
gatactcaggaggctgaggc

SEQ ID NO: 34183 - DNA, 20 bp, synthetic construct
  source 1..20: mol_type = other DNA
agatactcaggaggctgagg

SEQ ID NO: 34184 - DNA, 20 bp, synthetic construct
  source 1..20: mol_type = other DNA
cagatactcaggaggctgag

SEQ ID NO: 34185 - DNA, 20 bp, synthetic construct
  source 1..20: mol_type = other DNA
ccagatactcaggaggctga

SEQ ID NO: 34186 - DNA, 20 bp, synthetic construct
  source 1..20: mol_type = other DNA
cccagatactcaggaggctg

SEQ ID NO: 34187 - DNA, 20 bp, synthetic construct
  source 1..20: mol_type = other DNA
tcccagatactcaggaggct

SEQ ID NO: 34188 - DNA, 20 bp, synthetic construct
  source 1..20: mol_type = other DNA
gtcccagatactcaggaggc

SEQ ID NO: 34189 - DNA, 20 bp, synthetic construct
  source 1..20: mol_type = other DNA
agtcccagatactcaggagg

SEQ ID NO: 34190 - DNA, 20 bp, synthetic construct
  source 1..20: mol_type = other DNA
tagtcccagatactcaggag

SEQ ID NO: 34191 - DNA, 20 bp, synthetic construct
  source 1..20: mol_type = other DNA
gtagtcccagatactcagga

SEQ ID NO: 34192 - DNA, 20 bp, synthetic construct
  source 1..20: mol_type = other DNA
tgtagtcccagatactcagg

SEQ ID NO: 34193 - DNA, 20 bp, synthetic construct
  source 1..20: mol_type = other DNA
ctgtagtcccagatactcag

SEQ ID NO: 34194 - DNA, 20 bp, synthetic construct
  source 1..20: mol_type = other DNA
cctgtagtcccagatactca

SEQ ID NO: 34195 - DNA, 20 bp, synthetic construct
  source 1..20: mol_type = other DNA
acctgtagtcccagatactc

SEQ ID NO: 34196 - DNA, 20 bp, synthetic construct
  source 1..20: mol_type = other DNA
cacctgtagtcccagatact

SEQ ID NO: 34197 - DNA, 20 bp, synthetic construct
  source 1..20: mol_type = other DNA
gcacctgtagtcccagatac

SEQ ID NO: 34198 - DNA, 20 bp, synthetic construct
  source 1..20: mol_type = other DNA
tgcacctgtagtcccagata

SEQ ID NO: 34199 - DNA, 20 bp, synthetic construct
  source 1..20: mol_type = other DNA
atgcacctgtagtcccagat

SEQ ID NO: 34200 - DNA, 20 bp, synthetic construct
  source 1..20: mol_type = other DNA
catgcacctgtagtcccaga

SEQ ID NO: 34201 - DNA, 20 bp, synthetic construct
  source 1..20: mol_type = other DNA
gcatgcacctgtagtcccag

SEQ ID NO: 34202 - DNA, 20 bp, synthetic construct
  source 1..20: mol_type = other DNA
ggcatgcacctgtagtccca

SEQ ID NO: 34203 - DNA, 20 bp, synthetic construct
  source 1..20: mol_type = other DNA
tggcatgcacctgtagtccc

SEQ ID NO: 34204 - DNA, 20 bp, synthetic construct
  source 1..20: mol_type = other DNA
gtggcatgcacctgtagtcc

SEQ ID NO: 34205 - DNA, 20 bp, synthetic construct
  source 1..20: mol_type = other DNA
ggtggcatgcacctgtagtc

SEQ ID NO: 34206 - DNA, 20 bp, synthetic construct
  source 1..20: mol_type = other DNA
tggtggcatgcacctgtagt

SEQ ID NO: 34207 - DNA, 20 bp, synthetic construct
  source 1..20: mol_type = other DNA
gtggtggcatgcacctgtag

SEQ ID NO: 34208 - DNA, 20 bp, synthetic construct
  source 1..20: mol_type = other DNA
cgtggtggcatgcacctgta

SEQ ID NO: 34209 - DNA, 20 bp, synthetic construct
  source 1..20: mol_type = other DNA
gcgtggtggcatgcacctgt

SEQ ID NO: 34210 - DNA, 20 bp, synthetic construct
  source 1..20: mol_type = other DNA
ggcgtggtggcatgcacctg

SEQ ID NO: 34211 - DNA, 20 bp, synthetic construct
  source 1..20: mol_type = other DNA
tggcgtggtggcatgcacct

SEQ ID NO: 34212 - DNA, 20 bp, synthetic construct
  source 1..20: mol_type = other DNA
ctggcgtggtggcatgcacc

SEQ ID NO: 34213 - DNA, 20 bp, synthetic construct
  source 1..20: mol_type = other DNA
cctggcgtggtggcatgcac

SEQ ID NO: 34214 - DNA, 20 bp, synthetic construct
  source 1..20: mol_type = other DNA
gcctggcgtggtggcatgca

SEQ ID NO: 34215 - DNA, 20 bp, synthetic construct
  source 1..20: mol_type = other DNA
agcctggcgtggtggcatgc

SEQ ID NO: 34216 - DNA, 20 bp, synthetic construct
  source 1..20: mol_type = other DNA
tagcctggcgtggtggcatg

SEQ ID NO: 34217 - DNA, 20 bp, synthetic construct
  source 1..20: mol_type = other DNA
ttagcctggcgtggtggcat

SEQ ID NO: 34218 - DNA, 20 bp, synthetic construct
  source 1..20: mol_type = other DNA
attagcctggcgtggtggca

SEQ ID NO: 34219 - DNA, 20 bp, synthetic construct
  source 1..20: mol_type = other DNA
aattagcctggcgtggtggc

SEQ ID NO: 34220 - DNA, 20 bp, synthetic construct
  source 1..20: mol_type = other DNA
aaattagcctggcgtggtgg

SEQ ID NO: 34221 - DNA, 20 bp, synthetic construct
  source 1..20: mol_type = other DNA
aaaattagcctggcgtggtg

SEQ ID NO: 34222 - DNA, 20 bp, synthetic construct
  source 1..20: mol_type = other DNA
aaaaattagcctggcgtggt

SEQ ID NO: 34223 - DNA, 20 bp, synthetic construct
  source 1..20: mol_type = other DNA
caaaaattagcctggcgtgg

SEQ ID NO: 34224 - DNA, 20 bp, synthetic construct
  source 1..20: mol_type = other DNA
acaaaaattagcctggcgtg

SEQ ID NO: 34225 - DNA, 20 bp, synthetic construct
  source 1..20: mol_type = other DNA
tacaaaaattagcctggcgt

SEQ ID NO: 34226 - DNA, 20 bp, synthetic construct
  source 1..20: mol_type = other DNA
atacaaaaattagcctggcg

SEQ ID NO: 34227 - DNA, 20 bp, synthetic construct
  source 1..20: mol_type = other DNA
aatacaaaaattagcctggc

SEQ ID NO: 34228 - DNA, 20 bp, synthetic construct
  source 1..20: mol_type = other DNA
aaatacaaaaattagcctgg

SEQ ID NO: 34229 - DNA, 20 bp, synthetic construct
  source 1..20: mol_type = other DNA
aaaatacaaaaattagcctg

SEQ ID NO: 34230 - DNA, 20 bp, synthetic construct
  source 1..20: mol_type = other DNA
aaaaatacaaaaattagcct

SEQ ID NO: 34231 - DNA, 20 bp, synthetic construct
  source 1..20: mol_type = other DNA
taaaaatacaaaaattagcc

SEQ ID NO: 34232 - DNA, 20 bp, synthetic construct
  source 1..20: mol_type = other DNA
ctaaaaatacaaaaattagc

SEQ ID NO: 34233 - DNA, 20 bp, synthetic construct
  source 1..20: mol_type = other DNA
actaaaaatacaaaaattag

SEQ ID NO: 34234 - DNA, 20 bp, synthetic construct
  source 1..20: mol_type = other DNA
tactaaaaatacaaaaatta

SEQ ID NO: 34235 - DNA, 20 bp, synthetic construct
  source 1..20: mol_type = other DNA
ctactaaaaatacaaaaatt

SEQ ID NO: 34236 - DNA, 20 bp, synthetic construct
  source 1..20: mol_type = other DNA
tctactaaaaatacaaaaat

SEQ ID NO: 34237 - DNA, 20 bp, synthetic construct
  source 1..20: mol_type = other DNA
ctctactaaaaatacaaaaa

SEQ ID NO: 34238 - DNA, 20 bp, synthetic construct
  source 1..20: mol_type = other DNA
tctctactaaaaatacaaaa

SEQ ID NO: 34239 - DNA, 20 bp, synthetic construct
  source 1..20: mol_type = other DNA
gtctctactaaaaatacaaa

SEQ ID NO: 34240 - DNA, 20 bp, synthetic construct
  source 1..20: mol_type = other DNA
cgtctctactaaaaatacaa

SEQ ID NO: 34241 - DNA, 20 bp, synthetic construct
  source 1..20: mol_type = other DNA
ccgtctctactaaaaataca

SEQ ID NO: 34242 - DNA, 20 bp, synthetic construct
  source 1..20: mol_type = other DNA
cccgtctctactaaaaatac

SEQ ID NO: 34243 - DNA, 20 bp, synthetic construct
  source 1..20: mol_type = other DNA
ccccgtctctactaaaaata

SEQ ID NO: 34244 - DNA, 20 bp, synthetic construct
  source 1..20: mol_type = other DNA
accccgtctctactaaaaat

SEQ ID NO: 34245 - DNA, 20 bp, synthetic construct
  source 1..20: mol_type = other DNA
aaccccgtctctactaaaaa

SEQ ID NO: 34246 - DNA, 20 bp, synthetic construct
  source 1..20: mol_type = other DNA
aaaccccgtctctactaaaa

SEQ ID NO: 34247 - DNA, 20 bp, synthetic construct
  source 1..20: mol_type = other DNA
gaaaccccgtctctactaaa

SEQ ID NO: 34248 - DNA, 20 bp, synthetic construct
  source 1..20: mol_type = other DNA
tgaaaccccgtctctactaa

SEQ ID NO: 34249 - DNA, 20 bp, synthetic construct
  source 1..20: mol_type = other DNA
gtgaaaccccgtctctacta

SEQ ID NO: 34250 - DNA, 20 bp, synthetic construct
  source 1..20: mol_type = other DNA
ggtgaaaccccgtctctact

SEQ ID NO: 34251 - DNA, 20 bp, synthetic construct
  source 1..20: mol_type = other DNA
tggtgaaaccccgtctctac

SEQ ID NO: 34252 - DNA, 20 bp, synthetic construct
  source 1..20: mol_type = other DNA
atggtgaaaccccgtctcta

SEQ ID NO: 34253 - DNA, 20 bp, synthetic construct
  source 1..20: mol_type = other DNA
tatggtgaaaccccgtctct

SEQ ID NO: 34254 - DNA, 20 bp, synthetic construct
  source 1..20: mol_type = other DNA
atatggtgaaaccccgtctc

SEQ ID NO: 34255 - DNA, 20 bp, synthetic construct
  source 1..20: mol_type = other DNA
aatatggtgaaaccccgtct

SEQ ID NO: 34256 - DNA, 20 bp, synthetic construct
  source 1..20: mol_type = other DNA
caatatggtgaaaccccgtc

SEQ ID NO: 34257 - DNA, 20 bp, synthetic construct
  source 1..20: mol_type = other DNA
ccaatatggtgaaaccccgt

SEQ ID NO: 34258 - DNA, 20 bp, synthetic construct
  source 1..20: mol_type = other DNA
accaatatggtgaaaccccg

SEQ ID NO: 34259 - DNA, 20 bp, synthetic construct
  source 1..20: mol_type = other DNA
caccaatatggtgaaacccc

SEQ ID NO: 34260 - DNA, 20 bp, synthetic construct
  source 1..20: mol_type = other DNA
tcaccaatatggtgaaaccc

SEQ ID NO: 34261 - DNA, 20 bp, synthetic construct
  source 1..20: mol_type = other DNA
ctcaccaatatggtgaaacc

SEQ ID NO: 34262 - DNA, 20 bp, synthetic construct
  source 1..20: mol_type = other DNA
cctcaccaatatggtgaaac

SEQ ID NO: 34263 - DNA, 20 bp, synthetic construct
  source 1..20: mol_type = other DNA
gcctcaccaatatggtgaaa

SEQ ID NO: 34264 - DNA, 20 bp, synthetic construct
  source 1..20: mol_type = other DNA
agcctcaccaatatggtgaa

SEQ ID NO: 34265 - DNA, 20 bp, synthetic construct
  source 1..20: mol_type = other DNA
cagcctcaccaatatggtga

SEQ ID NO: 34266 - DNA, 20 bp, synthetic construct
  source 1..20: mol_type = other DNA
ccagcctcaccaatatggtg

SEQ ID NO: 34267 - DNA, 20 bp, synthetic construct
  source 1..20: mol_type = other DNA
accagcctcaccaatatggt

SEQ ID NO: 34268 - DNA, 20 bp, synthetic construct
  source 1..20: mol_type = other DNA
gaccagcctcaccaatatgg

SEQ ID NO: 34269 - DNA, 20 bp, synthetic construct
  source 1..20: mol_type = other DNA
agaccagcctcaccaatatg

SEQ ID NO: 34270 - DNA, 20 bp, synthetic construct
  source 1..20: mol_type = other DNA
aagaccagcctcaccaatat

SEQ ID NO: 34271 - DNA, 20 bp, synthetic construct
  source 1..20: mol_type = other DNA
caagaccagcctcaccaata

SEQ ID NO: 34272 - DNA, 20 bp, synthetic construct
  source 1..20: mol_type = other DNA
tcaagaccagcctcaccaat

SEQ ID NO: 34273 - DNA, 20 bp, synthetic construct
  source 1..20: mol_type = other DNA
ttcaagaccagcctcaccaa

SEQ ID NO: 34274 - DNA, 20 bp, synthetic construct
  source 1..20: mol_type = other DNA
gttcaagaccagcctcacca

SEQ ID NO: 34275 - DNA, 20 bp, synthetic construct
  source 1..20: mol_type = other DNA
agttcaagaccagcctcacc

SEQ ID NO: 34276 - DNA, 20 bp, synthetic construct
  source 1..20: mol_type = other DNA
gagttcaagaccagcctcac

SEQ ID NO: 34277 - DNA, 20 bp, synthetic construct
  source 1..20: mol_type = other DNA
ggagttcaagaccagcctca

SEQ ID NO: 34278 - DNA, 20 bp, synthetic construct
  source 1..20: mol_type = other DNA
aggagttcaagaccagcctc

SEQ ID NO: 34279 - DNA, 20 bp, synthetic construct
  source 1..20: mol_type = other DNA
caggagttcaagaccagcct

SEQ ID NO: 34280 - DNA, 20 bp, synthetic construct
  source 1..20: mol_type = other DNA
ccaggagttcaagaccagcc

SEQ ID NO: 34281 - DNA, 20 bp, synthetic construct
  source 1..20: mol_type = other DNA
gccaggagttcaagaccagc

SEQ ID NO: 34282 - DNA, 20 bp, synthetic construct
  source 1..20: mol_type = other DNA
agccaggagttcaagaccag

SEQ ID NO: 34283 - DNA, 20 bp, synthetic construct
  source 1..20: mol_type = other DNA
aagccaggagttcaagacca

SEQ ID NO: 34284 - DNA, 20 bp, synthetic construct
  source 1..20: mol_type = other DNA
gaagccaggagttcaagacc

SEQ ID NO: 34285 - DNA, 20 bp, synthetic construct
  source 1..20: mol_type = other DNA
cgaagccaggagttcaagac

SEQ ID NO: 34286 - DNA, 20 bp, synthetic construct
  source 1..20: mol_type = other DNA
acgaagccaggagttcaaga

SEQ ID NO: 34287 - DNA, 20 bp, synthetic construct
  source 1..20: mol_type = other DNA
cacgaagccaggagttcaag

SEQ ID NO: 34288 - DNA, 20 bp, synthetic construct
  source 1..20: mol_type = other DNA
tcacgaagccaggagttcaa

SEQ ID NO: 34289 - DNA, 20 bp, synthetic construct
  source 1..20: mol_type = other DNA
atcacgaagccaggagttca

SEQ ID NO: 34290 - DNA, 20 bp, synthetic construct
  source 1..20: mol_type = other DNA
gatcacgaagccaggagttc

SEQ ID NO: 34291 - DNA, 20 bp, synthetic construct
  source 1..20: mol_type = other DNA
agatcacgaagccaggagtt

SEQ ID NO: 34292 - DNA, 20 bp, synthetic construct
  source 1..20: mol_type = other DNA
cagatcacgaagccaggagt

SEQ ID NO: 34293 - DNA, 20 bp, synthetic construct
  source 1..20: mol_type = other DNA
gcagatcacgaagccaggag

SEQ ID NO: 34294 - DNA, 20 bp, synthetic construct
  source 1..20: mol_type = other DNA
ggcagatcacgaagccagga

SEQ ID NO: 34295 - DNA, 20 bp, synthetic construct
  source 1..20: mol_type = other DNA
gggcagatcacgaagccagg

SEQ ID NO: 34296 - DNA, 20 bp, synthetic construct
  source 1..20: mol_type = other DNA
cgggcagatcacgaagccag

SEQ ID NO: 34297 - DNA, 20 bp, synthetic construct
  source 1..20: mol_type = other DNA
gcgggcagatcacgaagcca

SEQ ID NO: 34298 - DNA, 20 bp, synthetic construct
  source 1..20: mol_type = other DNA
ggcgggcagatcacgaagcc

SEQ ID NO: 34299 - DNA, 20 bp, synthetic construct
  source 1..20: mol_type = other DNA
aggcgggcagatcacgaagc

SEQ ID NO: 34300 - DNA, 20 bp, synthetic construct
  source 1..20: mol_type = other DNA
gaggcgggcagatcacgaag

SEQ ID NO: 34301 - DNA, 20 bp, synthetic construct
  source 1..20: mol_type = other DNA
tgaggcgggcagatcacgaa

SEQ ID NO: 34302 - DNA, 20 bp, synthetic construct
  source 1..20: mol_type = other DNA
ttgaggcgggcagatcacga

SEQ ID NO: 34303 - DNA, 20 bp, synthetic construct
  source 1..20: mol_type = other DNA
gttgaggcgggcagatcacg

SEQ ID NO: 34304 - DNA, 20 bp, synthetic construct
  source 1..20: mol_type = other DNA
agttgaggcgggcagatcac

SEQ ID NO: 34305 - DNA, 20 bp, synthetic construct
  source 1..20: mol_type = other DNA
aagttgaggcgggcagatca

SEQ ID NO: 34306 - DNA, 20 bp, synthetic construct
  source 1..20: mol_type = other DNA
gaagttgaggcgggcagatc

SEQ ID NO: 34307 - DNA, 20 bp, synthetic construct
  source 1..20: mol_type = other DNA
cgaagttgaggcgggcagat

SEQ ID NO: 34308 - DNA, 20 bp, synthetic construct
  source 1..20: mol_type = other DNA
gcgaagttgaggcgggcaga

SEQ ID NO: 34309 - DNA, 20 bp, synthetic construct
  source 1..20: mol_type = other DNA
tgcgaagttgaggcgggcag

SEQ ID NO: 34310 - DNA, 20 bp, synthetic construct
  source 1..20: mol_type = other DNA
ttgcgaagttgaggcgggca

SEQ ID NO: 34311 - DNA, 20 bp, synthetic construct
  source 1..20: mol_type = other DNA
tttgcgaagttgaggcgggc

SEQ ID NO: 34312 - DNA, 20 bp, synthetic construct
  source 1..20: mol_type = other DNA
ctttgcgaagttgaggcggg

SEQ ID NO: 34313 - DNA, 20 bp, synthetic construct
  source 1..20: mol_type = other DNA
actttgcgaagttgaggcgg

SEQ ID NO: 34314 - DNA, 20 bp, synthetic construct
  source 1..20: mol_type = other DNA
cactttgcgaagttgaggcg

SEQ ID NO: 34315 - DNA, 20 bp, synthetic construct
  source 1..20: mol_type = other DNA
gcactttgcgaagttgaggc

SEQ ID NO: 34316 - DNA, 20 bp, synthetic construct
  source 1..20: mol_type = other DNA
agcactttgcgaagttgagg

SEQ ID NO: 34317 - DNA, 20 bp, synthetic construct
  source 1..20: mol_type = other DNA
cagcactttgcgaagttgag

SEQ ID NO: 34318 - DNA, 20 bp, synthetic construct
  source 1..20: mol_type = other DNA
ccagcactttgcgaagttga

SEQ ID NO: 34319 - DNA, 20 bp, synthetic construct
  source 1..20: mol_type = other DNA
cccagcactttgcgaagttg

SEQ ID NO: 34320 - DNA, 20 bp, synthetic construct
  source 1..20: mol_type = other DNA
tcccagcactttgcgaagtt

SEQ ID NO: 34321 - DNA, 20 bp, synthetic construct
  source 1..20: mol_type = other DNA
atcccagcactttgcgaagt

SEQ ID NO: 34322 - DNA, 20 bp, synthetic construct
  source 1..20: mol_type = other DNA
aatcccagcactttgcgaag

SEQ ID NO: 34323 - DNA, 20 bp, synthetic construct
  source 1..20: mol_type = other DNA
taatcccagcactttgcgaa

SEQ ID NO: 34324 - DNA, 20 bp, synthetic construct
  source 1..20: mol_type = other DNA
gtaatcccagcactttgcga

SEQ ID NO: 34325 - DNA, 20 bp, synthetic construct
  source 1..20: mol_type = other DNA
tgtaatcccagcactttgcg

SEQ ID NO: 34326 - DNA, 20 bp, synthetic construct
  source 1..20: mol_type = other DNA
ttgtaatcccagcactttgc

SEQ ID NO: 34327 - DNA, 20 bp, synthetic construct
  source 1..20: mol_type = other DNA
cttgtaatcccagcactttg

SEQ ID NO: 34328 - DNA, 20 bp, synthetic construct
  source 1..20: mol_type = other DNA
acttgtaatcccagcacttt

SEQ ID NO: 34329 - DNA, 20 bp, synthetic construct
  source 1..20: mol_type = other DNA
cacttgtaatcccagcactt

SEQ ID NO: 34330 - DNA, 20 bp, synthetic construct
  source 1..20: mol_type = other DNA
acacttgtaatcccagcact

SEQ ID NO: 34331 - DNA, 20 bp, synthetic construct
  source 1..20: mol_type = other DNA
cacacttgtaatcccagcac

SEQ ID NO: 34332 - DNA, 20 bp, synthetic construct
  source 1..20: mol_type = other DNA
tcacacttgtaatcccagca

SEQ ID NO: 34333 - DNA, 20 bp, synthetic construct
  source 1..20: mol_type = other DNA
ctcacacttgtaatcccagc

SEQ ID NO: 34334 - DNA, 20 bp, synthetic construct
  source 1..20: mol_type = other DNA
gctcacacttgtaatcccag

SEQ ID NO: 34335 - DNA, 20 bp, synthetic construct
  source 1..20: mol_type = other DNA
ggctcacacttgtaatccca

SEQ ID NO: 34336 - DNA, 20 bp, synthetic construct
  source 1..20: mol_type = other DNA
tggctcacacttgtaatccc

SEQ ID NO: 34337 - DNA, 20 bp, synthetic construct
  source 1..20: mol_type = other DNA
gtggctcacacttgtaatcc

SEQ ID NO: 34338 - DNA, 20 bp, synthetic construct
  source 1..20: mol_type = other DNA
ggtggctcacacttgtaatc

SEQ ID NO: 34339 - DNA, 20 bp, synthetic construct
  source 1..20: mol_type = other DNA
tggtggctcacacttgtaat

SEQ ID NO: 34340 - DNA, 20 bp, synthetic construct
  source 1..20: mol_type = other DNA
gtggtggctcacacttgtaa

SEQ ID NO: 34341 - DNA, 20 bp, synthetic construct
  source 1..20: mol_type = other DNA
cgtggtggctcacacttgta

SEQ ID NO: 34342 - DNA, 20 bp, synthetic construct
  source 1..20: mol_type = other DNA
gcgtggtggctcacacttgt

SEQ ID NO: 34343 - DNA, 20 bp, synthetic construct
  source 1..20: mol_type = other DNA
ggcgtggtggctcacacttg

SEQ ID NO: 34344 - DNA, 20 bp, synthetic construct
  source 1..20: mol_type = other DNA
gggcgtggtggctcacactt

SEQ ID NO: 34345 - DNA, 20 bp, synthetic construct
  source 1..20: mol_type = other DNA
cgggcgtggtggctcacact

SEQ ID NO: 34346 - DNA, 20 bp, synthetic construct
  source 1..20: mol_type = other DNA
ccgggcgtggtggctcacac

SEQ ID NO: 34347 - DNA, 20 bp, synthetic construct
  source 1..20: mol_type = other DNA
gccgggcgtggtggctcaca

SEQ ID NO: 34348 - DNA, 20 bp, synthetic construct
  source 1..20: mol_type = other DNA
ggccgggcgtggtggctcac

SEQ ID NO: 34349 - DNA, 20 bp, synthetic construct
  source 1..20: mol_type = other DNA
aggccgggcgtggtggctca

SEQ ID NO: 34350 - DNA, 20 bp, synthetic construct
  source 1..20: mol_type = other DNA
caggccgggcgtggtggctc

SEQ ID NO: 34351 - DNA, 20 bp, synthetic construct
  source 1..20: mol_type = other DNA
acaggccgggcgtggtggct

SEQ ID NO: 34352 - DNA, 20 bp, synthetic construct
  source 1..20: mol_type = other DNA
aacaggccgggcgtggtggc

SEQ ID NO: 34353 - DNA, 20 bp, synthetic construct
  source 1..20: mol_type = other DNA
aaacaggccgggcgtggtgg

SEQ ID NO: 34354 - DNA, 20 bp, synthetic construct
  source 1..20: mol_type = other DNA
gaaacaggccgggcgtggtg

SEQ ID NO: 34355 - DNA, 20 bp, synthetic construct
  source 1..20: mol_type = other DNA
agaaacaggccgggcgtggt

SEQ ID NO: 34356 - DNA, 20 bp, synthetic construct
  source 1..20: mol_type = other DNA
cagaaacaggccgggcgtgg

SEQ ID NO: 34357 - DNA, 20 bp, synthetic construct
  source 1..20: mol_type = other DNA
ccagaaacaggccgggcgtg

SEQ ID NO: 34358 - DNA, 20 bp, synthetic construct
  source 1..20: mol_type = other DNA
tccagaaacaggccgggcgt

SEQ ID NO: 34359 - DNA, 20 bp, synthetic construct
  source 1..20: mol_type = other DNA
ttccagaaacaggccgggcg

SEQ ID NO: 34360 - DNA, 20 bp, synthetic construct
  source 1..20: mol_type = other DNA
attccagaaacaggccgggc

SEQ ID NO: 34361 - DNA, 20 bp, synthetic construct
  source 1..20: mol_type = other DNA
tattccagaaacaggccggg

SEQ ID NO: 34362 - DNA, 20 bp, synthetic construct
  source 1..20: mol_type = other DNA
atattccagaaacaggccgg

SEQ ID NO: 34363 - DNA, 20 bp, synthetic construct
  source 1..20: mol_type = other DNA
aatattccagaaacaggccg

SEQ ID NO: 34364 - DNA, 20 bp, synthetic construct
  source 1..20: mol_type = other DNA
gaatattccagaaacaggcc

SEQ ID NO: 34365 - DNA, 20 bp, synthetic construct
  source 1..20: mol_type = other DNA
tgaatattccagaaacaggc

SEQ ID NO: 34366 - DNA, 20 bp, synthetic construct
  source 1..20: mol_type = other DNA
atgaatattccagaaacagg

SEQ ID NO: 34367 - DNA, 20 bp, synthetic construct
  source 1..20: mol_type = other DNA
tatgaatattccagaaacag

SEQ ID NO: 34368 - DNA, 20 bp, synthetic construct
  source 1..20: mol_type = other DNA
ttatgaatattccagaaaca

SEQ ID NO: 34369 - DNA, 20 bp, synthetic construct
  source 1..20: mol_type = other DNA
attatgaatattccagaaac

SEQ ID NO: 34370 - DNA, 20 bp, synthetic construct
  source 1..20: mol_type = other DNA
gattatgaatattccagaaa

SEQ ID NO: 34371 - DNA, 20 bp, synthetic construct
  source 1..20: mol_type = other DNA
agattatgaatattccagaa

SEQ ID NO: 34372 - DNA, 20 bp, synthetic construct
  source 1..20: mol_type = other DNA
aagattatgaatattccaga

SEQ ID NO: 34373 - DNA, 20 bp, synthetic construct
  source 1..20: mol_type = other DNA
aaagattatgaatattccag

SEQ ID NO: 34374 - DNA, 20 bp, synthetic construct
  source 1..20: mol_type = other DNA
aaaagattatgaatattcca

SEQ ID NO: 34375 - DNA, 20 bp, synthetic construct
  source 1..20: mol_type = other DNA
caaaagattatgaatattcc

SEQ ID NO: 34376 - DNA, 20 bp, synthetic construct
  source 1..20: mol_type = other DNA
acaaaagattatgaatattc

SEQ ID NO: 34377 - DNA, 20 bp, synthetic construct
  source 1..20: mol_type = other DNA
aacaaaagattatgaatatt

SEQ ID NO: 34378 - DNA, 20 bp, synthetic construct
  source 1..20: mol_type = other DNA
caacaaaagattatgaatat

SEQ ID NO: 34379 - DNA, 20 bp, synthetic construct
  source 1..20: mol_type = other DNA
acaacaaaagattatgaata

SEQ ID NO: 34380 - DNA, 20 bp, synthetic construct
  source 1..20: mol_type = other DNA
gacaacaaaagattatgaat

SEQ ID NO: 34381 - DNA, 20 bp, synthetic construct
  source 1..20: mol_type = other DNA
tgacaacaaaagattatgaa

SEQ ID NO: 34382 - DNA, 20 bp, synthetic construct
  source 1..20: mol_type = other DNA
atgacaacaaaagattatga

SEQ ID NO: 34383 - DNA, 20 bp, synthetic construct
  source 1..20: mol_type = other DNA
aatgacaacaaaagattatg

SEQ ID NO: 34384 - DNA, 20 bp, synthetic construct
  source 1..20: mol_type = other DNA
aaatgacaacaaaagattat

SEQ ID NO: 34385 - DNA, 20 bp, synthetic construct
  source 1..20: mol_type = other DNA
gaaatgacaacaaaagatta

SEQ ID NO: 34386 - DNA, 20 bp, synthetic construct
  source 1..20: mol_type = other DNA
tgaaatgacaacaaaagatt

SEQ ID NO: 34387 - DNA, 20 bp, synthetic construct
  source 1..20: mol_type = other DNA
ttgaaatgacaacaaaagat

SEQ ID NO: 34388 - DNA, 20 bp, synthetic construct
  source 1..20: mol_type = other DNA
gttgaaatgacaacaaaaga

SEQ ID NO: 34389 - DNA, 20 bp, synthetic construct
  source 1..20: mol_type = other DNA
tgttgaaatgacaacaaaag

SEQ ID NO: 34390 - DNA, 20 bp, synthetic construct
  source 1..20: mol_type = other DNA
ctgttgaaatgacaacaaaa

SEQ ID NO: 34391 - DNA, 20 bp, synthetic construct
  source 1..20: mol_type = other DNA
actgttgaaatgacaacaaa

SEQ ID NO: 34392 - DNA, 20 bp, synthetic construct
  source 1..20: mol_type = other DNA
cactgttgaaatgacaacaa

SEQ ID NO: 34393 - DNA, 20 bp, synthetic construct
  source 1..20: mol_type = other DNA
gcactgttgaaatgacaaca

SEQ ID NO: 34394 - DNA, 20 bp, synthetic construct
  source 1..20: mol_type = other DNA
agcactgttgaaatgacaac

SEQ ID NO: 34395 - DNA, 20 bp, synthetic construct
  source 1..20: mol_type = other DNA
gagcactgttgaaatgacaa

SEQ ID NO: 34396 - DNA, 20 bp, synthetic construct
  source 1..20: mol_type = other DNA
tgagcactgttgaaatgaca

SEQ ID NO: 34397 - DNA, 20 bp, synthetic construct
  source 1..20: mol_type = other DNA
gtgagcactgttgaaatgac

SEQ ID NO: 34398 - DNA, 20 bp, synthetic construct
  source 1..20: mol_type = other DNA
tgtgagcactgttgaaatga

SEQ ID NO: 34399 - DNA, 20 bp, synthetic construct
  source 1..20: mol_type = other DNA
ctgtgagcactgttgaaatg

SEQ ID NO: 34400 - DNA, 20 bp, synthetic construct
  source 1..20: mol_type = other DNA
gctgtgagcactgttgaaat

SEQ ID NO: 34401 - DNA, 20 bp, synthetic construct
  source 1..20: mol_type = other DNA
tgctgtgagcactgttgaaa

SEQ ID NO: 34402 - DNA, 20 bp, synthetic construct
  source 1..20: mol_type = other DNA
ctgctgtgagcactgttgaa

SEQ ID NO: 34403 - DNA, 20 bp, synthetic construct
  source 1..20: mol_type = other DNA
gctgctgtgagcactgttga

SEQ ID NO: 34404 - DNA, 20 bp, synthetic construct
  source 1..20: mol_type = other DNA
agctgctgtgagcactgttg

SEQ ID NO: 34405 - DNA, 20 bp, synthetic construct
  source 1..20: mol_type = other DNA
aagctgctgtgagcactgtt

SEQ ID NO: 34406 - DNA, 20 bp, synthetic construct
  source 1..20: mol_type = other DNA
gaagctgctgtgagcactgt

SEQ ID NO: 34407 - DNA, 20 bp, synthetic construct
  source 1..20: mol_type = other DNA
tgaagctgctgtgagcactg

SEQ ID NO: 34408 - DNA, 20 bp, synthetic construct
  source 1..20: mol_type = other DNA
gtgaagctgctgtgagcact

SEQ ID NO: 34409 - DNA, 20 bp, synthetic construct
  source 1..20: mol_type = other DNA
ggtgaagctgctgtgagcac

SEQ ID NO: 34410 - DNA, 20 bp, synthetic construct
  source 1..20: mol_type = other DNA
tggtgaagctgctgtgagca

SEQ ID NO: 34411 - DNA, 20 bp, synthetic construct
  source 1..20: mol_type = other DNA
ctggtgaagctgctgtgagc

SEQ ID NO: 34412 - DNA, 20 bp, synthetic construct
  source 1..20: mol_type = other DNA
cctggtgaagctgctgtgag

SEQ ID NO: 34413 - DNA, 20 bp, synthetic construct
  source 1..20: mol_type = other DNA
acctggtgaagctgctgtga

SEQ ID NO: 34414 - DNA, 20 bp, synthetic construct
  source 1..20: mol_type = other DNA
cacctggtgaagctgctgtg

SEQ ID NO: 34415 - DNA, 20 bp, synthetic construct
  source 1..20: mol_type = other DNA
acacctggtgaagctgctgt

SEQ ID NO: 34416 - DNA, 20 bp, synthetic construct
  source 1..20: mol_type = other DNA
tacacctggtgaagctgctg

SEQ ID NO: 34417 - DNA, 20 bp, synthetic construct
  source 1..20: mol_type = other DNA
ctacacctggtgaagctgct

SEQ ID NO: 34418 - DNA, 20 bp, synthetic construct
  source 1..20: mol_type = other DNA
tctacacctggtgaagctgc

SEQ ID NO: 34419 - DNA, 20 bp, synthetic construct
  source 1..20: mol_type = other DNA
atctacacctggtgaagctg

SEQ ID NO: 34420 - DNA, 20 bp, synthetic construct
  source 1..20: mol_type = other DNA
aatctacacctggtgaagct

SEQ ID NO: 34421 - DNA, 20 bp, synthetic construct
  source 1..20: mol_type = other DNA
gaatctacacctggtgaagc

SEQ ID NO: 34422 - DNA, 20 bp, synthetic construct
  source 1..20: mol_type = other DNA
ggaatctacacctggtgaag

SEQ ID NO: 34423 - DNA, 20 bp, synthetic construct
  source 1..20: mol_type = other DNA
tggaatctacacctggtgaa

SEQ ID NO: 34424 - DNA, 20 bp, synthetic construct
  source 1..20: mol_type = other DNA
atggaatctacacctggtga

SEQ ID NO: 34425 - DNA, 20 bp, synthetic construct
  source 1..20: mol_type = other DNA
gatggaatctacacctggtg

SEQ ID NO: 34426 - DNA, 20 bp, synthetic construct
  source 1..20: mol_type = other DNA
agatggaatctacacctggt

SEQ ID NO: 34427 - DNA, 20 bp, synthetic construct
  source 1..20: mol_type = other DNA
aagatggaatctacacctgg

SEQ ID NO: 34428 - DNA, 20 bp, synthetic construct
  source 1..20: mol_type = other DNA
taagatggaatctacacctg

SEQ ID NO: 34429 - DNA, 20 bp, synthetic construct
  source 1..20: mol_type = other DNA
ttaagatggaatctacacct

SEQ ID NO: 34430 - DNA, 20 bp, synthetic construct
  source 1..20: mol_type = other DNA
cttaagatggaatctacacc

SEQ ID NO: 34431 - DNA, 20 bp, synthetic construct
  source 1..20: mol_type = other DNA
tcttaagatggaatctacac

SEQ ID NO: 34432 - DNA, 20 bp, synthetic construct
  source 1..20: mol_type = other DNA
ttcttaagatggaatctaca

SEQ ID NO: 34433 - DNA, 20 bp, synthetic construct
  source 1..20: mol_type = other DNA
tttcttaagatggaatctac

SEQ ID NO: 34434 - DNA, 20 bp, synthetic construct
  source 1..20: mol_type = other DNA
gtttcttaagatggaatcta

SEQ ID NO: 34435 - DNA, 20 bp, synthetic construct
  source 1..20: mol_type = other DNA
ggtttcttaagatggaatct

SEQ ID NO: 34436 - DNA, 20 bp, synthetic construct
  source 1..20: mol_type = other DNA
tggtttcttaagatggaatc

SEQ ID NO: 34437 - DNA, 20 bp, synthetic construct
  source 1..20: mol_type = other DNA
gtggtttcttaagatggaat

SEQ ID NO: 34438 - DNA, 20 bp, synthetic construct
  source 1..20: mol_type = other DNA
agtggtttcttaagatggaa

SEQ ID NO: 34439 - DNA, 20 bp, synthetic construct
  source 1..20: mol_type = other DNA
aagtggtttcttaagatgga

SEQ ID NO: 34440 - DNA, 20 bp, synthetic construct
  source 1..20: mol_type = other DNA
aaagtggtttcttaagatgg

SEQ ID NO: 34441 - DNA, 20 bp, synthetic construct
  source 1..20: mol_type = other DNA
gaaagtggtttcttaagatg

SEQ ID NO: 34442 - DNA, 20 bp, synthetic construct
  source 1..20: mol_type = other DNA
agaaagtggtttcttaagat

SEQ ID NO: 34443 - DNA, 20 bp, synthetic construct
  source 1..20: mol_type = other DNA
aagaaagtggtttcttaaga

SEQ ID NO: 34444 - DNA, 20 bp, synthetic construct
  source 1..20: mol_type = other DNA
aaagaaagtggtttcttaag

SEQ ID NO: 34445 - DNA, 20 bp, synthetic construct
  source 1..20: mol_type = other DNA
caaagaaagtggtttcttaa

SEQ ID NO: 34446 - DNA, 20 bp, synthetic construct
  source 1..20: mol_type = other DNA
gcaaagaaagtggtttctta

SEQ ID NO: 34447 - DNA, 20 bp, synthetic construct
  source 1..20: mol_type = other DNA
agcaaagaaagtggtttctt

SEQ ID NO: 34448 - DNA, 20 bp, synthetic construct
  source 1..20: mol_type = other DNA
aagcaaagaaagtggtttct

SEQ ID NO: 34449 - DNA, 20 bp, synthetic construct
  source 1..20: mol_type = other DNA
taagcaaagaaagtggtttc

SEQ ID NO: 34450 - DNA, 20 bp, synthetic construct
  source 1..20: mol_type = other DNA
ataagcaaagaaagtggttt

SEQ ID NO: 34451 - DNA, 20 bp, synthetic construct
  source 1..20: mol_type = other DNA
gataagcaaagaaagtggtt

SEQ ID NO: 34452 - DNA, 20 bp, synthetic construct
  source 1..20: mol_type = other DNA
ggataagcaaagaaagtggt

SEQ ID NO: 34453 - DNA, 20 bp, synthetic construct
  source 1..20: mol_type = other DNA
tggataagcaaagaaagtgg

SEQ ID NO: 34454 - DNA, 20 bp, synthetic construct
  source 1..20: mol_type = other DNA
atggataagcaaagaaagtg

SEQ ID NO: 34455 - DNA, 20 bp, synthetic construct
  source 1..20: mol_type = other DNA
catggataagcaaagaaagt

SEQ ID NO: 34456 - DNA, 20 bp, synthetic construct
  source 1..20: mol_type = other DNA
tcatggataagcaaagaaag

SEQ ID NO: 34457 - DNA, 20 bp, synthetic construct
  source 1..20: mol_type = other DNA
ctcatggataagcaaagaaa

SEQ ID NO: 34458 - DNA, 20 bp, synthetic construct
  source 1..20: mol_type = other DNA
tctcatggataagcaaagaa

SEQ ID NO: 34459 - DNA, 20 bp, synthetic construct
  source 1..20: mol_type = other DNA
ttctcatggataagcaaaga

SEQ ID NO: 34460 - DNA, 20 bp, synthetic construct
  source 1..20: mol_type = other DNA
cttctcatggataagcaaag

SEQ ID NO: 34461 - DNA, 20 bp, synthetic construct
  source 1..20: mol_type = other DNA
gcttctcatggataagcaaa

SEQ ID NO: 34462 - DNA, 20 bp, synthetic construct
  source 1..20: mol_type = other DNA
tgcttctcatggataagcaa

SEQ ID NO: 34463 - DNA, 20 bp, synthetic construct
  source 1..20: mol_type = other DNA
ttgcttctcatggataagca

SEQ ID NO: 34464 - DNA, 20 bp, synthetic construct
  source 1..20: mol_type = other DNA
gttgcttctcatggataagc

SEQ ID NO: 34465 - DNA, 20 bp, synthetic construct
  source 1..20: mol_type = other DNA
tgttgcttctcatggataag

SEQ ID NO: 34466 - DNA, 20 bp, synthetic construct
  source 1..20: mol_type = other DNA
gtgttgcttctcatggataa

SEQ ID NO: 34467 - DNA, 20 bp, synthetic construct
  source 1..20: mol_type = other DNA
ggtgttgcttctcatggata

SEQ ID NO: 34468 - DNA, 20 bp, synthetic construct
  source 1..20: mol_type = other DNA
aggtgttgcttctcatggat

SEQ ID NO: 34469 - DNA, 20 bp, synthetic construct
  source 1..20: mol_type = other DNA
gaggtgttgcttctcatgga

SEQ ID NO: 34470 - DNA, 20 bp, synthetic construct
  source 1..20: mol_type = other DNA
tgaggtgttgcttctcatgg

SEQ ID NO: 34471 - DNA, 20 bp, synthetic construct
  source 1..20: mol_type = other DNA
atgaggtgttgcttctcatg

SEQ ID NO: 34472 - DNA, 20 bp, synthetic construct
  source 1..20: mol_type = other DNA
gatgaggtgttgcttctcat

SEQ ID NO: 34473 - DNA, 20 bp, synthetic construct
  source 1..20: mol_type = other DNA
agatgaggtgttgcttctca

SEQ ID NO: 34474 - DNA, 20 bp, synthetic construct
  source 1..20: mol_type = other DNA
tagatgaggtgttgcttctc

SEQ ID NO: 34475 - DNA, 20 bp, synthetic construct
  source 1..20: mol_type = other DNA
atagatgaggtgttgcttct

SEQ ID NO: 34476 - DNA, 20 bp, synthetic construct
  source 1..20: mol_type = other DNA
aatagatgaggtgttgcttc

SEQ ID NO: 34477 - DNA, 20 bp, synthetic construct
  source 1..20: mol_type = other DNA
gaatagatgaggtgttgctt

SEQ ID NO: 34478 - DNA, 20 bp, synthetic construct
  source 1..20: mol_type = other DNA
tgaatagatgaggtgttgct

SEQ ID NO: 34479 - DNA, 20 bp, synthetic construct
  source 1..20: mol_type = other DNA
ttgaatagatgaggtgttgc

SEQ ID NO: 34480 - DNA, 20 bp, synthetic construct
  source 1..20: mol_type = other DNA
cttgaatagatgaggtgttg

SEQ ID NO: 34481 - DNA, 20 bp, synthetic construct
  source 1..20: mol_type = other DNA
acttgaatagatgaggtgtt

SEQ ID NO: 34482 - DNA, 20 bp, synthetic construct
  source 1..20: mol_type = other DNA
aacttgaatagatgaggtgt

SEQ ID NO: 34483 - DNA, 20 bp, synthetic construct
  source 1..20: mol_type = other DNA
aaacttgaatagatgaggtg

SEQ ID NO: 34484 - DNA, 20 bp, synthetic construct
  source 1..20: mol_type = other DNA
aaaacttgaatagatgaggt

SEQ ID NO: 34485 - DNA, 20 bp, synthetic construct
  source 1..20: mol_type = other DNA
taaaacttgaatagatgagg

SEQ ID NO: 34486 - DNA, 20 bp, synthetic construct
  source 1..20: mol_type = other DNA
ataaaacttgaatagatgag

SEQ ID NO: 34487 - DNA, 20 bp, synthetic construct
  source 1..20: mol_type = other DNA
gataaaacttgaatagatga

SEQ ID NO: 34488 - DNA, 20 bp, synthetic construct
  source 1..20: mol_type = other DNA
tgataaaacttgaatagatg

SEQ ID NO: 34489 - DNA, 20 bp, synthetic construct
  source 1..20: mol_type = other DNA
atgataaaacttgaatagat

SEQ ID NO: 34490 - DNA, 20 bp, synthetic construct
  source 1..20: mol_type = other DNA
catgataaaacttgaataga

SEQ ID NO: 34491 - DNA, 20 bp, synthetic construct
  source 1..20: mol_type = other DNA
tcatgataaaacttgaatag

SEQ ID NO: 34492 - DNA, 20 bp, synthetic construct
  source 1..20: mol_type = other DNA
ctcatgataaaacttgaata

SEQ ID NO: 34493 - DNA, 20 bp, synthetic construct
  source 1..20: mol_type = other DNA
tctcatgataaaacttgaat

SEQ ID NO: 34494 - DNA, 20 bp, synthetic construct
  source 1..20: mol_type = other DNA
atctcatgataaaacttgaa

SEQ ID NO: 34495 - DNA, 20 bp, synthetic construct
  source 1..20: mol_type = other DNA
aatctcatgataaaacttga

SEQ ID NO: 34496 - DNA, 20 bp, synthetic construct
  source 1..20: mol_type = other DNA
caatctcatgataaaacttg

SEQ ID NO: 34497 - DNA, 20 bp, synthetic construct
  source 1..20: mol_type = other DNA
gcaatctcatgataaaactt

SEQ ID NO: 34498 - DNA, 20 bp, synthetic construct
  source 1..20: mol_type = other DNA
tgcaatctcatgataaaact

SEQ ID NO: 34499 - DNA, 20 bp, synthetic construct
  source 1..20: mol_type = other DNA
ctgcaatctcatgataaaac

SEQ ID NO: 34500 - DNA, 20 bp, synthetic construct
  source 1..20: mol_type = other DNA
gctgcaatctcatgataaaa

SEQ ID NO: 34501 - DNA, 20 bp, synthetic construct
  source 1..20: mol_type = other DNA
tgctgcaatctcatgataaa

SEQ ID NO: 34502 - DNA, 20 bp, synthetic construct
  source 1..20: mol_type = other DNA
ttgctgcaatctcatgataa

SEQ ID NO: 34503 - DNA, 20 bp, synthetic construct
  source 1..20: mol_type = other DNA
attgctgcaatctcatgata

SEQ ID NO: 34504 - DNA, 20 bp, synthetic construct
  source 1..20: mol_type = other DNA
aattgctgcaatctcatgat

SEQ ID NO: 34505 - DNA, 20 bp, synthetic construct
  source 1..20: mol_type = other DNA
gaattgctgcaatctcatga

SEQ ID NO: 34506 - DNA, 20 bp, synthetic construct
  source 1..20: mol_type = other DNA
tgaattgctgcaatctcatg

SEQ ID NO: 34507 - DNA, 20 bp, synthetic construct
  source 1..20: mol_type = other DNA
ctgaattgctgcaatctcat

SEQ ID NO: 34508 - DNA, 20 bp, synthetic construct
  source 1..20: mol_type = other DNA
actgaattgctgcaatctca

SEQ ID NO: 34509 - DNA, 20 bp, synthetic construct
  source 1..20: mol_type = other DNA
aactgaattgctgcaatctc

SEQ ID NO: 34510 - DNA, 20 bp, synthetic construct
  source 1..20: mol_type = other DNA
taactgaattgctgcaatct

SEQ ID NO: 34511 - DNA, 20 bp, synthetic construct
  source 1..20: mol_type = other DNA
gtaactgaattgctgcaatc

SEQ ID NO: 34512 - DNA, 20 bp, synthetic construct
  source 1..20: mol_type = other DNA
tgtaactgaattgctgcaat

SEQ ID NO: 34513 - DNA, 20 bp, synthetic construct
  source 1..20: mol_type = other DNA
atgtaactgaattgctgcaa

SEQ ID NO: 34514 - DNA, 20 bp, synthetic construct
  source 1..20: mol_type = other DNA
gatgtaactgaattgctgca

SEQ ID NO: 34515 - DNA, 20 bp, synthetic construct
  source 1..20: mol_type = other DNA
agatgtaactgaattgctgc

SEQ ID NO: 34516 - DNA, 20 bp, synthetic construct
  source 1..20: mol_type = other DNA
aagatgtaactgaattgctg

SEQ ID NO: 34517 - DNA, 20 bp, synthetic construct
  source 1..20: mol_type = other DNA
gaagatgtaactgaattgct

SEQ ID NO: 34518 - DNA, 20 bp, synthetic construct
  source 1..20: mol_type = other DNA
agaagatgtaactgaattgc

SEQ ID NO: 34519 - DNA, 20 bp, synthetic construct
  source 1..20: mol_type = other DNA
cagaagatgtaactgaattg

SEQ ID NO: 34520 - DNA, 20 bp, synthetic construct
  source 1..20: mol_type = other DNA
tcagaagatgtaactgaatt

SEQ ID NO: 34521 - DNA, 20 bp, synthetic construct
  source 1..20: mol_type = other DNA
gtcagaagatgtaactgaat

SEQ ID NO: 34522 - DNA, 20 bp, synthetic construct
  source 1..20: mol_type = other DNA
ggtcagaagatgtaactgaa

SEQ ID NO: 34523 - DNA, 20 bp, synthetic construct
  source 1..20: mol_type = other DNA
gggtcagaagatgtaactga

SEQ ID NO: 34524 - DNA, 20 bp, synthetic construct
  source 1..20: mol_type = other DNA
ggggtcagaagatgtaactg

SEQ ID NO: 34525 - DNA, 20 bp, synthetic construct
  source 1..20: mol_type = other DNA
tggggtcagaagatgtaact

SEQ ID NO: 34526 - DNA, 20 bp, synthetic construct
  source 1..20: mol_type = other DNA
gtggggtcagaagatgtaac

SEQ ID NO: 34527 - DNA, 20 bp, synthetic construct
  source 1..20: mol_type = other DNA
agtggggtcagaagatgtaa

SEQ ID NO: 34528 - DNA, 20 bp, synthetic construct
  source 1..20: mol_type = other DNA
aagtggggtcagaagatgta

SEQ ID NO: 34529 - DNA, 20 bp, synthetic construct
  source 1..20: mol_type = other DNA
gaagtggggtcagaagatgt

SEQ ID NO: 34530 - DNA, 20 bp, synthetic construct
  source 1..20: mol_type = other DNA
agaagtggggtcagaagatg

SEQ ID NO: 34531 - DNA, 20 bp, synthetic construct
  source 1..20: mol_type = other DNA
tagaagtggggtcagaagat

SEQ ID NO: 34532 - DNA, 20 bp, synthetic construct
  source 1..20: mol_type = other DNA
ttagaagtggggtcagaaga

SEQ ID NO: 34533 - DNA, 20 bp, synthetic construct
  source 1..20: mol_type = other DNA
attagaagtggggtcagaag

SEQ ID NO: 34534 - DNA, 20 bp, synthetic construct
  source 1..20: mol_type = other DNA
aattagaagtggggtcagaa

SEQ ID NO: 34535 - DNA, 20 bp, synthetic construct
  source 1..20: mol_type = other DNA
aaattagaagtggggtcaga

SEQ ID NO: 34536 - DNA, 20 bp, synthetic construct
  source 1..20: mol_type = other DNA
aaaattagaagtggggtcag

SEQ ID NO: 34537 - DNA, 20 bp, synthetic construct
  source 1..20: mol_type = other DNA
taaaattagaagtggggtca

SEQ ID NO: 34538 - DNA, 20 bp, synthetic construct
  source 1..20: mol_type = other DNA
ctaaaattagaagtggggtc

SEQ ID NO: 34539 - DNA, 20 bp, synthetic construct
  source 1..20: mol_type = other DNA
actaaaattagaagtggggt

SEQ ID NO: 34540 - DNA, 20 bp, synthetic construct
  source 1..20: mol_type = other DNA
aactaaaattagaagtgggg

SEQ ID NO: 34541 - DNA, 20 bp, synthetic construct
  source 1..20: mol_type = other DNA
gaactaaaattagaagtggg

SEQ ID NO: 34542 - DNA, 20 bp, synthetic construct
  source 1..20: mol_type = other DNA
agaactaaaattagaagtgg

SEQ ID NO: 34543 - DNA, 20 bp, synthetic construct
  source 1..20: mol_type = other DNA
gagaactaaaattagaagtg

SEQ ID NO: 34544 - DNA, 20 bp, synthetic construct
  source 1..20: mol_type = other DNA
agagaactaaaattagaagt

SEQ ID NO: 34545 - DNA, 20 bp, synthetic construct
  source 1..20: mol_type = other DNA
aagagaactaaaattagaag

SEQ ID NO: 34546 - DNA, 20 bp, synthetic construct
  source 1..20: mol_type = other DNA
caagagaactaaaattagaa

SEQ ID NO: 34547 - DNA, 20 bp, synthetic construct
  source 1..20: mol_type = other DNA
gcaagagaactaaaattaga

SEQ ID NO: 34548 - DNA, 20 bp, synthetic construct
  source 1..20: mol_type = other DNA
agcaagagaactaaaattag

SEQ ID NO: 34549 - DNA, 20 bp, synthetic construct
  source 1..20: mol_type = other DNA
aagcaagagaactaaaatta

SEQ ID NO: 34550 - DNA, 20 bp, synthetic construct
  source 1..20: mol_type = other DNA
aaagcaagagaactaaaatt

SEQ ID NO: 34551 - DNA, 20 bp, synthetic construct
  source 1..20: mol_type = other DNA
aaaagcaagagaactaaaat

SEQ ID NO: 34552 - DNA, 20 bp, synthetic construct
  source 1..20: mol_type = other DNA
aaaaagcaagagaactaaaa

SEQ ID NO: 34553 - DNA, 20 bp, synthetic construct
  source 1..20: mol_type = other DNA
aaaaaagcaagagaactaaa

SEQ ID NO: 34554 - DNA, 20 bp, synthetic construct
  source 1..20: mol_type = other DNA
taaaaaagcaagagaactaa

SEQ ID NO: 34555 - DNA, 20 bp, synthetic construct
  source 1..20: mol_type = other DNA
gtaaaaaagcaagagaacta

SEQ ID NO: 34556 - DNA, 20 bp, synthetic construct
  source 1..20: mol_type = other DNA
ggtaaaaaagcaagagaact

SEQ ID NO: 34557 - DNA, 20 bp, synthetic construct
  source 1..20: mol_type = other DNA
tggtaaaaaagcaagagaac

SEQ ID NO: 34558 - DNA, 20 bp, synthetic construct
  source 1..20: mol_type = other DNA
gtggtaaaaaagcaagagaa

SEQ ID NO: 34559 - DNA, 20 bp, synthetic construct
  source 1..20: mol_type = other DNA
tgtggtaaaaaagcaagaga

SEQ ID NO: 34560 - DNA, 20 bp, synthetic construct
  source 1..20: mol_type = other DNA
atgtggtaaaaaagcaagag

SEQ ID NO: 34561 - DNA, 20 bp, synthetic construct
  source 1..20: mol_type = other DNA
gatgtggtaaaaaagcaaga

SEQ ID NO: 34562 - DNA, 20 bp, synthetic construct
  source 1..20: mol_type = other DNA
agatgtggtaaaaaagcaag

SEQ ID NO: 34563 - DNA, 20 bp, synthetic construct
  source 1..20: mol_type = other DNA
cagatgtggtaaaaaagcaa

SEQ ID NO: 34564 - DNA, 20 bp, synthetic construct
  source 1..20: mol_type = other DNA
gcagatgtggtaaaaaagca

SEQ ID NO: 34565 - DNA, 20 bp, synthetic construct
  source 1..20: mol_type = other DNA
tgcagatgtggtaaaaaagc

SEQ ID NO: 34566 - DNA, 20 bp, synthetic construct
  source 1..20: mol_type = other DNA
ctgcagatgtggtaaaaaag

SEQ ID NO: 34567 - DNA, 20 bp, synthetic construct
  source 1..20: mol_type = other DNA
actgcagatgtggtaaaaaa

SEQ ID NO: 34568 - DNA, 20 bp, synthetic construct
  source 1..20: mol_type = other DNA
aactgcagatgtggtaaaaa

SEQ ID NO: 34569 - DNA, 20 bp, synthetic construct
  source 1..20: mol_type = other DNA
taactgcagatgtggtaaaa

SEQ ID NO: 34570 - DNA, 20 bp, synthetic construct
  source 1..20: mol_type = other DNA
gtaactgcagatgtggtaaa

SEQ ID NO: 34571 - DNA, 20 bp, synthetic construct
  source 1..20: mol_type = other DNA
agtaactgcagatgtggtaa

SEQ ID NO: 34572 - DNA, 20 bp, synthetic construct
  source 1..20: mol_type = other DNA
aagtaactgcagatgtggta

SEQ ID NO: 34573 - DNA, 20 bp, synthetic construct
  source 1..20: mol_type = other DNA
caagtaactgcagatgtggt

SEQ ID NO: 34574 - DNA, 20 bp, synthetic construct
  source 1..20: mol_type = other DNA
gcaagtaactgcagatgtgg

SEQ ID NO: 34575 - DNA, 20 bp, synthetic construct
  source 1..20: mol_type = other DNA
agcaagtaactgcagatgtg

SEQ ID NO: 34576 - DNA, 20 bp, synthetic construct
  source 1..20: mol_type = other DNA
gagcaagtaactgcagatgt

SEQ ID NO: 34577 - DNA, 20 bp, synthetic construct
  source 1..20: mol_type = other DNA
agagcaagtaactgcagatg

SEQ ID NO: 34578 - DNA, 20 bp, synthetic construct
  source 1..20: mol_type = other DNA
tagagcaagtaactgcagat

SEQ ID NO: 34579 - DNA, 20 bp, synthetic construct
  source 1..20: mol_type = other DNA
gtagagcaagtaactgcaga

SEQ ID NO: 34580 - DNA, 20 bp, synthetic construct
  source 1..20: mol_type = other DNA
agtagagcaagtaactgcag

SEQ ID NO: 34581 - DNA, 20 bp, synthetic construct
  source 1..20: mol_type = other DNA
cagtagagcaagtaactgca

SEQ ID NO: 34582 - DNA, 20 bp, synthetic construct
  source 1..20: mol_type = other DNA
tcagtagagcaagtaactgc

SEQ ID NO: 34583 - DNA, 20 bp, synthetic construct
  source 1..20: mol_type = other DNA
ttcagtagagcaagtaactg

SEQ ID NO: 34584 - DNA, 20 bp, synthetic construct
  source 1..20: mol_type = other DNA
cttcagtagagcaagtaact

SEQ ID NO: 34585 - DNA, 20 bp, synthetic construct
  source 1..20: mol_type = other DNA
acttcagtagagcaagtaac

SEQ ID NO: 34586 - DNA, 20 bp, synthetic construct
  source 1..20: mol_type = other DNA
gacttcagtagagcaagtaa

SEQ ID NO: 34587 - DNA, 20 bp, synthetic construct
  source 1..20: mol_type = other DNA
ggacttcagtagagcaagta

SEQ ID NO: 34588 - DNA, 20 bp, synthetic construct
  source 1..20: mol_type = other DNA
aggacttcagtagagcaagt

SEQ ID NO: 34589 - DNA, 20 bp, synthetic construct
  source 1..20: mol_type = other DNA
caggacttcagtagagcaag

SEQ ID NO: 34590 - DNA, 20 bp, synthetic construct
  source 1..20: mol_type = other DNA
tcaggacttcagtagagcaa

SEQ ID NO: 34591 - DNA, 20 bp, synthetic construct
  source 1..20: mol_type = other DNA
ttcaggacttcagtagagca

SEQ ID NO: 34592 - DNA, 20 bp, synthetic construct
  source 1..20: mol_type = other DNA
gttcaggacttcagtagagc

SEQ ID NO: 34593 - DNA, 20 bp, synthetic construct
  source 1..20: mol_type = other DNA
ggttcaggacttcagtagag

SEQ ID NO: 34594 - DNA, 20 bp, synthetic construct
  source 1..20: mol_type = other DNA
gggttcaggacttcagtaga

SEQ ID NO: 34595 - DNA, 20 bp, synthetic construct
  source 1..20: mol_type = other DNA
ggggttcaggacttcagtag

SEQ ID NO: 34596 - DNA, 20 bp, synthetic construct
  source 1..20: mol_type = other DNA
aggggttcaggacttcagta

SEQ ID NO: 34597 - DNA, 20 bp, synthetic construct
  source 1..20: mol_type = other DNA
gaggggttcaggacttcagt

SEQ ID NO: 34598 - DNA, 20 bp, synthetic construct
  source 1..20: mol_type = other DNA
tgaggggttcaggacttcag

SEQ ID NO: 34599 - DNA, 20 bp, synthetic construct
  source 1..20: mol_type = other DNA
ttgaggggttcaggacttca

SEQ ID NO: 34600 - DNA, 20 bp, synthetic construct
  source 1..20: mol_type = other DNA
tttgaggggttcaggacttc

SEQ ID NO: 34601 - DNA, 20 bp, synthetic construct
  source 1..20: mol_type = other DNA
ttttgaggggttcaggactt

SEQ ID NO: 34602 - DNA, 20 bp, synthetic construct
  source 1..20: mol_type = other DNA
attttgaggggttcaggact

SEQ ID NO: 34603 - DNA, 20 bp, synthetic construct
  source 1..20: mol_type = other DNA
gattttgaggggttcaggac

SEQ ID NO: 34604 - DNA, 20 bp, synthetic construct
  source 1..20: mol_type = other DNA
tgattttgaggggttcagga

SEQ ID NO: 34605 - DNA, 20 bp, synthetic construct
  source 1..20: mol_type = other DNA
atgattttgaggggttcagg

SEQ ID NO: 34606 - DNA, 20 bp, synthetic construct
  source 1..20: mol_type = other DNA
aatgattttgaggggttcag

SEQ ID NO: 34607 - DNA, 20 bp, synthetic construct
  source 1..20: mol_type = other DNA
gaatgattttgaggggttca

SEQ ID NO: 34608 - DNA, 20 bp, synthetic construct
  source 1..20: mol_type = other DNA
tgaatgattttgaggggttc

SEQ ID NO: 34609 - DNA, 20 bp, synthetic construct
  source 1..20: mol_type = other DNA
atgaatgattttgaggggtt

SEQ ID NO: 34610 - DNA, 20 bp, synthetic construct
  source 1..20: mol_type = other DNA
catgaatgattttgaggggt

SEQ ID NO: 34611 - DNA, 20 bp, synthetic construct
  source 1..20: mol_type = other DNA
tcatgaatgattttgagggg

SEQ ID NO: 34612 - DNA, 20 bp, synthetic construct
  source 1..20: mol_type = other DNA
ctcatgaatgattttgaggg

SEQ ID NO: 34613 - DNA, 20 bp, synthetic construct
  source 1..20: mol_type = other DNA
actcatgaatgattttgagg

SEQ ID NO: 34614 - DNA, 20 bp, synthetic construct
  source 1..20: mol_type = other DNA
tactcatgaatgattttgag

SEQ ID NO: 34615 - DNA, 20 bp, synthetic construct
  source 1..20: mol_type = other DNA
atactcatgaatgattttga

SEQ ID NO: 34616 - DNA, 20 bp, synthetic construct
  source 1..20: mol_type = other DNA
aatactcatgaatgattttg

SEQ ID NO: 34617 - DNA, 20 bp, synthetic construct
  source 1..20: mol_type = other DNA
taatactcatgaatgatttt

SEQ ID NO: 34618 - DNA, 20 bp, synthetic construct
  source 1..20: mol_type = other DNA
ctaatactcatgaatgattt

SEQ ID NO: 34619 - DNA, 20 bp, synthetic construct
  source 1..20: mol_type = other DNA
tctaatactcatgaatgatt

SEQ ID NO: 34620 - DNA, 20 bp, synthetic construct
  source 1..20: mol_type = other DNA
ttctaatactcatgaatgat

SEQ ID NO: 34621 - DNA, 20 bp, synthetic construct
  source 1..20: mol_type = other DNA
cttctaatactcatgaatga

SEQ ID NO: 34622 - DNA, 20 bp, synthetic construct
  source 1..20: mol_type = other DNA
gcttctaatactcatgaatg

SEQ ID NO: 34623 - DNA, 20 bp, synthetic construct
  source 1..20: mol_type = other DNA
tgcttctaatactcatgaat

SEQ ID NO: 34624 - DNA, 20 bp, synthetic construct
  source 1..20: mol_type = other DNA
ttgcttctaatactcatgaa

SEQ ID NO: 34625 - DNA, 20 bp, synthetic construct
  source 1..20: mol_type = other DNA
attgcttctaatactcatga

SEQ ID NO: 34626 - DNA, 20 bp, synthetic construct
  source 1..20: mol_type = other DNA
aattgcttctaatactcatg

SEQ ID NO: 34627 - DNA, 20 bp, synthetic construct
  source 1..20: mol_type = other DNA
aaattgcttctaatactcat

SEQ ID NO: 34628 - DNA, 20 bp, synthetic construct
  source 1..20: mol_type = other DNA
gaaattgcttctaatactca

SEQ ID NO: 34629 - DNA, 20 bp, synthetic construct
  source 1..20: mol_type = other DNA
ggaaattgcttctaatactc

SEQ ID NO: 34630 - DNA, 20 bp, synthetic construct
  source 1..20: mol_type = other DNA
aggaaattgcttctaatact

SEQ ID NO: 34631 - DNA, 20 bp, synthetic construct
  source 1..20: mol_type = other DNA
caggaaattgcttctaatac

SEQ ID NO: 34632 - DNA, 20 bp, synthetic construct
  source 1..20: mol_type = other DNA
ccaggaaattgcttctaata

SEQ ID NO: 34633 - DNA, 20 bp, synthetic construct
  source 1..20: mol_type = other DNA
accaggaaattgcttctaat

SEQ ID NO: 34634 - DNA, 20 bp, synthetic construct
  source 1..20: mol_type = other DNA
aaccaggaaattgcttctaa

SEQ ID NO: 34635 - DNA, 20 bp, synthetic construct
  source 1..20: mol_type = other DNA
caaccaggaaattgcttcta

SEQ ID NO: 34636 - DNA, 20 bp, synthetic construct
  source 1..20: mol_type = other DNA
ccaaccaggaaattgcttct

SEQ ID NO: 34637 - DNA, 20 bp, synthetic construct
  source 1..20: mol_type = other DNA
cccaaccaggaaattgcttc

SEQ ID NO: 34638 - DNA, 20 bp, synthetic construct
  source 1..20: mol_type = other DNA
gcccaaccaggaaattgctt

SEQ ID NO: 34639 - DNA, 20 bp, synthetic construct
  source 1..20: mol_type = other DNA
tgcccaaccaggaaattgct

SEQ ID NO: 34640 - DNA, 20 bp, synthetic construct
  source 1..20: mol_type = other DNA
gtgcccaaccaggaaattgc

SEQ ID NO: 34641 - DNA, 20 bp, synthetic construct
  source 1..20: mol_type = other DNA
cgtgcccaaccaggaaattg

SEQ ID NO: 34642 - DNA, 20 bp, synthetic construct
  source 1..20: mol_type = other DNA
ccgtgcccaaccaggaaatt

SEQ ID NO: 34643 - DNA, 20 bp, synthetic construct
  source 1..20: mol_type = other DNA
accgtgcccaaccaggaaat

SEQ ID NO: 34644 - DNA, 20 bp, synthetic construct
  source 1..20: mol_type = other DNA
caccgtgcccaaccaggaaa

SEQ ID NO: 34645 - DNA, 20 bp, synthetic construct
  source 1..20: mol_type = other DNA
ccaccgtgcccaaccaggaa

SEQ ID NO: 34646 - DNA, 20 bp, synthetic construct
  source 1..20: mol_type = other DNA
gccaccgtgcccaaccagga

SEQ ID NO: 34647 - DNA, 20 bp, synthetic construct
  source 1..20: mol_type = other DNA
agccaccgtgcccaaccagg

SEQ ID NO: 34648 - DNA, 20 bp, synthetic construct
  source 1..20: mol_type = other DNA
gagccaccgtgcccaaccag

SEQ ID NO: 34649 - DNA, 20 bp, synthetic construct
  source 1..20: mol_type = other DNA
tgagccaccgtgcccaacca

SEQ ID NO: 34650 - DNA, 20 bp, synthetic construct
  source 1..20: mol_type = other DNA
atgagccaccgtgcccaacc

SEQ ID NO: 34651 - DNA, 20 bp, synthetic construct
  source 1..20: mol_type = other DNA
catgagccaccgtgcccaac

SEQ ID NO: 34652 - DNA, 20 bp, synthetic construct
  source 1..20: mol_type = other DNA
gcatgagccaccgtgcccaa

SEQ ID NO: 34653 - DNA, 20 bp, synthetic construct
  source 1..20: mol_type = other DNA
ggcatgagccaccgtgccca

SEQ ID NO: 34654 - DNA, 20 bp, synthetic construct
  source 1..20: mol_type = other DNA
aggcatgagccaccgtgccc

SEQ ID NO: 34655 - DNA, 20 bp, synthetic construct
  source 1..20: mol_type = other DNA
caggcatgagccaccgtgcc

SEQ ID NO: 34656 - DNA, 20 bp, synthetic construct
  source 1..20: mol_type = other DNA
acaggcatgagccaccgtgc

SEQ ID NO: 34657 - DNA, 20 bp, synthetic construct
  source 1..20: mol_type = other DNA
tacaggcatgagccaccgtg

SEQ ID NO: 34658 - DNA, 20 bp, synthetic construct
  source 1..20: mol_type = other DNA
ttacaggcatgagccaccgt

SEQ ID NO: 34659 - DNA, 20 bp, synthetic construct
  source 1..20: mol_type = other DNA
attacaggcatgagccaccg

SEQ ID NO: 34660 - DNA, 20 bp, synthetic construct
  source 1..20: mol_type = other DNA
gattacaggcatgagccacc

SEQ ID NO: 34661 - DNA, 20 bp, synthetic construct
  source 1..20: mol_type = other DNA
ggattacaggcatgagccac

SEQ ID NO: 34662 - DNA, 20 bp, synthetic construct
  source 1..20: mol_type = other DNA
gggattacaggcatgagcca

SEQ ID NO: 34663 - DNA, 20 bp, synthetic construct
  source 1..20: mol_type = other DNA
tgggattacaggcatgagcc

SEQ ID NO: 34664 - DNA, 20 bp, synthetic construct
  source 1..20: mol_type = other DNA
ctgggattacaggcatgagc

SEQ ID NO: 34665 - DNA, 20 bp, synthetic construct
  source 1..20: mol_type = other DNA
actgggattacaggcatgag

SEQ ID NO: 34666 - DNA, 20 bp, synthetic construct
  source 1..20: mol_type = other DNA
tactgggattacaggcatga

SEQ ID NO: 34667 - DNA, 20 bp, synthetic construct
  source 1..20: mol_type = other DNA
gtactgggattacaggcatg

SEQ ID NO: 34668 - DNA, 20 bp, synthetic construct
  source 1..20: mol_type = other DNA
agtactgggattacaggcat

SEQ ID NO: 34669 - DNA, 20 bp, synthetic construct
  source 1..20: mol_type = other DNA
aagtactgggattacaggca

SEQ ID NO: 34670 - DNA, 20 bp, synthetic construct
  source 1..20: mol_type = other DNA
aaagtactgggattacaggc

SEQ ID NO: 34671 - DNA, 20 bp, synthetic construct
  source 1..20: mol_type = other DNA
caaagtactgggattacagg

SEQ ID NO: 34672 - DNA, 20 bp, synthetic construct
  source 1..20: mol_type = other DNA
ccaaagtactgggattacag

SEQ ID NO: 34673 - DNA, 20 bp, synthetic construct
  source 1..20: mol_type = other DNA
cccaaagtactgggattaca

SEQ ID NO: 34674 - DNA, 20 bp, synthetic construct
  source 1..20: mol_type = other DNA
tcccaaagtactgggattac

SEQ ID NO: 34675 - DNA, 20 bp, synthetic construct
  source 1..20: mol_type = other DNA
ctcccaaagtactgggatta

SEQ ID NO: 34676 - DNA, 20 bp, synthetic construct
  source 1..20: mol_type = other DNA
cctcccaaagtactgggatt

SEQ ID NO: 34677 - DNA, 20 bp, synthetic construct
  source 1..20: mol_type = other DNA
gcctcccaaagtactgggat

SEQ ID NO: 34678 - DNA, 20 bp, synthetic construct
  source 1..20: mol_type = other DNA
ggcctcccaaagtactggga

SEQ ID NO: 34679 - DNA, 20 bp, synthetic construct
  source 1..20: mol_type = other DNA
tggcctcccaaagtactggg

SEQ ID NO: 34680 - DNA, 20 bp, synthetic construct
  source 1..20: mol_type = other DNA
ttggcctcccaaagtactgg

SEQ ID NO: 34681 - DNA, 20 bp, synthetic construct
  source 1..20: mol_type = other DNA
cttggcctcccaaagtactg

SEQ ID NO: 34682 - DNA, 20 bp, synthetic construct
  source 1..20: mol_type = other DNA
ccttggcctcccaaagtact

SEQ ID NO: 34683 - DNA, 20 bp, synthetic construct
  source 1..20: mol_type = other DNA
tccttggcctcccaaagtac

SEQ ID NO: 34684 - DNA, 20 bp, synthetic construct
  source 1..20: mol_type = other DNA
ctccttggcctcccaaagta

SEQ ID NO: 34685 - DNA, 20 bp, synthetic construct
  source 1..20: mol_type = other DNA
cctccttggcctcccaaagt

SEQ ID NO: 34686 - DNA, 20 bp, synthetic construct
  source 1..20: mol_type = other DNA
ccctccttggcctcccaaag

SEQ ID NO: 34687 - DNA, 20 bp, synthetic construct
  source 1..20: mol_type = other DNA
gccctccttggcctcccaaa

SEQ ID NO: 34688 - DNA, 20 bp, synthetic construct
  source 1..20: mol_type = other DNA
cgccctccttggcctcccaa

SEQ ID NO: 34689 - DNA, 20 bp, synthetic construct
  source 1..20: mol_type = other DNA
ccgccctccttggcctccca

SEQ ID NO: 34690 - DNA, 20 bp, synthetic construct
  source 1..20: mol_type = other DNA
tccgccctccttggcctccc

SEQ ID NO: 34691 - DNA, 20 bp, synthetic construct
  source 1..20: mol_type = other DNA
atccgccctccttggcctcc

SEQ ID NO: 34692 - DNA, 20 bp, synthetic construct
  source 1..20: mol_type = other DNA
gatccgccctccttggcctc

SEQ ID NO: 34693 - DNA, 20 bp, synthetic construct
  source 1..20: mol_type = other DNA
tgatccgccctccttggcct

SEQ ID NO: 34694 - DNA, 20 bp, synthetic construct
  source 1..20: mol_type = other DNA
gtgatccgccctccttggcc

SEQ ID NO: 34695 - DNA, 20 bp, synthetic construct
  source 1..20: mol_type = other DNA
ggtgatccgccctccttggc

SEQ ID NO: 34696 - DNA, 20 bp, synthetic construct
  source 1..20: mol_type = other DNA
aggtgatccgccctccttgg

SEQ ID NO: 34697 - DNA, 20 bp, synthetic construct
  source 1..20: mol_type = other DNA
caggtgatccgccctccttg

SEQ ID NO: 34698 - DNA, 20 bp, synthetic construct
  source 1..20: mol_type = other DNA
tcaggtgatccgccctcctt

SEQ ID NO: 34699 - DNA, 20 bp, synthetic construct
  source 1..20: mol_type = other DNA
ttcaggtgatccgccctcct

SEQ ID NO: 34700 - DNA, 20 bp, synthetic construct
  source 1..20: mol_type = other DNA
cttcaggtgatccgccctcc

SEQ ID NO: 34701 - DNA, 20 bp, synthetic construct
  source 1..20: mol_type = other DNA
acttcaggtgatccgccctc

SEQ ID NO: 34702 - DNA, 20 bp, synthetic construct
  source 1..20: mol_type = other DNA
gacttcaggtgatccgccct

SEQ ID NO: 34703 - DNA, 20 bp, synthetic construct
  source 1..20: mol_type = other DNA
tgacttcaggtgatccgccc

SEQ ID NO: 34704 - DNA, 20 bp, synthetic construct
  source 1..20: mol_type = other DNA
ctgacttcaggtgatccgcc

SEQ ID NO: 34705 - DNA, 20 bp, synthetic construct
  source 1..20: mol_type = other DNA
cctgacttcaggtgatccgc

SEQ ID NO: 34706 - DNA, 20 bp, synthetic construct
  source 1..20: mol_type = other DNA
tcctgacttcaggtgatccg

SEQ ID NO: 34707 - DNA, 20 bp, synthetic construct
  source 1..20: mol_type = other DNA
ctcctgacttcaggtgatcc

SEQ ID NO: 34708 - DNA, 20 bp, synthetic construct
  source 1..20: mol_type = other DNA
actcctgacttcaggtgatc

SEQ ID NO: 34709 - DNA, 20 bp, synthetic construct
  source 1..20: mol_type = other DNA
aactcctgacttcaggtgat

SEQ ID NO: 34710 - DNA, 20 bp, synthetic construct
  source 1..20: mol_type = other DNA
gaactcctgacttcaggtga

SEQ ID NO: 34711 - DNA, 20 bp, synthetic construct
  source 1..20: mol_type = other DNA
tgaactcctgacttcaggtg

SEQ ID NO: 34712 - DNA, 20 bp, synthetic construct
  source 1..20: mol_type = other DNA
ttgaactcctgacttcaggt

SEQ ID NO: 34713 - DNA, 20 bp, synthetic construct
  source 1..20: mol_type = other DNA
cttgaactcctgacttcagg

SEQ ID NO: 34714 - DNA, 20 bp, synthetic construct
  source 1..20: mol_type = other DNA
tcttgaactcctgacttcag

SEQ ID NO: 34715 - DNA, 20 bp, synthetic construct
  source 1..20: mol_type = other DNA
gtcttgaactcctgacttca

SEQ ID NO: 34716 - DNA, 20 bp, synthetic construct
  source 1..20: mol_type = other DNA
ggtcttgaactcctgacttc

SEQ ID NO: 34717 - DNA, 20 bp, synthetic construct
  source 1..20: mol_type = other DNA
tggtcttgaactcctgactt

SEQ ID NO: 34718 - DNA, 20 bp, synthetic construct
  source 1..20: mol_type = other DNA
ctggtcttgaactcctgact

SEQ ID NO: 34719 - DNA, 20 bp, synthetic construct
  source 1..20: mol_type = other DNA
actggtcttgaactcctgac

SEQ ID NO: 34720 - DNA, 20 bp, synthetic construct
  source 1..20: mol_type = other DNA
gactggtcttgaactcctga

SEQ ID NO: 34721 - DNA, 20 bp, synthetic construct
  source 1..20: mol_type = other DNA
agactggtcttgaactcctg

SEQ ID NO: 34722 - DNA, 20 bp, synthetic construct
  source 1..20: mol_type = other DNA
cagactggtcttgaactcct

SEQ ID NO: 34723 - DNA, 20 bp, synthetic construct
  source 1..20: mol_type = other DNA
ccagactggtcttgaactcc

SEQ ID NO: 34724 - DNA, 20 bp, synthetic construct
  source 1..20: mol_type = other DNA
gccagactggtcttgaactc

SEQ ID NO: 34725 - DNA, 20 bp, synthetic construct
  source 1..20: mol_type = other DNA
tgccagactggtcttgaact

SEQ ID NO: 34726 - DNA, 20 bp, synthetic construct
  source 1..20: mol_type = other DNA
ttgccagactggtcttgaac

SEQ ID NO: 34727 - DNA, 20 bp, synthetic construct
  source 1..20: mol_type = other DNA
tttgccagactggtcttgaa

SEQ ID NO: 34728 - DNA, 20 bp, synthetic construct
  source 1..20: mol_type = other DNA
gtttgccagactggtcttga

SEQ ID NO: 34729 - DNA, 20 bp, synthetic construct
  source 1..20: mol_type = other DNA
cgtttgccagactggtcttg

SEQ ID NO: 34730 - DNA, 20 bp, synthetic construct
  source 1..20: mol_type = other DNA
acgtttgccagactggtctt

SEQ ID NO: 34731 - DNA, 20 bp, synthetic construct
  source 1..20: mol_type = other DNA
cacgtttgccagactggtct

SEQ ID NO: 34732 - DNA, 20 bp, synthetic construct
  source 1..20: mol_type = other DNA
ccacgtttgccagactggtc

SEQ ID NO: 34733 - DNA, 20 bp, synthetic construct
  source 1..20: mol_type = other DNA
accacgtttgccagactggt

SEQ ID NO: 34734 - DNA, 20 bp, synthetic construct
  source 1..20: mol_type = other DNA
caccacgtttgccagactgg

SEQ ID NO: 34735 - DNA, 20 bp, synthetic construct
  source 1..20: mol_type = other DNA
tcaccacgtttgccagactg

SEQ ID NO: 34736 - DNA, 20 bp, synthetic construct
  source 1..20: mol_type = other DNA
ttcaccacgtttgccagact

SEQ ID NO: 34737 - DNA, 20 bp, synthetic construct
  source 1..20: mol_type = other DNA
tttcaccacgtttgccagac

SEQ ID NO: 34738 - DNA, 20 bp, synthetic construct
  source 1..20: mol_type = other DNA
gtttcaccacgtttgccaga

SEQ ID NO: 34739 - DNA, 20 bp, synthetic construct
  source 1..20: mol_type = other DNA
ggtttcaccacgtttgccag

SEQ ID NO: 34740 - DNA, 20 bp, synthetic construct
  source 1..20: mol_type = other DNA
gggtttcaccacgtttgcca

SEQ ID NO: 34741 - DNA, 20 bp, synthetic construct
  source 1..20: mol_type = other DNA
ggggtttcaccacgtttgcc

SEQ ID NO: 34742 - DNA, 20 bp, synthetic construct
  source 1..20: mol_type = other DNA
cggggtttcaccacgtttgc

SEQ ID NO: 34743 - DNA, 20 bp, synthetic construct
  source 1..20: mol_type = other DNA
acggggtttcaccacgtttg

SEQ ID NO: 34744 - DNA, 20 bp, synthetic construct
  source 1..20: mol_type = other DNA
aacggggtttcaccacgttt

SEQ ID NO: 34745 - DNA, 20 bp, synthetic construct
  source 1..20: mol_type = other DNA
aaacggggtttcaccacgtt

SEQ ID NO: 34746 - DNA, 20 bp, synthetic construct
  source 1..20: mol_type = other DNA
gaaacggggtttcaccacgt

SEQ ID NO: 34747 - DNA, 20 bp, synthetic construct
  source 1..20: mol_type = other DNA
agaaacggggtttcaccacg

SEQ ID NO: 34748 - DNA, 20 bp, synthetic construct
  source 1..20: mol_type = other DNA
tagaaacggggtttcaccac

SEQ ID NO: 34749 - DNA, 20 bp, synthetic construct
  source 1..20: mol_type = other DNA
gtagaaacggggtttcacca

SEQ ID NO: 34750 - DNA, 20 bp, synthetic construct
  source 1..20: mol_type = other DNA
agtagaaacggggtttcacc

SEQ ID NO: 34751 - DNA, 20 bp, synthetic construct
  source 1..20: mol_type = other DNA
tagtagaaacggggtttcac

SEQ ID NO: 34752 - DNA, 20 bp, synthetic construct
  source 1..20: mol_type = other DNA
ttagtagaaacggggtttca

SEQ ID NO: 34753 - DNA, 20 bp, synthetic construct
  source 1..20: mol_type = other DNA
tttagtagaaacggggtttc

SEQ ID NO: 34754 - DNA, 20 bp, synthetic construct
  source 1..20: mol_type = other DNA
ttttagtagaaacggggttt

SEQ ID NO: 34755 - DNA, 20 bp, synthetic construct
  source 1..20: mol_type = other DNA
tttttagtagaaacggggtt

SEQ ID NO: 34756 - DNA, 20 bp, synthetic construct
  source 1..20: mol_type = other DNA
atttttagtagaaacggggt

SEQ ID NO: 34757 - DNA, 20 bp, synthetic construct
  source 1..20: mol_type = other DNA
tatttttagtagaaacgggg

SEQ ID NO: 34758 - DNA, 20 bp, synthetic construct
  source 1..20: mol_type = other DNA
gtatttttagtagaaacggg

SEQ ID NO: 34759 - DNA, 20 bp, synthetic construct
  source 1..20: mol_type = other DNA
tgtatttttagtagaaacgg

SEQ ID NO: 34760 - DNA, 20 bp, synthetic construct
  source 1..20: mol_type = other DNA
ttgtatttttagtagaaacg

SEQ ID NO: 34761 - DNA, 20 bp, synthetic construct
  source 1..20: mol_type = other DNA
tttgtatttttagtagaaac

SEQ ID NO: 34762 - DNA, 20 bp, synthetic construct
  source 1..20: mol_type = other DNA
ttttgtatttttagtagaaa

SEQ ID NO: 34763 - DNA, 20 bp, synthetic construct
  source 1..20: mol_type = other DNA
tttttgtatttttagtagaa

SEQ ID NO: 34764 - DNA, 20 bp, synthetic construct
  source 1..20: mol_type = other DNA
atttttgtatttttagtaga

SEQ ID NO: 34765 - DNA, 20 bp, synthetic construct
  source 1..20: mol_type = other DNA
aatttttgtatttttagtag

SEQ ID NO: 34766 - DNA, 20 bp, synthetic construct
  source 1..20: mol_type = other DNA
taatttttgtatttttagta

SEQ ID NO: 34767 - DNA, 20 bp, synthetic construct
  source 1..20: mol_type = other DNA
ctaatttttgtatttttagt

SEQ ID NO: 34768 - DNA, 20 bp, synthetic construct
  source 1..20: mol_type = other DNA
gctaatttttgtatttttag

SEQ ID NO: 34769 - DNA, 20 bp, synthetic construct
  source 1..20: mol_type = other DNA
cgctaatttttgtattttta

SEQ ID NO: 34770 - DNA, 20 bp, synthetic construct
  source 1..20: mol_type = other DNA
ccgctaatttttgtattttt

SEQ ID NO: 34771 - DNA, 20 bp, synthetic construct
  source 1..20: mol_type = other DNA
cccgctaatttttgtatttt

SEQ ID NO: 34772 - DNA, 20 bp, synthetic construct
  source 1..20: mol_type = other DNA
ccccgctaatttttgtattt

SEQ ID NO: 34773 - DNA, 20 bp, synthetic construct
  source 1..20: mol_type = other DNA
tccccgctaatttttgtatt

SEQ ID NO: 34774 - DNA, 20 bp, synthetic construct
  source 1..20: mol_type = other DNA
atccccgctaatttttgtat

SEQ ID NO: 34775 - DNA, 20 bp, synthetic construct
  source 1..20: mol_type = other DNA
catccccgctaatttttgta

SEQ ID NO: 34776 - DNA, 20 bp, synthetic construct
  source 1..20: mol_type = other DNA
acatccccgctaatttttgt

SEQ ID NO: 34777 - DNA, 20 bp, synthetic construct
  source 1..20: mol_type = other DNA
cacatccccgctaatttttg

SEQ ID NO: 34778 - DNA, 20 bp, synthetic construct
  source 1..20: mol_type = other DNA
ccacatccccgctaattttt

SEQ ID NO: 34779 - DNA, 20 bp, synthetic construct
  source 1..20: mol_type = other DNA
accacatccccgctaatttt

SEQ ID NO: 34780 - DNA, 20 bp, synthetic construct
  source 1..20: mol_type = other DNA
caccacatccccgctaattt

SEQ ID NO: 34781 - DNA, 20 bp, synthetic construct
  source 1..20: mol_type = other DNA
ccaccacatccccgctaatt

SEQ ID NO: 34782 - DNA, 20 bp, synthetic construct
  source 1..20: mol_type = other DNA
gccaccacatccccgctaat

SEQ ID NO: 34783 - DNA, 20 bp, synthetic construct
  source 1..20: mol_type = other DNA
cgccaccacatccccgctaa

SEQ ID NO: 34784 - DNA, 20 bp, synthetic construct
  source 1..20: mol_type = other DNA
ccgccaccacatccccgcta

SEQ ID NO: 34785 - DNA, 20 bp, synthetic construct
  source 1..20: mol_type = other DNA
cccgccaccacatccccgct

SEQ ID NO: 34786 - DNA, 20 bp, synthetic construct
  source 1..20: mol_type = other DNA
gcccgccaccacatccccgc

SEQ ID NO: 34787 - DNA, 20 bp, synthetic construct
  source 1..20: mol_type = other DNA
cgcccgccaccacatccccg

SEQ ID NO: 34788 - DNA, 20 bp, synthetic construct
  source 1..20: mol_type = other DNA
gcgcccgccaccacatcccc

SEQ ID NO: 34789 - DNA, 20 bp, synthetic construct
  source 1..20: mol_type = other DNA
ggcgcccgccaccacatccc

SEQ ID NO: 34790 - DNA, 20 bp, synthetic construct
  source 1..20: mol_type = other DNA
aggcgcccgccaccacatcc

SEQ ID NO: 34791 - DNA, 20 bp, synthetic construct
  source 1..20: mol_type = other DNA
taggcgcccgccaccacatc

SEQ ID NO: 34792 - DNA, 20 bp, synthetic construct
  source 1..20: mol_type = other DNA
ataggcgcccgccaccacat

SEQ ID NO: 34793 - DNA, 20 bp, synthetic construct
  source 1..20: mol_type = other DNA
tataggcgcccgccaccaca

SEQ ID NO: 34794 - DNA, 20 bp, synthetic construct
  source 1..20: mol_type = other DNA
ttataggcgcccgccaccac

SEQ ID NO: 34795 - DNA, 20 bp, synthetic construct
  source 1..20: mol_type = other DNA
attataggcgcccgccacca

SEQ ID NO: 34796 - DNA, 20 bp, synthetic construct
  source 1..20: mol_type = other DNA
gattataggcgcccgccacc

SEQ ID NO: 34797 - DNA, 20 bp, synthetic construct
  source 1..20: mol_type = other DNA
ggattataggcgcccgccac

SEQ ID NO: 34798 - DNA, 20 bp, synthetic construct
  source 1..20: mol_type = other DNA
gggattataggcgcccgcca

SEQ ID NO: 34799 - DNA, 20 bp, synthetic construct
  source 1..20: mol_type = other DNA
tgggattataggcgcccgcc

SEQ ID NO: 34800 - DNA, 20 bp, synthetic construct
  source 1..20: mol_type = other DNA
ctgggattataggcgcccgc

SEQ ID NO: 34801 - DNA, 20 bp, synthetic construct
  source 1..20: mol_type = other DNA
gctgggattataggcgcccg

SEQ ID NO: 34802 - DNA, 20 bp, synthetic construct
  source 1..20: mol_type = other DNA
agctgggattataggcgccc

SEQ ID NO: 34803 - DNA, 20 bp, synthetic construct
  source 1..20: mol_type = other DNA
tagctgggattataggcgcc

SEQ ID NO: 34804 - DNA, 20 bp, synthetic construct
  source 1..20: mol_type = other DNA
gtagctgggattataggcgc

SEQ ID NO: 34805 - DNA, 20 bp, synthetic construct
  source 1..20: mol_type = other DNA
agtagctgggattataggcg

SEQ ID NO: 34806 - DNA, 20 bp, synthetic construct
  source 1..20: mol_type = other DNA
aagtagctgggattataggc

SEQ ID NO: 34807 - DNA, 20 bp, synthetic construct
  source 1..20: mol_type = other DNA
caagtagctgggattatagg

SEQ ID NO: 34808 - DNA, 20 bp, synthetic construct
  source 1..20: mol_type = other DNA
ccaagtagctgggattatag

SEQ ID NO: 34809 - DNA, 20 bp, synthetic construct
  source 1..20: mol_type = other DNA
cccaagtagctgggattata

SEQ ID NO: 34810 - DNA, 20 bp, synthetic construct
  source 1..20: mol_type = other DNA
tcccaagtagctgggattat

SEQ ID NO: 34811 - DNA, 20 bp, synthetic construct
  source 1..20: mol_type = other DNA
ctcccaagtagctgggatta

SEQ ID NO: 34812 - DNA, 20 bp, synthetic construct
  source 1..20: mol_type = other DNA
tctcccaagtagctgggatt

SEQ ID NO: 34813 - DNA, 20 bp, synthetic construct
  source 1..20: mol_type = other DNA
gtctcccaagtagctgggat

SEQ ID NO: 34814 - DNA, 20 bp, synthetic construct
  source 1..20: mol_type = other DNA
agtctcccaagtagctggga

SEQ ID NO: 34815 - DNA, 20 bp, synthetic construct
  source 1..20: mol_type = other DNA
cagtctcccaagtagctggg

SEQ ID NO: 34816 - DNA, 20 bp, synthetic construct
  source 1..20: mol_type = other DNA
tcagtctcccaagtagctgg

SEQ ID NO: 34817 - DNA, 20 bp, synthetic construct
  source 1..20: mol_type = other DNA
ctcagtctcccaagtagctg

SEQ ID NO: 34818 - DNA, 20 bp, synthetic construct
  source 1..20: mol_type = other DNA
cctcagtctcccaagtagct

SEQ ID NO: 34819 - DNA, 20 bp, synthetic construct
  source 1..20: mol_type = other DNA
gcctcagtctcccaagtagc

SEQ ID NO: 34820 - DNA, 20 bp, synthetic construct
  source 1..20: mol_type = other DNA
tgcctcagtctcccaagtag

SEQ ID NO: 34821 - DNA, 20 bp, synthetic construct
  source 1..20: mol_type = other DNA
ctgcctcagtctcccaagta

SEQ ID NO: 34822 - DNA, 20 bp, synthetic construct
  source 1..20: mol_type = other DNA
cctgcctcagtctcccaagt

SEQ ID NO: 34823 - DNA, 20 bp, synthetic construct
  source 1..20: mol_type = other DNA
tcctgcctcagtctcccaag

SEQ ID NO: 34824 - DNA, 20 bp, synthetic construct
  source 1..20: mol_type = other DNA
ctcctgcctcagtctcccaa

SEQ ID NO: 34825 - DNA, 20 bp, synthetic construct
  source 1..20: mol_type = other DNA
tctcctgcctcagtctccca

SEQ ID NO: 34826 - DNA, 20 bp, synthetic construct
  source 1..20: mol_type = other DNA
ttctcctgcctcagtctccc

SEQ ID NO: 34827 - DNA, 20 bp, synthetic construct
  source 1..20: mol_type = other DNA
attctcctgcctcagtctcc

SEQ ID NO: 34828 - DNA, 20 bp, synthetic construct
  source 1..20: mol_type = other DNA
gattctcctgcctcagtctc

SEQ ID NO: 34829 - DNA, 20 bp, synthetic construct
  source 1..20: mol_type = other DNA
cgattctcctgcctcagtct

SEQ ID NO: 34830 - DNA, 20 bp, synthetic construct
  source 1..20: mol_type = other DNA
gcgattctcctgcctcagtc

SEQ ID NO: 34831 - DNA, 20 bp, synthetic construct
  source 1..20: mol_type = other DNA
agcgattctcctgcctcagt

SEQ ID NO: 34832 - DNA, 20 bp, synthetic construct
  source 1..20: mol_type = other DNA
aagcgattctcctgcctcag

SEQ ID NO: 34833 - DNA, 20 bp, synthetic construct
  source 1..20: mol_type = other DNA
caagcgattctcctgcctca

SEQ ID NO: 34834 - DNA, 20 bp, synthetic construct
  source 1..20: mol_type = other DNA
tcaagcgattctcctgcctc

SEQ ID NO: 34835 - DNA, 20 bp, synthetic construct
  source 1..20: mol_type = other DNA
ttcaagcgattctcctgcct

SEQ ID NO: 34836 - DNA, 20 bp, synthetic construct
  source 1..20: mol_type = other DNA
gttcaagcgattctcctgcc

SEQ ID NO: 34837 - DNA, 20 bp, synthetic construct
  source 1..20: mol_type = other DNA
ggttcaagcgattctcctgc

SEQ ID NO: 34838 - DNA, 20 bp, synthetic construct
  source 1..20: mol_type = other DNA
aggttcaagcgattctcctg

SEQ ID NO: 34839 - DNA, 20 bp, synthetic construct
  source 1..20: mol_type = other DNA
caggttcaagcgattctcct

SEQ ID NO: 34840 - DNA, 20 bp, synthetic construct
  source 1..20: mol_type = other DNA
ccaggttcaagcgattctcc

SEQ ID NO: 34841 - DNA, 20 bp, synthetic construct
  source 1..20: mol_type = other DNA
cccaggttcaagcgattctc

SEQ ID NO: 34842 - DNA, 20 bp, synthetic construct
  source 1..20: mol_type = other DNA
tcccaggttcaagcgattct

SEQ ID NO: 34843 - DNA, 20 bp, synthetic construct
  source 1..20: mol_type = other DNA
ctcccaggttcaagcgattc

SEQ ID NO: 34844 - DNA, 20 bp, synthetic construct
  source 1..20: mol_type = other DNA
cctcccaggttcaagcgatt

SEQ ID NO: 34845 - DNA, 20 bp, synthetic construct
  source 1..20: mol_type = other DNA
acctcccaggttcaagcgat

SEQ ID NO: 34846 - DNA, 20 bp, synthetic construct
  source 1..20: mol_type = other DNA
cacctcccaggttcaagcga

SEQ ID NO: 34847 - DNA, 20 bp, synthetic construct
  source 1..20: mol_type = other DNA
ccacctcccaggttcaagcg

SEQ ID NO: 34848 - DNA, 20 bp, synthetic construct
  source 1..20: mol_type = other DNA
tccacctcccaggttcaagc

SEQ ID NO: 34849 - DNA, 20 bp, synthetic construct
  source 1..20: mol_type = other DNA
ctccacctcccaggttcaag

SEQ ID NO: 34850 - DNA, 20 bp, synthetic construct
  source 1..20: mol_type = other DNA
cctccacctcccaggttcaa

SEQ ID NO: 34851 - DNA, 20 bp, synthetic construct
  source 1..20: mol_type = other DNA
acctccacctcccaggttca

SEQ ID NO: 34852 - DNA, 20 bp, synthetic construct
  source 1..20: mol_type = other DNA
aacctccacctcccaggttc

SEQ ID NO: 34853 - DNA, 20 bp, synthetic construct
  source 1..20: mol_type = other DNA
caacctccacctcccaggtt

SEQ ID NO: 34854 - DNA, 20 bp, synthetic construct
  source 1..20: mol_type = other DNA
gcaacctccacctcccaggt

SEQ ID NO: 34855 - DNA, 20 bp, synthetic construct
  source 1..20: mol_type = other DNA
tgcaacctccacctcccagg

SEQ ID NO: 34856 - DNA, 20 bp, synthetic construct
  source 1..20: mol_type = other DNA
ctgcaacctccacctcccag

SEQ ID NO: 34857 - DNA, 20 bp, synthetic construct
  source 1..20: mol_type = other DNA
actgcaacctccacctccca

SEQ ID NO: 34858 - DNA, 20 bp, synthetic construct
  source 1..20: mol_type = other DNA
cactgcaacctccacctccc

SEQ ID NO: 34859 - DNA, 20 bp, synthetic construct
  source 1..20: mol_type = other DNA
tcactgcaacctccacctcc

SEQ ID NO: 34860 - DNA, 20 bp, synthetic construct
  source 1..20: mol_type = other DNA
ctcactgcaacctccacctc

SEQ ID NO: 34861 - DNA, 20 bp, synthetic construct
  source 1..20: mol_type = other DNA
actcactgcaacctccacct

SEQ ID NO: 34862 - DNA, 20 bp, synthetic construct
  source 1..20: mol_type = other DNA
aactcactgcaacctccacc

SEQ ID NO: 34863 - DNA, 20 bp, synthetic construct
  source 1..20: mol_type = other DNA
caactcactgcaacctccac

SEQ ID NO: 34864 - DNA, 20 bp, synthetic construct
  source 1..20: mol_type = other DNA
tcaactcactgcaacctcca

SEQ ID NO: 34865 - DNA, 20 bp, synthetic construct
  source 1..20: mol_type = other DNA
ctcaactcactgcaacctcc

SEQ ID NO: 34866 - DNA, 20 bp, synthetic construct
  source 1..20: mol_type = other DNA
tctcaactcactgcaacctc

SEQ ID NO: 34867 - DNA, 20 bp, synthetic construct
  source 1..20: mol_type = other DNA
atctcaactcactgcaacct

SEQ ID NO: 34868 - DNA, 20 bp, synthetic construct
  source 1..20: mol_type = other DNA
aatctcaactcactgcaacc

SEQ ID NO: 34869 - DNA, 20 bp, synthetic construct
  source 1..20: mol_type = other DNA
caatctcaactcactgcaac

SEQ ID NO: 34870 - DNA, 20 bp, synthetic construct
  source 1..20: mol_type = other DNA
acaatctcaactcactgcaa

SEQ ID NO: 34871 - DNA, 20 bp, synthetic construct
  source 1..20: mol_type = other DNA
cacaatctcaactcactgca

SEQ ID NO: 34872 - DNA, 20 bp, synthetic construct
  source 1..20: mol_type = other DNA
gcacaatctcaactcactgc

SEQ ID NO: 34873 - DNA, 20 bp, synthetic construct
  source 1..20: mol_type = other DNA
ggcacaatctcaactcactg

SEQ ID NO: 34874 - DNA, 20 bp, synthetic construct
  source 1..20: mol_type = other DNA
gggcacaatctcaactcact

SEQ ID NO: 34875 - DNA, 20 bp, synthetic construct
  source 1..20: mol_type = other DNA
agggcacaatctcaactcac

SEQ ID NO: 34876 - DNA, 20 bp, synthetic construct
  source 1..20: mol_type = other DNA
aagggcacaatctcaactca

SEQ ID NO: 34877 - DNA, 20 bp, synthetic construct
  source 1..20: mol_type = other DNA
caagggcacaatctcaactc

SEQ ID NO: 34878 - DNA, 20 bp, synthetic construct
  source 1..20: mol_type = other DNA
gcaagggcacaatctcaact

SEQ ID NO: 34879 - DNA, 20 bp, synthetic construct
  source 1..20: mol_type = other DNA
tgcaagggcacaatctcaac

SEQ ID NO: 34880 - DNA, 20 bp, synthetic construct
  source 1..20: mol_type = other DNA
gtgcaagggcacaatctcaa

SEQ ID NO: 34881 - DNA, 20 bp, synthetic construct
  source 1..20: mol_type = other DNA
agtgcaagggcacaatctca

SEQ ID NO: 34882 - DNA, 20 bp, synthetic construct
  source 1..20: mol_type = other DNA
gagtgcaagggcacaatctc

SEQ ID NO: 34883 - DNA, 20 bp, synthetic construct
  source 1..20: mol_type = other DNA
ggagtgcaagggcacaatct

SEQ ID NO: 34884 - DNA, 20 bp, synthetic construct
  source 1..20: mol_type = other DNA
tggagtgcaagggcacaatc

SEQ ID NO: 34885 - DNA, 20 bp, synthetic construct
  source 1..20: mol_type = other DNA
ctggagtgcaagggcacaat

SEQ ID NO: 34886 - DNA, 20 bp, synthetic construct
  source 1..20: mol_type = other DNA
gctggagtgcaagggcacaa

SEQ ID NO: 34887 - DNA, 20 bp, synthetic construct
  source 1..20: mol_type = other DNA
ggctggagtgcaagggcaca

SEQ ID NO: 34888 - DNA, 20 bp, synthetic construct
  source 1..20: mol_type = other DNA
aggctggagtgcaagggcac

SEQ ID NO: 34889 - DNA, 20 bp, synthetic construct
  source 1..20: mol_type = other DNA
caggctggagtgcaagggca

SEQ ID NO: 34890 - DNA, 20 bp, synthetic construct
  source 1..20: mol_type = other DNA
ccaggctggagtgcaagggc

SEQ ID NO: 34891 - DNA, 20 bp, synthetic construct
  source 1..20: mol_type = other DNA
cccaggctggagtgcaaggg

SEQ ID NO: 34892 - DNA, 20 bp, synthetic construct
  source 1..20: mol_type = other DNA
gcccaggctggagtgcaagg

SEQ ID NO: 34893 - DNA, 20 bp, synthetic construct
  source 1..20: mol_type = other DNA
tgcccaggctggagtgcaag

SEQ ID NO: 34894 - DNA, 20 bp, synthetic construct
  source 1..20: mol_type = other DNA
ttgcccaggctggagtgcaa

SEQ ID NO: 34895 - DNA, 20 bp, synthetic construct
  source 1..20: mol_type = other DNA
gttgcccaggctggagtgca

SEQ ID NO: 34896 - DNA, 20 bp, synthetic construct
  source 1..20: mol_type = other DNA
tgttgcccaggctggagtgc

SEQ ID NO: 34897 - DNA, 20 bp, synthetic construct
  source 1..20: mol_type = other DNA
ctgttgcccaggctggagtg

SEQ ID NO: 34898 - DNA, 20 bp, synthetic construct
  source 1..20: mol_type = other DNA
cctgttgcccaggctggagt

SEQ ID NO: 34899 - DNA, 20 bp, synthetic construct
  source 1..20: mol_type = other DNA
tcctgttgcccaggctggag

SEQ ID NO: 34900 - DNA, 20 bp, synthetic construct
  source 1..20: mol_type = other DNA
ctcctgttgcccaggctgga

SEQ ID NO: 34901 - DNA, 20 bp, synthetic construct
  source 1..20: mol_type = other DNA
gctcctgttgcccaggctgg

SEQ ID NO: 34902 - DNA, 20 bp, synthetic construct
  source 1..20: mol_type = other DNA
cgctcctgttgcccaggctg

SEQ ID NO: 34903 - DNA, 20 bp, synthetic construct
  source 1..20: mol_type = other DNA
tcgctcctgttgcccaggct

SEQ ID NO: 34904 - DNA, 20 bp, synthetic construct
  source 1..20: mol_type = other DNA
ttcgctcctgttgcccaggc

SEQ ID NO: 34905 - DNA, 20 bp, synthetic construct
  source 1..20: mol_type = other DNA
tttcgctcctgttgcccagg

SEQ ID NO: 34906 - DNA, 20 bp, synthetic construct
  source 1..20: mol_type = other DNA
gtttcgctcctgttgcccag

SEQ ID NO: 34907 - DNA, 20 bp, synthetic construct
  source 1..20: mol_type = other DNA
agtttcgctcctgttgccca

SEQ ID NO: 34908 - DNA, 20 bp, synthetic construct
  source 1..20: mol_type = other DNA
gagtttcgctcctgttgccc

SEQ ID NO: 34909 - DNA, 20 bp, synthetic construct
  source 1..20: mol_type = other DNA
agagtttcgctcctgttgcc

SEQ ID NO: 34910 - DNA, 20 bp, synthetic construct
  source 1..20: mol_type = other DNA
tagagtttcgctcctgttgc

SEQ ID NO: 34911 - DNA, 20 bp, synthetic construct
  source 1..20: mol_type = other DNA
atagagtttcgctcctgttg

SEQ ID NO: 34912 - DNA, 20 bp, synthetic construct
  source 1..20: mol_type = other DNA
gatagagtttcgctcctgtt

SEQ ID NO: 34913 - DNA, 20 bp, synthetic construct
  source 1..20: mol_type = other DNA
agatagagtttcgctcctgt

SEQ ID NO: 34914 - DNA, 20 bp, synthetic construct
  source 1..20: mol_type = other DNA
aagatagagtttcgctcctg

SEQ ID NO: 34915 - DNA, 20 bp, synthetic construct
  source 1..20: mol_type = other DNA
taagatagagtttcgctcct

SEQ ID NO: 34916 - DNA, 20 bp, synthetic construct
  source 1..20: mol_type = other DNA
ttaagatagagtttcgctcc

SEQ ID NO: 34917 - DNA, 20 bp, synthetic construct
  source 1..20: mol_type = other DNA
tttaagatagagtttcgctc

SEQ ID NO: 34918 - DNA, 20 bp, synthetic construct
  source 1..20: mol_type = other DNA
ttttaagatagagtttcgct

SEQ ID NO: 34919 - DNA, 20 bp, synthetic construct
  source 1..20: mol_type = other DNA
tttttaagatagagtttcgc

SEQ ID NO: 34920 - DNA, 20 bp, synthetic construct
  source 1..20: mol_type = other DNA
ttttttaagatagagtttcg

SEQ ID NO: 34921 - DNA, 20 bp, synthetic construct
  source 1..20: mol_type = other DNA
tttttttaagatagagtttc

SEQ ID NO: 34922 - DNA, 20 bp, synthetic construct
  source 1..20: mol_type = other DNA
ttttttttaagatagagttt

SEQ ID NO: 34923 - DNA, 20 bp, synthetic construct
  source 1..20: mol_type = other DNA
tttttttttaagatagagtt

SEQ ID NO: 34924 - DNA, 20 bp, synthetic construct
  source 1..20: mol_type = other DNA
ttttttttttaagatagagt

SEQ ID NO: 34925 - DNA, 20 bp, synthetic construct
  source 1..20: mol_type = other DNA
tttttttttttaagatagag

SEQ ID NO: 34926 - DNA, 20 bp, synthetic construct
  source 1..20: mol_type = other DNA
ttttttttttttaagataga

SEQ ID NO: 34927 - DNA, 20 bp, synthetic construct
  source 1..20: mol_type = other DNA
tttttttttttttaagatag

SEQ ID NO: 34928 - DNA, 20 bp, synthetic construct
  source 1..20: mol_type = other DNA
ttttttttttttttaagata

SEQ ID NO: 34929 - DNA, 20 bp, synthetic construct
  source 1..20: mol_type = other DNA
tttttttttttttttaagat

SEQ ID NO: 34930 - DNA, 20 bp, synthetic construct
  source 1..20: mol_type = other DNA
ctttttttttttttttaaga

SEQ ID NO: 34931 - DNA, 20 bp, synthetic construct
  source 1..20: mol_type = other DNA
tctttttttttttttttaag

SEQ ID NO: 34932 - DNA, 20 bp, synthetic construct
  source 1..20: mol_type = other DNA
ttctttttttttttttttaa

SEQ ID NO: 34933 - DNA, 20 bp, synthetic construct
  source 1..20: mol_type = other DNA
tttcttttttttttttttta

SEQ ID NO: 34934 - DNA, 20 bp, synthetic construct
  source 1..20: mol_type = other DNA
ttttcttttttttttttttt

SEQ ID NO: 34935 - DNA, 20 bp, synthetic construct
  source 1..20: mol_type = other DNA
cttttctttttttttttttt

SEQ ID NO: 34936 - DNA, 20 bp, synthetic construct
  source 1..20: mol_type = other DNA
gcttttcttttttttttttt

SEQ ID NO: 34937 - DNA, 20 bp, synthetic construct
  source 1..20: mol_type = other DNA
tgcttttctttttttttttt

SEQ ID NO: 34938 - DNA, 20 bp, synthetic construct
  source 1..20: mol_type = other DNA
ttgcttttcttttttttttt

SEQ ID NO: 34939 - DNA, 20 bp, synthetic construct
  source 1..20: mol_type = other DNA
attgcttttctttttttttt

SEQ ID NO: 34940 - DNA, 20 bp, synthetic construct
  source 1..20: mol_type = other DNA
aattgcttttcttttttttt

SEQ ID NO: 34941 - DNA, 20 bp, synthetic construct
  source 1..20: mol_type = other DNA
aaattgcttttctttttttt

SEQ ID NO: 34942 - DNA, 20 bp, synthetic construct
  source 1..20: mol_type = other DNA
gaaattgcttttcttttttt

SEQ ID NO: 34943 - DNA, 20 bp, synthetic construct
  source 1..20: mol_type = other DNA
ggaaattgcttttctttttt

SEQ ID NO: 34944 - DNA, 20 bp, synthetic construct
  source 1..20: mol_type = other DNA
aggaaattgcttttcttttt

SEQ ID NO: 34945 - DNA, 20 bp, synthetic construct
  source 1..20: mol_type = other DNA
gaggaaattgcttttctttt

SEQ ID NO: 34946 - DNA, 20 bp, synthetic construct
  source 1..20: mol_type = other DNA
agaggaaattgcttttcttt

SEQ ID NO: 34947 - DNA, 20 bp, synthetic construct
  source 1..20: mol_type = other DNA
tagaggaaattgcttttctt

SEQ ID NO: 34948 - DNA, 20 bp, synthetic construct
  source 1..20: mol_type = other DNA
ttagaggaaattgcttttct

SEQ ID NO: 34949 - DNA, 20 bp, synthetic construct
  source 1..20: mol_type = other DNA
tttagaggaaattgcttttc

SEQ ID NO: 34950 - DNA, 20 bp, synthetic construct
  source 1..20: mol_type = other DNA
ttttagaggaaattgctttt

SEQ ID NO: 34951 - DNA, 20 bp, synthetic construct
  source 1..20: mol_type = other DNA
gttttagaggaaattgcttt

SEQ ID NO: 34952 - DNA, 20 bp, synthetic construct
  source 1..20: mol_type = other DNA
agttttagaggaaattgctt

SEQ ID NO: 34953 - DNA, 20 bp, synthetic construct
  source 1..20: mol_type = other DNA
gagttttagaggaaattgct

SEQ ID NO: 34954 - DNA, 20 bp, synthetic construct
  source 1..20: mol_type = other DNA
ggagttttagaggaaattgc

SEQ ID NO: 34955 - DNA, 20 bp, synthetic construct
  source 1..20: mol_type = other DNA
aggagttttagaggaaattg

SEQ ID NO: 34956 - DNA, 20 bp, synthetic construct
  source 1..20: mol_type = other DNA
caggagttttagaggaaatt

SEQ ID NO: 34957 - DNA, 20 bp, synthetic construct
  source 1..20: mol_type = other DNA
acaggagttttagaggaaat

SEQ ID NO: 34958 - DNA, 20 bp, synthetic construct
  source 1..20: mol_type = other DNA
aacaggagttttagaggaaa

SEQ ID NO: 34959 - DNA, 20 bp, synthetic construct
  source 1..20: mol_type = other DNA
taacaggagttttagaggaa

SEQ ID NO: 34960 - DNA, 20 bp, synthetic construct
  source 1..20: mol_type = other DNA
ttaacaggagttttagagga

SEQ ID NO: 34961 - DNA, 20 bp, synthetic construct
  source 1..20: mol_type = other DNA
attaacaggagttttagagg

SEQ ID NO: 34962 - DNA, 20 bp, synthetic construct
  source 1..20: mol_type = other DNA
cattaacaggagttttagag

SEQ ID NO: 34963 - DNA, 20 bp, synthetic construct
  source 1..20: mol_type = other DNA
acattaacaggagttttaga

SEQ ID NO: 34964 - DNA, 20 bp, synthetic construct
  source 1..20: mol_type = other DNA
aacattaacaggagttttag

SEQ ID NO: 34965 - DNA, 20 bp, synthetic construct
  source 1..20: mol_type = other DNA
caacattaacaggagtttta

SEQ ID NO: 34966 - DNA, 20 bp, synthetic construct
  source 1..20: mol_type = other DNA
tcaacattaacaggagtttt

SEQ ID NO: 34967 - DNA, 20 bp, synthetic construct
  source 1..20: mol_type = other DNA
atcaacattaacaggagttt

SEQ ID NO: 34968 - DNA, 20 bp, synthetic construct
  source 1..20: mol_type = other DNA
catcaacattaacaggagtt

SEQ ID NO: 34969 - DNA, 20 bp, synthetic construct
  source 1..20: mol_type = other DNA
acatcaacattaacaggagt

SEQ ID NO: 34970 - DNA, 20 bp, synthetic construct
  source 1..20: mol_type = other DNA
aacatcaacattaacaggag

SEQ ID NO: 34971 - DNA, 20 bp, synthetic construct
  source 1..20: mol_type = other DNA
aaacatcaacattaacagga

SEQ ID NO: 34972 - DNA, 20 bp, synthetic construct
  source 1..20: mol_type = other DNA
aaaacatcaacattaacagg

SEQ ID NO: 34973 - DNA, 20 bp, synthetic construct
  source 1..20: mol_type = other DNA
taaaacatcaacattaacag

SEQ ID NO: 34974 - DNA, 20 bp, synthetic construct
  source 1..20: mol_type = other DNA
ttaaaacatcaacattaaca

SEQ ID NO: 34975 - DNA, 20 bp, synthetic construct
  source 1..20: mol_type = other DNA
gttaaaacatcaacattaac

SEQ ID NO: 34976 - DNA, 20 bp, synthetic construct
  source 1..20: mol_type = other DNA
ggttaaaacatcaacattaa

SEQ ID NO: 34977 - DNA, 20 bp, synthetic construct
  source 1..20: mol_type = other DNA
aggttaaaacatcaacatta

SEQ ID NO: 34978 - DNA, 20 bp, synthetic construct
  source 1..20: mol_type = other DNA
gaggttaaaacatcaacatt

SEQ ID NO: 34979 - DNA, 20 bp, synthetic construct
  source 1..20: mol_type = other DNA
ggaggttaaaacatcaacat

SEQ ID NO: 34980 - DNA, 20 bp, synthetic construct
  source 1..20: mol_type = other DNA
aggaggttaaaacatcaaca

SEQ ID NO: 34981 - DNA, 20 bp, synthetic construct
  source 1..20: mol_type = other DNA
gaggaggttaaaacatcaac

SEQ ID NO: 34982 - DNA, 20 bp, synthetic construct
  source 1..20: mol_type = other DNA
ggaggaggttaaaacatcaa

SEQ ID NO: 34983 - DNA, 20 bp, synthetic construct
  source 1..20: mol_type = other DNA
gggaggaggttaaaacatca

SEQ ID NO: 34984 - DNA, 20 bp, synthetic construct
  source 1..20: mol_type = other DNA
tgggaggaggttaaaacatc

SEQ ID NO: 34985 - DNA, 20 bp, synthetic construct
  source 1..20: mol_type = other DNA
atgggaggaggttaaaacat

SEQ ID NO: 34986 - DNA, 20 bp, synthetic construct
  source 1..20: mol_type = other DNA
catgggaggaggttaaaaca

SEQ ID NO: 34987 - DNA, 20 bp, synthetic construct
  source 1..20: mol_type = other DNA
gcatgggaggaggttaaaac

SEQ ID NO: 34988 - DNA, 20 bp, synthetic construct
  source 1..20: mol_type = other DNA
agcatgggaggaggttaaaa

SEQ ID NO: 34989 - DNA, 20 bp, synthetic construct
  source 1..20: mol_type = other DNA
gagcatgggaggaggttaaa

SEQ ID NO: 34990 - DNA, 20 bp, synthetic construct
  source 1..20: mol_type = other DNA
tgagcatgggaggaggttaa

SEQ ID NO: 34991 - DNA, 20 bp, synthetic construct
  source 1..20: mol_type = other DNA
atgagcatgggaggaggtta

SEQ ID NO: 34992 - DNA, 20 bp, synthetic construct
  source 1..20: mol_type = other DNA
catgagcatgggaggaggtt

SEQ ID NO: 34993 - DNA, 20 bp, synthetic construct
  source 1..20: mol_type = other DNA
ccatgagcatgggaggaggt

SEQ ID NO: 34994 - DNA, 20 bp, synthetic construct
  source 1..20: mol_type = other DNA
tccatgagcatgggaggagg

SEQ ID NO: 34995 - DNA, 20 bp, synthetic construct
  source 1..20: mol_type = other DNA
atccatgagcatgggaggag

SEQ ID NO: 34996 - DNA, 20 bp, synthetic construct
  source 1..20: mol_type = other DNA
catccatgagcatgggagga

SEQ ID NO: 34997 - DNA, 20 bp, synthetic construct
  source 1..20: mol_type = other DNA
ccatccatgagcatgggagg

SEQ ID NO: 34998 - DNA, 20 bp, synthetic construct
  source 1..20: mol_type = other DNA
gccatccatgagcatgggag

SEQ ID NO: 34999 - DNA, 20 bp, synthetic construct
  source 1..20: mol_type = other DNA
tgccatccatgagcatggga

SEQ ID NO: 35000 - DNA, 20 bp, synthetic construct
  source 1..20: mol_type = other DNA
atgccatccatgagcatggg

SEQ ID NO: 35001 - DNA, 20 bp, synthetic construct
  source 1..20: mol_type = other DNA
aatgccatccatgagcatgg

SEQ ID NO: 35002 - DNA, 20 bp, synthetic construct
  source 1..20: mol_type = other DNA
gaatgccatccatgagcatg

SEQ ID NO: 35003 - DNA, 20 bp, synthetic construct
  source 1..20: mol_type = other DNA
agaatgccatccatgagcat

SEQ ID NO: 35004 - DNA, 20 bp, synthetic construct
  source 1..20: mol_type = other DNA
gagaatgccatccatgagca

SEQ ID NO: 35005 - DNA, 20 bp, synthetic construct
  source 1..20: mol_type = other DNA
tgagaatgccatccatgagc

SEQ ID NO: 35006 - DNA, 20 bp, synthetic construct
  source 1..20: mol_type = other DNA
ctgagaatgccatccatgag

SEQ ID NO: 35007 - DNA, 20 bp, synthetic construct
  source 1..20: mol_type = other DNA
actgagaatgccatccatga

SEQ ID NO: 35008 - DNA, 20 bp, synthetic construct
  source 1..20: mol_type = other DNA
cactgagaatgccatccatg

SEQ ID NO: 35009 - DNA, 20 bp, synthetic construct
  source 1..20: mol_type = other DNA
ccactgagaatgccatccat

SEQ ID NO: 35010 - DNA, 20 bp, synthetic construct
  source 1..20: mol_type = other DNA
gccactgagaatgccatcca

SEQ ID NO: 35011 - DNA, 20 bp, synthetic construct
  source 1..20: mol_type = other DNA
tgccactgagaatgccatcc

SEQ ID NO: 35012 - DNA, 20 bp, synthetic construct
  source 1..20: mol_type = other DNA
atgccactgagaatgccatc

SEQ ID NO: 35013 - DNA, 20 bp, synthetic construct
  source 1..20: mol_type = other DNA
gatgccactgagaatgccat

SEQ ID NO: 35014 - DNA, 20 bp, synthetic construct
  source 1..20: mol_type = other DNA
agatgccactgagaatgcca

SEQ ID NO: 35015 - DNA, 20 bp, synthetic construct
  source 1..20: mol_type = other DNA
tagatgccactgagaatgcc

SEQ ID NO: 35016 - DNA, 20 bp, synthetic construct
  source 1..20: mol_type = other DNA
ctagatgccactgagaatgc

SEQ ID NO: 35017 - DNA, 20 bp, synthetic construct
  source 1..20: mol_type = other DNA
tctagatgccactgagaatg

SEQ ID NO: 35018 - DNA, 20 bp, synthetic construct
  source 1..20: mol_type = other DNA
ttctagatgccactgagaat

SEQ ID NO: 35019 - DNA, 20 bp, synthetic construct
  source 1..20: mol_type = other DNA
attctagatgccactgagaa

SEQ ID NO: 35020 - DNA, 20 bp, synthetic construct
  source 1..20: mol_type = other DNA
cattctagatgccactgaga

SEQ ID NO: 35021 - DNA, 20 bp, synthetic construct
  source 1..20: mol_type = other DNA
ccattctagatgccactgag

SEQ ID NO: 35022 - DNA, 20 bp, synthetic construct
  source 1..20: mol_type = other DNA
accattctagatgccactga

SEQ ID NO: 35023 - DNA, 20 bp, synthetic construct
  source 1..20: mol_type = other DNA
caccattctagatgccactg

SEQ ID NO: 35024 - DNA, 20 bp, synthetic construct
  source 1..20: mol_type = other DNA
tcaccattctagatgccact

SEQ ID NO: 35025 - DNA, 20 bp, synthetic construct
  source 1..20: mol_type = other DNA
ttcaccattctagatgccac

SEQ ID NO: 35026 - DNA, 20 bp, synthetic construct
  source 1..20: mol_type = other DNA
attcaccattctagatgcca

SEQ ID NO: 35027 - DNA, 20 bp, synthetic construct
  source 1..20: mol_type = other DNA
tattcaccattctagatgcc

SEQ ID NO: 35028 - DNA, 20 bp, synthetic construct
  source 1..20: mol_type = other DNA
gtattcaccattctagatgc

SEQ ID NO: 35029 - DNA, 20 bp, synthetic construct
  source 1..20: mol_type = other DNA
agtattcaccattctagatg

SEQ ID NO: 35030 - DNA, 20 bp, synthetic construct
  source 1..20: mol_type = other DNA
aagtattcaccattctagat

SEQ ID NO: 35031 - DNA, 20 bp, synthetic construct
  source 1..20: mol_type = other DNA
aaagtattcaccattctaga

SEQ ID NO: 35032 - DNA, 20 bp, synthetic construct
  source 1..20: mol_type = other DNA
aaaagtattcaccattctag

SEQ ID NO: 35033 - DNA, 20 bp, synthetic construct
  source 1..20: mol_type = other DNA
aaaaagtattcaccattcta

SEQ ID NO: 35034 - DNA, 20 bp, synthetic construct
  source 1..20: mol_type = other DNA
taaaaagtattcaccattct

SEQ ID NO: 35035 - DNA, 20 bp, synthetic construct
  source 1..20: mol_type = other DNA
ctaaaaagtattcaccattc

SEQ ID NO: 35036 - DNA, 20 bp, synthetic construct
  source 1..20: mol_type = other DNA
tctaaaaagtattcaccatt

SEQ ID NO: 35037 - DNA, 20 bp, synthetic construct
  source 1..20: mol_type = other DNA
ttctaaaaagtattcaccat

SEQ ID NO: 35038 - DNA, 20 bp, synthetic construct
  source 1..20: mol_type = other DNA
tttctaaaaagtattcacca

SEQ ID NO: 35039 - DNA, 20 bp, synthetic construct
  source 1..20: mol_type = other DNA
ctttctaaaaagtattcacc

SEQ ID NO: 35040 - DNA, 20 bp, synthetic construct
  source 1..20: mol_type = other DNA
actttctaaaaagtattcac

SEQ ID NO: 35041 - DNA, 20 bp, synthetic construct
  source 1..20: mol_type = other DNA
aactttctaaaaagtattca

SEQ ID NO: 35042 - DNA, 20 bp, synthetic construct
  source 1..20: mol_type = other DNA
aaactttctaaaaagtattc

SEQ ID NO: 35043 - DNA, 20 bp, synthetic construct
  source 1..20: mol_type = other DNA
aaaactttctaaaaagtatt

SEQ ID NO: 35044 - DNA, 20 bp, synthetic construct
  source 1..20: mol_type = other DNA
gaaaactttctaaaaagtat

SEQ ID NO: 35045 - DNA, 20 bp, synthetic construct
  source 1..20: mol_type = other DNA
tgaaaactttctaaaaagta

SEQ ID NO: 35046 - DNA, 20 bp, synthetic construct
  source 1..20: mol_type = other DNA
ttgaaaactttctaaaaagt

SEQ ID NO: 35047 - DNA, 20 bp, synthetic construct
  source 1..20: mol_type = other DNA
attgaaaactttctaaaaag

SEQ ID NO: 35048 - DNA, 20 bp, synthetic construct
  source 1..20: mol_type = other DNA
aattgaaaactttctaaaaa

SEQ ID NO: 35049 - DNA, 20 bp, synthetic construct
  source 1..20: mol_type = other DNA
aaattgaaaactttctaaaa

SEQ ID NO: 35050 - DNA, 20 bp, synthetic construct
  source 1..20: mol_type = other DNA
taaattgaaaactttctaaa

SEQ ID NO: 35051 - DNA, 20 bp, synthetic construct
  source 1..20: mol_type = other DNA
ataaattgaaaactttctaa

SEQ ID NO: 35052 - DNA, 20 bp, synthetic construct
  source 1..20: mol_type = other DNA
aataaattgaaaactttcta

SEQ ID NO: 35053 - DNA, 20 bp, synthetic construct
  source 1..20: mol_type = other DNA
aaataaattgaaaactttct

SEQ ID NO: 35054 - DNA, 20 bp, synthetic construct
  source 1..20: mol_type = other DNA
aaaataaattgaaaactttc

SEQ ID NO: 35055 - DNA, 20 bp, synthetic construct
  source 1..20: mol_type = other DNA
caaaataaattgaaaacttt

SEQ ID NO: 35056 - DNA, 20 bp, synthetic construct
  source 1..20: mol_type = other DNA
gcaaaataaattgaaaactt

SEQ ID NO: 35057 - DNA, 20 bp, synthetic construct
  source 1..20: mol_type = other DNA
ggcaaaataaattgaaaact

SEQ ID NO: 35058 - DNA, 20 bp, synthetic construct
  source 1..20: mol_type = other DNA
tggcaaaataaattgaaaac

SEQ ID NO: 35059 - DNA, 20 bp, synthetic construct
  source 1..20: mol_type = other DNA
atggcaaaataaattgaaaa

SEQ ID NO: 35060 - DNA, 20 bp, synthetic construct
  source 1..20: mol_type = other DNA
gatggcaaaataaattgaaa

SEQ ID NO: 35061 - DNA, 20 bp, synthetic construct
  source 1..20: mol_type = other DNA
tgatggcaaaataaattgaa

SEQ ID NO: 35062 - DNA, 20 bp, synthetic construct
  source 1..20: mol_type = other DNA
ctgatggcaaaataaattga

SEQ ID NO: 35063 - DNA, 20 bp, synthetic construct
  source 1..20: mol_type = other DNA
tctgatggcaaaataaattg

SEQ ID NO: 35064 - DNA, 20 bp, synthetic construct
  source 1..20: mol_type = other DNA
ctctgatggcaaaataaatt

SEQ ID NO: 35065 - DNA, 20 bp, synthetic construct
  source 1..20: mol_type = other DNA
tctctgatggcaaaataaat

SEQ ID NO: 35066 - DNA, 20 bp, synthetic construct
  source 1..20: mol_type = other DNA
ttctctgatggcaaaataaa

SEQ ID NO: 35067 - DNA, 20 bp, synthetic construct
  source 1..20: mol_type = other DNA
attctctgatggcaaaataa

SEQ ID NO: 35068 - DNA, 20 bp, synthetic construct
  source 1..20: mol_type = other DNA
cattctctgatggcaaaata

SEQ ID NO: 35069 - DNA, 20 bp, synthetic construct
  source 1..20: mol_type = other DNA
ccattctctgatggcaaaat

SEQ ID NO: 35070 - DNA, 20 bp, synthetic construct
  source 1..20: mol_type = other DNA
gccattctctgatggcaaaa

SEQ ID NO: 35071 - DNA, 20 bp, synthetic construct
  source 1..20: mol_type = other DNA
agccattctctgatggcaaa

SEQ ID NO: 35072 - DNA, 20 bp, synthetic construct
  source 1..20: mol_type = other DNA
tagccattctctgatggcaa

SEQ ID NO: 35073 - DNA, 20 bp, synthetic construct
  source 1..20: mol_type = other DNA
atagccattctctgatggca

SEQ ID NO: 35074 - DNA, 20 bp, synthetic construct
  source 1..20: mol_type = other DNA
catagccattctctgatggc

SEQ ID NO: 35075 - DNA, 20 bp, synthetic construct
  source 1..20: mol_type = other DNA
tcatagccattctctgatgg

SEQ ID NO: 35076 - DNA, 20 bp, synthetic construct
  source 1..20: mol_type = other DNA
ttcatagccattctctgatg

SEQ ID NO: 35077 - DNA, 20 bp, synthetic construct
  source 1..20: mol_type = other DNA
attcatagccattctctgat

SEQ ID NO: 35078 - DNA, 20 bp, synthetic construct
  source 1..20: mol_type = other DNA
cattcatagccattctctga

SEQ ID NO: 35079 - DNA, 20 bp, synthetic construct
  source 1..20: mol_type = other DNA
ccattcatagccattctctg

SEQ ID NO: 35080 - DNA, 20 bp, synthetic construct
  source 1..20: mol_type = other DNA
gccattcatagccattctct

SEQ ID NO: 35081 - DNA, 20 bp, synthetic construct
  source 1..20: mol_type = other DNA
tgccattcatagccattctc

SEQ ID NO: 35082 - DNA, 20 bp, synthetic construct
  source 1..20: mol_type = other DNA
ctgccattcatagccattct

SEQ ID NO: 35083 - DNA, 20 bp, synthetic construct
  source 1..20: mol_type = other DNA
actgccattcatagccattc

SEQ ID NO: 35084 - DNA, 20 bp, synthetic construct
  source 1..20: mol_type = other DNA
tactgccattcatagccatt

SEQ ID NO: 35085 - DNA, 20 bp, synthetic construct
  source 1..20: mol_type = other DNA
ctactgccattcatagccat

SEQ ID NO: 35086 - DNA, 20 bp, synthetic construct
  source 1..20: mol_type = other DNA
actactgccattcatagcca

SEQ ID NO: 35087 - DNA, 20 bp, synthetic construct
  source 1..20: mol_type = other DNA
tactactgccattcatagcc

SEQ ID NO: 35088 - DNA, 20 bp, synthetic construct
  source 1..20: mol_type = other DNA
ctactactgccattcatagc

SEQ ID NO: 35089 - DNA, 20 bp, synthetic construct
  source 1..20: mol_type = other DNA
gctactactgccattcatag

SEQ ID NO: 35090 - DNA, 20 bp, synthetic construct
  source 1..20: mol_type = other DNA
ggctactactgccattcata

SEQ ID NO: 35091 - DNA, 20 bp, synthetic construct
  source 1..20: mol_type = other DNA
aggctactactgccattcat

SEQ ID NO: 35092 - DNA, 20 bp, synthetic construct
  source 1..20: mol_type = other DNA
aaggctactactgccattca

SEQ ID NO: 35093 - DNA, 20 bp, synthetic construct
  source 1..20: mol_type = other DNA
taaggctactactgccattc

SEQ ID NO: 35094 - DNA, 20 bp, synthetic construct
  source 1..20: mol_type = other DNA
gtaaggctactactgccatt

SEQ ID NO: 35095 - DNA, 20 bp, synthetic construct
  source 1..20: mol_type = other DNA
tgtaaggctactactgccat

SEQ ID NO: 35096 - DNA, 20 bp, synthetic construct
  source 1..20: mol_type = other DNA
ctgtaaggctactactgcca

SEQ ID NO: 35097 - DNA, 20 bp, synthetic construct
  source 1..20: mol_type = other DNA
tctgtaaggctactactgcc

SEQ ID NO: 35098 - DNA, 20 bp, synthetic construct
  source 1..20: mol_type = other DNA
ttctgtaaggctactactgc

SEQ ID NO: 35099 - DNA, 20 bp, synthetic construct
  source 1..20: mol_type = other DNA
attctgtaaggctactactg

SEQ ID NO: 35100 - DNA, 20 bp, synthetic construct
  source 1..20: mol_type = other DNA
cattctgtaaggctactact

SEQ ID NO: 35101 - DNA, 20 bp, synthetic construct
  source 1..20: mol_type = other DNA
acattctgtaaggctactac

SEQ ID NO: 35102 - DNA, 20 bp, synthetic construct
  source 1..20: mol_type = other DNA
tacattctgtaaggctacta

SEQ ID NO: 35103 - DNA, 20 bp, synthetic construct
  source 1..20: mol_type = other DNA
atacattctgtaaggctact

SEQ ID NO: 35104 - DNA, 20 bp, synthetic construct
  source 1..20: mol_type = other DNA
aatacattctgtaaggctac

SEQ ID NO: 35105 - DNA, 20 bp, synthetic construct
  source 1..20: mol_type = other DNA
aaatacattctgtaaggcta

SEQ ID NO: 35106 - DNA, 20 bp, synthetic construct
  source 1..20: mol_type = other DNA
gaaatacattctgtaaggct

SEQ ID NO: 35107 - DNA, 20 bp, synthetic construct
  source 1..20: mol_type = other DNA
agaaatacattctgtaaggc

SEQ ID NO: 35108 - DNA, 20 bp, synthetic construct
  source 1..20: mol_type = other DNA
aagaaatacattctgtaagg

SEQ ID NO: 35109 - DNA, 20 bp, synthetic construct
  source 1..20: mol_type = other DNA
aaagaaatacattctgtaag

SEQ ID NO: 35110 - DNA, 20 bp, synthetic construct
  source 1..20: mol_type = other DNA
aaaagaaatacattctgtaa

SEQ ID NO: 35111 - DNA, 20 bp, synthetic construct
  source 1..20: mol_type = other DNA
aaaaagaaatacattctgta

SEQ ID NO: 35112 - DNA, 20 bp, synthetic construct
  source 1..20: mol_type = other DNA
aaaaaagaaatacattctgt

SEQ ID NO: 35113 - DNA, 20 bp, synthetic construct
  source 1..20: mol_type = other DNA
aaaaaaagaaatacattctg

SEQ ID NO: 35114 - DNA, 20 bp, synthetic construct
  source 1..20: mol_type = other DNA
aaaaaaaagaaatacattct

SEQ ID NO: 35115 - DNA, 20 bp, synthetic construct
  source 1..20: mol_type = other DNA
aaaaaaaaagaaatacattc

SEQ ID NO: 35116 - DNA, 20 bp, synthetic construct
  source 1..20: mol_type = other DNA
aaaaaaaaaagaaatacatt

SEQ ID NO: 35117 - DNA, 20 bp, synthetic construct
  source 1..20: mol_type = other DNA
aaaaaaaaaaagaaatacat

SEQ ID NO: 35118 - DNA, 20 bp, synthetic construct
  source 1..20: mol_type = other DNA
aaaaaaaaaaaagaaataca

SEQ ID NO: 35119 - DNA, 20 bp, synthetic construct
  source 1..20: mol_type = other DNA
aaaaaaaaaaaaagaaatac

SEQ ID NO: 35120 - DNA, 20 bp, synthetic construct
  source 1..20: mol_type = other DNA
gaaaaaaaaaaaaagaaata

SEQ ID NO: 35121 - DNA, 20 bp, synthetic construct
  source 1..20: mol_type = other DNA
agaaaaaaaaaaaaagaaat

SEQ ID NO: 35122 - DNA, 20 bp, synthetic construct
  source 1..20: mol_type = other DNA
aagaaaaaaaaaaaaagaaa

SEQ ID NO: 35123 - DNA, 20 bp, synthetic construct
  source 1..20: mol_type = other DNA
aaagaaaaaaaaaaaaagaa

SEQ ID NO: 35124 - DNA, 20 bp, synthetic construct
  source 1..20: mol_type = other DNA
aaaagaaaaaaaaaaaaaga

SEQ ID NO: 35125 - DNA, 20 bp, synthetic construct
  source 1..20: mol_type = other DNA
aaaaagaaaaaaaaaaaaag

SEQ ID NO: 35126 - DNA, 20 bp, synthetic construct
  source 1..20: mol_type = other DNA
aaaaaagaaaaaaaaaaaaa

SEQ ID NO: 35127 - DNA, 20 bp, synthetic construct
  source 1..20: mol_type = other DNA
aaaaaaagaaaaaaaaaaaa

SEQ ID NO: 35128 - DNA, 20 bp, synthetic construct
  source 1..20: mol_type = other DNA
aaaaaaaagaaaaaaaaaaa

SEQ ID NO: 35129 - DNA, 20 bp, synthetic construct
  source 1..20: mol_type = other DNA
aaaaaaaaagaaaaaaaaaa

SEQ ID NO: 35130 - DNA, 20 bp, synthetic construct
  source 1..20: mol_type = other DNA
caaaaaaaaagaaaaaaaaa

SEQ ID NO: 35131 - DNA, 20 bp, synthetic construct
  source 1..20: mol_type = other DNA
tcaaaaaaaaagaaaaaaaa

SEQ ID NO: 35132 - DNA, 20 bp, synthetic construct
  source 1..20: mol_type = other DNA
ctcaaaaaaaaagaaaaaaa

SEQ ID NO: 35133 - DNA, 20 bp, synthetic construct
  source 1..20: mol_type = other DNA
tctcaaaaaaaaagaaaaaa

SEQ ID NO: 35134 - DNA, 20 bp, synthetic construct
  source 1..20: mol_type = other DNA
atctcaaaaaaaaagaaaaa

SEQ ID NO: 35135 - DNA, 20 bp, synthetic construct
  source 1..20: mol_type = other DNA
catctcaaaaaaaaagaaaa

SEQ ID NO: 35136 - DNA, 20 bp, synthetic construct
  source 1..20: mol_type = other DNA
ccatctcaaaaaaaaagaaa

SEQ ID NO: 35137 - DNA, 20 bp, synthetic construct
  source 1..20: mol_type = other DNA
tccatctcaaaaaaaaagaa

SEQ ID NO: 35138 - DNA, 20 bp, synthetic construct
  source 1..20: mol_type = other DNA
ctccatctcaaaaaaaaaga

SEQ ID NO: 35139 - DNA, 20 bp, synthetic construct
  source 1..20: mol_type = other DNA
actccatctcaaaaaaaaag

SEQ ID NO: 35140 - DNA, 20 bp, synthetic construct
  source 1..20: mol_type = other DNA
aactccatctcaaaaaaaaa

SEQ ID NO: 35141 - DNA, 20 bp, synthetic construct
  source 1..20: mol_type = other DNA
aaactccatctcaaaaaaaa

SEQ ID NO: 35142 - DNA, 20 bp, synthetic construct
  source 1..20: mol_type = other DNA
aaaactccatctcaaaaaaa

SEQ ID NO: 35143 - DNA, 20 bp, synthetic construct
  source 1..20: mol_type = other DNA
aaaaactccatctcaaaaaa

SEQ ID NO: 35144 - DNA, 20 bp, synthetic construct
  source 1..20: mol_type = other DNA
aaaaaactccatctcaaaaa

SEQ ID NO: 35145 - DNA, 20 bp, synthetic construct
  source 1..20: mol_type = other DNA
aaaaaaactccatctcaaaa

SEQ ID NO: 35146 - DNA, 20 bp, synthetic construct
  source 1..20: mol_type = other DNA
aaaaaaaactccatctcaaa

SEQ ID NO: 35147 - DNA, 20 bp, synthetic construct
  source 1..20: mol_type = other DNA
caaaaaaaactccatctcaa

SEQ ID NO: 35148 - DNA, 20 bp, synthetic construct
  source 1..20: mol_type = other DNA
gcaaaaaaaactccatctca

SEQ ID NO: 35149 - DNA, 20 bp, synthetic construct
  source 1..20: mol_type = other DNA
agcaaaaaaaactccatctc

SEQ ID NO: 35150 - DNA, 20 bp, synthetic construct
  source 1..20: mol_type = other DNA
gagcaaaaaaaactccatct

SEQ ID NO: 35151 - DNA, 20 bp, synthetic construct
  source 1..20: mol_type = other DNA
agagcaaaaaaaactccatc

SEQ ID NO: 35152 - DNA, 20 bp, synthetic construct
  source 1..20: mol_type = other DNA
aagagcaaaaaaaactccat

SEQ ID NO: 35153 - DNA, 20 bp, synthetic construct
  source 1..20: mol_type = other DNA
caagagcaaaaaaaactcca

SEQ ID NO: 35154 - DNA, 20 bp, synthetic construct
  source 1..20: mol_type = other DNA
acaagagcaaaaaaaactcc

SEQ ID NO: 35155 - DNA, 20 bp, synthetic construct
  source 1..20: mol_type = other DNA
gacaagagcaaaaaaaactc

SEQ ID NO: 35156 - DNA, 20 bp, synthetic construct
  source 1..20: mol_type = other DNA
tgacaagagcaaaaaaaact

SEQ ID NO: 35157 - DNA, 20 bp, synthetic construct
  source 1..20: mol_type = other DNA
gtgacaagagcaaaaaaaac

SEQ ID NO: 35158 - DNA, 20 bp, synthetic construct
  source 1..20: mol_type = other DNA
ggtgacaagagcaaaaaaaa

SEQ ID NO: 35159 - DNA, 20 bp, synthetic construct
  source 1..20: mol_type = other DNA
gggtgacaagagcaaaaaaa

SEQ ID NO: 35160 - DNA, 20 bp, synthetic construct
  source 1..20: mol_type = other DNA
tgggtgacaagagcaaaaaa

SEQ ID NO: 35161 - DNA, 20 bp, synthetic construct
  source 1..20: mol_type = other DNA
ctgggtgacaagagcaaaaa

SEQ ID NO: 35162 - DNA, 20 bp, synthetic construct
  source 1..20: mol_type = other DNA
cctgggtgacaagagcaaaa

SEQ ID NO: 35163 - DNA, 20 bp, synthetic construct
  source 1..20: mol_type = other DNA
gcctgggtgacaagagcaaa

SEQ ID NO: 35164 - DNA, 20 bp, synthetic construct
  source 1..20: mol_type = other DNA
agcctgggtgacaagagcaa

SEQ ID NO: 35165 - DNA, 20 bp, synthetic construct
  source 1..20: mol_type = other DNA
cagcctgggtgacaagagca

SEQ ID NO: 35166 - DNA, 20 bp, synthetic construct
  source 1..20: mol_type = other DNA
ccagcctgggtgacaagagc

SEQ ID NO: 35167 - DNA, 20 bp, synthetic construct
  source 1..20: mol_type = other DNA
tccagcctgggtgacaagag

SEQ ID NO: 35168 - DNA, 20 bp, synthetic construct
  source 1..20: mol_type = other DNA
ctccagcctgggtgacaaga

SEQ ID NO: 35169 - DNA, 20 bp, synthetic construct
  source 1..20: mol_type = other DNA
actccagcctgggtgacaag

SEQ ID NO: 35170 - DNA, 20 bp, synthetic construct
  source 1..20: mol_type = other DNA
cactccagcctgggtgacaa

SEQ ID NO: 35171 - DNA, 20 bp, synthetic construct
  source 1..20: mol_type = other DNA
gcactccagcctgggtgaca

SEQ ID NO: 35172 - DNA, 20 bp, synthetic construct
  source 1..20: mol_type = other DNA
tgcactccagcctgggtgac

SEQ ID NO: 35173 - DNA, 20 bp, synthetic construct
  source 1..20: mol_type = other DNA
ctgcactccagcctgggtga

SEQ ID NO: 35174 - DNA, 20 bp, synthetic construct
  source 1..20: mol_type = other DNA
actgcactccagcctgggtg

SEQ ID NO: 35175 - DNA, 20 bp, synthetic construct
  source 1..20: mol_type = other DNA
cactgcactccagcctgggt

SEQ ID NO: 35176 - DNA, 20 bp, synthetic construct
  source 1..20: mol_type = other DNA
ccactgcactccagcctggg

SEQ ID NO: 35177 - DNA, 20 bp, synthetic construct
  source 1..20: mol_type = other DNA
gccactgcactccagcctgg

SEQ ID NO: 35178 - DNA, 20 bp, synthetic construct
  source 1..20: mol_type = other DNA
tgccactgcactccagcctg

SEQ ID NO: 35179 - DNA, 20 bp, synthetic construct
  source 1..20: mol_type = other DNA
atgccactgcactccagcct

SEQ ID NO: 35180 - DNA, 20 bp, synthetic construct
  source 1..20: mol_type = other DNA
catgccactgcactccagcc

SEQ ID NO: 35181 - DNA, 20 bp, synthetic construct
  source 1..20: mol_type = other DNA
gcatgccactgcactccagc

SEQ ID NO: 35182 - DNA, 20 bp, synthetic construct
  source 1..20: mol_type = other DNA
agcatgccactgcactccag

SEQ ID NO: 35183 - DNA, 20 bp, synthetic construct
  source 1..20: mol_type = other DNA
tagcatgccactgcactcca

SEQ ID NO: 35184 - DNA, 20 bp, synthetic construct
  source 1..20: mol_type = other DNA
atagcatgccactgcactcc

SEQ ID NO: 35185 - DNA, 20 bp, synthetic construct
  source 1..20: mol_type = other DNA
gatagcatgccactgcactc

SEQ ID NO: 35186 - DNA, 20 bp, synthetic construct
  source 1..20: mol_type = other DNA
agatagcatgccactgcact

SEQ ID NO: 35187 - DNA, 20 bp, synthetic construct
  source 1..20: mol_type = other DNA
gagatagcatgccactgcac

SEQ ID NO: 35188 - DNA, 20 bp, synthetic construct
  source 1..20: mol_type = other DNA
cgagatagcatgccactgca

SEQ ID NO: 35189 - DNA, 20 bp, synthetic construct
  source 1..20: mol_type = other DNA
ccgagatagcatgccactgc

SEQ ID NO: 35190 - DNA, 20 bp, synthetic construct
  source 1..20: mol_type = other DNA
gccgagatagcatgccactg

SEQ ID NO: 35191 - DNA, 20 bp, synthetic construct
  source 1..20: mol_type = other DNA
agccgagatagcatgccact

SEQ ID NO: 35192 - DNA, 20 bp, synthetic construct
  source 1..20: mol_type = other DNA
gagccgagatagcatgccac

SEQ ID NO: 35193 - DNA, 20 bp, synthetic construct
  source 1..20: mol_type = other DNA
tgagccgagatagcatgcca

SEQ ID NO: 35194 - DNA, 20 bp, synthetic construct
  source 1..20: mol_type = other DNA
gtgagccgagatagcatgcc

SEQ ID NO: 35195 - DNA, 20 bp, synthetic construct
  source 1..20: mol_type = other DNA
ggtgagccgagatagcatgc

SEQ ID NO: 35196 - DNA, 20 bp, synthetic construct
  source 1..20: mol_type = other DNA
cggtgagccgagatagcatg

SEQ ID NO: 35197 - DNA, 20 bp, synthetic construct
  source 1..20: mol_type = other DNA
gcggtgagccgagatagcat

SEQ ID NO: 35198 - DNA, 20 bp, synthetic construct
  source 1..20: mol_type = other DNA
tgcggtgagccgagatagca

SEQ ID NO: 35199 - DNA, 20 bp, synthetic construct
  source 1..20: mol_type = other DNA
ttgcggtgagccgagatagc

SEQ ID NO: 35200 - DNA, 20 bp, synthetic construct
  source 1..20: mol_type = other DNA
gttgcggtgagccgagatag

SEQ ID NO: 35201 - DNA, 20 bp, synthetic construct
  source 1..20: mol_type = other DNA
ggttgcggtgagccgagata

SEQ ID NO: 35202 - DNA, 20 bp, synthetic construct
  source 1..20: mol_type = other DNA
aggttgcggtgagccgagat

SEQ ID NO: 35203 - DNA, 20 bp, synthetic construct
  source 1..20: mol_type = other DNA
gaggttgcggtgagccgaga

SEQ ID NO: 35204 - DNA, 20 bp, synthetic construct
  source 1..20: mol_type = other DNA
ggaggttgcggtgagccgag

SEQ ID NO: 35205 - DNA, 20 bp, synthetic construct
  source 1..20: mol_type = other DNA
cggaggttgcggtgagccga

SEQ ID NO: 35206 - DNA, 20 bp, synthetic construct
  source 1..20: mol_type = other DNA
gcggaggttgcggtgagccg

SEQ ID NO: 35207 - DNA, 20 bp, synthetic construct
  source 1..20: mol_type = other DNA
ggcggaggttgcggtgagcc

SEQ ID NO: 35208 - DNA, 20 bp, synthetic construct
  source 1..20: mol_type = other DNA
aggcggaggttgcggtgagc

SEQ ID NO: 35209 - DNA, 20 bp, synthetic construct
  source 1..20: mol_type = other DNA
gaggcggaggttgcggtgag

SEQ ID NO: 35210 - DNA, 20 bp, synthetic construct
  source 1..20: mol_type = other DNA
ggaggcggaggttgcggtga

SEQ ID NO: 35211 - DNA, 20 bp, synthetic construct
  source 1..20: mol_type = other DNA
gggaggcggaggttgcggtg

SEQ ID NO: 35212 - DNA, 20 bp, synthetic construct
  source 1..20: mol_type = other DNA
cgggaggcggaggttgcggt

SEQ ID NO: 35213 - DNA, 20 bp, synthetic construct
  source 1..20: mol_type = other DNA
ccgggaggcggaggttgcgg

SEQ ID NO: 35214 - DNA, 20 bp, synthetic construct
  source 1..20: mol_type = other DNA
cccgggaggcggaggttgcg

SEQ ID NO: 35215 - DNA, 20 bp, synthetic construct
  source 1..20: mol_type = other DNA
acccgggaggcggaggttgc

SEQ ID NO: 35216 - DNA, 20 bp, synthetic construct
  source 1..20: mol_type = other DNA
aacccgggaggcggaggttg

SEQ ID NO: 35217 - DNA, 20 bp, synthetic construct
  source 1..20: mol_type = other DNA
gaacccgggaggcggaggtt

SEQ ID NO: 35218 - DNA, 20 bp, synthetic construct
  source 1..20: mol_type = other DNA
tgaacccgggaggcggaggt

SEQ ID NO: 35219 - DNA, 20 bp, synthetic construct
  source 1..20: mol_type = other DNA
ttgaacccgggaggcggagg

SEQ ID NO: 35220 - DNA, 20 bp, synthetic construct
  source 1..20: mol_type = other DNA
cttgaacccgggaggcggag

SEQ ID NO: 35221 - DNA, 20 bp, synthetic construct
  source 1..20: mol_type = other DNA
gcttgaacccgggaggcgga

SEQ ID NO: 35222 - DNA, 20 bp, synthetic construct
  source 1..20: mol_type = other DNA
tgcttgaacccgggaggcgg

SEQ ID NO: 35223 - DNA, 20 bp, synthetic construct
  source 1..20: mol_type = other DNA
ttgcttgaacccgggaggcg

SEQ ID NO: 35224 - DNA, 20 bp, synthetic construct
  source 1..20: mol_type = other DNA
attgcttgaacccgggaggc

SEQ ID NO: 35225 - DNA, 20 bp, synthetic construct
  source 1..20: mol_type = other DNA
aattgcttgaacccgggagg

SEQ ID NO: 35226 - DNA, 20 bp, synthetic construct
  source 1..20: mol_type = other DNA
gaattgcttgaacccgggag

SEQ ID NO: 35227 - DNA, 20 bp, synthetic construct
  source 1..20: mol_type = other DNA
agaattgcttgaacccggga

SEQ ID NO: 35228 - DNA, 20 bp, synthetic construct
  source 1..20: mol_type = other DNA
gagaattgcttgaacccggg

SEQ ID NO: 35229 - DNA, 20 bp, synthetic construct
  source 1..20: mol_type = other DNA
ggagaattgcttgaacccgg

SEQ ID NO: 35230 - DNA, 20 bp, synthetic construct
  source 1..20: mol_type = other DNA
aggagaattgcttgaacccg

SEQ ID NO: 35231 - DNA, 20 bp, synthetic construct
  source 1..20: mol_type = other DNA
caggagaattgcttgaaccc

SEQ ID NO: 35232 - DNA, 20 bp, synthetic construct
  source 1..20: mol_type = other DNA
gcaggagaattgcttgaacc

SEQ ID NO: 35233 - DNA, 20 bp, synthetic construct
  source 1..20: mol_type = other DNA
ggcaggagaattgcttgaac

SEQ ID NO: 35234 - DNA, 20 bp, synthetic construct
  source 1..20: mol_type = other DNA
aggcaggagaattgcttgaa

SEQ ID NO: 35235 - DNA, 20 bp, synthetic construct
  source 1..20: mol_type = other DNA
gaggcaggagaattgcttga

SEQ ID NO: 35236 - DNA, 20 bp, synthetic construct
  source 1..20: mol_type = other DNA
tgaggcaggagaattgcttg

SEQ ID NO: 35237 - DNA, 20 bp, synthetic construct
  source 1..20: mol_type = other DNA
ctgaggcaggagaattgctt

SEQ ID NO: 35238 - DNA, 20 bp, synthetic construct
  source 1..20: mol_type = other DNA
gctgaggcaggagaattgct

SEQ ID NO: 35239 - DNA, 20 bp, synthetic construct
  source 1..20: mol_type = other DNA
ggctgaggcaggagaattgc

SEQ ID NO: 35240 - DNA, 20 bp, synthetic construct
  source 1..20: mol_type = other DNA
aggctgaggcaggagaattg

SEQ ID NO: 35241 - DNA, 20 bp, synthetic construct
  source 1..20: mol_type = other DNA
gaggctgaggcaggagaatt

SEQ ID NO: 35242 - DNA, 20 bp, synthetic construct
  source 1..20: mol_type = other DNA
ggaggctgaggcaggagaat

SEQ ID NO: 35243 - DNA, 20 bp, synthetic construct
  source 1..20: mol_type = other DNA
aggaggctgaggcaggagaa

SEQ ID NO: 35244 - DNA, 20 bp, synthetic construct
  source 1..20: mol_type = other DNA
caggaggctgaggcaggaga

SEQ ID NO: 35245 - DNA, 20 bp, synthetic construct
  source 1..20: mol_type = other DNA
tcaggaggctgaggcaggag

SEQ ID NO: 35246 - DNA, 20 bp, synthetic construct
  source 1..20: mol_type = other DNA
ctcaggaggctgaggcagga

SEQ ID NO: 35247 - DNA, 20 bp, synthetic construct
  source 1..20: mol_type = other DNA
actcaggaggctgaggcagg

SEQ ID NO: 35248 - DNA, 20 bp, synthetic construct
  source 1..20: mol_type = other DNA
tactcaggaggctgaggcag

SEQ ID NO: 35249 - DNA, 20 bp, synthetic construct
  source 1..20: mol_type = other DNA
ctactcaggaggctgaggca

SEQ ID NO: 35250 - DNA, 20 bp, synthetic construct
  source 1..20: mol_type = other DNA
gctactcaggaggctgaggc

SEQ ID NO: 35251 - DNA, 20 bp, synthetic construct
  source 1..20: mol_type = other DNA
agctactcaggaggctgagg

SEQ ID NO: 35252 - DNA, 20 bp, synthetic construct
  source 1..20: mol_type = other DNA
cagctactcaggaggctgag

SEQ ID NO: 35253 - DNA, 20 bp, synthetic construct
  source 1..20: mol_type = other DNA
ccagctactcaggaggctga

SEQ ID NO: 35254 - DNA, 20 bp, synthetic construct
  source 1..20: mol_type = other DNA
cccagctactcaggaggctg

SEQ ID NO: 35255 - DNA, 20 bp, synthetic construct
  source 1..20: mol_type = other DNA
tcccagctactcaggaggct

SEQ ID NO: 35256 - DNA, 20 bp, synthetic construct
  source 1..20: mol_type = other DNA
atcccagctactcaggaggc

SEQ ID NO: 35257 - DNA, 20 bp, synthetic construct
  source 1..20: mol_type = other DNA
aatcccagctactcaggagg

SEQ ID NO: 35258 - DNA, 20 bp, synthetic construct
  source 1..20: mol_type = other DNA
taatcccagctactcaggag

SEQ ID NO: 35259 - DNA, 20 bp, synthetic construct
  source 1..20: mol_type = other DNA
gtaatcccagctactcagga

SEQ ID NO: 35260 - DNA, 20 bp, synthetic construct
  source 1..20: mol_type = other DNA
tgtaatcccagctactcagg

SEQ ID NO: 35261 - DNA, 20 bp, synthetic construct
  source 1..20: mol_type = other DNA
ctgtaatcccagctactcag

SEQ ID NO: 35262 - DNA, 20 bp, synthetic construct
  source 1..20: mol_type = other DNA
cctgtaatcccagctactca

SEQ ID NO: 35263 - DNA, 20 bp, synthetic construct
  source 1..20: mol_type = other DNA
gcctgtaatcccagctactc

SEQ ID NO: 35264 - DNA, 20 bp, synthetic construct
  source 1..20: mol_type = other DNA
tgcctgtaatcccagctact

SEQ ID NO: 35265 - DNA, 20 bp, synthetic construct
  source 1..20: mol_type = other DNA
atgcctgtaatcccagctac

SEQ ID NO: 35266 - DNA, 20 bp, synthetic construct
  source 1..20: mol_type = other DNA
catgcctgtaatcccagcta

SEQ ID NO: 35267 - DNA, 20 bp, synthetic construct
  source 1..20: mol_type = other DNA
gcatgcctgtaatcccagct

SEQ ID NO: 35268 - DNA, 20 bp, synthetic construct
  source 1..20: mol_type = other DNA
tgcatgcctgtaatcccagc

SEQ ID NO: 35269 - DNA, 20 bp, synthetic construct
  source 1..20: mol_type = other DNA
gtgcatgcctgtaatcccag

SEQ ID NO: 35270 - DNA, 20 bp, synthetic construct
  source 1..20: mol_type = other DNA
ggtgcatgcctgtaatccca

SEQ ID NO: 35271 - DNA, 20 bp, synthetic construct
  source 1..20: mol_type = other DNA
tggtgcatgcctgtaatccc

SEQ ID NO: 35272 - DNA, 20 bp, synthetic construct
  source 1..20: mol_type = other DNA
gtggtgcatgcctgtaatcc

SEQ ID NO: 35273 - DNA, 20 bp, synthetic construct
  source 1..20: mol_type = other DNA
ggtggtgcatgcctgtaatc

SEQ ID NO: 35274 - DNA, 20 bp, synthetic construct
  source 1..20: mol_type = other DNA
tggtggtgcatgcctgtaat

SEQ ID NO: 35275 - DNA, 20 bp, synthetic construct
  source 1..20: mol_type = other DNA
atggtggtgcatgcctgtaa

SEQ ID NO: 35276 - DNA, 20 bp, synthetic construct
  source 1..20: mol_type = other DNA
catggtggtgcatgcctgta

SEQ ID NO: 35277 - DNA, 20 bp, synthetic construct
  source 1..20: mol_type = other DNA
gcatggtggtgcatgcctgt

SEQ ID NO: 35278 - DNA, 20 bp, synthetic construct
  source 1..20: mol_type = other DNA
ggcatggtggtgcatgcctg

SEQ ID NO: 35279 - DNA, 20 bp, synthetic construct
  source 1..20: mol_type = other DNA
gggcatggtggtgcatgcct

SEQ ID NO: 35280 - DNA, 20 bp, synthetic construct
  source 1..20: mol_type = other DNA
tgggcatggtggtgcatgcc

SEQ ID NO: 35281 - DNA, 20 bp, synthetic construct
  source 1..20: mol_type = other DNA
gtgggcatggtggtgcatgc

SEQ ID NO: 35282 - DNA, 20 bp, synthetic construct
  source 1..20: mol_type = other DNA
ggtgggcatggtggtgcatg

SEQ ID NO: 35283 - DNA, 20 bp, synthetic construct
  source 1..20: mol_type = other DNA
aggtgggcatggtggtgcat

SEQ ID NO: 35284 - DNA, 20 bp, synthetic construct
  source 1..20: mol_type = other DNA
taggtgggcatggtggtgca

SEQ ID NO: 35285 - DNA, 20 bp, synthetic construct
  source 1..20: mol_type = other DNA
ttaggtgggcatggtggtgc

SEQ ID NO: 35286 - DNA, 20 bp, synthetic construct
  source 1..20: mol_type = other DNA
attaggtgggcatggtggtg

SEQ ID NO: 35287 - DNA, 20 bp, synthetic construct
  source 1..20: mol_type = other DNA
aattaggtgggcatggtggt

SEQ ID NO: 35288 - DNA, 20 bp, synthetic construct
  source 1..20: mol_type = other DNA
aaattaggtgggcatggtgg

SEQ ID NO: 35289 - DNA, 20 bp, synthetic construct
  source 1..20: mol_type = other DNA
aaaattaggtgggcatggtg

SEQ ID NO: 35290 - DNA, 20 bp, synthetic construct
  source 1..20: mol_type = other DNA
caaaattaggtgggcatggt

SEQ ID NO: 35291 - DNA, 20 bp, synthetic construct
  source 1..20: mol_type = other DNA
acaaaattaggtgggcatgg

SEQ ID NO: 35292 - DNA, 20 bp, synthetic construct
  source 1..20: mol_type = other DNA
tacaaaattaggtgggcatg

SEQ ID NO: 35293 - DNA, 20 bp, synthetic construct
  source 1..20: mol_type = other DNA
atacaaaattaggtgggcat

SEQ ID NO: 35294 - DNA, 20 bp, synthetic construct
  source 1..20: mol_type = other DNA
aatacaaaattaggtgggca

SEQ ID NO: 35295 - DNA, 20 bp, synthetic construct
  source 1..20: mol_type = other DNA
aaatacaaaattaggtgggc

SEQ ID NO: 35296 - DNA, 20 bp, synthetic construct
  source 1..20: mol_type = other DNA
aaaatacaaaattaggtggg

SEQ ID NO: 35297 - DNA, 20 bp, synthetic construct
  source 1..20: mol_type = other DNA
aaaaatacaaaattaggtgg

SEQ ID NO: 35298 - DNA, 20 bp, synthetic construct
  source 1..20: mol_type = other DNA
taaaaatacaaaattaggtg

SEQ ID NO: 35299 - DNA, 20 bp, synthetic construct
  source 1..20: mol_type = other DNA
ctaaaaatacaaaattaggt

SEQ ID NO: 35300 - DNA, 20 bp, synthetic construct
  source 1..20: mol_type = other DNA
actaaaaatacaaaattagg

SEQ ID NO: 35301 - DNA, 20 bp, synthetic construct
  source 1..20: mol_type = other DNA
tactaaaaatacaaaattag

SEQ ID NO: 35302 - DNA, 20 bp, synthetic construct
  source 1..20: mol_type = other DNA
ctactaaaaatacaaaatta

SEQ ID NO: 35303 - DNA, 20 bp, synthetic construct
  source 1..20: mol_type = other DNA
tctactaaaaatacaaaatt

SEQ ID NO: 35304 - DNA, 20 bp, synthetic construct
  source 1..20: mol_type = other DNA
ctctactaaaaatacaaaat

SEQ ID NO: 35305 - DNA, 20 bp, synthetic construct
  source 1..20: mol_type = other DNA
cctctactaaaaatacaaaa

SEQ ID NO: 35306 - DNA, 20 bp, synthetic construct
  source 1..20: mol_type = other DNA
gcctctactaaaaatacaaa

SEQ ID NO: 35307 - DNA, 20 bp, synthetic construct
  source 1..20: mol_type = other DNA
cgcctctactaaaaatacaa

SEQ ID NO: 35308 - DNA, 20 bp, synthetic construct
  source 1..20: mol_type = other DNA
ccgcctctactaaaaataca

SEQ ID NO: 35309 - DNA, 20 bp, synthetic construct
  source 1..20: mol_type = other DNA
cccgcctctactaaaaatac

SEQ ID NO: 35310 - DNA, 20 bp, synthetic construct
  source 1..20: mol_type = other DNA
ccccgcctctactaaaaata

SEQ ID NO: 35311 - DNA, 20 bp, synthetic construct
  source 1..20: mol_type = other DNA
accccgcctctactaaaaat

SEQ ID NO: 35312 - DNA, 20 bp, synthetic construct
  source 1..20: mol_type = other DNA
aaccccgcctctactaaaaa

SEQ ID NO: 35313 - DNA, 20 bp, synthetic construct
  source 1..20: mol_type = other DNA
aaaccccgcctctactaaaa

SEQ ID NO: 35314 - DNA, 20 bp, synthetic construct
  source 1..20: mol_type = other DNA
gaaaccccgcctctactaaa

SEQ ID NO: 35315 - DNA, 20 bp, synthetic construct
  source 1..20: mol_type = other DNA
agaaaccccgcctctactaa

SEQ ID NO: 35316 - DNA, 20 bp, synthetic construct
  source 1..20: mol_type = other DNA
gagaaaccccgcctctacta

SEQ ID NO: 35317 - DNA, 20 bp, synthetic construct
  source 1..20: mol_type = other DNA
ggagaaaccccgcctctact

SEQ ID NO: 35318 - DNA, 20 bp, synthetic construct
  source 1..20: mol_type = other DNA
tggagaaaccccgcctctac

SEQ ID NO: 35319 - DNA, 20 bp, synthetic construct
  source 1..20: mol_type = other DNA
atggagaaaccccgcctcta

SEQ ID NO: 35320 - DNA, 20 bp, synthetic construct
  source 1..20: mol_type = other DNA
catggagaaaccccgcctct

SEQ ID NO: 35321 - DNA, 20 bp, synthetic construct
  source 1..20: mol_type = other DNA
acatggagaaaccccgcctc

SEQ ID NO: 35322 - DNA, 20 bp, synthetic construct
  source 1..20: mol_type = other DNA
aacatggagaaaccccgcct

SEQ ID NO: 35323 - DNA, 20 bp, synthetic construct
  source 1..20: mol_type = other DNA
caacatggagaaaccccgcc

SEQ ID NO: 35324 - DNA, 20 bp, synthetic construct
  source 1..20: mol_type = other DNA
ccaacatggagaaaccccgc

SEQ ID NO: 35325 - DNA, 20 bp, synthetic construct
  source 1..20: mol_type = other DNA
accaacatggagaaaccccg

SEQ ID NO: 35326 - DNA, 20 bp, synthetic construct
  source 1..20: mol_type = other DNA
gaccaacatggagaaacccc

SEQ ID NO: 35327 - DNA, 20 bp, synthetic construct
  source 1..20: mol_type = other DNA
tgaccaacatggagaaaccc

SEQ ID NO: 35328 - DNA, 20 bp, synthetic construct
  source 1..20: mol_type = other DNA
ctgaccaacatggagaaacc

SEQ ID NO: 35329 - DNA, 20 bp, synthetic construct
  source 1..20: mol_type = other DNA
cctgaccaacatggagaaac

SEQ ID NO: 35330 - DNA, 20 bp, synthetic construct
  source 1..20: mol_type = other DNA
gcctgaccaacatggagaaa

SEQ ID NO: 35331 - DNA, 20 bp, synthetic construct
  source 1..20: mol_type = other DNA
agcctgaccaacatggagaa

SEQ ID NO: 35332 - DNA, 20 bp, synthetic construct
  source 1..20: mol_type = other DNA
cagcctgaccaacatggaga

SEQ ID NO: 35333 - DNA, 20 bp, synthetic construct
  source 1..20: mol_type = other DNA
ccagcctgaccaacatggag

SEQ ID NO: 35334 - DNA, 20 bp, synthetic construct
  source 1..20: mol_type = other DNA
accagcctgaccaacatgga

SEQ ID NO: 35335 - DNA, 20 bp, synthetic construct
  source 1..20: mol_type = other DNA
gaccagcctgaccaacatgg

SEQ ID NO: 35336 - DNA, 20 bp, synthetic construct
  source 1..20: mol_type = other DNA
agaccagcctgaccaacatg

SEQ ID NO: 35337 - DNA, 20 bp, synthetic construct
  source 1..20: mol_type = other DNA
aagaccagcctgaccaacat

SEQ ID NO: 35338 - DNA, 20 bp, synthetic construct
  source 1..20: mol_type = other DNA
caagaccagcctgaccaaca

SEQ ID NO: 35339 - DNA, 20 bp, synthetic construct
  source 1..20: mol_type = other DNA
tcaagaccagcctgaccaac

SEQ ID NO: 35340 - DNA, 20 bp, synthetic construct
  source 1..20: mol_type = other DNA
ttcaagaccagcctgaccaa

SEQ ID NO: 35341 - DNA, 20 bp, synthetic construct
  source 1..20: mol_type = other DNA
gttcaagaccagcctgacca

SEQ ID NO: 35342 - DNA, 20 bp, synthetic construct
  source 1..20: mol_type = other DNA
agttcaagaccagcctgacc

SEQ ID NO: 35343 - DNA, 20 bp, synthetic construct
  source 1..20: mol_type = other DNA
gagttcaagaccagcctgac

SEQ ID NO: 35344 - DNA, 20 bp, synthetic construct
  source 1..20: mol_type = other DNA
ggagttcaagaccagcctga

SEQ ID NO: 35345 - DNA, 20 bp, synthetic construct
  source 1..20: mol_type = other DNA
gggagttcaagaccagcctg

SEQ ID NO: 35346 - DNA, 20 bp, synthetic construct
  source 1..20: mol_type = other DNA
cgggagttcaagaccagcct

SEQ ID NO: 35347 - DNA, 20 bp, synthetic construct
  source 1..20: mol_type = other DNA
tcgggagttcaagaccagcc

SEQ ID NO: 35348 - DNA, 20 bp, synthetic construct
  source 1..20: mol_type = other DNA
atcgggagttcaagaccagc

SEQ ID NO: 35349 - DNA, 20 bp, synthetic construct
  source 1..20: mol_type = other DNA
gatcgggagttcaagaccag

SEQ ID NO: 35350 - DNA, 20 bp, synthetic construct
  source 1..20: mol_type = other DNA
agatcgggagttcaagacca

SEQ ID NO: 35351 - DNA, 20 bp, synthetic construct
  source 1..20: mol_type = other DNA
gagatcgggagttcaagacc

SEQ ID NO: 35352 - DNA, 20 bp, synthetic construct
  source 1..20: mol_type = other DNA
tgagatcgggagttcaagac

SEQ ID NO: 35353 - DNA, 20 bp, synthetic construct
  source 1..20: mol_type = other DNA
ctgagatcgggagttcaaga

SEQ ID NO: 35354 - DNA, 20 bp, synthetic construct
  source 1..20: mol_type = other DNA
cctgagatcgggagttcaag

SEQ ID NO: 35355 - DNA, 20 bp, synthetic construct
  source 1..20: mol_type = other DNA
acctgagatcgggagttcaa

SEQ ID NO: 35356 - DNA, 20 bp, synthetic construct
  source 1..20: mol_type = other DNA
cacctgagatcgggagttca

SEQ ID NO: 35357 - DNA, 20 bp, synthetic construct
  source 1..20: mol_type = other DNA
tcacctgagatcgggagttc

SEQ ID NO: 35358 - DNA, 20 bp, synthetic construct
  source 1..20: mol_type = other DNA
atcacctgagatcgggagtt

SEQ ID NO: 35359 - DNA, 20 bp, synthetic construct
  source 1..20: mol_type = other DNA
gatcacctgagatcgggagt

SEQ ID NO: 35360 - DNA, 20 bp, synthetic construct
  source 1..20: mol_type = other DNA
agatcacctgagatcgggag

SEQ ID NO: 35361 - DNA, 20 bp, synthetic construct
  source 1..20: mol_type = other DNA
cagatcacctgagatcggga

SEQ ID NO: 35362 - DNA, 20 bp, synthetic construct
  source 1..20: mol_type = other DNA
gcagatcacctgagatcggg

SEQ ID NO: 35363 - DNA, 20 bp, synthetic construct
  source 1..20: mol_type = other DNA
ggcagatcacctgagatcgg

SEQ ID NO: 35364 - DNA, 20 bp, synthetic construct
  source 1..20: mol_type = other DNA
aggcagatcacctgagatcg

SEQ ID NO: 35365 - DNA, 20 bp, synthetic construct
  source 1..20: mol_type = other DNA
caggcagatcacctgagatc

SEQ ID NO: 35366 - DNA, 20 bp, synthetic construct
  source 1..20: mol_type = other DNA
gcaggcagatcacctgagat

SEQ ID NO: 35367 - DNA, 20 bp, synthetic construct
  source 1..20: mol_type = other DNA
ggcaggcagatcacctgaga

SEQ ID NO: 35368 - DNA, 20 bp, synthetic construct
  source 1..20: mol_type = other DNA
aggcaggcagatcacctgag

SEQ ID NO: 35369 - DNA, 20 bp, synthetic construct
  source 1..20: mol_type = other DNA
gaggcaggcagatcacctga

SEQ ID NO: 35370 - DNA, 20 bp, synthetic construct
  source 1..20: mol_type = other DNA
cgaggcaggcagatcacctg

SEQ ID NO: 35371 - DNA, 20 bp, synthetic construct
  source 1..20: mol_type = other DNA
ccgaggcaggcagatcacct

SEQ ID NO: 35372 - DNA, 20 bp, synthetic construct
  source 1..20: mol_type = other DNA
gccgaggcaggcagatcacc

SEQ ID NO: 35373 - DNA, 20 bp, synthetic construct
  source 1..20: mol_type = other DNA
ggccgaggcaggcagatcac

SEQ ID NO: 35374 - DNA, 20 bp, synthetic construct
  source 1..20: mol_type = other DNA
aggccgaggcaggcagatca

SEQ ID NO: 35375 - DNA, 20 bp, synthetic construct
  source 1..20: mol_type = other DNA
aaggccgaggcaggcagatc

SEQ ID NO: 35376 - DNA, 20 bp, synthetic construct
  source 1..20: mol_type = other DNA
gaaggccgaggcaggcagat

SEQ ID NO: 35377 - DNA, 20 bp, synthetic construct
  source 1..20: mol_type = other DNA
ggaaggccgaggcaggcaga

SEQ ID NO: 35378 - DNA, 20 bp, synthetic construct
  source 1..20: mol_type = other DNA
cggaaggccgaggcaggcag

SEQ ID NO: 35379 - DNA, 20 bp, synthetic construct
  source 1..20: mol_type = other DNA
tcggaaggccgaggcaggca

SEQ ID NO: 35380 - DNA, 20 bp, synthetic construct
  source 1..20: mol_type = other DNA
ttcggaaggccgaggcaggc

SEQ ID NO: 35381 - DNA, 20 bp, synthetic construct
  source 1..20: mol_type = other DNA
cttcggaaggccgaggcagg

SEQ ID NO: 35382 - DNA, 20 bp, synthetic construct
  source 1..20: mol_type = other DNA
acttcggaaggccgaggcag

SEQ ID NO: 35383 - DNA, 20 bp, synthetic construct
  source 1..20: mol_type = other DNA
cacttcggaaggccgaggca

SEQ ID NO: 35384 - DNA, 20 bp, synthetic construct
  source 1..20: mol_type = other DNA
acacttcggaaggccgaggc

SEQ ID NO: 35385 - DNA, 20 bp, synthetic construct
  source 1..20: mol_type = other DNA
aacacttcggaaggccgagg

SEQ ID NO: 35386 - DNA, 20 bp, synthetic construct
  source 1..20: mol_type = other DNA
caacacttcggaaggccgag

SEQ ID NO: 35387 - DNA, 20 bp, synthetic construct
  source 1..20: mol_type = other DNA
tcaacacttcggaaggccga

SEQ ID NO: 35388 - DNA, 20 bp, synthetic construct
  source 1..20: mol_type = other DNA
ctcaacacttcggaaggccg

SEQ ID NO: 35389 - DNA, 20 bp, synthetic construct
  source 1..20: mol_type = other DNA
tctcaacacttcggaaggcc

SEQ ID NO: 35390 - DNA, 20 bp, synthetic construct
  source 1..20: mol_type = other DNA
atctcaacacttcggaaggc

SEQ ID NO: 35391 - DNA, 20 bp, synthetic construct
  source 1..20: mol_type = other DNA
aatctcaacacttcggaagg

SEQ ID NO: 35392 - DNA, 20 bp, synthetic construct
  source 1..20: mol_type = other DNA
taatctcaacacttcggaag

SEQ ID NO: 35393 - DNA, 20 bp, synthetic construct
  source 1..20: mol_type = other DNA
gtaatctcaacacttcggaa

SEQ ID NO: 35394 - DNA, 20 bp, synthetic construct
  source 1..20: mol_type = other DNA
tgtaatctcaacacttcgga

SEQ ID NO: 35395 - DNA, 20 bp, synthetic construct
  source 1..20: mol_type = other DNA
ctgtaatctcaacacttcgg

SEQ ID NO: 35396 - DNA, 20 bp, synthetic construct
  source 1..20: mol_type = other DNA
cctgtaatctcaacacttcg

SEQ ID NO: 35397 - DNA, 20 bp, synthetic construct
  source 1..20: mol_type = other DNA
gcctgtaatctcaacacttc

SEQ ID NO: 35398 - DNA, 20 bp, synthetic construct
  source 1..20: mol_type = other DNA
cgcctgtaatctcaacactt

SEQ ID NO: 35399 - DNA, 20 bp, synthetic construct
  source 1..20: mol_type = other DNA
acgcctgtaatctcaacact

SEQ ID NO: 35400 - DNA, 20 bp, synthetic construct
  source 1..20: mol_type = other DNA
cacgcctgtaatctcaacac

SEQ ID NO: 35401 - DNA, 20 bp, synthetic construct
  source 1..20: mol_type = other DNA
tcacgcctgtaatctcaaca

SEQ ID NO: 35402 - DNA, 20 bp, synthetic construct
  source 1..20: mol_type = other DNA
ctcacgcctgtaatctcaac

SEQ ID NO: 35403 - DNA, 20 bp, synthetic construct
  source 1..20: mol_type = other DNA
gctcacgcctgtaatctcaa

SEQ ID NO: 35404 - DNA, 20 bp, synthetic construct
  source 1..20: mol_type = other DNA
ggctcacgcctgtaatctca

SEQ ID NO: 35405 - DNA, 20 bp, synthetic construct
  source 1..20: mol_type = other DNA
tggctcacgcctgtaatctc

SEQ ID NO: 35406 - DNA, 20 bp, synthetic construct
  source 1..20: mol_type = other DNA
gtggctcacgcctgtaatct

SEQ ID NO: 35407 - DNA, 20 bp, synthetic construct
  source 1..20: mol_type = other DNA
ggtggctcacgcctgtaatc

SEQ ID NO: 35408 - DNA, 20 bp, synthetic construct
  source 1..20: mol_type = other DNA
cggtggctcacgcctgtaat

SEQ ID NO: 35409 - DNA, 20 bp, synthetic construct
  source 1..20: mol_type = other DNA
gcggtggctcacgcctgtaa

SEQ ID NO: 35410 - DNA, 20 bp, synthetic construct
  source 1..20: mol_type = other DNA
cgcggtggctcacgcctgta

SEQ ID NO: 35411 - DNA, 20 bp, synthetic construct
  source 1..20: mol_type = other DNA
gcgcggtggctcacgcctgt

SEQ ID NO: 35412 - DNA, 20 bp, synthetic construct
  source 1..20: mol_type = other DNA
ggcgcggtggctcacgcctg

SEQ ID NO: 35413 - DNA, 20 bp, synthetic construct
  source 1..20: mol_type = other DNA
gggcgcggtggctcacgcct

SEQ ID NO: 35414 - DNA, 20 bp, synthetic construct
  source 1..20: mol_type = other DNA
cgggcgcggtggctcacgcc

SEQ ID NO: 35415 - DNA, 20 bp, synthetic construct
  source 1..20: mol_type = other DNA
ccgggcgcggtggctcacgc

SEQ ID NO: 35416 - DNA, 20 bp, synthetic construct
  source 1..20: mol_type = other DNA
gccgggcgcggtggctcacg

SEQ ID NO: 35417 - DNA, 20 bp, synthetic construct
  source 1..20: mol_type = other DNA
ggccgggcgcggtggctcac

SEQ ID NO: 35418 - DNA, 20 bp, synthetic construct
  source 1..20: mol_type = other DNA
cggccgggcgcggtggctca

SEQ ID NO: 35419 - DNA, 20 bp, synthetic construct
  source 1..20: mol_type = other DNA
acggccgggcgcggtggctc

SEQ ID NO: 35420 - DNA, 20 bp, synthetic construct
  source 1..20: mol_type = other DNA
tacggccgggcgcggtggct

SEQ ID NO: 35421 - DNA, 20 bp, synthetic construct
  source 1..20: mol_type = other DNA
atacggccgggcgcggtggc

SEQ ID NO: 35422 - DNA, 20 bp, synthetic construct
  source 1..20: mol_type = other DNA
aatacggccgggcgcggtgg

SEQ ID NO: 35423 - DNA, 20 bp, synthetic construct
  source 1..20: mol_type = other DNA
aaatacggccgggcgcggtg

SEQ ID NO: 35424 - DNA, 20 bp, synthetic construct
  source 1..20: mol_type = other DNA
gaaatacggccgggcgcggt

SEQ ID NO: 35425 - DNA, 20 bp, synthetic construct
  source 1..20: mol_type = other DNA
agaaatacggccgggcgcgg

SEQ ID NO: 35426 - DNA, 20 bp, synthetic construct
  source 1..20: mol_type = other DNA
aagaaatacggccgggcgcg

SEQ ID NO: 35427 - DNA, 20 bp, synthetic construct
  source 1..20: mol_type = other DNA
taagaaatacggccgggcgc

SEQ ID NO: 35428 - DNA, 20 bp, synthetic construct
  source 1..20: mol_type = other DNA
ttaagaaatacggccgggcg

SEQ ID NO: 35429 - DNA, 20 bp, synthetic construct
  source 1..20: mol_type = other DNA
tttaagaaatacggccgggc

SEQ ID NO: 35430 - DNA, 20 bp, synthetic construct
  source 1..20: mol_type = other DNA
atttaagaaatacggccggg

SEQ ID NO: 35431 - DNA, 20 bp, synthetic construct
  source 1..20: mol_type = other DNA
tatttaagaaatacggccgg

SEQ ID NO: 35432 - DNA, 20 bp, synthetic construct
  source 1..20: mol_type = other DNA
ttatttaagaaatacggccg

SEQ ID NO: 35433 - DNA, 20 bp, synthetic construct
  source 1..20: mol_type = other DNA
tttatttaagaaatacggcc

SEQ ID NO: 35434 - DNA, 20 bp, synthetic construct
  source 1..20: mol_type = other DNA
ttttatttaagaaatacggc

SEQ ID NO: 35435 - DNA, 20 bp, synthetic construct
  source 1..20: mol_type = other DNA
attttatttaagaaatacgg

SEQ ID NO: 35436 - DNA, 20 bp, synthetic construct
  source 1..20: mol_type = other DNA
cattttatttaagaaatacg

SEQ ID NO: 35437 - DNA, 20 bp, synthetic construct
  source 1..20: mol_type = other DNA
ccattttatttaagaaatac

SEQ ID NO: 35438 - DNA, 20 bp, synthetic construct
  source 1..20: mol_type = other DNA
gccattttatttaagaaata

SEQ ID NO: 35439 - DNA, 20 bp, synthetic construct
  source 1..20: mol_type = other DNA
agccattttatttaagaaat

SEQ ID NO: 35440 - DNA, 20 bp, synthetic construct
  source 1..20: mol_type = other DNA
aagccattttatttaagaaa

SEQ ID NO: 35441 - DNA, 20 bp, synthetic construct
  source 1..20: mol_type = other DNA
taagccattttatttaagaa

SEQ ID NO: 35442 - DNA, 20 bp, synthetic construct
  source 1..20: mol_type = other DNA
ttaagccattttatttaaga

SEQ ID NO: 35443 - DNA, 20 bp, synthetic construct
  source 1..20: mol_type = other DNA
tttaagccattttatttaag

SEQ ID NO: 35444 - DNA, 20 bp, synthetic construct
  source 1..20: mol_type = other DNA
gtttaagccattttatttaa

SEQ ID NO: 35445 - DNA, 20 bp, synthetic construct
  source 1..20: mol_type = other DNA
cgtttaagccattttattta

SEQ ID NO: 35446 - DNA, 20 bp, synthetic construct
  source 1..20: mol_type = other DNA
acgtttaagccattttattt

SEQ ID NO: 35447 - DNA, 20 bp, synthetic construct
  source 1..20: mol_type = other DNA
gacgtttaagccattttatt

SEQ ID NO: 35448 - DNA, 20 bp, synthetic construct
  source 1..20: mol_type = other DNA
tgacgtttaagccattttat

SEQ ID NO: 35449 - DNA, 20 bp, synthetic construct
  source 1..20: mol_type = other DNA
ttgacgtttaagccatttta

SEQ ID NO: 35450 - DNA, 20 bp, synthetic construct
  source 1..20: mol_type = other DNA
tttgacgtttaagccatttt

SEQ ID NO: 35451 - DNA, 20 bp, synthetic construct
  source 1..20: mol_type = other DNA
ttttgacgtttaagccattt

SEQ ID NO: 35452 - DNA, 20 bp, synthetic construct
  source 1..20: mol_type = other DNA
attttgacgtttaagccatt

SEQ ID NO: 35453 - DNA, 20 bp, synthetic construct
  source 1..20: mol_type = other DNA
aattttgacgtttaagccat

SEQ ID NO: 35454 - DNA, 20 bp, synthetic construct
  source 1..20: mol_type = other DNA
taattttgacgtttaagcca

SEQ ID NO: 35455 - DNA, 20 bp, synthetic construct
  source 1..20: mol_type = other DNA
ataattttgacgtttaagcc

SEQ ID NO: 35456 - DNA, 20 bp, synthetic construct
  source 1..20: mol_type = other DNA
gataattttgacgtttaagc

SEQ ID NO: 35457 - DNA, 20 bp, synthetic construct
  source 1..20: mol_type = other DNA
ggataattttgacgtttaag

SEQ ID NO: 35458 - DNA, 20 bp, synthetic construct
  source 1..20: mol_type = other DNA
gggataattttgacgtttaa

SEQ ID NO: 35459 - DNA, 20 bp, synthetic construct
  source 1..20: mol_type = other DNA
agggataattttgacgttta

SEQ ID NO: 35460 - DNA, 20 bp, synthetic construct
  source 1..20: mol_type = other DNA
aagggataattttgacgttt

SEQ ID NO: 35461 - DNA, 20 bp, synthetic construct
  source 1..20: mol_type = other DNA
caagggataattttgacgtt

SEQ ID NO: 35462 - DNA, 20 bp, synthetic construct
  source 1..20: mol_type = other DNA
tcaagggataattttgacgt

SEQ ID NO: 35463 - DNA, 20 bp, synthetic construct
  source 1..20: mol_type = other DNA
atcaagggataattttgacg

SEQ ID NO: 35464 - DNA, 20 bp, synthetic construct
  source 1..20: mol_type = other DNA
gatcaagggataattttgac

SEQ ID NO: 35465 - DNA, 20 bp, synthetic construct
  source 1..20: mol_type = other DNA
ggatcaagggataattttga

SEQ ID NO: 35466 - DNA, 20 bp, synthetic construct
  source 1..20: mol_type = other DNA
gggatcaagggataattttg

SEQ ID NO: 35467 - DNA, 20 bp, synthetic construct
  source 1..20: mol_type = other DNA
agggatcaagggataatttt

SEQ ID NO: 35468 - DNA, 20 bp, synthetic construct
  source 1..20: mol_type = other DNA
cagggatcaagggataattt

SEQ ID NO: 35469 - DNA, 20 bp, synthetic construct
  source 1..20: mol_type = other DNA
ccagggatcaagggataatt

SEQ ID NO: 35470 - DNA, 20 bp, synthetic construct
  source 1..20: mol_type = other DNA
cccagggatcaagggataat

SEQ ID NO: 35471 - DNA, 20 bp, synthetic construct
  source 1..20: mol_type = other DNA
gcccagggatcaagggataa

SEQ ID NO: 35472 - DNA, 20 bp, synthetic construct
  source 1..20: mol_type = other DNA
agcccagggatcaagggata

SEQ ID NO: 35473 - DNA, 20 bp, synthetic construct
  source 1..20: mol_type = other DNA
tagcccagggatcaagggat

SEQ ID NO: 35474 - DNA, 20 bp, synthetic construct
  source 1..20: mol_type = other DNA
atagcccagggatcaaggga

SEQ ID NO: 35475 - DNA, 20 bp, synthetic construct
  source 1..20: mol_type = other DNA
catagcccagggatcaaggg

SEQ ID NO: 35476 - DNA, 20 bp, synthetic construct
  source 1..20: mol_type = other DNA
ccatagcccagggatcaagg

SEQ ID NO: 35477 - DNA, 20 bp, synthetic construct
  source 1..20: mol_type = other DNA
tccatagcccagggatcaag

SEQ ID NO: 35478 - DNA, 20 bp, synthetic construct
  source 1..20: mol_type = other DNA
gtccatagcccagggatcaa

SEQ ID NO: 35479 - DNA, 20 bp, synthetic construct
  source 1..20: mol_type = other DNA
agtccatagcccagggatca

SEQ ID NO: 35480 - DNA, 20 bp, synthetic construct
  source 1..20: mol_type = other DNA
cagtccatagcccagggatc

SEQ ID NO: 35481 - DNA, 20 bp, synthetic construct
  source 1..20: mol_type = other DNA
tcagtccatagcccagggat

SEQ ID NO: 35482 - DNA, 20 bp, synthetic construct
  source 1..20: mol_type = other DNA
atcagtccatagcccaggga

SEQ ID NO: 35483 - DNA, 20 bp, synthetic construct
  source 1..20: mol_type = other DNA
aatcagtccatagcccaggg

SEQ ID NO: 35484 - DNA, 20 bp, synthetic construct
  source 1..20: mol_type = other DNA
gaatcagtccatagcccagg

SEQ ID NO: 35485 - DNA, 20 bp, synthetic construct
  source 1..20: mol_type = other DNA
agaatcagtccatagcccag

SEQ ID NO: 35486 - DNA, 20 bp, synthetic construct
  source 1..20: mol_type = other DNA
aagaatcagtccatagccca

SEQ ID NO: 35487 - DNA, 20 bp, synthetic construct
  source 1..20: mol_type = other DNA
caagaatcagtccatagccc

SEQ ID NO: 35488 - DNA, 20 bp, synthetic construct
  source 1..20: mol_type = other DNA
acaagaatcagtccatagcc

SEQ ID NO: 35489 - DNA, 20 bp, synthetic construct
  source 1..20: mol_type = other DNA
cacaagaatcagtccatagc

SEQ ID NO: 35490 - DNA, 20 bp, synthetic construct
  source 1..20: mol_type = other DNA
acacaagaatcagtccatag

SEQ ID NO: 35491 - DNA, 20 bp, synthetic construct
  source 1..20: mol_type = other DNA
aacacaagaatcagtccata

SEQ ID NO: 35492 - DNA, 20 bp, synthetic construct
  source 1..20: mol_type = other DNA
taacacaagaatcagtccat

SEQ ID NO: 35493 - DNA, 20 bp, synthetic construct
  source 1..20: mol_type = other DNA
ctaacacaagaatcagtcca

SEQ ID NO: 35494 - DNA, 20 bp, synthetic construct
  source 1..20: mol_type = other DNA
gctaacacaagaatcagtcc

SEQ ID NO: 35495 - DNA, 20 bp, synthetic construct
  source 1..20: mol_type = other DNA
tgctaacacaagaatcagtc

SEQ ID NO: 35496 - DNA, 20 bp, synthetic construct
  source 1..20: mol_type = other DNA
ctgctaacacaagaatcagt

SEQ ID NO: 35497 - DNA, 20 bp, synthetic construct
  source 1..20: mol_type = other DNA
actgctaacacaagaatcag

SEQ ID NO: 35498 - DNA, 20 bp, synthetic construct
  source 1..20: mol_type = other DNA
aactgctaacacaagaatca

SEQ ID NO: 35499 - DNA, 20 bp, synthetic construct
  source 1..20: mol_type = other DNA
taactgctaacacaagaatc

SEQ ID NO: 35500 - DNA, 20 bp, synthetic construct
  source 1..20: mol_type = other DNA
ataactgctaacacaagaat

SEQ ID NO: 35501 - DNA, 20 bp, synthetic construct
  source 1..20: mol_type = other DNA
cataactgctaacacaagaa

SEQ ID NO: 35502 - DNA, 20 bp, synthetic construct
  source 1..20: mol_type = other DNA
tcataactgctaacacaaga

SEQ ID NO: 35503 - DNA, 20 bp, synthetic construct
  source 1..20: mol_type = other DNA
ttcataactgctaacacaag

SEQ ID NO: 35504 - DNA, 20 bp, synthetic construct
  source 1..20: mol_type = other DNA
tttcataactgctaacacaa

SEQ ID NO: 35505 - DNA, 20 bp, synthetic construct
  source 1..20: mol_type = other DNA
ttttcataactgctaacaca

SEQ ID NO: 35506 - DNA, 20 bp, synthetic construct
  source 1..20: mol_type = other DNA
gttttcataactgctaacac

SEQ ID NO: 35507 - DNA, 20 bp, synthetic construct
  source 1..20: mol_type = other DNA
tgttttcataactgctaaca

SEQ ID NO: 35508 - DNA, 20 bp, synthetic construct
  source 1..20: mol_type = other DNA
atgttttcataactgctaac

SEQ ID NO: 35509 - DNA, 20 bp, synthetic construct
  source 1..20: mol_type = other DNA
aatgttttcataactgctaa

SEQ ID NO: 35510 - DNA, 20 bp, synthetic construct
  source 1..20: mol_type = other DNA
aaatgttttcataactgcta

SEQ ID NO: 35511 - DNA, 20 bp, synthetic construct
  source 1..20: mol_type = other DNA
taaatgttttcataactgct

SEQ ID NO: 35512 - DNA, 20 bp, synthetic construct
  source 1..20: mol_type = other DNA
ataaatgttttcataactgc

SEQ ID NO: 35513 - DNA, 20 bp, synthetic construct
  source 1..20: mol_type = other DNA
cataaatgttttcataactg

SEQ ID NO: 35514 - DNA, 20 bp, synthetic construct
  source 1..20: mol_type = other DNA
acataaatgttttcataact

SEQ ID NO: 35515 - DNA, 20 bp, synthetic construct
  source 1..20: mol_type = other DNA
gacataaatgttttcataac

SEQ ID NO: 35516 - DNA, 20 bp, synthetic construct
  source 1..20: mol_type = other DNA
ggacataaatgttttcataa

SEQ ID NO: 35517 - DNA, 20 bp, synthetic construct
  source 1..20: mol_type = other DNA
aggacataaatgttttcata

SEQ ID NO: 35518 - DNA, 20 bp, synthetic construct
  source 1..20: mol_type = other DNA
aaggacataaatgttttcat

SEQ ID NO: 35519 - DNA, 20 bp, synthetic construct
  source 1..20: mol_type = other DNA
caaggacataaatgttttca

SEQ ID NO: 35520 - DNA, 20 bp, synthetic construct
  source 1..20: mol_type = other DNA
acaaggacataaatgttttc

SEQ ID NO: 35521 - DNA, 20 bp, synthetic construct
  source 1..20: mol_type = other DNA
tacaaggacataaatgtttt

SEQ ID NO: 35522 - DNA, 20 bp, synthetic construct
  source 1..20: mol_type = other DNA
gtacaaggacataaatgttt

SEQ ID NO: 35523 - DNA, 20 bp, synthetic construct
  source 1..20: mol_type = other DNA
tgtacaaggacataaatgtt

SEQ ID NO: 35524 - DNA, 20 bp, synthetic construct
  source 1..20: mol_type = other DNA
atgtacaaggacataaatgt

SEQ ID NO: 35525 - DNA, 20 bp, synthetic construct
  source 1..20: mol_type = other DNA
aatgtacaaggacataaatg

SEQ ID NO: 35526 - DNA, 20 bp, synthetic construct
  source 1..20: mol_type = other DNA
gaatgtacaaggacataaat

SEQ ID NO: 35527 - DNA, 20 bp, synthetic construct
  source 1..20: mol_type = other DNA
ggaatgtacaaggacataaa

SEQ ID NO: 35528 - DNA, 20 bp, synthetic construct
  source 1..20: mol_type = other DNA
gggaatgtacaaggacataa

SEQ ID NO: 35529 - DNA, 20 bp, synthetic construct
  source 1..20: mol_type = other DNA
tgggaatgtacaaggacata

SEQ ID NO: 35530 - DNA, 20 bp, synthetic construct
  source 1..20: mol_type = other DNA
atgggaatgtacaaggacat

SEQ ID NO: 35531 - DNA, 20 bp, synthetic construct
  source 1..20: mol_type = other DNA
gatgggaatgtacaaggaca

SEQ ID NO: 35532 - DNA, 20 bp, synthetic construct
  source 1..20: mol_type = other DNA
tgatgggaatgtacaaggac

SEQ ID NO: 35533 - DNA, 20 bp, synthetic construct
  source 1..20: mol_type = other DNA
atgatgggaatgtacaagga

SEQ ID NO: 35534 - DNA, 20 bp, synthetic construct
  source 1..20: mol_type = other DNA
tatgatgggaatgtacaagg

SEQ ID NO: 35535 - DNA, 20 bp, synthetic construct
  source 1..20: mol_type = other DNA
ctatgatgggaatgtacaag

SEQ ID NO: 35536 - DNA, 20 bp, synthetic construct
  source 1..20: mol_type = other DNA
gctatgatgggaatgtacaa

SEQ ID NO: 35537 - DNA, 20 bp, synthetic construct
  source 1..20: mol_type = other DNA
agctatgatgggaatgtaca

SEQ ID NO: 35538 - DNA, 20 bp, synthetic construct
  source 1..20: mol_type = other DNA
aagctatgatgggaatgtac

SEQ ID NO: 35539 - DNA, 20 bp, synthetic construct
  source 1..20: mol_type = other DNA
aaagctatgatgggaatgta

SEQ ID NO: 35540 - DNA, 20 bp, synthetic construct
  source 1..20: mol_type = other DNA
aaaagctatgatgggaatgt

SEQ ID NO: 35541 - DNA, 20 bp, synthetic construct
  source 1..20: mol_type = other DNA
aaaaagctatgatgggaatg

SEQ ID NO: 35542 - DNA, 20 bp, synthetic construct
  source 1..20: mol_type = other DNA
caaaaagctatgatgggaat

SEQ ID NO: 35543 - DNA, 20 bp, synthetic construct
  source 1..20: mol_type = other DNA
acaaaaagctatgatgggaa

SEQ ID NO: 35544 - DNA, 20 bp, synthetic construct
  source 1..20: mol_type = other DNA
gacaaaaagctatgatggga

SEQ ID NO: 35545 - DNA, 20 bp, synthetic construct
  source 1..20: mol_type = other DNA
tgacaaaaagctatgatggg

SEQ ID NO: 35546 - DNA, 20 bp, synthetic construct
  source 1..20: mol_type = other DNA
ttgacaaaaagctatgatgg

SEQ ID NO: 35547 - DNA, 20 bp, synthetic construct
  source 1..20: mol_type = other DNA
attgacaaaaagctatgatg

SEQ ID NO: 35548 - DNA, 20 bp, synthetic construct
  source 1..20: mol_type = other DNA
cattgacaaaaagctatgat

SEQ ID NO: 35549 - DNA, 20 bp, synthetic construct
  source 1..20: mol_type = other DNA
tcattgacaaaaagctatga

SEQ ID NO: 35550 - DNA, 20 bp, synthetic construct
  source 1..20: mol_type = other DNA
ctcattgacaaaaagctatg

SEQ ID NO: 35551 - DNA, 20 bp, synthetic construct
  source 1..20: mol_type = other DNA
tctcattgacaaaaagctat

SEQ ID NO: 35552 - DNA, 20 bp, synthetic construct
  source 1..20: mol_type = other DNA
ttctcattgacaaaaagcta

SEQ ID NO: 35553 - DNA, 20 bp, synthetic construct
  source 1..20: mol_type = other DNA
cttctcattgacaaaaagct

SEQ ID NO: 35554 - DNA, 20 bp, synthetic construct
  source 1..20: mol_type = other DNA
acttctcattgacaaaaagc

SEQ ID NO: 35555 - DNA, 20 bp, synthetic construct
  source 1..20: mol_type = other DNA
tacttctcattgacaaaaag

SEQ ID NO: 35556 - DNA, 20 bp, synthetic construct
  source 1..20: mol_type = other DNA
ttacttctcattgacaaaaa

SEQ ID NO: 35557 - DNA, 20 bp, synthetic construct
  source 1..20: mol_type = other DNA
attacttctcattgacaaaa

SEQ ID NO: 35558 - DNA, 20 bp, synthetic construct
  source 1..20: mol_type = other DNA
aattacttctcattgacaaa

SEQ ID NO: 35559 - DNA, 20 bp, synthetic construct
  source 1..20: mol_type = other DNA
aaattacttctcattgacaa

SEQ ID NO: 35560 - DNA, 20 bp, synthetic construct
  source 1..20: mol_type = other DNA
aaaattacttctcattgaca

SEQ ID NO: 35561 - DNA, 20 bp, synthetic construct
  source 1..20: mol_type = other DNA
aaaaattacttctcattgac

SEQ ID NO: 35562 - DNA, 20 bp, synthetic construct
  source 1..20: mol_type = other DNA
aaaaaattacttctcattga

SEQ ID NO: 35563 - DNA, 20 bp, synthetic construct
  source 1..20: mol_type = other DNA
aaaaaaattacttctcattg

SEQ ID NO: 35564 - DNA, 20 bp, synthetic construct
  source 1..20: mol_type = other DNA
aaaaaaaattacttctcatt

SEQ ID NO: 35565 - DNA, 20 bp, synthetic construct
  source 1..20: mol_type = other DNA
aaaaaaaaattacttctcat

SEQ ID NO: 35566 - DNA, 20 bp, synthetic construct
  source 1..20: mol_type = other DNA
aaaaaaaaaattacttctca

SEQ ID NO: 35567 - DNA, 20 bp, synthetic construct
  source 1..20: mol_type = other DNA
aaaaaaaaaaattacttctc

SEQ ID NO: 35568 - DNA, 20 bp, synthetic construct
  source 1..20: mol_type = other DNA
aaaaaaaaaaaattacttct

SEQ ID NO: 35569 - DNA, 20 bp, synthetic construct
  source 1..20: mol_type = other DNA
aaaaaaaaaaaaattacttc

SEQ ID NO: 35570 - DNA, 20 bp, synthetic construct
  source 1..20: mol_type = other DNA
aaaaaaaaaaaaaattactt

SEQ ID NO: 35571 - DNA, 20 bp, synthetic construct
  source 1..20: mol_type = other DNA
aaaaaaaaaaaaaaattact

SEQ ID NO: 35572 - DNA, 20 bp, synthetic construct
  source 1..20: mol_type = other DNA
aaaaaaaaaaaaaaaattac

SEQ ID NO: 35573 - DNA, 20 bp, synthetic construct
  source 1..20: mol_type = other DNA
caaaaaaaaaaaaaaaatta

SEQ ID NO: 35574 - DNA, 20 bp, synthetic construct
  source 1..20: mol_type = other DNA
tcaaaaaaaaaaaaaaaatt

SEQ ID NO: 35575 - DNA, 20 bp, synthetic construct
  source 1..20: mol_type = other DNA
ctcaaaaaaaaaaaaaaaat

SEQ ID NO: 35576 - DNA, 20 bp, synthetic construct
  source 1..20: mol_type = other DNA
tctcaaaaaaaaaaaaaaaa

SEQ ID NO: 35577 - DNA, 20 bp, synthetic construct
  source 1..20: mol_type = other DNA
gtctcaaaaaaaaaaaaaaa

SEQ ID NO: 35578 - DNA, 20 bp, synthetic construct
  source 1..20: mol_type = other DNA
tgtctcaaaaaaaaaaaaaa

SEQ ID NO: 35579 - DNA, 20 bp, synthetic construct
  source 1..20: mol_type = other DNA
ctgtctcaaaaaaaaaaaaa

SEQ ID NO: 35580 - DNA, 20 bp, synthetic construct
  source 1..20: mol_type = other DNA
tctgtctcaaaaaaaaaaaa

SEQ ID NO: 35581 - DNA, 20 bp, synthetic construct
  source 1..20: mol_type = other DNA
ttctgtctcaaaaaaaaaaa

SEQ ID NO: 35582 - DNA, 20 bp, synthetic construct
  source 1..20: mol_type = other DNA
attctgtctcaaaaaaaaaa

SEQ ID NO: 35583 - DNA, 20 bp, synthetic construct
  source 1..20: mol_type = other DNA
gattctgtctcaaaaaaaaa

SEQ ID NO: 35584 - DNA, 20 bp, synthetic construct
  source 1..20: mol_type = other DNA
agattctgtctcaaaaaaaa

SEQ ID NO: 35585 - DNA, 20 bp, synthetic construct
  source 1..20: mol_type = other DNA
gagattctgtctcaaaaaaa

SEQ ID NO: 35586 - DNA, 20 bp, synthetic construct
  source 1..20: mol_type = other DNA
tgagattctgtctcaaaaaa

SEQ ID NO: 35587 - DNA, 20 bp, synthetic construct
  source 1..20: mol_type = other DNA
gtgagattctgtctcaaaaa

SEQ ID NO: 35588 - DNA, 20 bp, synthetic construct
  source 1..20: mol_type = other DNA
agtgagattctgtctcaaaa

SEQ ID NO: 35589 - DNA, 20 bp, synthetic construct
  source 1..20: mol_type = other DNA
gagtgagattctgtctcaaa

SEQ ID NO: 35590 - DNA, 20 bp, synthetic construct
  source 1..20: mol_type = other DNA
agagtgagattctgtctcaa

SEQ ID NO: 35591 - DNA, 20 bp, synthetic construct
  source 1..20: mol_type = other DNA
cagagtgagattctgtctca

SEQ ID NO: 35592 - DNA, 20 bp, synthetic construct
  source 1..20: mol_type = other DNA
acagagtgagattctgtctc

SEQ ID NO: 35593 - DNA, 20 bp, synthetic construct
  source 1..20: mol_type = other DNA
aacagagtgagattctgtct

SEQ ID NO: 35594 - DNA, 20 bp, synthetic construct
  source 1..20: mol_type = other DNA
aaacagagtgagattctgtc

SEQ ID NO: 35595 - DNA, 20 bp, synthetic construct
  source 1..20: mol_type = other DNA
gaaacagagtgagattctgt

SEQ ID NO: 35596 - DNA, 20 bp, synthetic construct
  source 1..20: mol_type = other DNA
ggaaacagagtgagattctg

SEQ ID NO: 35597 - DNA, 20 bp, synthetic construct
  source 1..20: mol_type = other DNA
gggaaacagagtgagattct

SEQ ID NO: 35598 - DNA, 20 bp, synthetic construct
  source 1..20: mol_type = other DNA
tgggaaacagagtgagattc

SEQ ID NO: 35599 - DNA, 20 bp, synthetic construct
  source 1..20: mol_type = other DNA
ctgggaaacagagtgagatt

SEQ ID NO: 35600 - DNA, 20 bp, synthetic construct
  source 1..20: mol_type = other DNA
gctgggaaacagagtgagat

SEQ ID NO: 35601 - DNA, 20 bp, synthetic construct
  source 1..20: mol_type = other DNA
cgctgggaaacagagtgaga

SEQ ID NO: 35602 - DNA, 20 bp, synthetic construct
  source 1..20: mol_type = other DNA
acgctgggaaacagagtgag

SEQ ID NO: 35603 - DNA, 20 bp, synthetic construct
  source 1..20: mol_type = other DNA
cacgctgggaaacagagtga

SEQ ID NO: 35604 - DNA, 20 bp, synthetic construct
  source 1..20: mol_type = other DNA
ccacgctgggaaacagagtg

SEQ ID NO: 35605 - DNA, 20 bp, synthetic construct
  source 1..20: mol_type = other DNA
tccacgctgggaaacagagt

SEQ ID NO: 35606 - DNA, 20 bp, synthetic construct
  source 1..20: mol_type = other DNA
ctccacgctgggaaacagag

SEQ ID NO: 35607 - DNA, 20 bp, synthetic construct
  source 1..20: mol_type = other DNA
actccacgctgggaaacaga

SEQ ID NO: 35608 - DNA, 20 bp, synthetic construct
  source 1..20: mol_type = other DNA
cactccacgctgggaaacag

SEQ ID NO: 35609 - DNA, 20 bp, synthetic construct
  source 1..20: mol_type = other DNA
gcactccacgctgggaaaca

SEQ ID NO: 35610 - DNA, 20 bp, synthetic construct
  source 1..20: mol_type = other DNA
tgcactccacgctgggaaac

SEQ ID NO: 35611 - DNA, 20 bp, synthetic construct
  source 1..20: mol_type = other DNA
ctgcactccacgctgggaaa

SEQ ID NO: 35612 - DNA, 20 bp, synthetic construct
  source 1..20: mol_type = other DNA
actgcactccacgctgggaa

SEQ ID NO: 35613 - DNA, 20 bp, synthetic construct
  source 1..20: mol_type = other DNA
cactgcactccacgctggga

SEQ ID NO: 35614 - DNA, 20 bp, synthetic construct
  source 1..20: mol_type = other DNA
ccactgcactccacgctggg

SEQ ID NO: 35615 - DNA, 20 bp, synthetic construct
  source 1..20: mol_type = other DNA
gccactgcactccacgctgg

SEQ ID NO: 35616 - DNA, 20 bp, synthetic construct
  source 1..20: mol_type = other DNA
tgccactgcactccacgctg

SEQ ID NO: 35617 - DNA, 20 bp, synthetic construct
  source 1..20: mol_type = other DNA
atgccactgcactccacgct

SEQ ID NO: 35618 - DNA, 20 bp, synthetic construct
  source 1..20: mol_type = other DNA
catgccactgcactccacgc

SEQ ID NO: 35619 - DNA, 20 bp, synthetic construct
  source 1..20: mol_type = other DNA
tcatgccactgcactccacg

SEQ ID NO: 35620 - DNA, 20 bp, synthetic construct
  source 1..20: mol_type = other DNA
atcatgccactgcactccac

SEQ ID NO: 35621 - DNA, 20 bp, synthetic construct
  source 1..20: mol_type = other DNA
gatcatgccactgcactcca

SEQ ID NO: 35622 - DNA, 20 bp, synthetic construct
  source 1..20: mol_type = other DNA
agatcatgccactgcactcc

SEQ ID NO: 35623 - DNA, 20 bp, synthetic construct
  source 1..20: mol_type = other DNA
gagatcatgccactgcactc

SEQ ID NO: 35624 - DNA, 20 bp, synthetic construct
  source 1..20: mol_type = other DNA
tgagatcatgccactgcact

SEQ ID NO: 35625 - DNA, 20 bp, synthetic construct
  source 1..20: mol_type = other DNA
ctgagatcatgccactgcac

SEQ ID NO: 35626 - DNA, 20 bp, synthetic construct
  source 1..20: mol_type = other DNA
gctgagatcatgccactgca

SEQ ID NO: 35627 - DNA, 20 bp, synthetic construct
  source 1..20: mol_type = other DNA
agctgagatcatgccactgc

SEQ ID NO: 35628 - DNA, 20 bp, synthetic construct
  source 1..20: mol_type = other DNA
gagctgagatcatgccactg

SEQ ID NO: 35629 - DNA, 20 bp, synthetic construct
  source 1..20: mol_type = other DNA
tgagctgagatcatgccact

SEQ ID NO: 35630 - DNA, 20 bp, synthetic construct
  source 1..20: mol_type = other DNA
ctgagctgagatcatgccac

SEQ ID NO: 35631 - DNA, 20 bp, synthetic construct
  source 1..20: mol_type = other DNA
actgagctgagatcatgcca

SEQ ID NO: 35632 - DNA, 20 bp, synthetic construct
  source 1..20: mol_type = other DNA
cactgagctgagatcatgcc

SEQ ID NO: 35633 - DNA, 20 bp, synthetic construct
  source 1..20: mol_type = other DNA
gcactgagctgagatcatgc

SEQ ID NO: 35634 - DNA, 20 bp, synthetic construct
  source 1..20: mol_type = other DNA
tgcactgagctgagatcatg

SEQ ID NO: 35635 - DNA, 20 bp, synthetic construct
  source 1..20: mol_type = other DNA
atgcactgagctgagatcat

SEQ ID NO: 35636 - DNA, 20 bp, synthetic construct
  source 1..20: mol_type = other DNA
gatgcactgagctgagatca

SEQ ID NO: 35637 - DNA, 20 bp, synthetic construct
  source 1..20: mol_type = other DNA
ggatgcactgagctgagatc

SEQ ID NO: 35638 - DNA, 20 bp, synthetic construct
  source 1..20: mol_type = other DNA
aggatgcactgagctgagat

SEQ ID NO: 35639 - DNA, 20 bp, synthetic construct
  source 1..20: mol_type = other DNA
taggatgcactgagctgaga

SEQ ID NO: 35640 - DNA, 20 bp, synthetic construct
  source 1..20: mol_type = other DNA
gtaggatgcactgagctgag

SEQ ID NO: 35641 - DNA, 20 bp, synthetic construct
  source 1..20: mol_type = other DNA
tgtaggatgcactgagctga

SEQ ID NO: 35642 - DNA, 20 bp, synthetic construct
  source 1..20: mol_type = other DNA
ttgtaggatgcactgagctg

SEQ ID NO: 35643 - DNA, 20 bp, synthetic construct
  source 1..20: mol_type = other DNA
gttgtaggatgcactgagct

SEQ ID NO: 35644 - DNA, 20 bp, synthetic construct
  source 1..20: mol_type = other DNA
agttgtaggatgcactgagc

SEQ ID NO: 35645 - DNA, 20 bp, synthetic construct
  source 1..20: mol_type = other DNA
gagttgtaggatgcactgag

SEQ ID NO: 35646 - DNA, 20 bp, synthetic construct
  source 1..20: mol_type = other DNA
agagttgtaggatgcactga

SEQ ID NO: 35647 - DNA, 20 bp, synthetic construct
  source 1..20: mol_type = other DNA
cagagttgtaggatgcactg

SEQ ID NO: 35648 - DNA, 20 bp, synthetic construct
  source 1..20: mol_type = other DNA
tcagagttgtaggatgcact

SEQ ID NO: 35649 - DNA, 20 bp, synthetic construct
  source 1..20: mol_type = other DNA
ctcagagttgtaggatgcac

SEQ ID NO: 35650 - DNA, 20 bp, synthetic construct
  source 1..20: mol_type = other DNA
cctcagagttgtaggatgca

SEQ ID NO: 35651 - DNA, 20 bp, synthetic construct
  source 1..20: mol_type = other DNA
acctcagagttgtaggatgc

SEQ ID NO: 35652 - DNA, 20 bp, synthetic construct
  source 1..20: mol_type = other DNA
aacctcagagttgtaggatg

SEQ ID NO: 35653 - DNA, 20 bp, synthetic construct
  source 1..20: mol_type = other DNA
gaacctcagagttgtaggat

SEQ ID NO: 35654 - DNA, 20 bp, synthetic construct
  source 1..20: mol_type = other DNA
tgaacctcagagttgtagga

SEQ ID NO: 35655 - DNA, 20 bp, synthetic construct
  source 1..20: mol_type = other DNA
ttgaacctcagagttgtagg

SEQ ID NO: 35656 - DNA, 20 bp, synthetic construct
  source 1..20: mol_type = other DNA
cttgaacctcagagttgtag

SEQ ID NO: 35657 - DNA, 20 bp, synthetic construct
  source 1..20: mol_type = other DNA
gcttgaacctcagagttgta

SEQ ID NO: 35658 - DNA, 20 bp, synthetic construct
  source 1..20: mol_type = other DNA
tgcttgaacctcagagttgt

SEQ ID NO: 35659 - DNA, 20 bp, synthetic construct
  source 1..20: mol_type = other DNA
ttgcttgaacctcagagttg

SEQ ID NO: 35660 - DNA, 20 bp, synthetic construct
  source 1..20: mol_type = other DNA
attgcttgaacctcagagtt

SEQ ID NO: 35661 - DNA, 20 bp, synthetic construct
  source 1..20: mol_type = other DNA
aattgcttgaacctcagagt

SEQ ID NO: 35662 - DNA, 20 bp, synthetic construct
  source 1..20: mol_type = other DNA
gaattgcttgaacctcagag

SEQ ID NO: 35663 - DNA, 20 bp, synthetic construct
  source 1..20: mol_type = other DNA
agaattgcttgaacctcaga

SEQ ID NO: 35664 - DNA, 20 bp, synthetic construct
  source 1..20: mol_type = other DNA
gagaattgcttgaacctcag

SEQ ID NO: 35665 - DNA, 20 bp, synthetic construct
  source 1..20: mol_type = other DNA
cgagaattgcttgaacctca

SEQ ID NO: 35666 - DNA, 20 bp, synthetic construct
  source 1..20: mol_type = other DNA
acgagaattgcttgaacctc

SEQ ID NO: 35667 - DNA, 20 bp, synthetic construct
  source 1..20: mol_type = other DNA
cacgagaattgcttgaacct

SEQ ID NO: 35668 - DNA, 20 bp, synthetic construct
  source 1..20: mol_type = other DNA
gcacgagaattgcttgaacc

SEQ ID NO: 35669 - DNA, 20 bp, synthetic construct
  source 1..20: mol_type = other DNA
ggcacgagaattgcttgaac

SEQ ID NO: 35670 - DNA, 20 bp, synthetic construct
  source 1..20: mol_type = other DNA
aggcacgagaattgcttgaa

SEQ ID NO: 35671 - DNA, 20 bp, synthetic construct
  source 1..20: mol_type = other DNA
gaggcacgagaattgcttga

SEQ ID NO: 35672 - DNA, 20 bp, synthetic construct
  source 1..20: mol_type = other DNA
tgaggcacgagaattgcttg

SEQ ID NO: 35673 - DNA, 20 bp, synthetic construct
  source 1..20: mol_type = other DNA
ctgaggcacgagaattgctt

SEQ ID NO: 35674 - DNA, 20 bp, synthetic construct
  source 1..20: mol_type = other DNA
gctgaggcacgagaattgct

SEQ ID NO: 35675 - DNA, 20 bp, synthetic construct
  source 1..20: mol_type = other DNA
agctgaggcacgagaattgc

SEQ ID NO: 35676 - DNA, 20 bp, synthetic construct
  source 1..20: mol_type = other DNA
aagctgaggcacgagaattg

SEQ ID NO: 35677 - DNA, 20 bp, synthetic construct
  source 1..20: mol_type = other DNA
taagctgaggcacgagaatt

SEQ ID NO: 35678 - DNA, 20 bp, synthetic construct
  source 1..20: mol_type = other DNA
gtaagctgaggcacgagaat

SEQ ID NO: 35679 - DNA, 20 bp, synthetic construct
  source 1..20: mol_type = other DNA
agtaagctgaggcacgagaa

SEQ ID NO: 35680 - DNA, 20 bp, synthetic construct
  source 1..20: mol_type = other DNA
cagtaagctgaggcacgaga

SEQ ID NO: 35681 - DNA, 20 bp, synthetic construct
  source 1..20: mol_type = other DNA
tcagtaagctgaggcacgag

SEQ ID NO: 35682 - DNA, 20 bp, synthetic construct
  source 1..20: mol_type = other DNA
ctcagtaagctgaggcacga

SEQ ID NO: 35683 - DNA, 20 bp, synthetic construct
  source 1..20: mol_type = other DNA
actcagtaagctgaggcacg

SEQ ID NO: 35684 - DNA, 20 bp, synthetic construct
  source 1..20: mol_type = other DNA
tactcagtaagctgaggcac

SEQ ID NO: 35685 - DNA, 20 bp, synthetic construct
  source 1..20: mol_type = other DNA
ctactcagtaagctgaggca

SEQ ID NO: 35686 - DNA, 20 bp, synthetic construct
  source 1..20: mol_type = other DNA
gctactcagtaagctgaggc

SEQ ID NO: 35687 - DNA, 20 bp, synthetic construct
  source 1..20: mol_type = other DNA
agctactcagtaagctgagg

SEQ ID NO: 35688 - DNA, 20 bp, synthetic construct
  source 1..20: mol_type = other DNA
cagctactcagtaagctgag

SEQ ID NO: 35689 - DNA, 20 bp, synthetic construct
  source 1..20: mol_type = other DNA
ccagctactcagtaagctga

SEQ ID NO: 35690 - DNA, 20 bp, synthetic construct
  source 1..20: mol_type = other DNA
cccagctactcagtaagctg

SEQ ID NO: 35691 - DNA, 20 bp, synthetic construct
  source 1..20: mol_type = other DNA
tcccagctactcagtaagct

SEQ ID NO: 35692 - DNA, 20 bp, synthetic construct
  source 1..20: mol_type = other DNA
atcccagctactcagtaagc

SEQ ID NO: 35693 - DNA, 20 bp, synthetic construct
  source 1..20: mol_type = other DNA
aatcccagctactcagtaag

SEQ ID NO: 35694 - DNA, 20 bp, synthetic construct
  source 1..20: mol_type = other DNA
taatcccagctactcagtaa

SEQ ID NO: 35695 - DNA, 20 bp, synthetic construct
  source 1..20: mol_type = other DNA
gtaatcccagctactcagta

SEQ ID NO: 35696 - DNA, 20 bp, synthetic construct
  source 1..20: mol_type = other DNA
tgtaatcccagctactcagt

SEQ ID NO: 35697 - DNA, 20 bp, synthetic construct
  source 1..20: mol_type = other DNA
ctgtaatcccagctactcag

SEQ ID NO: 35698 - DNA, 20 bp, synthetic construct
  source 1..20: mol_type = other DNA
cctgtaatcccagctactca

SEQ ID NO: 35699 - DNA, 20 bp, synthetic construct
  source 1..20: mol_type = other DNA
gcctgtaatcccagctactc

SEQ ID NO: 35700 - DNA, 20 bp, synthetic construct
  source 1..20: mol_type = other DNA
cgcctgtaatcccagctact

SEQ ID NO: 35701 - DNA, 20 bp, synthetic construct
  source 1..20: mol_type = other DNA
gcgcctgtaatcccagctac

SEQ ID NO: 35702 - DNA, 20 bp, synthetic construct
  source 1..20: mol_type = other DNA
ggcgcctgtaatcccagcta

SEQ ID NO: 35703 - DNA, 20 bp, synthetic construct
  source 1..20: mol_type = other DNA
gggcgcctgtaatcccagct

SEQ ID NO: 35704 - DNA, 20 bp, synthetic construct
  source 1..20: mol_type = other DNA
tgggcgcctgtaatcccagc

SEQ ID NO: 35705 - DNA, 20 bp, synthetic construct
  source 1..20: mol_type = other DNA
gtgggcgcctgtaatcccag

SEQ ID NO: 35706 - DNA, 20 bp, synthetic construct
  source 1..20: mol_type = other DNA
ggtgggcgcctgtaatccca

SEQ ID NO: 35707 - DNA, 20 bp, synthetic construct
  source 1..20: mol_type = other DNA
tggtgggcgcctgtaatccc

SEQ ID NO: 35708 - DNA, 20 bp, synthetic construct
  source 1..20: mol_type = other DNA
gtggtgggcgcctgtaatcc

SEQ ID NO: 35709 - DNA, 20 bp, synthetic construct
  source 1..20: mol_type = other DNA
ggtggtgggcgcctgtaatc

SEQ ID NO: 35710 - DNA, 20 bp, synthetic construct
  source 1..20: mol_type = other DNA
tggtggtgggcgcctgtaat

SEQ ID NO: 35711 - DNA, 20 bp, synthetic construct
  source 1..20: mol_type = other DNA
gtggtggtgggcgcctgtaa

SEQ ID NO: 35712 - DNA, 20 bp, synthetic construct
  source 1..20: mol_type = other DNA
cgtggtggtgggcgcctgta

SEQ ID NO: 35713 - DNA, 20 bp, synthetic construct
  source 1..20: mol_type = other DNA
acgtggtggtgggcgcctgt

SEQ ID NO: 35714 - DNA, 20 bp, synthetic construct
  source 1..20: mol_type = other DNA
gacgtggtggtgggcgcctg

SEQ ID NO: 35715 - DNA, 20 bp, synthetic construct
  source 1..20: mol_type = other DNA
agacgtggtggtgggcgcct

SEQ ID NO: 35716 - DNA, 20 bp, synthetic construct
  source 1..20: mol_type = other DNA
cagacgtggtggtgggcgcc

SEQ ID NO: 35717 - DNA, 20 bp, synthetic construct
  source 1..20: mol_type = other DNA
ccagacgtggtggtgggcgc

SEQ ID NO: 35718 - DNA, 20 bp, synthetic construct
  source 1..20: mol_type = other DNA
gccagacgtggtggtgggcg

SEQ ID NO: 35719 - DNA, 20 bp, synthetic construct
  source 1..20: mol_type = other DNA
agccagacgtggtggtgggc

SEQ ID NO: 35720 - DNA, 20 bp, synthetic construct
  source 1..20: mol_type = other DNA
tagccagacgtggtggtggg

SEQ ID NO: 35721 - DNA, 20 bp, synthetic construct
  source 1..20: mol_type = other DNA
ttagccagacgtggtggtgg

SEQ ID NO: 35722 - DNA, 20 bp, synthetic construct
  source 1..20: mol_type = other DNA
attagccagacgtggtggtg

SEQ ID NO: 35723 - DNA, 20 bp, synthetic construct
  source 1..20: mol_type = other DNA
aattagccagacgtggtggt

SEQ ID NO: 35724 - DNA, 20 bp, synthetic construct
  source 1..20: mol_type = other DNA
aaattagccagacgtggtgg

SEQ ID NO: 35725 - DNA, 20 bp, synthetic construct
  source 1..20: mol_type = other DNA
aaaattagccagacgtggtg

SEQ ID NO: 35726 - DNA, 20 bp, synthetic construct
  source 1..20: mol_type = other DNA
aaaaattagccagacgtggt

SEQ ID NO: 35727 - DNA, 20 bp, synthetic construct
  source 1..20: mol_type = other DNA
caaaaattagccagacgtgg

SEQ ID NO: 35728 - DNA, 20 bp, synthetic construct
  source 1..20: mol_type = other DNA
acaaaaattagccagacgtg

SEQ ID NO: 35729 - DNA, 20 bp, synthetic construct
  source 1..20: mol_type = other DNA
tacaaaaattagccagacgt

SEQ ID NO: 35730 - DNA, 20 bp, synthetic construct
  source 1..20: mol_type = other DNA
atacaaaaattagccagacg

SEQ ID NO: 35731 - DNA, 20 bp, synthetic construct
  source 1..20: mol_type = other DNA
aatacaaaaattagccagac

SEQ ID NO: 35732 - DNA, 20 bp, synthetic construct
  source 1..20: mol_type = other DNA
aaatacaaaaattagccaga

SEQ ID NO: 35733 - DNA, 20 bp, synthetic construct
  source 1..20: mol_type = other DNA
aaaatacaaaaattagccag

SEQ ID NO: 35734 - DNA, 20 bp, synthetic construct
  source 1..20: mol_type = other DNA
aaaaatacaaaaattagcca

SEQ ID NO: 35735 - DNA, 20 bp, synthetic construct
  source 1..20: mol_type = other DNA
taaaaatacaaaaattagcc

SEQ ID NO: 35736 - DNA, 20 bp, synthetic construct
  source 1..20: mol_type = other DNA
ctaaaaatacaaaaattagc

SEQ ID NO: 35737 - DNA, 20 bp, synthetic construct
  source 1..20: mol_type = other DNA
actaaaaatacaaaaattag

SEQ ID NO: 35738 - DNA, 20 bp, synthetic construct
  source 1..20: mol_type = other DNA
tactaaaaatacaaaaatta

SEQ ID NO: 35739 - DNA, 20 bp, synthetic construct
  source 1..20: mol_type = other DNA
ctactaaaaatacaaaaatt

SEQ ID NO: 35740 - DNA, 20 bp, synthetic construct
  source 1..20: mol_type = other DNA
tctactaaaaatacaaaaat

SEQ ID NO: 35741 - DNA, 20 bp, synthetic construct
  source 1..20: mol_type = other DNA
ctctactaaaaatacaaaaa

SEQ ID NO: 35742 - DNA, 20 bp, synthetic construct
  source 1..20: mol_type = other DNA
tctctactaaaaatacaaaa

SEQ ID NO: 35743 - DNA, 20 bp, synthetic construct
  source 1..20: mol_type = other DNA
atctctactaaaaatacaaa

SEQ ID NO: 35744 - DNA, 20 bp, synthetic construct
  source 1..20: mol_type = other DNA
catctctactaaaaatacaa

SEQ ID NO: 35745 - DNA, 20 bp, synthetic construct
  source 1..20: mol_type = other DNA
ccatctctactaaaaataca

SEQ ID NO: 35746 - DNA, 20 bp, synthetic construct
  source 1..20: mol_type = other DNA
cccatctctactaaaaatac

SEQ ID NO: 35747 - DNA, 20 bp, synthetic construct
  source 1..20: mol_type = other DNA
ccccatctctactaaaaata

SEQ ID NO: 35748 - DNA, 20 bp, synthetic construct
  source 1..20: mol_type = other DNA
accccatctctactaaaaat

SEQ ID NO: 35749 - DNA, 20 bp, synthetic construct
  source 1..20: mol_type = other DNA
aaccccatctctactaaaaa

SEQ ID NO: 35750 - DNA, 20 bp, synthetic construct
  source 1..20: mol_type = other DNA
aaaccccatctctactaaaa

SEQ ID NO: 35751 - DNA, 20 bp, synthetic construct
  source 1..20: mol_type = other DNA
gaaaccccatctctactaaa

SEQ ID NO: 35752 - DNA, 20 bp, synthetic construct
  source 1..20: mol_type = other DNA
tgaaaccccatctctactaa

SEQ ID NO: 35753 - DNA, 20 bp, synthetic construct
  source 1..20: mol_type = other DNA
gtgaaaccccatctctacta

SEQ ID NO: 35754 - DNA, 20 bp, synthetic construct
  source 1..20: mol_type = other DNA
cgtgaaaccccatctctact

SEQ ID NO: 35755 - DNA, 20 bp, synthetic construct
  source 1..20: mol_type = other DNA
tcgtgaaaccccatctctac

SEQ ID NO: 35756 - DNA, 20 bp, synthetic construct
  source 1..20: mol_type = other DNA
atcgtgaaaccccatctcta

SEQ ID NO: 35757 - DNA, 20 bp, synthetic construct
  source 1..20: mol_type = other DNA
catcgtgaaaccccatctct

SEQ ID NO: 35758 - DNA, 20 bp, synthetic construct
  source 1..20: mol_type = other DNA
acatcgtgaaaccccatctc

SEQ ID NO: 35759 - DNA, 20 bp, synthetic construct
  source 1..20: mol_type = other DNA
aacatcgtgaaaccccatct

SEQ ID NO: 35760 - DNA, 20 bp, synthetic construct
  source 1..20: mol_type = other DNA
caacatcgtgaaaccccatc

SEQ ID NO: 35761 - DNA, 20 bp, synthetic construct
  source 1..20: mol_type = other DNA
ccaacatcgtgaaaccccat

SEQ ID NO: 35762 - DNA, 20 bp, synthetic construct
  source 1..20: mol_type = other DNA
gccaacatcgtgaaacccca

SEQ ID NO: 35763 - DNA, 20 bp, synthetic construct
  source 1..20: mol_type = other DNA
ggccaacatcgtgaaacccc

SEQ ID NO: 35764 - DNA, 20 bp, synthetic construct
  source 1..20: mol_type = other DNA
tggccaacatcgtgaaaccc

SEQ ID NO: 35765 - DNA, 20 bp, synthetic construct
  source 1..20: mol_type = other DNA
ctggccaacatcgtgaaacc

SEQ ID NO: 35766 - DNA, 20 bp, synthetic construct
  source 1..20: mol_type = other DNA
cctggccaacatcgtgaaac

SEQ ID NO: 35767 - DNA, 20 bp, synthetic construct
  source 1..20: mol_type = other DNA
gcctggccaacatcgtgaaa

SEQ ID NO: 35768 - DNA, 20 bp, synthetic construct
  source 1..20: mol_type = other DNA
agcctggccaacatcgtgaa

SEQ ID NO: 35769 - DNA, 20 bp, synthetic construct
  source 1..20: mol_type = other DNA
cagcctggccaacatcgtga

SEQ ID NO: 35770 - DNA, 20 bp, synthetic construct
  source 1..20: mol_type = other DNA
ccagcctggccaacatcgtg

SEQ ID NO: 35771 - DNA, 20 bp, synthetic construct
  source 1..20: mol_type = other DNA
cccagcctggccaacatcgt

SEQ ID NO: 35772 - DNA, 20 bp, synthetic construct
  source 1..20: mol_type = other DNA
gcccagcctggccaacatcg

SEQ ID NO: 35773 - DNA, 20 bp, synthetic construct
  source 1..20: mol_type = other DNA
agcccagcctggccaacatc

SEQ ID NO: 35774 - DNA, 20 bp, synthetic construct
  source 1..20: mol_type = other DNA
gagcccagcctggccaacat

SEQ ID NO: 35775 - DNA, 20 bp, synthetic construct
  source 1..20: mol_type = other DNA
cgagcccagcctggccaaca

SEQ ID NO: 35776 - DNA, 20 bp, synthetic construct
  source 1..20: mol_type = other DNA
tcgagcccagcctggccaac

SEQ ID NO: 35777 - DNA, 20 bp, synthetic construct
  source 1..20: mol_type = other DNA
ttcgagcccagcctggccaa

SEQ ID NO: 35778 - DNA, 20 bp, synthetic construct
  source 1..20: mol_type = other DNA
gttcgagcccagcctggcca

SEQ ID NO: 35779 - DNA, 20 bp, synthetic construct
  source 1..20: mol_type = other DNA
agttcgagcccagcctggcc

SEQ ID NO: 35780 - DNA, 20 bp, synthetic construct
  source 1..20: mol_type = other DNA
gagttcgagcccagcctggc

SEQ ID NO: 35781 - DNA, 20 bp, synthetic construct
  source 1..20: mol_type = other DNA
ggagttcgagcccagcctgg

SEQ ID NO: 35782 - DNA, 20 bp, synthetic construct
  source 1..20: mol_type = other DNA
aggagttcgagcccagcctg

SEQ ID NO: 35783 - DNA, 20 bp, synthetic construct
  source 1..20: mol_type = other DNA
caggagttcgagcccagcct

SEQ ID NO: 35784 - DNA, 20 bp, synthetic construct
  source 1..20: mol_type = other DNA
ccaggagttcgagcccagcc

SEQ ID NO: 35785 - DNA, 20 bp, synthetic construct
  source 1..20: mol_type = other DNA
gccaggagttcgagcccagc

SEQ ID NO: 35786 - DNA, 20 bp, synthetic construct
  source 1..20: mol_type = other DNA
agccaggagttcgagcccag

SEQ ID NO: 35787 - DNA, 20 bp, synthetic construct
  source 1..20: mol_type = other DNA
aagccaggagttcgagccca

SEQ ID NO: 35788 - DNA, 20 bp, synthetic construct
  source 1..20: mol_type = other DNA
gaagccaggagttcgagccc

SEQ ID NO: 35789 - DNA, 20 bp, synthetic construct
  source 1..20: mol_type = other DNA
tgaagccaggagttcgagcc

SEQ ID NO: 35790 - DNA, 20 bp, synthetic construct
  source 1..20: mol_type = other DNA
ttgaagccaggagttcgagc

SEQ ID NO: 35791 - DNA, 20 bp, synthetic construct
  source 1..20: mol_type = other DNA
cttgaagccaggagttcgag

SEQ ID NO: 35792 - DNA, 20 bp, synthetic construct
  source 1..20: mol_type = other DNA
acttgaagccaggagttcga

SEQ ID NO: 35793 - DNA, 20 bp, synthetic construct
  source 1..20: mol_type = other DNA
cacttgaagccaggagttcg

SEQ ID NO: 35794 - DNA, 20 bp, synthetic construct
  source 1..20: mol_type = other DNA
tcacttgaagccaggagttc

SEQ ID NO: 35795 - DNA, 20 bp, synthetic construct
  source 1..20: mol_type = other DNA
atcacttgaagccaggagtt

SEQ ID NO: 35796 - DNA, 20 bp, synthetic construct
  source 1..20: mol_type = other DNA
gatcacttgaagccaggagt

SEQ ID NO: 35797 - DNA, 20 bp, synthetic construct
  source 1..20: mol_type = other DNA
ggatcacttgaagccaggag

SEQ ID NO: 35798 - DNA, 20 bp, synthetic construct
  source 1..20: mol_type = other DNA
tggatcacttgaagccagga

SEQ ID NO: 35799 - DNA, 20 bp, synthetic construct
  source 1..20: mol_type = other DNA
gtggatcacttgaagccagg

SEQ ID NO: 35800 - DNA, 20 bp, synthetic construct
  source 1..20: mol_type = other DNA
ggtggatcacttgaagccag

SEQ ID NO: 35801 - DNA, 20 bp, synthetic construct
  source 1..20: mol_type = other DNA
aggtggatcacttgaagcca

SEQ ID NO: 35802 - DNA, 20 bp, synthetic construct
  source 1..20: mol_type = other DNA
caggtggatcacttgaagcc

SEQ ID NO: 35803 - DNA, 20 bp, synthetic construct
  source 1..20: mol_type = other DNA
gcaggtggatcacttgaagc

SEQ ID NO: 35804 - DNA, 20 bp, synthetic construct
  source 1..20: mol_type = other DNA
ggcaggtggatcacttgaag

SEQ ID NO: 35805 - DNA, 20 bp, synthetic construct
  source 1..20: mol_type = other DNA
aggcaggtggatcacttgaa

SEQ ID NO: 35806 - DNA, 20 bp, synthetic construct
  source 1..20: mol_type = other DNA
aaggcaggtggatcacttga

SEQ ID NO: 35807 - DNA, 20 bp, synthetic construct
  source 1..20: mol_type = other DNA
caaggcaggtggatcacttg

SEQ ID NO: 35808 - DNA, 20 bp, synthetic construct
  source 1..20: mol_type = other DNA
ccaaggcaggtggatcactt

SEQ ID NO: 35809 - DNA, 20 bp, synthetic construct
  source 1..20: mol_type = other DNA
gccaaggcaggtggatcact

SEQ ID NO: 35810 - DNA, 20 bp, synthetic construct
  source 1..20: mol_type = other DNA
ggccaaggcaggtggatcac

SEQ ID NO: 35811 - DNA, 20 bp, synthetic construct
  source 1..20: mol_type = other DNA
aggccaaggcaggtggatca

SEQ ID NO: 35812 - DNA, 20 bp, synthetic construct
  source 1..20: mol_type = other DNA
gaggccaaggcaggtggatc

SEQ ID NO: 35813 - DNA, 20 bp, synthetic construct
  source 1..20: mol_type = other DNA
ggaggccaaggcaggtggat

SEQ ID NO: 35814 - DNA, 20 bp, synthetic construct
  source 1..20: mol_type = other DNA
gggaggccaaggcaggtgga

SEQ ID NO: 35815 - DNA, 20 bp, synthetic construct
  source 1..20: mol_type = other DNA
tgggaggccaaggcaggtgg

SEQ ID NO: 35816 - DNA, 20 bp, synthetic construct
  source 1..20: mol_type = other DNA
ttgggaggccaaggcaggtg

SEQ ID NO: 35817 - DNA, 20 bp, synthetic construct
  source 1..20: mol_type = other DNA
tttgggaggccaaggcaggt

SEQ ID NO: 35818 - DNA, 20 bp, synthetic construct
  source 1..20: mol_type = other DNA
ctttgggaggccaaggcagg

SEQ ID NO: 35819 - DNA, 20 bp, synthetic construct
  source 1..20: mol_type = other DNA
actttgggaggccaaggcag

SEQ ID NO: 35820 - DNA, 20 bp, synthetic construct
  source 1..20: mol_type = other DNA
cactttgggaggccaaggca

SEQ ID NO: 35821 - DNA, 20 bp, synthetic construct
  source 1..20: mol_type = other DNA
gcactttgggaggccaaggc

SEQ ID NO: 35822 - DNA, 20 bp, synthetic construct
  source 1..20: mol_type = other DNA
agcactttgggaggccaagg

SEQ ID NO: 35823 - DNA, 20 bp, synthetic construct
  source 1..20: mol_type = other DNA
cagcactttgggaggccaag

SEQ ID NO: 35824 - DNA, 20 bp, synthetic construct
  source 1..20: mol_type = other DNA
ccagcactttgggaggccaa

SEQ ID NO: 35825 - DNA, 20 bp, synthetic construct
  source 1..20: mol_type = other DNA
cccagcactttgggaggcca

SEQ ID NO: 35826 - DNA, 20 bp, synthetic construct
  source 1..20: mol_type = other DNA
tcccagcactttgggaggcc

SEQ ID NO: 35827 - DNA, 20 bp, synthetic construct
  source 1..20: mol_type = other DNA
atcccagcactttgggaggc

SEQ ID NO: 35828 - DNA, 20 bp, synthetic construct
  source 1..20: mol_type = other DNA
aatcccagcactttgggagg

SEQ ID NO: 35829 - DNA, 20 bp, synthetic construct
  source 1..20: mol_type = other DNA
caatcccagcactttgggag

SEQ ID NO: 35830 - DNA, 20 bp, synthetic construct
  source 1..20: mol_type = other DNA
acaatcccagcactttggga

SEQ ID NO: 35831 - DNA, 20 bp, synthetic construct
  source 1..20: mol_type = other DNA
tacaatcccagcactttggg

SEQ ID NO: 35832 - DNA, 20 bp, synthetic construct
  source 1..20: mol_type = other DNA
ctacaatcccagcactttgg

SEQ ID NO: 35833 - DNA, 20 bp, synthetic construct
  source 1..20: mol_type = other DNA
cctacaatcccagcactttg

SEQ ID NO: 35834 - DNA, 20 bp, synthetic construct
  source 1..20: mol_type = other DNA
acctacaatcccagcacttt

SEQ ID NO: 35835 - DNA, 20 bp, synthetic construct
  source 1..20: mol_type = other DNA
cacctacaatcccagcactt

SEQ ID NO: 35836 - DNA, 20 bp, synthetic construct
  source 1..20: mol_type = other DNA
acacctacaatcccagcact

SEQ ID NO: 35837 - DNA, 20 bp, synthetic construct
  source 1..20: mol_type = other DNA
cacacctacaatcccagcac

SEQ ID NO: 35838 - DNA, 20 bp, synthetic construct
  source 1..20: mol_type = other DNA
tcacacctacaatcccagca

SEQ ID NO: 35839 - DNA, 20 bp, synthetic construct
  source 1..20: mol_type = other DNA
ctcacacctacaatcccagc

SEQ ID NO: 35840 - DNA, 20 bp, synthetic construct
  source 1..20: mol_type = other DNA
gctcacacctacaatcccag

SEQ ID NO: 35841 - DNA, 20 bp, synthetic construct
  source 1..20: mol_type = other DNA
ggctcacacctacaatccca

SEQ ID NO: 35842 - DNA, 20 bp, synthetic construct
  source 1..20: mol_type = other DNA
tggctcacacctacaatccc

SEQ ID NO: 35843 - DNA, 20 bp, synthetic construct
  source 1..20: mol_type = other DNA
gtggctcacacctacaatcc

SEQ ID NO: 35844 - DNA, 20 bp, synthetic construct
  source 1..20: mol_type = other DNA
agtggctcacacctacaatc

SEQ ID NO: 35845 - DNA, 20 bp, synthetic construct
  source 1..20: mol_type = other DNA
tagtggctcacacctacaat

SEQ ID NO: 35846 - DNA, 20 bp, synthetic construct
  source 1..20: mol_type = other DNA
atagtggctcacacctacaa

SEQ ID NO: 35847 - DNA, 20 bp, synthetic construct
  source 1..20: mol_type = other DNA
catagtggctcacacctaca

SEQ ID NO: 35848 - DNA, 20 bp, synthetic construct
  source 1..20: mol_type = other DNA
gcatagtggctcacacctac

SEQ ID NO: 35849 - DNA, 20 bp, synthetic construct
  source 1..20: mol_type = other DNA
ggcatagtggctcacaccta

SEQ ID NO: 35850 - DNA, 20 bp, synthetic construct
  source 1..20: mol_type = other DNA
aggcatagtggctcacacct

SEQ ID NO: 35851 - DNA, 20 bp, synthetic construct
  source 1..20: mol_type = other DNA
caggcatagtggctcacacc

SEQ ID NO: 35852 - DNA, 20 bp, synthetic construct
  source 1..20: mol_type = other DNA
ccaggcatagtggctcacac

SEQ ID NO: 35853 - DNA, 20 bp, synthetic construct
  source 1..20: mol_type = other DNA
gccaggcatagtggctcaca

SEQ ID NO: 35854 - DNA, 20 bp, synthetic construct
  source 1..20: mol_type = other DNA
ggccaggcatagtggctcac

SEQ ID NO: 35855 - DNA, 20 bp, synthetic construct
  source 1..20: mol_type = other DNA
aggccaggcatagtggctca

SEQ ID NO: 35856 - DNA, 20 bp, synthetic construct
  source 1..20: mol_type = other DNA
taggccaggcatagtggctc

SEQ ID NO: 35857 - DNA, 20 bp, synthetic construct
  source 1..20: mol_type = other DNA
ttaggccaggcatagtggct

SEQ ID NO: 35858 - DNA, 20 bp, synthetic construct
  source 1..20: mol_type = other DNA
attaggccaggcatagtggc

SEQ ID NO: 35859 - DNA, 20 bp, synthetic construct
  source 1..20: mol_type = other DNA
aattaggccaggcatagtgg

SEQ ID NO: 35860 - DNA, 20 bp, synthetic construct
  source 1..20: mol_type = other DNA
caattaggccaggcatagtg

SEQ ID NO: 35861 - DNA, 20 bp, synthetic construct
  source 1..20: mol_type = other DNA
ccaattaggccaggcatagt

SEQ ID NO: 35862 - DNA, 20 bp, synthetic construct
  source 1..20: mol_type = other DNA
gccaattaggccaggcatag

SEQ ID NO: 35863 - DNA, 20 bp, synthetic construct
  source 1..20: mol_type = other DNA
ggccaattaggccaggcata

SEQ ID NO: 35864 - DNA, 20 bp, synthetic construct
  source 1..20: mol_type = other DNA
aggccaattaggccaggcat

SEQ ID NO: 35865 - DNA, 20 bp, synthetic construct
  source 1..20: mol_type = other DNA
taggccaattaggccaggca

SEQ ID NO: 35866 - DNA, 20 bp, synthetic construct
  source 1..20: mol_type = other DNA
ttaggccaattaggccaggc

SEQ ID NO: 35867 - DNA, 20 bp, synthetic construct
  source 1..20: mol_type = other DNA
attaggccaattaggccagg

SEQ ID NO: 35868 - DNA, 20 bp, synthetic construct
  source 1..20: mol_type = other DNA
aattaggccaattaggccag

SEQ ID NO: 35869 - DNA, 20 bp, synthetic construct
  source 1..20: mol_type = other DNA
aaattaggccaattaggcca

SEQ ID NO: 35870 - DNA, 20 bp, synthetic construct
  source 1..20: mol_type = other DNA
gaaattaggccaattaggcc

SEQ ID NO: 35871 - DNA, 20 bp, synthetic construct
  source 1..20: mol_type = other DNA
tgaaattaggccaattaggc

SEQ ID NO: 35872 - DNA, 20 bp, synthetic construct
  source 1..20: mol_type = other DNA
ttgaaattaggccaattagg

SEQ ID NO: 35873 - DNA, 20 bp, synthetic construct
  source 1..20: mol_type = other DNA
attgaaattaggccaattag

SEQ ID NO: 35874 - DNA, 20 bp, synthetic construct
  source 1..20: mol_type = other DNA
tattgaaattaggccaatta

SEQ ID NO: 35875 - DNA, 20 bp, synthetic construct
  source 1..20: mol_type = other DNA
atattgaaattaggccaatt

SEQ ID NO: 35876 - DNA, 20 bp, synthetic construct
  source 1..20: mol_type = other DNA
aatattgaaattaggccaat

SEQ ID NO: 35877 - DNA, 20 bp, synthetic construct
  source 1..20: mol_type = other DNA
caatattgaaattaggccaa

SEQ ID NO: 35878 - DNA, 20 bp, synthetic construct
  source 1..20: mol_type = other DNA
acaatattgaaattaggcca

SEQ ID NO: 35879 - DNA, 20 bp, synthetic construct
  source 1..20: mol_type = other DNA
aacaatattgaaattaggcc

SEQ ID NO: 35880 - DNA, 20 bp, synthetic construct
  source 1..20: mol_type = other DNA
taacaatattgaaattaggc

SEQ ID NO: 35881 - DNA, 20 bp, synthetic construct
  source 1..20: mol_type = other DNA
ataacaatattgaaattagg

SEQ ID NO: 35882 - DNA, 20 bp, synthetic construct
  source 1..20: mol_type = other DNA
tataacaatattgaaattag

SEQ ID NO: 35883 - DNA, 20 bp, synthetic construct
  source 1..20: mol_type = other DNA
atataacaatattgaaatta

SEQ ID NO: 35884 - DNA, 20 bp, synthetic construct
  source 1..20: mol_type = other DNA
gatataacaatattgaaatt

SEQ ID NO: 35885 - DNA, 20 bp, synthetic construct
  source 1..20: mol_type = other DNA
agatataacaatattgaaat

SEQ ID NO: 35886 - DNA, 20 bp, synthetic construct
  source 1..20: mol_type = other DNA
gagatataacaatattgaaa

SEQ ID NO: 35887 - DNA, 20 bp, synthetic construct
  source 1..20: mol_type = other DNA
tgagatataacaatattgaa

SEQ ID NO: 35888 - DNA, 20 bp, synthetic construct
  source 1..20: mol_type = other DNA
ctgagatataacaatattga

SEQ ID NO: 35889 - DNA, 20 bp, synthetic construct
  source 1..20: mol_type = other DNA
cctgagatataacaatattg

SEQ ID NO: 35890 - DNA, 20 bp, synthetic construct
  source 1..20: mol_type = other DNA
ccctgagatataacaatatt

SEQ ID NO: 35891 - DNA, 20 bp, synthetic construct
  source 1..20: mol_type = other DNA
tccctgagatataacaatat

SEQ ID NO: 35892 - DNA, 20 bp, synthetic construct
  source 1..20: mol_type = other DNA
ttccctgagatataacaata

SEQ ID NO: 35893 - DNA, 20 bp, synthetic construct
  source 1..20: mol_type = other DNA
attccctgagatataacaat

SEQ ID NO: 35894 - DNA, 20 bp, synthetic construct
  source 1..20: mol_type = other DNA
tattccctgagatataacaa

SEQ ID NO: 35895 - DNA, 20 bp, synthetic construct
  source 1..20: mol_type = other DNA
ctattccctgagatataaca

SEQ ID NO: 35896 - DNA, 20 bp, synthetic construct
  source 1..20: mol_type = other DNA
tctattccctgagatataac

SEQ ID NO: 35897 - DNA, 20 bp, synthetic construct
  source 1..20: mol_type = other DNA
ctctattccctgagatataa

SEQ ID NO: 35898 - DNA, 20 bp, synthetic construct
  source 1..20: mol_type = other DNA
tctctattccctgagatata

SEQ ID NO: 35899 - DNA, 20 bp, synthetic construct
  source 1..20: mol_type = other DNA
ctctctattccctgagatat

SEQ ID NO: 35900 - DNA, 20 bp, synthetic construct
  source 1..20: mol_type = other DNA
cctctctattccctgagata

SEQ ID NO: 35901 - DNA, 20 bp, synthetic construct
  source 1..20: mol_type = other DNA
gcctctctattccctgagat

SEQ ID NO: 35902 - DNA, 20 bp, synthetic construct
  source 1..20: mol_type = other DNA
tgcctctctattccctgaga

SEQ ID NO: 35903 - DNA, 20 bp, synthetic construct
  source 1..20: mol_type = other DNA
gtgcctctctattccctgag

SEQ ID NO: 35904 - DNA, 20 bp, synthetic construct
  source 1..20: mol_type = other DNA
cgtgcctctctattccctga

SEQ ID NO: 35905 - DNA, 20 bp, synthetic construct
  source 1..20: mol_type = other DNA
tcgtgcctctctattccctg

SEQ ID NO: 35906 - DNA, 20 bp, synthetic construct
  source 1..20: mol_type = other DNA
ctcgtgcctctctattccct

SEQ ID NO: 35907 - DNA, 20 bp, synthetic construct
  source 1..20: mol_type = other DNA
cctcgtgcctctctattccc

SEQ ID NO: 35908 - DNA, 20 bp, synthetic construct
  source 1..20: mol_type = other DNA
tcctcgtgcctctctattcc

SEQ ID NO: 35909 - DNA, 20 bp, synthetic construct
  source 1..20: mol_type = other DNA
ctcctcgtgcctctctattc

SEQ ID NO: 35910 - DNA, 20 bp, synthetic construct
  source 1..20: mol_type = other DNA
tctcctcgtgcctctctatt

SEQ ID NO: 35911 - DNA, 20 bp, synthetic construct
  source 1..20: mol_type = other DNA
ttctcctcgtgcctctctat

SEQ ID NO: 35912 - DNA, 20 bp, synthetic construct
  source 1..20: mol_type = other DNA
tttctcctcgtgcctctcta

SEQ ID NO: 35913 - DNA, 20 bp, synthetic construct
  source 1..20: mol_type = other DNA
ctttctcctcgtgcctctct

SEQ ID NO: 35914 - DNA, 20 bp, synthetic construct
  source 1..20: mol_type = other DNA
tctttctcctcgtgcctctc

SEQ ID NO: 35915 - DNA, 20 bp, synthetic construct
  source 1..20: mol_type = other DNA
ctctttctcctcgtgcctct

SEQ ID NO: 35916 - DNA, 20 bp, synthetic construct
  source 1..20: mol_type = other DNA
tctctttctcctcgtgcctc

SEQ ID NO: 35917 - DNA, 20 bp, synthetic construct
  source 1..20: mol_type = other DNA
ctctctttctcctcgtgcct

SEQ ID NO: 35918 - DNA, 20 bp, synthetic construct
  source 1..20: mol_type = other DNA
tctctctttctcctcgtgcc

SEQ ID NO: 35919 - DNA, 20 bp, synthetic construct
  source 1..20: mol_type = other DNA
gtctctctttctcctcgtgc

SEQ ID NO: 35920 - DNA, 20 bp, synthetic construct
  source 1..20: mol_type = other DNA
tgtctctctttctcctcgtg

SEQ ID NO: 35921 - DNA, 20 bp, synthetic construct
  source 1..20: mol_type = other DNA
ttgtctctctttctcctcgt

SEQ ID NO: 35922 - DNA, 20 bp, synthetic construct
  source 1..20: mol_type = other DNA
cttgtctctctttctcctcg

SEQ ID NO: 35923 - DNA, 20 bp, synthetic construct
  source 1..20: mol_type = other DNA
gcttgtctctctttctcctc

SEQ ID NO: 35924 - DNA, 20 bp, synthetic construct
  source 1..20: mol_type = other DNA
agcttgtctctctttctcct

SEQ ID NO: 35925 - DNA, 20 bp, synthetic construct
  source 1..20: mol_type = other DNA
cagcttgtctctctttctcc

SEQ ID NO: 35926 - DNA, 20 bp, synthetic construct
  source 1..20: mol_type = other DNA
tcagcttgtctctctttctc

SEQ ID NO: 35927 - DNA, 20 bp, synthetic construct
  source 1..20: mol_type = other DNA
gtcagcttgtctctctttct

SEQ ID NO: 35928 - DNA, 20 bp, synthetic construct
  source 1..20: mol_type = other DNA
agtcagcttgtctctctttc

SEQ ID NO: 35929 - DNA, 20 bp, synthetic construct
  source 1..20: mol_type = other DNA
cagtcagcttgtctctcttt

SEQ ID NO: 35930 - DNA, 20 bp, synthetic construct
  source 1..20: mol_type = other DNA
gcagtcagcttgtctctctt

SEQ ID NO: 35931 - DNA, 20 bp, synthetic construct
  source 1..20: mol_type = other DNA
agcagtcagcttgtctctct

SEQ ID NO: 35932 - DNA, 20 bp, synthetic construct
  source 1..20: mol_type = other DNA
cagcagtcagcttgtctctc

SEQ ID NO: 35933 - DNA, 20 bp, synthetic construct
  source 1..20: mol_type = other DNA
ccagcagtcagcttgtctct

SEQ ID NO: 35934 - DNA, 20 bp, synthetic construct
  source 1..20: mol_type = other DNA
accagcagtcagcttgtctc

SEQ ID NO: 35935 - DNA, 20 bp, synthetic construct
  source 1..20: mol_type = other DNA
aaccagcagtcagcttgtct

SEQ ID NO: 35936 - DNA, 20 bp, synthetic construct
  source 1..20: mol_type = other DNA
gaaccagcagtcagcttgtc

SEQ ID NO: 35937 - DNA, 20 bp, synthetic construct
  source 1..20: mol_type = other DNA
cgaaccagcagtcagcttgt

SEQ ID NO: 35938 - DNA, 20 bp, synthetic construct
  source 1..20: mol_type = other DNA
acgaaccagcagtcagcttg

SEQ ID NO: 35939 - DNA, 20 bp, synthetic construct
  source 1..20: mol_type = other DNA
cacgaaccagcagtcagctt

SEQ ID NO: 35940 - DNA, 20 bp, synthetic construct
  source 1..20: mol_type = other DNA
ccacgaaccagcagtcagct

SEQ ID NO: 35941 - DNA, 20 bp, synthetic construct
  source 1..20: mol_type = other DNA
tccacgaaccagcagtcagc

SEQ ID NO: 35942 - DNA, 20 bp, synthetic construct
  source 1..20: mol_type = other DNA
ctccacgaaccagcagtcag

SEQ ID NO: 35943 - DNA, 20 bp, synthetic construct
  source 1..20: mol_type = other DNA
actccacgaaccagcagtca

SEQ ID NO: 35944 - DNA, 20 bp, synthetic construct
  source 1..20: mol_type = other DNA
tactccacgaaccagcagtc

SEQ ID NO: 35945 - DNA, 20 bp, synthetic construct
  source 1..20: mol_type = other DNA
ctactccacgaaccagcagt

SEQ ID NO: 35946 - DNA, 20 bp, synthetic construct
  source 1..20: mol_type = other DNA
actactccacgaaccagcag

SEQ ID NO: 35947 - DNA, 20 bp, synthetic construct
  source 1..20: mol_type = other DNA
gactactccacgaaccagca

SEQ ID NO: 35948 - DNA, 20 bp, synthetic construct
  source 1..20: mol_type = other DNA
tgactactccacgaaccagc

SEQ ID NO: 35949 - DNA, 20 bp, synthetic construct
  source 1..20: mol_type = other DNA
atgactactccacgaaccag

SEQ ID NO: 35950 - DNA, 20 bp, synthetic construct
  source 1..20: mol_type = other DNA
tatgactactccacgaacca

SEQ ID NO: 35951 - DNA, 20 bp, synthetic construct
  source 1..20: mol_type = other DNA
ttatgactactccacgaacc

SEQ ID NO: 35952 - DNA, 20 bp, synthetic construct
  source 1..20: mol_type = other DNA
gttatgactactccacgaac

SEQ ID NO: 35953 - DNA, 20 bp, synthetic construct
  source 1..20: mol_type = other DNA
tgttatgactactccacgaa

SEQ ID NO: 35954 - DNA, 20 bp, synthetic construct
  source 1..20: mol_type = other DNA
gtgttatgactactccacga

SEQ ID NO: 35955 - DNA, 20 bp, synthetic construct
  source 1..20: mol_type = other DNA
tgtgttatgactactccacg

SEQ ID NO: 35956 - DNA, 20 bp, synthetic construct
  source 1..20: mol_type = other DNA
gtgtgttatgactactccac

SEQ ID NO: 35957 - DNA, 20 bp, synthetic construct
  source 1..20: mol_type = other DNA
tgtgtgttatgactactcca

SEQ ID NO: 35958 - DNA, 20 bp, synthetic construct
  source 1..20: mol_type = other DNA
ttgtgtgttatgactactcc

SEQ ID NO: 35959 - DNA, 20 bp, synthetic construct
  source 1..20: mol_type = other DNA
gttgtgtgttatgactactc

SEQ ID NO: 35960 - DNA, 20 bp, synthetic construct
  source 1..20: mol_type = other DNA
tgttgtgtgttatgactact

SEQ ID NO: 35961 - DNA, 20 bp, synthetic construct
  source 1..20: mol_type = other DNA
atgttgtgtgttatgactac

SEQ ID NO: 35962 - DNA, 20 bp, synthetic construct
  source 1..20: mol_type = other DNA
aatgttgtgtgttatgacta

SEQ ID NO: 35963 - DNA, 20 bp, synthetic construct
  source 1..20: mol_type = other DNA
aaatgttgtgtgttatgact

SEQ ID NO: 35964 - DNA, 20 bp, synthetic construct
  source 1..20: mol_type = other DNA
taaatgttgtgtgttatgac

SEQ ID NO: 35965 - DNA, 20 bp, synthetic construct
  source 1..20: mol_type = other DNA
ataaatgttgtgtgttatga

SEQ ID NO: 35966 - DNA, 20 bp, synthetic construct
  source 1..20: mol_type = other DNA
aataaatgttgtgtgttatg

SEQ ID NO: 35967 - DNA, 20 bp, synthetic construct
  source 1..20: mol_type = other DNA
taataaatgttgtgtgttat

SEQ ID NO: 35968 - DNA, 20 bp, synthetic construct
  source 1..20: mol_type = other DNA
ttaataaatgttgtgtgtta

SEQ ID NO: 35969 - DNA, 20 bp, synthetic construct
  source 1..20: mol_type = other DNA
cttaataaatgttgtgtgtt

SEQ ID NO: 35970 - DNA, 20 bp, synthetic construct
  source 1..20: mol_type = other DNA
tcttaataaatgttgtgtgt

SEQ ID NO: 35971 - DNA, 20 bp, synthetic construct
  source 1..20: mol_type = other DNA
atcttaataaatgttgtgtg

SEQ ID NO: 35972 - DNA, 20 bp, synthetic construct
  source 1..20: mol_type = other DNA
aatcttaataaatgttgtgt

SEQ ID NO: 35973 - DNA, 20 bp, synthetic construct
  source 1..20: mol_type = other DNA
caatcttaataaatgttgtg

SEQ ID NO: 35974 - DNA, 20 bp, synthetic construct
  source 1..20: mol_type = other DNA
gcaatcttaataaatgttgt

SEQ ID NO: 35975 - DNA, 20 bp, synthetic construct
  source 1..20: mol_type = other DNA
agcaatcttaataaatgttg

SEQ ID NO: 35976 - DNA, 20 bp, synthetic construct
  source 1..20: mol_type = other DNA
cagcaatcttaataaatgtt

SEQ ID NO: 35977 - DNA, 20 bp, synthetic construct
  source 1..20: mol_type = other DNA
acagcaatcttaataaatgt

SEQ ID NO: 35978 - DNA, 20 bp, synthetic construct
  source 1..20: mol_type = other DNA
gacagcaatcttaataaatg

SEQ ID NO: 35979 - DNA, 20 bp, synthetic construct
  source 1..20: mol_type = other DNA
agacagcaatcttaataaat

SEQ ID NO: 35980 - DNA, 20 bp, synthetic construct
  source 1..20: mol_type = other DNA
aagacagcaatcttaataaa

SEQ ID NO: 35981 - DNA, 20 bp, synthetic construct
  source 1..20: mol_type = other DNA
taagacagcaatcttaataa

SEQ ID NO: 35982 - DNA, 20 bp, synthetic construct
  source 1..20: mol_type = other DNA
ataagacagcaatcttaata

SEQ ID NO: 35983 - DNA, 20 bp, synthetic construct
  source 1..20: mol_type = other DNA
tataagacagcaatcttaat

SEQ ID NO: 35984 - DNA, 20 bp, synthetic construct
  source 1..20: mol_type = other DNA
atataagacagcaatcttaa

SEQ ID NO: 35985 - DNA, 20 bp, synthetic construct
  source 1..20: mol_type = other DNA
catataagacagcaatctta

SEQ ID NO: 35986 - DNA, 20 bp, synthetic construct
  source 1..20: mol_type = other DNA
ccatataagacagcaatctt

SEQ ID NO: 35987 - DNA, 20 bp, synthetic construct
  source 1..20: mol_type = other DNA
tccatataagacagcaatct

SEQ ID NO: 35988 - DNA, 20 bp, synthetic construct
  source 1..20: mol_type = other DNA
gtccatataagacagcaatc

SEQ ID NO: 35989 - DNA, 20 bp, synthetic construct
  source 1..20: mol_type = other DNA
ggtccatataagacagcaat

SEQ ID NO: 35990 - DNA, 20 bp, synthetic construct
  source 1..20: mol_type = other DNA
cggtccatataagacagcaa

SEQ ID NO: 35991 - DNA, 20 bp, synthetic construct
  source 1..20: mol_type = other DNA
acggtccatataagacagca

SEQ ID NO: 35992 - DNA, 20 bp, synthetic construct
  source 1..20: mol_type = other DNA
aacggtccatataagacagc

SEQ ID NO: 35993 - DNA, 20 bp, synthetic construct
  source 1..20: mol_type = other DNA
aaacggtccatataagacag

SEQ ID NO: 35994 - DNA, 20 bp, synthetic construct
  source 1..20: mol_type = other DNA
caaacggtccatataagaca

SEQ ID NO: 35995 - DNA, 20 bp, synthetic construct
  source 1..20: mol_type = other DNA
acaaacggtccatataagac

SEQ ID NO: 35996 - DNA, 20 bp, synthetic construct
  source 1..20: mol_type = other DNA
cacaaacggtccatataaga

SEQ ID NO: 35997 - DNA, 20 bp, synthetic construct
  source 1..20: mol_type = other DNA
ccacaaacggtccatataag

SEQ ID NO: 35998 - DNA, 20 bp, synthetic construct
  source 1..20: mol_type = other DNA
accacaaacggtccatataa

SEQ ID NO: 35999 - DNA, 20 bp, synthetic construct
  source 1..20: mol_type = other DNA
caccacaaacggtccatata

SEQ ID NO: 36000 - DNA, 20 bp, synthetic construct
  source 1..20: mol_type = other DNA
gcaccacaaacggtccatat

SEQ ID NO: 36001 - DNA, 20 bp, synthetic construct
  source 1..20: mol_type = other DNA
ggcaccacaaacggtccata

SEQ ID NO: 36002 - DNA, 20 bp, synthetic construct
  source 1..20: mol_type = other DNA
aggcaccacaaacggtccat

SEQ ID NO: 36003 - DNA, 20 bp, synthetic construct
  source 1..20: mol_type = other DNA
aaggcaccacaaacggtcca

SEQ ID NO: 36004 - DNA, 20 bp, synthetic construct
  source 1..20: mol_type = other DNA
taaggcaccacaaacggtcc

SEQ ID NO: 36005 - DNA, 20 bp, synthetic construct
  source 1..20: mol_type = other DNA
ttaaggcaccacaaacggtc

SEQ ID NO: 36006 - DNA, 20 bp, synthetic construct
  source 1..20: mol_type = other DNA
tttaaggcaccacaaacggt

SEQ ID NO: 36007 - DNA, 20 bp, synthetic construct
  source 1..20: mol_type = other DNA
ttttaaggcaccacaaacgg

SEQ ID NO: 36008 - DNA, 20 bp, synthetic construct
  source 1..20: mol_type = other DNA
cttttaaggcaccacaaacg

SEQ ID NO: 36009 - DNA, 20 bp, synthetic construct
  source 1..20: mol_type = other DNA
tcttttaaggcaccacaaac

SEQ ID NO: 36010 - DNA, 20 bp, synthetic construct
  source 1..20: mol_type = other DNA
ttcttttaaggcaccacaaa

SEQ ID NO: 36011 - DNA, 20 bp, synthetic construct
  source 1..20: mol_type = other DNA
tttcttttaaggcaccacaa

SEQ ID NO: 36012 - DNA, 20 bp, synthetic construct
  source 1..20: mol_type = other DNA
atttcttttaaggcaccaca

SEQ ID NO: 36013 - DNA, 20 bp, synthetic construct
  source 1..20: mol_type = other DNA
gatttcttttaaggcaccac

SEQ ID NO: 36014 - DNA, 20 bp, synthetic construct
  source 1..20: mol_type = other DNA
tgatttcttttaaggcacca

SEQ ID NO: 36015 - DNA, 20 bp, synthetic construct
  source 1..20: mol_type = other DNA
ctgatttcttttaaggcacc

SEQ ID NO: 36016 - DNA, 20 bp, synthetic construct
  source 1..20: mol_type = other DNA
cctgatttcttttaaggcac

SEQ ID NO: 36017 - DNA, 20 bp, synthetic construct
  source 1..20: mol_type = other DNA
ccctgatttcttttaaggca

SEQ ID NO: 36018 - DNA, 20 bp, synthetic construct
  source 1..20: mol_type = other DNA
accctgatttcttttaaggc

SEQ ID NO: 36019 - DNA, 20 bp, synthetic construct
  source 1..20: mol_type = other DNA
taccctgatttcttttaagg

SEQ ID NO: 36020 - DNA, 20 bp, synthetic construct
  source 1..20: mol_type = other DNA
ttaccctgatttcttttaag

SEQ ID NO: 36021 - DNA, 20 bp, synthetic construct
  source 1..20: mol_type = other DNA
gttaccctgatttcttttaa

SEQ ID NO: 36022 - DNA, 20 bp, synthetic construct
  source 1..20: mol_type = other DNA
tgttaccctgatttctttta

SEQ ID NO: 36023 - DNA, 20 bp, synthetic construct
  source 1..20: mol_type = other DNA
atgttaccctgatttctttt

SEQ ID NO: 36024 - DNA, 20 bp, synthetic construct
  source 1..20: mol_type = other DNA
gatgttaccctgatttcttt

SEQ ID NO: 36025 - DNA, 20 bp, synthetic construct
  source 1..20: mol_type = other DNA
tgatgttaccctgatttctt

SEQ ID NO: 36026 - DNA, 20 bp, synthetic construct
  source 1..20: mol_type = other DNA
ttgatgttaccctgatttct

SEQ ID NO: 36027 - DNA, 20 bp, synthetic construct
  source 1..20: mol_type = other DNA
gttgatgttaccctgatttc

SEQ ID NO: 36028 - DNA, 20 bp, synthetic construct
  source 1..20: mol_type = other DNA
cgttgatgttaccctgattt

SEQ ID NO: 36029 - DNA, 20 bp, synthetic construct
  source 1..20: mol_type = other DNA
tcgttgatgttaccctgatt

SEQ ID NO: 36030 - DNA, 20 bp, synthetic construct
  source 1..20: mol_type = other DNA
atcgttgatgttaccctgat

SEQ ID NO: 36031 - DNA, 20 bp, synthetic construct
  source 1..20: mol_type = other DNA
aatcgttgatgttaccctga

SEQ ID NO: 36032 - DNA, 20 bp, synthetic construct
  source 1..20: mol_type = other DNA
taatcgttgatgttaccctg

SEQ ID NO: 36033 - DNA, 20 bp, synthetic construct
  source 1..20: mol_type = other DNA
gtaatcgttgatgttaccct

SEQ ID NO: 36034 - DNA, 20 bp, synthetic construct
  source 1..20: mol_type = other DNA
agtaatcgttgatgttaccc

SEQ ID NO: 36035 - DNA, 20 bp, synthetic construct
  source 1..20: mol_type = other DNA
cagtaatcgttgatgttacc

SEQ ID NO: 36036 - DNA, 20 bp, synthetic construct
  source 1..20: mol_type = other DNA
tcagtaatcgttgatgttac

SEQ ID NO: 36037 - DNA, 20 bp, synthetic construct
  source 1..20: mol_type = other DNA
atcagtaatcgttgatgtta

SEQ ID NO: 36038 - DNA, 20 bp, synthetic construct
  source 1..20: mol_type = other DNA
aatcagtaatcgttgatgtt

SEQ ID NO: 36039 - DNA, 20 bp, synthetic construct
  source 1..20: mol_type = other DNA
taatcagtaatcgttgatgt

SEQ ID NO: 36040 - DNA, 20 bp, synthetic construct
  source 1..20: mol_type = other DNA
gtaatcagtaatcgttgatg

SEQ ID NO: 36041 - DNA, 20 bp, synthetic construct
  source 1..20: mol_type = other DNA
tgtaatcagtaatcgttgat

SEQ ID NO: 36042 - DNA, 20 bp, synthetic construct
  source 1..20: mol_type = other DNA
ctgtaatcagtaatcgttga

SEQ ID NO: 36043 - DNA, 20 bp, synthetic construct
  source 1..20: mol_type = other DNA
tctgtaatcagtaatcgttg

SEQ ID NO: 36044 - DNA, 20 bp, synthetic construct
  source 1..20: mol_type = other DNA
atctgtaatcagtaatcgtt

SEQ ID NO: 36045 - DNA, 20 bp, synthetic construct
  source 1..20: mol_type = other DNA
aatctgtaatcagtaatcgt

SEQ ID NO: 36046 - DNA, 20 bp, synthetic construct
  source 1..20: mol_type = other DNA
taatctgtaatcagtaatcg

SEQ ID NO: 36047 - DNA, 20 bp, synthetic construct
  source 1..20: mol_type = other DNA
gtaatctgtaatcagtaatc

SEQ ID NO: 36048 - DNA, 20 bp, synthetic construct
  source 1..20: mol_type = other DNA
agtaatctgtaatcagtaat

SEQ ID NO: 36049 - DNA, 20 bp, synthetic construct
  source 1..20: mol_type = other DNA
tagtaatctgtaatcagtaa

SEQ ID NO: 36050 - DNA, 20 bp, synthetic construct
  source 1..20: mol_type = other DNA
atagtaatctgtaatcagta

SEQ ID NO: 36051 - DNA, 20 bp, synthetic construct
  source 1..20: mol_type = other DNA
tatagtaatctgtaatcagt

SEQ ID NO: 36052 - DNA, 20 bp, synthetic construct
  source 1..20: mol_type = other DNA
ttatagtaatctgtaatcag

SEQ ID NO: 36053 - DNA, 20 bp, synthetic construct
  source 1..20: mol_type = other DNA
gttatagtaatctgtaatca

SEQ ID NO: 36054 - DNA, 20 bp, synthetic construct
  source 1..20: mol_type = other DNA
tgttatagtaatctgtaatc

SEQ ID NO: 36055 - DNA, 20 bp, synthetic construct
  source 1..20: mol_type = other DNA
ctgttatagtaatctgtaat

SEQ ID NO: 36056 - DNA, 20 bp, synthetic construct
  source 1..20: mol_type = other DNA
tctgttatagtaatctgtaa

SEQ ID NO: 36057 - DNA, 20 bp, synthetic construct
  source 1..20: mol_type = other DNA
atctgttatagtaatctgta

SEQ ID NO: 36058 - DNA, 20 bp, synthetic construct
  source 1..20: mol_type = other DNA
tatctgttatagtaatctgt

SEQ ID NO: 36059 - DNA, 20 bp, synthetic construct
  source 1..20: mol_type = other DNA
gtatctgttatagtaatctg

SEQ ID NO: 36060 - DNA, 20 bp, synthetic construct
  source 1..20: mol_type = other DNA
tgtatctgttatagtaatct

SEQ ID NO: 36061 - DNA, 20 bp, synthetic construct
  source 1..20: mol_type = other DNA
ttgtatctgttatagtaatc

SEQ ID NO: 36062 - DNA, 20 bp, synthetic construct
  source 1..20: mol_type = other DNA
attgtatctgttatagtaat

SEQ ID NO: 36063 - DNA, 20 bp, synthetic construct
  source 1..20: mol_type = other DNA
tattgtatctgttatagtaa

SEQ ID NO: 36064 - DNA, 20 bp, synthetic construct
  source 1..20: mol_type = other DNA
ttattgtatctgttatagta

SEQ ID NO: 36065 - DNA, 20 bp, synthetic construct
  source 1..20: mol_type = other DNA
attattgtatctgttatagt

SEQ ID NO: 36066 - DNA, 20 bp, synthetic construct
  source 1..20: mol_type = other DNA
tattattgtatctgttatag

SEQ ID NO: 36067 - DNA, 20 bp, synthetic construct
  source 1..20: mol_type = other DNA
ttattattgtatctgttata

SEQ ID NO: 36068 - DNA, 20 bp, synthetic construct
  source 1..20: mol_type = other DNA
attattattgtatctgttat

SEQ ID NO: 36069 - DNA, 20 bp, synthetic construct
  source 1..20: mol_type = other DNA
aattattattgtatctgtta

SEQ ID NO: 36070 - DNA, 20 bp, synthetic construct
  source 1..20: mol_type = other DNA
caattattattgtatctgtt

SEQ ID NO: 36071 - DNA, 20 bp, synthetic construct
  source 1..20: mol_type = other DNA
acaattattattgtatctgt

SEQ ID NO: 36072 - DNA, 20 bp, synthetic construct
  source 1..20: mol_type = other DNA
tacaattattattgtatctg

SEQ ID NO: 36073 - DNA, 20 bp, synthetic construct
  source 1..20: mol_type = other DNA
ttacaattattattgtatct

SEQ ID NO: 36074 - DNA, 20 bp, synthetic construct
  source 1..20: mol_type = other DNA
tttacaattattattgtatc

SEQ ID NO: 36075 - DNA, 20 bp, synthetic construct
  source 1..20: mol_type = other DNA
atttacaattattattgtat

SEQ ID NO: 36076 - DNA, 20 bp, synthetic construct
  source 1..20: mol_type = other DNA
aatttacaattattattgta

SEQ ID NO: 36077 - DNA, 20 bp, synthetic construct
  source 1..20: mol_type = other DNA
taatttacaattattattgt

SEQ ID NO: 36078 - DNA, 20 bp, synthetic construct
  source 1..20: mol_type = other DNA
ataatttacaattattattg

SEQ ID NO: 36079 - DNA, 20 bp, synthetic construct
  source 1..20: mol_type = other DNA
aataatttacaattattatt

SEQ ID NO: 36080 - DNA, 20 bp, synthetic construct
  source 1..20: mol_type = other DNA
taataatttacaattattat

SEQ ID NO: 36081 - DNA, 20 bp, synthetic construct
  source 1..20: mol_type = other DNA
ataataatttacaattatta

SEQ ID NO: 36082 - DNA, 20 bp, synthetic construct
  source 1..20: mol_type = other DNA
aataataatttacaattatt

SEQ ID NO: 36083 - DNA, 20 bp, synthetic construct
  source 1..20: mol_type = other DNA
aaataataatttacaattat

SEQ ID NO: 36084 - DNA, 20 bp, synthetic construct
  source 1..20: mol_type = other DNA
taaataataatttacaatta

SEQ ID NO: 36085 - DNA, 20 bp, synthetic construct
  source 1..20: mol_type = other DNA
gtaaataataatttacaatt

SEQ ID NO: 36086 - DNA, 20 bp, synthetic construct
  source 1..20: mol_type = other DNA
tgtaaataataatttacaat

SEQ ID NO: 36087 - DNA, 20 bp, synthetic construct
  source 1..20: mol_type = other DNA
ttgtaaataataatttacaa

SEQ ID NO: 36088 - DNA, 20 bp, synthetic construct
  source 1..20: mol_type = other DNA
attgtaaataataatttaca

SEQ ID NO: 36089 - DNA, 20 bp, synthetic construct
  source 1..20: mol_type = other DNA
aattgtaaataataatttac

SEQ ID NO: 36090 - DNA, 20 bp, synthetic construct
  source 1..20: mol_type = other DNA
caattgtaaataataattta

SEQ ID NO: 36091 - DNA, 20 bp, synthetic construct
  source 1..20: mol_type = other DNA
acaattgtaaataataattt

SEQ ID NO: 36092 - DNA, 20 bp, synthetic construct
  source 1..20: mol_type = other DNA
tacaattgtaaataataatt

SEQ ID NO: 36093 - DNA, 20 bp, synthetic construct
  source 1..20: mol_type = other DNA
ttacaattgtaaataataat

SEQ ID NO: 36094 - DNA, 20 bp, synthetic construct
  source 1..20: mol_type = other DNA
tttacaattgtaaataataa

SEQ ID NO: 36095 - DNA, 20 bp, synthetic construct
  source 1..20: mol_type = other DNA
ttttacaattgtaaataata

SEQ ID NO: 36096 - DNA, 20 bp, synthetic construct
  source 1..20: mol_type = other DNA
attttacaattgtaaataat

SEQ ID NO: 36097 - DNA, 20 bp, synthetic construct
  source 1..20: mol_type = other DNA
tattttacaattgtaaataa

SEQ ID NO: 36098 - DNA, 20 bp, synthetic construct
  source 1..20: mol_type = other DNA
gtattttacaattgtaaata

SEQ ID NO: 36099 - DNA, 20 bp, synthetic construct
  source 1..20: mol_type = other DNA
tgtattttacaattgtaaat

SEQ ID NO: 36100 - DNA, 20 bp, synthetic construct
  source 1..20: mol_type = other DNA
ttgtattttacaattgtaaa

SEQ ID NO: 36101 - DNA, 20 bp, synthetic construct
  source 1..20: mol_type = other DNA
attgtattttacaattgtaa

SEQ ID NO: 36102 - DNA, 20 bp, synthetic construct
  source 1..20: mol_type = other DNA
gattgtattttacaattgta

SEQ ID NO: 36103 - DNA, 20 bp, synthetic construct
  source 1..20: mol_type = other DNA
agattgtattttacaattgt

SEQ ID NO: 36104 - DNA, 20 bp, synthetic construct
  source 1..20: mol_type = other DNA
aagattgtattttacaattg

SEQ ID NO: 36105 - DNA, 20 bp, synthetic construct
  source 1..20: mol_type = other DNA
aaagattgtattttacaatt

SEQ ID NO: 36106 - DNA, 20 bp, synthetic construct
  source 1..20: mol_type = other DNA
aaaagattgtattttacaat

SEQ ID NO: 36107 - DNA, 20 bp, synthetic construct
  source 1..20: mol_type = other DNA
gaaaagattgtattttacaa

SEQ ID NO: 36108 - DNA, 20 bp, synthetic construct
  source 1..20: mol_type = other DNA
agaaaagattgtattttaca

SEQ ID NO: 36109 - DNA, 20 bp, synthetic construct
  source 1..20: mol_type = other DNA
aagaaaagattgtattttac

SEQ ID NO: 36110 - DNA, 20 bp, synthetic construct
  source 1..20: mol_type = other DNA
aaagaaaagattgtatttta

SEQ ID NO: 36111 - DNA, 20 bp, synthetic construct
  source 1..20: mol_type = other DNA
taaagaaaagattgtatttt

SEQ ID NO: 36112 - DNA, 20 bp, synthetic construct
  source 1..20: mol_type = other DNA
ataaagaaaagattgtattt

SEQ ID NO: 36113 - DNA, 20 bp, synthetic construct
  source 1..20: mol_type = other DNA
aataaagaaaagattgtatt

SEQ ID NO: 36114 - DNA, 20 bp, synthetic construct
  source 1..20: mol_type = other DNA
taataaagaaaagattgtat

SEQ ID NO: 36115 - DNA, 20 bp, synthetic construct
  source 1..20: mol_type = other DNA
ataataaagaaaagattgta

SEQ ID NO: 36116 - DNA, 20 bp, synthetic construct
  source 1..20: mol_type = other DNA
aataataaagaaaagattgt

SEQ ID NO: 36117 - DNA, 20 bp, synthetic construct
  source 1..20: mol_type = other DNA
aaataataaagaaaagattg

SEQ ID NO: 36118 - DNA, 20 bp, synthetic construct
  source 1..20: mol_type = other DNA
taaataataaagaaaagatt

SEQ ID NO: 36119 - DNA, 20 bp, synthetic construct
  source 1..20: mol_type = other DNA
gtaaataataaagaaaagat

SEQ ID NO: 36120 - DNA, 20 bp, synthetic construct
  source 1..20: mol_type = other DNA
tgtaaataataaagaaaaga

SEQ ID NO: 36121 - DNA, 20 bp, synthetic construct
  source 1..20: mol_type = other DNA
ttgtaaataataaagaaaag

SEQ ID NO: 36122 - DNA, 20 bp, synthetic construct
  source 1..20: mol_type = other DNA
attgtaaataataaagaaaa

SEQ ID NO: 36123 - DNA, 20 bp, synthetic construct
  source 1..20: mol_type = other DNA
aattgtaaataataaagaaa

SEQ ID NO: 36124 - DNA, 20 bp, synthetic construct
  source 1..20: mol_type = other DNA
taattgtaaataataaagaa

SEQ ID NO: 36125 - DNA, 20 bp, synthetic construct
  source 1..20: mol_type = other DNA
ataattgtaaataataaaga

SEQ ID NO: 36126 - DNA, 20 bp, synthetic construct
  source 1..20: mol_type = other DNA
aataattgtaaataataaag

SEQ ID NO: 36127 - DNA, 20 bp, synthetic construct
  source 1..20: mol_type = other DNA
caataattgtaaataataaa

SEQ ID NO: 36128 - DNA, 20 bp, synthetic construct
  source 1..20: mol_type = other DNA
acaataattgtaaataataa

SEQ ID NO: 36129 - DNA, 20 bp, synthetic construct
  source 1..20: mol_type = other DNA
tacaataattgtaaataata

SEQ ID NO: 36130 - DNA, 20 bp, synthetic construct
  source 1..20: mol_type = other DNA
ttacaataattgtaaataat

SEQ ID NO: 36131 - DNA, 20 bp, synthetic construct
  source 1..20: mol_type = other DNA
tttacaataattgtaaataa

SEQ ID NO: 36132 - DNA, 20 bp, synthetic construct
  source 1..20: mol_type = other DNA
ttttacaataattgtaaata

SEQ ID NO: 36133 - DNA, 20 bp, synthetic construct
  source 1..20: mol_type = other DNA
attttacaataattgtaaat

SEQ ID NO: 36134 - DNA, 20 bp, synthetic construct
  source 1..20: mol_type = other DNA
tattttacaataattgtaaa

SEQ ID NO: 36135 - DNA, 20 bp, synthetic construct
  source 1..20: mol_type = other DNA
gtattttacaataattgtaa

SEQ ID NO: 36136 - DNA, 20 bp, synthetic construct
  source 1..20: mol_type = other DNA
tgtattttacaataattgta

SEQ ID NO: 36137 - DNA, 20 bp, synthetic construct
  source 1..20: mol_type = other DNA
ttgtattttacaataattgt

SEQ ID NO: 36138 - DNA, 20 bp, synthetic construct
  source 1..20: mol_type = other DNA
attgtattttacaataattg

SEQ ID NO: 36139 - DNA, 20 bp, synthetic construct
  source 1..20: mol_type = other DNA
gattgtattttacaataatt

SEQ ID NO: 36140 - DNA, 20 bp, synthetic construct
  source 1..20: mol_type = other DNA
agattgtattttacaataat

SEQ ID NO: 36141 - DNA, 20 bp, synthetic construct
  source 1..20: mol_type = other DNA
cagattgtattttacaataa

SEQ ID NO: 36142 - DNA, 20 bp, synthetic construct
  source 1..20: mol_type = other DNA
tcagattgtattttacaata

SEQ ID NO: 36143 - DNA, 20 bp, synthetic construct
  source 1..20: mol_type = other DNA
atcagattgtattttacaat

SEQ ID NO: 36144 - DNA, 20 bp, synthetic construct
  source 1..20: mol_type = other DNA
aatcagattgtattttacaa

SEQ ID NO: 36145 - DNA, 20 bp, synthetic construct
  source 1..20: mol_type = other DNA
taatcagattgtattttaca

SEQ ID NO: 36146 - DNA, 20 bp, synthetic construct
  source 1..20: mol_type = other DNA
gtaatcagattgtattttac

SEQ ID NO: 36147 - DNA, 20 bp, synthetic construct
  source 1..20: mol_type = other DNA
tgtaatcagattgtatttta

SEQ ID NO: 36148 - DNA, 20 bp, synthetic construct
  source 1..20: mol_type = other DNA
ctgtaatcagattgtatttt

SEQ ID NO: 36149 - DNA, 20 bp, synthetic construct
  source 1..20: mol_type = other DNA
tctgtaatcagattgtattt

SEQ ID NO: 36150 - DNA, 20 bp, synthetic construct
  source 1..20: mol_type = other DNA
atctgtaatcagattgtatt

SEQ ID NO: 36151 - DNA, 20 bp, synthetic construct
  source 1..20: mol_type = other DNA
aatctgtaatcagattgtat

SEQ ID NO: 36152 - DNA, 20 bp, synthetic construct
  source 1..20: mol_type = other DNA
taatctgtaatcagattgta

SEQ ID NO: 36153 - DNA, 20 bp, synthetic construct
  source 1..20: mol_type = other DNA
gtaatctgtaatcagattgt

SEQ ID NO: 36154 - DNA, 20 bp, synthetic construct
  source 1..20: mol_type = other DNA
agtaatctgtaatcagattg

SEQ ID NO: 36155 - DNA, 20 bp, synthetic construct
  source 1..20: mol_type = other DNA
tagtaatctgtaatcagatt

SEQ ID NO: 36156 - DNA, 20 bp, synthetic construct
  source 1..20: mol_type = other DNA
atagtaatctgtaatcagat

SEQ ID NO: 36157 - DNA, 20 bp, synthetic construct
  source 1..20: mol_type = other DNA
tatagtaatctgtaatcaga

SEQ ID NO: 36158 - DNA, 20 bp, synthetic construct
  source 1..20: mol_type = other DNA
ttatagtaatctgtaatcag

SEQ ID NO: 36159 - DNA, 20 bp, synthetic construct
  source 1..20: mol_type = other DNA
gttatagtaatctgtaatca

SEQ ID NO: 36160 - DNA, 20 bp, synthetic construct
  source 1..20: mol_type = other DNA
cgttatagtaatctgtaatc

SEQ ID NO: 36161 - DNA, 20 bp, synthetic construct
  source 1..20: mol_type = other DNA
acgttatagtaatctgtaat

SEQ ID NO: 36162 - DNA, 20 bp, synthetic construct
  source 1..20: mol_type = other DNA
tacgttatagtaatctgtaa

SEQ ID NO: 36163 - DNA, 20 bp, synthetic construct
  source 1..20: mol_type = other DNA
atacgttatagtaatctgta

SEQ ID NO: 36164 - DNA, 20 bp, synthetic construct
  source 1..20: mol_type = other DNA
tatacgttatagtaatctgt

SEQ ID NO: 36165 - DNA, 20 bp, synthetic construct
  source 1..20: mol_type = other DNA
gtatacgttatagtaatctg

SEQ ID NO: 36166 - DNA, 20 bp, synthetic construct
  source 1..20: mol_type = other DNA
tgtatacgttatagtaatct

SEQ ID NO: 36167 - DNA, 20 bp, synthetic construct
  source 1..20: mol_type = other DNA
ttgtatacgttatagtaatc

SEQ ID NO: 36168 - DNA, 20 bp, synthetic construct
  source 1..20: mol_type = other DNA
attgtatacgttatagtaat

SEQ ID NO: 36169 - DNA, 20 bp, synthetic construct
  source 1..20: mol_type = other DNA
tattgtatacgttatagtaa

SEQ ID NO: 36170 - DNA, 20 bp, synthetic construct
  source 1..20: mol_type = other DNA
ttattgtatacgttatagta

SEQ ID NO: 36171 - DNA, 20 bp, synthetic construct
  source 1..20: mol_type = other DNA
attattgtatacgttatagt

SEQ ID NO: 36172 - DNA, 20 bp, synthetic construct
  source 1..20: mol_type = other DNA
tattattgtatacgttatag

SEQ ID NO: 36173 - DNA, 20 bp, synthetic construct
  source 1..20: mol_type = other DNA
ctattattgtatacgttata

SEQ ID NO: 36174 - DNA, 20 bp, synthetic construct
  source 1..20: mol_type = other DNA
actattattgtatacgttat

SEQ ID NO: 36175 - DNA, 20 bp, synthetic construct
  source 1..20: mol_type = other DNA
cactattattgtatacgtta

SEQ ID NO: 36176 - DNA, 20 bp, synthetic construct
  source 1..20: mol_type = other DNA
ccactattattgtatacgtt

SEQ ID NO: 36177 - DNA, 20 bp, synthetic construct
  source 1..20: mol_type = other DNA
tccactattattgtatacgt

SEQ ID NO: 36178 - DNA, 20 bp, synthetic construct
  source 1..20: mol_type = other DNA
ttccactattattgtatacg

SEQ ID NO: 36179 - DNA, 20 bp, synthetic construct
  source 1..20: mol_type = other DNA
tttccactattattgtatac

SEQ ID NO: 36180 - DNA, 20 bp, synthetic construct
  source 1..20: mol_type = other DNA
ttttccactattattgtata

SEQ ID NO: 36181 - DNA, 20 bp, synthetic construct
  source 1..20: mol_type = other DNA
cttttccactattattgtat

SEQ ID NO: 36182 - DNA, 20 bp, synthetic construct
  source 1..20: mol_type = other DNA
acttttccactattattgta

SEQ ID NO: 36183 - DNA, 20 bp, synthetic construct
  source 1..20: mol_type = other DNA
aacttttccactattattgt

SEQ ID NO: 36184 - DNA, 20 bp, synthetic construct
  source 1..20: mol_type = other DNA
aaacttttccactattattg

SEQ ID NO: 36185 - DNA, 20 bp, synthetic construct
  source 1..20: mol_type = other DNA
caaacttttccactattatt

SEQ ID NO: 36186 - DNA, 20 bp, synthetic construct
  source 1..20: mol_type = other DNA
tcaaacttttccactattat

SEQ ID NO: 36187 - DNA, 20 bp, synthetic construct
  source 1..20: mol_type = other DNA
ttcaaacttttccactatta

SEQ ID NO: 36188 - DNA, 20 bp, synthetic construct
  source 1..20: mol_type = other DNA
tttcaaacttttccactatt

SEQ ID NO: 36189 - DNA, 20 bp, synthetic construct
  source 1..20: mol_type = other DNA
ttttcaaacttttccactat

SEQ ID NO: 36190 - DNA, 20 bp, synthetic construct
  source 1..20: mol_type = other DNA
attttcaaacttttccacta

SEQ ID NO: 36191 - DNA, 20 bp, synthetic construct
  source 1..20: mol_type = other DNA
tattttcaaacttttccact

SEQ ID NO: 36192 - DNA, 20 bp, synthetic construct
  source 1..20: mol_type = other DNA
atattttcaaacttttccac

SEQ ID NO: 36193 - DNA, 20 bp, synthetic construct
  source 1..20: mol_type = other DNA
aatattttcaaacttttcca

SEQ ID NO: 36194 - DNA, 20 bp, synthetic construct
  source 1..20: mol_type = other DNA
caatattttcaaacttttcc

SEQ ID NO: 36195 - DNA, 20 bp, synthetic construct
  source 1..20: mol_type = other DNA
acaatattttcaaacttttc

SEQ ID NO: 36196 - DNA, 20 bp, synthetic construct
  source 1..20: mol_type = other DNA
cacaatattttcaaactttt

SEQ ID NO: 36197 - DNA, 20 bp, synthetic construct
  source 1..20: mol_type = other DNA
tcacaatattttcaaacttt

SEQ ID NO: 36198 - DNA, 20 bp, synthetic construct
  source 1..20: mol_type = other DNA
ctcacaatattttcaaactt

SEQ ID NO: 36199 - DNA, 20 bp, synthetic construct
  source 1..20: mol_type = other DNA
tctcacaatattttcaaact

SEQ ID NO: 36200 - DNA, 20 bp, synthetic construct
  source 1..20: mol_type = other DNA
atctcacaatattttcaaac

SEQ ID NO: 36201 - DNA, 20 bp, synthetic construct
  source 1..20: mol_type = other DNA
aatctcacaatattttcaaa

SEQ ID NO: 36202 - DNA, 20 bp, synthetic construct
  source 1..20: mol_type = other DNA
aaatctcacaatattttcaa

SEQ ID NO: 36203 - DNA, 20 bp, synthetic construct
  source 1..20: mol_type = other DNA
taaatctcacaatattttca

SEQ ID NO: 36204 - DNA, 20 bp, synthetic construct
  source 1..20: mol_type = other DNA
ataaatctcacaatattttc

SEQ ID NO: 36205 - DNA, 20 bp, synthetic construct
  source 1..20: mol_type = other DNA
cataaatctcacaatatttt

SEQ ID NO: 36206 - DNA, 20 bp, synthetic construct
  source 1..20: mol_type = other DNA
tcataaatctcacaatattt

SEQ ID NO: 36207 - DNA, 20 bp, synthetic construct
  source 1..20: mol_type = other DNA
ctcataaatctcacaatatt

SEQ ID NO: 36208 - DNA, 20 bp, synthetic construct
  source 1..20: mol_type = other DNA
tctcataaatctcacaatat

SEQ ID NO: 36209 - DNA, 20 bp, synthetic construct
  source 1..20: mol_type = other DNA
ttctcataaatctcacaata

SEQ ID NO: 36210 - DNA, 20 bp, synthetic construct
  source 1..20: mol_type = other DNA
attctcataaatctcacaat

SEQ ID NO: 36211 - DNA, 20 bp, synthetic construct
  source 1..20: mol_type = other DNA
cattctcataaatctcacaa

SEQ ID NO: 36212 - DNA, 20 bp, synthetic construct
  source 1..20: mol_type = other DNA
acattctcataaatctcaca

SEQ ID NO: 36213 - DNA, 20 bp, synthetic construct
  source 1..20: mol_type = other DNA
cacattctcataaatctcac

SEQ ID NO: 36214 - DNA, 20 bp, synthetic construct
  source 1..20: mol_type = other DNA
tcacattctcataaatctca

SEQ ID NO: 36215 - DNA, 20 bp, synthetic construct
  source 1..20: mol_type = other DNA
gtcacattctcataaatctc

SEQ ID NO: 36216 - DNA, 20 bp, synthetic construct
  source 1..20: mol_type = other DNA
tgtcacattctcataaatct

SEQ ID NO: 36217 - DNA, 20 bp, synthetic construct
  source 1..20: mol_type = other DNA
gtgtcacattctcataaatc

SEQ ID NO: 36218 - DNA, 20 bp, synthetic construct
  source 1..20: mol_type = other DNA
tgtgtcacattctcataaat

SEQ ID NO: 36219 - DNA, 20 bp, synthetic construct
  source 1..20: mol_type = other DNA
ctgtgtcacattctcataaa

SEQ ID NO: 36220 - DNA, 20 bp, synthetic construct
  source 1..20: mol_type = other DNA
cctgtgtcacattctcataa

SEQ ID NO: 36221 - DNA, 20 bp, synthetic construct
  source 1..20: mol_type = other DNA
gcctgtgtcacattctcata

SEQ ID NO: 36222 - DNA, 20 bp, synthetic construct
  source 1..20: mol_type = other DNA
cgcctgtgtcacattctcat

SEQ ID NO: 36223 - DNA, 20 bp, synthetic construct
  source 1..20: mol_type = other DNA
gcgcctgtgtcacattctca

SEQ ID NO: 36224 - DNA, 20 bp, synthetic construct
  source 1..20: mol_type = other DNA
tgcgcctgtgtcacattctc

SEQ ID NO: 36225 - DNA, 20 bp, synthetic construct
  source 1..20: mol_type = other DNA
ttgcgcctgtgtcacattct

SEQ ID NO: 36226 - DNA, 20 bp, synthetic construct
  source 1..20: mol_type = other DNA
tttgcgcctgtgtcacattc

SEQ ID NO: 36227 - DNA, 20 bp, synthetic construct
  source 1..20: mol_type = other DNA
ctttgcgcctgtgtcacatt

SEQ ID NO: 36228 - DNA, 20 bp, synthetic construct
  source 1..20: mol_type = other DNA
tctttgcgcctgtgtcacat

SEQ ID NO: 36229 - DNA, 20 bp, synthetic construct
  source 1..20: mol_type = other DNA
ctctttgcgcctgtgtcaca

SEQ ID NO: 36230 - DNA, 20 bp, synthetic construct
  source 1..20: mol_type = other DNA
tctctttgcgcctgtgtcac

SEQ ID NO: 36231 - DNA, 20 bp, synthetic construct
  source 1..20: mol_type = other DNA
ctctctttgcgcctgtgtca

SEQ ID NO: 36232 - DNA, 20 bp, synthetic construct
  source 1..20: mol_type = other DNA
gctctctttgcgcctgtgtc

SEQ ID NO: 36233 - DNA, 20 bp, synthetic construct
  source 1..20: mol_type = other DNA
tgctctctttgcgcctgtgt

SEQ ID NO: 36234 - DNA, 20 bp, synthetic construct
  source 1..20: mol_type = other DNA
gtgctctctttgcgcctgtg

SEQ ID NO: 36235 - DNA, 20 bp, synthetic construct
  source 1..20: mol_type = other DNA
tgtgctctctttgcgcctgt

SEQ ID NO: 36236 - DNA, 20 bp, synthetic construct
  source 1..20: mol_type = other DNA
atgtgctctctttgcgcctg

SEQ ID NO: 36237 - DNA, 20 bp, synthetic construct
  source 1..20: mol_type = other DNA
catgtgctctctttgcgcct

SEQ ID NO: 36238 - DNA, 20 bp, synthetic construct
  source 1..20: mol_type = other DNA
acatgtgctctctttgcgcc

SEQ ID NO: 36239 - DNA, 20 bp, synthetic construct
  source 1..20: mol_type = other DNA
aacatgtgctctctttgcgc

SEQ ID NO: 36240 - DNA, 20 bp, synthetic construct
  source 1..20: mol_type = other DNA
taacatgtgctctctttgcg

SEQ ID NO: 36241 - DNA, 20 bp, synthetic construct
  source 1..20: mol_type = other DNA
gtaacatgtgctctctttgc

SEQ ID NO: 36242 - DNA, 20 bp, synthetic construct
  source 1..20: mol_type = other DNA
agtaacatgtgctctctttg

SEQ ID NO: 36243 - DNA, 20 bp, synthetic construct
  source 1..20: mol_type = other DNA
cagtaacatgtgctctcttt

SEQ ID NO: 36244 - DNA, 20 bp, synthetic construct
  source 1..20: mol_type = other DNA
ccagtaacatgtgctctctt

SEQ ID NO: 36245 - DNA, 20 bp, synthetic construct
  source 1..20: mol_type = other DNA
tccagtaacatgtgctctct

SEQ ID NO: 36246 - DNA, 20 bp, synthetic construct
  source 1..20: mol_type = other DNA
ttccagtaacatgtgctctc

SEQ ID NO: 36247 - DNA, 20 bp, synthetic construct
  source 1..20: mol_type = other DNA
tttccagtaacatgtgctct

SEQ ID NO: 36248 - DNA, 20 bp, synthetic construct
  source 1..20: mol_type = other DNA
atttccagtaacatgtgctc

SEQ ID NO: 36249 - DNA, 20 bp, synthetic construct
  source 1..20: mol_type = other DNA
tatttccagtaacatgtgct

SEQ ID NO: 36250 - DNA, 20 bp, synthetic construct
  source 1..20: mol_type = other DNA
gtatttccagtaacatgtgc

SEQ ID NO: 36251 - DNA, 20 bp, synthetic construct
  source 1..20: mol_type = other DNA
cgtatttccagtaacatgtg

SEQ ID NO: 36252 - DNA, 20 bp, synthetic construct
  source 1..20: mol_type = other DNA
ccgtatttccagtaacatgt

SEQ ID NO: 36253 - DNA, 20 bp, synthetic construct
  source 1..20: mol_type = other DNA
gccgtatttccagtaacatg

SEQ ID NO: 36254 - DNA, 20 bp, synthetic construct
  source 1..20: mol_type = other DNA
tgccgtatttccagtaacat

SEQ ID NO: 36255 - DNA, 20 bp, synthetic construct
  source 1..20: mol_type = other DNA
gtgccgtatttccagtaaca

SEQ ID NO: 36256 - DNA, 20 bp, synthetic construct
  source 1..20: mol_type = other DNA
agtgccgtatttccagtaac

SEQ ID NO: 36257 - DNA, 20 bp, synthetic construct
  source 1..20: mol_type = other DNA
tagtgccgtatttccagtaa

SEQ ID NO: 36258 - DNA, 20 bp, synthetic construct
  source 1..20: mol_type = other DNA
ttagtgccgtatttccagta

SEQ ID NO: 36259 - DNA, 20 bp, synthetic construct
  source 1..20: mol_type = other DNA
attagtgccgtatttccagt

SEQ ID NO: 36260 - DNA, 20 bp, synthetic construct
  source 1..20: mol_type = other DNA
cattagtgccgtatttccag

SEQ ID NO: 36261 - DNA, 20 bp, synthetic construct
  source 1..20: mol_type = other DNA
ccattagtgccgtatttcca

SEQ ID NO: 36262 - DNA, 20 bp, synthetic construct
  source 1..20: mol_type = other DNA
tccattagtgccgtatttcc

SEQ ID NO: 36263 - DNA, 20 bp, synthetic construct
  source 1..20: mol_type = other DNA
gtccattagtgccgtatttc

SEQ ID NO: 36264 - DNA, 20 bp, synthetic construct
  source 1..20: mol_type = other DNA
agtccattagtgccgtattt

SEQ ID NO: 36265 - DNA, 20 bp, synthetic construct
  source 1..20: mol_type = other DNA
aagtccattagtgccgtatt

SEQ ID NO: 36266 - DNA, 20 bp, synthetic construct
  source 1..20: mol_type = other DNA
caagtccattagtgccgtat

SEQ ID NO: 36267 - DNA, 20 bp, synthetic construct
  source 1..20: mol_type = other DNA
gcaagtccattagtgccgta

SEQ ID NO: 36268 - DNA, 20 bp, synthetic construct
  source 1..20: mol_type = other DNA
ggcaagtccattagtgccgt

SEQ ID NO: 36269 - DNA, 20 bp, synthetic construct
  source 1..20: mol_type = other DNA
gggcaagtccattagtgccg

SEQ ID NO: 36270 - DNA, 20 bp, synthetic construct
  source 1..20: mol_type = other DNA
cgggcaagtccattagtgcc

SEQ ID NO: 36271 - DNA, 20 bp, synthetic construct
  source 1..20: mol_type = other DNA
tcgggcaagtccattagtgc

SEQ ID NO: 36272 - DNA, 20 bp, synthetic construct
  source 1..20: mol_type = other DNA
gtcgggcaagtccattagtg

SEQ ID NO: 36273 - DNA, 20 bp, synthetic construct
  source 1..20: mol_type = other DNA
agtcgggcaagtccattagt

SEQ ID NO: 36274 - DNA, 20 bp, synthetic construct
  source 1..20: mol_type = other DNA
gagtcgggcaagtccattag

SEQ ID NO: 36275 - DNA, 20 bp, synthetic construct
  source 1..20: mol_type = other DNA
cgagtcgggcaagtccatta

SEQ ID NO: 36276 - DNA, 20 bp, synthetic construct
  source 1..20: mol_type = other DNA
ccgagtcgggcaagtccatt

SEQ ID NO: 36277 - DNA, 20 bp, synthetic construct
  source 1..20: mol_type = other DNA
cccgagtcgggcaagtccat

SEQ ID NO: 36278 - DNA, 20 bp, synthetic construct
  source 1..20: mol_type = other DNA
ccccgagtcgggcaagtcca

SEQ ID NO: 36279 - DNA, 20 bp, synthetic construct
  source 1..20: mol_type = other DNA
accccgagtcgggcaagtcc

SEQ ID NO: 36280 - DNA, 20 bp, synthetic construct
  source 1..20: mol_type = other DNA
aaccccgagtcgggcaagtc

SEQ ID NO: 36281 - DNA, 20 bp, synthetic construct
  source 1..20: mol_type = other DNA
aaaccccgagtcgggcaagt

SEQ ID NO: 36282 - DNA, 20 bp, synthetic construct
  source 1..20: mol_type = other DNA
gaaaccccgagtcgggcaag

SEQ ID NO: 36283 - DNA, 20 bp, synthetic construct
  source 1..20: mol_type = other DNA
ggaaaccccgagtcgggcaa

SEQ ID NO: 36284 - DNA, 20 bp, synthetic construct
  source 1..20: mol_type = other DNA
tggaaaccccgagtcgggca

SEQ ID NO: 36285 - DNA, 20 bp, synthetic construct
  source 1..20: mol_type = other DNA
gtggaaaccccgagtcgggc

SEQ ID NO: 36286 - DNA, 20 bp, synthetic construct
  source 1..20: mol_type = other DNA
tgtggaaaccccgagtcggg

SEQ ID NO: 36287 - DNA, 20 bp, synthetic construct
  source 1..20: mol_type = other DNA
ctgtggaaaccccgagtcgg

SEQ ID NO: 36288 - DNA, 20 bp, synthetic construct
  source 1..20: mol_type = other DNA
tctgtggaaaccccgagtcg

SEQ ID NO: 36289 - DNA, 20 bp, synthetic construct
  source 1..20: mol_type = other DNA
gtctgtggaaaccccgagtc

SEQ ID NO: 36290 - DNA, 20 bp, synthetic construct
  source 1..20: mol_type = other DNA
cgtctgtggaaaccccgagt

SEQ ID NO: 36291 - DNA, 20 bp, synthetic construct
  source 1..20: mol_type = other DNA
ccgtctgtggaaaccccgag

SEQ ID NO: 36292 - DNA, 20 bp, synthetic construct
  source 1..20: mol_type = other DNA
accgtctgtggaaaccccga

SEQ ID NO: 36293 - DNA, 20 bp, synthetic construct
  source 1..20: mol_type = other DNA
gaccgtctgtggaaaccccg

SEQ ID NO: 36294 - DNA, 20 bp, synthetic construct
  source 1..20: mol_type = other DNA
tgaccgtctgtggaaacccc

SEQ ID NO: 36295 - DNA, 20 bp, synthetic construct
  source 1..20: mol_type = other DNA
ctgaccgtctgtggaaaccc

SEQ ID NO: 36296 - DNA, 20 bp, synthetic construct
  source 1..20: mol_type = other DNA
gctgaccgtctgtggaaacc

SEQ ID NO: 36297 - DNA, 20 bp, synthetic construct
  source 1..20: mol_type = other DNA
agctgaccgtctgtggaaac

SEQ ID NO: 36298 - DNA, 20 bp, synthetic construct
  source 1..20: mol_type = other DNA
aagctgaccgtctgtggaaa

SEQ ID NO: 36299 - DNA, 20 bp, synthetic construct
  source 1..20: mol_type = other DNA
caagctgaccgtctgtggaa

SEQ ID NO: 36300 - DNA, 20 bp, synthetic construct
  source 1..20: mol_type = other DNA
acaagctgaccgtctgtgga

SEQ ID NO: 36301 - DNA, 20 bp, synthetic construct
  source 1..20: mol_type = other DNA
gacaagctgaccgtctgtgg

SEQ ID NO: 36302 - DNA, 20 bp, synthetic construct
  source 1..20: mol_type = other DNA
tgacaagctgaccgtctgtg

SEQ ID NO: 36303 - DNA, 20 bp, synthetic construct
  source 1..20: mol_type = other DNA
ttgacaagctgaccgtctgt

SEQ ID NO: 36304 - DNA, 20 bp, synthetic construct
  source 1..20: mol_type = other DNA
tttgacaagctgaccgtctg

SEQ ID NO: 36305 - DNA, 20 bp, synthetic construct
  source 1..20: mol_type = other DNA
ttttgacaagctgaccgtct

SEQ ID NO: 36306 - DNA, 20 bp, synthetic construct
  source 1..20: mol_type = other DNA
tttttgacaagctgaccgtc

SEQ ID NO: 36307 - DNA, 20 bp, synthetic construct
  source 1..20: mol_type = other DNA
atttttgacaagctgaccgt

SEQ ID NO: 36308 - DNA, 20 bp, synthetic construct
  source 1..20: mol_type = other DNA
catttttgacaagctgaccg

SEQ ID NO: 36309 - DNA, 20 bp, synthetic construct
  source 1..20: mol_type = other DNA
gcatttttgacaagctgacc

SEQ ID NO: 36310 - DNA, 20 bp, synthetic construct
  source 1..20: mol_type = other DNA
tgcatttttgacaagctgac

SEQ ID NO: 36311 - DNA, 20 bp, synthetic construct
  source 1..20: mol_type = other DNA
ctgcatttttgacaagctga

SEQ ID NO: 36312 - DNA, 20 bp, synthetic construct
  source 1..20: mol_type = other DNA
gctgcatttttgacaagctg

SEQ ID NO: 36313 - DNA, 20 bp, synthetic construct
  source 1..20: mol_type = other DNA
tgctgcatttttgacaagct

SEQ ID NO: 36314 - DNA, 20 bp, synthetic construct
  source 1..20: mol_type = other DNA
atgctgcatttttgacaagc

SEQ ID NO: 36315 - DNA, 20 bp, synthetic construct
  source 1..20: mol_type = other DNA
gatgctgcatttttgacaag

SEQ ID NO: 36316 - DNA, 20 bp, synthetic construct
  source 1..20: mol_type = other DNA
agatgctgcatttttgacaa

SEQ ID NO: 36317 - DNA, 20 bp, synthetic construct
  source 1..20: mol_type = other DNA
cagatgctgcatttttgaca

SEQ ID NO: 36318 - DNA, 20 bp, synthetic construct
  source 1..20: mol_type = other DNA
acagatgctgcatttttgac

SEQ ID NO: 36319 - DNA, 20 bp, synthetic construct
  source 1..20: mol_type = other DNA
cacagatgctgcatttttga

SEQ ID NO: 36320 - DNA, 20 bp, synthetic construct
  source 1..20: mol_type = other DNA
tcacagatgctgcatttttg

SEQ ID NO: 36321 - DNA, 20 bp, synthetic construct
  source 1..20: mol_type = other DNA
ttcacagatgctgcattttt

SEQ ID NO: 36322 - DNA, 20 bp, synthetic construct
  source 1..20: mol_type = other DNA
attcacagatgctgcatttt

SEQ ID NO: 36323 - DNA, 20 bp, synthetic construct
  source 1..20: mol_type = other DNA
aattcacagatgctgcattt

SEQ ID NO: 36324 - DNA, 20 bp, synthetic construct
  source 1..20: mol_type = other DNA
aaattcacagatgctgcatt

SEQ ID NO: 36325 - DNA, 20 bp, synthetic construct
  source 1..20: mol_type = other DNA
gaaattcacagatgctgcat

SEQ ID NO: 36326 - DNA, 20 bp, synthetic construct
  source 1..20: mol_type = other DNA
tgaaattcacagatgctgca

SEQ ID NO: 36327 - DNA, 20 bp, synthetic construct
  source 1..20: mol_type = other DNA
ttgaaattcacagatgctgc

SEQ ID NO: 36328 - DNA, 20 bp, synthetic construct
  source 1..20: mol_type = other DNA
attgaaattcacagatgctg

SEQ ID NO: 36329 - DNA, 20 bp, synthetic construct
  source 1..20: mol_type = other DNA
tattgaaattcacagatgct

SEQ ID NO: 36330 - DNA, 20 bp, synthetic construct
  source 1..20: mol_type = other DNA
ttattgaaattcacagatgc

SEQ ID NO: 36331 - DNA, 20 bp, synthetic construct
  source 1..20: mol_type = other DNA
tttattgaaattcacagatg

SEQ ID NO: 36332 - DNA, 20 bp, synthetic construct
  source 1..20: mol_type = other DNA
ctttattgaaattcacagat

SEQ ID NO: 36333 - DNA, 20 bp, synthetic construct
  source 1..20: mol_type = other DNA
gctttattgaaattcacaga

SEQ ID NO: 36334 - DNA, 20 bp, synthetic construct
  source 1..20: mol_type = other DNA
tgctttattgaaattcacag

SEQ ID NO: 36335 - DNA, 20 bp, synthetic construct
  source 1..20: mol_type = other DNA
ttgctttattgaaattcaca

SEQ ID NO: 36336 - DNA, 20 bp, synthetic construct
  source 1..20: mol_type = other DNA
tttgctttattgaaattcac

SEQ ID NO: 36337 - DNA, 20 bp, synthetic construct
  source 1..20: mol_type = other DNA
ctttgctttattgaaattca

SEQ ID NO: 36338 - DNA, 20 bp, synthetic construct
  source 1..20: mol_type = other DNA
gctttgctttattgaaattc

SEQ ID NO: 36339 - DNA, 20 bp, synthetic construct
  source 1..20: mol_type = other DNA
tgctttgctttattgaaatt

SEQ ID NO: 36340 - DNA, 20 bp, synthetic construct
  source 1..20: mol_type = other DNA
ctgctttgctttattgaaat

SEQ ID NO: 36341 - DNA, 20 bp, synthetic construct
  source 1..20: mol_type = other DNA
tctgctttgctttattgaaa

SEQ ID NO: 36342 - DNA, 20 bp, synthetic construct
  source 1..20: mol_type = other DNA
ttctgctttgctttattgaa

SEQ ID NO: 36343 - DNA, 20 bp, synthetic construct
  source 1..20: mol_type = other DNA
attctgctttgctttattga

SEQ ID NO: 36344 - DNA, 20 bp, synthetic construct
  source 1..20: mol_type = other DNA
tattctgctttgctttattg

SEQ ID NO: 36345 - DNA, 20 bp, synthetic construct
  source 1..20: mol_type = other DNA
ttattctgctttgctttatt

SEQ ID NO: 36346 - DNA, 20 bp, synthetic construct
  source 1..20: mol_type = other DNA
tttattctgctttgctttat

SEQ ID NO: 36347 - DNA, 20 bp, synthetic construct
  source 1..20: mol_type = other DNA
ttttattctgctttgcttta

SEQ ID NO: 36348 - DNA, 20 bp, synthetic construct
  source 1..20: mol_type = other DNA
attttattctgctttgcttt

SEQ ID NO: 36349 - DNA, 20 bp, synthetic construct
  source 1..20: mol_type = other DNA
cattttattctgctttgctt

SEQ ID NO: 36350 - DNA, 20 bp, synthetic construct
  source 1..20: mol_type = other DNA
tcattttattctgctttgct

SEQ ID NO: 36351 - DNA, 20 bp, synthetic construct
  source 1..20: mol_type = other DNA
ctcattttattctgctttgc

SEQ ID NO: 36352 - DNA, 20 bp, synthetic construct
  source 1..20: mol_type = other DNA
cctcattttattctgctttg

SEQ ID NO: 36353 - DNA, 20 bp, synthetic construct
  source 1..20: mol_type = other DNA
acctcattttattctgcttt

SEQ ID NO: 36354 - DNA, 20 bp, synthetic construct
  source 1..20: mol_type = other DNA
tacctcattttattctgctt

SEQ ID NO: 36355 - DNA, 20 bp, synthetic construct
  source 1..20: mol_type = other DNA
atacctcattttattctgct

SEQ ID NO: 36356 - DNA, 20 bp, synthetic construct
  source 1..20: mol_type = other DNA
catacctcattttattctgc

SEQ ID NO: 36357 - DNA, 20 bp, synthetic construct
  source 1..20: mol_type = other DNA
gcatacctcattttattctg

SEQ ID NO: 36358 - DNA, 20 bp, synthetic construct
  source 1..20: mol_type = other DNA
tgcatacctcattttattct

SEQ ID NO: 36359 - DNA, 20 bp, synthetic construct
  source 1..20: mol_type = other DNA
atgcatacctcattttattc

SEQ ID NO: 36360 - DNA, 20 bp, synthetic construct
  source 1..20: mol_type = other DNA
catgcatacctcattttatt

SEQ ID NO: 36361 - DNA, 20 bp, synthetic construct
  source 1..20: mol_type = other DNA
acatgcatacctcattttat

SEQ ID NO: 36362 - DNA, 20 bp, synthetic construct
  source 1..20: mol_type = other DNA
tacatgcatacctcatttta

SEQ ID NO: 36363 - DNA, 20 bp, synthetic construct
  source 1..20: mol_type = other DNA
atacatgcatacctcatttt

SEQ ID NO: 36364 - DNA, 20 bp, synthetic construct
  source 1..20: mol_type = other DNA
aatacatgcatacctcattt

SEQ ID NO: 36365 - DNA, 20 bp, synthetic construct
  source 1..20: mol_type = other DNA
caatacatgcatacctcatt

SEQ ID NO: 36366 - DNA, 20 bp, synthetic construct
  source 1..20: mol_type = other DNA
gcaatacatgcatacctcat

SEQ ID NO: 36367 - DNA, 20 bp, synthetic construct
  source 1..20: mol_type = other DNA
ggcaatacatgcatacctca

SEQ ID NO: 36368 - DNA, 20 bp, synthetic construct
  source 1..20: mol_type = other DNA
tggcaatacatgcatacctc

SEQ ID NO: 36369 - DNA, 20 bp, synthetic construct
  source 1..20: mol_type = other DNA
atggcaatacatgcatacct

SEQ ID NO: 36370 - DNA, 20 bp, synthetic construct
  source 1..20: mol_type = other DNA
gatggcaatacatgcatacc

SEQ ID NO: 36371 - DNA, 20 bp, synthetic construct
  source 1..20: mol_type = other DNA
tgatggcaatacatgcatac

SEQ ID NO: 36372 - DNA, 20 bp, synthetic construct
  source 1..20: mol_type = other DNA
gtgatggcaatacatgcata

SEQ ID NO: 36373 - DNA, 20 bp, synthetic construct
  source 1..20: mol_type = other DNA
tgtgatggcaatacatgcat

SEQ ID NO: 36374 - DNA, 20 bp, synthetic construct
  source 1..20: mol_type = other DNA
atgtgatggcaatacatgca

SEQ ID NO: 36375 - DNA, 20 bp, synthetic construct
  source 1..20: mol_type = other DNA
catgtgatggcaatacatgc

SEQ ID NO: 36376 - DNA, 20 bp, synthetic construct
  source 1..20: mol_type = other DNA
acatgtgatggcaatacatg

SEQ ID NO: 36377 - DNA, 20 bp, synthetic construct
  source 1..20: mol_type = other DNA
tacatgtgatggcaatacat

SEQ ID NO: 36378 - DNA, 20 bp, synthetic construct
  source 1..20: mol_type = other DNA
gtacatgtgatggcaataca

SEQ ID NO: 36379 - DNA, 20 bp, synthetic construct
  source 1..20: mol_type = other DNA
tgtacatgtgatggcaatac

SEQ ID NO: 36380 - DNA, 20 bp, synthetic construct
  source 1..20: mol_type = other DNA
gtgtacatgtgatggcaata

SEQ ID NO: 36381 - DNA, 20 bp, synthetic construct
  source 1..20: mol_type = other DNA
agtgtacatgtgatggcaat

SEQ ID NO: 36382 - DNA, 20 bp, synthetic construct
  source 1..20: mol_type = other DNA
tagtgtacatgtgatggcaa

SEQ ID NO: 36383 - DNA, 20 bp, synthetic construct
  source 1..20: mol_type = other DNA
ctagtgtacatgtgatggca

SEQ ID NO: 36384 - DNA, 20 bp, synthetic construct
  source 1..20: mol_type = other DNA
actagtgtacatgtgatggc

SEQ ID NO: 36385 - DNA, 20 bp, synthetic construct
  source 1..20: mol_type = other DNA
tactagtgtacatgtgatgg

SEQ ID NO: 36386 - DNA, 20 bp, synthetic construct
  source 1..20: mol_type = other DNA
ttactagtgtacatgtgatg

SEQ ID NO: 36387 - DNA, 20 bp, synthetic construct
  source 1..20: mol_type = other DNA
tttactagtgtacatgtgat

SEQ ID NO: 36388 - DNA, 20 bp, synthetic construct
  source 1..20: mol_type = other DNA
ttttactagtgtacatgtga

SEQ ID NO: 36389 - DNA, 20 bp, synthetic construct
  source 1..20: mol_type = other DNA
attttactagtgtacatgtg

SEQ ID NO: 36390 - DNA, 20 bp, synthetic construct
  source 1..20: mol_type = other DNA
tattttactagtgtacatgt

SEQ ID NO: 36391 - DNA, 20 bp, synthetic construct
  source 1..20: mol_type = other DNA
gtattttactagtgtacatg

SEQ ID NO: 36392 - DNA, 20 bp, synthetic construct
  source 1..20: mol_type = other DNA
cgtattttactagtgtacat

SEQ ID NO: 36393 - DNA, 20 bp, synthetic construct
  source 1..20: mol_type = other DNA
acgtattttactagtgtaca

SEQ ID NO: 36394 - DNA, 20 bp, synthetic construct
  source 1..20: mol_type = other DNA
aacgtattttactagtgtac

SEQ ID NO: 36395 - DNA, 20 bp, synthetic construct
  source 1..20: mol_type = other DNA
aaacgtattttactagtgta

SEQ ID NO: 36396 - DNA, 20 bp, synthetic construct
  source 1..20: mol_type = other DNA
aaaacgtattttactagtgt

SEQ ID NO: 36397 - DNA, 20 bp, synthetic construct
  source 1..20: mol_type = other DNA
aaaaacgtattttactagtg

SEQ ID NO: 36398 - DNA, 20 bp, synthetic construct
  source 1..20: mol_type = other DNA
aaaaaacgtattttactagt

SEQ ID NO: 36399 - DNA, 20 bp, synthetic construct
  source 1..20: mol_type = other DNA
aaaaaaacgtattttactag

SEQ ID NO: 36400 - DNA, 20 bp, synthetic construct
  source 1..20: mol_type = other DNA
aaaaaaaacgtattttacta

SEQ ID NO: 36401 - DNA, 20 bp, synthetic construct
  source 1..20: mol_type = other DNA
aaaaaaaaacgtattttact

SEQ ID NO: 36402 - DNA, 20 bp, synthetic construct
  source 1..20: mol_type = other DNA
aaaaaaaaaacgtattttac

SEQ ID NO: 36403 - DNA, 20 bp, synthetic construct
  source 1..20: mol_type = other DNA
gaaaaaaaaaacgtatttta

SEQ ID NO: 36404 - DNA, 20 bp, synthetic construct
  source 1..20: mol_type = other DNA
tgaaaaaaaaaacgtatttt

SEQ ID NO: 36405 - DNA, 20 bp, synthetic construct
  source 1..20: mol_type = other DNA
ctgaaaaaaaaaacgtattt

SEQ ID NO: 36406 - DNA, 20 bp, synthetic construct
  source 1..20: mol_type = other DNA
actgaaaaaaaaaacgtatt

SEQ ID NO: 36407 - DNA, 20 bp, synthetic construct
  source 1..20: mol_type = other DNA
tactgaaaaaaaaaacgtat

SEQ ID NO: 36408 - DNA, 20 bp, synthetic construct
  source 1..20: mol_type = other DNA
ctactgaaaaaaaaaacgta

SEQ ID NO: 36409 - DNA, 20 bp, synthetic construct
  source 1..20: mol_type = other DNA
cctactgaaaaaaaaaacgt

SEQ ID NO: 36410 - DNA, 20 bp, synthetic construct
  source 1..20: mol_type = other DNA
acctactgaaaaaaaaaacg

SEQ ID NO: 36411 - DNA, 20 bp, synthetic construct
  source 1..20: mol_type = other DNA
cacctactgaaaaaaaaaac

SEQ ID NO: 36412 - DNA, 20 bp, synthetic construct
  source 1..20: mol_type = other DNA
ccacctactgaaaaaaaaaa

SEQ ID NO: 36413 - DNA, 20 bp, synthetic construct
  source 1..20: mol_type = other DNA
tccacctactgaaaaaaaaa

SEQ ID NO: 36414 - DNA, 20 bp, synthetic construct
  source 1..20: mol_type = other DNA
atccacctactgaaaaaaaa

SEQ ID NO: 36415 - DNA, 20 bp, synthetic construct
  source 1..20: mol_type = other DNA
gatccacctactgaaaaaaa

SEQ ID NO: 36416 - DNA, 20 bp, synthetic construct
  source 1..20: mol_type = other DNA
tgatccacctactgaaaaaa

SEQ ID NO: 36417 - DNA, 20 bp, synthetic construct
  source 1..20: mol_type = other DNA
ttgatccacctactgaaaaa

SEQ ID NO: 36418 - DNA, 20 bp, synthetic construct
  source 1..20: mol_type = other DNA
gttgatccacctactgaaaa

SEQ ID NO: 36419 - DNA, 20 bp, synthetic construct
  source 1..20: mol_type = other DNA
ggttgatccacctactgaaa

SEQ ID NO: 36420 - DNA, 20 bp, synthetic construct
  source 1..20: mol_type = other DNA
aggttgatccacctactgaa

SEQ ID NO: 36421 - DNA, 20 bp, synthetic construct
  source 1..20: mol_type = other DNA
gaggttgatccacctactga

SEQ ID NO: 36422 - DNA, 20 bp, synthetic construct
  source 1..20: mol_type = other DNA
tgaggttgatccacctactg

SEQ ID NO: 36423 - DNA, 20 bp, synthetic construct
  source 1..20: mol_type = other DNA
ttgaggttgatccacctact

SEQ ID NO: 36424 - DNA, 20 bp, synthetic construct
  source 1..20: mol_type = other DNA
tttgaggttgatccacctac

SEQ ID NO: 36425 - DNA, 20 bp, synthetic construct
  source 1..20: mol_type = other DNA
atttgaggttgatccaccta

SEQ ID NO: 36426 - DNA, 20 bp, synthetic construct
  source 1..20: mol_type = other DNA
aatttgaggttgatccacct

SEQ ID NO: 36427 - DNA, 20 bp, synthetic construct
  source 1..20: mol_type = other DNA
aaatttgaggttgatccacc

SEQ ID NO: 36428 - DNA, 20 bp, synthetic construct
  source 1..20: mol_type = other DNA
aaaatttgaggttgatccac

SEQ ID NO: 36429 - DNA, 20 bp, synthetic construct
  source 1..20: mol_type = other DNA
taaaatttgaggttgatcca

SEQ ID NO: 36430 - DNA, 20 bp, synthetic construct
  source 1..20: mol_type = other DNA
ttaaaatttgaggttgatcc

SEQ ID NO: 36431 - DNA, 20 bp, synthetic construct
  source 1..20: mol_type = other DNA
attaaaatttgaggttgatc

SEQ ID NO: 36432 - DNA, 20 bp, synthetic construct
  source 1..20: mol_type = other DNA
tattaaaatttgaggttgat

SEQ ID NO: 36433 - DNA, 20 bp, synthetic construct
  source 1..20: mol_type = other DNA
atattaaaatttgaggttga

SEQ ID NO: 36434 - DNA, 20 bp, synthetic construct
  source 1..20: mol_type = other DNA
tatattaaaatttgaggttg

SEQ ID NO: 36435 - DNA, 20 bp, synthetic construct
  source 1..20: mol_type = other DNA
ttatattaaaatttgaggtt

SEQ ID NO: 36436 - DNA, 20 bp, synthetic construct
  source 1..20: mol_type = other DNA
tttatattaaaatttgaggt

SEQ ID NO: 36437 - DNA, 20 bp, synthetic construct
  source 1..20: mol_type = other DNA
ctttatattaaaatttgagg

SEQ ID NO: 36438 - DNA, 20 bp, synthetic construct
  source 1..20: mol_type = other DNA
gctttatattaaaatttgag

SEQ ID NO: 36439 - DNA, 20 bp, synthetic construct
  source 1..20: mol_type = other DNA
tgctttatattaaaatttga

SEQ ID NO: 36440 - DNA, 20 bp, synthetic construct
  source 1..20: mol_type = other DNA
atgctttatattaaaatttg

SEQ ID NO: 36441 - DNA, 20 bp, synthetic construct
  source 1..20: mol_type = other DNA
aatgctttatattaaaattt

SEQ ID NO: 36442 - DNA, 20 bp, synthetic construct
  source 1..20: mol_type = other DNA
taatgctttatattaaaatt

SEQ ID NO: 36443 - DNA, 20 bp, synthetic construct
  source 1..20: mol_type = other DNA
gtaatgctttatattaaaat

SEQ ID NO: 36444 - DNA, 20 bp, synthetic construct
  source 1..20: mol_type = other DNA
agtaatgctttatattaaaa

SEQ ID NO: 36445 - DNA, 20 bp, synthetic construct
  source 1..20: mol_type = other DNA
aagtaatgctttatattaaa

SEQ ID NO: 36446 - DNA, 20 bp, synthetic construct
  source 1..20: mol_type = other DNA
taagtaatgctttatattaa

SEQ ID NO: 36447 - DNA, 20 bp, synthetic construct
  source 1..20: mol_type = other DNA
ttaagtaatgctttatatta

SEQ ID NO: 36448 - DNA, 20 bp, synthetic construct
  source 1..20: mol_type = other DNA
tttaagtaatgctttatatt

SEQ ID NO: 36449 - DNA, 20 bp, synthetic construct
  source 1..20: mol_type = other DNA
ctttaagtaatgctttatat

SEQ ID NO: 36450 - DNA, 20 bp, synthetic construct
  source 1..20: mol_type = other DNA
cctttaagtaatgctttata

SEQ ID NO: 36451 - DNA, 20 bp, synthetic construct
  source 1..20: mol_type = other DNA
tcctttaagtaatgctttat

SEQ ID NO: 36452 - DNA, 20 bp, synthetic construct
  source 1..20: mol_type = other DNA
ctcctttaagtaatgcttta

SEQ ID NO: 36453 - DNA, 20 bp, synthetic construct
  source 1..20: mol_type = other DNA
tctcctttaagtaatgcttt

SEQ ID NO: 36454 - DNA, 20 bp, synthetic construct
  source 1..20: mol_type = other DNA
ttctcctttaagtaatgctt

SEQ ID NO: 36455 - DNA, 20 bp, synthetic construct
  source 1..20: mol_type = other DNA
attctcctttaagtaatgct

SEQ ID NO: 36456 - DNA, 20 bp, synthetic construct
  source 1..20: mol_type = other DNA
tattctcctttaagtaatgc

SEQ ID NO: 36457 - DNA, 20 bp, synthetic construct
  source 1..20: mol_type = other DNA
atattctcctttaagtaatg

SEQ ID NO: 36458 - DNA, 20 bp, synthetic construct
  source 1..20: mol_type = other DNA
catattctcctttaagtaat

SEQ ID NO: 36459 - DNA, 20 bp, synthetic construct
  source 1..20: mol_type = other DNA
ccatattctcctttaagtaa

SEQ ID NO: 36460 - DNA, 20 bp, synthetic construct
  source 1..20: mol_type = other DNA
cccatattctcctttaagta

SEQ ID NO: 36461 - DNA, 20 bp, synthetic construct
  source 1..20: mol_type = other DNA
ccccatattctcctttaagt

SEQ ID NO: 36462 - DNA, 20 bp, synthetic construct
  source 1..20: mol_type = other DNA
tccccatattctcctttaag

SEQ ID NO: 36463 - DNA, 20 bp, synthetic construct
  source 1..20: mol_type = other DNA
gtccccatattctcctttaa

SEQ ID NO: 36464 - DNA, 20 bp, synthetic construct
  source 1..20: mol_type = other DNA
tgtccccatattctccttta

SEQ ID NO: 36465 - DNA, 20 bp, synthetic construct
  source 1..20: mol_type = other DNA
atgtccccatattctccttt

SEQ ID NO: 36466 - DNA, 20 bp, synthetic construct
  source 1..20: mol_type = other DNA
aatgtccccatattctcctt

SEQ ID NO: 36467 - DNA, 20 bp, synthetic construct
  source 1..20: mol_type = other DNA
gaatgtccccatattctcct

SEQ ID NO: 36468 - DNA, 20 bp, synthetic construct
  source 1..20: mol_type = other DNA
tgaatgtccccatattctcc

SEQ ID NO: 36469 - DNA, 20 bp, synthetic construct
  source 1..20: mol_type = other DNA
atgaatgtccccatattctc

SEQ ID NO: 36470 - DNA, 20 bp, synthetic construct
  source 1..20: mol_type = other DNA
catgaatgtccccatattct

SEQ ID NO: 36471 - DNA, 20 bp, synthetic construct
  source 1..20: mol_type = other DNA
tcatgaatgtccccatattc

SEQ ID NO: 36472 - DNA, 20 bp, synthetic construct
  source 1..20: mol_type = other DNA
gtcatgaatgtccccatatt

SEQ ID NO: 36473 - DNA, 20 bp, synthetic construct
  source 1..20: mol_type = other DNA
tgtcatgaatgtccccatat

SEQ ID NO: 36474 - DNA, 20 bp, synthetic construct
  source 1..20: mol_type = other DNA
atgtcatgaatgtccccata

SEQ ID NO: 36475 - DNA, 20 bp, synthetic construct
  source 1..20: mol_type = other DNA
aatgtcatgaatgtccccat

SEQ ID NO: 36476 - DNA, 20 bp, synthetic construct
  source 1..20: mol_type = other DNA
aaatgtcatgaatgtcccca

SEQ ID NO: 36477 - DNA, 20 bp, synthetic construct
  source 1..20: mol_type = other DNA
gaaatgtcatgaatgtcccc

SEQ ID NO: 36478 - DNA, 20 bp, synthetic construct
  source 1..20: mol_type = other DNA
agaaatgtcatgaatgtccc

SEQ ID NO: 36479 - DNA, 20 bp, synthetic construct
  source 1..20: mol_type = other DNA
aagaaatgtcatgaatgtcc

SEQ ID NO: 36480 - DNA, 20 bp, synthetic construct
  source 1..20: mol_type = other DNA
taagaaatgtcatgaatgtc

SEQ ID NO: 36481 - DNA, 20 bp, synthetic construct
  source 1..20: mol_type = other DNA
ataagaaatgtcatgaatgt

SEQ ID NO: 36482 - DNA, 20 bp, synthetic construct
  source 1..20: mol_type = other DNA
tataagaaatgtcatgaatg

SEQ ID NO: 36483 - DNA, 20 bp, synthetic construct
  source 1..20: mol_type = other DNA
atataagaaatgtcatgaat

SEQ ID NO: 36484 - DNA, 20 bp, synthetic construct
  source 1..20: mol_type = other DNA
catataagaaatgtcatgaa

SEQ ID NO: 36485 - DNA, 20 bp, synthetic construct
  source 1..20: mol_type = other DNA
acatataagaaatgtcatga

SEQ ID NO: 36486 - DNA, 20 bp, synthetic construct
  source 1..20: mol_type = other DNA
tacatataagaaatgtcatg

SEQ ID NO: 36487 - DNA, 20 bp, synthetic construct
  source 1..20: mol_type = other DNA
gtacatataagaaatgtcat

SEQ ID NO: 36488 - DNA, 20 bp, synthetic construct
  source 1..20: mol_type = other DNA
tgtacatataagaaatgtca

SEQ ID NO: 36489 - DNA, 20 bp, synthetic construct
  source 1..20: mol_type = other DNA
atgtacatataagaaatgtc

SEQ ID NO: 36490 - DNA, 20 bp, synthetic construct
  source 1..20: mol_type = other DNA
tatgtacatataagaaatgt

SEQ ID NO: 36491 - DNA, 20 bp, synthetic construct
  source 1..20: mol_type = other DNA
ttatgtacatataagaaatg

SEQ ID NO: 36492 - DNA, 20 bp, synthetic construct
  source 1..20: mol_type = other DNA
tttatgtacatataagaaat

SEQ ID NO: 36493 - DNA, 20 bp, synthetic construct
  source 1..20: mol_type = other DNA
ttttatgtacatataagaaa

SEQ ID NO: 36494 - DNA, 20 bp, synthetic construct
  source 1..20: mol_type = other DNA
gttttatgtacatataagaa

SEQ ID NO: 36495 - DNA, 20 bp, synthetic construct
  source 1..20: mol_type = other DNA
agttttatgtacatataaga

SEQ ID NO: 36496 - DNA, 20 bp, synthetic construct
  source 1..20: mol_type = other DNA
aagttttatgtacatataag

SEQ ID NO: 36497 - DNA, 20 bp, synthetic construct
  source 1..20: mol_type = other DNA
gaagttttatgtacatataa

SEQ ID NO: 36498 - DNA, 20 bp, synthetic construct
  source 1..20: mol_type = other DNA
tgaagttttatgtacatata

SEQ ID NO: 36499 - DNA, 20 bp, synthetic construct
  source 1..20: mol_type = other DNA
atgaagttttatgtacatat

SEQ ID NO: 36500 - DNA, 20 bp, synthetic construct
  source 1..20: mol_type = other DNA
catgaagttttatgtacata

SEQ ID NO: 36501 - DNA, 20 bp, synthetic construct
  source 1..20: mol_type = other DNA
tcatgaagttttatgtacat

SEQ ID NO: 36502 - DNA, 20 bp, synthetic construct
  source 1..20: mol_type = other DNA
ttcatgaagttttatgtaca

SEQ ID NO: 36503 - DNA, 20 bp, synthetic construct
  source 1..20: mol_type = other DNA
tttcatgaagttttatgtac

SEQ ID NO: 36504 - DNA, 20 bp, synthetic construct
  source 1..20: mol_type = other DNA
ttttcatgaagttttatgta

SEQ ID NO: 36505 - DNA, 20 bp, synthetic construct
  source 1..20: mol_type = other DNA
attttcatgaagttttatgt

SEQ ID NO: 36506 - DNA, 20 bp, synthetic construct
  source 1..20: mol_type = other DNA
tattttcatgaagttttatg

SEQ ID NO: 36507 - DNA, 20 bp, synthetic construct
  source 1..20: mol_type = other DNA
ttattttcatgaagttttat

SEQ ID NO: 36508 - DNA, 20 bp, synthetic construct
  source 1..20: mol_type = other DNA
attattttcatgaagtttta

SEQ ID NO: 36509 - DNA, 20 bp, synthetic construct
  source 1..20: mol_type = other DNA
aattattttcatgaagtttt

SEQ ID NO: 36510 - DNA, 20 bp, synthetic construct
  source 1..20: mol_type = other DNA
aaattattttcatgaagttt

SEQ ID NO: 36511 - DNA, 20 bp, synthetic construct
  source 1..20: mol_type = other DNA
taaattattttcatgaagtt

SEQ ID NO: 36512 - DNA, 20 bp, synthetic construct
  source 1..20: mol_type = other DNA
ttaaattattttcatgaagt

SEQ ID NO: 36513 - DNA, 20 bp, synthetic construct
  source 1..20: mol_type = other DNA
attaaattattttcatgaag

SEQ ID NO: 36514 - DNA, 20 bp, synthetic construct
  source 1..20: mol_type = other DNA
cattaaattattttcatgaa

SEQ ID NO: 36515 - DNA, 20 bp, synthetic construct
  source 1..20: mol_type = other DNA
gcattaaattattttcatga

SEQ ID NO: 36516 - DNA, 20 bp, synthetic construct
  source 1..20: mol_type = other DNA
agcattaaattattttcatg

SEQ ID NO: 36517 - DNA, 20 bp, synthetic construct
  source 1..20: mol_type = other DNA
tagcattaaattattttcat

SEQ ID NO: 36518 - DNA, 20 bp, synthetic construct
  source 1..20: mol_type = other DNA
atagcattaaattattttca

SEQ ID NO: 36519 - DNA, 20 bp, synthetic construct
  source 1..20: mol_type = other DNA
gatagcattaaattattttc

SEQ ID NO: 36520 - DNA, 20 bp, synthetic construct
  source 1..20: mol_type = other DNA
ggatagcattaaattatttt

SEQ ID NO: 36521 - DNA, 20 bp, synthetic construct
  source 1..20: mol_type = other DNA
tggatagcattaaattattt

SEQ ID NO: 36522 - DNA, 20 bp, synthetic construct
  source 1..20: mol_type = other DNA
ctggatagcattaaattatt

SEQ ID NO: 36523 - DNA, 20 bp, synthetic construct
  source 1..20: mol_type = other DNA
gctggatagcattaaattat

SEQ ID NO: 36524 - DNA, 20 bp, synthetic construct
  source 1..20: mol_type = other DNA
tgctggatagcattaaatta

SEQ ID NO: 36525 - DNA, 20 bp, synthetic construct
  source 1..20: mol_type = other DNA
ctgctggatagcattaaatt

SEQ ID NO: 36526 - DNA, 20 bp, synthetic construct
  source 1..20: mol_type = other DNA
actgctggatagcattaaat

SEQ ID NO: 36527 - DNA, 20 bp, synthetic construct
  source 1..20: mol_type = other DNA
aactgctggatagcattaaa

SEQ ID NO: 36528 - DNA, 20 bp, synthetic construct
  source 1..20: mol_type = other DNA
aaactgctggatagcattaa

SEQ ID NO: 36529 - DNA, 20 bp, synthetic construct
  source 1..20: mol_type = other DNA
taaactgctggatagcatta

SEQ ID NO: 36530 - DNA, 20 bp, synthetic construct
  source 1..20: mol_type = other DNA
ataaactgctggatagcatt

SEQ ID NO: 36531 - DNA, 20 bp, synthetic construct
  source 1..20: mol_type = other DNA
aataaactgctggatagcat

SEQ ID NO: 36532 - DNA, 20 bp, synthetic construct
  source 1..20: mol_type = other DNA
aaataaactgctggatagca

SEQ ID NO: 36533 - DNA, 20 bp, synthetic construct
  source 1..20: mol_type = other DNA
aaaataaactgctggatagc

SEQ ID NO: 36534 - DNA, 20 bp, synthetic construct
  source 1..20: mol_type = other DNA
taaaataaactgctggatag

SEQ ID NO: 36535 - DNA, 20 bp, synthetic construct
  source 1..20: mol_type = other DNA
ctaaaataaactgctggata

SEQ ID NO: 36536 - DNA, 20 bp, synthetic construct
  source 1..20: mol_type = other DNA
tctaaaataaactgctggat

SEQ ID NO: 36537 - DNA, 20 bp, synthetic construct
  source 1..20: mol_type = other DNA
ttctaaaataaactgctgga

SEQ ID NO: 36538 - DNA, 20 bp, synthetic construct
  source 1..20: mol_type = other DNA
cttctaaaataaactgctgg

SEQ ID NO: 36539 - DNA, 20 bp, synthetic construct
  source 1..20: mol_type = other DNA
acttctaaaataaactgctg

SEQ ID NO: 36540 - DNA, 20 bp, synthetic construct
  source 1..20: mol_type = other DNA
tacttctaaaataaactgct

SEQ ID NO: 36541 - DNA, 20 bp, synthetic construct
  source 1..20: mol_type = other DNA
gtacttctaaaataaactgc

SEQ ID NO: 36542 - DNA, 20 bp, synthetic construct
  source 1..20: mol_type = other DNA
agtacttctaaaataaactg

SEQ ID NO: 36543 - DNA, 20 bp, synthetic construct
  source 1..20: mol_type = other DNA
cagtacttctaaaataaact

SEQ ID NO: 36544 - DNA, 20 bp, synthetic construct
  source 1..20: mol_type = other DNA
ccagtacttctaaaataaac

SEQ ID NO: 36545 - DNA, 20 bp, synthetic construct
  source 1..20: mol_type = other DNA
tccagtacttctaaaataaa

SEQ ID NO: 36546 - DNA, 20 bp, synthetic construct
  source 1..20: mol_type = other DNA
ctccagtacttctaaaataa

SEQ ID NO: 36547 - DNA, 20 bp, synthetic construct
  source 1..20: mol_type = other DNA
cctccagtacttctaaaata

SEQ ID NO: 36548 - DNA, 20 bp, synthetic construct
  source 1..20: mol_type = other DNA
gcctccagtacttctaaaat

SEQ ID NO: 36549 - DNA, 20 bp, synthetic construct
  source 1..20: mol_type = other DNA
agcctccagtacttctaaaa

SEQ ID NO: 36550 - DNA, 20 bp, synthetic construct
  source 1..20: mol_type = other DNA
tagcctccagtacttctaaa

SEQ ID NO: 36551 - DNA, 20 bp, synthetic construct
  source 1..20: mol_type = other DNA
ctagcctccagtacttctaa

SEQ ID NO: 36552 - DNA, 20 bp, synthetic construct
  source 1..20: mol_type = other DNA
cctagcctccagtacttcta

SEQ ID NO: 36553 - DNA, 20 bp, synthetic construct
  source 1..20: mol_type = other DNA
gcctagcctccagtacttct

SEQ ID NO: 36554 - DNA, 20 bp, synthetic construct
  source 1..20: mol_type = other DNA
tgcctagcctccagtacttc

SEQ ID NO: 36555 - DNA, 20 bp, synthetic construct
  source 1..20: mol_type = other DNA
atgcctagcctccagtactt

SEQ ID NO: 36556 - DNA, 20 bp, synthetic construct
  source 1..20: mol_type = other DNA
catgcctagcctccagtact

SEQ ID NO: 36557 - DNA, 20 bp, synthetic construct
  source 1..20: mol_type = other DNA
ccatgcctagcctccagtac

SEQ ID NO: 36558 - DNA, 20 bp, synthetic construct
  source 1..20: mol_type = other DNA
accatgcctagcctccagta

SEQ ID NO: 36559 - DNA, 20 bp, synthetic construct
  source 1..20: mol_type = other DNA
caccatgcctagcctccagt

SEQ ID NO: 36560 - DNA, 20 bp, synthetic construct
  source 1..20: mol_type = other DNA
acaccatgcctagcctccag

SEQ ID NO: 36561 - DNA, 20 bp, synthetic construct
  source 1..20: mol_type = other DNA
gacaccatgcctagcctcca

SEQ ID NO: 36562 - DNA, 20 bp, synthetic construct
  source 1..20: mol_type = other DNA
agacaccatgcctagcctcc

SEQ ID NO: 36563 - DNA, 20 bp, synthetic construct
  source 1..20: mol_type = other DNA
aagacaccatgcctagcctc

SEQ ID NO: 36564 - DNA, 20 bp, synthetic construct
  source 1..20: mol_type = other DNA
taagacaccatgcctagcct

SEQ ID NO: 36565 - DNA, 20 bp, synthetic construct
  source 1..20: mol_type = other DNA
ataagacaccatgcctagcc

SEQ ID NO: 36566 - DNA, 20 bp, synthetic construct
  source 1..20: mol_type = other DNA
cataagacaccatgcctagc

SEQ ID NO: 36567 - DNA, 20 bp, synthetic construct
  source 1..20: mol_type = other DNA
gcataagacaccatgcctag

SEQ ID NO: 36568 - DNA, 20 bp, synthetic construct
  source 1..20: mol_type = other DNA
ggcataagacaccatgccta

SEQ ID NO: 36569 - DNA, 20 bp, synthetic construct
  source 1..20: mol_type = other DNA
aggcataagacaccatgcct

SEQ ID NO: 36570 - DNA, 20 bp, synthetic construct
  source 1..20: mol_type = other DNA
caggcataagacaccatgcc

SEQ ID NO: 36571 - DNA, 20 bp, synthetic construct
  source 1..20: mol_type = other DNA
acaggcataagacaccatgc

SEQ ID NO: 36572 - DNA, 20 bp, synthetic construct
  source 1..20: mol_type = other DNA
tacaggcataagacaccatg

SEQ ID NO: 36573 - DNA, 20 bp, synthetic construct
  source 1..20: mol_type = other DNA
ttacaggcataagacaccat

SEQ ID NO: 36574 - DNA, 20 bp, synthetic construct
  source 1..20: mol_type = other DNA
attacaggcataagacacca

SEQ ID NO: 36575 - DNA, 20 bp, synthetic construct
  source 1..20: mol_type = other DNA
gattacaggcataagacacc

SEQ ID NO: 36576 - DNA, 20 bp, synthetic construct
  source 1..20: mol_type = other DNA
ggattacaggcataagacac

SEQ ID NO: 36577 - DNA, 20 bp, synthetic construct
  source 1..20: mol_type = other DNA
gggattacaggcataagaca

SEQ ID NO: 36578 - DNA, 20 bp, synthetic construct
  source 1..20: mol_type = other DNA
tgggattacaggcataagac

SEQ ID NO: 36579 - DNA, 20 bp, synthetic construct
  source 1..20: mol_type = other DNA
ctgggattacaggcataaga

SEQ ID NO: 36580 - DNA, 20 bp, synthetic construct
  source 1..20: mol_type = other DNA
gctgggattacaggcataag

SEQ ID NO: 36581 - DNA, 20 bp, synthetic construct
  source 1..20: mol_type = other DNA
tgctgggattacaggcataa

SEQ ID NO: 36582 - DNA, 20 bp, synthetic construct
  source 1..20: mol_type = other DNA
gtgctgggattacaggcata

SEQ ID NO: 36583 - DNA, 20 bp, synthetic construct
  source 1..20: mol_type = other DNA
agtgctgggattacaggcat

SEQ ID NO: 36584 - DNA, 20 bp, synthetic construct
  source 1..20: mol_type = other DNA
aagtgctgggattacaggca

SEQ ID NO: 36585 - DNA, 20 bp, synthetic construct
  source 1..20: mol_type = other DNA
aaagtgctgggattacaggc

SEQ ID NO: 36586 - DNA, 20 bp, synthetic construct
  source 1..20: mol_type = other DNA
caaagtgctgggattacagg

SEQ ID NO: 36587 - DNA, 20 bp, synthetic construct
  source 1..20: mol_type = other DNA
ccaaagtgctgggattacag

SEQ ID NO: 36588 - DNA, 20 bp, synthetic construct
  source 1..20: mol_type = other DNA
cccaaagtgctgggattaca

SEQ ID NO: 36589 - DNA, 20 bp, synthetic construct
  source 1..20: mol_type = other DNA
tcccaaagtgctgggattac

SEQ ID NO: 36590 - DNA, 20 bp, synthetic construct
  source 1..20: mol_type = other DNA
ctcccaaagtgctgggatta

SEQ ID NO: 36591 - DNA, 20 bp, synthetic construct
  source 1..20: mol_type = other DNA
cctcccaaagtgctgggatt

SEQ ID NO: 36592 - DNA, 20 bp, synthetic construct
  source 1..20: mol_type = other DNA
gcctcccaaagtgctgggat

SEQ ID NO: 36593 - DNA, 20 bp, synthetic construct
  source 1..20: mol_type = other DNA
agcctcccaaagtgctggga

SEQ ID NO: 36594 - DNA, 20 bp, synthetic construct
  source 1..20: mol_type = other DNA
cagcctcccaaagtgctggg

SEQ ID NO: 36595 - DNA, 20 bp, synthetic construct
  source 1..20: mol_type = other DNA
tcagcctcccaaagtgctgg

SEQ ID NO: 36596 - DNA, 20 bp, synthetic construct
  source 1..20: mol_type = other DNA
ctcagcctcccaaagtgctg

SEQ ID NO: 36597 - DNA, 20 bp, synthetic construct
  source 1..20: mol_type = other DNA
cctcagcctcccaaagtgct

SEQ ID NO: 36598 - DNA, 20 bp, synthetic construct
  source 1..20: mol_type = other DNA
acctcagcctcccaaagtgc

SEQ ID NO: 36599 - DNA, 20 bp, synthetic construct
  source 1..20: mol_type = other DNA
tacctcagcctcccaaagtg

SEQ ID NO: 36600 - DNA, 20 bp, synthetic construct
  source 1..20: mol_type = other DNA
ctacctcagcctcccaaagt

SEQ ID NO: 36601 - DNA, 20 bp, synthetic construct
  source 1..20: mol_type = other DNA
cctacctcagcctcccaaag

SEQ ID NO: 36602 - DNA, 20 bp, synthetic construct
  source 1..20: mol_type = other DNA
tcctacctcagcctcccaaa

SEQ ID NO: 36603 - DNA, 20 bp, synthetic construct
  source 1..20: mol_type = other DNA
ctcctacctcagcctcccaa

SEQ ID NO: 36604 - DNA, 20 bp, synthetic construct
  source 1..20: mol_type = other DNA
cctcctacctcagcctccca

SEQ ID NO: 36605 - DNA, 20 bp, synthetic construct
  source 1..20: mol_type = other DNA
tcctcctacctcagcctccc

SEQ ID NO: 36606 - DNA, 20 bp, synthetic construct
  source 1..20: mol_type = other DNA
atcctcctacctcagcctcc

SEQ ID NO: 36607 - DNA, 20 bp, synthetic construct
  source 1..20: mol_type = other DNA
gatcctcctacctcagcctc

SEQ ID NO: 36608 - DNA, 20 bp, synthetic construct
  source 1..20: mol_type = other DNA
tgatcctcctacctcagcct

SEQ ID NO: 36609 - DNA, 20 bp, synthetic construct
  source 1..20: mol_type = other DNA
gtgatcctcctacctcagcc

SEQ ID NO: 36610 - DNA, 20 bp, synthetic construct
  source 1..20: mol_type = other DNA
agtgatcctcctacctcagc

SEQ ID NO: 36611 - DNA, 20 bp, synthetic construct
  source 1..20: mol_type = other DNA
aagtgatcctcctacctcag

SEQ ID NO: 36612 - DNA, 20 bp, synthetic construct
  source 1..20: mol_type = other DNA
caagtgatcctcctacctca

SEQ ID NO: 36613 - DNA, 20 bp, synthetic construct
  source 1..20: mol_type = other DNA
tcaagtgatcctcctacctc

SEQ ID NO: 36614 - DNA, 20 bp, synthetic construct
  source 1..20: mol_type = other DNA
ctcaagtgatcctcctacct

SEQ ID NO: 36615 - DNA, 20 bp, synthetic construct
  source 1..20: mol_type = other DNA
actcaagtgatcctcctacc

SEQ ID NO: 36616 - DNA, 20 bp, synthetic construct
  source 1..20: mol_type = other DNA
aactcaagtgatcctcctac

SEQ ID NO: 36617 - DNA, 20 bp, synthetic construct
  source 1..20: mol_type = other DNA
gaactcaagtgatcctccta

SEQ ID NO: 36618 - DNA, 20 bp, synthetic construct
  source 1..20: mol_type = other DNA
tgaactcaagtgatcctcct

SEQ ID NO: 36619 - DNA, 20 bp, synthetic construct
  source 1..20: mol_type = other DNA
ctgaactcaagtgatcctcc

SEQ ID NO: 36620 - DNA, 20 bp, synthetic construct
  source 1..20: mol_type = other DNA
cctgaactcaagtgatcctc

SEQ ID NO: 36621 - DNA, 20 bp, synthetic construct
  source 1..20: mol_type = other DNA
tcctgaactcaagtgatcct

SEQ ID NO: 36622 - DNA, 20 bp, synthetic construct
  source 1..20: mol_type = other DNA
ctcctgaactcaagtgatcc

SEQ ID NO: 36623 - DNA, 20 bp, synthetic construct
  source 1..20: mol_type = other DNA
gctcctgaactcaagtgatc

SEQ ID NO: 36624 - DNA, 20 bp, synthetic construct
  source 1..20: mol_type = other DNA
agctcctgaactcaagtgat

SEQ ID NO: 36625 - DNA, 20 bp, synthetic construct
  source 1..20: mol_type = other DNA
cagctcctgaactcaagtga

SEQ ID NO: 36626 - DNA, 20 bp, synthetic construct
  source 1..20: mol_type = other DNA
ccagctcctgaactcaagtg

SEQ ID NO: 36627 - DNA, 20 bp, synthetic construct
  source 1..20: mol_type = other DNA
tccagctcctgaactcaagt

SEQ ID NO: 36628 - DNA, 20 bp, synthetic construct
  source 1..20: mol_type = other DNA
ctccagctcctgaactcaag

SEQ ID NO: 36629 - DNA, 20 bp, synthetic construct
  source 1..20: mol_type = other DNA
tctccagctcctgaactcaa

SEQ ID NO: 36630 - DNA, 20 bp, synthetic construct
  source 1..20: mol_type = other DNA
gtctccagctcctgaactca

SEQ ID NO: 36631 - DNA, 20 bp, synthetic construct
  source 1..20: mol_type = other DNA
ggtctccagctcctgaactc

SEQ ID NO: 36632 - DNA, 20 bp, synthetic construct
  source 1..20: mol_type = other DNA
tggtctccagctcctgaact

SEQ ID NO: 36633 - DNA, 20 bp, synthetic construct
  source 1..20: mol_type = other DNA
ctggtctccagctcctgaac

SEQ ID NO: 36634 - DNA, 20 bp, synthetic construct
  source 1..20: mol_type = other DNA
gctggtctccagctcctgaa

SEQ ID NO: 36635 - DNA, 20 bp, synthetic construct
  source 1..20: mol_type = other DNA
agctggtctccagctcctga

SEQ ID NO: 36636 - DNA, 20 bp, synthetic construct
  source 1..20: mol_type = other DNA
aagctggtctccagctcctg

SEQ ID NO: 36637 - DNA, 20 bp, synthetic construct
  source 1..20: mol_type = other DNA
caagctggtctccagctcct

SEQ ID NO: 36638 - DNA, 20 bp, synthetic construct
  source 1..20: mol_type = other DNA
ccaagctggtctccagctcc

SEQ ID NO: 36639 - DNA, 20 bp, synthetic construct
  source 1..20: mol_type = other DNA
cccaagctggtctccagctc

SEQ ID NO: 36640 - DNA, 20 bp, synthetic construct
  source 1..20: mol_type = other DNA
gcccaagctggtctccagct

SEQ ID NO: 36641 - DNA, 20 bp, synthetic construct
  source 1..20: mol_type = other DNA
tgcccaagctggtctccagc

SEQ ID NO: 36642 - DNA, 20 bp, synthetic construct
  source 1..20: mol_type = other DNA
ttgcccaagctggtctccag

SEQ ID NO: 36643 - DNA, 20 bp, synthetic construct
  source 1..20: mol_type = other DNA
attgcccaagctggtctcca

SEQ ID NO: 36644 - DNA, 20 bp, synthetic construct
  source 1..20: mol_type = other DNA
tattgcccaagctggtctcc

SEQ ID NO: 36645 - DNA, 20 bp, synthetic construct
  source 1..20: mol_type = other DNA
atattgcccaagctggtctc

SEQ ID NO: 36646 - DNA, 20 bp, synthetic construct
  source 1..20: mol_type = other DNA
tatattgcccaagctggtct

SEQ ID NO: 36647 - DNA, 20 bp, synthetic construct
  source 1..20: mol_type = other DNA
ctatattgcccaagctggtc

SEQ ID NO: 36648 - DNA, 20 bp, synthetic construct
  source 1..20: mol_type = other DNA
actatattgcccaagctggt

SEQ ID NO: 36649 - DNA, 20 bp, synthetic construct
  source 1..20: mol_type = other DNA
cactatattgcccaagctgg

SEQ ID NO: 36650 - DNA, 20 bp, synthetic construct
  source 1..20: mol_type = other DNA
gcactatattgcccaagctg

SEQ ID NO: 36651 - DNA, 20 bp, synthetic construct
  source 1..20: mol_type = other DNA
cgcactatattgcccaagct

SEQ ID NO: 36652 - DNA, 20 bp, synthetic construct
  source 1..20: mol_type = other DNA
tcgcactatattgcccaagc

SEQ ID NO: 36653 - DNA, 20 bp, synthetic construct
  source 1..20: mol_type = other DNA
gtcgcactatattgcccaag

SEQ ID NO: 36654 - DNA, 20 bp, synthetic construct
  source 1..20: mol_type = other DNA
ggtcgcactatattgcccaa

SEQ ID NO: 36655 - DNA, 20 bp, synthetic construct
  source 1..20: mol_type = other DNA
gggtcgcactatattgccca

SEQ ID NO: 36656 - DNA, 20 bp, synthetic construct
  source 1..20: mol_type = other DNA
ggggtcgcactatattgccc

SEQ ID NO: 36657 - DNA, 20 bp, synthetic construct
  source 1..20: mol_type = other DNA
tggggtcgcactatattgcc

SEQ ID NO: 36658 - DNA, 20 bp, synthetic construct
  source 1..20: mol_type = other DNA
atggggtcgcactatattgc

SEQ ID NO: 36659 - DNA, 20 bp, synthetic construct
  source 1..20: mol_type = other DNA
gatggggtcgcactatattg

SEQ ID NO: 36660 - DNA, 20 bp, synthetic construct
  source 1..20: mol_type = other DNA
agatggggtcgcactatatt

SEQ ID NO: 36661 - DNA, 20 bp, synthetic construct
  source 1..20: mol_type = other DNA
gagatggggtcgcactatat

SEQ ID NO: 36662 - DNA, 20 bp, synthetic construct
  source 1..20: mol_type = other DNA
agagatggggtcgcactata

SEQ ID NO: 36663 - DNA, 20 bp, synthetic construct
  source 1..20: mol_type = other DNA
tagagatggggtcgcactat

SEQ ID NO: 36664 - DNA, 20 bp, synthetic construct
  source 1..20: mol_type = other DNA
gtagagatggggtcgcacta

SEQ ID NO: 36665 - DNA, 20 bp, synthetic construct
  source 1..20: mol_type = other DNA
tgtagagatggggtcgcact

SEQ ID NO: 36666 - DNA, 20 bp, synthetic construct
  source 1..20: mol_type = other DNA
ttgtagagatggggtcgcac

SEQ ID NO: 36667 - DNA, 20 bp, synthetic construct
  source 1..20: mol_type = other DNA
tttgtagagatggggtcgca

SEQ ID NO: 36668 - DNA, 20 bp, synthetic construct
  source 1..20: mol_type = other DNA
ttttgtagagatggggtcgc

SEQ ID NO: 36669 - DNA, 20 bp, synthetic construct
  source 1..20: mol_type = other DNA
cttttgtagagatggggtcg

SEQ ID NO: 36670 - DNA, 20 bp, synthetic construct
  source 1..20: mol_type = other DNA
tcttttgtagagatggggtc

SEQ ID NO: 36671 - DNA, 20 bp, synthetic construct
  source 1..20: mol_type = other DNA
ctcttttgtagagatggggt

SEQ ID NO: 36672 - DNA, 20 bp, synthetic construct
  source 1..20: mol_type = other DNA
tctcttttgtagagatgggg

SEQ ID NO: 36673 - DNA, 20 bp, synthetic construct
  source 1..20: mol_type = other DNA
ttctcttttgtagagatggg

SEQ ID NO: 36674 - DNA, 20 bp, synthetic construct
  source 1..20: mol_type = other DNA
tttctcttttgtagagatgg

SEQ ID NO: 36675 - DNA, 20 bp, synthetic construct
  source 1..20: mol_type = other DNA
ttttctcttttgtagagatg

SEQ ID NO: 36676 - DNA, 20 bp, synthetic construct
  source 1..20: mol_type = other DNA
cttttctcttttgtagagat

SEQ ID NO: 36677 - DNA, 20 bp, synthetic construct
  source 1..20: mol_type = other DNA
tcttttctcttttgtagaga

SEQ ID NO: 36678 - DNA, 20 bp, synthetic construct
  source 1..20: mol_type = other DNA
ttcttttctcttttgtagag

SEQ ID NO: 36679 - DNA, 20 bp, synthetic construct
  source 1..20: mol_type = other DNA
cttcttttctcttttgtaga

SEQ ID NO: 36680 - DNA, 20 bp, synthetic construct
  source 1..20: mol_type = other DNA
acttcttttctcttttgtag

SEQ ID NO: 36681 - DNA, 20 bp, synthetic construct
  source 1..20: mol_type = other DNA
tacttcttttctcttttgta

SEQ ID NO: 36682 - DNA, 20 bp, synthetic construct
  source 1..20: mol_type = other DNA
gtacttcttttctcttttgt

SEQ ID NO: 36683 - DNA, 20 bp, synthetic construct
  source 1..20: mol_type = other DNA
agtacttcttttctcttttg

SEQ ID NO: 36684 - DNA, 20 bp, synthetic construct
  source 1..20: mol_type = other DNA
cagtacttcttttctctttt

SEQ ID NO: 36685 - DNA, 20 bp, synthetic construct
  source 1..20: mol_type = other DNA
ccagtacttcttttctcttt

SEQ ID NO: 36686 - DNA, 20 bp, synthetic construct
  source 1..20: mol_type = other DNA
tccagtacttcttttctctt

SEQ ID NO: 36687 - DNA, 20 bp, synthetic construct
  source 1..20: mol_type = other DNA
ctccagtacttcttttctct

SEQ ID NO: 36688 - DNA, 20 bp, synthetic construct
  source 1..20: mol_type = other DNA
actccagtacttcttttctc

SEQ ID NO: 36689 - DNA, 20 bp, synthetic construct
  source 1..20: mol_type = other DNA
cactccagtacttcttttct

SEQ ID NO: 36690 - DNA, 20 bp, synthetic construct
  source 1..20: mol_type = other DNA
acactccagtacttcttttc

SEQ ID NO: 36691 - DNA, 20 bp, synthetic construct
  source 1..20: mol_type = other DNA
aacactccagtacttctttt

SEQ ID NO: 36692 - DNA, 20 bp, synthetic construct
  source 1..20: mol_type = other DNA
caacactccagtacttcttt

SEQ ID NO: 36693 - DNA, 20 bp, synthetic construct
  source 1..20: mol_type = other DNA
gcaacactccagtacttctt

SEQ ID NO: 36694 - DNA, 20 bp, synthetic construct
  source 1..20: mol_type = other DNA
tgcaacactccagtacttct

SEQ ID NO: 36695 - DNA, 20 bp, synthetic construct
  source 1..20: mol_type = other DNA
ctgcaacactccagtacttc

SEQ ID NO: 36696 - DNA, 20 bp, synthetic construct
  source 1..20: mol_type = other DNA
gctgcaacactccagtactt

SEQ ID NO: 36697 - DNA, 20 bp, synthetic construct
  source 1..20: mol_type = other DNA
agctgcaacactccagtact

SEQ ID NO: 36698 - DNA, 20 bp, synthetic construct
  source 1..20: mol_type = other DNA
gagctgcaacactccagtac

SEQ ID NO: 36699 - DNA, 20 bp, synthetic construct
  source 1..20: mol_type = other DNA
agagctgcaacactccagta

SEQ ID NO: 36700 - DNA, 20 bp, synthetic construct
  source 1..20: mol_type = other DNA
aagagctgcaacactccagt

SEQ ID NO: 36701 - DNA, 20 bp, synthetic construct
  source 1..20: mol_type = other DNA
taagagctgcaacactccag

SEQ ID NO: 36702 - DNA, 20 bp, synthetic construct
  source 1..20: mol_type = other DNA
gtaagagctgcaacactcca

SEQ ID NO: 36703 - DNA, 20 bp, synthetic construct
  source 1..20: mol_type = other DNA
tgtaagagctgcaacactcc

SEQ ID NO: 36704 - DNA, 20 bp, synthetic construct
  source 1..20: mol_type = other DNA
ctgtaagagctgcaacactc

SEQ ID NO: 36705 - DNA, 20 bp, synthetic construct
  source 1..20: mol_type = other DNA
tctgtaagagctgcaacact

SEQ ID NO: 36706 - DNA, 20 bp, synthetic construct
  source 1..20: mol_type = other DNA
ttctgtaagagctgcaacac

SEQ ID NO: 36707 - DNA, 20 bp, synthetic construct
  source 1..20: mol_type = other DNA
attctgtaagagctgcaaca

SEQ ID NO: 36708 - DNA, 20 bp, synthetic construct
  source 1..20: mol_type = other DNA
aattctgtaagagctgcaac

SEQ ID NO: 36709 - DNA, 20 bp, synthetic construct
  source 1..20: mol_type = other DNA
aaattctgtaagagctgcaa

SEQ ID NO: 36710 - DNA, 20 bp, synthetic construct
  source 1..20: mol_type = other DNA
caaattctgtaagagctgca

SEQ ID NO: 36711 - DNA, 20 bp, synthetic construct
  source 1..20: mol_type = other DNA
acaaattctgtaagagctgc

SEQ ID NO: 36712 - DNA, 20 bp, synthetic construct
  source 1..20: mol_type = other DNA
gacaaattctgtaagagctg

SEQ ID NO: 36713 - DNA, 20 bp, synthetic construct
  source 1..20: mol_type = other DNA
agacaaattctgtaagagct

SEQ ID NO: 36714 - DNA, 20 bp, synthetic construct
  source 1..20: mol_type = other DNA
tagacaaattctgtaagagc

SEQ ID NO: 36715 - DNA, 20 bp, synthetic construct
  source 1..20: mol_type = other DNA
ctagacaaattctgtaagag

SEQ ID NO: 36716 - DNA, 20 bp, synthetic construct
  source 1..20: mol_type = other DNA
gctagacaaattctgtaaga

SEQ ID NO: 36717 - DNA, 20 bp, synthetic construct
  source 1..20: mol_type = other DNA
tgctagacaaattctgtaag

SEQ ID NO: 36718 - DNA, 20 bp, synthetic construct
  source 1..20: mol_type = other DNA
ctgctagacaaattctgtaa

SEQ ID NO: 36719 - DNA, 20 bp, synthetic construct
  source 1..20: mol_type = other DNA
cctgctagacaaattctgta

SEQ ID NO: 36720 - DNA, 20 bp, synthetic construct
  source 1..20: mol_type = other DNA
acctgctagacaaattctgt

SEQ ID NO: 36721 - DNA, 20 bp, synthetic construct
  source 1..20: mol_type = other DNA
aacctgctagacaaattctg

SEQ ID NO: 36722 - DNA, 20 bp, synthetic construct
  source 1..20: mol_type = other DNA
aaacctgctagacaaattct

SEQ ID NO: 36723 - DNA, 20 bp, synthetic construct
  source 1..20: mol_type = other DNA
aaaacctgctagacaaattc

SEQ ID NO: 36724 - DNA, 20 bp, synthetic construct
  source 1..20: mol_type = other DNA
gaaaacctgctagacaaatt

SEQ ID NO: 36725 - DNA, 20 bp, synthetic construct
  source 1..20: mol_type = other DNA
ggaaaacctgctagacaaat

SEQ ID NO: 36726 - DNA, 20 bp, synthetic construct
  source 1..20: mol_type = other DNA
tggaaaacctgctagacaaa

SEQ ID NO: 36727 - DNA, 20 bp, synthetic construct
  source 1..20: mol_type = other DNA
ctggaaaacctgctagacaa

SEQ ID NO: 36728 - DNA, 20 bp, synthetic construct
  source 1..20: mol_type = other DNA
actggaaaacctgctagaca

SEQ ID NO: 36729 - DNA, 20 bp, synthetic construct
  source 1..20: mol_type = other DNA
gactggaaaacctgctagac

SEQ ID NO: 36730 - DNA, 20 bp, synthetic construct
  source 1..20: mol_type = other DNA
agactggaaaacctgctaga

SEQ ID NO: 36731 - DNA, 20 bp, synthetic construct
  source 1..20: mol_type = other DNA
aagactggaaaacctgctag

SEQ ID NO: 36732 - DNA, 20 bp, synthetic construct
  source 1..20: mol_type = other DNA
aaagactggaaaacctgcta

SEQ ID NO: 36733 - DNA, 20 bp, synthetic construct
  source 1..20: mol_type = other DNA
taaagactggaaaacctgct

SEQ ID NO: 36734 - DNA, 20 bp, synthetic construct
  source 1..20: mol_type = other DNA
gtaaagactggaaaacctgc

SEQ ID NO: 36735 - DNA, 20 bp, synthetic construct
  source 1..20: mol_type = other DNA
ggtaaagactggaaaacctg

SEQ ID NO: 36736 - DNA, 20 bp, synthetic construct
  source 1..20: mol_type = other DNA
tggtaaagactggaaaacct

SEQ ID NO: 36737 - DNA, 20 bp, synthetic construct
  source 1..20: mol_type = other DNA
ctggtaaagactggaaaacc

SEQ ID NO: 36738 - DNA, 20 bp, synthetic construct
  source 1..20: mol_type = other DNA
tctggtaaagactggaaaac

SEQ ID NO: 36739 - DNA, 20 bp, synthetic construct
  source 1..20: mol_type = other DNA
ttctggtaaagactggaaaa

SEQ ID NO: 36740 - DNA, 20 bp, synthetic construct
  source 1..20: mol_type = other DNA
tttctggtaaagactggaaa

SEQ ID NO: 36741 - DNA, 20 bp, synthetic construct
  source 1..20: mol_type = other DNA
atttctggtaaagactggaa

SEQ ID NO: 36742 - DNA, 20 bp, synthetic construct
  source 1..20: mol_type = other DNA
catttctggtaaagactgga

SEQ ID NO: 36743 - DNA, 20 bp, synthetic construct
  source 1..20: mol_type = other DNA
gcatttctggtaaagactgg

SEQ ID NO: 36744 - DNA, 20 bp, synthetic construct
  source 1..20: mol_type = other DNA
ggcatttctggtaaagactg

SEQ ID NO: 36745 - DNA, 20 bp, synthetic construct
  source 1..20: mol_type = other DNA
gggcatttctggtaaagact

SEQ ID NO: 36746 - DNA, 20 bp, synthetic construct
  source 1..20: mol_type = other DNA
ggggcatttctggtaaagac

SEQ ID NO: 36747 - DNA, 20 bp, synthetic construct
  source 1..20: mol_type = other DNA
gggggcatttctggtaaaga

SEQ ID NO: 36748 - DNA, 20 bp, synthetic construct
  source 1..20: mol_type = other DNA
tgggggcatttctggtaaag

SEQ ID NO: 36749 - DNA, 20 bp, synthetic construct
  source 1..20: mol_type = other DNA
atgggggcatttctggtaaa

SEQ ID NO: 36750 - DNA, 20 bp, synthetic construct
  source 1..20: mol_type = other DNA
catgggggcatttctggtaa

SEQ ID NO: 36751 - DNA, 20 bp, synthetic construct
  source 1..20: mol_type = other DNA
gcatgggggcatttctggta

SEQ ID NO: 36752 - DNA, 20 bp, synthetic construct
  source 1..20: mol_type = other DNA
tgcatgggggcatttctggt

SEQ ID NO: 36753 - DNA, 20 bp, synthetic construct
  source 1..20: mol_type = other DNA
ctgcatgggggcatttctgg

SEQ ID NO: 36754 - DNA, 20 bp, synthetic construct
  source 1..20: mol_type = other DNA
tctgcatgggggcatttctg

SEQ ID NO: 36755 - DNA, 20 bp, synthetic construct
  source 1..20: mol_type = other DNA
ttctgcatgggggcatttct

SEQ ID NO: 36756 - DNA, 20 bp, synthetic construct
  source 1..20: mol_type = other DNA
cttctgcatgggggcatttc

SEQ ID NO: 36757 - DNA, 20 bp, synthetic construct
  source 1..20: mol_type = other DNA
acttctgcatgggggcattt

SEQ ID NO: 36758 - DNA, 20 bp, synthetic construct
  source 1..20: mol_type = other DNA
tacttctgcatgggggcatt

SEQ ID NO: 36759 - DNA, 20 bp, synthetic construct
  source 1..20: mol_type = other DNA
ctacttctgcatgggggcat

SEQ ID NO: 36760 - DNA, 20 bp, synthetic construct
  source 1..20: mol_type = other DNA
actacttctgcatgggggca

SEQ ID NO: 36761 - DNA, 20 bp, synthetic construct
  source 1..20: mol_type = other DNA
tactacttctgcatgggggc

SEQ ID NO: 36762 - DNA, 20 bp, synthetic construct
  source 1..20: mol_type = other DNA
ttactacttctgcatggggg

SEQ ID NO: 36763 - DNA, 20 bp, synthetic construct
  source 1..20: mol_type = other DNA
tttactacttctgcatgggg

SEQ ID NO: 36764 - DNA, 20 bp, synthetic construct
  source 1..20: mol_type = other DNA
atttactacttctgcatggg

SEQ ID NO: 36765 - DNA, 20 bp, synthetic construct
  source 1..20: mol_type = other DNA
tatttactacttctgcatgg

SEQ ID NO: 36766 - DNA, 20 bp, synthetic construct
  source 1..20: mol_type = other DNA
gtatttactacttctgcatg

SEQ ID NO: 36767 - DNA, 20 bp, synthetic construct
  source 1..20: mol_type = other DNA
agtatttactacttctgcat

SEQ ID NO: 36768 - DNA, 20 bp, synthetic construct
  source 1..20: mol_type = other DNA
cagtatttactacttctgca

SEQ ID NO: 36769 - DNA, 20 bp, synthetic construct
  source 1..20: mol_type = other DNA
tcagtatttactacttctgc

SEQ ID NO: 36770 - DNA, 20 bp, synthetic construct
  source 1..20: mol_type = other DNA
atcagtatttactacttctg

SEQ ID NO: 36771 - DNA, 20 bp, synthetic construct
  source 1..20: mol_type = other DNA
aatcagtatttactacttct

SEQ ID NO: 36772 - DNA, 20 bp, synthetic construct
  source 1..20: mol_type = other DNA
gaatcagtatttactacttc

SEQ ID NO: 36773 - DNA, 20 bp, synthetic construct
  source 1..20: mol_type = other DNA
tgaatcagtatttactactt

SEQ ID NO: 36774 - DNA, 20 bp, synthetic construct
  source 1..20: mol_type = other DNA
atgaatcagtatttactact

SEQ ID NO: 36775 - DNA, 20 bp, synthetic construct
  source 1..20: mol_type = other DNA
catgaatcagtatttactac

SEQ ID NO: 36776 - DNA, 20 bp, synthetic construct
  source 1..20: mol_type = other DNA
acatgaatcagtatttacta

SEQ ID NO: 36777 - DNA, 20 bp, synthetic construct
  source 1..20: mol_type = other DNA
tacatgaatcagtatttact

SEQ ID NO: 36778 - DNA, 20 bp, synthetic construct
  source 1..20: mol_type = other DNA
ttacatgaatcagtatttac

SEQ ID NO: 36779 - DNA, 20 bp, synthetic construct
  source 1..20: mol_type = other DNA
tttacatgaatcagtattta

SEQ ID NO: 36780 - DNA, 20 bp, synthetic construct
  source 1..20: mol_type = other DNA
ttttacatgaatcagtattt

SEQ ID NO: 36781 - DNA, 20 bp, synthetic construct
  source 1..20: mol_type = other DNA
attttacatgaatcagtatt

SEQ ID NO: 36782 - DNA, 20 bp, synthetic construct
  source 1..20: mol_type = other DNA
tattttacatgaatcagtat

SEQ ID NO: 36783 - DNA, 20 bp, synthetic construct
  source 1..20: mol_type = other DNA
ttattttacatgaatcagta

SEQ ID NO: 36784 - DNA, 20 bp, synthetic construct
  source 1..20: mol_type = other DNA
attattttacatgaatcagt

SEQ ID NO: 36785 - DNA, 20 bp, synthetic construct
  source 1..20: mol_type = other DNA
tattattttacatgaatcag

SEQ ID NO: 36786 - DNA, 20 bp, synthetic construct
  source 1..20: mol_type = other DNA
ttattattttacatgaatca

SEQ ID NO: 36787 - DNA, 20 bp, synthetic construct
  source 1..20: mol_type = other DNA
tttattattttacatgaatc

SEQ ID NO: 36788 - DNA, 20 bp, synthetic construct
  source 1..20: mol_type = other DNA
gtttattattttacatgaat

SEQ ID NO: 36789 - DNA, 20 bp, synthetic construct
  source 1..20: mol_type = other DNA
tgtttattattttacatgaa

SEQ ID NO: 36790 - DNA, 20 bp, synthetic construct
  source 1..20: mol_type = other DNA
ttgtttattattttacatga

SEQ ID NO: 36791 - DNA, 20 bp, synthetic construct
  source 1..20: mol_type = other DNA
gttgtttattattttacatg

SEQ ID NO: 36792 - DNA, 20 bp, synthetic construct
  source 1..20: mol_type = other DNA
agttgtttattattttacat

SEQ ID NO: 36793 - DNA, 20 bp, synthetic construct
  source 1..20: mol_type = other DNA
aagttgtttattattttaca

SEQ ID NO: 36794 - DNA, 20 bp, synthetic construct
  source 1..20: mol_type = other DNA
aaagttgtttattattttac

SEQ ID NO: 36795 - DNA, 20 bp, synthetic construct
  source 1..20: mol_type = other DNA
taaagttgtttattatttta

SEQ ID NO: 36796 - DNA, 20 bp, synthetic construct
  source 1..20: mol_type = other DNA
ataaagttgtttattatttt

SEQ ID NO: 36797 - DNA, 20 bp, synthetic construct
  source 1..20: mol_type = other DNA
gataaagttgtttattattt

SEQ ID NO: 36798 - DNA, 20 bp, synthetic construct
  source 1..20: mol_type = other DNA
agataaagttgtttattatt

SEQ ID NO: 36799 - DNA, 20 bp, synthetic construct
  source 1..20: mol_type = other DNA
aagataaagttgtttattat

SEQ ID NO: 36800 - DNA, 20 bp, synthetic construct
  source 1..20: mol_type = other DNA
aaagataaagttgtttatta

SEQ ID NO: 36801 - DNA, 20 bp, synthetic construct
  source 1..20: mol_type = other DNA
gaaagataaagttgtttatt

SEQ ID NO: 36802 - DNA, 20 bp, synthetic construct
  source 1..20: mol_type = other DNA
tgaaagataaagttgtttat

SEQ ID NO: 36803 - DNA, 20 bp, synthetic construct
  source 1..20: mol_type = other DNA
ctgaaagataaagttgttta

SEQ ID NO: 36804 - DNA, 20 bp, synthetic construct
  source 1..20: mol_type = other DNA
actgaaagataaagttgttt

SEQ ID NO: 36805 - DNA, 20 bp, synthetic construct
  source 1..20: mol_type = other DNA
aactgaaagataaagttgtt

SEQ ID NO: 36806 - DNA, 20 bp, synthetic construct
  source 1..20: mol_type = other DNA
aaactgaaagataaagttgt

SEQ ID NO: 36807 - DNA, 20 bp, synthetic construct
  source 1..20: mol_type = other DNA
aaaactgaaagataaagttg

SEQ ID NO: 36808 - DNA, 20 bp, synthetic construct
  source 1..20: mol_type = other DNA
aaaaactgaaagataaagtt

SEQ ID NO: 36809 - DNA, 20 bp, synthetic construct
  source 1..20: mol_type = other DNA
taaaaactgaaagataaagt

SEQ ID NO: 36810 - DNA, 20 bp, synthetic construct
  source 1..20: mol_type = other DNA
ttaaaaactgaaagataaag

SEQ ID NO: 36811 - DNA, 20 bp, synthetic construct
  source 1..20: mol_type = other DNA
tttaaaaactgaaagataaa

SEQ ID NO: 36812 - DNA, 20 bp, synthetic construct
  source 1..20: mol_type = other DNA
ttttaaaaactgaaagataa

SEQ ID NO: 36813 - DNA, 20 bp, synthetic construct
  source 1..20: mol_type = other DNA
cttttaaaaactgaaagata

SEQ ID NO: 36814 - DNA, 20 bp, synthetic construct
  source 1..20: mol_type = other DNA
tcttttaaaaactgaaagat

SEQ ID NO: 36815 - DNA, 20 bp, synthetic construct
  source 1..20: mol_type = other DNA
gtcttttaaaaactgaaaga

SEQ ID NO: 36816 - DNA, 20 bp, synthetic construct
  source 1..20: mol_type = other DNA
tgtcttttaaaaactgaaag

SEQ ID NO: 36817 - DNA, 20 bp, synthetic construct
  source 1..20: mol_type = other DNA
ctgtcttttaaaaactgaaa

SEQ ID NO: 36818 - DNA, 20 bp, synthetic construct
  source 1..20: mol_type = other DNA
cctgtcttttaaaaactgaa

SEQ ID NO: 36819 - DNA, 20 bp, synthetic construct
  source 1..20: mol_type = other DNA
ccctgtcttttaaaaactga

SEQ ID NO: 36820 - DNA, 20 bp, synthetic construct
  source 1..20: mol_type = other DNA
accctgtcttttaaaaactg

SEQ ID NO: 36821 - DNA, 20 bp, synthetic construct
  source 1..20: mol_type = other DNA
gaccctgtcttttaaaaact

SEQ ID NO: 36822 - DNA, 20 bp, synthetic construct
  source 1..20: mol_type = other DNA
agaccctgtcttttaaaaac

SEQ ID NO: 36823 - DNA, 20 bp, synthetic construct
  source 1..20: mol_type = other DNA
aagaccctgtcttttaaaaa

SEQ ID NO: 36824 - DNA, 20 bp, synthetic construct
  source 1..20: mol_type = other DNA
caagaccctgtcttttaaaa

SEQ ID NO: 36825 - DNA, 20 bp, synthetic construct
  source 1..20: mol_type = other DNA
acaagaccctgtcttttaaa

SEQ ID NO: 36826 - DNA, 20 bp, synthetic construct
  source 1..20: mol_type = other DNA
tacaagaccctgtcttttaa

SEQ ID NO: 36827 - DNA, 20 bp, synthetic construct
  source 1..20: mol_type = other DNA
ttacaagaccctgtctttta

SEQ ID NO: 36828 - DNA, 20 bp, synthetic construct
  source 1..20: mol_type = other DNA
gttacaagaccctgtctttt

SEQ ID NO: 36829 - DNA, 20 bp, synthetic construct
  source 1..20: mol_type = other DNA
cgttacaagaccctgtcttt

SEQ ID NO: 36830 - DNA, 20 bp, synthetic construct
  source 1..20: mol_type = other DNA
acgttacaagaccctgtctt

SEQ ID NO: 36831 - DNA, 20 bp, synthetic construct
  source 1..20: mol_type = other DNA
aacgttacaagaccctgtct

SEQ ID NO: 36832 - DNA, 20 bp, synthetic construct
  source 1..20: mol_type = other DNA
caacgttacaagaccctgtc

SEQ ID NO: 36833 - DNA, 20 bp, synthetic construct
  source 1..20: mol_type = other DNA
gcaacgttacaagaccctgt

SEQ ID NO: 36834 - DNA, 20 bp, synthetic construct
  source 1..20: mol_type = other DNA
ggcaacgttacaagaccctg

SEQ ID NO: 36835 - DNA, 20 bp, synthetic construct
  source 1..20: mol_type = other DNA
gggcaacgttacaagaccct

SEQ ID NO: 36836 - DNA, 20 bp, synthetic construct
  source 1..20: mol_type = other DNA
tgggcaacgttacaagaccc

SEQ ID NO: 36837 - DNA, 20 bp, synthetic construct
  source 1..20: mol_type = other DNA
ctgggcaacgttacaagacc

SEQ ID NO: 36838 - DNA, 20 bp, synthetic construct
  source 1..20: mol_type = other DNA
tctgggcaacgttacaagac

SEQ ID NO: 36839 - DNA, 20 bp, synthetic construct
  source 1..20: mol_type = other DNA
gtctgggcaacgttacaaga

SEQ ID NO: 36840 - DNA, 20 bp, synthetic construct
  source 1..20: mol_type = other DNA
agtctgggcaacgttacaag

SEQ ID NO: 36841 - DNA, 20 bp, synthetic construct
  source 1..20: mol_type = other DNA
cagtctgggcaacgttacaa

SEQ ID NO: 36842 - DNA, 20 bp, synthetic construct
  source 1..20: mol_type = other DNA
ccagtctgggcaacgttaca

SEQ ID NO: 36843 - DNA, 20 bp, synthetic construct
  source 1..20: mol_type = other DNA
gccagtctgggcaacgttac

SEQ ID NO: 36844 - DNA, 20 bp, synthetic construct
  source 1..20: mol_type = other DNA
ggccagtctgggcaacgtta

SEQ ID NO: 36845 - DNA, 20 bp, synthetic construct
  source 1..20: mol_type = other DNA
aggccagtctgggcaacgtt

SEQ ID NO: 36846 - DNA, 20 bp, synthetic construct
  source 1..20: mol_type = other DNA
aaggccagtctgggcaacgt

SEQ ID NO: 36847 - DNA, 20 bp, synthetic construct
  source 1..20: mol_type = other DNA
aaaggccagtctgggcaacg

SEQ ID NO: 36848 - DNA, 20 bp, synthetic construct
  source 1..20: mol_type = other DNA
taaaggccagtctgggcaac

SEQ ID NO: 36849 - DNA, 20 bp, synthetic construct
  source 1..20: mol_type = other DNA
ttaaaggccagtctgggcaa

SEQ ID NO: 36850 - DNA, 20 bp, synthetic construct
  source 1..20: mol_type = other DNA
attaaaggccagtctgggca

SEQ ID NO: 36851 - DNA, 20 bp, synthetic construct
  source 1..20: mol_type = other DNA
aattaaaggccagtctgggc

SEQ ID NO: 36852 - DNA, 20 bp, synthetic construct
  source 1..20: mol_type = other DNA
gaattaaaggccagtctggg

SEQ ID NO: 36853 - DNA, 20 bp, synthetic construct
  source 1..20: mol_type = other DNA
ggaattaaaggccagtctgg

SEQ ID NO: 36854 - DNA, 20 bp, synthetic construct
  source 1..20: mol_type = other DNA
aggaattaaaggccagtctg

SEQ ID NO: 36855 - DNA, 20 bp, synthetic construct
  source 1..20: mol_type = other DNA
caggaattaaaggccagtct

SEQ ID NO: 36856 - DNA, 20 bp, synthetic construct
  source 1..20: mol_type = other DNA
ccaggaattaaaggccagtc

SEQ ID NO: 36857 - DNA, 20 bp, synthetic construct
  source 1..20: mol_type = other DNA
cccaggaattaaaggccagt

SEQ ID NO: 36858 - DNA, 20 bp, synthetic construct
  source 1..20: mol_type = other DNA
gcccaggaattaaaggccag

SEQ ID NO: 36859 - DNA, 20 bp, synthetic construct
  source 1..20: mol_type = other DNA
agcccaggaattaaaggcca

SEQ ID NO: 36860 - DNA, 20 bp, synthetic construct
  source 1..20: mol_type = other DNA
gagcccaggaattaaaggcc

SEQ ID NO: 36861 - DNA, 20 bp, synthetic construct
  source 1..20: mol_type = other DNA
tgagcccaggaattaaaggc

SEQ ID NO: 36862 - DNA, 20 bp, synthetic construct
  source 1..20: mol_type = other DNA
ttgagcccaggaattaaagg

SEQ ID NO: 36863 - DNA, 20 bp, synthetic construct
  source 1..20: mol_type = other DNA
cttgagcccaggaattaaag

SEQ ID NO: 36864 - DNA, 20 bp, synthetic construct
  source 1..20: mol_type = other DNA
gcttgagcccaggaattaaa

SEQ ID NO: 36865 - DNA, 20 bp, synthetic construct
  source 1..20: mol_type = other DNA
cgcttgagcccaggaattaa

SEQ ID NO: 36866 - DNA, 20 bp, synthetic construct
  source 1..20: mol_type = other DNA
tcgcttgagcccaggaatta

SEQ ID NO: 36867 - DNA, 20 bp, synthetic construct
  source 1..20: mol_type = other DNA
atcgcttgagcccaggaatt

SEQ ID NO: 36868 - DNA, 20 bp, synthetic construct
  source 1..20: mol_type = other DNA
gatcgcttgagcccaggaat

SEQ ID NO: 36869 - DNA, 20 bp, synthetic construct
  source 1..20: mol_type = other DNA
ggatcgcttgagcccaggaa

SEQ ID NO: 36870 - DNA, 20 bp, synthetic construct
  source 1..20: mol_type = other DNA
aggatcgcttgagcccagga

SEQ ID NO: 36871 - DNA, 20 bp, synthetic construct
  source 1..20: mol_type = other DNA
gaggatcgcttgagcccagg

SEQ ID NO: 36872 - DNA, 20 bp, synthetic construct
  source 1..20: mol_type = other DNA
agaggatcgcttgagcccag

SEQ ID NO: 36873 - DNA, 20 bp, synthetic construct
  source 1..20: mol_type = other DNA
gagaggatcgcttgagccca

SEQ ID NO: 36874 - DNA, 20 bp, synthetic construct
  source 1..20: mol_type = other DNA
tgagaggatcgcttgagccc

SEQ ID NO: 36875 - DNA, 20 bp, synthetic construct
  source 1..20: mol_type = other DNA
gtgagaggatcgcttgagcc

SEQ ID NO: 36876 - DNA, 20 bp, synthetic construct
  source 1..20: mol_type = other DNA
ggtgagaggatcgcttgagc

SEQ ID NO: 36877 - DNA, 20 bp, synthetic construct
  source 1..20: mol_type = other DNA
aggtgagaggatcgcttgag

SEQ ID NO: 36878 - DNA, 20 bp, synthetic construct
  source 1..20: mol_type = other DNA
caggtgagaggatcgcttga

SEQ ID NO: 36879 - DNA, 20 bp, synthetic construct
  source 1..20: mol_type = other DNA
tcaggtgagaggatcgcttg

SEQ ID NO: 36880 - DNA, 20 bp, synthetic construct
  source 1..20: mol_type = other DNA
ctcaggtgagaggatcgctt

SEQ ID NO: 36881 - DNA, 20 bp, synthetic construct
  source 1..20: mol_type = other DNA
gctcaggtgagaggatcgct

SEQ ID NO: 36882 - DNA, 20 bp, synthetic construct
  source 1..20: mol_type = other DNA
ggctcaggtgagaggatcgc

SEQ ID NO: 36883 - DNA, 20 bp, synthetic construct
  source 1..20: mol_type = other DNA
aggctcaggtgagaggatcg

SEQ ID NO: 36884 - DNA, 20 bp, synthetic construct
  source 1..20: mol_type = other DNA
aaggctcaggtgagaggatc

SEQ ID NO: 36885 - DNA, 20 bp, synthetic construct
  source 1..20: mol_type = other DNA
aaaggctcaggtgagaggat

SEQ ID NO: 36886 - DNA, 20 bp, synthetic construct
  source 1..20: mol_type = other DNA
aaaaggctcaggtgagagga

SEQ ID NO: 36887 - DNA, 20 bp, synthetic construct
  source 1..20: mol_type = other DNA
caaaaggctcaggtgagagg

SEQ ID NO: 36888 - DNA, 20 bp, synthetic construct
  source 1..20: mol_type = other DNA
tcaaaaggctcaggtgagag

SEQ ID NO: 36889 - DNA, 20 bp, synthetic construct
  source 1..20: mol_type = other DNA
ctcaaaaggctcaggtgaga

SEQ ID NO: 36890 - DNA, 20 bp, synthetic construct
  source 1..20: mol_type = other DNA
actcaaaaggctcaggtgag

SEQ ID NO: 36891 - DNA, 20 bp, synthetic construct
  source 1..20: mol_type = other DNA
tactcaaaaggctcaggtga

SEQ ID NO: 36892 - DNA, 20 bp, synthetic construct
  source 1..20: mol_type = other DNA
ctactcaaaaggctcaggtg

SEQ ID NO: 36893 - DNA, 20 bp, synthetic construct
  source 1..20: mol_type = other DNA
gctactcaaaaggctcaggt

SEQ ID NO: 36894 - DNA, 20 bp, synthetic construct
  source 1..20: mol_type = other DNA
agctactcaaaaggctcagg

SEQ ID NO: 36895 - DNA, 20 bp, synthetic construct
  source 1..20: mol_type = other DNA
cagctactcaaaaggctcag

SEQ ID NO: 36896 - DNA, 20 bp, synthetic construct
  source 1..20: mol_type = other DNA
tcagctactcaaaaggctca

SEQ ID NO: 36897 - DNA, 20 bp, synthetic construct
  source 1..20: mol_type = other DNA
ctcagctactcaaaaggctc

SEQ ID NO: 36898 - DNA, 20 bp, synthetic construct
  source 1..20: mol_type = other DNA
tctcagctactcaaaaggct

SEQ ID NO: 36899 - DNA, 20 bp, synthetic construct
  source 1..20: mol_type = other DNA
gtctcagctactcaaaaggc

SEQ ID NO: 36900 - DNA, 20 bp, synthetic construct
  source 1..20: mol_type = other DNA
agtctcagctactcaaaagg

SEQ ID NO: 36901 - DNA, 20 bp, synthetic construct
  source 1..20: mol_type = other DNA
tagtctcagctactcaaaag

SEQ ID NO: 36902 - DNA, 20 bp, synthetic construct
  source 1..20: mol_type = other DNA
gtagtctcagctactcaaaa

SEQ ID NO: 36903 - DNA, 20 bp, synthetic construct
  source 1..20: mol_type = other DNA
tgtagtctcagctactcaaa

SEQ ID NO: 36904 - DNA, 20 bp, synthetic construct
  source 1..20: mol_type = other DNA
ctgtagtctcagctactcaa

SEQ ID NO: 36905 - DNA, 20 bp, synthetic construct
  source 1..20: mol_type = other DNA
cctgtagtctcagctactca

SEQ ID NO: 36906 - DNA, 20 bp, synthetic construct
  source 1..20: mol_type = other DNA
gcctgtagtctcagctactc

SEQ ID NO: 36907 - DNA, 20 bp, synthetic construct
  source 1..20: mol_type = other DNA
agcctgtagtctcagctact

SEQ ID NO: 36908 - DNA, 20 bp, synthetic construct
  source 1..20: mol_type = other DNA
cagcctgtagtctcagctac

SEQ ID NO: 36909 - DNA, 20 bp, synthetic construct
  source 1..20: mol_type = other DNA
gcagcctgtagtctcagcta

SEQ ID NO: 36910 - DNA, 20 bp, synthetic construct
  source 1..20: mol_type = other DNA
tgcagcctgtagtctcagct

SEQ ID NO: 36911 - DNA, 20 bp, synthetic construct
  source 1..20: mol_type = other DNA
gtgcagcctgtagtctcagc

SEQ ID NO: 36912 - DNA, 20 bp, synthetic construct
  source 1..20: mol_type = other DNA
ggtgcagcctgtagtctcag

SEQ ID NO: 36913 - DNA, 20 bp, synthetic construct
  source 1..20: mol_type = other DNA
aggtgcagcctgtagtctca

SEQ ID NO: 36914 - DNA, 20 bp, synthetic construct
  source 1..20: mol_type = other DNA
gaggtgcagcctgtagtctc

SEQ ID NO: 36915 - DNA, 20 bp, synthetic construct
  source 1..20: mol_type = other DNA
agaggtgcagcctgtagtct

SEQ ID NO: 36916 - DNA, 20 bp, synthetic construct
  source 1..20: mol_type = other DNA
cagaggtgcagcctgtagtc

SEQ ID NO: 36917 - DNA, 20 bp, synthetic construct
  source 1..20: mol_type = other DNA
gcagaggtgcagcctgtagt

SEQ ID NO: 36918 - DNA, 20 bp, synthetic construct
  source 1..20: mol_type = other DNA
tgcagaggtgcagcctgtag

SEQ ID NO: 36919 - DNA, 20 bp, synthetic construct
  source 1..20: mol_type = other DNA
gtgcagaggtgcagcctgta

SEQ ID NO: 36920 - DNA, 20 bp, synthetic construct
  source 1..20: mol_type = other DNA
ggtgcagaggtgcagcctgt

SEQ ID NO: 36921 - DNA, 20 bp, synthetic construct
  source 1..20: mol_type = other DNA
aggtgcagaggtgcagcctg

SEQ ID NO: 36922 - DNA, 20 bp, synthetic construct
  source 1..20: mol_type = other DNA
caggtgcagaggtgcagcct

SEQ ID NO: 36923 - DNA, 20 bp, synthetic construct
  source 1..20: mol_type = other DNA
ccaggtgcagaggtgcagcc

SEQ ID NO: 36924 - DNA, 20 bp, synthetic construct
  source 1..20: mol_type = other DNA
gccaggtgcagaggtgcagc

SEQ ID NO: 36925 - DNA, 20 bp, synthetic construct
  source 1..20: mol_type = other DNA
agccaggtgcagaggtgcag

SEQ ID NO: 36926 - DNA, 20 bp, synthetic construct
  source 1..20: mol_type = other DNA
gagccaggtgcagaggtgca

SEQ ID NO: 36927 - DNA, 20 bp, synthetic construct
  source 1..20: mol_type = other DNA
agagccaggtgcagaggtgc

SEQ ID NO: 36928 - DNA, 20 bp, synthetic construct
  source 1..20: mol_type = other DNA
cagagccaggtgcagaggtg

SEQ ID NO: 36929 - DNA, 20 bp, synthetic construct
  source 1..20: mol_type = other DNA
gcagagccaggtgcagaggt

SEQ ID NO: 36930 - DNA, 20 bp, synthetic construct
  source 1..20: mol_type = other DNA
agcagagccaggtgcagagg

SEQ ID NO: 36931 - DNA, 20 bp, synthetic construct
  source 1..20: mol_type = other DNA
aagcagagccaggtgcagag

SEQ ID NO: 36932 - DNA, 20 bp, synthetic construct
  source 1..20: mol_type = other DNA
caagcagagccaggtgcaga

SEQ ID NO: 36933 - DNA, 20 bp, synthetic construct
  source 1..20: mol_type = other DNA
tcaagcagagccaggtgcag

SEQ ID NO: 36934 - DNA, 20 bp, synthetic construct
  source 1..20: mol_type = other DNA
atcaagcagagccaggtgca

SEQ ID NO: 36935 - DNA, 20 bp, synthetic construct
  source 1..20: mol_type = other DNA
aatcaagcagagccaggtgc

SEQ ID NO: 36936 - DNA, 20 bp, synthetic construct
  source 1..20: mol_type = other DNA
aaatcaagcagagccaggtg

SEQ ID NO: 36937 - DNA, 20 bp, synthetic construct
  source 1..20: mol_type = other DNA
aaaatcaagcagagccaggt

SEQ ID NO: 36938 - DNA, 20 bp, synthetic construct
  source 1..20: mol_type = other DNA
aaaaatcaagcagagccagg

SEQ ID NO: 36939 - DNA, 20 bp, synthetic construct
  source 1..20: mol_type = other DNA
taaaaatcaagcagagccag

SEQ ID NO: 36940 - DNA, 20 bp, synthetic construct
  source 1..20: mol_type = other DNA
ttaaaaatcaagcagagcca

SEQ ID NO: 36941 - DNA, 20 bp, synthetic construct
  source 1..20: mol_type = other DNA
attaaaaatcaagcagagcc

SEQ ID NO: 36942 - DNA, 20 bp, synthetic construct
  source 1..20: mol_type = other DNA
aattaaaaatcaagcagagc

SEQ ID NO: 36943 - DNA, 20 bp, synthetic construct
  source 1..20: mol_type = other DNA
caattaaaaatcaagcagag

SEQ ID NO: 36944 - DNA, 20 bp, synthetic construct
  source 1..20: mol_type = other DNA
acaattaaaaatcaagcaga

SEQ ID NO: 36945 - DNA, 20 bp, synthetic construct
  source 1..20: mol_type = other DNA
aacaattaaaaatcaagcag

SEQ ID NO: 36946 - DNA, 20 bp, synthetic construct
  source 1..20: mol_type = other DNA
caacaattaaaaatcaagca

SEQ ID NO: 36947 - DNA, 20 bp, synthetic construct
  source 1..20: mol_type = other DNA
acaacaattaaaaatcaagc

SEQ ID NO: 36948 - DNA, 20 bp, synthetic construct
  source 1..20: mol_type = other DNA
tacaacaattaaaaatcaag

SEQ ID NO: 36949 - DNA, 20 bp, synthetic construct
  source 1..20: mol_type = other DNA
atacaacaattaaaaatcaa

SEQ ID NO: 36950 - DNA, 20 bp, synthetic construct
  source 1..20: mol_type = other DNA
aatacaacaattaaaaatca

SEQ ID NO: 36951 - DNA, 20 bp, synthetic construct
  source 1..20: mol_type = other DNA
caatacaacaattaaaaatc

SEQ ID NO: 36952 - DNA, 20 bp, synthetic construct
  source 1..20: mol_type = other DNA
gcaatacaacaattaaaaat

SEQ ID NO: 36953 - DNA, 20 bp, synthetic construct
  source 1..20: mol_type = other DNA
agcaatacaacaattaaaaa

SEQ ID NO: 36954 - DNA, 20 bp, synthetic construct
  source 1..20: mol_type = other DNA
cagcaatacaacaattaaaa

SEQ ID NO: 36955 - DNA, 20 bp, synthetic construct
  source 1..20: mol_type = other DNA
acagcaatacaacaattaaa

SEQ ID NO: 36956 - DNA, 20 bp, synthetic construct
  source 1..20: mol_type = other DNA
aacagcaatacaacaattaa

SEQ ID NO: 36957 - DNA, 20 bp, synthetic construct
  source 1..20: mol_type = other DNA
caacagcaatacaacaatta

SEQ ID NO: 36958 - DNA, 20 bp, synthetic construct
  source 1..20: mol_type = other DNA
gcaacagcaatacaacaatt

SEQ ID NO: 36959 - DNA, 20 bp, synthetic construct
  source 1..20: mol_type = other DNA
tgcaacagcaatacaacaat

SEQ ID NO: 36960 - DNA, 20 bp, synthetic construct
  source 1..20: mol_type = other DNA
ctgcaacagcaatacaacaa

SEQ ID NO: 36961 - DNA, 20 bp, synthetic construct
  source 1..20: mol_type = other DNA
gctgcaacagcaatacaaca

SEQ ID NO: 36962 - DNA, 20 bp, synthetic construct
  source 1..20: mol_type = other DNA
agctgcaacagcaatacaac

SEQ ID NO: 36963 - DNA, 20 bp, synthetic construct
  source 1..20: mol_type = other DNA
tagctgcaacagcaatacaa

SEQ ID NO: 36964 - DNA, 20 bp, synthetic construct
  source 1..20: mol_type = other DNA
atagctgcaacagcaataca

SEQ ID NO: 36965 - DNA, 20 bp, synthetic construct
  source 1..20: mol_type = other DNA
catagctgcaacagcaatac

SEQ ID NO: 36966 - DNA, 20 bp, synthetic construct
  source 1..20: mol_type = other DNA
acatagctgcaacagcaata

SEQ ID NO: 36967 - DNA, 20 bp, synthetic construct
  source 1..20: mol_type = other DNA
aacatagctgcaacagcaat

SEQ ID NO: 36968 - DNA, 20 bp, synthetic construct
  source 1..20: mol_type = other DNA
aaacatagctgcaacagcaa

SEQ ID NO: 36969 - DNA, 20 bp, synthetic construct
  source 1..20: mol_type = other DNA
aaaacatagctgcaacagca

SEQ ID NO: 36970 - DNA, 20 bp, synthetic construct
  source 1..20: mol_type = other DNA
aaaaacatagctgcaacagc

SEQ ID NO: 36971 - DNA, 20 bp, synthetic construct
  source 1..20: mol_type = other DNA
aaaaaacatagctgcaacag

SEQ ID NO: 36972 - DNA, 20 bp, synthetic construct
  source 1..20: mol_type = other DNA
aaaaaaacatagctgcaaca

SEQ ID NO: 36973 - DNA, 20 bp, synthetic construct
  source 1..20: mol_type = other DNA
aaaaaaaacatagctgcaac

SEQ ID NO: 36974 - DNA, 20 bp, synthetic construct
  source 1..20: mol_type = other DNA
aaaaaaaaacatagctgcaa

SEQ ID NO: 36975 - DNA, 20 bp, synthetic construct
  source 1..20: mol_type = other DNA
aaaaaaaaaacatagctgca

SEQ ID NO: 36976 - DNA, 20 bp, synthetic construct
  source 1..20: mol_type = other DNA
aaaaaaaaaaacatagctgc

SEQ ID NO: 36977 - DNA, 20 bp, synthetic construct
  source 1..20: mol_type = other DNA
gaaaaaaaaaaacatagctg

SEQ ID NO: 36978 - DNA, 20 bp, synthetic construct
  source 1..20: mol_type = other DNA
agaaaaaaaaaaacatagct

SEQ ID NO: 36979 - DNA, 20 bp, synthetic construct
  source 1..20: mol_type = other DNA
aagaaaaaaaaaaacatagc

SEQ ID NO: 36980 - DNA, 20 bp, synthetic construct
  source 1..20: mol_type = other DNA
gaagaaaaaaaaaaacatag

SEQ ID NO: 36981 - DNA, 20 bp, synthetic construct
  source 1..20: mol_type = other DNA
tgaagaaaaaaaaaaacata

SEQ ID NO: 36982 - DNA, 20 bp, synthetic construct
  source 1..20: mol_type = other DNA
ctgaagaaaaaaaaaaacat

SEQ ID NO: 36983 - DNA, 20 bp, synthetic construct
  source 1..20: mol_type = other DNA
actgaagaaaaaaaaaaaca

SEQ ID NO: 36984 - DNA, 20 bp, synthetic construct
  source 1..20: mol_type = other DNA
cactgaagaaaaaaaaaaac

SEQ ID NO: 36985 - DNA, 20 bp, synthetic construct
  source 1..20: mol_type = other DNA
acactgaagaaaaaaaaaaa

SEQ ID NO: 36986 - DNA, 20 bp, synthetic construct
  source 1..20: mol_type = other DNA
cacactgaagaaaaaaaaaa

SEQ ID NO: 36987 - DNA, 20 bp, synthetic construct
  source 1..20: mol_type = other DNA
tcacactgaagaaaaaaaaa

SEQ ID NO: 36988 - DNA, 20 bp, synthetic construct
  source 1..20: mol_type = other DNA
ctcacactgaagaaaaaaaa

SEQ ID NO: 36989 - DNA, 20 bp, synthetic construct
  source 1..20: mol_type = other DNA
cctcacactgaagaaaaaaa

SEQ ID NO: 36990 - DNA, 20 bp, synthetic construct
  source 1..20: mol_type = other DNA
tcctcacactgaagaaaaaa

SEQ ID NO: 36991 - DNA, 20 bp, synthetic construct
  source 1..20: mol_type = other DNA
atcctcacactgaagaaaaa

SEQ ID NO: 36992 - DNA, 20 bp, synthetic construct
  source 1..20: mol_type = other DNA
catcctcacactgaagaaaa

SEQ ID NO: 36993 - DNA, 20 bp, synthetic construct
  source 1..20: mol_type = other DNA
ccatcctcacactgaagaaa

SEQ ID NO: 36994 - DNA, 20 bp, synthetic construct
  source 1..20: mol_type = other DNA
cccatcctcacactgaagaa

SEQ ID NO: 36995 - DNA, 20 bp, synthetic construct
  source 1..20: mol_type = other DNA
gcccatcctcacactgaaga

SEQ ID NO: 36996 - DNA, 20 bp, synthetic construct
  source 1..20: mol_type = other DNA
tgcccatcctcacactgaag

SEQ ID NO: 36997 - DNA, 20 bp, synthetic construct
  source 1..20: mol_type = other DNA
ttgcccatcctcacactgaa

SEQ ID NO: 36998 - DNA, 20 bp, synthetic construct
  source 1..20: mol_type = other DNA
tttgcccatcctcacactga

SEQ ID NO: 36999 - DNA, 20 bp, synthetic construct
  source 1..20: mol_type = other DNA
gtttgcccatcctcacactg

SEQ ID NO: 37000 - DNA, 20 bp, synthetic construct
  source 1..20: mol_type = other DNA
agtttgcccatcctcacact

SEQ ID NO: 37001 - DNA, 20 bp, synthetic construct
  source 1..20: mol_type = other DNA
aagtttgcccatcctcacac

SEQ ID NO: 37002 - DNA, 20 bp, synthetic construct
  source 1..20: mol_type = other DNA
aaagtttgcccatcctcaca

SEQ ID NO: 37003 - DNA, 20 bp, synthetic construct
  source 1..20: mol_type = other DNA
aaaagtttgcccatcctcac

SEQ ID NO: 37004 - DNA, 20 bp, synthetic construct
  source 1..20: mol_type = other DNA
aaaaagtttgcccatcctca

SEQ ID NO: 37005 - DNA, 20 bp, synthetic construct
  source 1..20: mol_type = other DNA
taaaaagtttgcccatcctc

SEQ ID NO: 37006 - DNA, 20 bp, synthetic construct
  source 1..20: mol_type = other DNA
ataaaaagtttgcccatcct

SEQ ID NO: 37007 - DNA, 20 bp, synthetic construct
  source 1..20: mol_type = other DNA
cataaaaagtttgcccatcc

SEQ ID NO: 37008 - DNA, 20 bp, synthetic construct
  source 1..20: mol_type = other DNA
acataaaaagtttgcccatc

SEQ ID NO: 37009 - DNA, 20 bp, synthetic construct
  source 1..20: mol_type = other DNA
tacataaaaagtttgcccat

SEQ ID NO: 37010 - DNA, 20 bp, synthetic construct
  source 1..20: mol_type = other DNA
ttacataaaaagtttgccca

SEQ ID NO: 37011 - DNA, 20 bp, synthetic construct
  source 1..20: mol_type = other DNA
tttacataaaaagtttgccc

SEQ ID NO: 37012 - DNA, 20 bp, synthetic construct
  source 1..20: mol_type = other DNA
ctttacataaaaagtttgcc

SEQ ID NO: 37013 - DNA, 20 bp, synthetic construct
  source 1..20: mol_type = other DNA
actttacataaaaagtttgc

SEQ ID NO: 37014 - DNA, 20 bp, synthetic construct
  source 1..20: mol_type = other DNA
gactttacataaaaagtttg

SEQ ID NO: 37015 - DNA, 20 bp, synthetic construct
  source 1..20: mol_type = other DNA
agactttacataaaaagttt

SEQ ID NO: 37016 - DNA, 20 bp, synthetic construct
  source 1..20: mol_type = other DNA
gagactttacataaaaagtt

SEQ ID NO: 37017 - DNA, 20 bp, synthetic construct
  source 1..20: mol_type = other DNA
tgagactttacataaaaagt

SEQ ID NO: 37018 - DNA, 20 bp, synthetic construct
  source 1..20: mol_type = other DNA
ctgagactttacataaaaag

SEQ ID NO: 37019 - DNA, 20 bp, synthetic construct
  source 1..20: mol_type = other DNA
cctgagactttacataaaaa

SEQ ID NO: 37020 - DNA, 20 bp, synthetic construct
  source 1..20: mol_type = other DNA
acctgagactttacataaaa

SEQ ID NO: 37021 - DNA, 20 bp, synthetic construct
  source 1..20: mol_type = other DNA
tacctgagactttacataaa

SEQ ID NO: 37022 - DNA, 20 bp, synthetic construct
  source 1..20: mol_type = other DNA
ttacctgagactttacataa

SEQ ID NO: 37023 - DNA, 20 bp, synthetic construct
  source 1..20: mol_type = other DNA
attacctgagactttacata

SEQ ID NO: 37024 - DNA, 20 bp, synthetic construct
  source 1..20: mol_type = other DNA
tattacctgagactttacat

SEQ ID NO: 37025 - DNA, 20 bp, synthetic construct
  source 1..20: mol_type = other DNA
ttattacctgagactttaca

SEQ ID NO: 37026 - DNA, 20 bp, synthetic construct
  source 1..20: mol_type = other DNA
cttattacctgagactttac

SEQ ID NO: 37027 - DNA, 20 bp, synthetic construct
  source 1..20: mol_type = other DNA
acttattacctgagacttta

SEQ ID NO: 37028 - DNA, 20 bp, synthetic construct
  source 1..20: mol_type = other DNA
tacttattacctgagacttt

SEQ ID NO: 37029 - DNA, 20 bp, synthetic construct
  source 1..20: mol_type = other DNA
atacttattacctgagactt

SEQ ID NO: 37030 - DNA, 20 bp, synthetic construct
  source 1..20: mol_type = other DNA
aatacttattacctgagact

SEQ ID NO: 37031 - DNA, 20 bp, synthetic construct
  source 1..20: mol_type = other DNA
aaatacttattacctgagac

SEQ ID NO: 37032 - DNA, 20 bp, synthetic construct
  source 1..20: mol_type = other DNA
aaaatacttattacctgaga

SEQ ID NO: 37033 - DNA, 20 bp, synthetic construct
  source 1..20: mol_type = other DNA
taaaatacttattacctgag

SEQ ID NO: 37034 - DNA, 20 bp, synthetic construct
  source 1..20: mol_type = other DNA
ctaaaatacttattacctga

SEQ ID NO: 37035 - DNA, 20 bp, synthetic construct
  source 1..20: mol_type = other DNA
cctaaaatacttattacctg

SEQ ID NO: 37036 - DNA, 20 bp, synthetic construct
  source 1..20: mol_type = other DNA
gcctaaaatacttattacct

SEQ ID NO: 37037 - DNA, 20 bp, synthetic construct
  source 1..20: mol_type = other DNA
agcctaaaatacttattacc

SEQ ID NO: 37038 - DNA, 20 bp, synthetic construct
  source 1..20: mol_type = other DNA
gagcctaaaatacttattac

SEQ ID NO: 37039 - DNA, 20 bp, synthetic construct
  source 1..20: mol_type = other DNA
agagcctaaaatacttatta

SEQ ID NO: 37040 - DNA, 20 bp, synthetic construct
  source 1..20: mol_type = other DNA
tagagcctaaaatacttatt

SEQ ID NO: 37041 - DNA, 20 bp, synthetic construct
  source 1..20: mol_type = other DNA
ctagagcctaaaatacttat

SEQ ID NO: 37042 - DNA, 20 bp, synthetic construct
  source 1..20: mol_type = other DNA
cctagagcctaaaatactta

SEQ ID NO: 37043 - DNA, 20 bp, synthetic construct
  source 1..20: mol_type = other DNA
ccctagagcctaaaatactt

SEQ ID NO: 37044 - DNA, 20 bp, synthetic construct
  source 1..20: mol_type = other DNA
gccctagagcctaaaatact

SEQ ID NO: 37045 - DNA, 20 bp, synthetic construct
  source 1..20: mol_type = other DNA
ggccctagagcctaaaatac

SEQ ID NO: 37046 - DNA, 20 bp, synthetic construct
  source 1..20: mol_type = other DNA
tggccctagagcctaaaata

SEQ ID NO: 37047 - DNA, 20 bp, synthetic construct
  source 1..20: mol_type = other DNA
atggccctagagcctaaaat

SEQ ID NO: 37048 - DNA, 20 bp, synthetic construct
  source 1..20: mol_type = other DNA
tatggccctagagcctaaaa

SEQ ID NO: 37049 - DNA, 20 bp, synthetic construct
  source 1..20: mol_type = other DNA
atatggccctagagcctaaa

SEQ ID NO: 37050 - DNA, 20 bp, synthetic construct
  source 1..20: mol_type = other DNA
tatatggccctagagcctaa

SEQ ID NO: 37051 - DNA, 20 bp, synthetic construct
  source 1..20: mol_type = other DNA
ctatatggccctagagccta

SEQ ID NO: 37052 - DNA, 20 bp, synthetic construct
  source 1..20: mol_type = other DNA
gctatatggccctagagcct

SEQ ID NO: 37053 - DNA, 20 bp, synthetic construct
  source 1..20: mol_type = other DNA
agctatatggccctagagcc

SEQ ID NO: 37054 - DNA, 20 bp, synthetic construct
  source 1..20: mol_type = other DNA
aagctatatggccctagagc

SEQ ID NO: 37055 - DNA, 20 bp, synthetic construct
  source 1..20: mol_type = other DNA
gaagctatatggccctagag

SEQ ID NO: 37056 - DNA, 20 bp, synthetic construct
  source 1..20: mol_type = other DNA
agaagctatatggccctaga

SEQ ID NO: 37057 - DNA, 20 bp, synthetic construct
  source 1..20: mol_type = other DNA
gagaagctatatggccctag

SEQ ID NO: 37058 - DNA, 20 bp, synthetic construct
  source 1..20: mol_type = other DNA
agagaagctatatggcccta

SEQ ID NO: 37059 - DNA, 20 bp, synthetic construct
  source 1..20: mol_type = other DNA
cagagaagctatatggccct

SEQ ID NO: 37060 - DNA, 20 bp, synthetic construct
  source 1..20: mol_type = other DNA
acagagaagctatatggccc

SEQ ID NO: 37061 - DNA, 20 bp, synthetic construct
  source 1..20: mol_type = other DNA
aacagagaagctatatggcc

SEQ ID NO: 37062 - DNA, 20 bp, synthetic construct
  source 1..20: mol_type = other DNA
caacagagaagctatatggc

SEQ ID NO: 37063 - DNA, 20 bp, synthetic construct
  source 1..20: mol_type = other DNA
gcaacagagaagctatatgg

SEQ ID NO: 37064 - DNA, 20 bp, synthetic construct
  source 1..20: mol_type = other DNA
tgcaacagagaagctatatg

SEQ ID NO: 37065 - DNA, 20 bp, synthetic construct
  source 1..20: mol_type = other DNA
atgcaacagagaagctatat

SEQ ID NO: 37066 - DNA, 20 bp, synthetic construct
  source 1..20: mol_type = other DNA
tatgcaacagagaagctata

SEQ ID NO: 37067 - DNA, 20 bp, synthetic construct
  source 1..20: mol_type = other DNA
atatgcaacagagaagctat

SEQ ID NO: 37068 - DNA, 20 bp, synthetic construct
  source 1..20: mol_type = other DNA
gatatgcaacagagaagcta

SEQ ID NO: 37069 - DNA, 20 bp, synthetic construct
  source 1..20: mol_type = other DNA
ggatatgcaacagagaagct

SEQ ID NO: 37070 - DNA, 20 bp, synthetic construct
  source 1..20: mol_type = other DNA
aggatatgcaacagagaagc

SEQ ID NO: 37071 - DNA, 20 bp, synthetic construct
  source 1..20: mol_type = other DNA
aaggatatgcaacagagaag

SEQ ID NO: 37072 - DNA, 20 bp, synthetic construct
  source 1..20: mol_type = other DNA
aaaggatatgcaacagagaa

SEQ ID NO: 37073 - DNA, 20 bp, synthetic construct
  source 1..20: mol_type = other DNA
aaaaggatatgcaacagaga

SEQ ID NO: 37074 - DNA, 20 bp, synthetic construct
  source 1..20: mol_type = other DNA
aaaaaggatatgcaacagag

SEQ ID NO: 37075 - DNA, 20 bp, synthetic construct
  source 1..20: mol_type = other DNA
aaaaaaggatatgcaacaga

SEQ ID NO: 37076 - DNA, 20 bp, synthetic construct
  source 1..20: mol_type = other DNA
aaaaaaaggatatgcaacag

SEQ ID NO: 37077 - DNA, 20 bp, synthetic construct
  source 1..20: mol_type = other DNA
aaaaaaaaggatatgcaaca

SEQ ID NO: 37078 - DNA, 20 bp, synthetic construct
  source 1..20: mol_type = other DNA
aaaaaaaaaggatatgcaac

SEQ ID NO: 37079 - DNA, 20 bp, synthetic construct
  source 1..20: mol_type = other DNA
aaaaaaaaaaggatatgcaa

SEQ ID NO: 37080 - DNA, 20 bp, synthetic construct
  source 1..20: mol_type = other DNA
aaaaaaaaaaaggatatgca

SEQ ID NO: 37081 - DNA, 20 bp, synthetic construct
  source 1..20: mol_type = other DNA
aaaaaaaaaaaaggatatgc

SEQ ID NO: 37082 - DNA, 20 bp, synthetic construct
  source 1..20: mol_type = other DNA
aaaaaaaaaaaaaggatatg

SEQ ID NO: 37083 - DNA, 20 bp, synthetic construct
  source 1..20: mol_type = other DNA
gaaaaaaaaaaaaaggatat

SEQ ID NO: 37084 - DNA, 20 bp, synthetic construct
  source 1..20: mol_type = other DNA
ggaaaaaaaaaaaaaggata

SEQ ID NO: 37085 - DNA, 20 bp, synthetic construct
  source 1..20: mol_type = other DNA
tggaaaaaaaaaaaaaggat

SEQ ID NO: 37086 - DNA, 20 bp, synthetic construct
  source 1..20: mol_type = other DNA
atggaaaaaaaaaaaaagga

SEQ ID NO: 37087 - DNA, 20 bp, synthetic construct
  source 1..20: mol_type = other DNA
aatggaaaaaaaaaaaaagg

SEQ ID NO: 37088 - DNA, 20 bp, synthetic construct
  source 1..20: mol_type = other DNA
aaatggaaaaaaaaaaaaag

SEQ ID NO: 37089 - DNA, 20 bp, synthetic construct
  source 1..20: mol_type = other DNA
gaaatggaaaaaaaaaaaaa

SEQ ID NO: 37090 - DNA, 20 bp, synthetic construct
  source 1..20: mol_type = other DNA
ggaaatggaaaaaaaaaaaa

SEQ ID NO: 37091 - DNA, 20 bp, synthetic construct
  source 1..20: mol_type = other DNA
gggaaatggaaaaaaaaaaa

SEQ ID NO: 37092 - DNA, 20 bp, synthetic construct
  source 1..20: mol_type = other DNA
ggggaaatggaaaaaaaaaa

SEQ ID NO: 37093 - DNA, 20 bp, synthetic construct
  source 1..20: mol_type = other DNA
aggggaaatggaaaaaaaaa

SEQ ID NO: 37094 - DNA, 20 bp, synthetic construct
  source 1..20: mol_type = other DNA
gaggggaaatggaaaaaaaa

SEQ ID NO: 37095 - DNA, 20 bp, synthetic construct
  source 1..20: mol_type = other DNA
tgaggggaaatggaaaaaaa

SEQ ID NO: 37096 - DNA, 20 bp, synthetic construct
  source 1..20: mol_type = other DNA
ttgaggggaaatggaaaaaa

SEQ ID NO: 37097 - DNA, 20 bp, synthetic construct
  source 1..20: mol_type = other DNA
tttgaggggaaatggaaaaa

SEQ ID NO: 37098 - DNA, 20 bp, synthetic construct
  source 1..20: mol_type = other DNA
atttgaggggaaatggaaaa

SEQ ID NO: 37099 - DNA, 20 bp, synthetic construct
  source 1..20: mol_type = other DNA
aatttgaggggaaatggaaa

SEQ ID NO: 37100 - DNA, 20 bp, synthetic construct
  source 1..20: mol_type = other DNA
gaatttgaggggaaatggaa

SEQ ID NO: 37101 - DNA, 20 bp, synthetic construct
  source 1..20: mol_type = other DNA
ggaatttgaggggaaatgga

SEQ ID NO: 37102 - DNA, 20 bp, synthetic construct
  source 1..20: mol_type = other DNA
aggaatttgaggggaaatgg

SEQ ID NO: 37103 - DNA, 20 bp, synthetic construct
  source 1..20: mol_type = other DNA
aaggaatttgaggggaaatg

SEQ ID NO: 37104 - DNA, 20 bp, synthetic construct
  source 1..20: mol_type = other DNA
aaaggaatttgaggggaaat

SEQ ID NO: 37105 - DNA, 20 bp, synthetic construct
  source 1..20: mol_type = other DNA
aaaaggaatttgaggggaaa

SEQ ID NO: 37106 - DNA, 20 bp, synthetic construct
  source 1..20: mol_type = other DNA
taaaaggaatttgaggggaa

SEQ ID NO: 37107 - DNA, 20 bp, synthetic construct
  source 1..20: mol_type = other DNA
gtaaaaggaatttgagggga

SEQ ID NO: 37108 - DNA, 20 bp, synthetic construct
  source 1..20: mol_type = other DNA
ggtaaaaggaatttgagggg

SEQ ID NO: 37109 - DNA, 20 bp, synthetic construct
  source 1..20: mol_type = other DNA
tggtaaaaggaatttgaggg

SEQ ID NO: 37110 - DNA, 20 bp, synthetic construct
  source 1..20: mol_type = other DNA
atggtaaaaggaatttgagg

SEQ ID NO: 37111 - DNA, 20 bp, synthetic construct
  source 1..20: mol_type = other DNA
tatggtaaaaggaatttgag

SEQ ID NO: 37112 - DNA, 20 bp, synthetic construct
  source 1..20: mol_type = other DNA
ttatggtaaaaggaatttga

SEQ ID NO: 37113 - DNA, 20 bp, synthetic construct
  source 1..20: mol_type = other DNA
cttatggtaaaaggaatttg

SEQ ID NO: 37114 - DNA, 20 bp, synthetic construct
  source 1..20: mol_type = other DNA
gcttatggtaaaaggaattt

SEQ ID NO: 37115 - DNA, 20 bp, synthetic construct
  source 1..20: mol_type = other DNA
tgcttatggtaaaaggaatt

SEQ ID NO: 37116 - DNA, 20 bp, synthetic construct
  source 1..20: mol_type = other DNA
ttgcttatggtaaaaggaat

SEQ ID NO: 37117 - DNA, 20 bp, synthetic construct
  source 1..20: mol_type = other DNA
gttgcttatggtaaaaggaa

SEQ ID NO: 37118 - DNA, 20 bp, synthetic construct
  source 1..20: mol_type = other DNA
agttgcttatggtaaaagga

SEQ ID NO: 37119 - DNA, 20 bp, synthetic construct
  source 1..20: mol_type = other DNA
gagttgcttatggtaaaagg

SEQ ID NO: 37120 - DNA, 20 bp, synthetic construct
  source 1..20: mol_type = other DNA
agagttgcttatggtaaaag

SEQ ID NO: 37121 - DNA, 20 bp, synthetic construct
  source 1..20: mol_type = other DNA
aagagttgcttatggtaaaa

SEQ ID NO: 37122 - DNA, 20 bp, synthetic construct
  source 1..20: mol_type = other DNA
caagagttgcttatggtaaa

SEQ ID NO: 37123 - DNA, 20 bp, synthetic construct
  source 1..20: mol_type = other DNA
tcaagagttgcttatggtaa

SEQ ID NO: 37124 - DNA, 20 bp, synthetic construct
  source 1..20: mol_type = other DNA
ctcaagagttgcttatggta

SEQ ID NO: 37125 - DNA, 20 bp, synthetic construct
  source 1..20: mol_type = other DNA
cctcaagagttgcttatggt

SEQ ID NO: 37126 - DNA, 20 bp, synthetic construct
  source 1..20: mol_type = other DNA
tcctcaagagttgcttatgg

SEQ ID NO: 37127 - DNA, 20 bp, synthetic construct
  source 1..20: mol_type = other DNA
ttcctcaagagttgcttatg

SEQ ID NO: 37128 - DNA, 20 bp, synthetic construct
  source 1..20: mol_type = other DNA
gttcctcaagagttgcttat

SEQ ID NO: 37129 - DNA, 20 bp, synthetic construct
  source 1..20: mol_type = other DNA
tgttcctcaagagttgctta

SEQ ID NO: 37130 - DNA, 20 bp, synthetic construct
  source 1..20: mol_type = other DNA
atgttcctcaagagttgctt

SEQ ID NO: 37131 - DNA, 20 bp, synthetic construct
  source 1..20: mol_type = other DNA
tatgttcctcaagagttgct

SEQ ID NO: 37132 - DNA, 20 bp, synthetic construct
  source 1..20: mol_type = other DNA
ttatgttcctcaagagttgc

SEQ ID NO: 37133 - DNA, 20 bp, synthetic construct
  source 1..20: mol_type = other DNA
tttatgttcctcaagagttg

SEQ ID NO: 37134 - DNA, 20 bp, synthetic construct
  source 1..20: mol_type = other DNA
ttttatgttcctcaagagtt

SEQ ID NO: 37135 - DNA, 20 bp, synthetic construct
  source 1..20: mol_type = other DNA
tttttatgttcctcaagagt

SEQ ID NO: 37136 - DNA, 20 bp, synthetic construct
  source 1..20: mol_type = other DNA
atttttatgttcctcaagag

SEQ ID NO: 37137 - DNA, 20 bp, synthetic construct
  source 1..20: mol_type = other DNA
gatttttatgttcctcaaga

SEQ ID NO: 37138 - DNA, 20 bp, synthetic construct
  source 1..20: mol_type = other DNA
tgatttttatgttcctcaag

SEQ ID NO: 37139 - DNA, 20 bp, synthetic construct
  source 1..20: mol_type = other DNA
atgatttttatgttcctcaa

SEQ ID NO: 37140 - DNA, 20 bp, synthetic construct
  source 1..20: mol_type = other DNA
aatgatttttatgttcctca

SEQ ID NO: 37141 - DNA, 20 bp, synthetic construct
  source 1..20: mol_type = other DNA
gaatgatttttatgttcctc

SEQ ID NO: 37142 - DNA, 20 bp, synthetic construct
  source 1..20: mol_type = other DNA
agaatgatttttatgttcct

SEQ ID NO: 37143 - DNA, 20 bp, synthetic construct
  source 1..20: mol_type = other DNA
aagaatgatttttatgttcc

SEQ ID NO: 37144 - DNA, 20 bp, synthetic construct
  source 1..20: mol_type = other DNA
taagaatgatttttatgttc

SEQ ID NO: 37145 - DNA, 20 bp, synthetic construct
  source 1..20: mol_type = other DNA
ctaagaatgatttttatgtt

SEQ ID NO: 37146 - DNA, 20 bp, synthetic construct
  source 1..20: mol_type = other DNA
gctaagaatgatttttatgt

SEQ ID NO: 37147 - DNA, 20 bp, synthetic construct
  source 1..20: mol_type = other DNA
ggctaagaatgatttttatg

SEQ ID NO: 37148 - DNA, 20 bp, synthetic construct
  source 1..20: mol_type = other DNA
gggctaagaatgatttttat

SEQ ID NO: 37149 - DNA, 20 bp, synthetic construct
  source 1..20: mol_type = other DNA
tgggctaagaatgattttta

SEQ ID NO: 37150 - DNA, 20 bp, synthetic construct
  source 1..20: mol_type = other DNA
ctgggctaagaatgattttt

SEQ ID NO: 37151 - DNA, 20 bp, synthetic construct
  source 1..20: mol_type = other DNA
tctgggctaagaatgatttt

SEQ ID NO: 37152 - DNA, 20 bp, synthetic construct
  source 1..20: mol_type = other DNA
ttctgggctaagaatgattt

SEQ ID NO: 37153 - DNA, 20 bp, synthetic construct
  source 1..20: mol_type = other DNA
cttctgggctaagaatgatt

SEQ ID NO: 37154 - DNA, 20 bp, synthetic construct
  source 1..20: mol_type = other DNA
gcttctgggctaagaatgat

SEQ ID NO: 37155 - DNA, 20 bp, synthetic construct
  source 1..20: mol_type = other DNA
ggcttctgggctaagaatga

SEQ ID NO: 37156 - DNA, 20 bp, synthetic construct
  source 1..20: mol_type = other DNA
tggcttctgggctaagaatg

SEQ ID NO: 37157 - DNA, 20 bp, synthetic construct
  source 1..20: mol_type = other DNA
ctggcttctgggctaagaat

SEQ ID NO: 37158 - DNA, 20 bp, synthetic construct
  source 1..20: mol_type = other DNA
tctggcttctgggctaagaa

SEQ ID NO: 37159 - DNA, 20 bp, synthetic construct
  source 1..20: mol_type = other DNA
gtctggcttctgggctaaga

SEQ ID NO: 37160 - DNA, 20 bp, synthetic construct
  source 1..20: mol_type = other DNA
ggtctggcttctgggctaag

SEQ ID NO: 37161 - DNA, 20 bp, synthetic construct
  source 1..20: mol_type = other DNA
tggtctggcttctgggctaa

SEQ ID NO: 37162 - DNA, 20 bp, synthetic construct
  source 1..20: mol_type = other DNA
ttggtctggcttctgggcta

SEQ ID NO: 37163 - DNA, 20 bp, synthetic construct
  source 1..20: mol_type = other DNA
tttggtctggcttctgggct

SEQ ID NO: 37164 - DNA, 20 bp, synthetic construct
  source 1..20: mol_type = other DNA
ttttggtctggcttctgggc

SEQ ID NO: 37165 - DNA, 20 bp, synthetic construct
  source 1..20: mol_type = other DNA
gttttggtctggcttctggg

SEQ ID NO: 37166 - DNA, 20 bp, synthetic construct
  source 1..20: mol_type = other DNA
tgttttggtctggcttctgg

SEQ ID NO: 37167 - DNA, 20 bp, synthetic construct
  source 1..20: mol_type = other DNA
ctgttttggtctggcttctg

SEQ ID NO: 37168 - DNA, 20 bp, synthetic construct
  source 1..20: mol_type = other DNA
cctgttttggtctggcttct

SEQ ID NO: 37169 - DNA, 20 bp, synthetic construct
  source 1..20: mol_type = other DNA
acctgttttggtctggcttc

SEQ ID NO: 37170 - DNA, 20 bp, synthetic construct
  source 1..20: mol_type = other DNA
aacctgttttggtctggctt

SEQ ID NO: 37171 - DNA, 20 bp, synthetic construct
  source 1..20: mol_type = other DNA
caacctgttttggtctggct

SEQ ID NO: 37172 - DNA, 20 bp, synthetic construct
  source 1..20: mol_type = other DNA
acaacctgttttggtctggc

SEQ ID NO: 37173 - DNA, 20 bp, synthetic construct
  source 1..20: mol_type = other DNA
cacaacctgttttggtctgg

SEQ ID NO: 37174 - DNA, 20 bp, synthetic construct
  source 1..20: mol_type = other DNA
ccacaacctgttttggtctg

SEQ ID NO: 37175 - DNA, 20 bp, synthetic construct
  source 1..20: mol_type = other DNA
cccacaacctgttttggtct

SEQ ID NO: 37176 - DNA, 20 bp, synthetic construct
  source 1..20: mol_type = other DNA
gcccacaacctgttttggtc

SEQ ID NO: 37177 - DNA, 20 bp, synthetic construct
  source 1..20: mol_type = other DNA
agcccacaacctgttttggt

SEQ ID NO: 37178 - DNA, 20 bp, synthetic construct
  source 1..20: mol_type = other DNA
cagcccacaacctgttttgg

SEQ ID NO: 37179 - DNA, 20 bp, synthetic construct
  source 1..20: mol_type = other DNA
acagcccacaacctgttttg

SEQ ID NO: 37180 - DNA, 20 bp, synthetic construct
  source 1..20: mol_type = other DNA
tacagcccacaacctgtttt

SEQ ID NO: 37181 - DNA, 20 bp, synthetic construct
  source 1..20: mol_type = other DNA
ctacagcccacaacctgttt

SEQ ID NO: 37182 - DNA, 20 bp, synthetic construct
  source 1..20: mol_type = other DNA
actacagcccacaacctgtt

SEQ ID NO: 37183 - DNA, 20 bp, synthetic construct
  source 1..20: mol_type = other DNA
cactacagcccacaacctgt

SEQ ID NO: 37184 - DNA, 20 bp, synthetic construct
  source 1..20: mol_type = other DNA
acactacagcccacaacctg

SEQ ID NO: 37185 - DNA, 20 bp, synthetic construct
  source 1..20: mol_type = other DNA
gacactacagcccacaacct

SEQ ID NO: 37186 - DNA, 20 bp, synthetic construct
  source 1..20: mol_type = other DNA
ggacactacagcccacaacc

SEQ ID NO: 37187 - DNA, 20 bp, synthetic construct
  source 1..20: mol_type = other DNA
aggacactacagcccacaac

SEQ ID NO: 37188 - DNA, 20 bp, synthetic construct
  source 1..20: mol_type = other DNA
caggacactacagcccacaa

SEQ ID NO: 37189 - DNA, 20 bp, synthetic construct
  source 1..20: mol_type = other DNA
tcaggacactacagcccaca

SEQ ID NO: 37190 - DNA, 20 bp, synthetic construct
  source 1..20: mol_type = other DNA
gtcaggacactacagcccac

SEQ ID NO: 37191 - DNA, 20 bp, synthetic construct
  source 1..20: mol_type = other DNA
ggtcaggacactacagccca

SEQ ID NO: 37192 - DNA, 20 bp, synthetic construct
  source 1..20: mol_type = other DNA
gggtcaggacactacagccc

SEQ ID NO: 37193 - DNA, 20 bp, synthetic construct
  source 1..20: mol_type = other DNA
ggggtcaggacactacagcc

SEQ ID NO: 37194 - DNA, 20 bp, synthetic construct
  source 1..20: mol_type = other DNA
aggggtcaggacactacagc

SEQ ID NO: 37195 - DNA, 20 bp, synthetic construct
  source 1..20: mol_type = other DNA
caggggtcaggacactacag

SEQ ID NO: 37196 - DNA, 20 bp, synthetic construct
  source 1..20: mol_type = other DNA
tcaggggtcaggacactaca

SEQ ID NO: 37197 - DNA, 20 bp, synthetic construct
  source 1..20: mol_type = other DNA
atcaggggtcaggacactac

SEQ ID NO: 37198 - DNA, 20 bp, synthetic construct
  source 1..20: mol_type = other DNA
aatcaggggtcaggacacta

SEQ ID NO: 37199 - DNA, 20 bp, synthetic construct
  source 1..20: mol_type = other DNA
aaatcaggggtcaggacact

SEQ ID NO: 37200 - DNA, 20 bp, synthetic construct
  source 1..20: mol_type = other DNA
taaatcaggggtcaggacac

SEQ ID NO: 37201 - DNA, 20 bp, synthetic construct
  source 1..20: mol_type = other DNA
ttaaatcaggggtcaggaca

SEQ ID NO: 37202 - DNA, 20 bp, synthetic construct
  source 1..20: mol_type = other DNA
tttaaatcaggggtcaggac

SEQ ID NO: 37203 - DNA, 20 bp, synthetic construct
  source 1..20: mol_type = other DNA
ctttaaatcaggggtcagga

SEQ ID NO: 37204 - DNA, 20 bp, synthetic construct
  source 1..20: mol_type = other DNA
tctttaaatcaggggtcagg

SEQ ID NO: 37205 - DNA, 20 bp, synthetic construct
  source 1..20: mol_type = other DNA
atctttaaatcaggggtcag

SEQ ID NO: 37206 - DNA, 20 bp, synthetic construct
  source 1..20: mol_type = other DNA
aatctttaaatcaggggtca

SEQ ID NO: 37207 - DNA, 20 bp, synthetic construct
  source 1..20: mol_type = other DNA
caatctttaaatcaggggtc

SEQ ID NO: 37208 - DNA, 20 bp, synthetic construct
  source 1..20: mol_type = other DNA
tcaatctttaaatcaggggt

SEQ ID NO: 37209 - DNA, 20 bp, synthetic construct
  source 1..20: mol_type = other DNA
atcaatctttaaatcagggg

SEQ ID NO: 37210 - DNA, 20 bp, synthetic construct
  source 1..20: mol_type = other DNA
tatcaatctttaaatcaggg

SEQ ID NO: 37211 - DNA, 20 bp, synthetic construct
  source 1..20: mol_type = other DNA
ctatcaatctttaaatcagg

SEQ ID NO: 37212 - DNA, 20 bp, synthetic construct
  source 1..20: mol_type = other DNA
gctatcaatctttaaatcag

SEQ ID NO: 37213 - DNA, 20 bp, synthetic construct
  source 1..20: mol_type = other DNA
agctatcaatctttaaatca

SEQ ID NO: 37214 - DNA, 20 bp, synthetic construct
  source 1..20: mol_type = other DNA
aagctatcaatctttaaatc

SEQ ID NO: 37215 - DNA, 20 bp, synthetic construct
  source 1..20: mol_type = other DNA
aaagctatcaatctttaaat

SEQ ID NO: 37216 - DNA, 20 bp, synthetic construct
  source 1..20: mol_type = other DNA
caaagctatcaatctttaaa

SEQ ID NO: 37217 - DNA, 20 bp, synthetic construct
  source 1..20: mol_type = other DNA
tcaaagctatcaatctttaa

SEQ ID NO: 37218 - DNA, 20 bp, synthetic construct
  source 1..20: mol_type = other DNA
ttcaaagctatcaatcttta

SEQ ID NO: 37219 - DNA, 20 bp, synthetic construct
  source 1..20: mol_type = other DNA
tttcaaagctatcaatcttt

SEQ ID NO: 37220 - DNA, 20 bp, synthetic construct
  source 1..20: mol_type = other DNA
atttcaaagctatcaatctt

SEQ ID NO: 37221 - DNA, 20 bp, synthetic construct
  source 1..20: mol_type = other DNA
catttcaaagctatcaatct

SEQ ID NO: 37222 - DNA, 20 bp, synthetic construct
  source 1..20: mol_type = other DNA
ccatttcaaagctatcaatc

SEQ ID NO: 37223 - DNA, 20 bp, synthetic construct
  source 1..20: mol_type = other DNA
tccatttcaaagctatcaat

SEQ ID NO: 37224 - DNA, 20 bp, synthetic construct
  source 1..20: mol_type = other DNA
ttccatttcaaagctatcaa

SEQ ID NO: 37225 - DNA, 20 bp, synthetic construct
  source 1..20: mol_type = other DNA
tttccatttcaaagctatca

SEQ ID NO: 37226 - DNA, 20 bp, synthetic construct
  source 1..20: mol_type = other DNA
ctttccatttcaaagctatc

SEQ ID NO: 37227 - DNA, 20 bp, synthetic construct
  source 1..20: mol_type = other DNA
actttccatttcaaagctat

SEQ ID NO: 37228 - DNA, 20 bp, synthetic construct
  source 1..20: mol_type = other DNA
aactttccatttcaaagcta

SEQ ID NO: 37229 - DNA, 20 bp, synthetic construct
  source 1..20: mol_type = other DNA
aaactttccatttcaaagct

SEQ ID NO: 37230 - DNA, 20 bp, synthetic construct
  source 1..20: mol_type = other DNA
aaaactttccatttcaaagc

SEQ ID NO: 37231 - DNA, 20 bp, synthetic construct
  source 1..20: mol_type = other DNA
taaaactttccatttcaaag

SEQ ID NO: 37232 - DNA, 20 bp, synthetic construct
  source 1..20: mol_type = other DNA
ttaaaactttccatttcaaa

SEQ ID NO: 37233 - DNA, 20 bp, synthetic construct
  source 1..20: mol_type = other DNA
gttaaaactttccatttcaa

SEQ ID NO: 37234 - DNA, 20 bp, synthetic construct
  source 1..20: mol_type = other DNA
agttaaaactttccatttca

SEQ ID NO: 37235 - DNA, 20 bp, synthetic construct
  source 1..20: mol_type = other DNA
aagttaaaactttccatttc

SEQ ID NO: 37236 - DNA, 20 bp, synthetic construct
  source 1..20: mol_type = other DNA
aaagttaaaactttccattt

SEQ ID NO: 37237 - DNA, 20 bp, synthetic construct
  source 1..20: mol_type = other DNA
gaaagttaaaactttccatt

SEQ ID NO: 37238 - DNA, 20 bp, synthetic construct
  source 1..20: mol_type = other DNA
agaaagttaaaactttccat

SEQ ID NO: 37239 - DNA, 20 bp, synthetic construct
  source 1..20: mol_type = other DNA
aagaaagttaaaactttcca

SEQ ID NO: 37240 - DNA, 20 bp, synthetic construct
  source 1..20: mol_type = other DNA
aaagaaagttaaaactttcc

SEQ ID NO: 37241 - DNA, 20 bp, synthetic construct
  source 1..20: mol_type = other DNA
aaaagaaagttaaaactttc

SEQ ID NO: 37242 - DNA, 20 bp, synthetic construct
  source 1..20: mol_type = other DNA
aaaaagaaagttaaaacttt

SEQ ID NO: 37243 - DNA, 20 bp, synthetic construct
  source 1..20: mol_type = other DNA
aaaaaagaaagttaaaactt

SEQ ID NO: 37244 - DNA, 20 bp, synthetic construct
  source 1..20: mol_type = other DNA
aaaaaaagaaagttaaaact

SEQ ID NO: 37245 - DNA, 20 bp, synthetic construct
  source 1..20: mol_type = other DNA
aaaaaaaagaaagttaaaac

SEQ ID NO: 37246 - DNA, 20 bp, synthetic construct
  source 1..20: mol_type = other DNA
aaaaaaaaagaaagttaaaa

SEQ ID NO: 37247 - DNA, 20 bp, synthetic construct
  source 1..20: mol_type = other DNA
gaaaaaaaaagaaagttaaa

SEQ ID NO: 37248 - DNA, 20 bp, synthetic construct
  source 1..20: mol_type = other DNA
agaaaaaaaaagaaagttaa

SEQ ID NO: 37249 - DNA, 20 bp, synthetic construct
  source 1..20: mol_type = other DNA
aagaaaaaaaaagaaagtta

SEQ ID NO: 37250 - DNA, 20 bp, synthetic construct
  source 1..20: mol_type = other DNA
aaagaaaaaaaaagaaagtt

SEQ ID NO: 37251 - DNA, 20 bp, synthetic construct
  source 1..20: mol_type = other DNA
gaaagaaaaaaaaagaaagt

SEQ ID NO: 37252 - DNA, 20 bp, synthetic construct
  source 1..20: mol_type = other DNA
ggaaagaaaaaaaaagaaag

SEQ ID NO: 37253 - DNA, 20 bp, synthetic construct
  source 1..20: mol_type = other DNA
gggaaagaaaaaaaaagaaa

SEQ ID NO: 37254 - DNA, 20 bp, synthetic construct
  source 1..20: mol_type = other DNA
agggaaagaaaaaaaaagaa

SEQ ID NO: 37255 - DNA, 20 bp, synthetic construct
  source 1..20: mol_type = other DNA
aagggaaagaaaaaaaaaga

SEQ ID NO: 37256 - DNA, 20 bp, synthetic construct
  source 1..20: mol_type = other DNA
caagggaaagaaaaaaaaag

SEQ ID NO: 37257 - DNA, 20 bp, synthetic construct
  source 1..20: mol_type = other DNA
acaagggaaagaaaaaaaaa

SEQ ID NO: 37258 - DNA, 20 bp, synthetic construct
  source 1..20: mol_type = other DNA
aacaagggaaagaaaaaaaa

SEQ ID NO: 37259 - DNA, 20 bp, synthetic construct
  source 1..20: mol_type = other DNA
gaacaagggaaagaaaaaaa

SEQ ID NO: 37260 - DNA, 20 bp, synthetic construct
  source 1..20: mol_type = other DNA
agaacaagggaaagaaaaaa

SEQ ID NO: 37261 - DNA, 20 bp, synthetic construct
  source 1..20: mol_type = other DNA
cagaacaagggaaagaaaaa

SEQ ID NO: 37262 - DNA, 20 bp, synthetic construct
  source 1..20: mol_type = other DNA
tcagaacaagggaaagaaaa

SEQ ID NO: 37263 - DNA, 20 bp, synthetic construct
  source 1..20: mol_type = other DNA
atcagaacaagggaaagaaa

SEQ ID NO: 37264 - DNA, 20 bp, synthetic construct
  source 1..20: mol_type = other DNA
aatcagaacaagggaaagaa

SEQ ID NO: 37265 - DNA, 20 bp, synthetic construct
  source 1..20: mol_type = other DNA
caatcagaacaagggaaaga

SEQ ID NO: 37266 - DNA, 20 bp, synthetic construct
  source 1..20: mol_type = other DNA
ccaatcagaacaagggaaag

SEQ ID NO: 37267 - DNA, 20 bp, synthetic construct
  source 1..20: mol_type = other DNA
cccaatcagaacaagggaaa

SEQ ID NO: 37268 - DNA, 20 bp, synthetic construct
  source 1..20: mol_type = other DNA
gcccaatcagaacaagggaa

SEQ ID NO: 37269 - DNA, 20 bp, synthetic construct
  source 1..20: mol_type = other DNA
agcccaatcagaacaaggga

SEQ ID NO: 37270 - DNA, 20 bp, synthetic construct
  source 1..20: mol_type = other DNA
cagcccaatcagaacaaggg

SEQ ID NO: 37271 - DNA, 20 bp, synthetic construct
  source 1..20: mol_type = other DNA
acagcccaatcagaacaagg

SEQ ID NO: 37272 - DNA, 20 bp, synthetic construct
  source 1..20: mol_type = other DNA
aacagcccaatcagaacaag

SEQ ID NO: 37273 - DNA, 20 bp, synthetic construct
  source 1..20: mol_type = other DNA
taacagcccaatcagaacaa

SEQ ID NO: 37274 - DNA, 20 bp, synthetic construct
  source 1..20: mol_type = other DNA
ttaacagcccaatcagaaca

SEQ ID NO: 37275 - DNA, 20 bp, synthetic construct
  source 1..20: mol_type = other DNA
attaacagcccaatcagaac

SEQ ID NO: 37276 - DNA, 20 bp, synthetic construct
  source 1..20: mol_type = other DNA
aattaacagcccaatcagaa

SEQ ID NO: 37277 - DNA, 20 bp, synthetic construct
  source 1..20: mol_type = other DNA
gaattaacagcccaatcaga

SEQ ID NO: 37278 - DNA, 20 bp, synthetic construct
  source 1..20: mol_type = other DNA
tgaattaacagcccaatcag

SEQ ID NO: 37279 - DNA, 20 bp, synthetic construct
  source 1..20: mol_type = other DNA
atgaattaacagcccaatca

SEQ ID NO: 37280 - DNA, 20 bp, synthetic construct
  source 1..20: mol_type = other DNA
aatgaattaacagcccaatc

SEQ ID NO: 37281 - DNA, 20 bp, synthetic construct
  source 1..20: mol_type = other DNA
taatgaattaacagcccaat

SEQ ID NO: 37282 - DNA, 20 bp, synthetic construct
  source 1..20: mol_type = other DNA
ctaatgaattaacagcccaa

SEQ ID NO: 37283 - DNA, 20 bp, synthetic construct
  source 1..20: mol_type = other DNA
cctaatgaattaacagccca

SEQ ID NO: 37284 - DNA, 20 bp, synthetic construct
  source 1..20: mol_type = other DNA
acctaatgaattaacagccc

SEQ ID NO: 37285 - DNA, 20 bp, synthetic construct
  source 1..20: mol_type = other DNA
tacctaatgaattaacagcc

SEQ ID NO: 37286 - DNA, 20 bp, synthetic construct
  source 1..20: mol_type = other DNA
atacctaatgaattaacagc

SEQ ID NO: 37287 - DNA, 20 bp, synthetic construct
  source 1..20: mol_type = other DNA
aatacctaatgaattaacag

SEQ ID NO: 37288 - DNA, 20 bp, synthetic construct
  source 1..20: mol_type = other DNA
aaatacctaatgaattaaca

SEQ ID NO: 37289 - DNA, 20 bp, synthetic construct
  source 1..20: mol_type = other DNA
taaatacctaatgaattaac

SEQ ID NO: 37290 - DNA, 20 bp, synthetic construct
  source 1..20: mol_type = other DNA
gtaaatacctaatgaattaa

SEQ ID NO: 37291 - DNA, 20 bp, synthetic construct
  source 1..20: mol_type = other DNA
agtaaatacctaatgaatta

SEQ ID NO: 37292 - DNA, 20 bp, synthetic construct
  source 1..20: mol_type = other DNA
gagtaaatacctaatgaatt

SEQ ID NO: 37293 - DNA, 20 bp, synthetic construct
  source 1..20: mol_type = other DNA
tgagtaaatacctaatgaat

SEQ ID NO: 37294 - DNA, 20 bp, synthetic construct
  source 1..20: mol_type = other DNA
ctgagtaaatacctaatgaa

SEQ ID NO: 37295 - DNA, 20 bp, synthetic construct
  source 1..20: mol_type = other DNA
actgagtaaatacctaatga

SEQ ID NO: 37296 - DNA, 20 bp, synthetic construct
  source 1..20: mol_type = other DNA
cactgagtaaatacctaatg

SEQ ID NO: 37297 - DNA, 20 bp, synthetic construct
  source 1..20: mol_type = other DNA
acactgagtaaatacctaat

SEQ ID NO: 37298 - DNA, 20 bp, synthetic construct
  source 1..20: mol_type = other DNA
cacactgagtaaatacctaa

SEQ ID NO: 37299 - DNA, 20 bp, synthetic construct
  source 1..20: mol_type = other DNA
acacactgagtaaataccta

SEQ ID NO: 37300 - DNA, 20 bp, synthetic construct
  source 1..20: mol_type = other DNA
tacacactgagtaaatacct

SEQ ID NO: 37301 - DNA, 20 bp, synthetic construct
  source 1..20: mol_type = other DNA
atacacactgagtaaatacc

SEQ ID NO: 37302 - DNA, 20 bp, synthetic construct
  source 1..20: mol_type = other DNA
gatacacactgagtaaatac

SEQ ID NO: 37303 - DNA, 20 bp, synthetic construct
  source 1..20: mol_type = other DNA
tgatacacactgagtaaata

SEQ ID NO: 37304 - DNA, 20 bp, synthetic construct
  source 1..20: mol_type = other DNA
atgatacacactgagtaaat

SEQ ID NO: 37305 - DNA, 20 bp, synthetic construct
  source 1..20: mol_type = other DNA
tatgatacacactgagtaaa

SEQ ID NO: 37306 - DNA, 20 bp, synthetic construct
  source 1..20: mol_type = other DNA
atatgatacacactgagtaa

SEQ ID NO: 37307 - DNA, 20 bp, synthetic construct
  source 1..20: mol_type = other DNA
catatgatacacactgagta

SEQ ID NO: 37308 - DNA, 20 bp, synthetic construct
  source 1..20: mol_type = other DNA
tcatatgatacacactgagt

SEQ ID NO: 37309 - DNA, 20 bp, synthetic construct
  source 1..20: mol_type = other DNA
ctcatatgatacacactgag

SEQ ID NO: 37310 - DNA, 20 bp, synthetic construct
  source 1..20: mol_type = other DNA
cctcatatgatacacactga

SEQ ID NO: 37311 - DNA, 20 bp, synthetic construct
  source 1..20: mol_type = other DNA
gcctcatatgatacacactg

SEQ ID NO: 37312 - DNA, 20 bp, synthetic construct
  source 1..20: mol_type = other DNA
tgcctcatatgatacacact

SEQ ID NO: 37313 - DNA, 20 bp, synthetic construct
  source 1..20: mol_type = other DNA
atgcctcatatgatacacac

SEQ ID NO: 37314 - DNA, 20 bp, synthetic construct
  source 1..20: mol_type = other DNA
catgcctcatatgatacaca

SEQ ID NO: 37315 - DNA, 20 bp, synthetic construct
  source 1..20: mol_type = other DNA
tcatgcctcatatgatacac

SEQ ID NO: 37316 - DNA, 20 bp, synthetic construct
  source 1..20: mol_type = other DNA
atcatgcctcatatgataca

SEQ ID NO: 37317 - DNA, 20 bp, synthetic construct
  source 1..20: mol_type = other DNA
aatcatgcctcatatgatac

SEQ ID NO: 37318 - DNA, 20 bp, synthetic construct
  source 1..20: mol_type = other DNA
gaatcatgcctcatatgata

SEQ ID NO: 37319 - DNA, 20 bp, synthetic construct
  source 1..20: mol_type = other DNA
ggaatcatgcctcatatgat

SEQ ID NO: 37320 - DNA, 20 bp, synthetic construct
  source 1..20: mol_type = other DNA
aggaatcatgcctcatatga

SEQ ID NO: 37321 - DNA, 20 bp, synthetic construct
  source 1..20: mol_type = other DNA
gaggaatcatgcctcatatg

SEQ ID NO: 37322 - DNA, 20 bp, synthetic construct
  source 1..20: mol_type = other DNA
agaggaatcatgcctcatat

SEQ ID NO: 37323 - DNA, 20 bp, synthetic construct
  source 1..20: mol_type = other DNA
cagaggaatcatgcctcata

SEQ ID NO: 37324 - DNA, 20 bp, synthetic construct
  source 1..20: mol_type = other DNA
gcagaggaatcatgcctcat

SEQ ID NO: 37325 - DNA, 20 bp, synthetic construct
  source 1..20: mol_type = other DNA
agcagaggaatcatgcctca

SEQ ID NO: 37326 - DNA, 20 bp, synthetic construct
  source 1..20: mol_type = other DNA
tagcagaggaatcatgcctc

SEQ ID NO: 37327 - DNA, 20 bp, synthetic construct
  source 1..20: mol_type = other DNA
ttagcagaggaatcatgcct

SEQ ID NO: 37328 - DNA, 20 bp, synthetic construct
  source 1..20: mol_type = other DNA
attagcagaggaatcatgcc

SEQ ID NO: 37329 - DNA, 20 bp, synthetic construct
  source 1..20: mol_type = other DNA
aattagcagaggaatcatgc

SEQ ID NO: 37330 - DNA, 20 bp, synthetic construct
  source 1..20: mol_type = other DNA
aaattagcagaggaatcatg

SEQ ID NO: 37331 - DNA, 20 bp, synthetic construct
  source 1..20: mol_type = other DNA
aaaattagcagaggaatcat

SEQ ID NO: 37332 - DNA, 20 bp, synthetic construct
  source 1..20: mol_type = other DNA
caaaattagcagaggaatca

SEQ ID NO: 37333 - DNA, 20 bp, synthetic construct
  source 1..20: mol_type = other DNA
ccaaaattagcagaggaatc

SEQ ID NO: 37334 - DNA, 20 bp, synthetic construct
  source 1..20: mol_type = other DNA
accaaaattagcagaggaat

SEQ ID NO: 37335 - DNA, 20 bp, synthetic construct
  source 1..20: mol_type = other DNA
taccaaaattagcagaggaa

SEQ ID NO: 37336 - DNA, 20 bp, synthetic construct
  source 1..20: mol_type = other DNA
ctaccaaaattagcagagga

SEQ ID NO: 37337 - DNA, 20 bp, synthetic construct
  source 1..20: mol_type = other DNA
actaccaaaattagcagagg

SEQ ID NO: 37338 - DNA, 20 bp, synthetic construct
  source 1..20: mol_type = other DNA
cactaccaaaattagcagag

SEQ ID NO: 37339 - DNA, 20 bp, synthetic construct
  source 1..20: mol_type = other DNA
ccactaccaaaattagcaga

SEQ ID NO: 37340 - DNA, 20 bp, synthetic construct
  source 1..20: mol_type = other DNA
accactaccaaaattagcag

SEQ ID NO: 37341 - DNA, 20 bp, synthetic construct
  source 1..20: mol_type = other DNA
taccactaccaaaattagca

SEQ ID NO: 37342 - DNA, 20 bp, synthetic construct
  source 1..20: mol_type = other DNA
ctaccactaccaaaattagc

SEQ ID NO: 37343 - DNA, 20 bp, synthetic construct
  source 1..20: mol_type = other DNA
tctaccactaccaaaattag

SEQ ID NO: 37344 - DNA, 20 bp, synthetic construct
  source 1..20: mol_type = other DNA
ttctaccactaccaaaatta

SEQ ID NO: 37345 - DNA, 20 bp, synthetic construct
  source 1..20: mol_type = other DNA
tttctaccactaccaaaatt

SEQ ID NO: 37346 - DNA, 20 bp, synthetic construct
  source 1..20: mol_type = other DNA
ctttctaccactaccaaaat

SEQ ID NO: 37347 - DNA, 20 bp, synthetic construct
  source 1..20: mol_type = other DNA
tctttctaccactaccaaaa

SEQ ID NO: 37348 - DNA, 20 bp, synthetic construct
  source 1..20: mol_type = other DNA
atctttctaccactaccaaa

SEQ ID NO: 37349 - DNA, 20 bp, synthetic construct
  source 1..20: mol_type = other DNA
tatctttctaccactaccaa

SEQ ID NO: 37350 - DNA, 20 bp, synthetic construct
  source 1..20: mol_type = other DNA
gtatctttctaccactacca

SEQ ID NO: 37351 - DNA, 20 bp, synthetic construct
  source 1..20: mol_type = other DNA
agtatctttctaccactacc

SEQ ID NO: 37352 - DNA, 20 bp, synthetic construct
  source 1..20: mol_type = other DNA
aagtatctttctaccactac

SEQ ID NO: 37353 - DNA, 20 bp, synthetic construct
  source 1..20: mol_type = other DNA
aaagtatctttctaccacta

SEQ ID NO: 37354 - DNA, 20 bp, synthetic construct
  source 1..20: mol_type = other DNA
aaaagtatctttctaccact

SEQ ID NO: 37355 - DNA, 20 bp, synthetic construct
  source 1..20: mol_type = other DNA
caaaagtatctttctaccac

SEQ ID NO: 37356 - DNA, 20 bp, synthetic construct
  source 1..20: mol_type = other DNA
gcaaaagtatctttctacca

SEQ ID NO: 37357 - DNA, 20 bp, synthetic construct
  source 1..20: mol_type = other DNA
ggcaaaagtatctttctacc

SEQ ID NO: 37358 - DNA, 20 bp, synthetic construct
  source 1..20: mol_type = other DNA
tggcaaaagtatctttctac

SEQ ID NO: 37359 - DNA, 20 bp, synthetic construct
  source 1..20: mol_type = other DNA
ttggcaaaagtatctttcta

SEQ ID NO: 37360 - DNA, 20 bp, synthetic construct
  source 1..20: mol_type = other DNA
cttggcaaaagtatctttct

SEQ ID NO: 37361 - DNA, 20 bp, synthetic construct
  source 1..20: mol_type = other DNA
gcttggcaaaagtatctttc

SEQ ID NO: 37362 - DNA, 20 bp, synthetic construct
  source 1..20: mol_type = other DNA
agcttggcaaaagtatcttt

SEQ ID NO: 37363 - DNA, 20 bp, synthetic construct
  source 1..20: mol_type = other DNA
aagcttggcaaaagtatctt

SEQ ID NO: 37364 - DNA, 20 bp, synthetic construct
  source 1..20: mol_type = other DNA
caagcttggcaaaagtatct

SEQ ID NO: 37365 - DNA, 20 bp, synthetic construct
  source 1..20: mol_type = other DNA
ccaagcttggcaaaagtatc

SEQ ID NO: 37366 - DNA, 20 bp, synthetic construct
  source 1..20: mol_type = other DNA
accaagcttggcaaaagtat

SEQ ID NO: 37367 - DNA, 20 bp, synthetic construct
  source 1..20: mol_type = other DNA
aaccaagcttggcaaaagta

SEQ ID NO: 37368 - DNA, 20 bp, synthetic construct
  source 1..20: mol_type = other DNA
caaccaagcttggcaaaagt

SEQ ID NO: 37369 - DNA, 20 bp, synthetic construct
  source 1..20: mol_type = other DNA
acaaccaagcttggcaaaag

SEQ ID NO: 37370 - DNA, 20 bp, synthetic construct
  source 1..20: mol_type = other DNA
aacaaccaagcttggcaaaa

SEQ ID NO: 37371 - DNA, 20 bp, synthetic construct
  source 1..20: mol_type = other DNA
taacaaccaagcttggcaaa

SEQ ID NO: 37372 - DNA, 20 bp, synthetic construct
  source 1..20: mol_type = other DNA
ctaacaaccaagcttggcaa

SEQ ID NO: 37373 - DNA, 20 bp, synthetic construct
  source 1..20: mol_type = other DNA
cctaacaaccaagcttggca

SEQ ID NO: 37374 - DNA, 20 bp, synthetic construct
  source 1..20: mol_type = other DNA
acctaacaaccaagcttggc

SEQ ID NO: 37375 - DNA, 20 bp, synthetic construct
  source 1..20: mol_type = other DNA
aacctaacaaccaagcttgg

SEQ ID NO: 37376 - DNA, 20 bp, synthetic construct
  source 1..20: mol_type = other DNA
aaacctaacaaccaagcttg

SEQ ID NO: 37377 - DNA, 20 bp, synthetic construct
  source 1..20: mol_type = other DNA
aaaacctaacaaccaagctt

SEQ ID NO: 37378 - DNA, 20 bp, synthetic construct
  source 1..20: mol_type = other DNA
gaaaacctaacaaccaagct

SEQ ID NO: 37379 - DNA, 20 bp, synthetic construct
  source 1..20: mol_type = other DNA
tgaaaacctaacaaccaagc

SEQ ID NO: 37380 - DNA, 20 bp, synthetic construct
  source 1..20: mol_type = other DNA
atgaaaacctaacaaccaag

SEQ ID NO: 37381 - DNA, 20 bp, synthetic construct
  source 1..20: mol_type = other DNA
aatgaaaacctaacaaccaa

SEQ ID NO: 37382 - DNA, 20 bp, synthetic construct
  source 1..20: mol_type = other DNA
aaatgaaaacctaacaacca

SEQ ID NO: 37383 - DNA, 20 bp, synthetic construct
  source 1..20: mol_type = other DNA
caaatgaaaacctaacaacc

SEQ ID NO: 37384 - DNA, 20 bp, synthetic construct
  source 1..20: mol_type = other DNA
acaaatgaaaacctaacaac

SEQ ID NO: 37385 - DNA, 20 bp, synthetic construct
  source 1..20: mol_type = other DNA
gacaaatgaaaacctaacaa

SEQ ID NO: 37386 - DNA, 20 bp, synthetic construct
  source 1..20: mol_type = other DNA
ggacaaatgaaaacctaaca

SEQ ID NO: 37387 - DNA, 20 bp, synthetic construct
  source 1..20: mol_type = other DNA
tggacaaatgaaaacctaac

SEQ ID NO: 37388 - DNA, 20 bp, synthetic construct
  source 1..20: mol_type = other DNA
ttggacaaatgaaaacctaa

SEQ ID NO: 37389 - DNA, 20 bp, synthetic construct
  source 1..20: mol_type = other DNA
cttggacaaatgaaaaccta

SEQ ID NO: 37390 - DNA, 20 bp, synthetic construct
  source 1..20: mol_type = other DNA
tcttggacaaatgaaaacct

SEQ ID NO: 37391 - DNA, 20 bp, synthetic construct
  source 1..20: mol_type = other DNA
ctcttggacaaatgaaaacc

SEQ ID NO: 37392 - DNA, 20 bp, synthetic construct
  source 1..20: mol_type = other DNA
actcttggacaaatgaaaac

SEQ ID NO: 37393 - DNA, 20 bp, synthetic construct
  source 1..20: mol_type = other DNA
aactcttggacaaatgaaaa

SEQ ID NO: 37394 - DNA, 20 bp, synthetic construct
  source 1..20: mol_type = other DNA
gaactcttggacaaatgaaa

SEQ ID NO: 37395 - DNA, 20 bp, synthetic construct
  source 1..20: mol_type = other DNA
ggaactcttggacaaatgaa

SEQ ID NO: 37396 - DNA, 20 bp, synthetic construct
  source 1..20: mol_type = other DNA
aggaactcttggacaaatga

SEQ ID NO: 37397 - DNA, 20 bp, synthetic construct
  source 1..20: mol_type = other DNA
caggaactcttggacaaatg

SEQ ID NO: 37398 - DNA, 20 bp, synthetic construct
  source 1..20: mol_type = other DNA
tcaggaactcttggacaaat

SEQ ID NO: 37399 - DNA, 20 bp, synthetic construct
  source 1..20: mol_type = other DNA
gtcaggaactcttggacaaa

SEQ ID NO: 37400 - DNA, 20 bp, synthetic construct
  source 1..20: mol_type = other DNA
ggtcaggaactcttggacaa

SEQ ID NO: 37401 - DNA, 20 bp, synthetic construct
  source 1..20: mol_type = other DNA
tggtcaggaactcttggaca

SEQ ID NO: 37402 - DNA, 20 bp, synthetic construct
  source 1..20: mol_type = other DNA
ttggtcaggaactcttggac

SEQ ID NO: 37403 - DNA, 20 bp, synthetic construct
  source 1..20: mol_type = other DNA
cttggtcaggaactcttgga

SEQ ID NO: 37404 - DNA, 20 bp, synthetic construct
  source 1..20: mol_type = other DNA
acttggtcaggaactcttgg

SEQ ID NO: 37405 - DNA, 20 bp, synthetic construct
  source 1..20: mol_type = other DNA
cacttggtcaggaactcttg

SEQ ID NO: 37406 - DNA, 20 bp, synthetic construct
  source 1..20: mol_type = other DNA
acacttggtcaggaactctt

SEQ ID NO: 37407 - DNA, 20 bp, synthetic construct
  source 1..20: mol_type = other DNA
cacacttggtcaggaactct

SEQ ID NO: 37408 - DNA, 20 bp, synthetic construct
  source 1..20: mol_type = other DNA
tcacacttggtcaggaactc

SEQ ID NO: 37409 - DNA, 20 bp, synthetic construct
  source 1..20: mol_type = other DNA
ttcacacttggtcaggaact

SEQ ID NO: 37410 - DNA, 20 bp, synthetic construct
  source 1..20: mol_type = other DNA
attcacacttggtcaggaac

SEQ ID NO: 37411 - DNA, 20 bp, synthetic construct
  source 1..20: mol_type = other DNA
cattcacacttggtcaggaa

SEQ ID NO: 37412 - DNA, 20 bp, synthetic construct
  source 1..20: mol_type = other DNA
ccattcacacttggtcagga

SEQ ID NO: 37413 - DNA, 20 bp, synthetic construct
  source 1..20: mol_type = other DNA
tccattcacacttggtcagg

SEQ ID NO: 37414 - DNA, 20 bp, synthetic construct
  source 1..20: mol_type = other DNA
atccattcacacttggtcag

SEQ ID NO: 37415 - DNA, 20 bp, synthetic construct
  source 1..20: mol_type = other DNA
catccattcacacttggtca

SEQ ID NO: 37416 - DNA, 20 bp, synthetic construct
  source 1..20: mol_type = other DNA
acatccattcacacttggtc

SEQ ID NO: 37417 - DNA, 20 bp, synthetic construct
  source 1..20: mol_type = other DNA
aacatccattcacacttggt

SEQ ID NO: 37418 - DNA, 20 bp, synthetic construct
  source 1..20: mol_type = other DNA
caacatccattcacacttgg

SEQ ID NO: 37419 - DNA, 20 bp, synthetic construct
  source 1..20: mol_type = other DNA
tcaacatccattcacacttg

SEQ ID NO: 37420 - DNA, 20 bp, synthetic construct
  source 1..20: mol_type = other DNA
ttcaacatccattcacactt

SEQ ID NO: 37421 - DNA, 20 bp, synthetic construct
  source 1..20: mol_type = other DNA
tttcaacatccattcacact

SEQ ID NO: 37422 - DNA, 20 bp, synthetic construct
  source 1..20: mol_type = other DNA
atttcaacatccattcacac

SEQ ID NO: 37423 - DNA, 20 bp, synthetic construct
  source 1..20: mol_type = other DNA
gatttcaacatccattcaca

SEQ ID NO: 37424 - DNA, 20 bp, synthetic construct
  source 1..20: mol_type = other DNA
tgatttcaacatccattcac

SEQ ID NO: 37425 - DNA, 20 bp, synthetic construct
  source 1..20: mol_type = other DNA
ttgatttcaacatccattca

SEQ ID NO: 37426 - DNA, 20 bp, synthetic construct
  source 1..20: mol_type = other DNA
cttgatttcaacatccattc

SEQ ID NO: 37427 - DNA, 20 bp, synthetic construct
  source 1..20: mol_type = other DNA
ccttgatttcaacatccatt

SEQ ID NO: 37428 - DNA, 20 bp, synthetic construct
  source 1..20: mol_type = other DNA
accttgatttcaacatccat

SEQ ID NO: 37429 - DNA, 20 bp, synthetic construct
  source 1..20: mol_type = other DNA
caccttgatttcaacatcca

SEQ ID NO: 37430 - DNA, 20 bp, synthetic construct
  source 1..20: mol_type = other DNA
acaccttgatttcaacatcc

SEQ ID NO: 37431 - DNA, 20 bp, synthetic construct
  source 1..20: mol_type = other DNA
aacaccttgatttcaacatc

SEQ ID NO: 37432 - DNA, 20 bp, synthetic construct
  source 1..20: mol_type = other DNA
aaacaccttgatttcaacat

SEQ ID NO: 37433 - DNA, 20 bp, synthetic construct
  source 1..20: mol_type = other DNA
gaaacaccttgatttcaaca

SEQ ID NO: 37434 - DNA, 20 bp, synthetic construct
  source 1..20: mol_type = other DNA
agaaacaccttgatttcaac

SEQ ID NO: 37435 - DNA, 20 bp, synthetic construct
  source 1..20: mol_type = other DNA
aagaaacaccttgatttcaa

SEQ ID NO: 37436 - DNA, 20 bp, synthetic construct
  source 1..20: mol_type = other DNA
aaagaaacaccttgatttca

SEQ ID NO: 37437 - DNA, 20 bp, synthetic construct
  source 1..20: mol_type = other DNA
caaagaaacaccttgatttc

SEQ ID NO: 37438 - DNA, 20 bp, synthetic construct
  source 1..20: mol_type = other DNA
ccaaagaaacaccttgattt

SEQ ID NO: 37439 - DNA, 20 bp, synthetic construct
  source 1..20: mol_type = other DNA
gccaaagaaacaccttgatt

SEQ ID NO: 37440 - DNA, 20 bp, synthetic construct
  source 1..20: mol_type = other DNA
ggccaaagaaacaccttgat

SEQ ID NO: 37441 - DNA, 20 bp, synthetic construct
  source 1..20: mol_type = other DNA
tggccaaagaaacaccttga

SEQ ID NO: 37442 - DNA, 20 bp, synthetic construct
  source 1..20: mol_type = other DNA
gtggccaaagaaacaccttg

SEQ ID NO: 37443 - DNA, 20 bp, synthetic construct
  source 1..20: mol_type = other DNA
tgtggccaaagaaacacctt

SEQ ID NO: 37444 - DNA, 20 bp, synthetic construct
  source 1..20: mol_type = other DNA
gtgtggccaaagaaacacct

SEQ ID NO: 37445 - DNA, 20 bp, synthetic construct
  source 1..20: mol_type = other DNA
tgtgtggccaaagaaacacc

SEQ ID NO: 37446 - DNA, 20 bp, synthetic construct
  source 1..20: mol_type = other DNA
ttgtgtggccaaagaaacac

SEQ ID NO: 37447 - DNA, 20 bp, synthetic construct
  source 1..20: mol_type = other DNA
attgtgtggccaaagaaaca

SEQ ID NO: 37448 - DNA, 20 bp, synthetic construct
  source 1..20: mol_type = other DNA
cattgtgtggccaaagaaac

SEQ ID NO: 37449 - DNA, 20 bp, synthetic construct
  source 1..20: mol_type = other DNA
acattgtgtggccaaagaaa

SEQ ID NO: 37450 - DNA, 20 bp, synthetic construct
  source 1..20: mol_type = other DNA
cacattgtgtggccaaagaa

SEQ ID NO: 37451 - DNA, 20 bp, synthetic construct
  source 1..20: mol_type = other DNA
gcacattgtgtggccaaaga

SEQ ID NO: 37452 - DNA, 20 bp, synthetic construct
  source 1..20: mol_type = other DNA
ggcacattgtgtggccaaag

SEQ ID NO: 37453 - DNA, 20 bp, synthetic construct
  source 1..20: mol_type = other DNA
aggcacattgtgtggccaaa

SEQ ID NO: 37454 - DNA, 20 bp, synthetic construct
  source 1..20: mol_type = other DNA
aaggcacattgtgtggccaa

SEQ ID NO: 37455 - DNA, 20 bp, synthetic construct
  source 1..20: mol_type = other DNA
aaaggcacattgtgtggcca

SEQ ID NO: 37456 - DNA, 20 bp, synthetic construct
  source 1..20: mol_type = other DNA
caaaggcacattgtgtggcc

SEQ ID NO: 37457 - DNA, 20 bp, synthetic construct
  source 1..20: mol_type = other DNA
ccaaaggcacattgtgtggc

SEQ ID NO: 37458 - DNA, 20 bp, synthetic construct
  source 1..20: mol_type = other DNA
cccaaaggcacattgtgtgg

SEQ ID NO: 37459 - DNA, 20 bp, synthetic construct
  source 1..20: mol_type = other DNA
ccccaaaggcacattgtgtg

SEQ ID NO: 37460 - DNA, 20 bp, synthetic construct
  source 1..20: mol_type = other DNA
cccccaaaggcacattgtgt

SEQ ID NO: 37461 - DNA, 20 bp, synthetic construct
  source 1..20: mol_type = other DNA
gcccccaaaggcacattgtg

SEQ ID NO: 37462 - DNA, 20 bp, synthetic construct
  source 1..20: mol_type = other DNA
agcccccaaaggcacattgt

SEQ ID NO: 37463 - DNA, 20 bp, synthetic construct
  source 1..20: mol_type = other DNA
tagcccccaaaggcacattg

SEQ ID NO: 37464 - DNA, 20 bp, synthetic construct
  source 1..20: mol_type = other DNA
atagcccccaaaggcacatt

SEQ ID NO: 37465 - DNA, 20 bp, synthetic construct
  source 1..20: mol_type = other DNA
tatagcccccaaaggcacat

SEQ ID NO: 37466 - DNA, 20 bp, synthetic construct
  source 1..20: mol_type = other DNA
atatagcccccaaaggcaca

SEQ ID NO: 37467 - DNA, 20 bp, synthetic construct
  source 1..20: mol_type = other DNA
gatatagcccccaaaggcac

SEQ ID NO: 37468 - DNA, 20 bp, synthetic construct
  source 1..20: mol_type = other DNA
agatatagcccccaaaggca

SEQ ID NO: 37469 - DNA, 20 bp, synthetic construct
  source 1..20: mol_type = other DNA
tagatatagcccccaaaggc

SEQ ID NO: 37470 - DNA, 20 bp, synthetic construct
  source 1..20: mol_type = other DNA
atagatatagcccccaaagg

SEQ ID NO: 37471 - DNA, 20 bp, synthetic construct
  source 1..20: mol_type = other DNA
catagatatagcccccaaag

SEQ ID NO: 37472 - DNA, 20 bp, synthetic construct
  source 1..20: mol_type = other DNA
acatagatatagcccccaaa

SEQ ID NO: 37473 - DNA, 20 bp, synthetic construct
  source 1..20: mol_type = other DNA
cacatagatatagcccccaa

SEQ ID NO: 37474 - DNA, 20 bp, synthetic construct
  source 1..20: mol_type = other DNA
gcacatagatatagccccca

SEQ ID NO: 37475 - DNA, 20 bp, synthetic construct
  source 1..20: mol_type = other DNA
agcacatagatatagccccc

SEQ ID NO: 37476 - DNA, 20 bp, synthetic construct
  source 1..20: mol_type = other DNA
aagcacatagatatagcccc

SEQ ID NO: 37477 - DNA, 20 bp, synthetic construct
  source 1..20: mol_type = other DNA
gaagcacatagatatagccc

SEQ ID NO: 37478 - DNA, 20 bp, synthetic construct
  source 1..20: mol_type = other DNA
agaagcacatagatatagcc

SEQ ID NO: 37479 - DNA, 20 bp, synthetic construct
  source 1..20: mol_type = other DNA
cagaagcacatagatatagc

SEQ ID NO: 37480 - DNA, 20 bp, synthetic construct
  source 1..20: mol_type = other DNA
ccagaagcacatagatatag

SEQ ID NO: 37481 - DNA, 20 bp, synthetic construct
  source 1..20: mol_type = other DNA
accagaagcacatagatata

SEQ ID NO: 37482 - DNA, 20 bp, synthetic construct
  source 1..20: mol_type = other DNA
taccagaagcacatagatat

SEQ ID NO: 37483 - DNA, 20 bp, synthetic construct
  source 1..20: mol_type = other DNA
gtaccagaagcacatagata

SEQ ID NO: 37484 - DNA, 20 bp, synthetic construct
  source 1..20: mol_type = other DNA
ggtaccagaagcacatagat

SEQ ID NO: 37485 - DNA, 20 bp, synthetic construct
  source 1..20: mol_type = other DNA
aggtaccagaagcacataga

SEQ ID NO: 37486 - DNA, 20 bp, synthetic construct
  source 1..20: mol_type = other DNA
aaggtaccagaagcacatag

SEQ ID NO: 37487 - DNA, 20 bp, synthetic construct
  source 1..20: mol_type = other DNA
gaaggtaccagaagcacata

SEQ ID NO: 37488 - DNA, 20 bp, synthetic construct
  source 1..20: mol_type = other DNA
agaaggtaccagaagcacat

SEQ ID NO: 37489 - DNA, 20 bp, synthetic construct
  source 1..20: mol_type = other DNA
aagaaggtaccagaagcaca

SEQ ID NO: 37490 - DNA, 20 bp, synthetic construct
  source 1..20: mol_type = other DNA
aaagaaggtaccagaagcac

SEQ ID NO: 37491 - DNA, 20 bp, synthetic construct
  source 1..20: mol_type = other DNA
aaaagaaggtaccagaagca

SEQ ID NO: 37492 - DNA, 20 bp, synthetic construct
  source 1..20: mol_type = other DNA
taaaagaaggtaccagaagc

SEQ ID NO: 37493 - DNA, 20 bp, synthetic construct
  source 1..20: mol_type = other DNA
ttaaaagaaggtaccagaag

SEQ ID NO: 37494 - DNA, 20 bp, synthetic construct
  source 1..20: mol_type = other DNA
attaaaagaaggtaccagaa

SEQ ID NO: 37495 - DNA, 20 bp, synthetic construct
  source 1..20: mol_type = other DNA
aattaaaagaaggtaccaga

SEQ ID NO: 37496 - DNA, 20 bp, synthetic construct
  source 1..20: mol_type = other DNA
aaattaaaagaaggtaccag

SEQ ID NO: 37497 - DNA, 20 bp, synthetic construct
  source 1..20: mol_type = other DNA
aaaattaaaagaaggtacca

SEQ ID NO: 37498 - DNA, 20 bp, synthetic construct
  source 1..20: mol_type = other DNA
gaaaattaaaagaaggtacc

SEQ ID NO: 37499 - DNA, 20 bp, synthetic construct
  source 1..20: mol_type = other DNA
tgaaaattaaaagaaggtac

SEQ ID NO: 37500 - DNA, 20 bp, synthetic construct
  source 1..20: mol_type = other DNA
gtgaaaattaaaagaaggta

SEQ ID NO: 37501 - DNA, 20 bp, synthetic construct
  source 1..20: mol_type = other DNA
tgtgaaaattaaaagaaggt

SEQ ID NO: 37502 - DNA, 20 bp, synthetic construct
  source 1..20: mol_type = other DNA
ttgtgaaaattaaaagaagg

SEQ ID NO: 37503 - DNA, 20 bp, synthetic construct
  source 1..20: mol_type = other DNA
tttgtgaaaattaaaagaag

SEQ ID NO: 37504 - DNA, 20 bp, synthetic construct
  source 1..20: mol_type = other DNA
ctttgtgaaaattaaaagaa

SEQ ID NO: 37505 - DNA, 20 bp, synthetic construct
  source 1..20: mol_type = other DNA
tctttgtgaaaattaaaaga

SEQ ID NO: 37506 - DNA, 20 bp, synthetic construct
  source 1..20: mol_type = other DNA
gtctttgtgaaaattaaaag

SEQ ID NO: 37507 - DNA, 20 bp, synthetic construct
  source 1..20: mol_type = other DNA
tgtctttgtgaaaattaaaa

SEQ ID NO: 37508 - DNA, 20 bp, synthetic construct
  source 1..20: mol_type = other DNA
gtgtctttgtgaaaattaaa

SEQ ID NO: 37509 - DNA, 20 bp, synthetic construct
  source 1..20: mol_type = other DNA
agtgtctttgtgaaaattaa

SEQ ID NO: 37510 - DNA, 20 bp, synthetic construct
  source 1..20: mol_type = other DNA
cagtgtctttgtgaaaatta

SEQ ID NO: 37511 - DNA, 20 bp, synthetic construct
  source 1..20: mol_type = other DNA
gcagtgtctttgtgaaaatt

SEQ ID NO: 37512 - DNA, 20 bp, synthetic construct
  source 1..20: mol_type = other DNA
agcagtgtctttgtgaaaat

SEQ ID NO: 37513 - DNA, 20 bp, synthetic construct
  source 1..20: mol_type = other DNA
aagcagtgtctttgtgaaaa

SEQ ID NO: 37514 - DNA, 20 bp, synthetic construct
  source 1..20: mol_type = other DNA
caagcagtgtctttgtgaaa

SEQ ID NO: 37515 - DNA, 20 bp, synthetic construct
  source 1..20: mol_type = other DNA
gcaagcagtgtctttgtgaa

SEQ ID NO: 37516 - DNA, 20 bp, synthetic construct
  source 1..20: mol_type = other DNA
ggcaagcagtgtctttgtga

SEQ ID NO: 37517 - DNA, 20 bp, synthetic construct
  source 1..20: mol_type = other DNA
cggcaagcagtgtctttgtg

SEQ ID NO: 37518 - DNA, 20 bp, synthetic construct
  source 1..20: mol_type = other DNA
tcggcaagcagtgtctttgt

SEQ ID NO: 37519 - DNA, 20 bp, synthetic construct
  source 1..20: mol_type = other DNA
gtcggcaagcagtgtctttg

SEQ ID NO: 37520 - DNA, 20 bp, synthetic construct
  source 1..20: mol_type = other DNA
ggtcggcaagcagtgtcttt

SEQ ID NO: 37521 - DNA, 20 bp, synthetic construct
  source 1..20: mol_type = other DNA
tggtcggcaagcagtgtctt

SEQ ID NO: 37522 - DNA, 20 bp, synthetic construct
  source 1..20: mol_type = other DNA
gtggtcggcaagcagtgtct

SEQ ID NO: 37523 - DNA, 20 bp, synthetic construct
  source 1..20: mol_type = other DNA
tgtggtcggcaagcagtgtc

SEQ ID NO: 37524 - DNA, 20 bp, synthetic construct
  source 1..20: mol_type = other DNA
gtgtggtcggcaagcagtgt

SEQ ID NO: 37525 - DNA, 20 bp, synthetic construct
  source 1..20: mol_type = other DNA
agtgtggtcggcaagcagtg

SEQ ID NO: 37526 - DNA, 20 bp, synthetic construct
  source 1..20: mol_type = other DNA
cagtgtggtcggcaagcagt

SEQ ID NO: 37527 - DNA, 20 bp, synthetic construct
  source 1..20: mol_type = other DNA
acagtgtggtcggcaagcag

SEQ ID NO: 37528 - DNA, 20 bp, synthetic construct
  source 1..20: mol_type = other DNA
aacagtgtggtcggcaagca

SEQ ID NO: 37529 - DNA, 20 bp, synthetic construct
  source 1..20: mol_type = other DNA
aaacagtgtggtcggcaagc

SEQ ID NO: 37530 - DNA, 20 bp, synthetic construct
  source 1..20: mol_type = other DNA
aaaacagtgtggtcggcaag

SEQ ID NO: 37531 - DNA, 20 bp, synthetic construct
  source 1..20: mol_type = other DNA
caaaacagtgtggtcggcaa

SEQ ID NO: 37532 - DNA, 20 bp, synthetic construct
  source 1..20: mol_type = other DNA
acaaaacagtgtggtcggca

SEQ ID NO: 37533 - DNA, 20 bp, synthetic construct
  source 1..20: mol_type = other DNA
gacaaaacagtgtggtcggc

SEQ ID NO: 37534 - DNA, 20 bp, synthetic construct
  source 1..20: mol_type = other DNA
agacaaaacagtgtggtcgg

SEQ ID NO: 37535 - DNA, 20 bp, synthetic construct
  source 1..20: mol_type = other DNA
tagacaaaacagtgtggtcg

SEQ ID NO: 37536 - DNA, 20 bp, synthetic construct
  source 1..20: mol_type = other DNA
ttagacaaaacagtgtggtc

SEQ ID NO: 37537 - DNA, 20 bp, synthetic construct
  source 1..20: mol_type = other DNA
attagacaaaacagtgtggt

SEQ ID NO: 37538 - DNA, 20 bp, synthetic construct
  source 1..20: mol_type = other DNA
cattagacaaaacagtgtgg

SEQ ID NO: 37539 - DNA, 20 bp, synthetic construct
  source 1..20: mol_type = other DNA
acattagacaaaacagtgtg

SEQ ID NO: 37540 - DNA, 20 bp, synthetic construct
  source 1..20: mol_type = other DNA
cacattagacaaaacagtgt

SEQ ID NO: 37541 - DNA, 20 bp, synthetic construct
  source 1..20: mol_type = other DNA
ccacattagacaaaacagtg

SEQ ID NO: 37542 - DNA, 20 bp, synthetic construct
  source 1..20: mol_type = other DNA
cccacattagacaaaacagt

SEQ ID NO: 37543 - DNA, 20 bp, synthetic construct
  source 1..20: mol_type = other DNA
ccccacattagacaaaacag

SEQ ID NO: 37544 - DNA, 20 bp, synthetic construct
  source 1..20: mol_type = other DNA
gccccacattagacaaaaca

SEQ ID NO: 37545 - DNA, 20 bp, synthetic construct
  source 1..20: mol_type = other DNA
agccccacattagacaaaac

SEQ ID NO: 37546 - DNA, 20 bp, synthetic construct
  source 1..20: mol_type = other DNA
tagccccacattagacaaaa

SEQ ID NO: 37547 - DNA, 20 bp, synthetic construct
  source 1..20: mol_type = other DNA
atagccccacattagacaaa

SEQ ID NO: 37548 - DNA, 20 bp, synthetic construct
  source 1..20: mol_type = other DNA
catagccccacattagacaa

SEQ ID NO: 37549 - DNA, 20 bp, synthetic construct
  source 1..20: mol_type = other DNA
tcatagccccacattagaca

SEQ ID NO: 37550 - DNA, 20 bp, synthetic construct
  source 1..20: mol_type = other DNA
gtcatagccccacattagac

SEQ ID NO: 37551 - DNA, 20 bp, synthetic construct
  source 1..20: mol_type = other DNA
ggtcatagccccacattaga

SEQ ID NO: 37552 - DNA, 20 bp, synthetic construct
  source 1..20: mol_type = other DNA
gggtcatagccccacattag

SEQ ID NO: 37553 - DNA, 20 bp, synthetic construct
  source 1..20: mol_type = other DNA
ggggtcatagccccacatta

SEQ ID NO: 37554 - DNA, 20 bp, synthetic construct
  source 1..20: mol_type = other DNA
gggggtcatagccccacatt

SEQ ID NO: 37555 - DNA, 20 bp, synthetic construct
  source 1..20: mol_type = other DNA
agggggtcatagccccacat

SEQ ID NO: 37556 - DNA, 20 bp, synthetic construct
  source 1..20: mol_type = other DNA
cagggggtcatagccccaca

SEQ ID NO: 37557 - DNA, 20 bp, synthetic construct
  source 1..20: mol_type = other DNA
ccagggggtcatagccccac

SEQ ID NO: 37558 - DNA, 20 bp, synthetic construct
  source 1..20: mol_type = other DNA
tccagggggtcatagcccca

SEQ ID NO: 37559 - DNA, 20 bp, synthetic construct
  source 1..20: mol_type = other DNA
ttccagggggtcatagcccc

SEQ ID NO: 37560 - DNA, 20 bp, synthetic construct
  source 1..20: mol_type = other DNA
cttccagggggtcatagccc

SEQ ID NO: 37561 - DNA, 20 bp, synthetic construct
  source 1..20: mol_type = other DNA
tcttccagggggtcatagcc

SEQ ID NO: 37562 - DNA, 20 bp, synthetic construct
  source 1..20: mol_type = other DNA
ctcttccagggggtcatagc

SEQ ID NO: 37563 - DNA, 20 bp, synthetic construct
  source 1..20: mol_type = other DNA
cctcttccagggggtcatag

SEQ ID NO: 37564 - DNA, 20 bp, synthetic construct
  source 1..20: mol_type = other DNA
gcctcttccagggggtcata

SEQ ID NO: 37565 - DNA, 20 bp, synthetic construct
  source 1..20: mol_type = other DNA
tgcctcttccagggggtcat

SEQ ID NO: 37566 - DNA, 20 bp, synthetic construct
  source 1..20: mol_type = other DNA
atgcctcttccagggggtca

SEQ ID NO: 37567 - DNA, 20 bp, synthetic construct
  source 1..20: mol_type = other DNA
gatgcctcttccagggggtc

SEQ ID NO: 37568 - DNA, 20 bp, synthetic construct
  source 1..20: mol_type = other DNA
tgatgcctcttccagggggt

SEQ ID NO: 37569 - DNA, 20 bp, synthetic construct
  source 1..20: mol_type = other DNA
atgatgcctcttccaggggg

SEQ ID NO: 37570 - DNA, 20 bp, synthetic construct
  source 1..20: mol_type = other DNA
aatgatgcctcttccagggg

SEQ ID NO: 37571 - DNA, 20 bp, synthetic construct
  source 1..20: mol_type = other DNA
aaatgatgcctcttccaggg

SEQ ID NO: 37572 - DNA, 20 bp, synthetic construct
  source 1..20: mol_type = other DNA
aaaatgatgcctcttccagg

SEQ ID NO: 37573 - DNA, 20 bp, synthetic construct
  source 1..20: mol_type = other DNA
gaaaatgatgcctcttccag

SEQ ID NO: 37574 - DNA, 20 bp, synthetic construct
  source 1..20: mol_type = other DNA
agaaaatgatgcctcttcca

SEQ ID NO: 37575 - DNA, 20 bp, synthetic construct
  source 1..20: mol_type = other DNA
cagaaaatgatgcctcttcc

SEQ ID NO: 37576 - DNA, 20 bp, synthetic construct
  source 1..20: mol_type = other DNA
tcagaaaatgatgcctcttc

SEQ ID NO: 37577 - DNA, 20 bp, synthetic construct
  source 1..20: mol_type = other DNA
atcagaaaatgatgcctctt

SEQ ID NO: 37578 - DNA, 20 bp, synthetic construct
  source 1..20: mol_type = other DNA
aatcagaaaatgatgcctct

SEQ ID NO: 37579 - DNA, 20 bp, synthetic construct
  source 1..20: mol_type = other DNA
aaatcagaaaatgatgcctc

SEQ ID NO: 37580 - DNA, 20 bp, synthetic construct
  source 1..20: mol_type = other DNA
aaaatcagaaaatgatgcct

SEQ ID NO: 37581 - DNA, 20 bp, synthetic construct
  source 1..20: mol_type = other DNA
gaaaatcagaaaatgatgcc

SEQ ID NO: 37582 - DNA, 20 bp, synthetic construct
  source 1..20: mol_type = other DNA
tgaaaatcagaaaatgatgc

SEQ ID NO: 37583 - DNA, 20 bp, synthetic construct
  source 1..20: mol_type = other DNA
gtgaaaatcagaaaatgatg

SEQ ID NO: 37584 - DNA, 20 bp, synthetic construct
  source 1..20: mol_type = other DNA
tgtgaaaatcagaaaatgat

SEQ ID NO: 37585 - DNA, 20 bp, synthetic construct
  source 1..20: mol_type = other DNA
ctgtgaaaatcagaaaatga

SEQ ID NO: 37586 - DNA, 20 bp, synthetic construct
  source 1..20: mol_type = other DNA
tctgtgaaaatcagaaaatg

SEQ ID NO: 37587 - DNA, 20 bp, synthetic construct
  source 1..20: mol_type = other DNA
ttctgtgaaaatcagaaaat

SEQ ID NO: 37588 - DNA, 20 bp, synthetic construct
  source 1..20: mol_type = other DNA
cttctgtgaaaatcagaaaa

SEQ ID NO: 37589 - DNA, 20 bp, synthetic construct
  source 1..20: mol_type = other DNA
gcttctgtgaaaatcagaaa

SEQ ID NO: 37590 - DNA, 20 bp, synthetic construct
  source 1..20: mol_type = other DNA
tgcttctgtgaaaatcagaa

SEQ ID NO: 37591 - DNA, 20 bp, synthetic construct
  source 1..20: mol_type = other DNA
atgcttctgtgaaaatcaga

SEQ ID NO: 37592 - DNA, 20 bp, synthetic construct
  source 1..20: mol_type = other DNA
tatgcttctgtgaaaatcag

SEQ ID NO: 37593 - DNA, 20 bp, synthetic construct
  source 1..20: mol_type = other DNA
ttatgcttctgtgaaaatca

SEQ ID NO: 37594 - DNA, 20 bp, synthetic construct
  source 1..20: mol_type = other DNA
attatgcttctgtgaaaatc

SEQ ID NO: 37595 - DNA, 20 bp, synthetic construct
  source 1..20: mol_type = other DNA
tattatgcttctgtgaaaat

SEQ ID NO: 37596 - DNA, 20 bp, synthetic construct
  source 1..20: mol_type = other DNA
atattatgcttctgtgaaaa

SEQ ID NO: 37597 - DNA, 20 bp, synthetic construct
  source 1..20: mol_type = other DNA
catattatgcttctgtgaaa

SEQ ID NO: 37598 - DNA, 20 bp, synthetic construct
  source 1..20: mol_type = other DNA
ccatattatgcttctgtgaa

SEQ ID NO: 37599 - DNA, 20 bp, synthetic construct
  source 1..20: mol_type = other DNA
accatattatgcttctgtga

SEQ ID NO: 37600 - DNA, 20 bp, synthetic construct
  source 1..20: mol_type = other DNA
gaccatattatgcttctgtg

SEQ ID NO: 37601 - DNA, 20 bp, synthetic construct
  source 1..20: mol_type = other DNA
tgaccatattatgcttctgt

SEQ ID NO: 37602 - DNA, 20 bp, synthetic construct
  source 1..20: mol_type = other DNA
ctgaccatattatgcttctg

SEQ ID NO: 37603 - DNA, 20 bp, synthetic construct
  source 1..20: mol_type = other DNA
cctgaccatattatgcttct

SEQ ID NO: 37604 - DNA, 20 bp, synthetic construct
  source 1..20: mol_type = other DNA
acctgaccatattatgcttc

SEQ ID NO: 37605 - DNA, 20 bp, synthetic construct
  source 1..20: mol_type = other DNA
cacctgaccatattatgctt

SEQ ID NO: 37606 - DNA, 20 bp, synthetic construct
  source 1..20: mol_type = other DNA
tcacctgaccatattatgct

SEQ ID NO: 37607 - DNA, 20 bp, synthetic construct
  source 1..20: mol_type = other DNA
atcacctgaccatattatgc

SEQ ID NO: 37608 - DNA, 20 bp, synthetic construct
  source 1..20: mol_type = other DNA
catcacctgaccatattatg

SEQ ID NO: 37609 - DNA, 20 bp, synthetic construct
  source 1..20: mol_type = other DNA
ccatcacctgaccatattat

SEQ ID NO: 37610 - DNA, 20 bp, synthetic construct
  source 1..20: mol_type = other DNA
accatcacctgaccatatta

SEQ ID NO: 37611 - DNA, 20 bp, synthetic construct
  source 1..20: mol_type = other DNA
gaccatcacctgaccatatt

SEQ ID NO: 37612 - DNA, 20 bp, synthetic construct
  source 1..20: mol_type = other DNA
ggaccatcacctgaccatat

SEQ ID NO: 37613 - DNA, 20 bp, synthetic construct
  source 1..20: mol_type = other DNA
aggaccatcacctgaccata

SEQ ID NO: 37614 - DNA, 20 bp, synthetic construct
  source 1..20: mol_type = other DNA
caggaccatcacctgaccat

SEQ ID NO: 37615 - DNA, 20 bp, synthetic construct
  source 1..20: mol_type = other DNA
tcaggaccatcacctgacca

SEQ ID NO: 37616 - DNA, 20 bp, synthetic construct
  source 1..20: mol_type = other DNA
ctcaggaccatcacctgacc

SEQ ID NO: 37617 - DNA, 20 bp, synthetic construct
  source 1..20: mol_type = other DNA
actcaggaccatcacctgac

SEQ ID NO: 37618 - DNA, 20 bp, synthetic construct
  source 1..20: mol_type = other DNA
tactcaggaccatcacctga

SEQ ID NO: 37619 - DNA, 20 bp, synthetic construct
  source 1..20: mol_type = other DNA
ctactcaggaccatcacctg

SEQ ID NO: 37620 - DNA, 20 bp, synthetic construct
  source 1..20: mol_type = other DNA
actactcaggaccatcacct

SEQ ID NO: 37621 - DNA, 20 bp, synthetic construct
  source 1..20: mol_type = other DNA
cactactcaggaccatcacc

SEQ ID NO: 37622 - DNA, 20 bp, synthetic construct
  source 1..20: mol_type = other DNA
ccactactcaggaccatcac

SEQ ID NO: 37623 - DNA, 20 bp, synthetic construct
  source 1..20: mol_type = other DNA
cccactactcaggaccatca

SEQ ID NO: 37624 - DNA, 20 bp, synthetic construct
  source 1..20: mol_type = other DNA
acccactactcaggaccatc

SEQ ID NO: 37625 - DNA, 20 bp, synthetic construct
  source 1..20: mol_type = other DNA
tacccactactcaggaccat

SEQ ID NO: 37626 - DNA, 20 bp, synthetic construct
  source 1..20: mol_type = other DNA
atacccactactcaggacca

SEQ ID NO: 37627 - DNA, 20 bp, synthetic construct
  source 1..20: mol_type = other DNA
tatacccactactcaggacc

SEQ ID NO: 37628 - DNA, 20 bp, synthetic construct
  source 1..20: mol_type = other DNA
atatacccactactcaggac

SEQ ID NO: 37629 - DNA, 20 bp, synthetic construct
  source 1..20: mol_type = other DNA
catatacccactactcagga

SEQ ID NO: 37630 - DNA, 20 bp, synthetic construct
  source 1..20: mol_type = other DNA
tcatatacccactactcagg

SEQ ID NO: 37631 - DNA, 20 bp, synthetic construct
  source 1..20: mol_type = other DNA
gtcatatacccactactcag

SEQ ID NO: 37632 - DNA, 20 bp, synthetic construct
  source 1..20: mol_type = other DNA
tgtcatatacccactactca

SEQ ID NO: 37633 - DNA, 20 bp, synthetic construct
  source 1..20: mol_type = other DNA
ctgtcatatacccactactc

SEQ ID NO: 37634 - DNA, 20 bp, synthetic construct
  source 1..20: mol_type = other DNA
tctgtcatatacccactact

SEQ ID NO: 37635 - DNA, 20 bp, synthetic construct
  source 1..20: mol_type = other DNA
atctgtcatatacccactac

SEQ ID NO: 37636 - DNA, 20 bp, synthetic construct
  source 1..20: mol_type = other DNA
tatctgtcatatacccacta

SEQ ID NO: 37637 - DNA, 20 bp, synthetic construct
  source 1..20: mol_type = other DNA
gtatctgtcatatacccact

SEQ ID NO: 37638 - DNA, 20 bp, synthetic construct
  source 1..20: mol_type = other DNA
tgtatctgtcatatacccac

SEQ ID NO: 37639 - DNA, 20 bp, synthetic construct
  source 1..20: mol_type = other DNA
gtgtatctgtcatataccca

SEQ ID NO: 37640 - DNA, 20 bp, synthetic construct
  source 1..20: mol_type = other DNA
agtgtatctgtcatataccc

SEQ ID NO: 37641 - DNA, 20 bp, synthetic construct
  source 1..20: mol_type = other DNA
tagtgtatctgtcatatacc

SEQ ID NO: 37642 - DNA, 20 bp, synthetic construct
  source 1..20: mol_type = other DNA
ctagtgtatctgtcatatac

SEQ ID NO: 37643 - DNA, 20 bp, synthetic construct
  source 1..20: mol_type = other DNA
actagtgtatctgtcatata

SEQ ID NO: 37644 - DNA, 20 bp, synthetic construct
  source 1..20: mol_type = other DNA
tactagtgtatctgtcatat

SEQ ID NO: 37645 - DNA, 20 bp, synthetic construct
  source 1..20: mol_type = other DNA
ttactagtgtatctgtcata

SEQ ID NO: 37646 - DNA, 20 bp, synthetic construct
  source 1..20: mol_type = other DNA
attactagtgtatctgtcat

SEQ ID NO: 37647 - DNA, 20 bp, synthetic construct
  source 1..20: mol_type = other DNA
aattactagtgtatctgtca

SEQ ID NO: 37648 - DNA, 20 bp, synthetic construct
  source 1..20: mol_type = other DNA
taattactagtgtatctgtc

SEQ ID NO: 37649 - DNA, 20 bp, synthetic construct
  source 1..20: mol_type = other DNA
ataattactagtgtatctgt

SEQ ID NO: 37650 - DNA, 20 bp, synthetic construct
  source 1..20: mol_type = other DNA
tataattactagtgtatctg

SEQ ID NO: 37651 - DNA, 20 bp, synthetic construct
  source 1..20: mol_type = other DNA
ttataattactagtgtatct

SEQ ID NO: 37652 - DNA, 20 bp, synthetic construct
  source 1..20: mol_type = other DNA
attataattactagtgtatc

SEQ ID NO: 37653 - DNA, 20 bp, synthetic construct
  source 1..20: mol_type = other DNA
tattataattactagtgtat

SEQ ID NO: 37654 - DNA, 20 bp, synthetic construct
  source 1..20: mol_type = other DNA
gtattataattactagtgta

SEQ ID NO: 37655 - DNA, 20 bp, synthetic construct
  source 1..20: mol_type = other DNA
tgtattataattactagtgt

SEQ ID NO: 37656 - DNA, 20 bp, synthetic construct
  source 1..20: mol_type = other DNA
ctgtattataattactagtg

SEQ ID NO: 37657 - DNA, 20 bp, synthetic construct
  source 1..20: mol_type = other DNA
tctgtattataattactagt

SEQ ID NO: 37658 - DNA, 20 bp, synthetic construct
  source 1..20: mol_type = other DNA
atctgtattataattactag

SEQ ID NO: 37659 - DNA, 20 bp, synthetic construct
  source 1..20: mol_type = other DNA
gatctgtattataattacta

SEQ ID NO: 37660 - DNA, 20 bp, synthetic construct
  source 1..20: mol_type = other DNA
agatctgtattataattact

SEQ ID NO: 37661 - DNA, 20 bp, synthetic construct
  source 1..20: mol_type = other DNA
tagatctgtattataattac

SEQ ID NO: 37662 - DNA, 20 bp, synthetic construct
  source 1..20: mol_type = other DNA
ttagatctgtattataatta

SEQ ID NO: 37663 - DNA, 20 bp, synthetic construct
  source 1..20: mol_type = other DNA
tttagatctgtattataatt

SEQ ID NO: 37664 - DNA, 20 bp, synthetic construct
  source 1..20: mol_type = other DNA
gtttagatctgtattataat

SEQ ID NO: 37665 - DNA, 20 bp, synthetic construct
  source 1..20: mol_type = other DNA
agtttagatctgtattataa

SEQ ID NO: 37666 - DNA, 20 bp, synthetic construct
  source 1..20: mol_type = other DNA
cagtttagatctgtattata

SEQ ID NO: 37667 - DNA, 20 bp, synthetic construct
  source 1..20: mol_type = other DNA
ccagtttagatctgtattat

SEQ ID NO: 37668 - DNA, 20 bp, synthetic construct
  source 1..20: mol_type = other DNA
tccagtttagatctgtatta

SEQ ID NO: 37669 - DNA, 20 bp, synthetic construct
  source 1..20: mol_type = other DNA
ctccagtttagatctgtatt

SEQ ID NO: 37670 - DNA, 20 bp, synthetic construct
  source 1..20: mol_type = other DNA
tctccagtttagatctgtat

SEQ ID NO: 37671 - DNA, 20 bp, synthetic construct
  source 1..20: mol_type = other DNA
ctctccagtttagatctgta

SEQ ID NO: 37672 - DNA, 20 bp, synthetic construct
  source 1..20: mol_type = other DNA
actctccagtttagatctgt

SEQ ID NO: 37673 - DNA, 20 bp, synthetic construct
  source 1..20: mol_type = other DNA
aactctccagtttagatctg

SEQ ID NO: 37674 - DNA, 20 bp, synthetic construct
  source 1..20: mol_type = other DNA
caactctccagtttagatct

SEQ ID NO: 37675 - DNA, 20 bp, synthetic construct
  source 1..20: mol_type = other DNA
tcaactctccagtttagatc

SEQ ID NO: 37676 - DNA, 20 bp, synthetic construct
  source 1..20: mol_type = other DNA
ttcaactctccagtttagat

SEQ ID NO: 37677 - DNA, 20 bp, synthetic construct
  source 1..20: mol_type = other DNA
tttcaactctccagtttaga

SEQ ID NO: 37678 - DNA, 20 bp, synthetic construct
  source 1..20: mol_type = other DNA
ttttcaactctccagtttag

SEQ ID NO: 37679 - DNA, 20 bp, synthetic construct
  source 1..20: mol_type = other DNA
gttttcaactctccagttta

SEQ ID NO: 37680 - DNA, 20 bp, synthetic construct
  source 1..20: mol_type = other DNA
tgttttcaactctccagttt

SEQ ID NO: 37681 - DNA, 20 bp, synthetic construct
  source 1..20: mol_type = other DNA
ctgttttcaactctccagtt

SEQ ID NO: 37682 - DNA, 20 bp, synthetic construct
  source 1..20: mol_type = other DNA
gctgttttcaactctccagt

SEQ ID NO: 37683 - DNA, 20 bp, synthetic construct
  source 1..20: mol_type = other DNA
tgctgttttcaactctccag

SEQ ID NO: 37684 - DNA, 20 bp, synthetic construct
  source 1..20: mol_type = other DNA
atgctgttttcaactctcca

SEQ ID NO: 37685 - DNA, 20 bp, synthetic construct
  source 1..20: mol_type = other DNA
gatgctgttttcaactctcc

SEQ ID NO: 37686 - DNA, 20 bp, synthetic construct
  source 1..20: mol_type = other DNA
cgatgctgttttcaactctc

SEQ ID NO: 37687 - DNA, 20 bp, synthetic construct
  source 1..20: mol_type = other DNA
acgatgctgttttcaactct

SEQ ID NO: 37688 - DNA, 20 bp, synthetic construct
  source 1..20: mol_type = other DNA
tacgatgctgttttcaactc

SEQ ID NO: 37689 - DNA, 20 bp, synthetic construct
  source 1..20: mol_type = other DNA
atacgatgctgttttcaact

SEQ ID NO: 37690 - DNA, 20 bp, synthetic construct
  source 1..20: mol_type = other DNA
tatacgatgctgttttcaac

SEQ ID NO: 37691 - DNA, 20 bp, synthetic construct
  source 1..20: mol_type = other DNA
atatacgatgctgttttcaa

SEQ ID NO: 37692 - DNA, 20 bp, synthetic construct
  source 1..20: mol_type = other DNA
aatatacgatgctgttttca

SEQ ID NO: 37693 - DNA, 20 bp, synthetic construct
  source 1..20: mol_type = other DNA
aaatatacgatgctgttttc

SEQ ID NO: 37694 - DNA, 20 bp, synthetic construct
  source 1..20: mol_type = other DNA
caaatatacgatgctgtttt

SEQ ID NO: 37695 - DNA, 20 bp, synthetic construct
  source 1..20: mol_type = other DNA
tcaaatatacgatgctgttt

SEQ ID NO: 37696 - DNA, 20 bp, synthetic construct
  source 1..20: mol_type = other DNA
atcaaatatacgatgctgtt

SEQ ID NO: 37697 - DNA, 20 bp, synthetic construct
  source 1..20: mol_type = other DNA
aatcaaatatacgatgctgt

SEQ ID NO: 37698 - DNA, 20 bp, synthetic construct
  source 1..20: mol_type = other DNA
caatcaaatatacgatgctg

SEQ ID NO: 37699 - DNA, 20 bp, synthetic construct
  source 1..20: mol_type = other DNA
tcaatcaaatatacgatgct

SEQ ID NO: 37700 - DNA, 20 bp, synthetic construct
  source 1..20: mol_type = other DNA
ctcaatcaaatatacgatgc

SEQ ID NO: 37701 - DNA, 20 bp, synthetic construct
  source 1..20: mol_type = other DNA
tctcaatcaaatatacgatg

SEQ ID NO: 37702 - DNA, 20 bp, synthetic construct
  source 1..20: mol_type = other DNA
atctcaatcaaatatacgat

SEQ ID NO: 37703 - DNA, 20 bp, synthetic construct
  source 1..20: mol_type = other DNA
tatctcaatcaaatatacga

SEQ ID NO: 37704 - DNA, 20 bp, synthetic construct
  source 1..20: mol_type = other DNA
ttatctcaatcaaatatacg

SEQ ID NO: 37705 - DNA, 20 bp, synthetic construct
  source 1..20: mol_type = other DNA
attatctcaatcaaatatac

SEQ ID NO: 37706 - DNA, 20 bp, synthetic construct
  source 1..20: mol_type = other DNA
gattatctcaatcaaatata

SEQ ID NO: 37707 - DNA, 20 bp, synthetic construct
  source 1..20: mol_type = other DNA
cgattatctcaatcaaatat

SEQ ID NO: 37708 - DNA, 20 bp, synthetic construct
  source 1..20: mol_type = other DNA
tcgattatctcaatcaaata

SEQ ID NO: 37709 - DNA, 20 bp, synthetic construct
  source 1..20: mol_type = other DNA
ttcgattatctcaatcaaat

SEQ ID NO: 37710 - DNA, 20 bp, synthetic construct
  source 1..20: mol_type = other DNA
cttcgattatctcaatcaaa

SEQ ID NO: 37711 - DNA, 20 bp, synthetic construct
  source 1..20: mol_type = other DNA
ccttcgattatctcaatcaa

SEQ ID NO: 37712 - DNA, 20 bp, synthetic construct
  source 1..20: mol_type = other DNA
tccttcgattatctcaatca

SEQ ID NO: 37713 - DNA, 20 bp, synthetic construct
  source 1..20: mol_type = other DNA
ttccttcgattatctcaatc

SEQ ID NO: 37714 - DNA, 20 bp, synthetic construct
  source 1..20: mol_type = other DNA
cttccttcgattatctcaat

SEQ ID NO: 37715 - DNA, 20 bp, synthetic construct
  source 1..20: mol_type = other DNA
tcttccttcgattatctcaa

SEQ ID NO: 37716 - DNA, 20 bp, synthetic construct
  source 1..20: mol_type = other DNA
gtcttccttcgattatctca

SEQ ID NO: 37717 - DNA, 20 bp, synthetic construct
  source 1..20: mol_type = other DNA
agtcttccttcgattatctc

SEQ ID NO: 37718 - DNA, 20 bp, synthetic construct
  source 1..20: mol_type = other DNA
aagtcttccttcgattatct

SEQ ID NO: 37719 - DNA, 20 bp, synthetic construct
  source 1..20: mol_type = other DNA
gaagtcttccttcgattatc

SEQ ID NO: 37720 - DNA, 20 bp, synthetic construct
  source 1..20: mol_type = other DNA
ggaagtcttccttcgattat

SEQ ID NO: 37721 - DNA, 20 bp, synthetic construct
  source 1..20: mol_type = other DNA
aggaagtcttccttcgatta

SEQ ID NO: 37722 - DNA, 20 bp, synthetic construct
  source 1..20: mol_type = other DNA
caggaagtcttccttcgatt

SEQ ID NO: 37723 - DNA, 20 bp, synthetic construct
  source 1..20: mol_type = other DNA
tcaggaagtcttccttcgat

SEQ ID NO: 37724 - DNA, 20 bp, synthetic construct
  source 1..20: mol_type = other DNA
ttcaggaagtcttccttcga

SEQ ID NO: 37725 - DNA, 20 bp, synthetic construct
  source 1..20: mol_type = other DNA
tttcaggaagtcttccttcg

SEQ ID NO: 37726 - DNA, 20 bp, synthetic construct
  source 1..20: mol_type = other DNA
ttttcaggaagtcttccttc

SEQ ID NO: 37727 - DNA, 20 bp, synthetic construct
  source 1..20: mol_type = other DNA
cttttcaggaagtcttcctt

SEQ ID NO: 37728 - DNA, 20 bp, synthetic construct
  source 1..20: mol_type = other DNA
tcttttcaggaagtcttcct

SEQ ID NO: 37729 - DNA, 20 bp, synthetic construct
  source 1..20: mol_type = other DNA
atcttttcaggaagtcttcc

SEQ ID NO: 37730 - DNA, 20 bp, synthetic construct
  source 1..20: mol_type = other DNA
catcttttcaggaagtcttc

SEQ ID NO: 37731 - DNA, 20 bp, synthetic construct
  source 1..20: mol_type = other DNA
ccatcttttcaggaagtctt

SEQ ID NO: 37732 - DNA, 20 bp, synthetic construct
  source 1..20: mol_type = other DNA
gccatcttttcaggaagtct

SEQ ID NO: 37733 - DNA, 20 bp, synthetic construct
  source 1..20: mol_type = other DNA
tgccatcttttcaggaagtc

SEQ ID NO: 37734 - DNA, 20 bp, synthetic construct
  source 1..20: mol_type = other DNA
atgccatcttttcaggaagt

SEQ ID NO: 37735 - DNA, 20 bp, synthetic construct
  source 1..20: mol_type = other DNA
aatgccatcttttcaggaag

SEQ ID NO: 37736 - DNA, 20 bp, synthetic construct
  source 1..20: mol_type = other DNA
aaatgccatcttttcaggaa

SEQ ID NO: 37737 - DNA, 20 bp, synthetic construct
  source 1..20: mol_type = other DNA
caaatgccatcttttcagga

SEQ ID NO: 37738 - DNA, 20 bp, synthetic construct
  source 1..20: mol_type = other DNA
tcaaatgccatcttttcagg

SEQ ID NO: 37739 - DNA, 20 bp, synthetic construct
  source 1..20: mol_type = other DNA
ctcaaatgccatcttttcag

SEQ ID NO: 37740 - DNA, 20 bp, synthetic construct
  source 1..20: mol_type = other DNA
actcaaatgccatcttttca

SEQ ID NO: 37741 - DNA, 20 bp, synthetic construct
  source 1..20: mol_type = other DNA
aactcaaatgccatcttttc

SEQ ID NO: 37742 - DNA, 20 bp, synthetic construct
  source 1..20: mol_type = other DNA
aaactcaaatgccatctttt

SEQ ID NO: 37743 - DNA, 20 bp, synthetic construct
  source 1..20: mol_type = other DNA
gaaactcaaatgccatcttt

SEQ ID NO: 37744 - DNA, 20 bp, synthetic construct
  source 1..20: mol_type = other DNA
tgaaactcaaatgccatctt

SEQ ID NO: 37745 - DNA, 20 bp, synthetic construct
  source 1..20: mol_type = other DNA
ttgaaactcaaatgccatct

SEQ ID NO: 37746 - DNA, 20 bp, synthetic construct
  source 1..20: mol_type = other DNA
cttgaaactcaaatgccatc

SEQ ID NO: 37747 - DNA, 20 bp, synthetic construct
  source 1..20: mol_type = other DNA
ccttgaaactcaaatgccat

SEQ ID NO: 37748 - DNA, 20 bp, synthetic construct
  source 1..20: mol_type = other DNA
gccttgaaactcaaatgcca

SEQ ID NO: 37749 - DNA, 20 bp, synthetic construct
  source 1..20: mol_type = other DNA
agccttgaaactcaaatgcc

SEQ ID NO: 37750 - DNA, 20 bp, synthetic construct
  source 1..20: mol_type = other DNA
cagccttgaaactcaaatgc

SEQ ID NO: 37751 - DNA, 20 bp, synthetic construct
  source 1..20: mol_type = other DNA
tcagccttgaaactcaaatg

SEQ ID NO: 37752 - DNA, 20 bp, synthetic construct
  source 1..20: mol_type = other DNA
ctcagccttgaaactcaaat

SEQ ID NO: 37753 - DNA, 20 bp, synthetic construct
  source 1..20: mol_type = other DNA
actcagccttgaaactcaaa

SEQ ID NO: 37754 - DNA, 20 bp, synthetic construct
  source 1..20: mol_type = other DNA
tactcagccttgaaactcaa

SEQ ID NO: 37755 - DNA, 20 bp, synthetic construct
  source 1..20: mol_type = other DNA
ctactcagccttgaaactca

SEQ ID NO: 37756 - DNA, 20 bp, synthetic construct
  source 1..20: mol_type = other DNA
cctactcagccttgaaactc

SEQ ID NO: 37757 - DNA, 20 bp, synthetic construct
  source 1..20: mol_type = other DNA
tcctactcagccttgaaact

SEQ ID NO: 37758 - DNA, 20 bp, synthetic construct
  source 1..20: mol_type = other DNA
atcctactcagccttgaaac

SEQ ID NO: 37759 - DNA, 20 bp, synthetic construct
  source 1..20: mol_type = other DNA
aatcctactcagccttgaaa

SEQ ID NO: 37760 - DNA, 20 bp, synthetic construct
  source 1..20: mol_type = other DNA
taatcctactcagccttgaa

SEQ ID NO: 37761 - DNA, 20 bp, synthetic construct
  source 1..20: mol_type = other DNA
ttaatcctactcagccttga

SEQ ID NO: 37762 - DNA, 20 bp, synthetic construct
  source 1..20: mol_type = other DNA
cttaatcctactcagccttg

SEQ ID NO: 37763 - DNA, 20 bp, synthetic construct
  source 1..20: mol_type = other DNA
acttaatcctactcagcctt

SEQ ID NO: 37764 - DNA, 20 bp, synthetic construct
  source 1..20: mol_type = other DNA
tacttaatcctactcagcct

SEQ ID NO: 37765 - DNA, 20 bp, synthetic construct
  source 1..20: mol_type = other DNA
atacttaatcctactcagcc

SEQ ID NO: 37766 - DNA, 20 bp, synthetic construct
  source 1..20: mol_type = other DNA
aatacttaatcctactcagc

SEQ ID NO: 37767 - DNA, 20 bp, synthetic construct
  source 1..20: mol_type = other DNA
taatacttaatcctactcag

SEQ ID NO: 37768 - DNA, 20 bp, synthetic construct
  source 1..20: mol_type = other DNA
ataatacttaatcctactca

SEQ ID NO: 37769 - DNA, 20 bp, synthetic construct
  source 1..20: mol_type = other DNA
aataatacttaatcctactc

SEQ ID NO: 37770 - DNA, 20 bp, synthetic construct
  source 1..20: mol_type = other DNA
taataatacttaatcctact

SEQ ID NO: 37771 - DNA, 20 bp, synthetic construct
  source 1..20: mol_type = other DNA
ataataatacttaatcctac

SEQ ID NO: 37772 - DNA, 20 bp, synthetic construct
  source 1..20: mol_type = other DNA
aataataatacttaatccta

SEQ ID NO: 37773 - DNA, 20 bp, synthetic construct
  source 1..20: mol_type = other DNA
aaataataatacttaatcct

SEQ ID NO: 37774 - DNA, 20 bp, synthetic construct
  source 1..20: mol_type = other DNA
taaataataatacttaatcc

SEQ ID NO: 37775 - DNA, 20 bp, synthetic construct
  source 1..20: mol_type = other DNA
ttaaataataatacttaatc

SEQ ID NO: 37776 - DNA, 20 bp, synthetic construct
  source 1..20: mol_type = other DNA
tttaaataataatacttaat

SEQ ID NO: 37777 - DNA, 20 bp, synthetic construct
  source 1..20: mol_type = other DNA
ttttaaataataatacttaa

SEQ ID NO: 37778 - DNA, 20 bp, synthetic construct
  source 1..20: mol_type = other DNA
tttttaaataataatactta

SEQ ID NO: 37779 - DNA, 20 bp, synthetic construct
  source 1..20: mol_type = other DNA
ttttttaaataataatactt

SEQ ID NO: 37780 - DNA, 20 bp, synthetic construct
  source 1..20: mol_type = other DNA
attttttaaataataatact

SEQ ID NO: 37781 - DNA, 20 bp, synthetic construct
  source 1..20: mol_type = other DNA
cattttttaaataataatac

SEQ ID NO: 37782 - DNA, 20 bp, synthetic construct
  source 1..20: mol_type = other DNA
gcattttttaaataataata

SEQ ID NO: 37783 - DNA, 20 bp, synthetic construct
  source 1..20: mol_type = other DNA
ggcattttttaaataataat

SEQ ID NO: 37784 - DNA, 20 bp, synthetic construct
  source 1..20: mol_type = other DNA
aggcattttttaaataataa

SEQ ID NO: 37785 - DNA, 20 bp, synthetic construct
  source 1..20: mol_type = other DNA
aaggcattttttaaataata

SEQ ID NO: 37786 - DNA, 20 bp, synthetic construct
  source 1..20: mol_type = other DNA
caaggcattttttaaataat

SEQ ID NO: 37787 - DNA, 20 bp, synthetic construct
  source 1..20: mol_type = other DNA
ccaaggcattttttaaataa

SEQ ID NO: 37788 - DNA, 20 bp, synthetic construct
  source 1..20: mol_type = other DNA
tccaaggcattttttaaata

SEQ ID NO: 37789 - DNA, 20 bp, synthetic construct
  source 1..20: mol_type = other DNA
gtccaaggcattttttaaat

SEQ ID NO: 37790 - DNA, 20 bp, synthetic construct
  source 1..20: mol_type = other DNA
tgtccaaggcattttttaaa

SEQ ID NO: 37791 - DNA, 20 bp, synthetic construct
  source 1..20: mol_type = other DNA
ttgtccaaggcattttttaa

SEQ ID NO: 37792 - DNA, 20 bp, synthetic construct
  source 1..20: mol_type = other DNA
attgtccaaggcatttttta

SEQ ID NO: 37793 - DNA, 20 bp, synthetic construct
  source 1..20: mol_type = other DNA
cattgtccaaggcatttttt

SEQ ID NO: 37794 - DNA, 20 bp, synthetic construct
  source 1..20: mol_type = other DNA
gcattgtccaaggcattttt

SEQ ID NO: 37795 - DNA, 20 bp, synthetic construct
  source 1..20: mol_type = other DNA
tgcattgtccaaggcatttt

SEQ ID NO: 37796 - DNA, 20 bp, synthetic construct
  source 1..20: mol_type = other DNA
atgcattgtccaaggcattt

SEQ ID NO: 37797 - DNA, 20 bp, synthetic construct
  source 1..20: mol_type = other DNA
aatgcattgtccaaggcatt

SEQ ID NO: 37798 - DNA, 20 bp, synthetic construct
  source 1..20: mol_type = other DNA
taatgcattgtccaaggcat

SEQ ID NO: 37799 - DNA, 20 bp, synthetic construct
  source 1..20: mol_type = other DNA
ttaatgcattgtccaaggca

SEQ ID NO: 37800 - DNA, 20 bp, synthetic construct
  source 1..20: mol_type = other DNA
tttaatgcattgtccaaggc

SEQ ID NO: 37801 - DNA, 20 bp, synthetic construct
  source 1..20: mol_type = other DNA
atttaatgcattgtccaagg

SEQ ID NO: 37802 - DNA, 20 bp, synthetic construct
  source 1..20: mol_type = other DNA
tatttaatgcattgtccaag

SEQ ID NO: 37803 - DNA, 20 bp, synthetic construct
  source 1..20: mol_type = other DNA
ctatttaatgcattgtccaa

SEQ ID NO: 37804 - DNA, 20 bp, synthetic construct
  source 1..20: mol_type = other DNA
tctatttaatgcattgtcca

SEQ ID NO: 37805 - DNA, 20 bp, synthetic construct
  source 1..20: mol_type = other DNA
ctctatttaatgcattgtcc

SEQ ID NO: 37806 - DNA, 20 bp, synthetic construct
  source 1..20: mol_type = other DNA
actctatttaatgcattgtc

SEQ ID NO: 37807 - DNA, 20 bp, synthetic construct
  source 1..20: mol_type = other DNA
aactctatttaatgcattgt

SEQ ID NO: 37808 - DNA, 20 bp, synthetic construct
  source 1..20: mol_type = other DNA
taactctatttaatgcattg

SEQ ID NO: 37809 - DNA, 20 bp, synthetic construct
  source 1..20: mol_type = other DNA
ttaactctatttaatgcatt

SEQ ID NO: 37810 - DNA, 20 bp, synthetic construct
  source 1..20: mol_type = other DNA
gttaactctatttaatgcat

SEQ ID NO: 37811 - DNA, 20 bp, synthetic construct
  source 1..20: mol_type = other DNA
tgttaactctatttaatgca

SEQ ID NO: 37812 - DNA, 20 bp, synthetic construct
  source 1..20: mol_type = other DNA
ttgttaactctatttaatgc

SEQ ID NO: 37813 - DNA, 20 bp, synthetic construct
  source 1..20: mol_type = other DNA
tttgttaactctatttaatg

SEQ ID NO: 37814 - DNA, 20 bp, synthetic construct
  source 1..20: mol_type = other DNA
atttgttaactctatttaat

SEQ ID NO: 37815 - DNA, 20 bp, synthetic construct
  source 1..20: mol_type = other DNA
gatttgttaactctatttaa

SEQ ID NO: 37816 - DNA, 20 bp, synthetic construct
  source 1..20: mol_type = other DNA
tgatttgttaactctattta

SEQ ID NO: 37817 - DNA, 20 bp, synthetic construct
  source 1..20: mol_type = other DNA
gtgatttgttaactctattt

SEQ ID NO: 37818 - DNA, 20 bp, synthetic construct
  source 1..20: mol_type = other DNA
tgtgatttgttaactctatt

SEQ ID NO: 37819 - DNA, 20 bp, synthetic construct
  source 1..20: mol_type = other DNA
atgtgatttgttaactctat

SEQ ID NO: 37820 - DNA, 20 bp, synthetic construct
  source 1..20: mol_type = other DNA
gatgtgatttgttaactcta

SEQ ID NO: 37821 - DNA, 20 bp, synthetic construct
  source 1..20: mol_type = other DNA
tgatgtgatttgttaactct

SEQ ID NO: 37822 - DNA, 20 bp, synthetic construct
  source 1..20: mol_type = other DNA
gtgatgtgatttgttaactc

SEQ ID NO: 37823 - DNA, 20 bp, synthetic construct
  source 1..20: mol_type = other DNA
agtgatgtgatttgttaact

SEQ ID NO: 37824 - DNA, 20 bp, synthetic construct
  source 1..20: mol_type = other DNA
aagtgatgtgatttgttaac

SEQ ID NO: 37825 - DNA, 20 bp, synthetic construct
  source 1..20: mol_type = other DNA
taagtgatgtgatttgttaa

SEQ ID NO: 37826 - DNA, 20 bp, synthetic construct
  source 1..20: mol_type = other DNA
ataagtgatgtgatttgtta

SEQ ID NO: 37827 - DNA, 20 bp, synthetic construct
  source 1..20: mol_type = other DNA
tataagtgatgtgatttgtt

SEQ ID NO: 37828 - DNA, 20 bp, synthetic construct
  source 1..20: mol_type = other DNA
ctataagtgatgtgatttgt

SEQ ID NO: 37829 - DNA, 20 bp, synthetic construct
  source 1..20: mol_type = other DNA
actataagtgatgtgatttg

SEQ ID NO: 37830 - DNA, 20 bp, synthetic construct
  source 1..20: mol_type = other DNA
gactataagtgatgtgattt

SEQ ID NO: 37831 - DNA, 20 bp, synthetic construct
  source 1..20: mol_type = other DNA
agactataagtgatgtgatt

SEQ ID NO: 37832 - DNA, 20 bp, synthetic construct
  source 1..20: mol_type = other DNA
gagactataagtgatgtgat

SEQ ID NO: 37833 - DNA, 20 bp, synthetic construct
  source 1..20: mol_type = other DNA
ggagactataagtgatgtga

SEQ ID NO: 37834 - DNA, 20 bp, synthetic construct
  source 1..20: mol_type = other DNA
tggagactataagtgatgtg

SEQ ID NO: 37835 - DNA, 20 bp, synthetic construct
  source 1..20: mol_type = other DNA
ttggagactataagtgatgt

SEQ ID NO: 37836 - DNA, 20 bp, synthetic construct
  source 1..20: mol_type = other DNA
attggagactataagtgatg

SEQ ID NO: 37837 - DNA, 20 bp, synthetic construct
  source 1..20: mol_type = other DNA
aattggagactataagtgat

SEQ ID NO: 37838 - DNA, 20 bp, synthetic construct
  source 1..20: mol_type = other DNA
taattggagactataagtga

SEQ ID NO: 37839 - DNA, 20 bp, synthetic construct
  source 1..20: mol_type = other DNA
ttaattggagactataagtg

SEQ ID NO: 37840 - DNA, 20 bp, synthetic construct
  source 1..20: mol_type = other DNA
tttaattggagactataagt

SEQ ID NO: 37841 - DNA, 20 bp, synthetic construct
  source 1..20: mol_type = other DNA
ttttaattggagactataag

SEQ ID NO: 37842 - DNA, 20 bp, synthetic construct
  source 1..20: mol_type = other DNA
tttttaattggagactataa

SEQ ID NO: 37843 - DNA, 20 bp, synthetic construct
  source 1..20: mol_type = other DNA
gtttttaattggagactata

SEQ ID NO: 37844 - DNA, 20 bp, synthetic construct
  source 1..20: mol_type = other DNA
tgtttttaattggagactat

SEQ ID NO: 37845 - DNA, 20 bp, synthetic construct
  source 1..20: mol_type = other DNA
atgtttttaattggagacta

SEQ ID NO: 37846 - DNA, 20 bp, synthetic construct
  source 1..20: mol_type = other DNA
aatgtttttaattggagact

SEQ ID NO: 37847 - DNA, 20 bp, synthetic construct
  source 1..20: mol_type = other DNA
aaatgtttttaattggagac

SEQ ID NO: 37848 - DNA, 20 bp, synthetic construct
  source 1..20: mol_type = other DNA
aaaatgtttttaattggaga

SEQ ID NO: 37849 - DNA, 20 bp, synthetic construct
  source 1..20: mol_type = other DNA
taaaatgtttttaattggag

SEQ ID NO: 37850 - DNA, 20 bp, synthetic construct
  source 1..20: mol_type = other DNA
gtaaaatgtttttaattgga

SEQ ID NO: 37851 - DNA, 20 bp, synthetic construct
  source 1..20: mol_type = other DNA
agtaaaatgtttttaattgg

SEQ ID NO: 37852 - DNA, 20 bp, synthetic construct
  source 1..20: mol_type = other DNA
aagtaaaatgtttttaattg

SEQ ID NO: 37853 - DNA, 20 bp, synthetic construct
  source 1..20: mol_type = other DNA
taagtaaaatgtttttaatt

SEQ ID NO: 37854 - DNA, 20 bp, synthetic construct
  source 1..20: mol_type = other DNA
ttaagtaaaatgtttttaat

SEQ ID NO: 37855 - DNA, 20 bp, synthetic construct
  source 1..20: mol_type = other DNA
tttaagtaaaatgtttttaa

SEQ ID NO: 37856 - DNA, 20 bp, synthetic construct
  source 1..20: mol_type = other DNA
gtttaagtaaaatgttttta

SEQ ID NO: 37857 - DNA, 20 bp, synthetic construct
  source 1..20: mol_type = other DNA
tgtttaagtaaaatgttttt

SEQ ID NO: 37858 - DNA, 20 bp, synthetic construct
  source 1..20: mol_type = other DNA
atgtttaagtaaaatgtttt

SEQ ID NO: 37859 - DNA, 20 bp, synthetic construct
  source 1..20: mol_type = other DNA
tatgtttaagtaaaatgttt

SEQ ID NO: 37860 - DNA, 20 bp, synthetic construct
  source 1..20: mol_type = other DNA
ttatgtttaagtaaaatgtt

SEQ ID NO: 37861 - DNA, 20 bp, synthetic construct
  source 1..20: mol_type = other DNA
attatgtttaagtaaaatgt

SEQ ID NO: 37862 - DNA, 20 bp, synthetic construct
  source 1..20: mol_type = other DNA
aattatgtttaagtaaaatg

SEQ ID NO: 37863 - DNA, 20 bp, synthetic construct
  source 1..20: mol_type = other DNA
aaattatgtttaagtaaaat

SEQ ID NO: 37864 - DNA, 20 bp, synthetic construct
  source 1..20: mol_type = other DNA
aaaattatgtttaagtaaaa

SEQ ID NO: 37865 - DNA, 20 bp, synthetic construct
  source 1..20: mol_type = other DNA
taaaattatgtttaagtaaa

SEQ ID NO: 37866 - DNA, 20 bp, synthetic construct
  source 1..20: mol_type = other DNA
ctaaaattatgtttaagtaa

SEQ ID NO: 37867 - DNA, 20 bp, synthetic construct
  source 1..20: mol_type = other DNA
tctaaaattatgtttaagta

SEQ ID NO: 37868 - DNA, 20 bp, synthetic construct
  source 1..20: mol_type = other DNA
gtctaaaattatgtttaagt

SEQ ID NO: 37869 - DNA, 20 bp, synthetic construct
  source 1..20: mol_type = other DNA
agtctaaaattatgtttaag

SEQ ID NO: 37870 - DNA, 20 bp, synthetic construct
  source 1..20: mol_type = other DNA
aagtctaaaattatgtttaa

SEQ ID NO: 37871 - DNA, 20 bp, synthetic construct
  source 1..20: mol_type = other DNA
aaagtctaaaattatgttta

SEQ ID NO: 37872 - DNA, 20 bp, synthetic construct
  source 1..20: mol_type = other DNA
aaaagtctaaaattatgttt

SEQ ID NO: 37873 - DNA, 20 bp, synthetic construct
  source 1..20: mol_type = other DNA
taaaagtctaaaattatgtt

SEQ ID NO: 37874 - DNA, 20 bp, synthetic construct
  source 1..20: mol_type = other DNA
ctaaaagtctaaaattatgt

SEQ ID NO: 37875 - DNA, 20 bp, synthetic construct
  source 1..20: mol_type = other DNA
tctaaaagtctaaaattatg

SEQ ID NO: 37876 - DNA, 20 bp, synthetic construct
  source 1..20: mol_type = other DNA
ttctaaaagtctaaaattat

SEQ ID NO: 37877 - DNA, 20 bp, synthetic construct
  source 1..20: mol_type = other DNA
tttctaaaagtctaaaatta

SEQ ID NO: 37878 - DNA, 20 bp, synthetic construct
  source 1..20: mol_type = other DNA
ttttctaaaagtctaaaatt

SEQ ID NO: 37879 - DNA, 20 bp, synthetic construct
  source 1..20: mol_type = other DNA
tttttctaaaagtctaaaat

SEQ ID NO: 37880 - DNA, 20 bp, synthetic construct
  source 1..20: mol_type = other DNA
atttttctaaaagtctaaaa

SEQ ID NO: 37881 - DNA, 20 bp, synthetic construct
  source 1..20: mol_type = other DNA
aatttttctaaaagtctaaa

SEQ ID NO: 37882 - DNA, 20 bp, synthetic construct
  source 1..20: mol_type = other DNA
caatttttctaaaagtctaa

SEQ ID NO: 37883 - DNA, 20 bp, synthetic construct
  source 1..20: mol_type = other DNA
gcaatttttctaaaagtcta

SEQ ID NO: 37884 - DNA, 20 bp, synthetic construct
  source 1..20: mol_type = other DNA
tgcaatttttctaaaagtct

SEQ ID NO: 37885 - DNA, 20 bp, synthetic construct
  source 1..20: mol_type = other DNA
ttgcaatttttctaaaagtc

SEQ ID NO: 37886 - DNA, 20 bp, synthetic construct
  source 1..20: mol_type = other DNA
tttgcaatttttctaaaagt

SEQ ID NO: 37887 - DNA, 20 bp, synthetic construct
  source 1..20: mol_type = other DNA
ctttgcaatttttctaaaag

SEQ ID NO: 37888 - DNA, 20 bp, synthetic construct
  source 1..20: mol_type = other DNA
tctttgcaatttttctaaaa

SEQ ID NO: 37889 - DNA, 20 bp, synthetic construct
  source 1..20: mol_type = other DNA
atctttgcaatttttctaaa

SEQ ID NO: 37890 - DNA, 20 bp, synthetic construct
  source 1..20: mol_type = other DNA
tatctttgcaatttttctaa

SEQ ID NO: 37891 - DNA, 20 bp, synthetic construct
  source 1..20: mol_type = other DNA
atatctttgcaatttttcta

SEQ ID NO: 37892 - DNA, 20 bp, synthetic construct
  source 1..20: mol_type = other DNA
aatatctttgcaatttttct

SEQ ID NO: 37893 - DNA, 20 bp, synthetic construct
  source 1..20: mol_type = other DNA
taatatctttgcaatttttc

SEQ ID NO: 37894 - DNA, 20 bp, synthetic construct
  source 1..20: mol_type = other DNA
ataatatctttgcaattttt

SEQ ID NO: 37895 - DNA, 20 bp, synthetic construct
  source 1..20: mol_type = other DNA
tataatatctttgcaatttt

SEQ ID NO: 37896 - DNA, 20 bp, synthetic construct
  source 1..20: mol_type = other DNA
ttataatatctttgcaattt

SEQ ID NO: 37897 - DNA, 20 bp, synthetic construct
  source 1..20: mol_type = other DNA
tttataatatctttgcaatt

SEQ ID NO: 37898 - DNA, 20 bp, synthetic construct
  source 1..20: mol_type = other DNA
ctttataatatctttgcaat

SEQ ID NO: 37899 - DNA, 20 bp, synthetic construct
  source 1..20: mol_type = other DNA
tctttataatatctttgcaa

SEQ ID NO: 37900 - DNA, 20 bp, synthetic construct
  source 1..20: mol_type = other DNA
ttctttataatatctttgca

SEQ ID NO: 37901 - DNA, 20 bp, synthetic construct
  source 1..20: mol_type = other DNA
attctttataatatctttgc

SEQ ID NO: 37902 - DNA, 20 bp, synthetic construct
  source 1..20: mol_type = other DNA
aattctttataatatctttg

SEQ ID NO: 37903 - DNA, 20 bp, synthetic construct
  source 1..20: mol_type = other DNA
gaattctttataatatcttt

SEQ ID NO: 37904 - DNA, 20 bp, synthetic construct
  source 1..20: mol_type = other DNA
agaattctttataatatctt

SEQ ID NO: 37905 - DNA, 20 bp, synthetic construct
  source 1..20: mol_type = other DNA
gagaattctttataatatct

SEQ ID NO: 37906 - DNA, 20 bp, synthetic construct
  source 1..20: mol_type = other DNA
ggagaattctttataatatc

SEQ ID NO: 37907 - DNA, 20 bp, synthetic construct
  source 1..20: mol_type = other DNA
aggagaattctttataatat

SEQ ID NO: 37908 - DNA, 20 bp, synthetic construct
  source 1..20: mol_type = other DNA
taggagaattctttataata

SEQ ID NO: 37909 - DNA, 20 bp, synthetic construct
  source 1..20: mol_type = other DNA
ataggagaattctttataat

SEQ ID NO: 37910 - DNA, 20 bp, synthetic construct
  source 1..20: mol_type = other DNA
tataggagaattctttataa

SEQ ID NO: 37911 - DNA, 20 bp, synthetic construct
  source 1..20: mol_type = other DNA
atataggagaattctttata

SEQ ID NO: 37912 - DNA, 20 bp, synthetic construct
  source 1..20: mol_type = other DNA
tatataggagaattctttat

SEQ ID NO: 37913 - DNA, 20 bp, synthetic construct
  source 1..20: mol_type = other DNA
atatataggagaattcttta

SEQ ID NO: 37914 - DNA, 20 bp, synthetic construct
  source 1..20: mol_type = other DNA
gatatataggagaattcttt

SEQ ID NO: 37915 - DNA, 20 bp, synthetic construct
  source 1..20: mol_type = other DNA
agatatataggagaattctt

SEQ ID NO: 37916 - DNA, 20 bp, synthetic construct
  source 1..20: mol_type = other DNA
gagatatataggagaattct

SEQ ID NO: 37917 - DNA, 20 bp, synthetic construct
  source 1..20: mol_type = other DNA
tgagatatataggagaattc

SEQ ID NO: 37918 - DNA, 20 bp, synthetic construct
  source 1..20: mol_type = other DNA
gtgagatatataggagaatt

SEQ ID NO: 37919 - DNA, 20 bp, synthetic construct
  source 1..20: mol_type = other DNA
ggtgagatatataggagaat

SEQ ID NO: 37920 - DNA, 20 bp, synthetic construct
  source 1..20: mol_type = other DNA
aggtgagatatataggagaa

SEQ ID NO: 37921 - DNA, 20 bp, synthetic construct
  source 1..20: mol_type = other DNA
caggtgagatatataggaga

SEQ ID NO: 37922 - DNA, 20 bp, synthetic construct
  source 1..20: mol_type = other DNA
acaggtgagatatataggag

SEQ ID NO: 37923 - DNA, 20 bp, synthetic construct
  source 1..20: mol_type = other DNA
tacaggtgagatatatagga

SEQ ID NO: 37924 - DNA, 20 bp, synthetic construct
  source 1..20: mol_type = other DNA
atacaggtgagatatatagg

SEQ ID NO: 37925 - DNA, 20 bp, synthetic construct
  source 1..20: mol_type = other DNA
aatacaggtgagatatatag

SEQ ID NO: 37926 - DNA, 20 bp, synthetic construct
  source 1..20: mol_type = other DNA
gaatacaggtgagatatata

SEQ ID NO: 37927 - DNA, 20 bp, synthetic construct
  source 1..20: mol_type = other DNA
agaatacaggtgagatatat

SEQ ID NO: 37928 - DNA, 20 bp, synthetic construct
  source 1..20: mol_type = other DNA
aagaatacaggtgagatata

SEQ ID NO: 37929 - DNA, 20 bp, synthetic construct
  source 1..20: mol_type = other DNA
gaagaatacaggtgagatat

SEQ ID NO: 37930 - DNA, 20 bp, synthetic construct
  source 1..20: mol_type = other DNA
tgaagaatacaggtgagata

SEQ ID NO: 37931 - DNA, 20 bp, synthetic construct
  source 1..20: mol_type = other DNA
ttgaagaatacaggtgagat

SEQ ID NO: 37932 - DNA, 20 bp, synthetic construct
  source 1..20: mol_type = other DNA
cttgaagaatacaggtgaga

SEQ ID NO: 37933 - DNA, 20 bp, synthetic construct
  source 1..20: mol_type = other DNA
acttgaagaatacaggtgag

SEQ ID NO: 37934 - DNA, 20 bp, synthetic construct
  source 1..20: mol_type = other DNA
tacttgaagaatacaggtga

SEQ ID NO: 37935 - DNA, 20 bp, synthetic construct
  source 1..20: mol_type = other DNA
ttacttgaagaatacaggtg

SEQ ID NO: 37936 - DNA, 20 bp, synthetic construct
  source 1..20: mol_type = other DNA
gttacttgaagaatacaggt

SEQ ID NO: 37937 - DNA, 20 bp, synthetic construct
  source 1..20: mol_type = other DNA
tgttacttgaagaatacagg

SEQ ID NO: 37938 - DNA, 20 bp, synthetic construct
  source 1..20: mol_type = other DNA
atgttacttgaagaatacag

SEQ ID NO: 37939 - DNA, 20 bp, synthetic construct
  source 1..20: mol_type = other DNA
aatgttacttgaagaataca

SEQ ID NO: 37940 - DNA, 20 bp, synthetic construct
  source 1..20: mol_type = other DNA
aaatgttacttgaagaatac

SEQ ID NO: 37941 - DNA, 20 bp, synthetic construct
  source 1..20: mol_type = other DNA
aaaatgttacttgaagaata

SEQ ID NO: 37942 - DNA, 20 bp, synthetic construct
  source 1..20: mol_type = other DNA
taaaatgttacttgaagaat

SEQ ID NO: 37943 - DNA, 20 bp, synthetic construct
  source 1..20: mol_type = other DNA
gtaaaatgttacttgaagaa

SEQ ID NO: 37944 - DNA, 20 bp, synthetic construct
  source 1..20: mol_type = other DNA
ggtaaaatgttacttgaaga

SEQ ID NO: 37945 - DNA, 20 bp, synthetic construct
  source 1..20: mol_type = other DNA
tggtaaaatgttacttgaag

SEQ ID NO: 37946 - DNA, 20 bp, synthetic construct
  source 1..20: mol_type = other DNA
atggtaaaatgttacttgaa

SEQ ID NO: 37947 - DNA, 20 bp, synthetic construct
  source 1..20: mol_type = other DNA
tatggtaaaatgttacttga

SEQ ID NO: 37948 - DNA, 20 bp, synthetic construct
  source 1..20: mol_type = other DNA
atatggtaaaatgttacttg

SEQ ID NO: 37949 - DNA, 20 bp, synthetic construct
  source 1..20: mol_type = other DNA
aatatggtaaaatgttactt

SEQ ID NO: 37950 - DNA, 20 bp, synthetic construct
  source 1..20: mol_type = other DNA
gaatatggtaaaatgttact

SEQ ID NO: 37951 - DNA, 20 bp, synthetic construct
  source 1..20: mol_type = other DNA
tgaatatggtaaaatgttac

SEQ ID NO: 37952 - DNA, 20 bp, synthetic construct
  source 1..20: mol_type = other DNA
gtgaatatggtaaaatgtta

SEQ ID NO: 37953 - DNA, 20 bp, synthetic construct
  source 1..20: mol_type = other DNA
ggtgaatatggtaaaatgtt

SEQ ID NO: 37954 - DNA, 20 bp, synthetic construct
  source 1..20: mol_type = other DNA
aggtgaatatggtaaaatgt

SEQ ID NO: 37955 - DNA, 20 bp, synthetic construct
  source 1..20: mol_type = other DNA
aaggtgaatatggtaaaatg

SEQ ID NO: 37956 - DNA, 20 bp, synthetic construct
  source 1..20: mol_type = other DNA
taaggtgaatatggtaaaat

SEQ ID NO: 37957 - DNA, 20 bp, synthetic construct
  source 1..20: mol_type = other DNA
ttaaggtgaatatggtaaaa

SEQ ID NO: 37958 - DNA, 20 bp, synthetic construct
  source 1..20: mol_type = other DNA
gttaaggtgaatatggtaaa

SEQ ID NO: 37959 - DNA, 20 bp, synthetic construct
  source 1..20: mol_type = other DNA
tgttaaggtgaatatggtaa

SEQ ID NO: 37960 - DNA, 20 bp, synthetic construct
  source 1..20: mol_type = other DNA
atgttaaggtgaatatggta

SEQ ID NO: 37961 - DNA, 20 bp, synthetic construct
  source 1..20: mol_type = other DNA
aatgttaaggtgaatatggt

SEQ ID NO: 37962 - DNA, 20 bp, synthetic construct
  source 1..20: mol_type = other DNA
aaatgttaaggtgaatatgg

SEQ ID NO: 37963 - DNA, 20 bp, synthetic construct
  source 1..20: mol_type = other DNA
aaaatgttaaggtgaatatg

SEQ ID NO: 37964 - DNA, 20 bp, synthetic construct
  source 1..20: mol_type = other DNA
gaaaatgttaaggtgaatat

SEQ ID NO: 37965 - DNA, 20 bp, synthetic construct
  source 1..20: mol_type = other DNA
agaaaatgttaaggtgaata

SEQ ID NO: 37966 - DNA, 20 bp, synthetic construct
  source 1..20: mol_type = other DNA
gagaaaatgttaaggtgaat

SEQ ID NO: 37967 - DNA, 20 bp, synthetic construct
  source 1..20: mol_type = other DNA
agagaaaatgttaaggtgaa

SEQ ID NO: 37968 - DNA, 20 bp, synthetic construct
  source 1..20: mol_type = other DNA
cagagaaaatgttaaggtga

SEQ ID NO: 37969 - DNA, 20 bp, synthetic construct
  source 1..20: mol_type = other DNA
acagagaaaatgttaaggtg

SEQ ID NO: 37970 - DNA, 20 bp, synthetic construct
  source 1..20: mol_type = other DNA
tacagagaaaatgttaaggt

SEQ ID NO: 37971 - DNA, 20 bp, synthetic construct
  source 1..20: mol_type = other DNA
atacagagaaaatgttaagg

SEQ ID NO: 37972 - DNA, 20 bp, synthetic construct
  source 1..20: mol_type = other DNA
aatacagagaaaatgttaag

SEQ ID NO: 37973 - DNA, 20 bp, synthetic construct
  source 1..20: mol_type = other DNA
caatacagagaaaatgttaa

SEQ ID NO: 37974 - DNA, 20 bp, synthetic construct
  source 1..20: mol_type = other DNA
ccaatacagagaaaatgtta

SEQ ID NO: 37975 - DNA, 20 bp, synthetic construct
  source 1..20: mol_type = other DNA
accaatacagagaaaatgtt

SEQ ID NO: 37976 - DNA, 20 bp, synthetic construct
  source 1..20: mol_type = other DNA
taccaatacagagaaaatgt

SEQ ID NO: 37977 - DNA, 20 bp, synthetic construct
  source 1..20: mol_type = other DNA
ttaccaatacagagaaaatg

SEQ ID NO: 37978 - DNA, 20 bp, synthetic construct
  source 1..20: mol_type = other DNA
attaccaatacagagaaaat

SEQ ID NO: 37979 - DNA, 20 bp, synthetic construct
  source 1..20: mol_type = other DNA
aattaccaatacagagaaaa

SEQ ID NO: 37980 - DNA, 20 bp, synthetic construct
  source 1..20: mol_type = other DNA
caattaccaatacagagaaa

SEQ ID NO: 37981 - DNA, 20 bp, synthetic construct
  source 1..20: mol_type = other DNA
acaattaccaatacagagaa

SEQ ID NO: 37982 - DNA, 20 bp, synthetic construct
  source 1..20: mol_type = other DNA
tacaattaccaatacagaga

SEQ ID NO: 37983 - DNA, 20 bp, synthetic construct
  source 1..20: mol_type = other DNA
atacaattaccaatacagag

SEQ ID NO: 37984 - DNA, 20 bp, synthetic construct
  source 1..20: mol_type = other DNA
tatacaattaccaatacaga

SEQ ID NO: 37985 - DNA, 20 bp, synthetic construct
  source 1..20: mol_type = other DNA
atatacaattaccaatacag

SEQ ID NO: 37986 - DNA, 20 bp, synthetic construct
  source 1..20: mol_type = other DNA
catatacaattaccaataca

SEQ ID NO: 37987 - DNA, 20 bp, synthetic construct
  source 1..20: mol_type = other DNA
acatatacaattaccaatac

SEQ ID NO: 37988 - DNA, 20 bp, synthetic construct
  source 1..20: mol_type = other DNA
tacatatacaattaccaata

SEQ ID NO: 37989 - DNA, 20 bp, synthetic construct
  source 1..20: mol_type = other DNA
ttacatatacaattaccaat

SEQ ID NO: 37990 - DNA, 20 bp, synthetic construct
  source 1..20: mol_type = other DNA
cttacatatacaattaccaa

SEQ ID NO: 37991 - DNA, 20 bp, synthetic construct
  source 1..20: mol_type = other DNA
tcttacatatacaattacca

SEQ ID NO: 37992 - DNA, 20 bp, synthetic construct
  source 1..20: mol_type = other DNA
atcttacatatacaattacc

SEQ ID NO: 37993 - DNA, 20 bp, synthetic construct
  source 1..20: mol_type = other DNA
aatcttacatatacaattac

SEQ ID NO: 37994 - DNA, 20 bp, synthetic construct
  source 1..20: mol_type = other DNA
aaatcttacatatacaatta

SEQ ID NO: 37995 - DNA, 20 bp, synthetic construct
  source 1..20: mol_type = other DNA
taaatcttacatatacaatt

SEQ ID NO: 37996 - DNA, 20 bp, synthetic construct
  source 1..20: mol_type = other DNA
ttaaatcttacatatacaat

SEQ ID NO: 37997 - DNA, 20 bp, synthetic construct
  source 1..20: mol_type = other DNA
attaaatcttacatatacaa

SEQ ID NO: 37998 - DNA, 20 bp, synthetic construct
  source 1..20: mol_type = other DNA
tattaaatcttacatataca

SEQ ID NO: 37999 - DNA, 20 bp, synthetic construct
  source 1..20: mol_type = other DNA
atattaaatcttacatatac

SEQ ID NO: 38000 - DNA, 20 bp, synthetic construct
  source 1..20: mol_type = other DNA
tatattaaatcttacatata

SEQ ID NO: 38001 - DNA, 20 bp, synthetic construct
  source 1..20: mol_type = other DNA
ttatattaaatcttacatat

SEQ ID NO: 38002 - DNA, 20 bp, synthetic construct
  source 1..20: mol_type = other DNA
tttatattaaatcttacata

SEQ ID NO: 38003 - DNA, 20 bp, synthetic construct
  source 1..20: mol_type = other DNA
ttttatattaaatcttacat

SEQ ID NO: 38004 - DNA, 20 bp, synthetic construct
  source 1..20: mol_type = other DNA
attttatattaaatcttaca

SEQ ID NO: 38005 - DNA, 20 bp, synthetic construct
  source 1..20: mol_type = other DNA
tattttatattaaatcttac

SEQ ID NO: 38006 - DNA, 20 bp, synthetic construct
  source 1..20: mol_type = other DNA
ttattttatattaaatctta

SEQ ID NO: 38007 - DNA, 20 bp, synthetic construct
  source 1..20: mol_type = other DNA
tttattttatattaaatctt

SEQ ID NO: 38008 - DNA, 20 bp, synthetic construct
  source 1..20: mol_type = other DNA
ttttattttatattaaatct

SEQ ID NO: 38009 - DNA, 20 bp, synthetic construct
  source 1..20: mol_type = other DNA
tttttattttatattaaatc

SEQ ID NO: 38010 - DNA, 20 bp, synthetic construct
  source 1..20: mol_type = other DNA
atttttattttatattaaat

SEQ ID NO: 38011 - DNA, 20 bp, synthetic construct
  source 1..20: mol_type = other DNA
aatttttattttatattaaa

SEQ ID NO: 38012 - DNA, 20 bp, synthetic construct
  source 1..20: mol_type = other DNA
gaatttttattttatattaa

SEQ ID NO: 38013 - DNA, 20 bp, synthetic construct
  source 1..20: mol_type = other DNA
agaatttttattttatatta

SEQ ID NO: 38014 - DNA, 20 bp, synthetic construct
  source 1..20: mol_type = other DNA
aagaatttttattttatatt

SEQ ID NO: 38015 - DNA, 20 bp, synthetic construct
  source 1..20: mol_type = other DNA
taagaatttttattttatat

SEQ ID NO: 38016 - DNA, 20 bp, synthetic construct
  source 1..20: mol_type = other DNA
ataagaatttttattttata

SEQ ID NO: 38017 - DNA, 20 bp, synthetic construct
  source 1..20: mol_type = other DNA
aataagaatttttattttat

SEQ ID NO: 38018 - DNA, 20 bp, synthetic construct
  source 1..20: mol_type = other DNA
taataagaatttttatttta

SEQ ID NO: 38019 - DNA, 20 bp, synthetic construct
  source 1..20: mol_type = other DNA
ttaataagaatttttatttt

SEQ ID NO: 38020 - DNA, 20 bp, synthetic construct
  source 1..20: mol_type = other DNA
tttaataagaatttttattt

SEQ ID NO: 38021 - DNA, 20 bp, synthetic construct
  source 1..20: mol_type = other DNA
gtttaataagaatttttatt

SEQ ID NO: 38022 - DNA, 20 bp, synthetic construct
  source 1..20: mol_type = other DNA
tgtttaataagaatttttat

SEQ ID NO: 38023 - DNA, 20 bp, synthetic construct
  source 1..20: mol_type = other DNA
atgtttaataagaattttta

SEQ ID NO: 38024 - DNA, 20 bp, synthetic construct
  source 1..20: mol_type = other DNA
tatgtttaataagaattttt

SEQ ID NO: 38025 - DNA, 20 bp, synthetic construct
  source 1..20: mol_type = other DNA
atatgtttaataagaatttt

SEQ ID NO: 38026 - DNA, 20 bp, synthetic construct
  source 1..20: mol_type = other DNA
catatgtttaataagaattt

SEQ ID NO: 38027 - DNA, 20 bp, synthetic construct
  source 1..20: mol_type = other DNA
tcatatgtttaataagaatt

SEQ ID NO: 38028 - DNA, 20 bp, synthetic construct
  source 1..20: mol_type = other DNA
ctcatatgtttaataagaat

SEQ ID NO: 38029 - DNA, 20 bp, synthetic construct
  source 1..20: mol_type = other DNA
tctcatatgtttaataagaa

SEQ ID NO: 38030 - DNA, 20 bp, synthetic construct
  source 1..20: mol_type = other DNA
ctctcatatgtttaataaga

SEQ ID NO: 38031 - DNA, 20 bp, synthetic construct
  source 1..20: mol_type = other DNA
tctctcatatgtttaataag

SEQ ID NO: 38032 - DNA, 20 bp, synthetic construct
  source 1..20: mol_type = other DNA
gtctctcatatgtttaataa

SEQ ID NO: 38033 - DNA, 20 bp, synthetic construct
  source 1..20: mol_type = other DNA
tgtctctcatatgtttaata

SEQ ID NO: 38034 - DNA, 20 bp, synthetic construct
  source 1..20: mol_type = other DNA
atgtctctcatatgtttaat

SEQ ID NO: 38035 - DNA, 20 bp, synthetic construct
  source 1..20: mol_type = other DNA
catgtctctcatatgtttaa

SEQ ID NO: 38036 - DNA, 20 bp, synthetic construct
  source 1..20: mol_type = other DNA
tcatgtctctcatatgttta

SEQ ID NO: 38037 - DNA, 20 bp, synthetic construct
  source 1..20: mol_type = other DNA
atcatgtctctcatatgttt

SEQ ID NO: 38038 - DNA, 20 bp, synthetic construct
  source 1..20: mol_type = other DNA
catcatgtctctcatatgtt

SEQ ID NO: 38039 - DNA, 20 bp, synthetic construct
  source 1..20: mol_type = other DNA
gcatcatgtctctcatatgt

SEQ ID NO: 38040 - DNA, 20 bp, synthetic construct
  source 1..20: mol_type = other DNA
ggcatcatgtctctcatatg

SEQ ID NO: 38041 - DNA, 20 bp, synthetic construct
  source 1..20: mol_type = other DNA
aggcatcatgtctctcatat

SEQ ID NO: 38042 - DNA, 20 bp, synthetic construct
  source 1..20: mol_type = other DNA
gaggcatcatgtctctcata

SEQ ID NO: 38043 - DNA, 20 bp, synthetic construct
  source 1..20: mol_type = other DNA
agaggcatcatgtctctcat

SEQ ID NO: 38044 - DNA, 20 bp, synthetic construct
  source 1..20: mol_type = other DNA
aagaggcatcatgtctctca

SEQ ID NO: 38045 - DNA, 20 bp, synthetic construct
  source 1..20: mol_type = other DNA
aaagaggcatcatgtctctc

SEQ ID NO: 38046 - DNA, 20 bp, synthetic construct
  source 1..20: mol_type = other DNA
taaagaggcatcatgtctct

SEQ ID NO: 38047 - DNA, 20 bp, synthetic construct
  source 1..20: mol_type = other DNA
ctaaagaggcatcatgtctc

SEQ ID NO: 38048 - DNA, 20 bp, synthetic construct
  source 1..20: mol_type = other DNA
gctaaagaggcatcatgtct

SEQ ID NO: 38049 - DNA, 20 bp, synthetic construct
  source 1..20: mol_type = other DNA
ggctaaagaggcatcatgtc

SEQ ID NO: 38050 - DNA, 20 bp, synthetic construct
  source 1..20: mol_type = other DNA
gggctaaagaggcatcatgt

SEQ ID NO: 38051 - DNA, 20 bp, synthetic construct
  source 1..20: mol_type = other DNA
agggctaaagaggcatcatg

SEQ ID NO: 38052 - DNA, 20 bp, synthetic construct
  source 1..20: mol_type = other DNA
tagggctaaagaggcatcat

SEQ ID NO: 38053 - DNA, 20 bp, synthetic construct
  source 1..20: mol_type = other DNA
ttagggctaaagaggcatca

SEQ ID NO: 38054 - DNA, 20 bp, synthetic construct
  source 1..20: mol_type = other DNA
tttagggctaaagaggcatc

SEQ ID NO: 38055 - DNA, 20 bp, synthetic construct
  source 1..20: mol_type = other DNA
atttagggctaaagaggcat

SEQ ID NO: 38056 - DNA, 20 bp, synthetic construct
  source 1..20: mol_type = other DNA
tatttagggctaaagaggca

SEQ ID NO: 38057 - DNA, 20 bp, synthetic construct
  source 1..20: mol_type = other DNA
gtatttagggctaaagaggc

SEQ ID NO: 38058 - DNA, 20 bp, synthetic construct
  source 1..20: mol_type = other DNA
agtatttagggctaaagagg

SEQ ID NO: 38059 - DNA, 20 bp, synthetic construct
  source 1..20: mol_type = other DNA
aagtatttagggctaaagag

SEQ ID NO: 38060 - DNA, 20 bp, synthetic construct
  source 1..20: mol_type = other DNA
gaagtatttagggctaaaga

SEQ ID NO: 38061 - DNA, 20 bp, synthetic construct
  source 1..20: mol_type = other DNA
tgaagtatttagggctaaag

SEQ ID NO: 38062 - DNA, 20 bp, synthetic construct
  source 1..20: mol_type = other DNA
ttgaagtatttagggctaaa

SEQ ID NO: 38063 - DNA, 20 bp, synthetic construct
  source 1..20: mol_type = other DNA
gttgaagtatttagggctaa

SEQ ID NO: 38064 - DNA, 20 bp, synthetic construct
  source 1..20: mol_type = other DNA
agttgaagtatttagggcta

SEQ ID NO: 38065 - DNA, 20 bp, synthetic construct
  source 1..20: mol_type = other DNA
aagttgaagtatttagggct

SEQ ID NO: 38066 - DNA, 20 bp, synthetic construct
  source 1..20: mol_type = other DNA
caagttgaagtatttagggc

SEQ ID NO: 38067 - DNA, 20 bp, synthetic construct
  source 1..20: mol_type = other DNA
acaagttgaagtatttaggg

SEQ ID NO: 38068 - DNA, 20 bp, synthetic construct
  source 1..20: mol_type = other DNA
tacaagttgaagtatttagg

SEQ ID NO: 38069 - DNA, 20 bp, synthetic construct
  source 1..20: mol_type = other DNA
atacaagttgaagtatttag

SEQ ID NO: 38070 - DNA, 20 bp, synthetic construct
  source 1..20: mol_type = other DNA
catacaagttgaagtattta

SEQ ID NO: 38071 - DNA, 20 bp, synthetic construct
  source 1..20: mol_type = other DNA
acatacaagttgaagtattt

SEQ ID NO: 38072 - DNA, 20 bp, synthetic construct
  source 1..20: mol_type = other DNA
tacatacaagttgaagtatt

SEQ ID NO: 38073 - DNA, 20 bp, synthetic construct
  source 1..20: mol_type = other DNA
gtacatacaagttgaagtat

SEQ ID NO: 38074 - DNA, 20 bp, synthetic construct
  source 1..20: mol_type = other DNA
agtacatacaagttgaagta

SEQ ID NO: 38075 - DNA, 20 bp, synthetic construct
  source 1..20: mol_type = other DNA
tagtacatacaagttgaagt

SEQ ID NO: 38076 - DNA, 20 bp, synthetic construct
  source 1..20: mol_type = other DNA
ttagtacatacaagttgaag

SEQ ID NO: 38077 - DNA, 20 bp, synthetic construct
  source 1..20: mol_type = other DNA
attagtacatacaagttgaa

SEQ ID NO: 38078 - DNA, 20 bp, synthetic construct
  source 1..20: mol_type = other DNA
tattagtacatacaagttga

SEQ ID NO: 38079 - DNA, 20 bp, synthetic construct
  source 1..20: mol_type = other DNA
ttattagtacatacaagttg

SEQ ID NO: 38080 - DNA, 20 bp, synthetic construct
  source 1..20: mol_type = other DNA
gttattagtacatacaagtt

SEQ ID NO: 38081 - DNA, 20 bp, synthetic construct
  source 1..20: mol_type = other DNA
tgttattagtacatacaagt

SEQ ID NO: 38082 - DNA, 20 bp, synthetic construct
  source 1..20: mol_type = other DNA
ttgttattagtacatacaag

SEQ ID NO: 38083 - DNA, 20 bp, synthetic construct
  source 1..20: mol_type = other DNA
cttgttattagtacatacaa

SEQ ID NO: 38084 - DNA, 20 bp, synthetic construct
  source 1..20: mol_type = other DNA
ccttgttattagtacataca

SEQ ID NO: 38085 - DNA, 20 bp, synthetic construct
  source 1..20: mol_type = other DNA
cccttgttattagtacatac

SEQ ID NO: 38086 - DNA, 20 bp, synthetic construct
  source 1..20: mol_type = other DNA
gcccttgttattagtacata

SEQ ID NO: 38087 - DNA, 20 bp, synthetic construct
  source 1..20: mol_type = other DNA
tgcccttgttattagtacat

SEQ ID NO: 38088 - DNA, 20 bp, synthetic construct
  source 1..20: mol_type = other DNA
atgcccttgttattagtaca

SEQ ID NO: 38089 - DNA, 20 bp, synthetic construct
  source 1..20: mol_type = other DNA
aatgcccttgttattagtac

SEQ ID NO: 38090 - DNA, 20 bp, synthetic construct
  source 1..20: mol_type = other DNA
gaatgcccttgttattagta

SEQ ID NO: 38091 - DNA, 20 bp, synthetic construct
  source 1..20: mol_type = other DNA
agaatgcccttgttattagt

SEQ ID NO: 38092 - DNA, 20 bp, synthetic construct
  source 1..20: mol_type = other DNA
tagaatgcccttgttattag

SEQ ID NO: 38093 - DNA, 20 bp, synthetic construct
  source 1..20: mol_type = other DNA
atagaatgcccttgttatta

SEQ ID NO: 38094 - DNA, 20 bp, synthetic construct
  source 1..20: mol_type = other DNA
aatagaatgcccttgttatt

SEQ ID NO: 38095 - DNA, 20 bp, synthetic construct
  source 1..20: mol_type = other DNA
aaatagaatgcccttgttat

SEQ ID NO: 38096 - DNA, 20 bp, synthetic construct
  source 1..20: mol_type = other DNA
gaaatagaatgcccttgtta

SEQ ID NO: 38097 - DNA, 20 bp, synthetic construct
  source 1..20: mol_type = other DNA
tgaaatagaatgcccttgtt

SEQ ID NO: 38098 - DNA, 20 bp, synthetic construct
  source 1..20: mol_type = other DNA
ttgaaatagaatgcccttgt

SEQ ID NO: 38099 - DNA, 20 bp, synthetic construct
  source 1..20: mol_type = other DNA
tttgaaatagaatgcccttg

SEQ ID NO: 38100 - DNA, 20 bp, synthetic construct
  source 1..20: mol_type = other DNA
ttttgaaatagaatgccctt

SEQ ID NO: 38101 - DNA, 20 bp, synthetic construct
  source 1..20: mol_type = other DNA
gttttgaaatagaatgccct

SEQ ID NO: 38102 - DNA, 20 bp, synthetic construct
  source 1..20: mol_type = other DNA
ggttttgaaatagaatgccc

SEQ ID NO: 38103 - DNA, 20 bp, synthetic construct
  source 1..20: mol_type = other DNA
tggttttgaaatagaatgcc

SEQ ID NO: 38104 - DNA, 20 bp, synthetic construct
  source 1..20: mol_type = other DNA
gtggttttgaaatagaatgc

SEQ ID NO: 38105 - DNA, 20 bp, synthetic construct
  source 1..20: mol_type = other DNA
tgtggttttgaaatagaatg

SEQ ID NO: 38106 - DNA, 20 bp, synthetic construct
  source 1..20: mol_type = other DNA
ctgtggttttgaaatagaat

SEQ ID NO: 38107 - DNA, 20 bp, synthetic construct
  source 1..20: mol_type = other DNA
actgtggttttgaaatagaa

SEQ ID NO: 38108 - DNA, 20 bp, synthetic construct
  source 1..20: mol_type = other DNA
tactgtggttttgaaataga

SEQ ID NO: 38109 - DNA, 20 bp, synthetic construct
  source 1..20: mol_type = other DNA
gtactgtggttttgaaatag

SEQ ID NO: 38110 - DNA, 20 bp, synthetic construct
  source 1..20: mol_type = other DNA
tgtactgtggttttgaaata

SEQ ID NO: 38111 - DNA, 20 bp, synthetic construct
  source 1..20: mol_type = other DNA
ctgtactgtggttttgaaat

SEQ ID NO: 38112 - DNA, 20 bp, synthetic construct
  source 1..20: mol_type = other DNA
actgtactgtggttttgaaa

SEQ ID NO: 38113 - DNA, 20 bp, synthetic construct
  source 1..20: mol_type = other DNA
aactgtactgtggttttgaa

SEQ ID NO: 38114 - DNA, 20 bp, synthetic construct
  source 1..20: mol_type = other DNA
caactgtactgtggttttga

SEQ ID NO: 38115 - DNA, 20 bp, synthetic construct
  source 1..20: mol_type = other DNA
acaactgtactgtggttttg

SEQ ID NO: 38116 - DNA, 20 bp, synthetic construct
  source 1..20: mol_type = other DNA
gacaactgtactgtggtttt

SEQ ID NO: 38117 - DNA, 20 bp, synthetic construct
  source 1..20: mol_type = other DNA
tgacaactgtactgtggttt

SEQ ID NO: 38118 - DNA, 20 bp, synthetic construct
  source 1..20: mol_type = other DNA
ttgacaactgtactgtggtt

SEQ ID NO: 38119 - DNA, 20 bp, synthetic construct
  source 1..20: mol_type = other DNA
tttgacaactgtactgtggt

SEQ ID NO: 38120 - DNA, 20 bp, synthetic construct
  source 1..20: mol_type = other DNA
ttttgacaactgtactgtgg

SEQ ID NO: 38121 - DNA, 20 bp, synthetic construct
  source 1..20: mol_type = other DNA
attttgacaactgtactgtg

SEQ ID NO: 38122 - DNA, 20 bp, synthetic construct
  source 1..20: mol_type = other DNA
tattttgacaactgtactgt

SEQ ID NO: 38123 - DNA, 20 bp, synthetic construct
  source 1..20: mol_type = other DNA
ttattttgacaactgtactg

SEQ ID NO: 38124 - DNA, 20 bp, synthetic construct
  source 1..20: mol_type = other DNA
cttattttgacaactgtact

SEQ ID NO: 38125 - DNA, 20 bp, synthetic construct
  source 1..20: mol_type = other DNA
ccttattttgacaactgtac

SEQ ID NO: 38126 - DNA, 20 bp, synthetic construct
  source 1..20: mol_type = other DNA
tccttattttgacaactgta

SEQ ID NO: 38127 - DNA, 20 bp, synthetic construct
  source 1..20: mol_type = other DNA
ttccttattttgacaactgt

SEQ ID NO: 38128 - DNA, 20 bp, synthetic construct
  source 1..20: mol_type = other DNA
tttccttattttgacaactg

SEQ ID NO: 38129 - DNA, 20 bp, synthetic construct
  source 1..20: mol_type = other DNA
atttccttattttgacaact

SEQ ID NO: 38130 - DNA, 20 bp, synthetic construct
  source 1..20: mol_type = other DNA
aatttccttattttgacaac

SEQ ID NO: 38131 - DNA, 20 bp, synthetic construct
  source 1..20: mol_type = other DNA
taatttccttattttgacaa

SEQ ID NO: 38132 - DNA, 20 bp, synthetic construct
  source 1..20: mol_type = other DNA
ttaatttccttattttgaca

SEQ ID NO: 38133 - DNA, 20 bp, synthetic construct
  source 1..20: mol_type = other DNA
attaatttccttattttgac

SEQ ID NO: 38134 - DNA, 20 bp, synthetic construct
  source 1..20: mol_type = other DNA
tattaatttccttattttga

SEQ ID NO: 38135 - DNA, 20 bp, synthetic construct
  source 1..20: mol_type = other DNA
ttattaatttccttattttg

SEQ ID NO: 38136 - DNA, 20 bp, synthetic construct
  source 1..20: mol_type = other DNA
attattaatttccttatttt

SEQ ID NO: 38137 - DNA, 20 bp, synthetic construct
  source 1..20: mol_type = other DNA
aattattaatttccttattt

SEQ ID NO: 38138 - DNA, 20 bp, synthetic construct
  source 1..20: mol_type = other DNA
caattattaatttccttatt

SEQ ID NO: 38139 - DNA, 20 bp, synthetic construct
  source 1..20: mol_type = other DNA
acaattattaatttccttat

SEQ ID NO: 38140 - DNA, 20 bp, synthetic construct
  source 1..20: mol_type = other DNA
cacaattattaatttcctta

SEQ ID NO: 38141 - DNA, 20 bp, synthetic construct
  source 1..20: mol_type = other DNA
acacaattattaatttcctt

SEQ ID NO: 38142 - DNA, 20 bp, synthetic construct
  source 1..20: mol_type = other DNA
gacacaattattaatttcct

SEQ ID NO: 38143 - DNA, 20 bp, synthetic construct
  source 1..20: mol_type = other DNA
tgacacaattattaatttcc

SEQ ID NO: 38144 - DNA, 20 bp, synthetic construct
  source 1..20: mol_type = other DNA
ttgacacaattattaatttc

SEQ ID NO: 38145 - DNA, 20 bp, synthetic construct
  source 1..20: mol_type = other DNA
tttgacacaattattaattt

SEQ ID NO: 38146 - DNA, 20 bp, synthetic construct
  source 1..20: mol_type = other DNA
gtttgacacaattattaatt

SEQ ID NO: 38147 - DNA, 20 bp, synthetic construct
  source 1..20: mol_type = other DNA
agtttgacacaattattaat

SEQ ID NO: 38148 - DNA, 20 bp, synthetic construct
  source 1..20: mol_type = other DNA
cagtttgacacaattattaa

SEQ ID NO: 38149 - DNA, 20 bp, synthetic construct
  source 1..20: mol_type = other DNA
acagtttgacacaattatta

SEQ ID NO: 38150 - DNA, 20 bp, synthetic construct
  source 1..20: mol_type = other DNA
aacagtttgacacaattatt

SEQ ID NO: 38151 - DNA, 20 bp, synthetic construct
  source 1..20: mol_type = other DNA
taacagtttgacacaattat

SEQ ID NO: 38152 - DNA, 20 bp, synthetic construct
  source 1..20: mol_type = other DNA
ataacagtttgacacaatta

SEQ ID NO: 38153 - DNA, 20 bp, synthetic construct
  source 1..20: mol_type = other DNA
aataacagtttgacacaatt

SEQ ID NO: 38154 - DNA, 20 bp, synthetic construct
  source 1..20: mol_type = other DNA
gaataacagtttgacacaat

SEQ ID NO: 38155 - DNA, 20 bp, synthetic construct
  source 1..20: mol_type = other DNA
agaataacagtttgacacaa

SEQ ID NO: 38156 - DNA, 20 bp, synthetic construct
  source 1..20: mol_type = other DNA
cagaataacagtttgacaca

SEQ ID NO: 38157 - DNA, 20 bp, synthetic construct
  source 1..20: mol_type = other DNA
acagaataacagtttgacac

SEQ ID NO: 38158 - DNA, 20 bp, synthetic construct
  source 1..20: mol_type = other DNA
aacagaataacagtttgaca

SEQ ID NO: 38159 - DNA, 20 bp, synthetic construct
  source 1..20: mol_type = other DNA
aaacagaataacagtttgac

SEQ ID NO: 38160 - DNA, 20 bp, synthetic construct
  source 1..20: mol_type = other DNA
taaacagaataacagtttga

SEQ ID NO: 38161 - DNA, 20 bp, synthetic construct
  source 1..20: mol_type = other DNA
ataaacagaataacagtttg

SEQ ID NO: 38162 - DNA, 20 bp, synthetic construct
  source 1..20: mol_type = other DNA
tataaacagaataacagttt

SEQ ID NO: 38163 - DNA, 20 bp, synthetic construct
  source 1..20: mol_type = other DNA
ctataaacagaataacagtt

SEQ ID NO: 38164 - DNA, 20 bp, synthetic construct
  source 1..20: mol_type = other DNA
tctataaacagaataacagt

SEQ ID NO: 38165 - DNA, 20 bp, synthetic construct
  source 1..20: mol_type = other DNA
gtctataaacagaataacag

SEQ ID NO: 38166 - DNA, 20 bp, synthetic construct
  source 1..20: mol_type = other DNA
ggtctataaacagaataaca

SEQ ID NO: 38167 - DNA, 20 bp, synthetic construct
  source 1..20: mol_type = other DNA
aggtctataaacagaataac

SEQ ID NO: 38168 - DNA, 20 bp, synthetic construct
  source 1..20: mol_type = other DNA
aaggtctataaacagaataa

SEQ ID NO: 38169 - DNA, 20 bp, synthetic construct
  source 1..20: mol_type = other DNA
gaaggtctataaacagaata

SEQ ID NO: 38170 - DNA, 20 bp, synthetic construct
  source 1..20: mol_type = other DNA
agaaggtctataaacagaat

SEQ ID NO: 38171 - DNA, 20 bp, synthetic construct
  source 1..20: mol_type = other DNA
tagaaggtctataaacagaa

SEQ ID NO: 38172 - DNA, 20 bp, synthetic construct
  source 1..20: mol_type = other DNA
ttagaaggtctataaacaga

SEQ ID NO: 38173 - DNA, 20 bp, synthetic construct
  source 1..20: mol_type = other DNA
attagaaggtctataaacag

SEQ ID NO: 38174 - DNA, 20 bp, synthetic construct
  source 1..20: mol_type = other DNA
cattagaaggtctataaaca

SEQ ID NO: 38175 - DNA, 20 bp, synthetic construct
  source 1..20: mol_type = other DNA
acattagaaggtctataaac

SEQ ID NO: 38176 - DNA, 20 bp, synthetic construct
  source 1..20: mol_type = other DNA
gacattagaaggtctataaa

SEQ ID NO: 38177 - DNA, 20 bp, synthetic construct
  source 1..20: mol_type = other DNA
ggacattagaaggtctataa

SEQ ID NO: 38178 - DNA, 20 bp, synthetic construct
  source 1..20: mol_type = other DNA
aggacattagaaggtctata

SEQ ID NO: 38179 - DNA, 20 bp, synthetic construct
  source 1..20: mol_type = other DNA
aaggacattagaaggtctat

SEQ ID NO: 38180 - DNA, 20 bp, synthetic construct
  source 1..20: mol_type = other DNA
aaaggacattagaaggtcta

SEQ ID NO: 38181 - DNA, 20 bp, synthetic construct
  source 1..20: mol_type = other DNA
taaaggacattagaaggtct

SEQ ID NO: 38182 - DNA, 20 bp, synthetic construct
  source 1..20: mol_type = other DNA
ttaaaggacattagaaggtc

SEQ ID NO: 38183 - DNA, 20 bp, synthetic construct
  source 1..20: mol_type = other DNA
tttaaaggacattagaaggt

SEQ ID NO: 38184 - DNA, 20 bp, synthetic construct
  source 1..20: mol_type = other DNA
ttttaaaggacattagaagg

SEQ ID NO: 38185 - DNA, 20 bp, synthetic construct
  source 1..20: mol_type = other DNA
gttttaaaggacattagaag

SEQ ID NO: 38186 - DNA, 20 bp, synthetic construct
  source 1..20: mol_type = other DNA
tgttttaaaggacattagaa

SEQ ID NO: 38187 - DNA, 20 bp, synthetic construct
  source 1..20: mol_type = other DNA
ttgttttaaaggacattaga

SEQ ID NO: 38188 - DNA, 20 bp, synthetic construct
  source 1..20: mol_type = other DNA
attgttttaaaggacattag

SEQ ID NO: 38189 - DNA, 20 bp, synthetic construct
  source 1..20: mol_type = other DNA
gattgttttaaaggacatta

SEQ ID NO: 38190 - DNA, 20 bp, synthetic construct
  source 1..20: mol_type = other DNA
tgattgttttaaaggacatt

SEQ ID NO: 38191 - DNA, 20 bp, synthetic construct
  source 1..20: mol_type = other DNA
ttgattgttttaaaggacat

SEQ ID NO: 38192 - DNA, 20 bp, synthetic construct
  source 1..20: mol_type = other DNA
gttgattgttttaaaggaca

SEQ ID NO: 38193 - DNA, 20 bp, synthetic construct
  source 1..20: mol_type = other DNA
tgttgattgttttaaaggac

SEQ ID NO: 38194 - DNA, 20 bp, synthetic construct
  source 1..20: mol_type = other DNA
ttgttgattgttttaaagga

SEQ ID NO: 38195 - DNA, 20 bp, synthetic construct
  source 1..20: mol_type = other DNA
tttgttgattgttttaaagg

SEQ ID NO: 38196 - DNA, 20 bp, synthetic construct
  source 1..20: mol_type = other DNA
atttgttgattgttttaaag

SEQ ID NO: 38197 - DNA, 20 bp, synthetic construct
  source 1..20: mol_type = other DNA
gatttgttgattgttttaaa

SEQ ID NO: 38198 - DNA, 20 bp, synthetic construct
  source 1..20: mol_type = other DNA
tgatttgttgattgttttaa

SEQ ID NO: 38199 - DNA, 20 bp, synthetic construct
  source 1..20: mol_type = other DNA
ttgatttgttgattgtttta

SEQ ID NO: 38200 - DNA, 20 bp, synthetic construct
  source 1..20: mol_type = other DNA
gttgatttgttgattgtttt

SEQ ID NO: 38201 - DNA, 20 bp, synthetic construct
  source 1..20: mol_type = other DNA
tgttgatttgttgattgttt

SEQ ID NO: 38202 - DNA, 20 bp, synthetic construct
  source 1..20: mol_type = other DNA
atgttgatttgttgattgtt

SEQ ID NO: 38203 - DNA, 20 bp, synthetic construct
  source 1..20: mol_type = other DNA
aatgttgatttgttgattgt

SEQ ID NO: 38204 - DNA, 20 bp, synthetic construct
  source 1..20: mol_type = other DNA
aaatgttgatttgttgattg

SEQ ID NO: 38205 - DNA, 20 bp, synthetic construct
  source 1..20: mol_type = other DNA
aaaatgttgatttgttgatt

SEQ ID NO: 38206 - DNA, 20 bp, synthetic construct
  source 1..20: mol_type = other DNA
aaaaatgttgatttgttgat

SEQ ID NO: 38207 - DNA, 20 bp, synthetic construct
  source 1..20: mol_type = other DNA
gaaaaatgttgatttgttga

SEQ ID NO: 38208 - DNA, 20 bp, synthetic construct
  source 1..20: mol_type = other DNA
agaaaaatgttgatttgttg

SEQ ID NO: 38209 - DNA, 20 bp, synthetic construct
  source 1..20: mol_type = other DNA
cagaaaaatgttgatttgtt

SEQ ID NO: 38210 - DNA, 20 bp, synthetic construct
  source 1..20: mol_type = other DNA
ccagaaaaatgttgatttgt

SEQ ID NO: 38211 - DNA, 20 bp, synthetic construct
  source 1..20: mol_type = other DNA
accagaaaaatgttgatttg

SEQ ID NO: 38212 - DNA, 20 bp, synthetic construct
  source 1..20: mol_type = other DNA
gaccagaaaaatgttgattt

SEQ ID NO: 38213 - DNA, 20 bp, synthetic construct
  source 1..20: mol_type = other DNA
tgaccagaaaaatgttgatt

SEQ ID NO: 38214 - DNA, 20 bp, synthetic construct
  source 1..20: mol_type = other DNA
ttgaccagaaaaatgttgat

SEQ ID NO: 38215 - DNA, 20 bp, synthetic construct
  source 1..20: mol_type = other DNA
cttgaccagaaaaatgttga

SEQ ID NO: 38216 - DNA, 20 bp, synthetic construct
  source 1..20: mol_type = other DNA
tcttgaccagaaaaatgttg

SEQ ID NO: 38217 - DNA, 20 bp, synthetic construct
  source 1..20: mol_type = other DNA
ttcttgaccagaaaaatgtt

SEQ ID NO: 38218 - DNA, 20 bp, synthetic construct
  source 1..20: mol_type = other DNA
gttcttgaccagaaaaatgt

SEQ ID NO: 38219 - DNA, 20 bp, synthetic construct
  source 1..20: mol_type = other DNA
ggttcttgaccagaaaaatg

SEQ ID NO: 38220 - DNA, 20 bp, synthetic construct
  source 1..20: mol_type = other DNA
tggttcttgaccagaaaaat

SEQ ID NO: 38221 - DNA, 20 bp, synthetic construct
  source 1..20: mol_type = other DNA
ctggttcttgaccagaaaaa

SEQ ID NO: 38222 - DNA, 20 bp, synthetic construct
  source 1..20: mol_type = other DNA
actggttcttgaccagaaaa

SEQ ID NO: 38223 - DNA, 20 bp, synthetic construct
  source 1..20: mol_type = other DNA
tactggttcttgaccagaaa

SEQ ID NO: 38224 - DNA, 20 bp, synthetic construct
  source 1..20: mol_type = other DNA
ttactggttcttgaccagaa

SEQ ID NO: 38225 - DNA, 20 bp, synthetic construct
  source 1..20: mol_type = other DNA
tttactggttcttgaccaga

SEQ ID NO: 38226 - DNA, 20 bp, synthetic construct
  source 1..20: mol_type = other DNA
atttactggttcttgaccag

SEQ ID NO: 38227 - DNA, 20 bp, synthetic construct
  source 1..20: mol_type = other DNA
tatttactggttcttgacca

SEQ ID NO: 38228 - DNA, 20 bp, synthetic construct
  source 1..20: mol_type = other DNA
atatttactggttcttgacc

SEQ ID NO: 38229 - DNA, 20 bp, synthetic construct
  source 1..20: mol_type = other DNA
catatttactggttcttgac

SEQ ID NO: 38230 - DNA, 20 bp, synthetic construct
  source 1..20: mol_type = other DNA
acatatttactggttcttga

SEQ ID NO: 38231 - DNA, 20 bp, synthetic construct
  source 1..20: mol_type = other DNA
tacatatttactggttcttg

SEQ ID NO: 38232 - DNA, 20 bp, synthetic construct
  source 1..20: mol_type = other DNA
atacatatttactggttctt

SEQ ID NO: 38233 - DNA, 20 bp, synthetic construct
  source 1..20: mol_type = other DNA
tatacatatttactggttct

SEQ ID NO: 38234 - DNA, 20 bp, synthetic construct
  source 1..20: mol_type = other DNA
atatacatatttactggttc

SEQ ID NO: 38235 - DNA, 20 bp, synthetic construct
  source 1..20: mol_type = other DNA
aatatacatatttactggtt

SEQ ID NO: 38236 - DNA, 20 bp, synthetic construct
  source 1..20: mol_type = other DNA
gaatatacatatttactggt

SEQ ID NO: 38237 - DNA, 20 bp, synthetic construct
  source 1..20: mol_type = other DNA
agaatatacatatttactgg

SEQ ID NO: 38238 - DNA, 20 bp, synthetic construct
  source 1..20: mol_type = other DNA
tagaatatacatatttactg

SEQ ID NO: 38239 - DNA, 20 bp, synthetic construct
  source 1..20: mol_type = other DNA
gtagaatatacatatttact

SEQ ID NO: 38240 - DNA, 20 bp, synthetic construct
  source 1..20: mol_type = other DNA
tgtagaatatacatatttac

SEQ ID NO: 38241 - DNA, 20 bp, synthetic construct
  source 1..20: mol_type = other DNA
atgtagaatatacatattta

SEQ ID NO: 38242 - DNA, 20 bp, synthetic construct
  source 1..20: mol_type = other DNA
tatgtagaatatacatattt

SEQ ID NO: 38243 - DNA, 20 bp, synthetic construct
  source 1..20: mol_type = other DNA
atatgtagaatatacatatt

SEQ ID NO: 38244 - DNA, 20 bp, synthetic construct
  source 1..20: mol_type = other DNA
tatatgtagaatatacatat

SEQ ID NO: 38245 - DNA, 20 bp, synthetic construct
  source 1..20: mol_type = other DNA
atatatgtagaatatacata

SEQ ID NO: 38246 - DNA, 20 bp, synthetic construct
  source 1..20: mol_type = other DNA
tatatatgtagaatatacat

SEQ ID NO: 38247 - DNA, 20 bp, synthetic construct
  source 1..20: mol_type = other DNA
atatatatgtagaatataca

SEQ ID NO: 38248 - DNA, 20 bp, synthetic construct
  source 1..20: mol_type = other DNA
tatatatatgtagaatatac

SEQ ID NO: 38249 - DNA, 20 bp, synthetic construct
  source 1..20: mol_type = other DNA
atatatatatgtagaatata

SEQ ID NO: 38250 - DNA, 20 bp, synthetic construct
  source 1..20: mol_type = other DNA
tatatatatatgtagaatat

SEQ ID NO: 38251 - DNA, 20 bp, synthetic construct
  source 1..20: mol_type = other DNA
gtatatatatatgtagaata

SEQ ID NO: 38252 - DNA, 20 bp, synthetic construct
  source 1..20: mol_type = other DNA
tgtatatatatatgtagaat

SEQ ID NO: 38253 - DNA, 20 bp, synthetic construct
  source 1..20: mol_type = other DNA
gtgtatatatatatgtagaa

SEQ ID NO: 38254 - DNA, 20 bp, synthetic construct
  source 1..20: mol_type = other DNA
tgtgtatatatatatgtaga

SEQ ID NO: 38255 - DNA, 20 bp, synthetic construct
  source 1..20: mol_type = other DNA
atgtgtatatatatatgtag

SEQ ID NO: 38256 - DNA, 20 bp, synthetic construct
  source 1..20: mol_type = other DNA
tatgtgtatatatatatgta

SEQ ID NO: 38257 - DNA, 20 bp, synthetic construct
  source 1..20: mol_type = other DNA
atatgtgtatatatatatgt

SEQ ID NO: 38258 - DNA, 20 bp, synthetic construct
  source 1..20: mol_type = other DNA
tatatgtgtatatatatatg

SEQ ID NO: 38259 - DNA, 20 bp, synthetic construct
  source 1..20: mol_type = other DNA
atatatgtgtatatatatat

SEQ ID NO: 38260 - DNA, 20 bp, synthetic construct
  source 1..20: mol_type = other DNA
tatatatgtgtatatatata

SEQ ID NO: 38261 - DNA, 20 bp, synthetic construct
  source 1..20: mol_type = other DNA
atatatatgtgtatatatat

SEQ ID NO: 38262 - DNA, 20 bp, synthetic construct
  source 1..20: mol_type = other DNA
tatatatatgtgtatatata

SEQ ID NO: 38263 - DNA, 20 bp, synthetic construct
  source 1..20: mol_type = other DNA
gtatatatatgtgtatatat

SEQ ID NO: 38264 - DNA, 20 bp, synthetic construct
  source 1..20: mol_type = other DNA
tgtatatatatgtgtatata

SEQ ID NO: 38265 - DNA, 20 bp, synthetic construct
  source 1..20: mol_type = other DNA
gtgtatatatatgtgtatat

SEQ ID NO: 38266 - DNA, 20 bp, synthetic construct
  source 1..20: mol_type = other DNA
tgtgtatatatatgtgtata

SEQ ID NO: 38267 - DNA, 20 bp, synthetic construct
  source 1..20: mol_type = other DNA
gtgtgtatatatatgtgtat

SEQ ID NO: 38268 - DNA, 20 bp, synthetic construct
  source 1..20: mol_type = other DNA
tgtgtgtatatatatgtgta

SEQ ID NO: 38269 - DNA, 20 bp, synthetic construct
  source 1..20: mol_type = other DNA
atgtgtgtatatatatgtgt

SEQ ID NO: 38270 - DNA, 20 bp, synthetic construct
  source 1..20: mol_type = other DNA
tatgtgtgtatatatatgtg

SEQ ID NO: 38271 - DNA, 20 bp, synthetic construct
  source 1..20: mol_type = other DNA
atatgtgtgtatatatatgt

SEQ ID NO: 38272 - DNA, 20 bp, synthetic construct
  source 1..20: mol_type = other DNA
tatatgtgtgtatatatatg

SEQ ID NO: 38273 - DNA, 20 bp, synthetic construct
  source 1..20: mol_type = other DNA
atatatgtgtgtatatatat

SEQ ID NO: 38274 - DNA, 20 bp, synthetic construct
  source 1..20: mol_type = other DNA
aatatatgtgtgtatatata

SEQ ID NO: 38275 - DNA, 20 bp, synthetic construct
  source 1..20: mol_type = other DNA
gaatatatgtgtgtatatat

SEQ ID NO: 38276 - DNA, 20 bp, synthetic construct
  source 1..20: mol_type = other DNA
agaatatatgtgtgtatata

SEQ ID NO: 38277 - DNA, 20 bp, synthetic construct
  source 1..20: mol_type = other DNA
tagaatatatgtgtgtatat

SEQ ID NO: 38278 - DNA, 20 bp, synthetic construct
  source 1..20: mol_type = other DNA
gtagaatatatgtgtgtata

SEQ ID NO: 38279 - DNA, 20 bp, synthetic construct
  source 1..20: mol_type = other DNA
tgtagaatatatgtgtgtat

SEQ ID NO: 38280 - DNA, 20 bp, synthetic construct
  source 1..20: mol_type = other DNA
atgtagaatatatgtgtgta

SEQ ID NO: 38281 - DNA, 20 bp, synthetic construct
  source 1..20: mol_type = other DNA
tatgtagaatatatgtgtgt

SEQ ID NO: 38282 - DNA, 20 bp, synthetic construct
  source 1..20: mol_type = other DNA
atatgtagaatatatgtgtg

SEQ ID NO: 38283 - DNA, 20 bp, synthetic construct
  source 1..20: mol_type = other DNA
tatatgtagaatatatgtgt

SEQ ID NO: 38284 - DNA, 20 bp, synthetic construct
  source 1..20: mol_type = other DNA
atatatgtagaatatatgtg

SEQ ID NO: 38285 - DNA, 20 bp, synthetic construct
  source 1..20: mol_type = other DNA
tatatatgtagaatatatgt

SEQ ID NO: 38286 - DNA, 20 bp, synthetic construct
  source 1..20: mol_type = other DNA
atatatatgtagaatatatg

SEQ ID NO: 38287 - DNA, 20 bp, synthetic construct
  source 1..20: mol_type = other DNA
catatatatgtagaatatat

SEQ ID NO: 38288 - DNA, 20 bp, synthetic construct
  source 1..20: mol_type = other DNA
acatatatatgtagaatata

SEQ ID NO: 38289 - DNA, 20 bp, synthetic construct
  source 1..20: mol_type = other DNA
cacatatatatgtagaatat

SEQ ID NO: 38290 - DNA, 20 bp, synthetic construct
  source 1..20: mol_type = other DNA
ccacatatatatgtagaata

SEQ ID NO: 38291 - DNA, 20 bp, synthetic construct
  source 1..20: mol_type = other DNA
tccacatatatatgtagaat

SEQ ID NO: 38292 - DNA, 20 bp, synthetic construct
  source 1..20: mol_type = other DNA
ttccacatatatatgtagaa

SEQ ID NO: 38293 - DNA, 20 bp, synthetic construct
  source 1..20: mol_type = other DNA
attccacatatatatgtaga

SEQ ID NO: 38294 - DNA, 20 bp, synthetic construct
  source 1..20: mol_type = other DNA
tattccacatatatatgtag

SEQ ID NO: 38295 - DNA, 20 bp, synthetic construct
  source 1..20: mol_type = other DNA
atattccacatatatatgta

SEQ ID NO: 38296 - DNA, 20 bp, synthetic construct
  source 1..20: mol_type = other DNA
tatattccacatatatatgt

SEQ ID NO: 38297 - DNA, 20 bp, synthetic construct
  source 1..20: mol_type = other DNA
gtatattccacatatatatg

SEQ ID NO: 38298 - DNA, 20 bp, synthetic construct
  source 1..20: mol_type = other DNA
cgtatattccacatatatat

SEQ ID NO: 38299 - DNA, 20 bp, synthetic construct
  source 1..20: mol_type = other DNA
acgtatattccacatatata

SEQ ID NO: 38300 - DNA, 20 bp, synthetic construct
  source 1..20: mol_type = other DNA
tacgtatattccacatatat

SEQ ID NO: 38301 - DNA, 20 bp, synthetic construct
  source 1..20: mol_type = other DNA
atacgtatattccacatata

SEQ ID NO: 38302 - DNA, 20 bp, synthetic construct
  source 1..20: mol_type = other DNA
aatacgtatattccacatat

SEQ ID NO: 38303 - DNA, 20 bp, synthetic construct
  source 1..20: mol_type = other DNA
aaatacgtatattccacata

SEQ ID NO: 38304 - DNA, 20 bp, synthetic construct
  source 1..20: mol_type = other DNA
taaatacgtatattccacat

SEQ ID NO: 38305 - DNA, 20 bp, synthetic construct
  source 1..20: mol_type = other DNA
gtaaatacgtatattccaca

SEQ ID NO: 38306 - DNA, 20 bp, synthetic construct
  source 1..20: mol_type = other DNA
agtaaatacgtatattccac

SEQ ID NO: 38307 - DNA, 20 bp, synthetic construct
  source 1..20: mol_type = other DNA
gagtaaatacgtatattcca

SEQ ID NO: 38308 - DNA, 20 bp, synthetic construct
  source 1..20: mol_type = other DNA
ggagtaaatacgtatattcc

SEQ ID NO: 38309 - DNA, 20 bp, synthetic construct
  source 1..20: mol_type = other DNA
gggagtaaatacgtatattc

SEQ ID NO: 38310 - DNA, 20 bp, synthetic construct
  source 1..20: mol_type = other DNA
agggagtaaatacgtatatt

SEQ ID NO: 38311 - DNA, 20 bp, synthetic construct
  source 1..20: mol_type = other DNA
gagggagtaaatacgtatat

SEQ ID NO: 38312 - DNA, 20 bp, synthetic construct
  source 1..20: mol_type = other DNA
agagggagtaaatacgtata

SEQ ID NO: 38313 - DNA, 20 bp, synthetic construct
  source 1..20: mol_type = other DNA
cagagggagtaaatacgtat

SEQ ID NO: 38314 - DNA, 20 bp, synthetic construct
  source 1..20: mol_type = other DNA
acagagggagtaaatacgta

SEQ ID NO: 38315 - DNA, 20 bp, synthetic construct
  source 1..20: mol_type = other DNA
gacagagggagtaaatacgt

SEQ ID NO: 38316 - DNA, 20 bp, synthetic construct
  source 1..20: mol_type = other DNA
ggacagagggagtaaatacg

SEQ ID NO: 38317 - DNA, 20 bp, synthetic construct
  source 1..20: mol_type = other DNA
tggacagagggagtaaatac

SEQ ID NO: 38318 - DNA, 20 bp, synthetic construct
  source 1..20: mol_type = other DNA
ttggacagagggagtaaata

SEQ ID NO: 38319 - DNA, 20 bp, synthetic construct
  source 1..20: mol_type = other DNA
cttggacagagggagtaaat

SEQ ID NO: 38320 - DNA, 20 bp, synthetic construct
  source 1..20: mol_type = other DNA
tcttggacagagggagtaaa

SEQ ID NO: 38321 - DNA, 20 bp, synthetic construct
  source 1..20: mol_type = other DNA
ttcttggacagagggagtaa

SEQ ID NO: 38322 - DNA, 20 bp, synthetic construct
  source 1..20: mol_type = other DNA
gttcttggacagagggagta

SEQ ID NO: 38323 - DNA, 20 bp, synthetic construct
  source 1..20: mol_type = other DNA
ggttcttggacagagggagt

SEQ ID NO: 38324 - DNA, 20 bp, synthetic construct
  source 1..20: mol_type = other DNA
tggttcttggacagagggag

SEQ ID NO: 38325 - DNA, 20 bp, synthetic construct
  source 1..20: mol_type = other DNA
ttggttcttggacagaggga

SEQ ID NO: 38326 - DNA, 20 bp, synthetic construct
  source 1..20: mol_type = other DNA
attggttcttggacagaggg

SEQ ID NO: 38327 - DNA, 20 bp, synthetic construct
  source 1..20: mol_type = other DNA
gattggttcttggacagagg

SEQ ID NO: 38328 - DNA, 20 bp, synthetic construct
  source 1..20: mol_type = other DNA
ggattggttcttggacagag

SEQ ID NO: 38329 - DNA, 20 bp, synthetic construct
  source 1..20: mol_type = other DNA
tggattggttcttggacaga

SEQ ID NO: 38330 - DNA, 20 bp, synthetic construct
  source 1..20: mol_type = other DNA
ctggattggttcttggacag

SEQ ID NO: 38331 - DNA, 20 bp, synthetic construct
  source 1..20: mol_type = other DNA
cctggattggttcttggaca

SEQ ID NO: 38332 - DNA, 20 bp, synthetic construct
  source 1..20: mol_type = other DNA
tcctggattggttcttggac

SEQ ID NO: 38333 - DNA, 20 bp, synthetic construct
  source 1..20: mol_type = other DNA
atcctggattggttcttgga

SEQ ID NO: 38334 - DNA, 20 bp, synthetic construct
  source 1..20: mol_type = other DNA
aatcctggattggttcttgg

SEQ ID NO: 38335 - DNA, 20 bp, synthetic construct
  source 1..20: mol_type = other DNA
caatcctggattggttcttg

SEQ ID NO: 38336 - DNA, 20 bp, synthetic construct
  source 1..20: mol_type = other DNA
acaatcctggattggttctt

SEQ ID NO: 38337 - DNA, 20 bp, synthetic construct
  source 1..20: mol_type = other DNA
aacaatcctggattggttct

SEQ ID NO: 38338 - DNA, 20 bp, synthetic construct
  source 1..20: mol_type = other DNA
taacaatcctggattggttc

SEQ ID NO: 38339 - DNA, 20 bp, synthetic construct
  source 1..20: mol_type = other DNA
gtaacaatcctggattggtt

SEQ ID NO: 38340 - DNA, 20 bp, synthetic construct
  source 1..20: mol_type = other DNA
ggtaacaatcctggattggt

SEQ ID NO: 38341 - DNA, 20 bp, synthetic construct
  source 1..20: mol_type = other DNA
aggtaacaatcctggattgg

SEQ ID NO: 38342 - DNA, 20 bp, synthetic construct
  source 1..20: mol_type = other DNA
aaggtaacaatcctggattg

SEQ ID NO: 38343 - DNA, 20 bp, synthetic construct
  source 1..20: mol_type = other DNA
gaaggtaacaatcctggatt

SEQ ID NO: 38344 - DNA, 20 bp, synthetic construct
  source 1..20: mol_type = other DNA
cgaaggtaacaatcctggat

SEQ ID NO: 38345 - DNA, 20 bp, synthetic construct
  source 1..20: mol_type = other DNA
ccgaaggtaacaatcctgga

SEQ ID NO: 38346 - DNA, 20 bp, synthetic construct
  source 1..20: mol_type = other DNA
accgaaggtaacaatcctgg

SEQ ID NO: 38347 - DNA, 20 bp, synthetic construct
  source 1..20: mol_type = other DNA
aaccgaaggtaacaatcctg

SEQ ID NO: 38348 - DNA, 20 bp, synthetic construct
  source 1..20: mol_type = other DNA
taaccgaaggtaacaatcct

SEQ ID NO: 38349 - DNA, 20 bp, synthetic construct
  source 1..20: mol_type = other DNA
ataaccgaaggtaacaatcc

SEQ ID NO: 38350 - DNA, 20 bp, synthetic construct
  source 1..20: mol_type = other DNA
gataaccgaaggtaacaatc

SEQ ID NO: 38351 - DNA, 20 bp, synthetic construct
  source 1..20: mol_type = other DNA
tgataaccgaaggtaacaat

SEQ ID NO: 38352 - DNA, 20 bp, synthetic construct
  source 1..20: mol_type = other DNA
atgataaccgaaggtaacaa

SEQ ID NO: 38353 - DNA, 20 bp, synthetic construct
  source 1..20: mol_type = other DNA
catgataaccgaaggtaaca

SEQ ID NO: 38354 - DNA, 20 bp, synthetic construct
  source 1..20: mol_type = other DNA
acatgataaccgaaggtaac

SEQ ID NO: 38355 - DNA, 20 bp, synthetic construct
  source 1..20: mol_type = other DNA
tacatgataaccgaaggtaa

SEQ ID NO: 38356 - DNA, 20 bp, synthetic construct
  source 1..20: mol_type = other DNA
atacatgataaccgaaggta

SEQ ID NO: 38357 - DNA, 20 bp, synthetic construct
  source 1..20: mol_type = other DNA
gatacatgataaccgaaggt

SEQ ID NO: 38358 - DNA, 20 bp, synthetic construct
  source 1..20: mol_type = other DNA
agatacatgataaccgaagg

SEQ ID NO: 38359 - DNA, 20 bp, synthetic construct
  source 1..20: mol_type = other DNA
aagatacatgataaccgaag

SEQ ID NO: 38360 - DNA, 20 bp, synthetic construct
  source 1..20: mol_type = other DNA
aaagatacatgataaccgaa

SEQ ID NO: 38361 - DNA, 20 bp, synthetic construct
  source 1..20: mol_type = other DNA
caaagatacatgataaccga

SEQ ID NO: 38362 - DNA, 20 bp, synthetic construct
  source 1..20: mol_type = other DNA
ccaaagatacatgataaccg

SEQ ID NO: 38363 - DNA, 20 bp, synthetic construct
  source 1..20: mol_type = other DNA
accaaagatacatgataacc

SEQ ID NO: 38364 - DNA, 20 bp, synthetic construct
  source 1..20: mol_type = other DNA
gaccaaagatacatgataac

SEQ ID NO: 38365 - DNA, 20 bp, synthetic construct
  source 1..20: mol_type = other DNA
agaccaaagatacatgataa

SEQ ID NO: 38366 - DNA, 20 bp, synthetic construct
  source 1..20: mol_type = other DNA
gagaccaaagatacatgata

SEQ ID NO: 38367 - DNA, 20 bp, synthetic construct
  source 1..20: mol_type = other DNA
ggagaccaaagatacatgat

SEQ ID NO: 38368 - DNA, 20 bp, synthetic construct
  source 1..20: mol_type = other DNA
aggagaccaaagatacatga

SEQ ID NO: 38369 - DNA, 20 bp, synthetic construct
  source 1..20: mol_type = other DNA
aaggagaccaaagatacatg

SEQ ID NO: 38370 - DNA, 20 bp, synthetic construct
  source 1..20: mol_type = other DNA
aaaggagaccaaagatacat

SEQ ID NO: 38371 - DNA, 20 bp, synthetic construct
  source 1..20: mol_type = other DNA
taaaggagaccaaagataca

SEQ ID NO: 38372 - DNA, 20 bp, synthetic construct
  source 1..20: mol_type = other DNA
ttaaaggagaccaaagatac

SEQ ID NO: 38373 - DNA, 20 bp, synthetic construct
  source 1..20: mol_type = other DNA
attaaaggagaccaaagata

SEQ ID NO: 38374 - DNA, 20 bp, synthetic construct
  source 1..20: mol_type = other DNA
gattaaaggagaccaaagat

SEQ ID NO: 38375 - DNA, 20 bp, synthetic construct
  source 1..20: mol_type = other DNA
ggattaaaggagaccaaaga

SEQ ID NO: 38376 - DNA, 20 bp, synthetic construct
  source 1..20: mol_type = other DNA
tggattaaaggagaccaaag

SEQ ID NO: 38377 - DNA, 20 bp, synthetic construct
  source 1..20: mol_type = other DNA
ttggattaaaggagaccaaa

SEQ ID NO: 38378 - DNA, 20 bp, synthetic construct
  source 1..20: mol_type = other DNA
tttggattaaaggagaccaa

SEQ ID NO: 38379 - DNA, 20 bp, synthetic construct
  source 1..20: mol_type = other DNA
ctttggattaaaggagacca

SEQ ID NO: 38380 - DNA, 20 bp, synthetic construct
  source 1..20: mol_type = other DNA
gctttggattaaaggagacc

SEQ ID NO: 38381 - DNA, 20 bp, synthetic construct
  source 1..20: mol_type = other DNA
tgctttggattaaaggagac

SEQ ID NO: 38382 - DNA, 20 bp, synthetic construct
  source 1..20: mol_type = other DNA
ctgctttggattaaaggaga

SEQ ID NO: 38383 - DNA, 20 bp, synthetic construct
  source 1..20: mol_type = other DNA
actgctttggattaaaggag

SEQ ID NO: 38384 - DNA, 20 bp, synthetic construct
  source 1..20: mol_type = other DNA
aactgctttggattaaagga

SEQ ID NO: 38385 - DNA, 20 bp, synthetic construct
  source 1..20: mol_type = other DNA
aaactgctttggattaaagg

SEQ ID NO: 38386 - DNA, 20 bp, synthetic construct
  source 1..20: mol_type = other DNA
gaaactgctttggattaaag

SEQ ID NO: 38387 - DNA, 20 bp, synthetic construct
  source 1..20: mol_type = other DNA
agaaactgctttggattaaa

SEQ ID NO: 38388 - DNA, 20 bp, synthetic construct
  source 1..20: mol_type = other DNA
aagaaactgctttggattaa

SEQ ID NO: 38389 - DNA, 20 bp, synthetic construct
  source 1..20: mol_type = other DNA
aaagaaactgctttggatta

SEQ ID NO: 38390 - DNA, 20 bp, synthetic construct
  source 1..20: mol_type = other DNA
caaagaaactgctttggatt

SEQ ID NO: 38391 - DNA, 20 bp, synthetic construct
  source 1..20: mol_type = other DNA
acaaagaaactgctttggat

SEQ ID NO: 38392 - DNA, 20 bp, synthetic construct
  source 1..20: mol_type = other DNA
gacaaagaaactgctttgga

SEQ ID NO: 38393 - DNA, 20 bp, synthetic construct
  source 1..20: mol_type = other DNA
agacaaagaaactgctttgg

SEQ ID NO: 38394 - DNA, 20 bp, synthetic construct
  source 1..20: mol_type = other DNA
aagacaaagaaactgctttg

SEQ ID NO: 38395 - DNA, 20 bp, synthetic construct
  source 1..20: mol_type = other DNA
aaagacaaagaaactgcttt

SEQ ID NO: 38396 - DNA, 20 bp, synthetic construct
  source 1..20: mol_type = other DNA
aaaagacaaagaaactgctt

SEQ ID NO: 38397 - DNA, 20 bp, synthetic construct
  source 1..20: mol_type = other DNA
taaaagacaaagaaactgct

SEQ ID NO: 38398 - DNA, 20 bp, synthetic construct
  source 1..20: mol_type = other DNA
ataaaagacaaagaaactgc

SEQ ID NO: 38399 - DNA, 20 bp, synthetic construct
  source 1..20: mol_type = other DNA
cataaaagacaaagaaactg

SEQ ID NO: 38400 - DNA, 20 bp, synthetic construct
  source 1..20: mol_type = other DNA
tcataaaagacaaagaaact

SEQ ID NO: 38401 - DNA, 20 bp, synthetic construct
  source 1..20: mol_type = other DNA
gtcataaaagacaaagaaac

SEQ ID NO: 38402 - DNA, 20 bp, synthetic construct
  source 1..20: mol_type = other DNA
agtcataaaagacaaagaaa

SEQ ID NO: 38403 - DNA, 20 bp, synthetic construct
  source 1..20: mol_type = other DNA
aagtcataaaagacaaagaa

SEQ ID NO: 38404 - DNA, 20 bp, synthetic construct
  source 1..20: mol_type = other DNA
caagtcataaaagacaaaga

SEQ ID NO: 38405 - DNA, 20 bp, synthetic construct
  source 1..20: mol_type = other DNA
tcaagtcataaaagacaaag

SEQ ID NO: 38406 - DNA, 20 bp, synthetic construct
  source 1..20: mol_type = other DNA
gtcaagtcataaaagacaaa

SEQ ID NO: 38407 - DNA, 20 bp, synthetic construct
  source 1..20: mol_type = other DNA
tgtcaagtcataaaagacaa

SEQ ID NO: 38408 - DNA, 20 bp, synthetic construct
  source 1..20: mol_type = other DNA
gtgtcaagtcataaaagaca

SEQ ID NO: 38409 - DNA, 20 bp, synthetic construct
  source 1..20: mol_type = other DNA
agtgtcaagtcataaaagac

SEQ ID NO: 38410 - DNA, 20 bp, synthetic construct
  source 1..20: mol_type = other DNA
aagtgtcaagtcataaaaga

SEQ ID NO: 38411 - DNA, 20 bp, synthetic construct
  source 1..20: mol_type = other DNA
aaagtgtcaagtcataaaag

SEQ ID NO: 38412 - DNA, 20 bp, synthetic construct
  source 1..20: mol_type = other DNA
aaaagtgtcaagtcataaaa

SEQ ID NO: 38413 - DNA, 20 bp, synthetic construct
  source 1..20: mol_type = other DNA
caaaagtgtcaagtcataaa

SEQ ID NO: 38414 - DNA, 20 bp, synthetic construct
  source 1..20: mol_type = other DNA
tcaaaagtgtcaagtcataa

SEQ ID NO: 38415 - DNA, 20 bp, synthetic construct
  source 1..20: mol_type = other DNA
ttcaaaagtgtcaagtcata

SEQ ID NO: 38416 - DNA, 20 bp, synthetic construct
  source 1..20: mol_type = other DNA
cttcaaaagtgtcaagtcat

SEQ ID NO: 38417 - DNA, 20 bp, synthetic construct
  source 1..20: mol_type = other DNA
tcttcaaaagtgtcaagtca

SEQ ID NO: 38418 - DNA, 20 bp, synthetic construct
  source 1..20: mol_type = other DNA
atcttcaaaagtgtcaagtc

SEQ ID NO: 38419 - DNA, 20 bp, synthetic construct
  source 1..20: mol_type = other DNA
aatcttcaaaagtgtcaagt

SEQ ID NO: 38420 - DNA, 20 bp, synthetic construct
  source 1..20: mol_type = other DNA
taatcttcaaaagtgtcaag

SEQ ID NO: 38421 - DNA, 20 bp, synthetic construct
  source 1..20: mol_type = other DNA
gtaatcttcaaaagtgtcaa

SEQ ID NO: 38422 - DNA, 20 bp, synthetic construct
  source 1..20: mol_type = other DNA
tgtaatcttcaaaagtgtca

SEQ ID NO: 38423 - DNA, 20 bp, synthetic construct
  source 1..20: mol_type = other DNA
ctgtaatcttcaaaagtgtc

SEQ ID NO: 38424 - DNA, 20 bp, synthetic construct
  source 1..20: mol_type = other DNA
cctgtaatcttcaaaagtgt

SEQ ID NO: 38425 - DNA, 20 bp, synthetic construct
  source 1..20: mol_type = other DNA
acctgtaatcttcaaaagtg

SEQ ID NO: 38426 - DNA, 20 bp, synthetic construct
  source 1..20: mol_type = other DNA
aacctgtaatcttcaaaagt

SEQ ID NO: 38427 - DNA, 20 bp, synthetic construct
  source 1..20: mol_type = other DNA
taacctgtaatcttcaaaag

SEQ ID NO: 38428 - DNA, 20 bp, synthetic construct
  source 1..20: mol_type = other DNA
ataacctgtaatcttcaaaa

SEQ ID NO: 38429 - DNA, 20 bp, synthetic construct
  source 1..20: mol_type = other DNA
aataacctgtaatcttcaaa

SEQ ID NO: 38430 - DNA, 20 bp, synthetic construct
  source 1..20: mol_type = other DNA
aaataacctgtaatcttcaa

SEQ ID NO: 38431 - DNA, 20 bp, synthetic construct
  source 1..20: mol_type = other DNA
aaaataacctgtaatcttca

SEQ ID NO: 38432 - DNA, 20 bp, synthetic construct
  source 1..20: mol_type = other DNA
caaaataacctgtaatcttc

SEQ ID NO: 38433 - DNA, 20 bp, synthetic construct
  source 1..20: mol_type = other DNA
acaaaataacctgtaatctt

SEQ ID NO: 38434 - DNA, 20 bp, synthetic construct
  source 1..20: mol_type = other DNA
tacaaaataacctgtaatct

SEQ ID NO: 38435 - DNA, 20 bp, synthetic construct
  source 1..20: mol_type = other DNA
ctacaaaataacctgtaatc

SEQ ID NO: 38436 - DNA, 20 bp, synthetic construct
  source 1..20: mol_type = other DNA
tctacaaaataacctgtaat

SEQ ID NO: 38437 - DNA, 20 bp, synthetic construct
  source 1..20: mol_type = other DNA
gtctacaaaataacctgtaa

SEQ ID NO: 38438 - DNA, 20 bp, synthetic construct
  source 1..20: mol_type = other DNA
agtctacaaaataacctgta

SEQ ID NO: 38439 - DNA, 20 bp, synthetic construct
  source 1..20: mol_type = other DNA
cagtctacaaaataacctgt

SEQ ID NO: 38440 - DNA, 20 bp, synthetic construct
  source 1..20: mol_type = other DNA
acagtctacaaaataacctg

SEQ ID NO: 38441 - DNA, 20 bp, synthetic construct
  source 1..20: mol_type = other DNA
gacagtctacaaaataacct

SEQ ID NO: 38442 - DNA, 20 bp, synthetic construct
  source 1..20: mol_type = other DNA
ggacagtctacaaaataacc

SEQ ID NO: 38443 - DNA, 20 bp, synthetic construct
  source 1..20: mol_type = other DNA
gggacagtctacaaaataac

SEQ ID NO: 38444 - DNA, 20 bp, synthetic construct
  source 1..20: mol_type = other DNA
agggacagtctacaaaataa

SEQ ID NO: 38445 - DNA, 20 bp, synthetic construct
  source 1..20: mol_type = other DNA
gagggacagtctacaaaata

SEQ ID NO: 38446 - DNA, 20 bp, synthetic construct
  source 1..20: mol_type = other DNA
tgagggacagtctacaaaat

SEQ ID NO: 38447 - DNA, 20 bp, synthetic construct
  source 1..20: mol_type = other DNA
ttgagggacagtctacaaaa

SEQ ID NO: 38448 - DNA, 20 bp, synthetic construct
  source 1..20: mol_type = other DNA
gttgagggacagtctacaaa

SEQ ID NO: 38449 - DNA, 20 bp, synthetic construct
  source 1..20: mol_type = other DNA
agttgagggacagtctacaa

SEQ ID NO: 38450 - DNA, 20 bp, synthetic construct
  source 1..20: mol_type = other DNA
tagttgagggacagtctaca

SEQ ID NO: 38451 - DNA, 20 bp, synthetic construct
  source 1..20: mol_type = other DNA
ctagttgagggacagtctac

SEQ ID NO: 38452 - DNA, 20 bp, synthetic construct
  source 1..20: mol_type = other DNA
cctagttgagggacagtcta

SEQ ID NO: 38453 - DNA, 20 bp, synthetic construct
  source 1..20: mol_type = other DNA
ccctagttgagggacagtct

SEQ ID NO: 38454 - DNA, 20 bp, synthetic construct
  source 1..20: mol_type = other DNA
accctagttgagggacagtc

SEQ ID NO: 38455 - DNA, 20 bp, synthetic construct
  source 1..20: mol_type = other DNA
aaccctagttgagggacagt

SEQ ID NO: 38456 - DNA, 20 bp, synthetic construct
  source 1..20: mol_type = other DNA
aaaccctagttgagggacag

SEQ ID NO: 38457 - DNA, 20 bp, synthetic construct
  source 1..20: mol_type = other DNA
taaaccctagttgagggaca

SEQ ID NO: 38458 - DNA, 20 bp, synthetic construct
  source 1..20: mol_type = other DNA
ataaaccctagttgagggac

SEQ ID NO: 38459 - DNA, 20 bp, synthetic construct
  source 1..20: mol_type = other DNA
gataaaccctagttgaggga

SEQ ID NO: 38460 - DNA, 20 bp, synthetic construct
  source 1..20: mol_type = other DNA
agataaaccctagttgaggg

SEQ ID NO: 38461 - DNA, 20 bp, synthetic construct
  source 1..20: mol_type = other DNA
cagataaaccctagttgagg

SEQ ID NO: 38462 - DNA, 20 bp, synthetic construct
  source 1..20: mol_type = other DNA
tcagataaaccctagttgag

SEQ ID NO: 38463 - DNA, 20 bp, synthetic construct
  source 1..20: mol_type = other DNA
ctcagataaaccctagttga

SEQ ID NO: 38464 - DNA, 20 bp, synthetic construct
  source 1..20: mol_type = other DNA
cctcagataaaccctagttg

SEQ ID NO: 38465 - DNA, 20 bp, synthetic construct
  source 1..20: mol_type = other DNA
acctcagataaaccctagtt

SEQ ID NO: 38466 - DNA, 20 bp, synthetic construct
  source 1..20: mol_type = other DNA
aacctcagataaaccctagt

SEQ ID NO: 38467 - DNA, 20 bp, synthetic construct
  source 1..20: mol_type = other DNA
aaacctcagataaaccctag

SEQ ID NO: 38468 - DNA, 20 bp, synthetic construct
  source 1..20: mol_type = other DNA
gaaacctcagataaacccta

SEQ ID NO: 38469 - DNA, 20 bp, synthetic construct
  source 1..20: mol_type = other DNA
ggaaacctcagataaaccct

SEQ ID NO: 38470 - DNA, 20 bp, synthetic construct
  source 1..20: mol_type = other DNA
aggaaacctcagataaaccc

SEQ ID NO: 38471 - DNA, 20 bp, synthetic construct
  source 1..20: mol_type = other DNA
aaggaaacctcagataaacc

SEQ ID NO: 38472 - DNA, 20 bp, synthetic construct
  source 1..20: mol_type = other DNA
taaggaaacctcagataaac

SEQ ID NO: 38473 - DNA, 20 bp, synthetic construct
  source 1..20: mol_type = other DNA
ataaggaaacctcagataaa

SEQ ID NO: 38474 - DNA, 20 bp, synthetic construct
  source 1..20: mol_type = other DNA
cataaggaaacctcagataa

SEQ ID NO: 38475 - DNA, 20 bp, synthetic construct
  source 1..20: mol_type = other DNA
tcataaggaaacctcagata

SEQ ID NO: 38476 - DNA, 20 bp, synthetic construct
  source 1..20: mol_type = other DNA
atcataaggaaacctcagat

SEQ ID NO: 38477 - DNA, 20 bp, synthetic construct
  source 1..20: mol_type = other DNA
aatcataaggaaacctcaga

SEQ ID NO: 38478 - DNA, 20 bp, synthetic construct
  source 1..20: mol_type = other DNA
taatcataaggaaacctcag

SEQ ID NO: 38479 - DNA, 20 bp, synthetic construct
  source 1..20: mol_type = other DNA
ctaatcataaggaaacctca

SEQ ID NO: 38480 - DNA, 20 bp, synthetic construct
  source 1..20: mol_type = other DNA
tctaatcataaggaaacctc

SEQ ID NO: 38481 - DNA, 20 bp, synthetic construct
  source 1..20: mol_type = other DNA
atctaatcataaggaaacct

SEQ ID NO: 38482 - DNA, 20 bp, synthetic construct
  source 1..20: mol_type = other DNA
aatctaatcataaggaaacc

SEQ ID NO: 38483 - DNA, 20 bp, synthetic construct
  source 1..20: mol_type = other DNA
gaatctaatcataaggaaac

SEQ ID NO: 38484 - DNA, 20 bp, synthetic construct
  source 1..20: mol_type = other DNA
tgaatctaatcataaggaaa

SEQ ID NO: 38485 - DNA, 20 bp, synthetic construct
  source 1..20: mol_type = other DNA
ctgaatctaatcataaggaa

SEQ ID NO: 38486 - DNA, 20 bp, synthetic construct
  source 1..20: mol_type = other DNA
tctgaatctaatcataagga

SEQ ID NO: 38487 - DNA, 20 bp, synthetic construct
  source 1..20: mol_type = other DNA
atctgaatctaatcataagg

SEQ ID NO: 38488 - DNA, 20 bp, synthetic construct
  source 1..20: mol_type = other DNA
tatctgaatctaatcataag

SEQ ID NO: 38489 - DNA, 20 bp, synthetic construct
  source 1..20: mol_type = other DNA
atatctgaatctaatcataa

SEQ ID NO: 38490 - DNA, 20 bp, synthetic construct
  source 1..20: mol_type = other DNA
aatatctgaatctaatcata

SEQ ID NO: 38491 - DNA, 20 bp, synthetic construct
  source 1..20: mol_type = other DNA
aaatatctgaatctaatcat

SEQ ID NO: 38492 - DNA, 20 bp, synthetic construct
  source 1..20: mol_type = other DNA
taaatatctgaatctaatca

SEQ ID NO: 38493 - DNA, 20 bp, synthetic construct
  source 1..20: mol_type = other DNA
ataaatatctgaatctaatc

SEQ ID NO: 38494 - DNA, 20 bp, synthetic construct
  source 1..20: mol_type = other DNA
aataaatatctgaatctaat

SEQ ID NO: 38495 - DNA, 20 bp, synthetic construct
  source 1..20: mol_type = other DNA
aaataaatatctgaatctaa

SEQ ID NO: 38496 - DNA, 20 bp, synthetic construct
  source 1..20: mol_type = other DNA
aaaataaatatctgaatcta

SEQ ID NO: 38497 - DNA, 20 bp, synthetic construct
  source 1..20: mol_type = other DNA
aaaaataaatatctgaatct

SEQ ID NO: 38498 - DNA, 20 bp, synthetic construct
  source 1..20: mol_type = other DNA
caaaaataaatatctgaatc

SEQ ID NO: 38499 - DNA, 20 bp, synthetic construct
  source 1..20: mol_type = other DNA
ccaaaaataaatatctgaat

SEQ ID NO: 38500 - DNA, 20 bp, synthetic construct
  source 1..20: mol_type = other DNA
gccaaaaataaatatctgaa

SEQ ID NO: 38501 - DNA, 20 bp, synthetic construct
  source 1..20: mol_type = other DNA
tgccaaaaataaatatctga

SEQ ID NO: 38502 - DNA, 20 bp, synthetic construct
  source 1..20: mol_type = other DNA
ctgccaaaaataaatatctg

SEQ ID NO: 38503 - DNA, 20 bp, synthetic construct
  source 1..20: mol_type = other DNA
cctgccaaaaataaatatct

SEQ ID NO: 38504 - DNA, 20 bp, synthetic construct
  source 1..20: mol_type = other DNA
tcctgccaaaaataaatatc

SEQ ID NO: 38505 - DNA, 20 bp, synthetic construct
  source 1..20: mol_type = other DNA
ttcctgccaaaaataaatat

SEQ ID NO: 38506 - DNA, 20 bp, synthetic construct
  source 1..20: mol_type = other DNA
attcctgccaaaaataaata

SEQ ID NO: 38507 - DNA, 20 bp, synthetic construct
  source 1..20: mol_type = other DNA
tattcctgccaaaaataaat

SEQ ID NO: 38508 - DNA, 20 bp, synthetic construct
  source 1..20: mol_type = other DNA
gtattcctgccaaaaataaa

SEQ ID NO: 38509 - DNA, 20 bp, synthetic construct
  source 1..20: mol_type = other DNA
tgtattcctgccaaaaataa

SEQ ID NO: 38510 - DNA, 20 bp, synthetic construct
  source 1..20: mol_type = other DNA
ttgtattcctgccaaaaata

SEQ ID NO: 38511 - DNA, 20 bp, synthetic construct
  source 1..20: mol_type = other DNA
gttgtattcctgccaaaaat

SEQ ID NO: 38512 - DNA, 20 bp, synthetic construct
  source 1..20: mol_type = other DNA
tgttgtattcctgccaaaaa

SEQ ID NO: 38513 - DNA, 20 bp, synthetic construct
  source 1..20: mol_type = other DNA
ctgttgtattcctgccaaaa

SEQ ID NO: 38514 - DNA, 20 bp, synthetic construct
  source 1..20: mol_type = other DNA
tctgttgtattcctgccaaa

SEQ ID NO: 38515 - DNA, 20 bp, synthetic construct
  source 1..20: mol_type = other DNA
ttctgttgtattcctgccaa

SEQ ID NO: 38516 - DNA, 20 bp, synthetic construct
  source 1..20: mol_type = other DNA
tttctgttgtattcctgcca

SEQ ID NO: 38517 - DNA, 20 bp, synthetic construct
  source 1..20: mol_type = other DNA
atttctgttgtattcctgcc

SEQ ID NO: 38518 - DNA, 20 bp, synthetic construct
  source 1..20: mol_type = other DNA
catttctgttgtattcctgc

SEQ ID NO: 38519 - DNA, 20 bp, synthetic construct
  source 1..20: mol_type = other DNA
tcatttctgttgtattcctg

SEQ ID NO: 38520 - DNA, 20 bp, synthetic construct
  source 1..20: mol_type = other DNA
atcatttctgttgtattcct

SEQ ID NO: 38521 - DNA, 20 bp, synthetic construct
  source 1..20: mol_type = other DNA
aatcatttctgttgtattcc

SEQ ID NO: 38522 - DNA, 20 bp, synthetic construct
  source 1..20: mol_type = other DNA
aaatcatttctgttgtattc

SEQ ID NO: 38523 - DNA, 20 bp, synthetic construct
  source 1..20: mol_type = other DNA
caaatcatttctgttgtatt

SEQ ID NO: 38524 - DNA, 20 bp, synthetic construct
  source 1..20: mol_type = other DNA
acaaatcatttctgttgtat

SEQ ID NO: 38525 - DNA, 20 bp, synthetic construct
  source 1..20: mol_type = other DNA
cacaaatcatttctgttgta

SEQ ID NO: 38526 - DNA, 20 bp, synthetic construct
  source 1..20: mol_type = other DNA
acacaaatcatttctgttgt

SEQ ID NO: 38527 - DNA, 20 bp, synthetic construct
  source 1..20: mol_type = other DNA
cacacaaatcatttctgttg

SEQ ID NO: 38528 - DNA, 20 bp, synthetic construct
  source 1..20: mol_type = other DNA
acacacaaatcatttctgtt

SEQ ID NO: 38529 - DNA, 20 bp, synthetic construct
  source 1..20: mol_type = other DNA
aacacacaaatcatttctgt

SEQ ID NO: 38530 - DNA, 20 bp, synthetic construct
  source 1..20: mol_type = other DNA
aaacacacaaatcatttctg

SEQ ID NO: 38531 - DNA, 20 bp, synthetic construct
  source 1..20: mol_type = other DNA
aaaacacacaaatcatttct

SEQ ID NO: 38532 - DNA, 20 bp, synthetic construct
  source 1..20: mol_type = other DNA
aaaaacacacaaatcatttc

SEQ ID NO: 38533 - DNA, 20 bp, synthetic construct
  source 1..20: mol_type = other DNA
gaaaaacacacaaatcattt

SEQ ID NO: 38534 - DNA, 20 bp, synthetic construct
  source 1..20: mol_type = other DNA
agaaaaacacacaaatcatt

SEQ ID NO: 38535 - DNA, 20 bp, synthetic construct
  source 1..20: mol_type = other DNA
gagaaaaacacacaaatcat

SEQ ID NO: 38536 - DNA, 20 bp, synthetic construct
  source 1..20: mol_type = other DNA
tgagaaaaacacacaaatca

SEQ ID NO: 38537 - DNA, 20 bp, synthetic construct
  source 1..20: mol_type = other DNA
atgagaaaaacacacaaatc

SEQ ID NO: 38538 - DNA, 20 bp, synthetic construct
  source 1..20: mol_type = other DNA
aatgagaaaaacacacaaat

SEQ ID NO: 38539 - DNA, 20 bp, synthetic construct
  source 1..20: mol_type = other DNA
caatgagaaaaacacacaaa

SEQ ID NO: 38540 - DNA, 20 bp, synthetic construct
  source 1..20: mol_type = other DNA
gcaatgagaaaaacacacaa

SEQ ID NO: 38541 - DNA, 20 bp, synthetic construct
  source 1..20: mol_type = other DNA
tgcaatgagaaaaacacaca

SEQ ID NO: 38542 - DNA, 20 bp, synthetic construct
  source 1..20: mol_type = other DNA
atgcaatgagaaaaacacac

SEQ ID NO: 38543 - DNA, 20 bp, synthetic construct
  source 1..20: mol_type = other DNA
catgcaatgagaaaaacaca

SEQ ID NO: 38544 - DNA, 20 bp, synthetic construct
  source 1..20: mol_type = other DNA
tcatgcaatgagaaaaacac

SEQ ID NO: 38545 - DNA, 20 bp, synthetic construct
  source 1..20: mol_type = other DNA
atcatgcaatgagaaaaaca

SEQ ID NO: 38546 - DNA, 20 bp, synthetic construct
  source 1..20: mol_type = other DNA
tatcatgcaatgagaaaaac

SEQ ID NO: 38547 - DNA, 20 bp, synthetic construct
  source 1..20: mol_type = other DNA
atatcatgcaatgagaaaaa

SEQ ID NO: 38548 - DNA, 20 bp, synthetic construct
  source 1..20: mol_type = other DNA
gatatcatgcaatgagaaaa

SEQ ID NO: 38549 - DNA, 20 bp, synthetic construct
  source 1..20: mol_type = other DNA
tgatatcatgcaatgagaaa

SEQ ID NO: 38550 - DNA, 20 bp, synthetic construct
  source 1..20: mol_type = other DNA
ctgatatcatgcaatgagaa

SEQ ID NO: 38551 - DNA, 20 bp, synthetic construct
  source 1..20: mol_type = other DNA
tctgatatcatgcaatgaga

SEQ ID NO: 38552 - DNA, 20 bp, synthetic construct
  source 1..20: mol_type = other DNA
ttctgatatcatgcaatgag

SEQ ID NO: 38553 - DNA, 20 bp, synthetic construct
  source 1..20: mol_type = other DNA
tttctgatatcatgcaatga

SEQ ID NO: 38554 - DNA, 20 bp, synthetic construct
  source 1..20: mol_type = other DNA
ctttctgatatcatgcaatg

SEQ ID NO: 38555 - DNA, 20 bp, synthetic construct
  source 1..20: mol_type = other DNA
actttctgatatcatgcaat

SEQ ID NO: 38556 - DNA, 20 bp, synthetic construct
  source 1..20: mol_type = other DNA
cactttctgatatcatgcaa

SEQ ID NO: 38557 - DNA, 20 bp, synthetic construct
  source 1..20: mol_type = other DNA
gcactttctgatatcatgca

SEQ ID NO: 38558 - DNA, 20 bp, synthetic construct
  source 1..20: mol_type = other DNA
tgcactttctgatatcatgc

SEQ ID NO: 38559 - DNA, 20 bp, synthetic construct
  source 1..20: mol_type = other DNA
atgcactttctgatatcatg

SEQ ID NO: 38560 - DNA, 20 bp, synthetic construct
  source 1..20: mol_type = other DNA
aatgcactttctgatatcat

SEQ ID NO: 38561 - DNA, 20 bp, synthetic construct
  source 1..20: mol_type = other DNA
caatgcactttctgatatca

SEQ ID NO: 38562 - DNA, 20 bp, synthetic construct
  source 1..20: mol_type = other DNA
acaatgcactttctgatatc

SEQ ID NO: 38563 - DNA, 20 bp, synthetic construct
  source 1..20: mol_type = other DNA
tacaatgcactttctgatat

SEQ ID NO: 38564 - DNA, 20 bp, synthetic construct
  source 1..20: mol_type = other DNA
atacaatgcactttctgata

SEQ ID NO: 38565 - DNA, 20 bp, synthetic construct
  source 1..20: mol_type = other DNA
tatacaatgcactttctgat

SEQ ID NO: 38566 - DNA, 20 bp, synthetic construct
  source 1..20: mol_type = other DNA
atatacaatgcactttctga

SEQ ID NO: 38567 - DNA, 20 bp, synthetic construct
  source 1..20: mol_type = other DNA
tatatacaatgcactttctg

SEQ ID NO: 38568 - DNA, 20 bp, synthetic construct
  source 1..20: mol_type = other DNA
atatatacaatgcactttct

SEQ ID NO: 38569 - DNA, 20 bp, synthetic construct
  source 1..20: mol_type = other DNA
aatatatacaatgcactttc

SEQ ID NO: 38570 - DNA, 20 bp, synthetic construct
  source 1..20: mol_type = other DNA
aaatatatacaatgcacttt

SEQ ID NO: 38571 - DNA, 20 bp, synthetic construct
  source 1..20: mol_type = other DNA
taaatatatacaatgcactt

SEQ ID NO: 38572 - DNA, 20 bp, synthetic construct
  source 1..20: mol_type = other DNA
ataaatatatacaatgcact

SEQ ID NO: 38573 - DNA, 20 bp, synthetic construct
  source 1..20: mol_type = other DNA
gataaatatatacaatgcac

SEQ ID NO: 38574 - DNA, 20 bp, synthetic construct
  source 1..20: mol_type = other DNA
ggataaatatatacaatgca

SEQ ID NO: 38575 - DNA, 20 bp, synthetic construct
  source 1..20: mol_type = other DNA
gggataaatatatacaatgc

SEQ ID NO: 38576 - DNA, 20 bp, synthetic construct
  source 1..20: mol_type = other DNA
tgggataaatatatacaatg

SEQ ID NO: 38577 - DNA, 20 bp, synthetic construct
  source 1..20: mol_type = other DNA
atgggataaatatatacaat

SEQ ID NO: 38578 - DNA, 20 bp, synthetic construct
  source 1..20: mol_type = other DNA
aatgggataaatatatacaa

SEQ ID NO: 38579 - DNA, 20 bp, synthetic construct
  source 1..20: mol_type = other DNA
taatgggataaatatataca

SEQ ID NO: 38580 - DNA, 20 bp, synthetic construct
  source 1..20: mol_type = other DNA
gtaatgggataaatatatac

SEQ ID NO: 38581 - DNA, 20 bp, synthetic construct
  source 1..20: mol_type = other DNA
agtaatgggataaatatata

SEQ ID NO: 38582 - DNA, 20 bp, synthetic construct
  source 1..20: mol_type = other DNA
cagtaatgggataaatatat

SEQ ID NO: 38583 - DNA, 20 bp, synthetic construct
  source 1..20: mol_type = other DNA
ccagtaatgggataaatata

SEQ ID NO: 38584 - DNA, 20 bp, synthetic construct
  source 1..20: mol_type = other DNA
cccagtaatgggataaatat

SEQ ID NO: 38585 - DNA, 20 bp, synthetic construct
  source 1..20: mol_type = other DNA
ccccagtaatgggataaata

SEQ ID NO: 38586 - DNA, 20 bp, synthetic construct
  source 1..20: mol_type = other DNA
accccagtaatgggataaat

SEQ ID NO: 38587 - DNA, 20 bp, synthetic construct
  source 1..20: mol_type = other DNA
aaccccagtaatgggataaa

SEQ ID NO: 38588 - DNA, 20 bp, synthetic construct
  source 1..20: mol_type = other DNA
caaccccagtaatgggataa

SEQ ID NO: 38589 - DNA, 20 bp, synthetic construct
  source 1..20: mol_type = other DNA
acaaccccagtaatgggata

SEQ ID NO: 38590 - DNA, 20 bp, synthetic construct
  source 1..20: mol_type = other DNA
aacaaccccagtaatgggat

SEQ ID NO: 38591 - DNA, 20 bp, synthetic construct
  source 1..20: mol_type = other DNA
taacaaccccagtaatggga

SEQ ID NO: 38592 - DNA, 20 bp, synthetic construct
  source 1..20: mol_type = other DNA
ttaacaaccccagtaatggg

SEQ ID NO: 38593 - DNA, 20 bp, synthetic construct
  source 1..20: mol_type = other DNA
gttaacaaccccagtaatgg

SEQ ID NO: 38594 - DNA, 20 bp, synthetic construct
  source 1..20: mol_type = other DNA
agttaacaaccccagtaatg

SEQ ID NO: 38595 - DNA, 20 bp, synthetic construct
  source 1..20: mol_type = other DNA
aagttaacaaccccagtaat

SEQ ID NO: 38596 - DNA, 20 bp, synthetic construct
  source 1..20: mol_type = other DNA
aaagttaacaaccccagtaa

SEQ ID NO: 38597 - DNA, 20 bp, synthetic construct
  source 1..20: mol_type = other DNA
caaagttaacaaccccagta

SEQ ID NO: 38598 - DNA, 20 bp, synthetic construct
  source 1..20: mol_type = other DNA
tcaaagttaacaaccccagt

SEQ ID NO: 38599 - DNA, 20 bp, synthetic construct
  source 1..20: mol_type = other DNA
atcaaagttaacaaccccag

SEQ ID NO: 38600 - DNA, 20 bp, synthetic construct
  source 1..20: mol_type = other DNA
gatcaaagttaacaacccca

SEQ ID NO: 38601 - DNA, 20 bp, synthetic construct
  source 1..20: mol_type = other DNA
tgatcaaagttaacaacccc

SEQ ID NO: 38602 - DNA, 20 bp, synthetic construct
  source 1..20: mol_type = other DNA
gtgatcaaagttaacaaccc

SEQ ID NO: 38603 - DNA, 20 bp, synthetic construct
  source 1..20: mol_type = other DNA
agtgatcaaagttaacaacc

SEQ ID NO: 38604 - DNA, 20 bp, synthetic construct
  source 1..20: mol_type = other DNA
aagtgatcaaagttaacaac

SEQ ID NO: 38605 - DNA, 20 bp, synthetic construct
  source 1..20: mol_type = other DNA
caagtgatcaaagttaacaa

SEQ ID NO: 38606 - DNA, 20 bp, synthetic construct
  source 1..20: mol_type = other DNA
ccaagtgatcaaagttaaca

SEQ ID NO: 38607 - DNA, 20 bp, synthetic construct
  source 1..20: mol_type = other DNA
accaagtgatcaaagttaac

SEQ ID NO: 38608 - DNA, 20 bp, synthetic construct
  source 1..20: mol_type = other DNA
aaccaagtgatcaaagttaa

SEQ ID NO: 38609 - DNA, 20 bp, synthetic construct
  source 1..20: mol_type = other DNA
taaccaagtgatcaaagtta

SEQ ID NO: 38610 - DNA, 20 bp, synthetic construct
  source 1..20: mol_type = other DNA
ctaaccaagtgatcaaagtt

SEQ ID NO: 38611 - DNA, 20 bp, synthetic construct
  source 1..20: mol_type = other DNA
tctaaccaagtgatcaaagt

SEQ ID NO: 38612 - DNA, 20 bp, synthetic construct
  source 1..20: mol_type = other DNA
ctctaaccaagtgatcaaag

SEQ ID NO: 38613 - DNA, 20 bp, synthetic construct
  source 1..20: mol_type = other DNA
actctaaccaagtgatcaaa

SEQ ID NO: 38614 - DNA, 20 bp, synthetic construct
  source 1..20: mol_type = other DNA
aactctaaccaagtgatcaa

SEQ ID NO: 38615 - DNA, 20 bp, synthetic construct
  source 1..20: mol_type = other DNA
caactctaaccaagtgatca

SEQ ID NO: 38616 - DNA, 20 bp, synthetic construct
  source 1..20: mol_type = other DNA
acaactctaaccaagtgatc

SEQ ID NO: 38617 - DNA, 20 bp, synthetic construct
  source 1..20: mol_type = other DNA
cacaactctaaccaagtgat

SEQ ID NO: 38618 - DNA, 20 bp, synthetic construct
  source 1..20: mol_type = other DNA
acacaactctaaccaagtga

SEQ ID NO: 38619 - DNA, 20 bp, synthetic construct
  source 1..20: mol_type = other DNA
gacacaactctaaccaagtg

SEQ ID NO: 38620 - DNA, 20 bp, synthetic construct
  source 1..20: mol_type = other DNA
agacacaactctaaccaagt

SEQ ID NO: 38621 - DNA, 20 bp, synthetic construct
  source 1..20: mol_type = other DNA
tagacacaactctaaccaag

SEQ ID NO: 38622 - DNA, 20 bp, synthetic construct
  source 1..20: mol_type = other DNA
gtagacacaactctaaccaa

SEQ ID NO: 38623 - DNA, 20 bp, synthetic construct
  source 1..20: mol_type = other DNA
agtagacacaactctaacca

SEQ ID NO: 38624 - DNA, 20 bp, synthetic construct
  source 1..20: mol_type = other DNA
tagtagacacaactctaacc

SEQ ID NO: 38625 - DNA, 20 bp, synthetic construct
  source 1..20: mol_type = other DNA
ttagtagacacaactctaac

SEQ ID NO: 38626 - DNA, 20 bp, synthetic construct
  source 1..20: mol_type = other DNA
cttagtagacacaactctaa

SEQ ID NO: 38627 - DNA, 20 bp, synthetic construct
  source 1..20: mol_type = other DNA
acttagtagacacaactcta

SEQ ID NO: 38628 - DNA, 20 bp, synthetic construct
  source 1..20: mol_type = other DNA
aacttagtagacacaactct

SEQ ID NO: 38629 - DNA, 20 bp, synthetic construct
  source 1..20: mol_type = other DNA
aaacttagtagacacaactc

SEQ ID NO: 38630 - DNA, 20 bp, synthetic construct
  source 1..20: mol_type = other DNA
gaaacttagtagacacaact

SEQ ID NO: 38631 - DNA, 20 bp, synthetic construct
  source 1..20: mol_type = other DNA
agaaacttagtagacacaac

SEQ ID NO: 38632 - DNA, 20 bp, synthetic construct
  source 1..20: mol_type = other DNA
aagaaacttagtagacacaa

SEQ ID NO: 38633 - DNA, 20 bp, synthetic construct
  source 1..20: mol_type = other DNA
gaagaaacttagtagacaca

SEQ ID NO: 38634 - DNA, 20 bp, synthetic construct
  source 1..20: mol_type = other DNA
tgaagaaacttagtagacac

SEQ ID NO: 38635 - DNA, 20 bp, synthetic construct
  source 1..20: mol_type = other DNA
gtgaagaaacttagtagaca

SEQ ID NO: 38636 - DNA, 20 bp, synthetic construct
  source 1..20: mol_type = other DNA
agtgaagaaacttagtagac

SEQ ID NO: 38637 - DNA, 20 bp, synthetic construct
  source 1..20: mol_type = other DNA
tagtgaagaaacttagtaga

SEQ ID NO: 38638 - DNA, 20 bp, synthetic construct
  source 1..20: mol_type = other DNA
atagtgaagaaacttagtag

SEQ ID NO: 38639 - DNA, 20 bp, synthetic construct
  source 1..20: mol_type = other DNA
tatagtgaagaaacttagta

SEQ ID NO: 38640 - DNA, 20 bp, synthetic construct
  source 1..20: mol_type = other DNA
ttatagtgaagaaacttagt

SEQ ID NO: 38641 - DNA, 20 bp, synthetic construct
  source 1..20: mol_type = other DNA
tttatagtgaagaaacttag

SEQ ID NO: 38642 - DNA, 20 bp, synthetic construct
  source 1..20: mol_type = other DNA
ctttatagtgaagaaactta

SEQ ID NO: 38643 - DNA, 20 bp, synthetic construct
  source 1..20: mol_type = other DNA
actttatagtgaagaaactt

SEQ ID NO: 38644 - DNA, 20 bp, synthetic construct
  source 1..20: mol_type = other DNA
aactttatagtgaagaaact

SEQ ID NO: 38645 - DNA, 20 bp, synthetic construct
  source 1..20: mol_type = other DNA
taactttatagtgaagaaac

SEQ ID NO: 38646 - DNA, 20 bp, synthetic construct
  source 1..20: mol_type = other DNA
ataactttatagtgaagaaa

SEQ ID NO: 38647 - DNA, 20 bp, synthetic construct
  source 1..20: mol_type = other DNA
aataactttatagtgaagaa

SEQ ID NO: 38648 - DNA, 20 bp, synthetic construct
  source 1..20: mol_type = other DNA
aaataactttatagtgaaga

SEQ ID NO: 38649 - DNA, 20 bp, synthetic construct
  source 1..20: mol_type = other DNA
aaaataactttatagtgaag

SEQ ID NO: 38650 - DNA, 20 bp, synthetic construct
  source 1..20: mol_type = other DNA
aaaaataactttatagtgaa

SEQ ID NO: 38651 - DNA, 20 bp, synthetic construct
  source 1..20: mol_type = other DNA
gaaaaataactttatagtga

SEQ ID NO: 38652 - DNA, 20 bp, synthetic construct
  source 1..20: mol_type = other DNA
tgaaaaataactttatagtg

SEQ ID NO: 38653 - DNA, 20 bp, synthetic construct
  source 1..20: mol_type = other DNA
gtgaaaaataactttatagt

SEQ ID NO: 38654 - DNA, 20 bp, synthetic construct
  source 1..20: mol_type = other DNA
agtgaaaaataactttatag

SEQ ID NO: 38655 - DNA, 20 bp, synthetic construct
  source 1..20: mol_type = other DNA
aagtgaaaaataactttata

SEQ ID NO: 38656 - DNA, 20 bp, synthetic construct
  source 1..20: mol_type = other DNA
caagtgaaaaataactttat

SEQ ID NO: 38657 - DNA, 20 bp, synthetic construct
  source 1..20: mol_type = other DNA
ccaagtgaaaaataacttta

SEQ ID NO: 38658 - DNA, 20 bp, synthetic construct
  source 1..20: mol_type = other DNA
accaagtgaaaaataacttt

SEQ ID NO: 38659 - DNA, 20 bp, synthetic construct
  source 1..20: mol_type = other DNA
gaccaagtgaaaaataactt

SEQ ID NO: 38660 - DNA, 20 bp, synthetic construct
  source 1..20: mol_type = other DNA
tgaccaagtgaaaaataact

SEQ ID NO: 38661 - DNA, 20 bp, synthetic construct
  source 1..20: mol_type = other DNA
atgaccaagtgaaaaataac

SEQ ID NO: 38662 - DNA, 20 bp, synthetic construct
  source 1..20: mol_type = other DNA
aatgaccaagtgaaaaataa

SEQ ID NO: 38663 - DNA, 20 bp, synthetic construct
  source 1..20: mol_type = other DNA
aaatgaccaagtgaaaaata

SEQ ID NO: 38664 - DNA, 20 bp, synthetic construct
  source 1..20: mol_type = other DNA
gaaatgaccaagtgaaaaat

SEQ ID NO: 38665 - DNA, 20 bp, synthetic construct
  source 1..20: mol_type = other DNA
tgaaatgaccaagtgaaaaa

SEQ ID NO: 38666 - DNA, 20 bp, synthetic construct
  source 1..20: mol_type = other DNA
atgaaatgaccaagtgaaaa

SEQ ID NO: 38667 - DNA, 20 bp, synthetic construct
  source 1..20: mol_type = other DNA
gatgaaatgaccaagtgaaa

SEQ ID NO: 38668 - DNA, 20 bp, synthetic construct
  source 1..20: mol_type = other DNA
tgatgaaatgaccaagtgaa

SEQ ID NO: 38669 - DNA, 20 bp, synthetic construct
  source 1..20: mol_type = other DNA
ctgatgaaatgaccaagtga

SEQ ID NO: 38670 - DNA, 20 bp, synthetic construct
  source 1..20: mol_type = other DNA
actgatgaaatgaccaagtg

SEQ ID NO: 38671 - DNA, 20 bp, synthetic construct
  source 1..20: mol_type = other DNA
tactgatgaaatgaccaagt

SEQ ID NO: 38672 - DNA, 20 bp, synthetic construct
  source 1..20: mol_type = other DNA
atactgatgaaatgaccaag

SEQ ID NO: 38673 - DNA, 20 bp, synthetic construct
  source 1..20: mol_type = other DNA
gatactgatgaaatgaccaa

SEQ ID NO: 38674 - DNA, 20 bp, synthetic construct
  source 1..20: mol_type = other DNA
agatactgatgaaatgacca

SEQ ID NO: 38675 - DNA, 20 bp, synthetic construct
  source 1..20: mol_type = other DNA
aagatactgatgaaatgacc

SEQ ID NO: 38676 - DNA, 20 bp, synthetic construct
  source 1..20: mol_type = other DNA
caagatactgatgaaatgac

SEQ ID NO: 38677 - DNA, 20 bp, synthetic construct
  source 1..20: mol_type = other DNA
acaagatactgatgaaatga

SEQ ID NO: 38678 - DNA, 20 bp, synthetic construct
  source 1..20: mol_type = other DNA
cacaagatactgatgaaatg

SEQ ID NO: 38679 - DNA, 20 bp, synthetic construct
  source 1..20: mol_type = other DNA
ccacaagatactgatgaaat

SEQ ID NO: 38680 - DNA, 20 bp, synthetic construct
  source 1..20: mol_type = other DNA
cccacaagatactgatgaaa

SEQ ID NO: 38681 - DNA, 20 bp, synthetic construct
  source 1..20: mol_type = other DNA
ccccacaagatactgatgaa

SEQ ID NO: 38682 - DNA, 20 bp, synthetic construct
  source 1..20: mol_type = other DNA
tccccacaagatactgatga

SEQ ID NO: 38683 - DNA, 20 bp, synthetic construct
  source 1..20: mol_type = other DNA
ctccccacaagatactgatg

SEQ ID NO: 38684 - DNA, 20 bp, synthetic construct
  source 1..20: mol_type = other DNA
actccccacaagatactgat

SEQ ID NO: 38685 - DNA, 20 bp, synthetic construct
  source 1..20: mol_type = other DNA
aactccccacaagatactga

SEQ ID NO: 38686 - DNA, 20 bp, synthetic construct
  source 1..20: mol_type = other DNA
taactccccacaagatactg

SEQ ID NO: 38687 - DNA, 20 bp, synthetic construct
  source 1..20: mol_type = other DNA
gtaactccccacaagatact

SEQ ID NO: 38688 - DNA, 20 bp, synthetic construct
  source 1..20: mol_type = other DNA
agtaactccccacaagatac

SEQ ID NO: 38689 - DNA, 20 bp, synthetic construct
  source 1..20: mol_type = other DNA
aagtaactccccacaagata

SEQ ID NO: 38690 - DNA, 20 bp, synthetic construct
  source 1..20: mol_type = other DNA
aaagtaactccccacaagat

SEQ ID NO: 38691 - DNA, 20 bp, synthetic construct
  source 1..20: mol_type = other DNA
caaagtaactccccacaaga

SEQ ID NO: 38692 - DNA, 20 bp, synthetic construct
  source 1..20: mol_type = other DNA
acaaagtaactccccacaag

SEQ ID NO: 38693 - DNA, 20 bp, synthetic construct
  source 1..20: mol_type = other DNA
cacaaagtaactccccacaa

SEQ ID NO: 38694 - DNA, 20 bp, synthetic construct
  source 1..20: mol_type = other DNA
ccacaaagtaactccccaca

SEQ ID NO: 38695 - DNA, 20 bp, synthetic construct
  source 1..20: mol_type = other DNA
accacaaagtaactccccac

SEQ ID NO: 38696 - DNA, 20 bp, synthetic construct
  source 1..20: mol_type = other DNA
aaccacaaagtaactcccca

SEQ ID NO: 38697 - DNA, 20 bp, synthetic construct
  source 1..20: mol_type = other DNA
taaccacaaagtaactcccc

SEQ ID NO: 38698 - DNA, 20 bp, synthetic construct
  source 1..20: mol_type = other DNA
ataaccacaaagtaactccc

SEQ ID NO: 38699 - DNA, 20 bp, synthetic construct
  source 1..20: mol_type = other DNA
tataaccacaaagtaactcc

SEQ ID NO: 38700 - DNA, 20 bp, synthetic construct
  source 1..20: mol_type = other DNA
atataaccacaaagtaactc

SEQ ID NO: 38701 - DNA, 20 bp, synthetic construct
  source 1..20: mol_type = other DNA
tatataaccacaaagtaact

SEQ ID NO: 38702 - DNA, 20 bp, synthetic construct
  source 1..20: mol_type = other DNA
ttatataaccacaaagtaac

SEQ ID NO: 38703 - DNA, 20 bp, synthetic construct
  source 1..20: mol_type = other DNA
tttatataaccacaaagtaa

SEQ ID NO: 38704 - DNA, 20 bp, synthetic construct
  source 1..20: mol_type = other DNA
atttatataaccacaaagta

SEQ ID NO: 38705 - DNA, 20 bp, synthetic construct
  source 1..20: mol_type = other DNA
tatttatataaccacaaagt

SEQ ID NO: 38706 - DNA, 20 bp, synthetic construct
  source 1..20: mol_type = other DNA
gtatttatataaccacaaag

SEQ ID NO: 38707 - DNA, 20 bp, synthetic construct
  source 1..20: mol_type = other DNA
agtatttatataaccacaaa

SEQ ID NO: 38708 - DNA, 20 bp, synthetic construct
  source 1..20: mol_type = other DNA
gagtatttatataaccacaa

SEQ ID NO: 38709 - DNA, 20 bp, synthetic construct
  source 1..20: mol_type = other DNA
agagtatttatataaccaca

SEQ ID NO: 38710 - DNA, 20 bp, synthetic construct
  source 1..20: mol_type = other DNA
cagagtatttatataaccac

SEQ ID NO: 38711 - DNA, 20 bp, synthetic construct
  source 1..20: mol_type = other DNA
acagagtatttatataacca

SEQ ID NO: 38712 - DNA, 20 bp, synthetic construct
  source 1..20: mol_type = other DNA
aacagagtatttatataacc

SEQ ID NO: 38713 - DNA, 20 bp, synthetic construct
  source 1..20: mol_type = other DNA
aaacagagtatttatataac

SEQ ID NO: 38714 - DNA, 20 bp, synthetic construct
  source 1..20: mol_type = other DNA
gaaacagagtatttatataa

SEQ ID NO: 38715 - DNA, 20 bp, synthetic construct
  source 1..20: mol_type = other DNA
agaaacagagtatttatata

SEQ ID NO: 38716 - DNA, 20 bp, synthetic construct
  source 1..20: mol_type = other DNA
tagaaacagagtatttatat

SEQ ID NO: 38717 - DNA, 20 bp, synthetic construct
  source 1..20: mol_type = other DNA
gtagaaacagagtatttata

SEQ ID NO: 38718 - DNA, 20 bp, synthetic construct
  source 1..20: mol_type = other DNA
agtagaaacagagtatttat

SEQ ID NO: 38719 - DNA, 20 bp, synthetic construct
  source 1..20: mol_type = other DNA
aagtagaaacagagtattta

SEQ ID NO: 38720 - DNA, 20 bp, synthetic construct
  source 1..20: mol_type = other DNA
aaagtagaaacagagtattt

SEQ ID NO: 38721 - DNA, 20 bp, synthetic construct
  source 1..20: mol_type = other DNA
gaaagtagaaacagagtatt

SEQ ID NO: 38722 - DNA, 20 bp, synthetic construct
  source 1..20: mol_type = other DNA
ggaaagtagaaacagagtat

SEQ ID NO: 38723 - DNA, 20 bp, synthetic construct
  source 1..20: mol_type = other DNA
gggaaagtagaaacagagta

SEQ ID NO: 38724 - DNA, 20 bp, synthetic construct
  source 1..20: mol_type = other DNA
agggaaagtagaaacagagt

SEQ ID NO: 38725 - DNA, 20 bp, synthetic construct
  source 1..20: mol_type = other DNA
aagggaaagtagaaacagag

SEQ ID NO: 38726 - DNA, 20 bp, synthetic construct
  source 1..20: mol_type = other DNA
taagggaaagtagaaacaga

SEQ ID NO: 38727 - DNA, 20 bp, synthetic construct
  source 1..20: mol_type = other DNA
gtaagggaaagtagaaacag

SEQ ID NO: 38728 - DNA, 20 bp, synthetic construct
  source 1..20: mol_type = other DNA
agtaagggaaagtagaaaca

SEQ ID NO: 38729 - DNA, 20 bp, synthetic construct
  source 1..20: mol_type = other DNA
tagtaagggaaagtagaaac

SEQ ID NO: 38730 - DNA, 20 bp, synthetic construct
  source 1..20: mol_type = other DNA
atagtaagggaaagtagaaa

SEQ ID NO: 38731 - DNA, 20 bp, synthetic construct
  source 1..20: mol_type = other DNA
tatagtaagggaaagtagaa

SEQ ID NO: 38732 - DNA, 20 bp, synthetic construct
  source 1..20: mol_type = other DNA
atatagtaagggaaagtaga

SEQ ID NO: 38733 - DNA, 20 bp, synthetic construct
  source 1..20: mol_type = other DNA
aatatagtaagggaaagtag

SEQ ID NO: 38734 - DNA, 20 bp, synthetic construct
  source 1..20: mol_type = other DNA
aaatatagtaagggaaagta

SEQ ID NO: 38735 - DNA, 20 bp, synthetic construct
  source 1..20: mol_type = other DNA
taaatatagtaagggaaagt

SEQ ID NO: 38736 - DNA, 20 bp, synthetic construct
  source 1..20: mol_type = other DNA
ctaaatatagtaagggaaag

SEQ ID NO: 38737 - DNA, 20 bp, synthetic construct
  source 1..20: mol_type = other DNA
gctaaatatagtaagggaaa

SEQ ID NO: 38738 - DNA, 20 bp, synthetic construct
  source 1..20: mol_type = other DNA
agctaaatatagtaagggaa

SEQ ID NO: 38739 - DNA, 20 bp, synthetic construct
  source 1..20: mol_type = other DNA
aagctaaatatagtaaggga

SEQ ID NO: 38740 - DNA, 20 bp, synthetic construct
  source 1..20: mol_type = other DNA
gaagctaaatatagtaaggg

SEQ ID NO: 38741 - DNA, 20 bp, synthetic construct
  source 1..20: mol_type = other DNA
agaagctaaatatagtaagg

SEQ ID NO: 38742 - DNA, 20 bp, synthetic construct
  source 1..20: mol_type = other DNA
cagaagctaaatatagtaag

SEQ ID NO: 38743 - DNA, 20 bp, synthetic construct
  source 1..20: mol_type = other DNA
acagaagctaaatatagtaa

SEQ ID NO: 38744 - DNA, 20 bp, synthetic construct
  source 1..20: mol_type = other DNA
cacagaagctaaatatagta

SEQ ID NO: 38745 - DNA, 20 bp, synthetic construct
  source 1..20: mol_type = other DNA
ccacagaagctaaatatagt

SEQ ID NO: 38746 - DNA, 20 bp, synthetic construct
  source 1..20: mol_type = other DNA
tccacagaagctaaatatag

SEQ ID NO: 38747 - DNA, 20 bp, synthetic construct
  source 1..20: mol_type = other DNA
gtccacagaagctaaatata

SEQ ID NO: 38748 - DNA, 20 bp, synthetic construct
  source 1..20: mol_type = other DNA
tgtccacagaagctaaatat

SEQ ID NO: 38749 - DNA, 20 bp, synthetic construct
  source 1..20: mol_type = other DNA
gtgtccacagaagctaaata

SEQ ID NO: 38750 - DNA, 20 bp, synthetic construct
  source 1..20: mol_type = other DNA
agtgtccacagaagctaaat

SEQ ID NO: 38751 - DNA, 20 bp, synthetic construct
  source 1..20: mol_type = other DNA
aagtgtccacagaagctaaa

SEQ ID NO: 38752 - DNA, 20 bp, synthetic construct
  source 1..20: mol_type = other DNA
aaagtgtccacagaagctaa

SEQ ID NO: 38753 - DNA, 20 bp, synthetic construct
  source 1..20: mol_type = other DNA
aaaagtgtccacagaagcta

SEQ ID NO: 38754 - DNA, 20 bp, synthetic construct
  source 1..20: mol_type = other DNA
caaaagtgtccacagaagct

SEQ ID NO: 38755 - DNA, 20 bp, synthetic construct
  source 1..20: mol_type = other DNA
gcaaaagtgtccacagaagc

SEQ ID NO: 38756 - DNA, 20 bp, synthetic construct
  source 1..20: mol_type = other DNA
ggcaaaagtgtccacagaag

SEQ ID NO: 38757 - DNA, 20 bp, synthetic construct
  source 1..20: mol_type = other DNA
aggcaaaagtgtccacagaa

SEQ ID NO: 38758 - DNA, 20 bp, synthetic construct
  source 1..20: mol_type = other DNA
caggcaaaagtgtccacaga

SEQ ID NO: 38759 - DNA, 20 bp, synthetic construct
  source 1..20: mol_type = other DNA
tcaggcaaaagtgtccacag

SEQ ID NO: 38760 - DNA, 20 bp, synthetic construct
  source 1..20: mol_type = other DNA
ttcaggcaaaagtgtccaca

SEQ ID NO: 38761 - DNA, 20 bp, synthetic construct
  source 1..20: mol_type = other DNA
tttcaggcaaaagtgtccac

SEQ ID NO: 38762 - DNA, 20 bp, synthetic construct
  source 1..20: mol_type = other DNA
gtttcaggcaaaagtgtcca

SEQ ID NO: 38763 - DNA, 20 bp, synthetic construct
  source 1..20: mol_type = other DNA
tgtttcaggcaaaagtgtcc

SEQ ID NO: 38764 - DNA, 20 bp, synthetic construct
  source 1..20: mol_type = other DNA
ctgtttcaggcaaaagtgtc

SEQ ID NO: 38765 - DNA, 20 bp, synthetic construct
  source 1..20: mol_type = other DNA
actgtttcaggcaaaagtgt

SEQ ID NO: 38766 - DNA, 20 bp, synthetic construct
  source 1..20: mol_type = other DNA
aactgtttcaggcaaaagtg

SEQ ID NO: 38767 - DNA, 20 bp, synthetic construct
  source 1..20: mol_type = other DNA
taactgtttcaggcaaaagt

SEQ ID NO: 38768 - DNA, 20 bp, synthetic construct
  source 1..20: mol_type = other DNA
ataactgtttcaggcaaaag

SEQ ID NO: 38769 - DNA, 20 bp, synthetic construct
  source 1..20: mol_type = other DNA
aataactgtttcaggcaaaa

SEQ ID NO: 38770 - DNA, 20 bp, synthetic construct
  source 1..20: mol_type = other DNA
aaataactgtttcaggcaaa

SEQ ID NO: 38771 - DNA, 20 bp, synthetic construct
  source 1..20: mol_type = other DNA
taaataactgtttcaggcaa

SEQ ID NO: 38772 - DNA, 20 bp, synthetic construct
  source 1..20: mol_type = other DNA
gtaaataactgtttcaggca

SEQ ID NO: 38773 - DNA, 20 bp, synthetic construct
  source 1..20: mol_type = other DNA
agtaaataactgtttcaggc

SEQ ID NO: 38774 - DNA, 20 bp, synthetic construct
  source 1..20: mol_type = other DNA
tagtaaataactgtttcagg

SEQ ID NO: 38775 - DNA, 20 bp, synthetic construct
  source 1..20: mol_type = other DNA
atagtaaataactgtttcag

SEQ ID NO: 38776 - DNA, 20 bp, synthetic construct
  source 1..20: mol_type = other DNA
catagtaaataactgtttca

SEQ ID NO: 38777 - DNA, 20 bp, synthetic construct
  source 1..20: mol_type = other DNA
ccatagtaaataactgtttc

SEQ ID NO: 38778 - DNA, 20 bp, synthetic construct
  source 1..20: mol_type = other DNA
accatagtaaataactgttt

SEQ ID NO: 38779 - DNA, 20 bp, synthetic construct
  source 1..20: mol_type = other DNA
caccatagtaaataactgtt

SEQ ID NO: 38780 - DNA, 20 bp, synthetic construct
  source 1..20: mol_type = other DNA
acaccatagtaaataactgt

SEQ ID NO: 38781 - DNA, 20 bp, synthetic construct
  source 1..20: mol_type = other DNA
aacaccatagtaaataactg

SEQ ID NO: 38782 - DNA, 20 bp, synthetic construct
  source 1..20: mol_type = other DNA
taacaccatagtaaataact

SEQ ID NO: 38783 - DNA, 20 bp, synthetic construct
  source 1..20: mol_type = other DNA
gtaacaccatagtaaataac

SEQ ID NO: 38784 - DNA, 20 bp, synthetic construct
  source 1..20: mol_type = other DNA
ggtaacaccatagtaaataa

SEQ ID NO: 38785 - DNA, 20 bp, synthetic construct
  source 1..20: mol_type = other DNA
tggtaacaccatagtaaata

SEQ ID NO: 38786 - DNA, 20 bp, synthetic construct
  source 1..20: mol_type = other DNA
ttggtaacaccatagtaaat

SEQ ID NO: 38787 - DNA, 20 bp, synthetic construct
  source 1..20: mol_type = other DNA
cttggtaacaccatagtaaa

SEQ ID NO: 38788 - DNA, 20 bp, synthetic construct
  source 1..20: mol_type = other DNA
acttggtaacaccatagtaa

SEQ ID NO: 38789 - DNA, 20 bp, synthetic construct
  source 1..20: mol_type = other DNA
tacttggtaacaccatagta

SEQ ID NO: 38790 - DNA, 20 bp, synthetic construct
  source 1..20: mol_type = other DNA
ctacttggtaacaccatagt

SEQ ID NO: 38791 - DNA, 20 bp, synthetic construct
  source 1..20: mol_type = other DNA
actacttggtaacaccatag

SEQ ID NO: 38792 - DNA, 20 bp, synthetic construct
  source 1..20: mol_type = other DNA
cactacttggtaacaccata

SEQ ID NO: 38793 - DNA, 20 bp, synthetic construct
  source 1..20: mol_type = other DNA
tcactacttggtaacaccat

SEQ ID NO: 38794 - DNA, 20 bp, synthetic construct
  source 1..20: mol_type = other DNA
atcactacttggtaacacca

SEQ ID NO: 38795 - DNA, 20 bp, synthetic construct
  source 1..20: mol_type = other DNA
catcactacttggtaacacc

SEQ ID NO: 38796 - DNA, 20 bp, synthetic construct
  source 1..20: mol_type = other DNA
gcatcactacttggtaacac

SEQ ID NO: 38797 - DNA, 20 bp, synthetic construct
  source 1..20: mol_type = other DNA
ggcatcactacttggtaaca

SEQ ID NO: 38798 - DNA, 20 bp, synthetic construct
  source 1..20: mol_type = other DNA
gggcatcactacttggtaac

SEQ ID NO: 38799 - DNA, 20 bp, synthetic construct
  source 1..20: mol_type = other DNA
agggcatcactacttggtaa

SEQ ID NO: 38800 - DNA, 20 bp, synthetic construct
  source 1..20: mol_type = other DNA
aagggcatcactacttggta

SEQ ID NO: 38801 - DNA, 20 bp, synthetic construct
  source 1..20: mol_type = other DNA
aaagggcatcactacttggt

SEQ ID NO: 38802 - DNA, 20 bp, synthetic construct
  source 1..20: mol_type = other DNA
aaaagggcatcactacttgg

SEQ ID NO: 38803 - DNA, 20 bp, synthetic construct
  source 1..20: mol_type = other DNA
gaaaagggcatcactacttg

SEQ ID NO: 38804 - DNA, 20 bp, synthetic construct
  source 1..20: mol_type = other DNA
agaaaagggcatcactactt

SEQ ID NO: 38805 - DNA, 20 bp, synthetic construct
  source 1..20: mol_type = other DNA
aagaaaagggcatcactact

SEQ ID NO: 38806 - DNA, 20 bp, synthetic construct
  source 1..20: mol_type = other DNA
gaagaaaagggcatcactac

SEQ ID NO: 38807 - DNA, 20 bp, synthetic construct
  source 1..20: mol_type = other DNA
ggaagaaaagggcatcacta

SEQ ID NO: 38808 - DNA, 20 bp, synthetic construct
  source 1..20: mol_type = other DNA
tggaagaaaagggcatcact

SEQ ID NO: 38809 - DNA, 20 bp, synthetic construct
  source 1..20: mol_type = other DNA
atggaagaaaagggcatcac

SEQ ID NO: 38810 - DNA, 20 bp, synthetic construct
  source 1..20: mol_type = other DNA
gatggaagaaaagggcatca

SEQ ID NO: 38811 - DNA, 20 bp, synthetic construct
  source 1..20: mol_type = other DNA
tgatggaagaaaagggcatc

SEQ ID NO: 38812 - DNA, 20 bp, synthetic construct
  source 1..20: mol_type = other DNA
atgatggaagaaaagggcat

SEQ ID NO: 38813 - DNA, 20 bp, synthetic construct
  source 1..20: mol_type = other DNA
aatgatggaagaaaagggca

SEQ ID NO: 38814 - DNA, 20 bp, synthetic construct
  source 1..20: mol_type = other DNA
gaatgatggaagaaaagggc

SEQ ID NO: 38815 - DNA, 20 bp, synthetic construct
  source 1..20: mol_type = other DNA
agaatgatggaagaaaaggg

SEQ ID NO: 38816 - DNA, 20 bp, synthetic construct
  source 1..20: mol_type = other DNA
cagaatgatggaagaaaagg

SEQ ID NO: 38817 - DNA, 20 bp, synthetic construct
  source 1..20: mol_type = other DNA
acagaatgatggaagaaaag

SEQ ID NO: 38818 - DNA, 20 bp, synthetic construct
  source 1..20: mol_type = other DNA
gacagaatgatggaagaaaa

SEQ ID NO: 38819 - DNA, 20 bp, synthetic construct
  source 1..20: mol_type = other DNA
agacagaatgatggaagaaa

SEQ ID NO: 38820 - DNA, 20 bp, synthetic construct
  source 1..20: mol_type = other DNA
tagacagaatgatggaagaa

SEQ ID NO: 38821 - DNA, 20 bp, synthetic construct
  source 1..20: mol_type = other DNA
gtagacagaatgatggaaga

SEQ ID NO: 38822 - DNA, 20 bp, synthetic construct
  source 1..20: mol_type = other DNA
tgtagacagaatgatggaag

SEQ ID NO: 38823 - DNA, 20 bp, synthetic construct
  source 1..20: mol_type = other DNA
atgtagacagaatgatggaa

SEQ ID NO: 38824 - DNA, 20 bp, synthetic construct
  source 1..20: mol_type = other DNA
aatgtagacagaatgatgga

SEQ ID NO: 38825 - DNA, 20 bp, synthetic construct
  source 1..20: mol_type = other DNA
aaatgtagacagaatgatgg

SEQ ID NO: 38826 - DNA, 20 bp, synthetic construct
  source 1..20: mol_type = other DNA
aaaatgtagacagaatgatg

SEQ ID NO: 38827 - DNA, 20 bp, synthetic construct
  source 1..20: mol_type = other DNA
aaaaatgtagacagaatgat

SEQ ID NO: 38828 - DNA, 20 bp, synthetic construct
  source 1..20: mol_type = other DNA
aaaaaatgtagacagaatga

SEQ ID NO: 38829 - DNA, 20 bp, synthetic construct
  source 1..20: mol_type = other DNA
aaaaaaatgtagacagaatg

SEQ ID NO: 38830 - DNA, 20 bp, synthetic construct
  source 1..20: mol_type = other DNA
aaaaaaaatgtagacagaat

SEQ ID NO: 38831 - DNA, 20 bp, synthetic construct
  source 1..20: mol_type = other DNA
aaaaaaaaatgtagacagaa

SEQ ID NO: 38832 - DNA, 20 bp, synthetic construct
  source 1..20: mol_type = other DNA
aaaaaaaaaatgtagacaga

SEQ ID NO: 38833 - DNA, 20 bp, synthetic construct
  source 1..20: mol_type = other DNA
aaaaaaaaaaatgtagacag

SEQ ID NO: 38834 - DNA, 20 bp, synthetic construct
  source 1..20: mol_type = other DNA
aaaaaaaaaaaatgtagaca

SEQ ID NO: 38835 - DNA, 20 bp, synthetic construct
  source 1..20: mol_type = other DNA
aaaaaaaaaaaaatgtagac

SEQ ID NO: 38836 - DNA, 20 bp, synthetic construct
  source 1..20: mol_type = other DNA
aaaaaaaaaaaaaatgtaga

SEQ ID NO: 38837 - DNA, 20 bp, synthetic construct
  source 1..20: mol_type = other DNA
aaaaaaaaaaaaaaatgtag

SEQ ID NO: 38838 - DNA, 20 bp, synthetic construct
  source 1..20: mol_type = other DNA
aaaaaaaaaaaaaaaatgta

SEQ ID NO: 38839 - DNA, 20 bp, synthetic construct
  source 1..20: mol_type = other DNA
aaaaaaaaaaaaaaaaatgt

SEQ ID NO: 38840 - DNA, 20 bp, synthetic construct
  source 1..20: mol_type = other DNA
aaaaaaaaaaaaaaaaaatg

SEQ ID NO: 38841 - DNA, 20 bp, synthetic construct
  source 1..20: mol_type = other DNA
aaaaaaaaaaaaaaaaaaat

SEQ ID NO: 38842 - DNA, 20 bp, synthetic construct
  source 1..20: mol_type = other DNA
aaaaaaaaaaaaaaaaaaaa

SEQ ID NO: 38843 - DNA, 20 bp, synthetic construct
  source 1..20: mol_type = other DNA
aaaaaaaaaaaaaaaaaaaa

SEQ ID NO: 38844 - DNA, 20 bp, synthetic construct
  source 1..20: mol_type = other DNA
aaaaaaaaaaaaaaaaaaaa

SEQ ID NO: 38845 - DNA, 20 bp, synthetic construct
  source 1..20: mol_type = other DNA
aaaaaaaaaaaaaaaaaaaa

SEQ ID NO: 38846 - DNA, 20 bp, synthetic construct
  source 1..20: mol_type = other DNA
aaaaaaaaaaaaaaaaaaaa

SEQ ID NO: 38847 - DNA, 20 bp, synthetic construct
  source 1..20: mol_type = other DNA
aaaaaaaaaaaaaaaaaaaa

SEQ ID NO: 38848 - DNA, 20 bp, synthetic construct
  source 1..20: mol_type = other DNA
caaaaaaaaaaaaaaaaaaa

SEQ ID NO: 38849 - DNA, 20 bp, synthetic construct
  source 1..20: mol_type = other DNA
tcaaaaaaaaaaaaaaaaaa

SEQ ID NO: 38850 - DNA, 20 bp, synthetic construct
  source 1..20: mol_type = other DNA
ctcaaaaaaaaaaaaaaaaa

SEQ ID NO: 38851 - DNA, 20 bp, synthetic construct
  source 1..20: mol_type = other DNA
tctcaaaaaaaaaaaaaaaa

SEQ ID NO: 38852 - DNA, 20 bp, synthetic construct
  source 1..20: mol_type = other DNA
atctcaaaaaaaaaaaaaaa

SEQ ID NO: 38853 - DNA, 20 bp, synthetic construct
  source 1..20: mol_type = other DNA
catctcaaaaaaaaaaaaaa

SEQ ID NO: 38854 - DNA, 20 bp, synthetic construct
  source 1..20: mol_type = other DNA
ccatctcaaaaaaaaaaaaa

SEQ ID NO: 38855 - DNA, 20 bp, synthetic construct
  source 1..20: mol_type = other DNA
tccatctcaaaaaaaaaaaa

SEQ ID NO: 38856 - DNA, 20 bp, synthetic construct
  source 1..20: mol_type = other DNA
ctccatctcaaaaaaaaaaa

SEQ ID NO: 38857 - DNA, 20 bp, synthetic construct
  source 1..20: mol_type = other DNA
actccatctcaaaaaaaaaa

SEQ ID NO: 38858 - DNA, 20 bp, synthetic construct
  source 1..20: mol_type = other DNA
aactccatctcaaaaaaaaa

SEQ ID NO: 38859 - DNA, 20 bp, synthetic construct
  source 1..20: mol_type = other DNA
aaactccatctcaaaaaaaa

SEQ ID NO: 38860 - DNA, 20 bp, synthetic construct
  source 1..20: mol_type = other DNA
gaaactccatctcaaaaaaa

SEQ ID NO: 38861 - DNA, 20 bp, synthetic construct
  source 1..20: mol_type = other DNA
cgaaactccatctcaaaaaa

SEQ ID NO: 38862 - DNA, 20 bp, synthetic construct
  source 1..20: mol_type = other DNA
gcgaaactccatctcaaaaa

SEQ ID NO: 38863 - DNA, 20 bp, synthetic construct
  source 1..20: mol_type = other DNA
agcgaaactccatctcaaaa

SEQ ID NO: 38864 - DNA, 20 bp, synthetic construct
  source 1..20: mol_type = other DNA
gagcgaaactccatctcaaa

SEQ ID NO: 38865 - DNA, 20 bp, synthetic construct
  source 1..20: mol_type = other DNA
agagcgaaactccatctcaa

SEQ ID NO: 38866 - DNA, 20 bp, synthetic construct
  source 1..20: mol_type = other DNA
aagagcgaaactccatctca

SEQ ID NO: 38867 - DNA, 20 bp, synthetic construct
  source 1..20: mol_type = other DNA
taagagcgaaactccatctc

SEQ ID NO: 38868 - DNA, 20 bp, synthetic construct
  source 1..20: mol_type = other DNA
ataagagcgaaactccatct

SEQ ID NO: 38869 - DNA, 20 bp, synthetic construct
  source 1..20: mol_type = other DNA
aataagagcgaaactccatc

SEQ ID NO: 38870 - DNA, 20 bp, synthetic construct
  source 1..20: mol_type = other DNA
caataagagcgaaactccat

SEQ ID NO: 38871 - DNA, 20 bp, synthetic construct
  source 1..20: mol_type = other DNA
gcaataagagcgaaactcca

SEQ ID NO: 38872 - DNA, 20 bp, synthetic construct
  source 1..20: mol_type = other DNA
ggcaataagagcgaaactcc

SEQ ID NO: 38873 - DNA, 20 bp, synthetic construct
  source 1..20: mol_type = other DNA
gggcaataagagcgaaactc

SEQ ID NO: 38874 - DNA, 20 bp, synthetic construct
  source 1..20: mol_type = other DNA
tgggcaataagagcgaaact

SEQ ID NO: 38875 - DNA, 20 bp, synthetic construct
  source 1..20: mol_type = other DNA
ctgggcaataagagcgaaac

SEQ ID NO: 38876 - DNA, 20 bp, synthetic construct
  source 1..20: mol_type = other DNA
cctgggcaataagagcgaaa

SEQ ID NO: 38877 - DNA, 20 bp, synthetic construct
  source 1..20: mol_type = other DNA
gcctgggcaataagagcgaa

SEQ ID NO: 38878 - DNA, 20 bp, synthetic construct
  source 1..20: mol_type = other DNA
agcctgggcaataagagcga

SEQ ID NO: 38879 - DNA, 20 bp, synthetic construct
  source 1..20: mol_type = other DNA
cagcctgggcaataagagcg

SEQ ID NO: 38880 - DNA, 20 bp, synthetic construct
  source 1..20: mol_type = other DNA
ccagcctgggcaataagagc

SEQ ID NO: 38881 - DNA, 20 bp, synthetic construct
  source 1..20: mol_type = other DNA
tccagcctgggcaataagag

SEQ ID NO: 38882 - DNA, 20 bp, synthetic construct
  source 1..20: mol_type = other DNA
ctccagcctgggcaataaga

SEQ ID NO: 38883 - DNA, 20 bp, synthetic construct
  source 1..20: mol_type = other DNA
actccagcctgggcaataag

SEQ ID NO: 38884 - DNA, 20 bp, synthetic construct
  source 1..20: mol_type = other DNA
cactccagcctgggcaataa

SEQ ID NO: 38885 - DNA, 20 bp, synthetic construct
  source 1..20: mol_type = other DNA
gcactccagcctgggcaata

SEQ ID NO: 38886 - DNA, 20 bp, synthetic construct
  source 1..20: mol_type = other DNA
cgcactccagcctgggcaat

SEQ ID NO: 38887 - DNA, 20 bp, synthetic construct
  source 1..20: mol_type = other DNA
ccgcactccagcctgggcaa

SEQ ID NO: 38888 - DNA, 20 bp, synthetic construct
  source 1..20: mol_type = other DNA
accgcactccagcctgggca

SEQ ID NO: 38889 - DNA, 20 bp, synthetic construct
  source 1..20: mol_type = other DNA
caccgcactccagcctgggc

SEQ ID NO: 38890 - DNA, 20 bp, synthetic construct
  source 1..20: mol_type = other DNA
ccaccgcactccagcctggg

SEQ ID NO: 38891 - DNA, 20 bp, synthetic construct
  source 1..20: mol_type = other DNA
gccaccgcactccagcctgg

SEQ ID NO: 38892 - DNA, 20 bp, synthetic construct
  source 1..20: mol_type = other DNA
ggccaccgcactccagcctg

SEQ ID NO: 38893 - DNA, 20 bp, synthetic construct
  source 1..20: mol_type = other DNA
aggccaccgcactccagcct

SEQ ID NO: 38894 - DNA, 20 bp, synthetic construct
  source 1..20: mol_type = other DNA
caggccaccgcactccagcc

SEQ ID NO: 38895 - DNA, 20 bp, synthetic construct
  source 1..20: mol_type = other DNA
tcaggccaccgcactccagc

SEQ ID NO: 38896 - DNA, 20 bp, synthetic construct
  source 1..20: mol_type = other DNA
atcaggccaccgcactccag

SEQ ID NO: 38897 - DNA, 20 bp, synthetic construct
  source 1..20: mol_type = other DNA
gatcaggccaccgcactcca

SEQ ID NO: 38898 - DNA, 20 bp, synthetic construct
  source 1..20: mol_type = other DNA
agatcaggccaccgcactcc

SEQ ID NO: 38899 - DNA, 20 bp, synthetic construct
  source 1..20: mol_type = other DNA
aagatcaggccaccgcactc

SEQ ID NO: 38900 - DNA, 20 bp, synthetic construct
  source 1..20: mol_type = other DNA
caagatcaggccaccgcact

SEQ ID NO: 38901 - DNA, 20 bp, synthetic construct
  source 1..20: mol_type = other DNA
ccaagatcaggccaccgcac

SEQ ID NO: 38902 - DNA, 20 bp, synthetic construct
  source 1..20: mol_type = other DNA
gccaagatcaggccaccgca

SEQ ID NO: 38903 - DNA, 20 bp, synthetic construct
  source 1..20: mol_type = other DNA
agccaagatcaggccaccgc

SEQ ID NO: 38904 - DNA, 20 bp, synthetic construct
  source 1..20: mol_type = other DNA
gagccaagatcaggccaccg

SEQ ID NO: 38905 - DNA, 20 bp, synthetic construct
  source 1..20: mol_type = other DNA
tgagccaagatcaggccacc

SEQ ID NO: 38906 - DNA, 20 bp, synthetic construct
  source 1..20: mol_type = other DNA
gtgagccaagatcaggccac

SEQ ID NO: 38907 - DNA, 20 bp, synthetic construct
  source 1..20: mol_type = other DNA
agtgagccaagatcaggcca

SEQ ID NO: 38908 - DNA, 20 bp, synthetic construct
  source 1..20: mol_type = other DNA
cagtgagccaagatcaggcc

SEQ ID NO: 38909 - DNA, 20 bp, synthetic construct
  source 1..20: mol_type = other DNA
gcagtgagccaagatcaggc

SEQ ID NO: 38910 - DNA, 20 bp, synthetic construct
  source 1..20: mol_type = other DNA
tgcagtgagccaagatcagg

SEQ ID NO: 38911 - DNA, 20 bp, synthetic construct
  source 1..20: mol_type = other DNA
ttgcagtgagccaagatcag

SEQ ID NO: 38912 - DNA, 20 bp, synthetic construct
  source 1..20: mol_type = other DNA
gttgcagtgagccaagatca

SEQ ID NO: 38913 - DNA, 20 bp, synthetic construct
  source 1..20: mol_type = other DNA
ggttgcagtgagccaagatc

SEQ ID NO: 38914 - DNA, 20 bp, synthetic construct
  source 1..20: mol_type = other DNA
aggttgcagtgagccaagat

SEQ ID NO: 38915 - DNA, 20 bp, synthetic construct
  source 1..20: mol_type = other DNA
gaggttgcagtgagccaaga

SEQ ID NO: 38916 - DNA, 20 bp, synthetic construct
  source 1..20: mol_type = other DNA
agaggttgcagtgagccaag

SEQ ID NO: 38917 - DNA, 20 bp, synthetic construct
  source 1..20: mol_type = other DNA
cagaggttgcagtgagccaa

SEQ ID NO: 38918 - DNA, 20 bp, synthetic construct
  source 1..20: mol_type = other DNA
gcagaggttgcagtgagcca

SEQ ID NO: 38919 - DNA, 20 bp, synthetic construct
  source 1..20: mol_type = other DNA
ggcagaggttgcagtgagcc

SEQ ID NO: 38920 - DNA, 20 bp, synthetic construct
  source 1..20: mol_type = other DNA
aggcagaggttgcagtgagc

SEQ ID NO: 38921 - DNA, 20 bp, synthetic construct
  source 1..20: mol_type = other DNA
gaggcagaggttgcagtgag

SEQ ID NO: 38922 - DNA, 20 bp, synthetic construct
  source 1..20: mol_type = other DNA
ggaggcagaggttgcagtga

SEQ ID NO: 38923 - DNA, 20 bp, synthetic construct
  source 1..20: mol_type = other DNA
gggaggcagaggttgcagtg

SEQ ID NO: 38924 - DNA, 20 bp, synthetic construct
  source 1..20: mol_type = other DNA
cgggaggcagaggttgcagt

SEQ ID NO: 38925 - DNA, 20 bp, synthetic construct
  source 1..20: mol_type = other DNA
ccgggaggcagaggttgcag

SEQ ID NO: 38926 - DNA, 20 bp, synthetic construct
  source 1..20: mol_type = other DNA
cccgggaggcagaggttgca

SEQ ID NO: 38927 - DNA, 20 bp, synthetic construct
  source 1..20: mol_type = other DNA
acccgggaggcagaggttgc

SEQ ID NO: 38928 - DNA, 20 bp, synthetic construct
  source 1..20: mol_type = other DNA
aacccgggaggcagaggttg

SEQ ID NO: 38929 - DNA, 20 bp, synthetic construct
  source 1..20: mol_type = other DNA
gaacccgggaggcagaggtt

SEQ ID NO: 38930 - DNA, 20 bp, synthetic construct
  source 1..20: mol_type = other DNA
tgaacccgggaggcagaggt

SEQ ID NO: 38931 - DNA, 20 bp, synthetic construct
  source 1..20: mol_type = other DNA
ttgaacccgggaggcagagg

SEQ ID NO: 38932 - DNA, 20 bp, synthetic construct
  source 1..20: mol_type = other DNA
cttgaacccgggaggcagag

SEQ ID NO: 38933 - DNA, 20 bp, synthetic construct
  source 1..20: mol_type = other DNA
gcttgaacccgggaggcaga

SEQ ID NO: 38934 - DNA, 20 bp, synthetic construct
  source 1..20: mol_type = other DNA
tgcttgaacccgggaggcag

SEQ ID NO: 38935 - DNA, 20 bp, synthetic construct
  source 1..20: mol_type = other DNA
ctgcttgaacccgggaggca

SEQ ID NO: 38936 - DNA, 20 bp, synthetic construct
  source 1..20: mol_type = other DNA
actgcttgaacccgggaggc

SEQ ID NO: 38937 - DNA, 20 bp, synthetic construct
  source 1..20: mol_type = other DNA
aactgcttgaacccgggagg

SEQ ID NO: 38938 - DNA, 20 bp, synthetic construct
  source 1..20: mol_type = other DNA
gaactgcttgaacccgggag

SEQ ID NO: 38939 - DNA, 20 bp, synthetic construct
  source 1..20: mol_type = other DNA
agaactgcttgaacccggga

SEQ ID NO: 38940 - DNA, 20 bp, synthetic construct
  source 1..20: mol_type = other DNA
gagaactgcttgaacccggg

SEQ ID NO: 38941 - DNA, 20 bp, synthetic construct
  source 1..20: mol_type = other DNA
ggagaactgcttgaacccgg

SEQ ID NO: 38942 - DNA, 20 bp, synthetic construct
  source 1..20: mol_type = other DNA
aggagaactgcttgaacccg

SEQ ID NO: 38943 - DNA, 20 bp, synthetic construct
  source 1..20: mol_type = other DNA
caggagaactgcttgaaccc

SEQ ID NO: 38944 - DNA, 20 bp, synthetic construct
  source 1..20: mol_type = other DNA
gcaggagaactgcttgaacc

SEQ ID NO: 38945 - DNA, 20 bp, synthetic construct
  source 1..20: mol_type = other DNA
cgcaggagaactgcttgaac

SEQ ID NO: 38946 - DNA, 20 bp, synthetic construct
  source 1..20: mol_type = other DNA
acgcaggagaactgcttgaa

SEQ ID NO: 38947 - DNA, 20 bp, synthetic construct
  source 1..20: mol_type = other DNA
gacgcaggagaactgcttga

SEQ ID NO: 38948 - DNA, 20 bp, synthetic construct
  source 1..20: mol_type = other DNA
tgacgcaggagaactgcttg

SEQ ID NO: 38949 - DNA, 20 bp, synthetic construct
  source 1..20: mol_type = other DNA
ctgacgcaggagaactgctt

SEQ ID NO: 38950 - DNA, 20 bp, synthetic construct
  source 1..20: mol_type = other DNA
gctgacgcaggagaactgct

SEQ ID NO: 38951 - DNA, 20 bp, synthetic construct
  source 1..20: mol_type = other DNA
ggctgacgcaggagaactgc

SEQ ID NO: 38952 - DNA, 20 bp, synthetic construct
  source 1..20: mol_type = other DNA
aggctgacgcaggagaactg

SEQ ID NO: 38953 - DNA, 20 bp, synthetic construct
  source 1..20: mol_type = other DNA
gaggctgacgcaggagaact

SEQ ID NO: 38954 - DNA, 20 bp, synthetic construct
  source 1..20: mol_type = other DNA
ggaggctgacgcaggagaac

SEQ ID NO: 38955 - DNA, 20 bp, synthetic construct
  source 1..20: mol_type = other DNA
gggaggctgacgcaggagaa

SEQ ID NO: 38956 - DNA, 20 bp, synthetic construct
  source 1..20: mol_type = other DNA
cgggaggctgacgcaggaga

SEQ ID NO: 38957 - DNA, 20 bp, synthetic construct
  source 1..20: mol_type = other DNA
tcgggaggctgacgcaggag

SEQ ID NO: 38958 - DNA, 20 bp, synthetic construct
  source 1..20: mol_type = other DNA
ctcgggaggctgacgcagga

SEQ ID NO: 38959 - DNA, 20 bp, synthetic construct
  source 1..20: mol_type = other DNA
actcgggaggctgacgcagg

SEQ ID NO: 38960 - DNA, 20 bp, synthetic construct
  source 1..20: mol_type = other DNA
tactcgggaggctgacgcag

SEQ ID NO: 38961 - DNA, 20 bp, synthetic construct
  source 1..20: mol_type = other DNA
ctactcgggaggctgacgca

SEQ ID NO: 38962 - DNA, 20 bp, synthetic construct
  source 1..20: mol_type = other DNA
gctactcgggaggctgacgc

SEQ ID NO: 38963 - DNA, 20 bp, synthetic construct
  source 1..20: mol_type = other DNA
agctactcgggaggctgacg

SEQ ID NO: 38964 - DNA, 20 bp, synthetic construct
  source 1..20: mol_type = other DNA
cagctactcgggaggctgac

SEQ ID NO: 38965 - DNA, 20 bp, synthetic construct
  source 1..20: mol_type = other DNA
ccagctactcgggaggctga

SEQ ID NO: 38966 - DNA, 20 bp, synthetic construct
  source 1..20: mol_type = other DNA
cccagctactcgggaggctg

SEQ ID NO: 38967 - DNA, 20 bp, synthetic construct
  source 1..20: mol_type = other DNA
tcccagctactcgggaggct

SEQ ID NO: 38968 - DNA, 20 bp, synthetic construct
  source 1..20: mol_type = other DNA
atcccagctactcgggaggc

SEQ ID NO: 38969 - DNA, 20 bp, synthetic construct
  source 1..20: mol_type = other DNA
aatcccagctactcgggagg

SEQ ID NO: 38970 - DNA, 20 bp, synthetic construct
  source 1..20: mol_type = other DNA
taatcccagctactcgggag

SEQ ID NO: 38971 - DNA, 20 bp, synthetic construct
  source 1..20: mol_type = other DNA
gtaatcccagctactcggga

SEQ ID NO: 38972 - DNA, 20 bp, synthetic construct
  source 1..20: mol_type = other DNA
tgtaatcccagctactcggg

SEQ ID NO: 38973 - DNA, 20 bp, synthetic construct
  source 1..20: mol_type = other DNA
ctgtaatcccagctactcgg

SEQ ID NO: 38974 - DNA, 20 bp, synthetic construct
  source 1..20: mol_type = other DNA
tctgtaatcccagctactcg

SEQ ID NO: 38975 - DNA, 20 bp, synthetic construct
  source 1..20: mol_type = other DNA
gtctgtaatcccagctactc

SEQ ID NO: 38976 - DNA, 20 bp, synthetic construct
  source 1..20: mol_type = other DNA
tgtctgtaatcccagctact

SEQ ID NO: 38977 - DNA, 20 bp, synthetic construct
  source 1..20: mol_type = other DNA
atgtctgtaatcccagctac

SEQ ID NO: 38978 - DNA, 20 bp, synthetic construct
  source 1..20: mol_type = other DNA
catgtctgtaatcccagcta

SEQ ID NO: 38979 - DNA, 20 bp, synthetic construct
  source 1..20: mol_type = other DNA
gcatgtctgtaatcccagct

SEQ ID NO: 38980 - DNA, 20 bp, synthetic construct
  source 1..20: mol_type = other DNA
cgcatgtctgtaatcccagc

SEQ ID NO: 38981 - DNA, 20 bp, synthetic construct
  source 1..20: mol_type = other DNA
gcgcatgtctgtaatcccag

SEQ ID NO: 38982 - DNA, 20 bp, synthetic construct
  source 1..20: mol_type = other DNA
ggcgcatgtctgtaatccca

SEQ ID NO: 38983 - DNA, 20 bp, synthetic construct
  source 1..20: mol_type = other DNA
tggcgcatgtctgtaatccc

SEQ ID NO: 38984 - DNA, 20 bp, synthetic construct
  source 1..20: mol_type = other DNA
gtggcgcatgtctgtaatcc

SEQ ID NO: 38985 - DNA, 20 bp, synthetic construct
  source 1..20: mol_type = other DNA
ggtggcgcatgtctgtaatc

SEQ ID NO: 38986 - DNA, 20 bp, synthetic construct
  source 1..20: mol_type = other DNA
tggtggcgcatgtctgtaat

SEQ ID NO: 38987 - DNA, 20 bp, synthetic construct
  source 1..20: mol_type = other DNA
gtggtggcgcatgtctgtaa

SEQ ID NO: 38988 - DNA, 20 bp, synthetic construct
  source 1..20: mol_type = other DNA
agtggtggcgcatgtctgta

SEQ ID NO: 38989 - DNA, 20 bp, synthetic construct
  source 1..20: mol_type = other DNA
gagtggtggcgcatgtctgt

SEQ ID NO: 38990 - DNA, 20 bp, synthetic construct
  source 1..20: mol_type = other DNA
ggagtggtggcgcatgtctg

SEQ ID NO: 38991 - DNA, 20 bp, synthetic construct
  source 1..20: mol_type = other DNA
aggagtggtggcgcatgtct

SEQ ID NO: 38992 - DNA, 20 bp, synthetic construct
  source 1..20: mol_type = other DNA
caggagtggtggcgcatgtc

SEQ ID NO: 38993 - DNA, 20 bp, synthetic construct
  source 1..20: mol_type = other DNA
ccaggagtggtggcgcatgt

SEQ ID NO: 38994 - DNA, 20 bp, synthetic construct
  source 1..20: mol_type = other DNA
gccaggagtggtggcgcatg

SEQ ID NO: 38995 - DNA, 20 bp, synthetic construct
  source 1..20: mol_type = other DNA
agccaggagtggtggcgcat

SEQ ID NO: 38996 - DNA, 20 bp, synthetic construct
  source 1..20: mol_type = other DNA
tagccaggagtggtggcgca

SEQ ID NO: 38997 - DNA, 20 bp, synthetic construct
  source 1..20: mol_type = other DNA
ttagccaggagtggtggcgc

SEQ ID NO: 38998 - DNA, 20 bp, synthetic construct
  source 1..20: mol_type = other DNA
attagccaggagtggtggcg

SEQ ID NO: 38999 - DNA, 20 bp, synthetic construct
  source 1..20: mol_type = other DNA
aattagccaggagtggtggc

SEQ ID NO: 39000 - DNA, 20 bp, synthetic construct
  source 1..20: mol_type = other DNA
aaattagccaggagtggtgg

SEQ ID NO: 39001 - DNA, 20 bp, synthetic construct
  source 1..20: mol_type = other DNA
aaaattagccaggagtggtg

SEQ ID NO: 39002 - DNA, 20 bp, synthetic construct
  source 1..20: mol_type = other DNA
caaaattagccaggagtggt

SEQ ID NO: 39003 - DNA, 20 bp, synthetic construct
  source 1..20: mol_type = other DNA
acaaaattagccaggagtgg

SEQ ID NO: 39004 - DNA, 20 bp, synthetic construct
  source 1..20: mol_type = other DNA
tacaaaattagccaggagtg

SEQ ID NO: 39005 - DNA, 20 bp, synthetic construct
  source 1..20: mol_type = other DNA
atacaaaattagccaggagt

SEQ ID NO: 39006 - DNA, 20 bp, synthetic construct
  source 1..20: mol_type = other DNA
catacaaaattagccaggag

SEQ ID NO: 39007 - DNA, 20 bp, synthetic construct
  source 1..20: mol_type = other DNA
acatacaaaattagccagga

SEQ ID NO: 39008 - DNA, 20 bp, synthetic construct
  source 1..20: mol_type = other DNA
aacatacaaaattagccagg

SEQ ID NO: 39009 - DNA, 20 bp, synthetic construct
  source 1..20: mol_type = other DNA
gaacatacaaaattagccag

SEQ ID NO: 39010 - DNA, 20 bp, synthetic construct
  source 1..20: mol_type = other DNA
tgaacatacaaaattagcca

SEQ ID NO: 39011 - DNA, 20 bp, synthetic construct
  source 1..20: mol_type = other DNA
ctgaacatacaaaattagcc

SEQ ID NO: 39012 - DNA, 20 bp, synthetic construct
  source 1..20: mol_type = other DNA
actgaacatacaaaattagc

SEQ ID NO: 39013 - DNA, 20 bp, synthetic construct
  source 1..20: mol_type = other DNA
tactgaacatacaaaattag

SEQ ID NO: 39014 - DNA, 20 bp, synthetic construct
  source 1..20: mol_type = other DNA
ctactgaacatacaaaatta

SEQ ID NO: 39015 - DNA, 20 bp, synthetic construct
  source 1..20: mol_type = other DNA
tctactgaacatacaaaatt

SEQ ID NO: 39016 - DNA, 20 bp, synthetic construct
  source 1..20: mol_type = other DNA
ctctactgaacatacaaaat

SEQ ID NO: 39017 - DNA, 20 bp, synthetic construct
  source 1..20: mol_type = other DNA
tctctactgaacatacaaaa

SEQ ID NO: 39018 - DNA, 20 bp, synthetic construct
  source 1..20: mol_type = other DNA
gtctctactgaacatacaaa

SEQ ID NO: 39019 - DNA, 20 bp, synthetic construct
  source 1..20: mol_type = other DNA
tgtctctactgaacatacaa

SEQ ID NO: 39020 - DNA, 20 bp, synthetic construct
  source 1..20: mol_type = other DNA
ctgtctctactgaacataca

SEQ ID NO: 39021 - DNA, 20 bp, synthetic construct
  source 1..20: mol_type = other DNA
cctgtctctactgaacatac

SEQ ID NO: 39022 - DNA, 20 bp, synthetic construct
  source 1..20: mol_type = other DNA
tcctgtctctactgaacata

SEQ ID NO: 39023 - DNA, 20 bp, synthetic construct
  source 1..20: mol_type = other DNA
atcctgtctctactgaacat

SEQ ID NO: 39024 - DNA, 20 bp, synthetic construct
  source 1..20: mol_type = other DNA
aatcctgtctctactgaaca

SEQ ID NO: 39025 - DNA, 20 bp, synthetic construct
  source 1..20: mol_type = other DNA
aaatcctgtctctactgaac

SEQ ID NO: 39026 - DNA, 20 bp, synthetic construct
  source 1..20: mol_type = other DNA
aaaatcctgtctctactgaa

SEQ ID NO: 39027 - DNA, 20 bp, synthetic construct
  source 1..20: mol_type = other DNA
aaaaatcctgtctctactga

SEQ ID NO: 39028 - DNA, 20 bp, synthetic construct
  source 1..20: mol_type = other DNA
gaaaaatcctgtctctactg

SEQ ID NO: 39029 - DNA, 20 bp, synthetic construct
  source 1..20: mol_type = other DNA
ggaaaaatcctgtctctact

SEQ ID NO: 39030 - DNA, 20 bp, synthetic construct
  source 1..20: mol_type = other DNA
tggaaaaatcctgtctctac

SEQ ID NO: 39031 - DNA, 20 bp, synthetic construct
  source 1..20: mol_type = other DNA
atggaaaaatcctgtctcta

SEQ ID NO: 39032 - DNA, 20 bp, synthetic construct
  source 1..20: mol_type = other DNA
catggaaaaatcctgtctct

SEQ ID NO: 39033 - DNA, 20 bp, synthetic construct
  source 1..20: mol_type = other DNA
acatggaaaaatcctgtctc

SEQ ID NO: 39034 - DNA, 20 bp, synthetic construct
  source 1..20: mol_type = other DNA
aacatggaaaaatcctgtct

SEQ ID NO: 39035 - DNA, 20 bp, synthetic construct
  source 1..20: mol_type = other DNA
caacatggaaaaatcctgtc

SEQ ID NO: 39036 - DNA, 20 bp, synthetic construct
  source 1..20: mol_type = other DNA
ccaacatggaaaaatcctgt

SEQ ID NO: 39037 - DNA, 20 bp, synthetic construct
  source 1..20: mol_type = other DNA
accaacatggaaaaatcctg

SEQ ID NO: 39038 - DNA, 20 bp, synthetic construct
  source 1..20: mol_type = other DNA
gaccaacatggaaaaatcct

SEQ ID NO: 39039 - DNA, 20 bp, synthetic construct
  source 1..20: mol_type = other DNA
tgaccaacatggaaaaatcc

SEQ ID NO: 39040 - DNA, 20 bp, synthetic construct
  source 1..20: mol_type = other DNA
ctgaccaacatggaaaaatc

SEQ ID NO: 39041 - DNA, 20 bp, synthetic construct
  source 1..20: mol_type = other DNA
cctgaccaacatggaaaaat

SEQ ID NO: 39042 - DNA, 20 bp, synthetic construct
  source 1..20: mol_type = other DNA
gcctgaccaacatggaaaaa

SEQ ID NO: 39043 - DNA, 20 bp, synthetic construct
  source 1..20: mol_type = other DNA
agcctgaccaacatggaaaa

SEQ ID NO: 39044 - DNA, 20 bp, synthetic construct
  source 1..20: mol_type = other DNA
cagcctgaccaacatggaaa

SEQ ID NO: 39045 - DNA, 20 bp, synthetic construct
  source 1..20: mol_type = other DNA
ccagcctgaccaacatggaa

SEQ ID NO: 39046 - DNA, 20 bp, synthetic construct
  source 1..20: mol_type = other DNA
accagcctgaccaacatgga

SEQ ID NO: 39047 - DNA, 20 bp, synthetic construct
  source 1..20: mol_type = other DNA
gaccagcctgaccaacatgg

SEQ ID NO: 39048 - DNA, 20 bp, synthetic construct
  source 1..20: mol_type = other DNA
agaccagcctgaccaacatg

SEQ ID NO: 39049 - DNA, 20 bp, synthetic construct
  source 1..20: mol_type = other DNA
gagaccagcctgaccaacat

SEQ ID NO: 39050 - DNA, 20 bp, synthetic construct
  source 1..20: mol_type = other DNA
ggagaccagcctgaccaaca

SEQ ID NO: 39051 - DNA, 20 bp, synthetic construct
  source 1..20: mol_type = other DNA
tggagaccagcctgaccaac

SEQ ID NO: 39052 - DNA, 20 bp, synthetic construct
  source 1..20: mol_type = other DNA
ttggagaccagcctgaccaa

SEQ ID NO: 39053 - DNA, 20 bp, synthetic construct
  source 1..20: mol_type = other DNA
gttggagaccagcctgacca

SEQ ID NO: 39054 - DNA, 20 bp, synthetic construct
  source 1..20: mol_type = other DNA
agttggagaccagcctgacc

SEQ ID NO: 39055 - DNA, 20 bp, synthetic construct
  source 1..20: mol_type = other DNA
gagttggagaccagcctgac

SEQ ID NO: 39056 - DNA, 20 bp, synthetic construct
  source 1..20: mol_type = other DNA
ggagttggagaccagcctga

SEQ ID NO: 39057 - DNA, 20 bp, synthetic construct
  source 1..20: mol_type = other DNA
gggagttggagaccagcctg

SEQ ID NO: 39058 - DNA, 20 bp, synthetic construct
  source 1..20: mol_type = other DNA
cgggagttggagaccagcct

SEQ ID NO: 39059 - DNA, 20 bp, synthetic construct
  source 1..20: mol_type = other DNA
tcgggagttggagaccagcc

SEQ ID NO: 39060 - DNA, 20 bp, synthetic construct
  source 1..20: mol_type = other DNA
gtcgggagttggagaccagc

SEQ ID NO: 39061 - DNA, 20 bp, synthetic construct
  source 1..20: mol_type = other DNA
ggtcgggagttggagaccag

SEQ ID NO: 39062 - DNA, 20 bp, synthetic construct
  source 1..20: mol_type = other DNA
aggtcgggagttggagacca

SEQ ID NO: 39063 - DNA, 20 bp, synthetic construct
  source 1..20: mol_type = other DNA
gaggtcgggagttggagacc

SEQ ID NO: 39064 - DNA, 20 bp, synthetic construct
  source 1..20: mol_type = other DNA
tgaggtcgggagttggagac

SEQ ID NO: 39065 - DNA, 20 bp, synthetic construct
  source 1..20: mol_type = other DNA
ctgaggtcgggagttggaga

SEQ ID NO: 39066 - DNA, 20 bp, synthetic construct
  source 1..20: mol_type = other DNA
cctgaggtcgggagttggag

SEQ ID NO: 39067 - DNA, 20 bp, synthetic construct
  source 1..20: mol_type = other DNA
acctgaggtcgggagttgga

SEQ ID NO: 39068 - DNA, 20 bp, synthetic construct
  source 1..20: mol_type = other DNA
cacctgaggtcgggagttgg

SEQ ID NO: 39069 - DNA, 20 bp, synthetic construct
  source 1..20: mol_type = other DNA
tcacctgaggtcgggagttg

SEQ ID NO: 39070 - DNA, 20 bp, synthetic construct
  source 1..20: mol_type = other DNA
atcacctgaggtcgggagtt

SEQ ID NO: 39071 - DNA, 20 bp, synthetic construct
  source 1..20: mol_type = other DNA
gatcacctgaggtcgggagt

SEQ ID NO: 39072 - DNA, 20 bp, synthetic construct
  source 1..20: mol_type = other DNA
ggatcacctgaggtcgggag

SEQ ID NO: 39073 - DNA, 20 bp, synthetic construct
  source 1..20: mol_type = other DNA
tggatcacctgaggtcggga

SEQ ID NO: 39074 - DNA, 20 bp, synthetic construct
  source 1..20: mol_type = other DNA
gtggatcacctgaggtcggg

SEQ ID NO: 39075 - DNA, 20 bp, synthetic construct
  source 1..20: mol_type = other DNA
ggtggatcacctgaggtcgg

SEQ ID NO: 39076 - DNA, 20 bp, synthetic construct
  source 1..20: mol_type = other DNA
gggtggatcacctgaggtcg

SEQ ID NO: 39077 - DNA, 20 bp, synthetic construct
  source 1..20: mol_type = other DNA
tgggtggatcacctgaggtc

SEQ ID NO: 39078 - DNA, 20 bp, synthetic construct
  source 1..20: mol_type = other DNA
gtgggtggatcacctgaggt

SEQ ID NO: 39079 - DNA, 20 bp, synthetic construct
  source 1..20: mol_type = other DNA
ggtgggtggatcacctgagg

SEQ ID NO: 39080 - DNA, 20 bp, synthetic construct
  source 1..20: mol_type = other DNA
aggtgggtggatcacctgag

SEQ ID NO: 39081 - DNA, 20 bp, synthetic construct
  source 1..20: mol_type = other DNA
gaggtgggtggatcacctga

SEQ ID NO: 39082 - DNA, 20 bp, synthetic construct
  source 1..20: mol_type = other DNA
tgaggtgggtggatcacctg

SEQ ID NO: 39083 - DNA, 20 bp, synthetic construct
  source 1..20: mol_type = other DNA
ctgaggtgggtggatcacct

SEQ ID NO: 39084 - DNA, 20 bp, synthetic construct
  source 1..20: mol_type = other DNA
gctgaggtgggtggatcacc

SEQ ID NO: 39085 - DNA, 20 bp, synthetic construct
  source 1..20: mol_type = other DNA
ggctgaggtgggtggatcac

SEQ ID NO: 39086 - DNA, 20 bp, synthetic construct
  source 1..20: mol_type = other DNA
aggctgaggtgggtggatca

SEQ ID NO: 39087 - DNA, 20 bp, synthetic construct
  source 1..20: mol_type = other DNA
gaggctgaggtgggtggatc

SEQ ID NO: 39088 - DNA, 20 bp, synthetic construct
  source 1..20: mol_type = other DNA
ggaggctgaggtgggtggat

SEQ ID NO: 39089 - DNA, 20 bp, synthetic construct
  source 1..20: mol_type = other DNA
gggaggctgaggtgggtgga

SEQ ID NO: 39090 - DNA, 20 bp, synthetic construct
  source 1..20: mol_type = other DNA
tgggaggctgaggtgggtgg

SEQ ID NO: 39091 - DNA, 20 bp, synthetic construct
  source 1..20: mol_type = other DNA
ctgggaggctgaggtgggtg

SEQ ID NO: 39092 - DNA, 20 bp, synthetic construct
  source 1..20: mol_type = other DNA
tctgggaggctgaggtgggt

SEQ ID NO: 39093 - DNA, 20 bp, synthetic construct
  source 1..20: mol_type = other DNA
ctctgggaggctgaggtggg

SEQ ID NO: 39094 - DNA, 20 bp, synthetic construct
  source 1..20: mol_type = other DNA
actctgggaggctgaggtgg

SEQ ID NO: 39095 - DNA, 20 bp, synthetic construct
  source 1..20: mol_type = other DNA
cactctgggaggctgaggtg

SEQ ID NO: 39096 - DNA, 20 bp, synthetic construct
  source 1..20: mol_type = other DNA
gcactctgggaggctgaggt

SEQ ID NO: 39097 - DNA, 20 bp, synthetic construct
  source 1..20: mol_type = other DNA
agcactctgggaggctgagg

SEQ ID NO: 39098 - DNA, 20 bp, synthetic construct
  source 1..20: mol_type = other DNA
tagcactctgggaggctgag

SEQ ID NO: 39099 - DNA, 20 bp, synthetic construct
  source 1..20: mol_type = other DNA
ctagcactctgggaggctga

SEQ ID NO: 39100 - DNA, 20 bp, synthetic construct
  source 1..20: mol_type = other DNA
cctagcactctgggaggctg

SEQ ID NO: 39101 - DNA, 20 bp, synthetic construct
  source 1..20: mol_type = other DNA
tcctagcactctgggaggct

SEQ ID NO: 39102 - DNA, 20 bp, synthetic construct
  source 1..20: mol_type = other DNA
atcctagcactctgggaggc

SEQ ID NO: 39103 - DNA, 20 bp, synthetic construct
  source 1..20: mol_type = other DNA
aatcctagcactctgggagg

SEQ ID NO: 39104 - DNA, 20 bp, synthetic construct
  source 1..20: mol_type = other DNA
taatcctagcactctgggag

SEQ ID NO: 39105 - DNA, 20 bp, synthetic construct
  source 1..20: mol_type = other DNA
gtaatcctagcactctggga

SEQ ID NO: 39106 - DNA, 20 bp, synthetic construct
  source 1..20: mol_type = other DNA
tgtaatcctagcactctggg

SEQ ID NO: 39107 - DNA, 20 bp, synthetic construct
  source 1..20: mol_type = other DNA
ctgtaatcctagcactctgg

SEQ ID NO: 39108 - DNA, 20 bp, synthetic construct
  source 1..20: mol_type = other DNA
cctgtaatcctagcactctg

SEQ ID NO: 39109 - DNA, 20 bp, synthetic construct
  source 1..20: mol_type = other DNA
gcctgtaatcctagcactct

SEQ ID NO: 39110 - DNA, 20 bp, synthetic construct
  source 1..20: mol_type = other DNA
cgcctgtaatcctagcactc

SEQ ID NO: 39111 - DNA, 20 bp, synthetic construct
  source 1..20: mol_type = other DNA
acgcctgtaatcctagcact

SEQ ID NO: 39112 - DNA, 20 bp, synthetic construct
  source 1..20: mol_type = other DNA
cacgcctgtaatcctagcac

SEQ ID NO: 39113 - DNA, 20 bp, synthetic construct
  source 1..20: mol_type = other DNA
tcacgcctgtaatcctagca

SEQ ID NO: 39114 - DNA, 20 bp, synthetic construct
  source 1..20: mol_type = other DNA
ctcacgcctgtaatcctagc

SEQ ID NO: 39115 - DNA, 20 bp, synthetic construct
  source 1..20: mol_type = other DNA
gctcacgcctgtaatcctag

SEQ ID NO: 39116 - DNA, 20 bp, synthetic construct
  source 1..20: mol_type = other DNA
agctcacgcctgtaatccta

SEQ ID NO: 39117 - DNA, 20 bp, synthetic construct
  source 1..20: mol_type = other DNA
cagctcacgcctgtaatcct

SEQ ID NO: 39118 - DNA, 20 bp, synthetic construct
  source 1..20: mol_type = other DNA
gcagctcacgcctgtaatcc

SEQ ID NO: 39119 - DNA, 20 bp, synthetic construct
  source 1..20: mol_type = other DNA
ggcagctcacgcctgtaatc

SEQ ID NO: 39120 - DNA, 20 bp, synthetic construct
  source 1..20: mol_type = other DNA
tggcagctcacgcctgtaat

SEQ ID NO: 39121 - DNA, 20 bp, synthetic construct
  source 1..20: mol_type = other DNA
gtggcagctcacgcctgtaa

SEQ ID NO: 39122 - DNA, 20 bp, synthetic construct
  source 1..20: mol_type = other DNA
tgtggcagctcacgcctgta

SEQ ID NO: 39123 - DNA, 20 bp, synthetic construct
  source 1..20: mol_type = other DNA
gtgtggcagctcacgcctgt

SEQ ID NO: 39124 - DNA, 20 bp, synthetic construct
  source 1..20: mol_type = other DNA
ggtgtggcagctcacgcctg

SEQ ID NO: 39125 - DNA, 20 bp, synthetic construct
  source 1..20: mol_type = other DNA
tggtgtggcagctcacgcct

SEQ ID NO: 39126 - DNA, 20 bp, synthetic construct
  source 1..20: mol_type = other DNA
ctggtgtggcagctcacgcc

SEQ ID NO: 39127 - DNA, 20 bp, synthetic construct
  source 1..20: mol_type = other DNA
cctggtgtggcagctcacgc

SEQ ID NO: 39128 - DNA, 20 bp, synthetic construct
  source 1..20: mol_type = other DNA
gcctggtgtggcagctcacg

SEQ ID NO: 39129 - DNA, 20 bp, synthetic construct
  source 1..20: mol_type = other DNA
ggcctggtgtggcagctcac

SEQ ID NO: 39130 - DNA, 20 bp, synthetic construct
  source 1..20: mol_type = other DNA
aggcctggtgtggcagctca

SEQ ID NO: 39131 - DNA, 20 bp, synthetic construct
  source 1..20: mol_type = other DNA
aaggcctggtgtggcagctc

SEQ ID NO: 39132 - DNA, 20 bp, synthetic construct
  source 1..20: mol_type = other DNA
gaaggcctggtgtggcagct

SEQ ID NO: 39133 - DNA, 20 bp, synthetic construct
  source 1..20: mol_type = other DNA
agaaggcctggtgtggcagc

SEQ ID NO: 39134 - DNA, 20 bp, synthetic construct
  source 1..20: mol_type = other DNA
aagaaggcctggtgtggcag

SEQ ID NO: 39135 - DNA, 20 bp, synthetic construct
  source 1..20: mol_type = other DNA
aaagaaggcctggtgtggca

SEQ ID NO: 39136 - DNA, 20 bp, synthetic construct
  source 1..20: mol_type = other DNA
aaaagaaggcctggtgtggc

SEQ ID NO: 39137 - DNA, 20 bp, synthetic construct
  source 1..20: mol_type = other DNA
aaaaagaaggcctggtgtgg

SEQ ID NO: 39138 - DNA, 20 bp, synthetic construct
  source 1..20: mol_type = other DNA
gaaaaagaaggcctggtgtg

SEQ ID NO: 39139 - DNA, 20 bp, synthetic construct
  source 1..20: mol_type = other DNA
agaaaaagaaggcctggtgt

SEQ ID NO: 39140 - DNA, 20 bp, synthetic construct
  source 1..20: mol_type = other DNA
gagaaaaagaaggcctggtg

SEQ ID NO: 39141 - DNA, 20 bp, synthetic construct
  source 1..20: mol_type = other DNA
agagaaaaagaaggcctggt

SEQ ID NO: 39142 - DNA, 20 bp, synthetic construct
  source 1..20: mol_type = other DNA
aagagaaaaagaaggcctgg

SEQ ID NO: 39143 - DNA, 20 bp, synthetic construct
  source 1..20: mol_type = other DNA
aaagagaaaaagaaggcctg

SEQ ID NO: 39144 - DNA, 20 bp, synthetic construct
  source 1..20: mol_type = other DNA
aaaagagaaaaagaaggcct

SEQ ID NO: 39145 - DNA, 20 bp, synthetic construct
  source 1..20: mol_type = other DNA
taaaagagaaaaagaaggcc

SEQ ID NO: 39146 - DNA, 20 bp, synthetic construct
  source 1..20: mol_type = other DNA
ttaaaagagaaaaagaaggc

SEQ ID NO: 39147 - DNA, 20 bp, synthetic construct
  source 1..20: mol_type = other DNA
cttaaaagagaaaaagaagg

SEQ ID NO: 39148 - DNA, 20 bp, synthetic construct
  source 1..20: mol_type = other DNA
tcttaaaagagaaaaagaag

SEQ ID NO: 39149 - DNA, 20 bp, synthetic construct
  source 1..20: mol_type = other DNA
ctcttaaaagagaaaaagaa

SEQ ID NO: 39150 - DNA, 20 bp, synthetic construct
  source 1..20: mol_type = other DNA
tctcttaaaagagaaaaaga

SEQ ID NO: 39151 - DNA, 20 bp, synthetic construct
  source 1..20: mol_type = other DNA
atctcttaaaagagaaaaag

SEQ ID NO: 39152 - DNA, 20 bp, synthetic construct
  source 1..20: mol_type = other DNA
tatctcttaaaagagaaaaa

SEQ ID NO: 39153 - DNA, 20 bp, synthetic construct
  source 1..20: mol_type = other DNA
ctatctcttaaaagagaaaa

SEQ ID NO: 39154 - DNA, 20 bp, synthetic construct
  source 1..20: mol_type = other DNA
tctatctcttaaaagagaaa

SEQ ID NO: 39155 - DNA, 20 bp, synthetic construct
  source 1..20: mol_type = other DNA
ctctatctcttaaaagagaa

SEQ ID NO: 39156 - DNA, 20 bp, synthetic construct
  source 1..20: mol_type = other DNA
actctatctcttaaaagaga

SEQ ID NO: 39157 - DNA, 20 bp, synthetic construct
  source 1..20: mol_type = other DNA
gactctatctcttaaaagag

SEQ ID NO: 39158 - DNA, 20 bp, synthetic construct
  source 1..20: mol_type = other DNA
ggactctatctcttaaaaga

SEQ ID NO: 39159 - DNA, 20 bp, synthetic construct
  source 1..20: mol_type = other DNA
aggactctatctcttaaaag

SEQ ID NO: 39160 - DNA, 20 bp, synthetic construct
  source 1..20: mol_type = other DNA
caggactctatctcttaaaa

SEQ ID NO: 39161 - DNA, 20 bp, synthetic construct
  source 1..20: mol_type = other DNA
gcaggactctatctcttaaa

SEQ ID NO: 39162 - DNA, 20 bp, synthetic construct
  source 1..20: mol_type = other DNA
agcaggactctatctcttaa

SEQ ID NO: 39163 - DNA, 20 bp, synthetic construct
  source 1..20: mol_type = other DNA
aagcaggactctatctctta

SEQ ID NO: 39164 - DNA, 20 bp, synthetic construct
  source 1..20: mol_type = other DNA
aaagcaggactctatctctt

SEQ ID NO: 39165 - DNA, 20 bp, synthetic construct
  source 1..20: mol_type = other DNA
caaagcaggactctatctct

SEQ ID NO: 39166 - DNA, 20 bp, synthetic construct
  source 1..20: mol_type = other DNA
acaaagcaggactctatctc

SEQ ID NO: 39167 - DNA, 20 bp, synthetic construct
  source 1..20: mol_type = other DNA
gacaaagcaggactctatct

SEQ ID NO: 39168 - DNA, 20 bp, synthetic construct
  source 1..20: mol_type = other DNA
tgacaaagcaggactctatc

SEQ ID NO: 39169 - DNA, 20 bp, synthetic construct
  source 1..20: mol_type = other DNA
gtgacaaagcaggactctat

SEQ ID NO: 39170 - DNA, 20 bp, synthetic construct
  source 1..20: mol_type = other DNA
ggtgacaaagcaggactcta

SEQ ID NO: 39171 - DNA, 20 bp, synthetic construct
  source 1..20: mol_type = other DNA
tggtgacaaagcaggactct

SEQ ID NO: 39172 - DNA, 20 bp, synthetic construct
  source 1..20: mol_type = other DNA
ttggtgacaaagcaggactc

SEQ ID NO: 39173 - DNA, 20 bp, synthetic construct
  source 1..20: mol_type = other DNA
cttggtgacaaagcaggact

SEQ ID NO: 39174 - DNA, 20 bp, synthetic construct
  source 1..20: mol_type = other DNA
ccttggtgacaaagcaggac

SEQ ID NO: 39175 - DNA, 20 bp, synthetic construct
  source 1..20: mol_type = other DNA
gccttggtgacaaagcagga

SEQ ID NO: 39176 - DNA, 20 bp, synthetic construct
  source 1..20: mol_type = other DNA
agccttggtgacaaagcagg

SEQ ID NO: 39177 - DNA, 20 bp, synthetic construct
  source 1..20: mol_type = other DNA
cagccttggtgacaaagcag

SEQ ID NO: 39178 - DNA, 20 bp, synthetic construct
  source 1..20: mol_type = other DNA
ccagccttggtgacaaagca

SEQ ID NO: 39179 - DNA, 20 bp, synthetic construct
  source 1..20: mol_type = other DNA
tccagccttggtgacaaagc

SEQ ID NO: 39180 - DNA, 20 bp, synthetic construct
  source 1..20: mol_type = other DNA
ctccagccttggtgacaaag

SEQ ID NO: 39181 - DNA, 20 bp, synthetic construct
  source 1..20: mol_type = other DNA
actccagccttggtgacaaa

SEQ ID NO: 39182 - DNA, 20 bp, synthetic construct
  source 1..20: mol_type = other DNA
cactccagccttggtgacaa

SEQ ID NO: 39183 - DNA, 20 bp, synthetic construct
  source 1..20: mol_type = other DNA
gcactccagccttggtgaca

SEQ ID NO: 39184 - DNA, 20 bp, synthetic construct
  source 1..20: mol_type = other DNA
tgcactccagccttggtgac

SEQ ID NO: 39185 - DNA, 20 bp, synthetic construct
  source 1..20: mol_type = other DNA
ctgcactccagccttggtga

SEQ ID NO: 39186 - DNA, 20 bp, synthetic construct
  source 1..20: mol_type = other DNA
actgcactccagccttggtg

SEQ ID NO: 39187 - DNA, 20 bp, synthetic construct
  source 1..20: mol_type = other DNA
cactgcactccagccttggt

SEQ ID NO: 39188 - DNA, 20 bp, synthetic construct
  source 1..20: mol_type = other DNA
ccactgcactccagccttgg

SEQ ID NO: 39189 - DNA, 20 bp, synthetic construct
  source 1..20: mol_type = other DNA
gccactgcactccagccttg

SEQ ID NO: 39190 - DNA, 20 bp, synthetic construct
  source 1..20: mol_type = other DNA
tgccactgcactccagcctt

SEQ ID NO: 39191 - DNA, 20 bp, synthetic construct
  source 1..20: mol_type = other DNA
atgccactgcactccagcct

SEQ ID NO: 39192 - DNA, 20 bp, synthetic construct
  source 1..20: mol_type = other DNA
catgccactgcactccagcc

SEQ ID NO: 39193 - DNA, 20 bp, synthetic construct
  source 1..20: mol_type = other DNA
tcatgccactgcactccagc

SEQ ID NO: 39194 - DNA, 20 bp, synthetic construct
  source 1..20: mol_type = other DNA
atcatgccactgcactccag

SEQ ID NO: 39195 - DNA, 20 bp, synthetic construct
  source 1..20: mol_type = other DNA
catcatgccactgcactcca

SEQ ID NO: 39196 - DNA, 20 bp, synthetic construct
  source 1..20: mol_type = other DNA
tcatcatgccactgcactcc

SEQ ID NO: 39197 - DNA, 20 bp, synthetic construct
  source 1..20: mol_type = other DNA
atcatcatgccactgcactc

SEQ ID NO: 39198 - DNA, 20 bp, synthetic construct
  source 1..20: mol_type = other DNA
tatcatcatgccactgcact

SEQ ID NO: 39199 - DNA, 20 bp, synthetic construct
  source 1..20: mol_type = other DNA
ctatcatcatgccactgcac

SEQ ID NO: 39200 - DNA, 20 bp, synthetic construct
  source 1..20: mol_type = other DNA
actatcatcatgccactgca

SEQ ID NO: 39201 - DNA, 20 bp, synthetic construct
  source 1..20: mol_type = other DNA
aactatcatcatgccactgc

SEQ ID NO: 39202 - DNA, 20 bp, synthetic construct
  source 1..20: mol_type = other DNA
gaactatcatcatgccactg

SEQ ID NO: 39203 - DNA, 20 bp, synthetic construct
  source 1..20: mol_type = other DNA
tgaactatcatcatgccact

SEQ ID NO: 39204 - DNA, 20 bp, synthetic construct
  source 1..20: mol_type = other DNA
gtgaactatcatcatgccac

SEQ ID NO: 39205 - DNA, 20 bp, synthetic construct
  source 1..20: mol_type = other DNA
agtgaactatcatcatgcca

SEQ ID NO: 39206 - DNA, 20 bp, synthetic construct
  source 1..20: mol_type = other DNA
cagtgaactatcatcatgcc

SEQ ID NO: 39207 - DNA, 20 bp, synthetic construct
  source 1..20: mol_type = other DNA
gcagtgaactatcatcatgc

SEQ ID NO: 39208 - DNA, 20 bp, synthetic construct
  source 1..20: mol_type = other DNA
tgcagtgaactatcatcatg

SEQ ID NO: 39209 - DNA, 20 bp, synthetic construct
  source 1..20: mol_type = other DNA
ctgcagtgaactatcatcat

SEQ ID NO: 39210 - DNA, 20 bp, synthetic construct
  source 1..20: mol_type = other DNA
gctgcagtgaactatcatca

SEQ ID NO: 39211 - DNA, 20 bp, synthetic construct
  source 1..20: mol_type = other DNA
ggctgcagtgaactatcatc

SEQ ID NO: 39212 - DNA, 20 bp, synthetic construct
  source 1..20: mol_type = other DNA
aggctgcagtgaactatcat

SEQ ID NO: 39213 - DNA, 20 bp, synthetic construct
  source 1..20: mol_type = other DNA
gaggctgcagtgaactatca

SEQ ID NO: 39214 - DNA, 20 bp, synthetic construct
  source 1..20: mol_type = other DNA
tgaggctgcagtgaactatc

SEQ ID NO: 39215 - DNA, 20 bp, synthetic construct
  source 1..20: mol_type = other DNA
ttgaggctgcagtgaactat

SEQ ID NO: 39216 - DNA, 20 bp, synthetic construct
  source 1..20: mol_type = other DNA
tttgaggctgcagtgaacta

SEQ ID NO: 39217 - DNA, 20 bp, synthetic construct
  source 1..20: mol_type = other DNA
gtttgaggctgcagtgaact

SEQ ID NO: 39218 - DNA, 20 bp, synthetic construct
  source 1..20: mol_type = other DNA
agtttgaggctgcagtgaac

SEQ ID NO: 39219 - DNA, 20 bp, synthetic construct
  source 1..20: mol_type = other DNA
gagtttgaggctgcagtgaa

SEQ ID NO: 39220 - DNA, 20 bp, synthetic construct
  source 1..20: mol_type = other DNA
ggagtttgaggctgcagtga

SEQ ID NO: 39221 - DNA, 20 bp, synthetic construct
  source 1..20: mol_type = other DNA
aggagtttgaggctgcagtg

SEQ ID NO: 39222 - DNA, 20 bp, synthetic construct
  source 1..20: mol_type = other DNA
caggagtttgaggctgcagt

SEQ ID NO: 39223 - DNA, 20 bp, synthetic construct
  source 1..20: mol_type = other DNA
ccaggagtttgaggctgcag

SEQ ID NO: 39224 - DNA, 20 bp, synthetic construct
  source 1..20: mol_type = other DNA
cccaggagtttgaggctgca

SEQ ID NO: 39225 - DNA, 20 bp, synthetic construct
  source 1..20: mol_type = other DNA
gcccaggagtttgaggctgc

SEQ ID NO: 39226 - DNA, 20 bp, synthetic construct
  source 1..20: mol_type = other DNA
agcccaggagtttgaggctg

SEQ ID NO: 39227 - DNA, 20 bp, synthetic construct
  source 1..20: mol_type = other DNA
gagcccaggagtttgaggct

SEQ ID NO: 39228 - DNA, 20 bp, synthetic construct
  source 1..20: mol_type = other DNA
tgagcccaggagtttgaggc

SEQ ID NO: 39229 - DNA, 20 bp, synthetic construct
  source 1..20: mol_type = other DNA
ttgagcccaggagtttgagg

SEQ ID NO: 39230 - DNA, 20 bp, synthetic construct
  source 1..20: mol_type = other DNA
cttgagcccaggagtttgag

SEQ ID NO: 39231 - DNA, 20 bp, synthetic construct
  source 1..20: mol_type = other DNA
acttgagcccaggagtttga

SEQ ID NO: 39232 - DNA, 20 bp, synthetic construct
  source 1..20: mol_type = other DNA
cacttgagcccaggagtttg

SEQ ID NO: 39233 - DNA, 20 bp, synthetic construct
  source 1..20: mol_type = other DNA
tcacttgagcccaggagttt

SEQ ID NO: 39234 - DNA, 20 bp, synthetic construct
  source 1..20: mol_type = other DNA
ttcacttgagcccaggagtt

SEQ ID NO: 39235 - DNA, 20 bp, synthetic construct
  source 1..20: mol_type = other DNA
gttcacttgagcccaggagt

SEQ ID NO: 39236 - DNA, 20 bp, synthetic construct
  source 1..20: mol_type = other DNA
ggttcacttgagcccaggag

SEQ ID NO: 39237 - DNA, 20 bp, synthetic construct
  source 1..20: mol_type = other DNA
aggttcacttgagcccagga

SEQ ID NO: 39238 - DNA, 20 bp, synthetic construct
  source 1..20: mol_type = other DNA
gaggttcacttgagcccagg

SEQ ID NO: 39239 - DNA, 20 bp, synthetic construct
  source 1..20: mol_type = other DNA
ggaggttcacttgagcccag

SEQ ID NO: 39240 - DNA, 20 bp, synthetic construct
  source 1..20: mol_type = other DNA
gggaggttcacttgagccca

SEQ ID NO: 39241 - DNA, 20 bp, synthetic construct
  source 1..20: mol_type = other DNA
tgggaggttcacttgagccc

SEQ ID NO: 39242 - DNA, 20 bp, synthetic construct
  source 1..20: mol_type = other DNA
atgggaggttcacttgagcc

SEQ ID NO: 39243 - DNA, 20 bp, synthetic construct
  source 1..20: mol_type = other DNA
gatgggaggttcacttgagc

SEQ ID NO: 39244 - DNA, 20 bp, synthetic construct
  source 1..20: mol_type = other DNA
agatgggaggttcacttgag

SEQ ID NO: 39245 - DNA, 20 bp, synthetic construct
  source 1..20: mol_type = other DNA
cagatgggaggttcacttga

SEQ ID NO: 39246 - DNA, 20 bp, synthetic construct
  source 1..20: mol_type = other DNA
acagatgggaggttcacttg

SEQ ID NO: 39247 - DNA, 20 bp, synthetic construct
  source 1..20: mol_type = other DNA
tacagatgggaggttcactt

SEQ ID NO: 39248 - DNA, 20 bp, synthetic construct
  source 1..20: mol_type = other DNA
ctacagatgggaggttcact

SEQ ID NO: 39249 - DNA, 20 bp, synthetic construct
  source 1..20: mol_type = other DNA
gctacagatgggaggttcac

SEQ ID NO: 39250 - DNA, 20 bp, synthetic construct
  source 1..20: mol_type = other DNA
agctacagatgggaggttca

SEQ ID NO: 39251 - DNA, 20 bp, synthetic construct
  source 1..20: mol_type = other DNA
cagctacagatgggaggttc

SEQ ID NO: 39252 - DNA, 20 bp, synthetic construct
  source 1..20: mol_type = other DNA
ccagctacagatgggaggtt

SEQ ID NO: 39253 - DNA, 20 bp, synthetic construct
  source 1..20: mol_type = other DNA
cccagctacagatgggaggt

SEQ ID NO: 39254 - DNA, 20 bp, synthetic construct
  source 1..20: mol_type = other DNA
tcccagctacagatgggagg

SEQ ID NO: 39255 - DNA, 20 bp, synthetic construct
  source 1..20: mol_type = other DNA
gtcccagctacagatgggag

SEQ ID NO: 39256 - DNA, 20 bp, synthetic construct
  source 1..20: mol_type = other DNA
agtcccagctacagatggga

SEQ ID NO: 39257 - DNA, 20 bp, synthetic construct
  source 1..20: mol_type = other DNA
tagtcccagctacagatggg

SEQ ID NO: 39258 - DNA, 20 bp, synthetic construct
  source 1..20: mol_type = other DNA
gtagtcccagctacagatgg

SEQ ID NO: 39259 - DNA, 20 bp, synthetic construct
  source 1..20: mol_type = other DNA
tgtagtcccagctacagatg

SEQ ID NO: 39260 - DNA, 20 bp, synthetic construct
  source 1..20: mol_type = other DNA
ctgtagtcccagctacagat

SEQ ID NO: 39261 - DNA, 20 bp, synthetic construct
  source 1..20: mol_type = other DNA
cctgtagtcccagctacaga

SEQ ID NO: 39262 - DNA, 20 bp, synthetic construct
  source 1..20: mol_type = other DNA
gcctgtagtcccagctacag

SEQ ID NO: 39263 - DNA, 20 bp, synthetic construct
  source 1..20: mol_type = other DNA
tgcctgtagtcccagctaca

SEQ ID NO: 39264 - DNA, 20 bp, synthetic construct
  source 1..20: mol_type = other DNA
gtgcctgtagtcccagctac

SEQ ID NO: 39265 - DNA, 20 bp, synthetic construct
  source 1..20: mol_type = other DNA
ggtgcctgtagtcccagcta

SEQ ID NO: 39266 - DNA, 20 bp, synthetic construct
  source 1..20: mol_type = other DNA
aggtgcctgtagtcccagct

SEQ ID NO: 39267 - DNA, 20 bp, synthetic construct
  source 1..20: mol_type = other DNA
caggtgcctgtagtcccagc

SEQ ID NO: 39268 - DNA, 20 bp, synthetic construct
  source 1..20: mol_type = other DNA
gcaggtgcctgtagtcccag

SEQ ID NO: 39269 - DNA, 20 bp, synthetic construct
  source 1..20: mol_type = other DNA
tgcaggtgcctgtagtccca

SEQ ID NO: 39270 - DNA, 20 bp, synthetic construct
  source 1..20: mol_type = other DNA
atgcaggtgcctgtagtccc

SEQ ID NO: 39271 - DNA, 20 bp, synthetic construct
  source 1..20: mol_type = other DNA
tatgcaggtgcctgtagtcc

SEQ ID NO: 39272 - DNA, 20 bp, synthetic construct
  source 1..20: mol_type = other DNA
ttatgcaggtgcctgtagtc

SEQ ID NO: 39273 - DNA, 20 bp, synthetic construct
  source 1..20: mol_type = other DNA
gttatgcaggtgcctgtagt

SEQ ID NO: 39274 - DNA, 20 bp, synthetic construct
  source 1..20: mol_type = other DNA
tgttatgcaggtgcctgtag

SEQ ID NO: 39275 - DNA, 20 bp, synthetic construct
  source 1..20: mol_type = other DNA
gtgttatgcaggtgcctgta

SEQ ID NO: 39276 - DNA, 20 bp, synthetic construct
  source 1..20: mol_type = other DNA
ggtgttatgcaggtgcctgt

SEQ ID NO: 39277 - DNA, 20 bp, synthetic construct
  source 1..20: mol_type = other DNA
aggtgttatgcaggtgcctg

SEQ ID NO: 39278 - DNA, 20 bp, synthetic construct
  source 1..20: mol_type = other DNA
caggtgttatgcaggtgcct

SEQ ID NO: 39279 - DNA, 20 bp, synthetic construct
  source 1..20: mol_type = other DNA
tcaggtgttatgcaggtgcc

SEQ ID NO: 39280 - DNA, 20 bp, synthetic construct
  source 1..20: mol_type = other DNA
gtcaggtgttatgcaggtgc

SEQ ID NO: 39281 - DNA, 20 bp, synthetic construct
  source 1..20: mol_type = other DNA
agtcaggtgttatgcaggtg

SEQ ID NO: 39282 - DNA, 20 bp, synthetic construct
  source 1..20: mol_type = other DNA
cagtcaggtgttatgcaggt

SEQ ID NO: 39283 - DNA, 20 bp, synthetic construct
  source 1..20: mol_type = other DNA
acagtcaggtgttatgcagg

SEQ ID NO: 39284 - DNA, 20 bp, synthetic construct
  source 1..20: mol_type = other DNA
aacagtcaggtgttatgcag

SEQ ID NO: 39285 - DNA, 20 bp, synthetic construct
  source 1..20: mol_type = other DNA
aaacagtcaggtgttatgca

SEQ ID NO: 39286 - DNA, 20 bp, synthetic construct
  source 1..20: mol_type = other DNA
aaaacagtcaggtgttatgc

SEQ ID NO: 39287 - DNA, 20 bp, synthetic construct
  source 1..20: mol_type = other DNA
aaaaacagtcaggtgttatg

SEQ ID NO: 39288 - DNA, 20 bp, synthetic construct
  source 1..20: mol_type = other DNA
aaaaaacagtcaggtgttat

SEQ ID NO: 39289 - DNA, 20 bp, synthetic construct
  source 1..20: mol_type = other DNA
taaaaaacagtcaggtgtta

SEQ ID NO: 39290 - DNA, 20 bp, synthetic construct
  source 1..20: mol_type = other DNA
ttaaaaaacagtcaggtgtt

SEQ ID NO: 39291 - DNA, 20 bp, synthetic construct
  source 1..20: mol_type = other DNA
tttaaaaaacagtcaggtgt

SEQ ID NO: 39292 - DNA, 20 bp, synthetic construct
  source 1..20: mol_type = other DNA
ttttaaaaaacagtcaggtg

SEQ ID NO: 39293 - DNA, 20 bp, synthetic construct
  source 1..20: mol_type = other DNA
gttttaaaaaacagtcaggt

SEQ ID NO: 39294 - DNA, 20 bp, synthetic construct
  source 1..20: mol_type = other DNA
agttttaaaaaacagtcagg

SEQ ID NO: 39295 - DNA, 20 bp, synthetic construct
  source 1..20: mol_type = other DNA
tagttttaaaaaacagtcag

SEQ ID NO: 39296 - DNA, 20 bp, synthetic construct
  source 1..20: mol_type = other DNA
atagttttaaaaaacagtca

SEQ ID NO: 39297 - DNA, 20 bp, synthetic construct
  source 1..20: mol_type = other DNA
aatagttttaaaaaacagtc

SEQ ID NO: 39298 - DNA, 20 bp, synthetic construct
  source 1..20: mol_type = other DNA
aaatagttttaaaaaacagt

SEQ ID NO: 39299 - DNA, 20 bp, synthetic construct
  source 1..20: mol_type = other DNA
aaaatagttttaaaaaacag

SEQ ID NO: 39300 - DNA, 20 bp, synthetic construct
  source 1..20: mol_type = other DNA
taaaatagttttaaaaaaca

SEQ ID NO: 39301 - DNA, 20 bp, synthetic construct
  source 1..20: mol_type = other DNA
ctaaaatagttttaaaaaac

SEQ ID NO: 39302 - DNA, 20 bp, synthetic construct
  source 1..20: mol_type = other DNA
tctaaaatagttttaaaaaa

SEQ ID NO: 39303 - DNA, 20 bp, synthetic construct
  source 1..20: mol_type = other DNA
ctctaaaatagttttaaaaa

SEQ ID NO: 39304 - DNA, 20 bp, synthetic construct
  source 1..20: mol_type = other DNA
tctctaaaatagttttaaaa

SEQ ID NO: 39305 - DNA, 20 bp, synthetic construct
  source 1..20: mol_type = other DNA
atctctaaaatagttttaaa

SEQ ID NO: 39306 - DNA, 20 bp, synthetic construct
  source 1..20: mol_type = other DNA
catctctaaaatagttttaa

SEQ ID NO: 39307 - DNA, 20 bp, synthetic construct
  source 1..20: mol_type = other DNA
ccatctctaaaatagtttta

SEQ ID NO: 39308 - DNA, 20 bp, synthetic construct
  source 1..20: mol_type = other DNA
cccatctctaaaatagtttt

SEQ ID NO: 39309 - DNA, 20 bp, synthetic construct
  source 1..20: mol_type = other DNA
ccccatctctaaaatagttt

SEQ ID NO: 39310 - DNA, 20 bp, synthetic construct
  source 1..20: mol_type = other DNA
accccatctctaaaatagtt

SEQ ID NO: 39311 - DNA, 20 bp, synthetic construct
  source 1..20: mol_type = other DNA
gaccccatctctaaaatagt

SEQ ID NO: 39312 - DNA, 20 bp, synthetic construct
  source 1..20: mol_type = other DNA
agaccccatctctaaaatag

SEQ ID NO: 39313 - DNA, 20 bp, synthetic construct
  source 1..20: mol_type = other DNA
aagaccccatctctaaaata

SEQ ID NO: 39314 - DNA, 20 bp, synthetic construct
  source 1..20: mol_type = other DNA
caagaccccatctctaaaat

SEQ ID NO: 39315 - DNA, 20 bp, synthetic construct
  source 1..20: mol_type = other DNA
gcaagaccccatctctaaaa

SEQ ID NO: 39316 - DNA, 20 bp, synthetic construct
  source 1..20: mol_type = other DNA
cgcaagaccccatctctaaa

SEQ ID NO: 39317 - DNA, 20 bp, synthetic construct
  source 1..20: mol_type = other DNA
tcgcaagaccccatctctaa

SEQ ID NO: 39318 - DNA, 20 bp, synthetic construct
  source 1..20: mol_type = other DNA
ttcgcaagaccccatctcta

SEQ ID NO: 39319 - DNA, 20 bp, synthetic construct
  source 1..20: mol_type = other DNA
cttcgcaagaccccatctct

SEQ ID NO: 39320 - DNA, 20 bp, synthetic construct
  source 1..20: mol_type = other DNA
acttcgcaagaccccatctc

SEQ ID NO: 39321 - DNA, 20 bp, synthetic construct
  source 1..20: mol_type = other DNA
aacttcgcaagaccccatct

SEQ ID NO: 39322 - DNA, 20 bp, synthetic construct
  source 1..20: mol_type = other DNA
caacttcgcaagaccccatc

SEQ ID NO: 39323 - DNA, 20 bp, synthetic construct
  source 1..20: mol_type = other DNA
gcaacttcgcaagaccccat

SEQ ID NO: 39324 - DNA, 20 bp, synthetic construct
  source 1..20: mol_type = other DNA
agcaacttcgcaagacccca

SEQ ID NO: 39325 - DNA, 20 bp, synthetic construct
  source 1..20: mol_type = other DNA
gagcaacttcgcaagacccc

SEQ ID NO: 39326 - DNA, 20 bp, synthetic construct
  source 1..20: mol_type = other DNA
tgagcaacttcgcaagaccc

SEQ ID NO: 39327 - DNA, 20 bp, synthetic construct
  source 1..20: mol_type = other DNA
ctgagcaacttcgcaagacc

SEQ ID NO: 39328 - DNA, 20 bp, synthetic construct
  source 1..20: mol_type = other DNA
cctgagcaacttcgcaagac

SEQ ID NO: 39329 - DNA, 20 bp, synthetic construct
  source 1..20: mol_type = other DNA
tcctgagcaacttcgcaaga

SEQ ID NO: 39330 - DNA, 20 bp, synthetic construct
  source 1..20: mol_type = other DNA
atcctgagcaacttcgcaag

SEQ ID NO: 39331 - DNA, 20 bp, synthetic construct
  source 1..20: mol_type = other DNA
catcctgagcaacttcgcaa

SEQ ID NO: 39332 - DNA, 20 bp, synthetic construct
  source 1..20: mol_type = other DNA
ccatcctgagcaacttcgca

SEQ ID NO: 39333 - DNA, 20 bp, synthetic construct
  source 1..20: mol_type = other DNA
accatcctgagcaacttcgc

SEQ ID NO: 39334 - DNA, 20 bp, synthetic construct
  source 1..20: mol_type = other DNA
gaccatcctgagcaacttcg

SEQ ID NO: 39335 - DNA, 20 bp, synthetic construct
  source 1..20: mol_type = other DNA
agaccatcctgagcaacttc

SEQ ID NO: 39336 - DNA, 20 bp, synthetic construct
  source 1..20: mol_type = other DNA
aagaccatcctgagcaactt

SEQ ID NO: 39337 - DNA, 20 bp, synthetic construct
  source 1..20: mol_type = other DNA
caagaccatcctgagcaact

SEQ ID NO: 39338 - DNA, 20 bp, synthetic construct
  source 1..20: mol_type = other DNA
tcaagaccatcctgagcaac

SEQ ID NO: 39339 - DNA, 20 bp, synthetic construct
  source 1..20: mol_type = other DNA
ttcaagaccatcctgagcaa

SEQ ID NO: 39340 - DNA, 20 bp, synthetic construct
  source 1..20: mol_type = other DNA
gttcaagaccatcctgagca

SEQ ID NO: 39341 - DNA, 20 bp, synthetic construct
  source 1..20: mol_type = other DNA
agttcaagaccatcctgagc

SEQ ID NO: 39342 - DNA, 20 bp, synthetic construct
  source 1..20: mol_type = other DNA
gagttcaagaccatcctgag

SEQ ID NO: 39343 - DNA, 20 bp, synthetic construct
  source 1..20: mol_type = other DNA
ggagttcaagaccatcctga

SEQ ID NO: 39344 - DNA, 20 bp, synthetic construct
  source 1..20: mol_type = other DNA
cggagttcaagaccatcctg

SEQ ID NO: 39345 - DNA, 20 bp, synthetic construct
  source 1..20: mol_type = other DNA
ccggagttcaagaccatcct

SEQ ID NO: 39346 - DNA, 20 bp, synthetic construct
  source 1..20: mol_type = other DNA
cccggagttcaagaccatcc

SEQ ID NO: 39347 - DNA, 20 bp, synthetic construct
  source 1..20: mol_type = other DNA
acccggagttcaagaccatc

SEQ ID NO: 39348 - DNA, 20 bp, synthetic construct
  source 1..20: mol_type = other DNA
gacccggagttcaagaccat

SEQ ID NO: 39349 - DNA, 20 bp, synthetic construct
  source 1..20: mol_type = other DNA
agacccggagttcaagacca

SEQ ID NO: 39350 - DNA, 20 bp, synthetic construct
  source 1..20: mol_type = other DNA
aagacccggagttcaagacc

SEQ ID NO: 39351 - DNA, 20 bp, synthetic construct
  source 1..20: mol_type = other DNA
taagacccggagttcaagac

SEQ ID NO: 39352 - DNA, 20 bp, synthetic construct
  source 1..20: mol_type = other DNA
ttaagacccggagttcaaga

SEQ ID NO: 39353 - DNA, 20 bp, synthetic construct
  source 1..20: mol_type = other DNA
cttaagacccggagttcaag

SEQ ID NO: 39354 - DNA, 20 bp, synthetic construct
  source 1..20: mol_type = other DNA
acttaagacccggagttcaa

SEQ ID NO: 39355 - DNA, 20 bp, synthetic construct
  source 1..20: mol_type = other DNA
cacttaagacccggagttca

SEQ ID NO: 39356 - DNA, 20 bp, synthetic construct
  source 1..20: mol_type = other DNA
ccacttaagacccggagttc

SEQ ID NO: 39357 - DNA, 20 bp, synthetic construct
  source 1..20: mol_type = other DNA
accacttaagacccggagtt

SEQ ID NO: 39358 - DNA, 20 bp, synthetic construct
  source 1..20: mol_type = other DNA
gaccacttaagacccggagt

SEQ ID NO: 39359 - DNA, 20 bp, synthetic construct
  source 1..20: mol_type = other DNA
ggaccacttaagacccggag

SEQ ID NO: 39360 - DNA, 20 bp, synthetic construct
  source 1..20: mol_type = other DNA
aggaccacttaagacccgga

SEQ ID NO: 39361 - DNA, 20 bp, synthetic construct
  source 1..20: mol_type = other DNA
aaggaccacttaagacccgg

SEQ ID NO: 39362 - DNA, 20 bp, synthetic construct
  source 1..20: mol_type = other DNA
gaaggaccacttaagacccg

SEQ ID NO: 39363 - DNA, 20 bp, synthetic construct
  source 1..20: mol_type = other DNA
agaaggaccacttaagaccc

SEQ ID NO: 39364 - DNA, 20 bp, synthetic construct
  source 1..20: mol_type = other DNA
cagaaggaccacttaagacc

SEQ ID NO: 39365 - DNA, 20 bp, synthetic construct
  source 1..20: mol_type = other DNA
gcagaaggaccacttaagac

SEQ ID NO: 39366 - DNA, 20 bp, synthetic construct
  source 1..20: mol_type = other DNA
ggcagaaggaccacttaaga

SEQ ID NO: 39367 - DNA, 20 bp, synthetic construct
  source 1..20: mol_type = other DNA
aggcagaaggaccacttaag

SEQ ID NO: 39368 - DNA, 20 bp, synthetic construct
  source 1..20: mol_type = other DNA
gaggcagaaggaccacttaa

SEQ ID NO: 39369 - DNA, 20 bp, synthetic construct
  source 1..20: mol_type = other DNA
tgaggcagaaggaccactta

SEQ ID NO: 39370 - DNA, 20 bp, synthetic construct
  source 1..20: mol_type = other DNA
ctgaggcagaaggaccactt

SEQ ID NO: 39371 - DNA, 20 bp, synthetic construct
  source 1..20: mol_type = other DNA
gctgaggcagaaggaccact

SEQ ID NO: 39372 - DNA, 20 bp, synthetic construct
  source 1..20: mol_type = other DNA
ggctgaggcagaaggaccac

SEQ ID NO: 39373 - DNA, 20 bp, synthetic construct
  source 1..20: mol_type = other DNA
aggctgaggcagaaggacca

SEQ ID NO: 39374 - DNA, 20 bp, synthetic construct
  source 1..20: mol_type = other DNA
gaggctgaggcagaaggacc

SEQ ID NO: 39375 - DNA, 20 bp, synthetic construct
  source 1..20: mol_type = other DNA
agaggctgaggcagaaggac

SEQ ID NO: 39376 - DNA, 20 bp, synthetic construct
  source 1..20: mol_type = other DNA
cagaggctgaggcagaagga

SEQ ID NO: 39377 - DNA, 20 bp, synthetic construct
  source 1..20: mol_type = other DNA
ccagaggctgaggcagaagg

SEQ ID NO: 39378 - DNA, 20 bp, synthetic construct
  source 1..20: mol_type = other DNA
tccagaggctgaggcagaag

SEQ ID NO: 39379 - DNA, 20 bp, synthetic construct
  source 1..20: mol_type = other DNA
atccagaggctgaggcagaa

SEQ ID NO: 39380 - DNA, 20 bp, synthetic construct
  source 1..20: mol_type = other DNA
aatccagaggctgaggcaga

SEQ ID NO: 39381 - DNA, 20 bp, synthetic construct
  source 1..20: mol_type = other DNA
taatccagaggctgaggcag

SEQ ID NO: 39382 - DNA, 20 bp, synthetic construct
  source 1..20: mol_type = other DNA
ctaatccagaggctgaggca

SEQ ID NO: 39383 - DNA, 20 bp, synthetic construct
  source 1..20: mol_type = other DNA
actaatccagaggctgaggc

SEQ ID NO: 39384 - DNA, 20 bp, synthetic construct
  source 1..20: mol_type = other DNA
aactaatccagaggctgagg

SEQ ID NO: 39385 - DNA, 20 bp, synthetic construct
  source 1..20: mol_type = other DNA
caactaatccagaggctgag

SEQ ID NO: 39386 - DNA, 20 bp, synthetic construct
  source 1..20: mol_type = other DNA
ccaactaatccagaggctga

SEQ ID NO: 39387 - DNA, 20 bp, synthetic construct
  source 1..20: mol_type = other DNA
gccaactaatccagaggctg

SEQ ID NO: 39388 - DNA, 20 bp, synthetic construct
  source 1..20: mol_type = other DNA
tgccaactaatccagaggct

SEQ ID NO: 39389 - DNA, 20 bp, synthetic construct
  source 1..20: mol_type = other DNA
atgccaactaatccagaggc

SEQ ID NO: 39390 - DNA, 20 bp, synthetic construct
  source 1..20: mol_type = other DNA
aatgccaactaatccagagg

SEQ ID NO: 39391 - DNA, 20 bp, synthetic construct
  source 1..20: mol_type = other DNA
taatgccaactaatccagag

SEQ ID NO: 39392 - DNA, 20 bp, synthetic construct
  source 1..20: mol_type = other DNA
gtaatgccaactaatccaga

SEQ ID NO: 39393 - DNA, 20 bp, synthetic construct
  source 1..20: mol_type = other DNA
tgtaatgccaactaatccag

SEQ ID NO: 39394 - DNA, 20 bp, synthetic construct
  source 1..20: mol_type = other DNA
ctgtaatgccaactaatcca

SEQ ID NO: 39395 - DNA, 20 bp, synthetic construct
  source 1..20: mol_type = other DNA
cctgtaatgccaactaatcc

SEQ ID NO: 39396 - DNA, 20 bp, synthetic construct
  source 1..20: mol_type = other DNA
gcctgtaatgccaactaatc

SEQ ID NO: 39397 - DNA, 20 bp, synthetic construct
  source 1..20: mol_type = other DNA
tgcctgtaatgccaactaat

SEQ ID NO: 39398 - DNA, 20 bp, synthetic construct
  source 1..20: mol_type = other DNA
atgcctgtaatgccaactaa

SEQ ID NO: 39399 - DNA, 20 bp, synthetic construct
  source 1..20: mol_type = other DNA
catgcctgtaatgccaacta

SEQ ID NO: 39400 - DNA, 20 bp, synthetic construct
  source 1..20: mol_type = other DNA
tcatgcctgtaatgccaact

SEQ ID NO: 39401 - DNA, 20 bp, synthetic construct
  source 1..20: mol_type = other DNA
ctcatgcctgtaatgccaac

SEQ ID NO: 39402 - DNA, 20 bp, synthetic construct
  source 1..20: mol_type = other DNA
gctcatgcctgtaatgccaa

SEQ ID NO: 39403 - DNA, 20 bp, synthetic construct
  source 1..20: mol_type = other DNA
ggctcatgcctgtaatgcca

SEQ ID NO: 39404 - DNA, 20 bp, synthetic construct
  source 1..20: mol_type = other DNA
tggctcatgcctgtaatgcc

SEQ ID NO: 39405 - DNA, 20 bp, synthetic construct
  source 1..20: mol_type = other DNA
atggctcatgcctgtaatgc

SEQ ID NO: 39406 - DNA, 20 bp, synthetic construct
  source 1..20: mol_type = other DNA
aatggctcatgcctgtaatg

SEQ ID NO: 39407 - DNA, 20 bp, synthetic construct
  source 1..20: mol_type = other DNA
caatggctcatgcctgtaat

SEQ ID NO: 39408 - DNA, 20 bp, synthetic construct
  source 1..20: mol_type = other DNA
acaatggctcatgcctgtaa

SEQ ID NO: 39409 - DNA, 20 bp, synthetic construct
  source 1..20: mol_type = other DNA
tacaatggctcatgcctgta

SEQ ID NO: 39410 - DNA, 20 bp, synthetic construct
  source 1..20: mol_type = other DNA
gtacaatggctcatgcctgt

SEQ ID NO: 39411 - DNA, 20 bp, synthetic construct
  source 1..20: mol_type = other DNA
ggtacaatggctcatgcctg

SEQ ID NO: 39412 - DNA, 20 bp, synthetic construct
  source 1..20: mol_type = other DNA
aggtacaatggctcatgcct

SEQ ID NO: 39413 - DNA, 20 bp, synthetic construct
  source 1..20: mol_type = other DNA
caggtacaatggctcatgcc

SEQ ID NO: 39414 - DNA, 20 bp, synthetic construct
  source 1..20: mol_type = other DNA
ccaggtacaatggctcatgc

SEQ ID NO: 39415 - DNA, 20 bp, synthetic construct
  source 1..20: mol_type = other DNA
gccaggtacaatggctcatg

SEQ ID NO: 39416 - DNA, 20 bp, synthetic construct
  source 1..20: mol_type = other DNA
tgccaggtacaatggctcat

SEQ ID NO: 39417 - DNA, 20 bp, synthetic construct
  source 1..20: mol_type = other DNA
ttgccaggtacaatggctca

SEQ ID NO: 39418 - DNA, 20 bp, synthetic construct
  source 1..20: mol_type = other DNA
cttgccaggtacaatggctc

SEQ ID NO: 39419 - DNA, 20 bp, synthetic construct
  source 1..20: mol_type = other DNA
acttgccaggtacaatggct

SEQ ID NO: 39420 - DNA, 20 bp, synthetic construct
  source 1..20: mol_type = other DNA
cacttgccaggtacaatggc

SEQ ID NO: 39421 - DNA, 20 bp, synthetic construct
  source 1..20: mol_type = other DNA
gcacttgccaggtacaatgg

SEQ ID NO: 39422 - DNA, 20 bp, synthetic construct
  source 1..20: mol_type = other DNA
tgcacttgccaggtacaatg

SEQ ID NO: 39423 - DNA, 20 bp, synthetic construct
  source 1..20: mol_type = other DNA
atgcacttgccaggtacaat

SEQ ID NO: 39424 - DNA, 20 bp, synthetic construct
  source 1..20: mol_type = other DNA
tatgcacttgccaggtacaa

SEQ ID NO: 39425 - DNA, 20 bp, synthetic construct
  source 1..20: mol_type = other DNA
atatgcacttgccaggtaca

SEQ ID NO: 39426 - DNA, 20 bp, synthetic construct
  source 1..20: mol_type = other DNA
aatatgcacttgccaggtac

SEQ ID NO: 39427 - DNA, 20 bp, synthetic construct
  source 1..20: mol_type = other DNA
aaatatgcacttgccaggta

SEQ ID NO: 39428 - DNA, 20 bp, synthetic construct
  source 1..20: mol_type = other DNA
aaaatatgcacttgccaggt

SEQ ID NO: 39429 - DNA, 20 bp, synthetic construct
  source 1..20: mol_type = other DNA
gaaaatatgcacttgccagg

SEQ ID NO: 39430 - DNA, 20 bp, synthetic construct
  source 1..20: mol_type = other DNA
agaaaatatgcacttgccag

SEQ ID NO: 39431 - DNA, 20 bp, synthetic construct
  source 1..20: mol_type = other DNA
aagaaaatatgcacttgcca

SEQ ID NO: 39432 - DNA, 20 bp, synthetic construct
  source 1..20: mol_type = other DNA
aaagaaaatatgcacttgcc

SEQ ID NO: 39433 - DNA, 20 bp, synthetic construct
  source 1..20: mol_type = other DNA
aaaagaaaatatgcacttgc

SEQ ID NO: 39434 - DNA, 20 bp, synthetic construct
  source 1..20: mol_type = other DNA
aaaaagaaaatatgcacttg

SEQ ID NO: 39435 - DNA, 20 bp, synthetic construct
  source 1..20: mol_type = other DNA
aaaaaagaaaatatgcactt

SEQ ID NO: 39436 - DNA, 20 bp, synthetic construct
  source 1..20: mol_type = other DNA
aaaaaaagaaaatatgcact

SEQ ID NO: 39437 - DNA, 20 bp, synthetic construct
  source 1..20: mol_type = other DNA
aaaaaaaagaaaatatgcac

SEQ ID NO: 39438 - DNA, 20 bp, synthetic construct
  source 1..20: mol_type = other DNA
aaaaaaaaagaaaatatgca

SEQ ID NO: 39439 - DNA, 20 bp, synthetic construct
  source 1..20: mol_type = other DNA
aaaaaaaaaagaaaatatgc

SEQ ID NO: 39440 - DNA, 20 bp, synthetic construct
  source 1..20: mol_type = other DNA
aaaaaaaaaaagaaaatatg

SEQ ID NO: 39441 - DNA, 20 bp, synthetic construct
  source 1..20: mol_type = other DNA
aaaaaaaaaaaagaaaatat

SEQ ID NO: 39442 - DNA, 20 bp, synthetic construct
  source 1..20: mol_type = other DNA
aaaaaaaaaaaaagaaaata

SEQ ID NO: 39443 - DNA, 20 bp, synthetic construct
  source 1..20: mol_type = other DNA
taaaaaaaaaaaaagaaaat

SEQ ID NO: 39444 - DNA, 20 bp, synthetic construct
  source 1..20: mol_type = other DNA
ttaaaaaaaaaaaaagaaaa

SEQ ID NO: 39445 - DNA, 20 bp, synthetic construct
  source 1..20: mol_type = other DNA
cttaaaaaaaaaaaaagaaa

SEQ ID NO: 39446 - DNA, 20 bp, synthetic construct
  source 1..20: mol_type = other DNA
ccttaaaaaaaaaaaaagaa

SEQ ID NO: 39447 - DNA, 20 bp, synthetic construct
  source 1..20: mol_type = other DNA
accttaaaaaaaaaaaaaga

SEQ ID NO: 39448 - DNA, 20 bp, synthetic construct
  source 1..20: mol_type = other DNA
caccttaaaaaaaaaaaaag

SEQ ID NO: 39449 - DNA, 20 bp, synthetic construct
  source 1..20: mol_type = other DNA
ccaccttaaaaaaaaaaaaa

SEQ ID NO: 39450 - DNA, 20 bp, synthetic construct
  source 1..20: mol_type = other DNA
tccaccttaaaaaaaaaaaa

SEQ ID NO: 39451 - DNA, 20 bp, synthetic construct
  source 1..20: mol_type = other DNA
ctccaccttaaaaaaaaaaa

SEQ ID NO: 39452 - DNA, 20 bp, synthetic construct
  source 1..20: mol_type = other DNA
actccaccttaaaaaaaaaa

SEQ ID NO: 39453 - DNA, 20 bp, synthetic construct
  source 1..20: mol_type = other DNA
gactccaccttaaaaaaaaa

SEQ ID NO: 39454 - DNA, 20 bp, synthetic construct
  source 1..20: mol_type = other DNA
agactccaccttaaaaaaaa

SEQ ID NO: 39455 - DNA, 20 bp, synthetic construct
  source 1..20: mol_type = other DNA
gagactccaccttaaaaaaa

SEQ ID NO: 39456 - DNA, 20 bp, synthetic construct
  source 1..20: mol_type = other DNA
cgagactccaccttaaaaaa

SEQ ID NO: 39457 - DNA, 20 bp, synthetic construct
  source 1..20: mol_type = other DNA
tcgagactccaccttaaaaa

SEQ ID NO: 39458 - DNA, 20 bp, synthetic construct
  source 1..20: mol_type = other DNA
ctcgagactccaccttaaaa

SEQ ID NO: 39459 - DNA, 20 bp, synthetic construct
  source 1..20: mol_type = other DNA
cctcgagactccaccttaaa

SEQ ID NO: 39460 - DNA, 20 bp, synthetic construct
  source 1..20: mol_type = other DNA
gcctcgagactccaccttaa

SEQ ID NO: 39461 - DNA, 20 bp, synthetic construct
  source 1..20: mol_type = other DNA
ggcctcgagactccacctta

SEQ ID NO: 39462 - DNA, 20 bp, synthetic construct
  source 1..20: mol_type = other DNA
cggcctcgagactccacctt

SEQ ID NO: 39463 - DNA, 20 bp, synthetic construct
  source 1..20: mol_type = other DNA
ccggcctcgagactccacct

SEQ ID NO: 39464 - DNA, 20 bp, synthetic construct
  source 1..20: mol_type = other DNA
cccggcctcgagactccacc

SEQ ID NO: 39465 - DNA, 20 bp, synthetic construct
  source 1..20: mol_type = other DNA
gcccggcctcgagactccac

SEQ ID NO: 39466 - DNA, 20 bp, synthetic construct
  source 1..20: mol_type = other DNA
cgcccggcctcgagactcca

SEQ ID NO: 39467 - DNA, 20 bp, synthetic construct
  source 1..20: mol_type = other DNA
gcgcccggcctcgagactcc

SEQ ID NO: 39468 - DNA, 20 bp, synthetic construct
  source 1..20: mol_type = other DNA
tgcgcccggcctcgagactc

SEQ ID NO: 39469 - DNA, 20 bp, synthetic construct
  source 1..20: mol_type = other DNA
ctgcgcccggcctcgagact

SEQ ID NO: 39470 - DNA, 20 bp, synthetic construct
  source 1..20: mol_type = other DNA
actgcgcccggcctcgagac

SEQ ID NO: 39471 - DNA, 20 bp, synthetic construct
  source 1..20: mol_type = other DNA
cactgcgcccggcctcgaga

SEQ ID NO: 39472 - DNA, 20 bp, synthetic construct
  source 1..20: mol_type = other DNA
ccactgcgcccggcctcgag

SEQ ID NO: 39473 - DNA, 20 bp, synthetic construct
  source 1..20: mol_type = other DNA
gccactgcgcccggcctcga

SEQ ID NO: 39474 - DNA, 20 bp, synthetic construct
  source 1..20: mol_type = other DNA
agccactgcgcccggcctcg

SEQ ID NO: 39475 - DNA, 20 bp, synthetic construct
  source 1..20: mol_type = other DNA
gagccactgcgcccggcctc

SEQ ID NO: 39476 - DNA, 20 bp, synthetic construct
  source 1..20: mol_type = other DNA
tgagccactgcgcccggcct

SEQ ID NO: 39477 - DNA, 20 bp, synthetic construct
  source 1..20: mol_type = other DNA
gtgagccactgcgcccggcc

SEQ ID NO: 39478 - DNA, 20 bp, synthetic construct
  source 1..20: mol_type = other DNA
tgtgagccactgcgcccggc

SEQ ID NO: 39479 - DNA, 20 bp, synthetic construct
  source 1..20: mol_type = other DNA
gtgtgagccactgcgcccgg

SEQ ID NO: 39480 - DNA, 20 bp, synthetic construct
  source 1..20: mol_type = other DNA
ggtgtgagccactgcgcccg

SEQ ID NO: 39481 - DNA, 20 bp, synthetic construct
  source 1..20: mol_type = other DNA
aggtgtgagccactgcgccc

SEQ ID NO: 39482 - DNA, 20 bp, synthetic construct
  source 1..20: mol_type = other DNA
caggtgtgagccactgcgcc

SEQ ID NO: 39483 - DNA, 20 bp, synthetic construct
  source 1..20: mol_type = other DNA
acaggtgtgagccactgcgc

SEQ ID NO: 39484 - DNA, 20 bp, synthetic construct
  source 1..20: mol_type = other DNA
tacaggtgtgagccactgcg

SEQ ID NO: 39485 - DNA, 20 bp, synthetic construct
  source 1..20: mol_type = other DNA
ttacaggtgtgagccactgc

SEQ ID NO: 39486 - DNA, 20 bp, synthetic construct
  source 1..20: mol_type = other DNA
attacaggtgtgagccactg

SEQ ID NO: 39487 - DNA, 20 bp, synthetic construct
  source 1..20: mol_type = other DNA
gattacaggtgtgagccact

SEQ ID NO: 39488 - DNA, 20 bp, synthetic construct
  source 1..20: mol_type = other DNA
ggattacaggtgtgagccac

SEQ ID NO: 39489 - DNA, 20 bp, synthetic construct
  source 1..20: mol_type = other DNA
gggattacaggtgtgagcca

SEQ ID NO: 39490 - DNA, 20 bp, synthetic construct
  source 1..20: mol_type = other DNA
tgggattacaggtgtgagcc

SEQ ID NO: 39491 - DNA, 20 bp, synthetic construct
  source 1..20: mol_type = other DNA
ctgggattacaggtgtgagc

SEQ ID NO: 39492 - DNA, 20 bp, synthetic construct
  source 1..20: mol_type = other DNA
gctgggattacaggtgtgag

SEQ ID NO: 39493 - DNA, 20 bp, synthetic construct
  source 1..20: mol_type = other DNA
tgctgggattacaggtgtga

SEQ ID NO: 39494 - DNA, 20 bp, synthetic construct
  source 1..20: mol_type = other DNA
gtgctgggattacaggtgtg

SEQ ID NO: 39495 - DNA, 20 bp, synthetic construct
  source 1..20: mol_type = other DNA
agtgctgggattacaggtgt

SEQ ID NO: 39496 - DNA, 20 bp, synthetic construct
  source 1..20: mol_type = other DNA
aagtgctgggattacaggtg

SEQ ID NO: 39497 - DNA, 20 bp, synthetic construct
  source 1..20: mol_type = other DNA
aaagtgctgggattacaggt

SEQ ID NO: 39498 - DNA, 20 bp, synthetic construct
  source 1..20: mol_type = other DNA
caaagtgctgggattacagg

SEQ ID NO: 39499 - DNA, 20 bp, synthetic construct
  source 1..20: mol_type = other DNA
ccaaagtgctgggattacag

SEQ ID NO: 39500 - DNA, 20 bp, synthetic construct
  source 1..20: mol_type = other DNA
tccaaagtgctgggattaca

SEQ ID NO: 39501 - DNA, 20 bp, synthetic construct
  source 1..20: mol_type = other DNA
ttccaaagtgctgggattac

SEQ ID NO: 39502 - DNA, 20 bp, synthetic construct
  source 1..20: mol_type = other DNA
cttccaaagtgctgggatta

SEQ ID NO: 39503 - DNA, 20 bp, synthetic construct
  source 1..20: mol_type = other DNA
ccttccaaagtgctgggatt

SEQ ID NO: 39504 - DNA, 20 bp, synthetic construct
  source 1..20: mol_type = other DNA
gccttccaaagtgctgggat

SEQ ID NO: 39505 - DNA, 20 bp, synthetic construct
  source 1..20: mol_type = other DNA
ggccttccaaagtgctggga

SEQ ID NO: 39506 - DNA, 20 bp, synthetic construct
  source 1..20: mol_type = other DNA
cggccttccaaagtgctggg

SEQ ID NO: 39507 - DNA, 20 bp, synthetic construct
  source 1..20: mol_type = other DNA
tcggccttccaaagtgctgg

SEQ ID NO: 39508 - DNA, 20 bp, synthetic construct
  source 1..20: mol_type = other DNA
ctcggccttccaaagtgctg

SEQ ID NO: 39509 - DNA, 20 bp, synthetic construct
  source 1..20: mol_type = other DNA
cctcggccttccaaagtgct

SEQ ID NO: 39510 - DNA, 20 bp, synthetic construct
  source 1..20: mol_type = other DNA
acctcggccttccaaagtgc

SEQ ID NO: 39511 - DNA, 20 bp, synthetic construct
  source 1..20: mol_type = other DNA
cacctcggccttccaaagtg

SEQ ID NO: 39512 - DNA, 20 bp, synthetic construct
  source 1..20: mol_type = other DNA
ccacctcggccttccaaagt

SEQ ID NO: 39513 - DNA, 20 bp, synthetic construct
  source 1..20: mol_type = other DNA
cccacctcggccttccaaag

SEQ ID NO: 39514 - DNA, 20 bp, synthetic construct
  source 1..20: mol_type = other DNA
acccacctcggccttccaaa

SEQ ID NO: 39515 - DNA, 20 bp, synthetic construct
  source 1..20: mol_type = other DNA
cacccacctcggccttccaa

SEQ ID NO: 39516 - DNA, 20 bp, synthetic construct
  source 1..20: mol_type = other DNA
ccacccacctcggccttcca

SEQ ID NO: 39517 - DNA, 20 bp, synthetic construct
  source 1..20: mol_type = other DNA
tccacccacctcggccttcc

SEQ ID NO: 39518 - DNA, 20 bp, synthetic construct
  source 1..20: mol_type = other DNA
atccacccacctcggccttc

SEQ ID NO: 39519 - DNA, 20 bp, synthetic construct
  source 1..20: mol_type = other DNA
gatccacccacctcggcctt

SEQ ID NO: 39520 - DNA, 20 bp, synthetic construct
  source 1..20: mol_type = other DNA
tgatccacccacctcggcct

SEQ ID NO: 39521 - DNA, 20 bp, synthetic construct
  source 1..20: mol_type = other DNA
ttgatccacccacctcggcc

SEQ ID NO: 39522 - DNA, 20 bp, synthetic construct
  source 1..20: mol_type = other DNA
cttgatccacccacctcggc

SEQ ID NO: 39523 - DNA, 20 bp, synthetic construct
  source 1..20: mol_type = other DNA
tcttgatccacccacctcgg

SEQ ID NO: 39524 - DNA, 20 bp, synthetic construct
  source 1..20: mol_type = other DNA
ctcttgatccacccacctcg

SEQ ID NO: 39525 - DNA, 20 bp, synthetic construct
  source 1..20: mol_type = other DNA
cctcttgatccacccacctc

SEQ ID NO: 39526 - DNA, 20 bp, synthetic construct
  source 1..20: mol_type = other DNA
acctcttgatccacccacct

SEQ ID NO: 39527 - DNA, 20 bp, synthetic construct
  source 1..20: mol_type = other DNA
gacctcttgatccacccacc

SEQ ID NO: 39528 - DNA, 20 bp, synthetic construct
  source 1..20: mol_type = other DNA
tgacctcttgatccacccac

SEQ ID NO: 39529 - DNA, 20 bp, synthetic construct
  source 1..20: mol_type = other DNA
ctgacctcttgatccaccca

SEQ ID NO: 39530 - DNA, 20 bp, synthetic construct
  source 1..20: mol_type = other DNA
cctgacctcttgatccaccc

SEQ ID NO: 39531 - DNA, 20 bp, synthetic construct
  source 1..20: mol_type = other DNA
tcctgacctcttgatccacc

SEQ ID NO: 39532 - DNA, 20 bp, synthetic construct
  source 1..20: mol_type = other DNA
ctcctgacctcttgatccac

SEQ ID NO: 39533 - DNA, 20 bp, synthetic construct
  source 1..20: mol_type = other DNA
tctcctgacctcttgatcca

SEQ ID NO: 39534 - DNA, 20 bp, synthetic construct
  source 1..20: mol_type = other DNA
atctcctgacctcttgatcc

SEQ ID NO: 39535 - DNA, 20 bp, synthetic construct
  source 1..20: mol_type = other DNA
gatctcctgacctcttgatc

SEQ ID NO: 39536 - DNA, 20 bp, synthetic construct
  source 1..20: mol_type = other DNA
cgatctcctgacctcttgat

SEQ ID NO: 39537 - DNA, 20 bp, synthetic construct
  source 1..20: mol_type = other DNA
tcgatctcctgacctcttga

SEQ ID NO: 39538 - DNA, 20 bp, synthetic construct
  source 1..20: mol_type = other DNA
ctcgatctcctgacctcttg

SEQ ID NO: 39539 - DNA, 20 bp, synthetic construct
  source 1..20: mol_type = other DNA
tctcgatctcctgacctctt

SEQ ID NO: 39540 - DNA, 20 bp, synthetic construct
  source 1..20: mol_type = other DNA
gtctcgatctcctgacctct

SEQ ID NO: 39541 - DNA, 20 bp, synthetic construct
  source 1..20: mol_type = other DNA
ggtctcgatctcctgacctc

SEQ ID NO: 39542 - DNA, 20 bp, synthetic construct
  source 1..20: mol_type = other DNA
tggtctcgatctcctgacct

SEQ ID NO: 39543 - DNA, 20 bp, synthetic construct
  source 1..20: mol_type = other DNA
atggtctcgatctcctgacc

SEQ ID NO: 39544 - DNA, 20 bp, synthetic construct
  source 1..20: mol_type = other DNA
gatggtctcgatctcctgac

SEQ ID NO: 39545 - DNA, 20 bp, synthetic construct
  source 1..20: mol_type = other DNA
ggatggtctcgatctcctga

SEQ ID NO: 39546 - DNA, 20 bp, synthetic construct
  source 1..20: mol_type = other DNA
aggatggtctcgatctcctg

SEQ ID NO: 39547 - DNA, 20 bp, synthetic construct
  source 1..20: mol_type = other DNA
caggatggtctcgatctcct

SEQ ID NO: 39548 - DNA, 20 bp, synthetic construct
  source 1..20: mol_type = other DNA
ccaggatggtctcgatctcc

SEQ ID NO: 39549 - DNA, 20 bp, synthetic construct
  source 1..20: mol_type = other DNA
gccaggatggtctcgatctc

SEQ ID NO: 39550 - DNA, 20 bp, synthetic construct
  source 1..20: mol_type = other DNA
agccaggatggtctcgatct

SEQ ID NO: 39551 - DNA, 20 bp, synthetic construct
  source 1..20: mol_type = other DNA
tagccaggatggtctcgatc

SEQ ID NO: 39552 - DNA, 20 bp, synthetic construct
  source 1..20: mol_type = other DNA
ttagccaggatggtctcgat

SEQ ID NO: 39553 - DNA, 20 bp, synthetic construct
  source 1..20: mol_type = other DNA
gttagccaggatggtctcga

SEQ ID NO: 39554 - DNA, 20 bp, synthetic construct
  source 1..20: mol_type = other DNA
tgttagccaggatggtctcg

SEQ ID NO: 39555 - DNA, 20 bp, synthetic construct
  source 1..20: mol_type = other DNA
atgttagccaggatggtctc

SEQ ID NO: 39556 - DNA, 20 bp, synthetic construct
  source 1..20: mol_type = other DNA
catgttagccaggatggtct

SEQ ID NO: 39557 - DNA, 20 bp, synthetic construct
  source 1..20: mol_type = other DNA
ccatgttagccaggatggtc

SEQ ID NO: 39558 - DNA, 20 bp, synthetic construct
  source 1..20: mol_type = other DNA
accatgttagccaggatggt

SEQ ID NO: 39559 - DNA, 20 bp, synthetic construct
  source 1..20: mol_type = other DNA
caccatgttagccaggatgg

SEQ ID NO: 39560 - DNA, 20 bp, synthetic construct
  source 1..20: mol_type = other DNA
tcaccatgttagccaggatg

SEQ ID NO: 39561 - DNA, 20 bp, synthetic construct
  source 1..20: mol_type = other DNA
ttcaccatgttagccaggat

SEQ ID NO: 39562 - DNA, 20 bp, synthetic construct
  source 1..20: mol_type = other DNA
tttcaccatgttagccagga

SEQ ID NO: 39563 - DNA, 20 bp, synthetic construct
  source 1..20: mol_type = other DNA
gtttcaccatgttagccagg

SEQ ID NO: 39564 - DNA, 20 bp, synthetic construct
  source 1..20: mol_type = other DNA
ggtttcaccatgttagccag

SEQ ID NO: 39565 - DNA, 20 bp, synthetic construct
  source 1..20: mol_type = other DNA
gggtttcaccatgttagcca

SEQ ID NO: 39566 - DNA, 20 bp, synthetic construct
  source 1..20: mol_type = other DNA
agggtttcaccatgttagcc

SEQ ID NO: 39567 - DNA, 20 bp, synthetic construct
  source 1..20: mol_type = other DNA
cagggtttcaccatgttagc

SEQ ID NO: 39568 - DNA, 20 bp, synthetic construct
  source 1..20: mol_type = other DNA
acagggtttcaccatgttag

SEQ ID NO: 39569 - DNA, 20 bp, synthetic construct
  source 1..20: mol_type = other DNA
gacagggtttcaccatgtta

SEQ ID NO: 39570 - DNA, 20 bp, synthetic construct
  source 1..20: mol_type = other DNA
agacagggtttcaccatgtt

SEQ ID NO: 39571 - DNA, 20 bp, synthetic construct
  source 1..20: mol_type = other DNA
gagacagggtttcaccatgt

SEQ ID NO: 39572 - DNA, 20 bp, synthetic construct
  source 1..20: mol_type = other DNA
agagacagggtttcaccatg

SEQ ID NO: 39573 - DNA, 20 bp, synthetic construct
  source 1..20: mol_type = other DNA
tagagacagggtttcaccat

SEQ ID NO: 39574 - DNA, 20 bp, synthetic construct
  source 1..20: mol_type = other DNA
gtagagacagggtttcacca

SEQ ID NO: 39575 - DNA, 20 bp, synthetic construct
  source 1..20: mol_type = other DNA
agtagagacagggtttcacc

SEQ ID NO: 39576 - DNA, 20 bp, synthetic construct
  source 1..20: mol_type = other DNA
tagtagagacagggtttcac

SEQ ID NO: 39577 - DNA, 20 bp, synthetic construct
  source 1..20: mol_type = other DNA
ttagtagagacagggtttca

SEQ ID NO: 39578 - DNA, 20 bp, synthetic construct
  source 1..20: mol_type = other DNA
tttagtagagacagggtttc

SEQ ID NO: 39579 - DNA, 20 bp, synthetic construct
  source 1..20: mol_type = other DNA
ttttagtagagacagggttt

SEQ ID NO: 39580 - DNA, 20 bp, synthetic construct
  source 1..20: mol_type = other DNA
tttttagtagagacagggtt

SEQ ID NO: 39581 - DNA, 20 bp, synthetic construct
  source 1..20: mol_type = other DNA
atttttagtagagacagggt

SEQ ID NO: 39582 - DNA, 20 bp, synthetic construct
  source 1..20: mol_type = other DNA
tatttttagtagagacaggg

SEQ ID NO: 39583 - DNA, 20 bp, synthetic construct
  source 1..20: mol_type = other DNA
gtatttttagtagagacagg

SEQ ID NO: 39584 - DNA, 20 bp, synthetic construct
  source 1..20: mol_type = other DNA
tgtatttttagtagagacag

SEQ ID NO: 39585 - DNA, 20 bp, synthetic construct
  source 1..20: mol_type = other DNA
ttgtatttttagtagagaca

SEQ ID NO: 39586 - DNA, 20 bp, synthetic construct
  source 1..20: mol_type = other DNA
tttgtatttttagtagagac

SEQ ID NO: 39587 - DNA, 20 bp, synthetic construct
  source 1..20: mol_type = other DNA
ttttgtatttttagtagaga

SEQ ID NO: 39588 - DNA, 20 bp, synthetic construct
  source 1..20: mol_type = other DNA
tttttgtatttttagtagag

SEQ ID NO: 39589 - DNA, 20 bp, synthetic construct
  source 1..20: mol_type = other DNA
ttttttgtatttttagtaga

SEQ ID NO: 39590 - DNA, 20 bp, synthetic construct
  source 1..20: mol_type = other DNA
attttttgtatttttagtag

SEQ ID NO: 39591 - DNA, 20 bp, synthetic construct
  source 1..20: mol_type = other DNA
aattttttgtatttttagta

SEQ ID NO: 39592 - DNA, 20 bp, synthetic construct
  source 1..20: mol_type = other DNA
taattttttgtatttttagt

SEQ ID NO: 39593 - DNA, 20 bp, synthetic construct
  source 1..20: mol_type = other DNA
ttaattttttgtatttttag

SEQ ID NO: 39594 - DNA, 20 bp, synthetic construct
  source 1..20: mol_type = other DNA
gttaattttttgtattttta

SEQ ID NO: 39595 - DNA, 20 bp, synthetic construct
  source 1..20: mol_type = other DNA
agttaattttttgtattttt

SEQ ID NO: 39596 - DNA, 20 bp, synthetic construct
  source 1..20: mol_type = other DNA
cagttaattttttgtatttt

SEQ ID NO: 39597 - DNA, 20 bp, synthetic construct
  source 1..20: mol_type = other DNA
ccagttaattttttgtattt

SEQ ID NO: 39598 - DNA, 20 bp, synthetic construct
  source 1..20: mol_type = other DNA
cccagttaattttttgtatt

SEQ ID NO: 39599 - DNA, 20 bp, synthetic construct
  source 1..20: mol_type = other DNA
gcccagttaattttttgtat

SEQ ID NO: 39600 - DNA, 20 bp, synthetic construct
  source 1..20: mol_type = other DNA
tgcccagttaattttttgta

SEQ ID NO: 39601 - DNA, 20 bp, synthetic construct
  source 1..20: mol_type = other DNA
atgcccagttaattttttgt

SEQ ID NO: 39602 - DNA, 20 bp, synthetic construct
  source 1..20: mol_type = other DNA
catgcccagttaattttttg

SEQ ID NO: 39603 - DNA, 20 bp, synthetic construct
  source 1..20: mol_type = other DNA
ccatgcccagttaatttttt

SEQ ID NO: 39604 - DNA, 20 bp, synthetic construct
  source 1..20: mol_type = other DNA
accatgcccagttaattttt

SEQ ID NO: 39605 - DNA, 20 bp, synthetic construct
  source 1..20: mol_type = other DNA
caccatgcccagttaatttt

SEQ ID NO: 39606 - DNA, 20 bp, synthetic construct
  source 1..20: mol_type = other DNA
ccaccatgcccagttaattt

SEQ ID NO: 39607 - DNA, 20 bp, synthetic construct
  source 1..20: mol_type = other DNA
gccaccatgcccagttaatt

SEQ ID NO: 39608 - DNA, 20 bp, synthetic construct
  source 1..20: mol_type = other DNA
tgccaccatgcccagttaat

SEQ ID NO: 39609 - DNA, 20 bp, synthetic construct
  source 1..20: mol_type = other DNA
gtgccaccatgcccagttaa

SEQ ID NO: 39610 - DNA, 20 bp, synthetic construct
  source 1..20: mol_type = other DNA
tgtgccaccatgcccagtta

SEQ ID NO: 39611 - DNA, 20 bp, synthetic construct
  source 1..20: mol_type = other DNA
gtgtgccaccatgcccagtt

SEQ ID NO: 39612 - DNA, 20 bp, synthetic construct
  source 1..20: mol_type = other DNA
cgtgtgccaccatgcccagt

SEQ ID NO: 39613 - DNA, 20 bp, synthetic construct
  source 1..20: mol_type = other DNA
gcgtgtgccaccatgcccag

SEQ ID NO: 39614 - DNA, 20 bp, synthetic construct
  source 1..20: mol_type = other DNA
ggcgtgtgccaccatgccca

SEQ ID NO: 39615 - DNA, 20 bp, synthetic construct
  source 1..20: mol_type = other DNA
aggcgtgtgccaccatgccc

SEQ ID NO: 39616 - DNA, 20 bp, synthetic construct
  source 1..20: mol_type = other DNA
caggcgtgtgccaccatgcc

SEQ ID NO: 39617 - DNA, 20 bp, synthetic construct
  source 1..20: mol_type = other DNA
acaggcgtgtgccaccatgc

SEQ ID NO: 39618 - DNA, 20 bp, synthetic construct
  source 1..20: mol_type = other DNA
tacaggcgtgtgccaccatg

SEQ ID NO: 39619 - DNA, 20 bp, synthetic construct
  source 1..20: mol_type = other DNA
ctacaggcgtgtgccaccat

SEQ ID NO: 39620 - DNA, 20 bp, synthetic construct
  source 1..20: mol_type = other DNA
actacaggcgtgtgccacca

SEQ ID NO: 39621 - DNA, 20 bp, synthetic construct
  source 1..20: mol_type = other DNA
gactacaggcgtgtgccacc

SEQ ID NO: 39622 - DNA, 20 bp, synthetic construct
  source 1..20: mol_type = other DNA
ggactacaggcgtgtgccac

SEQ ID NO: 39623 - DNA, 20 bp, synthetic construct
  source 1..20: mol_type = other DNA
gggactacaggcgtgtgcca

SEQ ID NO: 39624 - DNA, 20 bp, synthetic construct
  source 1..20: mol_type = other DNA
tgggactacaggcgtgtgcc

SEQ ID NO: 39625 - DNA, 20 bp, synthetic construct
  source 1..20: mol_type = other DNA
ctgggactacaggcgtgtgc

SEQ ID NO: 39626 - DNA, 20 bp, synthetic construct
  source 1..20: mol_type = other DNA
gctgggactacaggcgtgtg

SEQ ID NO: 39627 - DNA, 20 bp, synthetic construct
  source 1..20: mol_type = other DNA
agctgggactacaggcgtgt

SEQ ID NO: 39628 - DNA, 20 bp, synthetic construct
  source 1..20: mol_type = other DNA
tagctgggactacaggcgtg

SEQ ID NO: 39629 - DNA, 20 bp, synthetic construct
  source 1..20: mol_type = other DNA
gtagctgggactacaggcgt

SEQ ID NO: 39630 - DNA, 20 bp, synthetic construct
  source 1..20: mol_type = other DNA
agtagctgggactacaggcg

SEQ ID NO: 39631 - DNA, 20 bp, synthetic construct
  source 1..20: mol_type = other DNA
gagtagctgggactacaggc

SEQ ID NO: 39632 - DNA, 20 bp, synthetic construct
  source 1..20: mol_type = other DNA
cgagtagctgggactacagg

SEQ ID NO: 39633 - DNA, 20 bp, synthetic construct
  source 1..20: mol_type = other DNA
ccgagtagctgggactacag

SEQ ID NO: 39634 - DNA, 20 bp, synthetic construct
  source 1..20: mol_type = other DNA
cccgagtagctgggactaca

SEQ ID NO: 39635 - DNA, 20 bp, synthetic construct
  source 1..20: mol_type = other DNA
tcccgagtagctgggactac

SEQ ID NO: 39636 - DNA, 20 bp, synthetic construct
  source 1..20: mol_type = other DNA
ctcccgagtagctgggacta

SEQ ID NO: 39637 - DNA, 20 bp, synthetic construct
  source 1..20: mol_type = other DNA
cctcccgagtagctgggact

SEQ ID NO: 39638 - DNA, 20 bp, synthetic construct
  source 1..20: mol_type = other DNA
gcctcccgagtagctgggac

SEQ ID NO: 39639 - DNA, 20 bp, synthetic construct
  source 1..20: mol_type = other DNA
agcctcccgagtagctggga

SEQ ID NO: 39640 - DNA, 20 bp, synthetic construct
  source 1..20: mol_type = other DNA
cagcctcccgagtagctggg

SEQ ID NO: 39641 - DNA, 20 bp, synthetic construct
  source 1..20: mol_type = other DNA
tcagcctcccgagtagctgg

SEQ ID NO: 39642 - DNA, 20 bp, synthetic construct
  source 1..20: mol_type = other DNA
ctcagcctcccgagtagctg

SEQ ID NO: 39643 - DNA, 20 bp, synthetic construct
  source 1..20: mol_type = other DNA
cctcagcctcccgagtagct

SEQ ID NO: 39644 - DNA, 20 bp, synthetic construct
  source 1..20: mol_type = other DNA
gcctcagcctcccgagtagc

SEQ ID NO: 39645 - DNA, 20 bp, synthetic construct
  source 1..20: mol_type = other DNA
tgcctcagcctcccgagtag

SEQ ID NO: 39646 - DNA, 20 bp, synthetic construct
  source 1..20: mol_type = other DNA
ctgcctcagcctcccgagta

SEQ ID NO: 39647 - DNA, 20 bp, synthetic construct
  source 1..20: mol_type = other DNA
cctgcctcagcctcccgagt

SEQ ID NO: 39648 - DNA, 20 bp, synthetic construct
  source 1..20: mol_type = other DNA
tcctgcctcagcctcccgag

SEQ ID NO: 39649 - DNA, 20 bp, synthetic construct
  source 1..20: mol_type = other DNA
ctcctgcctcagcctcccga

SEQ ID NO: 39650 - DNA, 20 bp, synthetic construct
  source 1..20: mol_type = other DNA
tctcctgcctcagcctcccg

SEQ ID NO: 39651 - DNA, 20 bp, synthetic construct
  source 1..20: mol_type = other DNA
ttctcctgcctcagcctccc

SEQ ID NO: 39652 - DNA, 20 bp, synthetic construct
  source 1..20: mol_type = other DNA
attctcctgcctcagcctcc

SEQ ID NO: 39653 - DNA, 20 bp, synthetic construct
  source 1..20: mol_type = other DNA
aattctcctgcctcagcctc

SEQ ID NO: 39654 - DNA, 20 bp, synthetic construct
  source 1..20: mol_type = other DNA
caattctcctgcctcagcct

SEQ ID NO: 39655 - DNA, 20 bp, synthetic construct
  source 1..20: mol_type = other DNA
gcaattctcctgcctcagcc

SEQ ID NO: 39656 - DNA, 20 bp, synthetic construct
  source 1..20: mol_type = other DNA
agcaattctcctgcctcagc

SEQ ID NO: 39657 - DNA, 20 bp, synthetic construct
  source 1..20: mol_type = other DNA
aagcaattctcctgcctcag

SEQ ID NO: 39658 - DNA, 20 bp, synthetic construct
  source 1..20: mol_type = other DNA
caagcaattctcctgcctca

SEQ ID NO: 39659 - DNA, 20 bp, synthetic construct
  source 1..20: mol_type = other DNA
tcaagcaattctcctgcctc

SEQ ID NO: 39660 - DNA, 20 bp, synthetic construct
  source 1..20: mol_type = other DNA
ttcaagcaattctcctgcct

SEQ ID NO: 39661 - DNA, 20 bp, synthetic construct
  source 1..20: mol_type = other DNA
gttcaagcaattctcctgcc

SEQ ID NO: 39662 - DNA, 20 bp, synthetic construct
  source 1..20: mol_type = other DNA
ggttcaagcaattctcctgc

SEQ ID NO: 39663 - DNA, 20 bp, synthetic construct
  source 1..20: mol_type = other DNA
gggttcaagcaattctcctg

SEQ ID NO: 39664 - DNA, 20 bp, synthetic construct
  source 1..20: mol_type = other DNA
tgggttcaagcaattctcct

SEQ ID NO: 39665 - DNA, 20 bp, synthetic construct
  source 1..20: mol_type = other DNA
ctgggttcaagcaattctcc

SEQ ID NO: 39666 - DNA, 20 bp, synthetic construct
  source 1..20: mol_type = other DNA
cctgggttcaagcaattctc

SEQ ID NO: 39667 - DNA, 20 bp, synthetic construct
  source 1..20: mol_type = other DNA
tcctgggttcaagcaattct

SEQ ID NO: 39668 - DNA, 20 bp, synthetic construct
  source 1..20: mol_type = other DNA
ctcctgggttcaagcaattc

SEQ ID NO: 39669 - DNA, 20 bp, synthetic construct
  source 1..20: mol_type = other DNA
cctcctgggttcaagcaatt

SEQ ID NO: 39670 - DNA, 20 bp, synthetic construct
  source 1..20: mol_type = other DNA
acctcctgggttcaagcaat

SEQ ID NO: 39671 - DNA, 20 bp, synthetic construct
  source 1..20: mol_type = other DNA
cacctcctgggttcaagcaa

SEQ ID NO: 39672 - DNA, 20 bp, synthetic construct
  source 1..20: mol_type = other DNA
ccacctcctgggttcaagca

SEQ ID NO: 39673 - DNA, 20 bp, synthetic construct
  source 1..20: mol_type = other DNA
tccacctcctgggttcaagc

SEQ ID NO: 39674 - DNA, 20 bp, synthetic construct
  source 1..20: mol_type = other DNA
ctccacctcctgggttcaag

SEQ ID NO: 39675 - DNA, 20 bp, synthetic construct
  source 1..20: mol_type = other DNA
cctccacctcctgggttcaa

SEQ ID NO: 39676 - DNA, 20 bp, synthetic construct
  source 1..20: mol_type = other DNA
acctccacctcctgggttca

SEQ ID NO: 39677 - DNA, 20 bp, synthetic construct
  source 1..20: mol_type = other DNA
aacctccacctcctgggttc

SEQ ID NO: 39678 - DNA, 20 bp, synthetic construct
  source 1..20: mol_type = other DNA
caacctccacctcctgggtt

SEQ ID NO: 39679 - DNA, 20 bp, synthetic construct
  source 1..20: mol_type = other DNA
gcaacctccacctcctgggt

SEQ ID NO: 39680 - DNA, 20 bp, synthetic construct
  source 1..20: mol_type = other DNA
tgcaacctccacctcctggg

SEQ ID NO: 39681 - DNA, 20 bp, synthetic construct
  source 1..20: mol_type = other DNA
ctgcaacctccacctcctgg

SEQ ID NO: 39682 - DNA, 20 bp, synthetic construct
  source 1..20: mol_type = other DNA
actgcaacctccacctcctg

SEQ ID NO: 39683 - DNA, 20 bp, synthetic construct
  source 1..20: mol_type = other DNA
cactgcaacctccacctcct

SEQ ID NO: 39684 - DNA, 20 bp, synthetic construct
  source 1..20: mol_type = other DNA
tcactgcaacctccacctcc

SEQ ID NO: 39685 - DNA, 20 bp, synthetic construct
  source 1..20: mol_type = other DNA
ctcactgcaacctccacctc

SEQ ID NO: 39686 - DNA, 20 bp, synthetic construct
  source 1..20: mol_type = other DNA
actcactgcaacctccacct

SEQ ID NO: 39687 - DNA, 20 bp, synthetic construct
  source 1..20: mol_type = other DNA
gactcactgcaacctccacc

SEQ ID NO: 39688 - DNA, 20 bp, synthetic construct
  source 1..20: mol_type = other DNA
tgactcactgcaacctccac

SEQ ID NO: 39689 - DNA, 20 bp, synthetic construct
  source 1..20: mol_type = other DNA
ttgactcactgcaacctcca

SEQ ID NO: 39690 - DNA, 20 bp, synthetic construct
  source 1..20: mol_type = other DNA
cttgactcactgcaacctcc

SEQ ID NO: 39691 - DNA, 20 bp, synthetic construct
  source 1..20: mol_type = other DNA
tcttgactcactgcaacctc

SEQ ID NO: 39692 - DNA, 20 bp, synthetic construct
  source 1..20: mol_type = other DNA
atcttgactcactgcaacct

SEQ ID NO: 39693 - DNA, 20 bp, synthetic construct
  source 1..20: mol_type = other DNA
gatcttgactcactgcaacc

SEQ ID NO: 39694 - DNA, 20 bp, synthetic construct
  source 1..20: mol_type = other DNA
tgatcttgactcactgcaac

SEQ ID NO: 39695 - DNA, 20 bp, synthetic construct
  source 1..20: mol_type = other DNA
atgatcttgactcactgcaa

SEQ ID NO: 39696 - DNA, 20 bp, synthetic construct
  source 1..20: mol_type = other DNA
catgatcttgactcactgca

SEQ ID NO: 39697 - DNA, 20 bp, synthetic construct
  source 1..20: mol_type = other DNA
gcatgatcttgactcactgc

SEQ ID NO: 39698 - DNA, 20 bp, synthetic construct
  source 1..20: mol_type = other DNA
ggcatgatcttgactcactg

SEQ ID NO: 39699 - DNA, 20 bp, synthetic construct
  source 1..20: mol_type = other DNA
tggcatgatcttgactcact

SEQ ID NO: 39700 - DNA, 20 bp, synthetic construct
  source 1..20: mol_type = other DNA
gtggcatgatcttgactcac

SEQ ID NO: 39701 - DNA, 20 bp, synthetic construct
  source 1..20: mol_type = other DNA
agtggcatgatcttgactca

SEQ ID NO: 39702 - DNA, 20 bp, synthetic construct
  source 1..20: mol_type = other DNA
cagtggcatgatcttgactc

SEQ ID NO: 39703 - DNA, 20 bp, synthetic construct
  source 1..20: mol_type = other DNA
gcagtggcatgatcttgact

SEQ ID NO: 39704 - DNA, 20 bp, synthetic construct
  source 1..20: mol_type = other DNA
tgcagtggcatgatcttgac

SEQ ID NO: 39705 - DNA, 20 bp, synthetic construct
  source 1..20: mol_type = other DNA
gtgcagtggcatgatcttga

SEQ ID NO: 39706 - DNA, 20 bp, synthetic construct
  source 1..20: mol_type = other DNA
agtgcagtggcatgatcttg

SEQ ID NO: 39707 - DNA, 20 bp, synthetic construct
  source 1..20: mol_type = other DNA
gagtgcagtggcatgatctt

SEQ ID NO: 39708 - DNA, 20 bp, synthetic construct
  source 1..20: mol_type = other DNA
ggagtgcagtggcatgatct

SEQ ID NO: 39709 - DNA, 20 bp, synthetic construct
  source 1..20: mol_type = other DNA
tggagtgcagtggcatgatc

SEQ ID NO: 39710 - DNA, 20 bp, synthetic construct
  source 1..20: mol_type = other DNA
ctggagtgcagtggcatgat

SEQ ID NO: 39711 - DNA, 20 bp, synthetic construct
  source 1..20: mol_type = other DNA
gctggagtgcagtggcatga

SEQ ID NO: 39712 - DNA, 20 bp, synthetic construct
  source 1..20: mol_type = other DNA
ggctggagtgcagtggcatg

SEQ ID NO: 39713 - DNA, 20 bp, synthetic construct
  source 1..20: mol_type = other DNA
aggctggagtgcagtggcat

SEQ ID NO: 39714 - DNA, 20 bp, synthetic construct
  source 1..20: mol_type = other DNA
caggctggagtgcagtggca

SEQ ID NO: 39715 - DNA, 20 bp, synthetic construct
  source 1..20: mol_type = other DNA
tcaggctggagtgcagtggc

SEQ ID NO: 39716 - DNA, 20 bp, synthetic construct
  source 1..20: mol_type = other DNA
ctcaggctggagtgcagtgg

SEQ ID NO: 39717 - DNA, 20 bp, synthetic construct
  source 1..20: mol_type = other DNA
gctcaggctggagtgcagtg

SEQ ID NO: 39718 - DNA, 20 bp, synthetic construct
  source 1..20: mol_type = other DNA
cgctcaggctggagtgcagt

SEQ ID NO: 39719 - DNA, 20 bp, synthetic construct
  source 1..20: mol_type = other DNA
tcgctcaggctggagtgcag

SEQ ID NO: 39720 - DNA, 20 bp, synthetic construct
  source 1..20: mol_type = other DNA
gtcgctcaggctggagtgca

SEQ ID NO: 39721 - DNA, 20 bp, synthetic construct
  source 1..20: mol_type = other DNA
tgtcgctcaggctggagtgc

SEQ ID NO: 39722 - DNA, 20 bp, synthetic construct
  source 1..20: mol_type = other DNA
ctgtcgctcaggctggagtg

SEQ ID NO: 39723 - DNA, 20 bp, synthetic construct
  source 1..20: mol_type = other DNA
tctgtcgctcaggctggagt

SEQ ID NO: 39724 - DNA, 20 bp, synthetic construct
  source 1..20: mol_type = other DNA
ctctgtcgctcaggctggag

SEQ ID NO: 39725 - DNA, 20 bp, synthetic construct
  source 1..20: mol_type = other DNA
cctctgtcgctcaggctgga

SEQ ID NO: 39726 - DNA, 20 bp, synthetic construct
  source 1..20: mol_type = other DNA
acctctgtcgctcaggctgg

SEQ ID NO: 39727 - DNA, 20 bp, synthetic construct
  source 1..20: mol_type = other DNA
tacctctgtcgctcaggctg

SEQ ID NO: 39728 - DNA, 20 bp, synthetic construct
  source 1..20: mol_type = other DNA
ctacctctgtcgctcaggct

SEQ ID NO: 39729 - DNA, 20 bp, synthetic construct
  source 1..20: mol_type = other DNA
tctacctctgtcgctcaggc

SEQ ID NO: 39730 - DNA, 20 bp, synthetic construct
  source 1..20: mol_type = other DNA
gtctacctctgtcgctcagg

SEQ ID NO: 39731 - DNA, 20 bp, synthetic construct
  source 1..20: mol_type = other DNA
agtctacctctgtcgctcag

SEQ ID NO: 39732 - DNA, 20 bp, synthetic construct
  source 1..20: mol_type = other DNA
gagtctacctctgtcgctca

SEQ ID NO: 39733 - DNA, 20 bp, synthetic construct
  source 1..20: mol_type = other DNA
agagtctacctctgtcgctc

SEQ ID NO: 39734 - DNA, 20 bp, synthetic construct
  source 1..20: mol_type = other DNA
cagagtctacctctgtcgct

SEQ ID NO: 39735 - DNA, 20 bp, synthetic construct
  source 1..20: mol_type = other DNA
acagagtctacctctgtcgc

SEQ ID NO: 39736 - DNA, 20 bp, synthetic construct
  source 1..20: mol_type = other DNA
gacagagtctacctctgtcg

SEQ ID NO: 39737 - DNA, 20 bp, synthetic construct
  source 1..20: mol_type = other DNA
agacagagtctacctctgtc

SEQ ID NO: 39738 - DNA, 20 bp, synthetic construct
  source 1..20: mol_type = other DNA
gagacagagtctacctctgt

SEQ ID NO: 39739 - DNA, 20 bp, synthetic construct
  source 1..20: mol_type = other DNA
tgagacagagtctacctctg

SEQ ID NO: 39740 - DNA, 20 bp, synthetic construct
  source 1..20: mol_type = other DNA
ttgagacagagtctacctct

SEQ ID NO: 39741 - DNA, 20 bp, synthetic construct
  source 1..20: mol_type = other DNA
tttgagacagagtctacctc

SEQ ID NO: 39742 - DNA, 20 bp, synthetic construct
  source 1..20: mol_type = other DNA
ttttgagacagagtctacct

SEQ ID NO: 39743 - DNA, 20 bp, synthetic construct
  source 1..20: mol_type = other DNA
tttttgagacagagtctacc

SEQ ID NO: 39744 - DNA, 20 bp, synthetic construct
  source 1..20: mol_type = other DNA
ttttttgagacagagtctac

SEQ ID NO: 39745 - DNA, 20 bp, synthetic construct
  source 1..20: mol_type = other DNA
tttttttgagacagagtcta

SEQ ID NO: 39746 - DNA, 20 bp, synthetic construct
  source 1..20: mol_type = other DNA
ttttttttgagacagagtct

SEQ ID NO: 39747 - DNA, 20 bp, synthetic construct
  source 1..20: mol_type = other DNA
gttttttttgagacagagtc

SEQ ID NO: 39748 - DNA, 20 bp, synthetic construct
  source 1..20: mol_type = other DNA
tgttttttttgagacagagt

SEQ ID NO: 39749 - DNA, 20 bp, synthetic construct
  source 1..20: mol_type = other DNA
ctgttttttttgagacagag

SEQ ID NO: 39750 - DNA, 20 bp, synthetic construct
  source 1..20: mol_type = other DNA
tctgttttttttgagacaga

SEQ ID NO: 39751 - DNA, 20 bp, synthetic construct
  source 1..20: mol_type = other DNA
ttctgttttttttgagacag

SEQ ID NO: 39752 - DNA, 20 bp, synthetic construct
  source 1..20: mol_type = other DNA
tttctgttttttttgagaca

SEQ ID NO: 39753 - DNA, 20 bp, synthetic construct
  source 1..20: mol_type = other DNA
ctttctgttttttttgagac

SEQ ID NO: 39754 - DNA, 20 bp, synthetic construct
  source 1..20: mol_type = other DNA
tctttctgttttttttgaga

SEQ ID NO: 39755 - DNA, 20 bp, synthetic construct
  source 1..20: mol_type = other DNA
gtctttctgttttttttgag

SEQ ID NO: 39756 - DNA, 20 bp, synthetic construct
  source 1..20: mol_type = other DNA
cgtctttctgttttttttga

SEQ ID NO: 39757 - DNA, 20 bp, synthetic construct
  source 1..20: mol_type = other DNA
ccgtctttctgttttttttg

SEQ ID NO: 39758 - DNA, 20 bp, synthetic construct
  source 1..20: mol_type = other DNA
tccgtctttctgtttttttt

SEQ ID NO: 39759 - DNA, 20 bp, synthetic construct
  source 1..20: mol_type = other DNA
ctccgtctttctgttttttt

SEQ ID NO: 39760 - DNA, 20 bp, synthetic construct
  source 1..20: mol_type = other DNA
actccgtctttctgtttttt

SEQ ID NO: 39761 - DNA, 20 bp, synthetic construct
  source 1..20: mol_type = other DNA
gactccgtctttctgttttt

SEQ ID NO: 39762 - DNA, 20 bp, synthetic construct
  source 1..20: mol_type = other DNA
agactccgtctttctgtttt

SEQ ID NO: 39763 - DNA, 20 bp, synthetic construct
  source 1..20: mol_type = other DNA
aagactccgtctttctgttt

SEQ ID NO: 39764 - DNA, 20 bp, synthetic construct
  source 1..20: mol_type = other DNA
caagactccgtctttctgtt

SEQ ID NO: 39765 - DNA, 20 bp, synthetic construct
  source 1..20: mol_type = other DNA
gcaagactccgtctttctgt

SEQ ID NO: 39766 - DNA, 20 bp, synthetic construct
  source 1..20: mol_type = other DNA
agcaagactccgtctttctg

SEQ ID NO: 39767 - DNA, 20 bp, synthetic construct
  source 1..20: mol_type = other DNA
gagcaagactccgtctttct

SEQ ID NO: 39768 - DNA, 20 bp, synthetic construct
  source 1..20: mol_type = other DNA
agagcaagactccgtctttc

SEQ ID NO: 39769 - DNA, 20 bp, synthetic construct
  source 1..20: mol_type = other DNA
cagagcaagactccgtcttt

SEQ ID NO: 39770 - DNA, 20 bp, synthetic construct
  source 1..20: mol_type = other DNA
acagagcaagactccgtctt

SEQ ID NO: 39771 - DNA, 20 bp, synthetic construct
  source 1..20: mol_type = other DNA
gacagagcaagactccgtct

SEQ ID NO: 39772 - DNA, 20 bp, synthetic construct
  source 1..20: mol_type = other DNA
tgacagagcaagactccgtc

SEQ ID NO: 39773 - DNA, 20 bp, synthetic construct
  source 1..20: mol_type = other DNA
gtgacagagcaagactccgt

SEQ ID NO: 39774 - DNA, 20 bp, synthetic construct
  source 1..20: mol_type = other DNA
ggtgacagagcaagactccg

SEQ ID NO: 39775 - DNA, 20 bp, synthetic construct
  source 1..20: mol_type = other DNA
gggtgacagagcaagactcc

SEQ ID NO: 39776 - DNA, 20 bp, synthetic construct
  source 1..20: mol_type = other DNA
tgggtgacagagcaagactc

SEQ ID NO: 39777 - DNA, 20 bp, synthetic construct
  source 1..20: mol_type = other DNA
ctgggtgacagagcaagact

SEQ ID NO: 39778 - DNA, 20 bp, synthetic construct
  source 1..20: mol_type = other DNA
cctgggtgacagagcaagac

SEQ ID NO: 39779 - DNA, 20 bp, synthetic construct
  source 1..20: mol_type = other DNA
gcctgggtgacagagcaaga

SEQ ID NO: 39780 - DNA, 20 bp, synthetic construct
  source 1..20: mol_type = other DNA
agcctgggtgacagagcaag

SEQ ID NO: 39781 - DNA, 20 bp, synthetic construct
  source 1..20: mol_type = other DNA
cagcctgggtgacagagcaa

SEQ ID NO: 39782 - DNA, 20 bp, synthetic construct
  source 1..20: mol_type = other DNA
gcagcctgggtgacagagca

SEQ ID NO: 39783 - DNA, 20 bp, synthetic construct
  source 1..20: mol_type = other DNA
tgcagcctgggtgacagagc

SEQ ID NO: 39784 - DNA, 20 bp, synthetic construct
  source 1..20: mol_type = other DNA
atgcagcctgggtgacagag

SEQ ID NO: 39785 - DNA, 20 bp, synthetic construct
  source 1..20: mol_type = other DNA
aatgcagcctgggtgacaga

SEQ ID NO: 39786 - DNA, 20 bp, synthetic construct
  source 1..20: mol_type = other DNA
caatgcagcctgggtgacag

SEQ ID NO: 39787 - DNA, 20 bp, synthetic construct
  source 1..20: mol_type = other DNA
gcaatgcagcctgggtgaca

SEQ ID NO: 39788 - DNA, 20 bp, synthetic construct
  source 1..20: mol_type = other DNA
tgcaatgcagcctgggtgac

SEQ ID NO: 39789 - DNA, 20 bp, synthetic construct
  source 1..20: mol_type = other DNA
ctgcaatgcagcctgggtga

SEQ ID NO: 39790 - DNA, 20 bp, synthetic construct
  source 1..20: mol_type = other DNA
actgcaatgcagcctgggtg

SEQ ID NO: 39791 - DNA, 20 bp, synthetic construct
  source 1..20: mol_type = other DNA
cactgcaatgcagcctgggt

SEQ ID NO: 39792 - DNA, 20 bp, synthetic construct
  source 1..20: mol_type = other DNA
ccactgcaatgcagcctggg

SEQ ID NO: 39793 - DNA, 20 bp, synthetic construct
  source 1..20: mol_type = other DNA
gccactgcaatgcagcctgg

SEQ ID NO: 39794 - DNA, 20 bp, synthetic construct
  source 1..20: mol_type = other DNA
tgccactgcaatgcagcctg

SEQ ID NO: 39795 - DNA, 20 bp, synthetic construct
  source 1..20: mol_type = other DNA
atgccactgcaatgcagcct

SEQ ID NO: 39796 - DNA, 20 bp, synthetic construct
  source 1..20: mol_type = other DNA
catgccactgcaatgcagcc

SEQ ID NO: 39797 - DNA, 20 bp, synthetic construct
  source 1..20: mol_type = other DNA
tcatgccactgcaatgcagc

SEQ ID NO: 39798 - DNA, 20 bp, synthetic construct
  source 1..20: mol_type = other DNA
ttcatgccactgcaatgcag

SEQ ID NO: 39799 - DNA, 20 bp, synthetic construct
  source 1..20: mol_type = other DNA
gttcatgccactgcaatgca

SEQ ID NO: 39800 - DNA, 20 bp, synthetic construct
  source 1..20: mol_type = other DNA
agttcatgccactgcaatgc

SEQ ID NO: 39801 - DNA, 20 bp, synthetic construct
  source 1..20: mol_type = other DNA
gagttcatgccactgcaatg

SEQ ID NO: 39802 - DNA, 20 bp, synthetic construct
  source 1..20: mol_type = other DNA
ggagttcatgccactgcaat

SEQ ID NO: 39803 - DNA, 20 bp, synthetic construct
  source 1..20: mol_type = other DNA
cggagttcatgccactgcaa

SEQ ID NO: 39804 - DNA, 20 bp, synthetic construct
  source 1..20: mol_type = other DNA
gcggagttcatgccactgca

SEQ ID NO: 39805 - DNA, 20 bp, synthetic construct
  source 1..20: mol_type = other DNA
ggcggagttcatgccactgc

SEQ ID NO: 39806 - DNA, 20 bp, synthetic construct
  source 1..20: mol_type = other DNA
aggcggagttcatgccactg

SEQ ID NO: 39807 - DNA, 20 bp, synthetic construct
  source 1..20: mol_type = other DNA
gaggcggagttcatgccact

SEQ ID NO: 39808 - DNA, 20 bp, synthetic construct
  source 1..20: mol_type = other DNA
ggaggcggagttcatgccac

SEQ ID NO: 39809 - DNA, 20 bp, synthetic construct
  source 1..20: mol_type = other DNA
aggaggcggagttcatgcca

SEQ ID NO: 39810 - DNA, 20 bp, synthetic construct
  source 1..20: mol_type = other DNA
caggaggcggagttcatgcc

SEQ ID NO: 39811 - DNA, 20 bp, synthetic construct
  source 1..20: mol_type = other DNA
tcaggaggcggagttcatgc

SEQ ID NO: 39812 - DNA, 20 bp, synthetic construct
  source 1..20: mol_type = other DNA
ctcaggaggcggagttcatg

SEQ ID NO: 39813 - DNA, 20 bp, synthetic construct
  source 1..20: mol_type = other DNA
actcaggaggcggagttcat

SEQ ID NO: 39814 - DNA, 20 bp, synthetic construct
  source 1..20: mol_type = other DNA
aactcaggaggcggagttca

SEQ ID NO: 39815 - DNA, 20 bp, synthetic construct
  source 1..20: mol_type = other DNA
gaactcaggaggcggagttc

SEQ ID NO: 39816 - DNA, 20 bp, synthetic construct
  source 1..20: mol_type = other DNA
tgaactcaggaggcggagtt

SEQ ID NO: 39817 - DNA, 20 bp, synthetic construct
  source 1..20: mol_type = other DNA
ttgaactcaggaggcggagt

SEQ ID NO: 39818 - DNA, 20 bp, synthetic construct
  source 1..20: mol_type = other DNA
cttgaactcaggaggcggag

SEQ ID NO: 39819 - DNA, 20 bp, synthetic construct
  source 1..20: mol_type = other DNA
gcttgaactcaggaggcgga

SEQ ID NO: 39820 - DNA, 20 bp, synthetic construct
  source 1..20: mol_type = other DNA
tgcttgaactcaggaggcgg

SEQ ID NO: 39821 - DNA, 20 bp, synthetic construct
  source 1..20: mol_type = other DNA
ttgcttgaactcaggaggcg

SEQ ID NO: 39822 - DNA, 20 bp, synthetic construct
  source 1..20: mol_type = other DNA
attgcttgaactcaggaggc

SEQ ID NO: 39823 - DNA, 20 bp, synthetic construct
  source 1..20: mol_type = other DNA
aattgcttgaactcaggagg

SEQ ID NO: 39824 - DNA, 20 bp, synthetic construct
  source 1..20: mol_type = other DNA
gaattgcttgaactcaggag

SEQ ID NO: 39825 - DNA, 20 bp, synthetic construct
  source 1..20: mol_type = other DNA
agaattgcttgaactcagga

SEQ ID NO: 39826 - DNA, 20 bp, synthetic construct
  source 1..20: mol_type = other DNA
aagaattgcttgaactcagg

SEQ ID NO: 39827 - DNA, 20 bp, synthetic construct
  source 1..20: mol_type = other DNA
caagaattgcttgaactcag

SEQ ID NO: 39828 - DNA, 20 bp, synthetic construct
  source 1..20: mol_type = other DNA
acaagaattgcttgaactca

SEQ ID NO: 39829 - DNA, 20 bp, synthetic construct
  source 1..20: mol_type = other DNA
cacaagaattgcttgaactc

SEQ ID NO: 39830 - DNA, 20 bp, synthetic construct
  source 1..20: mol_type = other DNA
gcacaagaattgcttgaact

SEQ ID NO: 39831 - DNA, 20 bp, synthetic construct
  source 1..20: mol_type = other DNA
ggcacaagaattgcttgaac

SEQ ID NO: 39832 - DNA, 20 bp, synthetic construct
  source 1..20: mol_type = other DNA
aggcacaagaattgcttgaa

SEQ ID NO: 39833 - DNA, 20 bp, synthetic construct
  source 1..20: mol_type = other DNA
gaggcacaagaattgcttga

SEQ ID NO: 39834 - DNA, 20 bp, synthetic construct
  source 1..20: mol_type = other DNA
tgaggcacaagaattgcttg

SEQ ID NO: 39835 - DNA, 20 bp, synthetic construct
  source 1..20: mol_type = other DNA
ctgaggcacaagaattgctt

SEQ ID NO: 39836 - DNA, 20 bp, synthetic construct
  source 1..20: mol_type = other DNA
gctgaggcacaagaattgct

SEQ ID NO: 39837 - DNA, 20 bp, synthetic construct
  source 1..20: mol_type = other DNA
ggctgaggcacaagaattgc

SEQ ID NO: 39838 - DNA, 20 bp, synthetic construct
  source 1..20: mol_type = other DNA
aggctgaggcacaagaattg

SEQ ID NO: 39839 - DNA, 20 bp, synthetic construct
  source 1..20: mol_type = other DNA
gaggctgaggcacaagaatt

SEQ ID NO: 39840 - DNA, 20 bp, synthetic construct
  source 1..20: mol_type = other DNA
ggaggctgaggcacaagaat

SEQ ID NO: 39841 - DNA, 20 bp, synthetic construct
  source 1..20: mol_type = other DNA
gggaggctgaggcacaagaa

SEQ ID NO: 39842 - DNA, 20 bp, synthetic construct
  source 1..20: mol_type = other DNA
tgggaggctgaggcacaaga

SEQ ID NO: 39843 - DNA, 20 bp, synthetic construct
  source 1..20: mol_type = other DNA
ttgggaggctgaggcacaag

SEQ ID NO: 39844 - DNA, 20 bp, synthetic construct
  source 1..20: mol_type = other DNA
cttgggaggctgaggcacaa

SEQ ID NO: 39845 - DNA, 20 bp, synthetic construct
  source 1..20: mol_type = other DNA
acttgggaggctgaggcaca

SEQ ID NO: 39846 - DNA, 20 bp, synthetic construct
  source 1..20: mol_type = other DNA
tacttgggaggctgaggcac

SEQ ID NO: 39847 - DNA, 20 bp, synthetic construct
  source 1..20: mol_type = other DNA
ctacttgggaggctgaggca

SEQ ID NO: 39848 - DNA, 20 bp, synthetic construct
  source 1..20: mol_type = other DNA
gctacttgggaggctgaggc

SEQ ID NO: 39849 - DNA, 20 bp, synthetic construct
  source 1..20: mol_type = other DNA
agctacttgggaggctgagg

SEQ ID NO: 39850 - DNA, 20 bp, synthetic construct
  source 1..20: mol_type = other DNA
cagctacttgggaggctgag

SEQ ID NO: 39851 - DNA, 20 bp, synthetic construct
  source 1..20: mol_type = other DNA
ccagctacttgggaggctga

SEQ ID NO: 39852 - DNA, 20 bp, synthetic construct
  source 1..20: mol_type = other DNA
cccagctacttgggaggctg

SEQ ID NO: 39853 - DNA, 20 bp, synthetic construct
  source 1..20: mol_type = other DNA
tcccagctacttgggaggct

SEQ ID NO: 39854 - DNA, 20 bp, synthetic construct
  source 1..20: mol_type = other DNA
atcccagctacttgggaggc

SEQ ID NO: 39855 - DNA, 20 bp, synthetic construct
  source 1..20: mol_type = other DNA
aatcccagctacttgggagg

SEQ ID NO: 39856 - DNA, 20 bp, synthetic construct
  source 1..20: mol_type = other DNA
taatcccagctacttgggag

SEQ ID NO: 39857 - DNA, 20 bp, synthetic construct
  source 1..20: mol_type = other DNA
gtaatcccagctacttggga

SEQ ID NO: 39858 - DNA, 20 bp, synthetic construct
  source 1..20: mol_type = other DNA
tgtaatcccagctacttggg

SEQ ID NO: 39859 - DNA, 20 bp, synthetic construct
  source 1..20: mol_type = other DNA
ctgtaatcccagctacttgg

SEQ ID NO: 39860 - DNA, 20 bp, synthetic construct
  source 1..20: mol_type = other DNA
tctgtaatcccagctacttg

SEQ ID NO: 39861 - DNA, 20 bp, synthetic construct
  source 1..20: mol_type = other DNA
gtctgtaatcccagctactt

SEQ ID NO: 39862 - DNA, 20 bp, synthetic construct
  source 1..20: mol_type = other DNA
tgtctgtaatcccagctact

SEQ ID NO: 39863 - DNA, 20 bp, synthetic construct
  source 1..20: mol_type = other DNA
atgtctgtaatcccagctac

SEQ ID NO: 39864 - DNA, 20 bp, synthetic construct
  source 1..20: mol_type = other DNA
catgtctgtaatcccagcta

SEQ ID NO: 39865 - DNA, 20 bp, synthetic construct
  source 1..20: mol_type = other DNA
acatgtctgtaatcccagct

SEQ ID NO: 39866 - DNA, 20 bp, synthetic construct
  source 1..20: mol_type = other DNA
cacatgtctgtaatcccagc

SEQ ID NO: 39867 - DNA, 20 bp, synthetic construct
  source 1..20: mol_type = other DNA
gcacatgtctgtaatcccag

SEQ ID NO: 39868 - DNA, 20 bp, synthetic construct
  source 1..20: mol_type = other DNA
ggcacatgtctgtaatccca

SEQ ID NO: 39869 - DNA, 20 bp, synthetic construct
  source 1..20: mol_type = other DNA
tggcacatgtctgtaatccc

SEQ ID NO: 39870 - DNA, 20 bp, synthetic construct
  source 1..20: mol_type = other DNA
gtggcacatgtctgtaatcc

SEQ ID NO: 39871 - DNA, 20 bp, synthetic construct
  source 1..20: mol_type = other DNA
ggtggcacatgtctgtaatc

SEQ ID NO: 39872 - DNA, 20 bp, synthetic construct
  source 1..20: mol_type = other DNA
tggtggcacatgtctgtaat

SEQ ID NO: 39873 - DNA, 20 bp, synthetic construct
  source 1..20: mol_type = other DNA
gtggtggcacatgtctgtaa

SEQ ID NO: 39874 - DNA, 20 bp, synthetic construct
  source 1..20: mol_type = other DNA
tgtggtggcacatgtctgta

SEQ ID NO: 39875 - DNA, 20 bp, synthetic construct
  source 1..20: mol_type = other DNA
gtgtggtggcacatgtctgt

SEQ ID NO: 39876 - DNA, 20 bp, synthetic construct
  source 1..20: mol_type = other DNA
cgtgtggtggcacatgtctg

SEQ ID NO: 39877 - DNA, 20 bp, synthetic construct
  source 1..20: mol_type = other DNA
acgtgtggtggcacatgtct

SEQ ID NO: 39878 - DNA, 20 bp, synthetic construct
  source 1..20: mol_type = other DNA
cacgtgtggtggcacatgtc

SEQ ID NO: 39879 - DNA, 20 bp, synthetic construct
  source 1..20: mol_type = other DNA
ccacgtgtggtggcacatgt

SEQ ID NO: 39880 - DNA, 20 bp, synthetic construct
  source 1..20: mol_type = other DNA
gccacgtgtggtggcacatg

SEQ ID NO: 39881 - DNA, 20 bp, synthetic construct
  source 1..20: mol_type = other DNA
agccacgtgtggtggcacat

SEQ ID NO: 39882 - DNA, 20 bp, synthetic construct
  source 1..20: mol_type = other DNA
tagccacgtgtggtggcaca

SEQ ID NO: 39883 - DNA, 20 bp, synthetic construct
  source 1..20: mol_type = other DNA
ttagccacgtgtggtggcac

SEQ ID NO: 39884 - DNA, 20 bp, synthetic construct
  source 1..20: mol_type = other DNA
attagccacgtgtggtggca

SEQ ID NO: 39885 - DNA, 20 bp, synthetic construct
  source 1..20: mol_type = other DNA
aattagccacgtgtggtggc

SEQ ID NO: 39886 - DNA, 20 bp, synthetic construct
  source 1..20: mol_type = other DNA
aaattagccacgtgtggtgg

SEQ ID NO: 39887 - DNA, 20 bp, synthetic construct
  source 1..20: mol_type = other DNA
aaaattagccacgtgtggtg

SEQ ID NO: 39888 - DNA, 20 bp, synthetic construct
  source 1..20: mol_type = other DNA
aaaaattagccacgtgtggt

SEQ ID NO: 39889 - DNA, 20 bp, synthetic construct
  source 1..20: mol_type = other DNA
taaaaattagccacgtgtgg

SEQ ID NO: 39890 - DNA, 20 bp, synthetic construct
  source 1..20: mol_type = other DNA
ataaaaattagccacgtgtg

SEQ ID NO: 39891 - DNA, 20 bp, synthetic construct
  source 1..20: mol_type = other DNA
tataaaaattagccacgtgt

SEQ ID NO: 39892 - DNA, 20 bp, synthetic construct
  source 1..20: mol_type = other DNA
ctataaaaattagccacgtg

SEQ ID NO: 39893 - DNA, 20 bp, synthetic construct
  source 1..20: mol_type = other DNA
actataaaaattagccacgt

SEQ ID NO: 39894 - DNA, 20 bp, synthetic construct
  source 1..20: mol_type = other DNA
aactataaaaattagccacg

SEQ ID NO: 39895 - DNA, 20 bp, synthetic construct
  source 1..20: mol_type = other DNA
aaactataaaaattagccac

SEQ ID NO: 39896 - DNA, 20 bp, synthetic construct
  source 1..20: mol_type = other DNA
aaaactataaaaattagcca

SEQ ID NO: 39897 - DNA, 20 bp, synthetic construct
  source 1..20: mol_type = other DNA
taaaactataaaaattagcc

SEQ ID NO: 39898 - DNA, 20 bp, synthetic construct
  source 1..20: mol_type = other DNA
ctaaaactataaaaattagc

SEQ ID NO: 39899 - DNA, 20 bp, synthetic construct
  source 1..20: mol_type = other DNA
actaaaactataaaaattag

SEQ ID NO: 39900 - DNA, 20 bp, synthetic construct
  source 1..20: mol_type = other DNA
tactaaaactataaaaatta

SEQ ID NO: 39901 - DNA, 20 bp, synthetic construct
  source 1..20: mol_type = other DNA
ctactaaaactataaaaatt

SEQ ID NO: 39902 - DNA, 20 bp, synthetic construct
  source 1..20: mol_type = other DNA
tctactaaaactataaaaat

SEQ ID NO: 39903 - DNA, 20 bp, synthetic construct
  source 1..20: mol_type = other DNA
ctctactaaaactataaaaa

SEQ ID NO: 39904 - DNA, 20 bp, synthetic construct
  source 1..20: mol_type = other DNA
cctctactaaaactataaaa

SEQ ID NO: 39905 - DNA, 20 bp, synthetic construct
  source 1..20: mol_type = other DNA
acctctactaaaactataaa

SEQ ID NO: 39906 - DNA, 20 bp, synthetic construct
  source 1..20: mol_type = other DNA
cacctctactaaaactataa

SEQ ID NO: 39907 - DNA, 20 bp, synthetic construct
  source 1..20: mol_type = other DNA
ccacctctactaaaactata

SEQ ID NO: 39908 - DNA, 20 bp, synthetic construct
  source 1..20: mol_type = other DNA
tccacctctactaaaactat

SEQ ID NO: 39909 - DNA, 20 bp, synthetic construct
  source 1..20: mol_type = other DNA
ctccacctctactaaaacta

SEQ ID NO: 39910 - DNA, 20 bp, synthetic construct
  source 1..20: mol_type = other DNA
actccacctctactaaaact

SEQ ID NO: 39911 - DNA, 20 bp, synthetic construct
  source 1..20: mol_type = other DNA
aactccacctctactaaaac

SEQ ID NO: 39912 - DNA, 20 bp, synthetic construct
  source 1..20: mol_type = other DNA
aaactccacctctactaaaa

SEQ ID NO: 39913 - DNA, 20 bp, synthetic construct
  source 1..20: mol_type = other DNA
gaaactccacctctactaaa

SEQ ID NO: 39914 - DNA, 20 bp, synthetic construct
  source 1..20: mol_type = other DNA
tgaaactccacctctactaa

SEQ ID NO: 39915 - DNA, 20 bp, synthetic construct
  source 1..20: mol_type = other DNA
gtgaaactccacctctacta

SEQ ID NO: 39916 - DNA, 20 bp, synthetic construct
  source 1..20: mol_type = other DNA
ggtgaaactccacctctact

SEQ ID NO: 39917 - DNA, 20 bp, synthetic construct
  source 1..20: mol_type = other DNA
tggtgaaactccacctctac

SEQ ID NO: 39918 - DNA, 20 bp, synthetic construct
  source 1..20: mol_type = other DNA
atggtgaaactccacctcta

SEQ ID NO: 39919 - DNA, 20 bp, synthetic construct
  source 1..20: mol_type = other DNA
catggtgaaactccacctct

SEQ ID NO: 39920 - DNA, 20 bp, synthetic construct
  source 1..20: mol_type = other DNA
acatggtgaaactccacctc

SEQ ID NO: 39921 - DNA, 20 bp, synthetic construct
  source 1..20: mol_type = other DNA
aacatggtgaaactccacct

SEQ ID NO: 39922 - DNA, 20 bp, synthetic construct
  source 1..20: mol_type = other DNA
caacatggtgaaactccacc

SEQ ID NO: 39923 - DNA, 20 bp, synthetic construct
  source 1..20: mol_type = other DNA
ccaacatggtgaaactccac

SEQ ID NO: 39924 - DNA, 20 bp, synthetic construct
  source 1..20: mol_type = other DNA
gccaacatggtgaaactcca

SEQ ID NO: 39925 - DNA, 20 bp, synthetic construct
  source 1..20: mol_type = other DNA
agccaacatggtgaaactcc

SEQ ID NO: 39926 - DNA, 20 bp, synthetic construct
  source 1..20: mol_type = other DNA
tagccaacatggtgaaactc

SEQ ID NO: 39927 - DNA, 20 bp, synthetic construct
  source 1..20: mol_type = other DNA
ctagccaacatggtgaaact

SEQ ID NO: 39928 - DNA, 20 bp, synthetic construct
  source 1..20: mol_type = other DNA
cctagccaacatggtgaaac

SEQ ID NO: 39929 - DNA, 20 bp, synthetic construct
  source 1..20: mol_type = other DNA
gcctagccaacatggtgaaa

SEQ ID NO: 39930 - DNA, 20 bp, synthetic construct
  source 1..20: mol_type = other DNA
agcctagccaacatggtgaa

SEQ ID NO: 39931 - DNA, 20 bp, synthetic construct
  source 1..20: mol_type = other DNA
cagcctagccaacatggtga

SEQ ID NO: 39932 - DNA, 20 bp, synthetic construct
  source 1..20: mol_type = other DNA
ccagcctagccaacatggtg

SEQ ID NO: 39933 - DNA, 20 bp, synthetic construct
  source 1..20: mol_type = other DNA
accagcctagccaacatggt

SEQ ID NO: 39934 - DNA, 20 bp, synthetic construct
  source 1..20: mol_type = other DNA
gaccagcctagccaacatgg

SEQ ID NO: 39935 - DNA, 20 bp, synthetic construct
  source 1..20: mol_type = other DNA
agaccagcctagccaacatg

SEQ ID NO: 39936 - DNA, 20 bp, synthetic construct
  source 1..20: mol_type = other DNA
aagaccagcctagccaacat

SEQ ID NO: 39937 - DNA, 20 bp, synthetic construct
  source 1..20: mol_type = other DNA
caagaccagcctagccaaca

SEQ ID NO: 39938 - DNA, 20 bp, synthetic construct
  source 1..20: mol_type = other DNA
tcaagaccagcctagccaac

SEQ ID NO: 39939 - DNA, 20 bp, synthetic construct
  source 1..20: mol_type = other DNA
ttcaagaccagcctagccaa

SEQ ID NO: 39940 - DNA, 20 bp, synthetic construct
  source 1..20: mol_type = other DNA
gttcaagaccagcctagcca

SEQ ID NO: 39941 - DNA, 20 bp, synthetic construct
  source 1..20: mol_type = other DNA
agttcaagaccagcctagcc

SEQ ID NO: 39942 - DNA, 20 bp, synthetic construct
  source 1..20: mol_type = other DNA
gagttcaagaccagcctagc

SEQ ID NO: 39943 - DNA, 20 bp, synthetic construct
  source 1..20: mol_type = other DNA
ggagttcaagaccagcctag

SEQ ID NO: 39944 - DNA, 20 bp, synthetic construct
  source 1..20: mol_type = other DNA
aggagttcaagaccagccta

SEQ ID NO: 39945 - DNA, 20 bp, synthetic construct
  source 1..20: mol_type = other DNA
caggagttcaagaccagcct

SEQ ID NO: 39946 - DNA, 20 bp, synthetic construct
  source 1..20: mol_type = other DNA
tcaggagttcaagaccagcc

SEQ ID NO: 39947 - DNA, 20 bp, synthetic construct
  source 1..20: mol_type = other DNA
gtcaggagttcaagaccagc

SEQ ID NO: 39948 - DNA, 20 bp, synthetic construct
  source 1..20: mol_type = other DNA
agtcaggagttcaagaccag

SEQ ID NO: 39949 - DNA, 20 bp, synthetic construct
  source 1..20: mol_type = other DNA
aagtcaggagttcaagacca

SEQ ID NO: 39950 - DNA, 20 bp, synthetic construct
  source 1..20: mol_type = other DNA
gaagtcaggagttcaagacc

SEQ ID NO: 39951 - DNA, 20 bp, synthetic construct
  source 1..20: mol_type = other DNA
tgaagtcaggagttcaagac

SEQ ID NO: 39952 - DNA, 20 bp, synthetic construct
  source 1..20: mol_type = other DNA
ctgaagtcaggagttcaaga

SEQ ID NO: 39953 - DNA, 20 bp, synthetic construct
  source 1..20: mol_type = other DNA
cctgaagtcaggagttcaag

SEQ ID NO: 39954 - DNA, 20 bp, synthetic construct
  source 1..20: mol_type = other DNA
acctgaagtcaggagttcaa

SEQ ID NO: 39955 - DNA, 20 bp, synthetic construct
  source 1..20: mol_type = other DNA
cacctgaagtcaggagttca

SEQ ID NO: 39956 - DNA, 20 bp, synthetic construct
  source 1..20: mol_type = other DNA
tcacctgaagtcaggagttc

SEQ ID NO: 39957 - DNA, 20 bp, synthetic construct
  source 1..20: mol_type = other DNA
atcacctgaagtcaggagtt

SEQ ID NO: 39958 - DNA, 20 bp, synthetic construct
  source 1..20: mol_type = other DNA
gatcacctgaagtcaggagt

SEQ ID NO: 39959 - DNA, 20 bp, synthetic construct
  source 1..20: mol_type = other DNA
ggatcacctgaagtcaggag

SEQ ID NO: 39960 - DNA, 20 bp, synthetic construct
  source 1..20: mol_type = other DNA
tggatcacctgaagtcagga

SEQ ID NO: 39961 - DNA, 20 bp, synthetic construct
  source 1..20: mol_type = other DNA
gtggatcacctgaagtcagg

SEQ ID NO: 39962 - DNA, 20 bp, synthetic construct
  source 1..20: mol_type = other DNA
ggtggatcacctgaagtcag

SEQ ID NO: 39963 - DNA, 20 bp, synthetic construct
  source 1..20: mol_type = other DNA
gggtggatcacctgaagtca

SEQ ID NO: 39964 - DNA, 20 bp, synthetic construct
  source 1..20: mol_type = other DNA
cgggtggatcacctgaagtc

SEQ ID NO: 39965 - DNA, 20 bp, synthetic construct
  source 1..20: mol_type = other DNA
gcgggtggatcacctgaagt

SEQ ID NO: 39966 - DNA, 20 bp, synthetic construct
  source 1..20: mol_type = other DNA
ggcgggtggatcacctgaag

SEQ ID NO: 39967 - DNA, 20 bp, synthetic construct
  source 1..20: mol_type = other DNA
aggcgggtggatcacctgaa

SEQ ID NO: 39968 - DNA, 20 bp, synthetic construct
  source 1..20: mol_type = other DNA
aaggcgggtggatcacctga

SEQ ID NO: 39969 - DNA, 20 bp, synthetic construct
  source 1..20: mol_type = other DNA
caaggcgggtggatcacctg

SEQ ID NO: 39970 - DNA, 20 bp, synthetic construct
  source 1..20: mol_type = other DNA
ccaaggcgggtggatcacct

SEQ ID NO: 39971 - DNA, 20 bp, synthetic construct
  source 1..20: mol_type = other DNA
gccaaggcgggtggatcacc

SEQ ID NO: 39972 - DNA, 20 bp, synthetic construct
  source 1..20: mol_type = other DNA
ggccaaggcgggtggatcac

SEQ ID NO: 39973 - DNA, 20 bp, synthetic construct
  source 1..20: mol_type = other DNA
aggccaaggcgggtggatca

SEQ ID NO: 39974 - DNA, 20 bp, synthetic construct
  source 1..20: mol_type = other DNA
gaggccaaggcgggtggatc

SEQ ID NO: 39975 - DNA, 20 bp, synthetic construct
  source 1..20: mol_type = other DNA
agaggccaaggcgggtggat

SEQ ID NO: 39976 - DNA, 20 bp, synthetic construct
  source 1..20: mol_type = other DNA
aagaggccaaggcgggtgga

SEQ ID NO: 39977 - DNA, 20 bp, synthetic construct
  source 1..20: mol_type = other DNA
caagaggccaaggcgggtgg

SEQ ID NO: 39978 - DNA, 20 bp, synthetic construct
  source 1..20: mol_type = other DNA
tcaagaggccaaggcgggtg

SEQ ID NO: 39979 - DNA, 20 bp, synthetic construct
  source 1..20: mol_type = other DNA
ttcaagaggccaaggcgggt

SEQ ID NO: 39980 - DNA, 20 bp, synthetic construct
  source 1..20: mol_type = other DNA
cttcaagaggccaaggcggg

SEQ ID NO: 39981 - DNA, 20 bp, synthetic construct
  source 1..20: mol_type = other DNA
acttcaagaggccaaggcgg

SEQ ID NO: 39982 - DNA, 20 bp, synthetic construct
  source 1..20: mol_type = other DNA
cacttcaagaggccaaggcg

SEQ ID NO: 39983 - DNA, 20 bp, synthetic construct
  source 1..20: mol_type = other DNA
ccacttcaagaggccaaggc

SEQ ID NO: 39984 - DNA, 20 bp, synthetic construct
  source 1..20: mol_type = other DNA
accacttcaagaggccaagg

SEQ ID NO: 39985 - DNA, 20 bp, synthetic construct
  source 1..20: mol_type = other DNA
caccacttcaagaggccaag

SEQ ID NO: 39986 - DNA, 20 bp, synthetic construct
  source 1..20: mol_type = other DNA
ccaccacttcaagaggccaa

SEQ ID NO: 39987 - DNA, 20 bp, synthetic construct
  source 1..20: mol_type = other DNA
cccaccacttcaagaggcca

SEQ ID NO: 39988 - DNA, 20 bp, synthetic construct
  source 1..20: mol_type = other DNA
tcccaccacttcaagaggcc

SEQ ID NO: 39989 - DNA, 20 bp, synthetic construct
  source 1..20: mol_type = other DNA
atcccaccacttcaagaggc

SEQ ID NO: 39990 - DNA, 20 bp, synthetic construct
  source 1..20: mol_type = other DNA
aatcccaccacttcaagagg

SEQ ID NO: 39991 - DNA, 20 bp, synthetic construct
  source 1..20: mol_type = other DNA
taatcccaccacttcaagag

SEQ ID NO: 39992 - DNA, 20 bp, synthetic construct
  source 1..20: mol_type = other DNA
ataatcccaccacttcaaga

SEQ ID NO: 39993 - DNA, 20 bp, synthetic construct
  source 1..20: mol_type = other DNA
cataatcccaccacttcaag

SEQ ID NO: 39994 - DNA, 20 bp, synthetic construct
  source 1..20: mol_type = other DNA
tcataatcccaccacttcaa

SEQ ID NO: 39995 - DNA, 20 bp, synthetic construct
  source 1..20: mol_type = other DNA
ctcataatcccaccacttca

SEQ ID NO: 39996 - DNA, 20 bp, synthetic construct
  source 1..20: mol_type = other DNA
actcataatcccaccacttc

SEQ ID NO: 39997 - DNA, 20 bp, synthetic construct
  source 1..20: mol_type = other DNA
cactcataatcccaccactt

SEQ ID NO: 39998 - DNA, 20 bp, synthetic construct
  source 1..20: mol_type = other DNA
acactcataatcccaccact

SEQ ID NO: 39999 - DNA, 20 bp, synthetic construct
  source 1..20: mol_type = other DNA
cacactcataatcccaccac

SEQ ID NO: 40000 - DNA, 20 bp, synthetic construct
  source 1..20: mol_type = other DNA
tcacactcataatcccacca

SEQ ID NO: 40001 - DNA, 20 bp, synthetic construct
  source 1..20: mol_type = other DNA
ctcacactcataatcccacc

SEQ ID NO: 40002 - DNA, 20 bp, synthetic construct
  source 1..20: mol_type = other DNA
gctcacactcataatcccac

SEQ ID NO: 40003 - DNA, 20 bp, synthetic construct
  source 1..20: mol_type = other DNA
ggctcacactcataatccca

SEQ ID NO: 40004 - DNA, 20 bp, synthetic construct
  source 1..20: mol_type = other DNA
tggctcacactcataatccc

SEQ ID NO: 40005 - DNA, 20 bp, synthetic construct
  source 1..20: mol_type = other DNA
gtggctcacactcataatcc

SEQ ID NO: 40006 - DNA, 20 bp, synthetic construct
  source 1..20: mol_type = other DNA
agtggctcacactcataatc

SEQ ID NO: 40007 - DNA, 20 bp, synthetic construct
  source 1..20: mol_type = other DNA
cagtggctcacactcataat

SEQ ID NO: 40008 - DNA, 20 bp, synthetic construct
  source 1..20: mol_type = other DNA
acagtggctcacactcataa

SEQ ID NO: 40009 - DNA, 20 bp, synthetic construct
  source 1..20: mol_type = other DNA
cacagtggctcacactcata

SEQ ID NO: 40010 - DNA, 20 bp, synthetic construct
  source 1..20: mol_type = other DNA
gcacagtggctcacactcat

SEQ ID NO: 40011 - DNA, 20 bp, synthetic construct
  source 1..20: mol_type = other DNA
ggcacagtggctcacactca

SEQ ID NO: 40012 - DNA, 20 bp, synthetic construct
  source 1..20: mol_type = other DNA
gggcacagtggctcacactc

SEQ ID NO: 40013 - DNA, 20 bp, synthetic construct
  source 1..20: mol_type = other DNA
tgggcacagtggctcacact

SEQ ID NO: 40014 - DNA, 20 bp, synthetic construct
  source 1..20: mol_type = other DNA
ctgggcacagtggctcacac

SEQ ID NO: 40015 - DNA, 20 bp, synthetic construct
  source 1..20: mol_type = other DNA
gctgggcacagtggctcaca

SEQ ID NO: 40016 - DNA, 20 bp, synthetic construct
  source 1..20: mol_type = other DNA
ggctgggcacagtggctcac

SEQ ID NO: 40017 - DNA, 20 bp, synthetic construct
  source 1..20: mol_type = other DNA
tggctgggcacagtggctca

SEQ ID NO: 40018 - DNA, 20 bp, synthetic construct
  source 1..20: mol_type = other DNA
ttggctgggcacagtggctc

SEQ ID NO: 40019 - DNA, 20 bp, synthetic construct
  source 1..20: mol_type = other DNA
cttggctgggcacagtggct

SEQ ID NO: 40020 - DNA, 20 bp, synthetic construct
  source 1..20: mol_type = other DNA
acttggctgggcacagtggc

SEQ ID NO: 40021 - DNA, 20 bp, synthetic construct
  source 1..20: mol_type = other DNA
cacttggctgggcacagtgg

SEQ ID NO: 40022 - DNA, 20 bp, synthetic construct
  source 1..20: mol_type = other DNA
tcacttggctgggcacagtg

SEQ ID NO: 40023 - DNA, 20 bp, synthetic construct
  source 1..20: mol_type = other DNA
ctcacttggctgggcacagt

SEQ ID NO: 40024 - DNA, 20 bp, synthetic construct
  source 1..20: mol_type = other DNA
actcacttggctgggcacag

SEQ ID NO: 40025 - DNA, 20 bp, synthetic construct
  source 1..20: mol_type = other DNA
tactcacttggctgggcaca

SEQ ID NO: 40026 - DNA, 20 bp, synthetic construct
  source 1..20: mol_type = other DNA
atactcacttggctgggcac

SEQ ID NO: 40027 - DNA, 20 bp, synthetic construct
  source 1..20: mol_type = other DNA
aatactcacttggctgggca

SEQ ID NO: 40028 - DNA, 20 bp, synthetic construct
  source 1..20: mol_type = other DNA
aaatactcacttggctgggc

SEQ ID NO: 40029 - DNA, 20 bp, synthetic construct
  source 1..20: mol_type = other DNA
caaatactcacttggctggg

SEQ ID NO: 40030 - DNA, 20 bp, synthetic construct
  source 1..20: mol_type = other DNA
gcaaatactcacttggctgg

SEQ ID NO: 40031 - DNA, 20 bp, synthetic construct
  source 1..20: mol_type = other DNA
agcaaatactcacttggctg

SEQ ID NO: 40032 - DNA, 20 bp, synthetic construct
  source 1..20: mol_type = other DNA
aagcaaatactcacttggct

SEQ ID NO: 40033 - DNA, 20 bp, synthetic construct
  source 1..20: mol_type = other DNA
taagcaaatactcacttggc

SEQ ID NO: 40034 - DNA, 20 bp, synthetic construct
  source 1..20: mol_type = other DNA
ataagcaaatactcacttgg

SEQ ID NO: 40035 - DNA, 20 bp, synthetic construct
  source 1..20: mol_type = other DNA
cataagcaaatactcacttg

SEQ ID NO: 40036 - DNA, 20 bp, synthetic construct
  source 1..20: mol_type = other DNA
acataagcaaatactcactt

SEQ ID NO: 40037 - DNA, 20 bp, synthetic construct
  source 1..20: mol_type = other DNA
tacataagcaaatactcact

SEQ ID NO: 40038 - DNA, 20 bp, synthetic construct
  source 1..20: mol_type = other DNA
ctacataagcaaatactcac

SEQ ID NO: 40039 - DNA, 20 bp, synthetic construct
  source 1..20: mol_type = other DNA
actacataagcaaatactca

SEQ ID NO: 40040 - DNA, 20 bp, synthetic construct
  source 1..20: mol_type = other DNA
tactacataagcaaatactc

SEQ ID NO: 40041 - DNA, 20 bp, synthetic construct
  source 1..20: mol_type = other DNA
atactacataagcaaatact

SEQ ID NO: 40042 - DNA, 20 bp, synthetic construct
  source 1..20: mol_type = other DNA
aatactacataagcaaatac

SEQ ID NO: 40043 - DNA, 20 bp, synthetic construct
  source 1..20: mol_type = other DNA
aaatactacataagcaaata

SEQ ID NO: 40044 - DNA, 20 bp, synthetic construct
  source 1..20: mol_type = other DNA
aaaatactacataagcaaat

SEQ ID NO: 40045 - DNA, 20 bp, synthetic construct
  source 1..20: mol_type = other DNA
taaaatactacataagcaaa

SEQ ID NO: 40046 - DNA, 20 bp, synthetic construct
  source 1..20: mol_type = other DNA
ttaaaatactacataagcaa

SEQ ID NO: 40047 - DNA, 20 bp, synthetic construct
  source 1..20: mol_type = other DNA
attaaaatactacataagca

SEQ ID NO: 40048 - DNA, 20 bp, synthetic construct
  source 1..20: mol_type = other DNA
aattaaaatactacataagc

SEQ ID NO: 40049 - DNA, 20 bp, synthetic construct
  source 1..20: mol_type = other DNA
aaattaaaatactacataag

SEQ ID NO: 40050 - DNA, 20 bp, synthetic construct
  source 1..20: mol_type = other DNA
aaaattaaaatactacataa

SEQ ID NO: 40051 - DNA, 20 bp, synthetic construct
  source 1..20: mol_type = other DNA
taaaattaaaatactacata

SEQ ID NO: 40052 - DNA, 20 bp, synthetic construct
  source 1..20: mol_type = other DNA
ataaaattaaaatactacat

SEQ ID NO: 40053 - DNA, 20 bp, synthetic construct
  source 1..20: mol_type = other DNA
cataaaattaaaatactaca

SEQ ID NO: 40054 - DNA, 20 bp, synthetic construct
  source 1..20: mol_type = other DNA
tcataaaattaaaatactac

SEQ ID NO: 40055 - DNA, 20 bp, synthetic construct
  source 1..20: mol_type = other DNA
atcataaaattaaaatacta

SEQ ID NO: 40056 - DNA, 20 bp, synthetic construct
  source 1..20: mol_type = other DNA
aatcataaaattaaaatact

SEQ ID NO: 40057 - DNA, 20 bp, synthetic construct
  source 1..20: mol_type = other DNA
aaatcataaaattaaaatac

SEQ ID NO: 40058 - DNA, 20 bp, synthetic construct
  source 1..20: mol_type = other DNA
aaaatcataaaattaaaata

SEQ ID NO: 40059 - DNA, 20 bp, synthetic construct
  source 1..20: mol_type = other DNA
aaaaatcataaaattaaaat

SEQ ID NO: 40060 - DNA, 20 bp, synthetic construct
  source 1..20: mol_type = other DNA
aaaaaatcataaaattaaaa

SEQ ID NO: 40061 - DNA, 20 bp, synthetic construct
  source 1..20: mol_type = other DNA
aaaaaaatcataaaattaaa

SEQ ID NO: 40062 - DNA, 20 bp, synthetic construct
  source 1..20: mol_type = other DNA
aaaaaaaatcataaaattaa

SEQ ID NO: 40063 - DNA, 20 bp, synthetic construct
  source 1..20: mol_type = other DNA
aaaaaaaaatcataaaatta

SEQ ID NO: 40064 - DNA, 20 bp, synthetic construct
  source 1..20: mol_type = other DNA
gaaaaaaaaatcataaaatt

SEQ ID NO: 40065 - DNA, 20 bp, synthetic construct
  source 1..20: mol_type = other DNA
agaaaaaaaaatcataaaat

SEQ ID NO: 40066 - DNA, 20 bp, synthetic construct
  source 1..20: mol_type = other DNA
aagaaaaaaaaatcataaaa

SEQ ID NO: 40067 - DNA, 20 bp, synthetic construct
  source 1..20: mol_type = other DNA
aaagaaaaaaaaatcataaa

SEQ ID NO: 40068 - DNA, 20 bp, synthetic construct
  source 1..20: mol_type = other DNA
caaagaaaaaaaaatcataa

SEQ ID NO: 40069 - DNA, 20 bp, synthetic construct
  source 1..20: mol_type = other DNA
tcaaagaaaaaaaaatcata

SEQ ID NO: 40070 - DNA, 20 bp, synthetic construct
  source 1..20: mol_type = other DNA
ctcaaagaaaaaaaaatcat

SEQ ID NO: 40071 - DNA, 20 bp, synthetic construct
  source 1..20: mol_type = other DNA
tctcaaagaaaaaaaaatca

SEQ ID NO: 40072 - DNA, 20 bp, synthetic construct
  source 1..20: mol_type = other DNA
gtctcaaagaaaaaaaaatc

SEQ ID NO: 40073 - DNA, 20 bp, synthetic construct
  source 1..20: mol_type = other DNA
cgtctcaaagaaaaaaaaat

SEQ ID NO: 40074 - DNA, 20 bp, synthetic construct
  source 1..20: mol_type = other DNA
ccgtctcaaagaaaaaaaaa

SEQ ID NO: 40075 - DNA, 20 bp, synthetic construct
  source 1..20: mol_type = other DNA
tccgtctcaaagaaaaaaaa

SEQ ID NO: 40076 - DNA, 20 bp, synthetic construct
  source 1..20: mol_type = other DNA
ctccgtctcaaagaaaaaaa

SEQ ID NO: 40077 - DNA, 20 bp, synthetic construct
  source 1..20: mol_type = other DNA
cctccgtctcaaagaaaaaa

SEQ ID NO: 40078 - DNA, 20 bp, synthetic construct
  source 1..20: mol_type = other DNA
acctccgtctcaaagaaaaa

SEQ ID NO: 40079 - DNA, 20 bp, synthetic construct
  source 1..20: mol_type = other DNA
aacctccgtctcaaagaaaa

SEQ ID NO: 40080 - DNA, 20 bp, synthetic construct
  source 1..20: mol_type = other DNA
aaacctccgtctcaaagaaa

SEQ ID NO: 40081 - DNA, 20 bp, synthetic construct
  source 1..20: mol_type = other DNA
caaacctccgtctcaaagaa

SEQ ID NO: 40082 - DNA, 20 bp, synthetic construct
  source 1..20: mol_type = other DNA
gcaaacctccgtctcaaaga

SEQ ID NO: 40083 - DNA, 20 bp, synthetic construct
  source 1..20: mol_type = other DNA
agcaaacctccgtctcaaag

SEQ ID NO: 40084 - DNA, 20 bp, synthetic construct
  source 1..20: mol_type = other DNA
gagcaaacctccgtctcaaa

SEQ ID NO: 40085 - DNA, 20 bp, synthetic construct
  source 1..20: mol_type = other DNA
agagcaaacctccgtctcaa

SEQ ID NO: 40086 - DNA, 20 bp, synthetic construct
  source 1..20: mol_type = other DNA
aagagcaaacctccgtctca

SEQ ID NO: 40087 - DNA, 20 bp, synthetic construct
  source 1..20: mol_type = other DNA
caagagcaaacctccgtctc

SEQ ID NO: 40088 - DNA, 20 bp, synthetic construct
  source 1..20: mol_type = other DNA
acaagagcaaacctccgtct

SEQ ID NO: 40089 - DNA, 20 bp, synthetic construct
  source 1..20: mol_type = other DNA
aacaagagcaaacctccgtc

SEQ ID NO: 40090 - DNA, 20 bp, synthetic construct
  source 1..20: mol_type = other DNA
caacaagagcaaacctccgt

SEQ ID NO: 40091 - DNA, 20 bp, synthetic construct
  source 1..20: mol_type = other DNA
gcaacaagagcaaacctccg

SEQ ID NO: 40092 - DNA, 20 bp, synthetic construct
  source 1..20: mol_type = other DNA
ggcaacaagagcaaacctcc

SEQ ID NO: 40093 - DNA, 20 bp, synthetic construct
  source 1..20: mol_type = other DNA
gggcaacaagagcaaacctc

SEQ ID NO: 40094 - DNA, 20 bp, synthetic construct
  source 1..20: mol_type = other DNA
tgggcaacaagagcaaacct

SEQ ID NO: 40095 - DNA, 20 bp, synthetic construct
  source 1..20: mol_type = other DNA
ttgggcaacaagagcaaacc

SEQ ID NO: 40096 - DNA, 20 bp, synthetic construct
  source 1..20: mol_type = other DNA
cttgggcaacaagagcaaac

SEQ ID NO: 40097 - DNA, 20 bp, synthetic construct
  source 1..20: mol_type = other DNA
gcttgggcaacaagagcaaa

SEQ ID NO: 40098 - DNA, 20 bp, synthetic construct
  source 1..20: mol_type = other DNA
agcttgggcaacaagagcaa

SEQ ID NO: 40099 - DNA, 20 bp, synthetic construct
  source 1..20: mol_type = other DNA
cagcttgggcaacaagagca

SEQ ID NO: 40100 - DNA, 20 bp, synthetic construct
  source 1..20: mol_type = other DNA
ccagcttgggcaacaagagc

SEQ ID NO: 40101 - DNA, 20 bp, synthetic construct
  source 1..20: mol_type = other DNA
tccagcttgggcaacaagag

SEQ ID NO: 40102 - DNA, 20 bp, synthetic construct
  source 1..20: mol_type = other DNA
ctccagcttgggcaacaaga

SEQ ID NO: 40103 - DNA, 20 bp, synthetic construct
  source 1..20: mol_type = other DNA
actccagcttgggcaacaag

SEQ ID NO: 40104 - DNA, 20 bp, synthetic construct
  source 1..20: mol_type = other DNA
tactccagcttgggcaacaa

SEQ ID NO: 40105 - DNA, 20 bp, synthetic construct
  source 1..20: mol_type = other DNA
gtactccagcttgggcaaca

SEQ ID NO: 40106 - DNA, 20 bp, synthetic construct
  source 1..20: mol_type = other DNA
tgtactccagcttgggcaac

SEQ ID NO: 40107 - DNA, 20 bp, synthetic construct
  source 1..20: mol_type = other DNA
ctgtactccagcttgggcaa

SEQ ID NO: 40108 - DNA, 20 bp, synthetic construct
  source 1..20: mol_type = other DNA
actgtactccagcttgggca

SEQ ID NO: 40109 - DNA, 20 bp, synthetic construct
  source 1..20: mol_type = other DNA
cactgtactccagcttgggc

SEQ ID NO: 40110 - DNA, 20 bp, synthetic construct
  source 1..20: mol_type = other DNA
ccactgtactccagcttggg

SEQ ID NO: 40111 - DNA, 20 bp, synthetic construct
  source 1..20: mol_type = other DNA
accactgtactccagcttgg

SEQ ID NO: 40112 - DNA, 20 bp, synthetic construct
  source 1..20: mol_type = other DNA
caccactgtactccagcttg

SEQ ID NO: 40113 - DNA, 20 bp, synthetic construct
  source 1..20: mol_type = other DNA
gcaccactgtactccagctt

SEQ ID NO: 40114 - DNA, 20 bp, synthetic construct
  source 1..20: mol_type = other DNA
ggcaccactgtactccagct

SEQ ID NO: 40115 - DNA, 20 bp, synthetic construct
  source 1..20: mol_type = other DNA
tggcaccactgtactccagc

SEQ ID NO: 40116 - DNA, 20 bp, synthetic construct
  source 1..20: mol_type = other DNA
atggcaccactgtactccag

SEQ ID NO: 40117 - DNA, 20 bp, synthetic construct
  source 1..20: mol_type = other DNA
gatggcaccactgtactcca

SEQ ID NO: 40118 - DNA, 20 bp, synthetic construct
  source 1..20: mol_type = other DNA
agatggcaccactgtactcc

SEQ ID NO: 40119 - DNA, 20 bp, synthetic construct
  source 1..20: mol_type = other DNA
gagatggcaccactgtactc

SEQ ID NO: 40120 - DNA, 20 bp, synthetic construct
  source 1..20: mol_type = other DNA
cgagatggcaccactgtact

SEQ ID NO: 40121 - DNA, 20 bp, synthetic construct
  source 1..20: mol_type = other DNA
ccgagatggcaccactgtac

SEQ ID NO: 40122 - DNA, 20 bp, synthetic construct
  source 1..20: mol_type = other DNA
gccgagatggcaccactgta

SEQ ID NO: 40123 - DNA, 20 bp, synthetic construct
  source 1..20: mol_type = other DNA
agccgagatggcaccactgt

SEQ ID NO: 40124 - DNA, 20 bp, synthetic construct
  source 1..20: mol_type = other DNA
gagccgagatggcaccactg

SEQ ID NO: 40125 - DNA, 20 bp, synthetic construct
  source 1..20: mol_type = other DNA
tgagccgagatggcaccact

SEQ ID NO: 40126 - DNA, 20 bp, synthetic construct
  source 1..20: mol_type = other DNA
gtgagccgagatggcaccac

SEQ ID NO: 40127 - DNA, 20 bp, synthetic construct
  source 1..20: mol_type = other DNA
agtgagccgagatggcacca

SEQ ID NO: 40128 - DNA, 20 bp, synthetic construct
  source 1..20: mol_type = other DNA
cagtgagccgagatggcacc

SEQ ID NO: 40129 - DNA, 20 bp, synthetic construct
  source 1..20: mol_type = other DNA
gcagtgagccgagatggcac

SEQ ID NO: 40130 - DNA, 20 bp, synthetic construct
  source 1..20: mol_type = other DNA
tgcagtgagccgagatggca

SEQ ID NO: 40131 - DNA, 20 bp, synthetic construct
  source 1..20: mol_type = other DNA
ctgcagtgagccgagatggc

SEQ ID NO: 40132 - DNA, 20 bp, synthetic construct
  source 1..20: mol_type = other DNA
gctgcagtgagccgagatgg

SEQ ID NO: 40133 - DNA, 20 bp, synthetic construct
  source 1..20: mol_type = other DNA
ggctgcagtgagccgagatg

SEQ ID NO: 40134 - DNA, 20 bp, synthetic construct
  source 1..20: mol_type = other DNA
aggctgcagtgagccgagat

SEQ ID NO: 40135 - DNA, 20 bp, synthetic construct
  source 1..20: mol_type = other DNA
gaggctgcagtgagccgaga

SEQ ID NO: 40136 - DNA, 20 bp, synthetic construct
  source 1..20: mol_type = other DNA
ggaggctgcagtgagccgag

SEQ ID NO: 40137 - DNA, 20 bp, synthetic construct
  source 1..20: mol_type = other DNA
tggaggctgcagtgagccga

SEQ ID NO: 40138 - DNA, 20 bp, synthetic construct
  source 1..20: mol_type = other DNA
gtggaggctgcagtgagccg

SEQ ID NO: 40139 - DNA, 20 bp, synthetic construct
  source 1..20: mol_type = other DNA
ggtggaggctgcagtgagcc

SEQ ID NO: 40140 - DNA, 20 bp, synthetic construct
  source 1..20: mol_type = other DNA
aggtggaggctgcagtgagc

SEQ ID NO: 40141 - DNA, 20 bp, synthetic construct
  source 1..20: mol_type = other DNA
gaggtggaggctgcagtgag

SEQ ID NO: 40142 - DNA, 20 bp, synthetic construct
  source 1..20: mol_type = other DNA
ggaggtggaggctgcagtga

SEQ ID NO: 40143 - DNA, 20 bp, synthetic construct
  source 1..20: mol_type = other DNA
aggaggtggaggctgcagtg

SEQ ID NO: 40144 - DNA, 20 bp, synthetic construct
  source 1..20: mol_type = other DNA
caggaggtggaggctgcagt

SEQ ID NO: 40145 - DNA, 20 bp, synthetic construct
  source 1..20: mol_type = other DNA
ccaggaggtggaggctgcag

SEQ ID NO: 40146 - DNA, 20 bp, synthetic construct
  source 1..20: mol_type = other DNA
cccaggaggtggaggctgca

SEQ ID NO: 40147 - DNA, 20 bp, synthetic construct
  source 1..20: mol_type = other DNA
acccaggaggtggaggctgc

SEQ ID NO: 40148 - DNA, 20 bp, synthetic construct
  source 1..20: mol_type = other DNA
aacccaggaggtggaggctg

SEQ ID NO: 40149 - DNA, 20 bp, synthetic construct
  source 1..20: mol_type = other DNA
gaacccaggaggtggaggct

SEQ ID NO: 40150 - DNA, 20 bp, synthetic construct
  source 1..20: mol_type = other DNA
tgaacccaggaggtggaggc

SEQ ID NO: 40151 - DNA, 20 bp, synthetic construct
  source 1..20: mol_type = other DNA
ttgaacccaggaggtggagg

SEQ ID NO: 40152 - DNA, 20 bp, synthetic construct
  source 1..20: mol_type = other DNA
cttgaacccaggaggtggag

SEQ ID NO: 40153 - DNA, 20 bp, synthetic construct
  source 1..20: mol_type = other DNA
gcttgaacccaggaggtgga

SEQ ID NO: 40154 - DNA, 20 bp, synthetic construct
  source 1..20: mol_type = other DNA
ggcttgaacccaggaggtgg

SEQ ID NO: 40155 - DNA, 20 bp, synthetic construct
  source 1..20: mol_type = other DNA
cggcttgaacccaggaggtg

SEQ ID NO: 40156 - DNA, 20 bp, synthetic construct
  source 1..20: mol_type = other DNA
acggcttgaacccaggaggt

SEQ ID NO: 40157 - DNA, 20 bp, synthetic construct
  source 1..20: mol_type = other DNA
aacggcttgaacccaggagg

SEQ ID NO: 40158 - DNA, 20 bp, synthetic construct
  source 1..20: mol_type = other DNA
gaacggcttgaacccaggag

SEQ ID NO: 40159 - DNA, 20 bp, synthetic construct
  source 1..20: mol_type = other DNA
agaacggcttgaacccagga

SEQ ID NO: 40160 - DNA, 20 bp, synthetic construct
  source 1..20: mol_type = other DNA
gagaacggcttgaacccagg

SEQ ID NO: 40161 - DNA, 20 bp, synthetic construct
  source 1..20: mol_type = other DNA
ggagaacggcttgaacccag

SEQ ID NO: 40162 - DNA, 20 bp, synthetic construct
  source 1..20: mol_type = other DNA
aggagaacggcttgaaccca

SEQ ID NO: 40163 - DNA, 20 bp, synthetic construct
  source 1..20: mol_type = other DNA
gaggagaacggcttgaaccc

SEQ ID NO: 40164 - DNA, 20 bp, synthetic construct
  source 1..20: mol_type = other DNA
ggaggagaacggcttgaacc

SEQ ID NO: 40165 - DNA, 20 bp, synthetic construct
  source 1..20: mol_type = other DNA
gggaggagaacggcttgaac

SEQ ID NO: 40166 - DNA, 20 bp, synthetic construct
  source 1..20: mol_type = other DNA
agggaggagaacggcttgaa

SEQ ID NO: 40167 - DNA, 20 bp, synthetic construct
  source 1..20: mol_type = other DNA
gagggaggagaacggcttga

SEQ ID NO: 40168 - DNA, 20 bp, synthetic construct
  source 1..20: mol_type = other DNA
tgagggaggagaacggcttg

SEQ ID NO: 40169 - DNA, 20 bp, synthetic construct
  source 1..20: mol_type = other DNA
ctgagggaggagaacggctt

SEQ ID NO: 40170 - DNA, 20 bp, synthetic construct
  source 1..20: mol_type = other DNA
gctgagggaggagaacggct

SEQ ID NO: 40171 - DNA, 20 bp, synthetic construct
  source 1..20: mol_type = other DNA
ggctgagggaggagaacggc

SEQ ID NO: 40172 - DNA, 20 bp, synthetic construct
  source 1..20: mol_type = other DNA
tggctgagggaggagaacgg

SEQ ID NO: 40173 - DNA, 20 bp, synthetic construct
  source 1..20: mol_type = other DNA
gtggctgagggaggagaacg

SEQ ID NO: 40174 - DNA, 20 bp, synthetic construct
  source 1..20: mol_type = other DNA
ggtggctgagggaggagaac

SEQ ID NO: 40175 - DNA, 20 bp, synthetic construct
  source 1..20: mol_type = other DNA
aggtggctgagggaggagaa

SEQ ID NO: 40176 - DNA, 20 bp, synthetic construct
  source 1..20: mol_type = other DNA
gaggtggctgagggaggaga

SEQ ID NO: 40177 - DNA, 20 bp, synthetic construct
  source 1..20: mol_type = other DNA
ggaggtggctgagggaggag

SEQ ID NO: 40178 - DNA, 20 bp, synthetic construct
  source 1..20: mol_type = other DNA
aggaggtggctgagggagga

SEQ ID NO: 40179 - DNA, 20 bp, synthetic construct
  source 1..20: mol_type = other DNA
gaggaggtggctgagggagg

SEQ ID NO: 40180 - DNA, 20 bp, synthetic construct
  source 1..20: mol_type = other DNA
ggaggaggtggctgagggag

SEQ ID NO: 40181 - DNA, 20 bp, synthetic construct
  source 1..20: mol_type = other DNA
aggaggaggtggctgaggga

SEQ ID NO: 40182 - DNA, 20 bp, synthetic construct
  source 1..20: mol_type = other DNA
caggaggaggtggctgaggg

SEQ ID NO: 40183 - DNA, 20 bp, synthetic construct
  source 1..20: mol_type = other DNA
tcaggaggaggtggctgagg

SEQ ID NO: 40184 - DNA, 20 bp, synthetic construct
  source 1..20: mol_type = other DNA
ttcaggaggaggtggctgag

SEQ ID NO: 40185 - DNA, 20 bp, synthetic construct
  source 1..20: mol_type = other DNA
attcaggaggaggtggctga

SEQ ID NO: 40186 - DNA, 20 bp, synthetic construct
  source 1..20: mol_type = other DNA
tattcaggaggaggtggctg

SEQ ID NO: 40187 - DNA, 20 bp, synthetic construct
  source 1..20: mol_type = other DNA
ctattcaggaggaggtggct

SEQ ID NO: 40188 - DNA, 20 bp, synthetic construct
  source 1..20: mol_type = other DNA
actattcaggaggaggtggc

SEQ ID NO: 40189 - DNA, 20 bp, synthetic construct
  source 1..20: mol_type = other DNA
aactattcaggaggaggtgg

SEQ ID NO: 40190 - DNA, 20 bp, synthetic construct
  source 1..20: mol_type = other DNA
caactattcaggaggaggtg

SEQ ID NO: 40191 - DNA, 20 bp, synthetic construct
  source 1..20: mol_type = other DNA
ccaactattcaggaggaggt

SEQ ID NO: 40192 - DNA, 20 bp, synthetic construct
  source 1..20: mol_type = other DNA
cccaactattcaggaggagg

SEQ ID NO: 40193 - DNA, 20 bp, synthetic construct
  source 1..20: mol_type = other DNA
tcccaactattcaggaggag

SEQ ID NO: 40194 - DNA, 20 bp, synthetic construct
  source 1..20: mol_type = other DNA
atcccaactattcaggagga

SEQ ID NO: 40195 - DNA, 20 bp, synthetic construct
  source 1..20: mol_type = other DNA
aatcccaactattcaggagg

SEQ ID NO: 40196 - DNA, 20 bp, synthetic construct
  source 1..20: mol_type = other DNA
taatcccaactattcaggag

SEQ ID NO: 40197 - DNA, 20 bp, synthetic construct
  source 1..20: mol_type = other DNA
ataatcccaactattcagga

SEQ ID NO: 40198 - DNA, 20 bp, synthetic construct
  source 1..20: mol_type = other DNA
tataatcccaactattcagg

SEQ ID NO: 40199 - DNA, 20 bp, synthetic construct
  source 1..20: mol_type = other DNA
ctataatcccaactattcag

SEQ ID NO: 40200 - DNA, 20 bp, synthetic construct
  source 1..20: mol_type = other DNA
cctataatcccaactattca

SEQ ID NO: 40201 - DNA, 20 bp, synthetic construct
  source 1..20: mol_type = other DNA
gcctataatcccaactattc

SEQ ID NO: 40202 - DNA, 20 bp, synthetic construct
  source 1..20: mol_type = other DNA
cgcctataatcccaactatt

SEQ ID NO: 40203 - DNA, 20 bp, synthetic construct
  source 1..20: mol_type = other DNA
gcgcctataatcccaactat

SEQ ID NO: 40204 - DNA, 20 bp, synthetic construct
  source 1..20: mol_type = other DNA
ggcgcctataatcccaacta

SEQ ID NO: 40205 - DNA, 20 bp, synthetic construct
  source 1..20: mol_type = other DNA
aggcgcctataatcccaact

SEQ ID NO: 40206 - DNA, 20 bp, synthetic construct
  source 1..20: mol_type = other DNA
caggcgcctataatcccaac

SEQ ID NO: 40207 - DNA, 20 bp, synthetic construct
  source 1..20: mol_type = other DNA
gcaggcgcctataatcccaa

SEQ ID NO: 40208 - DNA, 20 bp, synthetic construct
  source 1..20: mol_type = other DNA
ggcaggcgcctataatccca

SEQ ID NO: 40209 - DNA, 20 bp, synthetic construct
  source 1..20: mol_type = other DNA
tggcaggcgcctataatccc

SEQ ID NO: 40210 - DNA, 20 bp, synthetic construct
  source 1..20: mol_type = other DNA
gtggcaggcgcctataatcc

SEQ ID NO: 40211 - DNA, 20 bp, synthetic construct
  source 1..20: mol_type = other DNA
ggtggcaggcgcctataatc

SEQ ID NO: 40212 - DNA, 20 bp, synthetic construct
  source 1..20: mol_type = other DNA
tggtggcaggcgcctataat

SEQ ID NO: 40213 - DNA, 20 bp, synthetic construct
  source 1..20: mol_type = other DNA
atggtggcaggcgcctataa

SEQ ID NO: 40214 - DNA, 20 bp, synthetic construct
  source 1..20: mol_type = other DNA
catggtggcaggcgcctata

SEQ ID NO: 40215 - DNA, 20 bp, synthetic construct
  source 1..20: mol_type = other DNA
gcatggtggcaggcgcctat

SEQ ID NO: 40216 - DNA, 20 bp, synthetic construct
  source 1..20: mol_type = other DNA
ggcatggtggcaggcgccta

SEQ ID NO: 40217 - DNA, 20 bp, synthetic construct
  source 1..20: mol_type = other DNA
aggcatggtggcaggcgcct

SEQ ID NO: 40218 - DNA, 20 bp, synthetic construct
  source 1..20: mol_type = other DNA
caggcatggtggcaggcgcc

SEQ ID NO: 40219 - DNA, 20 bp, synthetic construct
  source 1..20: mol_type = other DNA
ccaggcatggtggcaggcgc

SEQ ID NO: 40220 - DNA, 20 bp, synthetic construct
  source 1..20: mol_type = other DNA
gccaggcatggtggcaggcg

SEQ ID NO: 40221 - DNA, 20 bp, synthetic construct
  source 1..20: mol_type = other DNA
agccaggcatggtggcaggc

SEQ ID NO: 40222 - DNA, 20 bp, synthetic construct
  source 1..20: mol_type = other DNA
tagccaggcatggtggcagg

SEQ ID NO: 40223 - DNA, 20 bp, synthetic construct
  source 1..20: mol_type = other DNA
ttagccaggcatggtggcag

SEQ ID NO: 40224 - DNA, 20 bp, synthetic construct
  source 1..20: mol_type = other DNA
attagccaggcatggtggca

SEQ ID NO: 40225 - DNA, 20 bp, synthetic construct
  source 1..20: mol_type = other DNA
aattagccaggcatggtggc

SEQ ID NO: 40226 - DNA, 20 bp, synthetic construct
  source 1..20: mol_type = other DNA
aaattagccaggcatggtgg

SEQ ID NO: 40227 - DNA, 20 bp, synthetic construct
  source 1..20: mol_type = other DNA
aaaattagccaggcatggtg

SEQ ID NO: 40228 - DNA, 20 bp, synthetic construct
  source 1..20: mol_type = other DNA
aaaaattagccaggcatggt

SEQ ID NO: 40229 - DNA, 20 bp, synthetic construct
  source 1..20: mol_type = other DNA
aaaaaattagccaggcatgg

SEQ ID NO: 40230 - DNA, 20 bp, synthetic construct
  source 1..20: mol_type = other DNA
caaaaaattagccaggcatg

SEQ ID NO: 40231 - DNA, 20 bp, synthetic construct
  source 1..20: mol_type = other DNA
acaaaaaattagccaggcat

SEQ ID NO: 40232 - DNA, 20 bp, synthetic construct
  source 1..20: mol_type = other DNA
tacaaaaaattagccaggca

SEQ ID NO: 40233 - DNA, 20 bp, synthetic construct
  source 1..20: mol_type = other DNA
atacaaaaaattagccaggc

SEQ ID NO: 40234 - DNA, 20 bp, synthetic construct
  source 1..20: mol_type = other DNA
tatacaaaaaattagccagg

SEQ ID NO: 40235 - DNA, 20 bp, synthetic construct
  source 1..20: mol_type = other DNA
atatacaaaaaattagccag

SEQ ID NO: 40236 - DNA, 20 bp, synthetic construct
  source 1..20: mol_type = other DNA
gatatacaaaaaattagcca

SEQ ID NO: 40237 - DNA, 20 bp, synthetic construct
  source 1..20: mol_type = other DNA
agatatacaaaaaattagcc

SEQ ID NO: 40238 - DNA, 20 bp, synthetic construct
  source 1..20: mol_type = other DNA
tagatatacaaaaaattagc

SEQ ID NO: 40239 - DNA, 20 bp, synthetic construct
  source 1..20: mol_type = other DNA
ctagatatacaaaaaattag

SEQ ID NO: 40240 - DNA, 20 bp, synthetic construct
  source 1..20: mol_type = other DNA
actagatatacaaaaaatta

SEQ ID NO: 40241 - DNA, 20 bp, synthetic construct
  source 1..20: mol_type = other DNA
tactagatatacaaaaaatt

SEQ ID NO: 40242 - DNA, 20 bp, synthetic construct
  source 1..20: mol_type = other DNA
ctactagatatacaaaaaat

SEQ ID NO: 40243 - DNA, 20 bp, synthetic construct
  source 1..20: mol_type = other DNA
actactagatatacaaaaaa

SEQ ID NO: 40244 - DNA, 20 bp, synthetic construct
  source 1..20: mol_type = other DNA
cactactagatatacaaaaa

SEQ ID NO: 40245 - DNA, 20 bp, synthetic construct
  source 1..20: mol_type = other DNA
tcactactagatatacaaaa

SEQ ID NO: 40246 - DNA, 20 bp, synthetic construct
  source 1..20: mol_type = other DNA
atcactactagatatacaaa

SEQ ID NO: 40247 - DNA, 20 bp, synthetic construct
  source 1..20: mol_type = other DNA
catcactactagatatacaa

SEQ ID NO: 40248 - DNA, 20 bp, synthetic construct
  source 1..20: mol_type = other DNA
ccatcactactagatataca

SEQ ID NO: 40249 - DNA, 20 bp, synthetic construct
  source 1..20: mol_type = other DNA
tccatcactactagatatac

SEQ ID NO: 40250 - DNA, 20 bp, synthetic construct
  source 1..20: mol_type = other DNA
ctccatcactactagatata

SEQ ID NO: 40251 - DNA, 20 bp, synthetic construct
  source 1..20: mol_type = other DNA
actccatcactactagatat

SEQ ID NO: 40252 - DNA, 20 bp, synthetic construct
  source 1..20: mol_type = other DNA
aactccatcactactagata

SEQ ID NO: 40253 - DNA, 20 bp, synthetic construct
  source 1..20: mol_type = other DNA
aaactccatcactactagat

SEQ ID NO: 40254 - DNA, 20 bp, synthetic construct
  source 1..20: mol_type = other DNA
caaactccatcactactaga

SEQ ID NO: 40255 - DNA, 20 bp, synthetic construct
  source 1..20: mol_type = other DNA
tcaaactccatcactactag

SEQ ID NO: 40256 - DNA, 20 bp, synthetic construct
  source 1..20: mol_type = other DNA
ctcaaactccatcactacta

SEQ ID NO: 40257 - DNA, 20 bp, synthetic construct
  source 1..20: mol_type = other DNA
gctcaaactccatcactact

SEQ ID NO: 40258 - DNA, 20 bp, synthetic construct
  source 1..20: mol_type = other DNA
tgctcaaactccatcactac

SEQ ID NO: 40259 - DNA, 20 bp, synthetic construct
  source 1..20: mol_type = other DNA
atgctcaaactccatcacta

SEQ ID NO: 40260 - DNA, 20 bp, synthetic construct
  source 1..20: mol_type = other DNA
catgctcaaactccatcact

SEQ ID NO: 40261 - DNA, 20 bp, synthetic construct
  source 1..20: mol_type = other DNA
acatgctcaaactccatcac

SEQ ID NO: 40262 - DNA, 20 bp, synthetic construct
  source 1..20: mol_type = other DNA
aacatgctcaaactccatca

SEQ ID NO: 40263 - DNA, 20 bp, synthetic construct
  source 1..20: mol_type = other DNA
caacatgctcaaactccatc

SEQ ID NO: 40264 - DNA, 20 bp, synthetic construct
  source 1..20: mol_type = other DNA
gcaacatgctcaaactccat

SEQ ID NO: 40265 - DNA, 20 bp, synthetic construct
  source 1..20: mol_type = other DNA
ggcaacatgctcaaactcca

SEQ ID NO: 40266 - DNA, 20 bp, synthetic construct
  source 1..20: mol_type = other DNA
tggcaacatgctcaaactcc

SEQ ID NO: 40267 - DNA, 20 bp, synthetic construct
  source 1..20: mol_type = other DNA
ctggcaacatgctcaaactc

SEQ ID NO: 40268 - DNA, 20 bp, synthetic construct
  source 1..20: mol_type = other DNA
cctggcaacatgctcaaact

SEQ ID NO: 40269 - DNA, 20 bp, synthetic construct
  source 1..20: mol_type = other DNA
gcctggcaacatgctcaaac

SEQ ID NO: 40270 - DNA, 20 bp, synthetic construct
  source 1..20: mol_type = other DNA
agcctggcaacatgctcaaa

SEQ ID NO: 40271 - DNA, 20 bp, synthetic construct
  source 1..20: mol_type = other DNA
cagcctggcaacatgctcaa

SEQ ID NO: 40272 - DNA, 20 bp, synthetic construct
  source 1..20: mol_type = other DNA
ccagcctggcaacatgctca

SEQ ID NO: 40273 - DNA, 20 bp, synthetic construct
  source 1..20: mol_type = other DNA
accagcctggcaacatgctc

SEQ ID NO: 40274 - DNA, 20 bp, synthetic construct
  source 1..20: mol_type = other DNA
gaccagcctggcaacatgct

SEQ ID NO: 40275 - DNA, 20 bp, synthetic construct
  source 1..20: mol_type = other DNA
agaccagcctggcaacatgc

SEQ ID NO: 40276 - DNA, 20 bp, synthetic construct
  source 1..20: mol_type = other DNA
aagaccagcctggcaacatg

SEQ ID NO: 40277 - DNA, 20 bp, synthetic construct
  source 1..20: mol_type = other DNA
caagaccagcctggcaacat

SEQ ID NO: 40278 - DNA, 20 bp, synthetic construct
  source 1..20: mol_type = other DNA
tcaagaccagcctggcaaca

SEQ ID NO: 40279 - DNA, 20 bp, synthetic construct
  source 1..20: mol_type = other DNA
ttcaagaccagcctggcaac

SEQ ID NO: 40280 - DNA, 20 bp, synthetic construct
  source 1..20: mol_type = other DNA
gttcaagaccagcctggcaa

SEQ ID NO: 40281 - DNA, 20 bp, synthetic construct
  source 1..20: mol_type = other DNA
ggttcaagaccagcctggca

SEQ ID NO: 40282 - DNA, 20 bp, synthetic construct
  source 1..20: mol_type = other DNA
aggttcaagaccagcctggc

SEQ ID NO: 40283 - DNA, 20 bp, synthetic construct
  source 1..20: mol_type = other DNA
gaggttcaagaccagcctgg

SEQ ID NO: 40284 - DNA, 20 bp, synthetic construct
  source 1..20: mol_type = other DNA
agaggttcaagaccagcctg

SEQ ID NO: 40285 - DNA, 20 bp, synthetic construct
  source 1..20: mol_type = other DNA
cagaggttcaagaccagcct

SEQ ID NO: 40286 - DNA, 20 bp, synthetic construct
  source 1..20: mol_type = other DNA
tcagaggttcaagaccagcc

SEQ ID NO: 40287 - DNA, 20 bp, synthetic construct
  source 1..20: mol_type = other DNA
gtcagaggttcaagaccagc

SEQ ID NO: 40288 - DNA, 20 bp, synthetic construct
  source 1..20: mol_type = other DNA
ggtcagaggttcaagaccag

SEQ ID NO: 40289 - DNA, 20 bp, synthetic construct
  source 1..20: mol_type = other DNA
aggtcagaggttcaagacca

SEQ ID NO: 40290 - DNA, 20 bp, synthetic construct
  source 1..20: mol_type = other DNA
gaggtcagaggttcaagacc

SEQ ID NO: 40291 - DNA, 20 bp, synthetic construct
  source 1..20: mol_type = other DNA
tgaggtcagaggttcaagac

SEQ ID NO: 40292 - DNA, 20 bp, synthetic construct
  source 1..20: mol_type = other DNA
ctgaggtcagaggttcaaga

SEQ ID NO: 40293 - DNA, 20 bp, synthetic construct
  source 1..20: mol_type = other DNA
cctgaggtcagaggttcaag

SEQ ID NO: 40294 - DNA, 20 bp, synthetic construct
  source 1..20: mol_type = other DNA
acctgaggtcagaggttcaa

SEQ ID NO: 40295 - DNA, 20 bp, synthetic construct
  source 1..20: mol_type = other DNA
cacctgaggtcagaggttca

SEQ ID NO: 40296 - DNA, 20 bp, synthetic construct
  source 1..20: mol_type = other DNA
tcacctgaggtcagaggttc

SEQ ID NO: 40297 - DNA, 20 bp, synthetic construct
  source 1..20: mol_type = other DNA
atcacctgaggtcagaggtt

SEQ ID NO: 40298 - DNA, 20 bp, synthetic construct
  source 1..20: mol_type = other DNA
gatcacctgaggtcagaggt

SEQ ID NO: 40299 - DNA, 20 bp, synthetic construct
  source 1..20: mol_type = other DNA
ggatcacctgaggtcagagg

SEQ ID NO: 40300 - DNA, 20 bp, synthetic construct
  source 1..20: mol_type = other DNA
tggatcacctgaggtcagag

SEQ ID NO: 40301 - DNA, 20 bp, synthetic construct
  source 1..20: mol_type = other DNA
gtggatcacctgaggtcaga

SEQ ID NO: 40302 - DNA, 20 bp, synthetic construct
  source 1..20: mol_type = other DNA
ggtggatcacctgaggtcag

SEQ ID NO: 40303 - DNA, 20 bp, synthetic construct
  source 1..20: mol_type = other DNA
aggtggatcacctgaggtca

SEQ ID NO: 40304 - DNA, 20 bp, synthetic construct
  source 1..20: mol_type = other DNA
caggtggatcacctgaggtc

SEQ ID NO: 40305 - DNA, 20 bp, synthetic construct
  source 1..20: mol_type = other DNA
gcaggtggatcacctgaggt

SEQ ID NO: 40306 - DNA, 20 bp, synthetic construct
  source 1..20: mol_type = other DNA
ggcaggtggatcacctgagg

SEQ ID NO: 40307 - DNA, 20 bp, synthetic construct
  source 1..20: mol_type = other DNA
aggcaggtggatcacctgag

SEQ ID NO: 40308 - DNA, 20 bp, synthetic construct
  source 1..20: mol_type = other DNA
aaggcaggtggatcacctga

SEQ ID NO: 40309 - DNA, 20 bp, synthetic construct
  source 1..20: mol_type = other DNA
caaggcaggtggatcacctg

SEQ ID NO: 40310 - DNA, 20 bp, synthetic construct
  source 1..20: mol_type = other DNA
ccaaggcaggtggatcacct

SEQ ID NO: 40311 - DNA, 20 bp, synthetic construct
  source 1..20: mol_type = other DNA
gccaaggcaggtggatcacc

SEQ ID NO: 40312 - DNA, 20 bp, synthetic construct
  source 1..20: mol_type = other DNA
ggccaaggcaggtggatcac

SEQ ID NO: 40313 - DNA, 20 bp, synthetic construct
  source 1..20: mol_type = other DNA
aggccaaggcaggtggatca

SEQ ID NO: 40314 - DNA, 20 bp, synthetic construct
  source 1..20: mol_type = other DNA
gaggccaaggcaggtggatc

SEQ ID NO: 40315 - DNA, 20 bp, synthetic construct
  source 1..20: mol_type = other DNA
ggaggccaaggcaggtggat

SEQ ID NO: 40316 - DNA, 20 bp, synthetic construct
  source 1..20: mol_type = other DNA
gggaggccaaggcaggtgga

SEQ ID NO: 40317 - DNA, 20 bp, synthetic construct
  source 1..20: mol_type = other DNA
tgggaggccaaggcaggtgg

SEQ ID NO: 40318 - DNA, 20 bp, synthetic construct
  source 1..20: mol_type = other DNA
ttgggaggccaaggcaggtg

SEQ ID NO: 40319 - DNA, 20 bp, synthetic construct
  source 1..20: mol_type = other DNA
tttgggaggccaaggcaggt

SEQ ID NO: 40320 - DNA, 20 bp, synthetic construct
  source 1..20: mol_type = other DNA
ctttgggaggccaaggcagg

SEQ ID NO: 40321 - DNA, 20 bp, synthetic construct
  source 1..20: mol_type = other DNA
actttgggaggccaaggcag

SEQ ID NO: 40322 - DNA, 20 bp, synthetic construct
  source 1..20: mol_type = other DNA
cactttgggaggccaaggca

SEQ ID NO: 40323 - DNA, 20 bp, synthetic construct
  source 1..20: mol_type = other DNA
gcactttgggaggccaaggc

SEQ ID NO: 40324 - DNA, 20 bp, synthetic construct
  source 1..20: mol_type = other DNA
agcactttgggaggccaagg

SEQ ID NO: 40325 - DNA, 20 bp, synthetic construct
  source 1..20: mol_type = other DNA
cagcactttgggaggccaag

SEQ ID NO: 40326 - DNA, 20 bp, synthetic construct
  source 1..20: mol_type = other DNA
ccagcactttgggaggccaa

SEQ ID NO: 40327 - DNA, 20 bp, synthetic construct
  source 1..20: mol_type = other DNA
cccagcactttgggaggcca

SEQ ID NO: 40328 - DNA, 20 bp, synthetic construct
  source 1..20: mol_type = other DNA
tcccagcactttgggaggcc

SEQ ID NO: 40329 - DNA, 20 bp, synthetic construct
  source 1..20: mol_type = other DNA
atcccagcactttgggaggc

SEQ ID NO: 40330 - DNA, 20 bp, synthetic construct
  source 1..20: mol_type = other DNA
aatcccagcactttgggagg

SEQ ID NO: 40331 - DNA, 20 bp, synthetic construct
  source 1..20: mol_type = other DNA
taatcccagcactttgggag

SEQ ID NO: 40332 - DNA, 20 bp, synthetic construct
  source 1..20: mol_type = other DNA
ttaatcccagcactttggga

SEQ ID NO: 40333 - DNA, 20 bp, synthetic construct
  source 1..20: mol_type = other DNA
cttaatcccagcactttggg

SEQ ID NO: 40334 - DNA, 20 bp, synthetic construct
  source 1..20: mol_type = other DNA
ccttaatcccagcactttgg

SEQ ID NO: 40335 - DNA, 20 bp, synthetic construct
  source 1..20: mol_type = other DNA
gccttaatcccagcactttg

SEQ ID NO: 40336 - DNA, 20 bp, synthetic construct
  source 1..20: mol_type = other DNA
tgccttaatcccagcacttt

SEQ ID NO: 40337 - DNA, 20 bp, synthetic construct
  source 1..20: mol_type = other DNA
atgccttaatcccagcactt

SEQ ID NO: 40338 - DNA, 20 bp, synthetic construct
  source 1..20: mol_type = other DNA
catgccttaatcccagcact

SEQ ID NO: 40339 - DNA, 20 bp, synthetic construct
  source 1..20: mol_type = other DNA
tcatgccttaatcccagcac

SEQ ID NO: 40340 - DNA, 20 bp, synthetic construct
  source 1..20: mol_type = other DNA
ctcatgccttaatcccagca

SEQ ID NO: 40341 - DNA, 20 bp, synthetic construct
  source 1..20: mol_type = other DNA
gctcatgccttaatcccagc

SEQ ID NO: 40342 - DNA, 20 bp, synthetic construct
  source 1..20: mol_type = other DNA
ggctcatgccttaatcccag

SEQ ID NO: 40343 - DNA, 20 bp, synthetic construct
  source 1..20: mol_type = other DNA
tggctcatgccttaatccca

SEQ ID NO: 40344 - DNA, 20 bp, synthetic construct
  source 1..20: mol_type = other DNA
gtggctcatgccttaatccc

SEQ ID NO: 40345 - DNA, 20 bp, synthetic construct
  source 1..20: mol_type = other DNA
ggtggctcatgccttaatcc

SEQ ID NO: 40346 - DNA, 20 bp, synthetic construct
  source 1..20: mol_type = other DNA
tggtggctcatgccttaatc

SEQ ID NO: 40347 - DNA, 20 bp, synthetic construct
  source 1..20: mol_type = other DNA
atggtggctcatgccttaat

SEQ ID NO: 40348 - DNA, 20 bp, synthetic construct
  source 1..20: mol_type = other DNA
catggtggctcatgccttaa

SEQ ID NO: 40349 - DNA, 20 bp, synthetic construct
  source 1..20: mol_type = other DNA
gcatggtggctcatgcctta

SEQ ID NO: 40350 - DNA, 20 bp, synthetic construct
  source 1..20: mol_type = other DNA
ggcatggtggctcatgcctt

SEQ ID NO: 40351 - DNA, 20 bp, synthetic construct
  source 1..20: mol_type = other DNA
gggcatggtggctcatgcct

SEQ ID NO: 40352 - DNA, 20 bp, synthetic construct
  source 1..20: mol_type = other DNA
cgggcatggtggctcatgcc

SEQ ID NO: 40353 - DNA, 20 bp, synthetic construct
  source 1..20: mol_type = other DNA
ccgggcatggtggctcatgc

SEQ ID NO: 40354 - DNA, 20 bp, synthetic construct
  source 1..20: mol_type = other DNA
gccgggcatggtggctcatg

SEQ ID NO: 40355 - DNA, 20 bp, synthetic construct
  source 1..20: mol_type = other DNA
ggccgggcatggtggctcat

SEQ ID NO: 40356 - DNA, 20 bp, synthetic construct
  source 1..20: mol_type = other DNA
tggccgggcatggtggctca

SEQ ID NO: 40357 - DNA, 20 bp, synthetic construct
  source 1..20: mol_type = other DNA
ctggccgggcatggtggctc

SEQ ID NO: 40358 - DNA, 20 bp, synthetic construct
  source 1..20: mol_type = other DNA
tctggccgggcatggtggct

SEQ ID NO: 40359 - DNA, 20 bp, synthetic construct
  source 1..20: mol_type = other DNA
ctctggccgggcatggtggc

SEQ ID NO: 40360 - DNA, 20 bp, synthetic construct
  source 1..20: mol_type = other DNA
tctctggccgggcatggtgg

SEQ ID NO: 40361 - DNA, 20 bp, synthetic construct
  source 1..20: mol_type = other DNA
gtctctggccgggcatggtg

SEQ ID NO: 40362 - DNA, 20 bp, synthetic construct
  source 1..20: mol_type = other DNA
agtctctggccgggcatggt

SEQ ID NO: 40363 - DNA, 20 bp, synthetic construct
  source 1..20: mol_type = other DNA
cagtctctggccgggcatgg

SEQ ID NO: 40364 - DNA, 20 bp, synthetic construct
  source 1..20: mol_type = other DNA
acagtctctggccgggcatg

SEQ ID NO: 40365 - DNA, 20 bp, synthetic construct
  source 1..20: mol_type = other DNA
aacagtctctggccgggcat

SEQ ID NO: 40366 - DNA, 20 bp, synthetic construct
  source 1..20: mol_type = other DNA
gaacagtctctggccgggca

SEQ ID NO: 40367 - DNA, 20 bp, synthetic construct
  source 1..20: mol_type = other DNA
tgaacagtctctggccgggc

SEQ ID NO: 40368 - DNA, 20 bp, synthetic construct
  source 1..20: mol_type = other DNA
atgaacagtctctggccggg

SEQ ID NO: 40369 - DNA, 20 bp, synthetic construct
  source 1..20: mol_type = other DNA
aatgaacagtctctggccgg

SEQ ID NO: 40370 - DNA, 20 bp, synthetic construct
  source 1..20: mol_type = other DNA
aaatgaacagtctctggccg

SEQ ID NO: 40371 - DNA, 20 bp, synthetic construct
  source 1..20: mol_type = other DNA
taaatgaacagtctctggcc

SEQ ID NO: 40372 - DNA, 20 bp, synthetic construct
  source 1..20: mol_type = other DNA
ataaatgaacagtctctggc

SEQ ID NO: 40373 - DNA, 20 bp, synthetic construct
  source 1..20: mol_type = other DNA
aataaatgaacagtctctgg

SEQ ID NO: 40374 - DNA, 20 bp, synthetic construct
  source 1..20: mol_type = other DNA
aaataaatgaacagtctctg

SEQ ID NO: 40375 - DNA, 20 bp, synthetic construct
  source 1..20: mol_type = other DNA
aaaataaatgaacagtctct

SEQ ID NO: 40376 - DNA, 20 bp, synthetic construct
  source 1..20: mol_type = other DNA
aaaaataaatgaacagtctc

SEQ ID NO: 40377 - DNA, 20 bp, synthetic construct
  source 1..20: mol_type = other DNA
aaaaaataaatgaacagtct

SEQ ID NO: 40378 - DNA, 20 bp, synthetic construct
  source 1..20: mol_type = other DNA
aaaaaaataaatgaacagtc

SEQ ID NO: 40379 - DNA, 20 bp, synthetic construct
  source 1..20: mol_type = other DNA
aaaaaaaataaatgaacagt

SEQ ID NO: 40380 - DNA, 20 bp, synthetic construct
  source 1..20: mol_type = other DNA
aaaaaaaaataaatgaacag

SEQ ID NO: 40381 - DNA, 20 bp, synthetic construct
  source 1..20: mol_type = other DNA
aaaaaaaaaataaatgaaca

SEQ ID NO: 40382 - DNA, 20 bp, synthetic construct
  source 1..20: mol_type = other DNA
aaaaaaaaaaataaatgaac

SEQ ID NO: 40383 - DNA, 20 bp, synthetic construct
  source 1..20: mol_type = other DNA
aaaaaaaaaaaataaatgaa

SEQ ID NO: 40384 - DNA, 20 bp, synthetic construct
  source 1..20: mol_type = other DNA
caaaaaaaaaaaataaatga

SEQ ID NO: 40385 - DNA, 20 bp, synthetic construct
  source 1..20: mol_type = other DNA
tcaaaaaaaaaaaataaatg

SEQ ID NO: 40386 - DNA, 20 bp, synthetic construct
  source 1..20: mol_type = other DNA
ctcaaaaaaaaaaaataaat

SEQ ID NO: 40387 - DNA, 20 bp, synthetic construct
  source 1..20: mol_type = other DNA
cctcaaaaaaaaaaaataaa

SEQ ID NO: 40388 - DNA, 20 bp, synthetic construct
  source 1..20: mol_type = other DNA
gcctcaaaaaaaaaaaataa

SEQ ID NO: 40389 - DNA, 20 bp, synthetic construct
  source 1..20: mol_type = other DNA
cgcctcaaaaaaaaaaaata

SEQ ID NO: 40390 - DNA, 20 bp, synthetic construct
  source 1..20: mol_type = other DNA
ccgcctcaaaaaaaaaaaat

SEQ ID NO: 40391 - DNA, 20 bp, synthetic construct
  source 1..20: mol_type = other DNA
tccgcctcaaaaaaaaaaaa

SEQ ID NO: 40392 - DNA, 20 bp, synthetic construct
  source 1..20: mol_type = other DNA
ctccgcctcaaaaaaaaaaa

SEQ ID NO: 40393 - DNA, 20 bp, synthetic construct
  source 1..20: mol_type = other DNA
actccgcctcaaaaaaaaaa

SEQ ID NO: 40394 - DNA, 20 bp, synthetic construct
  source 1..20: mol_type = other DNA
gactccgcctcaaaaaaaaa

SEQ ID NO: 40395 - DNA, 20 bp, synthetic construct
  source 1..20: mol_type = other DNA
agactccgcctcaaaaaaaa

SEQ ID NO: 40396 - DNA, 20 bp, synthetic construct
  source 1..20: mol_type = other DNA
gagactccgcctcaaaaaaa

SEQ ID NO: 40397 - DNA, 20 bp, synthetic construct
  source 1..20: mol_type = other DNA
cgagactccgcctcaaaaaa

SEQ ID NO: 40398 - DNA, 20 bp, synthetic construct
  source 1..20: mol_type = other DNA
gcgagactccgcctcaaaaa

SEQ ID NO: 40399 - DNA, 20 bp, synthetic construct
  source 1..20: mol_type = other DNA
agcgagactccgcctcaaaa

SEQ ID NO: 40400 - DNA, 20 bp, synthetic construct
  source 1..20: mol_type = other DNA
cagcgagactccgcctcaaa

SEQ ID NO: 40401 - DNA, 20 bp, synthetic construct
  source 1..20: mol_type = other DNA
acagcgagactccgcctcaa

SEQ ID NO: 40402 - DNA, 20 bp, synthetic construct
  source 1..20: mol_type = other DNA
tacagcgagactccgcctca

SEQ ID NO: 40403 - DNA, 20 bp, synthetic construct
  source 1..20: mol_type = other DNA
atacagcgagactccgcctc

SEQ ID NO: 40404 - DNA, 20 bp, synthetic construct
  source 1..20: mol_type = other DNA
aatacagcgagactccgcct

SEQ ID NO: 40405 - DNA, 20 bp, synthetic construct
  source 1..20: mol_type = other DNA
caatacagcgagactccgcc

SEQ ID NO: 40406 - DNA, 20 bp, synthetic construct
  source 1..20: mol_type = other DNA
gcaatacagcgagactccgc

SEQ ID NO: 40407 - DNA, 20 bp, synthetic construct
  source 1..20: mol_type = other DNA
ggcaatacagcgagactccg

SEQ ID NO: 40408 - DNA, 20 bp, synthetic construct
  source 1..20: mol_type = other DNA
gggcaatacagcgagactcc

SEQ ID NO: 40409 - DNA, 20 bp, synthetic construct
  source 1..20: mol_type = other DNA
tgggcaatacagcgagactc

SEQ ID NO: 40410 - DNA, 20 bp, synthetic construct
  source 1..20: mol_type = other DNA
ctgggcaatacagcgagact

SEQ ID NO: 40411 - DNA, 20 bp, synthetic construct
  source 1..20: mol_type = other DNA
cctgggcaatacagcgagac

SEQ ID NO: 40412 - DNA, 20 bp, synthetic construct
  source 1..20: mol_type = other DNA
gcctgggcaatacagcgaga

SEQ ID NO: 40413 - DNA, 20 bp, synthetic construct
  source 1..20: mol_type = other DNA
agcctgggcaatacagcgag

SEQ ID NO: 40414 - DNA, 20 bp, synthetic construct
  source 1..20: mol_type = other DNA
cagcctgggcaatacagcga

SEQ ID NO: 40415 - DNA, 20 bp, synthetic construct
  source 1..20: mol_type = other DNA
ccagcctgggcaatacagcg

SEQ ID NO: 40416 - DNA, 20 bp, synthetic construct
  source 1..20: mol_type = other DNA
tccagcctgggcaatacagc

SEQ ID NO: 40417 - DNA, 20 bp, synthetic construct
  source 1..20: mol_type = other DNA
ctccagcctgggcaatacag

SEQ ID NO: 40418 - DNA, 20 bp, synthetic construct
  source 1..20: mol_type = other DNA
actccagcctgggcaataca

SEQ ID NO: 40419 - DNA, 20 bp, synthetic construct
  source 1..20: mol_type = other DNA
cactccagcctgggcaatac

SEQ ID NO: 40420 - DNA, 20 bp, synthetic construct
  source 1..20: mol_type = other DNA
gcactccagcctgggcaata

SEQ ID NO: 40421 - DNA, 20 bp, synthetic construct
  source 1..20: mol_type = other DNA
tgcactccagcctgggcaat

SEQ ID NO: 40422 - DNA, 20 bp, synthetic construct
  source 1..20: mol_type = other DNA
ctgcactccagcctgggcaa

SEQ ID NO: 40423 - DNA, 20 bp, synthetic construct
  source 1..20: mol_type = other DNA
actgcactccagcctgggca

SEQ ID NO: 40424 - DNA, 20 bp, synthetic construct
  source 1..20: mol_type = other DNA
cactgcactccagcctgggc

SEQ ID NO: 40425 - DNA, 20 bp, synthetic construct
  source 1..20: mol_type = other DNA
ccactgcactccagcctggg

SEQ ID NO: 40426 - DNA, 20 bp, synthetic construct
  source 1..20: mol_type = other DNA
gccactgcactccagcctgg

SEQ ID NO: 40427 - DNA, 20 bp, synthetic construct
  source 1..20: mol_type = other DNA
tgccactgcactccagcctg

SEQ ID NO: 40428 - DNA, 20 bp, synthetic construct
  source 1..20: mol_type = other DNA
gtgccactgcactccagcct

SEQ ID NO: 40429 - DNA, 20 bp, synthetic construct
  source 1..20: mol_type = other DNA
tgtgccactgcactccagcc

SEQ ID NO: 40430 - DNA, 20 bp, synthetic construct
  source 1..20: mol_type = other DNA
ttgtgccactgcactccagc

SEQ ID NO: 40431 - DNA, 20 bp, synthetic construct
  source 1..20: mol_type = other DNA
attgtgccactgcactccag

SEQ ID NO: 40432 - DNA, 20 bp, synthetic construct
  source 1..20: mol_type = other DNA
gattgtgccactgcactcca

SEQ ID NO: 40433 - DNA, 20 bp, synthetic construct
  source 1..20: mol_type = other DNA
agattgtgccactgcactcc

SEQ ID NO: 40434 - DNA, 20 bp, synthetic construct
  source 1..20: mol_type = other DNA
gagattgtgccactgcactc

SEQ ID NO: 40435 - DNA, 20 bp, synthetic construct
  source 1..20: mol_type = other DNA
cgagattgtgccactgcact

SEQ ID NO: 40436 - DNA, 20 bp, synthetic construct
  source 1..20: mol_type = other DNA
ccgagattgtgccactgcac

SEQ ID NO: 40437 - DNA, 20 bp, synthetic construct
  source 1..20: mol_type = other DNA
gccgagattgtgccactgca

SEQ ID NO: 40438 - DNA, 20 bp, synthetic construct
  source 1..20: mol_type = other DNA
agccgagattgtgccactgc

SEQ ID NO: 40439 - DNA, 20 bp, synthetic construct
  source 1..20: mol_type = other DNA
gagccgagattgtgccactg

SEQ ID NO: 40440 - DNA, 20 bp, synthetic construct
  source 1..20: mol_type = other DNA
tgagccgagattgtgccact

SEQ ID NO: 40441 - DNA, 20 bp, synthetic construct
  source 1..20: mol_type = other DNA
gtgagccgagattgtgccac

SEQ ID NO: 40442 - DNA, 20 bp, synthetic construct
  source 1..20: mol_type = other DNA
agtgagccgagattgtgcca

SEQ ID NO: 40443 - DNA, 20 bp, synthetic construct
  source 1..20: mol_type = other DNA
cagtgagccgagattgtgcc

SEQ ID NO: 40444 - DNA, 20 bp, synthetic construct
  source 1..20: mol_type = other DNA
gcagtgagccgagattgtgc

SEQ ID NO: 40445 - DNA, 20 bp, synthetic construct
  source 1..20: mol_type = other DNA
tgcagtgagccgagattgtg

SEQ ID NO: 40446 - DNA, 20 bp, synthetic construct
  source 1..20: mol_type = other DNA
ttgcagtgagccgagattgt

SEQ ID NO: 40447 - DNA, 20 bp, synthetic construct
  source 1..20: mol_type = other DNA
cttgcagtgagccgagattg

SEQ ID NO: 40448 - DNA, 20 bp, synthetic construct
  source 1..20: mol_type = other DNA
gcttgcagtgagccgagatt

SEQ ID NO: 40449 - DNA, 20 bp, synthetic construct
  source 1..20: mol_type = other DNA
agcttgcagtgagccgagat

SEQ ID NO: 40450 - DNA, 20 bp, synthetic construct
  source 1..20: mol_type = other DNA
gagcttgcagtgagccgaga

SEQ ID NO: 40451 - DNA, 20 bp, synthetic construct
  source 1..20: mol_type = other DNA
ggagcttgcagtgagccgag

SEQ ID NO: 40452 - DNA, 20 bp, synthetic construct
  source 1..20: mol_type = other DNA
cggagcttgcagtgagccga

SEQ ID NO: 40453 - DNA, 20 bp, synthetic construct
  source 1..20: mol_type = other DNA
gcggagcttgcagtgagccg

SEQ ID NO: 40454 - DNA, 20 bp, synthetic construct
  source 1..20: mol_type = other DNA
ggcggagcttgcagtgagcc

SEQ ID NO: 40455 - DNA, 20 bp, synthetic construct
  source 1..20: mol_type = other DNA
aggcggagcttgcagtgagc

SEQ ID NO: 40456 - DNA, 20 bp, synthetic construct
  source 1..20: mol_type = other DNA
gaggcggagcttgcagtgag

SEQ ID NO: 40457 - DNA, 20 bp, synthetic construct
  source 1..20: mol_type = other DNA
ggaggcggagcttgcagtga

SEQ ID NO: 40458 - DNA, 20 bp, synthetic construct
  source 1..20: mol_type = other DNA
gggaggcggagcttgcagtg

SEQ ID NO: 40459 - DNA, 20 bp, synthetic construct
  source 1..20: mol_type = other DNA
tgggaggcggagcttgcagt

SEQ ID NO: 40460 - DNA, 20 bp, synthetic construct
  source 1..20: mol_type = other DNA
ttgggaggcggagcttgcag

SEQ ID NO: 40461 - DNA, 20 bp, synthetic construct
  source 1..20: mol_type = other DNA
cttgggaggcggagcttgca

SEQ ID NO: 40462 - DNA, 20 bp, synthetic construct
  source 1..20: mol_type = other DNA
acttgggaggcggagcttgc

SEQ ID NO: 40463 - DNA, 20 bp, synthetic construct
  source 1..20: mol_type = other DNA
aacttgggaggcggagcttg

SEQ ID NO: 40464 - DNA, 20 bp, synthetic construct
  source 1..20: mol_type = other DNA
gaacttgggaggcggagctt

SEQ ID NO: 40465 - DNA, 20 bp, synthetic construct
  source 1..20: mol_type = other DNA
tgaacttgggaggcggagct

SEQ ID NO: 40466 - DNA, 20 bp, synthetic construct
  source 1..20: mol_type = other DNA
gtgaacttgggaggcggagc

SEQ ID NO: 40467 - DNA, 20 bp, synthetic construct
  source 1..20: mol_type = other DNA
tgtgaacttgggaggcggag

SEQ ID NO: 40468 - DNA, 20 bp, synthetic construct
  source 1..20: mol_type = other DNA
gtgtgaacttgggaggcgga

SEQ ID NO: 40469 - DNA, 20 bp, synthetic construct
  source 1..20: mol_type = other DNA
ggtgtgaacttgggaggcgg

SEQ ID NO: 40470 - DNA, 20 bp, synthetic construct
  source 1..20: mol_type = other DNA
tggtgtgaacttgggaggcg

SEQ ID NO: 40471 - DNA, 20 bp, synthetic construct
  source 1..20: mol_type = other DNA
atggtgtgaacttgggaggc

SEQ ID NO: 40472 - DNA, 20 bp, synthetic construct
  source 1..20: mol_type = other DNA
aatggtgtgaacttgggagg

SEQ ID NO: 40473 - DNA, 20 bp, synthetic construct
  source 1..20: mol_type = other DNA
caatggtgtgaacttgggag

SEQ ID NO: 40474 - DNA, 20 bp, synthetic construct
  source 1..20: mol_type = other DNA
acaatggtgtgaacttggga

SEQ ID NO: 40475 - DNA, 20 bp, synthetic construct
  source 1..20: mol_type = other DNA
gacaatggtgtgaacttggg

SEQ ID NO: 40476 - DNA, 20 bp, synthetic construct
  source 1..20: mol_type = other DNA
ggacaatggtgtgaacttgg

SEQ ID NO: 40477 - DNA, 20 bp, synthetic construct
  source 1..20: mol_type = other DNA
aggacaatggtgtgaacttg

SEQ ID NO: 40478 - DNA, 20 bp, synthetic construct
  source 1..20: mol_type = other DNA
caggacaatggtgtgaactt

SEQ ID NO: 40479 - DNA, 20 bp, synthetic construct
  source 1..20: mol_type = other DNA
gcaggacaatggtgtgaact

SEQ ID NO: 40480 - DNA, 20 bp, synthetic construct
  source 1..20: mol_type = other DNA
ggcaggacaatggtgtgaac

SEQ ID NO: 40481 - DNA, 20 bp, synthetic construct
  source 1..20: mol_type = other DNA
aggcaggacaatggtgtgaa

SEQ ID NO: 40482 - DNA, 20 bp, synthetic construct
  source 1..20: mol_type = other DNA
aaggcaggacaatggtgtga

SEQ ID NO: 40483 - DNA, 20 bp, synthetic construct
  source 1..20: mol_type = other DNA
taaggcaggacaatggtgtg

SEQ ID NO: 40484 - DNA, 20 bp, synthetic construct
  source 1..20: mol_type = other DNA
ctaaggcaggacaatggtgt

SEQ ID NO: 40485 - DNA, 20 bp, synthetic construct
  source 1..20: mol_type = other DNA
gctaaggcaggacaatggtg

SEQ ID NO: 40486 - DNA, 20 bp, synthetic construct
  source 1..20: mol_type = other DNA
ggctaaggcaggacaatggt

SEQ ID NO: 40487 - DNA, 20 bp, synthetic construct
  source 1..20: mol_type = other DNA
aggctaaggcaggacaatgg

SEQ ID NO: 40488 - DNA, 20 bp, synthetic construct
  source 1..20: mol_type = other DNA
gaggctaaggcaggacaatg

SEQ ID NO: 40489 - DNA, 20 bp, synthetic construct
  source 1..20: mol_type = other DNA
ggaggctaaggcaggacaat

SEQ ID NO: 40490 - DNA, 20 bp, synthetic construct
  source 1..20: mol_type = other DNA
aggaggctaaggcaggacaa

SEQ ID NO: 40491 - DNA, 20 bp, synthetic construct
  source 1..20: mol_type = other DNA
caggaggctaaggcaggaca

SEQ ID NO: 40492 - DNA, 20 bp, synthetic construct
  source 1..20: mol_type = other DNA
tcaggaggctaaggcaggac

SEQ ID NO: 40493 - DNA, 20 bp, synthetic construct
  source 1..20: mol_type = other DNA
ctcaggaggctaaggcagga

SEQ ID NO: 40494 - DNA, 20 bp, synthetic construct
  source 1..20: mol_type = other DNA
actcaggaggctaaggcagg

SEQ ID NO: 40495 - DNA, 20 bp, synthetic construct
  source 1..20: mol_type = other DNA
tactcaggaggctaaggcag

SEQ ID NO: 40496 - DNA, 20 bp, synthetic construct
  source 1..20: mol_type = other DNA
ctactcaggaggctaaggca

SEQ ID NO: 40497 - DNA, 20 bp, synthetic construct
  source 1..20: mol_type = other DNA
gctactcaggaggctaaggc

SEQ ID NO: 40498 - DNA, 20 bp, synthetic construct
  source 1..20: mol_type = other DNA
agctactcaggaggctaagg

SEQ ID NO: 40499 - DNA, 20 bp, synthetic construct
  source 1..20: mol_type = other DNA
cagctactcaggaggctaag

SEQ ID NO: 40500 - DNA, 20 bp, synthetic construct
  source 1..20: mol_type = other DNA
ccagctactcaggaggctaa

SEQ ID NO: 40501 - DNA, 20 bp, synthetic construct
  source 1..20: mol_type = other DNA
cccagctactcaggaggcta

SEQ ID NO: 40502 - DNA, 20 bp, synthetic construct
  source 1..20: mol_type = other DNA
tcccagctactcaggaggct

SEQ ID NO: 40503 - DNA, 20 bp, synthetic construct
  source 1..20: mol_type = other DNA
gtcccagctactcaggaggc

SEQ ID NO: 40504 - DNA, 20 bp, synthetic construct
  source 1..20: mol_type = other DNA
agtcccagctactcaggagg

SEQ ID NO: 40505 - DNA, 20 bp, synthetic construct
  source 1..20: mol_type = other DNA
tagtcccagctactcaggag

SEQ ID NO: 40506 - DNA, 20 bp, synthetic construct
  source 1..20: mol_type = other DNA
gtagtcccagctactcagga

SEQ ID NO: 40507 - DNA, 20 bp, synthetic construct
  source 1..20: mol_type = other DNA
tgtagtcccagctactcagg

SEQ ID NO: 40508 - DNA, 20 bp, synthetic construct
  source 1..20: mol_type = other DNA
ctgtagtcccagctactcag

SEQ ID NO: 40509 - DNA, 20 bp, synthetic construct
  source 1..20: mol_type = other DNA
cctgtagtcccagctactca

SEQ ID NO: 40510 - DNA, 20 bp, synthetic construct
  source 1..20: mol_type = other DNA
acctgtagtcccagctactc

SEQ ID NO: 40511 - DNA, 20 bp, synthetic construct
  source 1..20: mol_type = other DNA
cacctgtagtcccagctact

SEQ ID NO: 40512 - DNA, 20 bp, synthetic construct
  source 1..20: mol_type = other DNA
gcacctgtagtcccagctac

SEQ ID NO: 40513 - DNA, 20 bp, synthetic construct
  source 1..20: mol_type = other DNA
ggcacctgtagtcccagcta

SEQ ID NO: 40514 - DNA, 20 bp, synthetic construct
  source 1..20: mol_type = other DNA
aggcacctgtagtcccagct

SEQ ID NO: 40515 - DNA, 20 bp, synthetic construct
  source 1..20: mol_type = other DNA
caggcacctgtagtcccagc

SEQ ID NO: 40516 - DNA, 20 bp, synthetic construct
  source 1..20: mol_type = other DNA
gcaggcacctgtagtcccag

SEQ ID NO: 40517 - DNA, 20 bp, synthetic construct
  source 1..20: mol_type = other DNA
ggcaggcacctgtagtccca

SEQ ID NO: 40518 - DNA, 20 bp, synthetic construct
  source 1..20: mol_type = other DNA
tggcaggcacctgtagtccc

SEQ ID NO: 40519 - DNA, 20 bp, synthetic construct
  source 1..20: mol_type = other DNA
gtggcaggcacctgtagtcc

SEQ ID NO: 40520 - DNA, 20 bp, synthetic construct
  source 1..20: mol_type = other DNA
ggtggcaggcacctgtagtc

SEQ ID NO: 40521 - DNA, 20 bp, synthetic construct
  source 1..20: mol_type = other DNA
tggtggcaggcacctgtagt

SEQ ID NO: 40522 - DNA, 20 bp, synthetic construct
  source 1..20: mol_type = other DNA
gtggtggcaggcacctgtag

SEQ ID NO: 40523 - DNA, 20 bp, synthetic construct
  source 1..20: mol_type = other DNA
cgtggtggcaggcacctgta

SEQ ID NO: 40524 - DNA, 20 bp, synthetic construct
  source 1..20: mol_type = other DNA
gcgtggtggcaggcacctgt

SEQ ID NO: 40525 - DNA, 20 bp, synthetic construct
  source 1..20: mol_type = other DNA
ggcgtggtggcaggcacctg

SEQ ID NO: 40526 - DNA, 20 bp, synthetic construct
  source 1..20: mol_type = other DNA
aggcgtggtggcaggcacct

SEQ ID NO: 40527 - DNA, 20 bp, synthetic construct
  source 1..20: mol_type = other DNA
caggcgtggtggcaggcacc

SEQ ID NO: 40528 - DNA, 20 bp, synthetic construct
  source 1..20: mol_type = other DNA
ccaggcgtggtggcaggcac

SEQ ID NO: 40529 - DNA, 20 bp, synthetic construct
  source 1..20: mol_type = other DNA
gccaggcgtggtggcaggca

SEQ ID NO: 40530 - DNA, 20 bp, synthetic construct
  source 1..20: mol_type = other DNA
agccaggcgtggtggcaggc

SEQ ID NO: 40531 - DNA, 20 bp, synthetic construct
  source 1..20: mol_type = other DNA
tagccaggcgtggtggcagg

SEQ ID NO: 40532 - DNA, 20 bp, synthetic construct
  source 1..20: mol_type = other DNA
ttagccaggcgtggtggcag

SEQ ID NO: 40533 - DNA, 20 bp, synthetic construct
  source 1..20: mol_type = other DNA
attagccaggcgtggtggca

SEQ ID NO: 40534 - DNA, 20 bp, synthetic construct
  source 1..20: mol_type = other DNA
aattagccaggcgtggtggc

SEQ ID NO: 40535 - DNA, 20 bp, synthetic construct
  source 1..20: mol_type = other DNA
aaattagccaggcgtggtgg

SEQ ID NO: 40536 - DNA, 20 bp, synthetic construct
  source 1..20: mol_type = other DNA
aaaattagccaggcgtggtg

SEQ ID NO: 40537 - DNA, 20 bp, synthetic construct
  source 1..20: mol_type = other DNA
caaaattagccaggcgtggt

SEQ ID NO: 40538 - DNA, 20 bp, synthetic construct
  source 1..20: mol_type = other DNA
acaaaattagccaggcgtgg

SEQ ID NO: 40539 - DNA, 20 bp, synthetic construct
  source 1..20: mol_type = other DNA
aacaaaattagccaggcgtg

SEQ ID NO: 40540 - DNA, 20 bp, synthetic construct
  source 1..20: mol_type = other DNA
aaacaaaattagccaggcgt

SEQ ID NO: 40541 - DNA, 20 bp, synthetic construct
  source 1..20: mol_type = other DNA
aaaacaaaattagccaggcg

SEQ ID NO: 40542 - DNA, 20 bp, synthetic construct
  source 1..20: mol_type = other DNA
aaaaacaaaattagccaggc

SEQ ID NO: 40543 - DNA, 20 bp, synthetic construct
  source 1..20: mol_type = other DNA
caaaaacaaaattagccagg

SEQ ID NO: 40544 - DNA, 20 bp, synthetic construct
  source 1..20: mol_type = other DNA
acaaaaacaaaattagccag

SEQ ID NO: 40545 - DNA, 20 bp, synthetic construct
  source 1..20: mol_type = other DNA
tacaaaaacaaaattagcca

SEQ ID NO: 40546 - DNA, 20 bp, synthetic construct
  source 1..20: mol_type = other DNA
atacaaaaacaaaattagcc

SEQ ID NO: 40547 - DNA, 20 bp, synthetic construct
  source 1..20: mol_type = other DNA
aatacaaaaacaaaattagc

SEQ ID NO: 40548 - DNA, 20 bp, synthetic construct
  source 1..20: mol_type = other DNA
aaatacaaaaacaaaattag

SEQ ID NO: 40549 - DNA, 20 bp, synthetic construct
  source 1..20: mol_type = other DNA
aaaatacaaaaacaaaatta

SEQ ID NO: 40550 - DNA, 20 bp, synthetic construct
  source 1..20: mol_type = other DNA
aaaaatacaaaaacaaaatt

SEQ ID NO: 40551 - DNA, 20 bp, synthetic construct
  source 1..20: mol_type = other DNA
taaaaatacaaaaacaaaat

SEQ ID NO: 40552 - DNA, 20 bp, synthetic construct
  source 1..20: mol_type = other DNA
ctaaaaatacaaaaacaaaa

SEQ ID NO: 40553 - DNA, 20 bp, synthetic construct
  source 1..20: mol_type = other DNA
actaaaaatacaaaaacaaa

SEQ ID NO: 40554 - DNA, 20 bp, synthetic construct
  source 1..20: mol_type = other DNA
tactaaaaatacaaaaacaa

SEQ ID NO: 40555 - DNA, 20 bp, synthetic construct
  source 1..20: mol_type = other DNA
ctactaaaaatacaaaaaca

SEQ ID NO: 40556 - DNA, 20 bp, synthetic construct
  source 1..20: mol_type = other DNA
tctactaaaaatacaaaaac

SEQ ID NO: 40557 - DNA, 20 bp, synthetic construct
  source 1..20: mol_type = other DNA
ctctactaaaaatacaaaaa

SEQ ID NO: 40558 - DNA, 20 bp, synthetic construct
  source 1..20: mol_type = other DNA
tctctactaaaaatacaaaa

SEQ ID NO: 40559 - DNA, 20 bp, synthetic construct
  source 1..20: mol_type = other DNA
atctctactaaaaatacaaa

SEQ ID NO: 40560 - DNA, 20 bp, synthetic construct
  source 1..20: mol_type = other DNA
catctctactaaaaatacaa

SEQ ID NO: 40561 - DNA, 20 bp, synthetic construct
  source 1..20: mol_type = other DNA
ccatctctactaaaaataca

SEQ ID NO: 40562 - DNA, 20 bp, synthetic construct
  source 1..20: mol_type = other DNA
cccatctctactaaaaatac

SEQ ID NO: 40563 - DNA, 20 bp, synthetic construct
  source 1..20: mol_type = other DNA
ccccatctctactaaaaata

SEQ ID NO: 40564 - DNA, 20 bp, synthetic construct
  source 1..20: mol_type = other DNA
accccatctctactaaaaat

SEQ ID NO: 40565 - DNA, 20 bp, synthetic construct
  source 1..20: mol_type = other DNA
aaccccatctctactaaaaa

SEQ ID NO: 40566 - DNA, 20 bp, synthetic construct
  source 1..20: mol_type = other DNA
aaaccccatctctactaaaa

SEQ ID NO: 40567 - DNA, 20 bp, synthetic construct
  source 1..20: mol_type = other DNA
gaaaccccatctctactaaa

SEQ ID NO: 40568 - DNA, 20 bp, synthetic construct
  source 1..20: mol_type = other DNA
tgaaaccccatctctactaa

SEQ ID NO: 40569 - DNA, 20 bp, synthetic construct
  source 1..20: mol_type = other DNA
ctgaaaccccatctctacta

SEQ ID NO: 40570 - DNA, 20 bp, synthetic construct
  source 1..20: mol_type = other DNA
gctgaaaccccatctctact

SEQ ID NO: 40571 - DNA, 20 bp, synthetic construct
  source 1..20: mol_type = other DNA
ggctgaaaccccatctctac

SEQ ID NO: 40572 - DNA, 20 bp, synthetic construct
  source 1..20: mol_type = other DNA
gggctgaaaccccatctcta

SEQ ID NO: 40573 - DNA, 20 bp, synthetic construct
  source 1..20: mol_type = other DNA
cgggctgaaaccccatctct

SEQ ID NO: 40574 - DNA, 20 bp, synthetic construct
  source 1..20: mol_type = other DNA
gcgggctgaaaccccatctc

SEQ ID NO: 40575 - DNA, 20 bp, synthetic construct
  source 1..20: mol_type = other DNA
ggcgggctgaaaccccatct

SEQ ID NO: 40576 - DNA, 20 bp, synthetic construct
  source 1..20: mol_type = other DNA
aggcgggctgaaaccccatc

SEQ ID NO: 40577 - DNA, 20 bp, synthetic construct
  source 1..20: mol_type = other DNA
aaggcgggctgaaaccccat

SEQ ID NO: 40578 - DNA, 20 bp, synthetic construct
  source 1..20: mol_type = other DNA
caaggcgggctgaaacccca

SEQ ID NO: 40579 - DNA, 20 bp, synthetic construct
  source 1..20: mol_type = other DNA
ccaaggcgggctgaaacccc

SEQ ID NO: 40580 - DNA, 20 bp, synthetic construct
  source 1..20: mol_type = other DNA
gccaaggcgggctgaaaccc

SEQ ID NO: 40581 - DNA, 20 bp, synthetic construct
  source 1..20: mol_type = other DNA
ggccaaggcgggctgaaacc

SEQ ID NO: 40582 - DNA, 20 bp, synthetic construct
  source 1..20: mol_type = other DNA
aggccaaggcgggctgaaac

SEQ ID NO: 40583 - DNA, 20 bp, synthetic construct
  source 1..20: mol_type = other DNA
gaggccaaggcgggctgaaa

SEQ ID NO: 40584 - DNA, 20 bp, synthetic construct
  source 1..20: mol_type = other DNA
ggaggccaaggcgggctgaa

SEQ ID NO: 40585 - DNA, 20 bp, synthetic construct
  source 1..20: mol_type = other DNA
aggaggccaaggcgggctga

SEQ ID NO: 40586 - DNA, 20 bp, synthetic construct
  source 1..20: mol_type = other DNA
caggaggccaaggcgggctg

SEQ ID NO: 40587 - DNA, 20 bp, synthetic construct
  source 1..20: mol_type = other DNA
ccaggaggccaaggcgggct

SEQ ID NO: 40588 - DNA, 20 bp, synthetic construct
  source 1..20: mol_type = other DNA
tccaggaggccaaggcgggc

SEQ ID NO: 40589 - DNA, 20 bp, synthetic construct
  source 1..20: mol_type = other DNA
ctccaggaggccaaggcggg

SEQ ID NO: 40590 - DNA, 20 bp, synthetic construct
  source 1..20: mol_type = other DNA
actccaggaggccaaggcgg

SEQ ID NO: 40591 - DNA, 20 bp, synthetic construct
  source 1..20: mol_type = other DNA
cactccaggaggccaaggcg

SEQ ID NO: 40592 - DNA, 20 bp, synthetic construct
  source 1..20: mol_type = other DNA
gcactccaggaggccaaggc

SEQ ID NO: 40593 - DNA, 20 bp, synthetic construct
  source 1..20: mol_type = other DNA
agcactccaggaggccaagg

SEQ ID NO: 40594 - DNA, 20 bp, synthetic construct
  source 1..20: mol_type = other DNA
cagcactccaggaggccaag

SEQ ID NO: 40595 - DNA, 20 bp, synthetic construct
  source 1..20: mol_type = other DNA
ccagcactccaggaggccaa

SEQ ID NO: 40596 - DNA, 20 bp, synthetic construct
  source 1..20: mol_type = other DNA
cccagcactccaggaggcca

SEQ ID NO: 40597 - DNA, 20 bp, synthetic construct
  source 1..20: mol_type = other DNA
tcccagcactccaggaggcc

SEQ ID NO: 40598 - DNA, 20 bp, synthetic construct
  source 1..20: mol_type = other DNA
atcccagcactccaggaggc

SEQ ID NO: 40599 - DNA, 20 bp, synthetic construct
  source 1..20: mol_type = other DNA
aatcccagcactccaggagg

SEQ ID NO: 40600 - DNA, 20 bp, synthetic construct
  source 1..20: mol_type = other DNA
taatcccagcactccaggag

SEQ ID NO: 40601 - DNA, 20 bp, synthetic construct
  source 1..20: mol_type = other DNA
gtaatcccagcactccagga

SEQ ID NO: 40602 - DNA, 20 bp, synthetic construct
  source 1..20: mol_type = other DNA
tgtaatcccagcactccagg

SEQ ID NO: 40603 - DNA, 20 bp, synthetic construct
  source 1..20: mol_type = other DNA
ctgtaatcccagcactccag

SEQ ID NO: 40604 - DNA, 20 bp, synthetic construct
  source 1..20: mol_type = other DNA
cctgtaatcccagcactcca

SEQ ID NO: 40605 - DNA, 20 bp, synthetic construct
  source 1..20: mol_type = other DNA
gcctgtaatcccagcactcc

SEQ ID NO: 40606 - DNA, 20 bp, synthetic construct
  source 1..20: mol_type = other DNA
cgcctgtaatcccagcactc

SEQ ID NO: 40607 - DNA, 20 bp, synthetic construct
  source 1..20: mol_type = other DNA
acgcctgtaatcccagcact

SEQ ID NO: 40608 - DNA, 20 bp, synthetic construct
  source 1..20: mol_type = other DNA
cacgcctgtaatcccagcac

SEQ ID NO: 40609 - DNA, 20 bp, synthetic construct
  source 1..20: mol_type = other DNA
tcacgcctgtaatcccagca

SEQ ID NO: 40610 - DNA, 20 bp, synthetic construct
  source 1..20: mol_type = other DNA
ctcacgcctgtaatcccagc

SEQ ID NO: 40611 - DNA, 20 bp, synthetic construct
  source 1..20: mol_type = other DNA
actcacgcctgtaatcccag

SEQ ID NO: 40612 - DNA, 20 bp, synthetic construct
  source 1..20: mol_type = other DNA
gactcacgcctgtaatccca

SEQ ID NO: 40613 - DNA, 20 bp, synthetic construct
  source 1..20: mol_type = other DNA
tgactcacgcctgtaatccc

SEQ ID NO: 40614 - DNA, 20 bp, synthetic construct
  source 1..20: mol_type = other DNA
ctgactcacgcctgtaatcc

SEQ ID NO: 40615 - DNA, 20 bp, synthetic construct
  source 1..20: mol_type = other DNA
cctgactcacgcctgtaatc

SEQ ID NO: 40616 - DNA, 20 bp, synthetic construct
  source 1..20: mol_type = other DNA
ccctgactcacgcctgtaat

SEQ ID NO: 40617 - DNA, 20 bp, synthetic construct
  source 1..20: mol_type = other DNA
gccctgactcacgcctgtaa

SEQ ID NO: 40618 - DNA, 20 bp, synthetic construct
  source 1..20: mol_type = other DNA
cgccctgactcacgcctgta

SEQ ID NO: 40619 - DNA, 20 bp, synthetic construct
  source 1..20: mol_type = other DNA
gcgccctgactcacgcctgt

SEQ ID NO: 40620 - DNA, 20 bp, synthetic construct
  source 1..20: mol_type = other DNA
ggcgccctgactcacgcctg

SEQ ID NO: 40621 - DNA, 20 bp, synthetic construct
  source 1..20: mol_type = other DNA
aggcgccctgactcacgcct

SEQ ID NO: 40622 - DNA, 20 bp, synthetic construct
  source 1..20: mol_type = other DNA
caggcgccctgactcacgcc

SEQ ID NO: 40623 - DNA, 20 bp, synthetic construct
  source 1..20: mol_type = other DNA
ccaggcgccctgactcacgc

SEQ ID NO: 40624 - DNA, 20 bp, synthetic construct
  source 1..20: mol_type = other DNA
gccaggcgccctgactcacg

SEQ ID NO: 40625 - DNA, 20 bp, synthetic construct
  source 1..20: mol_type = other DNA
ggccaggcgccctgactcac

SEQ ID NO: 40626 - DNA, 20 bp, synthetic construct
  source 1..20: mol_type = other DNA
tggccaggcgccctgactca

SEQ ID NO: 40627 - DNA, 20 bp, synthetic construct
  source 1..20: mol_type = other DNA
ttggccaggcgccctgactc

SEQ ID NO: 40628 - DNA, 20 bp, synthetic construct
  source 1..20: mol_type = other DNA
attggccaggcgccctgact

SEQ ID NO: 40629 - DNA, 20 bp, synthetic construct
  source 1..20: mol_type = other DNA
gattggccaggcgccctgac

SEQ ID NO: 40630 - DNA, 20 bp, synthetic construct
  source 1..20: mol_type = other DNA
tgattggccaggcgccctga

SEQ ID NO: 40631 - DNA, 20 bp, synthetic construct
  source 1..20: mol_type = other DNA
atgattggccaggcgccctg

SEQ ID NO: 40632 - DNA, 20 bp, synthetic construct
  source 1..20: mol_type = other DNA
tatgattggccaggcgccct

SEQ ID NO: 40633 - DNA, 20 bp, synthetic construct
  source 1..20: mol_type = other DNA
gtatgattggccaggcgccc

SEQ ID NO: 40634 - DNA, 20 bp, synthetic construct
  source 1..20: mol_type = other DNA
ggtatgattggccaggcgcc

SEQ ID NO: 40635 - DNA, 20 bp, synthetic construct
  source 1..20: mol_type = other DNA
aggtatgattggccaggcgc

SEQ ID NO: 40636 - DNA, 20 bp, synthetic construct
  source 1..20: mol_type = other DNA
aaggtatgattggccaggcg

SEQ ID NO: 40637 - DNA, 20 bp, synthetic construct
  source 1..20: mol_type = other DNA
gaaggtatgattggccaggc

SEQ ID NO: 40638 - DNA, 20 bp, synthetic construct
  source 1..20: mol_type = other DNA
agaaggtatgattggccagg

SEQ ID NO: 40639 - DNA, 20 bp, synthetic construct
  source 1..20: mol_type = other DNA
aagaaggtatgattggccag

SEQ ID NO: 40640 - DNA, 20 bp, synthetic construct
  source 1..20: mol_type = other DNA
aaagaaggtatgattggcca

SEQ ID NO: 40641 - DNA, 20 bp, synthetic construct
  source 1..20: mol_type = other DNA
aaaagaaggtatgattggcc

SEQ ID NO: 40642 - DNA, 20 bp, synthetic construct
  source 1..20: mol_type = other DNA
taaaagaaggtatgattggc

SEQ ID NO: 40643 - DNA, 20 bp, synthetic construct
  source 1..20: mol_type = other DNA
gtaaaagaaggtatgattgg

SEQ ID NO: 40644 - DNA, 20 bp, synthetic construct
  source 1..20: mol_type = other DNA
agtaaaagaaggtatgattg

SEQ ID NO: 40645 - DNA, 20 bp, synthetic construct
  source 1..20: mol_type = other DNA
cagtaaaagaaggtatgatt

SEQ ID NO: 40646 - DNA, 20 bp, synthetic construct
  source 1..20: mol_type = other DNA
gcagtaaaagaaggtatgat

SEQ ID NO: 40647 - DNA, 20 bp, synthetic construct
  source 1..20: mol_type = other DNA
tgcagtaaaagaaggtatga

SEQ ID NO: 40648 - DNA, 20 bp, synthetic construct
  source 1..20: mol_type = other DNA
atgcagtaaaagaaggtatg

SEQ ID NO: 40649 - DNA, 20 bp, synthetic construct
  source 1..20: mol_type = other DNA
aatgcagtaaaagaaggtat

SEQ ID NO: 40650 - DNA, 20 bp, synthetic construct
  source 1..20: mol_type = other DNA
taatgcagtaaaagaaggta

SEQ ID NO: 40651 - DNA, 20 bp, synthetic construct
  source 1..20: mol_type = other DNA
ttaatgcagtaaaagaaggt

SEQ ID NO: 40652 - DNA, 20 bp, synthetic construct
  source 1..20: mol_type = other DNA
attaatgcagtaaaagaagg

SEQ ID NO: 40653 - DNA, 20 bp, synthetic construct
  source 1..20: mol_type = other DNA
aattaatgcagtaaaagaag

SEQ ID NO: 40654 - DNA, 20 bp, synthetic construct
  source 1..20: mol_type = other DNA
taattaatgcagtaaaagaa

SEQ ID NO: 40655 - DNA, 20 bp, synthetic construct
  source 1..20: mol_type = other DNA
ataattaatgcagtaaaaga

SEQ ID NO: 40656 - DNA, 20 bp, synthetic construct
  source 1..20: mol_type = other DNA
cataattaatgcagtaaaag

SEQ ID NO: 40657 - DNA, 20 bp, synthetic construct
  source 1..20: mol_type = other DNA
ccataattaatgcagtaaaa

SEQ ID NO: 40658 - DNA, 20 bp, synthetic construct
  source 1..20: mol_type = other DNA
accataattaatgcagtaaa

SEQ ID NO: 40659 - DNA, 20 bp, synthetic construct
  source 1..20: mol_type = other DNA
aaccataattaatgcagtaa

SEQ ID NO: 40660 - DNA, 20 bp, synthetic construct
  source 1..20: mol_type = other DNA
aaaccataattaatgcagta

SEQ ID NO: 40661 - DNA, 20 bp, synthetic construct
  source 1..20: mol_type = other DNA
aaaaccataattaatgcagt

SEQ ID NO: 40662 - DNA, 20 bp, synthetic construct
  source 1..20: mol_type = other DNA
gaaaaccataattaatgcag

SEQ ID NO: 40663 - DNA, 20 bp, synthetic construct
  source 1..20: mol_type = other DNA
agaaaaccataattaatgca

SEQ ID NO: 40664 - DNA, 20 bp, synthetic construct
  source 1..20: mol_type = other DNA
aagaaaaccataattaatgc

SEQ ID NO: 40665 - DNA, 20 bp, synthetic construct
  source 1..20: mol_type = other DNA
aaagaaaaccataattaatg

SEQ ID NO: 40666 - DNA, 20 bp, synthetic construct
  source 1..20: mol_type = other DNA
gaaagaaaaccataattaat

SEQ ID NO: 40667 - DNA, 20 bp, synthetic construct
  source 1..20: mol_type = other DNA
cgaaagaaaaccataattaa

SEQ ID NO: 40668 - DNA, 20 bp, synthetic construct
  source 1..20: mol_type = other DNA
acgaaagaaaaccataatta

SEQ ID NO: 40669 - DNA, 20 bp, synthetic construct
  source 1..20: mol_type = other DNA
aacgaaagaaaaccataatt

SEQ ID NO: 40670 - DNA, 20 bp, synthetic construct
  source 1..20: mol_type = other DNA
gaacgaaagaaaaccataat

SEQ ID NO: 40671 - DNA, 20 bp, synthetic construct
  source 1..20: mol_type = other DNA
agaacgaaagaaaaccataa

SEQ ID NO: 40672 - DNA, 20 bp, synthetic construct
  source 1..20: mol_type = other DNA
aagaacgaaagaaaaccata

SEQ ID NO: 40673 - DNA, 20 bp, synthetic construct
  source 1..20: mol_type = other DNA
taagaacgaaagaaaaccat

SEQ ID NO: 40674 - DNA, 20 bp, synthetic construct
  source 1..20: mol_type = other DNA
ttaagaacgaaagaaaacca

SEQ ID NO: 40675 - DNA, 20 bp, synthetic construct
  source 1..20: mol_type = other DNA
tttaagaacgaaagaaaacc

SEQ ID NO: 40676 - DNA, 20 bp, synthetic construct
  source 1..20: mol_type = other DNA
ttttaagaacgaaagaaaac

SEQ ID NO: 40677 - DNA, 20 bp, synthetic construct
  source 1..20: mol_type = other DNA
gttttaagaacgaaagaaaa

SEQ ID NO: 40678 - DNA, 20 bp, synthetic construct
  source 1..20: mol_type = other DNA
tgttttaagaacgaaagaaa

SEQ ID NO: 40679 - DNA, 20 bp, synthetic construct
  source 1..20: mol_type = other DNA
atgttttaagaacgaaagaa

SEQ ID NO: 40680 - DNA, 20 bp, synthetic construct
  source 1..20: mol_type = other DNA
catgttttaagaacgaaaga

SEQ ID NO: 40681 - DNA, 20 bp, synthetic construct
  source 1..20: mol_type = other DNA
acatgttttaagaacgaaag

SEQ ID NO: 40682 - DNA, 20 bp, synthetic construct
  source 1..20: mol_type = other DNA
aacatgttttaagaacgaaa

SEQ ID NO: 40683 - DNA, 20 bp, synthetic construct
  source 1..20: mol_type = other DNA
aaacatgttttaagaacgaa

SEQ ID NO: 40684 - DNA, 20 bp, synthetic construct
  source 1..20: mol_type = other DNA
taaacatgttttaagaacga

SEQ ID NO: 40685 - DNA, 20 bp, synthetic construct
  source 1..20: mol_type = other DNA
ataaacatgttttaagaacg

SEQ ID NO: 40686 - DNA, 20 bp, synthetic construct
  source 1..20: mol_type = other DNA
tataaacatgttttaagaac

SEQ ID NO: 40687 - DNA, 20 bp, synthetic construct
  source 1..20: mol_type = other DNA
ctataaacatgttttaagaa

SEQ ID NO: 40688 - DNA, 20 bp, synthetic construct
  source 1..20: mol_type = other DNA
actataaacatgttttaaga

SEQ ID NO: 40689 - DNA, 20 bp, synthetic construct
  source 1..20: mol_type = other DNA
cactataaacatgttttaag

SEQ ID NO: 40690 - DNA, 20 bp, synthetic construct
  source 1..20: mol_type = other DNA
tcactataaacatgttttaa

SEQ ID NO: 40691 - DNA, 20 bp, synthetic construct
  source 1..20: mol_type = other DNA
gtcactataaacatgtttta

SEQ ID NO: 40692 - DNA, 20 bp, synthetic construct
  source 1..20: mol_type = other DNA
ggtcactataaacatgtttt

SEQ ID NO: 40693 - DNA, 20 bp, synthetic construct
  source 1..20: mol_type = other DNA
tggtcactataaacatgttt

SEQ ID NO: 40694 - DNA, 20 bp, synthetic construct
  source 1..20: mol_type = other DNA
gtggtcactataaacatgtt

SEQ ID NO: 40695 - DNA, 20 bp, synthetic construct
  source 1..20: mol_type = other DNA
agtggtcactataaacatgt

SEQ ID NO: 40696 - DNA, 20 bp, synthetic construct
  source 1..20: mol_type = other DNA
aagtggtcactataaacatg

SEQ ID NO: 40697 - DNA, 20 bp, synthetic construct
  source 1..20: mol_type = other DNA
aaagtggtcactataaacat

SEQ ID NO: 40698 - DNA, 20 bp, synthetic construct
  source 1..20: mol_type = other DNA
aaaagtggtcactataaaca

SEQ ID NO: 40699 - DNA, 20 bp, synthetic construct
  source 1..20: mol_type = other DNA
caaaagtggtcactataaac

SEQ ID NO: 40700 - DNA, 20 bp, synthetic construct
  source 1..20: mol_type = other DNA
tcaaaagtggtcactataaa

SEQ ID NO: 40701 - DNA, 20 bp, synthetic construct
  source 1..20: mol_type = other DNA
ttcaaaagtggtcactataa

SEQ ID NO: 40702 - DNA, 20 bp, synthetic construct
  source 1..20: mol_type = other DNA
tttcaaaagtggtcactata

SEQ ID NO: 40703 - DNA, 20 bp, synthetic construct
  source 1..20: mol_type = other DNA
atttcaaaagtggtcactat

SEQ ID NO: 40704 - DNA, 20 bp, synthetic construct
  source 1..20: mol_type = other DNA
aatttcaaaagtggtcacta

SEQ ID NO: 40705 - DNA, 20 bp, synthetic construct
  source 1..20: mol_type = other DNA
gaatttcaaaagtggtcact

SEQ ID NO: 40706 - DNA, 20 bp, synthetic construct
  source 1..20: mol_type = other DNA
agaatttcaaaagtggtcac

SEQ ID NO: 40707 - DNA, 20 bp, synthetic construct
  source 1..20: mol_type = other DNA
aagaatttcaaaagtggtca

SEQ ID NO: 40708 - DNA, 20 bp, synthetic construct
  source 1..20: mol_type = other DNA
taagaatttcaaaagtggtc

SEQ ID NO: 40709 - DNA, 20 bp, synthetic construct
  source 1..20: mol_type = other DNA
ataagaatttcaaaagtggt

SEQ ID NO: 40710 - DNA, 20 bp, synthetic construct
  source 1..20: mol_type = other DNA
aataagaatttcaaaagtgg

SEQ ID NO: 40711 - DNA, 20 bp, synthetic construct
  source 1..20: mol_type = other DNA
taataagaatttcaaaagtg

SEQ ID NO: 40712 - DNA, 20 bp, synthetic construct
  source 1..20: mol_type = other DNA
ttaataagaatttcaaaagt

SEQ ID NO: 40713 - DNA, 20 bp, synthetic construct
  source 1..20: mol_type = other DNA
cttaataagaatttcaaaag

SEQ ID NO: 40714 - DNA, 20 bp, synthetic construct
  source 1..20: mol_type = other DNA
acttaataagaatttcaaaa

SEQ ID NO: 40715 - DNA, 20 bp, synthetic construct
  source 1..20: mol_type = other DNA
gacttaataagaatttcaaa

SEQ ID NO: 40716 - DNA, 20 bp, synthetic construct
  source 1..20: mol_type = other DNA
tgacttaataagaatttcaa

SEQ ID NO: 40717 - DNA, 20 bp, synthetic construct
  source 1..20: mol_type = other DNA
ctgacttaataagaatttca

SEQ ID NO: 40718 - DNA, 20 bp, synthetic construct
  source 1..20: mol_type = other DNA
tctgacttaataagaatttc

SEQ ID NO: 40719 - DNA, 20 bp, synthetic construct
  source 1..20: mol_type = other DNA
gtctgacttaataagaattt

SEQ ID NO: 40720 - DNA, 20 bp, synthetic construct
  source 1..20: mol_type = other DNA
tgtctgacttaataagaatt

SEQ ID NO: 40721 - DNA, 20 bp, synthetic construct
  source 1..20: mol_type = other DNA
atgtctgacttaataagaat

SEQ ID NO: 40722 - DNA, 20 bp, synthetic construct
  source 1..20: mol_type = other DNA
gatgtctgacttaataagaa

SEQ ID NO: 40723 - DNA, 20 bp, synthetic construct
  source 1..20: mol_type = other DNA
agatgtctgacttaataaga

SEQ ID NO: 40724 - DNA, 20 bp, synthetic construct
  source 1..20: mol_type = other DNA
cagatgtctgacttaataag

SEQ ID NO: 40725 - DNA, 20 bp, synthetic construct
  source 1..20: mol_type = other DNA
ccagatgtctgacttaataa

SEQ ID NO: 40726 - DNA, 20 bp, synthetic construct
  source 1..20: mol_type = other DNA
accagatgtctgacttaata

SEQ ID NO: 40727 - DNA, 20 bp, synthetic construct
  source 1..20: mol_type = other DNA
aaccagatgtctgacttaat

SEQ ID NO: 40728 - DNA, 20 bp, synthetic construct
  source 1..20: mol_type = other DNA
taaccagatgtctgacttaa

SEQ ID NO: 40729 - DNA, 20 bp, synthetic construct
  source 1..20: mol_type = other DNA
ataaccagatgtctgactta

SEQ ID NO: 40730 - DNA, 20 bp, synthetic construct
  source 1..20: mol_type = other DNA
tataaccagatgtctgactt

SEQ ID NO: 40731 - DNA, 20 bp, synthetic construct
  source 1..20: mol_type = other DNA
gtataaccagatgtctgact

SEQ ID NO: 40732 - DNA, 20 bp, synthetic construct
  source 1..20: mol_type = other DNA
tgtataaccagatgtctgac

SEQ ID NO: 40733 - DNA, 20 bp, synthetic construct
  source 1..20: mol_type = other DNA
ttgtataaccagatgtctga

SEQ ID NO: 40734 - DNA, 20 bp, synthetic construct
  source 1..20: mol_type = other DNA
cttgtataaccagatgtctg

SEQ ID NO: 40735 - DNA, 20 bp, synthetic construct
  source 1..20: mol_type = other DNA
gcttgtataaccagatgtct

SEQ ID NO: 40736 - DNA, 20 bp, synthetic construct
  source 1..20: mol_type = other DNA
tgcttgtataaccagatgtc

SEQ ID NO: 40737 - DNA, 20 bp, synthetic construct
  source 1..20: mol_type = other DNA
ttgcttgtataaccagatgt

SEQ ID NO: 40738 - DNA, 20 bp, synthetic construct
  source 1..20: mol_type = other DNA
attgcttgtataaccagatg

SEQ ID NO: 40739 - DNA, 20 bp, synthetic construct
  source 1..20: mol_type = other DNA
aattgcttgtataaccagat

SEQ ID NO: 40740 - DNA, 20 bp, synthetic construct
  source 1..20: mol_type = other DNA
aaattgcttgtataaccaga

SEQ ID NO: 40741 - DNA, 20 bp, synthetic construct
  source 1..20: mol_type = other DNA
gaaattgcttgtataaccag

SEQ ID NO: 40742 - DNA, 20 bp, synthetic construct
  source 1..20: mol_type = other DNA
agaaattgcttgtataacca

SEQ ID NO: 40743 - DNA, 20 bp, synthetic construct
  source 1..20: mol_type = other DNA
tagaaattgcttgtataacc

SEQ ID NO: 40744 - DNA, 20 bp, synthetic construct
  source 1..20: mol_type = other DNA
atagaaattgcttgtataac

SEQ ID NO: 40745 - DNA, 20 bp, synthetic construct
  source 1..20: mol_type = other DNA
aatagaaattgcttgtataa

SEQ ID NO: 40746 - DNA, 20 bp, synthetic construct
  source 1..20: mol_type = other DNA
caatagaaattgcttgtata

SEQ ID NO: 40747 - DNA, 20 bp, synthetic construct
  source 1..20: mol_type = other DNA
gcaatagaaattgcttgtat

SEQ ID NO: 40748 - DNA, 20 bp, synthetic construct
  source 1..20: mol_type = other DNA
ggcaatagaaattgcttgta

SEQ ID NO: 40749 - DNA, 20 bp, synthetic construct
  source 1..20: mol_type = other DNA
aggcaatagaaattgcttgt

SEQ ID NO: 40750 - DNA, 20 bp, synthetic construct
  source 1..20: mol_type = other DNA
taggcaatagaaattgcttg

SEQ ID NO: 40751 - DNA, 20 bp, synthetic construct
  source 1..20: mol_type = other DNA
gtaggcaatagaaattgctt

SEQ ID NO: 40752 - DNA, 20 bp, synthetic construct
  source 1..20: mol_type = other DNA
agtaggcaatagaaattgct

SEQ ID NO: 40753 - DNA, 20 bp, synthetic construct
  source 1..20: mol_type = other DNA
aagtaggcaatagaaattgc

SEQ ID NO: 40754 - DNA, 20 bp, synthetic construct
  source 1..20: mol_type = other DNA
gaagtaggcaatagaaattg

SEQ ID NO: 40755 - DNA, 20 bp, synthetic construct
  source 1..20: mol_type = other DNA
agaagtaggcaatagaaatt

SEQ ID NO: 40756 - DNA, 20 bp, synthetic construct
  source 1..20: mol_type = other DNA
aagaagtaggcaatagaaat

SEQ ID NO: 40757 - DNA, 20 bp, synthetic construct
  source 1..20: mol_type = other DNA
aaagaagtaggcaatagaaa

SEQ ID NO: 40758 - DNA, 20 bp, synthetic construct
  source 1..20: mol_type = other DNA
aaaagaagtaggcaatagaa

SEQ ID NO: 40759 - DNA, 20 bp, synthetic construct
  source 1..20: mol_type = other DNA
aaaaagaagtaggcaataga

SEQ ID NO: 40760 - DNA, 20 bp, synthetic construct
  source 1..20: mol_type = other DNA
gaaaaagaagtaggcaatag

SEQ ID NO: 40761 - DNA, 20 bp, synthetic construct
  source 1..20: mol_type = other DNA
ggaaaaagaagtaggcaata

SEQ ID NO: 40762 - DNA, 20 bp, synthetic construct
  source 1..20: mol_type = other DNA
tggaaaaagaagtaggcaat

SEQ ID NO: 40763 - DNA, 20 bp, synthetic construct
  source 1..20: mol_type = other DNA
ctggaaaaagaagtaggcaa

SEQ ID NO: 40764 - DNA, 20 bp, synthetic construct
  source 1..20: mol_type = other DNA
actggaaaaagaagtaggca

SEQ ID NO: 40765 - DNA, 20 bp, synthetic construct
  source 1..20: mol_type = other DNA
cactggaaaaagaagtaggc

SEQ ID NO: 40766 - DNA, 20 bp, synthetic construct
  source 1..20: mol_type = other DNA
ccactggaaaaagaagtagg

SEQ ID NO: 40767 - DNA, 20 bp, synthetic construct
  source 1..20: mol_type = other DNA
cccactggaaaaagaagtag

SEQ ID NO: 40768 - DNA, 20 bp, synthetic construct
  source 1..20: mol_type = other DNA
acccactggaaaaagaagta

SEQ ID NO: 40769 - DNA, 20 bp, synthetic construct
  source 1..20: mol_type = other DNA
cacccactggaaaaagaagt

SEQ ID NO: 40770 - DNA, 20 bp, synthetic construct
  source 1..20: mol_type = other DNA
ccacccactggaaaaagaag

SEQ ID NO: 40771 - DNA, 20 bp, synthetic construct
  source 1..20: mol_type = other DNA
cccacccactggaaaaagaa

SEQ ID NO: 40772 - DNA, 20 bp, synthetic construct
  source 1..20: mol_type = other DNA
ccccacccactggaaaaaga

SEQ ID NO: 40773 - DNA, 20 bp, synthetic construct
  source 1..20: mol_type = other DNA
accccacccactggaaaaag

SEQ ID NO: 40774 - DNA, 20 bp, synthetic construct
  source 1..20: mol_type = other DNA
aaccccacccactggaaaaa

SEQ ID NO: 40775 - DNA, 20 bp, synthetic construct
  source 1..20: mol_type = other DNA
taaccccacccactggaaaa

SEQ ID NO: 40776 - DNA, 20 bp, synthetic construct
  source 1..20: mol_type = other DNA
ataaccccacccactggaaa

SEQ ID NO: 40777 - DNA, 20 bp, synthetic construct
  source 1..20: mol_type = other DNA
tataaccccacccactggaa

SEQ ID NO: 40778 - DNA, 20 bp, synthetic construct
  source 1..20: mol_type = other DNA
gtataaccccacccactgga

SEQ ID NO: 40779 - DNA, 20 bp, synthetic construct
  source 1..20: mol_type = other DNA
agtataaccccacccactgg

SEQ ID NO: 40780 - DNA, 20 bp, synthetic construct
  source 1..20: mol_type = other DNA
aagtataaccccacccactg

SEQ ID NO: 40781 - DNA, 20 bp, synthetic construct
  source 1..20: mol_type = other DNA
aaagtataaccccacccact

SEQ ID NO: 40782 - DNA, 20 bp, synthetic construct
  source 1..20: mol_type = other DNA
gaaagtataaccccacccac

SEQ ID NO: 40783 - DNA, 20 bp, synthetic construct
  source 1..20: mol_type = other DNA
ggaaagtataaccccaccca

SEQ ID NO: 40784 - DNA, 20 bp, synthetic construct
  source 1..20: mol_type = other DNA
aggaaagtataaccccaccc

SEQ ID NO: 40785 - DNA, 20 bp, synthetic construct
  source 1..20: mol_type = other DNA
caggaaagtataaccccacc

SEQ ID NO: 40786 - DNA, 20 bp, synthetic construct
  source 1..20: mol_type = other DNA
acaggaaagtataaccccac

SEQ ID NO: 40787 - DNA, 20 bp, synthetic construct
  source 1..20: mol_type = other DNA
cacaggaaagtataacccca

SEQ ID NO: 40788 - DNA, 20 bp, synthetic construct
  source 1..20: mol_type = other DNA
acacaggaaagtataacccc

SEQ ID NO: 40789 - DNA, 20 bp, synthetic construct
  source 1..20: mol_type = other DNA
gacacaggaaagtataaccc

SEQ ID NO: 40790 - DNA, 20 bp, synthetic construct
  source 1..20: mol_type = other DNA
agacacaggaaagtataacc

SEQ ID NO: 40791 - DNA, 20 bp, synthetic construct
  source 1..20: mol_type = other DNA
aagacacaggaaagtataac

SEQ ID NO: 40792 - DNA, 20 bp, synthetic construct
  source 1..20: mol_type = other DNA
taagacacaggaaagtataa

SEQ ID NO: 40793 - DNA, 20 bp, synthetic construct
  source 1..20: mol_type = other DNA
ctaagacacaggaaagtata

SEQ ID NO: 40794 - DNA, 20 bp, synthetic construct
  source 1..20: mol_type = other DNA
gctaagacacaggaaagtat

SEQ ID NO: 40795 - DNA, 20 bp, synthetic construct
  source 1..20: mol_type = other DNA
agctaagacacaggaaagta

SEQ ID NO: 40796 - DNA, 20 bp, synthetic construct
  source 1..20: mol_type = other DNA
aagctaagacacaggaaagt

SEQ ID NO: 40797 - DNA, 20 bp, synthetic construct
  source 1..20: mol_type = other DNA
caagctaagacacaggaaag

SEQ ID NO: 40798 - DNA, 20 bp, synthetic construct
  source 1..20: mol_type = other DNA
acaagctaagacacaggaaa

SEQ ID NO: 40799 - DNA, 20 bp, synthetic construct
  source 1..20: mol_type = other DNA
gacaagctaagacacaggaa

SEQ ID NO: 40800 - DNA, 20 bp, synthetic construct
  source 1..20: mol_type = other DNA
cgacaagctaagacacagga

SEQ ID NO: 40801 - DNA, 20 bp, synthetic construct
  source 1..20: mol_type = other DNA
acgacaagctaagacacagg

SEQ ID NO: 40802 - DNA, 20 bp, synthetic construct
  source 1..20: mol_type = other DNA
aacgacaagctaagacacag

SEQ ID NO: 40803 - DNA, 20 bp, synthetic construct
  source 1..20: mol_type = other DNA
aaacgacaagctaagacaca

SEQ ID NO: 40804 - DNA, 20 bp, synthetic construct
  source 1..20: mol_type = other DNA
aaaacgacaagctaagacac

SEQ ID NO: 40805 - DNA, 20 bp, synthetic construct
  source 1..20: mol_type = other DNA
aaaaacgacaagctaagaca

SEQ ID NO: 40806 - DNA, 20 bp, synthetic construct
  source 1..20: mol_type = other DNA
aaaaaacgacaagctaagac

SEQ ID NO: 40807 - DNA, 20 bp, synthetic construct
  source 1..20: mol_type = other DNA
aaaaaaacgacaagctaaga

SEQ ID NO: 40808 - DNA, 20 bp, synthetic construct
  source 1..20: mol_type = other DNA
aaaaaaaacgacaagctaag

SEQ ID NO: 40809 - DNA, 20 bp, synthetic construct
  source 1..20: mol_type = other DNA
aaaaaaaaacgacaagctaa

SEQ ID NO: 40810 - DNA, 20 bp, synthetic construct
  source 1..20: mol_type = other DNA
aaaaaaaaaacgacaagcta

SEQ ID NO: 40811 - DNA, 20 bp, synthetic construct
  source 1..20: mol_type = other DNA
aaaaaaaaaaacgacaagct

SEQ ID NO: 40812 - DNA, 20 bp, synthetic construct
  source 1..20: mol_type = other DNA
caaaaaaaaaaacgacaagc

SEQ ID NO: 40813 - DNA, 20 bp, synthetic construct
  source 1..20: mol_type = other DNA
acaaaaaaaaaaacgacaag

SEQ ID NO: 40814 - DNA, 20 bp, synthetic construct
  source 1..20: mol_type = other DNA
aacaaaaaaaaaaacgacaa

SEQ ID NO: 40815 - DNA, 20 bp, synthetic construct
  source 1..20: mol_type = other DNA
caacaaaaaaaaaaacgaca

SEQ ID NO: 40816 - DNA, 20 bp, synthetic construct
  source 1..20: mol_type = other DNA
acaacaaaaaaaaaaacgac

SEQ ID NO: 40817 - DNA, 20 bp, synthetic construct
  source 1..20: mol_type = other DNA
aacaacaaaaaaaaaaacga

SEQ ID NO: 40818 - DNA, 20 bp, synthetic construct
  source 1..20: mol_type = other DNA
caacaacaaaaaaaaaaacg

SEQ ID NO: 40819 - DNA, 20 bp, synthetic construct
  source 1..20: mol_type = other DNA
tcaacaacaaaaaaaaaaac

SEQ ID NO: 40820 - DNA, 20 bp, synthetic construct
  source 1..20: mol_type = other DNA
ttcaacaacaaaaaaaaaaa

SEQ ID NO: 40821 - DNA, 20 bp, synthetic construct
  source 1..20: mol_type = other DNA
tttcaacaacaaaaaaaaaa

SEQ ID NO: 40822 - DNA, 20 bp, synthetic construct
  source 1..20: mol_type = other DNA
ttttcaacaacaaaaaaaaa

SEQ ID NO: 40823 - DNA, 20 bp, synthetic construct
  source 1..20: mol_type = other DNA
gttttcaacaacaaaaaaaa

SEQ ID NO: 40824 - DNA, 20 bp, synthetic construct
  source 1..20: mol_type = other DNA
agttttcaacaacaaaaaaa

SEQ ID NO: 40825 - DNA, 20 bp, synthetic construct
  source 1..20: mol_type = other DNA
cagttttcaacaacaaaaaa

SEQ ID NO: 40826 - DNA, 20 bp, synthetic construct
  source 1..20: mol_type = other DNA
ccagttttcaacaacaaaaa

SEQ ID NO: 40827 - DNA, 20 bp, synthetic construct
  source 1..20: mol_type = other DNA
tccagttttcaacaacaaaa

SEQ ID NO: 40828 - DNA, 20 bp, synthetic construct
  source 1..20: mol_type = other DNA
gtccagttttcaacaacaaa

SEQ ID NO: 40829 - DNA, 20 bp, synthetic construct
  source 1..20: mol_type = other DNA
tgtccagttttcaacaacaa

SEQ ID NO: 40830 - DNA, 20 bp, synthetic construct
  source 1..20: mol_type = other DNA
atgtccagttttcaacaaca

SEQ ID NO: 40831 - DNA, 20 bp, synthetic construct
  source 1..20: mol_type = other DNA
aatgtccagttttcaacaac

SEQ ID NO: 40832 - DNA, 20 bp, synthetic construct
  source 1..20: mol_type = other DNA
aaatgtccagttttcaacaa

SEQ ID NO: 40833 - DNA, 20 bp, synthetic construct
  source 1..20: mol_type = other DNA
aaaatgtccagttttcaaca

SEQ ID NO: 40834 - DNA, 20 bp, synthetic construct
  source 1..20: mol_type = other DNA
taaaatgtccagttttcaac

SEQ ID NO: 40835 - DNA, 20 bp, synthetic construct
  source 1..20: mol_type = other DNA
ttaaaatgtccagttttcaa

SEQ ID NO: 40836 - DNA, 20 bp, synthetic construct
  source 1..20: mol_type = other DNA
cttaaaatgtccagttttca

SEQ ID NO: 40837 - DNA, 20 bp, synthetic construct
  source 1..20: mol_type = other DNA
acttaaaatgtccagttttc

SEQ ID NO: 40838 - DNA, 20 bp, synthetic construct
  source 1..20: mol_type = other DNA
tacttaaaatgtccagtttt

SEQ ID NO: 40839 - DNA, 20 bp, synthetic construct
  source 1..20: mol_type = other DNA
ttacttaaaatgtccagttt

SEQ ID NO: 40840 - DNA, 20 bp, synthetic construct
  source 1..20: mol_type = other DNA
attacttaaaatgtccagtt

SEQ ID NO: 40841 - DNA, 20 bp, synthetic construct
  source 1..20: mol_type = other DNA
cattacttaaaatgtccagt

SEQ ID NO: 40842 - DNA, 20 bp, synthetic construct
  source 1..20: mol_type = other DNA
acattacttaaaatgtccag

SEQ ID NO: 40843 - DNA, 20 bp, synthetic construct
  source 1..20: mol_type = other DNA
tacattacttaaaatgtcca

SEQ ID NO: 40844 - DNA, 20 bp, synthetic construct
  source 1..20: mol_type = other DNA
ctacattacttaaaatgtcc

SEQ ID NO: 40845 - DNA, 20 bp, synthetic construct
  source 1..20: mol_type = other DNA
actacattacttaaaatgtc

SEQ ID NO: 40846 - DNA, 20 bp, synthetic construct
  source 1..20: mol_type = other DNA
tactacattacttaaaatgt

SEQ ID NO: 40847 - DNA, 20 bp, synthetic construct
  source 1..20: mol_type = other DNA
ttactacattacttaaaatg

SEQ ID NO: 40848 - DNA, 20 bp, synthetic construct
  source 1..20: mol_type = other DNA
gttactacattacttaaaat

SEQ ID NO: 40849 - DNA, 20 bp, synthetic construct
  source 1..20: mol_type = other DNA
agttactacattacttaaaa

SEQ ID NO: 40850 - DNA, 20 bp, synthetic construct
  source 1..20: mol_type = other DNA
gagttactacattacttaaa

SEQ ID NO: 40851 - DNA, 20 bp, synthetic construct
  source 1..20: mol_type = other DNA
agagttactacattacttaa

SEQ ID NO: 40852 - DNA, 20 bp, synthetic construct
  source 1..20: mol_type = other DNA
cagagttactacattactta

SEQ ID NO: 40853 - DNA, 20 bp, synthetic construct
  source 1..20: mol_type = other DNA
ccagagttactacattactt

SEQ ID NO: 40854 - DNA, 20 bp, synthetic construct
  source 1..20: mol_type = other DNA
tccagagttactacattact

SEQ ID NO: 40855 - DNA, 20 bp, synthetic construct
  source 1..20: mol_type = other DNA
atccagagttactacattac

SEQ ID NO: 40856 - DNA, 20 bp, synthetic construct
  source 1..20: mol_type = other DNA
tatccagagttactacatta

SEQ ID NO: 40857 - DNA, 20 bp, synthetic construct
  source 1..20: mol_type = other DNA
gtatccagagttactacatt

SEQ ID NO: 40858 - DNA, 20 bp, synthetic construct
  source 1..20: mol_type = other DNA
ggtatccagagttactacat

SEQ ID NO: 40859 - DNA, 20 bp, synthetic construct
  source 1..20: mol_type = other DNA
aggtatccagagttactaca

SEQ ID NO: 40860 - DNA, 20 bp, synthetic construct
  source 1..20: mol_type = other DNA
gaggtatccagagttactac

SEQ ID NO: 40861 - DNA, 20 bp, synthetic construct
  source 1..20: mol_type = other DNA
tgaggtatccagagttacta

SEQ ID NO: 40862 - DNA, 20 bp, synthetic construct
  source 1..20: mol_type = other DNA
atgaggtatccagagttact

SEQ ID NO: 40863 - DNA, 20 bp, synthetic construct
  source 1..20: mol_type = other DNA
aatgaggtatccagagttac

SEQ ID NO: 40864 - DNA, 20 bp, synthetic construct
  source 1..20: mol_type = other DNA
taatgaggtatccagagtta

SEQ ID NO: 40865 - DNA, 20 bp, synthetic construct
  source 1..20: mol_type = other DNA
ctaatgaggtatccagagtt

SEQ ID NO: 40866 - DNA, 20 bp, synthetic construct
  source 1..20: mol_type = other DNA
gctaatgaggtatccagagt

SEQ ID NO: 40867 - DNA, 20 bp, synthetic construct
  source 1..20: mol_type = other DNA
ggctaatgaggtatccagag

SEQ ID NO: 40868 - DNA, 20 bp, synthetic construct
  source 1..20: mol_type = other DNA
aggctaatgaggtatccaga

SEQ ID NO: 40869 - DNA, 20 bp, synthetic construct
  source 1..20: mol_type = other DNA
taggctaatgaggtatccag

SEQ ID NO: 40870 - DNA, 20 bp, synthetic construct
  source 1..20: mol_type = other DNA
ataggctaatgaggtatcca

SEQ ID NO: 40871 - DNA, 20 bp, synthetic construct
  source 1..20: mol_type = other DNA
cataggctaatgaggtatcc

SEQ ID NO: 40872 - DNA, 20 bp, synthetic construct
  source 1..20: mol_type = other DNA
ccataggctaatgaggtatc

SEQ ID NO: 40873 - DNA, 20 bp, synthetic construct
  source 1..20: mol_type = other DNA
accataggctaatgaggtat

SEQ ID NO: 40874 - DNA, 20 bp, synthetic construct
  source 1..20: mol_type = other DNA
aaccataggctaatgaggta

SEQ ID NO: 40875 - DNA, 20 bp, synthetic construct
  source 1..20: mol_type = other DNA
caaccataggctaatgaggt

SEQ ID NO: 40876 - DNA, 20 bp, synthetic construct
  source 1..20: mol_type = other DNA
ccaaccataggctaatgagg

SEQ ID NO: 40877 - DNA, 20 bp, synthetic construct
  source 1..20: mol_type = other DNA
cccaaccataggctaatgag

SEQ ID NO: 40878 - DNA, 20 bp, synthetic construct
  source 1..20: mol_type = other DNA
ccccaaccataggctaatga

SEQ ID NO: 40879 - DNA, 20 bp, synthetic construct
  source 1..20: mol_type = other DNA
cccccaaccataggctaatg

SEQ ID NO: 40880 - DNA, 20 bp, synthetic construct
  source 1..20: mol_type = other DNA
acccccaaccataggctaat

SEQ ID NO: 40881 - DNA, 20 bp, synthetic construct
  source 1..20: mol_type = other DNA
cacccccaaccataggctaa

SEQ ID NO: 40882 - DNA, 20 bp, synthetic construct
  source 1..20: mol_type = other DNA
ccacccccaaccataggcta

SEQ ID NO: 40883 - DNA, 20 bp, synthetic construct
  source 1..20: mol_type = other DNA
accacccccaaccataggct

SEQ ID NO: 40884 - DNA, 20 bp, synthetic construct
  source 1..20: mol_type = other DNA
caccacccccaaccataggc

SEQ ID NO: 40885 - DNA, 20 bp, synthetic construct
  source 1..20: mol_type = other DNA
ccaccacccccaaccatagg

SEQ ID NO: 40886 - DNA, 20 bp, synthetic construct
  source 1..20: mol_type = other DNA
accaccacccccaaccatag

SEQ ID NO: 40887 - DNA, 20 bp, synthetic construct
  source 1..20: mol_type = other DNA
aaccaccacccccaaccata

SEQ ID NO: 40888 - DNA, 20 bp, synthetic construct
  source 1..20: mol_type = other DNA
caaccaccacccccaaccat

SEQ ID NO: 40889 - DNA, 20 bp, synthetic construct
  source 1..20: mol_type = other DNA
acaaccaccacccccaacca

SEQ ID NO: 40890 - DNA, 20 bp, synthetic construct
  source 1..20: mol_type = other DNA
aacaaccaccacccccaacc

SEQ ID NO: 40891 - DNA, 20 bp, synthetic construct
  source 1..20: mol_type = other DNA
taacaaccaccacccccaac

SEQ ID NO: 40892 - DNA, 20 bp, synthetic construct
  source 1..20: mol_type = other DNA
gtaacaaccaccacccccaa

SEQ ID NO: 40893 - DNA, 20 bp, synthetic construct
  source 1..20: mol_type = other DNA
agtaacaaccaccaccccca

SEQ ID NO: 40894 - DNA, 20 bp, synthetic construct
  source 1..20: mol_type = other DNA
cagtaacaaccaccaccccc

SEQ ID NO: 40895 - DNA, 20 bp, synthetic construct
  source 1..20: mol_type = other DNA
acagtaacaaccaccacccc

SEQ ID NO: 40896 - DNA, 20 bp, synthetic construct
  source 1..20: mol_type = other DNA
aacagtaacaaccaccaccc

SEQ ID NO: 40897 - DNA, 20 bp, synthetic construct
  source 1..20: mol_type = other DNA
taacagtaacaaccaccacc

SEQ ID NO: 40898 - DNA, 20 bp, synthetic construct
  source 1..20: mol_type = other DNA
ataacagtaacaaccaccac

SEQ ID NO: 40899 - DNA, 20 bp, synthetic construct
  source 1..20: mol_type = other DNA
aataacagtaacaaccacca

SEQ ID NO: 40900 - DNA, 20 bp, synthetic construct
  source 1..20: mol_type = other DNA
aaataacagtaacaaccacc

SEQ ID NO: 40901 - DNA, 20 bp, synthetic construct
  source 1..20: mol_type = other DNA
caaataacagtaacaaccac

SEQ ID NO: 40902 - DNA, 20 bp, synthetic construct
  source 1..20: mol_type = other DNA
gcaaataacagtaacaacca

SEQ ID NO: 40903 - DNA, 20 bp, synthetic construct
  source 1..20: mol_type = other DNA
agcaaataacagtaacaacc

SEQ ID NO: 40904 - DNA, 20 bp, synthetic construct
  source 1..20: mol_type = other DNA
aagcaaataacagtaacaac

SEQ ID NO: 40905 - DNA, 20 bp, synthetic construct
  source 1..20: mol_type = other DNA
taagcaaataacagtaacaa

SEQ ID NO: 40906 - DNA, 20 bp, synthetic construct
  source 1..20: mol_type = other DNA
ataagcaaataacagtaaca

SEQ ID NO: 40907 - DNA, 20 bp, synthetic construct
  source 1..20: mol_type = other DNA
aataagcaaataacagtaac

SEQ ID NO: 40908 - DNA, 20 bp, synthetic construct
  source 1..20: mol_type = other DNA
aaataagcaaataacagtaa

SEQ ID NO: 40909 - DNA, 20 bp, synthetic construct
  source 1..20: mol_type = other DNA
caaataagcaaataacagta

SEQ ID NO: 40910 - DNA, 20 bp, synthetic construct
  source 1..20: mol_type = other DNA
acaaataagcaaataacagt

SEQ ID NO: 40911 - DNA, 20 bp, synthetic construct
  source 1..20: mol_type = other DNA
gacaaataagcaaataacag

SEQ ID NO: 40912 - DNA, 20 bp, synthetic construct
  source 1..20: mol_type = other DNA
agacaaataagcaaataaca

SEQ ID NO: 40913 - DNA, 20 bp, synthetic construct
  source 1..20: mol_type = other DNA
tagacaaataagcaaataac

SEQ ID NO: 40914 - DNA, 20 bp, synthetic construct
  source 1..20: mol_type = other DNA
ttagacaaataagcaaataa

SEQ ID NO: 40915 - DNA, 20 bp, synthetic construct
  source 1..20: mol_type = other DNA
attagacaaataagcaaata

SEQ ID NO: 40916 - DNA, 20 bp, synthetic construct
  source 1..20: mol_type = other DNA
cattagacaaataagcaaat

SEQ ID NO: 40917 - DNA, 20 bp, synthetic construct
  source 1..20: mol_type = other DNA
tcattagacaaataagcaaa

SEQ ID NO: 40918 - DNA, 20 bp, synthetic construct
  source 1..20: mol_type = other DNA
gtcattagacaaataagcaa

SEQ ID NO: 40919 - DNA, 20 bp, synthetic construct
  source 1..20: mol_type = other DNA
agtcattagacaaataagca

SEQ ID NO: 40920 - DNA, 20 bp, synthetic construct
  source 1..20: mol_type = other DNA
cagtcattagacaaataagc

SEQ ID NO: 40921 - DNA, 20 bp, synthetic construct
  source 1..20: mol_type = other DNA
ccagtcattagacaaataag

SEQ ID NO: 40922 - DNA, 20 bp, synthetic construct
  source 1..20: mol_type = other DNA
gccagtcattagacaaataa

SEQ ID NO: 40923 - DNA, 20 bp, synthetic construct
  source 1..20: mol_type = other DNA
agccagtcattagacaaata

SEQ ID NO: 40924 - DNA, 20 bp, synthetic construct
  source 1..20: mol_type = other DNA
cagccagtcattagacaaat

SEQ ID NO: 40925 - DNA, 20 bp, synthetic construct
  source 1..20: mol_type = other DNA
tcagccagtcattagacaaa

SEQ ID NO: 40926 - DNA, 20 bp, synthetic construct
  source 1..20: mol_type = other DNA
ttcagccagtcattagacaa

SEQ ID NO: 40927 - DNA, 20 bp, synthetic construct
  source 1..20: mol_type = other DNA
attcagccagtcattagaca

SEQ ID NO: 40928 - DNA, 20 bp, synthetic construct
  source 1..20: mol_type = other DNA
cattcagccagtcattagac

SEQ ID NO: 40929 - DNA, 20 bp, synthetic construct
  source 1..20: mol_type = other DNA
tcattcagccagtcattaga

SEQ ID NO: 40930 - DNA, 20 bp, synthetic construct
  source 1..20: mol_type = other DNA
atcattcagccagtcattag

SEQ ID NO: 40931 - DNA, 20 bp, synthetic construct
  source 1..20: mol_type = other DNA
aatcattcagccagtcatta

SEQ ID NO: 40932 - DNA, 20 bp, synthetic construct
  source 1..20: mol_type = other DNA
aaatcattcagccagtcatt

SEQ ID NO: 40933 - DNA, 20 bp, synthetic construct
  source 1..20: mol_type = other DNA
aaaatcattcagccagtcat

SEQ ID NO: 40934 - DNA, 20 bp, synthetic construct
  source 1..20: mol_type = other DNA
taaaatcattcagccagtca

SEQ ID NO: 40935 - DNA, 20 bp, synthetic construct
  source 1..20: mol_type = other DNA
ctaaaatcattcagccagtc

SEQ ID NO: 40936 - DNA, 20 bp, synthetic construct
  source 1..20: mol_type = other DNA
actaaaatcattcagccagt

SEQ ID NO: 40937 - DNA, 20 bp, synthetic construct
  source 1..20: mol_type = other DNA
cactaaaatcattcagccag

SEQ ID NO: 40938 - DNA, 20 bp, synthetic construct
  source 1..20: mol_type = other DNA
acactaaaatcattcagcca

SEQ ID NO: 40939 - DNA, 20 bp, synthetic construct
  source 1..20: mol_type = other DNA
aacactaaaatcattcagcc

SEQ ID NO: 40940 - DNA, 20 bp, synthetic construct
  source 1..20: mol_type = other DNA
gaacactaaaatcattcagc

SEQ ID NO: 40941 - DNA, 20 bp, synthetic construct
  source 1..20: mol_type = other DNA
agaacactaaaatcattcag

SEQ ID NO: 40942 - DNA, 20 bp, synthetic construct
  source 1..20: mol_type = other DNA
tagaacactaaaatcattca

SEQ ID NO: 40943 - DNA, 20 bp, synthetic construct
  source 1..20: mol_type = other DNA
atagaacactaaaatcattc

SEQ ID NO: 40944 - DNA, 20 bp, synthetic construct
  source 1..20: mol_type = other DNA
gatagaacactaaaatcatt

SEQ ID NO: 40945 - DNA, 20 bp, synthetic construct
  source 1..20: mol_type = other DNA
ggatagaacactaaaatcat

SEQ ID NO: 40946 - DNA, 20 bp, synthetic construct
  source 1..20: mol_type = other DNA
aggatagaacactaaaatca

SEQ ID NO: 40947 - DNA, 20 bp, synthetic construct
  source 1..20: mol_type = other DNA
aaggatagaacactaaaatc

SEQ ID NO: 40948 - DNA, 20 bp, synthetic construct
  source 1..20: mol_type = other DNA
gaaggatagaacactaaaat

SEQ ID NO: 40949 - DNA, 20 bp, synthetic construct
  source 1..20: mol_type = other DNA
agaaggatagaacactaaaa

SEQ ID NO: 40950 - DNA, 20 bp, synthetic construct
  source 1..20: mol_type = other DNA
aagaaggatagaacactaaa

SEQ ID NO: 40951 - DNA, 20 bp, synthetic construct
  source 1..20: mol_type = other DNA
gaagaaggatagaacactaa

SEQ ID NO: 40952 - DNA, 20 bp, synthetic construct
  source 1..20: mol_type = other DNA
ggaagaaggatagaacacta

SEQ ID NO: 40953 - DNA, 20 bp, synthetic construct
  source 1..20: mol_type = other DNA
gggaagaaggatagaacact

SEQ ID NO: 40954 - DNA, 20 bp, synthetic construct
  source 1..20: mol_type = other DNA
agggaagaaggatagaacac

SEQ ID NO: 40955 - DNA, 20 bp, synthetic construct
  source 1..20: mol_type = other DNA
gagggaagaaggatagaaca

SEQ ID NO: 40956 - DNA, 20 bp, synthetic construct
  source 1..20: mol_type = other DNA
ggagggaagaaggatagaac

SEQ ID NO: 40957 - DNA, 20 bp, synthetic construct
  source 1..20: mol_type = other DNA
gggagggaagaaggatagaa

SEQ ID NO: 40958 - DNA, 20 bp, synthetic construct
  source 1..20: mol_type = other DNA
agggagggaagaaggataga

SEQ ID NO: 40959 - DNA, 20 bp, synthetic construct
  source 1..20: mol_type = other DNA
cagggagggaagaaggatag

SEQ ID NO: 40960 - DNA, 20 bp, synthetic construct
  source 1..20: mol_type = other DNA
acagggagggaagaaggata

SEQ ID NO: 40961 - DNA, 20 bp, synthetic construct
  source 1..20: mol_type = other DNA
tacagggagggaagaaggat

SEQ ID NO: 40962 - DNA, 20 bp, synthetic construct
  source 1..20: mol_type = other DNA
gtacagggagggaagaagga

SEQ ID NO: 40963 - DNA, 20 bp, synthetic construct
  source 1..20: mol_type = other DNA
tgtacagggagggaagaagg

SEQ ID NO: 40964 - DNA, 20 bp, synthetic construct
  source 1..20: mol_type = other DNA
ctgtacagggagggaagaag

SEQ ID NO: 40965 - DNA, 20 bp, synthetic construct
  source 1..20: mol_type = other DNA
actgtacagggagggaagaa

SEQ ID NO: 40966 - DNA, 20 bp, synthetic construct
  source 1..20: mol_type = other DNA
cactgtacagggagggaaga

SEQ ID NO: 40967 - DNA, 20 bp, synthetic construct
  source 1..20: mol_type = other DNA
acactgtacagggagggaag

SEQ ID NO: 40968 - DNA, 20 bp, synthetic construct
  source 1..20: mol_type = other DNA
cacactgtacagggagggaa

SEQ ID NO: 40969 - DNA, 20 bp, synthetic construct
  source 1..20: mol_type = other DNA
tcacactgtacagggaggga

SEQ ID NO: 40970 - DNA, 20 bp, synthetic construct
  source 1..20: mol_type = other DNA
gtcacactgtacagggaggg

SEQ ID NO: 40971 - DNA, 20 bp, synthetic construct
  source 1..20: mol_type = other DNA
tgtcacactgtacagggagg

SEQ ID NO: 40972 - DNA, 20 bp, synthetic construct
  source 1..20: mol_type = other DNA
gtgtcacactgtacagggag

SEQ ID NO: 40973 - DNA, 20 bp, synthetic construct
  source 1..20: mol_type = other DNA
cgtgtcacactgtacaggga

SEQ ID NO: 40974 - DNA, 20 bp, synthetic construct
  source 1..20: mol_type = other DNA
acgtgtcacactgtacaggg

SEQ ID NO: 40975 - DNA, 20 bp, synthetic construct
  source 1..20: mol_type = other DNA
gacgtgtcacactgtacagg

SEQ ID NO: 40976 - DNA, 20 bp, synthetic construct
  source 1..20: mol_type = other DNA
agacgtgtcacactgtacag

SEQ ID NO: 40977 - DNA, 20 bp, synthetic construct
  source 1..20: mol_type = other DNA
cagacgtgtcacactgtaca

SEQ ID NO: 40978 - DNA, 20 bp, synthetic construct
  source 1..20: mol_type = other DNA
tcagacgtgtcacactgtac

SEQ ID NO: 40979 - DNA, 20 bp, synthetic construct
  source 1..20: mol_type = other DNA
atcagacgtgtcacactgta

SEQ ID NO: 40980 - DNA, 20 bp, synthetic construct
  source 1..20: mol_type = other DNA
catcagacgtgtcacactgt

SEQ ID NO: 40981 - DNA, 20 bp, synthetic construct
  source 1..20: mol_type = other DNA
gcatcagacgtgtcacactg

SEQ ID NO: 40982 - DNA, 20 bp, synthetic construct
  source 1..20: mol_type = other DNA
agcatcagacgtgtcacact

SEQ ID NO: 40983 - DNA, 20 bp, synthetic construct
  source 1..20: mol_type = other DNA
tagcatcagacgtgtcacac

SEQ ID NO: 40984 - DNA, 20 bp, synthetic construct
  source 1..20: mol_type = other DNA
ctagcatcagacgtgtcaca

SEQ ID NO: 40985 - DNA, 20 bp, synthetic construct
  source 1..20: mol_type = other DNA
actagcatcagacgtgtcac

SEQ ID NO: 40986 - DNA, 20 bp, synthetic construct
  source 1..20: mol_type = other DNA
aactagcatcagacgtgtca

SEQ ID NO: 40987 - DNA, 20 bp, synthetic construct
  source 1..20: mol_type = other DNA
aaactagcatcagacgtgtc

SEQ ID NO: 40988 - DNA, 20 bp, synthetic construct
  source 1..20: mol_type = other DNA
aaaactagcatcagacgtgt

SEQ ID NO: 40989 - DNA, 20 bp, synthetic construct
  source 1..20: mol_type = other DNA
gaaaactagcatcagacgtg

SEQ ID NO: 40990 - DNA, 20 bp, synthetic construct
  source 1..20: mol_type = other DNA
agaaaactagcatcagacgt

SEQ ID NO: 40991 - DNA, 20 bp, synthetic construct
  source 1..20: mol_type = other DNA
aagaaaactagcatcagacg

SEQ ID NO: 40992 - DNA, 20 bp, synthetic construct
  source 1..20: mol_type = other DNA
caagaaaactagcatcagac

SEQ ID NO: 40993 - DNA, 20 bp, synthetic construct
  source 1..20: mol_type = other DNA
ccaagaaaactagcatcaga

SEQ ID NO: 40994 - DNA, 20 bp, synthetic construct
  source 1..20: mol_type = other DNA
cccaagaaaactagcatcag

SEQ ID NO: 40995 - DNA, 20 bp, synthetic construct
  source 1..20: mol_type = other DNA
tcccaagaaaactagcatca

SEQ ID NO: 40996 - DNA, 20 bp, synthetic construct
  source 1..20: mol_type = other DNA
atcccaagaaaactagcatc

SEQ ID NO: 40997 - DNA, 20 bp, synthetic construct
  source 1..20: mol_type = other DNA
catcccaagaaaactagcat

SEQ ID NO: 40998 - DNA, 20 bp, synthetic construct
  source 1..20: mol_type = other DNA
gcatcccaagaaaactagca

SEQ ID NO: 40999 - DNA, 20 bp, synthetic construct
  source 1..20: mol_type = other DNA
tgcatcccaagaaaactagc

SEQ ID NO: 41000 - DNA, 20 bp, synthetic construct
  source 1..20: mol_type = other DNA
ctgcatcccaagaaaactag

SEQ ID NO: 41001 - DNA, 20 bp, synthetic construct
  source 1..20: mol_type = other DNA
gctgcatcccaagaaaacta

SEQ ID NO: 41002 - DNA, 20 bp, synthetic construct
  source 1..20: mol_type = other DNA
ggctgcatcccaagaaaact

SEQ ID NO: 41003 - DNA, 20 bp, synthetic construct
  source 1..20: mol_type = other DNA
aggctgcatcccaagaaaac

SEQ ID NO: 41004 - DNA, 20 bp, synthetic construct
  source 1..20: mol_type = other DNA
aaggctgcatcccaagaaaa

SEQ ID NO: 41005 - DNA, 20 bp, synthetic construct
  source 1..20: mol_type = other DNA
caaggctgcatcccaagaaa

SEQ ID NO: 41006 - DNA, 20 bp, synthetic construct
  source 1..20: mol_type = other DNA
ccaaggctgcatcccaagaa

SEQ ID NO: 41007 - DNA, 20 bp, synthetic construct
  source 1..20: mol_type = other DNA
cccaaggctgcatcccaaga

SEQ ID NO: 41008 - DNA, 20 bp, synthetic construct
  source 1..20: mol_type = other DNA
acccaaggctgcatcccaag

SEQ ID NO: 41009 - DNA, 20 bp, synthetic construct
  source 1..20: mol_type = other DNA
tacccaaggctgcatcccaa

SEQ ID NO: 41010 - DNA, 20 bp, synthetic construct
  source 1..20: mol_type = other DNA
atacccaaggctgcatccca

SEQ ID NO: 41011 - DNA, 20 bp, synthetic construct
  source 1..20: mol_type = other DNA
catacccaaggctgcatccc

SEQ ID NO: 41012 - DNA, 20 bp, synthetic construct
  source 1..20: mol_type = other DNA
gcatacccaaggctgcatcc

SEQ ID NO: 41013 - DNA, 20 bp, synthetic construct
  source 1..20: mol_type = other DNA
ggcatacccaaggctgcatc

SEQ ID NO: 41014 - DNA, 20 bp, synthetic construct
  source 1..20: mol_type = other DNA
aggcatacccaaggctgcat

SEQ ID NO: 41015 - DNA, 20 bp, synthetic construct
  source 1..20: mol_type = other DNA
taggcatacccaaggctgca

SEQ ID NO: 41016 - DNA, 20 bp, synthetic construct
  source 1..20: mol_type = other DNA
gtaggcatacccaaggctgc

SEQ ID NO: 41017 - DNA, 20 bp, synthetic construct
  source 1..20: mol_type = other DNA
ggtaggcatacccaaggctg

SEQ ID NO: 41018 - DNA, 20 bp, synthetic construct
  source 1..20: mol_type = other DNA
tggtaggcatacccaaggct

SEQ ID NO: 41019 - DNA, 20 bp, synthetic construct
  source 1..20: mol_type = other DNA
atggtaggcatacccaaggc

SEQ ID NO: 41020 - DNA, 20 bp, synthetic construct
  source 1..20: mol_type = other DNA
gatggtaggcatacccaagg

SEQ ID NO: 41021 - DNA, 20 bp, synthetic construct
  source 1..20: mol_type = other DNA
tgatggtaggcatacccaag

SEQ ID NO: 41022 - DNA, 20 bp, synthetic construct
  source 1..20: mol_type = other DNA
gtgatggtaggcatacccaa

SEQ ID NO: 41023 - DNA, 20 bp, synthetic construct
  source 1..20: mol_type = other DNA
agtgatggtaggcataccca

SEQ ID NO: 41024 - DNA, 20 bp, synthetic construct
  source 1..20: mol_type = other DNA
gagtgatggtaggcataccc

SEQ ID NO: 41025 - DNA, 20 bp, synthetic construct
  source 1..20: mol_type = other DNA
agagtgatggtaggcatacc

SEQ ID NO: 41026 - DNA, 20 bp, synthetic construct
  source 1..20: mol_type = other DNA
tagagtgatggtaggcatac

SEQ ID NO: 41027 - DNA, 20 bp, synthetic construct
  source 1..20: mol_type = other DNA
ctagagtgatggtaggcata

SEQ ID NO: 41028 - DNA, 20 bp, synthetic construct
  source 1..20: mol_type = other DNA
tctagagtgatggtaggcat

SEQ ID NO: 41029 - DNA, 20 bp, synthetic construct
  source 1..20: mol_type = other DNA
ttctagagtgatggtaggca

SEQ ID NO: 41030 - DNA, 20 bp, synthetic construct
  source 1..20: mol_type = other DNA
attctagagtgatggtaggc

SEQ ID NO: 41031 - DNA, 20 bp, synthetic construct
  source 1..20: mol_type = other DNA
gattctagagtgatggtagg

SEQ ID NO: 41032 - DNA, 20 bp, synthetic construct
  source 1..20: mol_type = other DNA
tgattctagagtgatggtag

SEQ ID NO: 41033 - DNA, 20 bp, synthetic construct
  source 1..20: mol_type = other DNA
gtgattctagagtgatggta

SEQ ID NO: 41034 - DNA, 20 bp, synthetic construct
  source 1..20: mol_type = other DNA
tgtgattctagagtgatggt

SEQ ID NO: 41035 - DNA, 20 bp, synthetic construct
  source 1..20: mol_type = other DNA
ctgtgattctagagtgatgg

SEQ ID NO: 41036 - DNA, 20 bp, synthetic construct
  source 1..20: mol_type = other DNA
actgtgattctagagtgatg

SEQ ID NO: 41037 - DNA, 20 bp, synthetic construct
  source 1..20: mol_type = other DNA
cactgtgattctagagtgat

SEQ ID NO: 41038 - DNA, 20 bp, synthetic construct
  source 1..20: mol_type = other DNA
tcactgtgattctagagtga

SEQ ID NO: 41039 - DNA, 20 bp, synthetic construct
  source 1..20: mol_type = other DNA
atcactgtgattctagagtg

SEQ ID NO: 41040 - DNA, 20 bp, synthetic construct
  source 1..20: mol_type = other DNA
aatcactgtgattctagagt

SEQ ID NO: 41041 - DNA, 20 bp, synthetic construct
  source 1..20: mol_type = other DNA
aaatcactgtgattctagag

SEQ ID NO: 41042 - DNA, 20 bp, synthetic construct
  source 1..20: mol_type = other DNA
aaaatcactgtgattctaga

SEQ ID NO: 41043 - DNA, 20 bp, synthetic construct
  source 1..20: mol_type = other DNA
caaaatcactgtgattctag

SEQ ID NO: 41044 - DNA, 20 bp, synthetic construct
  source 1..20: mol_type = other DNA
ccaaaatcactgtgattcta

SEQ ID NO: 41045 - DNA, 20 bp, synthetic construct
  source 1..20: mol_type = other DNA
gccaaaatcactgtgattct

SEQ ID NO: 41046 - DNA, 20 bp, synthetic construct
  source 1..20: mol_type = other DNA
tgccaaaatcactgtgattc

SEQ ID NO: 41047 - DNA, 20 bp, synthetic construct
  source 1..20: mol_type = other DNA
atgccaaaatcactgtgatt

SEQ ID NO: 41048 - DNA, 20 bp, synthetic construct
  source 1..20: mol_type = other DNA
catgccaaaatcactgtgat

SEQ ID NO: 41049 - DNA, 20 bp, synthetic construct
  source 1..20: mol_type = other DNA
ccatgccaaaatcactgtga

SEQ ID NO: 41050 - DNA, 20 bp, synthetic construct
  source 1..20: mol_type = other DNA
gccatgccaaaatcactgtg

SEQ ID NO: 41051 - DNA, 20 bp, synthetic construct
  source 1..20: mol_type = other DNA
agccatgccaaaatcactgt

SEQ ID NO: 41052 - DNA, 20 bp, synthetic construct
  source 1..20: mol_type = other DNA
aagccatgccaaaatcactg

SEQ ID NO: 41053 - DNA, 20 bp, synthetic construct
  source 1..20: mol_type = other DNA
aaagccatgccaaaatcact

SEQ ID NO: 41054 - DNA, 20 bp, synthetic construct
  source 1..20: mol_type = other DNA
caaagccatgccaaaatcac

SEQ ID NO: 41055 - DNA, 20 bp, synthetic construct
  source 1..20: mol_type = other DNA
acaaagccatgccaaaatca

SEQ ID NO: 41056 - DNA, 20 bp, synthetic construct
  source 1..20: mol_type = other DNA
gacaaagccatgccaaaatc

SEQ ID NO: 41057 - DNA, 20 bp, synthetic construct
  source 1..20: mol_type = other DNA
agacaaagccatgccaaaat

SEQ ID NO: 41058 - DNA, 20 bp, synthetic construct
  source 1..20: mol_type = other DNA
gagacaaagccatgccaaaa

SEQ ID NO: 41059 - DNA, 20 bp, synthetic construct
  source 1..20: mol_type = other DNA
agagacaaagccatgccaaa

SEQ ID NO: 41060 - DNA, 20 bp, synthetic construct
  source 1..20: mol_type = other DNA
aagagacaaagccatgccaa

SEQ ID NO: 41061 - DNA, 20 bp, synthetic construct
  source 1..20: mol_type = other DNA
aaagagacaaagccatgcca

SEQ ID NO: 41062 - DNA, 20 bp, synthetic construct
  source 1..20: mol_type = other DNA
aaaagagacaaagccatgcc

SEQ ID NO: 41063 - DNA, 20 bp, synthetic construct
  source 1..20: mol_type = other DNA
gaaaagagacaaagccatgc

SEQ ID NO: 41064 - DNA, 20 bp, synthetic construct
  source 1..20: mol_type = other DNA
ggaaaagagacaaagccatg

SEQ ID NO: 41065 - DNA, 20 bp, synthetic construct
  source 1..20: mol_type = other DNA
aggaaaagagacaaagccat

SEQ ID NO: 41066 - DNA, 20 bp, synthetic construct
  source 1..20: mol_type = other DNA
caggaaaagagacaaagcca

SEQ ID NO: 41067 - DNA, 20 bp, synthetic construct
  source 1..20: mol_type = other DNA
tcaggaaaagagacaaagcc

SEQ ID NO: 41068 - DNA, 20 bp, synthetic construct
  source 1..20: mol_type = other DNA
gtcaggaaaagagacaaagc

SEQ ID NO: 41069 - DNA, 20 bp, synthetic construct
  source 1..20: mol_type = other DNA
agtcaggaaaagagacaaag

SEQ ID NO: 41070 - DNA, 20 bp, synthetic construct
  source 1..20: mol_type = other DNA
cagtcaggaaaagagacaaa

SEQ ID NO: 41071 - DNA, 20 bp, synthetic construct
  source 1..20: mol_type = other DNA
acagtcaggaaaagagacaa

SEQ ID NO: 41072 - DNA, 20 bp, synthetic construct
  source 1..20: mol_type = other DNA
tacagtcaggaaaagagaca

SEQ ID NO: 41073 - DNA, 20 bp, synthetic construct
  source 1..20: mol_type = other DNA
gtacagtcaggaaaagagac

SEQ ID NO: 41074 - DNA, 20 bp, synthetic construct
  source 1..20: mol_type = other DNA
ggtacagtcaggaaaagaga

SEQ ID NO: 41075 - DNA, 20 bp, synthetic construct
  source 1..20: mol_type = other DNA
gggtacagtcaggaaaagag

SEQ ID NO: 41076 - DNA, 20 bp, synthetic construct
  source 1..20: mol_type = other DNA
tgggtacagtcaggaaaaga

SEQ ID NO: 41077 - DNA, 20 bp, synthetic construct
  source 1..20: mol_type = other DNA
ctgggtacagtcaggaaaag

SEQ ID NO: 41078 - DNA, 20 bp, synthetic construct
  source 1..20: mol_type = other DNA
gctgggtacagtcaggaaaa

SEQ ID NO: 41079 - DNA, 20 bp, synthetic construct
  source 1..20: mol_type = other DNA
agctgggtacagtcaggaaa

SEQ ID NO: 41080 - DNA, 20 bp, synthetic construct
  source 1..20: mol_type = other DNA
cagctgggtacagtcaggaa

SEQ ID NO: 41081 - DNA, 20 bp, synthetic construct
  source 1..20: mol_type = other DNA
acagctgggtacagtcagga

SEQ ID NO: 41082 - DNA, 20 bp, synthetic construct
  source 1..20: mol_type = other DNA
aacagctgggtacagtcagg

SEQ ID NO: 41083 - DNA, 20 bp, synthetic construct
  source 1..20: mol_type = other DNA
taacagctgggtacagtcag

SEQ ID NO: 41084 - DNA, 20 bp, synthetic construct
  source 1..20: mol_type = other DNA
ttaacagctgggtacagtca

SEQ ID NO: 41085 - DNA, 20 bp, synthetic construct
  source 1..20: mol_type = other DNA
cttaacagctgggtacagtc

SEQ ID NO: 41086 - DNA, 20 bp, synthetic construct
  source 1..20: mol_type = other DNA
gcttaacagctgggtacagt

SEQ ID NO: 41087 - DNA, 20 bp, synthetic construct
  source 1..20: mol_type = other DNA
agcttaacagctgggtacag

SEQ ID NO: 41088 - DNA, 20 bp, synthetic construct
  source 1..20: mol_type = other DNA
tagcttaacagctgggtaca

SEQ ID NO: 41089 - DNA, 20 bp, synthetic construct
  source 1..20: mol_type = other DNA
gtagcttaacagctgggtac

SEQ ID NO: 41090 - DNA, 20 bp, synthetic construct
  source 1..20: mol_type = other DNA
tgtagcttaacagctgggta

SEQ ID NO: 41091 - DNA, 20 bp, synthetic construct
  source 1..20: mol_type = other DNA
gtgtagcttaacagctgggt

SEQ ID NO: 41092 - DNA, 20 bp, synthetic construct
  source 1..20: mol_type = other DNA
agtgtagcttaacagctggg

SEQ ID NO: 41093 - DNA, 20 bp, synthetic construct
  source 1..20: mol_type = other DNA
tagtgtagcttaacagctgg

SEQ ID NO: 41094 - DNA, 20 bp, synthetic construct
  source 1..20: mol_type = other DNA
ttagtgtagcttaacagctg

SEQ ID NO: 41095 - DNA, 20 bp, synthetic construct
  source 1..20: mol_type = other DNA
attagtgtagcttaacagct

SEQ ID NO: 41096 - DNA, 20 bp, synthetic construct
  source 1..20: mol_type = other DNA
aattagtgtagcttaacagc

SEQ ID NO: 41097 - DNA, 20 bp, synthetic construct
  source 1..20: mol_type = other DNA
taattagtgtagcttaacag

SEQ ID NO: 41098 - DNA, 20 bp, synthetic construct
  source 1..20: mol_type = other DNA
gtaattagtgtagcttaaca

SEQ ID NO: 41099 - DNA, 20 bp, synthetic construct
  source 1..20: mol_type = other DNA
agtaattagtgtagcttaac

SEQ ID NO: 41100 - DNA, 20 bp, synthetic construct
  source 1..20: mol_type = other DNA
tagtaattagtgtagcttaa

SEQ ID NO: 41101 - DNA, 20 bp, synthetic construct
  source 1..20: mol_type = other DNA
ctagtaattagtgtagctta

SEQ ID NO: 41102 - DNA, 20 bp, synthetic construct
  source 1..20: mol_type = other DNA
cctagtaattagtgtagctt

SEQ ID NO: 41103 - DNA, 20 bp, synthetic construct
  source 1..20: mol_type = other DNA
acctagtaattagtgtagct

SEQ ID NO: 41104 - DNA, 20 bp, synthetic construct
  source 1..20: mol_type = other DNA
cacctagtaattagtgtagc

SEQ ID NO: 41105 - DNA, 20 bp, synthetic construct
  source 1..20: mol_type = other DNA
tcacctagtaattagtgtag

SEQ ID NO: 41106 - DNA, 20 bp, synthetic construct
  source 1..20: mol_type = other DNA
atcacctagtaattagtgta

SEQ ID NO: 41107 - DNA, 20 bp, synthetic construct
  source 1..20: mol_type = other DNA
catcacctagtaattagtgt

SEQ ID NO: 41108 - DNA, 20 bp, synthetic construct
  source 1..20: mol_type = other DNA
gcatcacctagtaattagtg

SEQ ID NO: 41109 - DNA, 20 bp, synthetic construct
  source 1..20: mol_type = other DNA
agcatcacctagtaattagt

SEQ ID NO: 41110 - DNA, 20 bp, synthetic construct
  source 1..20: mol_type = other DNA
cagcatcacctagtaattag

SEQ ID NO: 41111 - DNA, 20 bp, synthetic construct
  source 1..20: mol_type = other DNA
acagcatcacctagtaatta

SEQ ID NO: 41112 - DNA, 20 bp, synthetic construct
  source 1..20: mol_type = other DNA
cacagcatcacctagtaatt

SEQ ID NO: 41113 - DNA, 20 bp, synthetic construct
  source 1..20: mol_type = other DNA
acacagcatcacctagtaat

SEQ ID NO: 41114 - DNA, 20 bp, synthetic construct
  source 1..20: mol_type = other DNA
tacacagcatcacctagtaa

SEQ ID NO: 41115 - DNA, 20 bp, synthetic construct
  source 1..20: mol_type = other DNA
ctacacagcatcacctagta

SEQ ID NO: 41116 - DNA, 20 bp, synthetic construct
  source 1..20: mol_type = other DNA
actacacagcatcacctagt

SEQ ID NO: 41117 - DNA, 20 bp, synthetic construct
  source 1..20: mol_type = other DNA
gactacacagcatcacctag

SEQ ID NO: 41118 - DNA, 20 bp, synthetic construct
  source 1..20: mol_type = other DNA
tgactacacagcatcaccta

SEQ ID NO: 41119 - DNA, 20 bp, synthetic construct
  source 1..20: mol_type = other DNA
atgactacacagcatcacct

SEQ ID NO: 41120 - DNA, 20 bp, synthetic construct
  source 1..20: mol_type = other DNA
aatgactacacagcatcacc

SEQ ID NO: 41121 - DNA, 20 bp, synthetic construct
  source 1..20: mol_type = other DNA
aaatgactacacagcatcac

SEQ ID NO: 41122 - DNA, 20 bp, synthetic construct
  source 1..20: mol_type = other DNA
gaaatgactacacagcatca

SEQ ID NO: 41123 - DNA, 20 bp, synthetic construct
  source 1..20: mol_type = other DNA
agaaatgactacacagcatc

SEQ ID NO: 41124 - DNA, 20 bp, synthetic construct
  source 1..20: mol_type = other DNA
aagaaatgactacacagcat

SEQ ID NO: 41125 - DNA, 20 bp, synthetic construct
  source 1..20: mol_type = other DNA
caagaaatgactacacagca

SEQ ID NO: 41126 - DNA, 20 bp, synthetic construct
  source 1..20: mol_type = other DNA
ccaagaaatgactacacagc

SEQ ID NO: 41127 - DNA, 20 bp, synthetic construct
  source 1..20: mol_type = other DNA
accaagaaatgactacacag

SEQ ID NO: 41128 - DNA, 20 bp, synthetic construct
  source 1..20: mol_type = other DNA
caccaagaaatgactacaca

SEQ ID NO: 41129 - DNA, 20 bp, synthetic construct
  source 1..20: mol_type = other DNA
acaccaagaaatgactacac

SEQ ID NO: 41130 - DNA, 20 bp, synthetic construct
  source 1..20: mol_type = other DNA
gacaccaagaaatgactaca

SEQ ID NO: 41131 - DNA, 20 bp, synthetic construct
  source 1..20: mol_type = other DNA
ggacaccaagaaatgactac

SEQ ID NO: 41132 - DNA, 20 bp, synthetic construct
  source 1..20: mol_type = other DNA
aggacaccaagaaatgacta

SEQ ID NO: 41133 - DNA, 20 bp, synthetic construct
  source 1..20: mol_type = other DNA
aaggacaccaagaaatgact

SEQ ID NO: 41134 - DNA, 20 bp, synthetic construct
  source 1..20: mol_type = other DNA
caaggacaccaagaaatgac

SEQ ID NO: 41135 - DNA, 20 bp, synthetic construct
  source 1..20: mol_type = other DNA
ccaaggacaccaagaaatga

SEQ ID NO: 41136 - DNA, 20 bp, synthetic construct
  source 1..20: mol_type = other DNA
cccaaggacaccaagaaatg

SEQ ID NO: 41137 - DNA, 20 bp, synthetic construct
  source 1..20: mol_type = other DNA
ccccaaggacaccaagaaat

SEQ ID NO: 41138 - DNA, 20 bp, synthetic construct
  source 1..20: mol_type = other DNA
cccccaaggacaccaagaaa

SEQ ID NO: 41139 - DNA, 20 bp, synthetic construct
  source 1..20: mol_type = other DNA
tcccccaaggacaccaagaa

SEQ ID NO: 41140 - DNA, 20 bp, synthetic construct
  source 1..20: mol_type = other DNA
atcccccaaggacaccaaga

SEQ ID NO: 41141 - DNA, 20 bp, synthetic construct
  source 1..20: mol_type = other DNA
aatcccccaaggacaccaag

SEQ ID NO: 41142 - DNA, 20 bp, synthetic construct
  source 1..20: mol_type = other DNA
caatcccccaaggacaccaa

SEQ ID NO: 41143 - DNA, 20 bp, synthetic construct
  source 1..20: mol_type = other DNA
ccaatcccccaaggacacca

SEQ ID NO: 41144 - DNA, 20 bp, synthetic construct
  source 1..20: mol_type = other DNA
accaatcccccaaggacacc

SEQ ID NO: 41145 - DNA, 20 bp, synthetic construct
  source 1..20: mol_type = other DNA
gaccaatcccccaaggacac

SEQ ID NO: 41146 - DNA, 20 bp, synthetic construct
  source 1..20: mol_type = other DNA
ggaccaatcccccaaggaca

SEQ ID NO: 41147 - DNA, 20 bp, synthetic construct
  source 1..20: mol_type = other DNA
gggaccaatcccccaaggac

SEQ ID NO: 41148 - DNA, 20 bp, synthetic construct
  source 1..20: mol_type = other DNA
tgggaccaatcccccaagga

SEQ ID NO: 41149 - DNA, 20 bp, synthetic construct
  source 1..20: mol_type = other DNA
ctgggaccaatcccccaagg

SEQ ID NO: 41150 - DNA, 20 bp, synthetic construct
  source 1..20: mol_type = other DNA
cctgggaccaatcccccaag

SEQ ID NO: 41151 - DNA, 20 bp, synthetic construct
  source 1..20: mol_type = other DNA
tcctgggaccaatcccccaa

SEQ ID NO: 41152 - DNA, 20 bp, synthetic construct
  source 1..20: mol_type = other DNA
gtcctgggaccaatccccca

SEQ ID NO: 41153 - DNA, 20 bp, synthetic construct
  source 1..20: mol_type = other DNA
ggtcctgggaccaatccccc

SEQ ID NO: 41154 - DNA, 20 bp, synthetic construct
  source 1..20: mol_type = other DNA
gggtcctgggaccaatcccc

SEQ ID NO: 41155 - DNA, 20 bp, synthetic construct
  source 1..20: mol_type = other DNA
ggggtcctgggaccaatccc

SEQ ID NO: 41156 - DNA, 20 bp, synthetic construct
  source 1..20: mol_type = other DNA
gggggtcctgggaccaatcc

SEQ ID NO: 41157 - DNA, 20 bp, synthetic construct
  source 1..20: mol_type = other DNA
ggggggtcctgggaccaatc

SEQ ID NO: 41158 - DNA, 20 bp, synthetic construct
  source 1..20: mol_type = other DNA
gggggggtcctgggaccaat

SEQ ID NO: 41159 - DNA, 20 bp, synthetic construct
  source 1..20: mol_type = other DNA
cgggggggtcctgggaccaa

SEQ ID NO: 41160 - DNA, 20 bp, synthetic construct
  source 1..20: mol_type = other DNA
acgggggggtcctgggacca

SEQ ID NO: 41161 - DNA, 20 bp, synthetic construct
  source 1..20: mol_type = other DNA
aacgggggggtcctgggacc

SEQ ID NO: 41162 - DNA, 20 bp, synthetic construct
  source 1..20: mol_type = other DNA
caacgggggggtcctgggac

SEQ ID NO: 41163 - DNA, 20 bp, synthetic construct
  source 1..20: mol_type = other DNA
ccaacgggggggtcctggga

SEQ ID NO: 41164 - DNA, 20 bp, synthetic construct
  source 1..20: mol_type = other DNA
tccaacgggggggtcctggg

SEQ ID NO: 41165 - DNA, 20 bp, synthetic construct
  source 1..20: mol_type = other DNA
atccaacgggggggtcctgg

SEQ ID NO: 41166 - DNA, 20 bp, synthetic construct
  source 1..20: mol_type = other DNA
tatccaacgggggggtcctg

SEQ ID NO: 41167 - DNA, 20 bp, synthetic construct
  source 1..20: mol_type = other DNA
atatccaacgggggggtcct

SEQ ID NO: 41168 - DNA, 20 bp, synthetic construct
  source 1..20: mol_type = other DNA
tatatccaacgggggggtcc

SEQ ID NO: 41169 - DNA, 20 bp, synthetic construct
  source 1..20: mol_type = other DNA
ttatatccaacgggggggtc

SEQ ID NO: 41170 - DNA, 20 bp, synthetic construct
  source 1..20: mol_type = other DNA
tttatatccaacgggggggt

SEQ ID NO: 41171 - DNA, 20 bp, synthetic construct
  source 1..20: mol_type = other DNA
ttttatatccaacggggggg

SEQ ID NO: 41172 - DNA, 20 bp, synthetic construct
  source 1..20: mol_type = other DNA
tttttatatccaacgggggg

SEQ ID NO: 41173 - DNA, 20 bp, synthetic construct
  source 1..20: mol_type = other DNA
atttttatatccaacggggg

SEQ ID NO: 41174 - DNA, 20 bp, synthetic construct
  source 1..20: mol_type = other DNA
aatttttatatccaacgggg

SEQ ID NO: 41175 - DNA, 20 bp, synthetic construct
  source 1..20: mol_type = other DNA
aaatttttatatccaacggg

SEQ ID NO: 41176 - DNA, 20 bp, synthetic construct
  source 1..20: mol_type = other DNA
taaatttttatatccaacgg

SEQ ID NO: 41177 - DNA, 20 bp, synthetic construct
  source 1..20: mol_type = other DNA
ataaatttttatatccaacg

SEQ ID NO: 41178 - DNA, 20 bp, synthetic construct
  source 1..20: mol_type = other DNA
cataaatttttatatccaac

SEQ ID NO: 41179 - DNA, 20 bp, synthetic construct
  source 1..20: mol_type = other DNA
ccataaatttttatatccaa

SEQ ID NO: 41180 - DNA, 20 bp, synthetic construct
  source 1..20: mol_type = other DNA
tccataaatttttatatcca

SEQ ID NO: 41181 - DNA, 20 bp, synthetic construct
  source 1..20: mol_type = other DNA
atccataaatttttatatcc

SEQ ID NO: 41182 - DNA, 20 bp, synthetic construct
  source 1..20: mol_type = other DNA
catccataaatttttatatc

SEQ ID NO: 41183 - DNA, 20 bp, synthetic construct
  source 1..20: mol_type = other DNA
gcatccataaatttttatat

SEQ ID NO: 41184 - DNA, 20 bp, synthetic construct
  source 1..20: mol_type = other DNA
agcatccataaatttttata

SEQ ID NO: 41185 - DNA, 20 bp, synthetic construct
  source 1..20: mol_type = other DNA
gagcatccataaatttttat

SEQ ID NO: 41186 - DNA, 20 bp, synthetic construct
  source 1..20: mol_type = other DNA
agagcatccataaattttta

SEQ ID NO: 41187 - DNA, 20 bp, synthetic construct
  source 1..20: mol_type = other DNA
tagagcatccataaattttt

SEQ ID NO: 41188 - DNA, 20 bp, synthetic construct
  source 1..20: mol_type = other DNA
ctagagcatccataaatttt

SEQ ID NO: 41189 - DNA, 20 bp, synthetic construct
  source 1..20: mol_type = other DNA
actagagcatccataaattt

SEQ ID NO: 41190 - DNA, 20 bp, synthetic construct
  source 1..20: mol_type = other DNA
gactagagcatccataaatt

SEQ ID NO: 41191 - DNA, 20 bp, synthetic construct
  source 1..20: mol_type = other DNA
ggactagagcatccataaat

SEQ ID NO: 41192 - DNA, 20 bp, synthetic construct
  source 1..20: mol_type = other DNA
gggactagagcatccataaa

SEQ ID NO: 41193 - DNA, 20 bp, synthetic construct
  source 1..20: mol_type = other DNA
agggactagagcatccataa

SEQ ID NO: 41194 - DNA, 20 bp, synthetic construct
  source 1..20: mol_type = other DNA
gagggactagagcatccata

SEQ ID NO: 41195 - DNA, 20 bp, synthetic construct
  source 1..20: mol_type = other DNA
tgagggactagagcatccat

SEQ ID NO: 41196 - DNA, 20 bp, synthetic construct
  source 1..20: mol_type = other DNA
atgagggactagagcatcca

SEQ ID NO: 41197 - DNA, 20 bp, synthetic construct
  source 1..20: mol_type = other DNA
tatgagggactagagcatcc

SEQ ID NO: 41198 - DNA, 20 bp, synthetic construct
  source 1..20: mol_type = other DNA
ttatgagggactagagcatc

SEQ ID NO: 41199 - DNA, 20 bp, synthetic construct
  source 1..20: mol_type = other DNA
tttatgagggactagagcat

SEQ ID NO: 41200 - DNA, 20 bp, synthetic construct
  source 1..20: mol_type = other DNA
ttttatgagggactagagca

SEQ ID NO: 41201 - DNA, 20 bp, synthetic construct
  source 1..20: mol_type = other DNA
attttatgagggactagagc

SEQ ID NO: 41202 - DNA, 20 bp, synthetic construct
  source 1..20: mol_type = other DNA
cattttatgagggactagag

SEQ ID NO: 41203 - DNA, 20 bp, synthetic construct
  source 1..20: mol_type = other DNA
ccattttatgagggactaga

SEQ ID NO: 41204 - DNA, 20 bp, synthetic construct
  source 1..20: mol_type = other DNA
gccattttatgagggactag

SEQ ID NO: 41205 - DNA, 20 bp, synthetic construct
  source 1..20: mol_type = other DNA
tgccattttatgagggacta

SEQ ID NO: 41206 - DNA, 20 bp, synthetic construct
  source 1..20: mol_type = other DNA
gtgccattttatgagggact

SEQ ID NO: 41207 - DNA, 20 bp, synthetic construct
  source 1..20: mol_type = other DNA
tgtgccattttatgagggac

SEQ ID NO: 41208 - DNA, 20 bp, synthetic construct
  source 1..20: mol_type = other DNA
ctgtgccattttatgaggga

SEQ ID NO: 41209 - DNA, 20 bp, synthetic construct
  source 1..20: mol_type = other DNA
actgtgccattttatgaggg

SEQ ID NO: 41210 - DNA, 20 bp, synthetic construct
  source 1..20: mol_type = other DNA
tactgtgccattttatgagg

SEQ ID NO: 41211 - DNA, 20 bp, synthetic construct
  source 1..20: mol_type = other DNA
atactgtgccattttatgag

SEQ ID NO: 41212 - DNA, 20 bp, synthetic construct
  source 1..20: mol_type = other DNA
aatactgtgccattttatga

SEQ ID NO: 41213 - DNA, 20 bp, synthetic construct
  source 1..20: mol_type = other DNA
aaatactgtgccattttatg

SEQ ID NO: 41214 - DNA, 20 bp, synthetic construct
  source 1..20: mol_type = other DNA
caaatactgtgccattttat

SEQ ID NO: 41215 - DNA, 20 bp, synthetic construct
  source 1..20: mol_type = other DNA
gcaaatactgtgccatttta

SEQ ID NO: 41216 - DNA, 20 bp, synthetic construct
  source 1..20: mol_type = other DNA
tgcaaatactgtgccatttt

SEQ ID NO: 41217 - DNA, 20 bp, synthetic construct
  source 1..20: mol_type = other DNA
atgcaaatactgtgccattt

SEQ ID NO: 41218 - DNA, 20 bp, synthetic construct
  source 1..20: mol_type = other DNA
tatgcaaatactgtgccatt

SEQ ID NO: 41219 - DNA, 20 bp, synthetic construct
  source 1..20: mol_type = other DNA
atatgcaaatactgtgccat

SEQ ID NO: 41220 - DNA, 20 bp, synthetic construct
  source 1..20: mol_type = other DNA
tatatgcaaatactgtgcca

SEQ ID NO: 41221 - DNA, 20 bp, synthetic construct
  source 1..20: mol_type = other DNA
gtatatgcaaatactgtgcc

SEQ ID NO: 41222 - DNA, 20 bp, synthetic construct
  source 1..20: mol_type = other DNA
ggtatatgcaaatactgtgc

SEQ ID NO: 41223 - DNA, 20 bp, synthetic construct
  source 1..20: mol_type = other DNA
cggtatatgcaaatactgtg

SEQ ID NO: 41224 - DNA, 20 bp, synthetic construct
  source 1..20: mol_type = other DNA
ccggtatatgcaaatactgt

SEQ ID NO: 41225 - DNA, 20 bp, synthetic construct
  source 1..20: mol_type = other DNA
accggtatatgcaaatactg

SEQ ID NO: 41226 - DNA, 20 bp, synthetic construct
  source 1..20: mol_type = other DNA
caccggtatatgcaaatact

SEQ ID NO: 41227 - DNA, 20 bp, synthetic construct
  source 1..20: mol_type = other DNA
gcaccggtatatgcaaatac

SEQ ID NO: 41228 - DNA, 20 bp, synthetic construct
  source 1..20: mol_type = other DNA
tgcaccggtatatgcaaata

SEQ ID NO: 41229 - DNA, 20 bp, synthetic construct
  source 1..20: mol_type = other DNA
gtgcaccggtatatgcaaat

SEQ ID NO: 41230 - DNA, 20 bp, synthetic construct
  source 1..20: mol_type = other DNA
tgtgcaccggtatatgcaaa

SEQ ID NO: 41231 - DNA, 20 bp, synthetic construct
  source 1..20: mol_type = other DNA
atgtgcaccggtatatgcaa

SEQ ID NO: 41232 - DNA, 20 bp, synthetic construct
  source 1..20: mol_type = other DNA
gatgtgcaccggtatatgca

SEQ ID NO: 41233 - DNA, 20 bp, synthetic construct
  source 1..20: mol_type = other DNA
ggatgtgcaccggtatatgc

SEQ ID NO: 41234 - DNA, 20 bp, synthetic construct
  source 1..20: mol_type = other DNA
aggatgtgcaccggtatatg

SEQ ID NO: 41235 - DNA, 20 bp, synthetic construct
  source 1..20: mol_type = other DNA
gaggatgtgcaccggtatat

SEQ ID NO: 41236 - DNA, 20 bp, synthetic construct
  source 1..20: mol_type = other DNA
ggaggatgtgcaccggtata

SEQ ID NO: 41237 - DNA, 20 bp, synthetic construct
  source 1..20: mol_type = other DNA
aggaggatgtgcaccggtat

SEQ ID NO: 41238 - DNA, 20 bp, synthetic construct
  source 1..20: mol_type = other DNA
caggaggatgtgcaccggta

SEQ ID NO: 41239 - DNA, 20 bp, synthetic construct
  source 1..20: mol_type = other DNA
acaggaggatgtgcaccggt

SEQ ID NO: 41240 - DNA, 20 bp, synthetic construct
  source 1..20: mol_type = other DNA
tacaggaggatgtgcaccgg

SEQ ID NO: 41241 - DNA, 20 bp, synthetic construct
  source 1..20: mol_type = other DNA
atacaggaggatgtgcaccg

SEQ ID NO: 41242 - DNA, 20 bp, synthetic construct
  source 1..20: mol_type = other DNA
catacaggaggatgtgcacc

SEQ ID NO: 41243 - DNA, 20 bp, synthetic construct
  source 1..20: mol_type = other DNA
gcatacaggaggatgtgcac

SEQ ID NO: 41244 - DNA, 20 bp, synthetic construct
  source 1..20: mol_type = other DNA
agcatacaggaggatgtgca

SEQ ID NO: 41245 - DNA, 20 bp, synthetic construct
  source 1..20: mol_type = other DNA
aagcatacaggaggatgtgc

SEQ ID NO: 41246 - DNA, 20 bp, synthetic construct
  source 1..20: mol_type = other DNA
aaagcatacaggaggatgtg

SEQ ID NO: 41247 - DNA, 20 bp, synthetic construct
  source 1..20: mol_type = other DNA
caaagcatacaggaggatgt

SEQ ID NO: 41248 - DNA, 20 bp, synthetic construct
  source 1..20: mol_type = other DNA
acaaagcatacaggaggatg

SEQ ID NO: 41249 - DNA, 20 bp, synthetic construct
  source 1..20: mol_type = other DNA
gacaaagcatacaggaggat

SEQ ID NO: 41250 - DNA, 20 bp, synthetic construct
  source 1..20: mol_type = other DNA
tgacaaagcatacaggagga

SEQ ID NO: 41251 - DNA, 20 bp, synthetic construct
  source 1..20: mol_type = other DNA
atgacaaagcatacaggagg

SEQ ID NO: 41252 - DNA, 20 bp, synthetic construct
  source 1..20: mol_type = other DNA
aatgacaaagcatacaggag

SEQ ID NO: 41253 - DNA, 20 bp, synthetic construct
  source 1..20: mol_type = other DNA
aaatgacaaagcatacagga

SEQ ID NO: 41254 - DNA, 20 bp, synthetic construct
  source 1..20: mol_type = other DNA
gaaatgacaaagcatacagg

SEQ ID NO: 41255 - DNA, 20 bp, synthetic construct
  source 1..20: mol_type = other DNA
agaaatgacaaagcatacag

SEQ ID NO: 41256 - DNA, 20 bp, synthetic construct
  source 1..20: mol_type = other DNA
tagaaatgacaaagcataca

SEQ ID NO: 41257 - DNA, 20 bp, synthetic construct
  source 1..20: mol_type = other DNA
ctagaaatgacaaagcatac

SEQ ID NO: 41258 - DNA, 20 bp, synthetic construct
  source 1..20: mol_type = other DNA
tctagaaatgacaaagcata

SEQ ID NO: 41259 - DNA, 20 bp, synthetic construct
  source 1..20: mol_type = other DNA
atctagaaatgacaaagcat

SEQ ID NO: 41260 - DNA, 20 bp, synthetic construct
  source 1..20: mol_type = other DNA
aatctagaaatgacaaagca

SEQ ID NO: 41261 - DNA, 20 bp, synthetic construct
  source 1..20: mol_type = other DNA
taatctagaaatgacaaagc

SEQ ID NO: 41262 - DNA, 20 bp, synthetic construct
  source 1..20: mol_type = other DNA
gtaatctagaaatgacaaag

SEQ ID NO: 41263 - DNA, 20 bp, synthetic construct
  source 1..20: mol_type = other DNA
agtaatctagaaatgacaaa

SEQ ID NO: 41264 - DNA, 20 bp, synthetic construct
  source 1..20: mol_type = other DNA
aagtaatctagaaatgacaa

SEQ ID NO: 41265 - DNA, 20 bp, synthetic construct
  source 1..20: mol_type = other DNA
taagtaatctagaaatgaca

SEQ ID NO: 41266 - DNA, 20 bp, synthetic construct
  source 1..20: mol_type = other DNA
ataagtaatctagaaatgac

SEQ ID NO: 41267 - DNA, 20 bp, synthetic construct
  source 1..20: mol_type = other DNA
tataagtaatctagaaatga

SEQ ID NO: 41268 - DNA, 20 bp, synthetic construct
  source 1..20: mol_type = other DNA
ttataagtaatctagaaatg

SEQ ID NO: 41269 - DNA, 20 bp, synthetic construct
  source 1..20: mol_type = other DNA
attataagtaatctagaaat

SEQ ID NO: 41270 - DNA, 20 bp, synthetic construct
  source 1..20: mol_type = other DNA
tattataagtaatctagaaa

SEQ ID NO: 41271 - DNA, 20 bp, synthetic construct
  source 1..20: mol_type = other DNA
gtattataagtaatctagaa

SEQ ID NO: 41272 - DNA, 20 bp, synthetic construct
  source 1..20: mol_type = other DNA
ggtattataagtaatctaga

SEQ ID NO: 41273 - DNA, 20 bp, synthetic construct
  source 1..20: mol_type = other DNA
aggtattataagtaatctag

SEQ ID NO: 41274 - DNA, 20 bp, synthetic construct
  source 1..20: mol_type = other DNA
taggtattataagtaatcta

SEQ ID NO: 41275 - DNA, 20 bp, synthetic construct
  source 1..20: mol_type = other DNA
ttaggtattataagtaatct

SEQ ID NO: 41276 - DNA, 20 bp, synthetic construct
  source 1..20: mol_type = other DNA
attaggtattataagtaatc

SEQ ID NO: 41277 - DNA, 20 bp, synthetic construct
  source 1..20: mol_type = other DNA
tattaggtattataagtaat

SEQ ID NO: 41278 - DNA, 20 bp, synthetic construct
  source 1..20: mol_type = other DNA
atattaggtattataagtaa

SEQ ID NO: 41279 - DNA, 20 bp, synthetic construct
  source 1..20: mol_type = other DNA
catattaggtattataagta

SEQ ID NO: 41280 - DNA, 20 bp, synthetic construct
  source 1..20: mol_type = other DNA
ccatattaggtattataagt

SEQ ID NO: 41281 - DNA, 20 bp, synthetic construct
  source 1..20: mol_type = other DNA
accatattaggtattataag

SEQ ID NO: 41282 - DNA, 20 bp, synthetic construct
  source 1..20: mol_type = other DNA
caccatattaggtattataa

SEQ ID NO: 41283 - DNA, 20 bp, synthetic construct
  source 1..20: mol_type = other DNA
acaccatattaggtattata

SEQ ID NO: 41284 - DNA, 20 bp, synthetic construct
  source 1..20: mol_type = other DNA
tacaccatattaggtattat

SEQ ID NO: 41285 - DNA, 20 bp, synthetic construct
  source 1..20: mol_type = other DNA
ttacaccatattaggtatta

SEQ ID NO: 41286 - DNA, 20 bp, synthetic construct
  source 1..20: mol_type = other DNA
tttacaccatattaggtatt

SEQ ID NO: 41287 - DNA, 20 bp, synthetic construct
  source 1..20: mol_type = other DNA
gtttacaccatattaggtat

SEQ ID NO: 41288 - DNA, 20 bp, synthetic construct
  source 1..20: mol_type = other DNA
tgtttacaccatattaggta

SEQ ID NO: 41289 - DNA, 20 bp, synthetic construct
  source 1..20: mol_type = other DNA
gtgtttacaccatattaggt

SEQ ID NO: 41290 - DNA, 20 bp, synthetic construct
  source 1..20: mol_type = other DNA
agtgtttacaccatattagg

SEQ ID NO: 41291 - DNA, 20 bp, synthetic construct
  source 1..20: mol_type = other DNA
tagtgtttacaccatattag

SEQ ID NO: 41292 - DNA, 20 bp, synthetic construct
  source 1..20: mol_type = other DNA
ctagtgtttacaccatatta

SEQ ID NO: 41293 - DNA, 20 bp, synthetic construct
  source 1..20: mol_type = other DNA
cctagtgtttacaccatatt

SEQ ID NO: 41294 - DNA, 20 bp, synthetic construct
  source 1..20: mol_type = other DNA
acctagtgtttacaccatat

SEQ ID NO: 41295 - DNA, 20 bp, synthetic construct
  source 1..20: mol_type = other DNA
tacctagtgtttacaccata

SEQ ID NO: 41296 - DNA, 20 bp, synthetic construct
  source 1..20: mol_type = other DNA
ttacctagtgtttacaccat

SEQ ID NO: 41297 - DNA, 20 bp, synthetic construct
  source 1..20: mol_type = other DNA
tttacctagtgtttacacca

SEQ ID NO: 41298 - DNA, 20 bp, synthetic construct
  source 1..20: mol_type = other DNA
atttacctagtgtttacacc

SEQ ID NO: 41299 - DNA, 20 bp, synthetic construct
  source 1..20: mol_type = other DNA
tatttacctagtgtttacac

SEQ ID NO: 41300 - DNA, 20 bp, synthetic construct
  source 1..20: mol_type = other DNA
ctatttacctagtgtttaca

SEQ ID NO: 41301 - DNA, 20 bp, synthetic construct
  source 1..20: mol_type = other DNA
actatttacctagtgtttac

SEQ ID NO: 41302 - DNA, 20 bp, synthetic construct
  source 1..20: mol_type = other DNA
aactatttacctagtgttta

SEQ ID NO: 41303 - DNA, 20 bp, synthetic construct
  source 1..20: mol_type = other DNA
caactatttacctagtgttt

SEQ ID NO: 41304 - DNA, 20 bp, synthetic construct
  source 1..20: mol_type = other DNA
acaactatttacctagtgtt

SEQ ID NO: 41305 - DNA, 20 bp, synthetic construct
  source 1..20: mol_type = other DNA
aacaactatttacctagtgt

SEQ ID NO: 41306 - DNA, 20 bp, synthetic construct
  source 1..20: mol_type = other DNA
taacaactatttacctagtg

SEQ ID NO: 41307 - DNA, 20 bp, synthetic construct
  source 1..20: mol_type = other DNA
ataacaactatttacctagt

SEQ ID NO: 41308 - DNA, 20 bp, synthetic construct
  source 1..20: mol_type = other DNA
tataacaactatttacctag

SEQ ID NO: 41309 - DNA, 20 bp, synthetic construct
  source 1..20: mol_type = other DNA
atataacaactatttaccta

SEQ ID NO: 41310 - DNA, 20 bp, synthetic construct
  source 1..20: mol_type = other DNA
tatataacaactatttacct

SEQ ID NO: 41311 - DNA, 20 bp, synthetic construct
  source 1..20: mol_type = other DNA
atatataacaactatttacc

SEQ ID NO: 41312 - DNA, 20 bp, synthetic construct
  source 1..20: mol_type = other DNA
aatatataacaactatttac

SEQ ID NO: 41313 - DNA, 20 bp, synthetic construct
  source 1..20: mol_type = other DNA
aaatatataacaactattta

SEQ ID NO: 41314 - DNA, 20 bp, synthetic construct
  source 1..20: mol_type = other DNA
aaaatatataacaactattt

SEQ ID NO: 41315 - DNA, 20 bp, synthetic construct
  source 1..20: mol_type = other DNA
aaaaatatataacaactatt

SEQ ID NO: 41316 - DNA, 20 bp, synthetic construct
  source 1..20: mol_type = other DNA
aaaaaatatataacaactat

SEQ ID NO: 41317 - DNA, 20 bp, synthetic construct
  source 1..20: mol_type = other DNA
taaaaaatatataacaacta

SEQ ID NO: 41318 - DNA, 20 bp, synthetic construct
  source 1..20: mol_type = other DNA
ataaaaaatatataacaact

SEQ ID NO: 41319 - DNA, 20 bp, synthetic construct
  source 1..20: mol_type = other DNA
aataaaaaatatataacaac

SEQ ID NO: 41320 - DNA, 20 bp, synthetic construct
  source 1..20: mol_type = other DNA
aaataaaaaatatataacaa

SEQ ID NO: 41321 - DNA, 20 bp, synthetic construct
  source 1..20: mol_type = other DNA
caaataaaaaatatataaca

SEQ ID NO: 41322 - DNA, 20 bp, synthetic construct
  source 1..20: mol_type = other DNA
acaaataaaaaatatataac

SEQ ID NO: 41323 - DNA, 20 bp, synthetic construct
  source 1..20: mol_type = other DNA
gacaaataaaaaatatataa

SEQ ID NO: 41324 - DNA, 20 bp, synthetic construct
  source 1..20: mol_type = other DNA
agacaaataaaaaatatata

SEQ ID NO: 41325 - DNA, 20 bp, synthetic construct
  source 1..20: mol_type = other DNA
aagacaaataaaaaatatat

SEQ ID NO: 41326 - DNA, 20 bp, synthetic construct
  source 1..20: mol_type = other DNA
taagacaaataaaaaatata

SEQ ID NO: 41327 - DNA, 20 bp, synthetic construct
  source 1..20: mol_type = other DNA
ataagacaaataaaaaatat

SEQ ID NO: 41328 - DNA, 20 bp, synthetic construct
  source 1..20: mol_type = other DNA
aataagacaaataaaaaata

SEQ ID NO: 41329 - DNA, 20 bp, synthetic construct
  source 1..20: mol_type = other DNA
aaataagacaaataaaaaat

SEQ ID NO: 41330 - DNA, 20 bp, synthetic construct
  source 1..20: mol_type = other DNA
aaaataagacaaataaaaaa

SEQ ID NO: 41331 - DNA, 20 bp, synthetic construct
  source 1..20: mol_type = other DNA
aaaaataagacaaataaaaa

SEQ ID NO: 41332 - DNA, 20 bp, synthetic construct
  source 1..20: mol_type = other DNA
taaaaataagacaaataaaa

SEQ ID NO: 41333 - DNA, 20 bp, synthetic construct
  source 1..20: mol_type = other DNA
ataaaaataagacaaataaa

SEQ ID NO: 41334 - DNA, 20 bp, synthetic construct
  source 1..20: mol_type = other DNA
aataaaaataagacaaataa

SEQ ID NO: 41335 - DNA, 20 bp, synthetic construct
  source 1..20: mol_type = other DNA
caataaaaataagacaaata

SEQ ID NO: 41336 - DNA, 20 bp, synthetic construct
  source 1..20: mol_type = other DNA
acaataaaaataagacaaat

SEQ ID NO: 41337 - DNA, 20 bp, synthetic construct
  source 1..20: mol_type = other DNA
tacaataaaaataagacaaa

SEQ ID NO: 41338 - DNA, 20 bp, synthetic construct
  source 1..20: mol_type = other DNA
atacaataaaaataagacaa

SEQ ID NO: 41339 - DNA, 20 bp, synthetic construct
  source 1..20: mol_type = other DNA
aatacaataaaaataagaca

SEQ ID NO: 41340 - DNA, 20 bp, synthetic construct
  source 1..20: mol_type = other DNA
aaatacaataaaaataagac

SEQ ID NO: 41341 - DNA, 20 bp, synthetic construct
  source 1..20: mol_type = other DNA
taaatacaataaaaataaga

SEQ ID NO: 41342 - DNA, 20 bp, synthetic construct
  source 1..20: mol_type = other DNA
ataaatacaataaaaataag

SEQ ID NO: 41343 - DNA, 20 bp, synthetic construct
  source 1..20: mol_type = other DNA
aataaatacaataaaaataa

SEQ ID NO: 41344 - DNA, 20 bp, synthetic construct
  source 1..20: mol_type = other DNA
aaataaatacaataaaaata

SEQ ID NO: 41345 - DNA, 20 bp, synthetic construct
  source 1..20: mol_type = other DNA
aaaataaatacaataaaaat

SEQ ID NO: 41346 - DNA, 20 bp, synthetic construct
  source 1..20: mol_type = other DNA
aaaaataaatacaataaaaa

SEQ ID NO: 41347 - DNA, 20 bp, synthetic construct
  source 1..20: mol_type = other DNA
taaaaataaatacaataaaa

SEQ ID NO: 41348 - DNA, 20 bp, synthetic construct
  source 1..20: mol_type = other DNA
ttaaaaataaatacaataaa

SEQ ID NO: 41349 - DNA, 20 bp, synthetic construct
  source 1..20: mol_type = other DNA
cttaaaaataaatacaataa

SEQ ID NO: 41350 - DNA, 20 bp, synthetic construct
  source 1..20: mol_type = other DNA
acttaaaaataaatacaata

SEQ ID NO: 41351 - DNA, 20 bp, synthetic construct
  source 1..20: mol_type = other DNA
cacttaaaaataaatacaat

SEQ ID NO: 41352 - DNA, 20 bp, synthetic construct
  source 1..20: mol_type = other DNA
acacttaaaaataaatacaa

SEQ ID NO: 41353 - DNA, 20 bp, synthetic construct
  source 1..20: mol_type = other DNA
aacacttaaaaataaataca

SEQ ID NO: 41354 - DNA, 20 bp, synthetic construct
  source 1..20: mol_type = other DNA
aaacacttaaaaataaatac

SEQ ID NO: 41355 - DNA, 20 bp, synthetic construct
  source 1..20: mol_type = other DNA
aaaacacttaaaaataaata

SEQ ID NO: 41356 - DNA, 20 bp, synthetic construct
  source 1..20: mol_type = other DNA
aaaaacacttaaaaataaat

SEQ ID NO: 41357 - DNA, 20 bp, synthetic construct
  source 1..20: mol_type = other DNA
taaaaacacttaaaaataaa

SEQ ID NO: 41358 - DNA, 20 bp, synthetic construct
  source 1..20: mol_type = other DNA
ttaaaaacacttaaaaataa

SEQ ID NO: 41359 - DNA, 20 bp, synthetic construct
  source 1..20: mol_type = other DNA
attaaaaacacttaaaaata

SEQ ID NO: 41360 - DNA, 20 bp, synthetic construct
  source 1..20: mol_type = other DNA
gattaaaaacacttaaaaat

SEQ ID NO: 41361 - DNA, 20 bp, synthetic construct
  source 1..20: mol_type = other DNA
agattaaaaacacttaaaaa

SEQ ID NO: 41362 - DNA, 20 bp, synthetic construct
  source 1..20: mol_type = other DNA
gagattaaaaacacttaaaa

SEQ ID NO: 41363 - DNA, 20 bp, synthetic construct
  source 1..20: mol_type = other DNA
cgagattaaaaacacttaaa

SEQ ID NO: 41364 - DNA, 20 bp, synthetic construct
  source 1..20: mol_type = other DNA
tcgagattaaaaacacttaa

SEQ ID NO: 41365 - DNA, 20 bp, synthetic construct
  source 1..20: mol_type = other DNA
ctcgagattaaaaacactta

SEQ ID NO: 41366 - DNA, 20 bp, synthetic construct
  source 1..20: mol_type = other DNA
actcgagattaaaaacactt

SEQ ID NO: 41367 - DNA, 20 bp, synthetic construct
  source 1..20: mol_type = other DNA
cactcgagattaaaaacact

SEQ ID NO: 41368 - DNA, 20 bp, synthetic construct
  source 1..20: mol_type = other DNA
tcactcgagattaaaaacac

SEQ ID NO: 41369 - DNA, 20 bp, synthetic construct
  source 1..20: mol_type = other DNA
atcactcgagattaaaaaca

SEQ ID NO: 41370 - DNA, 20 bp, synthetic construct
  source 1..20: mol_type = other DNA
aatcactcgagattaaaaac

SEQ ID NO: 41371 - DNA, 20 bp, synthetic construct
  source 1..20: mol_type = other DNA
caatcactcgagattaaaaa

SEQ ID NO: 41372 - DNA, 20 bp, synthetic construct
  source 1..20: mol_type = other DNA
tcaatcactcgagattaaaa

SEQ ID NO: 41373 - DNA, 20 bp, synthetic construct
  source 1..20: mol_type = other DNA
ttcaatcactcgagattaaa

SEQ ID NO: 41374 - DNA, 20 bp, synthetic construct
  source 1..20: mol_type = other DNA
attcaatcactcgagattaa

SEQ ID NO: 41375 - DNA, 20 bp, synthetic construct
  source 1..20: mol_type = other DNA
gattcaatcactcgagatta

SEQ ID NO: 41376 - DNA, 20 bp, synthetic construct
  source 1..20: mol_type = other DNA
agattcaatcactcgagatt

SEQ ID NO: 41377 - DNA, 20 bp, synthetic construct
  source 1..20: mol_type = other DNA
cagattcaatcactcgagat

SEQ ID NO: 41378 - DNA, 20 bp, synthetic construct
  source 1..20: mol_type = other DNA
tcagattcaatcactcgaga

SEQ ID NO: 41379 - DNA, 20 bp, synthetic construct
  source 1..20: mol_type = other DNA
ctcagattcaatcactcgag

SEQ ID NO: 41380 - DNA, 20 bp, synthetic construct
  source 1..20: mol_type = other DNA
cctcagattcaatcactcga

SEQ ID NO: 41381 - DNA, 20 bp, synthetic construct
  source 1..20: mol_type = other DNA
tcctcagattcaatcactcg

SEQ ID NO: 41382 - DNA, 20 bp, synthetic construct
  source 1..20: mol_type = other DNA
atcctcagattcaatcactc

SEQ ID NO: 41383 - DNA, 20 bp, synthetic construct
  source 1..20: mol_type = other DNA
catcctcagattcaatcact

SEQ ID NO: 41384 - DNA, 20 bp, synthetic construct
  source 1..20: mol_type = other DNA
acatcctcagattcaatcac

SEQ ID NO: 41385 - DNA, 20 bp, synthetic construct
  source 1..20: mol_type = other DNA
cacatcctcagattcaatca

SEQ ID NO: 41386 - DNA, 20 bp, synthetic construct
  source 1..20: mol_type = other DNA
tcacatcctcagattcaatc

SEQ ID NO: 41387 - DNA, 20 bp, synthetic construct
  source 1..20: mol_type = other DNA
ttcacatcctcagattcaat

SEQ ID NO: 41388 - DNA, 20 bp, synthetic construct
  source 1..20: mol_type = other DNA
tttcacatcctcagattcaa

SEQ ID NO: 41389 - DNA, 20 bp, synthetic construct
  source 1..20: mol_type = other DNA
atttcacatcctcagattca

SEQ ID NO: 41390 - DNA, 20 bp, synthetic construct
  source 1..20: mol_type = other DNA
gatttcacatcctcagattc

SEQ ID NO: 41391 - DNA, 20 bp, synthetic construct
  source 1..20: mol_type = other DNA
agatttcacatcctcagatt

SEQ ID NO: 41392 - DNA, 20 bp, synthetic construct
  source 1..20: mol_type = other DNA
cagatttcacatcctcagat

SEQ ID NO: 41393 - DNA, 20 bp, synthetic construct
  source 1..20: mol_type = other DNA
gcagatttcacatcctcaga

SEQ ID NO: 41394 - DNA, 20 bp, synthetic construct
  source 1..20: mol_type = other DNA
tgcagatttcacatcctcag

SEQ ID NO: 41395 - DNA, 20 bp, synthetic construct
  source 1..20: mol_type = other DNA
ctgcagatttcacatcctca

SEQ ID NO: 41396 - DNA, 20 bp, synthetic construct
  source 1..20: mol_type = other DNA
tctgcagatttcacatcctc

SEQ ID NO: 41397 - DNA, 20 bp, synthetic construct
  source 1..20: mol_type = other DNA
atctgcagatttcacatcct

SEQ ID NO: 41398 - DNA, 20 bp, synthetic construct
  source 1..20: mol_type = other DNA
tatctgcagatttcacatcc

SEQ ID NO: 41399 - DNA, 20 bp, synthetic construct
  source 1..20: mol_type = other DNA
atatctgcagatttcacatc

SEQ ID NO: 41400 - DNA, 20 bp, synthetic construct
  source 1..20: mol_type = other DNA
catatctgcagatttcacat

SEQ ID NO: 41401 - DNA, 20 bp, synthetic construct
  source 1..20: mol_type = other DNA
ccatatctgcagatttcaca

SEQ ID NO: 41402 - DNA, 20 bp, synthetic construct
  source 1..20: mol_type = other DNA
tccatatctgcagatttcac

SEQ ID NO: 41403 - DNA, 20 bp, synthetic construct
  source 1..20: mol_type = other DNA
ctccatatctgcagatttca

SEQ ID NO: 41404 - DNA, 20 bp, synthetic construct
  source 1..20: mol_type = other DNA
cctccatatctgcagatttc

SEQ ID NO: 41405 - DNA, 20 bp, synthetic construct
  source 1..20: mol_type = other DNA
ccctccatatctgcagattt

SEQ ID NO: 41406 - DNA, 20 bp, synthetic construct
  source 1..20: mol_type = other DNA
gccctccatatctgcagatt

SEQ ID NO: 41407 - DNA, 20 bp, synthetic construct
  source 1..20: mol_type = other DNA
ggccctccatatctgcagat

SEQ ID NO: 41408 - DNA, 20 bp, synthetic construct
  source 1..20: mol_type = other DNA
aggccctccatatctgcaga

SEQ ID NO: 41409 - DNA, 20 bp, synthetic construct
  source 1..20: mol_type = other DNA
caggccctccatatctgcag

SEQ ID NO: 41410 - DNA, 20 bp, synthetic construct
  source 1..20: mol_type = other DNA
gcaggccctccatatctgca

SEQ ID NO: 41411 - DNA, 20 bp, synthetic construct
  source 1..20: mol_type = other DNA
tgcaggccctccatatctgc

SEQ ID NO: 41412 - DNA, 20 bp, synthetic construct
  source 1..20: mol_type = other DNA
atgcaggccctccatatctg

SEQ ID NO: 41413 - DNA, 20 bp, synthetic construct
  source 1..20: mol_type = other DNA
aatgcaggccctccatatct

SEQ ID NO: 41414 - DNA, 20 bp, synthetic construct
  source 1..20: mol_type = other DNA
caatgcaggccctccatatc

SEQ ID NO: 41415 - DNA, 20 bp, synthetic construct
  source 1..20: mol_type = other DNA
acaatgcaggccctccatat

SEQ ID NO: 41416 - DNA, 20 bp, synthetic construct
  source 1..20: mol_type = other DNA
aacaatgcaggccctccata

SEQ ID NO: 41417 - DNA, 20 bp, synthetic construct
  source 1..20: mol_type = other DNA
aaacaatgcaggccctccat

SEQ ID NO: 41418 - DNA, 20 bp, synthetic construct
  source 1..20: mol_type = other DNA
aaaacaatgcaggccctcca

SEQ ID NO: 41419 - DNA, 20 bp, synthetic construct
  source 1..20: mol_type = other DNA
gaaaacaatgcaggccctcc

SEQ ID NO: 41420 - DNA, 20 bp, synthetic construct
  source 1..20: mol_type = other DNA
ggaaaacaatgcaggccctc

SEQ ID NO: 41421 - DNA, 20 bp, synthetic construct
  source 1..20: mol_type = other DNA
cggaaaacaatgcaggccct

SEQ ID NO: 41422 - DNA, 20 bp, synthetic construct
  source 1..20: mol_type = other DNA
acggaaaacaatgcaggccc

SEQ ID NO: 41423 - DNA, 20 bp, synthetic construct
  source 1..20: mol_type = other DNA
cacggaaaacaatgcaggcc

SEQ ID NO: 41424 - DNA, 20 bp, synthetic construct
  source 1..20: mol_type = other DNA
ccacggaaaacaatgcaggc

SEQ ID NO: 41425 - DNA, 20 bp, synthetic construct
  source 1..20: mol_type = other DNA
tccacggaaaacaatgcagg

SEQ ID NO: 41426 - DNA, 20 bp, synthetic construct
  source 1..20: mol_type = other DNA
ctccacggaaaacaatgcag

SEQ ID NO: 41427 - DNA, 20 bp, synthetic construct
  source 1..20: mol_type = other DNA
gctccacggaaaacaatgca

SEQ ID NO: 41428 - DNA, 20 bp, synthetic construct
  source 1..20: mol_type = other DNA
agctccacggaaaacaatgc

SEQ ID NO: 41429 - DNA, 20 bp, synthetic construct
  source 1..20: mol_type = other DNA
aagctccacggaaaacaatg

SEQ ID NO: 41430 - DNA, 20 bp, synthetic construct
  source 1..20: mol_type = other DNA
aaagctccacggaaaacaat

SEQ ID NO: 41431 - DNA, 20 bp, synthetic construct
  source 1..20: mol_type = other DNA
caaagctccacggaaaacaa

SEQ ID NO: 41432 - DNA, 20 bp, synthetic construct
  source 1..20: mol_type = other DNA
ccaaagctccacggaaaaca

SEQ ID NO: 41433 - DNA, 20 bp, synthetic construct
  source 1..20: mol_type = other DNA
cccaaagctccacggaaaac

SEQ ID NO: 41434 - DNA, 20 bp, synthetic construct
  source 1..20: mol_type = other DNA
gcccaaagctccacggaaaa

SEQ ID NO: 41435 - DNA, 20 bp, synthetic construct
  source 1..20: mol_type = other DNA
ggcccaaagctccacggaaa

SEQ ID NO: 41436 - DNA, 20 bp, synthetic construct
  source 1..20: mol_type = other DNA
aggcccaaagctccacggaa

SEQ ID NO: 41437 - DNA, 20 bp, synthetic construct
  source 1..20: mol_type = other DNA
taggcccaaagctccacgga

SEQ ID NO: 41438 - DNA, 20 bp, synthetic construct
  source 1..20: mol_type = other DNA
ttaggcccaaagctccacgg

SEQ ID NO: 41439 - DNA, 20 bp, synthetic construct
  source 1..20: mol_type = other DNA
tttaggcccaaagctccacg

SEQ ID NO: 41440 - DNA, 20 bp, synthetic construct
  source 1..20: mol_type = other DNA
gtttaggcccaaagctccac

SEQ ID NO: 41441 - DNA, 20 bp, synthetic construct
  source 1..20: mol_type = other DNA
agtttaggcccaaagctcca

SEQ ID NO: 41442 - DNA, 20 bp, synthetic construct
  source 1..20: mol_type = other DNA
cagtttaggcccaaagctcc

SEQ ID NO: 41443 - DNA, 20 bp, synthetic construct
  source 1..20: mol_type = other DNA
gcagtttaggcccaaagctc

SEQ ID NO: 41444 - DNA, 20 bp, synthetic construct
  source 1..20: mol_type = other DNA
agcagtttaggcccaaagct

SEQ ID NO: 41445 - DNA, 20 bp, synthetic construct
  source 1..20: mol_type = other DNA
gagcagtttaggcccaaagc

SEQ ID NO: 41446 - DNA, 20 bp, synthetic construct
  source 1..20: mol_type = other DNA
ggagcagtttaggcccaaag

SEQ ID NO: 41447 - DNA, 20 bp, synthetic construct
  source 1..20: mol_type = other DNA
tggagcagtttaggcccaaa

SEQ ID NO: 41448 - DNA, 20 bp, synthetic construct
  source 1..20: mol_type = other DNA
gtggagcagtttaggcccaa

SEQ ID NO: 41449 - DNA, 20 bp, synthetic construct
  source 1..20: mol_type = other DNA
tgtggagcagtttaggccca

SEQ ID NO: 41450 - DNA, 20 bp, synthetic construct
  source 1..20: mol_type = other DNA
ctgtggagcagtttaggccc

SEQ ID NO: 41451 - DNA, 20 bp, synthetic construct
  source 1..20: mol_type = other DNA
tctgtggagcagtttaggcc

SEQ ID NO: 41452 - DNA, 20 bp, synthetic construct
  source 1..20: mol_type = other DNA
gtctgtggagcagtttaggc

SEQ ID NO: 41453 - DNA, 20 bp, synthetic construct
  source 1..20: mol_type = other DNA
agtctgtggagcagtttagg

SEQ ID NO: 41454 - DNA, 20 bp, synthetic construct
  source 1..20: mol_type = other DNA
cagtctgtggagcagtttag

SEQ ID NO: 41455 - DNA, 20 bp, synthetic construct
  source 1..20: mol_type = other DNA
tcagtctgtggagcagttta

SEQ ID NO: 41456 - DNA, 20 bp, synthetic construct
  source 1..20: mol_type = other DNA
atcagtctgtggagcagttt

SEQ ID NO: 41457 - DNA, 20 bp, synthetic construct
  source 1..20: mol_type = other DNA
gatcagtctgtggagcagtt

SEQ ID NO: 41458 - DNA, 20 bp, synthetic construct
  source 1..20: mol_type = other DNA
agatcagtctgtggagcagt

SEQ ID NO: 41459 - DNA, 20 bp, synthetic construct
  source 1..20: mol_type = other DNA
cagatcagtctgtggagcag

SEQ ID NO: 41460 - DNA, 20 bp, synthetic construct
  source 1..20: mol_type = other DNA
tcagatcagtctgtggagca

SEQ ID NO: 41461 - DNA, 20 bp, synthetic construct
  source 1..20: mol_type = other DNA
atcagatcagtctgtggagc

SEQ ID NO: 41462 - DNA, 20 bp, synthetic construct
  source 1..20: mol_type = other DNA
gatcagatcagtctgtggag

SEQ ID NO: 41463 - DNA, 20 bp, synthetic construct
  source 1..20: mol_type = other DNA
tgatcagatcagtctgtgga

SEQ ID NO: 41464 - DNA, 20 bp, synthetic construct
  source 1..20: mol_type = other DNA
ttgatcagatcagtctgtgg

SEQ ID NO: 41465 - DNA, 20 bp, synthetic construct
  source 1..20: mol_type = other DNA
tttgatcagatcagtctgtg

SEQ ID NO: 41466 - DNA, 20 bp, synthetic construct
  source 1..20: mol_type = other DNA
atttgatcagatcagtctgt

SEQ ID NO: 41467 - DNA, 20 bp, synthetic construct
  source 1..20: mol_type = other DNA
aatttgatcagatcagtctg

SEQ ID NO: 41468 - DNA, 20 bp, synthetic construct
  source 1..20: mol_type = other DNA
aaatttgatcagatcagtct

SEQ ID NO: 41469 - DNA, 20 bp, synthetic construct
  source 1..20: mol_type = other DNA
caaatttgatcagatcagtc

SEQ ID NO: 41470 - DNA, 20 bp, synthetic construct
  source 1..20: mol_type = other DNA
gcaaatttgatcagatcagt

SEQ ID NO: 41471 - DNA, 20 bp, synthetic construct
  source 1..20: mol_type = other DNA
cgcaaatttgatcagatcag

SEQ ID NO: 41472 - DNA, 20 bp, synthetic construct
  source 1..20: mol_type = other DNA
gcgcaaatttgatcagatca

SEQ ID NO: 41473 - DNA, 20 bp, synthetic construct
  source 1..20: mol_type = other DNA
agcgcaaatttgatcagatc

SEQ ID NO: 41474 - DNA, 20 bp, synthetic construct
  source 1..20: mol_type = other DNA
aagcgcaaatttgatcagat

SEQ ID NO: 41475 - DNA, 20 bp, synthetic construct
  source 1..20: mol_type = other DNA
gaagcgcaaatttgatcaga

SEQ ID NO: 41476 - DNA, 20 bp, synthetic construct
  source 1..20: mol_type = other DNA
agaagcgcaaatttgatcag

SEQ ID NO: 41477 - DNA, 20 bp, synthetic construct
  source 1..20: mol_type = other DNA
aagaagcgcaaatttgatca

SEQ ID NO: 41478 - DNA, 20 bp, synthetic construct
  source 1..20: mol_type = other DNA
aaagaagcgcaaatttgatc

SEQ ID NO: 41479 - DNA, 20 bp, synthetic construct
  source 1..20: mol_type = other DNA
caaagaagcgcaaatttgat

SEQ ID NO: 41480 - DNA, 20 bp, synthetic construct
  source 1..20: mol_type = other DNA
tcaaagaagcgcaaatttga

SEQ ID NO: 41481 - DNA, 20 bp, synthetic construct
  source 1..20: mol_type = other DNA
ttcaaagaagcgcaaatttg

SEQ ID NO: 41482 - DNA, 20 bp, synthetic construct
  source 1..20: mol_type = other DNA
cttcaaagaagcgcaaattt

SEQ ID NO: 41483 - DNA, 20 bp, synthetic construct
  source 1..20: mol_type = other DNA
ccttcaaagaagcgcaaatt

SEQ ID NO: 41484 - DNA, 20 bp, synthetic construct
  source 1..20: mol_type = other DNA
cccttcaaagaagcgcaaat

SEQ ID NO: 41485 - DNA, 20 bp, synthetic construct
  source 1..20: mol_type = other DNA
tcccttcaaagaagcgcaaa

SEQ ID NO: 41486 - DNA, 20 bp, synthetic construct
  source 1..20: mol_type = other DNA
atcccttcaaagaagcgcaa

SEQ ID NO: 41487 - DNA, 20 bp, synthetic construct
  source 1..20: mol_type = other DNA
tatcccttcaaagaagcgca

SEQ ID NO: 41488 - DNA, 20 bp, synthetic construct
  source 1..20: mol_type = other DNA
ctatcccttcaaagaagcgc

SEQ ID NO: 41489 - DNA, 20 bp, synthetic construct
  source 1..20: mol_type = other DNA
actatcccttcaaagaagcg

SEQ ID NO: 41490 - DNA, 20 bp, synthetic construct
  source 1..20: mol_type = other DNA
aactatcccttcaaagaagc

SEQ ID NO: 41491 - DNA, 20 bp, synthetic construct
  source 1..20: mol_type = other DNA
aaactatcccttcaaagaag

SEQ ID NO: 41492 - DNA, 20 bp, synthetic construct
  source 1..20: mol_type = other DNA
gaaactatcccttcaaagaa

SEQ ID NO: 41493 - DNA, 20 bp, synthetic construct
  source 1..20: mol_type = other DNA
agaaactatcccttcaaaga

SEQ ID NO: 41494 - DNA, 20 bp, synthetic construct
  source 1..20: mol_type = other DNA
cagaaactatcccttcaaag

SEQ ID NO: 41495 - DNA, 20 bp, synthetic construct
  source 1..20: mol_type = other DNA
tcagaaactatcccttcaaa

SEQ ID NO: 41496 - DNA, 20 bp, synthetic construct
  source 1..20: mol_type = other DNA
ctcagaaactatcccttcaa

SEQ ID NO: 41497 - DNA, 20 bp, synthetic construct
  source 1..20: mol_type = other DNA
tctcagaaactatcccttca

SEQ ID NO: 41498 - DNA, 20 bp, synthetic construct
  source 1..20: mol_type = other DNA
atctcagaaactatcccttc

SEQ ID NO: 41499 - DNA, 20 bp, synthetic construct
  source 1..20: mol_type = other DNA
gatctcagaaactatccctt

SEQ ID NO: 41500 - DNA, 20 bp, synthetic construct
  source 1..20: mol_type = other DNA
tgatctcagaaactatccct

SEQ ID NO: 41501 - DNA, 20 bp, synthetic construct
  source 1..20: mol_type = other DNA
ctgatctcagaaactatccc

SEQ ID NO: 41502 - DNA, 20 bp, synthetic construct
  source 1..20: mol_type = other DNA
actgatctcagaaactatcc

SEQ ID NO: 41503 - DNA, 20 bp, synthetic construct
  source 1..20: mol_type = other DNA
cactgatctcagaaactatc

SEQ ID NO: 41504 - DNA, 20 bp, synthetic construct
  source 1..20: mol_type = other DNA
acactgatctcagaaactat

SEQ ID NO: 41505 - DNA, 20 bp, synthetic construct
  source 1..20: mol_type = other DNA
aacactgatctcagaaacta

SEQ ID NO: 41506 - DNA, 20 bp, synthetic construct
  source 1..20: mol_type = other DNA
aaacactgatctcagaaact

SEQ ID NO: 41507 - DNA, 20 bp, synthetic construct
  source 1..20: mol_type = other DNA
caaacactgatctcagaaac

SEQ ID NO: 41508 - DNA, 20 bp, synthetic construct
  source 1..20: mol_type = other DNA
tcaaacactgatctcagaaa

SEQ ID NO: 41509 - DNA, 20 bp, synthetic construct
  source 1..20: mol_type = other DNA
ttcaaacactgatctcagaa

SEQ ID NO: 41510 - DNA, 20 bp, synthetic construct
  source 1..20: mol_type = other DNA
tttcaaacactgatctcaga

SEQ ID NO: 41511 - DNA, 20 bp, synthetic construct
  source 1..20: mol_type = other DNA
atttcaaacactgatctcag

SEQ ID NO: 41512 - DNA, 20 bp, synthetic construct
  source 1..20: mol_type = other DNA
aatttcaaacactgatctca

SEQ ID NO: 41513 - DNA, 20 bp, synthetic construct
  source 1..20: mol_type = other DNA
aaatttcaaacactgatctc

SEQ ID NO: 41514 - DNA, 20 bp, synthetic construct
  source 1..20: mol_type = other DNA
caaatttcaaacactgatct

SEQ ID NO: 41515 - DNA, 20 bp, synthetic construct
  source 1..20: mol_type = other DNA
acaaatttcaaacactgatc

SEQ ID NO: 41516 - DNA, 20 bp, synthetic construct
  source 1..20: mol_type = other DNA
aacaaatttcaaacactgat

SEQ ID NO: 41517 - DNA, 20 bp, synthetic construct
  source 1..20: mol_type = other DNA
gaacaaatttcaaacactga

SEQ ID NO: 41518 - DNA, 20 bp, synthetic construct
  source 1..20: mol_type = other DNA
ggaacaaatttcaaacactg

SEQ ID NO: 41519 - DNA, 20 bp, synthetic construct
  source 1..20: mol_type = other DNA
tggaacaaatttcaaacact

SEQ ID NO: 41520 - DNA, 20 bp, synthetic construct
  source 1..20: mol_type = other DNA
ttggaacaaatttcaaacac

SEQ ID NO: 41521 - DNA, 20 bp, synthetic construct
  source 1..20: mol_type = other DNA
attggaacaaatttcaaaca

SEQ ID NO: 41522 - DNA, 20 bp, synthetic construct
  source 1..20: mol_type = other DNA
gattggaacaaatttcaaac

SEQ ID NO: 41523 - DNA, 20 bp, synthetic construct
  source 1..20: mol_type = other DNA
ggattggaacaaatttcaaa

SEQ ID NO: 41524 - DNA, 20 bp, synthetic construct
  source 1..20: mol_type = other DNA
tggattggaacaaatttcaa

SEQ ID NO: 41525 - DNA, 20 bp, synthetic construct
  source 1..20: mol_type = other DNA
gtggattggaacaaatttca

SEQ ID NO: 41526 - DNA, 20 bp, synthetic construct
  source 1..20: mol_type = other DNA
tgtggattggaacaaatttc

SEQ ID NO: 41527 - DNA, 20 bp, synthetic construct
  source 1..20: mol_type = other DNA
ctgtggattggaacaaattt

SEQ ID NO: 41528 - DNA, 20 bp, synthetic construct
  source 1..20: mol_type = other DNA
tctgtggattggaacaaatt

SEQ ID NO: 41529 - DNA, 20 bp, synthetic construct
  source 1..20: mol_type = other DNA
ctctgtggattggaacaaat

SEQ ID NO: 41530 - DNA, 20 bp, synthetic construct
  source 1..20: mol_type = other DNA
cctctgtggattggaacaaa

SEQ ID NO: 41531 - DNA, 20 bp, synthetic construct
  source 1..20: mol_type = other DNA
tcctctgtggattggaacaa

SEQ ID NO: 41532 - DNA, 20 bp, synthetic construct
  source 1..20: mol_type = other DNA
ctcctctgtggattggaaca

SEQ ID NO: 41533 - DNA, 20 bp, synthetic construct
  source 1..20: mol_type = other DNA
actcctctgtggattggaac

SEQ ID NO: 41534 - DNA, 20 bp, synthetic construct
  source 1..20: mol_type = other DNA
gactcctctgtggattggaa

SEQ ID NO: 41535 - DNA, 20 bp, synthetic construct
  source 1..20: mol_type = other DNA
ggactcctctgtggattgga

SEQ ID NO: 41536 - DNA, 20 bp, synthetic construct
  source 1..20: mol_type = other DNA
aggactcctctgtggattgg

SEQ ID NO: 41537 - DNA, 20 bp, synthetic construct
  source 1..20: mol_type = other DNA
gaggactcctctgtggattg

SEQ ID NO: 41538 - DNA, 20 bp, synthetic construct
  source 1..20: mol_type = other DNA
ggaggactcctctgtggatt

SEQ ID NO: 41539 - DNA, 20 bp, synthetic construct
  source 1..20: mol_type = other DNA
gggaggactcctctgtggat

SEQ ID NO: 41540 - DNA, 20 bp, synthetic construct
  source 1..20: mol_type = other DNA
tgggaggactcctctgtgga

SEQ ID NO: 41541 - DNA, 20 bp, synthetic construct
  source 1..20: mol_type = other DNA
ctgggaggactcctctgtgg

SEQ ID NO: 41542 - DNA, 20 bp, synthetic construct
  source 1..20: mol_type = other DNA
gctgggaggactcctctgtg

SEQ ID NO: 41543 - DNA, 20 bp, synthetic construct
  source 1..20: mol_type = other DNA
agctgggaggactcctctgt

SEQ ID NO: 41544 - DNA, 20 bp, synthetic construct
  source 1..20: mol_type = other DNA
gagctgggaggactcctctg

SEQ ID NO: 41545 - DNA, 20 bp, synthetic construct
  source 1..20: mol_type = other DNA
agagctgggaggactcctct

SEQ ID NO: 41546 - DNA, 20 bp, synthetic construct
  source 1..20: mol_type = other DNA
gagagctgggaggactcctc

SEQ ID NO: 41547 - DNA, 20 bp, synthetic construct
  source 1..20: mol_type = other DNA
agagagctgggaggactcct

SEQ ID NO: 41548 - DNA, 20 bp, synthetic construct
  source 1..20: mol_type = other DNA
aagagagctgggaggactcc

SEQ ID NO: 41549 - DNA, 20 bp, synthetic construct
  source 1..20: mol_type = other DNA
aaagagagctgggaggactc

SEQ ID NO: 41550 - DNA, 20 bp, synthetic construct
  source 1..20: mol_type = other DNA
gaaagagagctgggaggact

SEQ ID NO: 41551 - DNA, 20 bp, synthetic construct
  source 1..20: mol_type = other DNA
ggaaagagagctgggaggac

SEQ ID NO: 41552 - DNA, 20 bp, synthetic construct
  source 1..20: mol_type = other DNA
gggaaagagagctgggagga

SEQ ID NO: 41553 - DNA, 20 bp, synthetic construct
  source 1..20: mol_type = other DNA
agggaaagagagctgggagg

SEQ ID NO: 41554 - DNA, 20 bp, synthetic construct
  source 1..20: mol_type = other DNA
tagggaaagagagctgggag

SEQ ID NO: 41555 - DNA, 20 bp, synthetic construct
  source 1..20: mol_type = other DNA
ctagggaaagagagctggga

SEQ ID NO: 41556 - DNA, 20 bp, synthetic construct
  source 1..20: mol_type = other DNA
actagggaaagagagctggg

SEQ ID NO: 41557 - DNA, 20 bp, synthetic construct
  source 1..20: mol_type = other DNA
aactagggaaagagagctgg

SEQ ID NO: 41558 - DNA, 20 bp, synthetic construct
  source 1..20: mol_type = other DNA
gaactagggaaagagagctg

SEQ ID NO: 41559 - DNA, 20 bp, synthetic construct
  source 1..20: mol_type = other DNA
agaactagggaaagagagct

SEQ ID NO: 41560 - DNA, 20 bp, synthetic construct
  source 1..20: mol_type = other DNA
cagaactagggaaagagagc

SEQ ID NO: 41561 - DNA, 20 bp, synthetic construct
  source 1..20: mol_type = other DNA
ccagaactagggaaagagag

SEQ ID NO: 41562 - DNA, 20 bp, synthetic construct
  source 1..20: mol_type = other DNA
gccagaactagggaaagaga

SEQ ID NO: 41563 - DNA, 20 bp, synthetic construct
  source 1..20: mol_type = other DNA
ggccagaactagggaaagag

SEQ ID NO: 41564 - DNA, 20 bp, synthetic construct
  source 1..20: mol_type = other DNA
tggccagaactagggaaaga

SEQ ID NO: 41565 - DNA, 20 bp, synthetic construct
  source 1..20: mol_type = other DNA
gtggccagaactagggaaag

SEQ ID NO: 41566 - DNA, 20 bp, synthetic construct
  source 1..20: mol_type = other DNA
ggtggccagaactagggaaa

SEQ ID NO: 41567 - DNA, 20 bp, synthetic construct
  source 1..20: mol_type = other DNA
tggtggccagaactagggaa

SEQ ID NO: 41568 - DNA, 20 bp, synthetic construct
  source 1..20: mol_type = other DNA
ttggtggccagaactaggga

SEQ ID NO: 41569 - DNA, 20 bp, synthetic construct
  source 1..20: mol_type = other DNA
tttggtggccagaactaggg

SEQ ID NO: 41570 - DNA, 20 bp, synthetic construct
  source 1..20: mol_type = other DNA
gtttggtggccagaactagg

SEQ ID NO: 41571 - DNA, 20 bp, synthetic construct
  source 1..20: mol_type = other DNA
agtttggtggccagaactag

SEQ ID NO: 41572 - DNA, 20 bp, synthetic construct
  source 1..20: mol_type = other DNA
tagtttggtggccagaacta

SEQ ID NO: 41573 - DNA, 20 bp, synthetic construct
  source 1..20: mol_type = other DNA
ctagtttggtggccagaact

SEQ ID NO: 41574 - DNA, 20 bp, synthetic construct
  source 1..20: mol_type = other DNA
tctagtttggtggccagaac

SEQ ID NO: 41575 - DNA, 20 bp, synthetic construct
  source 1..20: mol_type = other DNA
gtctagtttggtggccagaa

SEQ ID NO: 41576 - DNA, 20 bp, synthetic construct
  source 1..20: mol_type = other DNA
tgtctagtttggtggccaga

SEQ ID NO: 41577 - DNA, 20 bp, synthetic construct
  source 1..20: mol_type = other DNA
ttgtctagtttggtggccag

SEQ ID NO: 41578 - DNA, 20 bp, synthetic construct
  source 1..20: mol_type = other DNA
gttgtctagtttggtggcca

SEQ ID NO: 41579 - DNA, 20 bp, synthetic construct
  source 1..20: mol_type = other DNA
agttgtctagtttggtggcc

SEQ ID NO: 41580 - DNA, 20 bp, synthetic construct
  source 1..20: mol_type = other DNA
tagttgtctagtttggtggc

SEQ ID NO: 41581 - DNA, 20 bp, synthetic construct
  source 1..20: mol_type = other DNA
gtagttgtctagtttggtgg

SEQ ID NO: 41582 - DNA, 20 bp, synthetic construct
  source 1..20: mol_type = other DNA
tgtagttgtctagtttggtg

SEQ ID NO: 41583 - DNA, 20 bp, synthetic construct
  source 1..20: mol_type = other DNA
ttgtagttgtctagtttggt

SEQ ID NO: 41584 - DNA, 20 bp, synthetic construct
  source 1..20: mol_type = other DNA
attgtagttgtctagtttgg

SEQ ID NO: 41585 - DNA, 20 bp, synthetic construct
  source 1..20: mol_type = other DNA
aattgtagttgtctagtttg

SEQ ID NO: 41586 - DNA, 20 bp, synthetic construct
  source 1..20: mol_type = other DNA
aaattgtagttgtctagttt

SEQ ID NO: 41587 - DNA, 20 bp, synthetic construct
  source 1..20: mol_type = other DNA
taaattgtagttgtctagtt

SEQ ID NO: 41588 - DNA, 20 bp, synthetic construct
  source 1..20: mol_type = other DNA
ctaaattgtagttgtctagt

SEQ ID NO: 41589 - DNA, 20 bp, synthetic construct
  source 1..20: mol_type = other DNA
gctaaattgtagttgtctag

SEQ ID NO: 41590 - DNA, 20 bp, synthetic construct
  source 1..20: mol_type = other DNA
tgctaaattgtagttgtcta

SEQ ID NO: 41591 - DNA, 20 bp, synthetic construct
  source 1..20: mol_type = other DNA
gtgctaaattgtagttgtct

SEQ ID NO: 41592 - DNA, 20 bp, synthetic construct
  source 1..20: mol_type = other DNA
agtgctaaattgtagttgtc

SEQ ID NO: 41593 - DNA, 20 bp, synthetic construct
  source 1..20: mol_type = other DNA
aagtgctaaattgtagttgt

SEQ ID NO: 41594 - DNA, 20 bp, synthetic construct
  source 1..20: mol_type = other DNA
taagtgctaaattgtagttg

SEQ ID NO: 41595 - DNA, 20 bp, synthetic construct
  source 1..20: mol_type = other DNA
ataagtgctaaattgtagtt

SEQ ID NO: 41596 - DNA, 20 bp, synthetic construct
  source 1..20: mol_type = other DNA
gataagtgctaaattgtagt

SEQ ID NO: 41597 - DNA, 20 bp, synthetic construct
  source 1..20: mol_type = other DNA
agataagtgctaaattgtag

SEQ ID NO: 41598 - DNA, 20 bp, synthetic construct
  source 1..20: mol_type = other DNA
gagataagtgctaaattgta

SEQ ID NO: 41599 - DNA, 20 bp, synthetic construct
  source 1..20: mol_type = other DNA
ggagataagtgctaaattgt

SEQ ID NO: 41600 - DNA, 20 bp, synthetic construct
  source 1..20: mol_type = other DNA
tggagataagtgctaaattg

SEQ ID NO: 41601 - DNA, 20 bp, synthetic construct
  source 1..20: mol_type = other DNA
ttggagataagtgctaaatt

SEQ ID NO: 41602 - DNA, 20 bp, synthetic construct
  source 1..20: mol_type = other DNA
attggagataagtgctaaat

SEQ ID NO: 41603 - DNA, 20 bp, synthetic construct
  source 1..20: mol_type = other DNA
cattggagataagtgctaaa

SEQ ID NO: 41604 - DNA, 20 bp, synthetic construct
  source 1..20: mol_type = other DNA
tcattggagataagtgctaa

SEQ ID NO: 41605 - DNA, 20 bp, synthetic construct
  source 1..20: mol_type = other DNA
atcattggagataagtgcta

SEQ ID NO: 41606 - DNA, 20 bp, synthetic construct
  source 1..20: mol_type = other DNA
aatcattggagataagtgct

SEQ ID NO: 41607 - DNA, 20 bp, synthetic construct
  source 1..20: mol_type = other DNA
gaatcattggagataagtgc

SEQ ID NO: 41608 - DNA, 20 bp, synthetic construct
  source 1..20: mol_type = other DNA
agaatcattggagataagtg

SEQ ID NO: 41609 - DNA, 20 bp, synthetic construct
  source 1..20: mol_type = other DNA
gagaatcattggagataagt

SEQ ID NO: 41610 - DNA, 20 bp, synthetic construct
  source 1..20: mol_type = other DNA
ggagaatcattggagataag

SEQ ID NO: 41611 - DNA, 20 bp, synthetic construct
  source 1..20: mol_type = other DNA
aggagaatcattggagataa

SEQ ID NO: 41612 - DNA, 20 bp, synthetic construct
  source 1..20: mol_type = other DNA
gaggagaatcattggagata

SEQ ID NO: 41613 - DNA, 20 bp, synthetic construct
  source 1..20: mol_type = other DNA
ggaggagaatcattggagat

SEQ ID NO: 41614 - DNA, 20 bp, synthetic construct
  source 1..20: mol_type = other DNA
aggaggagaatcattggaga

SEQ ID NO: 41615 - DNA, 20 bp, synthetic construct
  source 1..20: mol_type = other DNA
taggaggagaatcattggag

SEQ ID NO: 41616 - DNA, 20 bp, synthetic construct
  source 1..20: mol_type = other DNA
gtaggaggagaatcattgga

SEQ ID NO: 41617 - DNA, 20 bp, synthetic construct
  source 1..20: mol_type = other DNA
ggtaggaggagaatcattgg

SEQ ID NO: 41618 - DNA, 20 bp, synthetic construct
  source 1..20: mol_type = other DNA
tggtaggaggagaatcattg

SEQ ID NO: 41619 - DNA, 20 bp, synthetic construct
  source 1..20: mol_type = other DNA
ttggtaggaggagaatcatt

SEQ ID NO: 41620 - DNA, 20 bp, synthetic construct
  source 1..20: mol_type = other DNA
cttggtaggaggagaatcat

SEQ ID NO: 41621 - DNA, 20 bp, synthetic construct
  source 1..20: mol_type = other DNA
acttggtaggaggagaatca

SEQ ID NO: 41622 - DNA, 20 bp, synthetic construct
  source 1..20: mol_type = other DNA
cacttggtaggaggagaatc

SEQ ID NO: 41623 - DNA, 20 bp, synthetic construct
  source 1..20: mol_type = other DNA
gcacttggtaggaggagaat

SEQ ID NO: 41624 - DNA, 20 bp, synthetic construct
  source 1..20: mol_type = other DNA
ggcacttggtaggaggagaa

SEQ ID NO: 41625 - DNA, 20 bp, synthetic construct
  source 1..20: mol_type = other DNA
aggcacttggtaggaggaga

SEQ ID NO: 41626 - DNA, 20 bp, synthetic construct
  source 1..20: mol_type = other DNA
aaggcacttggtaggaggag

SEQ ID NO: 41627 - DNA, 20 bp, synthetic construct
  source 1..20: mol_type = other DNA
aaaggcacttggtaggagga

SEQ ID NO: 41628 - DNA, 20 bp, synthetic construct
  source 1..20: mol_type = other DNA
caaaggcacttggtaggagg

SEQ ID NO: 41629 - DNA, 20 bp, synthetic construct
  source 1..20: mol_type = other DNA
tcaaaggcacttggtaggag

SEQ ID NO: 41630 - DNA, 20 bp, synthetic construct
  source 1..20: mol_type = other DNA
ttcaaaggcacttggtagga

SEQ ID NO: 41631 - DNA, 20 bp, synthetic construct
  source 1..20: mol_type = other DNA
tttcaaaggcacttggtagg

SEQ ID NO: 41632 - DNA, 20 bp, synthetic construct
  source 1..20: mol_type = other DNA
ctttcaaaggcacttggtag

SEQ ID NO: 41633 - DNA, 20 bp, synthetic construct
  source 1..20: mol_type = other DNA
gctttcaaaggcacttggta

SEQ ID NO: 41634 - DNA, 20 bp, synthetic construct
  source 1..20: mol_type = other DNA
tgctttcaaaggcacttggt

SEQ ID NO: 41635 - DNA, 20 bp, synthetic construct
  source 1..20: mol_type = other DNA
atgctttcaaaggcacttgg

SEQ ID NO: 41636 - DNA, 20 bp, synthetic construct
  source 1..20: mol_type = other DNA
gatgctttcaaaggcacttg

SEQ ID NO: 41637 - DNA, 20 bp, synthetic construct
  source 1..20: mol_type = other DNA
tgatgctttcaaaggcactt

SEQ ID NO: 41638 - DNA, 20 bp, synthetic construct
  source 1..20: mol_type = other DNA
atgatgctttcaaaggcact

SEQ ID NO: 41639 - DNA, 20 bp, synthetic construct
  source 1..20: mol_type = other DNA
aatgatgctttcaaaggcac

SEQ ID NO: 41640 - DNA, 20 bp, synthetic construct
  source 1..20: mol_type = other DNA
taatgatgctttcaaaggca

SEQ ID NO: 41641 - DNA, 20 bp, synthetic construct
  source 1..20: mol_type = other DNA
ttaatgatgctttcaaaggc

SEQ ID NO: 41642 - DNA, 20 bp, synthetic construct
  source 1..20: mol_type = other DNA
gttaatgatgctttcaaagg

SEQ ID NO: 41643 - DNA, 20 bp, synthetic construct
  source 1..20: mol_type = other DNA
agttaatgatgctttcaaag

SEQ ID NO: 41644 - DNA, 20 bp, synthetic construct
  source 1..20: mol_type = other DNA
gagttaatgatgctttcaaa

SEQ ID NO: 41645 - DNA, 20 bp, synthetic construct
  source 1..20: mol_type = other DNA
agagttaatgatgctttcaa

SEQ ID NO: 41646 - DNA, 20 bp, synthetic construct
  source 1..20: mol_type = other DNA
aagagttaatgatgctttca

SEQ ID NO: 41647 - DNA, 20 bp, synthetic construct
  source 1..20: mol_type = other DNA
aaagagttaatgatgctttc

SEQ ID NO: 41648 - DNA, 20 bp, synthetic construct
  source 1..20: mol_type = other DNA
gaaagagttaatgatgcttt

SEQ ID NO: 41649 - DNA, 20 bp, synthetic construct
  source 1..20: mol_type = other DNA
tgaaagagttaatgatgctt

SEQ ID NO: 41650 - DNA, 20 bp, synthetic construct
  source 1..20: mol_type = other DNA
atgaaagagttaatgatgct

SEQ ID NO: 41651 - DNA, 20 bp, synthetic construct
  source 1..20: mol_type = other DNA
tatgaaagagttaatgatgc

SEQ ID NO: 41652 - DNA, 20 bp, synthetic construct
  source 1..20: mol_type = other DNA
gtatgaaagagttaatgatg

SEQ ID NO: 41653 - DNA, 20 bp, synthetic construct
  source 1..20: mol_type = other DNA
ggtatgaaagagttaatgat

SEQ ID NO: 41654 - DNA, 20 bp, synthetic construct
  source 1..20: mol_type = other DNA
aggtatgaaagagttaatga

SEQ ID NO: 41655 - DNA, 20 bp, synthetic construct
  source 1..20: mol_type = other DNA
aaggtatgaaagagttaatg

SEQ ID NO: 41656 - DNA, 20 bp, synthetic construct
  source 1..20: mol_type = other DNA
caaggtatgaaagagttaat

SEQ ID NO: 41657 - DNA, 20 bp, synthetic construct
  source 1..20: mol_type = other DNA
acaaggtatgaaagagttaa

SEQ ID NO: 41658 - DNA, 20 bp, synthetic construct
  source 1..20: mol_type = other DNA
aacaaggtatgaaagagtta

SEQ ID NO: 41659 - DNA, 20 bp, synthetic construct
  source 1..20: mol_type = other DNA
caacaaggtatgaaagagtt

SEQ ID NO: 41660 - DNA, 20 bp, synthetic construct
  source 1..20: mol_type = other DNA
gcaacaaggtatgaaagagt

SEQ ID NO: 41661 - DNA, 20 bp, synthetic construct
  source 1..20: mol_type = other DNA
tgcaacaaggtatgaaagag

SEQ ID NO: 41662 - DNA, 20 bp, synthetic construct
  source 1..20: mol_type = other DNA
ttgcaacaaggtatgaaaga

SEQ ID NO: 41663 - DNA, 20 bp, synthetic construct
  source 1..20: mol_type = other DNA
tttgcaacaaggtatgaaag

SEQ ID NO: 41664 - DNA, 20 bp, synthetic construct
  source 1..20: mol_type = other DNA
atttgcaacaaggtatgaaa

SEQ ID NO: 41665 - DNA, 20 bp, synthetic construct
  source 1..20: mol_type = other DNA
catttgcaacaaggtatgaa

SEQ ID NO: 41666 - DNA, 20 bp, synthetic construct
  source 1..20: mol_type = other DNA
tcatttgcaacaaggtatga

SEQ ID NO: 41667 - DNA, 20 bp, synthetic construct
  source 1..20: mol_type = other DNA
ttcatttgcaacaaggtatg

SEQ ID NO: 41668 - DNA, 20 bp, synthetic construct
  source 1..20: mol_type = other DNA
tttcatttgcaacaaggtat

SEQ ID NO: 41669 - DNA, 20 bp, synthetic construct
  source 1..20: mol_type = other DNA
atttcatttgcaacaaggta

SEQ ID NO: 41670 - DNA, 20 bp, synthetic construct
  source 1..20: mol_type = other DNA
aatttcatttgcaacaaggt

SEQ ID NO: 41671 - DNA, 20 bp, synthetic construct
  source 1..20: mol_type = other DNA
aaatttcatttgcaacaagg

SEQ ID NO: 41672 - DNA, 20 bp, synthetic construct
  source 1..20: mol_type = other DNA
gaaatttcatttgcaacaag

SEQ ID NO: 41673 - DNA, 20 bp, synthetic construct
  source 1..20: mol_type = other DNA
agaaatttcatttgcaacaa

SEQ ID NO: 41674 - DNA, 20 bp, synthetic construct
  source 1..20: mol_type = other DNA
aagaaatttcatttgcaaca

SEQ ID NO: 41675 - DNA, 20 bp, synthetic construct
  source 1..20: mol_type = other DNA
aaagaaatttcatttgcaac

SEQ ID NO: 41676 - DNA, 20 bp, synthetic construct
  source 1..20: mol_type = other DNA
caaagaaatttcatttgcaa

SEQ ID NO: 41677 - DNA, 20 bp, synthetic construct
  source 1..20: mol_type = other DNA
ccaaagaaatttcatttgca

SEQ ID NO: 41678 - DNA, 20 bp, synthetic construct
  source 1..20: mol_type = other DNA
cccaaagaaatttcatttgc

SEQ ID NO: 41679 - DNA, 20 bp, synthetic construct
  source 1..20: mol_type = other DNA
tcccaaagaaatttcatttg

SEQ ID NO: 41680 - DNA, 20 bp, synthetic construct
  source 1..20: mol_type = other DNA
ttcccaaagaaatttcattt

SEQ ID NO: 41681 - DNA, 20 bp, synthetic construct
  source 1..20: mol_type = other DNA
cttcccaaagaaatttcatt

SEQ ID NO: 41682 - DNA, 20 bp, synthetic construct
  source 1..20: mol_type = other DNA
tcttcccaaagaaatttcat

SEQ ID NO: 41683 - DNA, 20 bp, synthetic construct
  source 1..20: mol_type = other DNA
ctcttcccaaagaaatttca

SEQ ID NO: 41684 - DNA, 20 bp, synthetic construct
  source 1..20: mol_type = other DNA
tctcttcccaaagaaatttc

SEQ ID NO: 41685 - DNA, 20 bp, synthetic construct
  source 1..20: mol_type = other DNA
atctcttcccaaagaaattt

SEQ ID NO: 41686 - DNA, 20 bp, synthetic construct
  source 1..20: mol_type = other DNA
aatctcttcccaaagaaatt

SEQ ID NO: 41687 - DNA, 20 bp, synthetic construct
  source 1..20: mol_type = other DNA
caatctcttcccaaagaaat

SEQ ID NO: 41688 - DNA, 20 bp, synthetic construct
  source 1..20: mol_type = other DNA
acaatctcttcccaaagaaa

SEQ ID NO: 41689 - DNA, 20 bp, synthetic construct
  source 1..20: mol_type = other DNA
cacaatctcttcccaaagaa

SEQ ID NO: 41690 - DNA, 20 bp, synthetic construct
  source 1..20: mol_type = other DNA
tcacaatctcttcccaaaga

SEQ ID NO: 41691 - DNA, 20 bp, synthetic construct
  source 1..20: mol_type = other DNA
ctcacaatctcttcccaaag

SEQ ID NO: 41692 - DNA, 20 bp, synthetic construct
  source 1..20: mol_type = other DNA
actcacaatctcttcccaaa

SEQ ID NO: 41693 - DNA, 20 bp, synthetic construct
  source 1..20: mol_type = other DNA
aactcacaatctcttcccaa

SEQ ID NO: 41694 - DNA, 20 bp, synthetic construct
  source 1..20: mol_type = other DNA
aaactcacaatctcttccca

SEQ ID NO: 41695 - DNA, 20 bp, synthetic construct
  source 1..20: mol_type = other DNA
aaaactcacaatctcttccc

SEQ ID NO: 41696 - DNA, 20 bp, synthetic construct
  source 1..20: mol_type = other DNA
aaaaactcacaatctcttcc

SEQ ID NO: 41697 - DNA, 20 bp, synthetic construct
  source 1..20: mol_type = other DNA
aaaaaactcacaatctcttc

SEQ ID NO: 41698 - DNA, 20 bp, synthetic construct
  source 1..20: mol_type = other DNA
aaaaaaactcacaatctctt

SEQ ID NO: 41699 - DNA, 20 bp, synthetic construct
  source 1..20: mol_type = other DNA
aaaaaaaactcacaatctct

SEQ ID NO: 41700 - DNA, 20 bp, synthetic construct
  source 1..20: mol_type = other DNA
gaaaaaaaactcacaatctc

SEQ ID NO: 41701 - DNA, 20 bp, synthetic construct
  source 1..20: mol_type = other DNA
agaaaaaaaactcacaatct

SEQ ID NO: 41702 - DNA, 20 bp, synthetic construct
  source 1..20: mol_type = other DNA
gagaaaaaaaactcacaatc

SEQ ID NO: 41703 - DNA, 20 bp, synthetic construct
  source 1..20: mol_type = other DNA
ggagaaaaaaaactcacaat

SEQ ID NO: 41704 - DNA, 20 bp, synthetic construct
  source 1..20: mol_type = other DNA
aggagaaaaaaaactcacaa

SEQ ID NO: 41705 - DNA, 20 bp, synthetic construct
  source 1..20: mol_type = other DNA
taggagaaaaaaaactcaca

SEQ ID NO: 41706 - DNA, 20 bp, synthetic construct
  source 1..20: mol_type = other DNA
ttaggagaaaaaaaactcac

SEQ ID NO: 41707 - DNA, 20 bp, synthetic construct
  source 1..20: mol_type = other DNA
tttaggagaaaaaaaactca

SEQ ID NO: 41708 - DNA, 20 bp, synthetic construct
  source 1..20: mol_type = other DNA
atttaggagaaaaaaaactc

SEQ ID NO: 41709 - DNA, 20 bp, synthetic construct
  source 1..20: mol_type = other DNA
aatttaggagaaaaaaaact

SEQ ID NO: 41710 - DNA, 20 bp, synthetic construct
  source 1..20: mol_type = other DNA
taatttaggagaaaaaaaac

SEQ ID NO: 41711 - DNA, 20 bp, synthetic construct
  source 1..20: mol_type = other DNA
ataatttaggagaaaaaaaa

SEQ ID NO: 41712 - DNA, 20 bp, synthetic construct
  source 1..20: mol_type = other DNA
cataatttaggagaaaaaaa

SEQ ID NO: 41713 - DNA, 20 bp, synthetic construct
  source 1..20: mol_type = other DNA
ccataatttaggagaaaaaa

SEQ ID NO: 41714 - DNA, 20 bp, synthetic construct
  source 1..20: mol_type = other DNA
accataatttaggagaaaaa

SEQ ID NO: 41715 - DNA, 20 bp, synthetic construct
  source 1..20: mol_type = other DNA
caccataatttaggagaaaa

SEQ ID NO: 41716 - DNA, 20 bp, synthetic construct
  source 1..20: mol_type = other DNA
gcaccataatttaggagaaa

SEQ ID NO: 41717 - DNA, 20 bp, synthetic construct
  source 1..20: mol_type = other DNA
tgcaccataatttaggagaa

SEQ ID NO: 41718 - DNA, 20 bp, synthetic construct
  source 1..20: mol_type = other DNA
ttgcaccataatttaggaga

SEQ ID NO: 41719 - DNA, 20 bp, synthetic construct
  source 1..20: mol_type = other DNA
attgcaccataatttaggag

SEQ ID NO: 41720 - DNA, 20 bp, synthetic construct
  source 1..20: mol_type = other DNA
tattgcaccataatttagga

SEQ ID NO: 41721 - DNA, 20 bp, synthetic construct
  source 1..20: mol_type = other DNA
atattgcaccataatttagg

SEQ ID NO: 41722 - DNA, 20 bp, synthetic construct
  source 1..20: mol_type = other DNA
tatattgcaccataatttag

SEQ ID NO: 41723 - DNA, 20 bp, synthetic construct
  source 1..20: mol_type = other DNA
ttatattgcaccataattta

SEQ ID NO: 41724 - DNA, 20 bp, synthetic construct
  source 1..20: mol_type = other DNA
cttatattgcaccataattt

SEQ ID NO: 41725 - DNA, 20 bp, synthetic construct
  source 1..20: mol_type = other DNA
acttatattgcaccataatt

SEQ ID NO: 41726 - DNA, 20 bp, synthetic construct
  source 1..20: mol_type = other DNA
tacttatattgcaccataat

SEQ ID NO: 41727 - DNA, 20 bp, synthetic construct
  source 1..20: mol_type = other DNA
ttacttatattgcaccataa

SEQ ID NO: 41728 - DNA, 20 bp, synthetic construct
  source 1..20: mol_type = other DNA
attacttatattgcaccata

SEQ ID NO: 41729 - DNA, 20 bp, synthetic construct
  source 1..20: mol_type = other DNA
tattacttatattgcaccat

SEQ ID NO: 41730 - DNA, 20 bp, synthetic construct
  source 1..20: mol_type = other DNA
atattacttatattgcacca

SEQ ID NO: 41731 - DNA, 20 bp, synthetic construct
  source 1..20: mol_type = other DNA
tatattacttatattgcacc

SEQ ID NO: 41732 - DNA, 20 bp, synthetic construct
  source 1..20: mol_type = other DNA
gtatattacttatattgcac

SEQ ID NO: 41733 - DNA, 20 bp, synthetic construct
  source 1..20: mol_type = other DNA
ggtatattacttatattgca

SEQ ID NO: 41734 - DNA, 20 bp, synthetic construct
  source 1..20: mol_type = other DNA
tggtatattacttatattgc

SEQ ID NO: 41735 - DNA, 20 bp, synthetic construct
  source 1..20: mol_type = other DNA
atggtatattacttatattg

SEQ ID NO: 41736 - DNA, 20 bp, synthetic construct
  source 1..20: mol_type = other DNA
aatggtatattacttatatt

SEQ ID NO: 41737 - DNA, 20 bp, synthetic construct
  source 1..20: mol_type = other DNA
aaatggtatattacttatat

SEQ ID NO: 41738 - DNA, 20 bp, synthetic construct
  source 1..20: mol_type = other DNA
aaaatggtatattacttata

SEQ ID NO: 41739 - DNA, 20 bp, synthetic construct
  source 1..20: mol_type = other DNA
taaaatggtatattacttat

SEQ ID NO: 41740 - DNA, 20 bp, synthetic construct
  source 1..20: mol_type = other DNA
ttaaaatggtatattactta

SEQ ID NO: 41741 - DNA, 20 bp, synthetic construct
  source 1..20: mol_type = other DNA
gttaaaatggtatattactt

SEQ ID NO: 41742 - DNA, 20 bp, synthetic construct
  source 1..20: mol_type = other DNA
tgttaaaatggtatattact

SEQ ID NO: 41743 - DNA, 20 bp, synthetic construct
  source 1..20: mol_type = other DNA
ttgttaaaatggtatattac

SEQ ID NO: 41744 - DNA, 20 bp, synthetic construct
  source 1..20: mol_type = other DNA
attgttaaaatggtatatta

SEQ ID NO: 41745 - DNA, 20 bp, synthetic construct
  source 1..20: mol_type = other DNA
aattgttaaaatggtatatt

SEQ ID NO: 41746 - DNA, 20 bp, synthetic construct
  source 1..20: mol_type = other DNA
aaattgttaaaatggtatat

SEQ ID NO: 41747 - DNA, 20 bp, synthetic construct
  source 1..20: mol_type = other DNA
aaaattgttaaaatggtata

SEQ ID NO: 41748 - DNA, 20 bp, synthetic construct
  source 1..20: mol_type = other DNA
taaaattgttaaaatggtat

SEQ ID NO: 41749 - DNA, 20 bp, synthetic construct
  source 1..20: mol_type = other DNA
ttaaaattgttaaaatggta

SEQ ID NO: 41750 - DNA, 20 bp, synthetic construct
  source 1..20: mol_type = other DNA
cttaaaattgttaaaatggt

SEQ ID NO: 41751 - DNA, 20 bp, synthetic construct
  source 1..20: mol_type = other DNA
acttaaaattgttaaaatgg

SEQ ID NO: 41752 - DNA, 20 bp, synthetic construct
  source 1..20: mol_type = other DNA
cacttaaaattgttaaaatg

SEQ ID NO: 41753 - DNA, 20 bp, synthetic construct
  source 1..20: mol_type = other DNA
acacttaaaattgttaaaat

SEQ ID NO: 41754 - DNA, 20 bp, synthetic construct
  source 1..20: mol_type = other DNA
tacacttaaaattgttaaaa

SEQ ID NO: 41755 - DNA, 20 bp, synthetic construct
  source 1..20: mol_type = other DNA
atacacttaaaattgttaaa

SEQ ID NO: 41756 - DNA, 20 bp, synthetic construct
  source 1..20: mol_type = other DNA
aatacacttaaaattgttaa

SEQ ID NO: 41757 - DNA, 20 bp, synthetic construct
  source 1..20: mol_type = other DNA
taatacacttaaaattgtta

SEQ ID NO: 41758 - DNA, 20 bp, synthetic construct
  source 1..20: mol_type = other DNA
ttaatacacttaaaattgtt

SEQ ID NO: 41759 - DNA, 20 bp, synthetic construct
  source 1..20: mol_type = other DNA
cttaatacacttaaaattgt

SEQ ID NO: 41760 - DNA, 20 bp, synthetic construct
  source 1..20: mol_type = other DNA
acttaatacacttaaaattg

SEQ ID NO: 41761 - DNA, 20 bp, synthetic construct
  source 1..20: mol_type = other DNA
cacttaatacacttaaaatt

SEQ ID NO: 41762 - DNA, 20 bp, synthetic construct
  source 1..20: mol_type = other DNA
acacttaatacacttaaaat

SEQ ID NO: 41763 - DNA, 20 bp, synthetic construct
  source 1..20: mol_type = other DNA
aacacttaatacacttaaaa

SEQ ID NO: 41764 - DNA, 20 bp, synthetic construct
  source 1..20: mol_type = other DNA
aaacacttaatacacttaaa

SEQ ID NO: 41765 - DNA, 20 bp, synthetic construct
  source 1..20: mol_type = other DNA
aaaacacttaatacacttaa

SEQ ID NO: 41766 - DNA, 20 bp, synthetic construct
  source 1..20: mol_type = other DNA
aaaaacacttaatacactta

SEQ ID NO: 41767 - DNA, 20 bp, synthetic construct
  source 1..20: mol_type = other DNA
aaaaaacacttaatacactt

SEQ ID NO: 41768 - DNA, 20 bp, synthetic construct
  source 1..20: mol_type = other DNA
aaaaaaacacttaatacact

SEQ ID NO: 41769 - DNA, 20 bp, synthetic construct
  source 1..20: mol_type = other DNA
aaaaaaaacacttaatacac

SEQ ID NO: 41770 - DNA, 20 bp, synthetic construct
  source 1..20: mol_type = other DNA
aaaaaaaaacacttaataca

SEQ ID NO: 41771 - DNA, 20 bp, synthetic construct
  source 1..20: mol_type = other DNA
aaaaaaaaaacacttaatac

SEQ ID NO: 41772 - DNA, 20 bp, synthetic construct
  source 1..20: mol_type = other DNA
aaaaaaaaaaacacttaata

SEQ ID NO: 41773 - DNA, 20 bp, synthetic construct
  source 1..20: mol_type = other DNA
aaaaaaaaaaaacacttaat

SEQ ID NO: 41774 - DNA, 20 bp, synthetic construct
  source 1..20: mol_type = other DNA
caaaaaaaaaaaacacttaa

SEQ ID NO: 41775 - DNA, 20 bp, synthetic construct
  source 1..20: mol_type = other DNA
acaaaaaaaaaaaacactta

SEQ ID NO: 41776 - DNA, 20 bp, synthetic construct
  source 1..20: mol_type = other DNA
tacaaaaaaaaaaaacactt

SEQ ID NO: 41777 - DNA, 20 bp, synthetic construct
  source 1..20: mol_type = other DNA
ctacaaaaaaaaaaaacact

SEQ ID NO: 41778 - DNA, 20 bp, synthetic construct
  source 1..20: mol_type = other DNA
actacaaaaaaaaaaaacac

SEQ ID NO: 41779 - DNA, 20 bp, synthetic construct
  source 1..20: mol_type = other DNA
aactacaaaaaaaaaaaaca

SEQ ID NO: 41780 - DNA, 20 bp, synthetic construct
  source 1..20: mol_type = other DNA
aaactacaaaaaaaaaaaac

SEQ ID NO: 41781 - DNA, 20 bp, synthetic construct
  source 1..20: mol_type = other DNA
aaaactacaaaaaaaaaaaa

SEQ ID NO: 41782 - DNA, 20 bp, synthetic construct
  source 1..20: mol_type = other DNA
aaaaactacaaaaaaaaaaa

SEQ ID NO: 41783 - DNA, 20 bp, synthetic construct
  source 1..20: mol_type = other DNA
aaaaaactacaaaaaaaaaa

SEQ ID NO: 41784 - DNA, 20 bp, synthetic construct
  source 1..20: mol_type = other DNA
aaaaaaactacaaaaaaaaa

SEQ ID NO: 41785 - DNA, 20 bp, synthetic construct
  source 1..20: mol_type = other DNA
aaaaaaaactacaaaaaaaa

SEQ ID NO: 41786 - DNA, 20 bp, synthetic construct
  source 1..20: mol_type = other DNA
aaaaaaaaactacaaaaaaa

SEQ ID NO: 41787 - DNA, 20 bp, synthetic construct
  source 1..20: mol_type = other DNA
aaaaaaaaaactacaaaaaa

SEQ ID NO: 41788 - DNA, 20 bp, synthetic construct
  source 1..20: mol_type = other DNA
aaaaaaaaaaactacaaaaa

SEQ ID NO: 41789 - DNA, 20 bp, synthetic construct
  source 1..20: mol_type = other DNA
aaaaaaaaaaaactacaaaa

SEQ ID NO: 41790 - DNA, 20 bp, synthetic construct
  source 1..20: mol_type = other DNA
aaaaaaaaaaaaactacaaa

SEQ ID NO: 41791 - DNA, 20 bp, synthetic construct
  source 1..20: mol_type = other DNA
caaaaaaaaaaaaactacaa

SEQ ID NO: 41792 - DNA, 20 bp, synthetic construct
  source 1..20: mol_type = other DNA
acaaaaaaaaaaaaactaca

SEQ ID NO: 41793 - DNA, 20 bp, synthetic construct
  source 1..20: mol_type = other DNA
aacaaaaaaaaaaaaactac

SEQ ID NO: 41794 - DNA, 20 bp, synthetic construct
  source 1..20: mol_type = other DNA
aaacaaaaaaaaaaaaacta

SEQ ID NO: 41795 - DNA, 20 bp, synthetic construct
  source 1..20: mol_type = other DNA
aaaacaaaaaaaaaaaaact

SEQ ID NO: 41796 - DNA, 20 bp, synthetic construct
  source 1..20: mol_type = other DNA
aaaaacaaaaaaaaaaaaac

SEQ ID NO: 41797 - DNA, 20 bp, synthetic construct
  source 1..20: mol_type = other DNA
aaaaaacaaaaaaaaaaaaa

SEQ ID NO: 41798 - DNA, 20 bp, synthetic construct
  source 1..20: mol_type = other DNA
caaaaaacaaaaaaaaaaaa

SEQ ID NO: 41799 - DNA, 20 bp, synthetic construct
  source 1..20: mol_type = other DNA
tcaaaaaacaaaaaaaaaaa

SEQ ID NO: 41800 - DNA, 20 bp, synthetic construct
  source 1..20: mol_type = other DNA
ctcaaaaaacaaaaaaaaaa

SEQ ID NO: 41801 - DNA, 20 bp, synthetic construct
  source 1..20: mol_type = other DNA
tctcaaaaaacaaaaaaaaa

SEQ ID NO: 41802 - DNA, 20 bp, synthetic construct
  source 1..20: mol_type = other DNA
atctcaaaaaacaaaaaaaa

SEQ ID NO: 41803 - DNA, 20 bp, synthetic construct
  source 1..20: mol_type = other DNA
tatctcaaaaaacaaaaaaa

SEQ ID NO: 41804 - DNA, 20 bp, synthetic construct
  source 1..20: mol_type = other DNA
ctatctcaaaaaacaaaaaa

SEQ ID NO: 41805 - DNA, 20 bp, synthetic construct
  source 1..20: mol_type = other DNA
actatctcaaaaaacaaaaa

SEQ ID NO: 41806 - DNA, 20 bp, synthetic construct
  source 1..20: mol_type = other DNA
gactatctcaaaaaacaaaa

SEQ ID NO: 41807 - DNA, 20 bp, synthetic construct
  source 1..20: mol_type = other DNA
agactatctcaaaaaacaaa

SEQ ID NO: 41808 - DNA, 20 bp, synthetic construct
  source 1..20: mol_type = other DNA
aagactatctcaaaaaacaa

SEQ ID NO: 41809 - DNA, 20 bp, synthetic construct
  source 1..20: mol_type = other DNA
caagactatctcaaaaaaca

SEQ ID NO: 41810 - DNA, 20 bp, synthetic construct
  source 1..20: mol_type = other DNA
gcaagactatctcaaaaaac

SEQ ID NO: 41811 - DNA, 20 bp, synthetic construct
  source 1..20: mol_type = other DNA
agcaagactatctcaaaaaa

SEQ ID NO: 41812 - DNA, 20 bp, synthetic construct
  source 1..20: mol_type = other DNA
gagcaagactatctcaaaaa

SEQ ID NO: 41813 - DNA, 20 bp, synthetic construct
  source 1..20: mol_type = other DNA
agagcaagactatctcaaaa

SEQ ID NO: 41814 - DNA, 20 bp, synthetic construct
  source 1..20: mol_type = other DNA
cagagcaagactatctcaaa

SEQ ID NO: 41815 - DNA, 20 bp, synthetic construct
  source 1..20: mol_type = other DNA
acagagcaagactatctcaa

SEQ ID NO: 41816 - DNA, 20 bp, synthetic construct
  source 1..20: mol_type = other DNA
gacagagcaagactatctca

SEQ ID NO: 41817 - DNA, 20 bp, synthetic construct
  source 1..20: mol_type = other DNA
cgacagagcaagactatctc

SEQ ID NO: 41818 - DNA, 20 bp, synthetic construct
  source 1..20: mol_type = other DNA
gcgacagagcaagactatct

SEQ ID NO: 41819 - DNA, 20 bp, synthetic construct
  source 1..20: mol_type = other DNA
ggcgacagagcaagactatc

SEQ ID NO: 41820 - DNA, 20 bp, synthetic construct
  source 1..20: mol_type = other DNA
gggcgacagagcaagactat

SEQ ID NO: 41821 - DNA, 20 bp, synthetic construct
  source 1..20: mol_type = other DNA
tgggcgacagagcaagacta

SEQ ID NO: 41822 - DNA, 20 bp, synthetic construct
  source 1..20: mol_type = other DNA
ctgggcgacagagcaagact

SEQ ID NO: 41823 - DNA, 20 bp, synthetic construct
  source 1..20: mol_type = other DNA
cctgggcgacagagcaagac

SEQ ID NO: 41824 - DNA, 20 bp, synthetic construct
  source 1..20: mol_type = other DNA
gcctgggcgacagagcaaga

SEQ ID NO: 41825 - DNA, 20 bp, synthetic construct
  source 1..20: mol_type = other DNA
agcctgggcgacagagcaag

SEQ ID NO: 41826 - DNA, 20 bp, synthetic construct
  source 1..20: mol_type = other DNA
cagcctgggcgacagagcaa

SEQ ID NO: 41827 - DNA, 20 bp, synthetic construct
  source 1..20: mol_type = other DNA
ccagcctgggcgacagagca

SEQ ID NO: 41828 - DNA, 20 bp, synthetic construct
  source 1..20: mol_type = other DNA
tccagcctgggcgacagagc

SEQ ID NO: 41829 - DNA, 20 bp, synthetic construct
  source 1..20: mol_type = other DNA
ctccagcctgggcgacagag

SEQ ID NO: 41830 - DNA, 20 bp, synthetic construct
  source 1..20: mol_type = other DNA
actccagcctgggcgacaga

SEQ ID NO: 41831 - DNA, 20 bp, synthetic construct
  source 1..20: mol_type = other DNA
cactccagcctgggcgacag

SEQ ID NO: 41832 - DNA, 20 bp, synthetic construct
  source 1..20: mol_type = other DNA
gcactccagcctgggcgaca

SEQ ID NO: 41833 - DNA, 20 bp, synthetic construct
  source 1..20: mol_type = other DNA
tgcactccagcctgggcgac

SEQ ID NO: 41834 - DNA, 20 bp, synthetic construct
  source 1..20: mol_type = other DNA
ctgcactccagcctgggcga

SEQ ID NO: 41835 - DNA, 20 bp, synthetic construct
  source 1..20: mol_type = other DNA
actgcactccagcctgggcg

SEQ ID NO: 41836 - DNA, 20 bp, synthetic construct
  source 1..20: mol_type = other DNA
cactgcactccagcctgggc

SEQ ID NO: 41837 - DNA, 20 bp, synthetic construct
  source 1..20: mol_type = other DNA
ccactgcactccagcctggg

SEQ ID NO: 41838 - DNA, 20 bp, synthetic construct
  source 1..20: mol_type = other DNA
gccactgcactccagcctgg

SEQ ID NO: 41839 - DNA, 20 bp, synthetic construct
  source 1..20: mol_type = other DNA
tgccactgcactccagcctg

SEQ ID NO: 41840 - DNA, 20 bp, synthetic construct
  source 1..20: mol_type = other DNA
gtgccactgcactccagcct

SEQ ID NO: 41841 - DNA, 20 bp, synthetic construct
  source 1..20: mol_type = other DNA
cgtgccactgcactccagcc

SEQ ID NO: 41842 - DNA, 20 bp, synthetic construct
  source 1..20: mol_type = other DNA
tcgtgccactgcactccagc

SEQ ID NO: 41843 - DNA, 20 bp, synthetic construct
  source 1..20: mol_type = other DNA
atcgtgccactgcactccag

SEQ ID NO: 41844 - DNA, 20 bp, synthetic construct
  source 1..20: mol_type = other DNA
gatcgtgccactgcactcca

SEQ ID NO: 41845 - DNA, 20 bp, synthetic construct
  source 1..20: mol_type = other DNA
agatcgtgccactgcactcc

SEQ ID NO: 41846 - DNA, 20 bp, synthetic construct
  source 1..20: mol_type = other DNA
gagatcgtgccactgcactc

SEQ ID NO: 41847 - DNA, 20 bp, synthetic construct
  source 1..20: mol_type = other DNA
cgagatcgtgccactgcact

SEQ ID NO: 41848 - DNA, 20 bp, synthetic construct
  source 1..20: mol_type = other DNA
ccgagatcgtgccactgcac

SEQ ID NO: 41849 - DNA, 20 bp, synthetic construct
  source 1..20: mol_type = other DNA
gccgagatcgtgccactgca

SEQ ID NO: 41850 - DNA, 20 bp, synthetic construct
  source 1..20: mol_type = other DNA
agccgagatcgtgccactgc

SEQ ID NO: 41851 - DNA, 20 bp, synthetic construct
  source 1..20: mol_type = other DNA
gagccgagatcgtgccactg

SEQ ID NO: 41852 - DNA, 20 bp, synthetic construct
  source 1..20: mol_type = other DNA
tgagccgagatcgtgccact

SEQ ID NO: 41853 - DNA, 20 bp, synthetic construct
  source 1..20: mol_type = other DNA
gtgagccgagatcgtgccac

SEQ ID NO: 41854 - DNA, 20 bp, synthetic construct
  source 1..20: mol_type = other DNA
agtgagccgagatcgtgcca

SEQ ID NO: 41855 - DNA, 20 bp, synthetic construct
  source 1..20: mol_type = other DNA
cagtgagccgagatcgtgcc

SEQ ID NO: 41856 - DNA, 20 bp, synthetic construct
  source 1..20: mol_type = other DNA
ccagtgagccgagatcgtgc

SEQ ID NO: 41857 - DNA, 20 bp, synthetic construct
  source 1..20: mol_type = other DNA
tccagtgagccgagatcgtg

SEQ ID NO: 41858 - DNA, 20 bp, synthetic construct
  source 1..20: mol_type = other DNA
ttccagtgagccgagatcgt

SEQ ID NO: 41859 - DNA, 20 bp, synthetic construct
  source 1..20: mol_type = other DNA
gttccagtgagccgagatcg

SEQ ID NO: 41860 - DNA, 20 bp, synthetic construct
  source 1..20: mol_type = other DNA
ggttccagtgagccgagatc

SEQ ID NO: 41861 - DNA, 20 bp, synthetic construct
  source 1..20: mol_type = other DNA
aggttccagtgagccgagat

SEQ ID NO: 41862 - DNA, 20 bp, synthetic construct
  source 1..20: mol_type = other DNA
gaggttccagtgagccgaga

SEQ ID NO: 41863 - DNA, 20 bp, synthetic construct
  source 1..20: mol_type = other DNA
ggaggttccagtgagccgag

SEQ ID NO: 41864 - DNA, 20 bp, synthetic construct
  source 1..20: mol_type = other DNA
tggaggttccagtgagccga

SEQ ID NO: 41865 - DNA, 20 bp, synthetic construct
  source 1..20: mol_type = other DNA
gtggaggttccagtgagccg

SEQ ID NO: 41866 - DNA, 20 bp, synthetic construct
  source 1..20: mol_type = other DNA
agtggaggttccagtgagcc

SEQ ID NO: 41867 - DNA, 20 bp, synthetic construct
  source 1..20: mol_type = other DNA
aagtggaggttccagtgagc

SEQ ID NO: 41868 - DNA, 20 bp, synthetic construct
  source 1..20: mol_type = other DNA
gaagtggaggttccagtgag

SEQ ID NO: 41869 - DNA, 20 bp, synthetic construct
  source 1..20: mol_type = other DNA
ggaagtggaggttccagtga

SEQ ID NO: 41870 - DNA, 20 bp, synthetic construct
  source 1..20: mol_type = other DNA
gggaagtggaggttccagtg

SEQ ID NO: 41871 - DNA, 20 bp, synthetic construct
  source 1..20: mol_type = other DNA
cgggaagtggaggttccagt

SEQ ID NO: 41872 - DNA, 20 bp, synthetic construct
  source 1..20: mol_type = other DNA
ccgggaagtggaggttccag

SEQ ID NO: 41873 - DNA, 20 bp, synthetic construct
  source 1..20: mol_type = other DNA
cccgggaagtggaggttcca

SEQ ID NO: 41874 - DNA, 20 bp, synthetic construct
  source 1..20: mol_type = other DNA
acccgggaagtggaggttcc

SEQ ID NO: 41875 - DNA, 20 bp, synthetic construct
  source 1..20: mol_type = other DNA
aacccgggaagtggaggttc

SEQ ID NO: 41876 - DNA, 20 bp, synthetic construct
  source 1..20: mol_type = other DNA
gaacccgggaagtggaggtt

SEQ ID NO: 41877 - DNA, 20 bp, synthetic construct
  source 1..20: mol_type = other DNA
tgaacccgggaagtggaggt

SEQ ID NO: 41878 - DNA, 20 bp, synthetic construct
  source 1..20: mol_type = other DNA
ttgaacccgggaagtggagg

SEQ ID NO: 41879 - DNA, 20 bp, synthetic construct
  source 1..20: mol_type = other DNA
cttgaacccgggaagtggag

SEQ ID NO: 41880 - DNA, 20 bp, synthetic construct
  source 1..20: mol_type = other DNA
acttgaacccgggaagtgga

SEQ ID NO: 41881 - DNA, 20 bp, synthetic construct
  source 1..20: mol_type = other DNA
cacttgaacccgggaagtgg

SEQ ID NO: 41882 - DNA, 20 bp, synthetic construct
  source 1..20: mol_type = other DNA
tcacttgaacccgggaagtg

SEQ ID NO: 41883 - DNA, 20 bp, synthetic construct
  source 1..20: mol_type = other DNA
atcacttgaacccgggaagt

SEQ ID NO: 41884 - DNA, 20 bp, synthetic construct
  source 1..20: mol_type = other DNA
aatcacttgaacccgggaag

SEQ ID NO: 41885 - DNA, 20 bp, synthetic construct
  source 1..20: mol_type = other DNA
gaatcacttgaacccgggaa

SEQ ID NO: 41886 - DNA, 20 bp, synthetic construct
  source 1..20: mol_type = other DNA
agaatcacttgaacccggga

SEQ ID NO: 41887 - DNA, 20 bp, synthetic construct
  source 1..20: mol_type = other DNA
gagaatcacttgaacccggg

SEQ ID NO: 41888 - DNA, 20 bp, synthetic construct
  source 1..20: mol_type = other DNA
agagaatcacttgaacccgg

SEQ ID NO: 41889 - DNA, 20 bp, synthetic construct
  source 1..20: mol_type = other DNA
cagagaatcacttgaacccg

SEQ ID NO: 41890 - DNA, 20 bp, synthetic construct
  source 1..20: mol_type = other DNA
ccagagaatcacttgaaccc

SEQ ID NO: 41891 - DNA, 20 bp, synthetic construct
  source 1..20: mol_type = other DNA
accagagaatcacttgaacc

SEQ ID NO: 41892 - DNA, 20 bp, synthetic construct
  source 1..20: mol_type = other DNA
gaccagagaatcacttgaac

SEQ ID NO: 41893 - DNA, 20 bp, synthetic construct
  source 1..20: mol_type = other DNA
agaccagagaatcacttgaa

SEQ ID NO: 41894 - DNA, 20 bp, synthetic construct
  source 1..20: mol_type = other DNA
gagaccagagaatcacttga

SEQ ID NO: 41895 - DNA, 20 bp, synthetic construct
  source 1..20: mol_type = other DNA
tgagaccagagaatcacttg

SEQ ID NO: 41896 - DNA, 20 bp, synthetic construct
  source 1..20: mol_type = other DNA
ctgagaccagagaatcactt

SEQ ID NO: 41897 - DNA, 20 bp, synthetic construct
  source 1..20: mol_type = other DNA
gctgagaccagagaatcact

SEQ ID NO: 41898 - DNA, 20 bp, synthetic construct
  source 1..20: mol_type = other DNA
ggctgagaccagagaatcac

SEQ ID NO: 41899 - DNA, 20 bp, synthetic construct
  source 1..20: mol_type = other DNA
aggctgagaccagagaatca

SEQ ID NO: 41900 - DNA, 20 bp, synthetic construct
  source 1..20: mol_type = other DNA
gaggctgagaccagagaatc

SEQ ID NO: 41901 - DNA, 20 bp, synthetic construct
  source 1..20: mol_type = other DNA
ggaggctgagaccagagaat

SEQ ID NO: 41902 - DNA, 20 bp, synthetic construct
  source 1..20: mol_type = other DNA
gggaggctgagaccagagaa

SEQ ID NO: 41903 - DNA, 20 bp, synthetic construct
  source 1..20: mol_type = other DNA
ggggaggctgagaccagaga

SEQ ID NO: 41904 - DNA, 20 bp, synthetic construct
  source 1..20: mol_type = other DNA
tggggaggctgagaccagag

SEQ ID NO: 41905 - DNA, 20 bp, synthetic construct
  source 1..20: mol_type = other DNA
ttggggaggctgagaccaga

SEQ ID NO: 41906 - DNA, 20 bp, synthetic construct
  source 1..20: mol_type = other DNA
tttggggaggctgagaccag

SEQ ID NO: 41907 - DNA, 20 bp, synthetic construct
  source 1..20: mol_type = other DNA
atttggggaggctgagacca

SEQ ID NO: 41908 - DNA, 20 bp, synthetic construct
  source 1..20: mol_type = other DNA
tatttggggaggctgagacc

SEQ ID NO: 41909 - DNA, 20 bp, synthetic construct
  source 1..20: mol_type = other DNA
atatttggggaggctgagac

SEQ ID NO: 41910 - DNA, 20 bp, synthetic construct
  source 1..20: mol_type = other DNA
gatatttggggaggctgaga

SEQ ID NO: 41911 - DNA, 20 bp, synthetic construct
  source 1..20: mol_type = other DNA
agatatttggggaggctgag

SEQ ID NO: 41912 - DNA, 20 bp, synthetic construct
  source 1..20: mol_type = other DNA
cagatatttggggaggctga

SEQ ID NO: 41913 - DNA, 20 bp, synthetic construct
  source 1..20: mol_type = other DNA
ccagatatttggggaggctg

SEQ ID NO: 41914 - DNA, 20 bp, synthetic construct
  source 1..20: mol_type = other DNA
cccagatatttggggaggct

SEQ ID NO: 41915 - DNA, 20 bp, synthetic construct
  source 1..20: mol_type = other DNA
tcccagatatttggggaggc

SEQ ID NO: 41916 - DNA, 20 bp, synthetic construct
  source 1..20: mol_type = other DNA
atcccagatatttggggagg

SEQ ID NO: 41917 - DNA, 20 bp, synthetic construct
  source 1..20: mol_type = other DNA
aatcccagatatttggggag

SEQ ID NO: 41918 - DNA, 20 bp, synthetic construct
  source 1..20: mol_type = other DNA
taatcccagatatttgggga

SEQ ID NO: 41919 - DNA, 20 bp, synthetic construct
  source 1..20: mol_type = other DNA
gtaatcccagatatttgggg

SEQ ID NO: 41920 - DNA, 20 bp, synthetic construct
  source 1..20: mol_type = other DNA
tgtaatcccagatatttggg

SEQ ID NO: 41921 - DNA, 20 bp, synthetic construct
  source 1..20: mol_type = other DNA
ctgtaatcccagatatttgg

SEQ ID NO: 41922 - DNA, 20 bp, synthetic construct
  source 1..20: mol_type = other DNA
cctgtaatcccagatatttg

SEQ ID NO: 41923 - DNA, 20 bp, synthetic construct
  source 1..20: mol_type = other DNA
acctgtaatcccagatattt

SEQ ID NO: 41924 - DNA, 20 bp, synthetic construct
  source 1..20: mol_type = other DNA
cacctgtaatcccagatatt

SEQ ID NO: 41925 - DNA, 20 bp, synthetic construct
  source 1..20: mol_type = other DNA
acacctgtaatcccagatat

SEQ ID NO: 41926 - DNA, 20 bp, synthetic construct
  source 1..20: mol_type = other DNA
cacacctgtaatcccagata

SEQ ID NO: 41927 - DNA, 20 bp, synthetic construct
  source 1..20: mol_type = other DNA
gcacacctgtaatcccagat

SEQ ID NO: 41928 - DNA, 20 bp, synthetic construct
  source 1..20: mol_type = other DNA
tgcacacctgtaatcccaga

SEQ ID NO: 41929 - DNA, 20 bp, synthetic construct
  source 1..20: mol_type = other DNA
gtgcacacctgtaatcccag

SEQ ID NO: 41930 - DNA, 20 bp, synthetic construct
  source 1..20: mol_type = other DNA
ggtgcacacctgtaatccca

SEQ ID NO: 41931 - DNA, 20 bp, synthetic construct
  source 1..20: mol_type = other DNA
tggtgcacacctgtaatccc

SEQ ID NO: 41932 - DNA, 20 bp, synthetic construct
  source 1..20: mol_type = other DNA
gtggtgcacacctgtaatcc

SEQ ID NO: 41933 - DNA, 20 bp, synthetic construct
  source 1..20: mol_type = other DNA
ggtggtgcacacctgtaatc

SEQ ID NO: 41934 - DNA, 20 bp, synthetic construct
  source 1..20: mol_type = other DNA
tggtggtgcacacctgtaat

SEQ ID NO: 41935 - DNA, 20 bp, synthetic construct
  source 1..20: mol_type = other DNA
gtggtggtgcacacctgtaa

SEQ ID NO: 41936 - DNA, 20 bp, synthetic construct
  source 1..20: mol_type = other DNA
cgtggtggtgcacacctgta

SEQ ID NO: 41937 - DNA, 20 bp, synthetic construct
  source 1..20: mol_type = other DNA
gcgtggtggtgcacacctgt

SEQ ID NO: 41938 - DNA, 20 bp, synthetic construct
  source 1..20: mol_type = other DNA
ggcgtggtggtgcacacctg

SEQ ID NO: 41939 - DNA, 20 bp, synthetic construct
  source 1..20: mol_type = other DNA
aggcgtggtggtgcacacct

SEQ ID NO: 41940 - DNA, 20 bp, synthetic construct
  source 1..20: mol_type = other DNA
caggcgtggtggtgcacacc

SEQ ID NO: 41941 - DNA, 20 bp, synthetic construct
  source 1..20: mol_type = other DNA
ccaggcgtggtggtgcacac

SEQ ID NO: 41942 - DNA, 20 bp, synthetic construct
  source 1..20: mol_type = other DNA
gccaggcgtggtggtgcaca

SEQ ID NO: 41943 - DNA, 20 bp, synthetic construct
  source 1..20: mol_type = other DNA
agccaggcgtggtggtgcac

SEQ ID NO: 41944 - DNA, 20 bp, synthetic construct
  source 1..20: mol_type = other DNA
tagccaggcgtggtggtgca

SEQ ID NO: 41945 - DNA, 20 bp, synthetic construct
  source 1..20: mol_type = other DNA
ttagccaggcgtggtggtgc

SEQ ID NO: 41946 - DNA, 20 bp, synthetic construct
  source 1..20: mol_type = other DNA
attagccaggcgtggtggtg

SEQ ID NO: 41947 - DNA, 20 bp, synthetic construct
  source 1..20: mol_type = other DNA
aattagccaggcgtggtggt

SEQ ID NO: 41948 - DNA, 20 bp, synthetic construct
  source 1..20: mol_type = other DNA
aaattagccaggcgtggtgg

SEQ ID NO: 41949 - DNA, 20 bp, synthetic construct
  source 1..20: mol_type = other DNA
aaaattagccaggcgtggtg

SEQ ID NO: 41950 - DNA, 20 bp, synthetic construct
  source 1..20: mol_type = other DNA
aaaaattagccaggcgtggt

SEQ ID NO: 41951 - DNA, 20 bp, synthetic construct
  source 1..20: mol_type = other DNA
gaaaaattagccaggcgtgg

SEQ ID NO: 41952 - DNA, 20 bp, synthetic construct
  source 1..20: mol_type = other DNA
agaaaaattagccaggcgtg

SEQ ID NO: 41953 - DNA, 20 bp, synthetic construct
  source 1..20: mol_type = other DNA
tagaaaaattagccaggcgt

SEQ ID NO: 41954 - DNA, 20 bp, synthetic construct
  source 1..20: mol_type = other DNA
atagaaaaattagccaggcg

SEQ ID NO: 41955 - DNA, 20 bp, synthetic construct
  source 1..20: mol_type = other DNA
aatagaaaaattagccaggc

SEQ ID NO: 41956 - DNA, 20 bp, synthetic construct
  source 1..20: mol_type = other DNA
aaatagaaaaattagccagg

SEQ ID NO: 41957 - DNA, 20 bp, synthetic construct
  source 1..20: mol_type = other DNA
aaaatagaaaaattagccag

SEQ ID NO: 41958 - DNA, 20 bp, synthetic construct
  source 1..20: mol_type = other DNA
aaaaatagaaaaattagcca

SEQ ID NO: 41959 - DNA, 20 bp, synthetic construct
  source 1..20: mol_type = other DNA
taaaaatagaaaaattagcc

SEQ ID NO: 41960 - DNA, 20 bp, synthetic construct
  source 1..20: mol_type = other DNA
ctaaaaatagaaaaattagc

SEQ ID NO: 41961 - DNA, 20 bp, synthetic construct
  source 1..20: mol_type = other DNA
actaaaaatagaaaaattag

SEQ ID NO: 41962 - DNA, 20 bp, synthetic construct
  source 1..20: mol_type = other DNA
tactaaaaatagaaaaatta

SEQ ID NO: 41963 - DNA, 20 bp, synthetic construct
  source 1..20: mol_type = other DNA
ctactaaaaatagaaaaatt

SEQ ID NO: 41964 - DNA, 20 bp, synthetic construct
  source 1..20: mol_type = other DNA
tctactaaaaatagaaaaat

SEQ ID NO: 41965 - DNA, 20 bp, synthetic construct
  source 1..20: mol_type = other DNA
ttctactaaaaatagaaaaa

SEQ ID NO: 41966 - DNA, 20 bp, synthetic construct
  source 1..20: mol_type = other DNA
tttctactaaaaatagaaaa

SEQ ID NO: 41967 - DNA, 20 bp, synthetic construct
  source 1..20: mol_type = other DNA
gtttctactaaaaatagaaa

SEQ ID NO: 41968 - DNA, 20 bp, synthetic construct
  source 1..20: mol_type = other DNA
cgtttctactaaaaatagaa

SEQ ID NO: 41969 - DNA, 20 bp, synthetic construct
  source 1..20: mol_type = other DNA
ccgtttctactaaaaataga

SEQ ID NO: 41970 - DNA, 20 bp, synthetic construct
  source 1..20: mol_type = other DNA
cccgtttctactaaaaatag

SEQ ID NO: 41971 - DNA, 20 bp, synthetic construct
  source 1..20: mol_type = other DNA
ccccgtttctactaaaaata

SEQ ID NO: 41972 - DNA, 20 bp, synthetic construct
  source 1..20: mol_type = other DNA
accccgtttctactaaaaat

SEQ ID NO: 41973 - DNA, 20 bp, synthetic construct
  source 1..20: mol_type = other DNA
aaccccgtttctactaaaaa

SEQ ID NO: 41974 - DNA, 20 bp, synthetic construct
  source 1..20: mol_type = other DNA
aaaccccgtttctactaaaa

SEQ ID NO: 41975 - DNA, 20 bp, synthetic construct
  source 1..20: mol_type = other DNA
gaaaccccgtttctactaaa

SEQ ID NO: 41976 - DNA, 20 bp, synthetic construct
  source 1..20: mol_type = other DNA
tgaaaccccgtttctactaa

SEQ ID NO: 41977 - DNA, 20 bp, synthetic construct
  source 1..20: mol_type = other DNA
gtgaaaccccgtttctacta

SEQ ID NO: 41978 - DNA, 20 bp, synthetic construct
  source 1..20: mol_type = other DNA
ggtgaaaccccgtttctact

SEQ ID NO: 41979 - DNA, 20 bp, synthetic construct
  source 1..20: mol_type = other DNA
tggtgaaaccccgtttctac

SEQ ID NO: 41980 - DNA, 20 bp, synthetic construct
  source 1..20: mol_type = other DNA
atggtgaaaccccgtttcta

SEQ ID NO: 41981 - DNA, 20 bp, synthetic construct
  source 1..20: mol_type = other DNA
tatggtgaaaccccgtttct

SEQ ID NO: 41982 - DNA, 20 bp, synthetic construct
  source 1..20: mol_type = other DNA
atatggtgaaaccccgtttc

SEQ ID NO: 41983 - DNA, 20 bp, synthetic construct
  source 1..20: mol_type = other DNA
aatatggtgaaaccccgttt

SEQ ID NO: 41984 - DNA, 20 bp, synthetic construct
  source 1..20: mol_type = other DNA
caatatggtgaaaccccgtt

SEQ ID NO: 41985 - DNA, 20 bp, synthetic construct
  source 1..20: mol_type = other DNA
ccaatatggtgaaaccccgt

SEQ ID NO: 41986 - DNA, 20 bp, synthetic construct
  source 1..20: mol_type = other DNA
accaatatggtgaaaccccg

SEQ ID NO: 41987 - DNA, 20 bp, synthetic construct
  source 1..20: mol_type = other DNA
gaccaatatggtgaaacccc

SEQ ID NO: 41988 - DNA, 20 bp, synthetic construct
  source 1..20: mol_type = other DNA
tgaccaatatggtgaaaccc

SEQ ID NO: 41989 - DNA, 20 bp, synthetic construct
  source 1..20: mol_type = other DNA
ctgaccaatatggtgaaacc

SEQ ID NO: 41990 - DNA, 20 bp, synthetic construct
  source 1..20: mol_type = other DNA
cctgaccaatatggtgaaac

SEQ ID NO: 41991 - DNA, 20 bp, synthetic construct
  source 1..20: mol_type = other DNA
gcctgaccaatatggtgaaa

SEQ ID NO: 41992 - DNA, 20 bp, synthetic construct
  source 1..20: mol_type = other DNA
agcctgaccaatatggtgaa

SEQ ID NO: 41993 - DNA, 20 bp, synthetic construct
  source 1..20: mol_type = other DNA
cagcctgaccaatatggtga

SEQ ID NO: 41994 - DNA, 20 bp, synthetic construct
  source 1..20: mol_type = other DNA
ccagcctgaccaatatggtg

SEQ ID NO: 41995 - DNA, 20 bp, synthetic construct
  source 1..20: mol_type = other DNA
accagcctgaccaatatggt

SEQ ID NO: 41996 - DNA, 20 bp, synthetic construct
  source 1..20: mol_type = other DNA
gaccagcctgaccaatatgg

SEQ ID NO: 41997 - DNA, 20 bp, synthetic construct
  source 1..20: mol_type = other DNA
agaccagcctgaccaatatg

SEQ ID NO: 41998 - DNA, 20 bp, synthetic construct
  source 1..20: mol_type = other DNA
aagaccagcctgaccaatat

SEQ ID NO: 41999 - DNA, 20 bp, synthetic construct
  source 1..20: mol_type = other DNA
caagaccagcctgaccaata

SEQ ID NO: 42000 - DNA, 20 bp, synthetic construct
  source 1..20: mol_type = other DNA
tcaagaccagcctgaccaat

SEQ ID NO: 42001 - DNA, 20 bp, synthetic construct
  source 1..20: mol_type = other DNA
ttcaagaccagcctgaccaa

SEQ ID NO: 42002 - DNA, 20 bp, synthetic construct
  source 1..20: mol_type = other DNA
gttcaagaccagcctgacca

SEQ ID NO: 42003 - DNA, 20 bp, synthetic construct
  source 1..20: mol_type = other DNA
agttcaagaccagcctgacc

SEQ ID NO: 42004 - DNA, 20 bp, synthetic construct
  source 1..20: mol_type = other DNA
aagttcaagaccagcctgac

SEQ ID NO: 42005 - DNA, 20 bp, synthetic construct
  source 1..20: mol_type = other DNA
gaagttcaagaccagcctga

SEQ ID NO: 42006 - DNA, 20 bp, synthetic construct
  source 1..20: mol_type = other DNA
agaagttcaagaccagcctg

SEQ ID NO: 42007 - DNA, 20 bp, synthetic construct
  source 1..20: mol_type = other DNA
cagaagttcaagaccagcct

SEQ ID NO: 42008 - DNA, 20 bp, synthetic construct
  source 1..20: mol_type = other DNA
tcagaagttcaagaccagcc

SEQ ID NO: 42009 - DNA, 20 bp, synthetic construct
  source 1..20: mol_type = other DNA
ctcagaagttcaagaccagc

SEQ ID NO: 42010 - DNA, 20 bp, synthetic construct
  source 1..20: mol_type = other DNA
gctcagaagttcaagaccag

SEQ ID NO: 42011 - DNA, 20 bp, synthetic construct
  source 1..20: mol_type = other DNA
agctcagaagttcaagacca

SEQ ID NO: 42012 - DNA, 20 bp, synthetic construct
  source 1..20: mol_type = other DNA
gagctcagaagttcaagacc

SEQ ID NO: 42013 - DNA, 20 bp, synthetic construct
  source 1..20: mol_type = other DNA
cgagctcagaagttcaagac

SEQ ID NO: 42014 - DNA, 20 bp, synthetic construct
  source 1..20: mol_type = other DNA
acgagctcagaagttcaaga

SEQ ID NO: 42015 - DNA, 20 bp, synthetic construct
  source 1..20: mol_type = other DNA
cacgagctcagaagttcaag

SEQ ID NO: 42016 - DNA, 20 bp, synthetic construct
  source 1..20: mol_type = other DNA
tcacgagctcagaagttcaa

SEQ ID NO: 42017 - DNA, 20 bp, synthetic construct
  source 1..20: mol_type = other DNA
atcacgagctcagaagttca

SEQ ID NO: 42018 - DNA, 20 bp, synthetic construct
  source 1..20: mol_type = other DNA
gatcacgagctcagaagttc

SEQ ID NO: 42019 - DNA, 20 bp, synthetic construct
  source 1..20: mol_type = other DNA
ggatcacgagctcagaagtt

SEQ ID NO: 42020 - DNA, 20 bp, synthetic construct
  source 1..20: mol_type = other DNA
tggatcacgagctcagaagt

SEQ ID NO: 42021 - DNA, 20 bp, synthetic construct
  source 1..20: mol_type = other DNA
gtggatcacgagctcagaag

SEQ ID NO: 42022 - DNA, 20 bp, synthetic construct
  source 1..20: mol_type = other DNA
ggtggatcacgagctcagaa

SEQ ID NO: 42023 - DNA, 20 bp, synthetic construct
  source 1..20: mol_type = other DNA
gggtggatcacgagctcaga

SEQ ID NO: 42024 - DNA, 20 bp, synthetic construct
  source 1..20: mol_type = other DNA
tgggtggatcacgagctcag

SEQ ID NO: 42025 - DNA, 20 bp, synthetic construct
  source 1..20: mol_type = other DNA
gtgggtggatcacgagctca

SEQ ID NO: 42026 - DNA, 20 bp, synthetic construct
  source 1..20: mol_type = other DNA
ggtgggtggatcacgagctc

SEQ ID NO: 42027 - DNA, 20 bp, synthetic construct
  source 1..20: mol_type = other DNA
aggtgggtggatcacgagct

SEQ ID NO: 42028 - DNA, 20 bp, synthetic construct
  source 1..20: mol_type = other DNA
gaggtgggtggatcacgagc

SEQ ID NO: 42029 - DNA, 20 bp, synthetic construct
  source 1..20: mol_type = other DNA
cgaggtgggtggatcacgag

SEQ ID NO: 42030 - DNA, 20 bp, synthetic construct
  source 1..20: mol_type = other DNA
ccgaggtgggtggatcacga

SEQ ID NO: 42031 - DNA, 20 bp, synthetic construct
  source 1..20: mol_type = other DNA
gccgaggtgggtggatcacg

SEQ ID NO: 42032 - DNA, 20 bp, synthetic construct
  source 1..20: mol_type = other DNA
ggccgaggtgggtggatcac

SEQ ID NO: 42033 - DNA, 20 bp, synthetic construct
  source 1..20: mol_type = other DNA
aggccgaggtgggtggatca

SEQ ID NO: 42034 - DNA, 20 bp, synthetic construct
  source 1..20: mol_type = other DNA
gaggccgaggtgggtggatc

SEQ ID NO: 42035 - DNA, 20 bp, synthetic construct
  source 1..20: mol_type = other DNA
ggaggccgaggtgggtggat

SEQ ID NO: 42036 - DNA, 20 bp, synthetic construct
  source 1..20: mol_type = other DNA
gggaggccgaggtgggtgga

SEQ ID NO: 42037 - DNA, 20 bp, synthetic construct
  source 1..20: mol_type = other DNA
tgggaggccgaggtgggtgg

SEQ ID NO: 42038 - DNA, 20 bp, synthetic construct
  source 1..20: mol_type = other DNA
ttgggaggccgaggtgggtg

SEQ ID NO: 42039 - DNA, 20 bp, synthetic construct
  source 1..20: mol_type = other DNA
tttgggaggccgaggtgggt

SEQ ID NO: 42040 - DNA, 20 bp, synthetic construct
  source 1..20: mol_type = other DNA
ctttgggaggccgaggtggg

SEQ ID NO: 42041 - DNA, 20 bp, synthetic construct
  source 1..20: mol_type = other DNA
actttgggaggccgaggtgg

SEQ ID NO: 42042 - DNA, 20 bp, synthetic construct
  source 1..20: mol_type = other DNA
cactttgggaggccgaggtg

SEQ ID NO: 42043 - DNA, 20 bp, synthetic construct
  source 1..20: mol_type = other DNA
gcactttgggaggccgaggt

SEQ ID NO: 42044 - DNA, 20 bp, synthetic construct
  source 1..20: mol_type = other DNA
agcactttgggaggccgagg

SEQ ID NO: 42045 - DNA, 20 bp, synthetic construct
  source 1..20: mol_type = other DNA
cagcactttgggaggccgag

SEQ ID NO: 42046 - DNA, 20 bp, synthetic construct
  source 1..20: mol_type = other DNA
ccagcactttgggaggccga

SEQ ID NO: 42047 - DNA, 20 bp, synthetic construct
  source 1..20: mol_type = other DNA
cccagcactttgggaggccg

SEQ ID NO: 42048 - DNA, 20 bp, synthetic construct
  source 1..20: mol_type = other DNA
tcccagcactttgggaggcc

SEQ ID NO: 42049 - DNA, 20 bp, synthetic construct
  source 1..20: mol_type = other DNA
atcccagcactttgggaggc

SEQ ID NO: 42050 - DNA, 20 bp, synthetic construct
  source 1..20: mol_type = other DNA
aatcccagcactttgggagg

SEQ ID NO: 42051 - DNA, 20 bp, synthetic construct
  source 1..20: mol_type = other DNA
taatcccagcactttgggag

SEQ ID NO: 42052 - DNA, 20 bp, synthetic construct
  source 1..20: mol_type = other DNA
gtaatcccagcactttggga

SEQ ID NO: 42053 - DNA, 20 bp, synthetic construct
  source 1..20: mol_type = other DNA
tgtaatcccagcactttggg

SEQ ID NO: 42054 - DNA, 20 bp, synthetic construct
  source 1..20: mol_type = other DNA
ctgtaatcccagcactttgg

SEQ ID NO: 42055 - DNA, 20 bp, synthetic construct
  source 1..20: mol_type = other DNA
cctgtaatcccagcactttg

SEQ ID NO: 42056 - DNA, 20 bp, synthetic construct
  source 1..20: mol_type = other DNA
gcctgtaatcccagcacttt

SEQ ID NO: 42057 - DNA, 20 bp, synthetic construct
  source 1..20: mol_type = other DNA
ggcctgtaatcccagcactt

SEQ ID NO: 42058 - DNA, 20 bp, synthetic construct
  source 1..20: mol_type = other DNA
aggcctgtaatcccagcact

SEQ ID NO: 42059 - DNA, 20 bp, synthetic construct
  source 1..20: mol_type = other DNA
aaggcctgtaatcccagcac

SEQ ID NO: 42060 - DNA, 20 bp, synthetic construct
  source 1..20: mol_type = other DNA
taaggcctgtaatcccagca

SEQ ID NO: 42061 - DNA, 20 bp, synthetic construct
  source 1..20: mol_type = other DNA
ctaaggcctgtaatcccagc

SEQ ID NO: 42062 - DNA, 20 bp, synthetic construct
  source 1..20: mol_type = other DNA
gctaaggcctgtaatcccag

SEQ ID NO: 42063 - DNA, 20 bp, synthetic construct
  source 1..20: mol_type = other DNA
ggctaaggcctgtaatccca

SEQ ID NO: 42064 - DNA, 20 bp, synthetic construct
  source 1..20: mol_type = other DNA
tggctaaggcctgtaatccc

SEQ ID NO: 42065 - DNA, 20 bp, synthetic construct
  source 1..20: mol_type = other DNA
gtggctaaggcctgtaatcc

SEQ ID NO: 42066 - DNA, 20 bp, synthetic construct
  source 1..20: mol_type = other DNA
ggtggctaaggcctgtaatc

SEQ ID NO: 42067 - DNA, 20 bp, synthetic construct
  source 1..20: mol_type = other DNA
tggtggctaaggcctgtaat

SEQ ID NO: 42068 - DNA, 20 bp, synthetic construct
  source 1..20: mol_type = other DNA
gtggtggctaaggcctgtaa

SEQ ID NO: 42069 - DNA, 20 bp, synthetic construct
  source 1..20: mol_type = other DNA
tgtggtggctaaggcctgta

SEQ ID NO: 42070 - DNA, 20 bp, synthetic construct
  source 1..20: mol_type = other DNA
gtgtggtggctaaggcctgt

SEQ ID NO: 42071 - DNA, 20 bp, synthetic construct
  source 1..20: mol_type = other DNA
ggtgtggtggctaaggcctg

SEQ ID NO: 42072 - DNA, 20 bp, synthetic construct
  source 1..20: mol_type = other DNA
aggtgtggtggctaaggcct

SEQ ID NO: 42073 - DNA, 20 bp, synthetic construct
  source 1..20: mol_type = other DNA
caggtgtggtggctaaggcc

SEQ ID NO: 42074 - DNA, 20 bp, synthetic construct
  source 1..20: mol_type = other DNA
ccaggtgtggtggctaaggc

SEQ ID NO: 42075 - DNA, 20 bp, synthetic construct
  source 1..20: mol_type = other DNA
gccaggtgtggtggctaagg

SEQ ID NO: 42076 - DNA, 20 bp, synthetic construct
  source 1..20: mol_type = other DNA
ggccaggtgtggtggctaag

SEQ ID NO: 42077 - DNA, 20 bp, synthetic construct
  source 1..20: mol_type = other DNA
aggccaggtgtggtggctaa

SEQ ID NO: 42078 - DNA, 20 bp, synthetic construct
  source 1..20: mol_type = other DNA
taggccaggtgtggtggcta

SEQ ID NO: 42079 - DNA, 20 bp, synthetic construct
  source 1..20: mol_type = other DNA
ataggccaggtgtggtggct

SEQ ID NO: 42080 - DNA, 20 bp, synthetic construct
  source 1..20: mol_type = other DNA
cataggccaggtgtggtggc

SEQ ID NO: 42081 - DNA, 20 bp, synthetic construct
  source 1..20: mol_type = other DNA
gcataggccaggtgtggtgg

SEQ ID NO: 42082 - DNA, 20 bp, synthetic construct
  source 1..20: mol_type = other DNA
tgcataggccaggtgtggtg

SEQ ID NO: 42083 - DNA, 20 bp, synthetic construct
  source 1..20: mol_type = other DNA
atgcataggccaggtgtggt

SEQ ID NO: 42084 - DNA, 20 bp, synthetic construct
  source 1..20: mol_type = other DNA
aatgcataggccaggtgtgg

SEQ ID NO: 42085 - DNA, 20 bp, synthetic construct
  source 1..20: mol_type = other DNA
caatgcataggccaggtgtg

SEQ ID NO: 42086 - DNA, 20 bp, synthetic construct
  source 1..20: mol_type = other DNA
gcaatgcataggccaggtgt

SEQ ID NO: 42087 - DNA, 20 bp, synthetic construct
  source 1..20: mol_type = other DNA
agcaatgcataggccaggtg

SEQ ID NO: 42088 - DNA, 20 bp, synthetic construct
  source 1..20: mol_type = other DNA
aagcaatgcataggccaggt

SEQ ID NO: 42089 - DNA, 20 bp, synthetic construct
  source 1..20: mol_type = other DNA
aaagcaatgcataggccagg

SEQ ID NO: 42090 - DNA, 20 bp, synthetic construct
  source 1..20: mol_type = other DNA
aaaagcaatgcataggccag

SEQ ID NO: 42091 - DNA, 20 bp, synthetic construct
  source 1..20: mol_type = other DNA
taaaagcaatgcataggcca

SEQ ID NO: 42092 - DNA, 20 bp, synthetic construct
  source 1..20: mol_type = other DNA
ataaaagcaatgcataggcc

SEQ ID NO: 42093 - DNA, 20 bp, synthetic construct
  source 1..20: mol_type = other DNA
tataaaagcaatgcataggc

SEQ ID NO: 42094 - DNA, 20 bp, synthetic construct
  source 1..20: mol_type = other DNA
atataaaagcaatgcatagg

SEQ ID NO: 42095 - DNA, 20 bp, synthetic construct
  source 1..20: mol_type = other DNA
catataaaagcaatgcatag

SEQ ID NO: 42096 - DNA, 20 bp, synthetic construct
  source 1..20: mol_type = other DNA
acatataaaagcaatgcata

SEQ ID NO: 42097 - DNA, 20 bp, synthetic construct
  source 1..20: mol_type = other DNA
tacatataaaagcaatgcat

SEQ ID NO: 42098 - DNA, 20 bp, synthetic construct
  source 1..20: mol_type = other DNA
atacatataaaagcaatgca

SEQ ID NO: 42099 - DNA, 20 bp, synthetic construct
  source 1..20: mol_type = other DNA
aatacatataaaagcaatgc

SEQ ID NO: 42100 - DNA, 20 bp, synthetic construct
  source 1..20: mol_type = other DNA
aaatacatataaaagcaatg

SEQ ID NO: 42101 - DNA, 20 bp, synthetic construct
  source 1..20: mol_type = other DNA
aaaatacatataaaagcaat

SEQ ID NO: 42102 - DNA, 20 bp, synthetic construct
  source 1..20: mol_type = other DNA
taaaatacatataaaagcaa

SEQ ID NO: 42103 - DNA, 20 bp, synthetic construct
  source 1..20: mol_type = other DNA
ttaaaatacatataaaagca

SEQ ID NO: 42104 - DNA, 20 bp, synthetic construct
  source 1..20: mol_type = other DNA
tttaaaatacatataaaagc

SEQ ID NO: 42105 - DNA, 20 bp, synthetic construct
  source 1..20: mol_type = other DNA
ttttaaaatacatataaaag

SEQ ID NO: 42106 - DNA, 20 bp, synthetic construct
  source 1..20: mol_type = other DNA
attttaaaatacatataaaa

SEQ ID NO: 42107 - DNA, 20 bp, synthetic construct
  source 1..20: mol_type = other DNA
aattttaaaatacatataaa

SEQ ID NO: 42108 - DNA, 20 bp, synthetic construct
  source 1..20: mol_type = other DNA
gaattttaaaatacatataa

SEQ ID NO: 42109 - DNA, 20 bp, synthetic construct
  source 1..20: mol_type = other DNA
tgaattttaaaatacatata

SEQ ID NO: 42110 - DNA, 20 bp, synthetic construct
  source 1..20: mol_type = other DNA
atgaattttaaaatacatat

SEQ ID NO: 42111 - DNA, 20 bp, synthetic construct
  source 1..20: mol_type = other DNA
tatgaattttaaaatacata

SEQ ID NO: 42112 - DNA, 20 bp, synthetic construct
  source 1..20: mol_type = other DNA
ttatgaattttaaaatacat

SEQ ID NO: 42113 - DNA, 20 bp, synthetic construct
  source 1..20: mol_type = other DNA
cttatgaattttaaaataca

SEQ ID NO: 42114 - DNA, 20 bp, synthetic construct
  source 1..20: mol_type = other DNA
acttatgaattttaaaatac

SEQ ID NO: 42115 - DNA, 20 bp, synthetic construct
  source 1..20: mol_type = other DNA
aacttatgaattttaaaata

SEQ ID NO: 42116 - DNA, 20 bp, synthetic construct
  source 1..20: mol_type = other DNA
gaacttatgaattttaaaat

SEQ ID NO: 42117 - DNA, 20 bp, synthetic construct
  source 1..20: mol_type = other DNA
agaacttatgaattttaaaa

SEQ ID NO: 42118 - DNA, 20 bp, synthetic construct
  source 1..20: mol_type = other DNA
gagaacttatgaattttaaa

SEQ ID NO: 42119 - DNA, 20 bp, synthetic construct
  source 1..20: mol_type = other DNA
ggagaacttatgaattttaa

SEQ ID NO: 42120 - DNA, 20 bp, synthetic construct
  source 1..20: mol_type = other DNA
aggagaacttatgaatttta

SEQ ID NO: 42121 - DNA, 20 bp, synthetic construct
  source 1..20: mol_type = other DNA
gaggagaacttatgaatttt

SEQ ID NO: 42122 - DNA, 20 bp, synthetic construct
  source 1..20: mol_type = other DNA
ggaggagaacttatgaattt

SEQ ID NO: 42123 - DNA, 20 bp, synthetic construct
  source 1..20: mol_type = other DNA
aggaggagaacttatgaatt

SEQ ID NO: 42124 - DNA, 20 bp, synthetic construct
  source 1..20: mol_type = other DNA
taggaggagaacttatgaat

SEQ ID NO: 42125 - DNA, 20 bp, synthetic construct
  source 1..20: mol_type = other DNA
ataggaggagaacttatgaa

SEQ ID NO: 42126 - DNA, 20 bp, synthetic construct
  source 1..20: mol_type = other DNA
cataggaggagaacttatga

SEQ ID NO: 42127 - DNA, 20 bp, synthetic construct
  source 1..20: mol_type = other DNA
tcataggaggagaacttatg

SEQ ID NO: 42128 - DNA, 20 bp, synthetic construct
  source 1..20: mol_type = other DNA
atcataggaggagaacttat

SEQ ID NO: 42129 - DNA, 20 bp, synthetic construct
  source 1..20: mol_type = other DNA
catcataggaggagaactta

SEQ ID NO: 42130 - DNA, 20 bp, synthetic construct
  source 1..20: mol_type = other DNA
acatcataggaggagaactt

SEQ ID NO: 42131 - DNA, 20 bp, synthetic construct
  source 1..20: mol_type = other DNA
aacatcataggaggagaact

SEQ ID NO: 42132 - DNA, 20 bp, synthetic construct
  source 1..20: mol_type = other DNA
aaacatcataggaggagaac

SEQ ID NO: 42133 - DNA, 20 bp, synthetic construct
  source 1..20: mol_type = other DNA
aaaacatcataggaggagaa

SEQ ID NO: 42134 - DNA, 20 bp, synthetic construct
  source 1..20: mol_type = other DNA
aaaaacatcataggaggaga

SEQ ID NO: 42135 - DNA, 20 bp, synthetic construct
  source 1..20: mol_type = other DNA
caaaaacatcataggaggag

SEQ ID NO: 42136 - DNA, 20 bp, synthetic construct
  source 1..20: mol_type = other DNA
acaaaaacatcataggagga

SEQ ID NO: 42137 - DNA, 20 bp, synthetic construct
  source 1..20: mol_type = other DNA
gacaaaaacatcataggagg

SEQ ID NO: 42138 - DNA, 20 bp, synthetic construct
  source 1..20: mol_type = other DNA
ggacaaaaacatcataggag

SEQ ID NO: 42139 - DNA, 20 bp, synthetic construct
  source 1..20: mol_type = other DNA
gggacaaaaacatcatagga

SEQ ID NO: 42140 - DNA, 20 bp, synthetic construct
  source 1..20: mol_type = other DNA
tgggacaaaaacatcatagg

SEQ ID NO: 42141 - DNA, 20 bp, synthetic construct
  source 1..20: mol_type = other DNA
atgggacaaaaacatcatag

SEQ ID NO: 42142 - DNA, 20 bp, synthetic construct
  source 1..20: mol_type = other DNA
catgggacaaaaacatcata

SEQ ID NO: 42143 - DNA, 20 bp, synthetic construct
  source 1..20: mol_type = other DNA
acatgggacaaaaacatcat

SEQ ID NO: 42144 - DNA, 20 bp, synthetic construct
  source 1..20: mol_type = other DNA
cacatgggacaaaaacatca

SEQ ID NO: 42145 - DNA, 20 bp, synthetic construct
  source 1..20: mol_type = other DNA
tcacatgggacaaaaacatc

SEQ ID NO: 42146 - DNA, 20 bp, synthetic construct
  source 1..20: mol_type = other DNA
atcacatgggacaaaaacat

SEQ ID NO: 42147 - DNA, 20 bp, synthetic construct
  source 1..20: mol_type = other DNA
aatcacatgggacaaaaaca

SEQ ID NO: 42148 - DNA, 20 bp, synthetic construct
  source 1..20: mol_type = other DNA
aaatcacatgggacaaaaac

SEQ ID NO: 42149 - DNA, 20 bp, synthetic construct
  source 1..20: mol_type = other DNA
taaatcacatgggacaaaaa

SEQ ID NO: 42150 - DNA, 20 bp, synthetic construct
  source 1..20: mol_type = other DNA
ataaatcacatgggacaaaa

SEQ ID NO: 42151 - DNA, 20 bp, synthetic construct
  source 1..20: mol_type = other DNA
aataaatcacatgggacaaa

SEQ ID NO: 42152 - DNA, 20 bp, synthetic construct
  source 1..20: mol_type = other DNA
aaataaatcacatgggacaa

SEQ ID NO: 42153 - DNA, 20 bp, synthetic construct
  source 1..20: mol_type = other DNA
caaataaatcacatgggaca

SEQ ID NO: 42154 - DNA, 20 bp, synthetic construct
  source 1..20: mol_type = other DNA
acaaataaatcacatgggac

SEQ ID NO: 42155 - DNA, 20 bp, synthetic construct
  source 1..20: mol_type = other DNA
aacaaataaatcacatggga

SEQ ID NO: 42156 - DNA, 20 bp, synthetic construct
  source 1..20: mol_type = other DNA
taacaaataaatcacatggg

SEQ ID NO: 42157 - DNA, 20 bp, synthetic construct
  source 1..20: mol_type = other DNA
ttaacaaataaatcacatgg

SEQ ID NO: 42158 - DNA, 20 bp, synthetic construct
  source 1..20: mol_type = other DNA
tttaacaaataaatcacatg

SEQ ID NO: 42159 - DNA, 20 bp, synthetic construct
  source 1..20: mol_type = other DNA
gtttaacaaataaatcacat

SEQ ID NO: 42160 - DNA, 20 bp, synthetic construct
  source 1..20: mol_type = other DNA
ggtttaacaaataaatcaca

SEQ ID NO: 42161 - DNA, 20 bp, synthetic construct
  source 1..20: mol_type = other DNA
cggtttaacaaataaatcac

SEQ ID NO: 42162 - DNA, 20 bp, synthetic construct
  source 1..20: mol_type = other DNA
acggtttaacaaataaatca

SEQ ID NO: 42163 - DNA, 20 bp, synthetic construct
  source 1..20: mol_type = other DNA
gacggtttaacaaataaatc

SEQ ID NO: 42164 - DNA, 20 bp, synthetic construct
  source 1..20: mol_type = other DNA
tgacggtttaacaaataaat

SEQ ID NO: 42165 - DNA, 20 bp, synthetic construct
  source 1..20: mol_type = other DNA
atgacggtttaacaaataaa

SEQ ID NO: 42166 - DNA, 20 bp, synthetic construct
  source 1..20: mol_type = other DNA
gatgacggtttaacaaataa

SEQ ID NO: 42167 - DNA, 20 bp, synthetic construct
  source 1..20: mol_type = other DNA
agatgacggtttaacaaata

SEQ ID NO: 42168 - DNA, 20 bp, synthetic construct
  source 1..20: mol_type = other DNA
aagatgacggtttaacaaat

SEQ ID NO: 42169 - DNA, 20 bp, synthetic construct
  source 1..20: mol_type = other DNA
aaagatgacggtttaacaaa

SEQ ID NO: 42170 - DNA, 20 bp, synthetic construct
  source 1..20: mol_type = other DNA
caaagatgacggtttaacaa

SEQ ID NO: 42171 - DNA, 20 bp, synthetic construct
  source 1..20: mol_type = other DNA
ccaaagatgacggtttaaca

SEQ ID NO: 42172 - DNA, 20 bp, synthetic construct
  source 1..20: mol_type = other DNA
gccaaagatgacggtttaac

SEQ ID NO: 42173 - DNA, 20 bp, synthetic construct
  source 1..20: mol_type = other DNA
ggccaaagatgacggtttaa

SEQ ID NO: 42174 - DNA, 20 bp, synthetic construct
  source 1..20: mol_type = other DNA
cggccaaagatgacggttta

SEQ ID NO: 42175 - DNA, 20 bp, synthetic construct
  source 1..20: mol_type = other DNA
ccggccaaagatgacggttt

SEQ ID NO: 42176 - DNA, 20 bp, synthetic construct
  source 1..20: mol_type = other DNA
cccggccaaagatgacggtt

SEQ ID NO: 42177 - DNA, 20 bp, synthetic construct
  source 1..20: mol_type = other DNA
gcccggccaaagatgacggt

SEQ ID NO: 42178 - DNA, 20 bp, synthetic construct
  source 1..20: mol_type = other DNA
cgcccggccaaagatgacgg

SEQ ID NO: 42179 - DNA, 20 bp, synthetic construct
  source 1..20: mol_type = other DNA
acgcccggccaaagatgacg

SEQ ID NO: 42180 - DNA, 20 bp, synthetic construct
  source 1..20: mol_type = other DNA
cacgcccggccaaagatgac

SEQ ID NO: 42181 - DNA, 20 bp, synthetic construct
  source 1..20: mol_type = other DNA
ccacgcccggccaaagatga

SEQ ID NO: 42182 - DNA, 20 bp, synthetic construct
  source 1..20: mol_type = other DNA
accacgcccggccaaagatg

SEQ ID NO: 42183 - DNA, 20 bp, synthetic construct
  source 1..20: mol_type = other DNA
taccacgcccggccaaagat

SEQ ID NO: 42184 - DNA, 20 bp, synthetic construct
  source 1..20: mol_type = other DNA
ctaccacgcccggccaaaga

SEQ ID NO: 42185 - DNA, 20 bp, synthetic construct
  source 1..20: mol_type = other DNA
gctaccacgcccggccaaag

SEQ ID NO: 42186 - DNA, 20 bp, synthetic construct
  source 1..20: mol_type = other DNA
agctaccacgcccggccaaa

SEQ ID NO: 42187 - DNA, 20 bp, synthetic construct
  source 1..20: mol_type = other DNA
gagctaccacgcccggccaa

SEQ ID NO: 42188 - DNA, 20 bp, synthetic construct
  source 1..20: mol_type = other DNA
tgagctaccacgcccggcca

SEQ ID NO: 42189 - DNA, 20 bp, synthetic construct
  source 1..20: mol_type = other DNA
gtgagctaccacgcccggcc

SEQ ID NO: 42190 - DNA, 20 bp, synthetic construct
  source 1..20: mol_type = other DNA
cgtgagctaccacgcccggc

SEQ ID NO: 42191 - DNA, 20 bp, synthetic construct
  source 1..20: mol_type = other DNA
gcgtgagctaccacgcccgg

SEQ ID NO: 42192 - DNA, 20 bp, synthetic construct
  source 1..20: mol_type = other DNA
ggcgtgagctaccacgcccg

SEQ ID NO: 42193 - DNA, 20 bp, synthetic construct
  source 1..20: mol_type = other DNA
aggcgtgagctaccacgccc

SEQ ID NO: 42194 - DNA, 20 bp, synthetic construct
  source 1..20: mol_type = other DNA
caggcgtgagctaccacgcc

SEQ ID NO: 42195 - DNA, 20 bp, synthetic construct
  source 1..20: mol_type = other DNA
acaggcgtgagctaccacgc

SEQ ID NO: 42196 - DNA, 20 bp, synthetic construct
  source 1..20: mol_type = other DNA
tacaggcgtgagctaccacg

SEQ ID NO: 42197 - DNA, 20 bp, synthetic construct
  source 1..20: mol_type = other DNA
ttacaggcgtgagctaccac

SEQ ID NO: 42198 - DNA, 20 bp, synthetic construct
  source 1..20: mol_type = other DNA
attacaggcgtgagctacca

SEQ ID NO: 42199 - DNA, 20 bp, synthetic construct
  source 1..20: mol_type = other DNA
gattacaggcgtgagctacc

SEQ ID NO: 42200 - DNA, 20 bp, synthetic construct
  source 1..20: mol_type = other DNA
ggattacaggcgtgagctac

SEQ ID NO: 42201 - DNA, 20 bp, synthetic construct
  source 1..20: mol_type = other DNA
gggattacaggcgtgagcta

SEQ ID NO: 42202 - DNA, 20 bp, synthetic construct
  source 1..20: mol_type = other DNA
tgggattacaggcgtgagct

SEQ ID NO: 42203 - DNA, 20 bp, synthetic construct
  source 1..20: mol_type = other DNA
ctgggattacaggcgtgagc

SEQ ID NO: 42204 - DNA, 20 bp, synthetic construct
  source 1..20: mol_type = other DNA
gctgggattacaggcgtgag

SEQ ID NO: 42205 - DNA, 20 bp, synthetic construct
  source 1..20: mol_type = other DNA
tgctgggattacaggcgtga

SEQ ID NO: 42206 - DNA, 20 bp, synthetic construct
  source 1..20: mol_type = other DNA
gtgctgggattacaggcgtg

SEQ ID NO: 42207 - DNA, 20 bp, synthetic construct
  source 1..20: mol_type = other DNA
agtgctgggattacaggcgt

SEQ ID NO: 42208 - DNA, 20 bp, synthetic construct
  source 1..20: mol_type = other DNA
aagtgctgggattacaggcg

SEQ ID NO: 42209 - DNA, 20 bp, synthetic construct
  source 1..20: mol_type = other DNA
aaagtgctgggattacaggc

SEQ ID NO: 42210 - DNA, 20 bp, synthetic construct
  source 1..20: mol_type = other DNA
caaagtgctgggattacagg

SEQ ID NO: 42211 - DNA, 20 bp, synthetic construct
  source 1..20: mol_type = other DNA
ccaaagtgctgggattacag

SEQ ID NO: 42212 - DNA, 20 bp, synthetic construct
  source 1..20: mol_type = other DNA
cccaaagtgctgggattaca

SEQ ID NO: 42213 - DNA, 20 bp, synthetic construct
  source 1..20: mol_type = other DNA
tcccaaagtgctgggattac

SEQ ID NO: 42214 - DNA, 20 bp, synthetic construct
  source 1..20: mol_type = other DNA
ctcccaaagtgctgggatta

SEQ ID NO: 42215 - DNA, 20 bp, synthetic construct
  source 1..20: mol_type = other DNA
cctcccaaagtgctgggatt

SEQ ID NO: 42216 - DNA, 20 bp, synthetic construct
  source 1..20: mol_type = other DNA
gcctcccaaagtgctgggat

SEQ ID NO: 42217 - DNA, 20 bp, synthetic construct
  source 1..20: mol_type = other DNA
agcctcccaaagtgctggga

SEQ ID NO: 42218 - DNA, 20 bp, synthetic construct
  source 1..20: mol_type = other DNA
cagcctcccaaagtgctggg

SEQ ID NO: 42219 - DNA, 20 bp, synthetic construct
  source 1..20: mol_type = other DNA
tcagcctcccaaagtgctgg

SEQ ID NO: 42220 - DNA, 20 bp, synthetic construct
  source 1..20: mol_type = other DNA
ctcagcctcccaaagtgctg

SEQ ID NO: 42221 - DNA, 20 bp, synthetic construct
  source 1..20: mol_type = other DNA
cctcagcctcccaaagtgct

SEQ ID NO: 42222 - DNA, 20 bp, synthetic construct
  source 1..20: mol_type = other DNA
acctcagcctcccaaagtgc

SEQ ID NO: 42223 - DNA, 20 bp, synthetic construct
  source 1..20: mol_type = other DNA
cacctcagcctcccaaagtg

SEQ ID NO: 42224 - DNA, 20 bp, synthetic construct
  source 1..20: mol_type = other DNA
ccacctcagcctcccaaagt

SEQ ID NO: 42225 - DNA, 20 bp, synthetic construct
  source 1..20: mol_type = other DNA
cccacctcagcctcccaaag

SEQ ID NO: 42226 - DNA, 20 bp, synthetic construct
  source 1..20: mol_type = other DNA
acccacctcagcctcccaaa

SEQ ID NO: 42227 - DNA, 20 bp, synthetic construct
  source 1..20: mol_type = other DNA
cacccacctcagcctcccaa

SEQ ID NO: 42228 - DNA, 20 bp, synthetic construct
  source 1..20: mol_type = other DNA
ccacccacctcagcctccca

SEQ ID NO: 42229 - DNA, 20 bp, synthetic construct
  source 1..20: mol_type = other DNA
tccacccacctcagcctccc

SEQ ID NO: 42230 - DNA, 20 bp, synthetic construct
  source 1..20: mol_type = other DNA
atccacccacctcagcctcc

SEQ ID NO: 42231 - DNA, 20 bp, synthetic construct
  source 1..20: mol_type = other DNA
gatccacccacctcagcctc

SEQ ID NO: 42232 - DNA, 20 bp, synthetic construct
  source 1..20: mol_type = other DNA
tgatccacccacctcagcct

SEQ ID NO: 42233 - DNA, 20 bp, synthetic construct
  source 1..20: mol_type = other DNA
gtgatccacccacctcagcc

SEQ ID NO: 42234 - DNA, 20 bp, synthetic construct
  source 1..20: mol_type = other DNA
tgtgatccacccacctcagc

SEQ ID NO: 42235 - DNA, 20 bp, synthetic construct
  source 1..20: mol_type = other DNA
ttgtgatccacccacctcag

SEQ ID NO: 42236 - DNA, 20 bp, synthetic construct
  source 1..20: mol_type = other DNA
cttgtgatccacccacctca

SEQ ID NO: 42237 - DNA, 20 bp, synthetic construct
  source 1..20: mol_type = other DNA
ccttgtgatccacccacctc

SEQ ID NO: 42238 - DNA, 20 bp, synthetic construct
  source 1..20: mol_type = other DNA
accttgtgatccacccacct

SEQ ID NO: 42239 - DNA, 20 bp, synthetic construct
  source 1..20: mol_type = other DNA
aaccttgtgatccacccacc

SEQ ID NO: 42240 - DNA, 20 bp, synthetic construct
  source 1..20: mol_type = other DNA
taaccttgtgatccacccac

SEQ ID NO: 42241 - DNA, 20 bp, synthetic construct
  source 1..20: mol_type = other DNA
ttaaccttgtgatccaccca

SEQ ID NO: 42242 - DNA, 20 bp, synthetic construct
  source 1..20: mol_type = other DNA
cttaaccttgtgatccaccc

SEQ ID NO: 42243 - DNA, 20 bp, synthetic construct
  source 1..20: mol_type = other DNA
tcttaaccttgtgatccacc

SEQ ID NO: 42244 - DNA, 20 bp, synthetic construct
  source 1..20: mol_type = other DNA
ctcttaaccttgtgatccac

SEQ ID NO: 42245 - DNA, 20 bp, synthetic construct
  source 1..20: mol_type = other DNA
tctcttaaccttgtgatcca

SEQ ID NO: 42246 - DNA, 20 bp, synthetic construct
  source 1..20: mol_type = other DNA
atctcttaaccttgtgatcc

SEQ ID NO: 42247 - DNA, 20 bp, synthetic construct
  source 1..20: mol_type = other DNA
gatctcttaaccttgtgatc

SEQ ID NO: 42248 - DNA, 20 bp, synthetic construct
  source 1..20: mol_type = other DNA
tgatctcttaaccttgtgat

SEQ ID NO: 42249 - DNA, 20 bp, synthetic construct
  source 1..20: mol_type = other DNA
ttgatctcttaaccttgtga

SEQ ID NO: 42250 - DNA, 20 bp, synthetic construct
  source 1..20: mol_type = other DNA
cttgatctcttaaccttgtg

SEQ ID NO: 42251 - DNA, 20 bp, synthetic construct
  source 1..20: mol_type = other DNA
tcttgatctcttaaccttgt

SEQ ID NO: 42252 - DNA, 20 bp, synthetic construct
  source 1..20: mol_type = other DNA
gtcttgatctcttaaccttg

SEQ ID NO: 42253 - DNA, 20 bp, synthetic construct
  source 1..20: mol_type = other DNA
ggtcttgatctcttaacctt

SEQ ID NO: 42254 - DNA, 20 bp, synthetic construct
  source 1..20: mol_type = other DNA
tggtcttgatctcttaacct

SEQ ID NO: 42255 - DNA, 20 bp, synthetic construct
  source 1..20: mol_type = other DNA
atggtcttgatctcttaacc

SEQ ID NO: 42256 - DNA, 20 bp, synthetic construct
  source 1..20: mol_type = other DNA
gatggtcttgatctcttaac

SEQ ID NO: 42257 - DNA, 20 bp, synthetic construct
  source 1..20: mol_type = other DNA
ggatggtcttgatctcttaa

SEQ ID NO: 42258 - DNA, 20 bp, synthetic construct
  source 1..20: mol_type = other DNA
aggatggtcttgatctctta

SEQ ID NO: 42259 - DNA, 20 bp, synthetic construct
  source 1..20: mol_type = other DNA
caggatggtcttgatctctt

SEQ ID NO: 42260 - DNA, 20 bp, synthetic construct
  source 1..20: mol_type = other DNA
ccaggatggtcttgatctct

SEQ ID NO: 42261 - DNA, 20 bp, synthetic construct
  source 1..20: mol_type = other DNA
gccaggatggtcttgatctc

SEQ ID NO: 42262 - DNA, 20 bp, synthetic construct
  source 1..20: mol_type = other DNA
ggccaggatggtcttgatct

SEQ ID NO: 42263 - DNA, 20 bp, synthetic construct
  source 1..20: mol_type = other DNA
tggccaggatggtcttgatc

SEQ ID NO: 42264 - DNA, 20 bp, synthetic construct
  source 1..20: mol_type = other DNA
ttggccaggatggtcttgat

SEQ ID NO: 42265 - DNA, 20 bp, synthetic construct
  source 1..20: mol_type = other DNA
gttggccaggatggtcttga

SEQ ID NO: 42266 - DNA, 20 bp, synthetic construct
  source 1..20: mol_type = other DNA
tgttggccaggatggtcttg

SEQ ID NO: 42267 - DNA, 20 bp, synthetic construct
  source 1..20: mol_type = other DNA
atgttggccaggatggtctt

SEQ ID NO: 42268 - DNA, 20 bp, synthetic construct
  source 1..20: mol_type = other DNA
catgttggccaggatggtct

SEQ ID NO: 42269 - DNA, 20 bp, synthetic construct
  source 1..20: mol_type = other DNA
ccatgttggccaggatggtc

SEQ ID NO: 42270 - DNA, 20 bp, synthetic construct
  source 1..20: mol_type = other DNA
accatgttggccaggatggt

SEQ ID NO: 42271 - DNA, 20 bp, synthetic construct
  source 1..20: mol_type = other DNA
caccatgttggccaggatgg

SEQ ID NO: 42272 - DNA, 20 bp, synthetic construct
  source 1..20: mol_type = other DNA
tcaccatgttggccaggatg

SEQ ID NO: 42273 - DNA, 20 bp, synthetic construct
  source 1..20: mol_type = other DNA
ttcaccatgttggccaggat

SEQ ID NO: 42274 - DNA, 20 bp, synthetic construct
  source 1..20: mol_type = other DNA
tttcaccatgttggccagga

SEQ ID NO: 42275 - DNA, 20 bp, synthetic construct
  source 1..20: mol_type = other DNA
gtttcaccatgttggccagg

SEQ ID NO: 42276 - DNA, 20 bp, synthetic construct
  source 1..20: mol_type = other DNA
ggtttcaccatgttggccag

SEQ ID NO: 42277 - DNA, 20 bp, synthetic construct
  source 1..20: mol_type = other DNA
gggtttcaccatgttggcca

SEQ ID NO: 42278 - DNA, 20 bp, synthetic construct
  source 1..20: mol_type = other DNA
ggggtttcaccatgttggcc

SEQ ID NO: 42279 - DNA, 20 bp, synthetic construct
  source 1..20: mol_type = other DNA
cggggtttcaccatgttggc

SEQ ID NO: 42280 - DNA, 20 bp, synthetic construct
  source 1..20: mol_type = other DNA
acggggtttcaccatgttgg

SEQ ID NO: 42281 - DNA, 20 bp, synthetic construct
  source 1..20: mol_type = other DNA
gacggggtttcaccatgttg

SEQ ID NO: 42282 - DNA, 20 bp, synthetic construct
  source 1..20: mol_type = other DNA
agacggggtttcaccatgtt

SEQ ID NO: 42283 - DNA, 20 bp, synthetic construct
  source 1..20: mol_type = other DNA
gagacggggtttcaccatgt

SEQ ID NO: 42284 - DNA, 20 bp, synthetic construct
  source 1..20: mol_type = other DNA
agagacggggtttcaccatg

SEQ ID NO: 42285 - DNA, 20 bp, synthetic construct
  source 1..20: mol_type = other DNA
tagagacggggtttcaccat

SEQ ID NO: 42286 - DNA, 20 bp, synthetic construct
  source 1..20: mol_type = other DNA
gtagagacggggtttcacca

SEQ ID NO: 42287 - DNA, 20 bp, synthetic construct
  source 1..20: mol_type = other DNA
agtagagacggggtttcacc

SEQ ID NO: 42288 - DNA, 20 bp, synthetic construct
  source 1..20: mol_type = other DNA
tagtagagacggggtttcac

SEQ ID NO: 42289 - DNA, 20 bp, synthetic construct
  source 1..20: mol_type = other DNA
ttagtagagacggggtttca

SEQ ID NO: 42290 - DNA, 20 bp, synthetic construct
  source 1..20: mol_type = other DNA
cttagtagagacggggtttc

SEQ ID NO: 42291 - DNA, 20 bp, synthetic construct
  source 1..20: mol_type = other DNA
tcttagtagagacggggttt

SEQ ID NO: 42292 - DNA, 20 bp, synthetic construct
  source 1..20: mol_type = other DNA
ttcttagtagagacggggtt

SEQ ID NO: 42293 - DNA, 20 bp, synthetic construct
  source 1..20: mol_type = other DNA
attcttagtagagacggggt

SEQ ID NO: 42294 - DNA, 20 bp, synthetic construct
  source 1..20: mol_type = other DNA
tattcttagtagagacgggg

SEQ ID NO: 42295 - DNA, 20 bp, synthetic construct
  source 1..20: mol_type = other DNA
gtattcttagtagagacggg

SEQ ID NO: 42296 - DNA, 20 bp, synthetic construct
  source 1..20: mol_type = other DNA
tgtattcttagtagagacgg

SEQ ID NO: 42297 - DNA, 20 bp, synthetic construct
  source 1..20: mol_type = other DNA
ttgtattcttagtagagacg

SEQ ID NO: 42298 - DNA, 20 bp, synthetic construct
  source 1..20: mol_type = other DNA
tttgtattcttagtagagac

SEQ ID NO: 42299 - DNA, 20 bp, synthetic construct
  source 1..20: mol_type = other DNA
ttttgtattcttagtagaga

SEQ ID NO: 42300 - DNA, 20 bp, synthetic construct
  source 1..20: mol_type = other DNA
tttttgtattcttagtagag

SEQ ID NO: 42301 - DNA, 20 bp, synthetic construct
  source 1..20: mol_type = other DNA
atttttgtattcttagtaga

SEQ ID NO: 42302 - DNA, 20 bp, synthetic construct
  source 1..20: mol_type = other DNA
aatttttgtattcttagtag

SEQ ID NO: 42303 - DNA, 20 bp, synthetic construct
  source 1..20: mol_type = other DNA
taatttttgtattcttagta

SEQ ID NO: 42304 - DNA, 20 bp, synthetic construct
  source 1..20: mol_type = other DNA
ataatttttgtattcttagt

SEQ ID NO: 42305 - DNA, 20 bp, synthetic construct
  source 1..20: mol_type = other DNA
gataatttttgtattcttag

SEQ ID NO: 42306 - DNA, 20 bp, synthetic construct
  source 1..20: mol_type = other DNA
agataatttttgtattctta

SEQ ID NO: 42307 - DNA, 20 bp, synthetic construct
  source 1..20: mol_type = other DNA
cagataatttttgtattctt

SEQ ID NO: 42308 - DNA, 20 bp, synthetic construct
  source 1..20: mol_type = other DNA
ccagataatttttgtattct

SEQ ID NO: 42309 - DNA, 20 bp, synthetic construct
  source 1..20: mol_type = other DNA
cccagataatttttgtattc

SEQ ID NO: 42310 - DNA, 20 bp, synthetic construct
  source 1..20: mol_type = other DNA
gcccagataatttttgtatt

SEQ ID NO: 42311 - DNA, 20 bp, synthetic construct
  source 1..20: mol_type = other DNA
tgcccagataatttttgtat

SEQ ID NO: 42312 - DNA, 20 bp, synthetic construct
  source 1..20: mol_type = other DNA
atgcccagataatttttgta

SEQ ID NO: 42313 - DNA, 20 bp, synthetic construct
  source 1..20: mol_type = other DNA
catgcccagataatttttgt

SEQ ID NO: 42314 - DNA, 20 bp, synthetic construct
  source 1..20: mol_type = other DNA
ccatgcccagataatttttg

SEQ ID NO: 42315 - DNA, 20 bp, synthetic construct
  source 1..20: mol_type = other DNA
accatgcccagataattttt

SEQ ID NO: 42316 - DNA, 20 bp, synthetic construct
  source 1..20: mol_type = other DNA
caccatgcccagataatttt

SEQ ID NO: 42317 - DNA, 20 bp, synthetic construct
  source 1..20: mol_type = other DNA
tcaccatgcccagataattt

SEQ ID NO: 42318 - DNA, 20 bp, synthetic construct
  source 1..20: mol_type = other DNA
gtcaccatgcccagataatt

SEQ ID NO: 42319 - DNA, 20 bp, synthetic construct
  source 1..20: mol_type = other DNA
cgtcaccatgcccagataat

SEQ ID NO: 42320 - DNA, 20 bp, synthetic construct
  source 1..20: mol_type = other DNA
gcgtcaccatgcccagataa

SEQ ID NO: 42321 - DNA, 20 bp, synthetic construct
  source 1..20: mol_type = other DNA
cgcgtcaccatgcccagata

SEQ ID NO: 42322 - DNA, 20 bp, synthetic construct
  source 1..20: mol_type = other DNA
acgcgtcaccatgcccagat

SEQ ID NO: 42323 - DNA, 20 bp, synthetic construct
  source 1..20: mol_type = other DNA
tacgcgtcaccatgcccaga

SEQ ID NO: 42324 - DNA, 20 bp, synthetic construct
  source 1..20: mol_type = other DNA
gtacgcgtcaccatgcccag

SEQ ID NO: 42325 - DNA, 20 bp, synthetic construct
  source 1..20: mol_type = other DNA
ggtacgcgtcaccatgccca

SEQ ID NO: 42326 - DNA, 20 bp, synthetic construct
  source 1..20: mol_type = other DNA
aggtacgcgtcaccatgccc

SEQ ID NO: 42327 - DNA, 20 bp, synthetic construct
  source 1..20: mol_type = other DNA
caggtacgcgtcaccatgcc

SEQ ID NO: 42328 - DNA, 20 bp, synthetic construct
  source 1..20: mol_type = other DNA
acaggtacgcgtcaccatgc

SEQ ID NO: 42329 - DNA, 20 bp, synthetic construct
  source 1..20: mol_type = other DNA
tacaggtacgcgtcaccatg

SEQ ID NO: 42330 - DNA, 20 bp, synthetic construct
  source 1..20: mol_type = other DNA
ctacaggtacgcgtcaccat

SEQ ID NO: 42331 - DNA, 20 bp, synthetic construct
  source 1..20: mol_type = other DNA
actacaggtacgcgtcacca

SEQ ID NO: 42332 - DNA, 20 bp, synthetic construct
  source 1..20: mol_type = other DNA
gactacaggtacgcgtcacc

SEQ ID NO: 42333 - DNA, 20 bp, synthetic construct
  source 1..20: mol_type = other DNA
ggactacaggtacgcgtcac

SEQ ID NO: 42334 - DNA, 20 bp, synthetic construct
  source 1..20: mol_type = other DNA
aggactacaggtacgcgtca

SEQ ID NO: 42335 - DNA, 20 bp, synthetic construct
  source 1..20: mol_type = other DNA
taggactacaggtacgcgtc

SEQ ID NO: 42336 - DNA, 20 bp, synthetic construct
  source 1..20: mol_type = other DNA
ctaggactacaggtacgcgt

SEQ ID NO: 42337 - DNA, 20 bp, synthetic construct
  source 1..20: mol_type = other DNA
gctaggactacaggtacgcg

SEQ ID NO: 42338 - DNA, 20 bp, synthetic construct
  source 1..20: mol_type = other DNA
agctaggactacaggtacgc

SEQ ID NO: 42339 - DNA, 20 bp, synthetic construct
  source 1..20: mol_type = other DNA
tagctaggactacaggtacg

SEQ ID NO: 42340 - DNA, 20 bp, synthetic construct
  source 1..20: mol_type = other DNA
gtagctaggactacaggtac

SEQ ID NO: 42341 - DNA, 20 bp, synthetic construct
  source 1..20: mol_type = other DNA
ggtagctaggactacaggta

SEQ ID NO: 42342 - DNA, 20 bp, synthetic construct
  source 1..20: mol_type = other DNA
aggtagctaggactacaggt

SEQ ID NO: 42343 - DNA, 20 bp, synthetic construct
  source 1..20: mol_type = other DNA
caggtagctaggactacagg

SEQ ID NO: 42344 - DNA, 20 bp, synthetic construct
  source 1..20: mol_type = other DNA
ccaggtagctaggactacag

SEQ ID NO: 42345 - DNA, 20 bp, synthetic construct
  source 1..20: mol_type = other DNA
cccaggtagctaggactaca

SEQ ID NO: 42346 - DNA, 20 bp, synthetic construct
  source 1..20: mol_type = other DNA
tcccaggtagctaggactac

SEQ ID NO: 42347 - DNA, 20 bp, synthetic construct
  source 1..20: mol_type = other DNA
ctcccaggtagctaggacta

SEQ ID NO: 42348 - DNA, 20 bp, synthetic construct
  source 1..20: mol_type = other DNA
cctcccaggtagctaggact

SEQ ID NO: 42349 - DNA, 20 bp, synthetic construct
  source 1..20: mol_type = other DNA
gcctcccaggtagctaggac

SEQ ID NO: 42350 - DNA, 20 bp, synthetic construct
  source 1..20: mol_type = other DNA
cgcctcccaggtagctagga

SEQ ID NO: 42351 - DNA, 20 bp, synthetic construct
  source 1..20: mol_type = other DNA
ccgcctcccaggtagctagg

SEQ ID NO: 42352 - DNA, 20 bp, synthetic construct
  source 1..20: mol_type = other DNA
tccgcctcccaggtagctag

SEQ ID NO: 42353 - DNA, 20 bp, synthetic construct
  source 1..20: mol_type = other DNA
ctccgcctcccaggtagcta

SEQ ID NO: 42354 - DNA, 20 bp, synthetic construct
  source 1..20: mol_type = other DNA
cctccgcctcccaggtagct

SEQ ID NO: 42355 - DNA, 20 bp, synthetic construct
  source 1..20: mol_type = other DNA
acctccgcctcccaggtagc

SEQ ID NO: 42356 - DNA, 20 bp, synthetic construct
  source 1..20: mol_type = other DNA
aacctccgcctcccaggtag

SEQ ID NO: 42357 - DNA, 20 bp, synthetic construct
  source 1..20: mol_type = other DNA
caacctccgcctcccaggta

SEQ ID NO: 42358 - DNA, 20 bp, synthetic construct
  source 1..20: mol_type = other DNA
gcaacctccgcctcccaggt

SEQ ID NO: 42359 - DNA, 20 bp, synthetic construct
  source 1..20: mol_type = other DNA
tgcaacctccgcctcccagg

SEQ ID NO: 42360 - DNA, 20 bp, synthetic construct
  source 1..20: mol_type = other DNA
ctgcaacctccgcctcccag

SEQ ID NO: 42361 - DNA, 20 bp, synthetic construct
  source 1..20: mol_type = other DNA
actgcaacctccgcctccca

SEQ ID NO: 42362 - DNA, 20 bp, synthetic construct
  source 1..20: mol_type = other DNA
cactgcaacctccgcctccc

SEQ ID NO: 42363 - DNA, 20 bp, synthetic construct
  source 1..20: mol_type = other DNA
tcactgcaacctccgcctcc

SEQ ID NO: 42364 - DNA, 20 bp, synthetic construct
  source 1..20: mol_type = other DNA
ctcactgcaacctccgcctc

SEQ ID NO: 42365 - DNA, 20 bp, synthetic construct
  source 1..20: mol_type = other DNA
gctcactgcaacctccgcct

SEQ ID NO: 42366 - DNA, 20 bp, synthetic construct
  source 1..20: mol_type = other DNA
ggctcactgcaacctccgcc

SEQ ID NO: 42367 - DNA, 20 bp, synthetic construct
  source 1..20: mol_type = other DNA
tggctcactgcaacctccgc

SEQ ID NO: 42368 - DNA, 20 bp, synthetic construct
  source 1..20: mol_type = other DNA
ttggctcactgcaacctccg

SEQ ID NO: 42369 - DNA, 20 bp, synthetic construct
  source 1..20: mol_type = other DNA
cttggctcactgcaacctcc

SEQ ID NO: 42370 - DNA, 20 bp, synthetic construct
  source 1..20: mol_type = other DNA
tcttggctcactgcaacctc

SEQ ID NO: 42371 - DNA, 20 bp, synthetic construct
  source 1..20: mol_type = other DNA
atcttggctcactgcaacct

SEQ ID NO: 42372 - DNA, 20 bp, synthetic construct
  source 1..20: mol_type = other DNA
gatcttggctcactgcaacc

SEQ ID NO: 42373 - DNA, 20 bp, synthetic construct
  source 1..20: mol_type = other DNA
cgatcttggctcactgcaac

SEQ ID NO: 42374 - DNA, 20 bp, synthetic construct
  source 1..20: mol_type = other DNA
acgatcttggctcactgcaa

SEQ ID NO: 42375 - DNA, 20 bp, synthetic construct
  source 1..20: mol_type = other DNA
cacgatcttggctcactgca

SEQ ID NO: 42376 - DNA, 20 bp, synthetic construct
  source 1..20: mol_type = other DNA
gcacgatcttggctcactgc

SEQ ID NO: 42377 - DNA, 20 bp, synthetic construct
  source 1..20: mol_type = other DNA
ggcacgatcttggctcactg

SEQ ID NO: 42378 - DNA, 20 bp, synthetic construct
  source 1..20: mol_type = other DNA
tggcacgatcttggctcact

SEQ ID NO: 42379 - DNA, 20 bp, synthetic construct
  source 1..20: mol_type = other DNA
gtggcacgatcttggctcac

SEQ ID NO: 42380 - DNA, 20 bp, synthetic construct
  source 1..20: mol_type = other DNA
agtggcacgatcttggctca

SEQ ID NO: 42381 - DNA, 20 bp, synthetic construct
  source 1..20: mol_type = other DNA
cagtggcacgatcttggctc

SEQ ID NO: 42382 - DNA, 20 bp, synthetic construct
  source 1..20: mol_type = other DNA
gcagtggcacgatcttggct

SEQ ID NO: 42383 - DNA, 20 bp, synthetic construct
  source 1..20: mol_type = other DNA
tgcagtggcacgatcttggc

SEQ ID NO: 42384 - DNA, 20 bp, synthetic construct
  source 1..20: mol_type = other DNA
gtgcagtggcacgatcttgg

SEQ ID NO: 42385 - DNA, 20 bp, synthetic construct
  source 1..20: mol_type = other DNA
agtgcagtggcacgatcttg

SEQ ID NO: 42386 - DNA, 20 bp, synthetic construct
  source 1..20: mol_type = other DNA
gagtgcagtggcacgatctt

SEQ ID NO: 42387 - DNA, 20 bp, synthetic construct
  source 1..20: mol_type = other DNA
ggagtgcagtggcacgatct

SEQ ID NO: 42388 - DNA, 20 bp, synthetic construct
  source 1..20: mol_type = other DNA
tggagtgcagtggcacgatc

SEQ ID NO: 42389 - DNA, 20 bp, synthetic construct
  source 1..20: mol_type = other DNA
ctggagtgcagtggcacgat

SEQ ID NO: 42390 - DNA, 20 bp, synthetic construct
  source 1..20: mol_type = other DNA
gctggagtgcagtggcacga

SEQ ID NO: 42391 - DNA, 20 bp, synthetic construct
  source 1..20: mol_type = other DNA
ggctggagtgcagtggcacg

SEQ ID NO: 42392 - DNA, 20 bp, synthetic construct
  source 1..20: mol_type = other DNA
aggctggagtgcagtggcac

SEQ ID NO: 42393 - DNA, 20 bp, synthetic construct
  source 1..20: mol_type = other DNA
caggctggagtgcagtggca

SEQ ID NO: 42394 - DNA, 20 bp, synthetic construct
  source 1..20: mol_type = other DNA
ccaggctggagtgcagtggc

SEQ ID NO: 42395 - DNA, 20 bp, synthetic construct
  source 1..20: mol_type = other DNA
gccaggctggagtgcagtgg

SEQ ID NO: 42396 - DNA, 20 bp, synthetic construct
  source 1..20: mol_type = other DNA
cgccaggctggagtgcagtg

SEQ ID NO: 42397 - DNA, 20 bp, synthetic construct
  source 1..20: mol_type = other DNA
tcgccaggctggagtgcagt

SEQ ID NO: 42398 - DNA, 20 bp, synthetic construct
  source 1..20: mol_type = other DNA
gtcgccaggctggagtgcag

SEQ ID NO: 42399 - DNA, 20 bp, synthetic construct
  source 1..20: mol_type = other DNA
tgtcgccaggctggagtgca

SEQ ID NO: 42400 - DNA, 20 bp, synthetic construct
  source 1..20: mol_type = other DNA
ctgtcgccaggctggagtgc

SEQ ID NO: 42401 - DNA, 20 bp, synthetic construct
  source 1..20: mol_type = other DNA
tctgtcgccaggctggagtg

SEQ ID NO: 42402 - DNA, 20 bp, synthetic construct
  source 1..20: mol_type = other DNA
ctctgtcgccaggctggagt

SEQ ID NO: 42403 - DNA, 20 bp, synthetic construct
  source 1..20: mol_type = other DNA
actctgtcgccaggctggag

SEQ ID NO: 42404 - DNA, 20 bp, synthetic construct
  source 1..20: mol_type = other DNA
cactctgtcgccaggctgga

SEQ ID NO: 42405 - DNA, 20 bp, synthetic construct
  source 1..20: mol_type = other DNA
tcactctgtcgccaggctgg

SEQ ID NO: 42406 - DNA, 20 bp, synthetic construct
  source 1..20: mol_type = other DNA
ctcactctgtcgccaggctg

SEQ ID NO: 42407 - DNA, 20 bp, synthetic construct
  source 1..20: mol_type = other DNA
tctcactctgtcgccaggct

SEQ ID NO: 42408 - DNA, 20 bp, synthetic construct
  source 1..20: mol_type = other DNA
gtctcactctgtcgccaggc

SEQ ID NO: 42409 - DNA, 20 bp, synthetic construct
  source 1..20: mol_type = other DNA
agtctcactctgtcgccagg

SEQ ID NO: 42410 - DNA, 20 bp, synthetic construct
  source 1..20: mol_type = other DNA
gagtctcactctgtcgccag

SEQ ID NO: 42411 - DNA, 20 bp, synthetic construct
  source 1..20: mol_type = other DNA
agagtctcactctgtcgcca

SEQ ID NO: 42412 - DNA, 20 bp, synthetic construct
  source 1..20: mol_type = other DNA
cagagtctcactctgtcgcc

SEQ ID NO: 42413 - DNA, 20 bp, synthetic construct
  source 1..20: mol_type = other DNA
acagagtctcactctgtcgc

SEQ ID NO: 42414 - DNA, 20 bp, synthetic construct
  source 1..20: mol_type = other DNA
gacagagtctcactctgtcg

SEQ ID NO: 42415 - DNA, 20 bp, synthetic construct
  source 1..20: mol_type = other DNA
agacagagtctcactctgtc

SEQ ID NO: 42416 - DNA, 20 bp, synthetic construct
  source 1..20: mol_type = other DNA
gagacagagtctcactctgt

SEQ ID NO: 42417 - DNA, 20 bp, synthetic construct
  source 1..20: mol_type = other DNA
tgagacagagtctcactctg

SEQ ID NO: 42418 - DNA, 20 bp, synthetic construct
  source 1..20: mol_type = other DNA
ctgagacagagtctcactct

SEQ ID NO: 42419 - DNA, 20 bp, synthetic construct
  source 1..20: mol_type = other DNA
tctgagacagagtctcactc

SEQ ID NO: 42420 - DNA, 20 bp, synthetic construct
  source 1..20: mol_type = other DNA
ttctgagacagagtctcact

SEQ ID NO: 42421 - DNA, 20 bp, synthetic construct
  source 1..20: mol_type = other DNA
tttctgagacagagtctcac

SEQ ID NO: 42422 - DNA, 20 bp, synthetic construct
  source 1..20: mol_type = other DNA
ttttctgagacagagtctca

SEQ ID NO: 42423 - DNA, 20 bp, synthetic construct
  source 1..20: mol_type = other DNA
tttttctgagacagagtctc

SEQ ID NO: 42424 - DNA, 20 bp, synthetic construct
  source 1..20: mol_type = other DNA
ttttttctgagacagagtct

SEQ ID NO: 42425 - DNA, 20 bp, synthetic construct
  source 1..20: mol_type = other DNA
tttttttctgagacagagtc

SEQ ID NO: 42426 - DNA, 20 bp, synthetic construct
  source 1..20: mol_type = other DNA
ttttttttctgagacagagt

SEQ ID NO: 42427 - DNA, 20 bp, synthetic construct
  source 1..20: mol_type = other DNA
tttttttttctgagacagag

SEQ ID NO: 42428 - DNA, 20 bp, synthetic construct
  source 1..20: mol_type = other DNA
ttttttttttctgagacaga

SEQ ID NO: 42429 - DNA, 20 bp, synthetic construct
  source 1..20: mol_type = other DNA
tttttttttttctgagacag

SEQ ID NO: 42430 - DNA, 20 bp, synthetic construct
  source 1..20: mol_type = other DNA
ttttttttttttctgagaca

SEQ ID NO: 42431 - DNA, 20 bp, synthetic construct
  source 1..20: mol_type = other DNA
tttttttttttttctgagac

SEQ ID NO: 42432 - DNA, 20 bp, synthetic construct
  source 1..20: mol_type = other DNA
gtttttttttttttctgaga

SEQ ID NO: 42433 - DNA, 20 bp, synthetic construct
  source 1..20: mol_type = other DNA
tgtttttttttttttctgag

SEQ ID NO: 42434 - DNA, 20 bp, synthetic construct
  source 1..20: mol_type = other DNA
ttgtttttttttttttctga

SEQ ID NO: 42435 - DNA, 20 bp, synthetic construct
  source 1..20: mol_type = other DNA
tttgtttttttttttttctg

SEQ ID NO: 42436 - DNA, 20 bp, synthetic construct
  source 1..20: mol_type = other DNA
ttttgtttttttttttttct

SEQ ID NO: 42437 - DNA, 20 bp, synthetic construct
  source 1..20: mol_type = other DNA
tttttgtttttttttttttc

SEQ ID NO: 42438 - DNA, 20 bp, synthetic construct
  source 1..20: mol_type = other DNA
ttttttgttttttttttttt

SEQ ID NO: 42439 - DNA, 20 bp, synthetic construct
  source 1..20: mol_type = other DNA
gttttttgtttttttttttt

SEQ ID NO: 42440 - DNA, 20 bp, synthetic construct
  source 1..20: mol_type = other DNA
agttttttgttttttttttt

SEQ ID NO: 42441 - DNA, 20 bp, synthetic construct
  source 1..20: mol_type = other DNA
cagttttttgtttttttttt

SEQ ID NO: 42442 - DNA, 20 bp, synthetic construct
  source 1..20: mol_type = other DNA
acagttttttgttttttttt

SEQ ID NO: 42443 - DNA, 20 bp, synthetic construct
  source 1..20: mol_type = other DNA
gacagttttttgtttttttt

SEQ ID NO: 42444 - DNA, 20 bp, synthetic construct
  source 1..20: mol_type = other DNA
tgacagttttttgttttttt

SEQ ID NO: 42445 - DNA, 20 bp, synthetic construct
  source 1..20: mol_type = other DNA
atgacagttttttgtttttt

SEQ ID NO: 42446 - DNA, 20 bp, synthetic construct
  source 1..20: mol_type = other DNA
aatgacagttttttgttttt

SEQ ID NO: 42447 - DNA, 20 bp, synthetic construct
  source 1..20: mol_type = other DNA
aaatgacagttttttgtttt

SEQ ID NO: 42448 - DNA, 20 bp, synthetic construct
  source 1..20: mol_type = other DNA
aaaatgacagttttttgttt

SEQ ID NO: 42449 - DNA, 20 bp, synthetic construct
  source 1..20: mol_type = other DNA
aaaaatgacagttttttgtt

SEQ ID NO: 42450 - DNA, 20 bp, synthetic construct
  source 1..20: mol_type = other DNA
aaaaaatgacagttttttgt

SEQ ID NO: 42451 - DNA, 20 bp, synthetic construct
  source 1..20: mol_type = other DNA
taaaaaatgacagttttttg

SEQ ID NO: 42452 - DNA, 20 bp, synthetic construct
  source 1..20: mol_type = other DNA
ataaaaaatgacagtttttt

SEQ ID NO: 42453 - DNA, 20 bp, synthetic construct
  source 1..20: mol_type = other DNA
cataaaaaatgacagttttt

SEQ ID NO: 42454 - DNA, 20 bp, synthetic construct
  source 1..20: mol_type = other DNA
acataaaaaatgacagtttt

SEQ ID NO: 42455 - DNA, 20 bp, synthetic construct
  source 1..20: mol_type = other DNA
aacataaaaaatgacagttt

SEQ ID NO: 42456 - DNA, 20 bp, synthetic construct
  source 1..20: mol_type = other DNA
caacataaaaaatgacagtt

SEQ ID NO: 42457 - DNA, 20 bp, synthetic construct
  source 1..20: mol_type = other DNA
gcaacataaaaaatgacagt

SEQ ID NO: 42458 - DNA, 20 bp, synthetic construct
  source 1..20: mol_type = other DNA
tgcaacataaaaaatgacag

SEQ ID NO: 42459 - DNA, 20 bp, synthetic construct
  source 1..20: mol_type = other DNA
atgcaacataaaaaatgaca

SEQ ID NO: 42460 - DNA, 20 bp, synthetic construct
  source 1..20: mol_type = other DNA
aatgcaacataaaaaatgac

SEQ ID NO: 42461 - DNA, 20 bp, synthetic construct
  source 1..20: mol_type = other DNA
aaatgcaacataaaaaatga

SEQ ID NO: 42462 - DNA, 20 bp, synthetic construct
  source 1..20: mol_type = other DNA
taaatgcaacataaaaaatg

SEQ ID NO: 42463 - DNA, 20 bp, synthetic construct
  source 1..20: mol_type = other DNA
gtaaatgcaacataaaaaat

SEQ ID NO: 42464 - DNA, 20 bp, synthetic construct
  source 1..20: mol_type = other DNA
agtaaatgcaacataaaaaa

SEQ ID NO: 42465 - DNA, 20 bp, synthetic construct
  source 1..20: mol_type = other DNA
cagtaaatgcaacataaaaa

SEQ ID NO: 42466 - DNA, 20 bp, synthetic construct
  source 1..20: mol_type = other DNA
gcagtaaatgcaacataaaa

SEQ ID NO: 42467 - DNA, 20 bp, synthetic construct
  source 1..20: mol_type = other DNA
tgcagtaaatgcaacataaa

SEQ ID NO: 42468 - DNA, 20 bp, synthetic construct
  source 1..20: mol_type = other DNA
atgcagtaaatgcaacataa

SEQ ID NO: 42469 - DNA, 20 bp, synthetic construct
  source 1..20: mol_type = other DNA
aatgcagtaaatgcaacata

SEQ ID NO: 42470 - DNA, 20 bp, synthetic construct
  source 1..20: mol_type = other DNA
gaatgcagtaaatgcaacat

SEQ ID NO: 42471 - DNA, 20 bp, synthetic construct
  source 1..20: mol_type = other DNA
agaatgcagtaaatgcaaca

SEQ ID NO: 42472 - DNA, 20 bp, synthetic construct
  source 1..20: mol_type = other DNA
cagaatgcagtaaatgcaac

SEQ ID NO: 42473 - DNA, 20 bp, synthetic construct
  source 1..20: mol_type = other DNA
ccagaatgcagtaaatgcaa

SEQ ID NO: 42474 - DNA, 20 bp, synthetic construct
  source 1..20: mol_type = other DNA
tccagaatgcagtaaatgca

SEQ ID NO: 42475 - DNA, 20 bp, synthetic construct
  source 1..20: mol_type = other DNA
atccagaatgcagtaaatgc

SEQ ID NO: 42476 - DNA, 20 bp, synthetic construct
  source 1..20: mol_type = other DNA
aatccagaatgcagtaaatg

SEQ ID NO: 42477 - DNA, 20 bp, synthetic construct
  source 1..20: mol_type = other DNA
aaatccagaatgcagtaaat

SEQ ID NO: 42478 - DNA, 20 bp, synthetic construct
  source 1..20: mol_type = other DNA
taaatccagaatgcagtaaa

SEQ ID NO: 42479 - DNA, 20 bp, synthetic construct
  source 1..20: mol_type = other DNA
ttaaatccagaatgcagtaa

SEQ ID NO: 42480 - DNA, 20 bp, synthetic construct
  source 1..20: mol_type = other DNA
tttaaatccagaatgcagta

SEQ ID NO: 42481 - DNA, 20 bp, synthetic construct
  source 1..20: mol_type = other DNA
gtttaaatccagaatgcagt

SEQ ID NO: 42482 - DNA, 20 bp, synthetic construct
  source 1..20: mol_type = other DNA
agtttaaatccagaatgcag

SEQ ID NO: 42483 - DNA, 20 bp, synthetic construct
  source 1..20: mol_type = other DNA
cagtttaaatccagaatgca

SEQ ID NO: 42484 - DNA, 20 bp, synthetic construct
  source 1..20: mol_type = other DNA
acagtttaaatccagaatgc

SEQ ID NO: 42485 - DNA, 20 bp, synthetic construct
  source 1..20: mol_type = other DNA
cacagtttaaatccagaatg

SEQ ID NO: 42486 - DNA, 20 bp, synthetic construct
  source 1..20: mol_type = other DNA
tcacagtttaaatccagaat

SEQ ID NO: 42487 - DNA, 20 bp, synthetic construct
  source 1..20: mol_type = other DNA
ctcacagtttaaatccagaa

SEQ ID NO: 42488 - DNA, 20 bp, synthetic construct
  source 1..20: mol_type = other DNA
cctcacagtttaaatccaga

SEQ ID NO: 42489 - DNA, 20 bp, synthetic construct
  source 1..20: mol_type = other DNA
tcctcacagtttaaatccag

SEQ ID NO: 42490 - DNA, 20 bp, synthetic construct
  source 1..20: mol_type = other DNA
ttcctcacagtttaaatcca

SEQ ID NO: 42491 - DNA, 20 bp, synthetic construct
  source 1..20: mol_type = other DNA
gttcctcacagtttaaatcc

SEQ ID NO: 42492 - DNA, 20 bp, synthetic construct
  source 1..20: mol_type = other DNA
ggttcctcacagtttaaatc

SEQ ID NO: 42493 - DNA, 20 bp, synthetic construct
  source 1..20: mol_type = other DNA
aggttcctcacagtttaaat

SEQ ID NO: 42494 - DNA, 20 bp, synthetic construct
  source 1..20: mol_type = other DNA
gaggttcctcacagtttaaa

SEQ ID NO: 42495 - DNA, 20 bp, synthetic construct
  source 1..20: mol_type = other DNA
tgaggttcctcacagtttaa

SEQ ID NO: 42496 - DNA, 20 bp, synthetic construct
  source 1..20: mol_type = other DNA
atgaggttcctcacagttta

SEQ ID NO: 42497 - DNA, 20 bp, synthetic construct
  source 1..20: mol_type = other DNA
catgaggttcctcacagttt

SEQ ID NO: 42498 - DNA, 20 bp, synthetic construct
  source 1..20: mol_type = other DNA
ccatgaggttcctcacagtt

SEQ ID NO: 42499 - DNA, 20 bp, synthetic construct
  source 1..20: mol_type = other DNA
accatgaggttcctcacagt

SEQ ID NO: 42500 - DNA, 20 bp, synthetic construct
  source 1..20: mol_type = other DNA
taccatgaggttcctcacag

SEQ ID NO: 42501 - DNA, 20 bp, synthetic construct
  source 1..20: mol_type = other DNA
ataccatgaggttcctcaca

SEQ ID NO: 42502 - DNA, 20 bp, synthetic construct
  source 1..20: mol_type = other DNA
gataccatgaggttcctcac

SEQ ID NO: 42503 - DNA, 20 bp, synthetic construct
  source 1..20: mol_type = other DNA
tgataccatgaggttcctca

SEQ ID NO: 42504 - DNA, 20 bp, synthetic construct
  source 1..20: mol_type = other DNA
ctgataccatgaggttcctc

SEQ ID NO: 42505 - DNA, 20 bp, synthetic construct
  source 1..20: mol_type = other DNA
actgataccatgaggttcct

SEQ ID NO: 42506 - DNA, 20 bp, synthetic construct
  source 1..20: mol_type = other DNA
aactgataccatgaggttcc

SEQ ID NO: 42507 - DNA, 20 bp, synthetic construct
  source 1..20: mol_type = other DNA
taactgataccatgaggttc

SEQ ID NO: 42508 - DNA, 20 bp, synthetic construct
  source 1..20: mol_type = other DNA
ttaactgataccatgaggtt

SEQ ID NO: 42509 - DNA, 20 bp, synthetic construct
  source 1..20: mol_type = other DNA
attaactgataccatgaggt

SEQ ID NO: 42510 - DNA, 20 bp, synthetic construct
  source 1..20: mol_type = other DNA
tattaactgataccatgagg

SEQ ID NO: 42511 - DNA, 20 bp, synthetic construct
  source 1..20: mol_type = other DNA
atattaactgataccatgag

SEQ ID NO: 42512 - DNA, 20 bp, synthetic construct
  source 1..20: mol_type = other DNA
tatattaactgataccatga

SEQ ID NO: 42513 - DNA, 20 bp, synthetic construct
  source 1..20: mol_type = other DNA
atatattaactgataccatg

SEQ ID NO: 42514 - DNA, 20 bp, synthetic construct
  source 1..20: mol_type = other DNA
aatatattaactgataccat

SEQ ID NO: 42515 - DNA, 20 bp, synthetic construct
  source 1..20: mol_type = other DNA
gaatatattaactgatacca

SEQ ID NO: 42516 - DNA, 20 bp, synthetic construct
  source 1..20: mol_type = other DNA
agaatatattaactgatacc

SEQ ID NO: 42517 - DNA, 20 bp, synthetic construct
  source 1..20: mol_type = other DNA
aagaatatattaactgatac

SEQ ID NO: 42518 - DNA, 20 bp, synthetic construct
  source 1..20: mol_type = other DNA
gaagaatatattaactgata

SEQ ID NO: 42519 - DNA, 20 bp, synthetic construct
  source 1..20: mol_type = other DNA
ggaagaatatattaactgat

SEQ ID NO: 42520 - DNA, 20 bp, synthetic construct
  source 1..20: mol_type = other DNA
tggaagaatatattaactga

SEQ ID NO: 42521 - DNA, 20 bp, synthetic construct
  source 1..20: mol_type = other DNA
atggaagaatatattaactg

SEQ ID NO: 42522 - DNA, 20 bp, synthetic construct
  source 1..20: mol_type = other DNA
gatggaagaatatattaact

SEQ ID NO: 42523 - DNA, 20 bp, synthetic construct
  source 1..20: mol_type = other DNA
agatggaagaatatattaac

SEQ ID NO: 42524 - DNA, 20 bp, synthetic construct
  source 1..20: mol_type = other DNA
aagatggaagaatatattaa

SEQ ID NO: 42525 - DNA, 20 bp, synthetic construct
  source 1..20: mol_type = other DNA
taagatggaagaatatatta

SEQ ID NO: 42526 - DNA, 20 bp, synthetic construct
  source 1..20: mol_type = other DNA
ttaagatggaagaatatatt

SEQ ID NO: 42527 - DNA, 20 bp, synthetic construct
  source 1..20: mol_type = other DNA
attaagatggaagaatatat

SEQ ID NO: 42528 - DNA, 20 bp, synthetic construct
  source 1..20: mol_type = other DNA
cattaagatggaagaatata

SEQ ID NO: 42529 - DNA, 20 bp, synthetic construct
  source 1..20: mol_type = other DNA
acattaagatggaagaatat

SEQ ID NO: 42530 - DNA, 20 bp, synthetic construct
  source 1..20: mol_type = other DNA
aacattaagatggaagaata

SEQ ID NO: 42531 - DNA, 20 bp, synthetic construct
  source 1..20: mol_type = other DNA
aaacattaagatggaagaat

SEQ ID NO: 42532 - DNA, 20 bp, synthetic construct
  source 1..20: mol_type = other DNA
gaaacattaagatggaagaa

SEQ ID NO: 42533 - DNA, 20 bp, synthetic construct
  source 1..20: mol_type = other DNA
agaaacattaagatggaaga

SEQ ID NO: 42534 - DNA, 20 bp, synthetic construct
  source 1..20: mol_type = other DNA
gagaaacattaagatggaag

SEQ ID NO: 42535 - DNA, 20 bp, synthetic construct
  source 1..20: mol_type = other DNA
cgagaaacattaagatggaa

SEQ ID NO: 42536 - DNA, 20 bp, synthetic construct
  source 1..20: mol_type = other DNA
acgagaaacattaagatgga

SEQ ID NO: 42537 - DNA, 20 bp, synthetic construct
  source 1..20: mol_type = other DNA
tacgagaaacattaagatgg

SEQ ID NO: 42538 - DNA, 20 bp, synthetic construct
  source 1..20: mol_type = other DNA
ttacgagaaacattaagatg

SEQ ID NO: 42539 - DNA, 20 bp, synthetic construct
  source 1..20: mol_type = other DNA
tttacgagaaacattaagat

SEQ ID NO: 42540 - DNA, 20 bp, synthetic construct
  source 1..20: mol_type = other DNA
gtttacgagaaacattaaga

SEQ ID NO: 42541 - DNA, 20 bp, synthetic construct
  source 1..20: mol_type = other DNA
agtttacgagaaacattaag

SEQ ID NO: 42542 - DNA, 20 bp, synthetic construct
  source 1..20: mol_type = other DNA
cagtttacgagaaacattaa

SEQ ID NO: 42543 - DNA, 20 bp, synthetic construct
  source 1..20: mol_type = other DNA
ccagtttacgagaaacatta

SEQ ID NO: 42544 - DNA, 20 bp, synthetic construct
  source 1..20: mol_type = other DNA
accagtttacgagaaacatt

SEQ ID NO: 42545 - DNA, 20 bp, synthetic construct
  source 1..20: mol_type = other DNA
taccagtttacgagaaacat

SEQ ID NO: 42546 - DNA, 20 bp, synthetic construct
  source 1..20: mol_type = other DNA
ctaccagtttacgagaaaca

SEQ ID NO: 42547 - DNA, 20 bp, synthetic construct
  source 1..20: mol_type = other DNA
tctaccagtttacgagaaac

SEQ ID NO: 42548 - DNA, 20 bp, synthetic construct
  source 1..20: mol_type = other DNA
atctaccagtttacgagaaa

SEQ ID NO: 42549 - DNA, 20 bp, synthetic construct
  source 1..20: mol_type = other DNA
gatctaccagtttacgagaa

SEQ ID NO: 42550 - DNA, 20 bp, synthetic construct
  source 1..20: mol_type = other DNA
agatctaccagtttacgaga

SEQ ID NO: 42551 - DNA, 20 bp, synthetic construct
  source 1..20: mol_type = other DNA
cagatctaccagtttacgag

SEQ ID NO: 42552 - DNA, 20 bp, synthetic construct
  source 1..20: mol_type = other DNA
acagatctaccagtttacga

SEQ ID NO: 42553 - DNA, 20 bp, synthetic construct
  source 1..20: mol_type = other DNA
tacagatctaccagtttacg

SEQ ID NO: 42554 - DNA, 20 bp, synthetic construct
  source 1..20: mol_type = other DNA
ttacagatctaccagtttac

SEQ ID NO: 42555 - DNA, 20 bp, synthetic construct
  source 1..20: mol_type = other DNA
tttacagatctaccagttta

SEQ ID NO: 42556 - DNA, 20 bp, synthetic construct
  source 1..20: mol_type = other DNA
gtttacagatctaccagttt

SEQ ID NO: 42557 - DNA, 20 bp, synthetic construct
  source 1..20: mol_type = other DNA
agtttacagatctaccagtt

SEQ ID NO: 42558 - DNA, 20 bp, synthetic construct
  source 1..20: mol_type = other DNA
aagtttacagatctaccagt

SEQ ID NO: 42559 - DNA, 20 bp, synthetic construct
  source 1..20: mol_type = other DNA
caagtttacagatctaccag

SEQ ID NO: 42560 - DNA, 20 bp, synthetic construct
  source 1..20: mol_type = other DNA
tcaagtttacagatctacca

SEQ ID NO: 42561 - DNA, 20 bp, synthetic construct
  source 1..20: mol_type = other DNA
atcaagtttacagatctacc

SEQ ID NO: 42562 - DNA, 20 bp, synthetic construct
  source 1..20: mol_type = other DNA
aatcaagtttacagatctac

SEQ ID NO: 42563 - DNA, 20 bp, synthetic construct
  source 1..20: mol_type = other DNA
taatcaagtttacagatcta

SEQ ID NO: 42564 - DNA, 20 bp, synthetic construct
  source 1..20: mol_type = other DNA
ctaatcaagtttacagatct

SEQ ID NO: 42565 - DNA, 20 bp, synthetic construct
  source 1..20: mol_type = other DNA
cctaatcaagtttacagatc

SEQ ID NO: 42566 - DNA, 20 bp, synthetic construct
  source 1..20: mol_type = other DNA
acctaatcaagtttacagat

SEQ ID NO: 42567 - DNA, 20 bp, synthetic construct
  source 1..20: mol_type = other DNA
gacctaatcaagtttacaga

SEQ ID NO: 42568 - DNA, 20 bp, synthetic construct
  source 1..20: mol_type = other DNA
agacctaatcaagtttacag

SEQ ID NO: 42569 - DNA, 20 bp, synthetic construct
  source 1..20: mol_type = other DNA
tagacctaatcaagtttaca

SEQ ID NO: 42570 - DNA, 20 bp, synthetic construct
  source 1..20: mol_type = other DNA
atagacctaatcaagtttac

SEQ ID NO: 42571 - DNA, 20 bp, synthetic construct
  source 1..20: mol_type = other DNA
gatagacctaatcaagttta

SEQ ID NO: 42572 - DNA, 20 bp, synthetic construct
  source 1..20: mol_type = other DNA
ggatagacctaatcaagttt

SEQ ID NO: 42573 - DNA, 20 bp, synthetic construct
  source 1..20: mol_type = other DNA
aggatagacctaatcaagtt

SEQ ID NO: 42574 - DNA, 20 bp, synthetic construct
  source 1..20: mol_type = other DNA
taggatagacctaatcaagt

SEQ ID NO: 42575 - DNA, 20 bp, synthetic construct
  source 1..20: mol_type = other DNA
ataggatagacctaatcaag

SEQ ID NO: 42576 - DNA, 20 bp, synthetic construct
  source 1..20: mol_type = other DNA
aataggatagacctaatcaa

SEQ ID NO: 42577 - DNA, 20 bp, synthetic construct
  source 1..20: mol_type = other DNA
caataggatagacctaatca

SEQ ID NO: 42578 - DNA, 20 bp, synthetic construct
  source 1..20: mol_type = other DNA
acaataggatagacctaatc

SEQ ID NO: 42579 - DNA, 20 bp, synthetic construct
  source 1..20: mol_type = other DNA
tacaataggatagacctaat

SEQ ID NO: 42580 - DNA, 20 bp, synthetic construct
  source 1..20: mol_type = other DNA
atacaataggatagacctaa

SEQ ID NO: 42581 - DNA, 20 bp, synthetic construct
  source 1..20: mol_type = other DNA
gatacaataggatagaccta

SEQ ID NO: 42582 - DNA, 20 bp, synthetic construct
  source 1..20: mol_type = other DNA
tgatacaataggatagacct

SEQ ID NO: 42583 - DNA, 20 bp, synthetic construct
  source 1..20: mol_type = other DNA
gtgatacaataggatagacc

SEQ ID NO: 42584 - DNA, 20 bp, synthetic construct
  source 1..20: mol_type = other DNA
tgtgatacaataggatagac

SEQ ID NO: 42585 - DNA, 20 bp, synthetic construct
  source 1..20: mol_type = other DNA
atgtgatacaataggataga

SEQ ID NO: 42586 - DNA, 20 bp, synthetic construct
  source 1..20: mol_type = other DNA
gatgtgatacaataggatag

SEQ ID NO: 42587 - DNA, 20 bp, synthetic construct
  source 1..20: mol_type = other DNA
tgatgtgatacaataggata

SEQ ID NO: 42588 - DNA, 20 bp, synthetic construct
  source 1..20: mol_type = other DNA
ctgatgtgatacaataggat

SEQ ID NO: 42589 - DNA, 20 bp, synthetic construct
  source 1..20: mol_type = other DNA
tctgatgtgatacaatagga

SEQ ID NO: 42590 - DNA, 20 bp, synthetic construct
  source 1..20: mol_type = other DNA
ttctgatgtgatacaatagg

SEQ ID NO: 42591 - DNA, 20 bp, synthetic construct
  source 1..20: mol_type = other DNA
cttctgatgtgatacaatag

SEQ ID NO: 42592 - DNA, 20 bp, synthetic construct
  source 1..20: mol_type = other DNA
gcttctgatgtgatacaata

SEQ ID NO: 42593 - DNA, 20 bp, synthetic construct
  source 1..20: mol_type = other DNA
tgcttctgatgtgatacaat

SEQ ID NO: 42594 - DNA, 20 bp, synthetic construct
  source 1..20: mol_type = other DNA
ctgcttctgatgtgatacaa

SEQ ID NO: 42595 - DNA, 20 bp, synthetic construct
  source 1..20: mol_type = other DNA
tctgcttctgatgtgataca

SEQ ID NO: 42596 - DNA, 20 bp, synthetic construct
  source 1..20: mol_type = other DNA
ttctgcttctgatgtgatac

SEQ ID NO: 42597 - DNA, 20 bp, synthetic construct
  source 1..20: mol_type = other DNA
cttctgcttctgatgtgata

SEQ ID NO: 42598 - DNA, 20 bp, synthetic construct
  source 1..20: mol_type = other DNA
ccttctgcttctgatgtgat

SEQ ID NO: 42599 - DNA, 20 bp, synthetic construct
  source 1..20: mol_type = other DNA
accttctgcttctgatgtga

SEQ ID NO: 42600 - DNA, 20 bp, synthetic construct
  source 1..20: mol_type = other DNA
caccttctgcttctgatgtg

SEQ ID NO: 42601 - DNA, 20 bp, synthetic construct
  source 1..20: mol_type = other DNA
gcaccttctgcttctgatgt

SEQ ID NO: 42602 - DNA, 20 bp, synthetic construct
  source 1..20: mol_type = other DNA
agcaccttctgcttctgatg

SEQ ID NO: 42603 - DNA, 20 bp, synthetic construct
  source 1..20: mol_type = other DNA
aagcaccttctgcttctgat

SEQ ID NO: 42604 - DNA, 20 bp, synthetic construct
  source 1..20: mol_type = other DNA
aaagcaccttctgcttctga

SEQ ID NO: 42605 - DNA, 20 bp, synthetic construct
  source 1..20: mol_type = other DNA
aaaagcaccttctgcttctg

SEQ ID NO: 42606 - DNA, 20 bp, synthetic construct
  source 1..20: mol_type = other DNA
aaaaagcaccttctgcttct

SEQ ID NO: 42607 - DNA, 20 bp, synthetic construct
  source 1..20: mol_type = other DNA
aaaaaagcaccttctgcttc

SEQ ID NO: 42608 - DNA, 20 bp, synthetic construct
  source 1..20: mol_type = other DNA
aaaaaaagcaccttctgctt

SEQ ID NO: 42609 - DNA, 20 bp, synthetic construct
  source 1..20: mol_type = other DNA
aaaaaaaagcaccttctgct

SEQ ID NO: 42610 - DNA, 20 bp, synthetic construct
  source 1..20: mol_type = other DNA
aaaaaaaaagcaccttctgc

SEQ ID NO: 42611 - DNA, 20 bp, synthetic construct
  source 1..20: mol_type = other DNA
aaaaaaaaaagcaccttctg

SEQ ID NO: 42612 - DNA, 20 bp, synthetic construct
  source 1..20: mol_type = other DNA
aaaaaaaaaaagcaccttct

SEQ ID NO: 42613 - DNA, 20 bp, synthetic construct
  source 1..20: mol_type = other DNA
aaaaaaaaaaaagcaccttc

SEQ ID NO: 42614 - DNA, 20 bp, synthetic construct
  source 1..20: mol_type = other DNA
aaaaaaaaaaaaagcacctt

SEQ ID NO: 42615 - DNA, 20 bp, synthetic construct
  source 1..20: mol_type = other DNA
aaaaaaaaaaaaaagcacct

SEQ ID NO: 42616 - DNA, 20 bp, synthetic construct
  source 1..20: mol_type = other DNA
taaaaaaaaaaaaaagcacc

SEQ ID NO: 42617 - DNA, 20 bp, synthetic construct
  source 1..20: mol_type = other DNA
ttaaaaaaaaaaaaaagcac

SEQ ID NO: 42618 - DNA, 20 bp, synthetic construct
  source 1..20: mol_type = other DNA
cttaaaaaaaaaaaaaagca

SEQ ID NO: 42619 - DNA, 20 bp, synthetic construct
  source 1..20: mol_type = other DNA
ccttaaaaaaaaaaaaaagc

SEQ ID NO: 42620 - DNA, 20 bp, synthetic construct
  source 1..20: mol_type = other DNA
cccttaaaaaaaaaaaaaag

SEQ ID NO: 42621 - DNA, 20 bp, synthetic construct
  source 1..20: mol_type = other DNA
tcccttaaaaaaaaaaaaaa

SEQ ID NO: 42622 - DNA, 20 bp, synthetic construct
  source 1..20: mol_type = other DNA
ttcccttaaaaaaaaaaaaa

SEQ ID NO: 42623 - DNA, 20 bp, synthetic construct
  source 1..20: mol_type = other DNA
tttcccttaaaaaaaaaaaa

SEQ ID NO: 42624 - DNA, 20 bp, synthetic construct
  source 1..20: mol_type = other DNA
atttcccttaaaaaaaaaaa

SEQ ID NO: 42625 - DNA, 20 bp, synthetic construct
  source 1..20: mol_type = other DNA
aatttcccttaaaaaaaaaa

SEQ ID NO: 42626 - DNA, 20 bp, synthetic construct
  source 1..20: mol_type = other DNA
caatttcccttaaaaaaaaa

SEQ ID NO: 42627 - DNA, 20 bp, synthetic construct
  source 1..20: mol_type = other DNA
acaatttcccttaaaaaaaa

SEQ ID NO: 42628 - DNA, 20 bp, synthetic construct
  source 1..20: mol_type = other DNA
cacaatttcccttaaaaaaa

SEQ ID NO: 42629 - DNA, 20 bp, synthetic construct
  source 1..20: mol_type = other DNA
acacaatttcccttaaaaaa

SEQ ID NO: 42630 - DNA, 20 bp, synthetic construct
  source 1..20: mol_type = other DNA
cacacaatttcccttaaaaa

SEQ ID NO: 42631 - DNA, 20 bp, synthetic construct
  source 1..20: mol_type = other DNA
tcacacaatttcccttaaaa

SEQ ID NO: 42632 - DNA, 20 bp, synthetic construct
  source 1..20: mol_type = other DNA
ttcacacaatttcccttaaa

SEQ ID NO: 42633 - DNA, 20 bp, synthetic construct
  source 1..20: mol_type = other DNA
tttcacacaatttcccttaa

SEQ ID NO: 42634 - DNA, 20 bp, synthetic construct
  source 1..20: mol_type = other DNA
ctttcacacaatttccctta

SEQ ID NO: 42635 - DNA, 20 bp, synthetic construct
  source 1..20: mol_type = other DNA
actttcacacaatttccctt

SEQ ID NO: 42636 - DNA, 20 bp, synthetic construct
  source 1..20: mol_type = other DNA
tactttcacacaatttccct

SEQ ID NO: 42637 - DNA, 20 bp, synthetic construct
  source 1..20: mol_type = other DNA
ctactttcacacaatttccc

SEQ ID NO: 42638 - DNA, 20 bp, synthetic construct
  source 1..20: mol_type = other DNA
tctactttcacacaatttcc

SEQ ID NO: 42639 - DNA, 20 bp, synthetic construct
  source 1..20: mol_type = other DNA
gtctactttcacacaatttc

SEQ ID NO: 42640 - DNA, 20 bp, synthetic construct
  source 1..20: mol_type = other DNA
tgtctactttcacacaattt

SEQ ID NO: 42641 - DNA, 20 bp, synthetic construct
  source 1..20: mol_type = other DNA
ctgtctactttcacacaatt

SEQ ID NO: 42642 - DNA, 20 bp, synthetic construct
  source 1..20: mol_type = other DNA
tctgtctactttcacacaat

SEQ ID NO: 42643 - DNA, 20 bp, synthetic construct
  source 1..20: mol_type = other DNA
ttctgtctactttcacacaa

SEQ ID NO: 42644 - DNA, 20 bp, synthetic construct
  source 1..20: mol_type = other DNA
attctgtctactttcacaca

SEQ ID NO: 42645 - DNA, 20 bp, synthetic construct
  source 1..20: mol_type = other DNA
cattctgtctactttcacac

SEQ ID NO: 42646 - DNA, 20 bp, synthetic construct
  source 1..20: mol_type = other DNA
ccattctgtctactttcaca

SEQ ID NO: 42647 - DNA, 20 bp, synthetic construct
  source 1..20: mol_type = other DNA
accattctgtctactttcac

SEQ ID NO: 42648 - DNA, 20 bp, synthetic construct
  source 1..20: mol_type = other DNA
taccattctgtctactttca

SEQ ID NO: 42649 - DNA, 20 bp, synthetic construct
  source 1..20: mol_type = other DNA
ttaccattctgtctactttc

SEQ ID NO: 42650 - DNA, 20 bp, synthetic construct
  source 1..20: mol_type = other DNA
tttaccattctgtctacttt

SEQ ID NO: 42651 - DNA, 20 bp, synthetic construct
  source 1..20: mol_type = other DNA
ctttaccattctgtctactt

SEQ ID NO: 42652 - DNA, 20 bp, synthetic construct
  source 1..20: mol_type = other DNA
actttaccattctgtctact

SEQ ID NO: 42653 - DNA, 20 bp, synthetic construct
  source 1..20: mol_type = other DNA
cactttaccattctgtctac

SEQ ID NO: 42654 - DNA, 20 bp, synthetic construct
  source 1..20: mol_type = other DNA
tcactttaccattctgtcta

SEQ ID NO: 42655 - DNA, 20 bp, synthetic construct
  source 1..20: mol_type = other DNA
ttcactttaccattctgtct

SEQ ID NO: 42656 - DNA, 20 bp, synthetic construct
  source 1..20: mol_type = other DNA
gttcactttaccattctgtc

SEQ ID NO: 42657 - DNA, 20 bp, synthetic construct
  source 1..20: mol_type = other DNA
ggttcactttaccattctgt

SEQ ID NO: 42658 - DNA, 20 bp, synthetic construct
  source 1..20: mol_type = other DNA
gggttcactttaccattctg

SEQ ID NO: 42659 - DNA, 20 bp, synthetic construct
  source 1..20: mol_type = other DNA
ggggttcactttaccattct

SEQ ID NO: 42660 - DNA, 20 bp, synthetic construct
  source 1..20: mol_type = other DNA
aggggttcactttaccattc

SEQ ID NO: 42661 - DNA, 20 bp, synthetic construct
  source 1..20: mol_type = other DNA
caggggttcactttaccatt

SEQ ID NO: 42662 - DNA, 20 bp, synthetic construct
  source 1..20: mol_type = other DNA
gcaggggttcactttaccat

SEQ ID NO: 42663 - DNA, 20 bp, synthetic construct
  source 1..20: mol_type = other DNA
tgcaggggttcactttacca

SEQ ID NO: 42664 - DNA, 20 bp, synthetic construct
  source 1..20: mol_type = other DNA
gtgcaggggttcactttacc

SEQ ID NO: 42665 - DNA, 20 bp, synthetic construct
  source 1..20: mol_type = other DNA
tgtgcaggggttcactttac

SEQ ID NO: 42666 - DNA, 20 bp, synthetic construct
  source 1..20: mol_type = other DNA
gtgtgcaggggttcacttta

SEQ ID NO: 42667 - DNA, 20 bp, synthetic construct
  source 1..20: mol_type = other DNA
ggtgtgcaggggttcacttt

SEQ ID NO: 42668 - DNA, 20 bp, synthetic construct
  source 1..20: mol_type = other DNA
aggtgtgcaggggttcactt

SEQ ID NO: 42669 - DNA, 20 bp, synthetic construct
  source 1..20: mol_type = other DNA
taggtgtgcaggggttcact

SEQ ID NO: 42670 - DNA, 20 bp, synthetic construct
  source 1..20: mol_type = other DNA
ataggtgtgcaggggttcac

SEQ ID NO: 42671 - DNA, 20 bp, synthetic construct
  source 1..20: mol_type = other DNA
gataggtgtgcaggggttca

SEQ ID NO: 42672 - DNA, 20 bp, synthetic construct
  source 1..20: mol_type = other DNA
tgataggtgtgcaggggttc

SEQ ID NO: 42673 - DNA, 20 bp, synthetic construct
  source 1..20: mol_type = other DNA
gtgataggtgtgcaggggtt

SEQ ID NO: 42674 - DNA, 20 bp, synthetic construct
  source 1..20: mol_type = other DNA
ggtgataggtgtgcaggggt

SEQ ID NO: 42675 - DNA, 20 bp, synthetic construct
  source 1..20: mol_type = other DNA
gggtgataggtgtgcagggg

SEQ ID NO: 42676 - DNA, 20 bp, synthetic construct
  source 1..20: mol_type = other DNA
tgggtgataggtgtgcaggg

SEQ ID NO: 42677 - DNA, 20 bp, synthetic construct
  source 1..20: mol_type = other DNA
ctgggtgataggtgtgcagg

SEQ ID NO: 42678 - DNA, 20 bp, synthetic construct
  source 1..20: mol_type = other DNA
gctgggtgataggtgtgcag

SEQ ID NO: 42679 - DNA, 20 bp, synthetic construct
  source 1..20: mol_type = other DNA
agctgggtgataggtgtgca

SEQ ID NO: 42680 - DNA, 20 bp, synthetic construct
  source 1..20: mol_type = other DNA
aagctgggtgataggtgtgc

SEQ ID NO: 42681 - DNA, 20 bp, synthetic construct
  source 1..20: mol_type = other DNA
aaagctgggtgataggtgtg

SEQ ID NO: 42682 - DNA, 20 bp, synthetic construct
  source 1..20: mol_type = other DNA
taaagctgggtgataggtgt

SEQ ID NO: 42683 - DNA, 20 bp, synthetic construct
  source 1..20: mol_type = other DNA
ttaaagctgggtgataggtg

SEQ ID NO: 42684 - DNA, 20 bp, synthetic construct
  source 1..20: mol_type = other DNA
attaaagctgggtgataggt

SEQ ID NO: 42685 - DNA, 20 bp, synthetic construct
  source 1..20: mol_type = other DNA
tattaaagctgggtgatagg

SEQ ID NO: 42686 - DNA, 20 bp, synthetic construct
  source 1..20: mol_type = other DNA
ctattaaagctgggtgatag

SEQ ID NO: 42687 - DNA, 20 bp, synthetic construct
  source 1..20: mol_type = other DNA
actattaaagctgggtgata

SEQ ID NO: 42688 - DNA, 20 bp, synthetic construct
  source 1..20: mol_type = other DNA
aactattaaagctgggtgat

SEQ ID NO: 42689 - DNA, 20 bp, synthetic construct
  source 1..20: mol_type = other DNA
taactattaaagctgggtga

SEQ ID NO: 42690 - DNA, 20 bp, synthetic construct
  source 1..20: mol_type = other DNA
ataactattaaagctgggtg

SEQ ID NO: 42691 - DNA, 20 bp, synthetic construct
  source 1..20: mol_type = other DNA
gataactattaaagctgggt

SEQ ID NO: 42692 - DNA, 20 bp, synthetic construct
  source 1..20: mol_type = other DNA
tgataactattaaagctggg

SEQ ID NO: 42693 - DNA, 20 bp, synthetic construct
  source 1..20: mol_type = other DNA
ctgataactattaaagctgg

SEQ ID NO: 42694 - DNA, 20 bp, synthetic construct
  source 1..20: mol_type = other DNA
gctgataactattaaagctg

SEQ ID NO: 42695 - DNA, 20 bp, synthetic construct
  source 1..20: mol_type = other DNA
agctgataactattaaagct

SEQ ID NO: 42696 - DNA, 20 bp, synthetic construct
  source 1..20: mol_type = other DNA
gagctgataactattaaagc

SEQ ID NO: 42697 - DNA, 20 bp, synthetic construct
  source 1..20: mol_type = other DNA
tgagctgataactattaaag

SEQ ID NO: 42698 - DNA, 20 bp, synthetic construct
  source 1..20: mol_type = other DNA
atgagctgataactattaaa

SEQ ID NO: 42699 - DNA, 20 bp, synthetic construct
  source 1..20: mol_type = other DNA
tatgagctgataactattaa

SEQ ID NO: 42700 - DNA, 20 bp, synthetic construct
  source 1..20: mol_type = other DNA
gtatgagctgataactatta

SEQ ID NO: 42701 - DNA, 20 bp, synthetic construct
  source 1..20: mol_type = other DNA
ggtatgagctgataactatt

SEQ ID NO: 42702 - DNA, 20 bp, synthetic construct
  source 1..20: mol_type = other DNA
tggtatgagctgataactat

SEQ ID NO: 42703 - DNA, 20 bp, synthetic construct
  source 1..20: mol_type = other DNA
atggtatgagctgataacta

SEQ ID NO: 42704 - DNA, 20 bp, synthetic construct
  source 1..20: mol_type = other DNA
aatggtatgagctgataact

SEQ ID NO: 42705 - DNA, 20 bp, synthetic construct
  source 1..20: mol_type = other DNA
gaatggtatgagctgataac

SEQ ID NO: 42706 - DNA, 20 bp, synthetic construct
  source 1..20: mol_type = other DNA
agaatggtatgagctgataa

SEQ ID NO: 42707 - DNA, 20 bp, synthetic construct
  source 1..20: mol_type = other DNA
aagaatggtatgagctgata

SEQ ID NO: 42708 - DNA, 20 bp, synthetic construct
  source 1..20: mol_type = other DNA
caagaatggtatgagctgat

SEQ ID NO: 42709 - DNA, 20 bp, synthetic construct
  source 1..20: mol_type = other DNA
acaagaatggtatgagctga

SEQ ID NO: 42710 - DNA, 20 bp, synthetic construct
  source 1..20: mol_type = other DNA
aacaagaatggtatgagctg

SEQ ID NO: 42711 - DNA, 20 bp, synthetic construct
  source 1..20: mol_type = other DNA
aaacaagaatggtatgagct

SEQ ID NO: 42712 - DNA, 20 bp, synthetic construct
  source 1..20: mol_type = other DNA
caaacaagaatggtatgagc

SEQ ID NO: 42713 - DNA, 20 bp, synthetic construct
  source 1..20: mol_type = other DNA
tcaaacaagaatggtatgag

SEQ ID NO: 42714 - DNA, 20 bp, synthetic construct
  source 1..20: mol_type = other DNA
atcaaacaagaatggtatga

SEQ ID NO: 42715 - DNA, 20 bp, synthetic construct
  source 1..20: mol_type = other DNA
aatcaaacaagaatggtatg

SEQ ID NO: 42716 - DNA, 20 bp, synthetic construct
  source 1..20: mol_type = other DNA
aaatcaaacaagaatggtat

SEQ ID NO: 42717 - DNA, 20 bp, synthetic construct
  source 1..20: mol_type = other DNA
taaatcaaacaagaatggta

SEQ ID NO: 42718 - DNA, 20 bp, synthetic construct
  source 1..20: mol_type = other DNA
gtaaatcaaacaagaatggt

SEQ ID NO: 42719 - DNA, 20 bp, synthetic construct
  source 1..20: mol_type = other DNA
tgtaaatcaaacaagaatgg

SEQ ID NO: 42720 - DNA, 20 bp, synthetic construct
  source 1..20: mol_type = other DNA
ttgtaaatcaaacaagaatg

SEQ ID NO: 42721 - DNA, 20 bp, synthetic construct
  source 1..20: mol_type = other DNA
gttgtaaatcaaacaagaat

SEQ ID NO: 42722 - DNA, 20 bp, synthetic construct
  source 1..20: mol_type = other DNA
ggttgtaaatcaaacaagaa

SEQ ID NO: 42723 - DNA, 20 bp, synthetic construct
  source 1..20: mol_type = other DNA
gggttgtaaatcaaacaaga

SEQ ID NO: 42724 - DNA, 20 bp, synthetic construct
  source 1..20: mol_type = other DNA
ggggttgtaaatcaaacaag

SEQ ID NO: 42725 - DNA, 20 bp, synthetic construct
  source 1..20: mol_type = other DNA
tggggttgtaaatcaaacaa

SEQ ID NO: 42726 - DNA, 20 bp, synthetic construct
  source 1..20: mol_type = other DNA
atggggttgtaaatcaaaca

SEQ ID NO: 42727 - DNA, 20 bp, synthetic construct
  source 1..20: mol_type = other DNA
aatggggttgtaaatcaaac

SEQ ID NO: 42728 - DNA, 20 bp, synthetic construct
  source 1..20: mol_type = other DNA
gaatggggttgtaaatcaaa

SEQ ID NO: 42729 - DNA, 20 bp, synthetic construct
  source 1..20: mol_type = other DNA
tgaatggggttgtaaatcaa

SEQ ID NO: 42730 - DNA, 20 bp, synthetic construct
  source 1..20: mol_type = other DNA
atgaatggggttgtaaatca

SEQ ID NO: 42731 - DNA, 20 bp, synthetic construct
  source 1..20: mol_type = other DNA
aatgaatggggttgtaaatc

SEQ ID NO: 42732 - DNA, 20 bp, synthetic construct
  source 1..20: mol_type = other DNA
aaatgaatggggttgtaaat

SEQ ID NO: 42733 - DNA, 20 bp, synthetic construct
  source 1..20: mol_type = other DNA
gaaatgaatggggttgtaaa

SEQ ID NO: 42734 - DNA, 20 bp, synthetic construct
  source 1..20: mol_type = other DNA
agaaatgaatggggttgtaa

SEQ ID NO: 42735 - DNA, 20 bp, synthetic construct
  source 1..20: mol_type = other DNA
gagaaatgaatggggttgta

SEQ ID NO: 42736 - DNA, 20 bp, synthetic construct
  source 1..20: mol_type = other DNA
ggagaaatgaatggggttgt

SEQ ID NO: 42737 - DNA, 20 bp, synthetic construct
  source 1..20: mol_type = other DNA
gggagaaatgaatggggttg

SEQ ID NO: 42738 - DNA, 20 bp, synthetic construct
  source 1..20: mol_type = other DNA
agggagaaatgaatggggtt

SEQ ID NO: 42739 - DNA, 20 bp, synthetic construct
  source 1..20: mol_type = other DNA
aagggagaaatgaatggggt

SEQ ID NO: 42740 - DNA, 20 bp, synthetic construct
  source 1..20: mol_type = other DNA
gaagggagaaatgaatgggg

SEQ ID NO: 42741 - DNA, 20 bp, synthetic construct
  source 1..20: mol_type = other DNA
agaagggagaaatgaatggg

SEQ ID NO: 42742 - DNA, 20 bp, synthetic construct
  source 1..20: mol_type = other DNA
cagaagggagaaatgaatgg

SEQ ID NO: 42743 - DNA, 20 bp, synthetic construct
  source 1..20: mol_type = other DNA
acagaagggagaaatgaatg

SEQ ID NO: 42744 - DNA, 20 bp, synthetic construct
  source 1..20: mol_type = other DNA
tacagaagggagaaatgaat

SEQ ID NO: 42745 - DNA, 20 bp, synthetic construct
  source 1..20: mol_type = other DNA
atacagaagggagaaatgaa

SEQ ID NO: 42746 - DNA, 20 bp, synthetic construct
  source 1..20: mol_type = other DNA
aatacagaagggagaaatga

SEQ ID NO: 42747 - DNA, 20 bp, synthetic construct
  source 1..20: mol_type = other DNA
taatacagaagggagaaatg

SEQ ID NO: 42748 - DNA, 20 bp, synthetic construct
  source 1..20: mol_type = other DNA
ataatacagaagggagaaat

SEQ ID NO: 42749 - DNA, 20 bp, synthetic construct
  source 1..20: mol_type = other DNA
aataatacagaagggagaaa

SEQ ID NO: 42750 - DNA, 20 bp, synthetic construct
  source 1..20: mol_type = other DNA
taataatacagaagggagaa

SEQ ID NO: 42751 - DNA, 20 bp, synthetic construct
  source 1..20: mol_type = other DNA
ataataatacagaagggaga

SEQ ID NO: 42752 - DNA, 20 bp, synthetic construct
  source 1..20: mol_type = other DNA
aataataatacagaagggag

SEQ ID NO: 42753 - DNA, 20 bp, synthetic construct
  source 1..20: mol_type = other DNA
taataataatacagaaggga

SEQ ID NO: 42754 - DNA, 20 bp, synthetic construct
  source 1..20: mol_type = other DNA
ataataataatacagaaggg

SEQ ID NO: 42755 - DNA, 20 bp, synthetic construct
  source 1..20: mol_type = other DNA
aataataataatacagaagg

SEQ ID NO: 42756 - DNA, 20 bp, synthetic construct
  source 1..20: mol_type = other DNA
aaataataataatacagaag

SEQ ID NO: 42757 - DNA, 20 bp, synthetic construct
  source 1..20: mol_type = other DNA
taaataataataatacagaa

SEQ ID NO: 42758 - DNA, 20 bp, synthetic construct
  source 1..20: mol_type = other DNA
ctaaataataataatacaga

SEQ ID NO: 42759 - DNA, 20 bp, synthetic construct
  source 1..20: mol_type = other DNA
actaaataataataatacag

SEQ ID NO: 42760 - DNA, 20 bp, synthetic construct
  source 1..20: mol_type = other DNA
aactaaataataataataca

SEQ ID NO: 42761 - DNA, 20 bp, synthetic construct
  source 1..20: mol_type = other DNA
taactaaataataataatac

SEQ ID NO: 42762 - DNA, 20 bp, synthetic construct
  source 1..20: mol_type = other DNA
ttaactaaataataataata

SEQ ID NO: 42763 - DNA, 20 bp, synthetic construct
  source 1..20: mol_type = other DNA
attaactaaataataataat

SEQ ID NO: 42764 - DNA, 20 bp, synthetic construct
  source 1..20: mol_type = other DNA
aattaactaaataataataa

SEQ ID NO: 42765 - DNA, 20 bp, synthetic construct
  source 1..20: mol_type = other DNA
taattaactaaataataata

SEQ ID NO: 42766 - DNA, 20 bp, synthetic construct
  source 1..20: mol_type = other DNA
ataattaactaaataataat

SEQ ID NO: 42767 - DNA, 20 bp, synthetic construct
  source 1..20: mol_type = other DNA
aataattaactaaataataa

SEQ ID NO: 42768 - DNA, 20 bp, synthetic construct
  source 1..20: mol_type = other DNA
aaataattaactaaataata

SEQ ID NO: 42769 - DNA, 20 bp, synthetic construct
  source 1..20: mol_type = other DNA
aaaataattaactaaataat

SEQ ID NO: 42770 - DNA, 20 bp, synthetic construct
  source 1..20: mol_type = other DNA
aaaaataattaactaaataa

SEQ ID NO: 42771 - DNA, 20 bp, synthetic construct
  source 1..20: mol_type = other DNA
aaaaaataattaactaaata

SEQ ID NO: 42772 - DNA, 20 bp, synthetic construct
  source 1..20: mol_type = other DNA
caaaaaataattaactaaat

SEQ ID NO: 42773 - DNA, 20 bp, synthetic construct
  source 1..20: mol_type = other DNA
tcaaaaaataattaactaaa

SEQ ID NO: 42774 - DNA, 20 bp, synthetic construct
  source 1..20: mol_type = other DNA
ctcaaaaaataattaactaa

SEQ ID NO: 42775 - DNA, 20 bp, synthetic construct
  source 1..20: mol_type = other DNA
tctcaaaaaataattaacta

SEQ ID NO: 42776 - DNA, 20 bp, synthetic construct
  source 1..20: mol_type = other DNA
gtctcaaaaaataattaact

SEQ ID NO: 42777 - DNA, 20 bp, synthetic construct
  source 1..20: mol_type = other DNA
tgtctcaaaaaataattaac

SEQ ID NO: 42778 - DNA, 20 bp, synthetic construct
  source 1..20: mol_type = other DNA
ctgtctcaaaaaataattaa

SEQ ID NO: 42779 - DNA, 20 bp, synthetic construct
  source 1..20: mol_type = other DNA
cctgtctcaaaaaataatta

SEQ ID NO: 42780 - DNA, 20 bp, synthetic construct
  source 1..20: mol_type = other DNA
ccctgtctcaaaaaataatt

SEQ ID NO: 42781 - DNA, 20 bp, synthetic construct
  source 1..20: mol_type = other DNA
accctgtctcaaaaaataat

SEQ ID NO: 42782 - DNA, 20 bp, synthetic construct
  source 1..20: mol_type = other DNA
aaccctgtctcaaaaaataa

SEQ ID NO: 42783 - DNA, 20 bp, synthetic construct
  source 1..20: mol_type = other DNA
aaaccctgtctcaaaaaata

SEQ ID NO: 42784 - DNA, 20 bp, synthetic construct
  source 1..20: mol_type = other DNA
aaaaccctgtctcaaaaaat

SEQ ID NO: 42785 - DNA, 20 bp, synthetic construct
  source 1..20: mol_type = other DNA
caaaaccctgtctcaaaaaa

SEQ ID NO: 42786 - DNA, 20 bp, synthetic construct
  source 1..20: mol_type = other DNA
gcaaaaccctgtctcaaaaa

SEQ ID NO: 42787 - DNA, 20 bp, synthetic construct
  source 1..20: mol_type = other DNA
agcaaaaccctgtctcaaaa

SEQ ID NO: 42788 - DNA, 20 bp, synthetic construct
  source 1..20: mol_type = other DNA
gagcaaaaccctgtctcaaa

SEQ ID NO: 42789 - DNA, 20 bp, synthetic construct
  source 1..20: mol_type = other DNA
agagcaaaaccctgtctcaa

SEQ ID NO: 42790 - DNA, 20 bp, synthetic construct
  source 1..20: mol_type = other DNA
cagagcaaaaccctgtctca

SEQ ID NO: 42791 - DNA, 20 bp, synthetic construct
  source 1..20: mol_type = other DNA
acagagcaaaaccctgtctc

SEQ ID NO: 42792 - DNA, 20 bp, synthetic construct
  source 1..20: mol_type = other DNA
gacagagcaaaaccctgtct

SEQ ID NO: 42793 - DNA, 20 bp, synthetic construct
  source 1..20: mol_type = other DNA
tgacagagcaaaaccctgtc

SEQ ID NO: 42794 - DNA, 20 bp, synthetic construct
  source 1..20: mol_type = other DNA
gtgacagagcaaaaccctgt

SEQ ID NO: 42795 - DNA, 20 bp, synthetic construct
  source 1..20: mol_type = other DNA
ggtgacagagcaaaaccctg

SEQ ID NO: 42796 - DNA, 20 bp, synthetic construct
  source 1..20: mol_type = other DNA
tggtgacagagcaaaaccct

SEQ ID NO: 42797 - DNA, 20 bp, synthetic construct
  source 1..20: mol_type = other DNA
ttggtgacagagcaaaaccc

SEQ ID NO: 42798 - DNA, 20 bp, synthetic construct
  source 1..20: mol_type = other DNA
attggtgacagagcaaaacc

SEQ ID NO: 42799 - DNA, 20 bp, synthetic construct
  source 1..20: mol_type = other DNA
cattggtgacagagcaaaac

SEQ ID NO: 42800 - DNA, 20 bp, synthetic construct
  source 1..20: mol_type = other DNA
gcattggtgacagagcaaaa

SEQ ID NO: 42801 - DNA, 20 bp, synthetic construct
  source 1..20: mol_type = other DNA
agcattggtgacagagcaaa

SEQ ID NO: 42802 - DNA, 20 bp, synthetic construct
  source 1..20: mol_type = other DNA
cagcattggtgacagagcaa

SEQ ID NO: 42803 - DNA, 20 bp, synthetic construct
  source 1..20: mol_type = other DNA
ccagcattggtgacagagca

SEQ ID NO: 42804 - DNA, 20 bp, synthetic construct
  source 1..20: mol_type = other DNA
tccagcattggtgacagagc

SEQ ID NO: 42805 - DNA, 20 bp, synthetic construct
  source 1..20: mol_type = other DNA
ctccagcattggtgacagag

SEQ ID NO: 42806 - DNA, 20 bp, synthetic construct
  source 1..20: mol_type = other DNA
actccagcattggtgacaga

SEQ ID NO: 42807 - DNA, 20 bp, synthetic construct
  source 1..20: mol_type = other DNA
cactccagcattggtgacag

SEQ ID NO: 42808 - DNA, 20 bp, synthetic construct
  source 1..20: mol_type = other DNA
gcactccagcattggtgaca

SEQ ID NO: 42809 - DNA, 20 bp, synthetic construct
  source 1..20: mol_type = other DNA
tgcactccagcattggtgac

SEQ ID NO: 42810 - DNA, 20 bp, synthetic construct
  source 1..20: mol_type = other DNA
ctgcactccagcattggtga

SEQ ID NO: 42811 - DNA, 20 bp, synthetic construct
  source 1..20: mol_type = other DNA
actgcactccagcattggtg

SEQ ID NO: 42812 - DNA, 20 bp, synthetic construct
  source 1..20: mol_type = other DNA
cactgcactccagcattggt

SEQ ID NO: 42813 - DNA, 20 bp, synthetic construct
  source 1..20: mol_type = other DNA
ccactgcactccagcattgg

SEQ ID NO: 42814 - DNA, 20 bp, synthetic construct
  source 1..20: mol_type = other DNA
gccactgcactccagcattg

SEQ ID NO: 42815 - DNA, 20 bp, synthetic construct
  source 1..20: mol_type = other DNA
tgccactgcactccagcatt

SEQ ID NO: 42816 - DNA, 20 bp, synthetic construct
  source 1..20: mol_type = other DNA
atgccactgcactccagcat

SEQ ID NO: 42817 - DNA, 20 bp, synthetic construct
  source 1..20: mol_type = other DNA
tatgccactgcactccagca

SEQ ID NO: 42818 - DNA, 20 bp, synthetic construct
  source 1..20: mol_type = other DNA
ttatgccactgcactccagc

SEQ ID NO: 42819 - DNA, 20 bp, synthetic construct
  source 1..20: mol_type = other DNA
attatgccactgcactccag

SEQ ID NO: 42820 - DNA, 20 bp, synthetic construct
  source 1..20: mol_type = other DNA
gattatgccactgcactcca

SEQ ID NO: 42821 - DNA, 20 bp, synthetic construct
  source 1..20: mol_type = other DNA
tgattatgccactgcactcc

SEQ ID NO: 42822 - DNA, 20 bp, synthetic construct
  source 1..20: mol_type = other DNA
gtgattatgccactgcactc

SEQ ID NO: 42823 - DNA, 20 bp, synthetic construct
  source 1..20: mol_type = other DNA
tgtgattatgccactgcact

SEQ ID NO: 42824 - DNA, 20 bp, synthetic construct
  source 1..20: mol_type = other DNA
ctgtgattatgccactgcac

SEQ ID NO: 42825 - DNA, 20 bp, synthetic construct
  source 1..20: mol_type = other DNA
gctgtgattatgccactgca

SEQ ID NO: 42826 - DNA, 20 bp, synthetic construct
  source 1..20: mol_type = other DNA
agctgtgattatgccactgc

SEQ ID NO: 42827 - DNA, 20 bp, synthetic construct
  source 1..20: mol_type = other DNA
gagctgtgattatgccactg

SEQ ID NO: 42828 - DNA, 20 bp, synthetic construct
  source 1..20: mol_type = other DNA
tgagctgtgattatgccact

SEQ ID NO: 42829 - DNA, 20 bp, synthetic construct
  source 1..20: mol_type = other DNA
gtgagctgtgattatgccac

SEQ ID NO: 42830 - DNA, 20 bp, synthetic construct
  source 1..20: mol_type = other DNA
agtgagctgtgattatgcca

SEQ ID NO: 42831 - DNA, 20 bp, synthetic construct
  source 1..20: mol_type = other DNA
cagtgagctgtgattatgcc

SEQ ID NO: 42832 - DNA, 20 bp, synthetic construct
  source 1..20: mol_type = other DNA
gcagtgagctgtgattatgc

SEQ ID NO: 42833 - DNA, 20 bp, synthetic construct
  source 1..20: mol_type = other DNA
agcagtgagctgtgattatg

SEQ ID NO: 42834 - DNA, 20 bp, synthetic construct
  source 1..20: mol_type = other DNA
cagcagtgagctgtgattat

SEQ ID NO: 42835 - DNA, 20 bp, synthetic construct
  source 1..20: mol_type = other DNA
acagcagtgagctgtgatta

SEQ ID NO: 42836 - DNA, 20 bp, synthetic construct
  source 1..20: mol_type = other DNA
gacagcagtgagctgtgatt

SEQ ID NO: 42837 - DNA, 20 bp, synthetic construct
  source 1..20: mol_type = other DNA
agacagcagtgagctgtgat

SEQ ID NO: 42838 - DNA, 20 bp, synthetic construct
  source 1..20: mol_type = other DNA
aagacagcagtgagctgtga

SEQ ID NO: 42839 - DNA, 20 bp, synthetic construct
  source 1..20: mol_type = other DNA
caagacagcagtgagctgtg

SEQ ID NO: 42840 - DNA, 20 bp, synthetic construct
  source 1..20: mol_type = other DNA
tcaagacagcagtgagctgt

SEQ ID NO: 42841 - DNA, 20 bp, synthetic construct
  source 1..20: mol_type = other DNA
gtcaagacagcagtgagctg

SEQ ID NO: 42842 - DNA, 20 bp, synthetic construct
  source 1..20: mol_type = other DNA
ggtcaagacagcagtgagct

SEQ ID NO: 42843 - DNA, 20 bp, synthetic construct
  source 1..20: mol_type = other DNA
aggtcaagacagcagtgagc

SEQ ID NO: 42844 - DNA, 20 bp, synthetic construct
  source 1..20: mol_type = other DNA
gaggtcaagacagcagtgag

SEQ ID NO: 42845 - DNA, 20 bp, synthetic construct
  source 1..20: mol_type = other DNA
ggaggtcaagacagcagtga

SEQ ID NO: 42846 - DNA, 20 bp, synthetic construct
  source 1..20: mol_type = other DNA
aggaggtcaagacagcagtg

SEQ ID NO: 42847 - DNA, 20 bp, synthetic construct
  source 1..20: mol_type = other DNA
caggaggtcaagacagcagt

SEQ ID NO: 42848 - DNA, 20 bp, synthetic construct
  source 1..20: mol_type = other DNA
ccaggaggtcaagacagcag

SEQ ID NO: 42849 - DNA, 20 bp, synthetic construct
  source 1..20: mol_type = other DNA
cccaggaggtcaagacagca

SEQ ID NO: 42850 - DNA, 20 bp, synthetic construct
  source 1..20: mol_type = other DNA
gcccaggaggtcaagacagc

SEQ ID NO: 42851 - DNA, 20 bp, synthetic construct
  source 1..20: mol_type = other DNA
agcccaggaggtcaagacag

SEQ ID NO: 42852 - DNA, 20 bp, synthetic construct
  source 1..20: mol_type = other DNA
gagcccaggaggtcaagaca

SEQ ID NO: 42853 - DNA, 20 bp, synthetic construct
  source 1..20: mol_type = other DNA
tgagcccaggaggtcaagac

SEQ ID NO: 42854 - DNA, 20 bp, synthetic construct
  source 1..20: mol_type = other DNA
ttgagcccaggaggtcaaga

SEQ ID NO: 42855 - DNA, 20 bp, synthetic construct
  source 1..20: mol_type = other DNA
cttgagcccaggaggtcaag

SEQ ID NO: 42856 - DNA, 20 bp, synthetic construct
  source 1..20: mol_type = other DNA
acttgagcccaggaggtcaa

SEQ ID NO: 42857 - DNA, 20 bp, synthetic construct
  source 1..20: mol_type = other DNA
cacttgagcccaggaggtca

SEQ ID NO: 42858 - DNA, 20 bp, synthetic construct
  source 1..20: mol_type = other DNA
tcacttgagcccaggaggtc

SEQ ID NO: 42859 - DNA, 20 bp, synthetic construct
  source 1..20: mol_type = other DNA
atcacttgagcccaggaggt

SEQ ID NO: 42860 - DNA, 20 bp, synthetic construct
  source 1..20: mol_type = other DNA
gatcacttgagcccaggagg

SEQ ID NO: 42861 - DNA, 20 bp, synthetic construct
  source 1..20: mol_type = other DNA
ggatcacttgagcccaggag

SEQ ID NO: 42862 - DNA, 20 bp, synthetic construct
  source 1..20: mol_type = other DNA
aggatcacttgagcccagga

SEQ ID NO: 42863 - DNA, 20 bp, synthetic construct
  source 1..20: mol_type = other DNA
gaggatcacttgagcccagg

SEQ ID NO: 42864 - DNA, 20 bp, synthetic construct
  source 1..20: mol_type = other DNA
ggaggatcacttgagcccag

SEQ ID NO: 42865 - DNA, 20 bp, synthetic construct
  source 1..20: mol_type = other DNA
gggaggatcacttgagccca

SEQ ID NO: 42866 - DNA, 20 bp, synthetic construct
  source 1..20: mol_type = other DNA
tgggaggatcacttgagccc

SEQ ID NO: 42867 - DNA, 20 bp, synthetic construct
  source 1..20: mol_type = other DNA
gtgggaggatcacttgagcc

SEQ ID NO: 42868 - DNA, 20 bp, synthetic construct
  source 1..20: mol_type = other DNA
ggtgggaggatcacttgagc

SEQ ID NO: 42869 - DNA, 20 bp, synthetic construct
  source 1..20: mol_type = other DNA
aggtgggaggatcacttgag

SEQ ID NO: 42870 - DNA, 20 bp, synthetic construct
  source 1..20: mol_type = other DNA
gaggtgggaggatcacttga

SEQ ID NO: 42871 - DNA, 20 bp, synthetic construct
  source 1..20: mol_type = other DNA
tgaggtgggaggatcacttg

SEQ ID NO: 42872 - DNA, 20 bp, synthetic construct
  source 1..20: mol_type = other DNA
gtgaggtgggaggatcactt

SEQ ID NO: 42873 - DNA, 20 bp, synthetic construct
  source 1..20: mol_type = other DNA
ggtgaggtgggaggatcact

SEQ ID NO: 42874 - DNA, 20 bp, synthetic construct
  source 1..20: mol_type = other DNA
gggtgaggtgggaggatcac

SEQ ID NO: 42875 - DNA, 20 bp, synthetic construct
  source 1..20: mol_type = other DNA
agggtgaggtgggaggatca

SEQ ID NO: 42876 - DNA, 20 bp, synthetic construct
  source 1..20: mol_type = other DNA
tagggtgaggtgggaggatc

SEQ ID NO: 42877 - DNA, 20 bp, synthetic construct
  source 1..20: mol_type = other DNA
gtagggtgaggtgggaggat

SEQ ID NO: 42878 - DNA, 20 bp, synthetic construct
  source 1..20: mol_type = other DNA
ggtagggtgaggtgggagga

SEQ ID NO: 42879 - DNA, 20 bp, synthetic construct
  source 1..20: mol_type = other DNA
tggtagggtgaggtgggagg

SEQ ID NO: 42880 - DNA, 20 bp, synthetic construct
  source 1..20: mol_type = other DNA
ttggtagggtgaggtgggag

SEQ ID NO: 42881 - DNA, 20 bp, synthetic construct
  source 1..20: mol_type = other DNA
cttggtagggtgaggtggga

SEQ ID NO: 42882 - DNA, 20 bp, synthetic construct
  source 1..20: mol_type = other DNA
acttggtagggtgaggtggg

SEQ ID NO: 42883 - DNA, 20 bp, synthetic construct
  source 1..20: mol_type = other DNA
tacttggtagggtgaggtgg

SEQ ID NO: 42884 - DNA, 20 bp, synthetic construct
  source 1..20: mol_type = other DNA
ctacttggtagggtgaggtg

SEQ ID NO: 42885 - DNA, 20 bp, synthetic construct
  source 1..20: mol_type = other DNA
gctacttggtagggtgaggt

SEQ ID NO: 42886 - DNA, 20 bp, synthetic construct
  source 1..20: mol_type = other DNA
cgctacttggtagggtgagg

SEQ ID NO: 42887 - DNA, 20 bp, synthetic construct
  source 1..20: mol_type = other DNA
ccgctacttggtagggtgag

SEQ ID NO: 42888 - DNA, 20 bp, synthetic construct
  source 1..20: mol_type = other DNA
cccgctacttggtagggtga

SEQ ID NO: 42889 - DNA, 20 bp, synthetic construct
  source 1..20: mol_type = other DNA
ccccgctacttggtagggtg

SEQ ID NO: 42890 - DNA, 20 bp, synthetic construct
  source 1..20: mol_type = other DNA
tccccgctacttggtagggt

SEQ ID NO: 42891 - DNA, 20 bp, synthetic construct
  source 1..20: mol_type = other DNA
gtccccgctacttggtaggg

SEQ ID NO: 42892 - DNA, 20 bp, synthetic construct
  source 1..20: mol_type = other DNA
ggtccccgctacttggtagg

SEQ ID NO: 42893 - DNA, 20 bp, synthetic construct
  source 1..20: mol_type = other DNA
tggtccccgctacttggtag

SEQ ID NO: 42894 - DNA, 20 bp, synthetic construct
  source 1..20: mol_type = other DNA
gtggtccccgctacttggta

SEQ ID NO: 42895 - DNA, 20 bp, synthetic construct
  source 1..20: mol_type = other DNA
tgtggtccccgctacttggt

SEQ ID NO: 42896 - DNA, 20 bp, synthetic construct
  source 1..20: mol_type = other DNA
ctgtggtccccgctacttgg

SEQ ID NO: 42897 - DNA, 20 bp, synthetic construct
  source 1..20: mol_type = other DNA
cctgtggtccccgctacttg

SEQ ID NO: 42898 - DNA, 20 bp, synthetic construct
  source 1..20: mol_type = other DNA
gcctgtggtccccgctactt

SEQ ID NO: 42899 - DNA, 20 bp, synthetic construct
  source 1..20: mol_type = other DNA
cgcctgtggtccccgctact

SEQ ID NO: 42900 - DNA, 20 bp, synthetic construct
  source 1..20: mol_type = other DNA
acgcctgtggtccccgctac

SEQ ID NO: 42901 - DNA, 20 bp, synthetic construct
  source 1..20: mol_type = other DNA
cacgcctgtggtccccgcta

SEQ ID NO: 42902 - DNA, 20 bp, synthetic construct
  source 1..20: mol_type = other DNA
acacgcctgtggtccccgct

SEQ ID NO: 42903 - DNA, 20 bp, synthetic construct
  source 1..20: mol_type = other DNA
cacacgcctgtggtccccgc

SEQ ID NO: 42904 - DNA, 20 bp, synthetic construct
  source 1..20: mol_type = other DNA
gcacacgcctgtggtccccg

SEQ ID NO: 42905 - DNA, 20 bp, synthetic construct
  source 1..20: mol_type = other DNA
ggcacacgcctgtggtcccc

SEQ ID NO: 42906 - DNA, 20 bp, synthetic construct
  source 1..20: mol_type = other DNA
tggcacacgcctgtggtccc

SEQ ID NO: 42907 - DNA, 20 bp, synthetic construct
  source 1..20: mol_type = other DNA
gtggcacacgcctgtggtcc

SEQ ID NO: 42908 - DNA, 20 bp, synthetic construct
  source 1..20: mol_type = other DNA
ggtggcacacgcctgtggtc

SEQ ID NO: 42909 - DNA, 20 bp, synthetic construct
  source 1..20: mol_type = other DNA
tggtggcacacgcctgtggt

SEQ ID NO: 42910 - DNA, 20 bp, synthetic construct
  source 1..20: mol_type = other DNA
atggtggcacacgcctgtgg

SEQ ID NO: 42911 - DNA, 20 bp, synthetic construct
  source 1..20: mol_type = other DNA
catggtggcacacgcctgtg

SEQ ID NO: 42912 - DNA, 20 bp, synthetic construct
  source 1..20: mol_type = other DNA
gcatggtggcacacgcctgt

SEQ ID NO: 42913 - DNA, 20 bp, synthetic construct
  source 1..20: mol_type = other DNA
ggcatggtggcacacgcctg

SEQ ID NO: 42914 - DNA, 20 bp, synthetic construct
  source 1..20: mol_type = other DNA
aggcatggtggcacacgcct

SEQ ID NO: 42915 - DNA, 20 bp, synthetic construct
  source 1..20: mol_type = other DNA
caggcatggtggcacacgcc

SEQ ID NO: 42916 - DNA, 20 bp, synthetic construct
  source 1..20: mol_type = other DNA
ccaggcatggtggcacacgc

SEQ ID NO: 42917 - DNA, 20 bp, synthetic construct
  source 1..20: mol_type = other DNA
gccaggcatggtggcacacg

SEQ ID NO: 42918 - DNA, 20 bp, synthetic construct
  source 1..20: mol_type = other DNA
agccaggcatggtggcacac

SEQ ID NO: 42919 - DNA, 20 bp, synthetic construct
  source 1..20: mol_type = other DNA
tagccaggcatggtggcaca

SEQ ID NO: 42920 - DNA, 20 bp, synthetic construct
  source 1..20: mol_type = other DNA
ctagccaggcatggtggcac

SEQ ID NO: 42921 - DNA, 20 bp, synthetic construct
  source 1..20: mol_type = other DNA
actagccaggcatggtggca

SEQ ID NO: 42922 - DNA, 20 bp, synthetic construct
  source 1..20: mol_type = other DNA
aactagccaggcatggtggc

SEQ ID NO: 42923 - DNA, 20 bp, synthetic construct
  source 1..20: mol_type = other DNA
aaactagccaggcatggtgg

SEQ ID NO: 42924 - DNA, 20 bp, synthetic construct
  source 1..20: mol_type = other DNA
aaaactagccaggcatggtg

SEQ ID NO: 42925 - DNA, 20 bp, synthetic construct
  source 1..20: mol_type = other DNA
aaaaactagccaggcatggt

SEQ ID NO: 42926 - DNA, 20 bp, synthetic construct
  source 1..20: mol_type = other DNA
aaaaaactagccaggcatgg

SEQ ID NO: 42927 - DNA, 20 bp, synthetic construct
  source 1..20: mol_type = other DNA
taaaaaactagccaggcatg

SEQ ID NO: 42928 - DNA, 20 bp, synthetic construct
  source 1..20: mol_type = other DNA
ataaaaaactagccaggcat

SEQ ID NO: 42929 - DNA, 20 bp, synthetic construct
  source 1..20: mol_type = other DNA
aataaaaaactagccaggca

SEQ ID NO: 42930 - DNA, 20 bp, synthetic construct
  source 1..20: mol_type = other DNA
aaataaaaaactagccaggc

SEQ ID NO: 42931 - DNA, 20 bp, synthetic construct
  source 1..20: mol_type = other DNA
aaaataaaaaactagccagg

SEQ ID NO: 42932 - DNA, 20 bp, synthetic construct
  source 1..20: mol_type = other DNA
aaaaataaaaaactagccag

SEQ ID NO: 42933 - DNA, 20 bp, synthetic construct
  source 1..20: mol_type = other DNA
aaaaaataaaaaactagcca

SEQ ID NO: 42934 - DNA, 20 bp, synthetic construct
  source 1..20: mol_type = other DNA
caaaaaataaaaaactagcc

SEQ ID NO: 42935 - DNA, 20 bp, synthetic construct
  source 1..20: mol_type = other DNA
acaaaaaataaaaaactagc

SEQ ID NO: 42936 - DNA, 20 bp, synthetic construct
  source 1..20: mol_type = other DNA
tacaaaaaataaaaaactag

SEQ ID NO: 42937 - DNA, 20 bp, synthetic construct
  source 1..20: mol_type = other DNA
ctacaaaaaataaaaaacta

SEQ ID NO: 42938 - DNA, 20 bp, synthetic construct
  source 1..20: mol_type = other DNA
tctacaaaaaataaaaaact

SEQ ID NO: 42939 - DNA, 20 bp, synthetic construct
  source 1..20: mol_type = other DNA
ttctacaaaaaataaaaaac

SEQ ID NO: 42940 - DNA, 20 bp, synthetic construct
  source 1..20: mol_type = other DNA
tttctacaaaaaataaaaaa

SEQ ID NO: 42941 - DNA, 20 bp, synthetic construct
  source 1..20: mol_type = other DNA
gtttctacaaaaaataaaaa

SEQ ID NO: 42942 - DNA, 20 bp, synthetic construct
  source 1..20: mol_type = other DNA
tgtttctacaaaaaataaaa

SEQ ID NO: 42943 - DNA, 20 bp, synthetic construct
  source 1..20: mol_type = other DNA
ctgtttctacaaaaaataaa

SEQ ID NO: 42944 - DNA, 20 bp, synthetic construct
  source 1..20: mol_type = other DNA
cctgtttctacaaaaaataa

SEQ ID NO: 42945 - DNA, 20 bp, synthetic construct
  source 1..20: mol_type = other DNA
ccctgtttctacaaaaaata

SEQ ID NO: 42946 - DNA, 20 bp, synthetic construct
  source 1..20: mol_type = other DNA
accctgtttctacaaaaaat

SEQ ID NO: 42947 - DNA, 20 bp, synthetic construct
  source 1..20: mol_type = other DNA
aaccctgtttctacaaaaaa

SEQ ID NO: 42948 - DNA, 20 bp, synthetic construct
  source 1..20: mol_type = other DNA
aaaccctgtttctacaaaaa

SEQ ID NO: 42949 - DNA, 20 bp, synthetic construct
  source 1..20: mol_type = other DNA
aaaaccctgtttctacaaaa

SEQ ID NO: 42950 - DNA, 20 bp, synthetic construct
  source 1..20: mol_type = other DNA
caaaaccctgtttctacaaa

SEQ ID NO: 42951 - DNA, 20 bp, synthetic construct
  source 1..20: mol_type = other DNA
gcaaaaccctgtttctacaa

SEQ ID NO: 42952 - DNA, 20 bp, synthetic construct
  source 1..20: mol_type = other DNA
agcaaaaccctgtttctaca

SEQ ID NO: 42953 - DNA, 20 bp, synthetic construct
  source 1..20: mol_type = other DNA
aagcaaaaccctgtttctac

SEQ ID NO: 42954 - DNA, 20 bp, synthetic construct
  source 1..20: mol_type = other DNA
aaagcaaaaccctgtttcta

SEQ ID NO: 42955 - DNA, 20 bp, synthetic construct
  source 1..20: mol_type = other DNA
caaagcaaaaccctgtttct

SEQ ID NO: 42956 - DNA, 20 bp, synthetic construct
  source 1..20: mol_type = other DNA
acaaagcaaaaccctgtttc

SEQ ID NO: 42957 - DNA, 20 bp, synthetic construct
  source 1..20: mol_type = other DNA
aacaaagcaaaaccctgttt

SEQ ID NO: 42958 - DNA, 20 bp, synthetic construct
  source 1..20: mol_type = other DNA
caacaaagcaaaaccctgtt

SEQ ID NO: 42959 - DNA, 20 bp, synthetic construct
  source 1..20: mol_type = other DNA
gcaacaaagcaaaaccctgt

SEQ ID NO: 42960 - DNA, 20 bp, synthetic construct
  source 1..20: mol_type = other DNA
ggcaacaaagcaaaaccctg

SEQ ID NO: 42961 - DNA, 20 bp, synthetic construct
  source 1..20: mol_type = other DNA
gggcaacaaagcaaaaccct

SEQ ID NO: 42962 - DNA, 20 bp, synthetic construct
  source 1..20: mol_type = other DNA
tgggcaacaaagcaaaaccc

SEQ ID NO: 42963 - DNA, 20 bp, synthetic construct
  source 1..20: mol_type = other DNA
ctgggcaacaaagcaaaacc

SEQ ID NO: 42964 - DNA, 20 bp, synthetic construct
  source 1..20: mol_type = other DNA
tctgggcaacaaagcaaaac

SEQ ID NO: 42965 - DNA, 20 bp, synthetic construct
  source 1..20: mol_type = other DNA
gtctgggcaacaaagcaaaa

SEQ ID NO: 42966 - DNA, 20 bp, synthetic construct
  source 1..20: mol_type = other DNA
agtctgggcaacaaagcaaa

SEQ ID NO: 42967 - DNA, 20 bp, synthetic construct
  source 1..20: mol_type = other DNA
cagtctgggcaacaaagcaa

SEQ ID NO: 42968 - DNA, 20 bp, synthetic construct
  source 1..20: mol_type = other DNA
tcagtctgggcaacaaagca

SEQ ID NO: 42969 - DNA, 20 bp, synthetic construct
  source 1..20: mol_type = other DNA
atcagtctgggcaacaaagc

SEQ ID NO: 42970 - DNA, 20 bp, synthetic construct
  source 1..20: mol_type = other DNA
gatcagtctgggcaacaaag

SEQ ID NO: 42971 - DNA, 20 bp, synthetic construct
  source 1..20: mol_type = other DNA
agatcagtctgggcaacaaa

SEQ ID NO: 42972 - DNA, 20 bp, synthetic construct
  source 1..20: mol_type = other DNA
gagatcagtctgggcaacaa

SEQ ID NO: 42973 - DNA, 20 bp, synthetic construct
  source 1..20: mol_type = other DNA
tgagatcagtctgggcaaca

SEQ ID NO: 42974 - DNA, 20 bp, synthetic construct
  source 1..20: mol_type = other DNA
ttgagatcagtctgggcaac

SEQ ID NO: 42975 - DNA, 20 bp, synthetic construct
  source 1..20: mol_type = other DNA
tttgagatcagtctgggcaa

SEQ ID NO: 42976 - DNA, 20 bp, synthetic construct
  source 1..20: mol_type = other DNA
gtttgagatcagtctgggca

SEQ ID NO: 42977 - DNA, 20 bp, synthetic construct
  source 1..20: mol_type = other DNA
agtttgagatcagtctgggc

SEQ ID NO: 42978 - DNA, 20 bp, synthetic construct
  source 1..20: mol_type = other DNA
gagtttgagatcagtctggg

SEQ ID NO: 42979 - DNA, 20 bp, synthetic construct
  source 1..20: mol_type = other DNA
ggagtttgagatcagtctgg

SEQ ID NO: 42980 - DNA, 20 bp, synthetic construct
  source 1..20: mol_type = other DNA
cggagtttgagatcagtctg

SEQ ID NO: 42981 - DNA, 20 bp, synthetic construct
  source 1..20: mol_type = other DNA
ccggagtttgagatcagtct

SEQ ID NO: 42982 - DNA, 20 bp, synthetic construct
  source 1..20: mol_type = other DNA
gccggagtttgagatcagtc

SEQ ID NO: 42983 - DNA, 20 bp, synthetic construct
  source 1..20: mol_type = other DNA
tgccggagtttgagatcagt

SEQ ID NO: 42984 - DNA, 20 bp, synthetic construct
  source 1..20: mol_type = other DNA
gtgccggagtttgagatcag

SEQ ID NO: 42985 - DNA, 20 bp, synthetic construct
  source 1..20: mol_type = other DNA
agtgccggagtttgagatca

SEQ ID NO: 42986 - DNA, 20 bp, synthetic construct
  source 1..20: mol_type = other DNA
gagtgccggagtttgagatc

SEQ ID NO: 42987 - DNA, 20 bp, synthetic construct
  source 1..20: mol_type = other DNA
tgagtgccggagtttgagat

SEQ ID NO: 42988 - DNA, 20 bp, synthetic construct
  source 1..20: mol_type = other DNA
ttgagtgccggagtttgaga

SEQ ID NO: 42989 - DNA, 20 bp, synthetic construct
  source 1..20: mol_type = other DNA
cttgagtgccggagtttgag

SEQ ID NO: 42990 - DNA, 20 bp, synthetic construct
  source 1..20: mol_type = other DNA
acttgagtgccggagtttga

SEQ ID NO: 42991 - DNA, 20 bp, synthetic construct
  source 1..20: mol_type = other DNA
cacttgagtgccggagtttg

SEQ ID NO: 42992 - DNA, 20 bp, synthetic construct
  source 1..20: mol_type = other DNA
tcacttgagtgccggagttt

SEQ ID NO: 42993 - DNA, 20 bp, synthetic construct
  source 1..20: mol_type = other DNA
atcacttgagtgccggagtt

SEQ ID NO: 42994 - DNA, 20 bp, synthetic construct
  source 1..20: mol_type = other DNA
gatcacttgagtgccggagt

SEQ ID NO: 42995 - DNA, 20 bp, synthetic construct
  source 1..20: mol_type = other DNA
ggatcacttgagtgccggag

SEQ ID NO: 42996 - DNA, 20 bp, synthetic construct
  source 1..20: mol_type = other DNA
aggatcacttgagtgccgga

SEQ ID NO: 42997 - DNA, 20 bp, synthetic construct
  source 1..20: mol_type = other DNA
gaggatcacttgagtgccgg

SEQ ID NO: 42998 - DNA, 20 bp, synthetic construct
  source 1..20: mol_type = other DNA
ggaggatcacttgagtgccg

SEQ ID NO: 42999 - DNA, 20 bp, synthetic construct
  source 1..20: mol_type = other DNA
aggaggatcacttgagtgcc

SEQ ID NO: 43000 - DNA, 20 bp, synthetic construct
  source 1..20: mol_type = other DNA
caggaggatcacttgagtgc

SEQ ID NO: 43001 - DNA, 20 bp, synthetic construct
  source 1..20: mol_type = other DNA
gcaggaggatcacttgagtg

SEQ ID NO: 43002 - DNA, 20 bp, synthetic construct
  source 1..20: mol_type = other DNA
ggcaggaggatcacttgagt

SEQ ID NO: 43003 - DNA, 20 bp, synthetic construct
  source 1..20: mol_type = other DNA
aggcaggaggatcacttgag

SEQ ID NO: 43004 - DNA, 20 bp, synthetic construct
  source 1..20: mol_type = other DNA
gaggcaggaggatcacttga

SEQ ID NO: 43005 - DNA, 20 bp, synthetic construct
  source 1..20: mol_type = other DNA
tgaggcaggaggatcacttg

SEQ ID NO: 43006 - DNA, 20 bp, synthetic construct
  source 1..20: mol_type = other DNA
ctgaggcaggaggatcactt

SEQ ID NO: 43007 - DNA, 20 bp, synthetic construct
  source 1..20: mol_type = other DNA
gctgaggcaggaggatcact

SEQ ID NO: 43008 - DNA, 20 bp, synthetic construct
  source 1..20: mol_type = other DNA
ggctgaggcaggaggatcac

SEQ ID NO: 43009 - DNA, 20 bp, synthetic construct
  source 1..20: mol_type = other DNA
aggctgaggcaggaggatca

SEQ ID NO: 43010 - DNA, 20 bp, synthetic construct
  source 1..20: mol_type = other DNA
gaggctgaggcaggaggatc

SEQ ID NO: 43011 - DNA, 20 bp, synthetic construct
  source 1..20: mol_type = other DNA
ggaggctgaggcaggaggat

SEQ ID NO: 43012 - DNA, 20 bp, synthetic construct
  source 1..20: mol_type = other DNA
aggaggctgaggcaggagga

SEQ ID NO: 43013 - DNA, 20 bp, synthetic construct
  source 1..20: mol_type = other DNA
taggaggctgaggcaggagg

SEQ ID NO: 43014 - DNA, 20 bp, synthetic construct
  source 1..20: mol_type = other DNA
ttaggaggctgaggcaggag

SEQ ID NO: 43015 - DNA, 20 bp, synthetic construct
  source 1..20: mol_type = other DNA
tttaggaggctgaggcagga

SEQ ID NO: 43016 - DNA, 20 bp, synthetic construct
  source 1..20: mol_type = other DNA
ctttaggaggctgaggcagg

SEQ ID NO: 43017 - DNA, 20 bp, synthetic construct
  source 1..20: mol_type = other DNA
actttaggaggctgaggcag

SEQ ID NO: 43018 - DNA, 20 bp, synthetic construct
  source 1..20: mol_type = other DNA
cactttaggaggctgaggca

SEQ ID NO: 43019 - DNA, 20 bp, synthetic construct
  source 1..20: mol_type = other DNA
gcactttaggaggctgaggc

SEQ ID NO: 43020 - DNA, 20 bp, synthetic construct
  source 1..20: mol_type = other DNA
agcactttaggaggctgagg

SEQ ID NO: 43021 - DNA, 20 bp, synthetic construct
  source 1..20: mol_type = other DNA
cagcactttaggaggctgag

SEQ ID NO: 43022 - DNA, 20 bp, synthetic construct
  source 1..20: mol_type = other DNA
ccagcactttaggaggctga

SEQ ID NO: 43023 - DNA, 20 bp, synthetic construct
  source 1..20: mol_type = other DNA
cccagcactttaggaggctg

SEQ ID NO: 43024 - DNA, 20 bp, synthetic construct
  source 1..20: mol_type = other DNA
tcccagcactttaggaggct

SEQ ID NO: 43025 - DNA, 20 bp, synthetic construct
  source 1..20: mol_type = other DNA
atcccagcactttaggaggc

SEQ ID NO: 43026 - DNA, 20 bp, synthetic construct
  source 1..20: mol_type = other DNA
aatcccagcactttaggagg

SEQ ID NO: 43027 - DNA, 20 bp, synthetic construct
  source 1..20: mol_type = other DNA
taatcccagcactttaggag

SEQ ID NO: 43028 - DNA, 20 bp, synthetic construct
  source 1..20: mol_type = other DNA
gtaatcccagcactttagga

SEQ ID NO: 43029 - DNA, 20 bp, synthetic construct
  source 1..20: mol_type = other DNA
tgtaatcccagcactttagg

SEQ ID NO: 43030 - DNA, 20 bp, synthetic construct
  source 1..20: mol_type = other DNA
ttgtaatcccagcactttag

SEQ ID NO: 43031 - DNA, 20 bp, synthetic construct
  source 1..20: mol_type = other DNA
cttgtaatcccagcacttta

SEQ ID NO: 43032 - DNA, 20 bp, synthetic construct
  source 1..20: mol_type = other DNA
gcttgtaatcccagcacttt

SEQ ID NO: 43033 - DNA, 20 bp, synthetic construct
  source 1..20: mol_type = other DNA
tgcttgtaatcccagcactt

SEQ ID NO: 43034 - DNA, 20 bp, synthetic construct
  source 1..20: mol_type = other DNA
atgcttgtaatcccagcact

SEQ ID NO: 43035 - DNA, 20 bp, synthetic construct
  source 1..20: mol_type = other DNA
catgcttgtaatcccagcac

SEQ ID NO: 43036 - DNA, 20 bp, synthetic construct
  source 1..20: mol_type = other DNA
tcatgcttgtaatcccagca

SEQ ID NO: 43037 - DNA, 20 bp, synthetic construct
  source 1..20: mol_type = other DNA
ctcatgcttgtaatcccagc

SEQ ID NO: 43038 - DNA, 20 bp, synthetic construct
  source 1..20: mol_type = other DNA
gctcatgcttgtaatcccag

SEQ ID NO: 43039 - DNA, 20 bp, synthetic construct
  source 1..20: mol_type = other DNA
agctcatgcttgtaatccca

SEQ ID NO: 43040 - DNA, 20 bp, synthetic construct
  source 1..20: mol_type = other DNA
tagctcatgcttgtaatccc

SEQ ID NO: 43041 - DNA, 20 bp, synthetic construct
  source 1..20: mol_type = other DNA
gtagctcatgcttgtaatcc

SEQ ID NO: 43042 - DNA, 20 bp, synthetic construct
  source 1..20: mol_type = other DNA
ggtagctcatgcttgtaatc

SEQ ID NO: 43043 - DNA, 20 bp, synthetic construct
  source 1..20: mol_type = other DNA
tggtagctcatgcttgtaat

SEQ ID NO: 43044 - DNA, 20 bp, synthetic construct
  source 1..20: mol_type = other DNA
gtggtagctcatgcttgtaa

SEQ ID NO: 43045 - DNA, 20 bp, synthetic construct
  source 1..20: mol_type = other DNA
tgtggtagctcatgcttgta

SEQ ID NO: 43046 - DNA, 20 bp, synthetic construct
  source 1..20: mol_type = other DNA
atgtggtagctcatgcttgt

SEQ ID NO: 43047 - DNA, 20 bp, synthetic construct
  source 1..20: mol_type = other DNA
aatgtggtagctcatgcttg

SEQ ID NO: 43048 - DNA, 20 bp, synthetic construct
  source 1..20: mol_type = other DNA
gaatgtggtagctcatgctt

SEQ ID NO: 43049 - DNA, 20 bp, synthetic construct
  source 1..20: mol_type = other DNA
tgaatgtggtagctcatgct

SEQ ID NO: 43050 - DNA, 20 bp, synthetic construct
  source 1..20: mol_type = other DNA
ctgaatgtggtagctcatgc

SEQ ID NO: 43051 - DNA, 20 bp, synthetic construct
  source 1..20: mol_type = other DNA
gctgaatgtggtagctcatg

SEQ ID NO: 43052 - DNA, 20 bp, synthetic construct
  source 1..20: mol_type = other DNA
tgctgaatgtggtagctcat

SEQ ID NO: 43053 - DNA, 20 bp, synthetic construct
  source 1..20: mol_type = other DNA
atgctgaatgtggtagctca

SEQ ID NO: 43054 - DNA, 20 bp, synthetic construct
  source 1..20: mol_type = other DNA
catgctgaatgtggtagctc

SEQ ID NO: 43055 - DNA, 20 bp, synthetic construct
  source 1..20: mol_type = other DNA
acatgctgaatgtggtagct

SEQ ID NO: 43056 - DNA, 20 bp, synthetic construct
  source 1..20: mol_type = other DNA
tacatgctgaatgtggtagc

SEQ ID NO: 43057 - DNA, 20 bp, synthetic construct
  source 1..20: mol_type = other DNA
ttacatgctgaatgtggtag

SEQ ID NO: 43058 - DNA, 20 bp, synthetic construct
  source 1..20: mol_type = other DNA
tttacatgctgaatgtggta

SEQ ID NO: 43059 - DNA, 20 bp, synthetic construct
  source 1..20: mol_type = other DNA
atttacatgctgaatgtggt

SEQ ID NO: 43060 - DNA, 20 bp, synthetic construct
  source 1..20: mol_type = other DNA
aatttacatgctgaatgtgg

SEQ ID NO: 43061 - DNA, 20 bp, synthetic construct
  source 1..20: mol_type = other DNA
aaatttacatgctgaatgtg

SEQ ID NO: 43062 - DNA, 20 bp, synthetic construct
  source 1..20: mol_type = other DNA
gaaatttacatgctgaatgt

SEQ ID NO: 43063 - DNA, 20 bp, synthetic construct
  source 1..20: mol_type = other DNA
agaaatttacatgctgaatg

SEQ ID NO: 43064 - DNA, 20 bp, synthetic construct
  source 1..20: mol_type = other DNA
aagaaatttacatgctgaat

SEQ ID NO: 43065 - DNA, 20 bp, synthetic construct
  source 1..20: mol_type = other DNA
aaagaaatttacatgctgaa

SEQ ID NO: 43066 - DNA, 20 bp, synthetic construct
  source 1..20: mol_type = other DNA
taaagaaatttacatgctga

SEQ ID NO: 43067 - DNA, 20 bp, synthetic construct
  source 1..20: mol_type = other DNA
ataaagaaatttacatgctg

SEQ ID NO: 43068 - DNA, 20 bp, synthetic construct
  source 1..20: mol_type = other DNA
tataaagaaatttacatgct

SEQ ID NO: 43069 - DNA, 20 bp, synthetic construct
  source 1..20: mol_type = other DNA
atataaagaaatttacatgc

SEQ ID NO: 43070 - DNA, 20 bp, synthetic construct
  source 1..20: mol_type = other DNA
aatataaagaaatttacatg

SEQ ID NO: 43071 - DNA, 20 bp, synthetic construct
  source 1..20: mol_type = other DNA
taatataaagaaatttacat

SEQ ID NO: 43072 - DNA, 20 bp, synthetic construct
  source 1..20: mol_type = other DNA
ttaatataaagaaatttaca

SEQ ID NO: 43073 - DNA, 20 bp, synthetic construct
  source 1..20: mol_type = other DNA
attaatataaagaaatttac

SEQ ID NO: 43074 - DNA, 20 bp, synthetic construct
  source 1..20: mol_type = other DNA
aattaatataaagaaattta

SEQ ID NO: 43075 - DNA, 20 bp, synthetic construct
  source 1..20: mol_type = other DNA
aaattaatataaagaaattt

SEQ ID NO: 43076 - DNA, 20 bp, synthetic construct
  source 1..20: mol_type = other DNA
caaattaatataaagaaatt

SEQ ID NO: 43077 - DNA, 20 bp, synthetic construct
  source 1..20: mol_type = other DNA
tcaaattaatataaagaaat

SEQ ID NO: 43078 - DNA, 20 bp, synthetic construct
  source 1..20: mol_type = other DNA
gtcaaattaatataaagaaa

SEQ ID NO: 43079 - DNA, 20 bp, synthetic construct
  source 1..20: mol_type = other DNA
agtcaaattaatataaagaa

SEQ ID NO: 43080 - DNA, 20 bp, synthetic construct
  source 1..20: mol_type = other DNA
cagtcaaattaatataaaga

SEQ ID NO: 43081 - DNA, 20 bp, synthetic construct
  source 1..20: mol_type = other DNA
ccagtcaaattaatataaag

SEQ ID NO: 43082 - DNA, 20 bp, synthetic construct
  source 1..20: mol_type = other DNA
gccagtcaaattaatataaa

SEQ ID NO: 43083 - DNA, 20 bp, synthetic construct
  source 1..20: mol_type = other DNA
tgccagtcaaattaatataa

SEQ ID NO: 43084 - DNA, 20 bp, synthetic construct
  source 1..20: mol_type = other DNA
atgccagtcaaattaatata

SEQ ID NO: 43085 - DNA, 20 bp, synthetic construct
  source 1..20: mol_type = other DNA
aatgccagtcaaattaatat

SEQ ID NO: 43086 - DNA, 20 bp, synthetic construct
  source 1..20: mol_type = other DNA
aaatgccagtcaaattaata

SEQ ID NO: 43087 - DNA, 20 bp, synthetic construct
  source 1..20: mol_type = other DNA
aaaatgccagtcaaattaat

SEQ ID NO: 43088 - DNA, 20 bp, synthetic construct
  source 1..20: mol_type = other DNA
taaaatgccagtcaaattaa

SEQ ID NO: 43089 - DNA, 20 bp, synthetic construct
  source 1..20: mol_type = other DNA
ttaaaatgccagtcaaatta

SEQ ID NO: 43090 - DNA, 20 bp, synthetic construct
  source 1..20: mol_type = other DNA
cttaaaatgccagtcaaatt

SEQ ID NO: 43091 - DNA, 20 bp, synthetic construct
  source 1..20: mol_type = other DNA
acttaaaatgccagtcaaat

SEQ ID NO: 43092 - DNA, 20 bp, synthetic construct
  source 1..20: mol_type = other DNA
gacttaaaatgccagtcaaa

SEQ ID NO: 43093 - DNA, 20 bp, synthetic construct
  source 1..20: mol_type = other DNA
tgacttaaaatgccagtcaa

SEQ ID NO: 43094 - DNA, 20 bp, synthetic construct
  source 1..20: mol_type = other DNA
gtgacttaaaatgccagtca

SEQ ID NO: 43095 - DNA, 20 bp, synthetic construct
  source 1..20: mol_type = other DNA
tgtgacttaaaatgccagtc

SEQ ID NO: 43096 - DNA, 20 bp, synthetic construct
  source 1..20: mol_type = other DNA
gtgtgacttaaaatgccagt

SEQ ID NO: 43097 - DNA, 20 bp, synthetic construct
  source 1..20: mol_type = other DNA
agtgtgacttaaaatgccag

SEQ ID NO: 43098 - DNA, 20 bp, synthetic construct
  source 1..20: mol_type = other DNA
aagtgtgacttaaaatgcca

SEQ ID NO: 43099 - DNA, 20 bp, synthetic construct
  source 1..20: mol_type = other DNA
caagtgtgacttaaaatgcc

SEQ ID NO: 43100 - DNA, 20 bp, synthetic construct
  source 1..20: mol_type = other DNA
tcaagtgtgacttaaaatgc

SEQ ID NO: 43101 - DNA, 20 bp, synthetic construct
  source 1..20: mol_type = other DNA
ttcaagtgtgacttaaaatg

SEQ ID NO: 43102 - DNA, 20 bp, synthetic construct
  source 1..20: mol_type = other DNA
attcaagtgtgacttaaaat

SEQ ID NO: 43103 - DNA, 20 bp, synthetic construct
  source 1..20: mol_type = other DNA
aattcaagtgtgacttaaaa

SEQ ID NO: 43104 - DNA, 20 bp, synthetic construct
  source 1..20: mol_type = other DNA
aaattcaagtgtgacttaaa

SEQ ID NO: 43105 - DNA, 20 bp, synthetic construct
  source 1..20: mol_type = other DNA
gaaattcaagtgtgacttaa

SEQ ID NO: 43106 - DNA, 20 bp, synthetic construct
  source 1..20: mol_type = other DNA
tgaaattcaagtgtgactta

SEQ ID NO: 43107 - DNA, 20 bp, synthetic construct
  source 1..20: mol_type = other DNA
atgaaattcaagtgtgactt

SEQ ID NO: 43108 - DNA, 20 bp, synthetic construct
  source 1..20: mol_type = other DNA
tatgaaattcaagtgtgact

SEQ ID NO: 43109 - DNA, 20 bp, synthetic construct
  source 1..20: mol_type = other DNA
atatgaaattcaagtgtgac

SEQ ID NO: 43110 - DNA, 20 bp, synthetic construct
  source 1..20: mol_type = other DNA
aatatgaaattcaagtgtga

SEQ ID NO: 43111 - DNA, 20 bp, synthetic construct
  source 1..20: mol_type = other DNA
aaatatgaaattcaagtgtg

SEQ ID NO: 43112 - DNA, 20 bp, synthetic construct
  source 1..20: mol_type = other DNA
caaatatgaaattcaagtgt

SEQ ID NO: 43113 - DNA, 20 bp, synthetic construct
  source 1..20: mol_type = other DNA
ccaaatatgaaattcaagtg

SEQ ID NO: 43114 - DNA, 20 bp, synthetic construct
  source 1..20: mol_type = other DNA
gccaaatatgaaattcaagt

SEQ ID NO: 43115 - DNA, 20 bp, synthetic construct
  source 1..20: mol_type = other DNA
tgccaaatatgaaattcaag

SEQ ID NO: 43116 - DNA, 20 bp, synthetic construct
  source 1..20: mol_type = other DNA
ttgccaaatatgaaattcaa

SEQ ID NO: 43117 - DNA, 20 bp, synthetic construct
  source 1..20: mol_type = other DNA
gttgccaaatatgaaattca

SEQ ID NO: 43118 - DNA, 20 bp, synthetic construct
  source 1..20: mol_type = other DNA
agttgccaaatatgaaattc

SEQ ID NO: 43119 - DNA, 20 bp, synthetic construct
  source 1..20: mol_type = other DNA
tagttgccaaatatgaaatt

SEQ ID NO: 43120 - DNA, 20 bp, synthetic construct
  source 1..20: mol_type = other DNA
atagttgccaaatatgaaat

SEQ ID NO: 43121 - DNA, 20 bp, synthetic construct
  source 1..20: mol_type = other DNA
aatagttgccaaatatgaaa

SEQ ID NO: 43122 - DNA, 20 bp, synthetic construct
  source 1..20: mol_type = other DNA
taatagttgccaaatatgaa

SEQ ID NO: 43123 - DNA, 20 bp, synthetic construct
  source 1..20: mol_type = other DNA
ttaatagttgccaaatatga

SEQ ID NO: 43124 - DNA, 20 bp, synthetic construct
  source 1..20: mol_type = other DNA
tttaatagttgccaaatatg

SEQ ID NO: 43125 - DNA, 20 bp, synthetic construct
  source 1..20: mol_type = other DNA
ttttaatagttgccaaatat

SEQ ID NO: 43126 - DNA, 20 bp, synthetic construct
  source 1..20: mol_type = other DNA
cttttaatagttgccaaata

SEQ ID NO: 43127 - DNA, 20 bp, synthetic construct
  source 1..20: mol_type = other DNA
gcttttaatagttgccaaat

SEQ ID NO: 43128 - DNA, 20 bp, synthetic construct
  source 1..20: mol_type = other DNA
tgcttttaatagttgccaaa

SEQ ID NO: 43129 - DNA, 20 bp, synthetic construct
  source 1..20: mol_type = other DNA
atgcttttaatagttgccaa

SEQ ID NO: 43130 - DNA, 20 bp, synthetic construct
  source 1..20: mol_type = other DNA
tatgcttttaatagttgcca

SEQ ID NO: 43131 - DNA, 20 bp, synthetic construct
  source 1..20: mol_type = other DNA
ctatgcttttaatagttgcc

SEQ ID NO: 43132 - DNA, 20 bp, synthetic construct
  source 1..20: mol_type = other DNA
tctatgcttttaatagttgc

SEQ ID NO: 43133 - DNA, 20 bp, synthetic construct
  source 1..20: mol_type = other DNA
ctctatgcttttaatagttg

SEQ ID NO: 43134 - DNA, 20 bp, synthetic construct
  source 1..20: mol_type = other DNA
actctatgcttttaatagtt

SEQ ID NO: 43135 - DNA, 20 bp, synthetic construct
  source 1..20: mol_type = other DNA
gactctatgcttttaatagt

SEQ ID NO: 43136 - DNA, 20 bp, synthetic construct
  source 1..20: mol_type = other DNA
ggactctatgcttttaatag

SEQ ID NO: 43137 - DNA, 20 bp, synthetic construct
  source 1..20: mol_type = other DNA
aggactctatgcttttaata

SEQ ID NO: 43138 - DNA, 20 bp, synthetic construct
  source 1..20: mol_type = other DNA
caggactctatgcttttaat

SEQ ID NO: 43139 - DNA, 20 bp, synthetic construct
  source 1..20: mol_type = other DNA
ccaggactctatgcttttaa

SEQ ID NO: 43140 - DNA, 20 bp, synthetic construct
  source 1..20: mol_type = other DNA
tccaggactctatgctttta

SEQ ID NO: 43141 - DNA, 20 bp, synthetic construct
  source 1..20: mol_type = other DNA
atccaggactctatgctttt

SEQ ID NO: 43142 - DNA, 20 bp, synthetic construct
  source 1..20: mol_type = other DNA
tatccaggactctatgcttt

SEQ ID NO: 43143 - DNA, 20 bp, synthetic construct
  source 1..20: mol_type = other DNA
atatccaggactctatgctt

SEQ ID NO: 43144 - DNA, 20 bp, synthetic construct
  source 1..20: mol_type = other DNA
aatatccaggactctatgct

SEQ ID NO: 43145 - DNA, 20 bp, synthetic construct
  source 1..20: mol_type = other DNA
taatatccaggactctatgc

SEQ ID NO: 43146 - DNA, 20 bp, synthetic construct
  source 1..20: mol_type = other DNA
ctaatatccaggactctatg

SEQ ID NO: 43147 - DNA, 20 bp, synthetic construct
  source 1..20: mol_type = other DNA
actaatatccaggactctat

SEQ ID NO: 43148 - DNA, 20 bp, synthetic construct
  source 1..20: mol_type = other DNA
cactaatatccaggactcta

SEQ ID NO: 43149 - DNA, 20 bp, synthetic construct
  source 1..20: mol_type = other DNA
acactaatatccaggactct

SEQ ID NO: 43150 - DNA, 20 bp, synthetic construct
  source 1..20: mol_type = other DNA
aacactaatatccaggactc

SEQ ID NO: 43151 - DNA, 20 bp, synthetic construct
  source 1..20: mol_type = other DNA
aaacactaatatccaggact

SEQ ID NO: 43152 - DNA, 20 bp, synthetic construct
  source 1..20: mol_type = other DNA
aaaacactaatatccaggac

SEQ ID NO: 43153 - DNA, 20 bp, synthetic construct
  source 1..20: mol_type = other DNA
caaaacactaatatccagga

SEQ ID NO: 43154 - DNA, 20 bp, synthetic construct
  source 1..20: mol_type = other DNA
acaaaacactaatatccagg

SEQ ID NO: 43155 - DNA, 20 bp, synthetic construct
  source 1..20: mol_type = other DNA
aacaaaacactaatatccag

SEQ ID NO: 43156 - DNA, 20 bp, synthetic construct
  source 1..20: mol_type = other DNA
taacaaaacactaatatcca

SEQ ID NO: 43157 - DNA, 20 bp, synthetic construct
  source 1..20: mol_type = other DNA
ttaacaaaacactaatatcc

SEQ ID NO: 43158 - DNA, 20 bp, synthetic construct
  source 1..20: mol_type = other DNA
tttaacaaaacactaatatc

SEQ ID NO: 43159 - DNA, 20 bp, synthetic construct
  source 1..20: mol_type = other DNA
gtttaacaaaacactaatat

SEQ ID NO: 43160 - DNA, 20 bp, synthetic construct
  source 1..20: mol_type = other DNA
ggtttaacaaaacactaata

SEQ ID NO: 43161 - DNA, 20 bp, synthetic construct
  source 1..20: mol_type = other DNA
aggtttaacaaaacactaat

SEQ ID NO: 43162 - DNA, 20 bp, synthetic construct
  source 1..20: mol_type = other DNA
caggtttaacaaaacactaa

SEQ ID NO: 43163 - DNA, 20 bp, synthetic construct
  source 1..20: mol_type = other DNA
tcaggtttaacaaaacacta

SEQ ID NO: 43164 - DNA, 20 bp, synthetic construct
  source 1..20: mol_type = other DNA
atcaggtttaacaaaacact

SEQ ID NO: 43165 - DNA, 20 bp, synthetic construct
  source 1..20: mol_type = other DNA
gatcaggtttaacaaaacac

SEQ ID NO: 43166 - DNA, 20 bp, synthetic construct
  source 1..20: mol_type = other DNA
agatcaggtttaacaaaaca

SEQ ID NO: 43167 - DNA, 20 bp, synthetic construct
  source 1..20: mol_type = other DNA
tagatcaggtttaacaaaac

SEQ ID NO: 43168 - DNA, 20 bp, synthetic construct
  source 1..20: mol_type = other DNA
atagatcaggtttaacaaaa

SEQ ID NO: 43169 - DNA, 20 bp, synthetic construct
  source 1..20: mol_type = other DNA
gatagatcaggtttaacaaa

SEQ ID NO: 43170 - DNA, 20 bp, synthetic construct
  source 1..20: mol_type = other DNA
agatagatcaggtttaacaa

SEQ ID NO: 43171 - DNA, 20 bp, synthetic construct
  source 1..20: mol_type = other DNA
tagatagatcaggtttaaca

SEQ ID NO: 43172 - DNA, 20 bp, synthetic construct
  source 1..20: mol_type = other DNA
ttagatagatcaggtttaac

SEQ ID NO: 43173 - DNA, 20 bp, synthetic construct
  source 1..20: mol_type = other DNA
attagatagatcaggtttaa

SEQ ID NO: 43174 - DNA, 20 bp, synthetic construct
  source 1..20: mol_type = other DNA
gattagatagatcaggttta

SEQ ID NO: 43175 - DNA, 20 bp, synthetic construct
  source 1..20: mol_type = other DNA
tgattagatagatcaggttt

SEQ ID NO: 43176 - DNA, 20 bp, synthetic construct
  source 1..20: mol_type = other DNA
atgattagatagatcaggtt

SEQ ID NO: 43177 - DNA, 20 bp, synthetic construct
  source 1..20: mol_type = other DNA
tatgattagatagatcaggt

SEQ ID NO: 43178 - DNA, 20 bp, synthetic construct
  source 1..20: mol_type = other DNA
ttatgattagatagatcagg

SEQ ID NO: 43179 - DNA, 20 bp, synthetic construct
  source 1..20: mol_type = other DNA
tttatgattagatagatcag

SEQ ID NO: 43180 - DNA, 20 bp, synthetic construct
  source 1..20: mol_type = other DNA
atttatgattagatagatca

SEQ ID NO: 43181 - DNA, 20 bp, synthetic construct
  source 1..20: mol_type = other DNA
tatttatgattagatagatc

SEQ ID NO: 43182 - DNA, 20 bp, synthetic construct
  source 1..20: mol_type = other DNA
atatttatgattagatagat

SEQ ID NO: 43183 - DNA, 20 bp, synthetic construct
  source 1..20: mol_type = other DNA
tatatttatgattagataga

SEQ ID NO: 43184 - DNA, 20 bp, synthetic construct
  source 1..20: mol_type = other DNA
gtatatttatgattagatag

SEQ ID NO: 43185 - DNA, 20 bp, synthetic construct
  source 1..20: mol_type = other DNA
agtatatttatgattagata

SEQ ID NO: 43186 - DNA, 20 bp, synthetic construct
  source 1..20: mol_type = other DNA
aagtatatttatgattagat

SEQ ID NO: 43187 - DNA, 20 bp, synthetic construct
  source 1..20: mol_type = other DNA
taagtatatttatgattaga

SEQ ID NO: 43188 - DNA, 20 bp, synthetic construct
  source 1..20: mol_type = other DNA
ctaagtatatttatgattag

SEQ ID NO: 43189 - DNA, 20 bp, synthetic construct
  source 1..20: mol_type = other DNA
cctaagtatatttatgatta

SEQ ID NO: 43190 - DNA, 20 bp, synthetic construct
  source 1..20: mol_type = other DNA
acctaagtatatttatgatt

SEQ ID NO: 43191 - DNA, 20 bp, synthetic construct
  source 1..20: mol_type = other DNA
gacctaagtatatttatgat

SEQ ID NO: 43192 - DNA, 20 bp, synthetic construct
  source 1..20: mol_type = other DNA
agacctaagtatatttatga

SEQ ID NO: 43193 - DNA, 20 bp, synthetic construct
  source 1..20: mol_type = other DNA
tagacctaagtatatttatg

SEQ ID NO: 43194 - DNA, 20 bp, synthetic construct
  source 1..20: mol_type = other DNA
ttagacctaagtatatttat

SEQ ID NO: 43195 - DNA, 20 bp, synthetic construct
  source 1..20: mol_type = other DNA
tttagacctaagtatattta

SEQ ID NO: 43196 - DNA, 20 bp, synthetic construct
  source 1..20: mol_type = other DNA
ttttagacctaagtatattt

SEQ ID NO: 43197 - DNA, 20 bp, synthetic construct
  source 1..20: mol_type = other DNA
attttagacctaagtatatt

SEQ ID NO: 43198 - DNA, 20 bp, synthetic construct
  source 1..20: mol_type = other DNA
tattttagacctaagtatat

SEQ ID NO: 43199 - DNA, 20 bp, synthetic construct
  source 1..20: mol_type = other DNA
atattttagacctaagtata

SEQ ID NO: 43200 - DNA, 20 bp, synthetic construct
  source 1..20: mol_type = other DNA
catattttagacctaagtat

SEQ ID NO: 43201 - DNA, 20 bp, synthetic construct
  source 1..20: mol_type = other DNA
gcatattttagacctaagta

SEQ ID NO: 43202 - DNA, 20 bp, synthetic construct
  source 1..20: mol_type = other DNA
agcatattttagacctaagt

SEQ ID NO: 43203 - DNA, 20 bp, synthetic construct
  source 1..20: mol_type = other DNA
gagcatattttagacctaag

SEQ ID NO: 43204 - DNA, 20 bp, synthetic construct
  source 1..20: mol_type = other DNA
agagcatattttagacctaa

SEQ ID NO: 43205 - DNA, 20 bp, synthetic construct
  source 1..20: mol_type = other DNA
aagagcatattttagaccta

SEQ ID NO: 43206 - DNA, 20 bp, synthetic construct
  source 1..20: mol_type = other DNA
caagagcatattttagacct

SEQ ID NO: 43207 - DNA, 20 bp, synthetic construct
  source 1..20: mol_type = other DNA
ccaagagcatattttagacc

SEQ ID NO: 43208 - DNA, 20 bp, synthetic construct
  source 1..20: mol_type = other DNA
gccaagagcatattttagac

SEQ ID NO: 43209 - DNA, 20 bp, synthetic construct
  source 1..20: mol_type = other DNA
ggccaagagcatattttaga

SEQ ID NO: 43210 - DNA, 20 bp, synthetic construct
  source 1..20: mol_type = other DNA
aggccaagagcatattttag

SEQ ID NO: 43211 - DNA, 20 bp, synthetic construct
  source 1..20: mol_type = other DNA
aaggccaagagcatatttta

SEQ ID NO: 43212 - DNA, 20 bp, synthetic construct
  source 1..20: mol_type = other DNA
aaaggccaagagcatatttt

SEQ ID NO: 43213 - DNA, 20 bp, synthetic construct
  source 1..20: mol_type = other DNA
caaaggccaagagcatattt

SEQ ID NO: 43214 - DNA, 20 bp, synthetic construct
  source 1..20: mol_type = other DNA
acaaaggccaagagcatatt

SEQ ID NO: 43215 - DNA, 20 bp, synthetic construct
  source 1..20: mol_type = other DNA
aacaaaggccaagagcatat

SEQ ID NO: 43216 - DNA, 20 bp, synthetic construct
  source 1..20: mol_type = other DNA
aaacaaaggccaagagcata

SEQ ID NO: 43217 - DNA, 20 bp, synthetic construct
  source 1..20: mol_type = other DNA
taaacaaaggccaagagcat

SEQ ID NO: 43218 - DNA, 20 bp, synthetic construct
  source 1..20: mol_type = other DNA
ataaacaaaggccaagagca

SEQ ID NO: 43219 - DNA, 20 bp, synthetic construct
  source 1..20: mol_type = other DNA
aataaacaaaggccaagagc

SEQ ID NO: 43220 - DNA, 20 bp, synthetic construct
  source 1..20: mol_type = other DNA
caataaacaaaggccaagag

SEQ ID NO: 43221 - DNA, 20 bp, synthetic construct
  source 1..20: mol_type = other DNA
gcaataaacaaaggccaaga

SEQ ID NO: 43222 - DNA, 20 bp, synthetic construct
  source 1..20: mol_type = other DNA
cgcaataaacaaaggccaag

SEQ ID NO: 43223 - DNA, 20 bp, synthetic construct
  source 1..20: mol_type = other DNA
ccgcaataaacaaaggccaa

SEQ ID NO: 43224 - DNA, 20 bp, synthetic construct
  source 1..20: mol_type = other DNA
accgcaataaacaaaggcca

SEQ ID NO: 43225 - DNA, 20 bp, synthetic construct
  source 1..20: mol_type = other DNA
aaccgcaataaacaaaggcc

SEQ ID NO: 43226 - DNA, 20 bp, synthetic construct
  source 1..20: mol_type = other DNA
gaaccgcaataaacaaaggc

SEQ ID NO: 43227 - DNA, 20 bp, synthetic construct
  source 1..20: mol_type = other DNA
tgaaccgcaataaacaaagg

SEQ ID NO: 43228 - DNA, 20 bp, synthetic construct
  source 1..20: mol_type = other DNA
ctgaaccgcaataaacaaag

SEQ ID NO: 43229 - DNA, 20 bp, synthetic construct
  source 1..20: mol_type = other DNA
actgaaccgcaataaacaaa

SEQ ID NO: 43230 - DNA, 20 bp, synthetic construct
  source 1..20: mol_type = other DNA
tactgaaccgcaataaacaa

SEQ ID NO: 43231 - DNA, 20 bp, synthetic construct
  source 1..20: mol_type = other DNA
atactgaaccgcaataaaca

SEQ ID NO: 43232 - DNA, 20 bp, synthetic construct
  source 1..20: mol_type = other DNA
aatactgaaccgcaataaac

SEQ ID NO: 43233 - DNA, 20 bp, synthetic construct
  source 1..20: mol_type = other DNA
aaatactgaaccgcaataaa

SEQ ID NO: 43234 - DNA, 20 bp, synthetic construct
  source 1..20: mol_type = other DNA
caaatactgaaccgcaataa

SEQ ID NO: 43235 - DNA, 20 bp, synthetic construct
  source 1..20: mol_type = other DNA
acaaatactgaaccgcaata

SEQ ID NO: 43236 - DNA, 20 bp, synthetic construct
  source 1..20: mol_type = other DNA
aacaaatactgaaccgcaat

SEQ ID NO: 43237 - DNA, 20 bp, synthetic construct
  source 1..20: mol_type = other DNA
taacaaatactgaaccgcaa

SEQ ID NO: 43238 - DNA, 20 bp, synthetic construct
  source 1..20: mol_type = other DNA
gtaacaaatactgaaccgca

SEQ ID NO: 43239 - DNA, 20 bp, synthetic construct
  source 1..20: mol_type = other DNA
agtaacaaatactgaaccgc

SEQ ID NO: 43240 - DNA, 20 bp, synthetic construct
  source 1..20: mol_type = other DNA
tagtaacaaatactgaaccg

SEQ ID NO: 43241 - DNA, 20 bp, synthetic construct
  source 1..20: mol_type = other DNA
atagtaacaaatactgaacc

SEQ ID NO: 43242 - DNA, 20 bp, synthetic construct
  source 1..20: mol_type = other DNA
tatagtaacaaatactgaac

SEQ ID NO: 43243 - DNA, 20 bp, synthetic construct
  source 1..20: mol_type = other DNA
atatagtaacaaatactgaa

SEQ ID NO: 43244 - DNA, 20 bp, synthetic construct
  source 1..20: mol_type = other DNA
aatatagtaacaaatactga

SEQ ID NO: 43245 - DNA, 20 bp, synthetic construct
  source 1..20: mol_type = other DNA
taatatagtaacaaatactg

SEQ ID NO: 43246 - DNA, 20 bp, synthetic construct
  source 1..20: mol_type = other DNA
ttaatatagtaacaaatact

SEQ ID NO: 43247 - DNA, 20 bp, synthetic construct
  source 1..20: mol_type = other DNA
tttaatatagtaacaaatac

SEQ ID NO: 43248 - DNA, 20 bp, synthetic construct
  source 1..20: mol_type = other DNA
atttaatatagtaacaaata

SEQ ID NO: 43249 - DNA, 20 bp, synthetic construct
  source 1..20: mol_type = other DNA
tatttaatatagtaacaaat

SEQ ID NO: 43250 - DNA, 20 bp, synthetic construct
  source 1..20: mol_type = other DNA
ctatttaatatagtaacaaa

SEQ ID NO: 43251 - DNA, 20 bp, synthetic construct
  source 1..20: mol_type = other DNA
actatttaatatagtaacaa

SEQ ID NO: 43252 - DNA, 20 bp, synthetic construct
  source 1..20: mol_type = other DNA
tactatttaatatagtaaca

SEQ ID NO: 43253 - DNA, 20 bp, synthetic construct
  source 1..20: mol_type = other DNA
ttactatttaatatagtaac

SEQ ID NO: 43254 - DNA, 20 bp, synthetic construct
  source 1..20: mol_type = other DNA
tttactatttaatatagtaa

SEQ ID NO: 43255 - DNA, 20 bp, synthetic construct
  source 1..20: mol_type = other DNA
ttttactatttaatatagta

SEQ ID NO: 43256 - DNA, 20 bp, synthetic construct
  source 1..20: mol_type = other DNA
attttactatttaatatagt

SEQ ID NO: 43257 - DNA, 20 bp, synthetic construct
  source 1..20: mol_type = other DNA
tattttactatttaatatag

SEQ ID NO: 43258 - DNA, 20 bp, synthetic construct
  source 1..20: mol_type = other DNA
atattttactatttaatata

SEQ ID NO: 43259 - DNA, 20 bp, synthetic construct
  source 1..20: mol_type = other DNA
aatattttactatttaatat

SEQ ID NO: 43260 - DNA, 20 bp, synthetic construct
  source 1..20: mol_type = other DNA
aaatattttactatttaata

SEQ ID NO: 43261 - DNA, 20 bp, synthetic construct
  source 1..20: mol_type = other DNA
caaatattttactatttaat

SEQ ID NO: 43262 - DNA, 20 bp, synthetic construct
  source 1..20: mol_type = other DNA
ccaaatattttactatttaa

SEQ ID NO: 43263 - DNA, 20 bp, synthetic construct
  source 1..20: mol_type = other DNA
accaaatattttactattta

SEQ ID NO: 43264 - DNA, 20 bp, synthetic construct
  source 1..20: mol_type = other DNA
aaccaaatattttactattt

SEQ ID NO: 43265 - DNA, 20 bp, synthetic construct
  source 1..20: mol_type = other DNA
aaaccaaatattttactatt

SEQ ID NO: 43266 - DNA, 20 bp, synthetic construct
  source 1..20: mol_type = other DNA
caaaccaaatattttactat

SEQ ID NO: 43267 - DNA, 20 bp, synthetic construct
  source 1..20: mol_type = other DNA
tcaaaccaaatattttacta

SEQ ID NO: 43268 - DNA, 20 bp, synthetic construct
  source 1..20: mol_type = other DNA
ctcaaaccaaatattttact

SEQ ID NO: 43269 - DNA, 20 bp, synthetic construct
  source 1..20: mol_type = other DNA
tctcaaaccaaatattttac

SEQ ID NO: 43270 - DNA, 20 bp, synthetic construct
  source 1..20: mol_type = other DNA
atctcaaaccaaatatttta

SEQ ID NO: 43271 - DNA, 20 bp, synthetic construct
  source 1..20: mol_type = other DNA
tatctcaaaccaaatatttt

SEQ ID NO: 43272 - DNA, 20 bp, synthetic construct
  source 1..20: mol_type = other DNA
gtatctcaaaccaaatattt

SEQ ID NO: 43273 - DNA, 20 bp, synthetic construct
  source 1..20: mol_type = other DNA
agtatctcaaaccaaatatt

SEQ ID NO: 43274 - DNA, 20 bp, synthetic construct
  source 1..20: mol_type = other DNA
tagtatctcaaaccaaatat

SEQ ID NO: 43275 - DNA, 20 bp, synthetic construct
  source 1..20: mol_type = other DNA
ttagtatctcaaaccaaata

SEQ ID NO: 43276 - DNA, 20 bp, synthetic construct
  source 1..20: mol_type = other DNA
attagtatctcaaaccaaat

SEQ ID NO: 43277 - DNA, 20 bp, synthetic construct
  source 1..20: mol_type = other DNA
cattagtatctcaaaccaaa

SEQ ID NO: 43278 - DNA, 20 bp, synthetic construct
  source 1..20: mol_type = other DNA
tcattagtatctcaaaccaa

SEQ ID NO: 43279 - DNA, 20 bp, synthetic construct
  source 1..20: mol_type = other DNA
ttcattagtatctcaaacca

SEQ ID NO: 43280 - DNA, 20 bp, synthetic construct
  source 1..20: mol_type = other DNA
tttcattagtatctcaaacc

SEQ ID NO: 43281 - DNA, 20 bp, synthetic construct
  source 1..20: mol_type = other DNA
ttttcattagtatctcaaac

SEQ ID NO: 43282 - DNA, 20 bp, synthetic construct
  source 1..20: mol_type = other DNA
cttttcattagtatctcaaa

SEQ ID NO: 43283 - DNA, 20 bp, synthetic construct
  source 1..20: mol_type = other DNA
tcttttcattagtatctcaa

SEQ ID NO: 43284 - DNA, 20 bp, synthetic construct
  source 1..20: mol_type = other DNA
atcttttcattagtatctca

SEQ ID NO: 43285 - DNA, 20 bp, synthetic construct
  source 1..20: mol_type = other DNA
aatcttttcattagtatctc

SEQ ID NO: 43286 - DNA, 20 bp, synthetic construct
  source 1..20: mol_type = other DNA
taatcttttcattagtatct

SEQ ID NO: 43287 - DNA, 20 bp, synthetic construct
  source 1..20: mol_type = other DNA
ttaatcttttcattagtatc

SEQ ID NO: 43288 - DNA, 20 bp, synthetic construct
  source 1..20: mol_type = other DNA
tttaatcttttcattagtat

SEQ ID NO: 43289 - DNA, 20 bp, synthetic construct
  source 1..20: mol_type = other DNA
ttttaatcttttcattagta

SEQ ID NO: 43290 - DNA, 20 bp, synthetic construct
  source 1..20: mol_type = other DNA
cttttaatcttttcattagt

SEQ ID NO: 43291 - DNA, 20 bp, synthetic construct
  source 1..20: mol_type = other DNA
acttttaatcttttcattag

SEQ ID NO: 43292 - DNA, 20 bp, synthetic construct
  source 1..20: mol_type = other DNA
tacttttaatcttttcatta

SEQ ID NO: 43293 - DNA, 20 bp, synthetic construct
  source 1..20: mol_type = other DNA
ttacttttaatcttttcatt

SEQ ID NO: 43294 - DNA, 20 bp, synthetic construct
  source 1..20: mol_type = other DNA
tttacttttaatcttttcat

SEQ ID NO: 43295 - DNA, 20 bp, synthetic construct
  source 1..20: mol_type = other DNA
ctttacttttaatcttttca

SEQ ID NO: 43296 - DNA, 20 bp, synthetic construct
  source 1..20: mol_type = other DNA
gctttacttttaatcttttc

SEQ ID NO: 43297 - DNA, 20 bp, synthetic construct
  source 1..20: mol_type = other DNA
tgctttacttttaatctttt

SEQ ID NO: 43298 - DNA, 20 bp, synthetic construct
  source 1..20: mol_type = other DNA
atgctttacttttaatcttt

SEQ ID NO: 43299 - DNA, 20 bp, synthetic construct
  source 1..20: mol_type = other DNA
tatgctttacttttaatctt

SEQ ID NO: 43300 - DNA, 20 bp, synthetic construct
  source 1..20: mol_type = other DNA
ttatgctttacttttaatct

SEQ ID NO: 43301 - DNA, 20 bp, synthetic construct
  source 1..20: mol_type = other DNA
gttatgctttacttttaatc

SEQ ID NO: 43302 - DNA, 20 bp, synthetic construct
  source 1..20: mol_type = other DNA
agttatgctttacttttaat

SEQ ID NO: 43303 - DNA, 20 bp, synthetic construct
  source 1..20: mol_type = other DNA
aagttatgctttacttttaa

SEQ ID NO: 43304 - DNA, 20 bp, synthetic construct
  source 1..20: mol_type = other DNA
caagttatgctttactttta

SEQ ID NO: 43305 - DNA, 20 bp, synthetic construct
  source 1..20: mol_type = other DNA
tcaagttatgctttactttt

SEQ ID NO: 43306 - DNA, 20 bp, synthetic construct
  source 1..20: mol_type = other DNA
ttcaagttatgctttacttt

SEQ ID NO: 43307 - DNA, 20 bp, synthetic construct
  source 1..20: mol_type = other DNA
attcaagttatgctttactt

SEQ ID NO: 43308 - DNA, 20 bp, synthetic construct
  source 1..20: mol_type = other DNA
cattcaagttatgctttact

SEQ ID NO: 43309 - DNA, 20 bp, synthetic construct
  source 1..20: mol_type = other DNA
ccattcaagttatgctttac

SEQ ID NO: 43310 - DNA, 20 bp, synthetic construct
  source 1..20: mol_type = other DNA
tccattcaagttatgcttta

SEQ ID NO: 43311 - DNA, 20 bp, synthetic construct
  source 1..20: mol_type = other DNA
atccattcaagttatgcttt

SEQ ID NO: 43312 - DNA, 20 bp, synthetic construct
  source 1..20: mol_type = other DNA
tatccattcaagttatgctt

SEQ ID NO: 43313 - DNA, 20 bp, synthetic construct
  source 1..20: mol_type = other DNA
gtatccattcaagttatgct

SEQ ID NO: 43314 - DNA, 20 bp, synthetic construct
  source 1..20: mol_type = other DNA
tgtatccattcaagttatgc

SEQ ID NO: 43315 - DNA, 20 bp, synthetic construct
  source 1..20: mol_type = other DNA
ttgtatccattcaagttatg

SEQ ID NO: 43316 - DNA, 20 bp, synthetic construct
  source 1..20: mol_type = other DNA
tttgtatccattcaagttat

SEQ ID NO: 43317 - DNA, 20 bp, synthetic construct
  source 1..20: mol_type = other DNA
ttttgtatccattcaagtta

SEQ ID NO: 43318 - DNA, 20 bp, synthetic construct
  source 1..20: mol_type = other DNA
tttttgtatccattcaagtt

SEQ ID NO: 43319 - DNA, 20 bp, synthetic construct
  source 1..20: mol_type = other DNA
ctttttgtatccattcaagt

SEQ ID NO: 43320 - DNA, 20 bp, synthetic construct
  source 1..20: mol_type = other DNA
tctttttgtatccattcaag

SEQ ID NO: 43321 - DNA, 20 bp, synthetic construct
  source 1..20: mol_type = other DNA
ttctttttgtatccattcaa

SEQ ID NO: 43322 - DNA, 20 bp, synthetic construct
  source 1..20: mol_type = other DNA
tttctttttgtatccattca

SEQ ID NO: 43323 - DNA, 20 bp, synthetic construct
  source 1..20: mol_type = other DNA
gtttctttttgtatccattc

SEQ ID NO: 43324 - DNA, 20 bp, synthetic construct
  source 1..20: mol_type = other DNA
tgtttctttttgtatccatt

SEQ ID NO: 43325 - DNA, 20 bp, synthetic construct
  source 1..20: mol_type = other DNA
ttgtttctttttgtatccat

SEQ ID NO: 43326 - DNA, 20 bp, synthetic construct
  source 1..20: mol_type = other DNA
cttgtttctttttgtatcca

SEQ ID NO: 43327 - DNA, 20 bp, synthetic construct
  source 1..20: mol_type = other DNA
tcttgtttctttttgtatcc

SEQ ID NO: 43328 - DNA, 20 bp, synthetic construct
  source 1..20: mol_type = other DNA
ttcttgtttctttttgtatc

SEQ ID NO: 43329 - DNA, 20 bp, synthetic construct
  source 1..20: mol_type = other DNA
attcttgtttctttttgtat

SEQ ID NO: 43330 - DNA, 20 bp, synthetic construct
  source 1..20: mol_type = other DNA
aattcttgtttctttttgta

SEQ ID NO: 43331 - DNA, 20 bp, synthetic construct
  source 1..20: mol_type = other DNA
aaattcttgtttctttttgt

SEQ ID NO: 43332 - DNA, 20 bp, synthetic construct
  source 1..20: mol_type = other DNA
taaattcttgtttctttttg

SEQ ID NO: 43333 - DNA, 20 bp, synthetic construct
  source 1..20: mol_type = other DNA
ctaaattcttgtttcttttt

SEQ ID NO: 43334 - DNA, 20 bp, synthetic construct
  source 1..20: mol_type = other DNA
tctaaattcttgtttctttt

SEQ ID NO: 43335 - DNA, 20 bp, synthetic construct
  source 1..20: mol_type = other DNA
gtctaaattcttgtttcttt

SEQ ID NO: 43336 - DNA, 20 bp, synthetic construct
  source 1..20: mol_type = other DNA
agtctaaattcttgtttctt

SEQ ID NO: 43337 - DNA, 20 bp, synthetic construct
  source 1..20: mol_type = other DNA
aagtctaaattcttgtttct

SEQ ID NO: 43338 - DNA, 20 bp, synthetic construct
  source 1..20: mol_type = other DNA
gaagtctaaattcttgtttc

SEQ ID NO: 43339 - DNA, 20 bp, synthetic construct
  source 1..20: mol_type = other DNA
tgaagtctaaattcttgttt

SEQ ID NO: 43340 - DNA, 20 bp, synthetic construct
  source 1..20: mol_type = other DNA
ctgaagtctaaattcttgtt

SEQ ID NO: 43341 - DNA, 20 bp, synthetic construct
  source 1..20: mol_type = other DNA
actgaagtctaaattcttgt

SEQ ID NO: 43342 - DNA, 20 bp, synthetic construct
  source 1..20: mol_type = other DNA
cactgaagtctaaattcttg

SEQ ID NO: 43343 - DNA, 20 bp, synthetic construct
  source 1..20: mol_type = other DNA
ccactgaagtctaaattctt

SEQ ID NO: 43344 - DNA, 20 bp, synthetic construct
  source 1..20: mol_type = other DNA
tccactgaagtctaaattct

SEQ ID NO: 43345 - DNA, 20 bp, synthetic construct
  source 1..20: mol_type = other DNA
atccactgaagtctaaattc

SEQ ID NO: 43346 - DNA, 20 bp, synthetic construct
  source 1..20: mol_type = other DNA
aatccactgaagtctaaatt

SEQ ID NO: 43347 - DNA, 20 bp, synthetic construct
  source 1..20: mol_type = other DNA
aaatccactgaagtctaaat

SEQ ID NO: 43348 - DNA, 20 bp, synthetic construct
  source 1..20: mol_type = other DNA
gaaatccactgaagtctaaa

SEQ ID NO: 43349 - DNA, 20 bp, synthetic construct
  source 1..20: mol_type = other DNA
tgaaatccactgaagtctaa

SEQ ID NO: 43350 - DNA, 20 bp, synthetic construct
  source 1..20: mol_type = other DNA
ctgaaatccactgaagtcta

SEQ ID NO: 43351 - DNA, 20 bp, synthetic construct
  source 1..20: mol_type = other DNA
tctgaaatccactgaagtct

SEQ ID NO: 43352 - DNA, 20 bp, synthetic construct
  source 1..20: mol_type = other DNA
ctctgaaatccactgaagtc

SEQ ID NO: 43353 - DNA, 20 bp, synthetic construct
  source 1..20: mol_type = other DNA
tctctgaaatccactgaagt

SEQ ID NO: 43354 - DNA, 20 bp, synthetic construct
  source 1..20: mol_type = other DNA
ttctctgaaatccactgaag

SEQ ID NO: 43355 - DNA, 20 bp, synthetic construct
  source 1..20: mol_type = other DNA
attctctgaaatccactgaa

SEQ ID NO: 43356 - DNA, 20 bp, synthetic construct
  source 1..20: mol_type = other DNA
tattctctgaaatccactga

SEQ ID NO: 43357 - DNA, 20 bp, synthetic construct
  source 1..20: mol_type = other DNA
gtattctctgaaatccactg

SEQ ID NO: 43358 - DNA, 20 bp, synthetic construct
  source 1..20: mol_type = other DNA
agtattctctgaaatccact

SEQ ID NO: 43359 - DNA, 20 bp, synthetic construct
  source 1..20: mol_type = other DNA
cagtattctctgaaatccac

SEQ ID NO: 43360 - DNA, 20 bp, synthetic construct
  source 1..20: mol_type = other DNA
gcagtattctctgaaatcca

SEQ ID NO: 43361 - DNA, 20 bp, synthetic construct
  source 1..20: mol_type = other DNA
agcagtattctctgaaatcc

SEQ ID NO: 43362 - DNA, 20 bp, synthetic construct
  source 1..20: mol_type = other DNA
aagcagtattctctgaaatc

SEQ ID NO: 43363 - DNA, 20 bp, synthetic construct
  source 1..20: mol_type = other DNA
gaagcagtattctctgaaat

SEQ ID NO: 43364 - DNA, 20 bp, synthetic construct
  source 1..20: mol_type = other DNA
cgaagcagtattctctgaaa

SEQ ID NO: 43365 - DNA, 20 bp, synthetic construct
  source 1..20: mol_type = other DNA
tcgaagcagtattctctgaa

SEQ ID NO: 43366 - DNA, 20 bp, synthetic construct
  source 1..20: mol_type = other DNA
atcgaagcagtattctctga

SEQ ID NO: 43367 - DNA, 20 bp, synthetic construct
  source 1..20: mol_type = other DNA
tatcgaagcagtattctctg

SEQ ID NO: 43368 - DNA, 20 bp, synthetic construct
  source 1..20: mol_type = other DNA
atatcgaagcagtattctct

SEQ ID NO: 43369 - DNA, 20 bp, synthetic construct
  source 1..20: mol_type = other DNA
catatcgaagcagtattctc

SEQ ID NO: 43370 - DNA, 20 bp, synthetic construct
  source 1..20: mol_type = other DNA
gcatatcgaagcagtattct

SEQ ID NO: 43371 - DNA, 20 bp, synthetic construct
  source 1..20: mol_type = other DNA
agcatatcgaagcagtattc

SEQ ID NO: 43372 - DNA, 20 bp, synthetic construct
  source 1..20: mol_type = other DNA
tagcatatcgaagcagtatt

SEQ ID NO: 43373 - DNA, 20 bp, synthetic construct
  source 1..20: mol_type = other DNA
ttagcatatcgaagcagtat

SEQ ID NO: 43374 - DNA, 20 bp, synthetic construct
  source 1..20: mol_type = other DNA
gttagcatatcgaagcagta

SEQ ID NO: 43375 - DNA, 20 bp, synthetic construct
  source 1..20: mol_type = other DNA
tgttagcatatcgaagcagt

SEQ ID NO: 43376 - DNA, 20 bp, synthetic construct
  source 1..20: mol_type = other DNA
atgttagcatatcgaagcag

SEQ ID NO: 43377 - DNA, 20 bp, synthetic construct
  source 1..20: mol_type = other DNA
aatgttagcatatcgaagca

SEQ ID NO: 43378 - DNA, 20 bp, synthetic construct
  source 1..20: mol_type = other DNA
gaatgttagcatatcgaagc

SEQ ID NO: 43379 - DNA, 20 bp, synthetic construct
  source 1..20: mol_type = other DNA
ggaatgttagcatatcgaag

SEQ ID NO: 43380 - DNA, 20 bp, synthetic construct
  source 1..20: mol_type = other DNA
aggaatgttagcatatcgaa

SEQ ID NO: 43381 - DNA, 20 bp, synthetic construct
  source 1..20: mol_type = other DNA
caggaatgttagcatatcga

SEQ ID NO: 43382 - DNA, 20 bp, synthetic construct
  source 1..20: mol_type = other DNA
acaggaatgttagcatatcg

SEQ ID NO: 43383 - DNA, 20 bp, synthetic construct
  source 1..20: mol_type = other DNA
aacaggaatgttagcatatc

SEQ ID NO: 43384 - DNA, 20 bp, synthetic construct
  source 1..20: mol_type = other DNA
caacaggaatgttagcatat

SEQ ID NO: 43385 - DNA, 20 bp, synthetic construct
  source 1..20: mol_type = other DNA
ccaacaggaatgttagcata

SEQ ID NO: 43386 - DNA, 20 bp, synthetic construct
  source 1..20: mol_type = other DNA
cccaacaggaatgttagcat

SEQ ID NO: 43387 - DNA, 20 bp, synthetic construct
  source 1..20: mol_type = other DNA
acccaacaggaatgttagca

SEQ ID NO: 43388 - DNA, 20 bp, synthetic construct
  source 1..20: mol_type = other DNA
cacccaacaggaatgttagc

SEQ ID NO: 43389 - DNA, 20 bp, synthetic construct
  source 1..20: mol_type = other DNA
acacccaacaggaatgttag

SEQ ID NO: 43390 - DNA, 20 bp, synthetic construct
  source 1..20: mol_type = other DNA
gacacccaacaggaatgtta

SEQ ID NO: 43391 - DNA, 20 bp, synthetic construct
  source 1..20: mol_type = other DNA
ggacacccaacaggaatgtt

SEQ ID NO: 43392 - DNA, 20 bp, synthetic construct
  source 1..20: mol_type = other DNA
tggacacccaacaggaatgt

SEQ ID NO: 43393 - DNA, 20 bp, synthetic construct
  source 1..20: mol_type = other DNA
ttggacacccaacaggaatg

SEQ ID NO: 43394 - DNA, 20 bp, synthetic construct
  source 1..20: mol_type = other DNA
gttggacacccaacaggaat

SEQ ID NO: 43395 - DNA, 20 bp, synthetic construct
  source 1..20: mol_type = other DNA
ggttggacacccaacaggaa

SEQ ID NO: 43396 - DNA, 20 bp, synthetic construct
  source 1..20: mol_type = other DNA
cggttggacacccaacagga

SEQ ID NO: 43397 - DNA, 20 bp, synthetic construct
  source 1..20: mol_type = other DNA
acggttggacacccaacagg

SEQ ID NO: 43398 - DNA, 20 bp, synthetic construct
  source 1..20: mol_type = other DNA
cacggttggacacccaacag

SEQ ID NO: 43399 - DNA, 20 bp, synthetic construct
  source 1..20: mol_type = other DNA
acacggttggacacccaaca

SEQ ID NO: 43400 - DNA, 20 bp, synthetic construct
  source 1..20: mol_type = other DNA
gacacggttggacacccaac

SEQ ID NO: 43401 - DNA, 20 bp, synthetic construct
  source 1..20: mol_type = other DNA
tgacacggttggacacccaa

SEQ ID NO: 43402 - DNA, 20 bp, synthetic construct
  source 1..20: mol_type = other DNA
atgacacggttggacaccca

SEQ ID NO: 43403 - DNA, 20 bp, synthetic construct
  source 1..20: mol_type = other DNA
tatgacacggttggacaccc

SEQ ID NO: 43404 - DNA, 20 bp, synthetic construct
  source 1..20: mol_type = other DNA
ctatgacacggttggacacc

SEQ ID NO: 43405 - DNA, 20 bp, synthetic construct
  source 1..20: mol_type = other DNA
tctatgacacggttggacac

SEQ ID NO: 43406 - DNA, 20 bp, synthetic construct
  source 1..20: mol_type = other DNA
atctatgacacggttggaca

SEQ ID NO: 43407 - DNA, 20 bp, synthetic construct
  source 1..20: mol_type = other DNA
gatctatgacacggttggac

SEQ ID NO: 43408 - DNA, 20 bp, synthetic construct
  source 1..20: mol_type = other DNA
tgatctatgacacggttgga

SEQ ID NO: 43409 - DNA, 20 bp, synthetic construct
  source 1..20: mol_type = other DNA
ctgatctatgacacggttgg

SEQ ID NO: 43410 - DNA, 20 bp, synthetic construct
  source 1..20: mol_type = other DNA
actgatctatgacacggttg

SEQ ID NO: 43411 - DNA, 20 bp, synthetic construct
  source 1..20: mol_type = other DNA
cactgatctatgacacggtt

SEQ ID NO: 43412 - DNA, 20 bp, synthetic construct
  source 1..20: mol_type = other DNA
ccactgatctatgacacggt

SEQ ID NO: 43413 - DNA, 20 bp, synthetic construct
  source 1..20: mol_type = other DNA
tccactgatctatgacacgg

SEQ ID NO: 43414 - DNA, 20 bp, synthetic construct
  source 1..20: mol_type = other DNA
ttccactgatctatgacacg

SEQ ID NO: 43415 - DNA, 20 bp, synthetic construct
  source 1..20: mol_type = other DNA
tttccactgatctatgacac

SEQ ID NO: 43416 - DNA, 20 bp, synthetic construct
  source 1..20: mol_type = other DNA
atttccactgatctatgaca

SEQ ID NO: 43417 - DNA, 20 bp, synthetic construct
  source 1..20: mol_type = other DNA
aatttccactgatctatgac

SEQ ID NO: 43418 - DNA, 20 bp, synthetic construct
  source 1..20: mol_type = other DNA
taatttccactgatctatga

SEQ ID NO: 43419 - DNA, 20 bp, synthetic construct
  source 1..20: mol_type = other DNA
ctaatttccactgatctatg

SEQ ID NO: 43420 - DNA, 20 bp, synthetic construct
  source 1..20: mol_type = other DNA
actaatttccactgatctat

SEQ ID NO: 43421 - DNA, 20 bp, synthetic construct
  source 1..20: mol_type = other DNA
cactaatttccactgatcta

SEQ ID NO: 43422 - DNA, 20 bp, synthetic construct
  source 1..20: mol_type = other DNA
ccactaatttccactgatct

SEQ ID NO: 43423 - DNA, 20 bp, synthetic construct
  source 1..20: mol_type = other DNA
accactaatttccactgatc

SEQ ID NO: 43424 - DNA, 20 bp, synthetic construct
  source 1..20: mol_type = other DNA
aaccactaatttccactgat

SEQ ID NO: 43425 - DNA, 20 bp, synthetic construct
  source 1..20: mol_type = other DNA
aaaccactaatttccactga

SEQ ID NO: 43426 - DNA, 20 bp, synthetic construct
  source 1..20: mol_type = other DNA
gaaaccactaatttccactg

SEQ ID NO: 43427 - DNA, 20 bp, synthetic construct
  source 1..20: mol_type = other DNA
agaaaccactaatttccact

SEQ ID NO: 43428 - DNA, 20 bp, synthetic construct
  source 1..20: mol_type = other DNA
cagaaaccactaatttccac

SEQ ID NO: 43429 - DNA, 20 bp, synthetic construct
  source 1..20: mol_type = other DNA
gcagaaaccactaatttcca

SEQ ID NO: 43430 - DNA, 20 bp, synthetic construct
  source 1..20: mol_type = other DNA
tgcagaaaccactaatttcc

SEQ ID NO: 43431 - DNA, 20 bp, synthetic construct
  source 1..20: mol_type = other DNA
gtgcagaaaccactaatttc

SEQ ID NO: 43432 - DNA, 20 bp, synthetic construct
  source 1..20: mol_type = other DNA
agtgcagaaaccactaattt

SEQ ID NO: 43433 - DNA, 20 bp, synthetic construct
  source 1..20: mol_type = other DNA
aagtgcagaaaccactaatt

SEQ ID NO: 43434 - DNA, 20 bp, synthetic construct
  source 1..20: mol_type = other DNA
aaagtgcagaaaccactaat

SEQ ID NO: 43435 - DNA, 20 bp, synthetic construct
  source 1..20: mol_type = other DNA
taaagtgcagaaaccactaa

SEQ ID NO: 43436 - DNA, 20 bp, synthetic construct
  source 1..20: mol_type = other DNA
gtaaagtgcagaaaccacta

SEQ ID NO: 43437 - DNA, 20 bp, synthetic construct
  source 1..20: mol_type = other DNA
agtaaagtgcagaaaccact

SEQ ID NO: 43438 - DNA, 20 bp, synthetic construct
  source 1..20: mol_type = other DNA
cagtaaagtgcagaaaccac

SEQ ID NO: 43439 - DNA, 20 bp, synthetic construct
  source 1..20: mol_type = other DNA
acagtaaagtgcagaaacca

SEQ ID NO: 43440 - DNA, 20 bp, synthetic construct
  source 1..20: mol_type = other DNA
tacagtaaagtgcagaaacc

SEQ ID NO: 43441 - DNA, 20 bp, synthetic construct
  source 1..20: mol_type = other DNA
gtacagtaaagtgcagaaac

SEQ ID NO: 43442 - DNA, 20 bp, synthetic construct
  source 1..20: mol_type = other DNA
agtacagtaaagtgcagaaa

SEQ ID NO: 43443 - DNA, 20 bp, synthetic construct
  source 1..20: mol_type = other DNA
cagtacagtaaagtgcagaa

SEQ ID NO: 43444 - DNA, 20 bp, synthetic construct
  source 1..20: mol_type = other DNA
acagtacagtaaagtgcaga

SEQ ID NO: 43445 - DNA, 20 bp, synthetic construct
  source 1..20: mol_type = other DNA
aacagtacagtaaagtgcag

SEQ ID NO: 43446 - DNA, 20 bp, synthetic construct
  source 1..20: mol_type = other DNA
aaacagtacagtaaagtgca

SEQ ID NO: 43447 - DNA, 20 bp, synthetic construct
  source 1..20: mol_type = other DNA
aaaacagtacagtaaagtgc

SEQ ID NO: 43448 - DNA, 20 bp, synthetic construct
  source 1..20: mol_type = other DNA
aaaaacagtacagtaaagtg

SEQ ID NO: 43449 - DNA, 20 bp, synthetic construct
  source 1..20: mol_type = other DNA
aaaaaacagtacagtaaagt

SEQ ID NO: 43450 - DNA, 20 bp, synthetic construct
  source 1..20: mol_type = other DNA
aaaaaaacagtacagtaaag

SEQ ID NO: 43451 - DNA, 20 bp, synthetic construct
  source 1..20: mol_type = other DNA
taaaaaaacagtacagtaaa

SEQ ID NO: 43452 - DNA, 20 bp, synthetic construct
  source 1..20: mol_type = other DNA
ataaaaaaacagtacagtaa

SEQ ID NO: 43453 - DNA, 20 bp, synthetic construct
  source 1..20: mol_type = other DNA
tataaaaaaacagtacagta

SEQ ID NO: 43454 - DNA, 20 bp, synthetic construct
  source 1..20: mol_type = other DNA
atataaaaaaacagtacagt

SEQ ID NO: 43455 - DNA, 20 bp, synthetic construct
  source 1..20: mol_type = other DNA
catataaaaaaacagtacag

SEQ ID NO: 43456 - DNA, 20 bp, synthetic construct
  source 1..20: mol_type = other DNA
tcatataaaaaaacagtaca

SEQ ID NO: 43457 - DNA, 20 bp, synthetic construct
  source 1..20: mol_type = other DNA
atcatataaaaaaacagtac

SEQ ID NO: 43458 - DNA, 20 bp, synthetic construct
  source 1..20: mol_type = other DNA
tatcatataaaaaaacagta

SEQ ID NO: 43459 - DNA, 20 bp, synthetic construct
  source 1..20: mol_type = other DNA
ttatcatataaaaaaacagt

SEQ ID NO: 43460 - DNA, 20 bp, synthetic construct
  source 1..20: mol_type = other DNA
attatcatataaaaaaacag

SEQ ID NO: 43461 - DNA, 20 bp, synthetic construct
  source 1..20: mol_type = other DNA
tattatcatataaaaaaaca

SEQ ID NO: 43462 - DNA, 20 bp, synthetic construct
  source 1..20: mol_type = other DNA
atattatcatataaaaaaac

SEQ ID NO: 43463 - DNA, 20 bp, synthetic construct
  source 1..20: mol_type = other DNA
aatattatcatataaaaaaa

SEQ ID NO: 43464 - DNA, 20 bp, synthetic construct
  source 1..20: mol_type = other DNA
aaatattatcatataaaaaa

SEQ ID NO: 43465 - DNA, 20 bp, synthetic construct
  source 1..20: mol_type = other DNA
aaaatattatcatataaaaa

SEQ ID NO: 43466 - DNA, 20 bp, synthetic construct
  source 1..20: mol_type = other DNA
gaaaatattatcatataaaa

SEQ ID NO: 43467 - DNA, 20 bp, synthetic construct
  source 1..20: mol_type = other DNA
ggaaaatattatcatataaa

SEQ ID NO: 43468 - DNA, 20 bp, synthetic construct
  source 1..20: mol_type = other DNA
aggaaaatattatcatataa

SEQ ID NO: 43469 - DNA, 20 bp, synthetic construct
  source 1..20: mol_type = other DNA
caggaaaatattatcatata

SEQ ID NO: 43470 - DNA, 20 bp, synthetic construct
  source 1..20: mol_type = other DNA
ccaggaaaatattatcatat

SEQ ID NO: 43471 - DNA, 20 bp, synthetic construct
  source 1..20: mol_type = other DNA
accaggaaaatattatcata

SEQ ID NO: 43472 - DNA, 20 bp, synthetic construct
  source 1..20: mol_type = other DNA
aaccaggaaaatattatcat

SEQ ID NO: 43473 - DNA, 20 bp, synthetic construct
  source 1..20: mol_type = other DNA
caaccaggaaaatattatca

SEQ ID NO: 43474 - DNA, 20 bp, synthetic construct
  source 1..20: mol_type = other DNA
tcaaccaggaaaatattatc

SEQ ID NO: 43475 - DNA, 20 bp, synthetic construct
  source 1..20: mol_type = other DNA
ttcaaccaggaaaatattat

SEQ ID NO: 43476 - DNA, 20 bp, synthetic construct
  source 1..20: mol_type = other DNA
attcaaccaggaaaatatta

SEQ ID NO: 43477 - DNA, 20 bp, synthetic construct
  source 1..20: mol_type = other DNA
cattcaaccaggaaaatatt

SEQ ID NO: 43478 - DNA, 20 bp, synthetic construct
  source 1..20: mol_type = other DNA
tcattcaaccaggaaaatat

SEQ ID NO: 43479 - DNA, 20 bp, synthetic construct
  source 1..20: mol_type = other DNA
atcattcaaccaggaaaata

SEQ ID NO: 43480 - DNA, 20 bp, synthetic construct
  source 1..20: mol_type = other DNA
aatcattcaaccaggaaaat

SEQ ID NO: 43481 - DNA, 20 bp, synthetic construct
  source 1..20: mol_type = other DNA
gaatcattcaaccaggaaaa

SEQ ID NO: 43482 - DNA, 20 bp, synthetic construct
  source 1..20: mol_type = other DNA
cgaatcattcaaccaggaaa

SEQ ID NO: 43483 - DNA, 20 bp, synthetic construct
  source 1..20: mol_type = other DNA
acgaatcattcaaccaggaa

SEQ ID NO: 43484 - DNA, 20 bp, synthetic construct
  source 1..20: mol_type = other DNA
aacgaatcattcaaccagga

SEQ ID NO: 43485 - DNA, 20 bp, synthetic construct
  source 1..20: mol_type = other DNA
gaacgaatcattcaaccagg

SEQ ID NO: 43486 - DNA, 20 bp, synthetic construct
  source 1..20: mol_type = other DNA
agaacgaatcattcaaccag

SEQ ID NO: 43487 - DNA, 20 bp, synthetic construct
  source 1..20: mol_type = other DNA
aagaacgaatcattcaacca

SEQ ID NO: 43488 - DNA, 20 bp, synthetic construct
  source 1..20: mol_type = other DNA
aaagaacgaatcattcaacc

SEQ ID NO: 43489 - DNA, 20 bp, synthetic construct
  source 1..20: mol_type = other DNA
aaaagaacgaatcattcaac

SEQ ID NO: 43490 - DNA, 20 bp, synthetic construct
  source 1..20: mol_type = other DNA
caaaagaacgaatcattcaa

SEQ ID NO: 43491 - DNA, 20 bp, synthetic construct
  source 1..20: mol_type = other DNA
tcaaaagaacgaatcattca

SEQ ID NO: 43492 - DNA, 20 bp, synthetic construct
  source 1..20: mol_type = other DNA
ctcaaaagaacgaatcattc

SEQ ID NO: 43493 - DNA, 20 bp, synthetic construct
  source 1..20: mol_type = other DNA
actcaaaagaacgaatcatt

SEQ ID NO: 43494 - DNA, 20 bp, synthetic construct
  source 1..20: mol_type = other DNA
tactcaaaagaacgaatcat

SEQ ID NO: 43495 - DNA, 20 bp, synthetic construct
  source 1..20: mol_type = other DNA
ttactcaaaagaacgaatca

SEQ ID NO: 43496 - DNA, 20 bp, synthetic construct
  source 1..20: mol_type = other DNA
tttactcaaaagaacgaatc

SEQ ID NO: 43497 - DNA, 20 bp, synthetic construct
  source 1..20: mol_type = other DNA
gtttactcaaaagaacgaat

SEQ ID NO: 43498 - DNA, 20 bp, synthetic construct
  source 1..20: mol_type = other DNA
agtttactcaaaagaacgaa

SEQ ID NO: 43499 - DNA, 20 bp, synthetic construct
  source 1..20: mol_type = other DNA
gagtttactcaaaagaacga

SEQ ID NO: 43500 - DNA, 20 bp, synthetic construct
  source 1..20: mol_type = other DNA
ggagtttactcaaaagaacg

SEQ ID NO: 43501 - DNA, 20 bp, synthetic construct
  source 1..20: mol_type = other DNA
tggagtttactcaaaagaac

SEQ ID NO: 43502 - DNA, 20 bp, synthetic construct
  source 1..20: mol_type = other DNA
atggagtttactcaaaagaa

SEQ ID NO: 43503 - DNA, 20 bp, synthetic construct
  source 1..20: mol_type = other DNA
catggagtttactcaaaaga

SEQ ID NO: 43504 - DNA, 20 bp, synthetic construct
  source 1..20: mol_type = other DNA
ccatggagtttactcaaaag

SEQ ID NO: 43505 - DNA, 20 bp, synthetic construct
  source 1..20: mol_type = other DNA
accatggagtttactcaaaa

SEQ ID NO: 43506 - DNA, 20 bp, synthetic construct
  source 1..20: mol_type = other DNA
gaccatggagtttactcaaa

SEQ ID NO: 43507 - DNA, 20 bp, synthetic construct
  source 1..20: mol_type = other DNA
tgaccatggagtttactcaa

SEQ ID NO: 43508 - DNA, 20 bp, synthetic construct
  source 1..20: mol_type = other DNA
ttgaccatggagtttactca

SEQ ID NO: 43509 - DNA, 20 bp, synthetic construct
  source 1..20: mol_type = other DNA
tttgaccatggagtttactc

SEQ ID NO: 43510 - DNA, 20 bp, synthetic construct
  source 1..20: mol_type = other DNA
gtttgaccatggagtttact

SEQ ID NO: 43511 - DNA, 20 bp, synthetic construct
  source 1..20: mol_type = other DNA
tgtttgaccatggagtttac

SEQ ID NO: 43512 - DNA, 20 bp, synthetic construct
  source 1..20: mol_type = other DNA
ttgtttgaccatggagttta

SEQ ID NO: 43513 - DNA, 20 bp, synthetic construct
  source 1..20: mol_type = other DNA
attgtttgaccatggagttt

SEQ ID NO: 43514 - DNA, 20 bp, synthetic construct
  source 1..20: mol_type = other DNA
aattgtttgaccatggagtt

SEQ ID NO: 43515 - DNA, 20 bp, synthetic construct
  source 1..20: mol_type = other DNA
taattgtttgaccatggagt

SEQ ID NO: 43516 - DNA, 20 bp, synthetic construct
  source 1..20: mol_type = other DNA
gtaattgtttgaccatggag

SEQ ID NO: 43517 - DNA, 20 bp, synthetic construct
  source 1..20: mol_type = other DNA
agtaattgtttgaccatgga

SEQ ID NO: 43518 - DNA, 20 bp, synthetic construct
  source 1..20: mol_type = other DNA
aagtaattgtttgaccatgg

SEQ ID NO: 43519 - DNA, 20 bp, synthetic construct
  source 1..20: mol_type = other DNA
aaagtaattgtttgaccatg

SEQ ID NO: 43520 - DNA, 20 bp, synthetic construct
  source 1..20: mol_type = other DNA
aaaagtaattgtttgaccat

SEQ ID NO: 43521 - DNA, 20 bp, synthetic construct
  source 1..20: mol_type = other DNA
aaaaagtaattgtttgacca

SEQ ID NO: 43522 - DNA, 20 bp, synthetic construct
  source 1..20: mol_type = other DNA
taaaaagtaattgtttgacc

SEQ ID NO: 43523 - DNA, 20 bp, synthetic construct
  source 1..20: mol_type = other DNA
ataaaaagtaattgtttgac

SEQ ID NO: 43524 - DNA, 20 bp, synthetic construct
  source 1..20: mol_type = other DNA
aataaaaagtaattgtttga

SEQ ID NO: 43525 - DNA, 20 bp, synthetic construct
  source 1..20: mol_type = other DNA
taataaaaagtaattgtttg

SEQ ID NO: 43526 - DNA, 20 bp, synthetic construct
  source 1..20: mol_type = other DNA
ctaataaaaagtaattgttt

SEQ ID NO: 43527 - DNA, 20 bp, synthetic construct
  source 1..20: mol_type = other DNA
actaataaaaagtaattgtt

SEQ ID NO: 43528 - DNA, 20 bp, synthetic construct
  source 1..20: mol_type = other DNA
gactaataaaaagtaattgt

SEQ ID NO: 43529 - DNA, 20 bp, synthetic construct
  source 1..20: mol_type = other DNA
tgactaataaaaagtaattg

SEQ ID NO: 43530 - DNA, 20 bp, synthetic construct
  source 1..20: mol_type = other DNA
ttgactaataaaaagtaatt

SEQ ID NO: 43531 - DNA, 20 bp, synthetic construct
  source 1..20: mol_type = other DNA
tttgactaataaaaagtaat

SEQ ID NO: 43532 - DNA, 20 bp, synthetic construct
  source 1..20: mol_type = other DNA
ctttgactaataaaaagtaa

SEQ ID NO: 43533 - DNA, 20 bp, synthetic construct
  source 1..20: mol_type = other DNA
tctttgactaataaaaagta

SEQ ID NO: 43534 - DNA, 20 bp, synthetic construct
  source 1..20: mol_type = other DNA
atctttgactaataaaaagt

SEQ ID NO: 43535 - DNA, 20 bp, synthetic construct
  source 1..20: mol_type = other DNA
catctttgactaataaaaag

SEQ ID NO: 43536 - DNA, 20 bp, synthetic construct
  source 1..20: mol_type = other DNA
acatctttgactaataaaaa

SEQ ID NO: 43537 - DNA, 20 bp, synthetic construct
  source 1..20: mol_type = other DNA
tacatctttgactaataaaa

SEQ ID NO: 43538 - DNA, 20 bp, synthetic construct
  source 1..20: mol_type = other DNA
ttacatctttgactaataaa

SEQ ID NO: 43539 - DNA, 20 bp, synthetic construct
  source 1..20: mol_type = other DNA
gttacatctttgactaataa

SEQ ID NO: 43540 - DNA, 20 bp, synthetic construct
  source 1..20: mol_type = other DNA
ggttacatctttgactaata

SEQ ID NO: 43541 - DNA, 20 bp, synthetic construct
  source 1..20: mol_type = other DNA
tggttacatctttgactaat

SEQ ID NO: 43542 - DNA, 20 bp, synthetic construct
  source 1..20: mol_type = other DNA
gtggttacatctttgactaa

SEQ ID NO: 43543 - DNA, 20 bp, synthetic construct
  source 1..20: mol_type = other DNA
tgtggttacatctttgacta

SEQ ID NO: 43544 - DNA, 20 bp, synthetic construct
  source 1..20: mol_type = other DNA
atgtggttacatctttgact

SEQ ID NO: 43545 - DNA, 20 bp, synthetic construct
  source 1..20: mol_type = other DNA
tatgtggttacatctttgac

SEQ ID NO: 43546 - DNA, 20 bp, synthetic construct
  source 1..20: mol_type = other DNA
ttatgtggttacatctttga

SEQ ID NO: 43547 - DNA, 20 bp, synthetic construct
  source 1..20: mol_type = other DNA
attatgtggttacatctttg

SEQ ID NO: 43548 - DNA, 20 bp, synthetic construct
  source 1..20: mol_type = other DNA
gattatgtggttacatcttt

SEQ ID NO: 43549 - DNA, 20 bp, synthetic construct
  source 1..20: mol_type = other DNA
tgattatgtggttacatctt

SEQ ID NO: 43550 - DNA, 20 bp, synthetic construct
  source 1..20: mol_type = other DNA
gtgattatgtggttacatct

SEQ ID NO: 43551 - DNA, 20 bp, synthetic construct
  source 1..20: mol_type = other DNA
agtgattatgtggttacatc

SEQ ID NO: 43552 - DNA, 20 bp, synthetic construct
  source 1..20: mol_type = other DNA
tagtgattatgtggttacat

SEQ ID NO: 43553 - DNA, 20 bp, synthetic construct
  source 1..20: mol_type = other DNA
ttagtgattatgtggttaca

SEQ ID NO: 43554 - DNA, 20 bp, synthetic construct
  source 1..20: mol_type = other DNA
tttagtgattatgtggttac

SEQ ID NO: 43555 - DNA, 20 bp, synthetic construct
  source 1..20: mol_type = other DNA
ttttagtgattatgtggtta

SEQ ID NO: 43556 - DNA, 20 bp, synthetic construct
  source 1..20: mol_type = other DNA
tttttagtgattatgtggtt

SEQ ID NO: 43557 - DNA, 20 bp, synthetic construct
  source 1..20: mol_type = other DNA
ctttttagtgattatgtggt

SEQ ID NO: 43558 - DNA, 20 bp, synthetic construct
  source 1..20: mol_type = other DNA
tctttttagtgattatgtgg

SEQ ID NO: 43559 - DNA, 20 bp, synthetic construct
  source 1..20: mol_type = other DNA
ttctttttagtgattatgtg

SEQ ID NO: 43560 - DNA, 20 bp, synthetic construct
  source 1..20: mol_type = other DNA
gttctttttagtgattatgt

SEQ ID NO: 43561 - DNA, 20 bp, synthetic construct
  source 1..20: mol_type = other DNA
tgttctttttagtgattatg

SEQ ID NO: 43562 - DNA, 20 bp, synthetic construct
  source 1..20: mol_type = other DNA
ctgttctttttagtgattat

SEQ ID NO: 43563 - DNA, 20 bp, synthetic construct
  source 1..20: mol_type = other DNA
actgttctttttagtgatta

SEQ ID NO: 43564 - DNA, 20 bp, synthetic construct
  source 1..20: mol_type = other DNA
cactgttctttttagtgatt

SEQ ID NO: 43565 - DNA, 20 bp, synthetic construct
  source 1..20: mol_type = other DNA
acactgttctttttagtgat

SEQ ID NO: 43566 - DNA, 20 bp, synthetic construct
  source 1..20: mol_type = other DNA
cacactgttctttttagtga

SEQ ID NO: 43567 - DNA, 20 bp, synthetic construct
  source 1..20: mol_type = other DNA
tcacactgttctttttagtg

SEQ ID NO: 43568 - DNA, 20 bp, synthetic construct
  source 1..20: mol_type = other DNA
gtcacactgttctttttagt

SEQ ID NO: 43569 - DNA, 20 bp, synthetic construct
  source 1..20: mol_type = other DNA
agtcacactgttctttttag

SEQ ID NO: 43570 - DNA, 20 bp, synthetic construct
  source 1..20: mol_type = other DNA
aagtcacactgttcttttta

SEQ ID NO: 43571 - DNA, 20 bp, synthetic construct
  source 1..20: mol_type = other DNA
taagtcacactgttcttttt

SEQ ID NO: 43572 - DNA, 20 bp, synthetic construct
  source 1..20: mol_type = other DNA
ataagtcacactgttctttt

SEQ ID NO: 43573 - DNA, 20 bp, synthetic construct
  source 1..20: mol_type = other DNA
aataagtcacactgttcttt

SEQ ID NO: 43574 - DNA, 20 bp, synthetic construct
  source 1..20: mol_type = other DNA
aaataagtcacactgttctt

SEQ ID NO: 43575 - DNA, 20 bp, synthetic construct
  source 1..20: mol_type = other DNA
taaataagtcacactgttct

SEQ ID NO: 43576 - DNA, 20 bp, synthetic construct
  source 1..20: mol_type = other DNA
ttaaataagtcacactgttc

SEQ ID NO: 43577 - DNA, 20 bp, synthetic construct
  source 1..20: mol_type = other DNA
tttaaataagtcacactgtt

SEQ ID NO: 43578 - DNA, 20 bp, synthetic construct
  source 1..20: mol_type = other DNA
ctttaaataagtcacactgt

SEQ ID NO: 43579 - DNA, 20 bp, synthetic construct
  source 1..20: mol_type = other DNA
cctttaaataagtcacactg

SEQ ID NO: 43580 - DNA, 20 bp, synthetic construct
  source 1..20: mol_type = other DNA
ccctttaaataagtcacact

SEQ ID NO: 43581 - DNA, 20 bp, synthetic construct
  source 1..20: mol_type = other DNA
cccctttaaataagtcacac

SEQ ID NO: 43582 - DNA, 20 bp, synthetic construct
  source 1..20: mol_type = other DNA
tcccctttaaataagtcaca

SEQ ID NO: 43583 - DNA, 20 bp, synthetic construct
  source 1..20: mol_type = other DNA
atcccctttaaataagtcac

SEQ ID NO: 43584 - DNA, 20 bp, synthetic construct
  source 1..20: mol_type = other DNA
aatcccctttaaataagtca

SEQ ID NO: 43585 - DNA, 20 bp, synthetic construct
  source 1..20: mol_type = other DNA
taatcccctttaaataagtc

SEQ ID NO: 43586 - DNA, 20 bp, synthetic construct
  source 1..20: mol_type = other DNA
ataatcccctttaaataagt

SEQ ID NO: 43587 - DNA, 20 bp, synthetic construct
  source 1..20: mol_type = other DNA
cataatcccctttaaataag

SEQ ID NO: 43588 - DNA, 20 bp, synthetic construct
  source 1..20: mol_type = other DNA
acataatcccctttaaataa

SEQ ID NO: 43589 - DNA, 20 bp, synthetic construct
  source 1..20: mol_type = other DNA
aacataatcccctttaaata

SEQ ID NO: 43590 - DNA, 20 bp, synthetic construct
  source 1..20: mol_type = other DNA
aaacataatcccctttaaat

SEQ ID NO: 43591 - DNA, 20 bp, synthetic construct
  source 1..20: mol_type = other DNA
aaaacataatcccctttaaa

SEQ ID NO: 43592 - DNA, 20 bp, synthetic construct
  source 1..20: mol_type = other DNA
aaaaacataatcccctttaa

SEQ ID NO: 43593 - DNA, 20 bp, synthetic construct
  source 1..20: mol_type = other DNA
taaaaacataatccccttta

SEQ ID NO: 43594 - DNA, 20 bp, synthetic construct
  source 1..20: mol_type = other DNA
ttaaaaacataatccccttt

SEQ ID NO: 43595 - DNA, 20 bp, synthetic construct
  source 1..20: mol_type = other DNA
cttaaaaacataatcccctt

SEQ ID NO: 43596 - DNA, 20 bp, synthetic construct
  source 1..20: mol_type = other DNA
acttaaaaacataatcccct

SEQ ID NO: 43597 - DNA, 20 bp, synthetic construct
  source 1..20: mol_type = other DNA
gacttaaaaacataatcccc

SEQ ID NO: 43598 - DNA, 20 bp, synthetic construct
  source 1..20: mol_type = other DNA
agacttaaaaacataatccc

SEQ ID NO: 43599 - DNA, 20 bp, synthetic construct
  source 1..20: mol_type = other DNA
aagacttaaaaacataatcc

SEQ ID NO: 43600 - DNA, 20 bp, synthetic construct
  source 1..20: mol_type = other DNA
aaagacttaaaaacataatc

SEQ ID NO: 43601 - DNA, 20 bp, synthetic construct
  source 1..20: mol_type = other DNA
aaaagacttaaaaacataat

SEQ ID NO: 43602 - DNA, 20 bp, synthetic construct
  source 1..20: mol_type = other DNA
taaaagacttaaaaacataa

SEQ ID NO: 43603 - DNA, 20 bp, synthetic construct
  source 1..20: mol_type = other DNA
ataaaagacttaaaaacata

SEQ ID NO: 43604 - DNA, 20 bp, synthetic construct
  source 1..20: mol_type = other DNA
tataaaagacttaaaaacat

SEQ ID NO: 43605 - DNA, 20 bp, synthetic construct
  source 1..20: mol_type = other DNA
atataaaagacttaaaaaca

SEQ ID NO: 43606 - DNA, 20 bp, synthetic construct
  source 1..20: mol_type = other DNA
tatataaaagacttaaaaac

SEQ ID NO: 43607 - DNA, 20 bp, synthetic construct
  source 1..20: mol_type = other DNA
ctatataaaagacttaaaaa

SEQ ID NO: 43608 - DNA, 20 bp, synthetic construct
  source 1..20: mol_type = other DNA
gctatataaaagacttaaaa

SEQ ID NO: 43609 - DNA, 20 bp, synthetic construct
  source 1..20: mol_type = other DNA
agctatataaaagacttaaa

SEQ ID NO: 43610 - DNA, 20 bp, synthetic construct
  source 1..20: mol_type = other DNA
aagctatataaaagacttaa

SEQ ID NO: 43611 - DNA, 20 bp, synthetic construct
  source 1..20: mol_type = other DNA
aaagctatataaaagactta

SEQ ID NO: 43612 - DNA, 20 bp, synthetic construct
  source 1..20: mol_type = other DNA
caaagctatataaaagactt

SEQ ID NO: 43613 - DNA, 20 bp, synthetic construct
  source 1..20: mol_type = other DNA
acaaagctatataaaagact

SEQ ID NO: 43614 - DNA, 20 bp, synthetic construct
  source 1..20: mol_type = other DNA
tacaaagctatataaaagac

SEQ ID NO: 43615 - DNA, 20 bp, synthetic construct
  source 1..20: mol_type = other DNA
ctacaaagctatataaaaga

SEQ ID NO: 43616 - DNA, 20 bp, synthetic construct
  source 1..20: mol_type = other DNA
cctacaaagctatataaaag

SEQ ID NO: 43617 - DNA, 20 bp, synthetic construct
  source 1..20: mol_type = other DNA
ccctacaaagctatataaaa

SEQ ID NO: 43618 - DNA, 20 bp, synthetic construct
  source 1..20: mol_type = other DNA
tccctacaaagctatataaa

SEQ ID NO: 43619 - DNA, 20 bp, synthetic construct
  source 1..20: mol_type = other DNA
ctccctacaaagctatataa

SEQ ID NO: 43620 - DNA, 20 bp, synthetic construct
  source 1..20: mol_type = other DNA
cctccctacaaagctatata

SEQ ID NO: 43621 - DNA, 20 bp, synthetic construct
  source 1..20: mol_type = other DNA
gcctccctacaaagctatat

SEQ ID NO: 43622 - DNA, 20 bp, synthetic construct
  source 1..20: mol_type = other DNA
ggcctccctacaaagctata

SEQ ID NO: 43623 - DNA, 20 bp, synthetic construct
  source 1..20: mol_type = other DNA
tggcctccctacaaagctat

SEQ ID NO: 43624 - DNA, 20 bp, synthetic construct
  source 1..20: mol_type = other DNA
atggcctccctacaaagcta

SEQ ID NO: 43625 - DNA, 20 bp, synthetic construct
  source 1..20: mol_type = other DNA
tatggcctccctacaaagct

SEQ ID NO: 43626 - DNA, 20 bp, synthetic construct
  source 1..20: mol_type = other DNA
atatggcctccctacaaagc

SEQ ID NO: 43627 - DNA, 20 bp, synthetic construct
  source 1..20: mol_type = other DNA
catatggcctccctacaaag

SEQ ID NO: 43628 - DNA, 20 bp, synthetic construct
  source 1..20: mol_type = other DNA
tcatatggcctccctacaaa

SEQ ID NO: 43629 - DNA, 20 bp, synthetic construct
  source 1..20: mol_type = other DNA
ctcatatggcctccctacaa

SEQ ID NO: 43630 - DNA, 20 bp, synthetic construct
  source 1..20: mol_type = other DNA
actcatatggcctccctaca

SEQ ID NO: 43631 - DNA, 20 bp, synthetic construct
  source 1..20: mol_type = other DNA
aactcatatggcctccctac

SEQ ID NO: 43632 - DNA, 20 bp, synthetic construct
  source 1..20: mol_type = other DNA
aaactcatatggcctcccta

SEQ ID NO: 43633 - DNA, 20 bp, synthetic construct
  source 1..20: mol_type = other DNA
taaactcatatggcctccct

SEQ ID NO: 43634 - DNA, 20 bp, synthetic construct
  source 1..20: mol_type = other DNA
ttaaactcatatggcctccc

SEQ ID NO: 43635 - DNA, 20 bp, synthetic construct
  source 1..20: mol_type = other DNA
cttaaactcatatggcctcc

SEQ ID NO: 43636 - DNA, 20 bp, synthetic construct
  source 1..20: mol_type = other DNA
ccttaaactcatatggcctc

SEQ ID NO: 43637 - DNA, 20 bp, synthetic construct
  source 1..20: mol_type = other DNA
tccttaaactcatatggcct

SEQ ID NO: 43638 - DNA, 20 bp, synthetic construct
  source 1..20: mol_type = other DNA
gtccttaaactcatatggcc

SEQ ID NO: 43639 - DNA, 20 bp, synthetic construct
  source 1..20: mol_type = other DNA
tgtccttaaactcatatggc

SEQ ID NO: 43640 - DNA, 20 bp, synthetic construct
  source 1..20: mol_type = other DNA
ctgtccttaaactcatatgg

SEQ ID NO: 43641 - DNA, 20 bp, synthetic construct
  source 1..20: mol_type = other DNA
actgtccttaaactcatatg

SEQ ID NO: 43642 - DNA, 20 bp, synthetic construct
  source 1..20: mol_type = other DNA
aactgtccttaaactcatat

SEQ ID NO: 43643 - DNA, 20 bp, synthetic construct
  source 1..20: mol_type = other DNA
gaactgtccttaaactcata

SEQ ID NO: 43644 - DNA, 20 bp, synthetic construct
  source 1..20: mol_type = other DNA
cgaactgtccttaaactcat

SEQ ID NO: 43645 - DNA, 20 bp, synthetic construct
  source 1..20: mol_type = other DNA
acgaactgtccttaaactca

SEQ ID NO: 43646 - DNA, 20 bp, synthetic construct
  source 1..20: mol_type = other DNA
cacgaactgtccttaaactc

SEQ ID NO: 43647 - DNA, 20 bp, synthetic construct
  source 1..20: mol_type = other DNA
ccacgaactgtccttaaact

SEQ ID NO: 43648 - DNA, 20 bp, synthetic construct
  source 1..20: mol_type = other DNA
gccacgaactgtccttaaac

SEQ ID NO: 43649 - DNA, 20 bp, synthetic construct
  source 1..20: mol_type = other DNA
tgccacgaactgtccttaaa

SEQ ID NO: 43650 - DNA, 20 bp, synthetic construct
  source 1..20: mol_type = other DNA
atgccacgaactgtccttaa

SEQ ID NO: 43651 - DNA, 20 bp, synthetic construct
  source 1..20: mol_type = other DNA
aatgccacgaactgtcctta

SEQ ID NO: 43652 - DNA, 20 bp, synthetic construct
  source 1..20: mol_type = other DNA
aaatgccacgaactgtcctt

SEQ ID NO: 43653 - DNA, 20 bp, synthetic construct
  source 1..20: mol_type = other DNA
caaatgccacgaactgtcct

SEQ ID NO: 43654 - DNA, 20 bp, synthetic construct
  source 1..20: mol_type = other DNA
acaaatgccacgaactgtcc

SEQ ID NO: 43655 - DNA, 20 bp, synthetic construct
  source 1..20: mol_type = other DNA
aacaaatgccacgaactgtc

SEQ ID NO: 43656 - DNA, 20 bp, synthetic construct
  source 1..20: mol_type = other DNA
gaacaaatgccacgaactgt

SEQ ID NO: 43657 - DNA, 20 bp, synthetic construct
  source 1..20: mol_type = other DNA
tgaacaaatgccacgaactg

SEQ ID NO: 43658 - DNA, 20 bp, synthetic construct
  source 1..20: mol_type = other DNA
ttgaacaaatgccacgaact

SEQ ID NO: 43659 - DNA, 20 bp, synthetic construct
  source 1..20: mol_type = other DNA
cttgaacaaatgccacgaac

SEQ ID NO: 43660 - DNA, 20 bp, synthetic construct
  source 1..20: mol_type = other DNA
ccttgaacaaatgccacgaa

SEQ ID NO: 43661 - DNA, 20 bp, synthetic construct
  source 1..20: mol_type = other DNA
accttgaacaaatgccacga

SEQ ID NO: 43662 - DNA, 20 bp, synthetic construct
  source 1..20: mol_type = other DNA
aaccttgaacaaatgccacg

SEQ ID NO: 43663 - DNA, 20 bp, synthetic construct
  source 1..20: mol_type = other DNA
aaaccttgaacaaatgccac

SEQ ID NO: 43664 - DNA, 20 bp, synthetic construct
  source 1..20: mol_type = other DNA
aaaaccttgaacaaatgcca

SEQ ID NO: 43665 - DNA, 20 bp, synthetic construct
  source 1..20: mol_type = other DNA
caaaaccttgaacaaatgcc

SEQ ID NO: 43666 - DNA, 20 bp, synthetic construct
  source 1..20: mol_type = other DNA
acaaaaccttgaacaaatgc

SEQ ID NO: 43667 - DNA, 20 bp, synthetic construct
  source 1..20: mol_type = other DNA
tacaaaaccttgaacaaatg

SEQ ID NO: 43668 - DNA, 20 bp, synthetic construct
  source 1..20: mol_type = other DNA
ttacaaaaccttgaacaaat

SEQ ID NO: 43669 - DNA, 20 bp, synthetic construct
  source 1..20: mol_type = other DNA
gttacaaaaccttgaacaaa

SEQ ID NO: 43670 - DNA, 20 bp, synthetic construct
  source 1..20: mol_type = other DNA
agttacaaaaccttgaacaa

SEQ ID NO: 43671 - DNA, 20 bp, synthetic construct
  source 1..20: mol_type = other DNA
aagttacaaaaccttgaaca

SEQ ID NO: 43672 - DNA, 20 bp, synthetic construct
  source 1..20: mol_type = other DNA
caagttacaaaaccttgaac

SEQ ID NO: 43673 - DNA, 20 bp, synthetic construct
  source 1..20: mol_type = other DNA
ccaagttacaaaaccttgaa

SEQ ID NO: 43674 - DNA, 20 bp, synthetic construct
  source 1..20: mol_type = other DNA
gccaagttacaaaaccttga

SEQ ID NO: 43675 - DNA, 20 bp, synthetic construct
  source 1..20: mol_type = other DNA
tgccaagttacaaaaccttg

SEQ ID NO: 43676 - DNA, 20 bp, synthetic construct
  source 1..20: mol_type = other DNA
atgccaagttacaaaacctt

SEQ ID NO: 43677 - DNA, 20 bp, synthetic construct
  source 1..20: mol_type = other DNA
gatgccaagttacaaaacct

SEQ ID NO: 43678 - DNA, 20 bp, synthetic construct
  source 1..20: mol_type = other DNA
agatgccaagttacaaaacc

SEQ ID NO: 43679 - DNA, 20 bp, synthetic construct
  source 1..20: mol_type = other DNA
gagatgccaagttacaaaac

SEQ ID NO: 43680 - DNA, 20 bp, synthetic construct
  source 1..20: mol_type = other DNA
tgagatgccaagttacaaaa

SEQ ID NO: 43681 - DNA, 20 bp, synthetic construct
  source 1..20: mol_type = other DNA
ctgagatgccaagttacaaa

SEQ ID NO: 43682 - DNA, 20 bp, synthetic construct
  source 1..20: mol_type = other DNA
gctgagatgccaagttacaa

SEQ ID NO: 43683 - DNA, 20 bp, synthetic construct
  source 1..20: mol_type = other DNA
tgctgagatgccaagttaca

SEQ ID NO: 43684 - DNA, 20 bp, synthetic construct
  source 1..20: mol_type = other DNA
ctgctgagatgccaagttac

SEQ ID NO: 43685 - DNA, 20 bp, synthetic construct
  source 1..20: mol_type = other DNA
gctgctgagatgccaagtta

SEQ ID NO: 43686 - DNA, 20 bp, synthetic construct
  source 1..20: mol_type = other DNA
ggctgctgagatgccaagtt

SEQ ID NO: 43687 - DNA, 20 bp, synthetic construct
  source 1..20: mol_type = other DNA
tggctgctgagatgccaagt

SEQ ID NO: 43688 - DNA, 20 bp, synthetic construct
  source 1..20: mol_type = other DNA
gtggctgctgagatgccaag

SEQ ID NO: 43689 - DNA, 20 bp, synthetic construct
  source 1..20: mol_type = other DNA
ggtggctgctgagatgccaa

SEQ ID NO: 43690 - DNA, 20 bp, synthetic construct
  source 1..20: mol_type = other DNA
tggtggctgctgagatgcca

SEQ ID NO: 43691 - DNA, 20 bp, synthetic construct
  source 1..20: mol_type = other DNA
ctggtggctgctgagatgcc

SEQ ID NO: 43692 - DNA, 20 bp, synthetic construct
  source 1..20: mol_type = other DNA
cctggtggctgctgagatgc

SEQ ID NO: 43693 - DNA, 20 bp, synthetic construct
  source 1..20: mol_type = other DNA
tcctggtggctgctgagatg

SEQ ID NO: 43694 - DNA, 20 bp, synthetic construct
  source 1..20: mol_type = other DNA
atcctggtggctgctgagat

SEQ ID NO: 43695 - DNA, 20 bp, synthetic construct
  source 1..20: mol_type = other DNA
tatcctggtggctgctgaga

SEQ ID NO: 43696 - DNA, 20 bp, synthetic construct
  source 1..20: mol_type = other DNA
gtatcctggtggctgctgag

SEQ ID NO: 43697 - DNA, 20 bp, synthetic construct
  source 1..20: mol_type = other DNA
ggtatcctggtggctgctga

SEQ ID NO: 43698 - DNA, 20 bp, synthetic construct
  source 1..20: mol_type = other DNA
tggtatcctggtggctgctg

SEQ ID NO: 43699 - DNA, 20 bp, synthetic construct
  source 1..20: mol_type = other DNA
ctggtatcctggtggctgct

SEQ ID NO: 43700 - DNA, 20 bp, synthetic construct
  source 1..20: mol_type = other DNA
tctggtatcctggtggctgc

SEQ ID NO: 43701 - DNA, 20 bp, synthetic construct
  source 1..20: mol_type = other DNA
atctggtatcctggtggctg

SEQ ID NO: 43702 - DNA, 20 bp, synthetic construct
  source 1..20: mol_type = other DNA
gatctggtatcctggtggct

SEQ ID NO: 43703 - DNA, 20 bp, synthetic construct
  source 1..20: mol_type = other DNA
tgatctggtatcctggtggc

SEQ ID NO: 43704 - DNA, 20 bp, synthetic construct
  source 1..20: mol_type = other DNA
atgatctggtatcctggtgg

SEQ ID NO: 43705 - DNA, 20 bp, synthetic construct
  source 1..20: mol_type = other DNA
gatgatctggtatcctggtg

SEQ ID NO: 43706 - DNA, 20 bp, synthetic construct
  source 1..20: mol_type = other DNA
cgatgatctggtatcctggt

SEQ ID NO: 43707 - DNA, 20 bp, synthetic construct
  source 1..20: mol_type = other DNA
acgatgatctggtatcctgg

SEQ ID NO: 43708 - DNA, 20 bp, synthetic construct
  source 1..20: mol_type = other DNA
aacgatgatctggtatcctg

SEQ ID NO: 43709 - DNA, 20 bp, synthetic construct
  source 1..20: mol_type = other DNA
gaacgatgatctggtatcct

SEQ ID NO: 43710 - DNA, 20 bp, synthetic construct
  source 1..20: mol_type = other DNA
agaacgatgatctggtatcc

SEQ ID NO: 43711 - DNA, 20 bp, synthetic construct
  source 1..20: mol_type = other DNA
tagaacgatgatctggtatc

SEQ ID NO: 43712 - DNA, 20 bp, synthetic construct
  source 1..20: mol_type = other DNA
ttagaacgatgatctggtat

SEQ ID NO: 43713 - DNA, 20 bp, synthetic construct
  source 1..20: mol_type = other DNA
cttagaacgatgatctggta

SEQ ID NO: 43714 - DNA, 20 bp, synthetic construct
  source 1..20: mol_type = other DNA
acttagaacgatgatctggt

SEQ ID NO: 43715 - DNA, 20 bp, synthetic construct
  source 1..20: mol_type = other DNA
tacttagaacgatgatctgg

SEQ ID NO: 43716 - DNA, 20 bp, synthetic construct
  source 1..20: mol_type = other DNA
ttacttagaacgatgatctg

SEQ ID NO: 43717 - DNA, 20 bp, synthetic construct
  source 1..20: mol_type = other DNA
cttacttagaacgatgatct

SEQ ID NO: 43718 - DNA, 20 bp, synthetic construct
  source 1..20: mol_type = other DNA
tcttacttagaacgatgatc

SEQ ID NO: 43719 - DNA, 20 bp, synthetic construct
  source 1..20: mol_type = other DNA
atcttacttagaacgatgat

SEQ ID NO: 43720 - DNA, 20 bp, synthetic construct
  source 1..20: mol_type = other DNA
aatcttacttagaacgatga

SEQ ID NO: 43721 - DNA, 20 bp, synthetic construct
  source 1..20: mol_type = other DNA
aaatcttacttagaacgatg

SEQ ID NO: 43722 - DNA, 20 bp, synthetic construct
  source 1..20: mol_type = other DNA
taaatcttacttagaacgat

SEQ ID NO: 43723 - DNA, 20 bp, synthetic construct
  source 1..20: mol_type = other DNA
ctaaatcttacttagaacga

SEQ ID NO: 43724 - DNA, 20 bp, synthetic construct
  source 1..20: mol_type = other DNA
cctaaatcttacttagaacg

SEQ ID NO: 43725 - DNA, 20 bp, synthetic construct
  source 1..20: mol_type = other DNA
gcctaaatcttacttagaac

SEQ ID NO: 43726 - DNA, 20 bp, synthetic construct
  source 1..20: mol_type = other DNA
tgcctaaatcttacttagaa

SEQ ID NO: 43727 - DNA, 20 bp, synthetic construct
  source 1..20: mol_type = other DNA
atgcctaaatcttacttaga

SEQ ID NO: 43728 - DNA, 20 bp, synthetic construct
  source 1..20: mol_type = other DNA
aatgcctaaatcttacttag

SEQ ID NO: 43729 - DNA, 20 bp, synthetic construct
  source 1..20: mol_type = other DNA
aaatgcctaaatcttactta

SEQ ID NO: 43730 - DNA, 20 bp, synthetic construct
  source 1..20: mol_type = other DNA
aaaatgcctaaatcttactt

SEQ ID NO: 43731 - DNA, 20 bp, synthetic construct
  source 1..20: mol_type = other DNA
taaaatgcctaaatcttact

SEQ ID NO: 43732 - DNA, 20 bp, synthetic construct
  source 1..20: mol_type = other DNA
ctaaaatgcctaaatcttac

SEQ ID NO: 43733 - DNA, 20 bp, synthetic construct
  source 1..20: mol_type = other DNA
gctaaaatgcctaaatctta

SEQ ID NO: 43734 - DNA, 20 bp, synthetic construct
  source 1..20: mol_type = other DNA
ggctaaaatgcctaaatctt

SEQ ID NO: 43735 - DNA, 20 bp, synthetic construct
  source 1..20: mol_type = other DNA
aggctaaaatgcctaaatct

SEQ ID NO: 43736 - DNA, 20 bp, synthetic construct
  source 1..20: mol_type = other DNA
aaggctaaaatgcctaaatc

SEQ ID NO: 43737 - DNA, 20 bp, synthetic construct
  source 1..20: mol_type = other DNA
gaaggctaaaatgcctaaat

SEQ ID NO: 43738 - DNA, 20 bp, synthetic construct
  source 1..20: mol_type = other DNA
tgaaggctaaaatgcctaaa

SEQ ID NO: 43739 - DNA, 20 bp, synthetic construct
  source 1..20: mol_type = other DNA
atgaaggctaaaatgcctaa

SEQ ID NO: 43740 - DNA, 20 bp, synthetic construct
  source 1..20: mol_type = other DNA
catgaaggctaaaatgccta

SEQ ID NO: 43741 - DNA, 20 bp, synthetic construct
  source 1..20: mol_type = other DNA
acatgaaggctaaaatgcct

SEQ ID NO: 43742 - DNA, 20 bp, synthetic construct
  source 1..20: mol_type = other DNA
tacatgaaggctaaaatgcc

SEQ ID NO: 43743 - DNA, 20 bp, synthetic construct
  source 1..20: mol_type = other DNA
gtacatgaaggctaaaatgc

SEQ ID NO: 43744 - DNA, 20 bp, synthetic construct
  source 1..20: mol_type = other DNA
tgtacatgaaggctaaaatg

SEQ ID NO: 43745 - DNA, 20 bp, synthetic construct
  source 1..20: mol_type = other DNA
ctgtacatgaaggctaaaat

SEQ ID NO: 43746 - DNA, 20 bp, synthetic construct
  source 1..20: mol_type = other DNA
tctgtacatgaaggctaaaa

SEQ ID NO: 43747 - DNA, 20 bp, synthetic construct
  source 1..20: mol_type = other DNA
gtctgtacatgaaggctaaa

SEQ ID NO: 43748 - DNA, 20 bp, synthetic construct
  source 1..20: mol_type = other DNA
agtctgtacatgaaggctaa

SEQ ID NO: 43749 - DNA, 20 bp, synthetic construct
  source 1..20: mol_type = other DNA
tagtctgtacatgaaggcta

SEQ ID NO: 43750 - DNA, 20 bp, synthetic construct
  source 1..20: mol_type = other DNA
atagtctgtacatgaaggct

SEQ ID NO: 43751 - DNA, 20 bp, synthetic construct
  source 1..20: mol_type = other DNA
tatagtctgtacatgaaggc

SEQ ID NO: 43752 - DNA, 20 bp, synthetic construct
  source 1..20: mol_type = other DNA
ttatagtctgtacatgaagg

SEQ ID NO: 43753 - DNA, 20 bp, synthetic construct
  source 1..20: mol_type = other DNA
cttatagtctgtacatgaag

SEQ ID NO: 43754 - DNA, 20 bp, synthetic construct
  source 1..20: mol_type = other DNA
acttatagtctgtacatgaa

SEQ ID NO: 43755 - DNA, 20 bp, synthetic construct
  source 1..20: mol_type = other DNA
tacttatagtctgtacatga

SEQ ID NO: 43756 - DNA, 20 bp, synthetic construct
  source 1..20: mol_type = other DNA
gtacttatagtctgtacatg

SEQ ID NO: 43757 - DNA, 20 bp, synthetic construct
  source 1..20: mol_type = other DNA
tgtacttatagtctgtacat

SEQ ID NO: 43758 - DNA, 20 bp, synthetic construct
  source 1..20: mol_type = other DNA
gtgtacttatagtctgtaca

SEQ ID NO: 43759 - DNA, 20 bp, synthetic construct
  source 1..20: mol_type = other DNA
ggtgtacttatagtctgtac

SEQ ID NO: 43760 - DNA, 20 bp, synthetic construct
  source 1..20: mol_type = other DNA
gggtgtacttatagtctgta

SEQ ID NO: 43761 - DNA, 20 bp, synthetic construct
  source 1..20: mol_type = other DNA
ggggtgtacttatagtctgt

SEQ ID NO: 43762 - DNA, 20 bp, synthetic construct
  source 1..20: mol_type = other DNA
gggggtgtacttatagtctg

SEQ ID NO: 43763 - DNA, 20 bp, synthetic construct
  source 1..20: mol_type = other DNA
ggggggtgtacttatagtct

SEQ ID NO: 43764 - DNA, 20 bp, synthetic construct
  source 1..20: mol_type = other DNA
gggggggtgtacttatagtc

SEQ ID NO: 43765 - DNA, 20 bp, synthetic construct
  source 1..20: mol_type = other DNA
tgggggggtgtacttatagt

SEQ ID NO: 43766 - DNA, 20 bp, synthetic construct
  source 1..20: mol_type = other DNA
gtgggggggtgtacttatag

SEQ ID NO: 43767 - DNA, 20 bp, synthetic construct
  source 1..20: mol_type = other DNA
tgtgggggggtgtacttata

SEQ ID NO: 43768 - DNA, 20 bp, synthetic construct
  source 1..20: mol_type = other DNA
gtgtgggggggtgtacttat

SEQ ID NO: 43769 - DNA, 20 bp, synthetic construct
  source 1..20: mol_type = other DNA
ggtgtgggggggtgtactta

SEQ ID NO: 43770 - DNA, 20 bp, synthetic construct
  source 1..20: mol_type = other DNA
gggtgtgggggggtgtactt

SEQ ID NO: 43771 - DNA, 20 bp, synthetic construct
  source 1..20: mol_type = other DNA
ggggtgtgggggggtgtact

SEQ ID NO: 43772 - DNA, 20 bp, synthetic construct
  source 1..20: mol_type = other DNA
aggggtgtgggggggtgtac

SEQ ID NO: 43773 - DNA, 20 bp, synthetic construct
  source 1..20: mol_type = other DNA
taggggtgtgggggggtgta

SEQ ID NO: 43774 - DNA, 20 bp, synthetic construct
  source 1..20: mol_type = other DNA
gtaggggtgtgggggggtgt

SEQ ID NO: 43775 - DNA, 20 bp, synthetic construct
  source 1..20: mol_type = other DNA
ggtaggggtgtgggggggtg

SEQ ID NO: 43776 - DNA, 20 bp, synthetic construct
  source 1..20: mol_type = other DNA
tggtaggggtgtgggggggt

SEQ ID NO: 43777 - DNA, 20 bp, synthetic construct
  source 1..20: mol_type = other DNA
ttggtaggggtgtggggggg

SEQ ID NO: 43778 - DNA, 20 bp, synthetic construct
  source 1..20: mol_type = other DNA
tttggtaggggtgtgggggg

SEQ ID NO: 43779 - DNA, 20 bp, synthetic construct
  source 1..20: mol_type = other DNA
ttttggtaggggtgtggggg

SEQ ID NO: 43780 - DNA, 20 bp, synthetic construct
  source 1..20: mol_type = other DNA
gttttggtaggggtgtgggg

SEQ ID NO: 43781 - DNA, 20 bp, synthetic construct
  source 1..20: mol_type = other DNA
agttttggtaggggtgtggg

SEQ ID NO: 43782 - DNA, 20 bp, synthetic construct
  source 1..20: mol_type = other DNA
cagttttggtaggggtgtgg

SEQ ID NO: 43783 - DNA, 20 bp, synthetic construct
  source 1..20: mol_type = other DNA
acagttttggtaggggtgtg

SEQ ID NO: 43784 - DNA, 20 bp, synthetic construct
  source 1..20: mol_type = other DNA
tacagttttggtaggggtgt

SEQ ID NO: 43785 - DNA, 20 bp, synthetic construct
  source 1..20: mol_type = other DNA
ttacagttttggtaggggtg

SEQ ID NO: 43786 - DNA, 20 bp, synthetic construct
  source 1..20: mol_type = other DNA
tttacagttttggtaggggt

SEQ ID NO: 43787 - DNA, 20 bp, synthetic construct
  source 1..20: mol_type = other DNA
atttacagttttggtagggg

SEQ ID NO: 43788 - DNA, 20 bp, synthetic construct
  source 1..20: mol_type = other DNA
aatttacagttttggtaggg

SEQ ID NO: 43789 - DNA, 20 bp, synthetic construct
  source 1..20: mol_type = other DNA
gaatttacagttttggtagg

SEQ ID NO: 43790 - DNA, 20 bp, synthetic construct
  source 1..20: mol_type = other DNA
tgaatttacagttttggtag

SEQ ID NO: 43791 - DNA, 20 bp, synthetic construct
  source 1..20: mol_type = other DNA
ttgaatttacagttttggta

SEQ ID NO: 43792 - DNA, 20 bp, synthetic construct
  source 1..20: mol_type = other DNA
tttgaatttacagttttggt

SEQ ID NO: 43793 - DNA, 20 bp, synthetic construct
  source 1..20: mol_type = other DNA
atttgaatttacagttttgg

SEQ ID NO: 43794 - DNA, 20 bp, synthetic construct
  source 1..20: mol_type = other DNA
catttgaatttacagttttg

SEQ ID NO: 43795 - DNA, 20 bp, synthetic construct
  source 1..20: mol_type = other DNA
tcatttgaatttacagtttt

SEQ ID NO: 43796 - DNA, 20 bp, synthetic construct
  source 1..20: mol_type = other DNA
atcatttgaatttacagttt

SEQ ID NO: 43797 - DNA, 20 bp, synthetic construct
  source 1..20: mol_type = other DNA
catcatttgaatttacagtt

SEQ ID NO: 43798 - DNA, 20 bp, synthetic construct
  source 1..20: mol_type = other DNA
acatcatttgaatttacagt

SEQ ID NO: 43799 - DNA, 20 bp, synthetic construct
  source 1..20: mol_type = other DNA
aacatcatttgaatttacag

SEQ ID NO: 43800 - DNA, 20 bp, synthetic construct
  source 1..20: mol_type = other DNA
aaacatcatttgaatttaca

SEQ ID NO: 43801 - DNA, 20 bp, synthetic construct
  source 1..20: mol_type = other DNA
caaacatcatttgaatttac

SEQ ID NO: 43802 - DNA, 20 bp, synthetic construct
  source 1..20: mol_type = other DNA
tcaaacatcatttgaattta

SEQ ID NO: 43803 - DNA, 20 bp, synthetic construct
  source 1..20: mol_type = other DNA
ttcaaacatcatttgaattt

SEQ ID NO: 43804 - DNA, 20 bp, synthetic construct
  source 1..20: mol_type = other DNA
tttcaaacatcatttgaatt

SEQ ID NO: 43805 - DNA, 20 bp, synthetic construct
  source 1..20: mol_type = other DNA
ttttcaaacatcatttgaat

SEQ ID NO: 43806 - DNA, 20 bp, synthetic construct
  source 1..20: mol_type = other DNA
tttttcaaacatcatttgaa

SEQ ID NO: 43807 - DNA, 20 bp, synthetic construct
  source 1..20: mol_type = other DNA
ctttttcaaacatcatttga

SEQ ID NO: 43808 - DNA, 20 bp, synthetic construct
  source 1..20: mol_type = other DNA
gctttttcaaacatcatttg

SEQ ID NO: 43809 - DNA, 20 bp, synthetic construct
  source 1..20: mol_type = other DNA
tgctttttcaaacatcattt

SEQ ID NO: 43810 - DNA, 20 bp, synthetic construct
  source 1..20: mol_type = other DNA
atgctttttcaaacatcatt

SEQ ID NO: 43811 - DNA, 20 bp, synthetic construct
  source 1..20: mol_type = other DNA
tatgctttttcaaacatcat

SEQ ID NO: 43812 - DNA, 20 bp, synthetic construct
  source 1..20: mol_type = other DNA
ctatgctttttcaaacatca

SEQ ID NO: 43813 - DNA, 20 bp, synthetic construct
  source 1..20: mol_type = other DNA
tctatgctttttcaaacatc

SEQ ID NO: 43814 - DNA, 20 bp, synthetic construct
  source 1..20: mol_type = other DNA
ttctatgctttttcaaacat

SEQ ID NO: 43815 - DNA, 20 bp, synthetic construct
  source 1..20: mol_type = other DNA
attctatgctttttcaaaca

SEQ ID NO: 43816 - DNA, 20 bp, synthetic construct
  source 1..20: mol_type = other DNA
aattctatgctttttcaaac

SEQ ID NO: 43817 - DNA, 20 bp, synthetic construct
  source 1..20: mol_type = other DNA
aaattctatgctttttcaaa

SEQ ID NO: 43818 - DNA, 20 bp, synthetic construct
  source 1..20: mol_type = other DNA
aaaattctatgctttttcaa

SEQ ID NO: 43819 - DNA, 20 bp, synthetic construct
  source 1..20: mol_type = other DNA
aaaaattctatgctttttca

SEQ ID NO: 43820 - DNA, 20 bp, synthetic construct
  source 1..20: mol_type = other DNA
caaaaattctatgctttttc

SEQ ID NO: 43821 - DNA, 20 bp, synthetic construct
  source 1..20: mol_type = other DNA
acaaaaattctatgcttttt

SEQ ID NO: 43822 - DNA, 20 bp, synthetic construct
  source 1..20: mol_type = other DNA
aacaaaaattctatgctttt

SEQ ID NO: 43823 - DNA, 20 bp, synthetic construct
  source 1..20: mol_type = other DNA
taacaaaaattctatgcttt

SEQ ID NO: 43824 - DNA, 20 bp, synthetic construct
  source 1..20: mol_type = other DNA
ctaacaaaaattctatgctt

SEQ ID NO: 43825 - DNA, 20 bp, synthetic construct
  source 1..20: mol_type = other DNA
cctaacaaaaattctatgct

SEQ ID NO: 43826 - DNA, 20 bp, synthetic construct
  source 1..20: mol_type = other DNA
gcctaacaaaaattctatgc

SEQ ID NO: 43827 - DNA, 20 bp, synthetic construct
  source 1..20: mol_type = other DNA
cgcctaacaaaaattctatg

SEQ ID NO: 43828 - DNA, 20 bp, synthetic construct
  source 1..20: mol_type = other DNA
tcgcctaacaaaaattctat

SEQ ID NO: 43829 - DNA, 20 bp, synthetic construct
  source 1..20: mol_type = other DNA
ctcgcctaacaaaaattcta

SEQ ID NO: 43830 - DNA, 20 bp, synthetic construct
  source 1..20: mol_type = other DNA
cctcgcctaacaaaaattct

SEQ ID NO: 43831 - DNA, 20 bp, synthetic construct
  source 1..20: mol_type = other DNA
acctcgcctaacaaaaattc

SEQ ID NO: 43832 - DNA, 20 bp, synthetic construct
  source 1..20: mol_type = other DNA
tacctcgcctaacaaaaatt

SEQ ID NO: 43833 - DNA, 20 bp, synthetic construct
  source 1..20: mol_type = other DNA
ctacctcgcctaacaaaaat

SEQ ID NO: 43834 - DNA, 20 bp, synthetic construct
  source 1..20: mol_type = other DNA
actacctcgcctaacaaaaa

SEQ ID NO: 43835 - DNA, 20 bp, synthetic construct
  source 1..20: mol_type = other DNA
aactacctcgcctaacaaaa

SEQ ID NO: 43836 - DNA, 20 bp, synthetic construct
  source 1..20: mol_type = other DNA
aaactacctcgcctaacaaa

SEQ ID NO: 43837 - DNA, 20 bp, synthetic construct
  source 1..20: mol_type = other DNA
taaactacctcgcctaacaa

SEQ ID NO: 43838 - DNA, 20 bp, synthetic construct
  source 1..20: mol_type = other DNA
ataaactacctcgcctaaca

SEQ ID NO: 43839 - DNA, 20 bp, synthetic construct
  source 1..20: mol_type = other DNA
aataaactacctcgcctaac

SEQ ID NO: 43840 - DNA, 20 bp, synthetic construct
  source 1..20: mol_type = other DNA
gaataaactacctcgcctaa

SEQ ID NO: 43841 - DNA, 20 bp, synthetic construct
  source 1..20: mol_type = other DNA
ggaataaactacctcgccta

SEQ ID NO: 43842 - DNA, 20 bp, synthetic construct
  source 1..20: mol_type = other DNA
aggaataaactacctcgcct

SEQ ID NO: 43843 - DNA, 20 bp, synthetic construct
  source 1..20: mol_type = other DNA
aaggaataaactacctcgcc

SEQ ID NO: 43844 - DNA, 20 bp, synthetic construct
  source 1..20: mol_type = other DNA
caaggaataaactacctcgc

SEQ ID NO: 43845 - DNA, 20 bp, synthetic construct
  source 1..20: mol_type = other DNA
acaaggaataaactacctcg

SEQ ID NO: 43846 - DNA, 20 bp, synthetic construct
  source 1..20: mol_type = other DNA
cacaaggaataaactacctc

SEQ ID NO: 43847 - DNA, 20 bp, synthetic construct
  source 1..20: mol_type = other DNA
tcacaaggaataaactacct

SEQ ID NO: 43848 - DNA, 20 bp, synthetic construct
  source 1..20: mol_type = other DNA
atcacaaggaataaactacc

SEQ ID NO: 43849 - DNA, 20 bp, synthetic construct
  source 1..20: mol_type = other DNA
tatcacaaggaataaactac

SEQ ID NO: 43850 - DNA, 20 bp, synthetic construct
  source 1..20: mol_type = other DNA
gtatcacaaggaataaacta

SEQ ID NO: 43851 - DNA, 20 bp, synthetic construct
  source 1..20: mol_type = other DNA
tgtatcacaaggaataaact

SEQ ID NO: 43852 - DNA, 20 bp, synthetic construct
  source 1..20: mol_type = other DNA
ctgtatcacaaggaataaac

SEQ ID NO: 43853 - DNA, 20 bp, synthetic construct
  source 1..20: mol_type = other DNA
actgtatcacaaggaataaa

SEQ ID NO: 43854 - DNA, 20 bp, synthetic construct
  source 1..20: mol_type = other DNA
aactgtatcacaaggaataa

SEQ ID NO: 43855 - DNA, 20 bp, synthetic construct
  source 1..20: mol_type = other DNA
gaactgtatcacaaggaata

SEQ ID NO: 43856 - DNA, 20 bp, synthetic construct
  source 1..20: mol_type = other DNA
ggaactgtatcacaaggaat

SEQ ID NO: 43857 - DNA, 20 bp, synthetic construct
  source 1..20: mol_type = other DNA
tggaactgtatcacaaggaa

SEQ ID NO: 43858 - DNA, 20 bp, synthetic construct
  source 1..20: mol_type = other DNA
ctggaactgtatcacaagga

SEQ ID NO: 43859 - DNA, 20 bp, synthetic construct
  source 1..20: mol_type = other DNA
tctggaactgtatcacaagg

SEQ ID NO: 43860 - DNA, 20 bp, synthetic construct
  source 1..20: mol_type = other DNA
ctctggaactgtatcacaag

SEQ ID NO: 43861 - DNA, 20 bp, synthetic construct
  source 1..20: mol_type = other DNA
tctctggaactgtatcacaa

SEQ ID NO: 43862 - DNA, 20 bp, synthetic construct
  source 1..20: mol_type = other DNA
ctctctggaactgtatcaca

SEQ ID NO: 43863 - DNA, 20 bp, synthetic construct
  source 1..20: mol_type = other DNA
cctctctggaactgtatcac

SEQ ID NO: 43864 - DNA, 20 bp, synthetic construct
  source 1..20: mol_type = other DNA
gcctctctggaactgtatca

SEQ ID NO: 43865 - DNA, 20 bp, synthetic construct
  source 1..20: mol_type = other DNA
tgcctctctggaactgtatc

SEQ ID NO: 43866 - DNA, 20 bp, synthetic construct
  source 1..20: mol_type = other DNA
ctgcctctctggaactgtat

SEQ ID NO: 43867 - DNA, 20 bp, synthetic construct
  source 1..20: mol_type = other DNA
gctgcctctctggaactgta

SEQ ID NO: 43868 - DNA, 20 bp, synthetic construct
  source 1..20: mol_type = other DNA
tgctgcctctctggaactgt

SEQ ID NO: 43869 - DNA, 20 bp, synthetic construct
  source 1..20: mol_type = other DNA
atgctgcctctctggaactg

SEQ ID NO: 43870 - DNA, 20 bp, synthetic construct
  source 1..20: mol_type = other DNA
tatgctgcctctctggaact

SEQ ID NO: 43871 - DNA, 20 bp, synthetic construct
  source 1..20: mol_type = other DNA
ttatgctgcctctctggaac

SEQ ID NO: 43872 - DNA, 20 bp, synthetic construct
  source 1..20: mol_type = other DNA
gttatgctgcctctctggaa

SEQ ID NO: 43873 - DNA, 20 bp, synthetic construct
  source 1..20: mol_type = other DNA
ggttatgctgcctctctgga

SEQ ID NO: 43874 - DNA, 20 bp, synthetic construct
  source 1..20: mol_type = other DNA
aggttatgctgcctctctgg

SEQ ID NO: 43875 - DNA, 20 bp, synthetic construct
  source 1..20: mol_type = other DNA
taggttatgctgcctctctg

SEQ ID NO: 43876 - DNA, 20 bp, synthetic construct
  source 1..20: mol_type = other DNA
ctaggttatgctgcctctct

SEQ ID NO: 43877 - DNA, 20 bp, synthetic construct
  source 1..20: mol_type = other DNA
cctaggttatgctgcctctc

SEQ ID NO: 43878 - DNA, 20 bp, synthetic construct
  source 1..20: mol_type = other DNA
tcctaggttatgctgcctct

SEQ ID NO: 43879 - DNA, 20 bp, synthetic construct
  source 1..20: mol_type = other DNA
ttcctaggttatgctgcctc

SEQ ID NO: 43880 - DNA, 20 bp, synthetic construct
  source 1..20: mol_type = other DNA
attcctaggttatgctgcct

SEQ ID NO: 43881 - DNA, 20 bp, synthetic construct
  source 1..20: mol_type = other DNA
cattcctaggttatgctgcc

SEQ ID NO: 43882 - DNA, 20 bp, synthetic construct
  source 1..20: mol_type = other DNA
tcattcctaggttatgctgc

SEQ ID NO: 43883 - DNA, 20 bp, synthetic construct
  source 1..20: mol_type = other DNA
ttcattcctaggttatgctg

SEQ ID NO: 43884 - DNA, 20 bp, synthetic construct
  source 1..20: mol_type = other DNA
tttcattcctaggttatgct

SEQ ID NO: 43885 - DNA, 20 bp, synthetic construct
  source 1..20: mol_type = other DNA
ttttcattcctaggttatgc

SEQ ID NO: 43886 - DNA, 20 bp, synthetic construct
  source 1..20: mol_type = other DNA
tttttcattcctaggttatg

SEQ ID NO: 43887 - DNA, 20 bp, synthetic construct
  source 1..20: mol_type = other DNA
gtttttcattcctaggttat

SEQ ID NO: 43888 - DNA, 20 bp, synthetic construct
  source 1..20: mol_type = other DNA
agtttttcattcctaggtta

SEQ ID NO: 43889 - DNA, 20 bp, synthetic construct
  source 1..20: mol_type = other DNA
aagtttttcattcctaggtt

SEQ ID NO: 43890 - DNA, 20 bp, synthetic construct
  source 1..20: mol_type = other DNA
taagtttttcattcctaggt

SEQ ID NO: 43891 - DNA, 20 bp, synthetic construct
  source 1..20: mol_type = other DNA
ctaagtttttcattcctagg

SEQ ID NO: 43892 - DNA, 20 bp, synthetic construct
  source 1..20: mol_type = other DNA
tctaagtttttcattcctag

SEQ ID NO: 43893 - DNA, 20 bp, synthetic construct
  source 1..20: mol_type = other DNA
gtctaagtttttcattccta

SEQ ID NO: 43894 - DNA, 20 bp, synthetic construct
  source 1..20: mol_type = other DNA
cgtctaagtttttcattcct

SEQ ID NO: 43895 - DNA, 20 bp, synthetic construct
  source 1..20: mol_type = other DNA
acgtctaagtttttcattcc

SEQ ID NO: 43896 - DNA, 20 bp, synthetic construct
  source 1..20: mol_type = other DNA
cacgtctaagtttttcattc

SEQ ID NO: 43897 - DNA, 20 bp, synthetic construct
  source 1..20: mol_type = other DNA
ccacgtctaagtttttcatt

SEQ ID NO: 43898 - DNA, 20 bp, synthetic construct
  source 1..20: mol_type = other DNA
tccacgtctaagtttttcat

SEQ ID NO: 43899 - DNA, 20 bp, synthetic construct
  source 1..20: mol_type = other DNA
ttccacgtctaagtttttca

SEQ ID NO: 43900 - DNA, 20 bp, synthetic construct
  source 1..20: mol_type = other DNA
attccacgtctaagtttttc

SEQ ID NO: 43901 - DNA, 20 bp, synthetic construct
  source 1..20: mol_type = other DNA
gattccacgtctaagttttt

SEQ ID NO: 43902 - DNA, 20 bp, synthetic construct
  source 1..20: mol_type = other DNA
tgattccacgtctaagtttt

SEQ ID NO: 43903 - DNA, 20 bp, synthetic construct
  source 1..20: mol_type = other DNA
ctgattccacgtctaagttt

SEQ ID NO: 43904 - DNA, 20 bp, synthetic construct
  source 1..20: mol_type = other DNA
tctgattccacgtctaagtt

SEQ ID NO: 43905 - DNA, 20 bp, synthetic construct
  source 1..20: mol_type = other DNA
atctgattccacgtctaagt

SEQ ID NO: 43906 - DNA, 20 bp, synthetic construct
  source 1..20: mol_type = other DNA
tatctgattccacgtctaag

SEQ ID NO: 43907 - DNA, 20 bp, synthetic construct
  source 1..20: mol_type = other DNA
gtatctgattccacgtctaa

SEQ ID NO: 43908 - DNA, 20 bp, synthetic construct
  source 1..20: mol_type = other DNA
tgtatctgattccacgtcta

SEQ ID NO: 43909 - DNA, 20 bp, synthetic construct
  source 1..20: mol_type = other DNA
gtgtatctgattccacgtct

SEQ ID NO: 43910 - DNA, 20 bp, synthetic construct
  source 1..20: mol_type = other DNA
ggtgtatctgattccacgtc

SEQ ID NO: 43911 - DNA, 20 bp, synthetic construct
  source 1..20: mol_type = other DNA
aggtgtatctgattccacgt

SEQ ID NO: 43912 - DNA, 20 bp, synthetic construct
  source 1..20: mol_type = other DNA
caggtgtatctgattccacg

SEQ ID NO: 43913 - DNA, 20 bp, synthetic construct
  source 1..20: mol_type = other DNA
ccaggtgtatctgattccac

SEQ ID NO: 43914 - DNA, 20 bp, synthetic construct
  source 1..20: mol_type = other DNA
accaggtgtatctgattcca

SEQ ID NO: 43915 - DNA, 20 bp, synthetic construct
  source 1..20: mol_type = other DNA
aaccaggtgtatctgattcc

SEQ ID NO: 43916 - DNA, 20 bp, synthetic construct
  source 1..20: mol_type = other DNA
aaaccaggtgtatctgattc

SEQ ID NO: 43917 - DNA, 20 bp, synthetic construct
  source 1..20: mol_type = other DNA
taaaccaggtgtatctgatt

SEQ ID NO: 43918 - DNA, 20 bp, synthetic construct
  source 1..20: mol_type = other DNA
ttaaaccaggtgtatctgat

SEQ ID NO: 43919 - DNA, 20 bp, synthetic construct
  source 1..20: mol_type = other DNA
tttaaaccaggtgtatctga

SEQ ID NO: 43920 - DNA, 20 bp, synthetic construct
  source 1..20: mol_type = other DNA
atttaaaccaggtgtatctg

SEQ ID NO: 43921 - DNA, 20 bp, synthetic construct
  source 1..20: mol_type = other DNA
tatttaaaccaggtgtatct

SEQ ID NO: 43922 - DNA, 20 bp, synthetic construct
  source 1..20: mol_type = other DNA
gtatttaaaccaggtgtatc

SEQ ID NO: 43923 - DNA, 20 bp, synthetic construct
  source 1..20: mol_type = other DNA
ggtatttaaaccaggtgtat

SEQ ID NO: 43924 - DNA, 20 bp, synthetic construct
  source 1..20: mol_type = other DNA
tggtatttaaaccaggtgta

SEQ ID NO: 43925 - DNA, 20 bp, synthetic construct
  source 1..20: mol_type = other DNA
ctggtatttaaaccaggtgt

SEQ ID NO: 43926 - DNA, 20 bp, synthetic construct
  source 1..20: mol_type = other DNA
gctggtatttaaaccaggtg

SEQ ID NO: 43927 - DNA, 20 bp, synthetic construct
  source 1..20: mol_type = other DNA
agctggtatttaaaccaggt

SEQ ID NO: 43928 - DNA, 20 bp, synthetic construct
  source 1..20: mol_type = other DNA
gagctggtatttaaaccagg

SEQ ID NO: 43929 - DNA, 20 bp, synthetic construct
  source 1..20: mol_type = other DNA
agagctggtatttaaaccag

SEQ ID NO: 43930 - DNA, 20 bp, synthetic construct
  source 1..20: mol_type = other DNA
tagagctggtatttaaacca

SEQ ID NO: 43931 - DNA, 20 bp, synthetic construct
  source 1..20: mol_type = other DNA
gtagagctggtatttaaacc

SEQ ID NO: 43932 - DNA, 20 bp, synthetic construct
  source 1..20: mol_type = other DNA
agtagagctggtatttaaac

SEQ ID NO: 43933 - DNA, 20 bp, synthetic construct
  source 1..20: mol_type = other DNA
cagtagagctggtatttaaa

SEQ ID NO: 43934 - DNA, 20 bp, synthetic construct
  source 1..20: mol_type = other DNA
gcagtagagctggtatttaa

SEQ ID NO: 43935 - DNA, 20 bp, synthetic construct
  source 1..20: mol_type = other DNA
agcagtagagctggtattta

SEQ ID NO: 43936 - DNA, 20 bp, synthetic construct
  source 1..20: mol_type = other DNA
gagcagtagagctggtattt

SEQ ID NO: 43937 - DNA, 20 bp, synthetic construct
  source 1..20: mol_type = other DNA
tgagcagtagagctggtatt

SEQ ID NO: 43938 - DNA, 20 bp, synthetic construct
  source 1..20: mol_type = other DNA
atgagcagtagagctggtat

SEQ ID NO: 43939 - DNA, 20 bp, synthetic construct
  source 1..20: mol_type = other DNA
catgagcagtagagctggta

SEQ ID NO: 43940 - DNA, 20 bp, synthetic construct
  source 1..20: mol_type = other DNA
tcatgagcagtagagctggt

SEQ ID NO: 43941 - DNA, 20 bp, synthetic construct
  source 1..20: mol_type = other DNA
ttcatgagcagtagagctgg

SEQ ID NO: 43942 - DNA, 20 bp, synthetic construct
  source 1..20: mol_type = other DNA
gttcatgagcagtagagctg

SEQ ID NO: 43943 - DNA, 20 bp, synthetic construct
  source 1..20: mol_type = other DNA
agttcatgagcagtagagct

SEQ ID NO: 43944 - DNA, 20 bp, synthetic construct
  source 1..20: mol_type = other DNA
cagttcatgagcagtagagc

SEQ ID NO: 43945 - DNA, 20 bp, synthetic construct
  source 1..20: mol_type = other DNA
ccagttcatgagcagtagag

SEQ ID NO: 43946 - DNA, 20 bp, synthetic construct
  source 1..20: mol_type = other DNA
tccagttcatgagcagtaga

SEQ ID NO: 43947 - DNA, 20 bp, synthetic construct
  source 1..20: mol_type = other DNA
atccagttcatgagcagtag

SEQ ID NO: 43948 - DNA, 20 bp, synthetic construct
  source 1..20: mol_type = other DNA
catccagttcatgagcagta

SEQ ID NO: 43949 - DNA, 20 bp, synthetic construct
  source 1..20: mol_type = other DNA
tcatccagttcatgagcagt

SEQ ID NO: 43950 - DNA, 20 bp, synthetic construct
  source 1..20: mol_type = other DNA
atcatccagttcatgagcag

SEQ ID NO: 43951 - DNA, 20 bp, synthetic construct
  source 1..20: mol_type = other DNA
aatcatccagttcatgagca

SEQ ID NO: 43952 - DNA, 20 bp, synthetic construct
  source 1..20: mol_type = other DNA
aaatcatccagttcatgagc

SEQ ID NO: 43953 - DNA, 20 bp, synthetic construct
  source 1..20: mol_type = other DNA
aaaatcatccagttcatgag

SEQ ID NO: 43954 - DNA, 20 bp, synthetic construct
  source 1..20: mol_type = other DNA
caaaatcatccagttcatga

SEQ ID NO: 43955 - DNA, 20 bp, synthetic construct
  source 1..20: mol_type = other DNA
ccaaaatcatccagttcatg

SEQ ID NO: 43956 - DNA, 20 bp, synthetic construct
  source 1..20: mol_type = other DNA
accaaaatcatccagttcat

SEQ ID NO: 43957 - DNA, 20 bp, synthetic construct
  source 1..20: mol_type = other DNA
gaccaaaatcatccagttca

SEQ ID NO: 43958 - DNA, 20 bp, synthetic construct
  source 1..20: mol_type = other DNA
tgaccaaaatcatccagttc

SEQ ID NO: 43959 - DNA, 20 bp, synthetic construct
  source 1..20: mol_type = other DNA
ttgaccaaaatcatccagtt

SEQ ID NO: 43960 - DNA, 20 bp, synthetic construct
  source 1..20: mol_type = other DNA
cttgaccaaaatcatccagt

SEQ ID NO: 43961 - DNA, 20 bp, synthetic construct
  source 1..20: mol_type = other DNA
tcttgaccaaaatcatccag

SEQ ID NO: 43962 - DNA, 20 bp, synthetic construct
  source 1..20: mol_type = other DNA
atcttgaccaaaatcatcca

SEQ ID NO: 43963 - DNA, 20 bp, synthetic construct
  source 1..20: mol_type = other DNA
tatcttgaccaaaatcatcc

SEQ ID NO: 43964 - DNA, 20 bp, synthetic construct
  source 1..20: mol_type = other DNA
gtatcttgaccaaaatcatc

SEQ ID NO: 43965 - DNA, 20 bp, synthetic construct
  source 1..20: mol_type = other DNA
agtatcttgaccaaaatcat

SEQ ID NO: 43966 - DNA, 20 bp, synthetic construct
  source 1..20: mol_type = other DNA
aagtatcttgaccaaaatca

SEQ ID NO: 43967 - DNA, 20 bp, synthetic construct
  source 1..20: mol_type = other DNA
caagtatcttgaccaaaatc

SEQ ID NO: 43968 - DNA, 20 bp, synthetic construct
  source 1..20: mol_type = other DNA
tcaagtatcttgaccaaaat

SEQ ID NO: 43969 - DNA, 20 bp, synthetic construct
  source 1..20: mol_type = other DNA
gtcaagtatcttgaccaaaa

SEQ ID NO: 43970 - DNA, 20 bp, synthetic construct
  source 1..20: mol_type = other DNA
agtcaagtatcttgaccaaa

SEQ ID NO: 43971 - DNA, 20 bp, synthetic construct
  source 1..20: mol_type = other DNA
cagtcaagtatcttgaccaa

SEQ ID NO: 43972 - DNA, 20 bp, synthetic construct
  source 1..20: mol_type = other DNA
gcagtcaagtatcttgacca

SEQ ID NO: 43973 - DNA, 20 bp, synthetic construct
  source 1..20: mol_type = other DNA
agcagtcaagtatcttgacc

SEQ ID NO: 43974 - DNA, 20 bp, synthetic construct
  source 1..20: mol_type = other DNA
cagcagtcaagtatcttgac

SEQ ID NO: 43975 - DNA, 20 bp, synthetic construct
  source 1..20: mol_type = other DNA
tcagcagtcaagtatcttga

SEQ ID NO: 43976 - DNA, 20 bp, synthetic construct
  source 1..20: mol_type = other DNA
ctcagcagtcaagtatcttg

SEQ ID NO: 43977 - DNA, 20 bp, synthetic construct
  source 1..20: mol_type = other DNA
cctcagcagtcaagtatctt

SEQ ID NO: 43978 - DNA, 20 bp, synthetic construct
  source 1..20: mol_type = other DNA
acctcagcagtcaagtatct

SEQ ID NO: 43979 - DNA, 20 bp, synthetic construct
  source 1..20: mol_type = other DNA
aacctcagcagtcaagtatc

SEQ ID NO: 43980 - DNA, 20 bp, synthetic construct
  source 1..20: mol_type = other DNA
gaacctcagcagtcaagtat

SEQ ID NO: 43981 - DNA, 20 bp, synthetic construct
  source 1..20: mol_type = other DNA
tgaacctcagcagtcaagta

SEQ ID NO: 43982 - DNA, 20 bp, synthetic construct
  source 1..20: mol_type = other DNA
ctgaacctcagcagtcaagt

SEQ ID NO: 43983 - DNA, 20 bp, synthetic construct
  source 1..20: mol_type = other DNA
actgaacctcagcagtcaag

SEQ ID NO: 43984 - DNA, 20 bp, synthetic construct
  source 1..20: mol_type = other DNA
aactgaacctcagcagtcaa

SEQ ID NO: 43985 - DNA, 20 bp, synthetic construct
  source 1..20: mol_type = other DNA
aaactgaacctcagcagtca

SEQ ID NO: 43986 - DNA, 20 bp, synthetic construct
  source 1..20: mol_type = other DNA
gaaactgaacctcagcagtc

SEQ ID NO: 43987 - DNA, 20 bp, synthetic construct
  source 1..20: mol_type = other DNA
ggaaactgaacctcagcagt

SEQ ID NO: 43988 - DNA, 20 bp, synthetic construct
  source 1..20: mol_type = other DNA
aggaaactgaacctcagcag

SEQ ID NO: 43989 - DNA, 20 bp, synthetic construct
  source 1..20: mol_type = other DNA
gaggaaactgaacctcagca

SEQ ID NO: 43990 - DNA, 20 bp, synthetic construct
  source 1..20: mol_type = other DNA
tgaggaaactgaacctcagc

SEQ ID NO: 43991 - DNA, 20 bp, synthetic construct
  source 1..20: mol_type = other DNA
gtgaggaaactgaacctcag

SEQ ID NO: 43992 - DNA, 20 bp, synthetic construct
  source 1..20: mol_type = other DNA
ggtgaggaaactgaacctca

SEQ ID NO: 43993 - DNA, 20 bp, synthetic construct
  source 1..20: mol_type = other DNA
aggtgaggaaactgaacctc

SEQ ID NO: 43994 - DNA, 20 bp, synthetic construct
  source 1..20: mol_type = other DNA
caggtgaggaaactgaacct

SEQ ID NO: 43995 - DNA, 20 bp, synthetic construct
  source 1..20: mol_type = other DNA
acaggtgaggaaactgaacc

SEQ ID NO: 43996 - DNA, 20 bp, synthetic construct
  source 1..20: mol_type = other DNA
tacaggtgaggaaactgaac

SEQ ID NO: 43997 - DNA, 20 bp, synthetic construct
  source 1..20: mol_type = other DNA
ttacaggtgaggaaactgaa

SEQ ID NO: 43998 - DNA, 20 bp, synthetic construct
  source 1..20: mol_type = other DNA
tttacaggtgaggaaactga

SEQ ID NO: 43999 - DNA, 20 bp, synthetic construct
  source 1..20: mol_type = other DNA
ctttacaggtgaggaaactg

SEQ ID NO: 44000 - DNA, 20 bp, synthetic construct
  source 1..20: mol_type = other DNA
actttacaggtgaggaaact

SEQ ID NO: 44001 - DNA, 20 bp, synthetic construct
  source 1..20: mol_type = other DNA
tactttacaggtgaggaaac

SEQ ID NO: 44002 - DNA, 20 bp, synthetic construct
  source 1..20: mol_type = other DNA
ctactttacaggtgaggaaa

SEQ ID NO: 44003 - DNA, 20 bp, synthetic construct
  source 1..20: mol_type = other DNA
tctactttacaggtgaggaa

SEQ ID NO: 44004 - DNA, 20 bp, synthetic construct
  source 1..20: mol_type = other DNA
ctctactttacaggtgagga

SEQ ID NO: 44005 - DNA, 20 bp, synthetic construct
  source 1..20: mol_type = other DNA
cctctactttacaggtgagg

SEQ ID NO: 44006 - DNA, 20 bp, synthetic construct
  source 1..20: mol_type = other DNA
acctctactttacaggtgag

SEQ ID NO: 44007 - DNA, 20 bp, synthetic construct
  source 1..20: mol_type = other DNA
cacctctactttacaggtga

SEQ ID NO: 44008 - DNA, 20 bp, synthetic construct
  source 1..20: mol_type = other DNA
tcacctctactttacaggtg

SEQ ID NO: 44009 - DNA, 20 bp, synthetic construct
  source 1..20: mol_type = other DNA
atcacctctactttacaggt

SEQ ID NO: 44010 - DNA, 20 bp, synthetic construct
  source 1..20: mol_type = other DNA
tatcacctctactttacagg

SEQ ID NO: 44011 - DNA, 20 bp, synthetic construct
  source 1..20: mol_type = other DNA
ctatcacctctactttacag

SEQ ID NO: 44012 - DNA, 20 bp, synthetic construct
  source 1..20: mol_type = other DNA
tctatcacctctactttaca

SEQ ID NO: 44013 - DNA, 20 bp, synthetic construct
  source 1..20: mol_type = other DNA
atctatcacctctactttac

SEQ ID NO: 44014 - DNA, 20 bp, synthetic construct
  source 1..20: mol_type = other DNA
aatctatcacctctacttta

SEQ ID NO: 44015 - DNA, 20 bp, synthetic construct
  source 1..20: mol_type = other DNA
taatctatcacctctacttt

SEQ ID NO: 44016 - DNA, 20 bp, synthetic construct
  source 1..20: mol_type = other DNA
ctaatctatcacctctactt

SEQ ID NO: 44017 - DNA, 20 bp, synthetic construct
  source 1..20: mol_type = other DNA
tctaatctatcacctctact

SEQ ID NO: 44018 - DNA, 20 bp, synthetic construct
  source 1..20: mol_type = other DNA
gtctaatctatcacctctac

SEQ ID NO: 44019 - DNA, 20 bp, synthetic construct
  source 1..20: mol_type = other DNA
tgtctaatctatcacctcta

SEQ ID NO: 44020 - DNA, 20 bp, synthetic construct
  source 1..20: mol_type = other DNA
atgtctaatctatcacctct

SEQ ID NO: 44021 - DNA, 20 bp, synthetic construct
  source 1..20: mol_type = other DNA
catgtctaatctatcacctc

SEQ ID NO: 44022 - DNA, 20 bp, synthetic construct
  source 1..20: mol_type = other DNA
acatgtctaatctatcacct

SEQ ID NO: 44023 - DNA, 20 bp, synthetic construct
  source 1..20: mol_type = other DNA
aacatgtctaatctatcacc

SEQ ID NO: 44024 - DNA, 20 bp, synthetic construct
  source 1..20: mol_type = other DNA
caacatgtctaatctatcac

SEQ ID NO: 44025 - DNA, 20 bp, synthetic construct
  source 1..20: mol_type = other DNA
gcaacatgtctaatctatca

SEQ ID NO: 44026 - DNA, 20 bp, synthetic construct
  source 1..20: mol_type = other DNA
tgcaacatgtctaatctatc

SEQ ID NO: 44027 - DNA, 20 bp, synthetic construct
  source 1..20: mol_type = other DNA
atgcaacatgtctaatctat

SEQ ID NO: 44028 - DNA, 20 bp, synthetic construct
  source 1..20: mol_type = other DNA
catgcaacatgtctaatcta

SEQ ID NO: 44029 - DNA, 20 bp, synthetic construct
  source 1..20: mol_type = other DNA
acatgcaacatgtctaatct

SEQ ID NO: 44030 - DNA, 20 bp, synthetic construct
  source 1..20: mol_type = other DNA
cacatgcaacatgtctaatc

SEQ ID NO: 44031 - DNA, 20 bp, synthetic construct
  source 1..20: mol_type = other DNA
tcacatgcaacatgtctaat

SEQ ID NO: 44032 - DNA, 20 bp, synthetic construct
  source 1..20: mol_type = other DNA
ttcacatgcaacatgtctaa

SEQ ID NO: 44033 - DNA, 20 bp, synthetic construct
  source 1..20: mol_type = other DNA
cttcacatgcaacatgtcta

SEQ ID NO: 44034 - DNA, 20 bp, synthetic construct
  source 1..20: mol_type = other DNA
acttcacatgcaacatgtct

SEQ ID NO: 44035 - DNA, 20 bp, synthetic construct
  source 1..20: mol_type = other DNA
tacttcacatgcaacatgtc

SEQ ID NO: 44036 - DNA, 20 bp, synthetic construct
  source 1..20: mol_type = other DNA
gtacttcacatgcaacatgt

SEQ ID NO: 44037 - DNA, 20 bp, synthetic construct
  source 1..20: mol_type = other DNA
agtacttcacatgcaacatg

SEQ ID NO: 44038 - DNA, 20 bp, synthetic construct
  source 1..20: mol_type = other DNA
aagtacttcacatgcaacat

SEQ ID NO: 44039 - DNA, 20 bp, synthetic construct
  source 1..20: mol_type = other DNA
taagtacttcacatgcaaca

SEQ ID NO: 44040 - DNA, 20 bp, synthetic construct
  source 1..20: mol_type = other DNA
ctaagtacttcacatgcaac

SEQ ID NO: 44041 - DNA, 20 bp, synthetic construct
  source 1..20: mol_type = other DNA
actaagtacttcacatgcaa

SEQ ID NO: 44042 - DNA, 20 bp, synthetic construct
  source 1..20: mol_type = other DNA
tactaagtacttcacatgca

SEQ ID NO: 44043 - DNA, 20 bp, synthetic construct
  source 1..20: mol_type = other DNA
atactaagtacttcacatgc

SEQ ID NO: 44044 - DNA, 20 bp, synthetic construct
  source 1..20: mol_type = other DNA
catactaagtacttcacatg

SEQ ID NO: 44045 - DNA, 20 bp, synthetic construct
  source 1..20: mol_type = other DNA
ccatactaagtacttcacat

SEQ ID NO: 44046 - DNA, 20 bp, synthetic construct
  source 1..20: mol_type = other DNA
accatactaagtacttcaca

SEQ ID NO: 44047 - DNA, 20 bp, synthetic construct
  source 1..20: mol_type = other DNA
caccatactaagtacttcac

SEQ ID NO: 44048 - DNA, 20 bp, synthetic construct
  source 1..20: mol_type = other DNA
acaccatactaagtacttca

SEQ ID NO: 44049 - DNA, 20 bp, synthetic construct
  source 1..20: mol_type = other DNA
gacaccatactaagtacttc

SEQ ID NO: 44050 - DNA, 20 bp, synthetic construct
  source 1..20: mol_type = other DNA
agacaccatactaagtactt

SEQ ID NO: 44051 - DNA, 20 bp, synthetic construct
  source 1..20: mol_type = other DNA
cagacaccatactaagtact

SEQ ID NO: 44052 - DNA, 20 bp, synthetic construct
  source 1..20: mol_type = other DNA
ccagacaccatactaagtac

SEQ ID NO: 44053 - DNA, 20 bp, synthetic construct
  source 1..20: mol_type = other DNA
accagacaccatactaagta

SEQ ID NO: 44054 - DNA, 20 bp, synthetic construct
  source 1..20: mol_type = other DNA
aaccagacaccatactaagt

SEQ ID NO: 44055 - DNA, 20 bp, synthetic construct
  source 1..20: mol_type = other DNA
aaaccagacaccatactaag

SEQ ID NO: 44056 - DNA, 20 bp, synthetic construct
  source 1..20: mol_type = other DNA
aaaaccagacaccatactaa

SEQ ID NO: 44057 - DNA, 20 bp, synthetic construct
  source 1..20: mol_type = other DNA
caaaaccagacaccatacta

SEQ ID NO: 44058 - DNA, 20 bp, synthetic construct
  source 1..20: mol_type = other DNA
acaaaaccagacaccatact

SEQ ID NO: 44059 - DNA, 20 bp, synthetic construct
  source 1..20: mol_type = other DNA
tacaaaaccagacaccatac

SEQ ID NO: 44060 - DNA, 20 bp, synthetic construct
  source 1..20: mol_type = other DNA
ctacaaaaccagacaccata

SEQ ID NO: 44061 - DNA, 20 bp, synthetic construct
  source 1..20: mol_type = other DNA
actacaaaaccagacaccat

SEQ ID NO: 44062 - DNA, 20 bp, synthetic construct
  source 1..20: mol_type = other DNA
tactacaaaaccagacacca

SEQ ID NO: 44063 - DNA, 20 bp, synthetic construct
  source 1..20: mol_type = other DNA
ttactacaaaaccagacacc

SEQ ID NO: 44064 - DNA, 20 bp, synthetic construct
  source 1..20: mol_type = other DNA
cttactacaaaaccagacac

SEQ ID NO: 44065 - DNA, 20 bp, synthetic construct
  source 1..20: mol_type = other DNA
tcttactacaaaaccagaca

SEQ ID NO: 44066 - DNA, 20 bp, synthetic construct
  source 1..20: mol_type = other DNA
atcttactacaaaaccagac

SEQ ID NO: 44067 - DNA, 20 bp, synthetic construct
  source 1..20: mol_type = other DNA
gatcttactacaaaaccaga

SEQ ID NO: 44068 - DNA, 20 bp, synthetic construct
  source 1..20: mol_type = other DNA
agatcttactacaaaaccag

SEQ ID NO: 44069 - DNA, 20 bp, synthetic construct
  source 1..20: mol_type = other DNA
tagatcttactacaaaacca

SEQ ID NO: 44070 - DNA, 20 bp, synthetic construct
  source 1..20: mol_type = other DNA
atagatcttactacaaaacc

SEQ ID NO: 44071 - DNA, 20 bp, synthetic construct
  source 1..20: mol_type = other DNA
tatagatcttactacaaaac

SEQ ID NO: 44072 - DNA, 20 bp, synthetic construct
  source 1..20: mol_type = other DNA
ttatagatcttactacaaaa

SEQ ID NO: 44073 - DNA, 20 bp, synthetic construct
  source 1..20: mol_type = other DNA
tttatagatcttactacaaa

SEQ ID NO: 44074 - DNA, 20 bp, synthetic construct
  source 1..20: mol_type = other DNA
ttttatagatcttactacaa

SEQ ID NO: 44075 - DNA, 20 bp, synthetic construct
  source 1..20: mol_type = other DNA
cttttatagatcttactaca

SEQ ID NO: 44076 - DNA, 20 bp, synthetic construct
  source 1..20: mol_type = other DNA
tcttttatagatcttactac

SEQ ID NO: 44077 - DNA, 20 bp, synthetic construct
  source 1..20: mol_type = other DNA
atcttttatagatcttacta

SEQ ID NO: 44078 - DNA, 20 bp, synthetic construct
  source 1..20: mol_type = other DNA
tatcttttatagatcttact

SEQ ID NO: 44079 - DNA, 20 bp, synthetic construct
  source 1..20: mol_type = other DNA
ttatcttttatagatcttac

SEQ ID NO: 44080 - DNA, 20 bp, synthetic construct
  source 1..20: mol_type = other DNA
tttatcttttatagatctta

SEQ ID NO: 44081 - DNA, 20 bp, synthetic construct
  source 1..20: mol_type = other DNA
atttatcttttatagatctt

SEQ ID NO: 44082 - DNA, 20 bp, synthetic construct
  source 1..20: mol_type = other DNA
aatttatcttttatagatct

SEQ ID NO: 44083 - DNA, 20 bp, synthetic construct
  source 1..20: mol_type = other DNA
taatttatcttttatagatc

SEQ ID NO: 44084 - DNA, 20 bp, synthetic construct
  source 1..20: mol_type = other DNA
ataatttatcttttatagat

SEQ ID NO: 44085 - DNA, 20 bp, synthetic construct
  source 1..20: mol_type = other DNA
aataatttatcttttataga

SEQ ID NO: 44086 - DNA, 20 bp, synthetic construct
  source 1..20: mol_type = other DNA
taataatttatcttttatag

SEQ ID NO: 44087 - DNA, 20 bp, synthetic construct
  source 1..20: mol_type = other DNA
ctaataatttatcttttata

SEQ ID NO: 44088 - DNA, 20 bp, synthetic construct
  source 1..20: mol_type = other DNA
actaataatttatcttttat

SEQ ID NO: 44089 - DNA, 20 bp, synthetic construct
  source 1..20: mol_type = other DNA
gactaataatttatctttta

SEQ ID NO: 44090 - DNA, 20 bp, synthetic construct
  source 1..20: mol_type = other DNA
tgactaataatttatctttt

SEQ ID NO: 44091 - DNA, 20 bp, synthetic construct
  source 1..20: mol_type = other DNA
atgactaataatttatcttt

SEQ ID NO: 44092 - DNA, 20 bp, synthetic construct
  source 1..20: mol_type = other DNA
tatgactaataatttatctt

SEQ ID NO: 44093 - DNA, 20 bp, synthetic construct
  source 1..20: mol_type = other DNA
atatgactaataatttatct

SEQ ID NO: 44094 - DNA, 20 bp, synthetic construct
  source 1..20: mol_type = other DNA
aatatgactaataatttatc

SEQ ID NO: 44095 - DNA, 20 bp, synthetic construct
  source 1..20: mol_type = other DNA
gaatatgactaataatttat

SEQ ID NO: 44096 - DNA, 20 bp, synthetic construct
  source 1..20: mol_type = other DNA
ggaatatgactaataattta

SEQ ID NO: 44097 - DNA, 20 bp, synthetic construct
  source 1..20: mol_type = other DNA
aggaatatgactaataattt

SEQ ID NO: 44098 - DNA, 20 bp, synthetic construct
  source 1..20: mol_type = other DNA
aaggaatatgactaataatt

SEQ ID NO: 44099 - DNA, 20 bp, synthetic construct
  source 1..20: mol_type = other DNA
taaggaatatgactaataat

SEQ ID NO: 44100 - DNA, 20 bp, synthetic construct
  source 1..20: mol_type = other DNA
ctaaggaatatgactaataa

SEQ ID NO: 44101 - DNA, 20 bp, synthetic construct
  source 1..20: mol_type = other DNA
tctaaggaatatgactaata

SEQ ID NO: 44102 - DNA, 20 bp, synthetic construct
  source 1..20: mol_type = other DNA
gtctaaggaatatgactaat

SEQ ID NO: 44103 - DNA, 20 bp, synthetic construct
  source 1..20: mol_type = other DNA
agtctaaggaatatgactaa

SEQ ID NO: 44104 - DNA, 20 bp, synthetic construct
  source 1..20: mol_type = other DNA
aagtctaaggaatatgacta

SEQ ID NO: 44105 - DNA, 20 bp, synthetic construct
  source 1..20: mol_type = other DNA
gaagtctaaggaatatgact

SEQ ID NO: 44106 - DNA, 20 bp, synthetic construct
  source 1..20: mol_type = other DNA
tgaagtctaaggaatatgac

SEQ ID NO: 44107 - DNA, 20 bp, synthetic construct
  source 1..20: mol_type = other DNA
ctgaagtctaaggaatatga

SEQ ID NO: 44108 - DNA, 20 bp, synthetic construct
  source 1..20: mol_type = other DNA
cctgaagtctaaggaatatg

SEQ ID NO: 44109 - DNA, 20 bp, synthetic construct
  source 1..20: mol_type = other DNA
tcctgaagtctaaggaatat

SEQ ID NO: 44110 - DNA, 20 bp, synthetic construct
  source 1..20: mol_type = other DNA
ttcctgaagtctaaggaata

SEQ ID NO: 44111 - DNA, 20 bp, synthetic construct
  source 1..20: mol_type = other DNA
attcctgaagtctaaggaat

SEQ ID NO: 44112 - DNA, 20 bp, synthetic construct
  source 1..20: mol_type = other DNA
aattcctgaagtctaaggaa

SEQ ID NO: 44113 - DNA, 20 bp, synthetic construct
  source 1..20: mol_type = other DNA
aaattcctgaagtctaagga

SEQ ID NO: 44114 - DNA, 20 bp, synthetic construct
  source 1..20: mol_type = other DNA
taaattcctgaagtctaagg

SEQ ID NO: 44115 - DNA, 20 bp, synthetic construct
  source 1..20: mol_type = other DNA
ataaattcctgaagtctaag

SEQ ID NO: 44116 - DNA, 20 bp, synthetic construct
  source 1..20: mol_type = other DNA
gataaattcctgaagtctaa

SEQ ID NO: 44117 - DNA, 20 bp, synthetic construct
  source 1..20: mol_type = other DNA
agataaattcctgaagtcta

SEQ ID NO: 44118 - DNA, 20 bp, synthetic construct
  source 1..20: mol_type = other DNA
gagataaattcctgaagtct

SEQ ID NO: 44119 - DNA, 20 bp, synthetic construct
  source 1..20: mol_type = other DNA
agagataaattcctgaagtc

SEQ ID NO: 44120 - DNA, 20 bp, synthetic construct
  source 1..20: mol_type = other DNA
cagagataaattcctgaagt

SEQ ID NO: 44121 - DNA, 20 bp, synthetic construct
  source 1..20: mol_type = other DNA
acagagataaattcctgaag

SEQ ID NO: 44122 - DNA, 20 bp, synthetic construct
  source 1..20: mol_type = other DNA
cacagagataaattcctgaa

SEQ ID NO: 44123 - DNA, 20 bp, synthetic construct
  source 1..20: mol_type = other DNA
gcacagagataaattcctga

SEQ ID NO: 44124 - DNA, 20 bp, synthetic construct
  source 1..20: mol_type = other DNA
ggcacagagataaattcctg

SEQ ID NO: 44125 - DNA, 20 bp, synthetic construct
  source 1..20: mol_type = other DNA
tggcacagagataaattcct

SEQ ID NO: 44126 - DNA, 20 bp, synthetic construct
  source 1..20: mol_type = other DNA
atggcacagagataaattcc

SEQ ID NO: 44127 - DNA, 20 bp, synthetic construct
  source 1..20: mol_type = other DNA
catggcacagagataaattc

SEQ ID NO: 44128 - DNA, 20 bp, synthetic construct
  source 1..20: mol_type = other DNA
acatggcacagagataaatt

SEQ ID NO: 44129 - DNA, 20 bp, synthetic construct
  source 1..20: mol_type = other DNA
aacatggcacagagataaat

SEQ ID NO: 44130 - DNA, 20 bp, synthetic construct
  source 1..20: mol_type = other DNA
aaacatggcacagagataaa

SEQ ID NO: 44131 - DNA, 20 bp, synthetic construct
  source 1..20: mol_type = other DNA
caaacatggcacagagataa

SEQ ID NO: 44132 - DNA, 20 bp, synthetic construct
  source 1..20: mol_type = other DNA
tcaaacatggcacagagata

SEQ ID NO: 44133 - DNA, 20 bp, synthetic construct
  source 1..20: mol_type = other DNA
ctcaaacatggcacagagat

SEQ ID NO: 44134 - DNA, 20 bp, synthetic construct
  source 1..20: mol_type = other DNA
cctcaaacatggcacagaga

SEQ ID NO: 44135 - DNA, 20 bp, synthetic construct
  source 1..20: mol_type = other DNA
gcctcaaacatggcacagag

SEQ ID NO: 44136 - DNA, 20 bp, synthetic construct
  source 1..20: mol_type = other DNA
tgcctcaaacatggcacaga

SEQ ID NO: 44137 - DNA, 20 bp, synthetic construct
  source 1..20: mol_type = other DNA
ttgcctcaaacatggcacag

SEQ ID NO: 44138 - DNA, 20 bp, synthetic construct
  source 1..20: mol_type = other DNA
tttgcctcaaacatggcaca

SEQ ID NO: 44139 - DNA, 20 bp, synthetic construct
  source 1..20: mol_type = other DNA
gtttgcctcaaacatggcac

SEQ ID NO: 44140 - DNA, 20 bp, synthetic construct
  source 1..20: mol_type = other DNA
tgtttgcctcaaacatggca

SEQ ID NO: 44141 - DNA, 20 bp, synthetic construct
  source 1..20: mol_type = other DNA
ctgtttgcctcaaacatggc

SEQ ID NO: 44142 - DNA, 20 bp, synthetic construct
  source 1..20: mol_type = other DNA
actgtttgcctcaaacatgg

SEQ ID NO: 44143 - DNA, 20 bp, synthetic construct
  source 1..20: mol_type = other DNA
aactgtttgcctcaaacatg

SEQ ID NO: 44144 - DNA, 20 bp, synthetic construct
  source 1..20: mol_type = other DNA
taactgtttgcctcaaacat

SEQ ID NO: 44145 - DNA, 20 bp, synthetic construct
  source 1..20: mol_type = other DNA
gtaactgtttgcctcaaaca

SEQ ID NO: 44146 - DNA, 20 bp, synthetic construct
  source 1..20: mol_type = other DNA
tgtaactgtttgcctcaaac

SEQ ID NO: 44147 - DNA, 20 bp, synthetic construct
  source 1..20: mol_type = other DNA
ctgtaactgtttgcctcaaa

SEQ ID NO: 44148 - DNA, 20 bp, synthetic construct
  source 1..20: mol_type = other DNA
tctgtaactgtttgcctcaa

SEQ ID NO: 44149 - DNA, 20 bp, synthetic construct
  source 1..20: mol_type = other DNA
ttctgtaactgtttgcctca

SEQ ID NO: 44150 - DNA, 20 bp, synthetic construct
  source 1..20: mol_type = other DNA
attctgtaactgtttgcctc

SEQ ID NO: 44151 - DNA, 20 bp, synthetic construct
  source 1..20: mol_type = other DNA
aattctgtaactgtttgcct

SEQ ID NO: 44152 - DNA, 20 bp, synthetic construct
  source 1..20: mol_type = other DNA
taattctgtaactgtttgcc

SEQ ID NO: 44153 - DNA, 20 bp, synthetic construct
  source 1..20: mol_type = other DNA
ctaattctgtaactgtttgc

SEQ ID NO: 44154 - DNA, 20 bp, synthetic construct
  source 1..20: mol_type = other DNA
tctaattctgtaactgtttg

SEQ ID NO: 44155 - DNA, 20 bp, synthetic construct
  source 1..20: mol_type = other DNA
ttctaattctgtaactgttt

SEQ ID NO: 44156 - DNA, 20 bp, synthetic construct
  source 1..20: mol_type = other DNA
attctaattctgtaactgtt

SEQ ID NO: 44157 - DNA, 20 bp, synthetic construct
  source 1..20: mol_type = other DNA
cattctaattctgtaactgt

SEQ ID NO: 44158 - DNA, 20 bp, synthetic construct
  source 1..20: mol_type = other DNA
acattctaattctgtaactg

SEQ ID NO: 44159 - DNA, 20 bp, synthetic construct
  source 1..20: mol_type = other DNA
aacattctaattctgtaact

SEQ ID NO: 44160 - DNA, 20 bp, synthetic construct
  source 1..20: mol_type = other DNA
taacattctaattctgtaac

SEQ ID NO: 44161 - DNA, 20 bp, synthetic construct
  source 1..20: mol_type = other DNA
ctaacattctaattctgtaa

SEQ ID NO: 44162 - DNA, 20 bp, synthetic construct
  source 1..20: mol_type = other DNA
tctaacattctaattctgta

SEQ ID NO: 44163 - DNA, 20 bp, synthetic construct
  source 1..20: mol_type = other DNA
ttctaacattctaattctgt

SEQ ID NO: 44164 - DNA, 20 bp, synthetic construct
  source 1..20: mol_type = other DNA
tttctaacattctaattctg

SEQ ID NO: 44165 - DNA, 20 bp, synthetic construct
  source 1..20: mol_type = other DNA
atttctaacattctaattct

SEQ ID NO: 44166 - DNA, 20 bp, synthetic construct
  source 1..20: mol_type = other DNA
catttctaacattctaattc

SEQ ID NO: 44167 - DNA, 20 bp, synthetic construct
  source 1..20: mol_type = other DNA
tcatttctaacattctaatt

SEQ ID NO: 44168 - DNA, 20 bp, synthetic construct
  source 1..20: mol_type = other DNA
ttcatttctaacattctaat

SEQ ID NO: 44169 - DNA, 20 bp, synthetic construct
  source 1..20: mol_type = other DNA
tttcatttctaacattctaa

SEQ ID NO: 44170 - DNA, 20 bp, synthetic construct
  source 1..20: mol_type = other DNA
ctttcatttctaacattcta

SEQ ID NO: 44171 - DNA, 20 bp, synthetic construct
  source 1..20: mol_type = other DNA
cctttcatttctaacattct

SEQ ID NO: 44172 - DNA, 20 bp, synthetic construct
  source 1..20: mol_type = other DNA
tcctttcatttctaacattc

SEQ ID NO: 44173 - DNA, 20 bp, synthetic construct
  source 1..20: mol_type = other DNA
ttcctttcatttctaacatt

SEQ ID NO: 44174 - DNA, 20 bp, synthetic construct
  source 1..20: mol_type = other DNA
attcctttcatttctaacat

SEQ ID NO: 44175 - DNA, 20 bp, synthetic construct
  source 1..20: mol_type = other DNA
gattcctttcatttctaaca

SEQ ID NO: 44176 - DNA, 20 bp, synthetic construct
  source 1..20: mol_type = other DNA
ggattcctttcatttctaac

SEQ ID NO: 44177 - DNA, 20 bp, synthetic construct
  source 1..20: mol_type = other DNA
aggattcctttcatttctaa

SEQ ID NO: 44178 - DNA, 20 bp, synthetic construct
  source 1..20: mol_type = other DNA
taggattcctttcatttcta

SEQ ID NO: 44179 - DNA, 20 bp, synthetic construct
  source 1..20: mol_type = other DNA
ctaggattcctttcatttct

SEQ ID NO: 44180 - DNA, 20 bp, synthetic construct
  source 1..20: mol_type = other DNA
tctaggattcctttcatttc

SEQ ID NO: 44181 - DNA, 20 bp, synthetic construct
  source 1..20: mol_type = other DNA
atctaggattcctttcattt

SEQ ID NO: 44182 - DNA, 20 bp, synthetic construct
  source 1..20: mol_type = other DNA
catctaggattcctttcatt

SEQ ID NO: 44183 - DNA, 20 bp, synthetic construct
  source 1..20: mol_type = other DNA
acatctaggattcctttcat

SEQ ID NO: 44184 - DNA, 20 bp, synthetic construct
  source 1..20: mol_type = other DNA
gacatctaggattcctttca

SEQ ID NO: 44185 - DNA, 20 bp, synthetic construct
  source 1..20: mol_type = other DNA
tgacatctaggattcctttc

SEQ ID NO: 44186 - DNA, 20 bp, synthetic construct
  source 1..20: mol_type = other DNA
atgacatctaggattccttt

SEQ ID NO: 44187 - DNA, 20 bp, synthetic construct
  source 1..20: mol_type = other DNA
aatgacatctaggattcctt

SEQ ID NO: 44188 - DNA, 20 bp, synthetic construct
  source 1..20: mol_type = other DNA
aaatgacatctaggattcct

SEQ ID NO: 44189 - DNA, 20 bp, synthetic construct
  source 1..20: mol_type = other DNA
taaatgacatctaggattcc

SEQ ID NO: 44190 - DNA, 20 bp, synthetic construct
  source 1..20: mol_type = other DNA
ttaaatgacatctaggattc

SEQ ID NO: 44191 - DNA, 20 bp, synthetic construct
  source 1..20: mol_type = other DNA
attaaatgacatctaggatt

SEQ ID NO: 44192 - DNA, 20 bp, synthetic construct
  source 1..20: mol_type = other DNA
aattaaatgacatctaggat

SEQ ID NO: 44193 - DNA, 20 bp, synthetic construct
  source 1..20: mol_type = other DNA
gaattaaatgacatctagga

SEQ ID NO: 44194 - DNA, 20 bp, synthetic construct
  source 1..20: mol_type = other DNA
tgaattaaatgacatctagg

SEQ ID NO: 44195 - DNA, 20 bp, synthetic construct
  source 1..20: mol_type = other DNA
ttgaattaaatgacatctag

SEQ ID NO: 44196 - DNA, 20 bp, synthetic construct
  source 1..20: mol_type = other DNA
cttgaattaaatgacatcta

SEQ ID NO: 44197 - DNA, 20 bp, synthetic construct
  source 1..20: mol_type = other DNA
acttgaattaaatgacatct

SEQ ID NO: 44198 - DNA, 20 bp, synthetic construct
  source 1..20: mol_type = other DNA
gacttgaattaaatgacatc

SEQ ID NO: 44199 - DNA, 20 bp, synthetic construct
  source 1..20: mol_type = other DNA
ggacttgaattaaatgacat

SEQ ID NO: 44200 - DNA, 20 bp, synthetic construct
  source 1..20: mol_type = other DNA
tggacttgaattaaatgaca

SEQ ID NO: 44201 - DNA, 20 bp, synthetic construct
  source 1..20: mol_type = other DNA
atggacttgaattaaatgac

SEQ ID NO: 44202 - DNA, 20 bp, synthetic construct
  source 1..20: mol_type = other DNA
aatggacttgaattaaatga

SEQ ID NO: 44203 - DNA, 20 bp, synthetic construct
  source 1..20: mol_type = other DNA
caatggacttgaattaaatg

SEQ ID NO: 44204 - DNA, 20 bp, synthetic construct
  source 1..20: mol_type = other DNA
acaatggacttgaattaaat

SEQ ID NO: 44205 - DNA, 20 bp, synthetic construct
  source 1..20: mol_type = other DNA
aacaatggacttgaattaaa

SEQ ID NO: 44206 - DNA, 20 bp, synthetic construct
  source 1..20: mol_type = other DNA
aaacaatggacttgaattaa

SEQ ID NO: 44207 - DNA, 20 bp, synthetic construct
  source 1..20: mol_type = other DNA
aaaacaatggacttgaatta

SEQ ID NO: 44208 - DNA, 20 bp, synthetic construct
  source 1..20: mol_type = other DNA
gaaaacaatggacttgaatt

SEQ ID NO: 44209 - DNA, 20 bp, synthetic construct
  source 1..20: mol_type = other DNA
agaaaacaatggacttgaat

SEQ ID NO: 44210 - DNA, 20 bp, synthetic construct
  source 1..20: mol_type = other DNA
cagaaaacaatggacttgaa

SEQ ID NO: 44211 - DNA, 20 bp, synthetic construct
  source 1..20: mol_type = other DNA
ccagaaaacaatggacttga

SEQ ID NO: 44212 - DNA, 20 bp, synthetic construct
  source 1..20: mol_type = other DNA
tccagaaaacaatggacttg

SEQ ID NO: 44213 - DNA, 20 bp, synthetic construct
  source 1..20: mol_type = other DNA
atccagaaaacaatggactt

SEQ ID NO: 44214 - DNA, 20 bp, synthetic construct
  source 1..20: mol_type = other DNA
catccagaaaacaatggact

SEQ ID NO: 44215 - DNA, 20 bp, synthetic construct
  source 1..20: mol_type = other DNA
tcatccagaaaacaatggac

SEQ ID NO: 44216 - DNA, 20 bp, synthetic construct
  source 1..20: mol_type = other DNA
ctcatccagaaaacaatgga

SEQ ID NO: 44217 - DNA, 20 bp, synthetic construct
  source 1..20: mol_type = other DNA
tctcatccagaaaacaatgg

SEQ ID NO: 44218 - DNA, 20 bp, synthetic construct
  source 1..20: mol_type = other DNA
ctctcatccagaaaacaatg

SEQ ID NO: 44219 - DNA, 20 bp, synthetic construct
  source 1..20: mol_type = other DNA
tctctcatccagaaaacaat

SEQ ID NO: 44220 - DNA, 20 bp, synthetic construct
  source 1..20: mol_type = other DNA
ttctctcatccagaaaacaa

SEQ ID NO: 44221 - DNA, 20 bp, synthetic construct
  source 1..20: mol_type = other DNA
cttctctcatccagaaaaca

SEQ ID NO: 44222 - DNA, 20 bp, synthetic construct
  source 1..20: mol_type = other DNA
tcttctctcatccagaaaac

SEQ ID NO: 44223 - DNA, 20 bp, synthetic construct
  source 1..20: mol_type = other DNA
ttcttctctcatccagaaaa

SEQ ID NO: 44224 - DNA, 20 bp, synthetic construct
  source 1..20: mol_type = other DNA
tttcttctctcatccagaaa

SEQ ID NO: 44225 - DNA, 20 bp, synthetic construct
  source 1..20: mol_type = other DNA
ctttcttctctcatccagaa

SEQ ID NO: 44226 - DNA, 20 bp, synthetic construct
  source 1..20: mol_type = other DNA
actttcttctctcatccaga

SEQ ID NO: 44227 - DNA, 20 bp, synthetic construct
  source 1..20: mol_type = other DNA
cactttcttctctcatccag

SEQ ID NO: 44228 - DNA, 20 bp, synthetic construct
  source 1..20: mol_type = other DNA
tcactttcttctctcatcca

SEQ ID NO: 44229 - DNA, 20 bp, synthetic construct
  source 1..20: mol_type = other DNA
ctcactttcttctctcatcc

SEQ ID NO: 44230 - DNA, 20 bp, synthetic construct
  source 1..20: mol_type = other DNA
cctcactttcttctctcatc

SEQ ID NO: 44231 - DNA, 20 bp, synthetic construct
  source 1..20: mol_type = other DNA
tcctcactttcttctctcat

SEQ ID NO: 44232 - DNA, 20 bp, synthetic construct
  source 1..20: mol_type = other DNA
ttcctcactttcttctctca

SEQ ID NO: 44233 - DNA, 20 bp, synthetic construct
  source 1..20: mol_type = other DNA
tttcctcactttcttctctc

SEQ ID NO: 44234 - DNA, 20 bp, synthetic construct
  source 1..20: mol_type = other DNA
ttttcctcactttcttctct

SEQ ID NO: 44235 - DNA, 20 bp, synthetic construct
  source 1..20: mol_type = other DNA
cttttcctcactttcttctc

SEQ ID NO: 44236 - DNA, 20 bp, synthetic construct
  source 1..20: mol_type = other DNA
acttttcctcactttcttct

SEQ ID NO: 44237 - DNA, 20 bp, synthetic construct
  source 1..20: mol_type = other DNA
cacttttcctcactttcttc

SEQ ID NO: 44238 - DNA, 20 bp, synthetic construct
  source 1..20: mol_type = other DNA
tcacttttcctcactttctt

SEQ ID NO: 44239 - DNA, 20 bp, synthetic construct
  source 1..20: mol_type = other DNA
gtcacttttcctcactttct

SEQ ID NO: 44240 - DNA, 20 bp, synthetic construct
  source 1..20: mol_type = other DNA
tgtcacttttcctcactttc

SEQ ID NO: 44241 - DNA, 20 bp, synthetic construct
  source 1..20: mol_type = other DNA
ctgtcacttttcctcacttt

SEQ ID NO: 44242 - DNA, 20 bp, synthetic construct
  source 1..20: mol_type = other DNA
tctgtcacttttcctcactt

SEQ ID NO: 44243 - DNA, 20 bp, synthetic construct
  source 1..20: mol_type = other DNA
ctctgtcacttttcctcact

SEQ ID NO: 44244 - DNA, 20 bp, synthetic construct
  source 1..20: mol_type = other DNA
actctgtcacttttcctcac

SEQ ID NO: 44245 - DNA, 20 bp, synthetic construct
  source 1..20: mol_type = other DNA
aactctgtcacttttcctca

SEQ ID NO: 44246 - DNA, 20 bp, synthetic construct
  source 1..20: mol_type = other DNA
caactctgtcacttttcctc

SEQ ID NO: 44247 - DNA, 20 bp, synthetic construct
  source 1..20: mol_type = other DNA
ccaactctgtcacttttcct

SEQ ID NO: 44248 - DNA, 20 bp, synthetic construct
  source 1..20: mol_type = other DNA
tccaactctgtcacttttcc

SEQ ID NO: 44249 - DNA, 20 bp, synthetic construct
  source 1..20: mol_type = other DNA
ctccaactctgtcacttttc

SEQ ID NO: 44250 - DNA, 20 bp, synthetic construct
  source 1..20: mol_type = other DNA
tctccaactctgtcactttt

SEQ ID NO: 44251 - DNA, 20 bp, synthetic construct
  source 1..20: mol_type = other DNA
gtctccaactctgtcacttt

SEQ ID NO: 44252 - DNA, 20 bp, synthetic construct
  source 1..20: mol_type = other DNA
ggtctccaactctgtcactt

SEQ ID NO: 44253 - DNA, 20 bp, synthetic construct
  source 1..20: mol_type = other DNA
tggtctccaactctgtcact

SEQ ID NO: 44254 - DNA, 20 bp, synthetic construct
  source 1..20: mol_type = other DNA
ttggtctccaactctgtcac

SEQ ID NO: 44255 - DNA, 20 bp, synthetic construct
  source 1..20: mol_type = other DNA
cttggtctccaactctgtca

SEQ ID NO: 44256 - DNA, 20 bp, synthetic construct
  source 1..20: mol_type = other DNA
gcttggtctccaactctgtc

SEQ ID NO: 44257 - DNA, 20 bp, synthetic construct
  source 1..20: mol_type = other DNA
agcttggtctccaactctgt

SEQ ID NO: 44258 - DNA, 20 bp, synthetic construct
  source 1..20: mol_type = other DNA
tagcttggtctccaactctg

SEQ ID NO: 44259 - DNA, 20 bp, synthetic construct
  source 1..20: mol_type = other DNA
ctagcttggtctccaactct

SEQ ID NO: 44260 - DNA, 20 bp, synthetic construct
  source 1..20: mol_type = other DNA
cctagcttggtctccaactc

SEQ ID NO: 44261 - DNA, 20 bp, synthetic construct
  source 1..20: mol_type = other DNA
tcctagcttggtctccaact

SEQ ID NO: 44262 - DNA, 20 bp, synthetic construct
  source 1..20: mol_type = other DNA
gtcctagcttggtctccaac

SEQ ID NO: 44263 - DNA, 20 bp, synthetic construct
  source 1..20: mol_type = other DNA
agtcctagcttggtctccaa

SEQ ID NO: 44264 - DNA, 20 bp, synthetic construct
  source 1..20: mol_type = other DNA
cagtcctagcttggtctcca

SEQ ID NO: 44265 - DNA, 20 bp, synthetic construct
  source 1..20: mol_type = other DNA
ccagtcctagcttggtctcc

SEQ ID NO: 44266 - DNA, 20 bp, synthetic construct
  source 1..20: mol_type = other DNA
gccagtcctagcttggtctc

SEQ ID NO: 44267 - DNA, 20 bp, synthetic construct
  source 1..20: mol_type = other DNA
ggccagtcctagcttggtct

SEQ ID NO: 44268 - DNA, 20 bp, synthetic construct
  source 1..20: mol_type = other DNA
aggccagtcctagcttggtc

SEQ ID NO: 44269 - DNA, 20 bp, synthetic construct
  source 1..20: mol_type = other DNA
gaggccagtcctagcttggt

SEQ ID NO: 44270 - DNA, 20 bp, synthetic construct
  source 1..20: mol_type = other DNA
tgaggccagtcctagcttgg

SEQ ID NO: 44271 - DNA, 20 bp, synthetic construct
  source 1..20: mol_type = other DNA
ctgaggccagtcctagcttg

SEQ ID NO: 44272 - DNA, 20 bp, synthetic construct
  source 1..20: mol_type = other DNA
tctgaggccagtcctagctt

SEQ ID NO: 44273 - DNA, 20 bp, synthetic construct
  source 1..20: mol_type = other DNA
ttctgaggccagtcctagct

SEQ ID NO: 44274 - DNA, 20 bp, synthetic construct
  source 1..20: mol_type = other DNA
attctgaggccagtcctagc

SEQ ID NO: 44275 - DNA, 20 bp, synthetic construct
  source 1..20: mol_type = other DNA
cattctgaggccagtcctag

SEQ ID NO: 44276 - DNA, 20 bp, synthetic construct
  source 1..20: mol_type = other DNA
acattctgaggccagtccta

SEQ ID NO: 44277 - DNA, 20 bp, synthetic construct
  source 1..20: mol_type = other DNA
aacattctgaggccagtcct

SEQ ID NO: 44278 - DNA, 20 bp, synthetic construct
  source 1..20: mol_type = other DNA
taacattctgaggccagtcc

SEQ ID NO: 44279 - DNA, 20 bp, synthetic construct
  source 1..20: mol_type = other DNA
ttaacattctgaggccagtc

SEQ ID NO: 44280 - DNA, 20 bp, synthetic construct
  source 1..20: mol_type = other DNA
cttaacattctgaggccagt

SEQ ID NO: 44281 - DNA, 20 bp, synthetic construct
  source 1..20: mol_type = other DNA
tcttaacattctgaggccag

SEQ ID NO: 44282 - DNA, 20 bp, synthetic construct
  source 1..20: mol_type = other DNA
ctcttaacattctgaggcca

SEQ ID NO: 44283 - DNA, 20 bp, synthetic construct
  source 1..20: mol_type = other DNA
actcttaacattctgaggcc

SEQ ID NO: 44284 - DNA, 20 bp, synthetic construct
  source 1..20: mol_type = other DNA
tactcttaacattctgaggc

SEQ ID NO: 44285 - DNA, 20 bp, synthetic construct
  source 1..20: mol_type = other DNA
gtactcttaacattctgagg

SEQ ID NO: 44286 - DNA, 20 bp, synthetic construct
  source 1..20: mol_type = other DNA
agtactcttaacattctgag

SEQ ID NO: 44287 - DNA, 20 bp, synthetic construct
  source 1..20: mol_type = other DNA
gagtactcttaacattctga

SEQ ID NO: 44288 - DNA, 20 bp, synthetic construct
  source 1..20: mol_type = other DNA
agagtactcttaacattctg

SEQ ID NO: 44289 - DNA, 20 bp, synthetic construct
  source 1..20: mol_type = other DNA
aagagtactcttaacattct

SEQ ID NO: 44290 - DNA, 20 bp, synthetic construct
  source 1..20: mol_type = other DNA
gaagagtactcttaacattc

SEQ ID NO: 44291 - DNA, 20 bp, synthetic construct
  source 1..20: mol_type = other DNA
agaagagtactcttaacatt

SEQ ID NO: 44292 - DNA, 20 bp, synthetic construct
  source 1..20: mol_type = other DNA
tagaagagtactcttaacat

SEQ ID NO: 44293 - DNA, 20 bp, synthetic construct
  source 1..20: mol_type = other DNA
ctagaagagtactcttaaca

SEQ ID NO: 44294 - DNA, 20 bp, synthetic construct
  source 1..20: mol_type = other DNA
cctagaagagtactcttaac

SEQ ID NO: 44295 - DNA, 20 bp, synthetic construct
  source 1..20: mol_type = other DNA
ccctagaagagtactcttaa

SEQ ID NO: 44296 - DNA, 20 bp, synthetic construct
  source 1..20: mol_type = other DNA
tccctagaagagtactctta

SEQ ID NO: 44297 - DNA, 20 bp, synthetic construct
  source 1..20: mol_type = other DNA
atccctagaagagtactctt

SEQ ID NO: 44298 - DNA, 20 bp, synthetic construct
  source 1..20: mol_type = other DNA
gatccctagaagagtactct

SEQ ID NO: 44299 - DNA, 20 bp, synthetic construct
  source 1..20: mol_type = other DNA
cgatccctagaagagtactc

SEQ ID NO: 44300 - DNA, 20 bp, synthetic construct
  source 1..20: mol_type = other DNA
tcgatccctagaagagtact

SEQ ID NO: 44301 - DNA, 20 bp, synthetic construct
  source 1..20: mol_type = other DNA
gtcgatccctagaagagtac

SEQ ID NO: 44302 - DNA, 20 bp, synthetic construct
  source 1..20: mol_type = other DNA
ggtcgatccctagaagagta

SEQ ID NO: 44303 - DNA, 20 bp, synthetic construct
  source 1..20: mol_type = other DNA
tggtcgatccctagaagagt

SEQ ID NO: 44304 - DNA, 20 bp, synthetic construct
  source 1..20: mol_type = other DNA
ctggtcgatccctagaagag

SEQ ID NO: 44305 - DNA, 20 bp, synthetic construct
  source 1..20: mol_type = other DNA
actggtcgatccctagaaga

SEQ ID NO: 44306 - DNA, 20 bp, synthetic construct
  source 1..20: mol_type = other DNA
gactggtcgatccctagaag

SEQ ID NO: 44307 - DNA, 20 bp, synthetic construct
  source 1..20: mol_type = other DNA
cgactggtcgatccctagaa

SEQ ID NO: 44308 - DNA, 20 bp, synthetic construct
  source 1..20: mol_type = other DNA
acgactggtcgatccctaga

SEQ ID NO: 44309 - DNA, 20 bp, synthetic construct
  source 1..20: mol_type = other DNA
cacgactggtcgatccctag

SEQ ID NO: 44310 - DNA, 20 bp, synthetic construct
  source 1..20: mol_type = other DNA
acacgactggtcgatcccta

SEQ ID NO: 44311 - DNA, 20 bp, synthetic construct
  source 1..20: mol_type = other DNA
aacacgactggtcgatccct

SEQ ID NO: 44312 - DNA, 20 bp, synthetic construct
  source 1..20: mol_type = other DNA
taacacgactggtcgatccc

SEQ ID NO: 44313 - DNA, 20 bp, synthetic construct
  source 1..20: mol_type = other DNA
gtaacacgactggtcgatcc

SEQ ID NO: 44314 - DNA, 20 bp, synthetic construct
  source 1..20: mol_type = other DNA
agtaacacgactggtcgatc

SEQ ID NO: 44315 - DNA, 20 bp, synthetic construct
  source 1..20: mol_type = other DNA
tagtaacacgactggtcgat

SEQ ID NO: 44316 - DNA, 20 bp, synthetic construct
  source 1..20: mol_type = other DNA
ctagtaacacgactggtcga

SEQ ID NO: 44317 - DNA, 20 bp, synthetic construct
  source 1..20: mol_type = other DNA
tctagtaacacgactggtcg

SEQ ID NO: 44318 - DNA, 20 bp, synthetic construct
  source 1..20: mol_type = other DNA
gtctagtaacacgactggtc

SEQ ID NO: 44319 - DNA, 20 bp, synthetic construct
  source 1..20: mol_type = other DNA
agtctagtaacacgactggt

SEQ ID NO: 44320 - DNA, 20 bp, synthetic construct
  source 1..20: mol_type = other DNA
aagtctagtaacacgactgg

SEQ ID NO: 44321 - DNA, 20 bp, synthetic construct
  source 1..20: mol_type = other DNA
aaagtctagtaacacgactg

SEQ ID NO: 44322 - DNA, 20 bp, synthetic construct
  source 1..20: mol_type = other DNA
aaaagtctagtaacacgact

SEQ ID NO: 44323 - DNA, 20 bp, synthetic construct
  source 1..20: mol_type = other DNA
aaaaagtctagtaacacgac

SEQ ID NO: 44324 - DNA, 20 bp, synthetic construct
  source 1..20: mol_type = other DNA
caaaaagtctagtaacacga

SEQ ID NO: 44325 - DNA, 20 bp, synthetic construct
  source 1..20: mol_type = other DNA
ccaaaaagtctagtaacacg

SEQ ID NO: 44326 - DNA, 20 bp, synthetic construct
  source 1..20: mol_type = other DNA
tccaaaaagtctagtaacac

SEQ ID NO: 44327 - DNA, 20 bp, synthetic construct
  source 1..20: mol_type = other DNA
atccaaaaagtctagtaaca

SEQ ID NO: 44328 - DNA, 20 bp, synthetic construct
  source 1..20: mol_type = other DNA
gatccaaaaagtctagtaac

SEQ ID NO: 44329 - DNA, 20 bp, synthetic construct
  source 1..20: mol_type = other DNA
agatccaaaaagtctagtaa

SEQ ID NO: 44330 - DNA, 20 bp, synthetic construct
  source 1..20: mol_type = other DNA
cagatccaaaaagtctagta

SEQ ID NO: 44331 - DNA, 20 bp, synthetic construct
  source 1..20: mol_type = other DNA
tcagatccaaaaagtctagt

SEQ ID NO: 44332 - DNA, 20 bp, synthetic construct
  source 1..20: mol_type = other DNA
ttcagatccaaaaagtctag

SEQ ID NO: 44333 - DNA, 20 bp, synthetic construct
  source 1..20: mol_type = other DNA
attcagatccaaaaagtcta

SEQ ID NO: 44334 - DNA, 20 bp, synthetic construct
  source 1..20: mol_type = other DNA
aattcagatccaaaaagtct

SEQ ID NO: 44335 - DNA, 20 bp, synthetic construct
  source 1..20: mol_type = other DNA
caattcagatccaaaaagtc

SEQ ID NO: 44336 - DNA, 20 bp, synthetic construct
  source 1..20: mol_type = other DNA
acaattcagatccaaaaagt

SEQ ID NO: 44337 - DNA, 20 bp, synthetic construct
  source 1..20: mol_type = other DNA
cacaattcagatccaaaaag

SEQ ID NO: 44338 - DNA, 20 bp, synthetic construct
  source 1..20: mol_type = other DNA
gcacaattcagatccaaaaa

SEQ ID NO: 44339 - DNA, 20 bp, synthetic construct
  source 1..20: mol_type = other DNA
agcacaattcagatccaaaa

SEQ ID NO: 44340 - DNA, 20 bp, synthetic construct
  source 1..20: mol_type = other DNA
aagcacaattcagatccaaa

SEQ ID NO: 44341 - DNA, 20 bp, synthetic construct
  source 1..20: mol_type = other DNA
aaagcacaattcagatccaa

SEQ ID NO: 44342 - DNA, 20 bp, synthetic construct
  source 1..20: mol_type = other DNA
aaaagcacaattcagatcca

SEQ ID NO: 44343 - DNA, 20 bp, synthetic construct
  source 1..20: mol_type = other DNA
gaaaagcacaattcagatcc

SEQ ID NO: 44344 - DNA, 20 bp, synthetic construct
  source 1..20: mol_type = other DNA
ggaaaagcacaattcagatc

SEQ ID NO: 44345 - DNA, 20 bp, synthetic construct
  source 1..20: mol_type = other DNA
aggaaaagcacaattcagat

SEQ ID NO: 44346 - DNA, 20 bp, synthetic construct
  source 1..20: mol_type = other DNA
aaggaaaagcacaattcaga

SEQ ID NO: 44347 - DNA, 20 bp, synthetic construct
  source 1..20: mol_type = other DNA
caaggaaaagcacaattcag

SEQ ID NO: 44348 - DNA, 20 bp, synthetic construct
  source 1..20: mol_type = other DNA
tcaaggaaaagcacaattca

SEQ ID NO: 44349 - DNA, 20 bp, synthetic construct
  source 1..20: mol_type = other DNA
ttcaaggaaaagcacaattc

SEQ ID NO: 44350 - DNA, 20 bp, synthetic construct
  source 1..20: mol_type = other DNA
attcaaggaaaagcacaatt

SEQ ID NO: 44351 - DNA, 20 bp, synthetic construct
  source 1..20: mol_type = other DNA
cattcaaggaaaagcacaat

SEQ ID NO: 44352 - DNA, 20 bp, synthetic construct
  source 1..20: mol_type = other DNA
acattcaaggaaaagcacaa

SEQ ID NO: 44353 - DNA, 20 bp, synthetic construct
  source 1..20: mol_type = other DNA
aacattcaaggaaaagcaca

SEQ ID NO: 44354 - DNA, 20 bp, synthetic construct
  source 1..20: mol_type = other DNA
aaacattcaaggaaaagcac

SEQ ID NO: 44355 - DNA, 20 bp, synthetic construct
  source 1..20: mol_type = other DNA
aaaacattcaaggaaaagca

SEQ ID NO: 44356 - DNA, 20 bp, synthetic construct
  source 1..20: mol_type = other DNA
caaaacattcaaggaaaagc

SEQ ID NO: 44357 - DNA, 20 bp, synthetic construct
  source 1..20: mol_type = other DNA
tcaaaacattcaaggaaaag

SEQ ID NO: 44358 - DNA, 20 bp, synthetic construct
  source 1..20: mol_type = other DNA
ttcaaaacattcaaggaaaa

SEQ ID NO: 44359 - DNA, 20 bp, synthetic construct
  source 1..20: mol_type = other DNA
attcaaaacattcaaggaaa

SEQ ID NO: 44360 - DNA, 20 bp, synthetic construct
  source 1..20: mol_type = other DNA
aattcaaaacattcaaggaa

SEQ ID NO: 44361 - DNA, 20 bp, synthetic construct
  source 1..20: mol_type = other DNA
aaattcaaaacattcaagga

SEQ ID NO: 44362 - DNA, 20 bp, synthetic construct
  source 1..20: mol_type = other DNA
aaaattcaaaacattcaagg

SEQ ID NO: 44363 - DNA, 20 bp, synthetic construct
  source 1..20: mol_type = other DNA
caaaattcaaaacattcaag

SEQ ID NO: 44364 - DNA, 20 bp, synthetic construct
  source 1..20: mol_type = other DNA
ccaaaattcaaaacattcaa

SEQ ID NO: 44365 - DNA, 20 bp, synthetic construct
  source 1..20: mol_type = other DNA
gccaaaattcaaaacattca

SEQ ID NO: 44366 - DNA, 20 bp, synthetic construct
  source 1..20: mol_type = other DNA
agccaaaattcaaaacattc

SEQ ID NO: 44367 - DNA, 20 bp, synthetic construct
  source 1..20: mol_type = other DNA
aagccaaaattcaaaacatt

SEQ ID NO: 44368 - DNA, 20 bp, synthetic construct
  source 1..20: mol_type = other DNA
caagccaaaattcaaaacat

SEQ ID NO: 44369 - DNA, 20 bp, synthetic construct
  source 1..20: mol_type = other DNA
tcaagccaaaattcaaaaca

SEQ ID NO: 44370 - DNA, 20 bp, synthetic construct
  source 1..20: mol_type = other DNA
ctcaagccaaaattcaaaac

SEQ ID NO: 44371 - DNA, 20 bp, synthetic construct
  source 1..20: mol_type = other DNA
actcaagccaaaattcaaaa

SEQ ID NO: 44372 - DNA, 20 bp, synthetic construct
  source 1..20: mol_type = other DNA
cactcaagccaaaattcaaa

SEQ ID NO: 44373 - DNA, 20 bp, synthetic construct
  source 1..20: mol_type = other DNA
acactcaagccaaaattcaa

SEQ ID NO: 44374 - DNA, 20 bp, synthetic construct
  source 1..20: mol_type = other DNA
aacactcaagccaaaattca

SEQ ID NO: 44375 - DNA, 20 bp, synthetic construct
  source 1..20: mol_type = other DNA
caacactcaagccaaaattc

SEQ ID NO: 44376 - DNA, 20 bp, synthetic construct
  source 1..20: mol_type = other DNA
acaacactcaagccaaaatt

SEQ ID NO: 44377 - DNA, 20 bp, synthetic construct
  source 1..20: mol_type = other DNA
cacaacactcaagccaaaat

SEQ ID NO: 44378 - DNA, 20 bp, synthetic construct
  source 1..20: mol_type = other DNA
tcacaacactcaagccaaaa

SEQ ID NO: 44379 - DNA, 20 bp, synthetic construct
  source 1..20: mol_type = other DNA
atcacaacactcaagccaaa

SEQ ID NO: 44380 - DNA, 20 bp, synthetic construct
  source 1..20: mol_type = other DNA
aatcacaacactcaagccaa

SEQ ID NO: 44381 - DNA, 20 bp, synthetic construct
  source 1..20: mol_type = other DNA
taatcacaacactcaagcca

SEQ ID NO: 44382 - DNA, 20 bp, synthetic construct
  source 1..20: mol_type = other DNA
ataatcacaacactcaagcc

SEQ ID NO: 44383 - DNA, 20 bp, synthetic construct
  source 1..20: mol_type = other DNA
aataatcacaacactcaagc

SEQ ID NO: 44384 - DNA, 20 bp, synthetic construct
  source 1..20: mol_type = other DNA
aaataatcacaacactcaag

SEQ ID NO: 44385 - DNA, 20 bp, synthetic construct
  source 1..20: mol_type = other DNA
aaaataatcacaacactcaa

SEQ ID NO: 44386 - DNA, 20 bp, synthetic construct
  source 1..20: mol_type = other DNA
taaaataatcacaacactca

SEQ ID NO: 44387 - DNA, 20 bp, synthetic construct
  source 1..20: mol_type = other DNA
ataaaataatcacaacactc

SEQ ID NO: 44388 - DNA, 20 bp, synthetic construct
  source 1..20: mol_type = other DNA
aataaaataatcacaacact

SEQ ID NO: 44389 - DNA, 20 bp, synthetic construct
  source 1..20: mol_type = other DNA
taataaaataatcacaacac

SEQ ID NO: 44390 - DNA, 20 bp, synthetic construct
  source 1..20: mol_type = other DNA
ttaataaaataatcacaaca

SEQ ID NO: 44391 - DNA, 20 bp, synthetic construct
  source 1..20: mol_type = other DNA
tttaataaaataatcacaac

SEQ ID NO: 44392 - DNA, 20 bp, synthetic construct
  source 1..20: mol_type = other DNA
ttttaataaaataatcacaa

SEQ ID NO: 44393 - DNA, 20 bp, synthetic construct
  source 1..20: mol_type = other DNA
attttaataaaataatcaca

SEQ ID NO: 44394 - DNA, 20 bp, synthetic construct
  source 1..20: mol_type = other DNA
cattttaataaaataatcac

SEQ ID NO: 44395 - DNA, 20 bp, synthetic construct
  source 1..20: mol_type = other DNA
tcattttaataaaataatca

SEQ ID NO: 44396 - DNA, 20 bp, synthetic construct
  source 1..20: mol_type = other DNA
ctcattttaataaaataatc

SEQ ID NO: 44397 - DNA, 20 bp, synthetic construct
  source 1..20: mol_type = other DNA
tctcattttaataaaataat

SEQ ID NO: 44398 - DNA, 20 bp, synthetic construct
  source 1..20: mol_type = other DNA
atctcattttaataaaataa

SEQ ID NO: 44399 - DNA, 20 bp, synthetic construct
  source 1..20: mol_type = other DNA
aatctcattttaataaaata

SEQ ID NO: 44400 - DNA, 20 bp, synthetic construct
  source 1..20: mol_type = other DNA
gaatctcattttaataaaat

SEQ ID NO: 44401 - DNA, 20 bp, synthetic construct
  source 1..20: mol_type = other DNA
ggaatctcattttaataaaa

SEQ ID NO: 44402 - DNA, 20 bp, synthetic construct
  source 1..20: mol_type = other DNA
tggaatctcattttaataaa

SEQ ID NO: 44403 - DNA, 20 bp, synthetic construct
  source 1..20: mol_type = other DNA
ctggaatctcattttaataa

SEQ ID NO: 44404 - DNA, 20 bp, synthetic construct
  source 1..20: mol_type = other DNA
actggaatctcattttaata

SEQ ID NO: 44405 - DNA, 20 bp, synthetic construct
  source 1..20: mol_type = other DNA
gactggaatctcattttaat

SEQ ID NO: 44406 - DNA, 20 bp, synthetic construct
  source 1..20: mol_type = other DNA
ggactggaatctcattttaa

SEQ ID NO: 44407 - DNA, 20 bp, synthetic construct
  source 1..20: mol_type = other DNA
aggactggaatctcatttta

SEQ ID NO: 44408 - DNA, 20 bp, synthetic construct
  source 1..20: mol_type = other DNA
taggactggaatctcatttt

SEQ ID NO: 44409 - DNA, 20 bp, synthetic construct
  source 1..20: mol_type = other DNA
ataggactggaatctcattt

SEQ ID NO: 44410 - DNA, 20 bp, synthetic construct
  source 1..20: mol_type = other DNA
aataggactggaatctcatt

SEQ ID NO: 44411 - DNA, 20 bp, synthetic construct
  source 1..20: mol_type = other DNA
caataggactggaatctcat

SEQ ID NO: 44412 - DNA, 20 bp, synthetic construct
  source 1..20: mol_type = other DNA
acaataggactggaatctca

SEQ ID NO: 44413 - DNA, 20 bp, synthetic construct
  source 1..20: mol_type = other DNA
gacaataggactggaatctc

SEQ ID NO: 44414 - DNA, 20 bp, synthetic construct
  source 1..20: mol_type = other DNA
tgacaataggactggaatct

SEQ ID NO: 44415 - DNA, 20 bp, synthetic construct
  source 1..20: mol_type = other DNA
atgacaataggactggaatc

SEQ ID NO: 44416 - DNA, 20 bp, synthetic construct
  source 1..20: mol_type = other DNA
catgacaataggactggaat

SEQ ID NO: 44417 - DNA, 20 bp, synthetic construct
  source 1..20: mol_type = other DNA
tcatgacaataggactggaa

SEQ ID NO: 44418 - DNA, 20 bp, synthetic construct
  source 1..20: mol_type = other DNA
gtcatgacaataggactgga

SEQ ID NO: 44419 - DNA, 20 bp, synthetic construct
  source 1..20: mol_type = other DNA
agtcatgacaataggactgg

SEQ ID NO: 44420 - DNA, 20 bp, synthetic construct
  source 1..20: mol_type = other DNA
tagtcatgacaataggactg

SEQ ID NO: 44421 - DNA, 20 bp, synthetic construct
  source 1..20: mol_type = other DNA
ttagtcatgacaataggact

SEQ ID NO: 44422 - DNA, 20 bp, synthetic construct
  source 1..20: mol_type = other DNA
attagtcatgacaataggac

SEQ ID NO: 44423 - DNA, 20 bp, synthetic construct
  source 1..20: mol_type = other DNA
cattagtcatgacaatagga

SEQ ID NO: 44424 - DNA, 20 bp, synthetic construct
  source 1..20: mol_type = other DNA
acattagtcatgacaatagg

SEQ ID NO: 44425 - DNA, 20 bp, synthetic construct
  source 1..20: mol_type = other DNA
aacattagtcatgacaatag

SEQ ID NO: 44426 - DNA, 20 bp, synthetic construct
  source 1..20: mol_type = other DNA
aaacattagtcatgacaata

SEQ ID NO: 44427 - DNA, 20 bp, synthetic construct
  source 1..20: mol_type = other DNA
taaacattagtcatgacaat

SEQ ID NO: 44428 - DNA, 20 bp, synthetic construct
  source 1..20: mol_type = other DNA
ataaacattagtcatgacaa

SEQ ID NO: 44429 - DNA, 20 bp, synthetic construct
  source 1..20: mol_type = other DNA
cataaacattagtcatgaca

SEQ ID NO: 44430 - DNA, 20 bp, synthetic construct
  source 1..20: mol_type = other DNA
tcataaacattagtcatgac

SEQ ID NO: 44431 - DNA, 20 bp, synthetic construct
  source 1..20: mol_type = other DNA
ctcataaacattagtcatga

SEQ ID NO: 44432 - DNA, 20 bp, synthetic construct
  source 1..20: mol_type = other DNA
tctcataaacattagtcatg

SEQ ID NO: 44433 - DNA, 20 bp, synthetic construct
  source 1..20: mol_type = other DNA
ttctcataaacattagtcat

SEQ ID NO: 44434 - DNA, 20 bp, synthetic construct
  source 1..20: mol_type = other DNA
tttctcataaacattagtca

SEQ ID NO: 44435 - DNA, 20 bp, synthetic construct
  source 1..20: mol_type = other DNA
atttctcataaacattagtc

SEQ ID NO: 44436 - DNA, 20 bp, synthetic construct
  source 1..20: mol_type = other DNA
tatttctcataaacattagt

SEQ ID NO: 44437 - DNA, 20 bp, synthetic construct
  source 1..20: mol_type = other DNA
atatttctcataaacattag

SEQ ID NO: 44438 - DNA, 20 bp, synthetic construct
  source 1..20: mol_type = other DNA
tatatttctcataaacatta

SEQ ID NO: 44439 - DNA, 20 bp, synthetic construct
  source 1..20: mol_type = other DNA
ttatatttctcataaacatt

SEQ ID NO: 44440 - DNA, 20 bp, synthetic construct
  source 1..20: mol_type = other DNA
gttatatttctcataaacat

SEQ ID NO: 44441 - DNA, 20 bp, synthetic construct
  source 1..20: mol_type = other DNA
tgttatatttctcataaaca

SEQ ID NO: 44442 - DNA, 20 bp, synthetic construct
  source 1..20: mol_type = other DNA
atgttatatttctcataaac

SEQ ID NO: 44443 - DNA, 20 bp, synthetic construct
  source 1..20: mol_type = other DNA
aatgttatatttctcataaa

SEQ ID NO: 44444 - DNA, 20 bp, synthetic construct
  source 1..20: mol_type = other DNA
aaatgttatatttctcataa

SEQ ID NO: 44445 - DNA, 20 bp, synthetic construct
  source 1..20: mol_type = other DNA
gaaatgttatatttctcata

SEQ ID NO: 44446 - DNA, 20 bp, synthetic construct
  source 1..20: mol_type = other DNA
tgaaatgttatatttctcat

SEQ ID NO: 44447 - DNA, 20 bp, synthetic construct
  source 1..20: mol_type = other DNA
gtgaaatgttatatttctca

SEQ ID NO: 44448 - DNA, 20 bp, synthetic construct
  source 1..20: mol_type = other DNA
agtgaaatgttatatttctc

SEQ ID NO: 44449 - DNA, 20 bp, synthetic construct
  source 1..20: mol_type = other DNA
aagtgaaatgttatatttct

SEQ ID NO: 44450 - DNA, 20 bp, synthetic construct
  source 1..20: mol_type = other DNA
aaagtgaaatgttatatttc

SEQ ID NO: 44451 - DNA, 20 bp, synthetic construct
  source 1..20: mol_type = other DNA
taaagtgaaatgttatattt

SEQ ID NO: 44452 - DNA, 20 bp, synthetic construct
  source 1..20: mol_type = other DNA
ttaaagtgaaatgttatatt

SEQ ID NO: 44453 - DNA, 20 bp, synthetic construct
  source 1..20: mol_type = other DNA
attaaagtgaaatgttatat

SEQ ID NO: 44454 - DNA, 20 bp, synthetic construct
  source 1..20: mol_type = other DNA
cattaaagtgaaatgttata

SEQ ID NO: 44455 - DNA, 20 bp, synthetic construct
  source 1..20: mol_type = other DNA
tcattaaagtgaaatgttat

SEQ ID NO: 44456 - DNA, 20 bp, synthetic construct
  source 1..20: mol_type = other DNA
atcattaaagtgaaatgtta

SEQ ID NO: 44457 - DNA, 20 bp, synthetic construct
  source 1..20: mol_type = other DNA
catcattaaagtgaaatgtt

SEQ ID NO: 44458 - DNA, 20 bp, synthetic construct
  source 1..20: mol_type = other DNA
acatcattaaagtgaaatgt

SEQ ID NO: 44459 - DNA, 20 bp, synthetic construct
  source 1..20: mol_type = other DNA
aacatcattaaagtgaaatg

SEQ ID NO: 44460 - DNA, 20 bp, synthetic construct
  source 1..20: mol_type = other DNA
aaacatcattaaagtgaaat

SEQ ID NO: 44461 - DNA, 20 bp, synthetic construct
  source 1..20: mol_type = other DNA
aaaacatcattaaagtgaaa

SEQ ID NO: 44462 - DNA, 20 bp, synthetic construct
  source 1..20: mol_type = other DNA
aaaaacatcattaaagtgaa

SEQ ID NO: 44463 - DNA, 20 bp, synthetic construct
  source 1..20: mol_type = other DNA
aaaaaacatcattaaagtga

SEQ ID NO: 44464 - DNA, 20 bp, synthetic construct
  source 1..20: mol_type = other DNA
taaaaaacatcattaaagtg

SEQ ID NO: 44465 - DNA, 20 bp, synthetic construct
  source 1..20: mol_type = other DNA
ttaaaaaacatcattaaagt

SEQ ID NO: 44466 - DNA, 20 bp, synthetic construct
  source 1..20: mol_type = other DNA
attaaaaaacatcattaaag

SEQ ID NO: 44467 - DNA, 20 bp, synthetic construct
  source 1..20: mol_type = other DNA
aattaaaaaacatcattaaa

SEQ ID NO: 44468 - DNA, 20 bp, synthetic construct
  source 1..20: mol_type = other DNA
taattaaaaaacatcattaa

SEQ ID NO: 44469 - DNA, 20 bp, synthetic construct
  source 1..20: mol_type = other DNA
ataattaaaaaacatcatta

SEQ ID NO: 44470 - DNA, 20 bp, synthetic construct
  source 1..20: mol_type = other DNA
aataattaaaaaacatcatt

SEQ ID NO: 44471 - DNA, 20 bp, synthetic construct
  source 1..20: mol_type = other DNA
gaataattaaaaaacatcat

SEQ ID NO: 44472 - DNA, 20 bp, synthetic construct
  source 1..20: mol_type = other DNA
agaataattaaaaaacatca

SEQ ID NO: 44473 - DNA, 20 bp, synthetic construct
  source 1..20: mol_type = other DNA
tagaataattaaaaaacatc

SEQ ID NO: 44474 - DNA, 20 bp, synthetic construct
  source 1..20: mol_type = other DNA
ttagaataattaaaaaacat

SEQ ID NO: 44475 - DNA, 20 bp, synthetic construct
  source 1..20: mol_type = other DNA
cttagaataattaaaaaaca

SEQ ID NO: 44476 - DNA, 20 bp, synthetic construct
  source 1..20: mol_type = other DNA
ccttagaataattaaaaaac

SEQ ID NO: 44477 - DNA, 20 bp, synthetic construct
  source 1..20: mol_type = other DNA
cccttagaataattaaaaaa

SEQ ID NO: 44478 - DNA, 20 bp, synthetic construct
  source 1..20: mol_type = other DNA
ccccttagaataattaaaaa

SEQ ID NO: 44479 - DNA, 20 bp, synthetic construct
  source 1..20: mol_type = other DNA
gccccttagaataattaaaa

SEQ ID NO: 44480 - DNA, 20 bp, synthetic construct
  source 1..20: mol_type = other DNA
ggccccttagaataattaaa

SEQ ID NO: 44481 - DNA, 20 bp, synthetic construct
  source 1..20: mol_type = other DNA
aggccccttagaataattaa

SEQ ID NO: 44482 - DNA, 20 bp, synthetic construct
  source 1..20: mol_type = other DNA
taggccccttagaataatta

SEQ ID NO: 44483 - DNA, 20 bp, synthetic construct
  source 1..20: mol_type = other DNA
ttaggccccttagaataatt

SEQ ID NO: 44484 - DNA, 20 bp, synthetic construct
  source 1..20: mol_type = other DNA
attaggccccttagaataat

SEQ ID NO: 44485 - DNA, 20 bp, synthetic construct
  source 1..20: mol_type = other DNA
gattaggccccttagaataa

SEQ ID NO: 44486 - DNA, 20 bp, synthetic construct
  source 1..20: mol_type = other DNA
agattaggccccttagaata

SEQ ID NO: 44487 - DNA, 20 bp, synthetic construct
  source 1..20: mol_type = other DNA
aagattaggccccttagaat

SEQ ID NO: 44488 - DNA, 20 bp, synthetic construct
  source 1..20: mol_type = other DNA
aaagattaggccccttagaa

SEQ ID NO: 44489 - DNA, 20 bp, synthetic construct
  source 1..20: mol_type = other DNA
aaaagattaggccccttaga

SEQ ID NO: 44490 - DNA, 20 bp, synthetic construct
  source 1..20: mol_type = other DNA
aaaaagattaggccccttag

SEQ ID NO: 44491 - DNA, 20 bp, synthetic construct
  source 1..20: mol_type = other DNA
gaaaaagattaggcccctta

SEQ ID NO: 44492 - DNA, 20 bp, synthetic construct
  source 1..20: mol_type = other DNA
tgaaaaagattaggcccctt

SEQ ID NO: 44493 - DNA, 20 bp, synthetic construct
  source 1..20: mol_type = other DNA
ctgaaaaagattaggcccct

SEQ ID NO: 44494 - DNA, 20 bp, synthetic construct
  source 1..20: mol_type = other DNA
actgaaaaagattaggcccc

SEQ ID NO: 44495 - DNA, 20 bp, synthetic construct
  source 1..20: mol_type = other DNA
cactgaaaaagattaggccc

SEQ ID NO: 44496 - DNA, 20 bp, synthetic construct
  source 1..20: mol_type = other DNA
ccactgaaaaagattaggcc

SEQ ID NO: 44497 - DNA, 20 bp, synthetic construct
  source 1..20: mol_type = other DNA
tccactgaaaaagattaggc

SEQ ID NO: 44498 - DNA, 20 bp, synthetic construct
  source 1..20: mol_type = other DNA
ttccactgaaaaagattagg

SEQ ID NO: 44499 - DNA, 20 bp, synthetic construct
  source 1..20: mol_type = other DNA
attccactgaaaaagattag

SEQ ID NO: 44500 - DNA, 20 bp, synthetic construct
  source 1..20: mol_type = other DNA
tattccactgaaaaagatta

SEQ ID NO: 44501 - DNA, 20 bp, synthetic construct
  source 1..20: mol_type = other DNA
ttattccactgaaaaagatt

SEQ ID NO: 44502 - DNA, 20 bp, synthetic construct
  source 1..20: mol_type = other DNA
cttattccactgaaaaagat

SEQ ID NO: 44503 - DNA, 20 bp, synthetic construct
  source 1..20: mol_type = other DNA
gcttattccactgaaaaaga

SEQ ID NO: 44504 - DNA, 20 bp, synthetic construct
  source 1..20: mol_type = other DNA
agcttattccactgaaaaag

SEQ ID NO: 44505 - DNA, 20 bp, synthetic construct
  source 1..20: mol_type = other DNA
aagcttattccactgaaaaa

SEQ ID NO: 44506 - DNA, 20 bp, synthetic construct
  source 1..20: mol_type = other DNA
aaagcttattccactgaaaa

SEQ ID NO: 44507 - DNA, 20 bp, synthetic construct
  source 1..20: mol_type = other DNA
taaagcttattccactgaaa

SEQ ID NO: 44508 - DNA, 20 bp, synthetic construct
  source 1..20: mol_type = other DNA
ctaaagcttattccactgaa

SEQ ID NO: 44509 - DNA, 20 bp, synthetic construct
  source 1..20: mol_type = other DNA
cctaaagcttattccactga

SEQ ID NO: 44510 - DNA, 20 bp, synthetic construct
  source 1..20: mol_type = other DNA
acctaaagcttattccactg

SEQ ID NO: 44511 - DNA, 20 bp, synthetic construct
  source 1..20: mol_type = other DNA
aacctaaagcttattccact

SEQ ID NO: 44512 - DNA, 20 bp, synthetic construct
  source 1..20: mol_type = other DNA
caacctaaagcttattccac

SEQ ID NO: 44513 - DNA, 20 bp, synthetic construct
  source 1..20: mol_type = other DNA
acaacctaaagcttattcca

SEQ ID NO: 44514 - DNA, 20 bp, synthetic construct
  source 1..20: mol_type = other DNA
tacaacctaaagcttattcc

SEQ ID NO: 44515 - DNA, 20 bp, synthetic construct
  source 1..20: mol_type = other DNA
atacaacctaaagcttattc

SEQ ID NO: 44516 - DNA, 20 bp, synthetic construct
  source 1..20: mol_type = other DNA
aatacaacctaaagcttatt

SEQ ID NO: 44517 - DNA, 20 bp, synthetic construct
  source 1..20: mol_type = other DNA
taatacaacctaaagcttat

SEQ ID NO: 44518 - DNA, 20 bp, synthetic construct
  source 1..20: mol_type = other DNA
ataatacaacctaaagctta

SEQ ID NO: 44519 - DNA, 20 bp, synthetic construct
  source 1..20: mol_type = other DNA
tataatacaacctaaagctt

SEQ ID NO: 44520 - DNA, 20 bp, synthetic construct
  source 1..20: mol_type = other DNA
atataatacaacctaaagct

SEQ ID NO: 44521 - DNA, 20 bp, synthetic construct
  source 1..20: mol_type = other DNA
aatataatacaacctaaagc

SEQ ID NO: 44522 - DNA, 20 bp, synthetic construct
  source 1..20: mol_type = other DNA
gaatataatacaacctaaag

SEQ ID NO: 44523 - DNA, 20 bp, synthetic construct
  source 1..20: mol_type = other DNA
agaatataatacaacctaaa

SEQ ID NO: 44524 - DNA, 20 bp, synthetic construct
  source 1..20: mol_type = other DNA
tagaatataatacaacctaa

SEQ ID NO: 44525 - DNA, 20 bp, synthetic construct
  source 1..20: mol_type = other DNA
atagaatataatacaaccta

SEQ ID NO: 44526 - DNA, 20 bp, synthetic construct
  source 1..20: mol_type = other DNA
tatagaatataatacaacct

SEQ ID NO: 44527 - DNA, 20 bp, synthetic construct
  source 1..20: mol_type = other DNA
ttatagaatataatacaacc

SEQ ID NO: 44528 - DNA, 20 bp, synthetic construct
  source 1..20: mol_type = other DNA
attatagaatataatacaac

SEQ ID NO: 44529 - DNA, 20 bp, synthetic construct
  source 1..20: mol_type = other DNA
aattatagaatataatacaa

SEQ ID NO: 44530 - DNA, 20 bp, synthetic construct
  source 1..20: mol_type = other DNA
gaattatagaatataataca

SEQ ID NO: 44531 - DNA, 20 bp, synthetic construct
  source 1..20: mol_type = other DNA
tgaattatagaatataatac

SEQ ID NO: 44532 - DNA, 20 bp, synthetic construct
  source 1..20: mol_type = other DNA
gtgaattatagaatataata

SEQ ID NO: 44533 - DNA, 20 bp, synthetic construct
  source 1..20: mol_type = other DNA
agtgaattatagaatataat

SEQ ID NO: 44534 - DNA, 20 bp, synthetic construct
  source 1..20: mol_type = other DNA
aagtgaattatagaatataa

SEQ ID NO: 44535 - DNA, 20 bp, synthetic construct
  source 1..20: mol_type = other DNA
caagtgaattatagaatata

SEQ ID NO: 44536 - DNA, 20 bp, synthetic construct
  source 1..20: mol_type = other DNA
tcaagtgaattatagaatat

SEQ ID NO: 44537 - DNA, 20 bp, synthetic construct
  source 1..20: mol_type = other DNA
ttcaagtgaattatagaata

SEQ ID NO: 44538 - DNA, 20 bp, synthetic construct
  source 1..20: mol_type = other DNA
tttcaagtgaattatagaat

SEQ ID NO: 44539 - DNA, 20 bp, synthetic construct
  source 1..20: mol_type = other DNA
ttttcaagtgaattatagaa

SEQ ID NO: 44540 - DNA, 20 bp, synthetic construct
  source 1..20: mol_type = other DNA
attttcaagtgaattataga

SEQ ID NO: 44541 - DNA, 20 bp, synthetic construct
  source 1..20: mol_type = other DNA
tattttcaagtgaattatag

SEQ ID NO: 44542 - DNA, 20 bp, synthetic construct
  source 1..20: mol_type = other DNA
ctattttcaagtgaattata

SEQ ID NO: 44543 - DNA, 20 bp, synthetic construct
  source 1..20: mol_type = other DNA
tctattttcaagtgaattat

SEQ ID NO: 44544 - DNA, 20 bp, synthetic construct
  source 1..20: mol_type = other DNA
ttctattttcaagtgaatta

SEQ ID NO: 44545 - DNA, 20 bp, synthetic construct
  source 1..20: mol_type = other DNA
attctattttcaagtgaatt

SEQ ID NO: 44546 - DNA, 20 bp, synthetic construct
  source 1..20: mol_type = other DNA
aattctattttcaagtgaat

SEQ ID NO: 44547 - DNA, 20 bp, synthetic construct
  source 1..20: mol_type = other DNA
gaattctattttcaagtgaa

SEQ ID NO: 44548 - DNA, 20 bp, synthetic construct
  source 1..20: mol_type = other DNA
tgaattctattttcaagtga

SEQ ID NO: 44549 - DNA, 20 bp, synthetic construct
  source 1..20: mol_type = other DNA
atgaattctattttcaagtg

SEQ ID NO: 44550 - DNA, 20 bp, synthetic construct
  source 1..20: mol_type = other DNA
gatgaattctattttcaagt

SEQ ID NO: 44551 - DNA, 20 bp, synthetic construct
  source 1..20: mol_type = other DNA
agatgaattctattttcaag

SEQ ID NO: 44552 - DNA, 20 bp, synthetic construct
  source 1..20: mol_type = other DNA
aagatgaattctattttcaa

SEQ ID NO: 44553 - DNA, 20 bp, synthetic construct
  source 1..20: mol_type = other DNA
aaagatgaattctattttca

SEQ ID NO: 44554 - DNA, 20 bp, synthetic construct
  source 1..20: mol_type = other DNA
taaagatgaattctattttc

SEQ ID NO: 44555 - DNA, 20 bp, synthetic construct
  source 1..20: mol_type = other DNA
gtaaagatgaattctatttt

SEQ ID NO: 44556 - DNA, 20 bp, synthetic construct
  source 1..20: mol_type = other DNA
agtaaagatgaattctattt

SEQ ID NO: 44557 - DNA, 20 bp, synthetic construct
  source 1..20: mol_type = other DNA
aagtaaagatgaattctatt

SEQ ID NO: 44558 - DNA, 20 bp, synthetic construct
  source 1..20: mol_type = other DNA
caagtaaagatgaattctat

SEQ ID NO: 44559 - DNA, 20 bp, synthetic construct
  source 1..20: mol_type = other DNA
tcaagtaaagatgaattcta

SEQ ID NO: 44560 - DNA, 20 bp, synthetic construct
  source 1..20: mol_type = other DNA
gtcaagtaaagatgaattct

SEQ ID NO: 44561 - DNA, 20 bp, synthetic construct
  source 1..20: mol_type = other DNA
tgtcaagtaaagatgaattc

SEQ ID NO: 44562 - DNA, 20 bp, synthetic construct
  source 1..20: mol_type = other DNA
ctgtcaagtaaagatgaatt

SEQ ID NO: 44563 - DNA, 20 bp, synthetic construct
  source 1..20: mol_type = other DNA
gctgtcaagtaaagatgaat

SEQ ID NO: 44564 - DNA, 20 bp, synthetic construct
  source 1..20: mol_type = other DNA
ggctgtcaagtaaagatgaa

SEQ ID NO: 44565 - DNA, 20 bp, synthetic construct
  source 1..20: mol_type = other DNA
tggctgtcaagtaaagatga

SEQ ID NO: 44566 - DNA, 20 bp, synthetic construct
  source 1..20: mol_type = other DNA
ttggctgtcaagtaaagatg

SEQ ID NO: 44567 - DNA, 20 bp, synthetic construct
  source 1..20: mol_type = other DNA
tttggctgtcaagtaaagat

SEQ ID NO: 44568 - DNA, 20 bp, synthetic construct
  source 1..20: mol_type = other DNA
atttggctgtcaagtaaaga

SEQ ID NO: 44569 - DNA, 20 bp, synthetic construct
  source 1..20: mol_type = other DNA
aatttggctgtcaagtaaag

SEQ ID NO: 44570 - DNA, 20 bp, synthetic construct
  source 1..20: mol_type = other DNA
aaatttggctgtcaagtaaa

SEQ ID NO: 44571 - DNA, 20 bp, synthetic construct
  source 1..20: mol_type = other DNA
aaaatttggctgtcaagtaa

SEQ ID NO: 44572 - DNA, 20 bp, synthetic construct
  source 1..20: mol_type = other DNA
caaaatttggctgtcaagta

SEQ ID NO: 44573 - DNA, 20 bp, synthetic construct
  source 1..20: mol_type = other DNA
acaaaatttggctgtcaagt

SEQ ID NO: 44574 - DNA, 20 bp, synthetic construct
  source 1..20: mol_type = other DNA
cacaaaatttggctgtcaag

SEQ ID NO: 44575 - DNA, 20 bp, synthetic construct
  source 1..20: mol_type = other DNA
acacaaaatttggctgtcaa

SEQ ID NO: 44576 - DNA, 20 bp, synthetic construct
  source 1..20: mol_type = other DNA
tacacaaaatttggctgtca

SEQ ID NO: 44577 - DNA, 20 bp, synthetic construct
  source 1..20: mol_type = other DNA
gtacacaaaatttggctgtc

SEQ ID NO: 44578 - DNA, 20 bp, synthetic construct
  source 1..20: mol_type = other DNA
agtacacaaaatttggctgt

SEQ ID NO: 44579 - DNA, 20 bp, synthetic construct
  source 1..20: mol_type = other DNA
cagtacacaaaatttggctg

SEQ ID NO: 44580 - DNA, 20 bp, synthetic construct
  source 1..20: mol_type = other DNA
gcagtacacaaaatttggct

SEQ ID NO: 44581 - DNA, 20 bp, synthetic construct
  source 1..20: mol_type = other DNA
tgcagtacacaaaatttggc

SEQ ID NO: 44582 - DNA, 20 bp, synthetic construct
  source 1..20: mol_type = other DNA
atgcagtacacaaaatttgg

SEQ ID NO: 44583 - DNA, 20 bp, synthetic construct
  source 1..20: mol_type = other DNA
gatgcagtacacaaaatttg

SEQ ID NO: 44584 - DNA, 20 bp, synthetic construct
  source 1..20: mol_type = other DNA
agatgcagtacacaaaattt

SEQ ID NO: 44585 - DNA, 20 bp, synthetic construct
  source 1..20: mol_type = other DNA
aagatgcagtacacaaaatt

SEQ ID NO: 44586 - DNA, 20 bp, synthetic construct
  source 1..20: mol_type = other DNA
aaagatgcagtacacaaaat

SEQ ID NO: 44587 - DNA, 20 bp, synthetic construct
  source 1..20: mol_type = other DNA
aaaagatgcagtacacaaaa

SEQ ID NO: 44588 - DNA, 20 bp, synthetic construct
  source 1..20: mol_type = other DNA
gaaaagatgcagtacacaaa

SEQ ID NO: 44589 - DNA, 20 bp, synthetic construct
  source 1..20: mol_type = other DNA
agaaaagatgcagtacacaa

SEQ ID NO: 44590 - DNA, 20 bp, synthetic construct
  source 1..20: mol_type = other DNA
cagaaaagatgcagtacaca

SEQ ID NO: 44591 - DNA, 20 bp, synthetic construct
  source 1..20: mol_type = other DNA
tcagaaaagatgcagtacac

SEQ ID NO: 44592 - DNA, 20 bp, synthetic construct
  source 1..20: mol_type = other DNA
ctcagaaaagatgcagtaca

SEQ ID NO: 44593 - DNA, 20 bp, synthetic construct
  source 1..20: mol_type = other DNA
cctcagaaaagatgcagtac

SEQ ID NO: 44594 - DNA, 20 bp, synthetic construct
  source 1..20: mol_type = other DNA
ccctcagaaaagatgcagta

SEQ ID NO: 44595 - DNA, 20 bp, synthetic construct
  source 1..20: mol_type = other DNA
tccctcagaaaagatgcagt

SEQ ID NO: 44596 - DNA, 20 bp, synthetic construct
  source 1..20: mol_type = other DNA
ctccctcagaaaagatgcag

SEQ ID NO: 44597 - DNA, 20 bp, synthetic construct
  source 1..20: mol_type = other DNA
tctccctcagaaaagatgca

SEQ ID NO: 44598 - DNA, 20 bp, synthetic construct
  source 1..20: mol_type = other DNA
ctctccctcagaaaagatgc

SEQ ID NO: 44599 - DNA, 20 bp, synthetic construct
  source 1..20: mol_type = other DNA
tctctccctcagaaaagatg

SEQ ID NO: 44600 - DNA, 20 bp, synthetic construct
  source 1..20: mol_type = other DNA
ctctctccctcagaaaagat

SEQ ID NO: 44601 - DNA, 20 bp, synthetic construct
  source 1..20: mol_type = other DNA
actctctccctcagaaaaga

SEQ ID NO: 44602 - DNA, 20 bp, synthetic construct
  source 1..20: mol_type = other DNA
aactctctccctcagaaaag

SEQ ID NO: 44603 - DNA, 20 bp, synthetic construct
  source 1..20: mol_type = other DNA
caactctctccctcagaaaa

SEQ ID NO: 44604 - DNA, 20 bp, synthetic construct
  source 1..20: mol_type = other DNA
ccaactctctccctcagaaa

SEQ ID NO: 44605 - DNA, 20 bp, synthetic construct
  source 1..20: mol_type = other DNA
gccaactctctccctcagaa

SEQ ID NO: 44606 - DNA, 20 bp, synthetic construct
  source 1..20: mol_type = other DNA
tgccaactctctccctcaga

SEQ ID NO: 44607 - DNA, 20 bp, synthetic construct
  source 1..20: mol_type = other DNA
ttgccaactctctccctcag

SEQ ID NO: 44608 - DNA, 20 bp, synthetic construct
  source 1..20: mol_type = other DNA
cttgccaactctctccctca

SEQ ID NO: 44609 - DNA, 20 bp, synthetic construct
  source 1..20: mol_type = other DNA
ccttgccaactctctccctc

SEQ ID NO: 44610 - DNA, 20 bp, synthetic construct
  source 1..20: mol_type = other DNA
tccttgccaactctctccct

SEQ ID NO: 44611 - DNA, 20 bp, synthetic construct
  source 1..20: mol_type = other DNA
ttccttgccaactctctccc

SEQ ID NO: 44612 - DNA, 20 bp, synthetic construct
  source 1..20: mol_type = other DNA
tttccttgccaactctctcc

SEQ ID NO: 44613 - DNA, 20 bp, synthetic construct
  source 1..20: mol_type = other DNA
ctttccttgccaactctctc

SEQ ID NO: 44614 - DNA, 20 bp, synthetic construct
  source 1..20: mol_type = other DNA
cctttccttgccaactctct

SEQ ID NO: 44615 - DNA, 20 bp, synthetic construct
  source 1..20: mol_type = other DNA
gcctttccttgccaactctc

SEQ ID NO: 44616 - DNA, 20 bp, synthetic construct
  source 1..20: mol_type = other DNA
tgcctttccttgccaactct

SEQ ID NO: 44617 - DNA, 20 bp, synthetic construct
  source 1..20: mol_type = other DNA
gtgcctttccttgccaactc

SEQ ID NO: 44618 - DNA, 20 bp, synthetic construct
  source 1..20: mol_type = other DNA
agtgcctttccttgccaact

SEQ ID NO: 44619 - DNA, 20 bp, synthetic construct
  source 1..20: mol_type = other DNA
aagtgcctttccttgccaac

SEQ ID NO: 44620 - DNA, 20 bp, synthetic construct
  source 1..20: mol_type = other DNA
caagtgcctttccttgccaa

SEQ ID NO: 44621 - DNA, 20 bp, synthetic construct
  source 1..20: mol_type = other DNA
acaagtgcctttccttgcca

SEQ ID NO: 44622 - DNA, 20 bp, synthetic construct
  source 1..20: mol_type = other DNA
aacaagtgcctttccttgcc

SEQ ID NO: 44623 - DNA, 20 bp, synthetic construct
  source 1..20: mol_type = other DNA
taacaagtgcctttccttgc

SEQ ID NO: 44624 - DNA, 20 bp, synthetic construct
  source 1..20: mol_type = other DNA
gtaacaagtgcctttccttg

SEQ ID NO: 44625 - DNA, 20 bp, synthetic construct
  source 1..20: mol_type = other DNA
tgtaacaagtgcctttcctt

SEQ ID NO: 44626 - DNA, 20 bp, synthetic construct
  source 1..20: mol_type = other DNA
ttgtaacaagtgcctttcct

SEQ ID NO: 44627 - DNA, 20 bp, synthetic construct
  source 1..20: mol_type = other DNA
gttgtaacaagtgcctttcc

SEQ ID NO: 44628 - DNA, 20 bp, synthetic construct
  source 1..20: mol_type = other DNA
cgttgtaacaagtgcctttc

SEQ ID NO: 44629 - DNA, 20 bp, synthetic construct
  source 1..20: mol_type = other DNA
tcgttgtaacaagtgccttt

SEQ ID NO: 44630 - DNA, 20 bp, synthetic construct
  source 1..20: mol_type = other DNA
atcgttgtaacaagtgcctt

SEQ ID NO: 44631 - DNA, 20 bp, synthetic construct
  source 1..20: mol_type = other DNA
gatcgttgtaacaagtgcct

SEQ ID NO: 44632 - DNA, 20 bp, synthetic construct
  source 1..20: mol_type = other DNA
ggatcgttgtaacaagtgcc

SEQ ID NO: 44633 - DNA, 20 bp, synthetic construct
  source 1..20: mol_type = other DNA
tggatcgttgtaacaagtgc

SEQ ID NO: 44634 - DNA, 20 bp, synthetic construct
  source 1..20: mol_type = other DNA
gtggatcgttgtaacaagtg

SEQ ID NO: 44635 - DNA, 20 bp, synthetic construct
  source 1..20: mol_type = other DNA
tgtggatcgttgtaacaagt

SEQ ID NO: 44636 - DNA, 20 bp, synthetic construct
  source 1..20: mol_type = other DNA
gtgtggatcgttgtaacaag

SEQ ID NO: 44637 - DNA, 20 bp, synthetic construct
  source 1..20: mol_type = other DNA
tgtgtggatcgttgtaacaa

SEQ ID NO: 44638 - DNA, 20 bp, synthetic construct
  source 1..20: mol_type = other DNA
atgtgtggatcgttgtaaca

SEQ ID NO: 44639 - DNA, 20 bp, synthetic construct
  source 1..20: mol_type = other DNA
tatgtgtggatcgttgtaac

SEQ ID NO: 44640 - DNA, 20 bp, synthetic construct
  source 1..20: mol_type = other DNA
atatgtgtggatcgttgtaa

SEQ ID NO: 44641 - DNA, 20 bp, synthetic construct
  source 1..20: mol_type = other DNA
tatatgtgtggatcgttgta

SEQ ID NO: 44642 - DNA, 20 bp, synthetic construct
  source 1..20: mol_type = other DNA
ctatatgtgtggatcgttgt

SEQ ID NO: 44643 - DNA, 20 bp, synthetic construct
  source 1..20: mol_type = other DNA
tctatatgtgtggatcgttg

SEQ ID NO: 44644 - DNA, 20 bp, synthetic construct
  source 1..20: mol_type = other DNA
gtctatatgtgtggatcgtt

SEQ ID NO: 44645 - DNA, 20 bp, synthetic construct
  source 1..20: mol_type = other DNA
cgtctatatgtgtggatcgt

SEQ ID NO: 44646 - DNA, 20 bp, synthetic construct
  source 1..20: mol_type = other DNA
gcgtctatatgtgtggatcg

SEQ ID NO: 44647 - DNA, 20 bp, synthetic construct
  source 1..20: mol_type = other DNA
tgcgtctatatgtgtggatc

SEQ ID NO: 44648 - DNA, 20 bp, synthetic construct
  source 1..20: mol_type = other DNA
atgcgtctatatgtgtggat

SEQ ID NO: 44649 - DNA, 20 bp, synthetic construct
  source 1..20: mol_type = other DNA
tatgcgtctatatgtgtgga

SEQ ID NO: 44650 - DNA, 20 bp, synthetic construct
  source 1..20: mol_type = other DNA
atatgcgtctatatgtgtgg

SEQ ID NO: 44651 - DNA, 20 bp, synthetic construct
  source 1..20: mol_type = other DNA
aatatgcgtctatatgtgtg

SEQ ID NO: 44652 - DNA, 20 bp, synthetic construct
  source 1..20: mol_type = other DNA
taatatgcgtctatatgtgt

SEQ ID NO: 44653 - DNA, 20 bp, synthetic construct
  source 1..20: mol_type = other DNA
ataatatgcgtctatatgtg

SEQ ID NO: 44654 - DNA, 20 bp, synthetic construct
  source 1..20: mol_type = other DNA
aataatatgcgtctatatgt

SEQ ID NO: 44655 - DNA, 20 bp, synthetic construct
  source 1..20: mol_type = other DNA
aaataatatgcgtctatatg

SEQ ID NO: 44656 - DNA, 20 bp, synthetic construct
  source 1..20: mol_type = other DNA
taaataatatgcgtctatat

SEQ ID NO: 44657 - DNA, 20 bp, synthetic construct
  source 1..20: mol_type = other DNA
ctaaataatatgcgtctata

SEQ ID NO: 44658 - DNA, 20 bp, synthetic construct
  source 1..20: mol_type = other DNA
tctaaataatatgcgtctat

SEQ ID NO: 44659 - DNA, 20 bp, synthetic construct
  source 1..20: mol_type = other DNA
ttctaaataatatgcgtcta

SEQ ID NO: 44660 - DNA, 20 bp, synthetic construct
  source 1..20: mol_type = other DNA
tttctaaataatatgcgtct

SEQ ID NO: 44661 - DNA, 20 bp, synthetic construct
  source 1..20: mol_type = other DNA
atttctaaataatatgcgtc

SEQ ID NO: 44662 - DNA, 20 bp, synthetic construct
  source 1..20: mol_type = other DNA
catttctaaataatatgcgt

SEQ ID NO: 44663 - DNA, 20 bp, synthetic construct
  source 1..20: mol_type = other DNA
tcatttctaaataatatgcg

SEQ ID NO: 44664 - DNA, 20 bp, synthetic construct
  source 1..20: mol_type = other DNA
ttcatttctaaataatatgc

SEQ ID NO: 44665 - DNA, 20 bp, synthetic construct
  source 1..20: mol_type = other DNA
tttcatttctaaataatatg

SEQ ID NO: 44666 - DNA, 20 bp, synthetic construct
  source 1..20: mol_type = other DNA
ctttcatttctaaataatat

SEQ ID NO: 44667 - DNA, 20 bp, synthetic construct
  source 1..20: mol_type = other DNA
actttcatttctaaataata

SEQ ID NO: 44668 - DNA, 20 bp, synthetic construct
  source 1..20: mol_type = other DNA
cactttcatttctaaataat

SEQ ID NO: 44669 - DNA, 20 bp, synthetic construct
  source 1..20: mol_type = other DNA
gcactttcatttctaaataa

SEQ ID NO: 44670 - DNA, 20 bp, synthetic construct
  source 1..20: mol_type = other DNA
agcactttcatttctaaata

SEQ ID NO: 44671 - DNA, 20 bp, synthetic construct
  source 1..20: mol_type = other DNA
aagcactttcatttctaaat

SEQ ID NO: 44672 - DNA, 20 bp, synthetic construct
  source 1..20: mol_type = other DNA
aaagcactttcatttctaaa

SEQ ID NO: 44673 - DNA, 20 bp, synthetic construct
  source 1..20: mol_type = other DNA
caaagcactttcatttctaa

SEQ ID NO: 44674 - DNA, 20 bp, synthetic construct
  source 1..20: mol_type = other DNA
tcaaagcactttcatttcta

SEQ ID NO: 44675 - DNA, 20 bp, synthetic construct
  source 1..20: mol_type = other DNA
ttcaaagcactttcatttct

SEQ ID NO: 44676 - DNA, 20 bp, synthetic construct
  source 1..20: mol_type = other DNA
attcaaagcactttcatttc

SEQ ID NO: 44677 - DNA, 20 bp, synthetic construct
  source 1..20: mol_type = other DNA
cattcaaagcactttcattt

SEQ ID NO: 44678 - DNA, 20 bp, synthetic construct
  source 1..20: mol_type = other DNA
tcattcaaagcactttcatt

SEQ ID NO: 44679 - DNA, 20 bp, synthetic construct
  source 1..20: mol_type = other DNA
atcattcaaagcactttcat

SEQ ID NO: 44680 - DNA, 20 bp, synthetic construct
  source 1..20: mol_type = other DNA
aatcattcaaagcactttca

SEQ ID NO: 44681 - DNA, 20 bp, synthetic construct
  source 1..20: mol_type = other DNA
aaatcattcaaagcactttc

SEQ ID NO: 44682 - DNA, 20 bp, synthetic construct
  source 1..20: mol_type = other DNA
taaatcattcaaagcacttt

SEQ ID NO: 44683 - DNA, 20 bp, synthetic construct
  source 1..20: mol_type = other DNA
ctaaatcattcaaagcactt

SEQ ID NO: 44684 - DNA, 20 bp, synthetic construct
  source 1..20: mol_type = other DNA
gctaaatcattcaaagcact

SEQ ID NO: 44685 - DNA, 20 bp, synthetic construct
  source 1..20: mol_type = other DNA
agctaaatcattcaaagcac

SEQ ID NO: 44686 - DNA, 20 bp, synthetic construct
  source 1..20: mol_type = other DNA
aagctaaatcattcaaagca

SEQ ID NO: 44687 - DNA, 20 bp, synthetic construct
  source 1..20: mol_type = other DNA
taagctaaatcattcaaagc

SEQ ID NO: 44688 - DNA, 20 bp, synthetic construct
  source 1..20: mol_type = other DNA
ataagctaaatcattcaaag

SEQ ID NO: 44689 - DNA, 20 bp, synthetic construct
  source 1..20: mol_type = other DNA
aataagctaaatcattcaaa

SEQ ID NO: 44690 - DNA, 20 bp, synthetic construct
  source 1..20: mol_type = other DNA
aaataagctaaatcattcaa

SEQ ID NO: 44691 - DNA, 20 bp, synthetic construct
  source 1..20: mol_type = other DNA
aaaataagctaaatcattca

SEQ ID NO: 44692 - DNA, 20 bp, synthetic construct
  source 1..20: mol_type = other DNA
gaaaataagctaaatcattc

SEQ ID NO: 44693 - DNA, 20 bp, synthetic construct
  source 1..20: mol_type = other DNA
tgaaaataagctaaatcatt

SEQ ID NO: 44694 - DNA, 20 bp, synthetic construct
  source 1..20: mol_type = other DNA
ctgaaaataagctaaatcat

SEQ ID NO: 44695 - DNA, 20 bp, synthetic construct
  source 1..20: mol_type = other DNA
actgaaaataagctaaatca

SEQ ID NO: 44696 - DNA, 20 bp, synthetic construct
  source 1..20: mol_type = other DNA
aactgaaaataagctaaatc

SEQ ID NO: 44697 - DNA, 20 bp, synthetic construct
  source 1..20: mol_type = other DNA
aaactgaaaataagctaaat

SEQ ID NO: 44698 - DNA, 20 bp, synthetic construct
  source 1..20: mol_type = other DNA
aaaactgaaaataagctaaa

SEQ ID NO: 44699 - DNA, 20 bp, synthetic construct
  source 1..20: mol_type = other DNA
aaaaactgaaaataagctaa

SEQ ID NO: 44700 - DNA, 20 bp, synthetic construct
  source 1..20: mol_type = other DNA
aaaaaactgaaaataagcta

SEQ ID NO: 44701 - DNA, 20 bp, synthetic construct
  source 1..20: mol_type = other DNA
aaaaaaactgaaaataagct

SEQ ID NO: 44702 - DNA, 20 bp, synthetic construct
  source 1..20: mol_type = other DNA
aaaaaaaactgaaaataagc

SEQ ID NO: 44703 - DNA, 20 bp, synthetic construct
  source 1..20: mol_type = other DNA
aaaaaaaaactgaaaataag

SEQ ID NO: 44704 - DNA, 20 bp, synthetic construct
  source 1..20: mol_type = other DNA
aaaaaaaaaactgaaaataa

SEQ ID NO: 44705 - DNA, 20 bp, synthetic construct
  source 1..20: mol_type = other DNA
aaaaaaaaaaactgaaaata

SEQ ID NO: 44706 - DNA, 20 bp, synthetic construct
  source 1..20: mol_type = other DNA
gaaaaaaaaaaactgaaaat

SEQ ID NO: 44707 - DNA, 20 bp, synthetic construct
  source 1..20: mol_type = other DNA
agaaaaaaaaaaactgaaaa

SEQ ID NO: 44708 - DNA, 20 bp, synthetic construct
  source 1..20: mol_type = other DNA
cagaaaaaaaaaaactgaaa

SEQ ID NO: 44709 - DNA, 20 bp, synthetic construct
  source 1..20: mol_type = other DNA
gcagaaaaaaaaaaactgaa

SEQ ID NO: 44710 - DNA, 20 bp, synthetic construct
  source 1..20: mol_type = other DNA
tgcagaaaaaaaaaaactga

SEQ ID NO: 44711 - DNA, 20 bp, synthetic construct
  source 1..20: mol_type = other DNA
ctgcagaaaaaaaaaaactg

SEQ ID NO: 44712 - DNA, 20 bp, synthetic construct
  source 1..20: mol_type = other DNA
actgcagaaaaaaaaaaact

SEQ ID NO: 44713 - DNA, 20 bp, synthetic construct
  source 1..20: mol_type = other DNA
aactgcagaaaaaaaaaaac

SEQ ID NO: 44714 - DNA, 20 bp, synthetic construct
  source 1..20: mol_type = other DNA
caactgcagaaaaaaaaaaa

SEQ ID NO: 44715 - DNA, 20 bp, synthetic construct
  source 1..20: mol_type = other DNA
acaactgcagaaaaaaaaaa

SEQ ID NO: 44716 - DNA, 20 bp, synthetic construct
  source 1..20: mol_type = other DNA
tacaactgcagaaaaaaaaa

SEQ ID NO: 44717 - DNA, 20 bp, synthetic construct
  source 1..20: mol_type = other DNA
ttacaactgcagaaaaaaaa

SEQ ID NO: 44718 - DNA, 20 bp, synthetic construct
  source 1..20: mol_type = other DNA
attacaactgcagaaaaaaa

SEQ ID NO: 44719 - DNA, 20 bp, synthetic construct
  source 1..20: mol_type = other DNA
gattacaactgcagaaaaaa

SEQ ID NO: 44720 - DNA, 20 bp, synthetic construct
  source 1..20: mol_type = other DNA
tgattacaactgcagaaaaa

SEQ ID NO: 44721 - DNA, 20 bp, synthetic construct
  source 1..20: mol_type = other DNA
atgattacaactgcagaaaa

SEQ ID NO: 44722 - DNA, 20 bp, synthetic construct
  source 1..20: mol_type = other DNA
tatgattacaactgcagaaa

SEQ ID NO: 44723 - DNA, 20 bp, synthetic construct
  source 1..20: mol_type = other DNA
atatgattacaactgcagaa

SEQ ID NO: 44724 - DNA, 20 bp, synthetic construct
  source 1..20: mol_type = other DNA
catatgattacaactgcaga

SEQ ID NO: 44725 - DNA, 20 bp, synthetic construct
  source 1..20: mol_type = other DNA
tcatatgattacaactgcag

SEQ ID NO: 44726 - DNA, 20 bp, synthetic construct
  source 1..20: mol_type = other DNA
gtcatatgattacaactgca

SEQ ID NO: 44727 - DNA, 20 bp, synthetic construct
  source 1..20: mol_type = other DNA
ggtcatatgattacaactgc

SEQ ID NO: 44728 - DNA, 20 bp, synthetic construct
  source 1..20: mol_type = other DNA
aggtcatatgattacaactg

SEQ ID NO: 44729 - DNA, 20 bp, synthetic construct
  source 1..20: mol_type = other DNA
caggtcatatgattacaact

SEQ ID NO: 44730 - DNA, 20 bp, synthetic construct
  source 1..20: mol_type = other DNA
acaggtcatatgattacaac

SEQ ID NO: 44731 - DNA, 20 bp, synthetic construct
  source 1..20: mol_type = other DNA
aacaggtcatatgattacaa

SEQ ID NO: 44732 - DNA, 20 bp, synthetic construct
  source 1..20: mol_type = other DNA
aaacaggtcatatgattaca

SEQ ID NO: 44733 - DNA, 20 bp, synthetic construct
  source 1..20: mol_type = other DNA
aaaacaggtcatatgattac

SEQ ID NO: 44734 - DNA, 20 bp, synthetic construct
  source 1..20: mol_type = other DNA
aaaaacaggtcatatgatta

SEQ ID NO: 44735 - DNA, 20 bp, synthetic construct
  source 1..20: mol_type = other DNA
gaaaaacaggtcatatgatt

SEQ ID NO: 44736 - DNA, 20 bp, synthetic construct
  source 1..20: mol_type = other DNA
agaaaaacaggtcatatgat

SEQ ID NO: 44737 - DNA, 20 bp, synthetic construct
  source 1..20: mol_type = other DNA
aagaaaaacaggtcatatga

SEQ ID NO: 44738 - DNA, 20 bp, synthetic construct
  source 1..20: mol_type = other DNA
aaagaaaaacaggtcatatg

SEQ ID NO: 44739 - DNA, 20 bp, synthetic construct
  source 1..20: mol_type = other DNA
gaaagaaaaacaggtcatat

SEQ ID NO: 44740 - DNA, 20 bp, synthetic construct
  source 1..20: mol_type = other DNA
agaaagaaaaacaggtcata

SEQ ID NO: 44741 - DNA, 20 bp, synthetic construct
  source 1..20: mol_type = other DNA
aagaaagaaaaacaggtcat

SEQ ID NO: 44742 - DNA, 20 bp, synthetic construct
  source 1..20: mol_type = other DNA
aaagaaagaaaaacaggtca

SEQ ID NO: 44743 - DNA, 20 bp, synthetic construct
  source 1..20: mol_type = other DNA
aaaagaaagaaaaacaggtc

SEQ ID NO: 44744 - DNA, 20 bp, synthetic construct
  source 1..20: mol_type = other DNA
aaaaagaaagaaaaacaggt

SEQ ID NO: 44745 - DNA, 20 bp, synthetic construct
  source 1..20: mol_type = other DNA
aaaaaagaaagaaaaacagg

SEQ ID NO: 44746 - DNA, 20 bp, synthetic construct
  source 1..20: mol_type = other DNA
aaaaaaagaaagaaaaacag

SEQ ID NO: 44747 - DNA, 20 bp, synthetic construct
  source 1..20: mol_type = other DNA
aaaaaaaagaaagaaaaaca

SEQ ID NO: 44748 - DNA, 20 bp, synthetic construct
  source 1..20: mol_type = other DNA
aaaaaaaaagaaagaaaaac

SEQ ID NO: 44749 - DNA, 20 bp, synthetic construct
  source 1..20: mol_type = other DNA
aaaaaaaaaagaaagaaaaa

SEQ ID NO: 44750 - DNA, 20 bp, synthetic construct
  source 1..20: mol_type = other DNA
aaaaaaaaaaagaaagaaaa

SEQ ID NO: 44751 - DNA, 20 bp, synthetic construct
  source 1..20: mol_type = other DNA
aaaaaaaaaaaagaaagaaa

SEQ ID NO: 44752 - DNA, 20 bp, synthetic construct
  source 1..20: mol_type = other DNA
aaaaaaaaaaaaagaaagaa

SEQ ID NO: 44753 - DNA, 20 bp, synthetic construct
  source 1..20: mol_type = other DNA
caaaaaaaaaaaaagaaaga

SEQ ID NO: 44754 - DNA, 20 bp, synthetic construct
  source 1..20: mol_type = other DNA
tcaaaaaaaaaaaaagaaag

SEQ ID NO: 44755 - DNA, 20 bp, synthetic construct
  source 1..20: mol_type = other DNA
ctcaaaaaaaaaaaaagaaa

SEQ ID NO: 44756 - DNA, 20 bp, synthetic construct
  source 1..20: mol_type = other DNA
tctcaaaaaaaaaaaaagaa

SEQ ID NO: 44757 - DNA, 20 bp, synthetic construct
  source 1..20: mol_type = other DNA
gtctcaaaaaaaaaaaaaga

SEQ ID NO: 44758 - DNA, 20 bp, synthetic construct
  source 1..20: mol_type = other DNA
tgtctcaaaaaaaaaaaaag

SEQ ID NO: 44759 - DNA, 20 bp, synthetic construct
  source 1..20: mol_type = other DNA
ctgtctcaaaaaaaaaaaaa

SEQ ID NO: 44760 - DNA, 20 bp, synthetic construct
  source 1..20: mol_type = other DNA
tctgtctcaaaaaaaaaaaa

SEQ ID NO: 44761 - DNA, 20 bp, synthetic construct
  source 1..20: mol_type = other DNA
ctctgtctcaaaaaaaaaaa

SEQ ID NO: 44762 - DNA, 20 bp, synthetic construct
  source 1..20: mol_type = other DNA
actctgtctcaaaaaaaaaa

SEQ ID NO: 44763 - DNA, 20 bp, synthetic construct
  source 1..20: mol_type = other DNA
gactctgtctcaaaaaaaaa

SEQ ID NO: 44764 - DNA, 20 bp, synthetic construct
  source 1..20: mol_type = other DNA
agactctgtctcaaaaaaaa

SEQ ID NO: 44765 - DNA, 20 bp, synthetic construct
  source 1..20: mol_type = other DNA
aagactctgtctcaaaaaaa

SEQ ID NO: 44766 - DNA, 20 bp, synthetic construct
  source 1..20: mol_type = other DNA
caagactctgtctcaaaaaa

SEQ ID NO: 44767 - DNA, 20 bp, synthetic construct
  source 1..20: mol_type = other DNA
gcaagactctgtctcaaaaa

SEQ ID NO: 44768 - DNA, 20 bp, synthetic construct
  source 1..20: mol_type = other DNA
agcaagactctgtctcaaaa

SEQ ID NO: 44769 - DNA, 20 bp, synthetic construct
  source 1..20: mol_type = other DNA
gagcaagactctgtctcaaa

SEQ ID NO: 44770 - DNA, 20 bp, synthetic construct
  source 1..20: mol_type = other DNA
agagcaagactctgtctcaa

SEQ ID NO: 44771 - DNA, 20 bp, synthetic construct
  source 1..20: mol_type = other DNA
cagagcaagactctgtctca

SEQ ID NO: 44772 - DNA, 20 bp, synthetic construct
  source 1..20: mol_type = other DNA
acagagcaagactctgtctc

SEQ ID NO: 44773 - DNA, 20 bp, synthetic construct
  source 1..20: mol_type = other DNA
gacagagcaagactctgtct

SEQ ID NO: 44774 - DNA, 20 bp, synthetic construct
  source 1..20: mol_type = other DNA
tgacagagcaagactctgtc

SEQ ID NO: 44775 - DNA, 20 bp, synthetic construct
  source 1..20: mol_type = other DNA
gtgacagagcaagactctgt

SEQ ID NO: 44776 - DNA, 20 bp, synthetic construct
  source 1..20: mol_type = other DNA
ggtgacagagcaagactctg

SEQ ID NO: 44777 - DNA, 20 bp, synthetic construct
  source 1..20: mol_type = other DNA
gggtgacagagcaagactct

SEQ ID NO: 44778 - DNA, 20 bp, synthetic construct
  source 1..20: mol_type = other DNA
ggggtgacagagcaagactc

SEQ ID NO: 44779 - DNA, 20 bp, synthetic construct
  source 1..20: mol_type = other DNA
cggggtgacagagcaagact

SEQ ID NO: 44780 - DNA, 20 bp, synthetic construct
  source 1..20: mol_type = other DNA
ccggggtgacagagcaagac

SEQ ID NO: 44781 - DNA, 20 bp, synthetic construct
  source 1..20: mol_type = other DNA
gccggggtgacagagcaaga

SEQ ID NO: 44782 - DNA, 20 bp, synthetic construct
  source 1..20: mol_type = other DNA
agccggggtgacagagcaag

SEQ ID NO: 44783 - DNA, 20 bp, synthetic construct
  source 1..20: mol_type = other DNA
cagccggggtgacagagcaa

SEQ ID NO: 44784 - DNA, 20 bp, synthetic construct
  source 1..20: mol_type = other DNA
ccagccggggtgacagagca

SEQ ID NO: 44785 - DNA, 20 bp, synthetic construct
  source 1..20: mol_type = other DNA
tccagccggggtgacagagc

SEQ ID NO: 44786 - DNA, 20 bp, synthetic construct
  source 1..20: mol_type = other DNA
ctccagccggggtgacagag

SEQ ID NO: 44787 - DNA, 20 bp, synthetic construct
  source 1..20: mol_type = other DNA
actccagccggggtgacaga

SEQ ID NO: 44788 - DNA, 20 bp, synthetic construct
  source 1..20: mol_type = other DNA
tactccagccggggtgacag

SEQ ID NO: 44789 - DNA, 20 bp, synthetic construct
  source 1..20: mol_type = other DNA
gtactccagccggggtgaca

SEQ ID NO: 44790 - DNA, 20 bp, synthetic construct
  source 1..20: mol_type = other DNA
tgtactccagccggggtgac

SEQ ID NO: 44791 - DNA, 20 bp, synthetic construct
  source 1..20: mol_type = other DNA
ttgtactccagccggggtga

SEQ ID NO: 44792 - DNA, 20 bp, synthetic construct
  source 1..20: mol_type = other DNA
attgtactccagccggggtg

SEQ ID NO: 44793 - DNA, 20 bp, synthetic construct
  source 1..20: mol_type = other DNA
cattgtactccagccggggt

SEQ ID NO: 44794 - DNA, 20 bp, synthetic construct
  source 1..20: mol_type = other DNA
ccattgtactccagccgggg

SEQ ID NO: 44795 - DNA, 20 bp, synthetic construct
  source 1..20: mol_type = other DNA
cccattgtactccagccggg

SEQ ID NO: 44796 - DNA, 20 bp, synthetic construct
  source 1..20: mol_type = other DNA
ccccattgtactccagccgg

SEQ ID NO: 44797 - DNA, 20 bp, synthetic construct
  source 1..20: mol_type = other DNA
gccccattgtactccagccg

SEQ ID NO: 44798 - DNA, 20 bp, synthetic construct
  source 1..20: mol_type = other DNA
cgccccattgtactccagcc

SEQ ID NO: 44799 - DNA, 20 bp, synthetic construct
  source 1..20: mol_type = other DNA
ccgccccattgtactccagc

SEQ ID NO: 44800 - DNA, 20 bp, synthetic construct
  source 1..20: mol_type = other DNA
accgccccattgtactccag

SEQ ID NO: 44801 - DNA, 20 bp, synthetic construct
  source 1..20: mol_type = other DNA
gaccgccccattgtactcca

SEQ ID NO: 44802 - DNA, 20 bp, synthetic construct
  source 1..20: mol_type = other DNA
agaccgccccattgtactcc

SEQ ID NO: 44803 - DNA, 20 bp, synthetic construct
  source 1..20: mol_type = other DNA
gagaccgccccattgtactc

SEQ ID NO: 44804 - DNA, 20 bp, synthetic construct
  source 1..20: mol_type = other DNA
tgagaccgccccattgtact

SEQ ID NO: 44805 - DNA, 20 bp, synthetic construct
  source 1..20: mol_type = other DNA
ctgagaccgccccattgtac

SEQ ID NO: 44806 - DNA, 20 bp, synthetic construct
  source 1..20: mol_type = other DNA
gctgagaccgccccattgta

SEQ ID NO: 44807 - DNA, 20 bp, synthetic construct
  source 1..20: mol_type = other DNA
agctgagaccgccccattgt

SEQ ID NO: 44808 - DNA, 20 bp, synthetic construct
  source 1..20: mol_type = other DNA
gagctgagaccgccccattg

SEQ ID NO: 44809 - DNA, 20 bp, synthetic construct
  source 1..20: mol_type = other DNA
tgagctgagaccgccccatt

SEQ ID NO: 44810 - DNA, 20 bp, synthetic construct
  source 1..20: mol_type = other DNA
gtgagctgagaccgccccat

SEQ ID NO: 44811 - DNA, 20 bp, synthetic construct
  source 1..20: mol_type = other DNA
agtgagctgagaccgcccca

SEQ ID NO: 44812 - DNA, 20 bp, synthetic construct
  source 1..20: mol_type = other DNA
cagtgagctgagaccgcccc

SEQ ID NO: 44813 - DNA, 20 bp, synthetic construct
  source 1..20: mol_type = other DNA
gcagtgagctgagaccgccc

SEQ ID NO: 44814 - DNA, 20 bp, synthetic construct
  source 1..20: mol_type = other DNA
tgcagtgagctgagaccgcc

SEQ ID NO: 44815 - DNA, 20 bp, synthetic construct
  source 1..20: mol_type = other DNA
ttgcagtgagctgagaccgc

SEQ ID NO: 44816 - DNA, 20 bp, synthetic construct
  source 1..20: mol_type = other DNA
gttgcagtgagctgagaccg

SEQ ID NO: 44817 - DNA, 20 bp, synthetic construct
  source 1..20: mol_type = other DNA
ggttgcagtgagctgagacc

SEQ ID NO: 44818 - DNA, 20 bp, synthetic construct
  source 1..20: mol_type = other DNA
aggttgcagtgagctgagac

SEQ ID NO: 44819 - DNA, 20 bp, synthetic construct
  source 1..20: mol_type = other DNA
gaggttgcagtgagctgaga

SEQ ID NO: 44820 - DNA, 20 bp, synthetic construct
  source 1..20: mol_type = other DNA
ggaggttgcagtgagctgag

SEQ ID NO: 44821 - DNA, 20 bp, synthetic construct
  source 1..20: mol_type = other DNA
tggaggttgcagtgagctga

SEQ ID NO: 44822 - DNA, 20 bp, synthetic construct
  source 1..20: mol_type = other DNA
gtggaggttgcagtgagctg

SEQ ID NO: 44823 - DNA, 20 bp, synthetic construct
  source 1..20: mol_type = other DNA
ggtggaggttgcagtgagct

SEQ ID NO: 44824 - DNA, 20 bp, synthetic construct
  source 1..20: mol_type = other DNA
aggtggaggttgcagtgagc

SEQ ID NO: 44825 - DNA, 20 bp, synthetic construct
  source 1..20: mol_type = other DNA
gaggtggaggttgcagtgag

SEQ ID NO: 44826 - DNA, 20 bp, synthetic construct
  source 1..20: mol_type = other DNA
ggaggtggaggttgcagtga

SEQ ID NO: 44827 - DNA, 20 bp, synthetic construct
  source 1..20: mol_type = other DNA
gggaggtggaggttgcagtg

SEQ ID NO: 44828 - DNA, 20 bp, synthetic construct
  source 1..20: mol_type = other DNA
tgggaggtggaggttgcagt

SEQ ID NO: 44829 - DNA, 20 bp, synthetic construct
  source 1..20: mol_type = other DNA
ctgggaggtggaggttgcag

SEQ ID NO: 44830 - DNA, 20 bp, synthetic construct
  source 1..20: mol_type = other DNA
cctgggaggtggaggttgca

SEQ ID NO: 44831 - DNA, 20 bp, synthetic construct
  source 1..20: mol_type = other DNA
acctgggaggtggaggttgc

SEQ ID NO: 44832 - DNA, 20 bp, synthetic construct
  source 1..20: mol_type = other DNA
aacctgggaggtggaggttg

SEQ ID NO: 44833 - DNA, 20 bp, synthetic construct
  source 1..20: mol_type = other DNA
gaacctgggaggtggaggtt

SEQ ID NO: 44834 - DNA, 20 bp, synthetic construct
  source 1..20: mol_type = other DNA
tgaacctgggaggtggaggt

SEQ ID NO: 44835 - DNA, 20 bp, synthetic construct
  source 1..20: mol_type = other DNA
ctgaacctgggaggtggagg

SEQ ID NO: 44836 - DNA, 20 bp, synthetic construct
  source 1..20: mol_type = other DNA
cctgaacctgggaggtggag

SEQ ID NO: 44837 - DNA, 20 bp, synthetic construct
  source 1..20: mol_type = other DNA
gcctgaacctgggaggtgga

SEQ ID NO: 44838 - DNA, 20 bp, synthetic construct
  source 1..20: mol_type = other DNA
cgcctgaacctgggaggtgg

SEQ ID NO: 44839 - DNA, 20 bp, synthetic construct
  source 1..20: mol_type = other DNA
tcgcctgaacctgggaggtg

SEQ ID NO: 44840 - DNA, 20 bp, synthetic construct
  source 1..20: mol_type = other DNA
atcgcctgaacctgggaggt

SEQ ID NO: 44841 - DNA, 20 bp, synthetic construct
  source 1..20: mol_type = other DNA
aatcgcctgaacctgggagg

SEQ ID NO: 44842 - DNA, 20 bp, synthetic construct
  source 1..20: mol_type = other DNA
gaatcgcctgaacctgggag

SEQ ID NO: 44843 - DNA, 20 bp, synthetic construct
  source 1..20: mol_type = other DNA
agaatcgcctgaacctggga

SEQ ID NO: 44844 - DNA, 20 bp, synthetic construct
  source 1..20: mol_type = other DNA
aagaatcgcctgaacctggg

SEQ ID NO: 44845 - DNA, 20 bp, synthetic construct
  source 1..20: mol_type = other DNA
gaagaatcgcctgaacctgg

SEQ ID NO: 44846 - DNA, 20 bp, synthetic construct
  source 1..20: mol_type = other DNA
agaagaatcgcctgaacctg

SEQ ID NO: 44847 - DNA, 20 bp, synthetic construct
  source 1..20: mol_type = other DNA
cagaagaatcgcctgaacct

SEQ ID NO: 44848 - DNA, 20 bp, synthetic construct
  source 1..20: mol_type = other DNA
gcagaagaatcgcctgaacc

SEQ ID NO: 44849 - DNA, 20 bp, synthetic construct
  source 1..20: mol_type = other DNA
ggcagaagaatcgcctgaac

SEQ ID NO: 44850 - DNA, 20 bp, synthetic construct
  source 1..20: mol_type = other DNA
aggcagaagaatcgcctgaa

SEQ ID NO: 44851 - DNA, 20 bp, synthetic construct
  source 1..20: mol_type = other DNA
gaggcagaagaatcgcctga

SEQ ID NO: 44852 - DNA, 20 bp, synthetic construct
  source 1..20: mol_type = other DNA
tgaggcagaagaatcgcctg

SEQ ID NO: 44853 - DNA, 20 bp, synthetic construct
  source 1..20: mol_type = other DNA
ctgaggcagaagaatcgcct

SEQ ID NO: 44854 - DNA, 20 bp, synthetic construct
  source 1..20: mol_type = other DNA
gctgaggcagaagaatcgcc

SEQ ID NO: 44855 - DNA, 20 bp, synthetic construct
  source 1..20: mol_type = other DNA
ggctgaggcagaagaatcgc

SEQ ID NO: 44856 - DNA, 20 bp, synthetic construct
  source 1..20: mol_type = other DNA
aggctgaggcagaagaatcg

SEQ ID NO: 44857 - DNA, 20 bp, synthetic construct
  source 1..20: mol_type = other DNA
gaggctgaggcagaagaatc

SEQ ID NO: 44858 - DNA, 20 bp, synthetic construct
  source 1..20: mol_type = other DNA
ggaggctgaggcagaagaat

SEQ ID NO: 44859 - DNA, 20 bp, synthetic construct
  source 1..20: mol_type = other DNA
gggaggctgaggcagaagaa

SEQ ID NO: 44860 - DNA, 20 bp, synthetic construct
  source 1..20: mol_type = other DNA
agggaggctgaggcagaaga

SEQ ID NO: 44861 - DNA, 20 bp, synthetic construct
  source 1..20: mol_type = other DNA
tagggaggctgaggcagaag

SEQ ID NO: 44862 - DNA, 20 bp, synthetic construct
  source 1..20: mol_type = other DNA
ctagggaggctgaggcagaa

SEQ ID NO: 44863 - DNA, 20 bp, synthetic construct
  source 1..20: mol_type = other DNA
actagggaggctgaggcaga

SEQ ID NO: 44864 - DNA, 20 bp, synthetic construct
  source 1..20: mol_type = other DNA
tactagggaggctgaggcag

SEQ ID NO: 44865 - DNA, 20 bp, synthetic construct
  source 1..20: mol_type = other DNA
ctactagggaggctgaggca

SEQ ID NO: 44866 - DNA, 20 bp, synthetic construct
  source 1..20: mol_type = other DNA
gctactagggaggctgaggc

SEQ ID NO: 44867 - DNA, 20 bp, synthetic construct
  source 1..20: mol_type = other DNA
agctactagggaggctgagg

SEQ ID NO: 44868 - DNA, 20 bp, synthetic construct
  source 1..20: mol_type = other DNA
cagctactagggaggctgag

SEQ ID NO: 44869 - DNA, 20 bp, synthetic construct
  source 1..20: mol_type = other DNA
ccagctactagggaggctga

SEQ ID NO: 44870 - DNA, 20 bp, synthetic construct
  source 1..20: mol_type = other DNA
cccagctactagggaggctg

SEQ ID NO: 44871 - DNA, 20 bp, synthetic construct
  source 1..20: mol_type = other DNA
tcccagctactagggaggct

SEQ ID NO: 44872 - DNA, 20 bp, synthetic construct
  source 1..20: mol_type = other DNA
gtcccagctactagggaggc

SEQ ID NO: 44873 - DNA, 20 bp, synthetic construct
  source 1..20: mol_type = other DNA
agtcccagctactagggagg

SEQ ID NO: 44874 - DNA, 20 bp, synthetic construct
  source 1..20: mol_type = other DNA
tagtcccagctactagggag

SEQ ID NO: 44875 - DNA, 20 bp, synthetic construct
  source 1..20: mol_type = other DNA
gtagtcccagctactaggga

SEQ ID NO: 44876 - DNA, 20 bp, synthetic construct
  source 1..20: mol_type = other DNA
tgtagtcccagctactaggg

SEQ ID NO: 44877 - DNA, 20 bp, synthetic construct
  source 1..20: mol_type = other DNA
ctgtagtcccagctactagg

SEQ ID NO: 44878 - DNA, 20 bp, synthetic construct
  source 1..20: mol_type = other DNA
cctgtagtcccagctactag

SEQ ID NO: 44879 - DNA, 20 bp, synthetic construct
  source 1..20: mol_type = other DNA
gcctgtagtcccagctacta

SEQ ID NO: 44880 - DNA, 20 bp, synthetic construct
  source 1..20: mol_type = other DNA
cgcctgtagtcccagctact

SEQ ID NO: 44881 - DNA, 20 bp, synthetic construct
  source 1..20: mol_type = other DNA
gcgcctgtagtcccagctac

SEQ ID NO: 44882 - DNA, 20 bp, synthetic construct
  source 1..20: mol_type = other DNA
tgcgcctgtagtcccagcta

SEQ ID NO: 44883 - DNA, 20 bp, synthetic construct
  source 1..20: mol_type = other DNA
atgcgcctgtagtcccagct

SEQ ID NO: 44884 - DNA, 20 bp, synthetic construct
  source 1..20: mol_type = other DNA
catgcgcctgtagtcccagc

SEQ ID NO: 44885 - DNA, 20 bp, synthetic construct
  source 1..20: mol_type = other DNA
gcatgcgcctgtagtcccag

SEQ ID NO: 44886 - DNA, 20 bp, synthetic construct
  source 1..20: mol_type = other DNA
ggcatgcgcctgtagtccca

SEQ ID NO: 44887 - DNA, 20 bp, synthetic construct
  source 1..20: mol_type = other DNA
tggcatgcgcctgtagtccc

SEQ ID NO: 44888 - DNA, 20 bp, synthetic construct
  source 1..20: mol_type = other DNA
gtggcatgcgcctgtagtcc

SEQ ID NO: 44889 - DNA, 20 bp, synthetic construct
  source 1..20: mol_type = other DNA
ggtggcatgcgcctgtagtc

SEQ ID NO: 44890 - DNA, 20 bp, synthetic construct
  source 1..20: mol_type = other DNA
tggtggcatgcgcctgtagt

SEQ ID NO: 44891 - DNA, 20 bp, synthetic construct
  source 1..20: mol_type = other DNA
gtggtggcatgcgcctgtag

SEQ ID NO: 44892 - DNA, 20 bp, synthetic construct
  source 1..20: mol_type = other DNA
tgtggtggcatgcgcctgta

SEQ ID NO: 44893 - DNA, 20 bp, synthetic construct
  source 1..20: mol_type = other DNA
gtgtggtggcatgcgcctgt

SEQ ID NO: 44894 - DNA, 20 bp, synthetic construct
  source 1..20: mol_type = other DNA
ggtgtggtggcatgcgcctg

SEQ ID NO: 44895 - DNA, 20 bp, synthetic construct
  source 1..20: mol_type = other DNA
aggtgtggtggcatgcgcct

SEQ ID NO: 44896 - DNA, 20 bp, synthetic construct
  source 1..20: mol_type = other DNA
caggtgtggtggcatgcgcc

SEQ ID NO: 44897 - DNA, 20 bp, synthetic construct
  source 1..20: mol_type = other DNA
ccaggtgtggtggcatgcgc

SEQ ID NO: 44898 - DNA, 20 bp, synthetic construct
  source 1..20: mol_type = other DNA
gccaggtgtggtggcatgcg

SEQ ID NO: 44899 - DNA, 20 bp, synthetic construct
  source 1..20: mol_type = other DNA
agccaggtgtggtggcatgc

SEQ ID NO: 44900 - DNA, 20 bp, synthetic construct
  source 1..20: mol_type = other DNA
tagccaggtgtggtggcatg

SEQ ID NO: 44901 - DNA, 20 bp, synthetic construct
  source 1..20: mol_type = other DNA
ttagccaggtgtggtggcat

SEQ ID NO: 44902 - DNA, 20 bp, synthetic construct
  source 1..20: mol_type = other DNA
attagccaggtgtggtggca

SEQ ID NO: 44903 - DNA, 20 bp, synthetic construct
  source 1..20: mol_type = other DNA
aattagccaggtgtggtggc

SEQ ID NO: 44904 - DNA, 20 bp, synthetic construct
  source 1..20: mol_type = other DNA
aaattagccaggtgtggtgg

SEQ ID NO: 44905 - DNA, 20 bp, synthetic construct
  source 1..20: mol_type = other DNA
aaaattagccaggtgtggtg

SEQ ID NO: 44906 - DNA, 20 bp, synthetic construct
  source 1..20: mol_type = other DNA
aaaaattagccaggtgtggt

SEQ ID NO: 44907 - DNA, 20 bp, synthetic construct
  source 1..20: mol_type = other DNA
aaaaaattagccaggtgtgg

SEQ ID NO: 44908 - DNA, 20 bp, synthetic construct
  source 1..20: mol_type = other DNA
aaaaaaattagccaggtgtg

SEQ ID NO: 44909 - DNA, 20 bp, synthetic construct
  source 1..20: mol_type = other DNA
taaaaaaattagccaggtgt

SEQ ID NO: 44910 - DNA, 20 bp, synthetic construct
  source 1..20: mol_type = other DNA
ataaaaaaattagccaggtg

SEQ ID NO: 44911 - DNA, 20 bp, synthetic construct
  source 1..20: mol_type = other DNA
aataaaaaaattagccaggt

SEQ ID NO: 44912 - DNA, 20 bp, synthetic construct
  source 1..20: mol_type = other DNA
gaataaaaaaattagccagg

SEQ ID NO: 44913 - DNA, 20 bp, synthetic construct
  source 1..20: mol_type = other DNA
agaataaaaaaattagccag

SEQ ID NO: 44914 - DNA, 20 bp, synthetic construct
  source 1..20: mol_type = other DNA
aagaataaaaaaattagcca

SEQ ID NO: 44915 - DNA, 20 bp, synthetic construct
  source 1..20: mol_type = other DNA
taagaataaaaaaattagcc

SEQ ID NO: 44916 - DNA, 20 bp, synthetic construct
  source 1..20: mol_type = other DNA
ctaagaataaaaaaattagc

SEQ ID NO: 44917 - DNA, 20 bp, synthetic construct
  source 1..20: mol_type = other DNA
actaagaataaaaaaattag

SEQ ID NO: 44918 - DNA, 20 bp, synthetic construct
  source 1..20: mol_type = other DNA
tactaagaataaaaaaatta

SEQ ID NO: 44919 - DNA, 20 bp, synthetic construct
  source 1..20: mol_type = other DNA
ctactaagaataaaaaaatt

SEQ ID NO: 44920 - DNA, 20 bp, synthetic construct
  source 1..20: mol_type = other DNA
tctactaagaataaaaaaat

SEQ ID NO: 44921 - DNA, 20 bp, synthetic construct
  source 1..20: mol_type = other DNA
ctctactaagaataaaaaaa

SEQ ID NO: 44922 - DNA, 20 bp, synthetic construct
  source 1..20: mol_type = other DNA
tctctactaagaataaaaaa

SEQ ID NO: 44923 - DNA, 20 bp, synthetic construct
  source 1..20: mol_type = other DNA
atctctactaagaataaaaa

SEQ ID NO: 44924 - DNA, 20 bp, synthetic construct
  source 1..20: mol_type = other DNA
catctctactaagaataaaa

SEQ ID NO: 44925 - DNA, 20 bp, synthetic construct
  source 1..20: mol_type = other DNA
ccatctctactaagaataaa

SEQ ID NO: 44926 - DNA, 20 bp, synthetic construct
  source 1..20: mol_type = other DNA
cccatctctactaagaataa

SEQ ID NO: 44927 - DNA, 20 bp, synthetic construct
  source 1..20: mol_type = other DNA
ccccatctctactaagaata

SEQ ID NO: 44928 - DNA, 20 bp, synthetic construct
  source 1..20: mol_type = other DNA
accccatctctactaagaat

SEQ ID NO: 44929 - DNA, 20 bp, synthetic construct
  source 1..20: mol_type = other DNA
aaccccatctctactaagaa

SEQ ID NO: 44930 - DNA, 20 bp, synthetic construct
  source 1..20: mol_type = other DNA
aaaccccatctctactaaga

SEQ ID NO: 44931 - DNA, 20 bp, synthetic construct
  source 1..20: mol_type = other DNA
gaaaccccatctctactaag

SEQ ID NO: 44932 - DNA, 20 bp, synthetic construct
  source 1..20: mol_type = other DNA
tgaaaccccatctctactaa

SEQ ID NO: 44933 - DNA, 20 bp, synthetic construct
  source 1..20: mol_type = other DNA
gtgaaaccccatctctacta

SEQ ID NO: 44934 - DNA, 20 bp, synthetic construct
  source 1..20: mol_type = other DNA
agtgaaaccccatctctact

SEQ ID NO: 44935 - DNA, 20 bp, synthetic construct
  source 1..20: mol_type = other DNA
cagtgaaaccccatctctac

SEQ ID NO: 44936 - DNA, 20 bp, synthetic construct
  source 1..20: mol_type = other DNA
acagtgaaaccccatctcta

SEQ ID NO: 44937 - DNA, 20 bp, synthetic construct
  source 1..20: mol_type = other DNA
cacagtgaaaccccatctct

SEQ ID NO: 44938 - DNA, 20 bp, synthetic construct
  source 1..20: mol_type = other DNA
acacagtgaaaccccatctc

SEQ ID NO: 44939 - DNA, 20 bp, synthetic construct
  source 1..20: mol_type = other DNA
aacacagtgaaaccccatct

SEQ ID NO: 44940 - DNA, 20 bp, synthetic construct
  source 1..20: mol_type = other DNA
taacacagtgaaaccccatc

SEQ ID NO: 44941 - DNA, 20 bp, synthetic construct
  source 1..20: mol_type = other DNA
ctaacacagtgaaaccccat

SEQ ID NO: 44942 - DNA, 20 bp, synthetic construct
  source 1..20: mol_type = other DNA
gctaacacagtgaaacccca

SEQ ID NO: 44943 - DNA, 20 bp, synthetic construct
  source 1..20: mol_type = other DNA
ggctaacacagtgaaacccc

SEQ ID NO: 44944 - DNA, 20 bp, synthetic construct
  source 1..20: mol_type = other DNA
tggctaacacagtgaaaccc

SEQ ID NO: 44945 - DNA, 20 bp, synthetic construct
  source 1..20: mol_type = other DNA
ctggctaacacagtgaaacc

SEQ ID NO: 44946 - DNA, 20 bp, synthetic construct
  source 1..20: mol_type = other DNA
cctggctaacacagtgaaac

SEQ ID NO: 44947 - DNA, 20 bp, synthetic construct
  source 1..20: mol_type = other DNA
tcctggctaacacagtgaaa

SEQ ID NO: 44948 - DNA, 20 bp, synthetic construct
  source 1..20: mol_type = other DNA
atcctggctaacacagtgaa

SEQ ID NO: 44949 - DNA, 20 bp, synthetic construct
  source 1..20: mol_type = other DNA
catcctggctaacacagtga

SEQ ID NO: 44950 - DNA, 20 bp, synthetic construct
  source 1..20: mol_type = other DNA
ccatcctggctaacacagtg

SEQ ID NO: 44951 - DNA, 20 bp, synthetic construct
  source 1..20: mol_type = other DNA
accatcctggctaacacagt

SEQ ID NO: 44952 - DNA, 20 bp, synthetic construct
  source 1..20: mol_type = other DNA
gaccatcctggctaacacag

SEQ ID NO: 44953 - DNA, 20 bp, synthetic construct
  source 1..20: mol_type = other DNA
agaccatcctggctaacaca

SEQ ID NO: 44954 - DNA, 20 bp, synthetic construct
  source 1..20: mol_type = other DNA
gagaccatcctggctaacac

SEQ ID NO: 44955 - DNA, 20 bp, synthetic construct
  source 1..20: mol_type = other DNA
cgagaccatcctggctaaca

SEQ ID NO: 44956 - DNA, 20 bp, synthetic construct
  source 1..20: mol_type = other DNA
tcgagaccatcctggctaac

SEQ ID NO: 44957 - DNA, 20 bp, synthetic construct
  source 1..20: mol_type = other DNA
ttcgagaccatcctggctaa

SEQ ID NO: 44958 - DNA, 20 bp, synthetic construct
  source 1..20: mol_type = other DNA
gttcgagaccatcctggcta

SEQ ID NO: 44959 - DNA, 20 bp, synthetic construct
  source 1..20: mol_type = other DNA
agttcgagaccatcctggct

SEQ ID NO: 44960 - DNA, 20 bp, synthetic construct
  source 1..20: mol_type = other DNA
gagttcgagaccatcctggc

SEQ ID NO: 44961 - DNA, 20 bp, synthetic construct
  source 1..20: mol_type = other DNA
ggagttcgagaccatcctgg

SEQ ID NO: 44962 - DNA, 20 bp, synthetic construct
  source 1..20: mol_type = other DNA
aggagttcgagaccatcctg

SEQ ID NO: 44963 - DNA, 20 bp, synthetic construct
  source 1..20: mol_type = other DNA
caggagttcgagaccatcct

SEQ ID NO: 44964 - DNA, 20 bp, synthetic construct
  source 1..20: mol_type = other DNA
tcaggagttcgagaccatcc

SEQ ID NO: 44965 - DNA, 20 bp, synthetic construct
  source 1..20: mol_type = other DNA
gtcaggagttcgagaccatc

SEQ ID NO: 44966 - DNA, 20 bp, synthetic construct
  source 1..20: mol_type = other DNA
ggtcaggagttcgagaccat

SEQ ID NO: 44967 - DNA, 20 bp, synthetic construct
  source 1..20: mol_type = other DNA
aggtcaggagttcgagacca

SEQ ID NO: 44968 - DNA, 20 bp, synthetic construct
  source 1..20: mol_type = other DNA
aaggtcaggagttcgagacc

SEQ ID NO: 44969 - DNA, 20 bp, synthetic construct
  source 1..20: mol_type = other DNA
caaggtcaggagttcgagac

SEQ ID NO: 44970 - DNA, 20 bp, synthetic construct
  source 1..20: mol_type = other DNA
acaaggtcaggagttcgaga

SEQ ID NO: 44971 - DNA, 20 bp, synthetic construct
  source 1..20: mol_type = other DNA
cacaaggtcaggagttcgag

SEQ ID NO: 44972 - DNA, 20 bp, synthetic construct
  source 1..20: mol_type = other DNA
tcacaaggtcaggagttcga

SEQ ID NO: 44973 - DNA, 20 bp, synthetic construct
  source 1..20: mol_type = other DNA
atcacaaggtcaggagttcg

SEQ ID NO: 44974 - DNA, 20 bp, synthetic construct
  source 1..20: mol_type = other DNA
gatcacaaggtcaggagttc

SEQ ID NO: 44975 - DNA, 20 bp, synthetic construct
  source 1..20: mol_type = other DNA
agatcacaaggtcaggagtt

SEQ ID NO: 44976 - DNA, 20 bp, synthetic construct
  source 1..20: mol_type = other DNA
cagatcacaaggtcaggagt

SEQ ID NO: 44977 - DNA, 20 bp, synthetic construct
  source 1..20: mol_type = other DNA
gcagatcacaaggtcaggag

SEQ ID NO: 44978 - DNA, 20 bp, synthetic construct
  source 1..20: mol_type = other DNA
ggcagatcacaaggtcagga

SEQ ID NO: 44979 - DNA, 20 bp, synthetic construct
  source 1..20: mol_type = other DNA
gggcagatcacaaggtcagg

SEQ ID NO: 44980 - DNA, 20 bp, synthetic construct
  source 1..20: mol_type = other DNA
tgggcagatcacaaggtcag

SEQ ID NO: 44981 - DNA, 20 bp, synthetic construct
  source 1..20: mol_type = other DNA
gtgggcagatcacaaggtca

SEQ ID NO: 44982 - DNA, 20 bp, synthetic construct
  source 1..20: mol_type = other DNA
ggtgggcagatcacaaggtc

SEQ ID NO: 44983 - DNA, 20 bp, synthetic construct
  source 1..20: mol_type = other DNA
aggtgggcagatcacaaggt

SEQ ID NO: 44984 - DNA, 20 bp, synthetic construct
  source 1..20: mol_type = other DNA
gaggtgggcagatcacaagg

SEQ ID NO: 44985 - DNA, 20 bp, synthetic construct
  source 1..20: mol_type = other DNA
agaggtgggcagatcacaag

SEQ ID NO: 44986 - DNA, 20 bp, synthetic construct
  source 1..20: mol_type = other DNA
cagaggtgggcagatcacaa

SEQ ID NO: 44987 - DNA, 20 bp, synthetic construct
  source 1..20: mol_type = other DNA
gcagaggtgggcagatcaca

SEQ ID NO: 44988 - DNA, 20 bp, synthetic construct
  source 1..20: mol_type = other DNA
ggcagaggtgggcagatcac

SEQ ID NO: 44989 - DNA, 20 bp, synthetic construct
  source 1..20: mol_type = other DNA
aggcagaggtgggcagatca

SEQ ID NO: 44990 - DNA, 20 bp, synthetic construct
  source 1..20: mol_type = other DNA
gaggcagaggtgggcagatc

SEQ ID NO: 44991 - DNA, 20 bp, synthetic construct
  source 1..20: mol_type = other DNA
ggaggcagaggtgggcagat

SEQ ID NO: 44992 - DNA, 20 bp, synthetic construct
  source 1..20: mol_type = other DNA
gggaggcagaggtgggcaga

SEQ ID NO: 44993 - DNA, 20 bp, synthetic construct
  source 1..20: mol_type = other DNA
tgggaggcagaggtgggcag

SEQ ID NO: 44994 - DNA, 20 bp, synthetic construct
  source 1..20: mol_type = other DNA
ttgggaggcagaggtgggca

SEQ ID NO: 44995 - DNA, 20 bp, synthetic construct
  source 1..20: mol_type = other DNA
tttgggaggcagaggtgggc

SEQ ID NO: 44996 - DNA, 20 bp, synthetic construct
  source 1..20: mol_type = other DNA
ctttgggaggcagaggtggg

SEQ ID NO: 44997 - DNA, 20 bp, synthetic construct
  source 1..20: mol_type = other DNA
actttgggaggcagaggtgg

SEQ ID NO: 44998 - DNA, 20 bp, synthetic construct
  source 1..20: mol_type = other DNA
cactttgggaggcagaggtg

SEQ ID NO: 44999 - DNA, 20 bp, synthetic construct
  source 1..20: mol_type = other DNA
gcactttgggaggcagaggt

SEQ ID NO: 45000 - DNA, 20 bp, synthetic construct
  source 1..20: mol_type = other DNA
agcactttgggaggcagagg

SEQ ID NO: 45001 - DNA, 20 bp, synthetic construct
  source 1..20: mol_type = other DNA
cagcactttgggaggcagag

SEQ ID NO: 45002 - DNA, 20 bp, synthetic construct
  source 1..20: mol_type = other DNA
ccagcactttgggaggcaga

SEQ ID NO: 45003 - DNA, 20 bp, synthetic construct
  source 1..20: mol_type = other DNA
cccagcactttgggaggcag

SEQ ID NO: 45004 - DNA, 20 bp, synthetic construct
  source 1..20: mol_type = other DNA
tcccagcactttgggaggca

SEQ ID NO: 45005 - DNA, 20 bp, synthetic construct
  source 1..20: mol_type = other DNA
atcccagcactttgggaggc

SEQ ID NO: 45006 - DNA, 20 bp, synthetic construct
  source 1..20: mol_type = other DNA
aatcccagcactttgggagg

SEQ ID NO: 45007 - DNA, 20 bp, synthetic construct
  source 1..20: mol_type = other DNA
taatcccagcactttgggag

SEQ ID NO: 45008 - DNA, 20 bp, synthetic construct
  source 1..20: mol_type = other DNA
gtaatcccagcactttggga

SEQ ID NO: 45009 - DNA, 20 bp, synthetic construct
  source 1..20: mol_type = other DNA
tgtaatcccagcactttggg

SEQ ID NO: 45010 - DNA, 20 bp, synthetic construct
  source 1..20: mol_type = other DNA
ctgtaatcccagcactttgg

SEQ ID NO: 45011 - DNA, 20 bp, synthetic construct
  source 1..20: mol_type = other DNA
cctgtaatcccagcactttg

SEQ ID NO: 45012 - DNA, 20 bp, synthetic construct
  source 1..20: mol_type = other DNA
gcctgtaatcccagcacttt

SEQ ID NO: 45013 - DNA, 20 bp, synthetic construct
  source 1..20: mol_type = other DNA
tgcctgtaatcccagcactt

SEQ ID NO: 45014 - DNA, 20 bp, synthetic construct
  source 1..20: mol_type = other DNA
atgcctgtaatcccagcact

SEQ ID NO: 45015 - DNA, 20 bp, synthetic construct
  source 1..20: mol_type = other DNA
catgcctgtaatcccagcac

SEQ ID NO: 45016 - DNA, 20 bp, synthetic construct
  source 1..20: mol_type = other DNA
tcatgcctgtaatcccagca

SEQ ID NO: 45017 - DNA, 20 bp, synthetic construct
  source 1..20: mol_type = other DNA
ctcatgcctgtaatcccagc

SEQ ID NO: 45018 - DNA, 20 bp, synthetic construct
  source 1..20: mol_type = other DNA
gctcatgcctgtaatcccag

SEQ ID NO: 45019 - DNA, 20 bp, synthetic construct
  source 1..20: mol_type = other DNA
ggctcatgcctgtaatccca

SEQ ID NO: 45020 - DNA, 20 bp, synthetic construct
  source 1..20: mol_type = other DNA
tggctcatgcctgtaatccc

SEQ ID NO: 45021 - DNA, 20 bp, synthetic construct
  source 1..20: mol_type = other DNA
gtggctcatgcctgtaatcc

SEQ ID NO: 45022 - DNA, 20 bp, synthetic construct
  source 1..20: mol_type = other DNA
agtggctcatgcctgtaatc

SEQ ID NO: 45023 - DNA, 20 bp, synthetic construct
  source 1..20: mol_type = other DNA
cagtggctcatgcctgtaat

SEQ ID NO: 45024 - DNA, 20 bp, synthetic construct
  source 1..20: mol_type = other DNA
gcagtggctcatgcctgtaa

SEQ ID NO: 45025 - DNA, 20 bp, synthetic construct
  source 1..20: mol_type = other DNA
cgcagtggctcatgcctgta

SEQ ID NO: 45026 - DNA, 20 bp, synthetic construct
  source 1..20: mol_type = other DNA
gcgcagtggctcatgcctgt

SEQ ID NO: 45027 - DNA, 20 bp, synthetic construct
  source 1..20: mol_type = other DNA
ggcgcagtggctcatgcctg

SEQ ID NO: 45028 - DNA, 20 bp, synthetic construct
  source 1..20: mol_type = other DNA
gggcgcagtggctcatgcct

SEQ ID NO: 45029 - DNA, 20 bp, synthetic construct
  source 1..20: mol_type = other DNA
cgggcgcagtggctcatgcc

SEQ ID NO: 45030 - DNA, 20 bp, synthetic construct
  source 1..20: mol_type = other DNA
ccgggcgcagtggctcatgc

SEQ ID NO: 45031 - DNA, 20 bp, synthetic construct
  source 1..20: mol_type = other DNA
gccgggcgcagtggctcatg

SEQ ID NO: 45032 - DNA, 20 bp, synthetic construct
  source 1..20: mol_type = other DNA
ggccgggcgcagtggctcat

SEQ ID NO: 45033 - DNA, 20 bp, synthetic construct
  source 1..20: mol_type = other DNA
gggccgggcgcagtggctca

SEQ ID NO: 45034 - DNA, 20 bp, synthetic construct
  source 1..20: mol_type = other DNA
tgggccgggcgcagtggctc

SEQ ID NO: 45035 - DNA, 20 bp, synthetic construct
  source 1..20: mol_type = other DNA
atgggccgggcgcagtggct

SEQ ID NO: 45036 - DNA, 20 bp, synthetic construct
  source 1..20: mol_type = other DNA
tatgggccgggcgcagtggc

SEQ ID NO: 45037 - DNA, 20 bp, synthetic construct
  source 1..20: mol_type = other DNA
atatgggccgggcgcagtgg

SEQ ID NO: 45038 - DNA, 20 bp, synthetic construct
  source 1..20: mol_type = other DNA
catatgggccgggcgcagtg

SEQ ID NO: 45039 - DNA, 20 bp, synthetic construct
  source 1..20: mol_type = other DNA
tcatatgggccgggcgcagt

SEQ ID NO: 45040 - DNA, 20 bp, synthetic construct
  source 1..20: mol_type = other DNA
gtcatatgggccgggcgcag

SEQ ID NO: 45041 - DNA, 20 bp, synthetic construct
  source 1..20: mol_type = other DNA
ggtcatatgggccgggcgca

SEQ ID NO: 45042 - DNA, 20 bp, synthetic construct
  source 1..20: mol_type = other DNA
aggtcatatgggccgggcgc

SEQ ID NO: 45043 - DNA, 20 bp, synthetic construct
  source 1..20: mol_type = other DNA
caggtcatatgggccgggcg

SEQ ID NO: 45044 - DNA, 20 bp, synthetic construct
  source 1..20: mol_type = other DNA
acaggtcatatgggccgggc

SEQ ID NO: 45045 - DNA, 20 bp, synthetic construct
  source 1..20: mol_type = other DNA
aacaggtcatatgggccggg

SEQ ID NO: 45046 - DNA, 20 bp, synthetic construct
  source 1..20: mol_type = other DNA
aaacaggtcatatgggccgg

SEQ ID NO: 45047 - DNA, 20 bp, synthetic construct
  source 1..20: mol_type = other DNA
aaaacaggtcatatgggccg

SEQ ID NO: 45048 - DNA, 20 bp, synthetic construct
  source 1..20: mol_type = other DNA
aaaaacaggtcatatgggcc

SEQ ID NO: 45049 - DNA, 20 bp, synthetic construct
  source 1..20: mol_type = other DNA
gaaaaacaggtcatatgggc

SEQ ID NO: 45050 - DNA, 20 bp, synthetic construct
  source 1..20: mol_type = other DNA
agaaaaacaggtcatatggg

SEQ ID NO: 45051 - DNA, 20 bp, synthetic construct
  source 1..20: mol_type = other DNA
aagaaaaacaggtcatatgg

SEQ ID NO: 45052 - DNA, 20 bp, synthetic construct
  source 1..20: mol_type = other DNA
aaagaaaaacaggtcatatg

SEQ ID NO: 45053 - DNA, 20 bp, synthetic construct
  source 1..20: mol_type = other DNA
aaaagaaaaacaggtcatat

SEQ ID NO: 45054 - DNA, 20 bp, synthetic construct
  source 1..20: mol_type = other DNA
taaaagaaaaacaggtcata

SEQ ID NO: 45055 - DNA, 20 bp, synthetic construct
  source 1..20: mol_type = other DNA
ataaaagaaaaacaggtcat

SEQ ID NO: 45056 - DNA, 20 bp, synthetic construct
  source 1..20: mol_type = other DNA
tataaaagaaaaacaggtca

SEQ ID NO: 45057 - DNA, 20 bp, synthetic construct
  source 1..20: mol_type = other DNA
ctataaaagaaaaacaggtc

SEQ ID NO: 45058 - DNA, 20 bp, synthetic construct
  source 1..20: mol_type = other DNA
tctataaaagaaaaacaggt

SEQ ID NO: 45059 - DNA, 20 bp, synthetic construct
  source 1..20: mol_type = other DNA
atctataaaagaaaaacagg

SEQ ID NO: 45060 - DNA, 20 bp, synthetic construct
  source 1..20: mol_type = other DNA
catctataaaagaaaaacag

SEQ ID NO: 45061 - DNA, 20 bp, synthetic construct
  source 1..20: mol_type = other DNA
ccatctataaaagaaaaaca

SEQ ID NO: 45062 - DNA, 20 bp, synthetic construct
  source 1..20: mol_type = other DNA
cccatctataaaagaaaaac

SEQ ID NO: 45063 - DNA, 20 bp, synthetic construct
  source 1..20: mol_type = other DNA
ccccatctataaaagaaaaa

SEQ ID NO: 45064 - DNA, 20 bp, synthetic construct
  source 1..20: mol_type = other DNA
cccccatctataaaagaaaa

SEQ ID NO: 45065 - DNA, 20 bp, synthetic construct
  source 1..20: mol_type = other DNA
tcccccatctataaaagaaa

SEQ ID NO: 45066 - DNA, 20 bp, synthetic construct
  source 1..20: mol_type = other DNA
ctcccccatctataaaagaa

SEQ ID NO: 45067 - DNA, 20 bp, synthetic construct
  source 1..20: mol_type = other DNA
tctcccccatctataaaaga

SEQ ID NO: 45068 - DNA, 20 bp, synthetic construct
  source 1..20: mol_type = other DNA
ttctcccccatctataaaag

SEQ ID NO: 45069 - DNA, 20 bp, synthetic construct
  source 1..20: mol_type = other DNA
tttctcccccatctataaaa

SEQ ID NO: 45070 - DNA, 20 bp, synthetic construct
  source 1..20: mol_type = other DNA
atttctcccccatctataaa

SEQ ID NO: 45071 - DNA, 20 bp, synthetic construct
  source 1..20: mol_type = other DNA
tatttctcccccatctataa

SEQ ID NO: 45072 - DNA, 20 bp, synthetic construct
  source 1..20: mol_type = other DNA
atatttctcccccatctata

SEQ ID NO: 45073 - DNA, 20 bp, synthetic construct
  source 1..20: mol_type = other DNA
catatttctcccccatctat

SEQ ID NO: 45074 - DNA, 20 bp, synthetic construct
  source 1..20: mol_type = other DNA
ccatatttctcccccatcta

SEQ ID NO: 45075 - DNA, 20 bp, synthetic construct
  source 1..20: mol_type = other DNA
cccatatttctcccccatct

SEQ ID NO: 45076 - DNA, 20 bp, synthetic construct
  source 1..20: mol_type = other DNA
tcccatatttctcccccatc

SEQ ID NO: 45077 - DNA, 20 bp, synthetic construct
  source 1..20: mol_type = other DNA
ttcccatatttctcccccat

SEQ ID NO: 45078 - DNA, 20 bp, synthetic construct
  source 1..20: mol_type = other DNA
cttcccatatttctccccca

SEQ ID NO: 45079 - DNA, 20 bp, synthetic construct
  source 1..20: mol_type = other DNA
acttcccatatttctccccc

SEQ ID NO: 45080 - DNA, 20 bp, synthetic construct
  source 1..20: mol_type = other DNA
cacttcccatatttctcccc

SEQ ID NO: 45081 - DNA, 20 bp, synthetic construct
  source 1..20: mol_type = other DNA
tcacttcccatatttctccc

SEQ ID NO: 45082 - DNA, 20 bp, synthetic construct
  source 1..20: mol_type = other DNA
gtcacttcccatatttctcc

SEQ ID NO: 45083 - DNA, 20 bp, synthetic construct
  source 1..20: mol_type = other DNA
agtcacttcccatatttctc

SEQ ID NO: 45084 - DNA, 20 bp, synthetic construct
  source 1..20: mol_type = other DNA
aagtcacttcccatatttct

SEQ ID NO: 45085 - DNA, 20 bp, synthetic construct
  source 1..20: mol_type = other DNA
caagtcacttcccatatttc

SEQ ID NO: 45086 - DNA, 20 bp, synthetic construct
  source 1..20: mol_type = other DNA
ccaagtcacttcccatattt

SEQ ID NO: 45087 - DNA, 20 bp, synthetic construct
  source 1..20: mol_type = other DNA
accaagtcacttcccatatt

SEQ ID NO: 45088 - DNA, 20 bp, synthetic construct
  source 1..20: mol_type = other DNA
caccaagtcacttcccatat

SEQ ID NO: 45089 - DNA, 20 bp, synthetic construct
  source 1..20: mol_type = other DNA
acaccaagtcacttcccata

SEQ ID NO: 45090 - DNA, 20 bp, synthetic construct
  source 1..20: mol_type = other DNA
gacaccaagtcacttcccat

SEQ ID NO: 45091 - DNA, 20 bp, synthetic construct
  source 1..20: mol_type = other DNA
tgacaccaagtcacttccca

SEQ ID NO: 45092 - DNA, 20 bp, synthetic construct
  source 1..20: mol_type = other DNA
ctgacaccaagtcacttccc

SEQ ID NO: 45093 - DNA, 20 bp, synthetic construct
  source 1..20: mol_type = other DNA
actgacaccaagtcacttcc

SEQ ID NO: 45094 - DNA, 20 bp, synthetic construct
  source 1..20: mol_type = other DNA
gactgacaccaagtcacttc

SEQ ID NO: 45095 - DNA, 20 bp, synthetic construct
  source 1..20: mol_type = other DNA
tgactgacaccaagtcactt

SEQ ID NO: 45096 - DNA, 20 bp, synthetic construct
  source 1..20: mol_type = other DNA
atgactgacaccaagtcact

SEQ ID NO: 45097 - DNA, 20 bp, synthetic construct
  source 1..20: mol_type = other DNA
gatgactgacaccaagtcac

SEQ ID NO: 45098 - DNA, 20 bp, synthetic construct
  source 1..20: mol_type = other DNA
agatgactgacaccaagtca

SEQ ID NO: 45099 - DNA, 20 bp, synthetic construct
  source 1..20: mol_type = other DNA
cagatgactgacaccaagtc

SEQ ID NO: 45100 - DNA, 20 bp, synthetic construct
  source 1..20: mol_type = other DNA
acagatgactgacaccaagt

SEQ ID NO: 45101 - DNA, 20 bp, synthetic construct
  source 1..20: mol_type = other DNA
cacagatgactgacaccaag

SEQ ID NO: 45102 - DNA, 20 bp, synthetic construct
  source 1..20: mol_type = other DNA
acacagatgactgacaccaa

SEQ ID NO: 45103 - DNA, 20 bp, synthetic construct
  source 1..20: mol_type = other DNA
aacacagatgactgacacca

SEQ ID NO: 45104 - DNA, 20 bp, synthetic construct
  source 1..20: mol_type = other DNA
caacacagatgactgacacc

SEQ ID NO: 45105 - DNA, 20 bp, synthetic construct
  source 1..20: mol_type = other DNA
ccaacacagatgactgacac

SEQ ID NO: 45106 - DNA, 20 bp, synthetic construct
  source 1..20: mol_type = other DNA
accaacacagatgactgaca

SEQ ID NO: 45107 - DNA, 20 bp, synthetic construct
  source 1..20: mol_type = other DNA
aaccaacacagatgactgac

SEQ ID NO: 45108 - DNA, 20 bp, synthetic construct
  source 1..20: mol_type = other DNA
taaccaacacagatgactga

SEQ ID NO: 45109 - DNA, 20 bp, synthetic construct
  source 1..20: mol_type = other DNA
ttaaccaacacagatgactg

SEQ ID NO: 45110 - DNA, 20 bp, synthetic construct
  source 1..20: mol_type = other DNA
tttaaccaacacagatgact

SEQ ID NO: 45111 - DNA, 20 bp, synthetic construct
  source 1..20: mol_type = other DNA
atttaaccaacacagatgac

SEQ ID NO: 45112 - DNA, 20 bp, synthetic construct
  source 1..20: mol_type = other DNA
gatttaaccaacacagatga

SEQ ID NO: 45113 - DNA, 20 bp, synthetic construct
  source 1..20: mol_type = other DNA
tgatttaaccaacacagatg

SEQ ID NO: 45114 - DNA, 20 bp, synthetic construct
  source 1..20: mol_type = other DNA
ttgatttaaccaacacagat

SEQ ID NO: 45115 - DNA, 20 bp, synthetic construct
  source 1..20: mol_type = other DNA
cttgatttaaccaacacaga

SEQ ID NO: 45116 - DNA, 20 bp, synthetic construct
  source 1..20: mol_type = other DNA
tcttgatttaaccaacacag

SEQ ID NO: 45117 - DNA, 20 bp, synthetic construct
  source 1..20: mol_type = other DNA
ttcttgatttaaccaacaca

SEQ ID NO: 45118 - DNA, 20 bp, synthetic construct
  source 1..20: mol_type = other DNA
attcttgatttaaccaacac

SEQ ID NO: 45119 - DNA, 20 bp, synthetic construct
  source 1..20: mol_type = other DNA
tattcttgatttaaccaaca

SEQ ID NO: 45120 - DNA, 20 bp, synthetic construct
  source 1..20: mol_type = other DNA
atattcttgatttaaccaac

SEQ ID NO: 45121 - DNA, 20 bp, synthetic construct
  source 1..20: mol_type = other DNA
tatattcttgatttaaccaa

SEQ ID NO: 45122 - DNA, 20 bp, synthetic construct
  source 1..20: mol_type = other DNA
ttatattcttgatttaacca

SEQ ID NO: 45123 - DNA, 20 bp, synthetic construct
  source 1..20: mol_type = other DNA
attatattcttgatttaacc

SEQ ID NO: 45124 - DNA, 20 bp, synthetic construct
  source 1..20: mol_type = other DNA
gattatattcttgatttaac

SEQ ID NO: 45125 - DNA, 20 bp, synthetic construct
  source 1..20: mol_type = other DNA
ggattatattcttgatttaa

SEQ ID NO: 45126 - DNA, 20 bp, synthetic construct
  source 1..20: mol_type = other DNA
cggattatattcttgattta

SEQ ID NO: 45127 - DNA, 20 bp, synthetic construct
  source 1..20: mol_type = other DNA
acggattatattcttgattt

SEQ ID NO: 45128 - DNA, 20 bp, synthetic construct
  source 1..20: mol_type = other DNA
cacggattatattcttgatt

SEQ ID NO: 45129 - DNA, 20 bp, synthetic construct
  source 1..20: mol_type = other DNA
acacggattatattcttgat

SEQ ID NO: 45130 - DNA, 20 bp, synthetic construct
  source 1..20: mol_type = other DNA
aacacggattatattcttga

SEQ ID NO: 45131 - DNA, 20 bp, synthetic construct
  source 1..20: mol_type = other DNA
aaacacggattatattcttg

SEQ ID NO: 45132 - DNA, 20 bp, synthetic construct
  source 1..20: mol_type = other DNA
aaaacacggattatattctt

SEQ ID NO: 45133 - DNA, 20 bp, synthetic construct
  source 1..20: mol_type = other DNA
caaaacacggattatattct

SEQ ID NO: 45134 - DNA, 20 bp, synthetic construct
  source 1..20: mol_type = other DNA
gcaaaacacggattatattc

SEQ ID NO: 45135 - DNA, 20 bp, synthetic construct
  source 1..20: mol_type = other DNA
agcaaaacacggattatatt

SEQ ID NO: 45136 - DNA, 20 bp, synthetic construct
  source 1..20: mol_type = other DNA
aagcaaaacacggattatat

SEQ ID NO: 45137 - DNA, 20 bp, synthetic construct
  source 1..20: mol_type = other DNA
gaagcaaaacacggattata

SEQ ID NO: 45138 - DNA, 20 bp, synthetic construct
  source 1..20: mol_type = other DNA
agaagcaaaacacggattat

SEQ ID NO: 45139 - DNA, 20 bp, synthetic construct
  source 1..20: mol_type = other DNA
cagaagcaaaacacggatta

SEQ ID NO: 45140 - DNA, 20 bp, synthetic construct
  source 1..20: mol_type = other DNA
tcagaagcaaaacacggatt

SEQ ID NO: 45141 - DNA, 20 bp, synthetic construct
  source 1..20: mol_type = other DNA
ttcagaagcaaaacacggat

SEQ ID NO: 45142 - DNA, 20 bp, synthetic construct
  source 1..20: mol_type = other DNA
attcagaagcaaaacacgga

SEQ ID NO: 45143 - DNA, 20 bp, synthetic construct
  source 1..20: mol_type = other DNA
tattcagaagcaaaacacgg

SEQ ID NO: 45144 - DNA, 20 bp, synthetic construct
  source 1..20: mol_type = other DNA
ctattcagaagcaaaacacg

SEQ ID NO: 45145 - DNA, 20 bp, synthetic construct
  source 1..20: mol_type = other DNA
gctattcagaagcaaaacac

SEQ ID NO: 45146 - DNA, 20 bp, synthetic construct
  source 1..20: mol_type = other DNA
agctattcagaagcaaaaca

SEQ ID NO: 45147 - DNA, 20 bp, synthetic construct
  source 1..20: mol_type = other DNA
gagctattcagaagcaaaac

SEQ ID NO: 45148 - DNA, 20 bp, synthetic construct
  source 1..20: mol_type = other DNA
agagctattcagaagcaaaa

SEQ ID NO: 45149 - DNA, 20 bp, synthetic construct
  source 1..20: mol_type = other DNA
aagagctattcagaagcaaa

SEQ ID NO: 45150 - DNA, 20 bp, synthetic construct
  source 1..20: mol_type = other DNA
aaagagctattcagaagcaa

SEQ ID NO: 45151 - DNA, 20 bp, synthetic construct
  source 1..20: mol_type = other DNA
taaagagctattcagaagca

SEQ ID NO: 45152 - DNA, 20 bp, synthetic construct
  source 1..20: mol_type = other DNA
ataaagagctattcagaagc

SEQ ID NO: 45153 - DNA, 20 bp, synthetic construct
  source 1..20: mol_type = other DNA
tataaagagctattcagaag

SEQ ID NO: 45154 - DNA, 20 bp, synthetic construct
  source 1..20: mol_type = other DNA
ttataaagagctattcagaa

SEQ ID NO: 45155 - DNA, 20 bp, synthetic construct
  source 1..20: mol_type = other DNA
gttataaagagctattcaga

SEQ ID NO: 45156 - DNA, 20 bp, synthetic construct
  source 1..20: mol_type = other DNA
tgttataaagagctattcag

SEQ ID NO: 45157 - DNA, 20 bp, synthetic construct
  source 1..20: mol_type = other DNA
ctgttataaagagctattca

SEQ ID NO: 45158 - DNA, 20 bp, synthetic construct
  source 1..20: mol_type = other DNA
actgttataaagagctattc

SEQ ID NO: 45159 - DNA, 20 bp, synthetic construct
  source 1..20: mol_type = other DNA
cactgttataaagagctatt

SEQ ID NO: 45160 - DNA, 20 bp, synthetic construct
  source 1..20: mol_type = other DNA
tcactgttataaagagctat

SEQ ID NO: 45161 - DNA, 20 bp, synthetic construct
  source 1..20: mol_type = other DNA
atcactgttataaagagcta

SEQ ID NO: 45162 - DNA, 20 bp, synthetic construct
  source 1..20: mol_type = other DNA
aatcactgttataaagagct

SEQ ID NO: 45163 - DNA, 20 bp, synthetic construct
  source 1..20: mol_type = other DNA
caatcactgttataaagagc

SEQ ID NO: 45164 - DNA, 20 bp, synthetic construct
  source 1..20: mol_type = other DNA
ccaatcactgttataaagag

SEQ ID NO: 45165 - DNA, 20 bp, synthetic construct
  source 1..20: mol_type = other DNA
accaatcactgttataaaga

SEQ ID NO: 45166 - DNA, 20 bp, synthetic construct
  source 1..20: mol_type = other DNA
aaccaatcactgttataaag

SEQ ID NO: 45167 - DNA, 20 bp, synthetic construct
  source 1..20: mol_type = other DNA
taaccaatcactgttataaa

SEQ ID NO: 45168 - DNA, 20 bp, synthetic construct
  source 1..20: mol_type = other DNA
gtaaccaatcactgttataa

SEQ ID NO: 45169 - DNA, 20 bp, synthetic construct
  source 1..20: mol_type = other DNA
agtaaccaatcactgttata

SEQ ID NO: 45170 - DNA, 20 bp, synthetic construct
  source 1..20: mol_type = other DNA
aagtaaccaatcactgttat

SEQ ID NO: 45171 - DNA, 20 bp, synthetic construct
  source 1..20: mol_type = other DNA
aaagtaaccaatcactgtta

SEQ ID NO: 45172 - DNA, 20 bp, synthetic construct
  source 1..20: mol_type = other DNA
caaagtaaccaatcactgtt

SEQ ID NO: 45173 - DNA, 20 bp, synthetic construct
  source 1..20: mol_type = other DNA
ccaaagtaaccaatcactgt

SEQ ID NO: 45174 - DNA, 20 bp, synthetic construct
  source 1..20: mol_type = other DNA
cccaaagtaaccaatcactg

SEQ ID NO: 45175 - DNA, 20 bp, synthetic construct
  source 1..20: mol_type = other DNA
tcccaaagtaaccaatcact

SEQ ID NO: 45176 - DNA, 20 bp, synthetic construct
  source 1..20: mol_type = other DNA
ctcccaaagtaaccaatcac

SEQ ID NO: 45177 - DNA, 20 bp, synthetic construct
  source 1..20: mol_type = other DNA
actcccaaagtaaccaatca

SEQ ID NO: 45178 - DNA, 20 bp, synthetic construct
  source 1..20: mol_type = other DNA
tactcccaaagtaaccaatc

SEQ ID NO: 45179 - DNA, 20 bp, synthetic construct
  source 1..20: mol_type = other DNA
ttactcccaaagtaaccaat

SEQ ID NO: 45180 - DNA, 20 bp, synthetic construct
  source 1..20: mol_type = other DNA
tttactcccaaagtaaccaa

SEQ ID NO: 45181 - DNA, 20 bp, synthetic construct
  source 1..20: mol_type = other DNA
ctttactcccaaagtaacca

SEQ ID NO: 45182 - DNA, 20 bp, synthetic construct
  source 1..20: mol_type = other DNA
tctttactcccaaagtaacc

SEQ ID NO: 45183 - DNA, 20 bp, synthetic construct
  source 1..20: mol_type = other DNA
atctttactcccaaagtaac

SEQ ID NO: 45184 - DNA, 20 bp, synthetic construct
  source 1..20: mol_type = other DNA
aatctttactcccaaagtaa

SEQ ID NO: 45185 - DNA, 20 bp, synthetic construct
  source 1..20: mol_type = other DNA
taatctttactcccaaagta

SEQ ID NO: 45186 - DNA, 20 bp, synthetic construct
  source 1..20: mol_type = other DNA
ataatctttactcccaaagt

SEQ ID NO: 45187 - DNA, 20 bp, synthetic construct
  source 1..20: mol_type = other DNA
aataatctttactcccaaag

SEQ ID NO: 45188 - DNA, 20 bp, synthetic construct
  source 1..20: mol_type = other DNA
taataatctttactcccaaa

SEQ ID NO: 45189 - DNA, 20 bp, synthetic construct
  source 1..20: mol_type = other DNA
ataataatctttactcccaa

SEQ ID NO: 45190 - DNA, 20 bp, synthetic construct
  source 1..20: mol_type = other DNA
aataataatctttactccca

SEQ ID NO: 45191 - DNA, 20 bp, synthetic construct
  source 1..20: mol_type = other DNA
aaataataatctttactccc

SEQ ID NO: 45192 - DNA, 20 bp, synthetic construct
  source 1..20: mol_type = other DNA
taaataataatctttactcc

SEQ ID NO: 45193 - DNA, 20 bp, synthetic construct
  source 1..20: mol_type = other DNA
ctaaataataatctttactc

SEQ ID NO: 45194 - DNA, 20 bp, synthetic construct
  source 1..20: mol_type = other DNA
tctaaataataatctttact

SEQ ID NO: 45195 - DNA, 20 bp, synthetic construct
  source 1..20: mol_type = other DNA
ctctaaataataatctttac

SEQ ID NO: 45196 - DNA, 20 bp, synthetic construct
  source 1..20: mol_type = other DNA
tctctaaataataatcttta

SEQ ID NO: 45197 - DNA, 20 bp, synthetic construct
  source 1..20: mol_type = other DNA
gtctctaaataataatcttt

SEQ ID NO: 45198 - DNA, 20 bp, synthetic construct
  source 1..20: mol_type = other DNA
tgtctctaaataataatctt

SEQ ID NO: 45199 - DNA, 20 bp, synthetic construct
  source 1..20: mol_type = other DNA
ctgtctctaaataataatct

SEQ ID NO: 45200 - DNA, 20 bp, synthetic construct
  source 1..20: mol_type = other DNA
tctgtctctaaataataatc

SEQ ID NO: 45201 - DNA, 20 bp, synthetic construct
  source 1..20: mol_type = other DNA
ctctgtctctaaataataat

SEQ ID NO: 45202 - DNA, 20 bp, synthetic construct
  source 1..20: mol_type = other DNA
actctgtctctaaataataa

SEQ ID NO: 45203 - DNA, 20 bp, synthetic construct
  source 1..20: mol_type = other DNA
gactctgtctctaaataata

SEQ ID NO: 45204 - DNA, 20 bp, synthetic construct
  source 1..20: mol_type = other DNA
agactctgtctctaaataat

SEQ ID NO: 45205 - DNA, 20 bp, synthetic construct
  source 1..20: mol_type = other DNA
aagactctgtctctaaataa

SEQ ID NO: 45206 - DNA, 20 bp, synthetic construct
  source 1..20: mol_type = other DNA
caagactctgtctctaaata

SEQ ID NO: 45207 - DNA, 20 bp, synthetic construct
  source 1..20: mol_type = other DNA
gcaagactctgtctctaaat

SEQ ID NO: 45208 - DNA, 20 bp, synthetic construct
  source 1..20: mol_type = other DNA
agcaagactctgtctctaaa

SEQ ID NO: 45209 - DNA, 20 bp, synthetic construct
  source 1..20: mol_type = other DNA
aagcaagactctgtctctaa

SEQ ID NO: 45210 - DNA, 20 bp, synthetic construct
  source 1..20: mol_type = other DNA
aaagcaagactctgtctcta

SEQ ID NO: 45211 - DNA, 20 bp, synthetic construct
  source 1..20: mol_type = other DNA
caaagcaagactctgtctct

SEQ ID NO: 45212 - DNA, 20 bp, synthetic construct
  source 1..20: mol_type = other DNA
acaaagcaagactctgtctc

SEQ ID NO: 45213 - DNA, 20 bp, synthetic construct
  source 1..20: mol_type = other DNA
gacaaagcaagactctgtct

SEQ ID NO: 45214 - DNA, 20 bp, synthetic construct
  source 1..20: mol_type = other DNA
cgacaaagcaagactctgtc

SEQ ID NO: 45215 - DNA, 20 bp, synthetic construct
  source 1..20: mol_type = other DNA
gcgacaaagcaagactctgt

SEQ ID NO: 45216 - DNA, 20 bp, synthetic construct
  source 1..20: mol_type = other DNA
ggcgacaaagcaagactctg

SEQ ID NO: 45217 - DNA, 20 bp, synthetic construct
  source 1..20: mol_type = other DNA
gggcgacaaagcaagactct

SEQ ID NO: 45218 - DNA, 20 bp, synthetic construct
  source 1..20: mol_type = other DNA
tgggcgacaaagcaagactc

SEQ ID NO: 45219 - DNA, 20 bp, synthetic construct
  source 1..20: mol_type = other DNA
ctgggcgacaaagcaagact

SEQ ID NO: 45220 - DNA, 20 bp, synthetic construct
  source 1..20: mol_type = other DNA
cctgggcgacaaagcaagac

SEQ ID NO: 45221 - DNA, 20 bp, synthetic construct
  source 1..20: mol_type = other DNA
gcctgggcgacaaagcaaga

SEQ ID NO: 45222 - DNA, 20 bp, synthetic construct
  source 1..20: mol_type = other DNA
agcctgggcgacaaagcaag

SEQ ID NO: 45223 - DNA, 20 bp, synthetic construct
  source 1..20: mol_type = other DNA
tagcctgggcgacaaagcaa

SEQ ID NO: 45224 - DNA, 20 bp, synthetic construct
  source 1..20: mol_type = other DNA
ctagcctgggcgacaaagca

SEQ ID NO: 45225 - DNA, 20 bp, synthetic construct
  source 1..20: mol_type = other DNA
tctagcctgggcgacaaagc

SEQ ID NO: 45226 - DNA, 20 bp, synthetic construct
  source 1..20: mol_type = other DNA
gtctagcctgggcgacaaag

SEQ ID NO: 45227 - DNA, 20 bp, synthetic construct
  source 1..20: mol_type = other DNA
agtctagcctgggcgacaaa

SEQ ID NO: 45228 - DNA, 20 bp, synthetic construct
  source 1..20: mol_type = other DNA
cagtctagcctgggcgacaa

SEQ ID NO: 45229 - DNA, 20 bp, synthetic construct
  source 1..20: mol_type = other DNA
gcagtctagcctgggcgaca

SEQ ID NO: 45230 - DNA, 20 bp, synthetic construct
  source 1..20: mol_type = other DNA
tgcagtctagcctgggcgac

SEQ ID NO: 45231 - DNA, 20 bp, synthetic construct
  source 1..20: mol_type = other DNA
ctgcagtctagcctgggcga

SEQ ID NO: 45232 - DNA, 20 bp, synthetic construct
  source 1..20: mol_type = other DNA
actgcagtctagcctgggcg

SEQ ID NO: 45233 - DNA, 20 bp, synthetic construct
  source 1..20: mol_type = other DNA
cactgcagtctagcctgggc

SEQ ID NO: 45234 - DNA, 20 bp, synthetic construct
  source 1..20: mol_type = other DNA
ccactgcagtctagcctggg

SEQ ID NO: 45235 - DNA, 20 bp, synthetic construct
  source 1..20: mol_type = other DNA
tccactgcagtctagcctgg

SEQ ID NO: 45236 - DNA, 20 bp, synthetic construct
  source 1..20: mol_type = other DNA
ttccactgcagtctagcctg

SEQ ID NO: 45237 - DNA, 20 bp, synthetic construct
  source 1..20: mol_type = other DNA
attccactgcagtctagcct

SEQ ID NO: 45238 - DNA, 20 bp, synthetic construct
  source 1..20: mol_type = other DNA
cattccactgcagtctagcc

SEQ ID NO: 45239 - DNA, 20 bp, synthetic construct
  source 1..20: mol_type = other DNA
tcattccactgcagtctagc

SEQ ID NO: 45240 - DNA, 20 bp, synthetic construct
  source 1..20: mol_type = other DNA
atcattccactgcagtctag

SEQ ID NO: 45241 - DNA, 20 bp, synthetic construct
  source 1..20: mol_type = other DNA
gatcattccactgcagtcta

SEQ ID NO: 45242 - DNA, 20 bp, synthetic construct
  source 1..20: mol_type = other DNA
cgatcattccactgcagtct

SEQ ID NO: 45243 - DNA, 20 bp, synthetic construct
  source 1..20: mol_type = other DNA
acgatcattccactgcagtc

SEQ ID NO: 45244 - DNA, 20 bp, synthetic construct
  source 1..20: mol_type = other DNA
tacgatcattccactgcagt

SEQ ID NO: 45245 - DNA, 20 bp, synthetic construct
  source 1..20: mol_type = other DNA
ctacgatcattccactgcag

SEQ ID NO: 45246 - DNA, 20 bp, synthetic construct
  source 1..20: mol_type = other DNA
gctacgatcattccactgca

SEQ ID NO: 45247 - DNA, 20 bp, synthetic construct
  source 1..20: mol_type = other DNA
ggctacgatcattccactgc

SEQ ID NO: 45248 - DNA, 20 bp, synthetic construct
  source 1..20: mol_type = other DNA
aggctacgatcattccactg

SEQ ID NO: 45249 - DNA, 20 bp, synthetic construct
  source 1..20: mol_type = other DNA
taggctacgatcattccact

SEQ ID NO: 45250 - DNA, 20 bp, synthetic construct
  source 1..20: mol_type = other DNA
gtaggctacgatcattccac

SEQ ID NO: 45251 - DNA, 20 bp, synthetic construct
  source 1..20: mol_type = other DNA
agtaggctacgatcattcca

SEQ ID NO: 45252 - DNA, 20 bp, synthetic construct
  source 1..20: mol_type = other DNA
cagtaggctacgatcattcc

SEQ ID NO: 45253 - DNA, 20 bp, synthetic construct
  source 1..20: mol_type = other DNA
gcagtaggctacgatcattc

SEQ ID NO: 45254 - DNA, 20 bp, synthetic construct
  source 1..20: mol_type = other DNA
tgcagtaggctacgatcatt

SEQ ID NO: 45255 - DNA, 20 bp, synthetic construct
  source 1..20: mol_type = other DNA
ctgcagtaggctacgatcat

SEQ ID NO: 45256 - DNA, 20 bp, synthetic construct
  source 1..20: mol_type = other DNA
gctgcagtaggctacgatca

SEQ ID NO: 45257 - DNA, 20 bp, synthetic construct
  source 1..20: mol_type = other DNA
ggctgcagtaggctacgatc

SEQ ID NO: 45258 - DNA, 20 bp, synthetic construct
  source 1..20: mol_type = other DNA
aggctgcagtaggctacgat

SEQ ID NO: 45259 - DNA, 20 bp, synthetic construct
  source 1..20: mol_type = other DNA
gaggctgcagtaggctacga

SEQ ID NO: 45260 - DNA, 20 bp, synthetic construct
  source 1..20: mol_type = other DNA
tgaggctgcagtaggctacg

SEQ ID NO: 45261 - DNA, 20 bp, synthetic construct
  source 1..20: mol_type = other DNA
ctgaggctgcagtaggctac

SEQ ID NO: 45262 - DNA, 20 bp, synthetic construct
  source 1..20: mol_type = other DNA
tctgaggctgcagtaggcta

SEQ ID NO: 45263 - DNA, 20 bp, synthetic construct
  source 1..20: mol_type = other DNA
gtctgaggctgcagtaggct

SEQ ID NO: 45264 - DNA, 20 bp, synthetic construct
  source 1..20: mol_type = other DNA
agtctgaggctgcagtaggc

SEQ ID NO: 45265 - DNA, 20 bp, synthetic construct
  source 1..20: mol_type = other DNA
gagtctgaggctgcagtagg

SEQ ID NO: 45266 - DNA, 20 bp, synthetic construct
  source 1..20: mol_type = other DNA
ggagtctgaggctgcagtag

SEQ ID NO: 45267 - DNA, 20 bp, synthetic construct
  source 1..20: mol_type = other DNA
aggagtctgaggctgcagta

SEQ ID NO: 45268 - DNA, 20 bp, synthetic construct
  source 1..20: mol_type = other DNA
caggagtctgaggctgcagt

SEQ ID NO: 45269 - DNA, 20 bp, synthetic construct
  source 1..20: mol_type = other DNA
ccaggagtctgaggctgcag

SEQ ID NO: 45270 - DNA, 20 bp, synthetic construct
  source 1..20: mol_type = other DNA
tccaggagtctgaggctgca

SEQ ID NO: 45271 - DNA, 20 bp, synthetic construct
  source 1..20: mol_type = other DNA
gtccaggagtctgaggctgc

SEQ ID NO: 45272 - DNA, 20 bp, synthetic construct
  source 1..20: mol_type = other DNA
agtccaggagtctgaggctg

SEQ ID NO: 45273 - DNA, 20 bp, synthetic construct
  source 1..20: mol_type = other DNA
gagtccaggagtctgaggct

SEQ ID NO: 45274 - DNA, 20 bp, synthetic construct
  source 1..20: mol_type = other DNA
agagtccaggagtctgaggc

SEQ ID NO: 45275 - DNA, 20 bp, synthetic construct
  source 1..20: mol_type = other DNA
cagagtccaggagtctgagg

SEQ ID NO: 45276 - DNA, 20 bp, synthetic construct
  source 1..20: mol_type = other DNA
ccagagtccaggagtctgag

SEQ ID NO: 45277 - DNA, 20 bp, synthetic construct
  source 1..20: mol_type = other DNA
accagagtccaggagtctga

SEQ ID NO: 45278 - DNA, 20 bp, synthetic construct
  source 1..20: mol_type = other DNA
caccagagtccaggagtctg

SEQ ID NO: 45279 - DNA, 20 bp, synthetic construct
  source 1..20: mol_type = other DNA
tcaccagagtccaggagtct

SEQ ID NO: 45280 - DNA, 20 bp, synthetic construct
  source 1..20: mol_type = other DNA
atcaccagagtccaggagtc

SEQ ID NO: 45281 - DNA, 20 bp, synthetic construct
  source 1..20: mol_type = other DNA
gatcaccagagtccaggagt

SEQ ID NO: 45282 - DNA, 20 bp, synthetic construct
  source 1..20: mol_type = other DNA
ggatcaccagagtccaggag

SEQ ID NO: 45283 - DNA, 20 bp, synthetic construct
  source 1..20: mol_type = other DNA
aggatcaccagagtccagga

SEQ ID NO: 45284 - DNA, 20 bp, synthetic construct
  source 1..20: mol_type = other DNA
caggatcaccagagtccagg

SEQ ID NO: 45285 - DNA, 20 bp, synthetic construct
  source 1..20: mol_type = other DNA
gcaggatcaccagagtccag

SEQ ID NO: 45286 - DNA, 20 bp, synthetic construct
  source 1..20: mol_type = other DNA
ggcaggatcaccagagtcca

SEQ ID NO: 45287 - DNA, 20 bp, synthetic construct
  source 1..20: mol_type = other DNA
aggcaggatcaccagagtcc

SEQ ID NO: 45288 - DNA, 20 bp, synthetic construct
  source 1..20: mol_type = other DNA
gaggcaggatcaccagagtc

SEQ ID NO: 45289 - DNA, 20 bp, synthetic construct
  source 1..20: mol_type = other DNA
tgaggcaggatcaccagagt

SEQ ID NO: 45290 - DNA, 20 bp, synthetic construct
  source 1..20: mol_type = other DNA
ctgaggcaggatcaccagag

SEQ ID NO: 45291 - DNA, 20 bp, synthetic construct
  source 1..20: mol_type = other DNA
gctgaggcaggatcaccaga

SEQ ID NO: 45292 - DNA, 20 bp, synthetic construct
  source 1..20: mol_type = other DNA
ggctgaggcaggatcaccag

SEQ ID NO: 45293 - DNA, 20 bp, synthetic construct
  source 1..20: mol_type = other DNA
aggctgaggcaggatcacca

SEQ ID NO: 45294 - DNA, 20 bp, synthetic construct
  source 1..20: mol_type = other DNA
gaggctgaggcaggatcacc

SEQ ID NO: 45295 - DNA, 20 bp, synthetic construct
  source 1..20: mol_type = other DNA
ggaggctgaggcaggatcac

SEQ ID NO: 45296 - DNA, 20 bp, synthetic construct
  source 1..20: mol_type = other DNA
aggaggctgaggcaggatca

SEQ ID NO: 45297 - DNA, 20 bp, synthetic construct
  source 1..20: mol_type = other DNA
caggaggctgaggcaggatc

SEQ ID NO: 45298 - DNA, 20 bp, synthetic construct
  source 1..20: mol_type = other DNA
tcaggaggctgaggcaggat

SEQ ID NO: 45299 - DNA, 20 bp, synthetic construct
  source 1..20: mol_type = other DNA
ctcaggaggctgaggcagga

SEQ ID NO: 45300 - DNA, 20 bp, synthetic construct
  source 1..20: mol_type = other DNA
actcaggaggctgaggcagg

SEQ ID NO: 45301 - DNA, 20 bp, synthetic construct
  source 1..20: mol_type = other DNA
tactcaggaggctgaggcag

SEQ ID NO: 45302 - DNA, 20 bp, synthetic construct
  source 1..20: mol_type = other DNA
ctactcaggaggctgaggca

SEQ ID NO: 45303 - DNA, 20 bp, synthetic construct
  source 1..20: mol_type = other DNA
gctactcaggaggctgaggc

SEQ ID NO: 45304 - DNA, 20 bp, synthetic construct
  source 1..20: mol_type = other DNA
agctactcaggaggctgagg

SEQ ID NO: 45305 - DNA, 20 bp, synthetic construct
  source 1..20: mol_type = other DNA
tagctactcaggaggctgag

SEQ ID NO: 45306 - DNA, 20 bp, synthetic construct
  source 1..20: mol_type = other DNA
ctagctactcaggaggctga

SEQ ID NO: 45307 - DNA, 20 bp, synthetic construct
  source 1..20: mol_type = other DNA
cctagctactcaggaggctg

SEQ ID NO: 45308 - DNA, 20 bp, synthetic construct
  source 1..20: mol_type = other DNA
tcctagctactcaggaggct

SEQ ID NO: 45309 - DNA, 20 bp, synthetic construct
  source 1..20: mol_type = other DNA
gtcctagctactcaggaggc

SEQ ID NO: 45310 - DNA, 20 bp, synthetic construct
  source 1..20: mol_type = other DNA
agtcctagctactcaggagg

SEQ ID NO: 45311 - DNA, 20 bp, synthetic construct
  source 1..20: mol_type = other DNA
tagtcctagctactcaggag

SEQ ID NO: 45312 - DNA, 20 bp, synthetic construct
  source 1..20: mol_type = other DNA
ctagtcctagctactcagga

SEQ ID NO: 45313 - DNA, 20 bp, synthetic construct
  source 1..20: mol_type = other DNA
tctagtcctagctactcagg

SEQ ID NO: 45314 - DNA, 20 bp, synthetic construct
  source 1..20: mol_type = other DNA
ctctagtcctagctactcag

SEQ ID NO: 45315 - DNA, 20 bp, synthetic construct
  source 1..20: mol_type = other DNA
cctctagtcctagctactca

SEQ ID NO: 45316 - DNA, 20 bp, synthetic construct
  source 1..20: mol_type = other DNA
acctctagtcctagctactc

SEQ ID NO: 45317 - DNA, 20 bp, synthetic construct
  source 1..20: mol_type = other DNA
cacctctagtcctagctact

SEQ ID NO: 45318 - DNA, 20 bp, synthetic construct
  source 1..20: mol_type = other DNA
gcacctctagtcctagctac

SEQ ID NO: 45319 - DNA, 20 bp, synthetic construct
  source 1..20: mol_type = other DNA
tgcacctctagtcctagcta

SEQ ID NO: 45320 - DNA, 20 bp, synthetic construct
  source 1..20: mol_type = other DNA
atgcacctctagtcctagct

SEQ ID NO: 45321 - DNA, 20 bp, synthetic construct
  source 1..20: mol_type = other DNA
catgcacctctagtcctagc

SEQ ID NO: 45322 - DNA, 20 bp, synthetic construct
  source 1..20: mol_type = other DNA
gcatgcacctctagtcctag

SEQ ID NO: 45323 - DNA, 20 bp, synthetic construct
  source 1..20: mol_type = other DNA
ggcatgcacctctagtccta

SEQ ID NO: 45324 - DNA, 20 bp, synthetic construct
  source 1..20: mol_type = other DNA
tggcatgcacctctagtcct

SEQ ID NO: 45325 - DNA, 20 bp, synthetic construct
  source 1..20: mol_type = other DNA
gtggcatgcacctctagtcc

SEQ ID NO: 45326 - DNA, 20 bp, synthetic construct
  source 1..20: mol_type = other DNA
tgtggcatgcacctctagtc

SEQ ID NO: 45327 - DNA, 20 bp, synthetic construct
  source 1..20: mol_type = other DNA
atgtggcatgcacctctagt

SEQ ID NO: 45328 - DNA, 20 bp, synthetic construct
  source 1..20: mol_type = other DNA
catgtggcatgcacctctag

SEQ ID NO: 45329 - DNA, 20 bp, synthetic construct
  source 1..20: mol_type = other DNA
gcatgtggcatgcacctcta

SEQ ID NO: 45330 - DNA, 20 bp, synthetic construct
  source 1..20: mol_type = other DNA
ggcatgtggcatgcacctct

SEQ ID NO: 45331 - DNA, 20 bp, synthetic construct
  source 1..20: mol_type = other DNA
aggcatgtggcatgcacctc

SEQ ID NO: 45332 - DNA, 20 bp, synthetic construct
  source 1..20: mol_type = other DNA
caggcatgtggcatgcacct

SEQ ID NO: 45333 - DNA, 20 bp, synthetic construct
  source 1..20: mol_type = other DNA
ccaggcatgtggcatgcacc

SEQ ID NO: 45334 - DNA, 20 bp, synthetic construct
  source 1..20: mol_type = other DNA
gccaggcatgtggcatgcac

SEQ ID NO: 45335 - DNA, 20 bp, synthetic construct
  source 1..20: mol_type = other DNA
agccaggcatgtggcatgca

SEQ ID NO: 45336 - DNA, 20 bp, synthetic construct
  source 1..20: mol_type = other DNA
tagccaggcatgtggcatgc

SEQ ID NO: 45337 - DNA, 20 bp, synthetic construct
  source 1..20: mol_type = other DNA
atagccaggcatgtggcatg

SEQ ID NO: 45338 - DNA, 20 bp, synthetic construct
  source 1..20: mol_type = other DNA
tatagccaggcatgtggcat

SEQ ID NO: 45339 - DNA, 20 bp, synthetic construct
  source 1..20: mol_type = other DNA
ttatagccaggcatgtggca

SEQ ID NO: 45340 - DNA, 20 bp, synthetic construct
  source 1..20: mol_type = other DNA
attatagccaggcatgtggc

SEQ ID NO: 45341 - DNA, 20 bp, synthetic construct
  source 1..20: mol_type = other DNA
aattatagccaggcatgtgg

SEQ ID NO: 45342 - DNA, 20 bp, synthetic construct
  source 1..20: mol_type = other DNA
taattatagccaggcatgtg

SEQ ID NO: 45343 - DNA, 20 bp, synthetic construct
  source 1..20: mol_type = other DNA
ataattatagccaggcatgt

SEQ ID NO: 45344 - DNA, 20 bp, synthetic construct
  source 1..20: mol_type = other DNA
aataattatagccaggcatg

SEQ ID NO: 45345 - DNA, 20 bp, synthetic construct
  source 1..20: mol_type = other DNA
taataattatagccaggcat

SEQ ID NO: 45346 - DNA, 20 bp, synthetic construct
  source 1..20: mol_type = other DNA
ataataattatagccaggca

SEQ ID NO: 45347 - DNA, 20 bp, synthetic construct
  source 1..20: mol_type = other DNA
aataataattatagccaggc

SEQ ID NO: 45348 - DNA, 20 bp, synthetic construct
  source 1..20: mol_type = other DNA
taataataattatagccagg

SEQ ID NO: 45349 - DNA, 20 bp, synthetic construct
  source 1..20: mol_type = other DNA
ttaataataattatagccag

SEQ ID NO: 45350 - DNA, 20 bp, synthetic construct
  source 1..20: mol_type = other DNA
attaataataattatagcca

SEQ ID NO: 45351 - DNA, 20 bp, synthetic construct
  source 1..20: mol_type = other DNA
aattaataataattatagcc

SEQ ID NO: 45352 - DNA, 20 bp, synthetic construct
  source 1..20: mol_type = other DNA
aaattaataataattatagc

SEQ ID NO: 45353 - DNA, 20 bp, synthetic construct
  source 1..20: mol_type = other DNA
taaattaataataattatag

SEQ ID NO: 45354 - DNA, 20 bp, synthetic construct
  source 1..20: mol_type = other DNA
gtaaattaataataattata

SEQ ID NO: 45355 - DNA, 20 bp, synthetic construct
  source 1..20: mol_type = other DNA
cgtaaattaataataattat

SEQ ID NO: 45356 - DNA, 20 bp, synthetic construct
  source 1..20: mol_type = other DNA
acgtaaattaataataatta

SEQ ID NO: 45357 - DNA, 20 bp, synthetic construct
  source 1..20: mol_type = other DNA
aacgtaaattaataataatt

SEQ ID NO: 45358 - DNA, 20 bp, synthetic construct
  source 1..20: mol_type = other DNA
aaacgtaaattaataataat

SEQ ID NO: 45359 - DNA, 20 bp, synthetic construct
  source 1..20: mol_type = other DNA
taaacgtaaattaataataa

SEQ ID NO: 45360 - DNA, 20 bp, synthetic construct
  source 1..20: mol_type = other DNA
ctaaacgtaaattaataata

SEQ ID NO: 45361 - DNA, 20 bp, synthetic construct
  source 1..20: mol_type = other DNA
gctaaacgtaaattaataat

SEQ ID NO: 45362 - DNA, 20 bp, synthetic construct
  source 1..20: mol_type = other DNA
tgctaaacgtaaattaataa

SEQ ID NO: 45363 - DNA, 20 bp, synthetic construct
  source 1..20: mol_type = other DNA
atgctaaacgtaaattaata

SEQ ID NO: 45364 - DNA, 20 bp, synthetic construct
  source 1..20: mol_type = other DNA
aatgctaaacgtaaattaat

SEQ ID NO: 45365 - DNA, 20 bp, synthetic construct
  source 1..20: mol_type = other DNA
taatgctaaacgtaaattaa

SEQ ID NO: 45366 - DNA, 20 bp, synthetic construct
  source 1..20: mol_type = other DNA
ctaatgctaaacgtaaatta

SEQ ID NO: 45367 - DNA, 20 bp, synthetic construct
  source 1..20: mol_type = other DNA
actaatgctaaacgtaaatt

SEQ ID NO: 45368 - DNA, 20 bp, synthetic construct
  source 1..20: mol_type = other DNA
aactaatgctaaacgtaaat

SEQ ID NO: 45369 - DNA, 20 bp, synthetic construct
  source 1..20: mol_type = other DNA
aaactaatgctaaacgtaaa

SEQ ID NO: 45370 - DNA, 20 bp, synthetic construct
  source 1..20: mol_type = other DNA
aaaactaatgctaaacgtaa

SEQ ID NO: 45371 - DNA, 20 bp, synthetic construct
  source 1..20: mol_type = other DNA
aaaaactaatgctaaacgta

SEQ ID NO: 45372 - DNA, 20 bp, synthetic construct
  source 1..20: mol_type = other DNA
aaaaaactaatgctaaacgt

SEQ ID NO: 45373 - DNA, 20 bp, synthetic construct
  source 1..20: mol_type = other DNA
aaaaaaactaatgctaaacg

SEQ ID NO: 45374 - DNA, 20 bp, synthetic construct
  source 1..20: mol_type = other DNA
gaaaaaaactaatgctaaac

SEQ ID NO: 45375 - DNA, 20 bp, synthetic construct
  source 1..20: mol_type = other DNA
agaaaaaaactaatgctaaa

SEQ ID NO: 45376 - DNA, 20 bp, synthetic construct
  source 1..20: mol_type = other DNA
aagaaaaaaactaatgctaa

SEQ ID NO: 45377 - DNA, 20 bp, synthetic construct
  source 1..20: mol_type = other DNA
gaagaaaaaaactaatgcta

SEQ ID NO: 45378 - DNA, 20 bp, synthetic construct
  source 1..20: mol_type = other DNA
ggaagaaaaaaactaatgct

SEQ ID NO: 45379 - DNA, 20 bp, synthetic construct
  source 1..20: mol_type = other DNA
tggaagaaaaaaactaatgc

SEQ ID NO: 45380 - DNA, 20 bp, synthetic construct
  source 1..20: mol_type = other DNA
ctggaagaaaaaaactaatg

SEQ ID NO: 45381 - DNA, 20 bp, synthetic construct
  source 1..20: mol_type = other DNA
actggaagaaaaaaactaat

SEQ ID NO: 45382 - DNA, 20 bp, synthetic construct
  source 1..20: mol_type = other DNA
tactggaagaaaaaaactaa

SEQ ID NO: 45383 - DNA, 20 bp, synthetic construct
  source 1..20: mol_type = other DNA
ctactggaagaaaaaaacta

SEQ ID NO: 45384 - DNA, 20 bp, synthetic construct
  source 1..20: mol_type = other DNA
cctactggaagaaaaaaact

SEQ ID NO: 45385 - DNA, 20 bp, synthetic construct
  source 1..20: mol_type = other DNA
gcctactggaagaaaaaaac

SEQ ID NO: 45386 - DNA, 20 bp, synthetic construct
  source 1..20: mol_type = other DNA
agcctactggaagaaaaaaa

SEQ ID NO: 45387 - DNA, 20 bp, synthetic construct
  source 1..20: mol_type = other DNA
tagcctactggaagaaaaaa

SEQ ID NO: 45388 - DNA, 20 bp, synthetic construct
  source 1..20: mol_type = other DNA
atagcctactggaagaaaaa

SEQ ID NO: 45389 - DNA, 20 bp, synthetic construct
  source 1..20: mol_type = other DNA
aatagcctactggaagaaaa

SEQ ID NO: 45390 - DNA, 20 bp, synthetic construct
  source 1..20: mol_type = other DNA
aaatagcctactggaagaaa

SEQ ID NO: 45391 - DNA, 20 bp, synthetic construct
  source 1..20: mol_type = other DNA
aaaatagcctactggaagaa

SEQ ID NO: 45392 - DNA, 20 bp, synthetic construct
  source 1..20: mol_type = other DNA
taaaatagcctactggaaga

SEQ ID NO: 45393 - DNA, 20 bp, synthetic construct
  source 1..20: mol_type = other DNA
gtaaaatagcctactggaag

SEQ ID NO: 45394 - DNA, 20 bp, synthetic construct
  source 1..20: mol_type = other DNA
agtaaaatagcctactggaa

SEQ ID NO: 45395 - DNA, 20 bp, synthetic construct
  source 1..20: mol_type = other DNA
aagtaaaatagcctactgga

SEQ ID NO: 45396 - DNA, 20 bp, synthetic construct
  source 1..20: mol_type = other DNA
aaagtaaaatagcctactgg

SEQ ID NO: 45397 - DNA, 20 bp, synthetic construct
  source 1..20: mol_type = other DNA
taaagtaaaatagcctactg

SEQ ID NO: 45398 - DNA, 20 bp, synthetic construct
  source 1..20: mol_type = other DNA
ataaagtaaaatagcctact

SEQ ID NO: 45399 - DNA, 20 bp, synthetic construct
  source 1..20: mol_type = other DNA
aataaagtaaaatagcctac

SEQ ID NO: 45400 - DNA, 20 bp, synthetic construct
  source 1..20: mol_type = other DNA
aaataaagtaaaatagccta

SEQ ID NO: 45401 - DNA, 20 bp, synthetic construct
  source 1..20: mol_type = other DNA
taaataaagtaaaatagcct

SEQ ID NO: 45402 - DNA, 20 bp, synthetic construct
  source 1..20: mol_type = other DNA
ataaataaagtaaaatagcc

SEQ ID NO: 45403 - DNA, 20 bp, synthetic construct
  source 1..20: mol_type = other DNA
aataaataaagtaaaatagc

SEQ ID NO: 45404 - DNA, 20 bp, synthetic construct
  source 1..20: mol_type = other DNA
aaataaataaagtaaaatag

SEQ ID NO: 45405 - DNA, 20 bp, synthetic construct
  source 1..20: mol_type = other DNA
caaataaataaagtaaaata

SEQ ID NO: 45406 - DNA, 20 bp, synthetic construct
  source 1..20: mol_type = other DNA
tcaaataaataaagtaaaat

SEQ ID NO: 45407 - DNA, 20 bp, synthetic construct
  source 1..20: mol_type = other DNA
atcaaataaataaagtaaaa

SEQ ID NO: 45408 - DNA, 20 bp, synthetic construct
  source 1..20: mol_type = other DNA
aatcaaataaataaagtaaa

SEQ ID NO: 45409 - DNA, 20 bp, synthetic construct
  source 1..20: mol_type = other DNA
aaatcaaataaataaagtaa

SEQ ID NO: 45410 - DNA, 20 bp, synthetic construct
  source 1..20: mol_type = other DNA
aaaatcaaataaataaagta

SEQ ID NO: 45411 - DNA, 20 bp, synthetic construct
  source 1..20: mol_type = other DNA
caaaatcaaataaataaagt

SEQ ID NO: 45412 - DNA, 20 bp, synthetic construct
  source 1..20: mol_type = other DNA
tcaaaatcaaataaataaag

SEQ ID NO: 45413 - DNA, 20 bp, synthetic construct
  source 1..20: mol_type = other DNA
atcaaaatcaaataaataaa

SEQ ID NO: 45414 - DNA, 20 bp, synthetic construct
  source 1..20: mol_type = other DNA
catcaaaatcaaataaataa

SEQ ID NO: 45415 - DNA, 20 bp, synthetic construct
  source 1..20: mol_type = other DNA
tcatcaaaatcaaataaata

SEQ ID NO: 45416 - DNA, 20 bp, synthetic construct
  source 1..20: mol_type = other DNA
ttcatcaaaatcaaataaat

SEQ ID NO: 45417 - DNA, 20 bp, synthetic construct
  source 1..20: mol_type = other DNA
cttcatcaaaatcaaataaa

SEQ ID NO: 45418 - DNA, 20 bp, synthetic construct
  source 1..20: mol_type = other DNA
acttcatcaaaatcaaataa

SEQ ID NO: 45419 - DNA, 20 bp, synthetic construct
  source 1..20: mol_type = other DNA
aacttcatcaaaatcaaata

SEQ ID NO: 45420 - DNA, 20 bp, synthetic construct
  source 1..20: mol_type = other DNA
aaacttcatcaaaatcaaat

SEQ ID NO: 45421 - DNA, 20 bp, synthetic construct
  source 1..20: mol_type = other DNA
caaacttcatcaaaatcaaa

SEQ ID NO: 45422 - DNA, 20 bp, synthetic construct
  source 1..20: mol_type = other DNA
tcaaacttcatcaaaatcaa

SEQ ID NO: 45423 - DNA, 20 bp, synthetic construct
  source 1..20: mol_type = other DNA
atcaaacttcatcaaaatca

SEQ ID NO: 45424 - DNA, 20 bp, synthetic construct
  source 1..20: mol_type = other DNA
aatcaaacttcatcaaaatc

SEQ ID NO: 45425 - DNA, 20 bp, synthetic construct
  source 1..20: mol_type = other DNA
taatcaaacttcatcaaaat

SEQ ID NO: 45426 - DNA, 20 bp, synthetic construct
  source 1..20: mol_type = other DNA
ataatcaaacttcatcaaaa

SEQ ID NO: 45427 - DNA, 20 bp, synthetic construct
  source 1..20: mol_type = other DNA
aataatcaaacttcatcaaa

SEQ ID NO: 45428 - DNA, 20 bp, synthetic construct
  source 1..20: mol_type = other DNA
aaataatcaaacttcatcaa

SEQ ID NO: 45429 - DNA, 20 bp, synthetic construct
  source 1..20: mol_type = other DNA
gaaataatcaaacttcatca

SEQ ID NO: 45430 - DNA, 20 bp, synthetic construct
  source 1..20: mol_type = other DNA
agaaataatcaaacttcatc

SEQ ID NO: 45431 - DNA, 20 bp, synthetic construct
  source 1..20: mol_type = other DNA
tagaaataatcaaacttcat

SEQ ID NO: 45432 - DNA, 20 bp, synthetic construct
  source 1..20: mol_type = other DNA
ctagaaataatcaaacttca

SEQ ID NO: 45433 - DNA, 20 bp, synthetic construct
  source 1..20: mol_type = other DNA
actagaaataatcaaacttc

SEQ ID NO: 45434 - DNA, 20 bp, synthetic construct
  source 1..20: mol_type = other DNA
aactagaaataatcaaactt

SEQ ID NO: 45435 - DNA, 20 bp, synthetic construct
  source 1..20: mol_type = other DNA
aaactagaaataatcaaact

SEQ ID NO: 45436 - DNA, 20 bp, synthetic construct
  source 1..20: mol_type = other DNA
caaactagaaataatcaaac

SEQ ID NO: 45437 - DNA, 20 bp, synthetic construct
  source 1..20: mol_type = other DNA
gcaaactagaaataatcaaa

SEQ ID NO: 45438 - DNA, 20 bp, synthetic construct
  source 1..20: mol_type = other DNA
agcaaactagaaataatcaa

SEQ ID NO: 45439 - DNA, 20 bp, synthetic construct
  source 1..20: mol_type = other DNA
aagcaaactagaaataatca

SEQ ID NO: 45440 - DNA, 20 bp, synthetic construct
  source 1..20: mol_type = other DNA
gaagcaaactagaaataatc

SEQ ID NO: 45441 - DNA, 20 bp, synthetic construct
  source 1..20: mol_type = other DNA
ggaagcaaactagaaataat

SEQ ID NO: 45442 - DNA, 20 bp, synthetic construct
  source 1..20: mol_type = other DNA
aggaagcaaactagaaataa

SEQ ID NO: 45443 - DNA, 20 bp, synthetic construct
  source 1..20: mol_type = other DNA
aaggaagcaaactagaaata

SEQ ID NO: 45444 - DNA, 20 bp, synthetic construct
  source 1..20: mol_type = other DNA
gaaggaagcaaactagaaat

SEQ ID NO: 45445 - DNA, 20 bp, synthetic construct
  source 1..20: mol_type = other DNA
agaaggaagcaaactagaaa

SEQ ID NO: 45446 - DNA, 20 bp, synthetic construct
  source 1..20: mol_type = other DNA
tagaaggaagcaaactagaa

SEQ ID NO: 45447 - DNA, 20 bp, synthetic construct
  source 1..20: mol_type = other DNA
atagaaggaagcaaactaga

SEQ ID NO: 45448 - DNA, 20 bp, synthetic construct
  source 1..20: mol_type = other DNA
catagaaggaagcaaactag

SEQ ID NO: 45449 - DNA, 20 bp, synthetic construct
  source 1..20: mol_type = other DNA
tcatagaaggaagcaaacta

SEQ ID NO: 45450 - DNA, 20 bp, synthetic construct
  source 1..20: mol_type = other DNA
gtcatagaaggaagcaaact

SEQ ID NO: 45451 - DNA, 20 bp, synthetic construct
  source 1..20: mol_type = other DNA
ggtcatagaaggaagcaaac

SEQ ID NO: 45452 - DNA, 20 bp, synthetic construct
  source 1..20: mol_type = other DNA
gggtcatagaaggaagcaaa

SEQ ID NO: 45453 - DNA, 20 bp, synthetic construct
  source 1..20: mol_type = other DNA
ggggtcatagaaggaagcaa

SEQ ID NO: 45454 - DNA, 20 bp, synthetic construct
  source 1..20: mol_type = other DNA
aggggtcatagaaggaagca

SEQ ID NO: 45455 - DNA, 20 bp, synthetic construct
  source 1..20: mol_type = other DNA
taggggtcatagaaggaagc

SEQ ID NO: 45456 - DNA, 20 bp, synthetic construct
  source 1..20: mol_type = other DNA
gtaggggtcatagaaggaag

SEQ ID NO: 45457 - DNA, 20 bp, synthetic construct
  source 1..20: mol_type = other DNA
ggtaggggtcatagaaggaa

SEQ ID NO: 45458 - DNA, 20 bp, synthetic construct
  source 1..20: mol_type = other DNA
aggtaggggtcatagaagga

SEQ ID NO: 45459 - DNA, 20 bp, synthetic construct
  source 1..20: mol_type = other DNA
caggtaggggtcatagaagg

SEQ ID NO: 45460 - DNA, 20 bp, synthetic construct
  source 1..20: mol_type = other DNA
acaggtaggggtcatagaag

SEQ ID NO: 45461 - DNA, 20 bp, synthetic construct
  source 1..20: mol_type = other DNA
aacaggtaggggtcatagaa

SEQ ID NO: 45462 - DNA, 20 bp, synthetic construct
  source 1..20: mol_type = other DNA
caacaggtaggggtcataga

SEQ ID NO: 45463 - DNA, 20 bp, synthetic construct
  source 1..20: mol_type = other DNA
acaacaggtaggggtcatag

SEQ ID NO: 45464 - DNA, 20 bp, synthetic construct
  source 1..20: mol_type = other DNA
cacaacaggtaggggtcata

SEQ ID NO: 45465 - DNA, 20 bp, synthetic construct
  source 1..20: mol_type = other DNA
ccacaacaggtaggggtcat

SEQ ID NO: 45466 - DNA, 20 bp, synthetic construct
  source 1..20: mol_type = other DNA
cccacaacaggtaggggtca

SEQ ID NO: 45467 - DNA, 20 bp, synthetic construct
  source 1..20: mol_type = other DNA
acccacaacaggtaggggtc

SEQ ID NO: 45468 - DNA, 20 bp, synthetic construct
  source 1..20: mol_type = other DNA
gacccacaacaggtaggggt

SEQ ID NO: 45469 - DNA, 20 bp, synthetic construct
  source 1..20: mol_type = other DNA
agacccacaacaggtagggg

SEQ ID NO: 45470 - DNA, 20 bp, synthetic construct
  source 1..20: mol_type = other DNA
gagacccacaacaggtaggg

SEQ ID NO: 45471 - DNA, 20 bp, synthetic construct
  source 1..20: mol_type = other DNA
ggagacccacaacaggtagg

SEQ ID NO: 45472 - DNA, 20 bp, synthetic construct
  source 1..20: mol_type = other DNA
tggagacccacaacaggtag

SEQ ID NO: 45473 - DNA, 20 bp, synthetic construct
  source 1..20: mol_type = other DNA
ctggagacccacaacaggta

SEQ ID NO: 45474 - DNA, 20 bp, synthetic construct
  source 1..20: mol_type = other DNA
cctggagacccacaacaggt

SEQ ID NO: 45475 - DNA, 20 bp, synthetic construct
  source 1..20: mol_type = other DNA
gcctggagacccacaacagg

SEQ ID NO: 45476 - DNA, 20 bp, synthetic construct
  source 1..20: mol_type = other DNA
tgcctggagacccacaacag

SEQ ID NO: 45477 - DNA, 20 bp, synthetic construct
  source 1..20: mol_type = other DNA
ttgcctggagacccacaaca

SEQ ID NO: 45478 - DNA, 20 bp, synthetic construct
  source 1..20: mol_type = other DNA
cttgcctggagacccacaac

SEQ ID NO: 45479 - DNA, 20 bp, synthetic construct
  source 1..20: mol_type = other DNA
gcttgcctggagacccacaa

SEQ ID NO: 45480 - DNA, 20 bp, synthetic construct
  source 1..20: mol_type = other DNA
tgcttgcctggagacccaca

SEQ ID NO: 45481 - DNA, 20 bp, synthetic construct
  source 1..20: mol_type = other DNA
ctgcttgcctggagacccac

SEQ ID NO: 45482 - DNA, 20 bp, synthetic construct
  source 1..20: mol_type = other DNA
actgcttgcctggagaccca

SEQ ID NO: 45483 - DNA, 20 bp, synthetic construct
  source 1..20: mol_type = other DNA
cactgcttgcctggagaccc

SEQ ID NO: 45484 - DNA, 20 bp, synthetic construct
  source 1..20: mol_type = other DNA
gcactgcttgcctggagacc

SEQ ID NO: 45485 - DNA, 20 bp, synthetic construct
  source 1..20: mol_type = other DNA
tgcactgcttgcctggagac

SEQ ID NO: 45486 - DNA, 20 bp, synthetic construct
  source 1..20: mol_type = other DNA
atgcactgcttgcctggaga

SEQ ID NO: 45487 - DNA, 20 bp, synthetic construct
  source 1..20: mol_type = other DNA
tatgcactgcttgcctggag

SEQ ID NO: 45488 - DNA, 20 bp, synthetic construct
  source 1..20: mol_type = other DNA
ctatgcactgcttgcctgga

SEQ ID NO: 45489 - DNA, 20 bp, synthetic construct
  source 1..20: mol_type = other DNA
cctatgcactgcttgcctgg

SEQ ID NO: 45490 - DNA, 20 bp, synthetic construct
  source 1..20: mol_type = other DNA
acctatgcactgcttgcctg

SEQ ID NO: 45491 - DNA, 20 bp, synthetic construct
  source 1..20: mol_type = other DNA
tacctatgcactgcttgcct

SEQ ID NO: 45492 - DNA, 20 bp, synthetic construct
  source 1..20: mol_type = other DNA
ctacctatgcactgcttgcc

SEQ ID NO: 45493 - DNA, 20 bp, synthetic construct
  source 1..20: mol_type = other DNA
tctacctatgcactgcttgc

SEQ ID NO: 45494 - DNA, 20 bp, synthetic construct
  source 1..20: mol_type = other DNA
ctctacctatgcactgcttg

SEQ ID NO: 45495 - DNA, 20 bp, synthetic construct
  source 1..20: mol_type = other DNA
gctctacctatgcactgctt

SEQ ID NO: 45496 - DNA, 20 bp, synthetic construct
  source 1..20: mol_type = other DNA
ggctctacctatgcactgct

SEQ ID NO: 45497 - DNA, 20 bp, synthetic construct
  source 1..20: mol_type = other DNA
tggctctacctatgcactgc

SEQ ID NO: 45498 - DNA, 20 bp, synthetic construct
  source 1..20: mol_type = other DNA
atggctctacctatgcactg

SEQ ID NO: 45499 - DNA, 20 bp, synthetic construct
  source 1..20: mol_type = other DNA
gatggctctacctatgcact

SEQ ID NO: 45500 - DNA, 20 bp, synthetic construct
  source 1..20: mol_type = other DNA
ggatggctctacctatgcac

SEQ ID NO: 45501 - DNA, 20 bp, synthetic construct
  source 1..20: mol_type = other DNA
aggatggctctacctatgca

SEQ ID NO: 45502 - DNA, 20 bp, synthetic construct
  source 1..20: mol_type = other DNA
aaggatggctctacctatgc

SEQ ID NO: 45503 - DNA, 20 bp, synthetic construct
  source 1..20: mol_type = other DNA
taaggatggctctacctatg

SEQ ID NO: 45504 - DNA, 20 bp, synthetic construct
  source 1..20: mol_type = other DNA
ctaaggatggctctacctat

SEQ ID NO: 45505 - DNA, 20 bp, synthetic construct
  source 1..20: mol_type = other DNA
cctaaggatggctctaccta

SEQ ID NO: 45506 - DNA, 20 bp, synthetic construct
  source 1..20: mol_type = other DNA
acctaaggatggctctacct

SEQ ID NO: 45507 - DNA, 20 bp, synthetic construct
  source 1..20: mol_type = other DNA
tacctaaggatggctctacc

SEQ ID NO: 45508 - DNA, 20 bp, synthetic construct
  source 1..20: mol_type = other DNA
ctacctaaggatggctctac

SEQ ID NO: 45509 - DNA, 20 bp, synthetic construct
  source 1..20: mol_type = other DNA
gctacctaaggatggctcta

SEQ ID NO: 45510 - DNA, 20 bp, synthetic construct
  source 1..20: mol_type = other DNA
ggctacctaaggatggctct

SEQ ID NO: 45511 - DNA, 20 bp, synthetic construct
  source 1..20: mol_type = other DNA
aggctacctaaggatggctc

SEQ ID NO: 45512 - DNA, 20 bp, synthetic construct
  source 1..20: mol_type = other DNA
aaggctacctaaggatggct

SEQ ID NO: 45513 - DNA, 20 bp, synthetic construct
  source 1..20: mol_type = other DNA
aaaggctacctaaggatggc

SEQ ID NO: 45514 - DNA, 20 bp, synthetic construct
  source 1..20: mol_type = other DNA
taaaggctacctaaggatgg

SEQ ID NO: 45515 - DNA, 20 bp, synthetic construct
  source 1..20: mol_type = other DNA
ctaaaggctacctaaggatg

SEQ ID NO: 45516 - DNA, 20 bp, synthetic construct
  source 1..20: mol_type = other DNA
tctaaaggctacctaaggat

SEQ ID NO: 45517 - DNA, 20 bp, synthetic construct
  source 1..20: mol_type = other DNA
gtctaaaggctacctaagga

SEQ ID NO: 45518 - DNA, 20 bp, synthetic construct
  source 1..20: mol_type = other DNA
agtctaaaggctacctaagg

SEQ ID NO: 45519 - DNA, 20 bp, synthetic construct
  source 1..20: mol_type = other DNA
aagtctaaaggctacctaag

SEQ ID NO: 45520 - DNA, 20 bp, synthetic construct
  source 1..20: mol_type = other DNA
taagtctaaaggctacctaa

SEQ ID NO: 45521 - DNA, 20 bp, synthetic construct
  source 1..20: mol_type = other DNA
ttaagtctaaaggctaccta

SEQ ID NO: 45522 - DNA, 20 bp, synthetic construct
  source 1..20: mol_type = other DNA
attaagtctaaaggctacct

SEQ ID NO: 45523 - DNA, 20 bp, synthetic construct
  source 1..20: mol_type = other DNA
tattaagtctaaaggctacc

SEQ ID NO: 45524 - DNA, 20 bp, synthetic construct
  source 1..20: mol_type = other DNA
atattaagtctaaaggctac

SEQ ID NO: 45525 - DNA, 20 bp, synthetic construct
  source 1..20: mol_type = other DNA
aatattaagtctaaaggcta

SEQ ID NO: 45526 - DNA, 20 bp, synthetic construct
  source 1..20: mol_type = other DNA
taatattaagtctaaaggct

SEQ ID NO: 45527 - DNA, 20 bp, synthetic construct
  source 1..20: mol_type = other DNA
ctaatattaagtctaaaggc

SEQ ID NO: 45528 - DNA, 20 bp, synthetic construct
  source 1..20: mol_type = other DNA
cctaatattaagtctaaagg

SEQ ID NO: 45529 - DNA, 20 bp, synthetic construct
  source 1..20: mol_type = other DNA
acctaatattaagtctaaag

SEQ ID NO: 45530 - DNA, 20 bp, synthetic construct
  source 1..20: mol_type = other DNA
cacctaatattaagtctaaa

SEQ ID NO: 45531 - DNA, 20 bp, synthetic construct
  source 1..20: mol_type = other DNA
tcacctaatattaagtctaa

SEQ ID NO: 45532 - DNA, 20 bp, synthetic construct
  source 1..20: mol_type = other DNA
ctcacctaatattaagtcta

SEQ ID NO: 45533 - DNA, 20 bp, synthetic construct
  source 1..20: mol_type = other DNA
gctcacctaatattaagtct

SEQ ID NO: 45534 - DNA, 20 bp, synthetic construct
  source 1..20: mol_type = other DNA
agctcacctaatattaagtc

SEQ ID NO: 45535 - DNA, 20 bp, synthetic construct
  source 1..20: mol_type = other DNA
gagctcacctaatattaagt

SEQ ID NO: 45536 - DNA, 20 bp, synthetic construct
  source 1..20: mol_type = other DNA
agagctcacctaatattaag

SEQ ID NO: 45537 - DNA, 20 bp, synthetic construct
  source 1..20: mol_type = other DNA
gagagctcacctaatattaa

SEQ ID NO: 45538 - DNA, 20 bp, synthetic construct
  source 1..20: mol_type = other DNA
ggagagctcacctaatatta

SEQ ID NO: 45539 - DNA, 20 bp, synthetic construct
  source 1..20: mol_type = other DNA
gggagagctcacctaatatt

SEQ ID NO: 45540 - DNA, 20 bp, synthetic construct
  source 1..20: mol_type = other DNA
ggggagagctcacctaatat

SEQ ID NO: 45541 - DNA, 20 bp, synthetic construct
  source 1..20: mol_type = other DNA
tggggagagctcacctaata

SEQ ID NO: 45542 - DNA, 20 bp, synthetic construct
  source 1..20: mol_type = other DNA
gtggggagagctcacctaat

SEQ ID NO: 45543 - DNA, 20 bp, synthetic construct
  source 1..20: mol_type = other DNA
tgtggggagagctcacctaa

SEQ ID NO: 45544 - DNA, 20 bp, synthetic construct
  source 1..20: mol_type = other DNA
ctgtggggagagctcaccta

SEQ ID NO: 45545 - DNA, 20 bp, synthetic construct
  source 1..20: mol_type = other DNA
tctgtggggagagctcacct

SEQ ID NO: 45546 - DNA, 20 bp, synthetic construct
  source 1..20: mol_type = other DNA
atctgtggggagagctcacc

SEQ ID NO: 45547 - DNA, 20 bp, synthetic construct
  source 1..20: mol_type = other DNA
tatctgtggggagagctcac

SEQ ID NO: 45548 - DNA, 20 bp, synthetic construct
  source 1..20: mol_type = other DNA
ctatctgtggggagagctca

SEQ ID NO: 45549 - DNA, 20 bp, synthetic construct
  source 1..20: mol_type = other DNA
gctatctgtggggagagctc

SEQ ID NO: 45550 - DNA, 20 bp, synthetic construct
  source 1..20: mol_type = other DNA
ggctatctgtggggagagct

SEQ ID NO: 45551 - DNA, 20 bp, synthetic construct
  source 1..20: mol_type = other DNA
aggctatctgtggggagagc

SEQ ID NO: 45552 - DNA, 20 bp, synthetic construct
  source 1..20: mol_type = other DNA
gaggctatctgtggggagag

SEQ ID NO: 45553 - DNA, 20 bp, synthetic construct
  source 1..20: mol_type = other DNA
agaggctatctgtggggaga

SEQ ID NO: 45554 - DNA, 20 bp, synthetic construct
  source 1..20: mol_type = other DNA
gagaggctatctgtggggag

SEQ ID NO: 45555 - DNA, 20 bp, synthetic construct
  source 1..20: mol_type = other DNA
ggagaggctatctgtgggga

SEQ ID NO: 45556 - DNA, 20 bp, synthetic construct
  source 1..20: mol_type = other DNA
aggagaggctatctgtgggg

SEQ ID NO: 45557 - DNA, 20 bp, synthetic construct
  source 1..20: mol_type = other DNA
aaggagaggctatctgtggg

SEQ ID NO: 45558 - DNA, 20 bp, synthetic construct
  source 1..20: mol_type = other DNA
aaaggagaggctatctgtgg

SEQ ID NO: 45559 - DNA, 20 bp, synthetic construct
  source 1..20: mol_type = other DNA
taaaggagaggctatctgtg

SEQ ID NO: 45560 - DNA, 20 bp, synthetic construct
  source 1..20: mol_type = other DNA
ataaaggagaggctatctgt

SEQ ID NO: 45561 - DNA, 20 bp, synthetic construct
  source 1..20: mol_type = other DNA
aataaaggagaggctatctg

SEQ ID NO: 45562 - DNA, 20 bp, synthetic construct
  source 1..20: mol_type = other DNA
aaataaaggagaggctatct

SEQ ID NO: 45563 - DNA, 20 bp, synthetic construct
  source 1..20: mol_type = other DNA
caaataaaggagaggctatc

SEQ ID NO: 45564 - DNA, 20 bp, synthetic construct
  source 1..20: mol_type = other DNA
tcaaataaaggagaggctat

SEQ ID NO: 45565 - DNA, 20 bp, synthetic construct
  source 1..20: mol_type = other DNA
ttcaaataaaggagaggcta

SEQ ID NO: 45566 - DNA, 20 bp, synthetic construct
  source 1..20: mol_type = other DNA
attcaaataaaggagaggct

SEQ ID NO: 45567 - DNA, 20 bp, synthetic construct
  source 1..20: mol_type = other DNA
cattcaaataaaggagaggc

SEQ ID NO: 45568 - DNA, 20 bp, synthetic construct
  source 1..20: mol_type = other DNA
ccattcaaataaaggagagg

SEQ ID NO: 45569 - DNA, 20 bp, synthetic construct
  source 1..20: mol_type = other DNA
tccattcaaataaaggagag

SEQ ID NO: 45570 - DNA, 20 bp, synthetic construct
  source 1..20: mol_type = other DNA
ttccattcaaataaaggaga

SEQ ID NO: 45571 - DNA, 20 bp, synthetic construct
  source 1..20: mol_type = other DNA
attccattcaaataaaggag

SEQ ID NO: 45572 - DNA, 20 bp, synthetic construct
  source 1..20: mol_type = other DNA
aattccattcaaataaagga

SEQ ID NO: 45573 - DNA, 20 bp, synthetic construct
  source 1..20: mol_type = other DNA
taattccattcaaataaagg

SEQ ID NO: 45574 - DNA, 20 bp, synthetic construct
  source 1..20: mol_type = other DNA
ataattccattcaaataaag

SEQ ID NO: 45575 - DNA, 20 bp, synthetic construct
  source 1..20: mol_type = other DNA
tataattccattcaaataaa

SEQ ID NO: 45576 - DNA, 20 bp, synthetic construct
  source 1..20: mol_type = other DNA
atataattccattcaaataa

SEQ ID NO: 45577 - DNA, 20 bp, synthetic construct
  source 1..20: mol_type = other DNA
aatataattccattcaaata

SEQ ID NO: 45578 - DNA, 20 bp, synthetic construct
  source 1..20: mol_type = other DNA
aaatataattccattcaaat

SEQ ID NO: 45579 - DNA, 20 bp, synthetic construct
  source 1..20: mol_type = other DNA
aaaatataattccattcaaa

SEQ ID NO: 45580 - DNA, 20 bp, synthetic construct
  source 1..20: mol_type = other DNA
taaaatataattccattcaa

SEQ ID NO: 45581 - DNA, 20 bp, synthetic construct
  source 1..20: mol_type = other DNA
ttaaaatataattccattca

SEQ ID NO: 45582 - DNA, 20 bp, synthetic construct
  source 1..20: mol_type = other DNA
cttaaaatataattccattc

SEQ ID NO: 45583 - DNA, 20 bp, synthetic construct
  source 1..20: mol_type = other DNA
acttaaaatataattccatt

SEQ ID NO: 45584 - DNA, 20 bp, synthetic construct
  source 1..20: mol_type = other DNA
aacttaaaatataattccat

SEQ ID NO: 45585 - DNA, 20 bp, synthetic construct
  source 1..20: mol_type = other DNA
aaacttaaaatataattcca

SEQ ID NO: 45586 - DNA, 20 bp, synthetic construct
  source 1..20: mol_type = other DNA
caaacttaaaatataattcc

SEQ ID NO: 45587 - DNA, 20 bp, synthetic construct
  source 1..20: mol_type = other DNA
ccaaacttaaaatataattc

SEQ ID NO: 45588 - DNA, 20 bp, synthetic construct
  source 1..20: mol_type = other DNA
tccaaacttaaaatataatt

SEQ ID NO: 45589 - DNA, 20 bp, synthetic construct
  source 1..20: mol_type = other DNA
ttccaaacttaaaatataat

SEQ ID NO: 45590 - DNA, 20 bp, synthetic construct
  source 1..20: mol_type = other DNA
tttccaaacttaaaatataa

SEQ ID NO: 45591 - DNA, 20 bp, synthetic construct
  source 1..20: mol_type = other DNA
atttccaaacttaaaatata

SEQ ID NO: 45592 - DNA, 20 bp, synthetic construct
  source 1..20: mol_type = other DNA
tatttccaaacttaaaatat

SEQ ID NO: 45593 - DNA, 20 bp, synthetic construct
  source 1..20: mol_type = other DNA
atatttccaaacttaaaata

SEQ ID NO: 45594 - DNA, 20 bp, synthetic construct
  source 1..20: mol_type = other DNA
aatatttccaaacttaaaat

SEQ ID NO: 45595 - DNA, 20 bp, synthetic construct
  source 1..20: mol_type = other DNA
aaatatttccaaacttaaaa

SEQ ID NO: 45596 - DNA, 20 bp, synthetic construct
  source 1..20: mol_type = other DNA
aaaatatttccaaacttaaa

SEQ ID NO: 45597 - DNA, 20 bp, synthetic construct
  source 1..20: mol_type = other DNA
aaaaatatttccaaacttaa

SEQ ID NO: 45598 - DNA, 20 bp, synthetic construct
  source 1..20: mol_type = other DNA
gaaaaatatttccaaactta

SEQ ID NO: 45599 - DNA, 20 bp, synthetic construct
  source 1..20: mol_type = other DNA
tgaaaaatatttccaaactt

SEQ ID NO: 45600 - DNA, 20 bp, synthetic construct
  source 1..20: mol_type = other DNA
ctgaaaaatatttccaaact

SEQ ID NO: 45601 - DNA, 20 bp, synthetic construct
  source 1..20: mol_type = other DNA
gctgaaaaatatttccaaac

SEQ ID NO: 45602 - DNA, 20 bp, synthetic construct
  source 1..20: mol_type = other DNA
agctgaaaaatatttccaaa

SEQ ID NO: 45603 - DNA, 20 bp, synthetic construct
  source 1..20: mol_type = other DNA
aagctgaaaaatatttccaa

SEQ ID NO: 45604 - DNA, 20 bp, synthetic construct
  source 1..20: mol_type = other DNA
taagctgaaaaatatttcca

SEQ ID NO: 45605 - DNA, 20 bp, synthetic construct
  source 1..20: mol_type = other DNA
ataagctgaaaaatatttcc

SEQ ID NO: 45606 - DNA, 20 bp, synthetic construct
  source 1..20: mol_type = other DNA
aataagctgaaaaatatttc

SEQ ID NO: 45607 - DNA, 20 bp, synthetic construct
  source 1..20: mol_type = other DNA
aaataagctgaaaaatattt

SEQ ID NO: 45608 - DNA, 20 bp, synthetic construct
  source 1..20: mol_type = other DNA
taaataagctgaaaaatatt

SEQ ID NO: 45609 - DNA, 20 bp, synthetic construct
  source 1..20: mol_type = other DNA
ctaaataagctgaaaaatat

SEQ ID NO: 45610 - DNA, 20 bp, synthetic construct
  source 1..20: mol_type = other DNA
gctaaataagctgaaaaata

SEQ ID NO: 45611 - DNA, 20 bp, synthetic construct
  source 1..20: mol_type = other DNA
ggctaaataagctgaaaaat

SEQ ID NO: 45612 - DNA, 20 bp, synthetic construct
  source 1..20: mol_type = other DNA
aggctaaataagctgaaaaa

SEQ ID NO: 45613 - DNA, 20 bp, synthetic construct
  source 1..20: mol_type = other DNA
caggctaaataagctgaaaa

SEQ ID NO: 45614 - DNA, 20 bp, synthetic construct
  source 1..20: mol_type = other DNA
acaggctaaataagctgaaa

SEQ ID NO: 45615 - DNA, 20 bp, synthetic construct
  source 1..20: mol_type = other DNA
aacaggctaaataagctgaa

SEQ ID NO: 45616 - DNA, 20 bp, synthetic construct
  source 1..20: mol_type = other DNA
caacaggctaaataagctga

SEQ ID NO: 45617 - DNA, 20 bp, synthetic construct
  source 1..20: mol_type = other DNA
tcaacaggctaaataagctg

SEQ ID NO: 45618 - DNA, 20 bp, synthetic construct
  source 1..20: mol_type = other DNA
ttcaacaggctaaataagct

SEQ ID NO: 45619 - DNA, 20 bp, synthetic construct
  source 1..20: mol_type = other DNA
attcaacaggctaaataagc

SEQ ID NO: 45620 - DNA, 20 bp, synthetic construct
  source 1..20: mol_type = other DNA
aattcaacaggctaaataag

SEQ ID NO: 45621 - DNA, 20 bp, synthetic construct
  source 1..20: mol_type = other DNA
aaattcaacaggctaaataa

SEQ ID NO: 45622 - DNA, 20 bp, synthetic construct
  source 1..20: mol_type = other DNA
taaattcaacaggctaaata

SEQ ID NO: 45623 - DNA, 20 bp, synthetic construct
  source 1..20: mol_type = other DNA
ttaaattcaacaggctaaat

SEQ ID NO: 45624 - DNA, 20 bp, synthetic construct
  source 1..20: mol_type = other DNA
attaaattcaacaggctaaa

SEQ ID NO: 45625 - DNA, 20 bp, synthetic construct
  source 1..20: mol_type = other DNA
tattaaattcaacaggctaa

SEQ ID NO: 45626 - DNA, 20 bp, synthetic construct
  source 1..20: mol_type = other DNA
ttattaaattcaacaggcta

SEQ ID NO: 45627 - DNA, 20 bp, synthetic construct
  source 1..20: mol_type = other DNA
tttattaaattcaacaggct

SEQ ID NO: 45628 - DNA, 20 bp, synthetic construct
  source 1..20: mol_type = other DNA
ttttattaaattcaacaggc

SEQ ID NO: 45629 - DNA, 20 bp, synthetic construct
  source 1..20: mol_type = other DNA
tttttattaaattcaacagg

SEQ ID NO: 45630 - DNA, 20 bp, synthetic construct
  source 1..20: mol_type = other DNA
atttttattaaattcaacag

SEQ ID NO: 45631 - DNA, 20 bp, synthetic construct
  source 1..20: mol_type = other DNA
tatttttattaaattcaaca

SEQ ID NO: 45632 - DNA, 20 bp, synthetic construct
  source 1..20: mol_type = other DNA
ttatttttattaaattcaac

SEQ ID NO: 45633 - DNA, 20 bp, synthetic construct
  source 1..20: mol_type = other DNA
attatttttattaaattcaa

SEQ ID NO: 45634 - DNA, 20 bp, synthetic construct
  source 1..20: mol_type = other DNA
tattatttttattaaattca

SEQ ID NO: 45635 - DNA, 20 bp, synthetic construct
  source 1..20: mol_type = other DNA
atattatttttattaaattc

SEQ ID NO: 45636 - DNA, 20 bp, synthetic construct
  source 1..20: mol_type = other DNA
aatattatttttattaaatt

SEQ ID NO: 45637 - DNA, 20 bp, synthetic construct
  source 1..20: mol_type = other DNA
aaatattatttttattaaat

SEQ ID NO: 45638 - DNA, 20 bp, synthetic construct
  source 1..20: mol_type = other DNA
taaatattatttttattaaa

SEQ ID NO: 45639 - DNA, 20 bp, synthetic construct
  source 1..20: mol_type = other DNA
ttaaatattatttttattaa

SEQ ID NO: 45640 - DNA, 20 bp, synthetic construct
  source 1..20: mol_type = other DNA
attaaatattatttttatta

SEQ ID NO: 45641 - DNA, 20 bp, synthetic construct
  source 1..20: mol_type = other DNA
gattaaatattatttttatt

SEQ ID NO: 45642 - DNA, 20 bp, synthetic construct
  source 1..20: mol_type = other DNA
agattaaatattatttttat

SEQ ID NO: 45643 - DNA, 20 bp, synthetic construct
  source 1..20: mol_type = other DNA
aagattaaatattattttta

SEQ ID NO: 45644 - DNA, 20 bp, synthetic construct
  source 1..20: mol_type = other DNA
aaagattaaatattattttt

SEQ ID NO: 45645 - DNA, 20 bp, synthetic construct
  source 1..20: mol_type = other DNA
aaaagattaaatattatttt

SEQ ID NO: 45646 - DNA, 20 bp, synthetic construct
  source 1..20: mol_type = other DNA
gaaaagattaaatattattt

SEQ ID NO: 45647 - DNA, 20 bp, synthetic construct
  source 1..20: mol_type = other DNA
tgaaaagattaaatattatt

SEQ ID NO: 45648 - DNA, 20 bp, synthetic construct
  source 1..20: mol_type = other DNA
ctgaaaagattaaatattat

SEQ ID NO: 45649 - DNA, 20 bp, synthetic construct
  source 1..20: mol_type = other DNA
tctgaaaagattaaatatta

SEQ ID NO: 45650 - DNA, 20 bp, synthetic construct
  source 1..20: mol_type = other DNA
ctctgaaaagattaaatatt

SEQ ID NO: 45651 - DNA, 20 bp, synthetic construct
  source 1..20: mol_type = other DNA
cctctgaaaagattaaatat

SEQ ID NO: 45652 - DNA, 20 bp, synthetic construct
  source 1..20: mol_type = other DNA
acctctgaaaagattaaata

SEQ ID NO: 45653 - DNA, 20 bp, synthetic construct
  source 1..20: mol_type = other DNA
gacctctgaaaagattaaat

SEQ ID NO: 45654 - DNA, 20 bp, synthetic construct
  source 1..20: mol_type = other DNA
cgacctctgaaaagattaaa

SEQ ID NO: 45655 - DNA, 20 bp, synthetic construct
  source 1..20: mol_type = other DNA
tcgacctctgaaaagattaa

SEQ ID NO: 45656 - DNA, 20 bp, synthetic construct
  source 1..20: mol_type = other DNA
ttcgacctctgaaaagatta

SEQ ID NO: 45657 - DNA, 20 bp, synthetic construct
  source 1..20: mol_type = other DNA
tttcgacctctgaaaagatt

SEQ ID NO: 45658 - DNA, 20 bp, synthetic construct
  source 1..20: mol_type = other DNA
gtttcgacctctgaaaagat

SEQ ID NO: 45659 - DNA, 20 bp, synthetic construct
  source 1..20: mol_type = other DNA
tgtttcgacctctgaaaaga

SEQ ID NO: 45660 - DNA, 20 bp, synthetic construct
  source 1..20: mol_type = other DNA
ctgtttcgacctctgaaaag

SEQ ID NO: 45661 - DNA, 20 bp, synthetic construct
  source 1..20: mol_type = other DNA
actgtttcgacctctgaaaa

SEQ ID NO: 45662 - DNA, 20 bp, synthetic construct
  source 1..20: mol_type = other DNA
tactgtttcgacctctgaaa

SEQ ID NO: 45663 - DNA, 20 bp, synthetic construct
  source 1..20: mol_type = other DNA
ttactgtttcgacctctgaa

SEQ ID NO: 45664 - DNA, 20 bp, synthetic construct
  source 1..20: mol_type = other DNA
gttactgtttcgacctctga

SEQ ID NO: 45665 - DNA, 20 bp, synthetic construct
  source 1..20: mol_type = other DNA
tgttactgtttcgacctctg

SEQ ID NO: 45666 - DNA, 20 bp, synthetic construct
  source 1..20: mol_type = other DNA
ttgttactgtttcgacctct

SEQ ID NO: 45667 - DNA, 20 bp, synthetic construct
  source 1..20: mol_type = other DNA
tttgttactgtttcgacctc

SEQ ID NO: 45668 - DNA, 20 bp, synthetic construct
  source 1..20: mol_type = other DNA
ctttgttactgtttcgacct

SEQ ID NO: 45669 - DNA, 20 bp, synthetic construct
  source 1..20: mol_type = other DNA
cctttgttactgtttcgacc

SEQ ID NO: 45670 - DNA, 20 bp, synthetic construct
  source 1..20: mol_type = other DNA
tcctttgttactgtttcgac

SEQ ID NO: 45671 - DNA, 20 bp, synthetic construct
  source 1..20: mol_type = other DNA
gtcctttgttactgtttcga

SEQ ID NO: 45672 - DNA, 20 bp, synthetic construct
  source 1..20: mol_type = other DNA
agtcctttgttactgtttcg

SEQ ID NO: 45673 - DNA, 20 bp, synthetic construct
  source 1..20: mol_type = other DNA
cagtcctttgttactgtttc

SEQ ID NO: 45674 - DNA, 20 bp, synthetic construct
  source 1..20: mol_type = other DNA
gcagtcctttgttactgttt

SEQ ID NO: 45675 - DNA, 20 bp, synthetic construct
  source 1..20: mol_type = other DNA
ggcagtcctttgttactgtt

SEQ ID NO: 45676 - DNA, 20 bp, synthetic construct
  source 1..20: mol_type = other DNA
aggcagtcctttgttactgt

SEQ ID NO: 45677 - DNA, 20 bp, synthetic construct
  source 1..20: mol_type = other DNA
gaggcagtcctttgttactg

SEQ ID NO: 45678 - DNA, 20 bp, synthetic construct
  source 1..20: mol_type = other DNA
tgaggcagtcctttgttact

SEQ ID NO: 45679 - DNA, 20 bp, synthetic construct
  source 1..20: mol_type = other DNA
ctgaggcagtcctttgttac

SEQ ID NO: 45680 - DNA, 20 bp, synthetic construct
  source 1..20: mol_type = other DNA
actgaggcagtcctttgtta

SEQ ID NO: 45681 - DNA, 20 bp, synthetic construct
  source 1..20: mol_type = other DNA
gactgaggcagtcctttgtt

SEQ ID NO: 45682 - DNA, 20 bp, synthetic construct
  source 1..20: mol_type = other DNA
agactgaggcagtcctttgt

SEQ ID NO: 45683 - DNA, 20 bp, synthetic construct
  source 1..20: mol_type = other DNA
tagactgaggcagtcctttg

SEQ ID NO: 45684 - DNA, 20 bp, synthetic construct
  source 1..20: mol_type = other DNA
gtagactgaggcagtccttt

SEQ ID NO: 45685 - DNA, 20 bp, synthetic construct
  source 1..20: mol_type = other DNA
cgtagactgaggcagtcctt

SEQ ID NO: 45686 - DNA, 20 bp, synthetic construct
  source 1..20: mol_type = other DNA
ccgtagactgaggcagtcct

SEQ ID NO: 45687 - DNA, 20 bp, synthetic construct
  source 1..20: mol_type = other DNA
accgtagactgaggcagtcc

SEQ ID NO: 45688 - DNA, 20 bp, synthetic construct
  source 1..20: mol_type = other DNA
caccgtagactgaggcagtc

SEQ ID NO: 45689 - DNA, 20 bp, synthetic construct
  source 1..20: mol_type = other DNA
tcaccgtagactgaggcagt

SEQ ID NO: 45690 - DNA, 20 bp, synthetic construct
  source 1..20: mol_type = other DNA
ctcaccgtagactgaggcag

SEQ ID NO: 45691 - DNA, 20 bp, synthetic construct
  source 1..20: mol_type = other DNA
actcaccgtagactgaggca

SEQ ID NO: 45692 - DNA, 20 bp, synthetic construct
  source 1..20: mol_type = other DNA
tactcaccgtagactgaggc

SEQ ID NO: 45693 - DNA, 20 bp, synthetic construct
  source 1..20: mol_type = other DNA
ttactcaccgtagactgagg

SEQ ID NO: 45694 - DNA, 20 bp, synthetic construct
  source 1..20: mol_type = other DNA
gttactcaccgtagactgag

SEQ ID NO: 45695 - DNA, 20 bp, synthetic construct
  source 1..20: mol_type = other DNA
agttactcaccgtagactga

SEQ ID NO: 45696 - DNA, 20 bp, synthetic construct
  source 1..20: mol_type = other DNA
aagttactcaccgtagactg

SEQ ID NO: 45697 - DNA, 20 bp, synthetic construct
  source 1..20: mol_type = other DNA
aaagttactcaccgtagact

SEQ ID NO: 45698 - DNA, 20 bp, synthetic construct
  source 1..20: mol_type = other DNA
taaagttactcaccgtagac

SEQ ID NO: 45699 - DNA, 20 bp, synthetic construct
  source 1..20: mol_type = other DNA
ttaaagttactcaccgtaga

SEQ ID NO: 45700 - DNA, 20 bp, synthetic construct
  source 1..20: mol_type = other DNA
attaaagttactcaccgtag

SEQ ID NO: 45701 - DNA, 20 bp, synthetic construct
  source 1..20: mol_type = other DNA
cattaaagttactcaccgta

SEQ ID NO: 45702 - DNA, 20 bp, synthetic construct
  source 1..20: mol_type = other DNA
acattaaagttactcaccgt

SEQ ID NO: 45703 - DNA, 20 bp, synthetic construct
  source 1..20: mol_type = other DNA
aacattaaagttactcaccg

SEQ ID NO: 45704 - DNA, 20 bp, synthetic construct
  source 1..20: mol_type = other DNA
taacattaaagttactcacc

SEQ ID NO: 45705 - DNA, 20 bp, synthetic construct
  source 1..20: mol_type = other DNA
gtaacattaaagttactcac

SEQ ID NO: 45706 - DNA, 20 bp, synthetic construct
  source 1..20: mol_type = other DNA
agtaacattaaagttactca

SEQ ID NO: 45707 - DNA, 20 bp, synthetic construct
  source 1..20: mol_type = other DNA
aagtaacattaaagttactc

SEQ ID NO: 45708 - DNA, 20 bp, synthetic construct
  source 1..20: mol_type = other DNA
taagtaacattaaagttact

SEQ ID NO: 45709 - DNA, 20 bp, synthetic construct
  source 1..20: mol_type = other DNA
ataagtaacattaaagttac

SEQ ID NO: 45710 - DNA, 20 bp, synthetic construct
  source 1..20: mol_type = other DNA
aataagtaacattaaagtta

SEQ ID NO: 45711 - DNA, 20 bp, synthetic construct
  source 1..20: mol_type = other DNA
caataagtaacattaaagtt

SEQ ID NO: 45712 - DNA, 20 bp, synthetic construct
  source 1..20: mol_type = other DNA
ccaataagtaacattaaagt

SEQ ID NO: 45713 - DNA, 20 bp, synthetic construct
  source 1..20: mol_type = other DNA
cccaataagtaacattaaag

SEQ ID NO: 45714 - DNA, 20 bp, synthetic construct
  source 1..20: mol_type = other DNA
ccccaataagtaacattaaa

SEQ ID NO: 45715 - DNA, 20 bp, synthetic construct
  source 1..20: mol_type = other DNA
tccccaataagtaacattaa

SEQ ID NO: 45716 - DNA, 20 bp, synthetic construct
  source 1..20: mol_type = other DNA
ttccccaataagtaacatta

SEQ ID NO: 45717 - DNA, 20 bp, synthetic construct
  source 1..20: mol_type = other DNA
tttccccaataagtaacatt

SEQ ID NO: 45718 - DNA, 20 bp, synthetic construct
  source 1..20: mol_type = other DNA
ttttccccaataagtaacat

SEQ ID NO: 45719 - DNA, 20 bp, synthetic construct
  source 1..20: mol_type = other DNA
attttccccaataagtaaca

SEQ ID NO: 45720 - DNA, 20 bp, synthetic construct
  source 1..20: mol_type = other DNA
aattttccccaataagtaac

SEQ ID NO: 45721 - DNA, 20 bp, synthetic construct
  source 1..20: mol_type = other DNA
taattttccccaataagtaa

SEQ ID NO: 45722 - DNA, 20 bp, synthetic construct
  source 1..20: mol_type = other DNA
ctaattttccccaataagta

SEQ ID NO: 45723 - DNA, 20 bp, synthetic construct
  source 1..20: mol_type = other DNA
actaattttccccaataagt

SEQ ID NO: 45724 - DNA, 20 bp, synthetic construct
  source 1..20: mol_type = other DNA
tactaattttccccaataag

SEQ ID NO: 45725 - DNA, 20 bp, synthetic construct
  source 1..20: mol_type = other DNA
ctactaattttccccaataa

SEQ ID NO: 45726 - DNA, 20 bp, synthetic construct
  source 1..20: mol_type = other DNA
gctactaattttccccaata

SEQ ID NO: 45727 - DNA, 20 bp, synthetic construct
  source 1..20: mol_type = other DNA
agctactaattttccccaat

SEQ ID NO: 45728 - DNA, 20 bp, synthetic construct
  source 1..20: mol_type = other DNA
tagctactaattttccccaa

SEQ ID NO: 45729 - DNA, 20 bp, synthetic construct
  source 1..20: mol_type = other DNA
ttagctactaattttcccca

SEQ ID NO: 45730 - DNA, 20 bp, synthetic construct
  source 1..20: mol_type = other DNA
tttagctactaattttcccc

SEQ ID NO: 45731 - DNA, 20 bp, synthetic construct
  source 1..20: mol_type = other DNA
ttttagctactaattttccc

SEQ ID NO: 45732 - DNA, 20 bp, synthetic construct
  source 1..20: mol_type = other DNA
gttttagctactaattttcc

SEQ ID NO: 45733 - DNA, 20 bp, synthetic construct
  source 1..20: mol_type = other DNA
tgttttagctactaattttc

SEQ ID NO: 45734 - DNA, 20 bp, synthetic construct
  source 1..20: mol_type = other DNA
atgttttagctactaatttt

SEQ ID NO: 45735 - DNA, 20 bp, synthetic construct
  source 1..20: mol_type = other DNA
catgttttagctactaattt

SEQ ID NO: 45736 - DNA, 20 bp, synthetic construct
  source 1..20: mol_type = other DNA
tcatgttttagctactaatt

SEQ ID NO: 45737 - DNA, 20 bp, synthetic construct
  source 1..20: mol_type = other DNA
atcatgttttagctactaat

SEQ ID NO: 45738 - DNA, 20 bp, synthetic construct
  source 1..20: mol_type = other DNA
gatcatgttttagctactaa

SEQ ID NO: 45739 - DNA, 20 bp, synthetic construct
  source 1..20: mol_type = other DNA
agatcatgttttagctacta

SEQ ID NO: 45740 - DNA, 20 bp, synthetic construct
  source 1..20: mol_type = other DNA
gagatcatgttttagctact

SEQ ID NO: 45741 - DNA, 20 bp, synthetic construct
  source 1..20: mol_type = other DNA
agagatcatgttttagctac

SEQ ID NO: 45742 - DNA, 20 bp, synthetic construct
  source 1..20: mol_type = other DNA
tagagatcatgttttagcta

SEQ ID NO: 45743 - DNA, 20 bp, synthetic construct
  source 1..20: mol_type = other DNA
ttagagatcatgttttagct

SEQ ID NO: 45744 - DNA, 20 bp, synthetic construct
  source 1..20: mol_type = other DNA
gttagagatcatgttttagc

SEQ ID NO: 45745 - DNA, 20 bp, synthetic construct
  source 1..20: mol_type = other DNA
ggttagagatcatgttttag

SEQ ID NO: 45746 - DNA, 20 bp, synthetic construct
  source 1..20: mol_type = other DNA
tggttagagatcatgtttta

SEQ ID NO: 45747 - DNA, 20 bp, synthetic construct
  source 1..20: mol_type = other DNA
gtggttagagatcatgtttt

SEQ ID NO: 45748 - DNA, 20 bp, synthetic construct
  source 1..20: mol_type = other DNA
tgtggttagagatcatgttt

SEQ ID NO: 45749 - DNA, 20 bp, synthetic construct
  source 1..20: mol_type = other DNA
ctgtggttagagatcatgtt

SEQ ID NO: 45750 - DNA, 20 bp, synthetic construct
  source 1..20: mol_type = other DNA
tctgtggttagagatcatgt

SEQ ID NO: 45751 - DNA, 20 bp, synthetic construct
  source 1..20: mol_type = other DNA
gtctgtggttagagatcatg

SEQ ID NO: 45752 - DNA, 20 bp, synthetic construct
  source 1..20: mol_type = other DNA
ggtctgtggttagagatcat

SEQ ID NO: 45753 - DNA, 20 bp, synthetic construct
  source 1..20: mol_type = other DNA
tggtctgtggttagagatca

SEQ ID NO: 45754 - DNA, 20 bp, synthetic construct
  source 1..20: mol_type = other DNA
ttggtctgtggttagagatc

SEQ ID NO: 45755 - DNA, 20 bp, synthetic construct
  source 1..20: mol_type = other DNA
tttggtctgtggttagagat

SEQ ID NO: 45756 - DNA, 20 bp, synthetic construct
  source 1..20: mol_type = other DNA
atttggtctgtggttagaga

SEQ ID NO: 45757 - DNA, 20 bp, synthetic construct
  source 1..20: mol_type = other DNA
catttggtctgtggttagag

SEQ ID NO: 45758 - DNA, 20 bp, synthetic construct
  source 1..20: mol_type = other DNA
gcatttggtctgtggttaga

SEQ ID NO: 45759 - DNA, 20 bp, synthetic construct
  source 1..20: mol_type = other DNA
ggcatttggtctgtggttag

SEQ ID NO: 45760 - DNA, 20 bp, synthetic construct
  source 1..20: mol_type = other DNA
tggcatttggtctgtggtta

SEQ ID NO: 45761 - DNA, 20 bp, synthetic construct
  source 1..20: mol_type = other DNA
ttggcatttggtctgtggtt

SEQ ID NO: 45762 - DNA, 20 bp, synthetic construct
  source 1..20: mol_type = other DNA
cttggcatttggtctgtggt

SEQ ID NO: 45763 - DNA, 20 bp, synthetic construct
  source 1..20: mol_type = other DNA
ccttggcatttggtctgtgg

SEQ ID NO: 45764 - DNA, 20 bp, synthetic construct
  source 1..20: mol_type = other DNA
gccttggcatttggtctgtg

SEQ ID NO: 45765 - DNA, 20 bp, synthetic construct
  source 1..20: mol_type = other DNA
tgccttggcatttggtctgt

SEQ ID NO: 45766 - DNA, 20 bp, synthetic construct
  source 1..20: mol_type = other DNA
ttgccttggcatttggtctg

SEQ ID NO: 45767 - DNA, 20 bp, synthetic construct
  source 1..20: mol_type = other DNA
tttgccttggcatttggtct

SEQ ID NO: 45768 - DNA, 20 bp, synthetic construct
  source 1..20: mol_type = other DNA
ttttgccttggcatttggtc

SEQ ID NO: 45769 - DNA, 20 bp, synthetic construct
  source 1..20: mol_type = other DNA
cttttgccttggcatttggt

SEQ ID NO: 45770 - DNA, 20 bp, synthetic construct
  source 1..20: mol_type = other DNA
tcttttgccttggcatttgg

SEQ ID NO: 45771 - DNA, 20 bp, synthetic construct
  source 1..20: mol_type = other DNA
atcttttgccttggcatttg

SEQ ID NO: 45772 - DNA, 20 bp, synthetic construct
  source 1..20: mol_type = other DNA
aatcttttgccttggcattt

SEQ ID NO: 45773 - DNA, 20 bp, synthetic construct
  source 1..20: mol_type = other DNA
gaatcttttgccttggcatt

SEQ ID NO: 45774 - DNA, 20 bp, synthetic construct
  source 1..20: mol_type = other DNA
ggaatcttttgccttggcat

SEQ ID NO: 45775 - DNA, 20 bp, synthetic construct
  source 1..20: mol_type = other DNA
gggaatcttttgccttggca

SEQ ID NO: 45776 - DNA, 20 bp, synthetic construct
  source 1..20: mol_type = other DNA
agggaatcttttgccttggc

SEQ ID NO: 45777 - DNA, 20 bp, synthetic construct
  source 1..20: mol_type = other DNA
aagggaatcttttgccttgg

SEQ ID NO: 45778 - DNA, 20 bp, synthetic construct
  source 1..20: mol_type = other DNA
gaagggaatcttttgccttg

SEQ ID NO: 45779 - DNA, 20 bp, synthetic construct
  source 1..20: mol_type = other DNA
agaagggaatcttttgcctt

SEQ ID NO: 45780 - DNA, 20 bp, synthetic construct
  source 1..20: mol_type = other DNA
aagaagggaatcttttgcct

SEQ ID NO: 45781 - DNA, 20 bp, synthetic construct
  source 1..20: mol_type = other DNA
aaagaagggaatcttttgcc

SEQ ID NO: 45782 - DNA, 20 bp, synthetic construct
  source 1..20: mol_type = other DNA
aaaagaagggaatcttttgc

SEQ ID NO: 45783 - DNA, 20 bp, synthetic construct
  source 1..20: mol_type = other DNA
caaaagaagggaatcttttg

SEQ ID NO: 45784 - DNA, 20 bp, synthetic construct
  source 1..20: mol_type = other DNA
tcaaaagaagggaatctttt

SEQ ID NO: 45785 - DNA, 20 bp, synthetic construct
  source 1..20: mol_type = other DNA
ttcaaaagaagggaatcttt

SEQ ID NO: 45786 - DNA, 20 bp, synthetic construct
  source 1..20: mol_type = other DNA
attcaaaagaagggaatctt

SEQ ID NO: 45787 - DNA, 20 bp, synthetic construct
  source 1..20: mol_type = other DNA
aattcaaaagaagggaatct

SEQ ID NO: 45788 - DNA, 20 bp, synthetic construct
  source 1..20: mol_type = other DNA
aaattcaaaagaagggaatc

SEQ ID NO: 45789 - DNA, 20 bp, synthetic construct
  source 1..20: mol_type = other DNA
aaaattcaaaagaagggaat

SEQ ID NO: 45790 - DNA, 20 bp, synthetic construct
  source 1..20: mol_type = other DNA
caaaattcaaaagaagggaa

SEQ ID NO: 45791 - DNA, 20 bp, synthetic construct
  source 1..20: mol_type = other DNA
acaaaattcaaaagaaggga

SEQ ID NO: 45792 - DNA, 20 bp, synthetic construct
  source 1..20: mol_type = other DNA
gacaaaattcaaaagaaggg

SEQ ID NO: 45793 - DNA, 20 bp, synthetic construct
  source 1..20: mol_type = other DNA
tgacaaaattcaaaagaagg

SEQ ID NO: 45794 - DNA, 20 bp, synthetic construct
  source 1..20: mol_type = other DNA
atgacaaaattcaaaagaag

SEQ ID NO: 45795 - DNA, 20 bp, synthetic construct
  source 1..20: mol_type = other DNA
tatgacaaaattcaaaagaa

SEQ ID NO: 45796 - DNA, 20 bp, synthetic construct
  source 1..20: mol_type = other DNA
ctatgacaaaattcaaaaga

SEQ ID NO: 45797 - DNA, 20 bp, synthetic construct
  source 1..20: mol_type = other DNA
tctatgacaaaattcaaaag

SEQ ID NO: 45798 - DNA, 20 bp, synthetic construct
  source 1..20: mol_type = other DNA
atctatgacaaaattcaaaa

SEQ ID NO: 45799 - DNA, 20 bp, synthetic construct
  source 1..20: mol_type = other DNA
tatctatgacaaaattcaaa

SEQ ID NO: 45800 - DNA, 20 bp, synthetic construct
  source 1..20: mol_type = other DNA
ttatctatgacaaaattcaa

SEQ ID NO: 45801 - DNA, 20 bp, synthetic construct
  source 1..20: mol_type = other DNA
gttatctatgacaaaattca

SEQ ID NO: 45802 - DNA, 20 bp, synthetic construct
  source 1..20: mol_type = other DNA
agttatctatgacaaaattc

SEQ ID NO: 45803 - DNA, 20 bp, synthetic construct
  source 1..20: mol_type = other DNA
aagttatctatgacaaaatt

SEQ ID NO: 45804 - DNA, 20 bp, synthetic construct
  source 1..20: mol_type = other DNA
caagttatctatgacaaaat

SEQ ID NO: 45805 - DNA, 20 bp, synthetic construct
  source 1..20: mol_type = other DNA
tcaagttatctatgacaaaa

SEQ ID NO: 45806 - DNA, 20 bp, synthetic construct
  source 1..20: mol_type = other DNA
gtcaagttatctatgacaaa

SEQ ID NO: 45807 - DNA, 20 bp, synthetic construct
  source 1..20: mol_type = other DNA
agtcaagttatctatgacaa

SEQ ID NO: 45808 - DNA, 20 bp, synthetic construct
  source 1..20: mol_type = other DNA
cagtcaagttatctatgaca

SEQ ID NO: 45809 - DNA, 20 bp, synthetic construct
  source 1..20: mol_type = other DNA
acagtcaagttatctatgac

SEQ ID NO: 45810 - DNA, 20 bp, synthetic construct
  source 1..20: mol_type = other DNA
aacagtcaagttatctatga

SEQ ID NO: 45811 - DNA, 20 bp, synthetic construct
  source 1..20: mol_type = other DNA
aaacagtcaagttatctatg

SEQ ID NO: 45812 - DNA, 20 bp, synthetic construct
  source 1..20: mol_type = other DNA
taaacagtcaagttatctat

SEQ ID NO: 45813 - DNA, 20 bp, synthetic construct
  source 1..20: mol_type = other DNA
ttaaacagtcaagttatcta

SEQ ID NO: 45814 - DNA, 20 bp, synthetic construct
  source 1..20: mol_type = other DNA
cttaaacagtcaagttatct

SEQ ID NO: 45815 - DNA, 20 bp, synthetic construct
  source 1..20: mol_type = other DNA
acttaaacagtcaagttatc

SEQ ID NO: 45816 - DNA, 20 bp, synthetic construct
  source 1..20: mol_type = other DNA
tacttaaacagtcaagttat

SEQ ID NO: 45817 - DNA, 20 bp, synthetic construct
  source 1..20: mol_type = other DNA
atacttaaacagtcaagtta

SEQ ID NO: 45818 - DNA, 20 bp, synthetic construct
  source 1..20: mol_type = other DNA
catacttaaacagtcaagtt

SEQ ID NO: 45819 - DNA, 20 bp, synthetic construct
  source 1..20: mol_type = other DNA
acatacttaaacagtcaagt

SEQ ID NO: 45820 - DNA, 20 bp, synthetic construct
  source 1..20: mol_type = other DNA
aacatacttaaacagtcaag

SEQ ID NO: 45821 - DNA, 20 bp, synthetic construct
  source 1..20: mol_type = other DNA
taacatacttaaacagtcaa

SEQ ID NO: 45822 - DNA, 20 bp, synthetic construct
  source 1..20: mol_type = other DNA
ataacatacttaaacagtca

SEQ ID NO: 45823 - DNA, 20 bp, synthetic construct
  source 1..20: mol_type = other DNA
aataacatacttaaacagtc

SEQ ID NO: 45824 - DNA, 20 bp, synthetic construct
  source 1..20: mol_type = other DNA
taataacatacttaaacagt

SEQ ID NO: 45825 - DNA, 20 bp, synthetic construct
  source 1..20: mol_type = other DNA
ctaataacatacttaaacag

SEQ ID NO: 45826 - DNA, 20 bp, synthetic construct
  source 1..20: mol_type = other DNA
gctaataacatacttaaaca

SEQ ID NO: 45827 - DNA, 20 bp, synthetic construct
  source 1..20: mol_type = other DNA
ggctaataacatacttaaac

SEQ ID NO: 45828 - DNA, 20 bp, synthetic construct
  source 1..20: mol_type = other DNA
aggctaataacatacttaaa

SEQ ID NO: 45829 - DNA, 20 bp, synthetic construct
  source 1..20: mol_type = other DNA
taggctaataacatacttaa

SEQ ID NO: 45830 - DNA, 20 bp, synthetic construct
  source 1..20: mol_type = other DNA
ataggctaataacatactta

SEQ ID NO: 45831 - DNA, 20 bp, synthetic construct
  source 1..20: mol_type = other DNA
tataggctaataacatactt

SEQ ID NO: 45832 - DNA, 20 bp, synthetic construct
  source 1..20: mol_type = other DNA
atataggctaataacatact

SEQ ID NO: 45833 - DNA, 20 bp, synthetic construct
  source 1..20: mol_type = other DNA
catataggctaataacatac

SEQ ID NO: 45834 - DNA, 20 bp, synthetic construct
  source 1..20: mol_type = other DNA
acatataggctaataacata

SEQ ID NO: 45835 - DNA, 20 bp, synthetic construct
  source 1..20: mol_type = other DNA
cacatataggctaataacat

SEQ ID NO: 45836 - DNA, 20 bp, synthetic construct
  source 1..20: mol_type = other DNA
acacatataggctaataaca

SEQ ID NO: 45837 - DNA, 20 bp, synthetic construct
  source 1..20: mol_type = other DNA
aacacatataggctaataac

SEQ ID NO: 45838 - DNA, 20 bp, synthetic construct
  source 1..20: mol_type = other DNA
aaacacatataggctaataa

SEQ ID NO: 45839 - DNA, 20 bp, synthetic construct
  source 1..20: mol_type = other DNA
aaaacacatataggctaata

SEQ ID NO: 45840 - DNA, 20 bp, synthetic construct
  source 1..20: mol_type = other DNA
aaaaacacatataggctaat

SEQ ID NO: 45841 - DNA, 20 bp, synthetic construct
  source 1..20: mol_type = other DNA
aaaaaacacatataggctaa

SEQ ID NO: 45842 - DNA, 20 bp, synthetic construct
  source 1..20: mol_type = other DNA
aaaaaaacacatataggcta

SEQ ID NO: 45843 - DNA, 20 bp, synthetic construct
  source 1..20: mol_type = other DNA
taaaaaaacacatataggct

SEQ ID NO: 45844 - DNA, 20 bp, synthetic construct
  source 1..20: mol_type = other DNA
ttaaaaaaacacatataggc

SEQ ID NO: 45845 - DNA, 20 bp, synthetic construct
  source 1..20: mol_type = other DNA
attaaaaaaacacatatagg

SEQ ID NO: 45846 - DNA, 20 bp, synthetic construct
  source 1..20: mol_type = other DNA
cattaaaaaaacacatatag

SEQ ID NO: 45847 - DNA, 20 bp, synthetic construct
  source 1..20: mol_type = other DNA
tcattaaaaaaacacatata

SEQ ID NO: 45848 - DNA, 20 bp, synthetic construct
  source 1..20: mol_type = other DNA
gtcattaaaaaaacacatat

SEQ ID NO: 45849 - DNA, 20 bp, synthetic construct
  source 1..20: mol_type = other DNA
agtcattaaaaaaacacata

SEQ ID NO: 45850 - DNA, 20 bp, synthetic construct
  source 1..20: mol_type = other DNA
gagtcattaaaaaaacacat

SEQ ID NO: 45851 - DNA, 20 bp, synthetic construct
  source 1..20: mol_type = other DNA
agagtcattaaaaaaacaca

SEQ ID NO: 45852 - DNA, 20 bp, synthetic construct
  source 1..20: mol_type = other DNA
cagagtcattaaaaaaacac

SEQ ID NO: 45853 - DNA, 20 bp, synthetic construct
  source 1..20: mol_type = other DNA
acagagtcattaaaaaaaca

SEQ ID NO: 45854 - DNA, 20 bp, synthetic construct
  source 1..20: mol_type = other DNA
tacagagtcattaaaaaaac

SEQ ID NO: 45855 - DNA, 20 bp, synthetic construct
  source 1..20: mol_type = other DNA
atacagagtcattaaaaaaa

SEQ ID NO: 45856 - DNA, 20 bp, synthetic construct
  source 1..20: mol_type = other DNA
tatacagagtcattaaaaaa

SEQ ID NO: 45857 - DNA, 20 bp, synthetic construct
  source 1..20: mol_type = other DNA
ttatacagagtcattaaaaa

SEQ ID NO: 45858 - DNA, 20 bp, synthetic construct
  source 1..20: mol_type = other DNA
tttatacagagtcattaaaa

SEQ ID NO: 45859 - DNA, 20 bp, synthetic construct
  source 1..20: mol_type = other DNA
ttttatacagagtcattaaa

SEQ ID NO: 45860 - DNA, 20 bp, synthetic construct
  source 1..20: mol_type = other DNA
attttatacagagtcattaa

SEQ ID NO: 45861 - DNA, 20 bp, synthetic construct
  source 1..20: mol_type = other DNA
cattttatacagagtcatta

SEQ ID NO: 45862 - DNA, 20 bp, synthetic construct
  source 1..20: mol_type = other DNA
acattttatacagagtcatt

SEQ ID NO: 45863 - DNA, 20 bp, synthetic construct
  source 1..20: mol_type = other DNA
tacattttatacagagtcat

SEQ ID NO: 45864 - DNA, 20 bp, synthetic construct
  source 1..20: mol_type = other DNA
gtacattttatacagagtca

SEQ ID NO: 45865 - DNA, 20 bp, synthetic construct
  source 1..20: mol_type = other DNA
tgtacattttatacagagtc

SEQ ID NO: 45866 - DNA, 20 bp, synthetic construct
  source 1..20: mol_type = other DNA
ttgtacattttatacagagt

SEQ ID NO: 45867 - DNA, 20 bp, synthetic construct
  source 1..20: mol_type = other DNA
attgtacattttatacagag

SEQ ID NO: 45868 - DNA, 20 bp, synthetic construct
  source 1..20: mol_type = other DNA
aattgtacattttatacaga

SEQ ID NO: 45869 - DNA, 20 bp, synthetic construct
  source 1..20: mol_type = other DNA
taattgtacattttatacag

SEQ ID NO: 45870 - DNA, 20 bp, synthetic construct
  source 1..20: mol_type = other DNA
gtaattgtacattttataca

SEQ ID NO: 45871 - DNA, 20 bp, synthetic construct
  source 1..20: mol_type = other DNA
agtaattgtacattttatac

SEQ ID NO: 45872 - DNA, 20 bp, synthetic construct
  source 1..20: mol_type = other DNA
aagtaattgtacattttata

SEQ ID NO: 45873 - DNA, 20 bp, synthetic construct
  source 1..20: mol_type = other DNA
caagtaattgtacattttat

SEQ ID NO: 45874 - DNA, 20 bp, synthetic construct
  source 1..20: mol_type = other DNA
acaagtaattgtacatttta

SEQ ID NO: 45875 - DNA, 20 bp, synthetic construct
  source 1..20: mol_type = other DNA
aacaagtaattgtacatttt

SEQ ID NO: 45876 - DNA, 20 bp, synthetic construct
  source 1..20: mol_type = other DNA
caacaagtaattgtacattt

SEQ ID NO: 45877 - DNA, 20 bp, synthetic construct
  source 1..20: mol_type = other DNA
acaacaagtaattgtacatt

SEQ ID NO: 45878 - DNA, 20 bp, synthetic construct
  source 1..20: mol_type = other DNA
tacaacaagtaattgtacat

SEQ ID NO: 45879 - DNA, 20 bp, synthetic construct
  source 1..20: mol_type = other DNA
atacaacaagtaattgtaca

SEQ ID NO: 45880 - DNA, 20 bp, synthetic construct
  source 1..20: mol_type = other DNA
aatacaacaagtaattgtac

SEQ ID NO: 45881 - DNA, 20 bp, synthetic construct
  source 1..20: mol_type = other DNA
taatacaacaagtaattgta

SEQ ID NO: 45882 - DNA, 20 bp, synthetic construct
  source 1..20: mol_type = other DNA
ctaatacaacaagtaattgt

SEQ ID NO: 45883 - DNA, 20 bp, synthetic construct
  source 1..20: mol_type = other DNA
actaatacaacaagtaattg

SEQ ID NO: 45884 - DNA, 20 bp, synthetic construct
  source 1..20: mol_type = other DNA
gactaatacaacaagtaatt

SEQ ID NO: 45885 - DNA, 20 bp, synthetic construct
  source 1..20: mol_type = other DNA
ggactaatacaacaagtaat

SEQ ID NO: 45886 - DNA, 20 bp, synthetic construct
  source 1..20: mol_type = other DNA
tggactaatacaacaagtaa

SEQ ID NO: 45887 - DNA, 20 bp, synthetic construct
  source 1..20: mol_type = other DNA
atggactaatacaacaagta

SEQ ID NO: 45888 - DNA, 20 bp, synthetic construct
  source 1..20: mol_type = other DNA
aatggactaatacaacaagt

SEQ ID NO: 45889 - DNA, 20 bp, synthetic construct
  source 1..20: mol_type = other DNA
gaatggactaatacaacaag

SEQ ID NO: 45890 - DNA, 20 bp, synthetic construct
  source 1..20: mol_type = other DNA
agaatggactaatacaacaa

SEQ ID NO: 45891 - DNA, 20 bp, synthetic construct
  source 1..20: mol_type = other DNA
aagaatggactaatacaaca

SEQ ID NO: 45892 - DNA, 20 bp, synthetic construct
  source 1..20: mol_type = other DNA
taagaatggactaatacaac

SEQ ID NO: 45893 - DNA, 20 bp, synthetic construct
  source 1..20: mol_type = other DNA
gtaagaatggactaatacaa

SEQ ID NO: 45894 - DNA, 20 bp, synthetic construct
  source 1..20: mol_type = other DNA
tgtaagaatggactaataca

SEQ ID NO: 45895 - DNA, 20 bp, synthetic construct
  source 1..20: mol_type = other DNA
gtgtaagaatggactaatac

SEQ ID NO: 45896 - DNA, 20 bp, synthetic construct
  source 1..20: mol_type = other DNA
agtgtaagaatggactaata

SEQ ID NO: 45897 - DNA, 20 bp, synthetic construct
  source 1..20: mol_type = other DNA
cagtgtaagaatggactaat

SEQ ID NO: 45898 - DNA, 20 bp, synthetic construct
  source 1..20: mol_type = other DNA
gcagtgtaagaatggactaa

SEQ ID NO: 45899 - DNA, 20 bp, synthetic construct
  source 1..20: mol_type = other DNA
agcagtgtaagaatggacta

SEQ ID NO: 45900 - DNA, 20 bp, synthetic construct
  source 1..20: mol_type = other DNA
tagcagtgtaagaatggact

SEQ ID NO: 45901 - DNA, 20 bp, synthetic construct
  source 1..20: mol_type = other DNA
ttagcagtgtaagaatggac

SEQ ID NO: 45902 - DNA, 20 bp, synthetic construct
  source 1..20: mol_type = other DNA
attagcagtgtaagaatgga

SEQ ID NO: 45903 - DNA, 20 bp, synthetic construct
  source 1..20: mol_type = other DNA
tattagcagtgtaagaatgg

SEQ ID NO: 45904 - DNA, 20 bp, synthetic construct
  source 1..20: mol_type = other DNA
ttattagcagtgtaagaatg

SEQ ID NO: 45905 - DNA, 20 bp, synthetic construct
  source 1..20: mol_type = other DNA
tttattagcagtgtaagaat

SEQ ID NO: 45906 - DNA, 20 bp, synthetic construct
  source 1..20: mol_type = other DNA
ctttattagcagtgtaagaa

SEQ ID NO: 45907 - DNA, 20 bp, synthetic construct
  source 1..20: mol_type = other DNA
tctttattagcagtgtaaga

SEQ ID NO: 45908 - DNA, 20 bp, synthetic construct
  source 1..20: mol_type = other DNA
atctttattagcagtgtaag

SEQ ID NO: 45909 - DNA, 20 bp, synthetic construct
  source 1..20: mol_type = other DNA
tatctttattagcagtgtaa

SEQ ID NO: 45910 - DNA, 20 bp, synthetic construct
  source 1..20: mol_type = other DNA
atatctttattagcagtgta

SEQ ID NO: 45911 - DNA, 20 bp, synthetic construct
  source 1..20: mol_type = other DNA
tatatctttattagcagtgt

SEQ ID NO: 45912 - DNA, 20 bp, synthetic construct
  source 1..20: mol_type = other DNA
gtatatctttattagcagtg

SEQ ID NO: 45913 - DNA, 20 bp, synthetic construct
  source 1..20: mol_type = other DNA
ggtatatctttattagcagt

SEQ ID NO: 45914 - DNA, 20 bp, synthetic construct
  source 1..20: mol_type = other DNA
aggtatatctttattagcag

SEQ ID NO: 45915 - DNA, 20 bp, synthetic construct
  source 1..20: mol_type = other DNA
taggtatatctttattagca

SEQ ID NO: 45916 - DNA, 20 bp, synthetic construct
  source 1..20: mol_type = other DNA
ttaggtatatctttattagc

SEQ ID NO: 45917 - DNA, 20 bp, synthetic construct
  source 1..20: mol_type = other DNA
cttaggtatatctttattag

SEQ ID NO: 45918 - DNA, 20 bp, synthetic construct
  source 1..20: mol_type = other DNA
tcttaggtatatctttatta

SEQ ID NO: 45919 - DNA, 20 bp, synthetic construct
  source 1..20: mol_type = other DNA
gtcttaggtatatctttatt

SEQ ID NO: 45920 - DNA, 20 bp, synthetic construct
  source 1..20: mol_type = other DNA
agtcttaggtatatctttat

SEQ ID NO: 45921 - DNA, 20 bp, synthetic construct
  source 1..20: mol_type = other DNA
cagtcttaggtatatcttta

SEQ ID NO: 45922 - DNA, 20 bp, synthetic construct
  source 1..20: mol_type = other DNA
ccagtcttaggtatatcttt

SEQ ID NO: 45923 - DNA, 20 bp, synthetic construct
  source 1..20: mol_type = other DNA
cccagtcttaggtatatctt

SEQ ID NO: 45924 - DNA, 20 bp, synthetic construct
  source 1..20: mol_type = other DNA
acccagtcttaggtatatct

SEQ ID NO: 45925 - DNA, 20 bp, synthetic construct
  source 1..20: mol_type = other DNA
tacccagtcttaggtatatc

SEQ ID NO: 45926 - DNA, 20 bp, synthetic construct
  source 1..20: mol_type = other DNA
ttacccagtcttaggtatat

SEQ ID NO: 45927 - DNA, 20 bp, synthetic construct
  source 1..20: mol_type = other DNA
attacccagtcttaggtata

SEQ ID NO: 45928 - DNA, 20 bp, synthetic construct
  source 1..20: mol_type = other DNA
aattacccagtcttaggtat

SEQ ID NO: 45929 - DNA, 20 bp, synthetic construct
  source 1..20: mol_type = other DNA
aaattacccagtcttaggta

SEQ ID NO: 45930 - DNA, 20 bp, synthetic construct
  source 1..20: mol_type = other DNA
taaattacccagtcttaggt

SEQ ID NO: 45931 - DNA, 20 bp, synthetic construct
  source 1..20: mol_type = other DNA
ataaattacccagtcttagg

SEQ ID NO: 45932 - DNA, 20 bp, synthetic construct
  source 1..20: mol_type = other DNA
tataaattacccagtcttag

SEQ ID NO: 45933 - DNA, 20 bp, synthetic construct
  source 1..20: mol_type = other DNA
ttataaattacccagtctta

SEQ ID NO: 45934 - DNA, 20 bp, synthetic construct
  source 1..20: mol_type = other DNA
tttataaattacccagtctt

SEQ ID NO: 45935 - DNA, 20 bp, synthetic construct
  source 1..20: mol_type = other DNA
ctttataaattacccagtct

SEQ ID NO: 45936 - DNA, 20 bp, synthetic construct
  source 1..20: mol_type = other DNA
cctttataaattacccagtc

SEQ ID NO: 45937 - DNA, 20 bp, synthetic construct
  source 1..20: mol_type = other DNA
tcctttataaattacccagt

SEQ ID NO: 45938 - DNA, 20 bp, synthetic construct
  source 1..20: mol_type = other DNA
ttcctttataaattacccag

SEQ ID NO: 45939 - DNA, 20 bp, synthetic construct
  source 1..20: mol_type = other DNA
tttcctttataaattaccca

SEQ ID NO: 45940 - DNA, 20 bp, synthetic construct
  source 1..20: mol_type = other DNA
ctttcctttataaattaccc

SEQ ID NO: 45941 - DNA, 20 bp, synthetic construct
  source 1..20: mol_type = other DNA
tctttcctttataaattacc

SEQ ID NO: 45942 - DNA, 20 bp, synthetic construct
  source 1..20: mol_type = other DNA
ctctttcctttataaattac

SEQ ID NO: 45943 - DNA, 20 bp, synthetic construct
  source 1..20: mol_type = other DNA
cctctttcctttataaatta

SEQ ID NO: 45944 - DNA, 20 bp, synthetic construct
  source 1..20: mol_type = other DNA
acctctttcctttataaatt

SEQ ID NO: 45945 - DNA, 20 bp, synthetic construct
  source 1..20: mol_type = other DNA
aacctctttcctttataaat

SEQ ID NO: 45946 - DNA, 20 bp, synthetic construct
  source 1..20: mol_type = other DNA
aaacctctttcctttataaa

SEQ ID NO: 45947 - DNA, 20 bp, synthetic construct
  source 1..20: mol_type = other DNA
taaacctctttcctttataa

SEQ ID NO: 45948 - DNA, 20 bp, synthetic construct
  source 1..20: mol_type = other DNA
ttaaacctctttcctttata

SEQ ID NO: 45949 - DNA, 20 bp, synthetic construct
  source 1..20: mol_type = other DNA
attaaacctctttcctttat

SEQ ID NO: 45950 - DNA, 20 bp, synthetic construct
  source 1..20: mol_type = other DNA
aattaaacctctttccttta

SEQ ID NO: 45951 - DNA, 20 bp, synthetic construct
  source 1..20: mol_type = other DNA
caattaaacctctttccttt

SEQ ID NO: 45952 - DNA, 20 bp, synthetic construct
  source 1..20: mol_type = other DNA
tcaattaaacctctttcctt

SEQ ID NO: 45953 - DNA, 20 bp, synthetic construct
  source 1..20: mol_type = other DNA
gtcaattaaacctctttcct

SEQ ID NO: 45954 - DNA, 20 bp, synthetic construct
  source 1..20: mol_type = other DNA
agtcaattaaacctctttcc

SEQ ID NO: 45955 - DNA, 20 bp, synthetic construct
  source 1..20: mol_type = other DNA
gagtcaattaaacctctttc

SEQ ID NO: 45956 - DNA, 20 bp, synthetic construct
  source 1..20: mol_type = other DNA
tgagtcaattaaacctcttt

SEQ ID NO: 45957 - DNA, 20 bp, synthetic construct
  source 1..20: mol_type = other DNA
atgagtcaattaaacctctt

SEQ ID NO: 45958 - DNA, 20 bp, synthetic construct
  source 1..20: mol_type = other DNA
catgagtcaattaaacctct

SEQ ID NO: 45959 - DNA, 20 bp, synthetic construct
  source 1..20: mol_type = other DNA
gcatgagtcaattaaacctc

SEQ ID NO: 45960 - DNA, 20 bp, synthetic construct
  source 1..20: mol_type = other DNA
agcatgagtcaattaaacct

SEQ ID NO: 45961 - DNA, 20 bp, synthetic construct
  source 1..20: mol_type = other DNA
gagcatgagtcaattaaacc

SEQ ID NO: 45962 - DNA, 20 bp, synthetic construct
  source 1..20: mol_type = other DNA
agagcatgagtcaattaaac

SEQ ID NO: 45963 - DNA, 20 bp, synthetic construct
  source 1..20: mol_type = other DNA
cagagcatgagtcaattaaa

SEQ ID NO: 45964 - DNA, 20 bp, synthetic construct
  source 1..20: mol_type = other DNA
gcagagcatgagtcaattaa

SEQ ID NO: 45965 - DNA, 20 bp, synthetic construct
  source 1..20: mol_type = other DNA
tgcagagcatgagtcaatta

SEQ ID NO: 45966 - DNA, 20 bp, synthetic construct
  source 1..20: mol_type = other DNA
atgcagagcatgagtcaatt

SEQ ID NO: 45967 - DNA, 20 bp, synthetic construct
  source 1..20: mol_type = other DNA
aatgcagagcatgagtcaat

SEQ ID NO: 45968 - DNA, 20 bp, synthetic construct
  source 1..20: mol_type = other DNA
caatgcagagcatgagtcaa

SEQ ID NO: 45969 - DNA, 20 bp, synthetic construct
  source 1..20: mol_type = other DNA
gcaatgcagagcatgagtca

SEQ ID NO: 45970 - DNA, 20 bp, synthetic construct
  source 1..20: mol_type = other DNA
agcaatgcagagcatgagtc

SEQ ID NO: 45971 - DNA, 20 bp, synthetic construct
  source 1..20: mol_type = other DNA
cagcaatgcagagcatgagt

SEQ ID NO: 45972 - DNA, 20 bp, synthetic construct
  source 1..20: mol_type = other DNA
ccagcaatgcagagcatgag

SEQ ID NO: 45973 - DNA, 20 bp, synthetic construct
  source 1..20: mol_type = other DNA
cccagcaatgcagagcatga

SEQ ID NO: 45974 - DNA, 20 bp, synthetic construct
  source 1..20: mol_type = other DNA
ccccagcaatgcagagcatg

SEQ ID NO: 45975 - DNA, 20 bp, synthetic construct
  source 1..20: mol_type = other DNA
tccccagcaatgcagagcat

SEQ ID NO: 45976 - DNA, 20 bp, synthetic construct
  source 1..20: mol_type = other DNA
ctccccagcaatgcagagca

SEQ ID NO: 45977 - DNA, 20 bp, synthetic construct
  source 1..20: mol_type = other DNA
cctccccagcaatgcagagc

SEQ ID NO: 45978 - DNA, 20 bp, synthetic construct
  source 1..20: mol_type = other DNA
gcctccccagcaatgcagag

SEQ ID NO: 45979 - DNA, 20 bp, synthetic construct
  source 1..20: mol_type = other DNA
ggcctccccagcaatgcaga

SEQ ID NO: 45980 - DNA, 20 bp, synthetic construct
  source 1..20: mol_type = other DNA
aggcctccccagcaatgcag

SEQ ID NO: 45981 - DNA, 20 bp, synthetic construct
  source 1..20: mol_type = other DNA
gaggcctccccagcaatgca

SEQ ID NO: 45982 - DNA, 20 bp, synthetic construct
  source 1..20: mol_type = other DNA
tgaggcctccccagcaatgc

SEQ ID NO: 45983 - DNA, 20 bp, synthetic construct
  source 1..20: mol_type = other DNA
ctgaggcctccccagcaatg

SEQ ID NO: 45984 - DNA, 20 bp, synthetic construct
  source 1..20: mol_type = other DNA
cctgaggcctccccagcaat

SEQ ID NO: 45985 - DNA, 20 bp, synthetic construct
  source 1..20: mol_type = other DNA
tcctgaggcctccccagcaa

SEQ ID NO: 45986 - DNA, 20 bp, synthetic construct
  source 1..20: mol_type = other DNA
ttcctgaggcctccccagca

SEQ ID NO: 45987 - DNA, 20 bp, synthetic construct
  source 1..20: mol_type = other DNA
tttcctgaggcctccccagc

SEQ ID NO: 45988 - DNA, 20 bp, synthetic construct
  source 1..20: mol_type = other DNA
gtttcctgaggcctccccag

SEQ ID NO: 45989 - DNA, 20 bp, synthetic construct
  source 1..20: mol_type = other DNA
agtttcctgaggcctcccca

SEQ ID NO: 45990 - DNA, 20 bp, synthetic construct
  source 1..20: mol_type = other DNA
aagtttcctgaggcctcccc

SEQ ID NO: 45991 - DNA, 20 bp, synthetic construct
  source 1..20: mol_type = other DNA
taagtttcctgaggcctccc

SEQ ID NO: 45992 - DNA, 20 bp, synthetic construct
  source 1..20: mol_type = other DNA
gtaagtttcctgaggcctcc

SEQ ID NO: 45993 - DNA, 20 bp, synthetic construct
  source 1..20: mol_type = other DNA
tgtaagtttcctgaggcctc

SEQ ID NO: 45994 - DNA, 20 bp, synthetic construct
  source 1..20: mol_type = other DNA
ttgtaagtttcctgaggcct

SEQ ID NO: 45995 - DNA, 20 bp, synthetic construct
  source 1..20: mol_type = other DNA
attgtaagtttcctgaggcc

SEQ ID NO: 45996 - DNA, 20 bp, synthetic construct
  source 1..20: mol_type = other DNA
gattgtaagtttcctgaggc

SEQ ID NO: 45997 - DNA, 20 bp, synthetic construct
  source 1..20: mol_type = other DNA
tgattgtaagtttcctgagg

SEQ ID NO: 45998 - DNA, 20 bp, synthetic construct
  source 1..20: mol_type = other DNA
atgattgtaagtttcctgag

SEQ ID NO: 45999 - DNA, 20 bp, synthetic construct
  source 1..20: mol_type = other DNA
catgattgtaagtttcctga

SEQ ID NO: 46000 - DNA, 20 bp, synthetic construct
  source 1..20: mol_type = other DNA
ccatgattgtaagtttcctg

SEQ ID NO: 46001 - DNA, 20 bp, synthetic construct
  source 1..20: mol_type = other DNA
accatgattgtaagtttcct

SEQ ID NO: 46002 - DNA, 20 bp, synthetic construct
  source 1..20: mol_type = other DNA
caccatgattgtaagtttcc

SEQ ID NO: 46003 - DNA, 20 bp, synthetic construct
  source 1..20: mol_type = other DNA
ccaccatgattgtaagtttc

SEQ ID NO: 46004 - DNA, 20 bp, synthetic construct
  source 1..20: mol_type = other DNA
tccaccatgattgtaagttt

SEQ ID NO: 46005 - DNA, 20 bp, synthetic construct
  source 1..20: mol_type = other DNA
ttccaccatgattgtaagtt

SEQ ID NO: 46006 - DNA, 20 bp, synthetic construct
  source 1..20: mol_type = other DNA
cttccaccatgattgtaagt

SEQ ID NO: 46007 - DNA, 20 bp, synthetic construct
  source 1..20: mol_type = other DNA
ccttccaccatgattgtaag

SEQ ID NO: 46008 - DNA, 20 bp, synthetic construct
  source 1..20: mol_type = other DNA
cccttccaccatgattgtaa

SEQ ID NO: 46009 - DNA, 20 bp, synthetic construct
  source 1..20: mol_type = other DNA
ccccttccaccatgattgta

SEQ ID NO: 46010 - DNA, 20 bp, synthetic construct
  source 1..20: mol_type = other DNA
tccccttccaccatgattgt

SEQ ID NO: 46011 - DNA, 20 bp, synthetic construct
  source 1..20: mol_type = other DNA
ttccccttccaccatgattg

SEQ ID NO: 46012 - DNA, 20 bp, synthetic construct
  source 1..20: mol_type = other DNA
cttccccttccaccatgatt

SEQ ID NO: 46013 - DNA, 20 bp, synthetic construct
  source 1..20: mol_type = other DNA
gcttccccttccaccatgat

SEQ ID NO: 46014 - DNA, 20 bp, synthetic construct
  source 1..20: mol_type = other DNA
tgcttccccttccaccatga

SEQ ID NO: 46015 - DNA, 20 bp, synthetic construct
  source 1..20: mol_type = other DNA
ttgcttccccttccaccatg

SEQ ID NO: 46016 - DNA, 20 bp, synthetic construct
  source 1..20: mol_type = other DNA
tttgcttccccttccaccat

SEQ ID NO: 46017 - DNA, 20 bp, synthetic construct
  source 1..20: mol_type = other DNA
gtttgcttccccttccacca

SEQ ID NO: 46018 - DNA, 20 bp, synthetic construct
  source 1..20: mol_type = other DNA
tgtttgcttccccttccacc

SEQ ID NO: 46019 - DNA, 20 bp, synthetic construct
  source 1..20: mol_type = other DNA
gtgtttgcttccccttccac

SEQ ID NO: 46020 - DNA, 20 bp, synthetic construct
  source 1..20: mol_type = other DNA
tgtgtttgcttccccttcca

SEQ ID NO: 46021 - DNA, 20 bp, synthetic construct
  source 1..20: mol_type = other DNA
atgtgtttgcttccccttcc

SEQ ID NO: 46022 - DNA, 20 bp, synthetic construct
  source 1..20: mol_type = other DNA
gatgtgtttgcttccccttc

SEQ ID NO: 46023 - DNA, 20 bp, synthetic construct
  source 1..20: mol_type = other DNA
ggatgtgtttgcttcccctt

SEQ ID NO: 46024 - DNA, 20 bp, synthetic construct
  source 1..20: mol_type = other DNA
aggatgtgtttgcttcccct

SEQ ID NO: 46025 - DNA, 20 bp, synthetic construct
  source 1..20: mol_type = other DNA
aaggatgtgtttgcttcccc

SEQ ID NO: 46026 - DNA, 20 bp, synthetic construct
  source 1..20: mol_type = other DNA
gaaggatgtgtttgcttccc

SEQ ID NO: 46027 - DNA, 20 bp, synthetic construct
  source 1..20: mol_type = other DNA
agaaggatgtgtttgcttcc

SEQ ID NO: 46028 - DNA, 20 bp, synthetic construct
  source 1..20: mol_type = other DNA
aagaaggatgtgtttgcttc

SEQ ID NO: 46029 - DNA, 20 bp, synthetic construct
  source 1..20: mol_type = other DNA
gaagaaggatgtgtttgctt

SEQ ID NO: 46030 - DNA, 20 bp, synthetic construct
  source 1..20: mol_type = other DNA
tgaagaaggatgtgtttgct

SEQ ID NO: 46031 - DNA, 20 bp, synthetic construct
  source 1..20: mol_type = other DNA
gtgaagaaggatgtgtttgc

SEQ ID NO: 46032 - DNA, 20 bp, synthetic construct
  source 1..20: mol_type = other DNA
tgtgaagaaggatgtgtttg

SEQ ID NO: 46033 - DNA, 20 bp, synthetic construct
  source 1..20: mol_type = other DNA
atgtgaagaaggatgtgttt

SEQ ID NO: 46034 - DNA, 20 bp, synthetic construct
  source 1..20: mol_type = other DNA
tatgtgaagaaggatgtgtt

SEQ ID NO: 46035 - DNA, 20 bp, synthetic construct
  source 1..20: mol_type = other DNA
ctatgtgaagaaggatgtgt

SEQ ID NO: 46036 - DNA, 20 bp, synthetic construct
  source 1..20: mol_type = other DNA
gctatgtgaagaaggatgtg

SEQ ID NO: 46037 - DNA, 20 bp, synthetic construct
  source 1..20: mol_type = other DNA
cgctatgtgaagaaggatgt

SEQ ID NO: 46038 - DNA, 20 bp, synthetic construct
  source 1..20: mol_type = other DNA
tcgctatgtgaagaaggatg

SEQ ID NO: 46039 - DNA, 20 bp, synthetic construct
  source 1..20: mol_type = other DNA
gtcgctatgtgaagaaggat

SEQ ID NO: 46040 - DNA, 20 bp, synthetic construct
  source 1..20: mol_type = other DNA
tgtcgctatgtgaagaagga

SEQ ID NO: 46041 - DNA, 20 bp, synthetic construct
  source 1..20: mol_type = other DNA
ctgtcgctatgtgaagaagg

SEQ ID NO: 46042 - DNA, 20 bp, synthetic construct
  source 1..20: mol_type = other DNA
cctgtcgctatgtgaagaag

SEQ ID NO: 46043 - DNA, 20 bp, synthetic construct
  source 1..20: mol_type = other DNA
tcctgtcgctatgtgaagaa

SEQ ID NO: 46044 - DNA, 20 bp, synthetic construct
  source 1..20: mol_type = other DNA
ctcctgtcgctatgtgaaga

SEQ ID NO: 46045 - DNA, 20 bp, synthetic construct
  source 1..20: mol_type = other DNA
tctcctgtcgctatgtgaag

SEQ ID NO: 46046 - DNA, 20 bp, synthetic construct
  source 1..20: mol_type = other DNA
ctctcctgtcgctatgtgaa

SEQ ID NO: 46047 - DNA, 20 bp, synthetic construct
  source 1..20: mol_type = other DNA
tctctcctgtcgctatgtga

SEQ ID NO: 46048 - DNA, 20 bp, synthetic construct
  source 1..20: mol_type = other DNA
ctctctcctgtcgctatgtg

SEQ ID NO: 46049 - DNA, 20 bp, synthetic construct
  source 1..20: mol_type = other DNA
tctctctcctgtcgctatgt

SEQ ID NO: 46050 - DNA, 20 bp, synthetic construct
  source 1..20: mol_type = other DNA
ttctctctcctgtcgctatg

SEQ ID NO: 46051 - DNA, 20 bp, synthetic construct
  source 1..20: mol_type = other DNA
cttctctctcctgtcgctat

SEQ ID NO: 46052 - DNA, 20 bp, synthetic construct
  source 1..20: mol_type = other DNA
acttctctctcctgtcgcta

SEQ ID NO: 46053 - DNA, 20 bp, synthetic construct
  source 1..20: mol_type = other DNA
cacttctctctcctgtcgct

SEQ ID NO: 46054 - DNA, 20 bp, synthetic construct
  source 1..20: mol_type = other DNA
gcacttctctctcctgtcgc

SEQ ID NO: 46055 - DNA, 20 bp, synthetic construct
  source 1..20: mol_type = other DNA
agcacttctctctcctgtcg

SEQ ID NO: 46056 - DNA, 20 bp, synthetic construct
  source 1..20: mol_type = other DNA
cagcacttctctctcctgtc

SEQ ID NO: 46057 - DNA, 20 bp, synthetic construct
  source 1..20: mol_type = other DNA
tcagcacttctctctcctgt

SEQ ID NO: 46058 - DNA, 20 bp, synthetic construct
  source 1..20: mol_type = other DNA
ctcagcacttctctctcctg

SEQ ID NO: 46059 - DNA, 20 bp, synthetic construct
  source 1..20: mol_type = other DNA
gctcagcacttctctctcct

SEQ ID NO: 46060 - DNA, 20 bp, synthetic construct
  source 1..20: mol_type = other DNA
tgctcagcacttctctctcc

SEQ ID NO: 46061 - DNA, 20 bp, synthetic construct
  source 1..20: mol_type = other DNA
ttgctcagcacttctctctc

SEQ ID NO: 46062 - DNA, 20 bp, synthetic construct
  source 1..20: mol_type = other DNA
tttgctcagcacttctctct

SEQ ID NO: 46063 - DNA, 20 bp, synthetic construct
  source 1..20: mol_type = other DNA
ctttgctcagcacttctctc

SEQ ID NO: 46064 - DNA, 20 bp, synthetic construct
  source 1..20: mol_type = other DNA
gctttgctcagcacttctct

SEQ ID NO: 46065 - DNA, 20 bp, synthetic construct
  source 1..20: mol_type = other DNA
tgctttgctcagcacttctc

SEQ ID NO: 46066 - DNA, 20 bp, synthetic construct
  source 1..20: mol_type = other DNA
ctgctttgctcagcacttct

SEQ ID NO: 46067 - DNA, 20 bp, synthetic construct
  source 1..20: mol_type = other DNA
cctgctttgctcagcacttc

SEQ ID NO: 46068 - DNA, 20 bp, synthetic construct
  source 1..20: mol_type = other DNA
ccctgctttgctcagcactt

SEQ ID NO: 46069 - DNA, 20 bp, synthetic construct
  source 1..20: mol_type = other DNA
tccctgctttgctcagcact

SEQ ID NO: 46070 - DNA, 20 bp, synthetic construct
  source 1..20: mol_type = other DNA
ttccctgctttgctcagcac

SEQ ID NO: 46071 - DNA, 20 bp, synthetic construct
  source 1..20: mol_type = other DNA
tttccctgctttgctcagca

SEQ ID NO: 46072 - DNA, 20 bp, synthetic construct
  source 1..20: mol_type = other DNA
ctttccctgctttgctcagc

SEQ ID NO: 46073 - DNA, 20 bp, synthetic construct
  source 1..20: mol_type = other DNA
gctttccctgctttgctcag

SEQ ID NO: 46074 - DNA, 20 bp, synthetic construct
  source 1..20: mol_type = other DNA
ggctttccctgctttgctca

SEQ ID NO: 46075 - DNA, 20 bp, synthetic construct
  source 1..20: mol_type = other DNA
gggctttccctgctttgctc

SEQ ID NO: 46076 - DNA, 20 bp, synthetic construct
  source 1..20: mol_type = other DNA
ggggctttccctgctttgct

SEQ ID NO: 46077 - DNA, 20 bp, synthetic construct
  source 1..20: mol_type = other DNA
aggggctttccctgctttgc

SEQ ID NO: 46078 - DNA, 20 bp, synthetic construct
  source 1..20: mol_type = other DNA
aaggggctttccctgctttg

SEQ ID NO: 46079 - DNA, 20 bp, synthetic construct
  source 1..20: mol_type = other DNA
taaggggctttccctgcttt

SEQ ID NO: 46080 - DNA, 20 bp, synthetic construct
  source 1..20: mol_type = other DNA
ataaggggctttccctgctt

SEQ ID NO: 46081 - DNA, 20 bp, synthetic construct
  source 1..20: mol_type = other DNA
tataaggggctttccctgct

SEQ ID NO: 46082 - DNA, 20 bp, synthetic construct
  source 1..20: mol_type = other DNA
ttataaggggctttccctgc

SEQ ID NO: 46083 - DNA, 20 bp, synthetic construct
  source 1..20: mol_type = other DNA
tttataaggggctttccctg

SEQ ID NO: 46084 - DNA, 20 bp, synthetic construct
  source 1..20: mol_type = other DNA
ttttataaggggctttccct

SEQ ID NO: 46085 - DNA, 20 bp, synthetic construct
  source 1..20: mol_type = other DNA
gttttataaggggctttccc

SEQ ID NO: 46086 - DNA, 20 bp, synthetic construct
  source 1..20: mol_type = other DNA
ggttttataaggggctttcc

SEQ ID NO: 46087 - DNA, 20 bp, synthetic construct
  source 1..20: mol_type = other DNA
tggttttataaggggctttc

SEQ ID NO: 46088 - DNA, 20 bp, synthetic construct
  source 1..20: mol_type = other DNA
atggttttataaggggcttt

SEQ ID NO: 46089 - DNA, 20 bp, synthetic construct
  source 1..20: mol_type = other DNA
gatggttttataaggggctt

SEQ ID NO: 46090 - DNA, 20 bp, synthetic construct
  source 1..20: mol_type = other DNA
tgatggttttataaggggct

SEQ ID NO: 46091 - DNA, 20 bp, synthetic construct
  source 1..20: mol_type = other DNA
ctgatggttttataaggggc

SEQ ID NO: 46092 - DNA, 20 bp, synthetic construct
  source 1..20: mol_type = other DNA
tctgatggttttataagggg

SEQ ID NO: 46093 - DNA, 20 bp, synthetic construct
  source 1..20: mol_type = other DNA
atctgatggttttataaggg

SEQ ID NO: 46094 - DNA, 20 bp, synthetic construct
  source 1..20: mol_type = other DNA
gatctgatggttttataagg

SEQ ID NO: 46095 - DNA, 20 bp, synthetic construct
  source 1..20: mol_type = other DNA
agatctgatggttttataag

SEQ ID NO: 46096 - DNA, 20 bp, synthetic construct
  source 1..20: mol_type = other DNA
gagatctgatggttttataa

SEQ ID NO: 46097 - DNA, 20 bp, synthetic construct
  source 1..20: mol_type = other DNA
ggagatctgatggttttata

SEQ ID NO: 46098 - DNA, 20 bp, synthetic construct
  source 1..20: mol_type = other DNA
aggagatctgatggttttat

SEQ ID NO: 46099 - DNA, 20 bp, synthetic construct
  source 1..20: mol_type = other DNA
caggagatctgatggtttta

SEQ ID NO: 46100 - DNA, 20 bp, synthetic construct
  source 1..20: mol_type = other DNA
tcaggagatctgatggtttt

SEQ ID NO: 46101 - DNA, 20 bp, synthetic construct
  source 1..20: mol_type = other DNA
ctcaggagatctgatggttt

SEQ ID NO: 46102 - DNA, 20 bp, synthetic construct
  source 1..20: mol_type = other DNA
tctcaggagatctgatggtt

SEQ ID NO: 46103 - DNA, 20 bp, synthetic construct
  source 1..20: mol_type = other DNA
ttctcaggagatctgatggt

SEQ ID NO: 46104 - DNA, 20 bp, synthetic construct
  source 1..20: mol_type = other DNA
gttctcaggagatctgatgg

SEQ ID NO: 46105 - DNA, 20 bp, synthetic construct
  source 1..20: mol_type = other DNA
agttctcaggagatctgatg

SEQ ID NO: 46106 - DNA, 20 bp, synthetic construct
  source 1..20: mol_type = other DNA
gagttctcaggagatctgat

SEQ ID NO: 46107 - DNA, 20 bp, synthetic construct
  source 1..20: mol_type = other DNA
tgagttctcaggagatctga

SEQ ID NO: 46108 - DNA, 20 bp, synthetic construct
  source 1..20: mol_type = other DNA
gtgagttctcaggagatctg

SEQ ID NO: 46109 - DNA, 20 bp, synthetic construct
  source 1..20: mol_type = other DNA
agtgagttctcaggagatct

SEQ ID NO: 46110 - DNA, 20 bp, synthetic construct
  source 1..20: mol_type = other DNA
gagtgagttctcaggagatc

SEQ ID NO: 46111 - DNA, 20 bp, synthetic construct
  source 1..20: mol_type = other DNA
tgagtgagttctcaggagat

SEQ ID NO: 46112 - DNA, 20 bp, synthetic construct
  source 1..20: mol_type = other DNA
gtgagtgagttctcaggaga

SEQ ID NO: 46113 - DNA, 20 bp, synthetic construct
  source 1..20: mol_type = other DNA
agtgagtgagttctcaggag

SEQ ID NO: 46114 - DNA, 20 bp, synthetic construct
  source 1..20: mol_type = other DNA
tagtgagtgagttctcagga

SEQ ID NO: 46115 - DNA, 20 bp, synthetic construct
  source 1..20: mol_type = other DNA
atagtgagtgagttctcagg

SEQ ID NO: 46116 - DNA, 20 bp, synthetic construct
  source 1..20: mol_type = other DNA
gatagtgagtgagttctcag

SEQ ID NO: 46117 - DNA, 20 bp, synthetic construct
  source 1..20: mol_type = other DNA
tgatagtgagtgagttctca

SEQ ID NO: 46118 - DNA, 20 bp, synthetic construct
  source 1..20: mol_type = other DNA
atgatagtgagtgagttctc

SEQ ID NO: 46119 - DNA, 20 bp, synthetic construct
  source 1..20: mol_type = other DNA
catgatagtgagtgagttct

SEQ ID NO: 46120 - DNA, 20 bp, synthetic construct
  source 1..20: mol_type = other DNA
tcatgatagtgagtgagttc

SEQ ID NO: 46121 - DNA, 20 bp, synthetic construct
  source 1..20: mol_type = other DNA
ctcatgatagtgagtgagtt

SEQ ID NO: 46122 - DNA, 20 bp, synthetic construct
  source 1..20: mol_type = other DNA
tctcatgatagtgagtgagt

SEQ ID NO: 46123 - DNA, 20 bp, synthetic construct
  source 1..20: mol_type = other DNA
ctctcatgatagtgagtgag

SEQ ID NO: 46124 - DNA, 20 bp, synthetic construct
  source 1..20: mol_type = other DNA
gctctcatgatagtgagtga

SEQ ID NO: 46125 - DNA, 20 bp, synthetic construct
  source 1..20: mol_type = other DNA
tgctctcatgatagtgagtg

SEQ ID NO: 46126 - DNA, 20 bp, synthetic construct
  source 1..20: mol_type = other DNA
ctgctctcatgatagtgagt

SEQ ID NO: 46127 - DNA, 20 bp, synthetic construct
  source 1..20: mol_type = other DNA
gctgctctcatgatagtgag

SEQ ID NO: 46128 - DNA, 20 bp, synthetic construct
  source 1..20: mol_type = other DNA
cgctgctctcatgatagtga

SEQ ID NO: 46129 - DNA, 20 bp, synthetic construct
  source 1..20: mol_type = other DNA
acgctgctctcatgatagtg

SEQ ID NO: 46130 - DNA, 20 bp, synthetic construct
  source 1..20: mol_type = other DNA
tacgctgctctcatgatagt

SEQ ID NO: 46131 - DNA, 20 bp, synthetic construct
  source 1..20: mol_type = other DNA
ctacgctgctctcatgatag

SEQ ID NO: 46132 - DNA, 20 bp, synthetic construct
  source 1..20: mol_type = other DNA
cctacgctgctctcatgata

SEQ ID NO: 46133 - DNA, 20 bp, synthetic construct
  source 1..20: mol_type = other DNA
ccctacgctgctctcatgat

SEQ ID NO: 46134 - DNA, 20 bp, synthetic construct
  source 1..20: mol_type = other DNA
cccctacgctgctctcatga

SEQ ID NO: 46135 - DNA, 20 bp, synthetic construct
  source 1..20: mol_type = other DNA
tcccctacgctgctctcatg

SEQ ID NO: 46136 - DNA, 20 bp, synthetic construct
  source 1..20: mol_type = other DNA
ttcccctacgctgctctcat

SEQ ID NO: 46137 - DNA, 20 bp, synthetic construct
  source 1..20: mol_type = other DNA
tttcccctacgctgctctca

SEQ ID NO: 46138 - DNA, 20 bp, synthetic construct
  source 1..20: mol_type = other DNA
gtttcccctacgctgctctc

SEQ ID NO: 46139 - DNA, 20 bp, synthetic construct
  source 1..20: mol_type = other DNA
agtttcccctacgctgctct

SEQ ID NO: 46140 - DNA, 20 bp, synthetic construct
  source 1..20: mol_type = other DNA
cagtttcccctacgctgctc

SEQ ID NO: 46141 - DNA, 20 bp, synthetic construct
  source 1..20: mol_type = other DNA
gcagtttcccctacgctgct

SEQ ID NO: 46142 - DNA, 20 bp, synthetic construct
  source 1..20: mol_type = other DNA
ggcagtttcccctacgctgc

SEQ ID NO: 46143 - DNA, 20 bp, synthetic construct
  source 1..20: mol_type = other DNA
gggcagtttcccctacgctg

SEQ ID NO: 46144 - DNA, 20 bp, synthetic construct
  source 1..20: mol_type = other DNA
ggggcagtttcccctacgct

SEQ ID NO: 46145 - DNA, 20 bp, synthetic construct
  source 1..20: mol_type = other DNA
gggggcagtttcccctacgc

SEQ ID NO: 46146 - DNA, 20 bp, synthetic construct
  source 1..20: mol_type = other DNA
tgggggcagtttcccctacg

SEQ ID NO: 46147 - DNA, 20 bp, synthetic construct
  source 1..20: mol_type = other DNA
atgggggcagtttcccctac

SEQ ID NO: 46148 - DNA, 20 bp, synthetic construct
  source 1..20: mol_type = other DNA
catgggggcagtttccccta

SEQ ID NO: 46149 - DNA, 20 bp, synthetic construct
  source 1..20: mol_type = other DNA
tcatgggggcagtttcccct

SEQ ID NO: 46150 - DNA, 20 bp, synthetic construct
  source 1..20: mol_type = other DNA
atcatgggggcagtttcccc

SEQ ID NO: 46151 - DNA, 20 bp, synthetic construct
  source 1..20: mol_type = other DNA
aatcatgggggcagtttccc

SEQ ID NO: 46152 - DNA, 20 bp, synthetic construct
  source 1..20: mol_type = other DNA
gaatcatgggggcagtttcc

SEQ ID NO: 46153 - DNA, 20 bp, synthetic construct
  source 1..20: mol_type = other DNA
tgaatcatgggggcagtttc

SEQ ID NO: 46154 - DNA, 20 bp, synthetic construct
  source 1..20: mol_type = other DNA
ctgaatcatgggggcagttt

SEQ ID NO: 46155 - DNA, 20 bp, synthetic construct
  source 1..20: mol_type = other DNA
actgaatcatgggggcagtt

SEQ ID NO: 46156 - DNA, 20 bp, synthetic construct
  source 1..20: mol_type = other DNA
aactgaatcatgggggcagt

SEQ ID NO: 46157 - DNA, 20 bp, synthetic construct
  source 1..20: mol_type = other DNA
taactgaatcatgggggcag

SEQ ID NO: 46158 - DNA, 20 bp, synthetic construct
  source 1..20: mol_type = other DNA
ataactgaatcatgggggca

SEQ ID NO: 46159 - DNA, 20 bp, synthetic construct
  source 1..20: mol_type = other DNA
gataactgaatcatgggggc

SEQ ID NO: 46160 - DNA, 20 bp, synthetic construct
  source 1..20: mol_type = other DNA
agataactgaatcatggggg

SEQ ID NO: 46161 - DNA, 20 bp, synthetic construct
  source 1..20: mol_type = other DNA
gagataactgaatcatgggg

SEQ ID NO: 46162 - DNA, 20 bp, synthetic construct
  source 1..20: mol_type = other DNA
ggagataactgaatcatggg

SEQ ID NO: 46163 - DNA, 20 bp, synthetic construct
  source 1..20: mol_type = other DNA
tggagataactgaatcatgg

SEQ ID NO: 46164 - DNA, 20 bp, synthetic construct
  source 1..20: mol_type = other DNA
gtggagataactgaatcatg

SEQ ID NO: 46165 - DNA, 20 bp, synthetic construct
  source 1..20: mol_type = other DNA
ggtggagataactgaatcat

SEQ ID NO: 46166 - DNA, 20 bp, synthetic construct
  source 1..20: mol_type = other DNA
aggtggagataactgaatca

SEQ ID NO: 46167 - DNA, 20 bp, synthetic construct
  source 1..20: mol_type = other DNA
caggtggagataactgaatc

SEQ ID NO: 46168 - DNA, 20 bp, synthetic construct
  source 1..20: mol_type = other DNA
ccaggtggagataactgaat

SEQ ID NO: 46169 - DNA, 20 bp, synthetic construct
  source 1..20: mol_type = other DNA
accaggtggagataactgaa

SEQ ID NO: 46170 - DNA, 20 bp, synthetic construct
  source 1..20: mol_type = other DNA
gaccaggtggagataactga

SEQ ID NO: 46171 - DNA, 20 bp, synthetic construct
  source 1..20: mol_type = other DNA
agaccaggtggagataactg

SEQ ID NO: 46172 - DNA, 20 bp, synthetic construct
  source 1..20: mol_type = other DNA
aagaccaggtggagataact

SEQ ID NO: 46173 - DNA, 20 bp, synthetic construct
  source 1..20: mol_type = other DNA
caagaccaggtggagataac

SEQ ID NO: 46174 - DNA, 20 bp, synthetic construct
  source 1..20: mol_type = other DNA
gcaagaccaggtggagataa

SEQ ID NO: 46175 - DNA, 20 bp, synthetic construct
  source 1..20: mol_type = other DNA
ggcaagaccaggtggagata

SEQ ID NO: 46176 - DNA, 20 bp, synthetic construct
  source 1..20: mol_type = other DNA
gggcaagaccaggtggagat

SEQ ID NO: 46177 - DNA, 20 bp, synthetic construct
  source 1..20: mol_type = other DNA
agggcaagaccaggtggaga

SEQ ID NO: 46178 - DNA, 20 bp, synthetic construct
  source 1..20: mol_type = other DNA
aagggcaagaccaggtggag

SEQ ID NO: 46179 - DNA, 20 bp, synthetic construct
  source 1..20: mol_type = other DNA
caagggcaagaccaggtgga

SEQ ID NO: 46180 - DNA, 20 bp, synthetic construct
  source 1..20: mol_type = other DNA
tcaagggcaagaccaggtgg

SEQ ID NO: 46181 - DNA, 20 bp, synthetic construct
  source 1..20: mol_type = other DNA
gtcaagggcaagaccaggtg

SEQ ID NO: 46182 - DNA, 20 bp, synthetic construct
  source 1..20: mol_type = other DNA
tgtcaagggcaagaccaggt

SEQ ID NO: 46183 - DNA, 20 bp, synthetic construct
  source 1..20: mol_type = other DNA
gtgtcaagggcaagaccagg

SEQ ID NO: 46184 - DNA, 20 bp, synthetic construct
  source 1..20: mol_type = other DNA
tgtgtcaagggcaagaccag

SEQ ID NO: 46185 - DNA, 20 bp, synthetic construct
  source 1..20: mol_type = other DNA
gtgtgtcaagggcaagacca

SEQ ID NO: 46186 - DNA, 20 bp, synthetic construct
  source 1..20: mol_type = other DNA
cgtgtgtcaagggcaagacc

SEQ ID NO: 46187 - DNA, 20 bp, synthetic construct
  source 1..20: mol_type = other DNA
tcgtgtgtcaagggcaagac

SEQ ID NO: 46188 - DNA, 20 bp, synthetic construct
  source 1..20: mol_type = other DNA
ctcgtgtgtcaagggcaaga

SEQ ID NO: 46189 - DNA, 20 bp, synthetic construct
  source 1..20: mol_type = other DNA
tctcgtgtgtcaagggcaag

SEQ ID NO: 46190 - DNA, 20 bp, synthetic construct
  source 1..20: mol_type = other DNA
ttctcgtgtgtcaagggcaa

SEQ ID NO: 46191 - DNA, 20 bp, synthetic construct
  source 1..20: mol_type = other DNA
attctcgtgtgtcaagggca

SEQ ID NO: 46192 - DNA, 20 bp, synthetic construct
  source 1..20: mol_type = other DNA
aattctcgtgtgtcaagggc

SEQ ID NO: 46193 - DNA, 20 bp, synthetic construct
  source 1..20: mol_type = other DNA
taattctcgtgtgtcaaggg

SEQ ID NO: 46194 - DNA, 20 bp, synthetic construct
  source 1..20: mol_type = other DNA
ataattctcgtgtgtcaagg

SEQ ID NO: 46195 - DNA, 20 bp, synthetic construct
  source 1..20: mol_type = other DNA
aataattctcgtgtgtcaag

SEQ ID NO: 46196 - DNA, 20 bp, synthetic construct
  source 1..20: mol_type = other DNA
taataattctcgtgtgtcaa

SEQ ID NO: 46197 - DNA, 20 bp, synthetic construct
  source 1..20: mol_type = other DNA
ataataattctcgtgtgtca

SEQ ID NO: 46198 - DNA, 20 bp, synthetic construct
  source 1..20: mol_type = other DNA
tataataattctcgtgtgtc

SEQ ID NO: 46199 - DNA, 20 bp, synthetic construct
  source 1..20: mol_type = other DNA
ttataataattctcgtgtgt

SEQ ID NO: 46200 - DNA, 20 bp, synthetic construct
  source 1..20: mol_type = other DNA
attataataattctcgtgtg

SEQ ID NO: 46201 - DNA, 20 bp, synthetic construct
  source 1..20: mol_type = other DNA
aattataataattctcgtgt

SEQ ID NO: 46202 - DNA, 20 bp, synthetic construct
  source 1..20: mol_type = other DNA
taattataataattctcgtg

SEQ ID NO: 46203 - DNA, 20 bp, synthetic construct
  source 1..20: mol_type = other DNA
ttaattataataattctcgt

SEQ ID NO: 46204 - DNA, 20 bp, synthetic construct
  source 1..20: mol_type = other DNA
tttaattataataattctcg

SEQ ID NO: 46205 - DNA, 20 bp, synthetic construct
  source 1..20: mol_type = other DNA
ctttaattataataattctc

SEQ ID NO: 46206 - DNA, 20 bp, synthetic construct
  source 1..20: mol_type = other DNA
tctttaattataataattct

SEQ ID NO: 46207 - DNA, 20 bp, synthetic construct
  source 1..20: mol_type = other DNA
atctttaattataataattc

SEQ ID NO: 46208 - DNA, 20 bp, synthetic construct
  source 1..20: mol_type = other DNA
tatctttaattataataatt

SEQ ID NO: 46209 - DNA, 20 bp, synthetic construct
  source 1..20: mol_type = other DNA
ttatctttaattataataat

SEQ ID NO: 46210 - DNA, 20 bp, synthetic construct
  source 1..20: mol_type = other DNA
cttatctttaattataataa

SEQ ID NO: 46211 - DNA, 20 bp, synthetic construct
  source 1..20: mol_type = other DNA
tcttatctttaattataata

SEQ ID NO: 46212 - DNA, 20 bp, synthetic construct
  source 1..20: mol_type = other DNA
atcttatctttaattataat

SEQ ID NO: 46213 - DNA, 20 bp, synthetic construct
  source 1..20: mol_type = other DNA
aatcttatctttaattataa

SEQ ID NO: 46214 - DNA, 20 bp, synthetic construct
  source 1..20: mol_type = other DNA
aaatcttatctttaattata

SEQ ID NO: 46215 - DNA, 20 bp, synthetic construct
  source 1..20: mol_type = other DNA
caaatcttatctttaattat

SEQ ID NO: 46216 - DNA, 20 bp, synthetic construct
  source 1..20: mol_type = other DNA
ccaaatcttatctttaatta

SEQ ID NO: 46217 - DNA, 20 bp, synthetic construct
  source 1..20: mol_type = other DNA
cccaaatcttatctttaatt

SEQ ID NO: 46218 - DNA, 20 bp, synthetic construct
  source 1..20: mol_type = other DNA
acccaaatcttatctttaat

SEQ ID NO: 46219 - DNA, 20 bp, synthetic construct
  source 1..20: mol_type = other DNA
cacccaaatcttatctttaa

SEQ ID NO: 46220 - DNA, 20 bp, synthetic construct
  source 1..20: mol_type = other DNA
ccacccaaatcttatcttta

SEQ ID NO: 46221 - DNA, 20 bp, synthetic construct
  source 1..20: mol_type = other DNA
cccacccaaatcttatcttt

SEQ ID NO: 46222 - DNA, 20 bp, synthetic construct
  source 1..20: mol_type = other DNA
ccccacccaaatcttatctt

SEQ ID NO: 46223 - DNA, 20 bp, synthetic construct
  source 1..20: mol_type = other DNA
tccccacccaaatcttatct

SEQ ID NO: 46224 - DNA, 20 bp, synthetic construct
  source 1..20: mol_type = other DNA
gtccccacccaaatcttatc

SEQ ID NO: 46225 - DNA, 20 bp, synthetic construct
  source 1..20: mol_type = other DNA
tgtccccacccaaatcttat

SEQ ID NO: 46226 - DNA, 20 bp, synthetic construct
  source 1..20: mol_type = other DNA
gtgtccccacccaaatctta

SEQ ID NO: 46227 - DNA, 20 bp, synthetic construct
  source 1..20: mol_type = other DNA
tgtgtccccacccaaatctt

SEQ ID NO: 46228 - DNA, 20 bp, synthetic construct
  source 1..20: mol_type = other DNA
ctgtgtccccacccaaatct

SEQ ID NO: 46229 - DNA, 20 bp, synthetic construct
  source 1..20: mol_type = other DNA
tctgtgtccccacccaaatc

SEQ ID NO: 46230 - DNA, 20 bp, synthetic construct
  source 1..20: mol_type = other DNA
ttctgtgtccccacccaaat

SEQ ID NO: 46231 - DNA, 20 bp, synthetic construct
  source 1..20: mol_type = other DNA
gttctgtgtccccacccaaa

SEQ ID NO: 46232 - DNA, 20 bp, synthetic construct
  source 1..20: mol_type = other DNA
ggttctgtgtccccacccaa

SEQ ID NO: 46233 - DNA, 20 bp, synthetic construct
  source 1..20: mol_type = other DNA
tggttctgtgtccccaccca

SEQ ID NO: 46234 - DNA, 20 bp, synthetic construct
  source 1..20: mol_type = other DNA
ttggttctgtgtccccaccc

SEQ ID NO: 46235 - DNA, 20 bp, synthetic construct
  source 1..20: mol_type = other DNA
tttggttctgtgtccccacc

SEQ ID NO: 46236 - DNA, 20 bp, synthetic construct
  source 1..20: mol_type = other DNA
gtttggttctgtgtccccac

SEQ ID NO: 46237 - DNA, 20 bp, synthetic construct
  source 1..20: mol_type = other DNA
ggtttggttctgtgtcccca

SEQ ID NO: 46238 - DNA, 20 bp, synthetic construct
  source 1..20: mol_type = other DNA
tggtttggttctgtgtcccc

SEQ ID NO: 46239 - DNA, 20 bp, synthetic construct
  source 1..20: mol_type = other DNA
atggtttggttctgtgtccc

SEQ ID NO: 46240 - DNA, 20 bp, synthetic construct
  source 1..20: mol_type = other DNA
tatggtttggttctgtgtcc

SEQ ID NO: 46241 - DNA, 20 bp, synthetic construct
  source 1..20: mol_type = other DNA
atatggtttggttctgtgtc

SEQ ID NO: 46242 - DNA, 20 bp, synthetic construct
  source 1..20: mol_type = other DNA
gatatggtttggttctgtgt

SEQ ID NO: 46243 - DNA, 20 bp, synthetic construct
  source 1..20: mol_type = other DNA
tgatatggtttggttctgtg

SEQ ID NO: 46244 - DNA, 20 bp, synthetic construct
  source 1..20: mol_type = other DNA
atgatatggtttggttctgt

SEQ ID NO: 46245 - DNA, 20 bp, synthetic construct
  source 1..20: mol_type = other DNA
aatgatatggtttggttctg

SEQ ID NO: 46246 - DNA, 20 bp, synthetic construct
  source 1..20: mol_type = other DNA
aaatgatatggtttggttct

SEQ ID NO: 46247 - DNA, 20 bp, synthetic construct
  source 1..20: mol_type = other DNA
caaatgatatggtttggttc

SEQ ID NO: 46248 - DNA, 20 bp, synthetic construct
  source 1..20: mol_type = other DNA
acaaatgatatggtttggtt

SEQ ID NO: 46249 - DNA, 20 bp, synthetic construct
  source 1..20: mol_type = other DNA
tacaaatgatatggtttggt

SEQ ID NO: 46250 - DNA, 20 bp, synthetic construct
  source 1..20: mol_type = other DNA
ttacaaatgatatggtttgg

SEQ ID NO: 46251 - DNA, 20 bp, synthetic construct
  source 1..20: mol_type = other DNA
tttacaaatgatatggtttg

SEQ ID NO: 46252 - DNA, 20 bp, synthetic construct
  source 1..20: mol_type = other DNA
atttacaaatgatatggttt

SEQ ID NO: 46253 - DNA, 20 bp, synthetic construct
  source 1..20: mol_type = other DNA
tatttacaaatgatatggtt

SEQ ID NO: 46254 - DNA, 20 bp, synthetic construct
  source 1..20: mol_type = other DNA
ctatttacaaatgatatggt

SEQ ID NO: 46255 - DNA, 20 bp, synthetic construct
  source 1..20: mol_type = other DNA
actatttacaaatgatatgg

SEQ ID NO: 46256 - DNA, 20 bp, synthetic construct
  source 1..20: mol_type = other DNA
tactatttacaaatgatatg

SEQ ID NO: 46257 - DNA, 20 bp, synthetic construct
  source 1..20: mol_type = other DNA
atactatttacaaatgatat

SEQ ID NO: 46258 - DNA, 20 bp, synthetic construct
  source 1..20: mol_type = other DNA
aatactatttacaaatgata

SEQ ID NO: 46259 - DNA, 20 bp, synthetic construct
  source 1..20: mol_type = other DNA
aaatactatttacaaatgat

SEQ ID NO: 46260 - DNA, 20 bp, synthetic construct
  source 1..20: mol_type = other DNA
aaaatactatttacaaatga

SEQ ID NO: 46261 - DNA, 20 bp, synthetic construct
  source 1..20: mol_type = other DNA
aaaaatactatttacaaatg

SEQ ID NO: 46262 - DNA, 20 bp, synthetic construct
  source 1..20: mol_type = other DNA
caaaaatactatttacaaat

SEQ ID NO: 46263 - DNA, 20 bp, synthetic construct
  source 1..20: mol_type = other DNA
acaaaaatactatttacaaa

SEQ ID NO: 46264 - DNA, 20 bp, synthetic construct
  source 1..20: mol_type = other DNA
gacaaaaatactatttacaa

SEQ ID NO: 46265 - DNA, 20 bp, synthetic construct
  source 1..20: mol_type = other DNA
tgacaaaaatactatttaca

SEQ ID NO: 46266 - DNA, 20 bp, synthetic construct
  source 1..20: mol_type = other DNA
gtgacaaaaatactatttac

SEQ ID NO: 46267 - DNA, 20 bp, synthetic construct
  source 1..20: mol_type = other DNA
cgtgacaaaaatactattta

SEQ ID NO: 46268 - DNA, 20 bp, synthetic construct
  source 1..20: mol_type = other DNA
acgtgacaaaaatactattt

SEQ ID NO: 46269 - DNA, 20 bp, synthetic construct
  source 1..20: mol_type = other DNA
cacgtgacaaaaatactatt

SEQ ID NO: 46270 - DNA, 20 bp, synthetic construct
  source 1..20: mol_type = other DNA
acacgtgacaaaaatactat

SEQ ID NO: 46271 - DNA, 20 bp, synthetic construct
  source 1..20: mol_type = other DNA
tacacgtgacaaaaatacta

SEQ ID NO: 46272 - DNA, 20 bp, synthetic construct
  source 1..20: mol_type = other DNA
ttacacgtgacaaaaatact

SEQ ID NO: 46273 - DNA, 20 bp, synthetic construct
  source 1..20: mol_type = other DNA
attacacgtgacaaaaatac

SEQ ID NO: 46274 - DNA, 20 bp, synthetic construct
  source 1..20: mol_type = other DNA
tattacacgtgacaaaaata

SEQ ID NO: 46275 - DNA, 20 bp, synthetic construct
  source 1..20: mol_type = other DNA
ttattacacgtgacaaaaat

SEQ ID NO: 46276 - DNA, 20 bp, synthetic construct
  source 1..20: mol_type = other DNA
gttattacacgtgacaaaaa

SEQ ID NO: 46277 - DNA, 20 bp, synthetic construct
  source 1..20: mol_type = other DNA
tgttattacacgtgacaaaa

SEQ ID NO: 46278 - DNA, 20 bp, synthetic construct
  source 1..20: mol_type = other DNA
ttgttattacacgtgacaaa

SEQ ID NO: 46279 - DNA, 20 bp, synthetic construct
  source 1..20: mol_type = other DNA
cttgttattacacgtgacaa

SEQ ID NO: 46280 - DNA, 20 bp, synthetic construct
  source 1..20: mol_type = other DNA
tcttgttattacacgtgaca

SEQ ID NO: 46281 - DNA, 20 bp, synthetic construct
  source 1..20: mol_type = other DNA
ttcttgttattacacgtgac

SEQ ID NO: 46282 - DNA, 20 bp, synthetic construct
  source 1..20: mol_type = other DNA
gttcttgttattacacgtga

SEQ ID NO: 46283 - DNA, 20 bp, synthetic construct
  source 1..20: mol_type = other DNA
tgttcttgttattacacgtg

SEQ ID NO: 46284 - DNA, 20 bp, synthetic construct
  source 1..20: mol_type = other DNA
ttgttcttgttattacacgt

SEQ ID NO: 46285 - DNA, 20 bp, synthetic construct
  source 1..20: mol_type = other DNA
cttgttcttgttattacacg

SEQ ID NO: 46286 - DNA, 20 bp, synthetic construct
  source 1..20: mol_type = other DNA
acttgttcttgttattacac

SEQ ID NO: 46287 - DNA, 20 bp, synthetic construct
  source 1..20: mol_type = other DNA
gacttgttcttgttattaca

SEQ ID NO: 46288 - DNA, 20 bp, synthetic construct
  source 1..20: mol_type = other DNA
cgacttgttcttgttattac

SEQ ID NO: 46289 - DNA, 20 bp, synthetic construct
  source 1..20: mol_type = other DNA
gcgacttgttcttgttatta

SEQ ID NO: 46290 - DNA, 20 bp, synthetic construct
  source 1..20: mol_type = other DNA
agcgacttgttcttgttatt

SEQ ID NO: 46291 - DNA, 20 bp, synthetic construct
  source 1..20: mol_type = other DNA
aagcgacttgttcttgttat

SEQ ID NO: 46292 - DNA, 20 bp, synthetic construct
  source 1..20: mol_type = other DNA
caagcgacttgttcttgtta

SEQ ID NO: 46293 - DNA, 20 bp, synthetic construct
  source 1..20: mol_type = other DNA
acaagcgacttgttcttgtt

SEQ ID NO: 46294 - DNA, 20 bp, synthetic construct
  source 1..20: mol_type = other DNA
aacaagcgacttgttcttgt

SEQ ID NO: 46295 - DNA, 20 bp, synthetic construct
  source 1..20: mol_type = other DNA
gaacaagcgacttgttcttg

SEQ ID NO: 46296 - DNA, 20 bp, synthetic construct
  source 1..20: mol_type = other DNA
agaacaagcgacttgttctt

SEQ ID NO: 46297 - DNA, 20 bp, synthetic construct
  source 1..20: mol_type = other DNA
aagaacaagcgacttgttct

SEQ ID NO: 46298 - DNA, 20 bp, synthetic construct
  source 1..20: mol_type = other DNA
aaagaacaagcgacttgttc

SEQ ID NO: 46299 - DNA, 20 bp, synthetic construct
  source 1..20: mol_type = other DNA
aaaagaacaagcgacttgtt

SEQ ID NO: 46300 - DNA, 20 bp, synthetic construct
  source 1..20: mol_type = other DNA
gaaaagaacaagcgacttgt

SEQ ID NO: 46301 - DNA, 20 bp, synthetic construct
  source 1..20: mol_type = other DNA
agaaaagaacaagcgacttg

SEQ ID NO: 46302 - DNA, 20 bp, synthetic construct
  source 1..20: mol_type = other DNA
tagaaaagaacaagcgactt

SEQ ID NO: 46303 - DNA, 20 bp, synthetic construct
  source 1..20: mol_type = other DNA
ttagaaaagaacaagcgact

SEQ ID NO: 46304 - DNA, 20 bp, synthetic construct
  source 1..20: mol_type = other DNA
tttagaaaagaacaagcgac

SEQ ID NO: 46305 - DNA, 20 bp, synthetic construct
  source 1..20: mol_type = other DNA
atttagaaaagaacaagcga

SEQ ID NO: 46306 - DNA, 20 bp, synthetic construct
  source 1..20: mol_type = other DNA
catttagaaaagaacaagcg

SEQ ID NO: 46307 - DNA, 20 bp, synthetic construct
  source 1..20: mol_type = other DNA
tcatttagaaaagaacaagc

SEQ ID NO: 46308 - DNA, 20 bp, synthetic construct
  source 1..20: mol_type = other DNA
gtcatttagaaaagaacaag

SEQ ID NO: 46309 - DNA, 20 bp, synthetic construct
  source 1..20: mol_type = other DNA
agtcatttagaaaagaacaa

SEQ ID NO: 46310 - DNA, 20 bp, synthetic construct
  source 1..20: mol_type = other DNA
tagtcatttagaaaagaaca

SEQ ID NO: 46311 - DNA, 20 bp, synthetic construct
  source 1..20: mol_type = other DNA
ttagtcatttagaaaagaac

SEQ ID NO: 46312 - DNA, 20 bp, synthetic construct
  source 1..20: mol_type = other DNA
cttagtcatttagaaaagaa

SEQ ID NO: 46313 - DNA, 20 bp, synthetic construct
  source 1..20: mol_type = other DNA
acttagtcatttagaaaaga

SEQ ID NO: 46314 - DNA, 20 bp, synthetic construct
  source 1..20: mol_type = other DNA
cacttagtcatttagaaaag

SEQ ID NO: 46315 - DNA, 20 bp, synthetic construct
  source 1..20: mol_type = other DNA
gcacttagtcatttagaaaa

SEQ ID NO: 46316 - DNA, 20 bp, synthetic construct
  source 1..20: mol_type = other DNA
tgcacttagtcatttagaaa

SEQ ID NO: 46317 - DNA, 20 bp, synthetic construct
  source 1..20: mol_type = other DNA
ttgcacttagtcatttagaa

SEQ ID NO: 46318 - DNA, 20 bp, synthetic construct
  source 1..20: mol_type = other DNA
tttgcacttagtcatttaga

SEQ ID NO: 46319 - DNA, 20 bp, synthetic construct
  source 1..20: mol_type = other DNA
atttgcacttagtcatttag

SEQ ID NO: 46320 - DNA, 20 bp, synthetic construct
  source 1..20: mol_type = other DNA
gatttgcacttagtcattta

SEQ ID NO: 46321 - DNA, 20 bp, synthetic construct
  source 1..20: mol_type = other DNA
agatttgcacttagtcattt

SEQ ID NO: 46322 - DNA, 20 bp, synthetic construct
  source 1..20: mol_type = other DNA
tagatttgcacttagtcatt

SEQ ID NO: 46323 - DNA, 20 bp, synthetic construct
  source 1..20: mol_type = other DNA
ttagatttgcacttagtcat

SEQ ID NO: 46324 - DNA, 20 bp, synthetic construct
  source 1..20: mol_type = other DNA
cttagatttgcacttagtca

SEQ ID NO: 46325 - DNA, 20 bp, synthetic construct
  source 1..20: mol_type = other DNA
acttagatttgcacttagtc

SEQ ID NO: 46326 - DNA, 20 bp, synthetic construct
  source 1..20: mol_type = other DNA
cacttagatttgcacttagt

SEQ ID NO: 46327 - DNA, 20 bp, synthetic construct
  source 1..20: mol_type = other DNA
tcacttagatttgcacttag

SEQ ID NO: 46328 - DNA, 20 bp, synthetic construct
  source 1..20: mol_type = other DNA
ttcacttagatttgcactta

SEQ ID NO: 46329 - DNA, 20 bp, synthetic construct
  source 1..20: mol_type = other DNA
tttcacttagatttgcactt

SEQ ID NO: 46330 - DNA, 20 bp, synthetic construct
  source 1..20: mol_type = other DNA
ttttcacttagatttgcact

SEQ ID NO: 46331 - DNA, 20 bp, synthetic construct
  source 1..20: mol_type = other DNA
tttttcacttagatttgcac

SEQ ID NO: 46332 - DNA, 20 bp, synthetic construct
  source 1..20: mol_type = other DNA
gtttttcacttagatttgca

SEQ ID NO: 46333 - DNA, 20 bp, synthetic construct
  source 1..20: mol_type = other DNA
ggtttttcacttagatttgc

SEQ ID NO: 46334 - DNA, 20 bp, synthetic construct
  source 1..20: mol_type = other DNA
aggtttttcacttagatttg

SEQ ID NO: 46335 - DNA, 20 bp, synthetic construct
  source 1..20: mol_type = other DNA
gaggtttttcacttagattt

SEQ ID NO: 46336 - DNA, 20 bp, synthetic construct
  source 1..20: mol_type = other DNA
ggaggtttttcacttagatt

SEQ ID NO: 46337 - DNA, 20 bp, synthetic construct
  source 1..20: mol_type = other DNA
tggaggtttttcacttagat

SEQ ID NO: 46338 - DNA, 20 bp, synthetic construct
  source 1..20: mol_type = other DNA
ttggaggtttttcacttaga

SEQ ID NO: 46339 - DNA, 20 bp, synthetic construct
  source 1..20: mol_type = other DNA
tttggaggtttttcacttag

SEQ ID NO: 46340 - DNA, 20 bp, synthetic construct
  source 1..20: mol_type = other DNA
ttttggaggtttttcactta

SEQ ID NO: 46341 - DNA, 20 bp, synthetic construct
  source 1..20: mol_type = other DNA
cttttggaggtttttcactt

SEQ ID NO: 46342 - DNA, 20 bp, synthetic construct
  source 1..20: mol_type = other DNA
tcttttggaggtttttcact

SEQ ID NO: 46343 - DNA, 20 bp, synthetic construct
  source 1..20: mol_type = other DNA
atcttttggaggtttttcac

SEQ ID NO: 46344 - DNA, 20 bp, synthetic construct
  source 1..20: mol_type = other DNA
tatcttttggaggtttttca

SEQ ID NO: 46345 - DNA, 20 bp, synthetic construct
  source 1..20: mol_type = other DNA
gtatcttttggaggtttttc

SEQ ID NO: 46346 - DNA, 20 bp, synthetic construct
  source 1..20: mol_type = other DNA
cgtatcttttggaggttttt

SEQ ID NO: 46347 - DNA, 20 bp, synthetic construct
  source 1..20: mol_type = other DNA
acgtatcttttggaggtttt

SEQ ID NO: 46348 - DNA, 20 bp, synthetic construct
  source 1..20: mol_type = other DNA
tacgtatcttttggaggttt

SEQ ID NO: 46349 - DNA, 20 bp, synthetic construct
  source 1..20: mol_type = other DNA
ctacgtatcttttggaggtt

SEQ ID NO: 46350 - DNA, 20 bp, synthetic construct
  source 1..20: mol_type = other DNA
tctacgtatcttttggaggt

SEQ ID NO: 46351 - DNA, 20 bp, synthetic construct
  source 1..20: mol_type = other DNA
ttctacgtatcttttggagg

SEQ ID NO: 46352 - DNA, 20 bp, synthetic construct
  source 1..20: mol_type = other DNA
gttctacgtatcttttggag

SEQ ID NO: 46353 - DNA, 20 bp, synthetic construct
  source 1..20: mol_type = other DNA
tgttctacgtatcttttgga

SEQ ID NO: 46354 - DNA, 20 bp, synthetic construct
  source 1..20: mol_type = other DNA
gtgttctacgtatcttttgg

SEQ ID NO: 46355 - DNA, 20 bp, synthetic construct
  source 1..20: mol_type = other DNA
ggtgttctacgtatcttttg

SEQ ID NO: 46356 - DNA, 20 bp, synthetic construct
  source 1..20: mol_type = other DNA
tggtgttctacgtatctttt

SEQ ID NO: 46357 - DNA, 20 bp, synthetic construct
  source 1..20: mol_type = other DNA
ttggtgttctacgtatcttt

SEQ ID NO: 46358 - DNA, 20 bp, synthetic construct
  source 1..20: mol_type = other DNA
cttggtgttctacgtatctt

SEQ ID NO: 46359 - DNA, 20 bp, synthetic construct
  source 1..20: mol_type = other DNA
tcttggtgttctacgtatct

SEQ ID NO: 46360 - DNA, 20 bp, synthetic construct
  source 1..20: mol_type = other DNA
ctcttggtgttctacgtatc

SEQ ID NO: 46361 - DNA, 20 bp, synthetic construct
  source 1..20: mol_type = other DNA
actcttggtgttctacgtat

SEQ ID NO: 46362 - DNA, 20 bp, synthetic construct
  source 1..20: mol_type = other DNA
cactcttggtgttctacgta

SEQ ID NO: 46363 - DNA, 20 bp, synthetic construct
  source 1..20: mol_type = other DNA
ccactcttggtgttctacgt

SEQ ID NO: 46364 - DNA, 20 bp, synthetic construct
  source 1..20: mol_type = other DNA
tccactcttggtgttctacg

SEQ ID NO: 46365 - DNA, 20 bp, synthetic construct
  source 1..20: mol_type = other DNA
ctccactcttggtgttctac

SEQ ID NO: 46366 - DNA, 20 bp, synthetic construct
  source 1..20: mol_type = other DNA
actccactcttggtgttcta

SEQ ID NO: 46367 - DNA, 20 bp, synthetic construct
  source 1..20: mol_type = other DNA
gactccactcttggtgttct

SEQ ID NO: 46368 - DNA, 20 bp, synthetic construct
  source 1..20: mol_type = other DNA
agactccactcttggtgttc

SEQ ID NO: 46369 - DNA, 20 bp, synthetic construct
  source 1..20: mol_type = other DNA
cagactccactcttggtgtt

SEQ ID NO: 46370 - DNA, 20 bp, synthetic construct
  source 1..20: mol_type = other DNA
gcagactccactcttggtgt

SEQ ID NO: 46371 - DNA, 20 bp, synthetic construct
  source 1..20: mol_type = other DNA
tgcagactccactcttggtg

SEQ ID NO: 46372 - DNA, 20 bp, synthetic construct
  source 1..20: mol_type = other DNA
ctgcagactccactcttggt

SEQ ID NO: 46373 - DNA, 20 bp, synthetic construct
  source 1..20: mol_type = other DNA
tctgcagactccactcttgg

SEQ ID NO: 46374 - DNA, 20 bp, synthetic construct
  source 1..20: mol_type = other DNA
ctctgcagactccactcttg

SEQ ID NO: 46375 - DNA, 20 bp, synthetic construct
  source 1..20: mol_type = other DNA
actctgcagactccactctt

SEQ ID NO: 46376 - DNA, 20 bp, synthetic construct
  source 1..20: mol_type = other DNA
aactctgcagactccactct

SEQ ID NO: 46377 - DNA, 20 bp, synthetic construct
  source 1..20: mol_type = other DNA
gaactctgcagactccactc

SEQ ID NO: 46378 - DNA, 20 bp, synthetic construct
  source 1..20: mol_type = other DNA
agaactctgcagactccact

SEQ ID NO: 46379 - DNA, 20 bp, synthetic construct
  source 1..20: mol_type = other DNA
aagaactctgcagactccac

SEQ ID NO: 46380 - DNA, 20 bp, synthetic construct
  source 1..20: mol_type = other DNA
aaagaactctgcagactcca

SEQ ID NO: 46381 - DNA, 20 bp, synthetic construct
  source 1..20: mol_type = other DNA
taaagaactctgcagactcc

SEQ ID NO: 46382 - DNA, 20 bp, synthetic construct
  source 1..20: mol_type = other DNA
ataaagaactctgcagactc

SEQ ID NO: 46383 - DNA, 20 bp, synthetic construct
  source 1..20: mol_type = other DNA
cataaagaactctgcagact

SEQ ID NO: 46384 - DNA, 20 bp, synthetic construct
  source 1..20: mol_type = other DNA
gcataaagaactctgcagac

SEQ ID NO: 46385 - DNA, 20 bp, synthetic construct
  source 1..20: mol_type = other DNA
agcataaagaactctgcaga

SEQ ID NO: 46386 - DNA, 20 bp, synthetic construct
  source 1..20: mol_type = other DNA
aagcataaagaactctgcag

SEQ ID NO: 46387 - DNA, 20 bp, synthetic construct
  source 1..20: mol_type = other DNA
aaagcataaagaactctgca

SEQ ID NO: 46388 - DNA, 20 bp, synthetic construct
  source 1..20: mol_type = other DNA
aaaagcataaagaactctgc

SEQ ID NO: 46389 - DNA, 20 bp, synthetic construct
  source 1..20: mol_type = other DNA
aaaaagcataaagaactctg

SEQ ID NO: 46390 - DNA, 20 bp, synthetic construct
  source 1..20: mol_type = other DNA
taaaaagcataaagaactct

SEQ ID NO: 46391 - DNA, 20 bp, synthetic construct
  source 1..20: mol_type = other DNA
ataaaaagcataaagaactc

SEQ ID NO: 46392 - DNA, 20 bp, synthetic construct
  source 1..20: mol_type = other DNA
aataaaaagcataaagaact

SEQ ID NO: 46393 - DNA, 20 bp, synthetic construct
  source 1..20: mol_type = other DNA
aaataaaaagcataaagaac

SEQ ID NO: 46394 - DNA, 20 bp, synthetic construct
  source 1..20: mol_type = other DNA
aaaataaaaagcataaagaa

SEQ ID NO: 46395 - DNA, 20 bp, synthetic construct
  source 1..20: mol_type = other DNA
caaaataaaaagcataaaga

SEQ ID NO: 46396 - DNA, 20 bp, synthetic construct
  source 1..20: mol_type = other DNA
tcaaaataaaaagcataaag

SEQ ID NO: 46397 - DNA, 20 bp, synthetic construct
  source 1..20: mol_type = other DNA
ttcaaaataaaaagcataaa

SEQ ID NO: 46398 - DNA, 20 bp, synthetic construct
  source 1..20: mol_type = other DNA
attcaaaataaaaagcataa

SEQ ID NO: 46399 - DNA, 20 bp, synthetic construct
  source 1..20: mol_type = other DNA
aattcaaaataaaaagcata

SEQ ID NO: 46400 - DNA, 20 bp, synthetic construct
  source 1..20: mol_type = other DNA
taattcaaaataaaaagcat

SEQ ID NO: 46401 - DNA, 20 bp, synthetic construct
  source 1..20: mol_type = other DNA
ttaattcaaaataaaaagca

SEQ ID NO: 46402 - DNA, 20 bp, synthetic construct
  source 1..20: mol_type = other DNA
attaattcaaaataaaaagc

SEQ ID NO: 46403 - DNA, 20 bp, synthetic construct
  source 1..20: mol_type = other DNA
cattaattcaaaataaaaag

SEQ ID NO: 46404 - DNA, 20 bp, synthetic construct
  source 1..20: mol_type = other DNA
acattaattcaaaataaaaa

SEQ ID NO: 46405 - DNA, 20 bp, synthetic construct
  source 1..20: mol_type = other DNA
cacattaattcaaaataaaa

SEQ ID NO: 46406 - DNA, 20 bp, synthetic construct
  source 1..20: mol_type = other DNA
gcacattaattcaaaataaa

SEQ ID NO: 46407 - DNA, 20 bp, synthetic construct
  source 1..20: mol_type = other DNA
agcacattaattcaaaataa

SEQ ID NO: 46408 - DNA, 20 bp, synthetic construct
  source 1..20: mol_type = other DNA
aagcacattaattcaaaata

SEQ ID NO: 46409 - DNA, 20 bp, synthetic construct
  source 1..20: mol_type = other DNA
aaagcacattaattcaaaat

SEQ ID NO: 46410 - DNA, 20 bp, synthetic construct
  source 1..20: mol_type = other DNA
aaaagcacattaattcaaaa

SEQ ID NO: 46411 - DNA, 20 bp, synthetic construct
  source 1..20: mol_type = other DNA
aaaaagcacattaattcaaa

SEQ ID NO: 46412 - DNA, 20 bp, synthetic construct
  source 1..20: mol_type = other DNA
aaaaaagcacattaattcaa

SEQ ID NO: 46413 - DNA, 20 bp, synthetic construct
  source 1..20: mol_type = other DNA
aaaaaaagcacattaattca

SEQ ID NO: 46414 - DNA, 20 bp, synthetic construct
  source 1..20: mol_type = other DNA
gaaaaaaagcacattaattc

SEQ ID NO: 46415 - DNA, 20 bp, synthetic construct
  source 1..20: mol_type = other DNA
agaaaaaaagcacattaatt

SEQ ID NO: 46416 - DNA, 20 bp, synthetic construct
  source 1..20: mol_type = other DNA
cagaaaaaaagcacattaat

SEQ ID NO: 46417 - DNA, 20 bp, synthetic construct
  source 1..20: mol_type = other DNA
gcagaaaaaaagcacattaa

SEQ ID NO: 46418 - DNA, 20 bp, synthetic construct
  source 1..20: mol_type = other DNA
agcagaaaaaaagcacatta

SEQ ID NO: 46419 - DNA, 20 bp, synthetic construct
  source 1..20: mol_type = other DNA
cagcagaaaaaaagcacatt

SEQ ID NO: 46420 - DNA, 20 bp, synthetic construct
  source 1..20: mol_type = other DNA
gcagcagaaaaaaagcacat

SEQ ID NO: 46421 - DNA, 20 bp, synthetic construct
  source 1..20: mol_type = other DNA
agcagcagaaaaaaagcaca

SEQ ID NO: 46422 - DNA, 20 bp, synthetic construct
  source 1..20: mol_type = other DNA
aagcagcagaaaaaaagcac

SEQ ID NO: 46423 - DNA, 20 bp, synthetic construct
  source 1..20: mol_type = other DNA
aaagcagcagaaaaaaagca

SEQ ID NO: 46424 - DNA, 20 bp, synthetic construct
  source 1..20: mol_type = other DNA
gaaagcagcagaaaaaaagc

SEQ ID NO: 46425 - DNA, 20 bp, synthetic construct
  source 1..20: mol_type = other DNA
tgaaagcagcagaaaaaaag

SEQ ID NO: 46426 - DNA, 20 bp, synthetic construct
  source 1..20: mol_type = other DNA
atgaaagcagcagaaaaaaa

SEQ ID NO: 46427 - DNA, 20 bp, synthetic construct
  source 1..20: mol_type = other DNA
aatgaaagcagcagaaaaaa

SEQ ID NO: 46428 - DNA, 20 bp, synthetic construct
  source 1..20: mol_type = other DNA
aaatgaaagcagcagaaaaa

SEQ ID NO: 46429 - DNA, 20 bp, synthetic construct
  source 1..20: mol_type = other DNA
aaaatgaaagcagcagaaaa

SEQ ID NO: 46430 - DNA, 20 bp, synthetic construct
  source 1..20: mol_type = other DNA
aaaaatgaaagcagcagaaa

SEQ ID NO: 46431 - DNA, 20 bp, synthetic construct
  source 1..20: mol_type = other DNA
gaaaaatgaaagcagcagaa

SEQ ID NO: 46432 - DNA, 20 bp, synthetic construct
  source 1..20: mol_type = other DNA
agaaaaatgaaagcagcaga

SEQ ID NO: 46433 - DNA, 20 bp, synthetic construct
  source 1..20: mol_type = other DNA
gagaaaaatgaaagcagcag

SEQ ID NO: 46434 - DNA, 20 bp, synthetic construct
  source 1..20: mol_type = other DNA
ggagaaaaatgaaagcagca

SEQ ID NO: 46435 - DNA, 20 bp, synthetic construct
  source 1..20: mol_type = other DNA
aggagaaaaatgaaagcagc

SEQ ID NO: 46436 - DNA, 20 bp, synthetic construct
  source 1..20: mol_type = other DNA
aaggagaaaaatgaaagcag

SEQ ID NO: 46437 - DNA, 20 bp, synthetic construct
  source 1..20: mol_type = other DNA
aaaggagaaaaatgaaagca

SEQ ID NO: 46438 - DNA, 20 bp, synthetic construct
  source 1..20: mol_type = other DNA
caaaggagaaaaatgaaagc

SEQ ID NO: 46439 - DNA, 20 bp, synthetic construct
  source 1..20: mol_type = other DNA
ccaaaggagaaaaatgaaag

SEQ ID NO: 46440 - DNA, 20 bp, synthetic construct
  source 1..20: mol_type = other DNA
gccaaaggagaaaaatgaaa

SEQ ID NO: 46441 - DNA, 20 bp, synthetic construct
  source 1..20: mol_type = other DNA
agccaaaggagaaaaatgaa

SEQ ID NO: 46442 - DNA, 20 bp, synthetic construct
  source 1..20: mol_type = other DNA
aagccaaaggagaaaaatga

SEQ ID NO: 46443 - DNA, 20 bp, synthetic construct
  source 1..20: mol_type = other DNA
aaagccaaaggagaaaaatg

SEQ ID NO: 46444 - DNA, 20 bp, synthetic construct
  source 1..20: mol_type = other DNA
gaaagccaaaggagaaaaat

SEQ ID NO: 46445 - DNA, 20 bp, synthetic construct
  source 1..20: mol_type = other DNA
agaaagccaaaggagaaaaa

SEQ ID NO: 46446 - DNA, 20 bp, synthetic construct
  source 1..20: mol_type = other DNA
cagaaagccaaaggagaaaa

SEQ ID NO: 46447 - DNA, 20 bp, synthetic construct
  source 1..20: mol_type = other DNA
ccagaaagccaaaggagaaa

SEQ ID NO: 46448 - DNA, 20 bp, synthetic construct
  source 1..20: mol_type = other DNA
accagaaagccaaaggagaa

SEQ ID NO: 46449 - DNA, 20 bp, synthetic construct
  source 1..20: mol_type = other DNA
gaccagaaagccaaaggaga

SEQ ID NO: 46450 - DNA, 20 bp, synthetic construct
  source 1..20: mol_type = other DNA
agaccagaaagccaaaggag

SEQ ID NO: 46451 - DNA, 20 bp, synthetic construct
  source 1..20: mol_type = other DNA
aagaccagaaagccaaagga

SEQ ID NO: 46452 - DNA, 20 bp, synthetic construct
  source 1..20: mol_type = other DNA
taagaccagaaagccaaagg

SEQ ID NO: 46453 - DNA, 20 bp, synthetic construct
  source 1..20: mol_type = other DNA
ttaagaccagaaagccaaag

SEQ ID NO: 46454 - DNA, 20 bp, synthetic construct
  source 1..20: mol_type = other DNA
tttaagaccagaaagccaaa

SEQ ID NO: 46455 - DNA, 20 bp, synthetic construct
  source 1..20: mol_type = other DNA
atttaagaccagaaagccaa

SEQ ID NO: 46456 - DNA, 20 bp, synthetic construct
  source 1..20: mol_type = other DNA
aatttaagaccagaaagcca

SEQ ID NO: 46457 - DNA, 20 bp, synthetic construct
  source 1..20: mol_type = other DNA
aaatttaagaccagaaagcc

SEQ ID NO: 46458 - DNA, 20 bp, synthetic construct
  source 1..20: mol_type = other DNA
aaaatttaagaccagaaagc

SEQ ID NO: 46459 - DNA, 20 bp, synthetic construct
  source 1..20: mol_type = other DNA
caaaatttaagaccagaaag

SEQ ID NO: 46460 - DNA, 20 bp, synthetic construct
  source 1..20: mol_type = other DNA
ccaaaatttaagaccagaaa

SEQ ID NO: 46461 - DNA, 20 bp, synthetic construct
  source 1..20: mol_type = other DNA
tccaaaatttaagaccagaa

SEQ ID NO: 46462 - DNA, 20 bp, synthetic construct
  source 1..20: mol_type = other DNA
ttccaaaatttaagaccaga

SEQ ID NO: 46463 - DNA, 20 bp, synthetic construct
  source 1..20: mol_type = other DNA
attccaaaatttaagaccag

SEQ ID NO: 46464 - DNA, 20 bp, synthetic construct
  source 1..20: mol_type = other DNA
cattccaaaatttaagacca

SEQ ID NO: 46465 - DNA, 20 bp, synthetic construct
  source 1..20: mol_type = other DNA
acattccaaaatttaagacc

SEQ ID NO: 46466 - DNA, 20 bp, synthetic construct
  source 1..20: mol_type = other DNA
aacattccaaaatttaagac

SEQ ID NO: 46467 - DNA, 20 bp, synthetic construct
  source 1..20: mol_type = other DNA
taacattccaaaatttaaga

SEQ ID NO: 46468 - DNA, 20 bp, synthetic construct
  source 1..20: mol_type = other DNA
ataacattccaaaatttaag

SEQ ID NO: 46469 - DNA, 20 bp, synthetic construct
  source 1..20: mol_type = other DNA
gataacattccaaaatttaa

SEQ ID NO: 46470 - DNA, 20 bp, synthetic construct
  source 1..20: mol_type = other DNA
tgataacattccaaaattta

SEQ ID NO: 46471 - DNA, 20 bp, synthetic construct
  source 1..20: mol_type = other DNA
ttgataacattccaaaattt

SEQ ID NO: 46472 - DNA, 20 bp, synthetic construct
  source 1..20: mol_type = other DNA
attgataacattccaaaatt

SEQ ID NO: 46473 - DNA, 20 bp, synthetic construct
  source 1..20: mol_type = other DNA
cattgataacattccaaaat

SEQ ID NO: 46474 - DNA, 20 bp, synthetic construct
  source 1..20: mol_type = other DNA
tcattgataacattccaaaa

SEQ ID NO: 46475 - DNA, 20 bp, synthetic construct
  source 1..20: mol_type = other DNA
ttcattgataacattccaaa

SEQ ID NO: 46476 - DNA, 20 bp, synthetic construct
  source 1..20: mol_type = other DNA
tttcattgataacattccaa

SEQ ID NO: 46477 - DNA, 20 bp, synthetic construct
  source 1..20: mol_type = other DNA
atttcattgataacattcca

SEQ ID NO: 46478 - DNA, 20 bp, synthetic construct
  source 1..20: mol_type = other DNA
aatttcattgataacattcc

SEQ ID NO: 46479 - DNA, 20 bp, synthetic construct
  source 1..20: mol_type = other DNA
caatttcattgataacattc

SEQ ID NO: 46480 - DNA, 20 bp, synthetic construct
  source 1..20: mol_type = other DNA
tcaatttcattgataacatt

SEQ ID NO: 46481 - DNA, 20 bp, synthetic construct
  source 1..20: mol_type = other DNA
ttcaatttcattgataacat

SEQ ID NO: 46482 - DNA, 20 bp, synthetic construct
  source 1..20: mol_type = other DNA
gttcaatttcattgataaca

SEQ ID NO: 46483 - DNA, 20 bp, synthetic construct
  source 1..20: mol_type = other DNA
ggttcaatttcattgataac

SEQ ID NO: 46484 - DNA, 20 bp, synthetic construct
  source 1..20: mol_type = other DNA
cggttcaatttcattgataa

SEQ ID NO: 46485 - DNA, 20 bp, synthetic construct
  source 1..20: mol_type = other DNA
ccggttcaatttcattgata

SEQ ID NO: 46486 - DNA, 20 bp, synthetic construct
  source 1..20: mol_type = other DNA
tccggttcaatttcattgat

SEQ ID NO: 46487 - DNA, 20 bp, synthetic construct
  source 1..20: mol_type = other DNA
gtccggttcaatttcattga

SEQ ID NO: 46488 - DNA, 20 bp, synthetic construct
  source 1..20: mol_type = other DNA
tgtccggttcaatttcattg

SEQ ID NO: 46489 - DNA, 20 bp, synthetic construct
  source 1..20: mol_type = other DNA
atgtccggttcaatttcatt

SEQ ID NO: 46490 - DNA, 20 bp, synthetic construct
  source 1..20: mol_type = other DNA
catgtccggttcaatttcat

SEQ ID NO: 46491 - DNA, 20 bp, synthetic construct
  source 1..20: mol_type = other DNA
tcatgtccggttcaatttca

SEQ ID NO: 46492 - DNA, 20 bp, synthetic construct
  source 1..20: mol_type = other DNA
ttcatgtccggttcaatttc

SEQ ID NO: 46493 - DNA, 20 bp, synthetic construct
  source 1..20: mol_type = other DNA
cttcatgtccggttcaattt

SEQ ID NO: 46494 - DNA, 20 bp, synthetic construct
  source 1..20: mol_type = other DNA
ccttcatgtccggttcaatt

SEQ ID NO: 46495 - DNA, 20 bp, synthetic construct
  source 1..20: mol_type = other DNA
cccttcatgtccggttcaat

SEQ ID NO: 46496 - DNA, 20 bp, synthetic construct
  source 1..20: mol_type = other DNA
gcccttcatgtccggttcaa

SEQ ID NO: 46497 - DNA, 20 bp, synthetic construct
  source 1..20: mol_type = other DNA
tgcccttcatgtccggttca

SEQ ID NO: 46498 - DNA, 20 bp, synthetic construct
  source 1..20: mol_type = other DNA
ctgcccttcatgtccggttc

SEQ ID NO: 46499 - DNA, 20 bp, synthetic construct
  source 1..20: mol_type = other DNA
tctgcccttcatgtccggtt

SEQ ID NO: 46500 - DNA, 20 bp, synthetic construct
  source 1..20: mol_type = other DNA
ttctgcccttcatgtccggt

SEQ ID NO: 46501 - DNA, 20 bp, synthetic construct
  source 1..20: mol_type = other DNA
tttctgcccttcatgtccgg

SEQ ID NO: 46502 - DNA, 20 bp, synthetic construct
  source 1..20: mol_type = other DNA
gtttctgcccttcatgtccg

SEQ ID NO: 46503 - DNA, 20 bp, synthetic construct
  source 1..20: mol_type = other DNA
agtttctgcccttcatgtcc

SEQ ID NO: 46504 - DNA, 20 bp, synthetic construct
  source 1..20: mol_type = other DNA
tagtttctgcccttcatgtc

SEQ ID NO: 46505 - DNA, 20 bp, synthetic construct
  source 1..20: mol_type = other DNA
atagtttctgcccttcatgt

SEQ ID NO: 46506 - DNA, 20 bp, synthetic construct
  source 1..20: mol_type = other DNA
tatagtttctgcccttcatg

SEQ ID NO: 46507 - DNA, 20 bp, synthetic construct
  source 1..20: mol_type = other DNA
ttatagtttctgcccttcat

SEQ ID NO: 46508 - DNA, 20 bp, synthetic construct
  source 1..20: mol_type = other DNA
cttatagtttctgcccttca

SEQ ID NO: 46509 - DNA, 20 bp, synthetic construct
  source 1..20: mol_type = other DNA
acttatagtttctgcccttc

SEQ ID NO: 46510 - DNA, 20 bp, synthetic construct
  source 1..20: mol_type = other DNA
gacttatagtttctgccctt

SEQ ID NO: 46511 - DNA, 20 bp, synthetic construct
  source 1..20: mol_type = other DNA
ggacttatagtttctgccct

SEQ ID NO: 46512 - DNA, 20 bp, synthetic construct
  source 1..20: mol_type = other DNA
gggacttatagtttctgccc

SEQ ID NO: 46513 - DNA, 20 bp, synthetic construct
  source 1..20: mol_type = other DNA
tgggacttatagtttctgcc

SEQ ID NO: 46514 - DNA, 20 bp, synthetic construct
  source 1..20: mol_type = other DNA
gtgggacttatagtttctgc

SEQ ID NO: 46515 - DNA, 20 bp, synthetic construct
  source 1..20: mol_type = other DNA
tgtgggacttatagtttctg

SEQ ID NO: 46516 - DNA, 20 bp, synthetic construct
  source 1..20: mol_type = other DNA
atgtgggacttatagtttct

SEQ ID NO: 46517 - DNA, 20 bp, synthetic construct
  source 1..20: mol_type = other DNA
catgtgggacttatagtttc

SEQ ID NO: 46518 - DNA, 20 bp, synthetic construct
  source 1..20: mol_type = other DNA
tcatgtgggacttatagttt

SEQ ID NO: 46519 - DNA, 20 bp, synthetic construct
  source 1..20: mol_type = other DNA
atcatgtgggacttatagtt

SEQ ID NO: 46520 - DNA, 20 bp, synthetic construct
  source 1..20: mol_type = other DNA
catcatgtgggacttatagt

SEQ ID NO: 46521 - DNA, 20 bp, synthetic construct
  source 1..20: mol_type = other DNA
ccatcatgtgggacttatag

SEQ ID NO: 46522 - DNA, 20 bp, synthetic construct
  source 1..20: mol_type = other DNA
tccatcatgtgggacttata

SEQ ID NO: 46523 - DNA, 20 bp, synthetic construct
  source 1..20: mol_type = other DNA
ttccatcatgtgggacttat

SEQ ID NO: 46524 - DNA, 20 bp, synthetic construct
  source 1..20: mol_type = other DNA
cttccatcatgtgggactta

SEQ ID NO: 46525 - DNA, 20 bp, synthetic construct
  source 1..20: mol_type = other DNA
tcttccatcatgtgggactt

SEQ ID NO: 46526 - DNA, 20 bp, synthetic construct
  source 1..20: mol_type = other DNA
ttcttccatcatgtgggact

SEQ ID NO: 46527 - DNA, 20 bp, synthetic construct
  source 1..20: mol_type = other DNA
tttcttccatcatgtgggac

SEQ ID NO: 46528 - DNA, 20 bp, synthetic construct
  source 1..20: mol_type = other DNA
atttcttccatcatgtggga

SEQ ID NO: 46529 - DNA, 20 bp, synthetic construct
  source 1..20: mol_type = other DNA
tatttcttccatcatgtggg

SEQ ID NO: 46530 - DNA, 20 bp, synthetic construct
  source 1..20: mol_type = other DNA
ttatttcttccatcatgtgg

SEQ ID NO: 46531 - DNA, 20 bp, synthetic construct
  source 1..20: mol_type = other DNA
tttatttcttccatcatgtg

SEQ ID NO: 46532 - DNA, 20 bp, synthetic construct
  source 1..20: mol_type = other DNA
atttatttcttccatcatgt

SEQ ID NO: 46533 - DNA, 20 bp, synthetic construct
  source 1..20: mol_type = other DNA
catttatttcttccatcatg

SEQ ID NO: 46534 - DNA, 20 bp, synthetic construct
  source 1..20: mol_type = other DNA
tcatttatttcttccatcat

SEQ ID NO: 46535 - DNA, 20 bp, synthetic construct
  source 1..20: mol_type = other DNA
ctcatttatttcttccatca

SEQ ID NO: 46536 - DNA, 20 bp, synthetic construct
  source 1..20: mol_type = other DNA
tctcatttatttcttccatc

SEQ ID NO: 46537 - DNA, 20 bp, synthetic construct
  source 1..20: mol_type = other DNA
ttctcatttatttcttccat

SEQ ID NO: 46538 - DNA, 20 bp, synthetic construct
  source 1..20: mol_type = other DNA
cttctcatttatttcttcca

SEQ ID NO: 46539 - DNA, 20 bp, synthetic construct
  source 1..20: mol_type = other DNA
gcttctcatttatttcttcc

SEQ ID NO: 46540 - DNA, 20 bp, synthetic construct
  source 1..20: mol_type = other DNA
agcttctcatttatttcttc

SEQ ID NO: 46541 - DNA, 20 bp, synthetic construct
  source 1..20: mol_type = other DNA
tagcttctcatttatttctt

SEQ ID NO: 46542 - DNA, 20 bp, synthetic construct
  source 1..20: mol_type = other DNA
atagcttctcatttatttct

SEQ ID NO: 46543 - DNA, 20 bp, synthetic construct
  source 1..20: mol_type = other DNA
gatagcttctcatttatttc

SEQ ID NO: 46544 - DNA, 20 bp, synthetic construct
  source 1..20: mol_type = other DNA
tgatagcttctcatttattt

SEQ ID NO: 46545 - DNA, 20 bp, synthetic construct
  source 1..20: mol_type = other DNA
gtgatagcttctcatttatt

SEQ ID NO: 46546 - DNA, 20 bp, synthetic construct
  source 1..20: mol_type = other DNA
tgtgatagcttctcatttat

SEQ ID NO: 46547 - DNA, 20 bp, synthetic construct
  source 1..20: mol_type = other DNA
ttgtgatagcttctcattta

SEQ ID NO: 46548 - DNA, 20 bp, synthetic construct
  source 1..20: mol_type = other DNA
tttgtgatagcttctcattt

SEQ ID NO: 46549 - DNA, 20 bp, synthetic construct
  source 1..20: mol_type = other DNA
atttgtgatagcttctcatt

SEQ ID NO: 46550 - DNA, 20 bp, synthetic construct
  source 1..20: mol_type = other DNA
aatttgtgatagcttctcat

SEQ ID NO: 46551 - DNA, 20 bp, synthetic construct
  source 1..20: mol_type = other DNA
aaatttgtgatagcttctca

SEQ ID NO: 46552 - DNA, 20 bp, synthetic construct
  source 1..20: mol_type = other DNA
aaaatttgtgatagcttctc

SEQ ID NO: 46553 - DNA, 20 bp, synthetic construct
  source 1..20: mol_type = other DNA
aaaaatttgtgatagcttct

SEQ ID NO: 46554 - DNA, 20 bp, synthetic construct
  source 1..20: mol_type = other DNA
caaaaatttgtgatagcttc

SEQ ID NO: 46555 - DNA, 20 bp, synthetic construct
  source 1..20: mol_type = other DNA
tcaaaaatttgtgatagctt

SEQ ID NO: 46556 - DNA, 20 bp, synthetic construct
  source 1..20: mol_type = other DNA
ctcaaaaatttgtgatagct

SEQ ID NO: 46557 - DNA, 20 bp, synthetic construct
  source 1..20: mol_type = other DNA
tctcaaaaatttgtgatagc

SEQ ID NO: 46558 - DNA, 20 bp, synthetic construct
  source 1..20: mol_type = other DNA
gtctcaaaaatttgtgatag

SEQ ID NO: 46559 - DNA, 20 bp, synthetic construct
  source 1..20: mol_type = other DNA
agtctcaaaaatttgtgata

SEQ ID NO: 46560 - DNA, 20 bp, synthetic construct
  source 1..20: mol_type = other DNA
aagtctcaaaaatttgtgat

SEQ ID NO: 46561 - DNA, 20 bp, synthetic construct
  source 1..20: mol_type = other DNA
aaagtctcaaaaatttgtga

SEQ ID NO: 46562 - DNA, 20 bp, synthetic construct
  source 1..20: mol_type = other DNA
caaagtctcaaaaatttgtg

SEQ ID NO: 46563 - DNA, 20 bp, synthetic construct
  source 1..20: mol_type = other DNA
gcaaagtctcaaaaatttgt

SEQ ID NO: 46564 - DNA, 20 bp, synthetic construct
  source 1..20: mol_type = other DNA
ggcaaagtctcaaaaatttg

SEQ ID NO: 46565 - DNA, 20 bp, synthetic construct
  source 1..20: mol_type = other DNA
aggcaaagtctcaaaaattt

SEQ ID NO: 46566 - DNA, 20 bp, synthetic construct
  source 1..20: mol_type = other DNA
aaggcaaagtctcaaaaatt

SEQ ID NO: 46567 - DNA, 20 bp, synthetic construct
  source 1..20: mol_type = other DNA
aaaggcaaagtctcaaaaat

SEQ ID NO: 46568 - DNA, 20 bp, synthetic construct
  source 1..20: mol_type = other DNA
taaaggcaaagtctcaaaaa

SEQ ID NO: 46569 - DNA, 20 bp, synthetic construct
  source 1..20: mol_type = other DNA
ataaaggcaaagtctcaaaa

SEQ ID NO: 46570 - DNA, 20 bp, synthetic construct
  source 1..20: mol_type = other DNA
aataaaggcaaagtctcaaa

SEQ ID NO: 46571 - DNA, 20 bp, synthetic construct
  source 1..20: mol_type = other DNA
taataaaggcaaagtctcaa

SEQ ID NO: 46572 - DNA, 20 bp, synthetic construct
  source 1..20: mol_type = other DNA
ctaataaaggcaaagtctca

SEQ ID NO: 46573 - DNA, 20 bp, synthetic construct
  source 1..20: mol_type = other DNA
tctaataaaggcaaagtctc

SEQ ID NO: 46574 - DNA, 20 bp, synthetic construct
  source 1..20: mol_type = other DNA
atctaataaaggcaaagtct

SEQ ID NO: 46575 - DNA, 20 bp, synthetic construct
  source 1..20: mol_type = other DNA
aatctaataaaggcaaagtc

SEQ ID NO: 46576 - DNA, 20 bp, synthetic construct
  source 1..20: mol_type = other DNA
caatctaataaaggcaaagt

SEQ ID NO: 46577 - DNA, 20 bp, synthetic construct
  source 1..20: mol_type = other DNA
acaatctaataaaggcaaag

SEQ ID NO: 46578 - DNA, 20 bp, synthetic construct
  source 1..20: mol_type = other DNA
aacaatctaataaaggcaaa

SEQ ID NO: 46579 - DNA, 20 bp, synthetic construct
  source 1..20: mol_type = other DNA
aaacaatctaataaaggcaa

SEQ ID NO: 46580 - DNA, 20 bp, synthetic construct
  source 1..20: mol_type = other DNA
aaaacaatctaataaaggca

SEQ ID NO: 46581 - DNA, 20 bp, synthetic construct
  source 1..20: mol_type = other DNA
taaaacaatctaataaaggc

SEQ ID NO: 46582 - DNA, 20 bp, synthetic construct
  source 1..20: mol_type = other DNA
gtaaaacaatctaataaagg

SEQ ID NO: 46583 - DNA, 20 bp, synthetic construct
  source 1..20: mol_type = other DNA
tgtaaaacaatctaataaag

SEQ ID NO: 46584 - DNA, 20 bp, synthetic construct
  source 1..20: mol_type = other DNA
ttgtaaaacaatctaataaa

SEQ ID NO: 46585 - DNA, 20 bp, synthetic construct
  source 1..20: mol_type = other DNA
cttgtaaaacaatctaataa

SEQ ID NO: 46586 - DNA, 20 bp, synthetic construct
  source 1..20: mol_type = other DNA
tcttgtaaaacaatctaata

SEQ ID NO: 46587 - DNA, 20 bp, synthetic construct
  source 1..20: mol_type = other DNA
ttcttgtaaaacaatctaat

SEQ ID NO: 46588 - DNA, 20 bp, synthetic construct
  source 1..20: mol_type = other DNA
attcttgtaaaacaatctaa

SEQ ID NO: 46589 - DNA, 20 bp, synthetic construct
  source 1..20: mol_type = other DNA
gattcttgtaaaacaatcta

SEQ ID NO: 46590 - DNA, 20 bp, synthetic construct
  source 1..20: mol_type = other DNA
tgattcttgtaaaacaatct

SEQ ID NO: 46591 - DNA, 20 bp, synthetic construct
  source 1..20: mol_type = other DNA
ctgattcttgtaaaacaatc

SEQ ID NO: 46592 - DNA, 20 bp, synthetic construct
  source 1..20: mol_type = other DNA
cctgattcttgtaaaacaat

SEQ ID NO: 46593 - DNA, 20 bp, synthetic construct
  source 1..20: mol_type = other DNA
tcctgattcttgtaaaacaa

SEQ ID NO: 46594 - DNA, 20 bp, synthetic construct
  source 1..20: mol_type = other DNA
ttcctgattcttgtaaaaca

SEQ ID NO: 46595 - DNA, 20 bp, synthetic construct
  source 1..20: mol_type = other DNA
cttcctgattcttgtaaaac

SEQ ID NO: 46596 - DNA, 20 bp, synthetic construct
  source 1..20: mol_type = other DNA
tcttcctgattcttgtaaaa

SEQ ID NO: 46597 - DNA, 20 bp, synthetic construct
  source 1..20: mol_type = other DNA
atcttcctgattcttgtaaa

SEQ ID NO: 46598 - DNA, 20 bp, synthetic construct
  source 1..20: mol_type = other DNA
tatcttcctgattcttgtaa

SEQ ID NO: 46599 - DNA, 20 bp, synthetic construct
  source 1..20: mol_type = other DNA
atatcttcctgattcttgta

SEQ ID NO: 46600 - DNA, 20 bp, synthetic construct
  source 1..20: mol_type = other DNA
tatatcttcctgattcttgt

SEQ ID NO: 46601 - DNA, 20 bp, synthetic construct
  source 1..20: mol_type = other DNA
gtatatcttcctgattcttg

SEQ ID NO: 46602 - DNA, 20 bp, synthetic construct
  source 1..20: mol_type = other DNA
tgtatatcttcctgattctt

SEQ ID NO: 46603 - DNA, 20 bp, synthetic construct
  source 1..20: mol_type = other DNA
gtgtatatcttcctgattct

SEQ ID NO: 46604 - DNA, 20 bp, synthetic construct
  source 1..20: mol_type = other DNA
cgtgtatatcttcctgattc

SEQ ID NO: 46605 - DNA, 20 bp, synthetic construct
  source 1..20: mol_type = other DNA
acgtgtatatcttcctgatt

SEQ ID NO: 46606 - DNA, 20 bp, synthetic construct
  source 1..20: mol_type = other DNA
tacgtgtatatcttcctgat

SEQ ID NO: 46607 - DNA, 20 bp, synthetic construct
  source 1..20: mol_type = other DNA
atacgtgtatatcttcctga

SEQ ID NO: 46608 - DNA, 20 bp, synthetic construct
  source 1..20: mol_type = other DNA
tatacgtgtatatcttcctg

SEQ ID NO: 46609 - DNA, 20 bp, synthetic construct
  source 1..20: mol_type = other DNA
atatacgtgtatatcttcct

SEQ ID NO: 46610 - DNA, 20 bp, synthetic construct
  source 1..20: mol_type = other DNA
catatacgtgtatatcttcc

SEQ ID NO: 46611 - DNA, 20 bp, synthetic construct
  source 1..20: mol_type = other DNA
ccatatacgtgtatatcttc

SEQ ID NO: 46612 - DNA, 20 bp, synthetic construct
  source 1..20: mol_type = other DNA
accatatacgtgtatatctt

SEQ ID NO: 46613 - DNA, 20 bp, synthetic construct
  source 1..20: mol_type = other DNA
taccatatacgtgtatatct

SEQ ID NO: 46614 - DNA, 20 bp, synthetic construct
  source 1..20: mol_type = other DNA
ctaccatatacgtgtatatc

SEQ ID NO: 46615 - DNA, 20 bp, synthetic construct
  source 1..20: mol_type = other DNA
actaccatatacgtgtatat

SEQ ID NO: 46616 - DNA, 20 bp, synthetic construct
  source 1..20: mol_type = other DNA
tactaccatatacgtgtata

SEQ ID NO: 46617 - DNA, 20 bp, synthetic construct
  source 1..20: mol_type = other DNA
ttactaccatatacgtgtat

SEQ ID NO: 46618 - DNA, 20 bp, synthetic construct
  source 1..20: mol_type = other DNA
attactaccatatacgtgta

SEQ ID NO: 46619 - DNA, 20 bp, synthetic construct
  source 1..20: mol_type = other DNA
tattactaccatatacgtgt

SEQ ID NO: 46620 - DNA, 20 bp, synthetic construct
  source 1..20: mol_type = other DNA
atattactaccatatacgtg

SEQ ID NO: 46621 - DNA, 20 bp, synthetic construct
  source 1..20: mol_type = other DNA
catattactaccatatacgt

SEQ ID NO: 46622 - DNA, 20 bp, synthetic construct
  source 1..20: mol_type = other DNA
ccatattactaccatatacg

SEQ ID NO: 46623 - DNA, 20 bp, synthetic construct
  source 1..20: mol_type = other DNA
tccatattactaccatatac

SEQ ID NO: 46624 - DNA, 20 bp, synthetic construct
  source 1..20: mol_type = other DNA
ctccatattactaccatata

SEQ ID NO: 46625 - DNA, 20 bp, synthetic construct
  source 1..20: mol_type = other DNA
actccatattactaccatat

SEQ ID NO: 46626 - DNA, 20 bp, synthetic construct
  source 1..20: mol_type = other DNA
tactccatattactaccata

SEQ ID NO: 46627 - DNA, 20 bp, synthetic construct
  source 1..20: mol_type = other DNA
ctactccatattactaccat

SEQ ID NO: 46628 - DNA, 20 bp, synthetic construct
  source 1..20: mol_type = other DNA
actactccatattactacca

SEQ ID NO: 46629 - DNA, 20 bp, synthetic construct
  source 1..20: mol_type = other DNA
cactactccatattactacc

SEQ ID NO: 46630 - DNA, 20 bp, synthetic construct
  source 1..20: mol_type = other DNA
acactactccatattactac

SEQ ID NO: 46631 - DNA, 20 bp, synthetic construct
  source 1..20: mol_type = other DNA
cacactactccatattacta

SEQ ID NO: 46632 - DNA, 20 bp, synthetic construct
  source 1..20: mol_type = other DNA
ccacactactccatattact

SEQ ID NO: 46633 - DNA, 20 bp, synthetic construct
  source 1..20: mol_type = other DNA
accacactactccatattac

SEQ ID NO: 46634 - DNA, 20 bp, synthetic construct
  source 1..20: mol_type = other DNA
aaccacactactccatatta

SEQ ID NO: 46635 - DNA, 20 bp, synthetic construct
  source 1..20: mol_type = other DNA
caaccacactactccatatt

SEQ ID NO: 46636 - DNA, 20 bp, synthetic construct
  source 1..20: mol_type = other DNA
tcaaccacactactccatat

SEQ ID NO: 46637 - DNA, 20 bp, synthetic construct
  source 1..20: mol_type = other DNA
atcaaccacactactccata

SEQ ID NO: 46638 - DNA, 20 bp, synthetic construct
  source 1..20: mol_type = other DNA
gatcaaccacactactccat

SEQ ID NO: 46639 - DNA, 20 bp, synthetic construct
  source 1..20: mol_type = other DNA
tgatcaaccacactactcca

SEQ ID NO: 46640 - DNA, 20 bp, synthetic construct
  source 1..20: mol_type = other DNA
ctgatcaaccacactactcc

SEQ ID NO: 46641 - DNA, 20 bp, synthetic construct
  source 1..20: mol_type = other DNA
tctgatcaaccacactactc

SEQ ID NO: 46642 - DNA, 20 bp, synthetic construct
  source 1..20: mol_type = other DNA
gtctgatcaaccacactact

SEQ ID NO: 46643 - DNA, 20 bp, synthetic construct
  source 1..20: mol_type = other DNA
agtctgatcaaccacactac

SEQ ID NO: 46644 - DNA, 20 bp, synthetic construct
  source 1..20: mol_type = other DNA
aagtctgatcaaccacacta

SEQ ID NO: 46645 - DNA, 20 bp, synthetic construct
  source 1..20: mol_type = other DNA
taagtctgatcaaccacact

SEQ ID NO: 46646 - DNA, 20 bp, synthetic construct
  source 1..20: mol_type = other DNA
ttaagtctgatcaaccacac

SEQ ID NO: 46647 - DNA, 20 bp, synthetic construct
  source 1..20: mol_type = other DNA
cttaagtctgatcaaccaca

SEQ ID NO: 46648 - DNA, 20 bp, synthetic construct
  source 1..20: mol_type = other DNA
gcttaagtctgatcaaccac

SEQ ID NO: 46649 - DNA, 20 bp, synthetic construct
  source 1..20: mol_type = other DNA
tgcttaagtctgatcaacca

SEQ ID NO: 46650 - DNA, 20 bp, synthetic construct
  source 1..20: mol_type = other DNA
gtgcttaagtctgatcaacc

SEQ ID NO: 46651 - DNA, 20 bp, synthetic construct
  source 1..20: mol_type = other DNA
agtgcttaagtctgatcaac

SEQ ID NO: 46652 - DNA, 20 bp, synthetic construct
  source 1..20: mol_type = other DNA
cagtgcttaagtctgatcaa

SEQ ID NO: 46653 - DNA, 20 bp, synthetic construct
  source 1..20: mol_type = other DNA
acagtgcttaagtctgatca

SEQ ID NO: 46654 - DNA, 20 bp, synthetic construct
  source 1..20: mol_type = other DNA
gacagtgcttaagtctgatc

SEQ ID NO: 46655 - DNA, 20 bp, synthetic construct
  source 1..20: mol_type = other DNA
tgacagtgcttaagtctgat

SEQ ID NO: 46656 - DNA, 20 bp, synthetic construct
  source 1..20: mol_type = other DNA
gtgacagtgcttaagtctga

SEQ ID NO: 46657 - DNA, 20 bp, synthetic construct
  source 1..20: mol_type = other DNA
agtgacagtgcttaagtctg

SEQ ID NO: 46658 - DNA, 20 bp, synthetic construct
  source 1..20: mol_type = other DNA
cagtgacagtgcttaagtct

SEQ ID NO: 46659 - DNA, 20 bp, synthetic construct
  source 1..20: mol_type = other DNA
tcagtgacagtgcttaagtc

SEQ ID NO: 46660 - DNA, 20 bp, synthetic construct
  source 1..20: mol_type = other DNA
atcagtgacagtgcttaagt

SEQ ID NO: 46661 - DNA, 20 bp, synthetic construct
  source 1..20: mol_type = other DNA
catcagtgacagtgcttaag

SEQ ID NO: 46662 - DNA, 20 bp, synthetic construct
  source 1..20: mol_type = other DNA
gcatcagtgacagtgcttaa

SEQ ID NO: 46663 - DNA, 20 bp, synthetic construct
  source 1..20: mol_type = other DNA
agcatcagtgacagtgctta

SEQ ID NO: 46664 - DNA, 20 bp, synthetic construct
  source 1..20: mol_type = other DNA
cagcatcagtgacagtgctt

SEQ ID NO: 46665 - DNA, 20 bp, synthetic construct
  source 1..20: mol_type = other DNA
tcagcatcagtgacagtgct

SEQ ID NO: 46666 - DNA, 20 bp, synthetic construct
  source 1..20: mol_type = other DNA
atcagcatcagtgacagtgc

SEQ ID NO: 46667 - DNA, 20 bp, synthetic construct
  source 1..20: mol_type = other DNA
tatcagcatcagtgacagtg

SEQ ID NO: 46668 - DNA, 20 bp, synthetic construct
  source 1..20: mol_type = other DNA
atatcagcatcagtgacagt

SEQ ID NO: 46669 - DNA, 20 bp, synthetic construct
  source 1..20: mol_type = other DNA
catatcagcatcagtgacag

SEQ ID NO: 46670 - DNA, 20 bp, synthetic construct
  source 1..20: mol_type = other DNA
gcatatcagcatcagtgaca

SEQ ID NO: 46671 - DNA, 20 bp, synthetic construct
  source 1..20: mol_type = other DNA
agcatatcagcatcagtgac

SEQ ID NO: 46672 - DNA, 20 bp, synthetic construct
  source 1..20: mol_type = other DNA
cagcatatcagcatcagtga

SEQ ID NO: 46673 - DNA, 20 bp, synthetic construct
  source 1..20: mol_type = other DNA
ccagcatatcagcatcagtg

SEQ ID NO: 46674 - DNA, 20 bp, synthetic construct
  source 1..20: mol_type = other DNA
cccagcatatcagcatcagt

SEQ ID NO: 46675 - DNA, 20 bp, synthetic construct
  source 1..20: mol_type = other DNA
tcccagcatatcagcatcag

SEQ ID NO: 46676 - DNA, 20 bp, synthetic construct
  source 1..20: mol_type = other DNA
ctcccagcatatcagcatca

SEQ ID NO: 46677 - DNA, 20 bp, synthetic construct
  source 1..20: mol_type = other DNA
tctcccagcatatcagcatc

SEQ ID NO: 46678 - DNA, 20 bp, synthetic construct
  source 1..20: mol_type = other DNA
ttctcccagcatatcagcat

SEQ ID NO: 46679 - DNA, 20 bp, synthetic construct
  source 1..20: mol_type = other DNA
gttctcccagcatatcagca

SEQ ID NO: 46680 - DNA, 20 bp, synthetic construct
  source 1..20: mol_type = other DNA
ggttctcccagcatatcagc

SEQ ID NO: 46681 - DNA, 20 bp, synthetic construct
  source 1..20: mol_type = other DNA
aggttctcccagcatatcag

SEQ ID NO: 46682 - DNA, 20 bp, synthetic construct
  source 1..20: mol_type = other DNA
taggttctcccagcatatca

SEQ ID NO: 46683 - DNA, 20 bp, synthetic construct
  source 1..20: mol_type = other DNA
ctaggttctcccagcatatc

SEQ ID NO: 46684 - DNA, 20 bp, synthetic construct
  source 1..20: mol_type = other DNA
actaggttctcccagcatat

SEQ ID NO: 46685 - DNA, 20 bp, synthetic construct
  source 1..20: mol_type = other DNA
gactaggttctcccagcata

SEQ ID NO: 46686 - DNA, 20 bp, synthetic construct
  source 1..20: mol_type = other DNA
tgactaggttctcccagcat

SEQ ID NO: 46687 - DNA, 20 bp, synthetic construct
  source 1..20: mol_type = other DNA
ctgactaggttctcccagca

SEQ ID NO: 46688 - DNA, 20 bp, synthetic construct
  source 1..20: mol_type = other DNA
cctgactaggttctcccagc

SEQ ID NO: 46689 - DNA, 20 bp, synthetic construct
  source 1..20: mol_type = other DNA
ccctgactaggttctcccag

SEQ ID NO: 46690 - DNA, 20 bp, synthetic construct
  source 1..20: mol_type = other DNA
accctgactaggttctccca

SEQ ID NO: 46691 - DNA, 20 bp, synthetic construct
  source 1..20: mol_type = other DNA
aaccctgactaggttctccc

SEQ ID NO: 46692 - DNA, 20 bp, synthetic construct
  source 1..20: mol_type = other DNA
gaaccctgactaggttctcc

SEQ ID NO: 46693 - DNA, 20 bp, synthetic construct
  source 1..20: mol_type = other DNA
agaaccctgactaggttctc

SEQ ID NO: 46694 - DNA, 20 bp, synthetic construct
  source 1..20: mol_type = other DNA
aagaaccctgactaggttct

SEQ ID NO: 46695 - DNA, 20 bp, synthetic construct
  source 1..20: mol_type = other DNA
gaagaaccctgactaggttc

SEQ ID NO: 46696 - DNA, 20 bp, synthetic construct
  source 1..20: mol_type = other DNA
agaagaaccctgactaggtt

SEQ ID NO: 46697 - DNA, 20 bp, synthetic construct
  source 1..20: mol_type = other DNA
tagaagaaccctgactaggt

SEQ ID NO: 46698 - DNA, 20 bp, synthetic construct
  source 1..20: mol_type = other DNA
atagaagaaccctgactagg

SEQ ID NO: 46699 - DNA, 20 bp, synthetic construct
  source 1..20: mol_type = other DNA
catagaagaaccctgactag

SEQ ID NO: 46700 - DNA, 20 bp, synthetic construct
  source 1..20: mol_type = other DNA
tcatagaagaaccctgacta

SEQ ID NO: 46701 - DNA, 20 bp, synthetic construct
  source 1..20: mol_type = other DNA
ttcatagaagaaccctgact

SEQ ID NO: 46702 - DNA, 20 bp, synthetic construct
  source 1..20: mol_type = other DNA
cttcatagaagaaccctgac

SEQ ID NO: 46703 - DNA, 20 bp, synthetic construct
  source 1..20: mol_type = other DNA
ccttcatagaagaaccctga

SEQ ID NO: 46704 - DNA, 20 bp, synthetic construct
  source 1..20: mol_type = other DNA
accttcatagaagaaccctg

SEQ ID NO: 46705 - DNA, 20 bp, synthetic construct
  source 1..20: mol_type = other DNA
taccttcatagaagaaccct

SEQ ID NO: 46706 - DNA, 20 bp, synthetic construct
  source 1..20: mol_type = other DNA
ataccttcatagaagaaccc

SEQ ID NO: 46707 - DNA, 20 bp, synthetic construct
  source 1..20: mol_type = other DNA
cataccttcatagaagaacc

SEQ ID NO: 46708 - DNA, 20 bp, synthetic construct
  source 1..20: mol_type = other DNA
tcataccttcatagaagaac

SEQ ID NO: 46709 - DNA, 20 bp, synthetic construct
  source 1..20: mol_type = other DNA
gtcataccttcatagaagaa

SEQ ID NO: 46710 - DNA, 20 bp, synthetic construct
  source 1..20: mol_type = other DNA
ggtcataccttcatagaaga

SEQ ID NO: 46711 - DNA, 20 bp, synthetic construct
  source 1..20: mol_type = other DNA
aggtcataccttcatagaag

SEQ ID NO: 46712 - DNA, 20 bp, synthetic construct
  source 1..20: mol_type = other DNA
caggtcataccttcatagaa

SEQ ID NO: 46713 - DNA, 20 bp, synthetic construct
  source 1..20: mol_type = other DNA
ccaggtcataccttcataga

SEQ ID NO: 46714 - DNA, 20 bp, synthetic construct
  source 1..20: mol_type = other DNA
gccaggtcataccttcatag

SEQ ID NO: 46715 - DNA, 20 bp, synthetic construct
  source 1..20: mol_type = other DNA
agccaggtcataccttcata

SEQ ID NO: 46716 - DNA, 20 bp, synthetic construct
  source 1..20: mol_type = other DNA
aagccaggtcataccttcat

SEQ ID NO: 46717 - DNA, 20 bp, synthetic construct
  source 1..20: mol_type = other DNA
gaagccaggtcataccttca

SEQ ID NO: 46718 - DNA, 20 bp, synthetic construct
  source 1..20: mol_type = other DNA
ggaagccaggtcataccttc

SEQ ID NO: 46719 - DNA, 20 bp, synthetic construct
  source 1..20: mol_type = other DNA
aggaagccaggtcatacctt

SEQ ID NO: 46720 - DNA, 20 bp, synthetic construct
  source 1..20: mol_type = other DNA
taggaagccaggtcatacct

SEQ ID NO: 46721 - DNA, 20 bp, synthetic construct
  source 1..20: mol_type = other DNA
gtaggaagccaggtcatacc

SEQ ID NO: 46722 - DNA, 20 bp, synthetic construct
  source 1..20: mol_type = other DNA
ggtaggaagccaggtcatac

SEQ ID NO: 46723 - DNA, 20 bp, synthetic construct
  source 1..20: mol_type = other DNA
gggtaggaagccaggtcata

SEQ ID NO: 46724 - DNA, 20 bp, synthetic construct
  source 1..20: mol_type = other DNA
ggggtaggaagccaggtcat

SEQ ID NO: 46725 - DNA, 20 bp, synthetic construct
  source 1..20: mol_type = other DNA
tggggtaggaagccaggtca

SEQ ID NO: 46726 - DNA, 20 bp, synthetic construct
  source 1..20: mol_type = other DNA
atggggtaggaagccaggtc

SEQ ID NO: 46727 - DNA, 20 bp, synthetic construct
  source 1..20: mol_type = other DNA
aatggggtaggaagccaggt

SEQ ID NO: 46728 - DNA, 20 bp, synthetic construct
  source 1..20: mol_type = other DNA
aaatggggtaggaagccagg

SEQ ID NO: 46729 - DNA, 20 bp, synthetic construct
  source 1..20: mol_type = other DNA
taaatggggtaggaagccag

SEQ ID NO: 46730 - DNA, 20 bp, synthetic construct
  source 1..20: mol_type = other DNA
ataaatggggtaggaagcca

SEQ ID NO: 46731 - DNA, 20 bp, synthetic construct
  source 1..20: mol_type = other DNA
aataaatggggtaggaagcc

SEQ ID NO: 46732 - DNA, 20 bp, synthetic construct
  source 1..20: mol_type = other DNA
aaataaatggggtaggaagc

SEQ ID NO: 46733 - DNA, 20 bp, synthetic construct
  source 1..20: mol_type = other DNA
taaataaatggggtaggaag

SEQ ID NO: 46734 - DNA, 20 bp, synthetic construct
  source 1..20: mol_type = other DNA
ataaataaatggggtaggaa

SEQ ID NO: 46735 - DNA, 20 bp, synthetic construct
  source 1..20: mol_type = other DNA
tataaataaatggggtagga

SEQ ID NO: 46736 - DNA, 20 bp, synthetic construct
  source 1..20: mol_type = other DNA
gtataaataaatggggtagg

SEQ ID NO: 46737 - DNA, 20 bp, synthetic construct
  source 1..20: mol_type = other DNA
agtataaataaatggggtag

SEQ ID NO: 46738 - DNA, 20 bp, synthetic construct
  source 1..20: mol_type = other DNA
aagtataaataaatggggta

SEQ ID NO: 46739 - DNA, 20 bp, synthetic construct
  source 1..20: mol_type = other DNA
gaagtataaataaatggggt

SEQ ID NO: 46740 - DNA, 20 bp, synthetic construct
  source 1..20: mol_type = other DNA
tgaagtataaataaatgggg

SEQ ID NO: 46741 - DNA, 20 bp, synthetic construct
  source 1..20: mol_type = other DNA
gtgaagtataaataaatggg

SEQ ID NO: 46742 - DNA, 20 bp, synthetic construct
  source 1..20: mol_type = other DNA
ggtgaagtataaataaatgg

SEQ ID NO: 46743 - DNA, 20 bp, synthetic construct
  source 1..20: mol_type = other DNA
gggtgaagtataaataaatg

SEQ ID NO: 46744 - DNA, 20 bp, synthetic construct
  source 1..20: mol_type = other DNA
agggtgaagtataaataaat

SEQ ID NO: 46745 - DNA, 20 bp, synthetic construct
  source 1..20: mol_type = other DNA
aagggtgaagtataaataaa

SEQ ID NO: 46746 - DNA, 20 bp, synthetic construct
  source 1..20: mol_type = other DNA
gaagggtgaagtataaataa

SEQ ID NO: 46747 - DNA, 20 bp, synthetic construct
  source 1..20: mol_type = other DNA
agaagggtgaagtataaata

SEQ ID NO: 46748 - DNA, 20 bp, synthetic construct
  source 1..20: mol_type = other DNA
aagaagggtgaagtataaat

SEQ ID NO: 46749 - DNA, 20 bp, synthetic construct
  source 1..20: mol_type = other DNA
taagaagggtgaagtataaa

SEQ ID NO: 46750 - DNA, 20 bp, synthetic construct
  source 1..20: mol_type = other DNA
ctaagaagggtgaagtataa

SEQ ID NO: 46751 - DNA, 20 bp, synthetic construct
  source 1..20: mol_type = other DNA
cctaagaagggtgaagtata

SEQ ID NO: 46752 - DNA, 20 bp, synthetic construct
  source 1..20: mol_type = other DNA
ccctaagaagggtgaagtat

SEQ ID NO: 46753 - DNA, 20 bp, synthetic construct
  source 1..20: mol_type = other DNA
accctaagaagggtgaagta

SEQ ID NO: 46754 - DNA, 20 bp, synthetic construct
  source 1..20: mol_type = other DNA
taccctaagaagggtgaagt

SEQ ID NO: 46755 - DNA, 20 bp, synthetic construct
  source 1..20: mol_type = other DNA
gtaccctaagaagggtgaag

SEQ ID NO: 46756 - DNA, 20 bp, synthetic construct
  source 1..20: mol_type = other DNA
tgtaccctaagaagggtgaa

SEQ ID NO: 46757 - DNA, 20 bp, synthetic construct
  source 1..20: mol_type = other DNA
atgtaccctaagaagggtga

SEQ ID NO: 46758 - DNA, 20 bp, synthetic construct
  source 1..20: mol_type = other DNA
aatgtaccctaagaagggtg

SEQ ID NO: 46759 - DNA, 20 bp, synthetic construct
  source 1..20: mol_type = other DNA
aaatgtaccctaagaagggt

SEQ ID NO: 46760 - DNA, 20 bp, synthetic construct
  source 1..20: mol_type = other DNA
gaaatgtaccctaagaaggg

SEQ ID NO: 46761 - DNA, 20 bp, synthetic construct
  source 1..20: mol_type = other DNA
agaaatgtaccctaagaagg

SEQ ID NO: 46762 - DNA, 20 bp, synthetic construct
  source 1..20: mol_type = other DNA
cagaaatgtaccctaagaag

SEQ ID NO: 46763 - DNA, 20 bp, synthetic construct
  source 1..20: mol_type = other DNA
acagaaatgtaccctaagaa

SEQ ID NO: 46764 - DNA, 20 bp, synthetic construct
  source 1..20: mol_type = other DNA
cacagaaatgtaccctaaga

SEQ ID NO: 46765 - DNA, 20 bp, synthetic construct
  source 1..20: mol_type = other DNA
tcacagaaatgtaccctaag

SEQ ID NO: 46766 - DNA, 20 bp, synthetic construct
  source 1..20: mol_type = other DNA
ctcacagaaatgtaccctaa

SEQ ID NO: 46767 - DNA, 20 bp, synthetic construct
  source 1..20: mol_type = other DNA
actcacagaaatgtacccta

SEQ ID NO: 46768 - DNA, 20 bp, synthetic construct
  source 1..20: mol_type = other DNA
aactcacagaaatgtaccct

SEQ ID NO: 46769 - DNA, 20 bp, synthetic construct
  source 1..20: mol_type = other DNA
aaactcacagaaatgtaccc

SEQ ID NO: 46770 - DNA, 20 bp, synthetic construct
  source 1..20: mol_type = other DNA
aaaactcacagaaatgtacc

SEQ ID NO: 46771 - DNA, 20 bp, synthetic construct
  source 1..20: mol_type = other DNA
taaaactcacagaaatgtac

SEQ ID NO: 46772 - DNA, 20 bp, synthetic construct
  source 1..20: mol_type = other DNA
ttaaaactcacagaaatgta

SEQ ID NO: 46773 - DNA, 20 bp, synthetic construct
  source 1..20: mol_type = other DNA
gttaaaactcacagaaatgt

SEQ ID NO: 46774 - DNA, 20 bp, synthetic construct
  source 1..20: mol_type = other DNA
tgttaaaactcacagaaatg

SEQ ID NO: 46775 - DNA, 20 bp, synthetic construct
  source 1..20: mol_type = other DNA
ttgttaaaactcacagaaat

SEQ ID NO: 46776 - DNA, 20 bp, synthetic construct
  source 1..20: mol_type = other DNA
attgttaaaactcacagaaa

SEQ ID NO: 46777 - DNA, 20 bp, synthetic construct
  source 1..20: mol_type = other DNA
aattgttaaaactcacagaa

SEQ ID NO: 46778 - DNA, 20 bp, synthetic construct
  source 1..20: mol_type = other DNA
caattgttaaaactcacaga

SEQ ID NO: 46779 - DNA, 20 bp, synthetic construct
  source 1..20: mol_type = other DNA
gcaattgttaaaactcacag

SEQ ID NO: 46780 - DNA, 20 bp, synthetic construct
  source 1..20: mol_type = other DNA
tgcaattgttaaaactcaca

SEQ ID NO: 46781 - DNA, 20 bp, synthetic construct
  source 1..20: mol_type = other DNA
atgcaattgttaaaactcac

SEQ ID NO: 46782 - DNA, 20 bp, synthetic construct
  source 1..20: mol_type = other DNA
tatgcaattgttaaaactca

SEQ ID NO: 46783 - DNA, 20 bp, synthetic construct
  source 1..20: mol_type = other DNA
gtatgcaattgttaaaactc

SEQ ID NO: 46784 - DNA, 20 bp, synthetic construct
  source 1..20: mol_type = other DNA
tgtatgcaattgttaaaact

SEQ ID NO: 46785 - DNA, 20 bp, synthetic construct
  source 1..20: mol_type = other DNA
ttgtatgcaattgttaaaac

SEQ ID NO: 46786 - DNA, 20 bp, synthetic construct
  source 1..20: mol_type = other DNA
attgtatgcaattgttaaaa

SEQ ID NO: 46787 - DNA, 20 bp, synthetic construct
  source 1..20: mol_type = other DNA
gattgtatgcaattgttaaa

SEQ ID NO: 46788 - DNA, 20 bp, synthetic construct
  source 1..20: mol_type = other DNA
tgattgtatgcaattgttaa

SEQ ID NO: 46789 - DNA, 20 bp, synthetic construct
  source 1..20: mol_type = other DNA
ctgattgtatgcaattgtta

SEQ ID NO: 46790 - DNA, 20 bp, synthetic construct
  source 1..20: mol_type = other DNA
actgattgtatgcaattgtt

SEQ ID NO: 46791 - DNA, 20 bp, synthetic construct
  source 1..20: mol_type = other DNA
cactgattgtatgcaattgt

SEQ ID NO: 46792 - DNA, 20 bp, synthetic construct
  source 1..20: mol_type = other DNA
acactgattgtatgcaattg

SEQ ID NO: 46793 - DNA, 20 bp, synthetic construct
  source 1..20: mol_type = other DNA
tacactgattgtatgcaatt

SEQ ID NO: 46794 - DNA, 20 bp, synthetic construct
  source 1..20: mol_type = other DNA
ttacactgattgtatgcaat

SEQ ID NO: 46795 - DNA, 20 bp, synthetic construct
  source 1..20: mol_type = other DNA
gttacactgattgtatgcaa

SEQ ID NO: 46796 - DNA, 20 bp, synthetic construct
  source 1..20: mol_type = other DNA
agttacactgattgtatgca

SEQ ID NO: 46797 - DNA, 20 bp, synthetic construct
  source 1..20: mol_type = other DNA
tagttacactgattgtatgc

SEQ ID NO: 46798 - DNA, 20 bp, synthetic construct
  source 1..20: mol_type = other DNA
gtagttacactgattgtatg

SEQ ID NO: 46799 - DNA, 20 bp, synthetic construct
  source 1..20: mol_type = other DNA
ggtagttacactgattgtat

SEQ ID NO: 46800 - DNA, 20 bp, synthetic construct
  source 1..20: mol_type = other DNA
tggtagttacactgattgta

SEQ ID NO: 46801 - DNA, 20 bp, synthetic construct
  source 1..20: mol_type = other DNA
gtggtagttacactgattgt

SEQ ID NO: 46802 - DNA, 20 bp, synthetic construct
  source 1..20: mol_type = other DNA
ggtggtagttacactgattg

SEQ ID NO: 46803 - DNA, 20 bp, synthetic construct
  source 1..20: mol_type = other DNA
tggtggtagttacactgatt

SEQ ID NO: 46804 - DNA, 20 bp, synthetic construct
  source 1..20: mol_type = other DNA
gtggtggtagttacactgat

SEQ ID NO: 46805 - DNA, 20 bp, synthetic construct
  source 1..20: mol_type = other DNA
tgtggtggtagttacactga

SEQ ID NO: 46806 - DNA, 20 bp, synthetic construct
  source 1..20: mol_type = other DNA
ttgtggtggtagttacactg

SEQ ID NO: 46807 - DNA, 20 bp, synthetic construct
  source 1..20: mol_type = other DNA
attgtggtggtagttacact

SEQ ID NO: 46808 - DNA, 20 bp, synthetic construct
  source 1..20: mol_type = other DNA
gattgtggtggtagttacac

SEQ ID NO: 46809 - DNA, 20 bp, synthetic construct
  source 1..20: mol_type = other DNA
tgattgtggtggtagttaca

SEQ ID NO: 46810 - DNA, 20 bp, synthetic construct
  source 1..20: mol_type = other DNA
ttgattgtggtggtagttac

SEQ ID NO: 46811 - DNA, 20 bp, synthetic construct
  source 1..20: mol_type = other DNA
cttgattgtggtggtagtta

SEQ ID NO: 46812 - DNA, 20 bp, synthetic construct
  source 1..20: mol_type = other DNA
acttgattgtggtggtagtt

SEQ ID NO: 46813 - DNA, 20 bp, synthetic construct
  source 1..20: mol_type = other DNA
aacttgattgtggtggtagt

SEQ ID NO: 46814 - DNA, 20 bp, synthetic construct
  source 1..20: mol_type = other DNA
taacttgattgtggtggtag

SEQ ID NO: 46815 - DNA, 20 bp, synthetic construct
  source 1..20: mol_type = other DNA
ttaacttgattgtggtggta

SEQ ID NO: 46816 - DNA, 20 bp, synthetic construct
  source 1..20: mol_type = other DNA
attaacttgattgtggtggt

SEQ ID NO: 46817 - DNA, 20 bp, synthetic construct
  source 1..20: mol_type = other DNA
tattaacttgattgtggtgg

SEQ ID NO: 46818 - DNA, 20 bp, synthetic construct
  source 1..20: mol_type = other DNA
ctattaacttgattgtggtg

SEQ ID NO: 46819 - DNA, 20 bp, synthetic construct
  source 1..20: mol_type = other DNA
tctattaacttgattgtggt

SEQ ID NO: 46820 - DNA, 20 bp, synthetic construct
  source 1..20: mol_type = other DNA
ttctattaacttgattgtgg

SEQ ID NO: 46821 - DNA, 20 bp, synthetic construct
  source 1..20: mol_type = other DNA
gttctattaacttgattgtg

SEQ ID NO: 46822 - DNA, 20 bp, synthetic construct
  source 1..20: mol_type = other DNA
tgttctattaacttgattgt

SEQ ID NO: 46823 - DNA, 20 bp, synthetic construct
  source 1..20: mol_type = other DNA
ctgttctattaacttgattg

SEQ ID NO: 46824 - DNA, 20 bp, synthetic construct
  source 1..20: mol_type = other DNA
actgttctattaacttgatt

SEQ ID NO: 46825 - DNA, 20 bp, synthetic construct
  source 1..20: mol_type = other DNA
aactgttctattaacttgat

SEQ ID NO: 46826 - DNA, 20 bp, synthetic construct
  source 1..20: mol_type = other DNA
aaactgttctattaacttga

SEQ ID NO: 46827 - DNA, 20 bp, synthetic construct
  source 1..20: mol_type = other DNA
gaaactgttctattaacttg

SEQ ID NO: 46828 - DNA, 20 bp, synthetic construct
  source 1..20: mol_type = other DNA
tgaaactgttctattaactt

SEQ ID NO: 46829 - DNA, 20 bp, synthetic construct
  source 1..20: mol_type = other DNA
atgaaactgttctattaact

SEQ ID NO: 46830 - DNA, 20 bp, synthetic construct
  source 1..20: mol_type = other DNA
aatgaaactgttctattaac

SEQ ID NO: 46831 - DNA, 20 bp, synthetic construct
  source 1..20: mol_type = other DNA
caatgaaactgttctattaa

SEQ ID NO: 46832 - DNA, 20 bp, synthetic construct
  source 1..20: mol_type = other DNA
gcaatgaaactgttctatta

SEQ ID NO: 46833 - DNA, 20 bp, synthetic construct
  source 1..20: mol_type = other DNA
ggcaatgaaactgttctatt

SEQ ID NO: 46834 - DNA, 20 bp, synthetic construct
  source 1..20: mol_type = other DNA
gggcaatgaaactgttctat

SEQ ID NO: 46835 - DNA, 20 bp, synthetic construct
  source 1..20: mol_type = other DNA
tgggcaatgaaactgttcta

SEQ ID NO: 46836 - DNA, 20 bp, synthetic construct
  source 1..20: mol_type = other DNA
gtgggcaatgaaactgttct

SEQ ID NO: 46837 - DNA, 20 bp, synthetic construct
  source 1..20: mol_type = other DNA
ggtgggcaatgaaactgttc

SEQ ID NO: 46838 - DNA, 20 bp, synthetic construct
  source 1..20: mol_type = other DNA
tggtgggcaatgaaactgtt

SEQ ID NO: 46839 - DNA, 20 bp, synthetic construct
  source 1..20: mol_type = other DNA
ttggtgggcaatgaaactgt

SEQ ID NO: 46840 - DNA, 20 bp, synthetic construct
  source 1..20: mol_type = other DNA
tttggtgggcaatgaaactg

SEQ ID NO: 46841 - DNA, 20 bp, synthetic construct
  source 1..20: mol_type = other DNA
ttttggtgggcaatgaaact

SEQ ID NO: 46842 - DNA, 20 bp, synthetic construct
  source 1..20: mol_type = other DNA
attttggtgggcaatgaaac

SEQ ID NO: 46843 - DNA, 20 bp, synthetic construct
  source 1..20: mol_type = other DNA
gattttggtgggcaatgaaa

SEQ ID NO: 46844 - DNA, 20 bp, synthetic construct
  source 1..20: mol_type = other DNA
ggattttggtgggcaatgaa

SEQ ID NO: 46845 - DNA, 20 bp, synthetic construct
  source 1..20: mol_type = other DNA
gggattttggtgggcaatga

SEQ ID NO: 46846 - DNA, 20 bp, synthetic construct
  source 1..20: mol_type = other DNA
agggattttggtgggcaatg

SEQ ID NO: 46847 - DNA, 20 bp, synthetic construct
  source 1..20: mol_type = other DNA
gagggattttggtgggcaat

SEQ ID NO: 46848 - DNA, 20 bp, synthetic construct
  source 1..20: mol_type = other DNA
tgagggattttggtgggcaa

SEQ ID NO: 46849 - DNA, 20 bp, synthetic construct
  source 1..20: mol_type = other DNA
ttgagggattttggtgggca

SEQ ID NO: 46850 - DNA, 20 bp, synthetic construct
  source 1..20: mol_type = other DNA
tttgagggattttggtgggc

SEQ ID NO: 46851 - DNA, 20 bp, synthetic construct
  source 1..20: mol_type = other DNA
atttgagggattttggtggg

SEQ ID NO: 46852 - DNA, 20 bp, synthetic construct
  source 1..20: mol_type = other DNA
gatttgagggattttggtgg

SEQ ID NO: 46853 - DNA, 20 bp, synthetic construct
  source 1..20: mol_type = other DNA
tgatttgagggattttggtg

SEQ ID NO: 46854 - DNA, 20 bp, synthetic construct
  source 1..20: mol_type = other DNA
gtgatttgagggattttggt

SEQ ID NO: 46855 - DNA, 20 bp, synthetic construct
  source 1..20: mol_type = other DNA
agtgatttgagggattttgg

SEQ ID NO: 46856 - DNA, 20 bp, synthetic construct
  source 1..20: mol_type = other DNA
aagtgatttgagggattttg

SEQ ID NO: 46857 - DNA, 20 bp, synthetic construct
  source 1..20: mol_type = other DNA
aaagtgatttgagggatttt

SEQ ID NO: 46858 - DNA, 20 bp, synthetic construct
  source 1..20: mol_type = other DNA
aaaagtgatttgagggattt

SEQ ID NO: 46859 - DNA, 20 bp, synthetic construct
  source 1..20: mol_type = other DNA
gaaaagtgatttgagggatt

SEQ ID NO: 46860 - DNA, 20 bp, synthetic construct
  source 1..20: mol_type = other DNA
tgaaaagtgatttgagggat

SEQ ID NO: 46861 - DNA, 20 bp, synthetic construct
  source 1..20: mol_type = other DNA
ctgaaaagtgatttgaggga

SEQ ID NO: 46862 - DNA, 20 bp, synthetic construct
  source 1..20: mol_type = other DNA
actgaaaagtgatttgaggg

SEQ ID NO: 46863 - DNA, 20 bp, synthetic construct
  source 1..20: mol_type = other DNA
cactgaaaagtgatttgagg

SEQ ID NO: 46864 - DNA, 20 bp, synthetic construct
  source 1..20: mol_type = other DNA
tcactgaaaagtgatttgag

SEQ ID NO: 46865 - DNA, 20 bp, synthetic construct
  source 1..20: mol_type = other DNA
ttcactgaaaagtgatttga

SEQ ID NO: 46866 - DNA, 20 bp, synthetic construct
  source 1..20: mol_type = other DNA
gttcactgaaaagtgatttg

SEQ ID NO: 46867 - DNA, 20 bp, synthetic construct
  source 1..20: mol_type = other DNA
ggttcactgaaaagtgattt

SEQ ID NO: 46868 - DNA, 20 bp, synthetic construct
  source 1..20: mol_type = other DNA
gggttcactgaaaagtgatt

SEQ ID NO: 46869 - DNA, 20 bp, synthetic construct
  source 1..20: mol_type = other DNA
agggttcactgaaaagtgat

SEQ ID NO: 46870 - DNA, 20 bp, synthetic construct
  source 1..20: mol_type = other DNA
gagggttcactgaaaagtga

SEQ ID NO: 46871 - DNA, 20 bp, synthetic construct
  source 1..20: mol_type = other DNA
ggagggttcactgaaaagtg

SEQ ID NO: 46872 - DNA, 20 bp, synthetic construct
  source 1..20: mol_type = other DNA
aggagggttcactgaaaagt

SEQ ID NO: 46873 - DNA, 20 bp, synthetic construct
  source 1..20: mol_type = other DNA
gaggagggttcactgaaaag

SEQ ID NO: 46874 - DNA, 20 bp, synthetic construct
  source 1..20: mol_type = other DNA
agaggagggttcactgaaaa

SEQ ID NO: 46875 - DNA, 20 bp, synthetic construct
  source 1..20: mol_type = other DNA
gagaggagggttcactgaaa

SEQ ID NO: 46876 - DNA, 20 bp, synthetic construct
  source 1..20: mol_type = other DNA
agagaggagggttcactgaa

SEQ ID NO: 46877 - DNA, 20 bp, synthetic construct
  source 1..20: mol_type = other DNA
gagagaggagggttcactga

SEQ ID NO: 46878 - DNA, 20 bp, synthetic construct
  source 1..20: mol_type = other DNA
agagagaggagggttcactg

SEQ ID NO: 46879 - DNA, 20 bp, synthetic construct
  source 1..20: mol_type = other DNA
gagagagaggagggttcact

SEQ ID NO: 46880 - DNA, 20 bp, synthetic construct
  source 1..20: mol_type = other DNA
ggagagagaggagggttcac

SEQ ID NO: 46881 - DNA, 20 bp, synthetic construct
  source 1..20: mol_type = other DNA
tggagagagaggagggttca

SEQ ID NO: 46882 - DNA, 20 bp, synthetic construct
  source 1..20: mol_type = other DNA
ttggagagagaggagggttc

SEQ ID NO: 46883 - DNA, 20 bp, synthetic construct
  source 1..20: mol_type = other DNA
gttggagagagaggagggtt

SEQ ID NO: 46884 - DNA, 20 bp, synthetic construct
  source 1..20: mol_type = other DNA
ggttggagagagaggagggt

SEQ ID NO: 46885 - DNA, 20 bp, synthetic construct
  source 1..20: mol_type = other DNA
tggttggagagagaggaggg

SEQ ID NO: 46886 - DNA, 20 bp, synthetic construct
  source 1..20: mol_type = other DNA
atggttggagagagaggagg

SEQ ID NO: 46887 - DNA, 20 bp, synthetic construct
  source 1..20: mol_type = other DNA
aatggttggagagagaggag

SEQ ID NO: 46888 - DNA, 20 bp, synthetic construct
  source 1..20: mol_type = other DNA
caatggttggagagagagga

SEQ ID NO: 46889 - DNA, 20 bp, synthetic construct
  source 1..20: mol_type = other DNA
tcaatggttggagagagagg

SEQ ID NO: 46890 - DNA, 20 bp, synthetic construct
  source 1..20: mol_type = other DNA
atcaatggttggagagagag

SEQ ID NO: 46891 - DNA, 20 bp, synthetic construct
  source 1..20: mol_type = other DNA
aatcaatggttggagagaga

SEQ ID NO: 46892 - DNA, 20 bp, synthetic construct
  source 1..20: mol_type = other DNA
aaatcaatggttggagagag

SEQ ID NO: 46893 - DNA, 20 bp, synthetic construct
  source 1..20: mol_type = other DNA
caaatcaatggttggagaga

SEQ ID NO: 46894 - DNA, 20 bp, synthetic construct
  source 1..20: mol_type = other DNA
acaaatcaatggttggagag

SEQ ID NO: 46895 - DNA, 20 bp, synthetic construct
  source 1..20: mol_type = other DNA
gacaaatcaatggttggaga

SEQ ID NO: 46896 - DNA, 20 bp, synthetic construct
  source 1..20: mol_type = other DNA
agacaaatcaatggttggag

SEQ ID NO: 46897 - DNA, 20 bp, synthetic construct
  source 1..20: mol_type = other DNA
aagacaaatcaatggttgga

SEQ ID NO: 46898 - DNA, 20 bp, synthetic construct
  source 1..20: mol_type = other DNA
gaagacaaatcaatggttgg

SEQ ID NO: 46899 - DNA, 20 bp, synthetic construct
  source 1..20: mol_type = other DNA
ggaagacaaatcaatggttg

SEQ ID NO: 46900 - DNA, 20 bp, synthetic construct
  source 1..20: mol_type = other DNA
tggaagacaaatcaatggtt

SEQ ID NO: 46901 - DNA, 20 bp, synthetic construct
  source 1..20: mol_type = other DNA
atggaagacaaatcaatggt

SEQ ID NO: 46902 - DNA, 20 bp, synthetic construct
  source 1..20: mol_type = other DNA
gatggaagacaaatcaatgg

SEQ ID NO: 46903 - DNA, 20 bp, synthetic construct
  source 1..20: mol_type = other DNA
ggatggaagacaaatcaatg

SEQ ID NO: 46904 - DNA, 20 bp, synthetic construct
  source 1..20: mol_type = other DNA
aggatggaagacaaatcaat

SEQ ID NO: 46905 - DNA, 20 bp, synthetic construct
  source 1..20: mol_type = other DNA
aaggatggaagacaaatcaa

SEQ ID NO: 46906 - DNA, 20 bp, synthetic construct
  source 1..20: mol_type = other DNA
taaggatggaagacaaatca

SEQ ID NO: 46907 - DNA, 20 bp, synthetic construct
  source 1..20: mol_type = other DNA
gtaaggatggaagacaaatc

SEQ ID NO: 46908 - DNA, 20 bp, synthetic construct
  source 1..20: mol_type = other DNA
cgtaaggatggaagacaaat

SEQ ID NO: 46909 - DNA, 20 bp, synthetic construct
  source 1..20: mol_type = other DNA
ccgtaaggatggaagacaaa

SEQ ID NO: 46910 - DNA, 20 bp, synthetic construct
  source 1..20: mol_type = other DNA
accgtaaggatggaagacaa

SEQ ID NO: 46911 - DNA, 20 bp, synthetic construct
  source 1..20: mol_type = other DNA
aaccgtaaggatggaagaca

SEQ ID NO: 46912 - DNA, 20 bp, synthetic construct
  source 1..20: mol_type = other DNA
aaaccgtaaggatggaagac

SEQ ID NO: 46913 - DNA, 20 bp, synthetic construct
  source 1..20: mol_type = other DNA
caaaccgtaaggatggaaga

SEQ ID NO: 46914 - DNA, 20 bp, synthetic construct
  source 1..20: mol_type = other DNA
acaaaccgtaaggatggaag

SEQ ID NO: 46915 - DNA, 20 bp, synthetic construct
  source 1..20: mol_type = other DNA
cacaaaccgtaaggatggaa

SEQ ID NO: 46916 - DNA, 20 bp, synthetic construct
  source 1..20: mol_type = other DNA
acacaaaccgtaaggatgga

SEQ ID NO: 46917 - DNA, 20 bp, synthetic construct
  source 1..20: mol_type = other DNA
gacacaaaccgtaaggatgg

SEQ ID NO: 46918 - DNA, 20 bp, synthetic construct
  source 1..20: mol_type = other DNA
ggacacaaaccgtaaggatg

SEQ ID NO: 46919 - DNA, 20 bp, synthetic construct
  source 1..20: mol_type = other DNA
aggacacaaaccgtaaggat

SEQ ID NO: 46920 - DNA, 20 bp, synthetic construct
  source 1..20: mol_type = other DNA
aaggacacaaaccgtaagga

SEQ ID NO: 46921 - DNA, 20 bp, synthetic construct
  source 1..20: mol_type = other DNA
gaaggacacaaaccgtaagg

SEQ ID NO: 46922 - DNA, 20 bp, synthetic construct
  source 1..20: mol_type = other DNA
ggaaggacacaaaccgtaag

SEQ ID NO: 46923 - DNA, 20 bp, synthetic construct
  source 1..20: mol_type = other DNA
aggaaggacacaaaccgtaa

SEQ ID NO: 46924 - DNA, 20 bp, synthetic construct
  source 1..20: mol_type = other DNA
gaggaaggacacaaaccgta

SEQ ID NO: 46925 - DNA, 20 bp, synthetic construct
  source 1..20: mol_type = other DNA
ggaggaaggacacaaaccgt

SEQ ID NO: 46926 - DNA, 20 bp, synthetic construct
  source 1..20: mol_type = other DNA
aggaggaaggacacaaaccg

SEQ ID NO: 46927 - DNA, 20 bp, synthetic construct
  source 1..20: mol_type = other DNA
gaggaggaaggacacaaacc

SEQ ID NO: 46928 - DNA, 20 bp, synthetic construct
  source 1..20: mol_type = other DNA
agaggaggaaggacacaaac

SEQ ID NO: 46929 - DNA, 20 bp, synthetic construct
  source 1..20: mol_type = other DNA
tagaggaggaaggacacaaa

SEQ ID NO: 46930 - DNA, 20 bp, synthetic construct
  source 1..20: mol_type = other DNA
atagaggaggaaggacacaa

SEQ ID NO: 46931 - DNA, 20 bp, synthetic construct
  source 1..20: mol_type = other DNA
catagaggaggaaggacaca

SEQ ID NO: 46932 - DNA, 20 bp, synthetic construct
  source 1..20: mol_type = other DNA
ccatagaggaggaaggacac

SEQ ID NO: 46933 - DNA, 20 bp, synthetic construct
  source 1..20: mol_type = other DNA
tccatagaggaggaaggaca

SEQ ID NO: 46934 - DNA, 20 bp, synthetic construct
  source 1..20: mol_type = other DNA
ttccatagaggaggaaggac

SEQ ID NO: 46935 - DNA, 20 bp, synthetic construct
  source 1..20: mol_type = other DNA
cttccatagaggaggaagga

SEQ ID NO: 46936 - DNA, 20 bp, synthetic construct
  source 1..20: mol_type = other DNA
acttccatagaggaggaagg

SEQ ID NO: 46937 - DNA, 20 bp, synthetic construct
  source 1..20: mol_type = other DNA
aacttccatagaggaggaag

SEQ ID NO: 46938 - DNA, 20 bp, synthetic construct
  source 1..20: mol_type = other DNA
aaacttccatagaggaggaa

SEQ ID NO: 46939 - DNA, 20 bp, synthetic construct
  source 1..20: mol_type = other DNA
taaacttccatagaggagga

SEQ ID NO: 46940 - DNA, 20 bp, synthetic construct
  source 1..20: mol_type = other DNA
gtaaacttccatagaggagg

SEQ ID NO: 46941 - DNA, 20 bp, synthetic construct
  source 1..20: mol_type = other DNA
agtaaacttccatagaggag

SEQ ID NO: 46942 - DNA, 20 bp, synthetic construct
  source 1..20: mol_type = other DNA
gagtaaacttccatagagga

SEQ ID NO: 46943 - DNA, 20 bp, synthetic construct
  source 1..20: mol_type = other DNA
agagtaaacttccatagagg

SEQ ID NO: 46944 - DNA, 20 bp, synthetic construct
  source 1..20: mol_type = other DNA
aagagtaaacttccatagag

SEQ ID NO: 46945 - DNA, 20 bp, synthetic construct
  source 1..20: mol_type = other DNA
caagagtaaacttccataga

SEQ ID NO: 46946 - DNA, 20 bp, synthetic construct
  source 1..20: mol_type = other DNA
gcaagagtaaacttccatag

SEQ ID NO: 46947 - DNA, 20 bp, synthetic construct
  source 1..20: mol_type = other DNA
agcaagagtaaacttccata

SEQ ID NO: 46948 - DNA, 20 bp, synthetic construct
  source 1..20: mol_type = other DNA
aagcaagagtaaacttccat

SEQ ID NO: 46949 - DNA, 20 bp, synthetic construct
  source 1..20: mol_type = other DNA
aaagcaagagtaaacttcca

SEQ ID NO: 46950 - DNA, 20 bp, synthetic construct
  source 1..20: mol_type = other DNA
aaaagcaagagtaaacttcc

SEQ ID NO: 46951 - DNA, 20 bp, synthetic construct
  source 1..20: mol_type = other DNA
aaaaagcaagagtaaacttc

SEQ ID NO: 46952 - DNA, 20 bp, synthetic construct
  source 1..20: mol_type = other DNA
aaaaaagcaagagtaaactt

SEQ ID NO: 46953 - DNA, 20 bp, synthetic construct
  source 1..20: mol_type = other DNA
taaaaaagcaagagtaaact

SEQ ID NO: 46954 - DNA, 20 bp, synthetic construct
  source 1..20: mol_type = other DNA
ataaaaaagcaagagtaaac

SEQ ID NO: 46955 - DNA, 20 bp, synthetic construct
  source 1..20: mol_type = other DNA
cataaaaaagcaagagtaaa

SEQ ID NO: 46956 - DNA, 20 bp, synthetic construct
  source 1..20: mol_type = other DNA
acataaaaaagcaagagtaa

SEQ ID NO: 46957 - DNA, 20 bp, synthetic construct
  source 1..20: mol_type = other DNA
gacataaaaaagcaagagta

SEQ ID NO: 46958 - DNA, 20 bp, synthetic construct
  source 1..20: mol_type = other DNA
tgacataaaaaagcaagagt

SEQ ID NO: 46959 - DNA, 20 bp, synthetic construct
  source 1..20: mol_type = other DNA
atgacataaaaaagcaagag

SEQ ID NO: 46960 - DNA, 20 bp, synthetic construct
  source 1..20: mol_type = other DNA
catgacataaaaaagcaaga

SEQ ID NO: 46961 - DNA, 20 bp, synthetic construct
  source 1..20: mol_type = other DNA
acatgacataaaaaagcaag

SEQ ID NO: 46962 - DNA, 20 bp, synthetic construct
  source 1..20: mol_type = other DNA
aacatgacataaaaaagcaa

SEQ ID NO: 46963 - DNA, 20 bp, synthetic construct
  source 1..20: mol_type = other DNA
aaacatgacataaaaaagca

SEQ ID NO: 46964 - DNA, 20 bp, synthetic construct
  source 1..20: mol_type = other DNA
taaacatgacataaaaaagc

SEQ ID NO: 46965 - DNA, 20 bp, synthetic construct
  source 1..20: mol_type = other DNA
ctaaacatgacataaaaaag

SEQ ID NO: 46966 - DNA, 20 bp, synthetic construct
  source 1..20: mol_type = other DNA
actaaacatgacataaaaaa

SEQ ID NO: 46967 - DNA, 20 bp, synthetic construct
  source 1..20: mol_type = other DNA
gactaaacatgacataaaaa

SEQ ID NO: 46968 - DNA, 20 bp, synthetic construct
  source 1..20: mol_type = other DNA
tgactaaacatgacataaaa

SEQ ID NO: 46969 - DNA, 20 bp, synthetic construct
  source 1..20: mol_type = other DNA
ttgactaaacatgacataaa

SEQ ID NO: 46970 - DNA, 20 bp, synthetic construct
  source 1..20: mol_type = other DNA
tttgactaaacatgacataa

SEQ ID NO: 46971 - DNA, 20 bp, synthetic construct
  source 1..20: mol_type = other DNA
ttttgactaaacatgacata

SEQ ID NO: 46972 - DNA, 20 bp, synthetic construct
  source 1..20: mol_type = other DNA
gttttgactaaacatgacat

SEQ ID NO: 46973 - DNA, 20 bp, synthetic construct
  source 1..20: mol_type = other DNA
tgttttgactaaacatgaca

SEQ ID NO: 46974 - DNA, 20 bp, synthetic construct
  source 1..20: mol_type = other DNA
gtgttttgactaaacatgac

SEQ ID NO: 46975 - DNA, 20 bp, synthetic construct
  source 1..20: mol_type = other DNA
ggtgttttgactaaacatga

SEQ ID NO: 46976 - DNA, 20 bp, synthetic construct
  source 1..20: mol_type = other DNA
tggtgttttgactaaacatg

SEQ ID NO: 46977 - DNA, 20 bp, synthetic construct
  source 1..20: mol_type = other DNA
atggtgttttgactaaacat

SEQ ID NO: 46978 - DNA, 20 bp, synthetic construct
  source 1..20: mol_type = other DNA
aatggtgttttgactaaaca

SEQ ID NO: 46979 - DNA, 20 bp, synthetic construct
  source 1..20: mol_type = other DNA
taatggtgttttgactaaac

SEQ ID NO: 46980 - DNA, 20 bp, synthetic construct
  source 1..20: mol_type = other DNA
ctaatggtgttttgactaaa

SEQ ID NO: 46981 - DNA, 20 bp, synthetic construct
  source 1..20: mol_type = other DNA
actaatggtgttttgactaa

SEQ ID NO: 46982 - DNA, 20 bp, synthetic construct
  source 1..20: mol_type = other DNA
aactaatggtgttttgacta

SEQ ID NO: 46983 - DNA, 20 bp, synthetic construct
  source 1..20: mol_type = other DNA
caactaatggtgttttgact

SEQ ID NO: 46984 - DNA, 20 bp, synthetic construct
  source 1..20: mol_type = other DNA
ccaactaatggtgttttgac

SEQ ID NO: 46985 - DNA, 20 bp, synthetic construct
  source 1..20: mol_type = other DNA
accaactaatggtgttttga

SEQ ID NO: 46986 - DNA, 20 bp, synthetic construct
  source 1..20: mol_type = other DNA
aaccaactaatggtgttttg

SEQ ID NO: 46987 - DNA, 20 bp, synthetic construct
  source 1..20: mol_type = other DNA
aaaccaactaatggtgtttt

SEQ ID NO: 46988 - DNA, 20 bp, synthetic construct
  source 1..20: mol_type = other DNA
caaaccaactaatggtgttt

SEQ ID NO: 46989 - DNA, 20 bp, synthetic construct
  source 1..20: mol_type = other DNA
tcaaaccaactaatggtgtt

SEQ ID NO: 46990 - DNA, 20 bp, synthetic construct
  source 1..20: mol_type = other DNA
gtcaaaccaactaatggtgt

SEQ ID NO: 46991 - DNA, 20 bp, synthetic construct
  source 1..20: mol_type = other DNA
agtcaaaccaactaatggtg

SEQ ID NO: 46992 - DNA, 20 bp, synthetic construct
  source 1..20: mol_type = other DNA
cagtcaaaccaactaatggt

SEQ ID NO: 46993 - DNA, 20 bp, synthetic construct
  source 1..20: mol_type = other DNA
tcagtcaaaccaactaatgg

SEQ ID NO: 46994 - DNA, 20 bp, synthetic construct
  source 1..20: mol_type = other DNA
atcagtcaaaccaactaatg

SEQ ID NO: 46995 - DNA, 20 bp, synthetic construct
  source 1..20: mol_type = other DNA
tatcagtcaaaccaactaat

SEQ ID NO: 46996 - DNA, 20 bp, synthetic construct
  source 1..20: mol_type = other DNA
ttatcagtcaaaccaactaa

SEQ ID NO: 46997 - DNA, 20 bp, synthetic construct
  source 1..20: mol_type = other DNA
gttatcagtcaaaccaacta

SEQ ID NO: 46998 - DNA, 20 bp, synthetic construct
  source 1..20: mol_type = other DNA
tgttatcagtcaaaccaact

SEQ ID NO: 46999 - DNA, 20 bp, synthetic construct
  source 1..20: mol_type = other DNA
gtgttatcagtcaaaccaac

SEQ ID NO: 47000 - DNA, 20 bp, synthetic construct
  source 1..20: mol_type = other DNA
agtgttatcagtcaaaccaa

SEQ ID NO: 47001 - DNA, 20 bp, synthetic construct
  source 1..20: mol_type = other DNA
aagtgttatcagtcaaacca

SEQ ID NO: 47002 - DNA, 20 bp, synthetic construct
  source 1..20: mol_type = other DNA
caagtgttatcagtcaaacc

SEQ ID NO: 47003 - DNA, 20 bp, synthetic construct
  source 1..20: mol_type = other DNA
tcaagtgttatcagtcaaac

SEQ ID NO: 47004 - DNA, 20 bp, synthetic construct
  source 1..20: mol_type = other DNA
ttcaagtgttatcagtcaaa

SEQ ID NO: 47005 - DNA, 20 bp, synthetic construct
  source 1..20: mol_type = other DNA
tttcaagtgttatcagtcaa

SEQ ID NO: 47006 - DNA, 20 bp, synthetic construct
  source 1..20: mol_type = other DNA
ttttcaagtgttatcagtca

SEQ ID NO: 47007 - DNA, 20 bp, synthetic construct
  source 1..20: mol_type = other DNA
gttttcaagtgttatcagtc

SEQ ID NO: 47008 - DNA, 20 bp, synthetic construct
  source 1..20: mol_type = other DNA
ggttttcaagtgttatcagt

SEQ ID NO: 47009 - DNA, 20 bp, synthetic construct
  source 1..20: mol_type = other DNA
aggttttcaagtgttatcag

SEQ ID NO: 47010 - DNA, 20 bp, synthetic construct
  source 1..20: mol_type = other DNA
caggttttcaagtgttatca

SEQ ID NO: 47011 - DNA, 20 bp, synthetic construct
  source 1..20: mol_type = other DNA
tcaggttttcaagtgttatc

SEQ ID NO: 47012 - DNA, 20 bp, synthetic construct
  source 1..20: mol_type = other DNA
gtcaggttttcaagtgttat

SEQ ID NO: 47013 - DNA, 20 bp, synthetic construct
  source 1..20: mol_type = other DNA
ggtcaggttttcaagtgtta

SEQ ID NO: 47014 - DNA, 20 bp, synthetic construct
  source 1..20: mol_type = other DNA
aggtcaggttttcaagtgtt

SEQ ID NO: 47015 - DNA, 20 bp, synthetic construct
  source 1..20: mol_type = other DNA
aaggtcaggttttcaagtgt

SEQ ID NO: 47016 - DNA, 20 bp, synthetic construct
  source 1..20: mol_type = other DNA
gaaggtcaggttttcaagtg

SEQ ID NO: 47017 - DNA, 20 bp, synthetic construct
  source 1..20: mol_type = other DNA
agaaggtcaggttttcaagt

SEQ ID NO: 47018 - DNA, 20 bp, synthetic construct
  source 1..20: mol_type = other DNA
cagaaggtcaggttttcaag

SEQ ID NO: 47019 - DNA, 20 bp, synthetic construct
  source 1..20: mol_type = other DNA
acagaaggtcaggttttcaa

SEQ ID NO: 47020 - DNA, 20 bp, synthetic construct
  source 1..20: mol_type = other DNA
aacagaaggtcaggttttca

SEQ ID NO: 47021 - DNA, 20 bp, synthetic construct
  source 1..20: mol_type = other DNA
gaacagaaggtcaggttttc

SEQ ID NO: 47022 - DNA, 20 bp, synthetic construct
  source 1..20: mol_type = other DNA
ggaacagaaggtcaggtttt

SEQ ID NO: 47023 - DNA, 20 bp, synthetic construct
  source 1..20: mol_type = other DNA
aggaacagaaggtcaggttt

SEQ ID NO: 47024 - DNA, 20 bp, synthetic construct
  source 1..20: mol_type = other DNA
aaggaacagaaggtcaggtt

SEQ ID NO: 47025 - DNA, 20 bp, synthetic construct
  source 1..20: mol_type = other DNA
gaaggaacagaaggtcaggt

SEQ ID NO: 47026 - DNA, 20 bp, synthetic construct
  source 1..20: mol_type = other DNA
agaaggaacagaaggtcagg

SEQ ID NO: 47027 - DNA, 20 bp, synthetic construct
  source 1..20: mol_type = other DNA
cagaaggaacagaaggtcag

SEQ ID NO: 47028 - DNA, 20 bp, synthetic construct
  source 1..20: mol_type = other DNA
acagaaggaacagaaggtca

SEQ ID NO: 47029 - DNA, 20 bp, synthetic construct
  source 1..20: mol_type = other DNA
aacagaaggaacagaaggtc

SEQ ID NO: 47030 - DNA, 20 bp, synthetic construct
  source 1..20: mol_type = other DNA
gaacagaaggaacagaaggt

SEQ ID NO: 47031 - DNA, 20 bp, synthetic construct
  source 1..20: mol_type = other DNA
agaacagaaggaacagaagg

SEQ ID NO: 47032 - DNA, 20 bp, synthetic construct
  source 1..20: mol_type = other DNA
gagaacagaaggaacagaag

SEQ ID NO: 47033 - DNA, 20 bp, synthetic construct
  source 1..20: mol_type = other DNA
agagaacagaaggaacagaa

SEQ ID NO: 47034 - DNA, 20 bp, synthetic construct
  source 1..20: mol_type = other DNA
tagagaacagaaggaacaga

SEQ ID NO: 47035 - DNA, 20 bp, synthetic construct
  source 1..20: mol_type = other DNA
atagagaacagaaggaacag

SEQ ID NO: 47036 - DNA, 20 bp, synthetic construct
  source 1..20: mol_type = other DNA
catagagaacagaaggaaca

SEQ ID NO: 47037 - DNA, 20 bp, synthetic construct
  source 1..20: mol_type = other DNA
ccatagagaacagaaggaac

SEQ ID NO: 47038 - DNA, 20 bp, synthetic construct
  source 1..20: mol_type = other DNA
tccatagagaacagaaggaa

SEQ ID NO: 47039 - DNA, 20 bp, synthetic construct
  source 1..20: mol_type = other DNA
ttccatagagaacagaagga

SEQ ID NO: 47040 - DNA, 20 bp, synthetic construct
  source 1..20: mol_type = other DNA
cttccatagagaacagaagg

SEQ ID NO: 47041 - DNA, 20 bp, synthetic construct
  source 1..20: mol_type = other DNA
gcttccatagagaacagaag

SEQ ID NO: 47042 - DNA, 20 bp, synthetic construct
  source 1..20: mol_type = other DNA
tgcttccatagagaacagaa

SEQ ID NO: 47043 - DNA, 20 bp, synthetic construct
  source 1..20: mol_type = other DNA
ttgcttccatagagaacaga

SEQ ID NO: 47044 - DNA, 20 bp, synthetic construct
  source 1..20: mol_type = other DNA
tttgcttccatagagaacag

SEQ ID NO: 47045 - DNA, 20 bp, synthetic construct
  source 1..20: mol_type = other DNA
ttttgcttccatagagaaca

SEQ ID NO: 47046 - DNA, 20 bp, synthetic construct
  source 1..20: mol_type = other DNA
attttgcttccatagagaac

SEQ ID NO: 47047 - DNA, 20 bp, synthetic construct
  source 1..20: mol_type = other DNA
tattttgcttccatagagaa

SEQ ID NO: 47048 - DNA, 20 bp, synthetic construct
  source 1..20: mol_type = other DNA
atattttgcttccatagaga

SEQ ID NO: 47049 - DNA, 20 bp, synthetic construct
  source 1..20: mol_type = other DNA
aatattttgcttccatagag

SEQ ID NO: 47050 - DNA, 20 bp, synthetic construct
  source 1..20: mol_type = other DNA
taatattttgcttccataga

SEQ ID NO: 47051 - DNA, 20 bp, synthetic construct
  source 1..20: mol_type = other DNA
ttaatattttgcttccatag

SEQ ID NO: 47052 - DNA, 20 bp, synthetic construct
  source 1..20: mol_type = other DNA
tttaatattttgcttccata

SEQ ID NO: 47053 - DNA, 20 bp, synthetic construct
  source 1..20: mol_type = other DNA
atttaatattttgcttccat

SEQ ID NO: 47054 - DNA, 20 bp, synthetic construct
  source 1..20: mol_type = other DNA
tatttaatattttgcttcca

SEQ ID NO: 47055 - DNA, 20 bp, synthetic construct
  source 1..20: mol_type = other DNA
ttatttaatattttgcttcc

SEQ ID NO: 47056 - DNA, 20 bp, synthetic construct
  source 1..20: mol_type = other DNA
tttatttaatattttgcttc

SEQ ID NO: 47057 - DNA, 20 bp, synthetic construct
  source 1..20: mol_type = other DNA
gtttatttaatattttgctt

SEQ ID NO: 47058 - DNA, 20 bp, synthetic construct
  source 1..20: mol_type = other DNA
tgtttatttaatattttgct

SEQ ID NO: 47059 - DNA, 20 bp, synthetic construct
  source 1..20: mol_type = other DNA
ttgtttatttaatattttgc

SEQ ID NO: 47060 - DNA, 20 bp, synthetic construct
  source 1..20: mol_type = other DNA
tttgtttatttaatattttg

SEQ ID NO: 47061 - DNA, 20 bp, synthetic construct
  source 1..20: mol_type = other DNA
ttttgtttatttaatatttt

SEQ ID NO: 47062 - DNA, 20 bp, synthetic construct
  source 1..20: mol_type = other DNA
attttgtttatttaatattt

SEQ ID NO: 47063 - DNA, 20 bp, synthetic construct
  source 1..20: mol_type = other DNA
gattttgtttatttaatatt

SEQ ID NO: 47064 - DNA, 20 bp, synthetic construct
  source 1..20: mol_type = other DNA
agattttgtttatttaatat

SEQ ID NO: 47065 - DNA, 20 bp, synthetic construct
  source 1..20: mol_type = other DNA
aagattttgtttatttaata

SEQ ID NO: 47066 - DNA, 20 bp, synthetic construct
  source 1..20: mol_type = other DNA
gaagattttgtttatttaat

SEQ ID NO: 47067 - DNA, 20 bp, synthetic construct
  source 1..20: mol_type = other DNA
ggaagattttgtttatttaa

SEQ ID NO: 47068 - DNA, 20 bp, synthetic construct
  source 1..20: mol_type = other DNA
gggaagattttgtttattta

SEQ ID NO: 47069 - DNA, 20 bp, synthetic construct
  source 1..20: mol_type = other DNA
agggaagattttgtttattt

SEQ ID NO: 47070 - DNA, 20 bp, synthetic construct
  source 1..20: mol_type = other DNA
aagggaagattttgtttatt

SEQ ID NO: 47071 - DNA, 20 bp, synthetic construct
  source 1..20: mol_type = other DNA
taagggaagattttgtttat

SEQ ID NO: 47072 - DNA, 20 bp, synthetic construct
  source 1..20: mol_type = other DNA
ttaagggaagattttgttta

SEQ ID NO: 47073 - DNA, 20 bp, synthetic construct
  source 1..20: mol_type = other DNA
attaagggaagattttgttt

SEQ ID NO: 47074 - DNA, 20 bp, synthetic construct
  source 1..20: mol_type = other DNA
tattaagggaagattttgtt

SEQ ID NO: 47075 - DNA, 20 bp, synthetic construct
  source 1..20: mol_type = other DNA
gtattaagggaagattttgt

SEQ ID NO: 47076 - DNA, 20 bp, synthetic construct
  source 1..20: mol_type = other DNA
tgtattaagggaagattttg

SEQ ID NO: 47077 - DNA, 20 bp, synthetic construct
  source 1..20: mol_type = other DNA
atgtattaagggaagatttt

SEQ ID NO: 47078 - DNA, 20 bp, synthetic construct
  source 1..20: mol_type = other DNA
catgtattaagggaagattt

SEQ ID NO: 47079 - DNA, 20 bp, synthetic construct
  source 1..20: mol_type = other DNA
acatgtattaagggaagatt

SEQ ID NO: 47080 - DNA, 20 bp, synthetic construct
  source 1..20: mol_type = other DNA
tacatgtattaagggaagat

SEQ ID NO: 47081 - DNA, 20 bp, synthetic construct
  source 1..20: mol_type = other DNA
ttacatgtattaagggaaga

SEQ ID NO: 47082 - DNA, 20 bp, synthetic construct
  source 1..20: mol_type = other DNA
cttacatgtattaagggaag

SEQ ID NO: 47083 - DNA, 20 bp, synthetic construct
  source 1..20: mol_type = other DNA
tcttacatgtattaagggaa

SEQ ID NO: 47084 - DNA, 20 bp, synthetic construct
  source 1..20: mol_type = other DNA
atcttacatgtattaaggga

SEQ ID NO: 47085 - DNA, 20 bp, synthetic construct
  source 1..20: mol_type = other DNA
tatcttacatgtattaaggg

SEQ ID NO: 47086 - DNA, 20 bp, synthetic construct
  source 1..20: mol_type = other DNA
atatcttacatgtattaagg

SEQ ID NO: 47087 - DNA, 20 bp, synthetic construct
  source 1..20: mol_type = other DNA
gatatcttacatgtattaag

SEQ ID NO: 47088 - DNA, 20 bp, synthetic construct
  source 1..20: mol_type = other DNA
tgatatcttacatgtattaa

SEQ ID NO: 47089 - DNA, 20 bp, synthetic construct
  source 1..20: mol_type = other DNA
atgatatcttacatgtatta

SEQ ID NO: 47090 - DNA, 20 bp, synthetic construct
  source 1..20: mol_type = other DNA
tatgatatcttacatgtatt

SEQ ID NO: 47091 - DNA, 20 bp, synthetic construct
  source 1..20: mol_type = other DNA
ttatgatatcttacatgtat

SEQ ID NO: 47092 - DNA, 20 bp, synthetic construct
  source 1..20: mol_type = other DNA
tttatgatatcttacatgta

SEQ ID NO: 47093 - DNA, 20 bp, synthetic construct
  source 1..20: mol_type = other DNA
gtttatgatatcttacatgt

SEQ ID NO: 47094 - DNA, 20 bp, synthetic construct
  source 1..20: mol_type = other DNA
ggtttatgatatcttacatg

SEQ ID NO: 47095 - DNA, 20 bp, synthetic construct
  source 1..20: mol_type = other DNA
aggtttatgatatcttacat

SEQ ID NO: 47096 - DNA, 20 bp, synthetic construct
  source 1..20: mol_type = other DNA
taggtttatgatatcttaca

SEQ ID NO: 47097 - DNA, 20 bp, synthetic construct
  source 1..20: mol_type = other DNA
ttaggtttatgatatcttac

SEQ ID NO: 47098 - DNA, 20 bp, synthetic construct
  source 1..20: mol_type = other DNA
gttaggtttatgatatctta

SEQ ID NO: 47099 - DNA, 20 bp, synthetic construct
  source 1..20: mol_type = other DNA
agttaggtttatgatatctt

SEQ ID NO: 47100 - DNA, 20 bp, synthetic construct
  source 1..20: mol_type = other DNA
tagttaggtttatgatatct

SEQ ID NO: 47101 - DNA, 20 bp, synthetic construct
  source 1..20: mol_type = other DNA
ttagttaggtttatgatatc

SEQ ID NO: 47102 - DNA, 20 bp, synthetic construct
  source 1..20: mol_type = other DNA
tttagttaggtttatgatat

SEQ ID NO: 47103 - DNA, 20 bp, synthetic construct
  source 1..20: mol_type = other DNA
gtttagttaggtttatgata

SEQ ID NO: 47104 - DNA, 20 bp, synthetic construct
  source 1..20: mol_type = other DNA
tgtttagttaggtttatgat

SEQ ID NO: 47105 - DNA, 20 bp, synthetic construct
  source 1..20: mol_type = other DNA
atgtttagttaggtttatga

SEQ ID NO: 47106 - DNA, 20 bp, synthetic construct
  source 1..20: mol_type = other DNA
aatgtttagttaggtttatg

SEQ ID NO: 47107 - DNA, 20 bp, synthetic construct
  source 1..20: mol_type = other DNA
aaatgtttagttaggtttat

SEQ ID NO: 47108 - DNA, 20 bp, synthetic construct
  source 1..20: mol_type = other DNA
aaaatgtttagttaggttta

SEQ ID NO: 47109 - DNA, 20 bp, synthetic construct
  source 1..20: mol_type = other DNA
caaaatgtttagttaggttt

SEQ ID NO: 47110 - DNA, 20 bp, synthetic construct
  source 1..20: mol_type = other DNA
gcaaaatgtttagttaggtt

SEQ ID NO: 47111 - DNA, 20 bp, synthetic construct
  source 1..20: mol_type = other DNA
tgcaaaatgtttagttaggt

SEQ ID NO: 47112 - DNA, 20 bp, synthetic construct
  source 1..20: mol_type = other DNA
ttgcaaaatgtttagttagg

SEQ ID NO: 47113 - DNA, 20 bp, synthetic construct
  source 1..20: mol_type = other DNA
gttgcaaaatgtttagttag

SEQ ID NO: 47114 - DNA, 20 bp, synthetic construct
  source 1..20: mol_type = other DNA
tgttgcaaaatgtttagtta

SEQ ID NO: 47115 - DNA, 20 bp, synthetic construct
  source 1..20: mol_type = other DNA
ttgttgcaaaatgtttagtt

SEQ ID NO: 47116 - DNA, 20 bp, synthetic construct
  source 1..20: mol_type = other DNA
tttgttgcaaaatgtttagt

SEQ ID NO: 47117 - DNA, 20 bp, synthetic construct
  source 1..20: mol_type = other DNA
atttgttgcaaaatgtttag

SEQ ID NO: 47118 - DNA, 20 bp, synthetic construct
  source 1..20: mol_type = other DNA
tatttgttgcaaaatgttta

SEQ ID NO: 47119 - DNA, 20 bp, synthetic construct
  source 1..20: mol_type = other DNA
ttatttgttgcaaaatgttt

SEQ ID NO: 47120 - DNA, 20 bp, synthetic construct
  source 1..20: mol_type = other DNA
attatttgttgcaaaatgtt

SEQ ID NO: 47121 - DNA, 20 bp, synthetic construct
  source 1..20: mol_type = other DNA
tattatttgttgcaaaatgt

SEQ ID NO: 47122 - DNA, 20 bp, synthetic construct
  source 1..20: mol_type = other DNA
ttattatttgttgcaaaatg

SEQ ID NO: 47123 - DNA, 20 bp, synthetic construct
  source 1..20: mol_type = other DNA
tttattatttgttgcaaaat

SEQ ID NO: 47124 - DNA, 20 bp, synthetic construct
  source 1..20: mol_type = other DNA
gtttattatttgttgcaaaa

SEQ ID NO: 47125 - DNA, 20 bp, synthetic construct
  source 1..20: mol_type = other DNA
cgtttattatttgttgcaaa

SEQ ID NO: 47126 - DNA, 20 bp, synthetic construct
  source 1..20: mol_type = other DNA
acgtttattatttgttgcaa

SEQ ID NO: 47127 - DNA, 20 bp, synthetic construct
  source 1..20: mol_type = other DNA
aacgtttattatttgttgca

SEQ ID NO: 47128 - DNA, 20 bp, synthetic construct
  source 1..20: mol_type = other DNA
taacgtttattatttgttgc

SEQ ID NO: 47129 - DNA, 20 bp, synthetic construct
  source 1..20: mol_type = other DNA
ctaacgtttattatttgttg

SEQ ID NO: 47130 - DNA, 20 bp, synthetic construct
  source 1..20: mol_type = other DNA
gctaacgtttattatttgtt

SEQ ID NO: 47131 - DNA, 20 bp, synthetic construct
  source 1..20: mol_type = other DNA
agctaacgtttattatttgt

SEQ ID NO: 47132 - DNA, 20 bp, synthetic construct
  source 1..20: mol_type = other DNA
aagctaacgtttattatttg

SEQ ID NO: 47133 - DNA, 20 bp, synthetic construct
  source 1..20: mol_type = other DNA
aaagctaacgtttattattt

SEQ ID NO: 47134 - DNA, 20 bp, synthetic construct
  source 1..20: mol_type = other DNA
taaagctaacgtttattatt

SEQ ID NO: 47135 - DNA, 20 bp, synthetic construct
  source 1..20: mol_type = other DNA
ataaagctaacgtttattat

SEQ ID NO: 47136 - DNA, 20 bp, synthetic construct
  source 1..20: mol_type = other DNA
tataaagctaacgtttatta

SEQ ID NO: 47137 - DNA, 20 bp, synthetic construct
  source 1..20: mol_type = other DNA
atataaagctaacgtttatt

SEQ ID NO: 47138 - DNA, 20 bp, synthetic construct
  source 1..20: mol_type = other DNA
catataaagctaacgtttat

SEQ ID NO: 47139 - DNA, 20 bp, synthetic construct
  source 1..20: mol_type = other DNA
gcatataaagctaacgttta

SEQ ID NO: 47140 - DNA, 20 bp, synthetic construct
  source 1..20: mol_type = other DNA
tgcatataaagctaacgttt

SEQ ID NO: 47141 - DNA, 20 bp, synthetic construct
  source 1..20: mol_type = other DNA
ttgcatataaagctaacgtt

SEQ ID NO: 47142 - DNA, 20 bp, synthetic construct
  source 1..20: mol_type = other DNA
tttgcatataaagctaacgt

SEQ ID NO: 47143 - DNA, 20 bp, synthetic construct
  source 1..20: mol_type = other DNA
atttgcatataaagctaacg

SEQ ID NO: 47144 - DNA, 20 bp, synthetic construct
  source 1..20: mol_type = other DNA
catttgcatataaagctaac

SEQ ID NO: 47145 - DNA, 20 bp, synthetic construct
  source 1..20: mol_type = other DNA
acatttgcatataaagctaa

SEQ ID NO: 47146 - DNA, 20 bp, synthetic construct
  source 1..20: mol_type = other DNA
tacatttgcatataaagcta

SEQ ID NO: 47147 - DNA, 20 bp, synthetic construct
  source 1..20: mol_type = other DNA
ttacatttgcatataaagct

SEQ ID NO: 47148 - DNA, 20 bp, synthetic construct
  source 1..20: mol_type = other DNA
tttacatttgcatataaagc

SEQ ID NO: 47149 - DNA, 20 bp, synthetic construct
  source 1..20: mol_type = other DNA
atttacatttgcatataaag

SEQ ID NO: 47150 - DNA, 20 bp, synthetic construct
  source 1..20: mol_type = other DNA
tatttacatttgcatataaa

SEQ ID NO: 47151 - DNA, 20 bp, synthetic construct
  source 1..20: mol_type = other DNA
gtatttacatttgcatataa

SEQ ID NO: 47152 - DNA, 20 bp, synthetic construct
  source 1..20: mol_type = other DNA
tgtatttacatttgcatata

SEQ ID NO: 47153 - DNA, 20 bp, synthetic construct
  source 1..20: mol_type = other DNA
ctgtatttacatttgcatat

SEQ ID NO: 47154 - DNA, 20 bp, synthetic construct
  source 1..20: mol_type = other DNA
cctgtatttacatttgcata

SEQ ID NO: 47155 - DNA, 20 bp, synthetic construct
  source 1..20: mol_type = other DNA
gcctgtatttacatttgcat

SEQ ID NO: 47156 - DNA, 20 bp, synthetic construct
  source 1..20: mol_type = other DNA
agcctgtatttacatttgca

SEQ ID NO: 47157 - DNA, 20 bp, synthetic construct
  source 1..20: mol_type = other DNA
cagcctgtatttacatttgc

SEQ ID NO: 47158 - DNA, 20 bp, synthetic construct
  source 1..20: mol_type = other DNA
tcagcctgtatttacatttg

SEQ ID NO: 47159 - DNA, 20 bp, synthetic construct
  source 1..20: mol_type = other DNA
ctcagcctgtatttacattt

SEQ ID NO: 47160 - DNA, 20 bp, synthetic construct
  source 1..20: mol_type = other DNA
gctcagcctgtatttacatt

SEQ ID NO: 47161 - DNA, 20 bp, synthetic construct
  source 1..20: mol_type = other DNA
tgctcagcctgtatttacat

SEQ ID NO: 47162 - DNA, 20 bp, synthetic construct
  source 1..20: mol_type = other DNA
atgctcagcctgtatttaca

SEQ ID NO: 47163 - DNA, 20 bp, synthetic construct
  source 1..20: mol_type = other DNA
gatgctcagcctgtatttac

SEQ ID NO: 47164 - DNA, 20 bp, synthetic construct
  source 1..20: mol_type = other DNA
ggatgctcagcctgtattta

SEQ ID NO: 47165 - DNA, 20 bp, synthetic construct
  source 1..20: mol_type = other DNA
gggatgctcagcctgtattt

SEQ ID NO: 47166 - DNA, 20 bp, synthetic construct
  source 1..20: mol_type = other DNA
agggatgctcagcctgtatt

SEQ ID NO: 47167 - DNA, 20 bp, synthetic construct
  source 1..20: mol_type = other DNA
tagggatgctcagcctgtat

SEQ ID NO: 47168 - DNA, 20 bp, synthetic construct
  source 1..20: mol_type = other DNA
ttagggatgctcagcctgta

SEQ ID NO: 47169 - DNA, 20 bp, synthetic construct
  source 1..20: mol_type = other DNA
attagggatgctcagcctgt

SEQ ID NO: 47170 - DNA, 20 bp, synthetic construct
  source 1..20: mol_type = other DNA
gattagggatgctcagcctg

SEQ ID NO: 47171 - DNA, 20 bp, synthetic construct
  source 1..20: mol_type = other DNA
cgattagggatgctcagcct

SEQ ID NO: 47172 - DNA, 20 bp, synthetic construct
  source 1..20: mol_type = other DNA
ccgattagggatgctcagcc

SEQ ID NO: 47173 - DNA, 20 bp, synthetic construct
  source 1..20: mol_type = other DNA
tccgattagggatgctcagc

SEQ ID NO: 47174 - DNA, 20 bp, synthetic construct
  source 1..20: mol_type = other DNA
ttccgattagggatgctcag

SEQ ID NO: 47175 - DNA, 20 bp, synthetic construct
  source 1..20: mol_type = other DNA
tttccgattagggatgctca

SEQ ID NO: 47176 - DNA, 20 bp, synthetic construct
  source 1..20: mol_type = other DNA
atttccgattagggatgctc

SEQ ID NO: 47177 - DNA, 20 bp, synthetic construct
  source 1..20: mol_type = other DNA
catttccgattagggatgct

SEQ ID NO: 47178 - DNA, 20 bp, synthetic construct
  source 1..20: mol_type = other DNA
gcatttccgattagggatgc

SEQ ID NO: 47179 - DNA, 20 bp, synthetic construct
  source 1..20: mol_type = other DNA
agcatttccgattagggatg

SEQ ID NO: 47180 - DNA, 20 bp, synthetic construct
  source 1..20: mol_type = other DNA
gagcatttccgattagggat

SEQ ID NO: 47181 - DNA, 20 bp, synthetic construct
  source 1..20: mol_type = other DNA
ggagcatttccgattaggga

SEQ ID NO: 47182 - DNA, 20 bp, synthetic construct
  source 1..20: mol_type = other DNA
tggagcatttccgattaggg

SEQ ID NO: 47183 - DNA, 20 bp, synthetic construct
  source 1..20: mol_type = other DNA
ttggagcatttccgattagg

SEQ ID NO: 47184 - DNA, 20 bp, synthetic construct
  source 1..20: mol_type = other DNA
tttggagcatttccgattag

SEQ ID NO: 47185 - DNA, 20 bp, synthetic construct
  source 1..20: mol_type = other DNA
ttttggagcatttccgatta

SEQ ID NO: 47186 - DNA, 20 bp, synthetic construct
  source 1..20: mol_type = other DNA
attttggagcatttccgatt

SEQ ID NO: 47187 - DNA, 20 bp, synthetic construct
  source 1..20: mol_type = other DNA
aattttggagcatttccgat

SEQ ID NO: 47188 - DNA, 20 bp, synthetic construct
  source 1..20: mol_type = other DNA
aaattttggagcatttccga

SEQ ID NO: 47189 - DNA, 20 bp, synthetic construct
  source 1..20: mol_type = other DNA
gaaattttggagcatttccg

SEQ ID NO: 47190 - DNA, 20 bp, synthetic construct
  source 1..20: mol_type = other DNA
tgaaattttggagcatttcc

SEQ ID NO: 47191 - DNA, 20 bp, synthetic construct
  source 1..20: mol_type = other DNA
atgaaattttggagcatttc

SEQ ID NO: 47192 - DNA, 20 bp, synthetic construct
  source 1..20: mol_type = other DNA
tatgaaattttggagcattt

SEQ ID NO: 47193 - DNA, 20 bp, synthetic construct
  source 1..20: mol_type = other DNA
atatgaaattttggagcatt

SEQ ID NO: 47194 - DNA, 20 bp, synthetic construct
  source 1..20: mol_type = other DNA
aatatgaaattttggagcat

SEQ ID NO: 47195 - DNA, 20 bp, synthetic construct
  source 1..20: mol_type = other DNA
aaatatgaaattttggagca

SEQ ID NO: 47196 - DNA, 20 bp, synthetic construct
  source 1..20: mol_type = other DNA
aaaatatgaaattttggagc

SEQ ID NO: 47197 - DNA, 20 bp, synthetic construct
  source 1..20: mol_type = other DNA
caaaatatgaaattttggag

SEQ ID NO: 47198 - DNA, 20 bp, synthetic construct
  source 1..20: mol_type = other DNA
tcaaaatatgaaattttgga

SEQ ID NO: 47199 - DNA, 20 bp, synthetic construct
  source 1..20: mol_type = other DNA
ttcaaaatatgaaattttgg

SEQ ID NO: 47200 - DNA, 20 bp, synthetic construct
  source 1..20: mol_type = other DNA
attcaaaatatgaaattttg

SEQ ID NO: 47201 - DNA, 20 bp, synthetic construct
  source 1..20: mol_type = other DNA
aattcaaaatatgaaatttt

SEQ ID NO: 47202 - DNA, 20 bp, synthetic construct
  source 1..20: mol_type = other DNA
taattcaaaatatgaaattt

SEQ ID NO: 47203 - DNA, 20 bp, synthetic construct
  source 1..20: mol_type = other DNA
ctaattcaaaatatgaaatt

SEQ ID NO: 47204 - DNA, 20 bp, synthetic construct
  source 1..20: mol_type = other DNA
cctaattcaaaatatgaaat

SEQ ID NO: 47205 - DNA, 20 bp, synthetic construct
  source 1..20: mol_type = other DNA
ccctaattcaaaatatgaaa

SEQ ID NO: 47206 - DNA, 20 bp, synthetic construct
  source 1..20: mol_type = other DNA
tccctaattcaaaatatgaa

SEQ ID NO: 47207 - DNA, 20 bp, synthetic construct
  source 1..20: mol_type = other DNA
atccctaattcaaaatatga

SEQ ID NO: 47208 - DNA, 20 bp, synthetic construct
  source 1..20: mol_type = other DNA
catccctaattcaaaatatg

SEQ ID NO: 47209 - DNA, 20 bp, synthetic construct
  source 1..20: mol_type = other DNA
acatccctaattcaaaatat

SEQ ID NO: 47210 - DNA, 20 bp, synthetic construct
  source 1..20: mol_type = other DNA
aacatccctaattcaaaata

SEQ ID NO: 47211 - DNA, 20 bp, synthetic construct
  source 1..20: mol_type = other DNA
gaacatccctaattcaaaat

SEQ ID NO: 47212 - DNA, 20 bp, synthetic construct
  source 1..20: mol_type = other DNA
tgaacatccctaattcaaaa

SEQ ID NO: 47213 - DNA, 20 bp, synthetic construct
  source 1..20: mol_type = other DNA
ttgaacatccctaattcaaa

SEQ ID NO: 47214 - DNA, 20 bp, synthetic construct
  source 1..20: mol_type = other DNA
cttgaacatccctaattcaa

SEQ ID NO: 47215 - DNA, 20 bp, synthetic construct
  source 1..20: mol_type = other DNA
gcttgaacatccctaattca

SEQ ID NO: 47216 - DNA, 20 bp, synthetic construct
  source 1..20: mol_type = other DNA
tgcttgaacatccctaattc

SEQ ID NO: 47217 - DNA, 20 bp, synthetic construct
  source 1..20: mol_type = other DNA
gtgcttgaacatccctaatt

SEQ ID NO: 47218 - DNA, 20 bp, synthetic construct
  source 1..20: mol_type = other DNA
agtgcttgaacatccctaat

SEQ ID NO: 47219 - DNA, 20 bp, synthetic construct
  source 1..20: mol_type = other DNA
tagtgcttgaacatccctaa

SEQ ID NO: 47220 - DNA, 20 bp, synthetic construct
  source 1..20: mol_type = other DNA
ttagtgcttgaacatcccta

SEQ ID NO: 47221 - DNA, 20 bp, synthetic construct
  source 1..20: mol_type = other DNA
cttagtgcttgaacatccct

SEQ ID NO: 47222 - DNA, 20 bp, synthetic construct
  source 1..20: mol_type = other DNA
acttagtgcttgaacatccc

SEQ ID NO: 47223 - DNA, 20 bp, synthetic construct
  source 1..20: mol_type = other DNA
tacttagtgcttgaacatcc

SEQ ID NO: 47224 - DNA, 20 bp, synthetic construct
  source 1..20: mol_type = other DNA
atacttagtgcttgaacatc

SEQ ID NO: 47225 - DNA, 20 bp, synthetic construct
  source 1..20: mol_type = other DNA
tatacttagtgcttgaacat

SEQ ID NO: 47226 - DNA, 20 bp, synthetic construct
  source 1..20: mol_type = other DNA
ttatacttagtgcttgaaca

SEQ ID NO: 47227 - DNA, 20 bp, synthetic construct
  source 1..20: mol_type = other DNA
attatacttagtgcttgaac

SEQ ID NO: 47228 - DNA, 20 bp, synthetic construct
  source 1..20: mol_type = other DNA
cattatacttagtgcttgaa

SEQ ID NO: 47229 - DNA, 20 bp, synthetic construct
  source 1..20: mol_type = other DNA
gcattatacttagtgcttga

SEQ ID NO: 47230 - DNA, 20 bp, synthetic construct
  source 1..20: mol_type = other DNA
tgcattatacttagtgcttg

SEQ ID NO: 47231 - DNA, 20 bp, synthetic construct
  source 1..20: mol_type = other DNA
ttgcattatacttagtgctt

SEQ ID NO: 47232 - DNA, 20 bp, synthetic construct
  source 1..20: mol_type = other DNA
tttgcattatacttagtgct

SEQ ID NO: 47233 - DNA, 20 bp, synthetic construct
  source 1..20: mol_type = other DNA
atttgcattatacttagtgc

SEQ ID NO: 47234 - DNA, 20 bp, synthetic construct
  source 1..20: mol_type = other DNA
tatttgcattatacttagtg

SEQ ID NO: 47235 - DNA, 20 bp, synthetic construct
  source 1..20: mol_type = other DNA
atatttgcattatacttagt

SEQ ID NO: 47236 - DNA, 20 bp, synthetic construct
  source 1..20: mol_type = other DNA
gatatttgcattatacttag

SEQ ID NO: 47237 - DNA, 20 bp, synthetic construct
  source 1..20: mol_type = other DNA
ggatatttgcattatactta

SEQ ID NO: 47238 - DNA, 20 bp, synthetic construct
  source 1..20: mol_type = other DNA
gggatatttgcattatactt

SEQ ID NO: 47239 - DNA, 20 bp, synthetic construct
  source 1..20: mol_type = other DNA
ggggatatttgcattatact

SEQ ID NO: 47240 - DNA, 20 bp, synthetic construct
  source 1..20: mol_type = other DNA
tggggatatttgcattatac

SEQ ID NO: 47241 - DNA, 20 bp, synthetic construct
  source 1..20: mol_type = other DNA
ttggggatatttgcattata

SEQ ID NO: 47242 - DNA, 20 bp, synthetic construct
  source 1..20: mol_type = other DNA
tttggggatatttgcattat

SEQ ID NO: 47243 - DNA, 20 bp, synthetic construct
  source 1..20: mol_type = other DNA
atttggggatatttgcatta

SEQ ID NO: 47244 - DNA, 20 bp, synthetic construct
  source 1..20: mol_type = other DNA
gatttggggatatttgcatt

SEQ ID NO: 47245 - DNA, 20 bp, synthetic construct
  source 1..20: mol_type = other DNA
ggatttggggatatttgcat

SEQ ID NO: 47246 - DNA, 20 bp, synthetic construct
  source 1..20: mol_type = other DNA
cggatttggggatatttgca

SEQ ID NO: 47247 - DNA, 20 bp, synthetic construct
  source 1..20: mol_type = other DNA
tcggatttggggatatttgc

SEQ ID NO: 47248 - DNA, 20 bp, synthetic construct
  source 1..20: mol_type = other DNA
ttcggatttggggatatttg

SEQ ID NO: 47249 - DNA, 20 bp, synthetic construct
  source 1..20: mol_type = other DNA
tttcggatttggggatattt

SEQ ID NO: 47250 - DNA, 20 bp, synthetic construct
  source 1..20: mol_type = other DNA
ttttcggatttggggatatt

SEQ ID NO: 47251 - DNA, 20 bp, synthetic construct
  source 1..20: mol_type = other DNA
tttttcggatttggggatat

SEQ ID NO: 47252 - DNA, 20 bp, synthetic construct
  source 1..20: mol_type = other DNA
ttttttcggatttggggata

SEQ ID NO: 47253 - DNA, 20 bp, synthetic construct
  source 1..20: mol_type = other DNA
tttttttcggatttggggat

SEQ ID NO: 47254 - DNA, 20 bp, synthetic construct
  source 1..20: mol_type = other DNA
atttttttcggatttgggga

SEQ ID NO: 47255 - DNA, 20 bp, synthetic construct
  source 1..20: mol_type = other DNA
gatttttttcggatttgggg

SEQ ID NO: 47256 - DNA, 20 bp, synthetic construct
  source 1..20: mol_type = other DNA
ggatttttttcggatttggg

SEQ ID NO: 47257 - DNA, 20 bp, synthetic construct
  source 1..20: mol_type = other DNA
cggatttttttcggatttgg

SEQ ID NO: 47258 - DNA, 20 bp, synthetic construct
  source 1..20: mol_type = other DNA
gcggatttttttcggatttg

SEQ ID NO: 47259 - DNA, 20 bp, synthetic construct
  source 1..20: mol_type = other DNA
tgcggatttttttcggattt

SEQ ID NO: 47260 - DNA, 20 bp, synthetic construct
  source 1..20: mol_type = other DNA
ctgcggatttttttcggatt

SEQ ID NO: 47261 - DNA, 20 bp, synthetic construct
  source 1..20: mol_type = other DNA
actgcggatttttttcggat

SEQ ID NO: 47262 - DNA, 20 bp, synthetic construct
  source 1..20: mol_type = other DNA
gactgcggatttttttcgga

SEQ ID NO: 47263 - DNA, 20 bp, synthetic construct
  source 1..20: mol_type = other DNA
agactgcggatttttttcgg

SEQ ID NO: 47264 - DNA, 20 bp, synthetic construct
  source 1..20: mol_type = other DNA
tagactgcggatttttttcg

SEQ ID NO: 47265 - DNA, 20 bp, synthetic construct
  source 1..20: mol_type = other DNA
ttagactgcggatttttttc

SEQ ID NO: 47266 - DNA, 20 bp, synthetic construct
  source 1..20: mol_type = other DNA
tttagactgcggattttttt

SEQ ID NO: 47267 - DNA, 20 bp, synthetic construct
  source 1..20: mol_type = other DNA
ttttagactgcggatttttt

SEQ ID NO: 47268 - DNA, 20 bp, synthetic construct
  source 1..20: mol_type = other DNA
attttagactgcggattttt

SEQ ID NO: 47269 - DNA, 20 bp, synthetic construct
  source 1..20: mol_type = other DNA
tattttagactgcggatttt

SEQ ID NO: 47270 - DNA, 20 bp, synthetic construct
  source 1..20: mol_type = other DNA
gtattttagactgcggattt

SEQ ID NO: 47271 - DNA, 20 bp, synthetic construct
  source 1..20: mol_type = other DNA
agtattttagactgcggatt

SEQ ID NO: 47272 - DNA, 20 bp, synthetic construct
  source 1..20: mol_type = other DNA
aagtattttagactgcggat

SEQ ID NO: 47273 - DNA, 20 bp, synthetic construct
  source 1..20: mol_type = other DNA
gaagtattttagactgcgga

SEQ ID NO: 47274 - DNA, 20 bp, synthetic construct
  source 1..20: mol_type = other DNA
agaagtattttagactgcgg

SEQ ID NO: 47275 - DNA, 20 bp, synthetic construct
  source 1..20: mol_type = other DNA
cagaagtattttagactgcg

SEQ ID NO: 47276 - DNA, 20 bp, synthetic construct
  source 1..20: mol_type = other DNA
ccagaagtattttagactgc

SEQ ID NO: 47277 - DNA, 20 bp, synthetic construct
  source 1..20: mol_type = other DNA
accagaagtattttagactg

SEQ ID NO: 47278 - DNA, 20 bp, synthetic construct
  source 1..20: mol_type = other DNA
gaccagaagtattttagact

SEQ ID NO: 47279 - DNA, 20 bp, synthetic construct
  source 1..20: mol_type = other DNA
ggaccagaagtattttagac

SEQ ID NO: 47280 - DNA, 20 bp, synthetic construct
  source 1..20: mol_type = other DNA
gggaccagaagtattttaga

SEQ ID NO: 47281 - DNA, 20 bp, synthetic construct
  source 1..20: mol_type = other DNA
tgggaccagaagtattttag

SEQ ID NO: 47282 - DNA, 20 bp, synthetic construct
  source 1..20: mol_type = other DNA
ttgggaccagaagtatttta

SEQ ID NO: 47283 - DNA, 20 bp, synthetic construct
  source 1..20: mol_type = other DNA
cttgggaccagaagtatttt

SEQ ID NO: 47284 - DNA, 20 bp, synthetic construct
  source 1..20: mol_type = other DNA
gcttgggaccagaagtattt

SEQ ID NO: 47285 - DNA, 20 bp, synthetic construct
  source 1..20: mol_type = other DNA
tgcttgggaccagaagtatt

SEQ ID NO: 47286 - DNA, 20 bp, synthetic construct
  source 1..20: mol_type = other DNA
atgcttgggaccagaagtat

SEQ ID NO: 47287 - DNA, 20 bp, synthetic construct
  source 1..20: mol_type = other DNA
aatgcttgggaccagaagta

SEQ ID NO: 47288 - DNA, 20 bp, synthetic construct
  source 1..20: mol_type = other DNA
aaatgcttgggaccagaagt

SEQ ID NO: 47289 - DNA, 20 bp, synthetic construct
  source 1..20: mol_type = other DNA
aaaatgcttgggaccagaag

SEQ ID NO: 47290 - DNA, 20 bp, synthetic construct
  source 1..20: mol_type = other DNA
taaaatgcttgggaccagaa

SEQ ID NO: 47291 - DNA, 20 bp, synthetic construct
  source 1..20: mol_type = other DNA
ctaaaatgcttgggaccaga

SEQ ID NO: 47292 - DNA, 20 bp, synthetic construct
  source 1..20: mol_type = other DNA
tctaaaatgcttgggaccag

SEQ ID NO: 47293 - DNA, 20 bp, synthetic construct
  source 1..20: mol_type = other DNA
atctaaaatgcttgggacca

SEQ ID NO: 47294 - DNA, 20 bp, synthetic construct
  source 1..20: mol_type = other DNA
catctaaaatgcttgggacc

SEQ ID NO: 47295 - DNA, 20 bp, synthetic construct
  source 1..20: mol_type = other DNA
tcatctaaaatgcttgggac

SEQ ID NO: 47296 - DNA, 20 bp, synthetic construct
  source 1..20: mol_type = other DNA
ctcatctaaaatgcttggga

SEQ ID NO: 47297 - DNA, 20 bp, synthetic construct
  source 1..20: mol_type = other DNA
cctcatctaaaatgcttggg

SEQ ID NO: 47298 - DNA, 20 bp, synthetic construct
  source 1..20: mol_type = other DNA
tcctcatctaaaatgcttgg

SEQ ID NO: 47299 - DNA, 20 bp, synthetic construct
  source 1..20: mol_type = other DNA
ttcctcatctaaaatgcttg

SEQ ID NO: 47300 - DNA, 20 bp, synthetic construct
  source 1..20: mol_type = other DNA
cttcctcatctaaaatgctt

SEQ ID NO: 47301 - DNA, 20 bp, synthetic construct
  source 1..20: mol_type = other DNA
tcttcctcatctaaaatgct

SEQ ID NO: 47302 - DNA, 20 bp, synthetic construct
  source 1..20: mol_type = other DNA
atcttcctcatctaaaatgc

SEQ ID NO: 47303 - DNA, 20 bp, synthetic construct
  source 1..20: mol_type = other DNA
aatcttcctcatctaaaatg

SEQ ID NO: 47304 - DNA, 20 bp, synthetic construct
  source 1..20: mol_type = other DNA
gaatcttcctcatctaaaat

SEQ ID NO: 47305 - DNA, 20 bp, synthetic construct
  source 1..20: mol_type = other DNA
tgaatcttcctcatctaaaa

SEQ ID NO: 47306 - DNA, 20 bp, synthetic construct
  source 1..20: mol_type = other DNA
ctgaatcttcctcatctaaa

SEQ ID NO: 47307 - DNA, 20 bp, synthetic construct
  source 1..20: mol_type = other DNA
actgaatcttcctcatctaa

SEQ ID NO: 47308 - DNA, 20 bp, synthetic construct
  source 1..20: mol_type = other DNA
aactgaatcttcctcatcta

SEQ ID NO: 47309 - DNA, 20 bp, synthetic construct
  source 1..20: mol_type = other DNA
aaactgaatcttcctcatct

SEQ ID NO: 47310 - DNA, 20 bp, synthetic construct
  source 1..20: mol_type = other DNA
caaactgaatcttcctcatc

SEQ ID NO: 47311 - DNA, 20 bp, synthetic construct
  source 1..20: mol_type = other DNA
acaaactgaatcttcctcat

SEQ ID NO: 47312 - DNA, 20 bp, synthetic construct
  source 1..20: mol_type = other DNA
tacaaactgaatcttcctca

SEQ ID NO: 47313 - DNA, 20 bp, synthetic construct
  source 1..20: mol_type = other DNA
gtacaaactgaatcttcctc

SEQ ID NO: 47314 - DNA, 20 bp, synthetic construct
  source 1..20: mol_type = other DNA
agtacaaactgaatcttcct

SEQ ID NO: 47315 - DNA, 20 bp, synthetic construct
  source 1..20: mol_type = other DNA
tagtacaaactgaatcttcc

SEQ ID NO: 47316 - DNA, 20 bp, synthetic construct
  source 1..20: mol_type = other DNA
ttagtacaaactgaatcttc

SEQ ID NO: 47317 - DNA, 20 bp, synthetic construct
  source 1..20: mol_type = other DNA
attagtacaaactgaatctt

SEQ ID NO: 47318 - DNA, 20 bp, synthetic construct
  source 1..20: mol_type = other DNA
aattagtacaaactgaatct

SEQ ID NO: 47319 - DNA, 20 bp, synthetic construct
  source 1..20: mol_type = other DNA
aaattagtacaaactgaatc

SEQ ID NO: 47320 - DNA, 20 bp, synthetic construct
  source 1..20: mol_type = other DNA
gaaattagtacaaactgaat

SEQ ID NO: 47321 - DNA, 20 bp, synthetic construct
  source 1..20: mol_type = other DNA
agaaattagtacaaactgaa

SEQ ID NO: 47322 - DNA, 20 bp, synthetic construct
  source 1..20: mol_type = other DNA
tagaaattagtacaaactga

SEQ ID NO: 47323 - DNA, 20 bp, synthetic construct
  source 1..20: mol_type = other DNA
ttagaaattagtacaaactg

SEQ ID NO: 47324 - DNA, 20 bp, synthetic construct
  source 1..20: mol_type = other DNA
attagaaattagtacaaact

SEQ ID NO: 47325 - DNA, 20 bp, synthetic construct
  source 1..20: mol_type = other DNA
tattagaaattagtacaaac

SEQ ID NO: 47326 - DNA, 20 bp, synthetic construct
  source 1..20: mol_type = other DNA
ctattagaaattagtacaaa

SEQ ID NO: 47327 - DNA, 20 bp, synthetic construct
  source 1..20: mol_type = other DNA
actattagaaattagtacaa

SEQ ID NO: 47328 - DNA, 20 bp, synthetic construct
  source 1..20: mol_type = other DNA
aactattagaaattagtaca

SEQ ID NO: 47329 - DNA, 20 bp, synthetic construct
  source 1..20: mol_type = other DNA
aaactattagaaattagtac

SEQ ID NO: 47330 - DNA, 20 bp, synthetic construct
  source 1..20: mol_type = other DNA
aaaactattagaaattagta

SEQ ID NO: 47331 - DNA, 20 bp, synthetic construct
  source 1..20: mol_type = other DNA
aaaaactattagaaattagt

SEQ ID NO: 47332 - DNA, 20 bp, synthetic construct
  source 1..20: mol_type = other DNA
aaaaaactattagaaattag

SEQ ID NO: 47333 - DNA, 20 bp, synthetic construct
  source 1..20: mol_type = other DNA
aaaaaaactattagaaatta

SEQ ID NO: 47334 - DNA, 20 bp, synthetic construct
  source 1..20: mol_type = other DNA
aaaaaaaactattagaaatt

SEQ ID NO: 47335 - DNA, 20 bp, synthetic construct
  source 1..20: mol_type = other DNA
aaaaaaaaactattagaaat

SEQ ID NO: 47336 - DNA, 20 bp, synthetic construct
  source 1..20: mol_type = other DNA
aaaaaaaaaactattagaaa

SEQ ID NO: 47337 - DNA, 20 bp, synthetic construct
  source 1..20: mol_type = other DNA
aaaaaaaaaaactattagaa

SEQ ID NO: 47338 - DNA, 20 bp, synthetic construct
  source 1..20: mol_type = other DNA
aaaaaaaaaaaactattaga

SEQ ID NO: 47339 - DNA, 20 bp, synthetic construct
  source 1..20: mol_type = other DNA
aaaaaaaaaaaaactattag

SEQ ID NO: 47340 - DNA, 20 bp, synthetic construct
  source 1..20: mol_type = other DNA
aaaaaaaaaaaaaactatta

SEQ ID NO: 47341 - DNA, 20 bp, synthetic construct
  source 1..20: mol_type = other DNA
taaaaaaaaaaaaaactatt

SEQ ID NO: 47342 - DNA, 20 bp, synthetic construct
  source 1..20: mol_type = other DNA
ttaaaaaaaaaaaaaactat

SEQ ID NO: 47343 - DNA, 20 bp, synthetic construct
  source 1..20: mol_type = other DNA
attaaaaaaaaaaaaaacta

SEQ ID NO: 47344 - DNA, 20 bp, synthetic construct
  source 1..20: mol_type = other DNA
tattaaaaaaaaaaaaaact

SEQ ID NO: 47345 - DNA, 20 bp, synthetic construct
  source 1..20: mol_type = other DNA
atattaaaaaaaaaaaaaac

SEQ ID NO: 47346 - DNA, 20 bp, synthetic construct
  source 1..20: mol_type = other DNA
aatattaaaaaaaaaaaaaa

SEQ ID NO: 47347 - DNA, 20 bp, synthetic construct
  source 1..20: mol_type = other DNA
gaatattaaaaaaaaaaaaa

SEQ ID NO: 47348 - DNA, 20 bp, synthetic construct
  source 1..20: mol_type = other DNA
ggaatattaaaaaaaaaaaa

SEQ ID NO: 47349 - DNA, 20 bp, synthetic construct
  source 1..20: mol_type = other DNA
tggaatattaaaaaaaaaaa

SEQ ID NO: 47350 - DNA, 20 bp, synthetic construct
  source 1..20: mol_type = other DNA
ctggaatattaaaaaaaaaa

SEQ ID NO: 47351 - DNA, 20 bp, synthetic construct
  source 1..20: mol_type = other DNA
tctggaatattaaaaaaaaa

SEQ ID NO: 47352 - DNA, 20 bp, synthetic construct
  source 1..20: mol_type = other DNA
atctggaatattaaaaaaaa

SEQ ID NO: 47353 - DNA, 20 bp, synthetic construct
  source 1..20: mol_type = other DNA
aatctggaatattaaaaaaa

SEQ ID NO: 47354 - DNA, 20 bp, synthetic construct
  source 1..20: mol_type = other DNA
aaatctggaatattaaaaaa

SEQ ID NO: 47355 - DNA, 20 bp, synthetic construct
  source 1..20: mol_type = other DNA
gaaatctggaatattaaaaa

SEQ ID NO: 47356 - DNA, 20 bp, synthetic construct
  source 1..20: mol_type = other DNA
agaaatctggaatattaaaa

SEQ ID NO: 47357 - DNA, 20 bp, synthetic construct
  source 1..20: mol_type = other DNA
aagaaatctggaatattaaa

SEQ ID NO: 47358 - DNA, 20 bp, synthetic construct
  source 1..20: mol_type = other DNA
aaagaaatctggaatattaa

SEQ ID NO: 47359 - DNA, 20 bp, synthetic construct
  source 1..20: mol_type = other DNA
aaaagaaatctggaatatta

SEQ ID NO: 47360 - DNA, 20 bp, synthetic construct
  source 1..20: mol_type = other DNA
caaaagaaatctggaatatt

SEQ ID NO: 47361 - DNA, 20 bp, synthetic construct
  source 1..20: mol_type = other DNA
tcaaaagaaatctggaatat

SEQ ID NO: 47362 - DNA, 20 bp, synthetic construct
  source 1..20: mol_type = other DNA
atcaaaagaaatctggaata

SEQ ID NO: 47363 - DNA, 20 bp, synthetic construct
  source 1..20: mol_type = other DNA
catcaaaagaaatctggaat

SEQ ID NO: 47364 - DNA, 20 bp, synthetic construct
  source 1..20: mol_type = other DNA
ccatcaaaagaaatctggaa

SEQ ID NO: 47365 - DNA, 20 bp, synthetic construct
  source 1..20: mol_type = other DNA
tccatcaaaagaaatctgga

SEQ ID NO: 47366 - DNA, 20 bp, synthetic construct
  source 1..20: mol_type = other DNA
ttccatcaaaagaaatctgg

SEQ ID NO: 47367 - DNA, 20 bp, synthetic construct
  source 1..20: mol_type = other DNA
attccatcaaaagaaatctg

SEQ ID NO: 47368 - DNA, 20 bp, synthetic construct
  source 1..20: mol_type = other DNA
gattccatcaaaagaaatct

SEQ ID NO: 47369 - DNA, 20 bp, synthetic construct
  source 1..20: mol_type = other DNA
agattccatcaaaagaaatc

SEQ ID NO: 47370 - DNA, 20 bp, synthetic construct
  source 1..20: mol_type = other DNA
tagattccatcaaaagaaat

SEQ ID NO: 47371 - DNA, 20 bp, synthetic construct
  source 1..20: mol_type = other DNA
atagattccatcaaaagaaa

SEQ ID NO: 47372 - DNA, 20 bp, synthetic construct
  source 1..20: mol_type = other DNA
catagattccatcaaaagaa

SEQ ID NO: 47373 - DNA, 20 bp, synthetic construct
  source 1..20: mol_type = other DNA
gcatagattccatcaaaaga

SEQ ID NO: 47374 - DNA, 20 bp, synthetic construct
  source 1..20: mol_type = other DNA
tgcatagattccatcaaaag

SEQ ID NO: 47375 - DNA, 20 bp, synthetic construct
  source 1..20: mol_type = other DNA
ttgcatagattccatcaaaa

SEQ ID NO: 47376 - DNA, 20 bp, synthetic construct
  source 1..20: mol_type = other DNA
tttgcatagattccatcaaa

SEQ ID NO: 47377 - DNA, 20 bp, synthetic construct
  source 1..20: mol_type = other DNA
atttgcatagattccatcaa

SEQ ID NO: 47378 - DNA, 20 bp, synthetic construct
  source 1..20: mol_type = other DNA
tatttgcatagattccatca

SEQ ID NO: 47379 - DNA, 20 bp, synthetic construct
  source 1..20: mol_type = other DNA
atatttgcatagattccatc

SEQ ID NO: 47380 - DNA, 20 bp, synthetic construct
  source 1..20: mol_type = other DNA
catatttgcatagattccat

SEQ ID NO: 47381 - DNA, 20 bp, synthetic construct
  source 1..20: mol_type = other DNA
tcatatttgcatagattcca

SEQ ID NO: 47382 - DNA, 20 bp, synthetic construct
  source 1..20: mol_type = other DNA
ctcatatttgcatagattcc

SEQ ID NO: 47383 - DNA, 20 bp, synthetic construct
  source 1..20: mol_type = other DNA
cctcatatttgcatagattc

SEQ ID NO: 47384 - DNA, 20 bp, synthetic construct
  source 1..20: mol_type = other DNA
tcctcatatttgcatagatt

SEQ ID NO: 47385 - DNA, 20 bp, synthetic construct
  source 1..20: mol_type = other DNA
atcctcatatttgcatagat

SEQ ID NO: 47386 - DNA, 20 bp, synthetic construct
  source 1..20: mol_type = other DNA
catcctcatatttgcataga

SEQ ID NO: 47387 - DNA, 20 bp, synthetic construct
  source 1..20: mol_type = other DNA
ccatcctcatatttgcatag

SEQ ID NO: 47388 - DNA, 20 bp, synthetic construct
  source 1..20: mol_type = other DNA
accatcctcatatttgcata

SEQ ID NO: 47389 - DNA, 20 bp, synthetic construct
  source 1..20: mol_type = other DNA
aaccatcctcatatttgcat

SEQ ID NO: 47390 - DNA, 20 bp, synthetic construct
  source 1..20: mol_type = other DNA
gaaccatcctcatatttgca

SEQ ID NO: 47391 - DNA, 20 bp, synthetic construct
  source 1..20: mol_type = other DNA
tgaaccatcctcatatttgc

SEQ ID NO: 47392 - DNA, 20 bp, synthetic construct
  source 1..20: mol_type = other DNA
atgaaccatcctcatatttg

SEQ ID NO: 47393 - DNA, 20 bp, synthetic construct
  source 1..20: mol_type = other DNA
tatgaaccatcctcatattt

SEQ ID NO: 47394 - DNA, 20 bp, synthetic construct
  source 1..20: mol_type = other DNA
atatgaaccatcctcatatt

SEQ ID NO: 47395 - DNA, 20 bp, synthetic construct
  source 1..20: mol_type = other DNA
tatatgaaccatcctcatat

SEQ ID NO: 47396 - DNA, 20 bp, synthetic construct
  source 1..20: mol_type = other DNA
gtatatgaaccatcctcata

SEQ ID NO: 47397 - DNA, 20 bp, synthetic construct
  source 1..20: mol_type = other DNA
agtatatgaaccatcctcat

SEQ ID NO: 47398 - DNA, 20 bp, synthetic construct
  source 1..20: mol_type = other DNA
aagtatatgaaccatcctca

SEQ ID NO: 47399 - DNA, 20 bp, synthetic construct
  source 1..20: mol_type = other DNA
taagtatatgaaccatcctc

SEQ ID NO: 47400 - DNA, 20 bp, synthetic construct
  source 1..20: mol_type = other DNA
gtaagtatatgaaccatcct

SEQ ID NO: 47401 - DNA, 20 bp, synthetic construct
  source 1..20: mol_type = other DNA
tgtaagtatatgaaccatcc

SEQ ID NO: 47402 - DNA, 20 bp, synthetic construct
  source 1..20: mol_type = other DNA
atgtaagtatatgaaccatc

SEQ ID NO: 47403 - DNA, 20 bp, synthetic construct
  source 1..20: mol_type = other DNA
gatgtaagtatatgaaccat

SEQ ID NO: 47404 - DNA, 20 bp, synthetic construct
  source 1..20: mol_type = other DNA
tgatgtaagtatatgaacca

SEQ ID NO: 47405 - DNA, 20 bp, synthetic construct
  source 1..20: mol_type = other DNA
ctgatgtaagtatatgaacc

SEQ ID NO: 47406 - DNA, 20 bp, synthetic construct
  source 1..20: mol_type = other DNA
actgatgtaagtatatgaac

SEQ ID NO: 47407 - DNA, 20 bp, synthetic construct
  source 1..20: mol_type = other DNA
aactgatgtaagtatatgaa

SEQ ID NO: 47408 - DNA, 20 bp, synthetic construct
  source 1..20: mol_type = other DNA
caactgatgtaagtatatga

SEQ ID NO: 47409 - DNA, 20 bp, synthetic construct
  source 1..20: mol_type = other DNA
acaactgatgtaagtatatg

SEQ ID NO: 47410 - DNA, 20 bp, synthetic construct
  source 1..20: mol_type = other DNA
aacaactgatgtaagtatat

SEQ ID NO: 47411 - DNA, 20 bp, synthetic construct
  source 1..20: mol_type = other DNA
caacaactgatgtaagtata

SEQ ID NO: 47412 - DNA, 20 bp, synthetic construct
  source 1..20: mol_type = other DNA
acaacaactgatgtaagtat

SEQ ID NO: 47413 - DNA, 20 bp, synthetic construct
  source 1..20: mol_type = other DNA
tacaacaactgatgtaagta

SEQ ID NO: 47414 - DNA, 20 bp, synthetic construct
  source 1..20: mol_type = other DNA
ttacaacaactgatgtaagt

SEQ ID NO: 47415 - DNA, 20 bp, synthetic construct
  source 1..20: mol_type = other DNA
cttacaacaactgatgtaag

SEQ ID NO: 47416 - DNA, 20 bp, synthetic construct
  source 1..20: mol_type = other DNA
acttacaacaactgatgtaa

SEQ ID NO: 47417 - DNA, 20 bp, synthetic construct
  source 1..20: mol_type = other DNA
aacttacaacaactgatgta

SEQ ID NO: 47418 - DNA, 20 bp, synthetic construct
  source 1..20: mol_type = other DNA
taacttacaacaactgatgt

SEQ ID NO: 47419 - DNA, 20 bp, synthetic construct
  source 1..20: mol_type = other DNA
ataacttacaacaactgatg

SEQ ID NO: 47420 - DNA, 20 bp, synthetic construct
  source 1..20: mol_type = other DNA
aataacttacaacaactgat

SEQ ID NO: 47421 - DNA, 20 bp, synthetic construct
  source 1..20: mol_type = other DNA
taataacttacaacaactga

SEQ ID NO: 47422 - DNA, 20 bp, synthetic construct
  source 1..20: mol_type = other DNA
ctaataacttacaacaactg

SEQ ID NO: 47423 - DNA, 20 bp, synthetic construct
  source 1..20: mol_type = other DNA
tctaataacttacaacaact

SEQ ID NO: 47424 - DNA, 20 bp, synthetic construct
  source 1..20: mol_type = other DNA
atctaataacttacaacaac

SEQ ID NO: 47425 - DNA, 20 bp, synthetic construct
  source 1..20: mol_type = other DNA
aatctaataacttacaacaa

SEQ ID NO: 47426 - DNA, 20 bp, synthetic construct
  source 1..20: mol_type = other DNA
taatctaataacttacaaca

SEQ ID NO: 47427 - DNA, 20 bp, synthetic construct
  source 1..20: mol_type = other DNA
ataatctaataacttacaac

SEQ ID NO: 47428 - DNA, 20 bp, synthetic construct
  source 1..20: mol_type = other DNA
aataatctaataacttacaa

SEQ ID NO: 47429 - DNA, 20 bp, synthetic construct
  source 1..20: mol_type = other DNA
caataatctaataacttaca

SEQ ID NO: 47430 - DNA, 20 bp, synthetic construct
  source 1..20: mol_type = other DNA
ccaataatctaataacttac

SEQ ID NO: 47431 - DNA, 20 bp, synthetic construct
  source 1..20: mol_type = other DNA
cccaataatctaataactta

SEQ ID NO: 47432 - DNA, 20 bp, synthetic construct
  source 1..20: mol_type = other DNA
ccccaataatctaataactt

SEQ ID NO: 47433 - DNA, 20 bp, synthetic construct
  source 1..20: mol_type = other DNA
tccccaataatctaataact

SEQ ID NO: 47434 - DNA, 20 bp, synthetic construct
  source 1..20: mol_type = other DNA
atccccaataatctaataac

SEQ ID NO: 47435 - DNA, 20 bp, synthetic construct
  source 1..20: mol_type = other DNA
tatccccaataatctaataa

SEQ ID NO: 47436 - DNA, 20 bp, synthetic construct
  source 1..20: mol_type = other DNA
ttatccccaataatctaata

SEQ ID NO: 47437 - DNA, 20 bp, synthetic construct
  source 1..20: mol_type = other DNA
tttatccccaataatctaat

SEQ ID NO: 47438 - DNA, 20 bp, synthetic construct
  source 1..20: mol_type = other DNA
gtttatccccaataatctaa

SEQ ID NO: 47439 - DNA, 20 bp, synthetic construct
  source 1..20: mol_type = other DNA
agtttatccccaataatcta

SEQ ID NO: 47440 - DNA, 20 bp, synthetic construct
  source 1..20: mol_type = other DNA
cagtttatccccaataatct

SEQ ID NO: 47441 - DNA, 20 bp, synthetic construct
  source 1..20: mol_type = other DNA
gcagtttatccccaataatc

SEQ ID NO: 47442 - DNA, 20 bp, synthetic construct
  source 1..20: mol_type = other DNA
ggcagtttatccccaataat

SEQ ID NO: 47443 - DNA, 20 bp, synthetic construct
  source 1..20: mol_type = other DNA
aggcagtttatccccaataa

SEQ ID NO: 47444 - DNA, 20 bp, synthetic construct
  source 1..20: mol_type = other DNA
aaggcagtttatccccaata

SEQ ID NO: 47445 - DNA, 20 bp, synthetic construct
  source 1..20: mol_type = other DNA
caaggcagtttatccccaat

SEQ ID NO: 47446 - DNA, 20 bp, synthetic construct
  source 1..20: mol_type = other DNA
ccaaggcagtttatccccaa

SEQ ID NO: 47447 - DNA, 20 bp, synthetic construct
  source 1..20: mol_type = other DNA
cccaaggcagtttatcccca

SEQ ID NO: 47448 - DNA, 20 bp, synthetic construct
  source 1..20: mol_type = other DNA
ccccaaggcagtttatcccc

SEQ ID NO: 47449 - DNA, 20 bp, synthetic construct
  source 1..20: mol_type = other DNA
cccccaaggcagtttatccc

SEQ ID NO: 47450 - DNA, 20 bp, synthetic construct
  source 1..20: mol_type = other DNA
acccccaaggcagtttatcc

SEQ ID NO: 47451 - DNA, 20 bp, synthetic construct
  source 1..20: mol_type = other DNA
tacccccaaggcagtttatc

SEQ ID NO: 47452 - DNA, 20 bp, synthetic construct
  source 1..20: mol_type = other DNA
ctacccccaaggcagtttat

SEQ ID NO: 47453 - DNA, 20 bp, synthetic construct
  source 1..20: mol_type = other DNA
tctacccccaaggcagttta

SEQ ID NO: 47454 - DNA, 20 bp, synthetic construct
  source 1..20: mol_type = other DNA
ttctacccccaaggcagttt

SEQ ID NO: 47455 - DNA, 20 bp, synthetic construct
  source 1..20: mol_type = other DNA
attctacccccaaggcagtt

SEQ ID NO: 47456 - DNA, 20 bp, synthetic construct
  source 1..20: mol_type = other DNA
tattctacccccaaggcagt

SEQ ID NO: 47457 - DNA, 20 bp, synthetic construct
  source 1..20: mol_type = other DNA
ttattctacccccaaggcag

SEQ ID NO: 47458 - DNA, 20 bp, synthetic construct
  source 1..20: mol_type = other DNA
tttattctacccccaaggca

SEQ ID NO: 47459 - DNA, 20 bp, synthetic construct
  source 1..20: mol_type = other DNA
ctttattctacccccaaggc

SEQ ID NO: 47460 - DNA, 20 bp, synthetic construct
  source 1..20: mol_type = other DNA
actttattctacccccaagg

SEQ ID NO: 47461 - DNA, 20 bp, synthetic construct
  source 1..20: mol_type = other DNA
tactttattctacccccaag

SEQ ID NO: 47462 - DNA, 20 bp, synthetic construct
  source 1..20: mol_type = other DNA
ttactttattctacccccaa

SEQ ID NO: 47463 - DNA, 20 bp, synthetic construct
  source 1..20: mol_type = other DNA
attactttattctaccccca

SEQ ID NO: 47464 - DNA, 20 bp, synthetic construct
  source 1..20: mol_type = other DNA
aattactttattctaccccc

SEQ ID NO: 47465 - DNA, 20 bp, synthetic construct
  source 1..20: mol_type = other DNA
gaattactttattctacccc

SEQ ID NO: 47466 - DNA, 20 bp, synthetic construct
  source 1..20: mol_type = other DNA
ggaattactttattctaccc

SEQ ID NO: 47467 - DNA, 20 bp, synthetic construct
  source 1..20: mol_type = other DNA
tggaattactttattctacc

SEQ ID NO: 47468 - DNA, 20 bp, synthetic construct
  source 1..20: mol_type = other DNA
atggaattactttattctac

SEQ ID NO: 47469 - DNA, 20 bp, synthetic construct
  source 1..20: mol_type = other DNA
catggaattactttattcta

SEQ ID NO: 47470 - DNA, 20 bp, synthetic construct
  source 1..20: mol_type = other DNA
tcatggaattactttattct

SEQ ID NO: 47471 - DNA, 20 bp, synthetic construct
  source 1..20: mol_type = other DNA
ttcatggaattactttattc

SEQ ID NO: 47472 - DNA, 20 bp, synthetic construct
  source 1..20: mol_type = other DNA
cttcatggaattactttatt

SEQ ID NO: 47473 - DNA, 20 bp, synthetic construct
  source 1..20: mol_type = other DNA
acttcatggaattactttat

SEQ ID NO: 47474 - DNA, 20 bp, synthetic construct
  source 1..20: mol_type = other DNA
aacttcatggaattacttta

SEQ ID NO: 47475 - DNA, 20 bp, synthetic construct
  source 1..20: mol_type = other DNA
taacttcatggaattacttt

SEQ ID NO: 47476 - DNA, 20 bp, synthetic construct
  source 1..20: mol_type = other DNA
ttaacttcatggaattactt

SEQ ID NO: 47477 - DNA, 20 bp, synthetic construct
  source 1..20: mol_type = other DNA
tttaacttcatggaattact

SEQ ID NO: 47478 - DNA, 20 bp, synthetic construct
  source 1..20: mol_type = other DNA
ttttaacttcatggaattac

SEQ ID NO: 47479 - DNA, 20 bp, synthetic construct
  source 1..20: mol_type = other DNA
attttaacttcatggaatta

SEQ ID NO: 47480 - DNA, 20 bp, synthetic construct
  source 1..20: mol_type = other DNA
cattttaacttcatggaatt

SEQ ID NO: 47481 - DNA, 20 bp, synthetic construct
  source 1..20: mol_type = other DNA
acattttaacttcatggaat

SEQ ID NO: 47482 - DNA, 20 bp, synthetic construct
  source 1..20: mol_type = other DNA
cacattttaacttcatggaa

SEQ ID NO: 47483 - DNA, 20 bp, synthetic construct
  source 1..20: mol_type = other DNA
ccacattttaacttcatgga

SEQ ID NO: 47484 - DNA, 20 bp, synthetic construct
  source 1..20: mol_type = other DNA
tccacattttaacttcatgg

SEQ ID NO: 47485 - DNA, 20 bp, synthetic construct
  source 1..20: mol_type = other DNA
atccacattttaacttcatg

SEQ ID NO: 47486 - DNA, 20 bp, synthetic construct
  source 1..20: mol_type = other DNA
tatccacattttaacttcat

SEQ ID NO: 47487 - DNA, 20 bp, synthetic construct
  source 1..20: mol_type = other DNA
ttatccacattttaacttca

SEQ ID NO: 47488 - DNA, 20 bp, synthetic construct
  source 1..20: mol_type = other DNA
tttatccacattttaacttc

SEQ ID NO: 47489 - DNA, 20 bp, synthetic construct
  source 1..20: mol_type = other DNA
atttatccacattttaactt

SEQ ID NO: 47490 - DNA, 20 bp, synthetic construct
  source 1..20: mol_type = other DNA
catttatccacattttaact

SEQ ID NO: 47491 - DNA, 20 bp, synthetic construct
  source 1..20: mol_type = other DNA
tcatttatccacattttaac

SEQ ID NO: 47492 - DNA, 20 bp, synthetic construct
  source 1..20: mol_type = other DNA
atcatttatccacattttaa

SEQ ID NO: 47493 - DNA, 20 bp, synthetic construct
  source 1..20: mol_type = other DNA
aatcatttatccacatttta

SEQ ID NO: 47494 - DNA, 20 bp, synthetic construct
  source 1..20: mol_type = other DNA
caatcatttatccacatttt

SEQ ID NO: 47495 - DNA, 20 bp, synthetic construct
  source 1..20: mol_type = other DNA
acaatcatttatccacattt

SEQ ID NO: 47496 - DNA, 20 bp, synthetic construct
  source 1..20: mol_type = other DNA
gacaatcatttatccacatt

SEQ ID NO: 47497 - DNA, 20 bp, synthetic construct
  source 1..20: mol_type = other DNA
tgacaatcatttatccacat

SEQ ID NO: 47498 - DNA, 20 bp, synthetic construct
  source 1..20: mol_type = other DNA
ttgacaatcatttatccaca

SEQ ID NO: 47499 - DNA, 20 bp, synthetic construct
  source 1..20: mol_type = other DNA
tttgacaatcatttatccac

SEQ ID NO: 47500 - DNA, 20 bp, synthetic construct
  source 1..20: mol_type = other DNA
ctttgacaatcatttatcca

SEQ ID NO: 47501 - DNA, 20 bp, synthetic construct
  source 1..20: mol_type = other DNA
actttgacaatcatttatcc

SEQ ID NO: 47502 - DNA, 20 bp, synthetic construct
  source 1..20: mol_type = other DNA
tactttgacaatcatttatc

SEQ ID NO: 47503 - DNA, 20 bp, synthetic construct
  source 1..20: mol_type = other DNA
ttactttgacaatcatttat

SEQ ID NO: 47504 - DNA, 20 bp, synthetic construct
  source 1..20: mol_type = other DNA
gttactttgacaatcattta

SEQ ID NO: 47505 - DNA, 20 bp, synthetic construct
  source 1..20: mol_type = other DNA
tgttactttgacaatcattt

SEQ ID NO: 47506 - DNA, 20 bp, synthetic construct
  source 1..20: mol_type = other DNA
atgttactttgacaatcatt

SEQ ID NO: 47507 - DNA, 20 bp, synthetic construct
  source 1..20: mol_type = other DNA
aatgttactttgacaatcat

SEQ ID NO: 47508 - DNA, 20 bp, synthetic construct
  source 1..20: mol_type = other DNA
caatgttactttgacaatca

SEQ ID NO: 47509 - DNA, 20 bp, synthetic construct
  source 1..20: mol_type = other DNA
gcaatgttactttgacaatc

SEQ ID NO: 47510 - DNA, 20 bp, synthetic construct
  source 1..20: mol_type = other DNA
agcaatgttactttgacaat

SEQ ID NO: 47511 - DNA, 20 bp, synthetic construct
  source 1..20: mol_type = other DNA
aagcaatgttactttgacaa

SEQ ID NO: 47512 - DNA, 20 bp, synthetic construct
  source 1..20: mol_type = other DNA
taagcaatgttactttgaca

SEQ ID NO: 47513 - DNA, 20 bp, synthetic construct
  source 1..20: mol_type = other DNA
ctaagcaatgttactttgac

SEQ ID NO: 47514 - DNA, 20 bp, synthetic construct
  source 1..20: mol_type = other DNA
tctaagcaatgttactttga

SEQ ID NO: 47515 - DNA, 20 bp, synthetic construct
  source 1..20: mol_type = other DNA
atctaagcaatgttactttg

SEQ ID NO: 47516 - DNA, 20 bp, synthetic construct
  source 1..20: mol_type = other DNA
gatctaagcaatgttacttt

SEQ ID NO: 47517 - DNA, 20 bp, synthetic construct
  source 1..20: mol_type = other DNA
tgatctaagcaatgttactt

SEQ ID NO: 47518 - DNA, 20 bp, synthetic construct
  source 1..20: mol_type = other DNA
atgatctaagcaatgttact

SEQ ID NO: 47519 - DNA, 20 bp, synthetic construct
  source 1..20: mol_type = other DNA
catgatctaagcaatgttac

SEQ ID NO: 47520 - DNA, 20 bp, synthetic construct
  source 1..20: mol_type = other DNA
acatgatctaagcaatgtta

SEQ ID NO: 47521 - DNA, 20 bp, synthetic construct
  source 1..20: mol_type = other DNA
aacatgatctaagcaatgtt

SEQ ID NO: 47522 - DNA, 20 bp, synthetic construct
  source 1..20: mol_type = other DNA
aaacatgatctaagcaatgt

SEQ ID NO: 47523 - DNA, 20 bp, synthetic construct
  source 1..20: mol_type = other DNA
taaacatgatctaagcaatg

SEQ ID NO: 47524 - DNA, 20 bp, synthetic construct
  source 1..20: mol_type = other DNA
ctaaacatgatctaagcaat

SEQ ID NO: 47525 - DNA, 20 bp, synthetic construct
  source 1..20: mol_type = other DNA
actaaacatgatctaagcaa

SEQ ID NO: 47526 - DNA, 20 bp, synthetic construct
  source 1..20: mol_type = other DNA
gactaaacatgatctaagca

SEQ ID NO: 47527 - DNA, 20 bp, synthetic construct
  source 1..20: mol_type = other DNA
tgactaaacatgatctaagc

SEQ ID NO: 47528 - DNA, 20 bp, synthetic construct
  source 1..20: mol_type = other DNA
ctgactaaacatgatctaag

SEQ ID NO: 47529 - DNA, 20 bp, synthetic construct
  source 1..20: mol_type = other DNA
cctgactaaacatgatctaa

SEQ ID NO: 47530 - DNA, 20 bp, synthetic construct
  source 1..20: mol_type = other DNA
tcctgactaaacatgatcta

SEQ ID NO: 47531 - DNA, 20 bp, synthetic construct
  source 1..20: mol_type = other DNA
atcctgactaaacatgatct

SEQ ID NO: 47532 - DNA, 20 bp, synthetic construct
  source 1..20: mol_type = other DNA
catcctgactaaacatgatc

SEQ ID NO: 47533 - DNA, 20 bp, synthetic construct
  source 1..20: mol_type = other DNA
tcatcctgactaaacatgat

SEQ ID NO: 47534 - DNA, 20 bp, synthetic construct
  source 1..20: mol_type = other DNA
atcatcctgactaaacatga

SEQ ID NO: 47535 - DNA, 20 bp, synthetic construct
  source 1..20: mol_type = other DNA
aatcatcctgactaaacatg

SEQ ID NO: 47536 - DNA, 20 bp, synthetic construct
  source 1..20: mol_type = other DNA
aaatcatcctgactaaacat

SEQ ID NO: 47537 - DNA, 20 bp, synthetic construct
  source 1..20: mol_type = other DNA
taaatcatcctgactaaaca

SEQ ID NO: 47538 - DNA, 20 bp, synthetic construct
  source 1..20: mol_type = other DNA
ctaaatcatcctgactaaac

SEQ ID NO: 47539 - DNA, 20 bp, synthetic construct
  source 1..20: mol_type = other DNA
tctaaatcatcctgactaaa

SEQ ID NO: 47540 - DNA, 20 bp, synthetic construct
  source 1..20: mol_type = other DNA
ctctaaatcatcctgactaa

SEQ ID NO: 47541 - DNA, 20 bp, synthetic construct
  source 1..20: mol_type = other DNA
tctctaaatcatcctgacta

SEQ ID NO: 47542 - DNA, 20 bp, synthetic construct
  source 1..20: mol_type = other DNA
ttctctaaatcatcctgact

SEQ ID NO: 47543 - DNA, 20 bp, synthetic construct
  source 1..20: mol_type = other DNA
tttctctaaatcatcctgac

SEQ ID NO: 47544 - DNA, 20 bp, synthetic construct
  source 1..20: mol_type = other DNA
atttctctaaatcatcctga

SEQ ID NO: 47545 - DNA, 20 bp, synthetic construct
  source 1..20: mol_type = other DNA
tatttctctaaatcatcctg

SEQ ID NO: 47546 - DNA, 20 bp, synthetic construct
  source 1..20: mol_type = other DNA
ctatttctctaaatcatcct

SEQ ID NO: 47547 - DNA, 20 bp, synthetic construct
  source 1..20: mol_type = other DNA
tctatttctctaaatcatcc

SEQ ID NO: 47548 - DNA, 20 bp, synthetic construct
  source 1..20: mol_type = other DNA
atctatttctctaaatcatc

SEQ ID NO: 47549 - DNA, 20 bp, synthetic construct
  source 1..20: mol_type = other DNA
aatctatttctctaaatcat

SEQ ID NO: 47550 - DNA, 20 bp, synthetic construct
  source 1..20: mol_type = other DNA
taatctatttctctaaatca

SEQ ID NO: 47551 - DNA, 20 bp, synthetic construct
  source 1..20: mol_type = other DNA
ctaatctatttctctaaatc

SEQ ID NO: 47552 - DNA, 20 bp, synthetic construct
  source 1..20: mol_type = other DNA
tctaatctatttctctaaat

SEQ ID NO: 47553 - DNA, 20 bp, synthetic construct
  source 1..20: mol_type = other DNA
ttctaatctatttctctaaa

SEQ ID NO: 47554 - DNA, 20 bp, synthetic construct
  source 1..20: mol_type = other DNA
gttctaatctatttctctaa

SEQ ID NO: 47555 - DNA, 20 bp, synthetic construct
  source 1..20: mol_type = other DNA
agttctaatctatttctcta

SEQ ID NO: 47556 - DNA, 20 bp, synthetic construct
  source 1..20: mol_type = other DNA
gagttctaatctatttctct

SEQ ID NO: 47557 - DNA, 20 bp, synthetic construct
  source 1..20: mol_type = other DNA
ggagttctaatctatttctc

SEQ ID NO: 47558 - DNA, 20 bp, synthetic construct
  source 1..20: mol_type = other DNA
aggagttctaatctatttct

SEQ ID NO: 47559 - DNA, 20 bp, synthetic construct
  source 1..20: mol_type = other DNA
aaggagttctaatctatttc

SEQ ID NO: 47560 - DNA, 20 bp, synthetic construct
  source 1..20: mol_type = other DNA
aaaggagttctaatctattt

SEQ ID NO: 47561 - DNA, 20 bp, synthetic construct
  source 1..20: mol_type = other DNA
aaaaggagttctaatctatt

SEQ ID NO: 47562 - DNA, 20 bp, synthetic construct
  source 1..20: mol_type = other DNA
taaaaggagttctaatctat

SEQ ID NO: 47563 - DNA, 20 bp, synthetic construct
  source 1..20: mol_type = other DNA
ataaaaggagttctaatcta

SEQ ID NO: 47564 - DNA, 20 bp, synthetic construct
  source 1..20: mol_type = other DNA
gataaaaggagttctaatct

SEQ ID NO: 47565 - DNA, 20 bp, synthetic construct
  source 1..20: mol_type = other DNA
ggataaaaggagttctaatc

SEQ ID NO: 47566 - DNA, 20 bp, synthetic construct
  source 1..20: mol_type = other DNA
tggataaaaggagttctaat

SEQ ID NO: 47567 - DNA, 20 bp, synthetic construct
  source 1..20: mol_type = other DNA
ctggataaaaggagttctaa

SEQ ID NO: 47568 - DNA, 20 bp, synthetic construct
  source 1..20: mol_type = other DNA
actggataaaaggagttcta

SEQ ID NO: 47569 - DNA, 20 bp, synthetic construct
  source 1..20: mol_type = other DNA
gactggataaaaggagttct

SEQ ID NO: 47570 - DNA, 20 bp, synthetic construct
  source 1..20: mol_type = other DNA
agactggataaaaggagttc

SEQ ID NO: 47571 - DNA, 20 bp, synthetic construct
  source 1..20: mol_type = other DNA
tagactggataaaaggagtt

SEQ ID NO: 47572 - DNA, 20 bp, synthetic construct
  source 1..20: mol_type = other DNA
ttagactggataaaaggagt

SEQ ID NO: 47573 - DNA, 20 bp, synthetic construct
  source 1..20: mol_type = other DNA
attagactggataaaaggag

SEQ ID NO: 47574 - DNA, 20 bp, synthetic construct
  source 1..20: mol_type = other DNA
tattagactggataaaagga

SEQ ID NO: 47575 - DNA, 20 bp, synthetic construct
  source 1..20: mol_type = other DNA
atattagactggataaaagg

SEQ ID NO: 47576 - DNA, 20 bp, synthetic construct
  source 1..20: mol_type = other DNA
tatattagactggataaaag

SEQ ID NO: 47577 - DNA, 20 bp, synthetic construct
  source 1..20: mol_type = other DNA
ttatattagactggataaaa

SEQ ID NO: 47578 - DNA, 20 bp, synthetic construct
  source 1..20: mol_type = other DNA
attatattagactggataaa

SEQ ID NO: 47579 - DNA, 20 bp, synthetic construct
  source 1..20: mol_type = other DNA
aattatattagactggataa

SEQ ID NO: 47580 - DNA, 20 bp, synthetic construct
  source 1..20: mol_type = other DNA
gaattatattagactggata

SEQ ID NO: 47581 - DNA, 20 bp, synthetic construct
  source 1..20: mol_type = other DNA
tgaattatattagactggat

SEQ ID NO: 47582 - DNA, 20 bp, synthetic construct
  source 1..20: mol_type = other DNA
atgaattatattagactgga

SEQ ID NO: 47583 - DNA, 20 bp, synthetic construct
  source 1..20: mol_type = other DNA
aatgaattatattagactgg

SEQ ID NO: 47584 - DNA, 20 bp, synthetic construct
  source 1..20: mol_type = other DNA
caatgaattatattagactg

SEQ ID NO: 47585 - DNA, 20 bp, synthetic construct
  source 1..20: mol_type = other DNA
acaatgaattatattagact

SEQ ID NO: 47586 - DNA, 20 bp, synthetic construct
  source 1..20: mol_type = other DNA
tacaatgaattatattagac

SEQ ID NO: 47587 - DNA, 20 bp, synthetic construct
  source 1..20: mol_type = other DNA
ttacaatgaattatattaga

SEQ ID NO: 47588 - DNA, 20 bp, synthetic construct
  source 1..20: mol_type = other DNA
tttacaatgaattatattag

SEQ ID NO: 47589 - DNA, 20 bp, synthetic construct
  source 1..20: mol_type = other DNA
ttttacaatgaattatatta

SEQ ID NO: 47590 - DNA, 20 bp, synthetic construct
  source 1..20: mol_type = other DNA
cttttacaatgaattatatt

SEQ ID NO: 47591 - DNA, 20 bp, synthetic construct
  source 1..20: mol_type = other DNA
acttttacaatgaattatat

SEQ ID NO: 47592 - DNA, 20 bp, synthetic construct
  source 1..20: mol_type = other DNA
tacttttacaatgaattata

SEQ ID NO: 47593 - DNA, 20 bp, synthetic construct
  source 1..20: mol_type = other DNA
gtacttttacaatgaattat

SEQ ID NO: 47594 - DNA, 20 bp, synthetic construct
  source 1..20: mol_type = other DNA
tgtacttttacaatgaatta

SEQ ID NO: 47595 - DNA, 20 bp, synthetic construct
  source 1..20: mol_type = other DNA
ctgtacttttacaatgaatt

SEQ ID NO: 47596 - DNA, 20 bp, synthetic construct
  source 1..20: mol_type = other DNA
actgtacttttacaatgaat

SEQ ID NO: 47597 - DNA, 20 bp, synthetic construct
  source 1..20: mol_type = other DNA
aactgtacttttacaatgaa

SEQ ID NO: 47598 - DNA, 20 bp, synthetic construct
  source 1..20: mol_type = other DNA
caactgtacttttacaatga

SEQ ID NO: 47599 - DNA, 20 bp, synthetic construct
  source 1..20: mol_type = other DNA
ccaactgtacttttacaatg

SEQ ID NO: 47600 - DNA, 20 bp, synthetic construct
  source 1..20: mol_type = other DNA
accaactgtacttttacaat

SEQ ID NO: 47601 - DNA, 20 bp, synthetic construct
  source 1..20: mol_type = other DNA
gaccaactgtacttttacaa

SEQ ID NO: 47602 - DNA, 20 bp, synthetic construct
  source 1..20: mol_type = other DNA
ggaccaactgtacttttaca

SEQ ID NO: 47603 - DNA, 20 bp, synthetic construct
  source 1..20: mol_type = other DNA
aggaccaactgtacttttac

SEQ ID NO: 47604 - DNA, 20 bp, synthetic construct
  source 1..20: mol_type = other DNA
gaggaccaactgtactttta

SEQ ID NO: 47605 - DNA, 20 bp, synthetic construct
  source 1..20: mol_type = other DNA
agaggaccaactgtactttt

SEQ ID NO: 47606 - DNA, 20 bp, synthetic construct
  source 1..20: mol_type = other DNA
cagaggaccaactgtacttt

SEQ ID NO: 47607 - DNA, 20 bp, synthetic construct
  source 1..20: mol_type = other DNA
gcagaggaccaactgtactt

SEQ ID NO: 47608 - DNA, 20 bp, synthetic construct
  source 1..20: mol_type = other DNA
tgcagaggaccaactgtact

SEQ ID NO: 47609 - DNA, 20 bp, synthetic construct
  source 1..20: mol_type = other DNA
atgcagaggaccaactgtac

SEQ ID NO: 47610 - DNA, 20 bp, synthetic construct
  source 1..20: mol_type = other DNA
gatgcagaggaccaactgta

SEQ ID NO: 47611 - DNA, 20 bp, synthetic construct
  source 1..20: mol_type = other DNA
agatgcagaggaccaactgt

SEQ ID NO: 47612 - DNA, 20 bp, synthetic construct
  source 1..20: mol_type = other DNA
cagatgcagaggaccaactg

SEQ ID NO: 47613 - DNA, 20 bp, synthetic construct
  source 1..20: mol_type = other DNA
acagatgcagaggaccaact

SEQ ID NO: 47614 - DNA, 20 bp, synthetic construct
  source 1..20: mol_type = other DNA
cacagatgcagaggaccaac

SEQ ID NO: 47615 - DNA, 20 bp, synthetic construct
  source 1..20: mol_type = other DNA
ccacagatgcagaggaccaa

SEQ ID NO: 47616 - DNA, 20 bp, synthetic construct
  source 1..20: mol_type = other DNA
cccacagatgcagaggacca

SEQ ID NO: 47617 - DNA, 20 bp, synthetic construct
  source 1..20: mol_type = other DNA
acccacagatgcagaggacc

SEQ ID NO: 47618 - DNA, 20 bp, synthetic construct
  source 1..20: mol_type = other DNA
aacccacagatgcagaggac

SEQ ID NO: 47619 - DNA, 20 bp, synthetic construct
  source 1..20: mol_type = other DNA
gaacccacagatgcagagga

SEQ ID NO: 47620 - DNA, 20 bp, synthetic construct
  source 1..20: mol_type = other DNA
ggaacccacagatgcagagg

SEQ ID NO: 47621 - DNA, 20 bp, synthetic construct
  source 1..20: mol_type = other DNA
tggaacccacagatgcagag

SEQ ID NO: 47622 - DNA, 20 bp, synthetic construct
  source 1..20: mol_type = other DNA
atggaacccacagatgcaga

SEQ ID NO: 47623 - DNA, 20 bp, synthetic construct
  source 1..20: mol_type = other DNA
tatggaacccacagatgcag

SEQ ID NO: 47624 - DNA, 20 bp, synthetic construct
  source 1..20: mol_type = other DNA
atatggaacccacagatgca

SEQ ID NO: 47625 - DNA, 20 bp, synthetic construct
  source 1..20: mol_type = other DNA
aatatggaacccacagatgc

SEQ ID NO: 47626 - DNA, 20 bp, synthetic construct
  source 1..20: mol_type = other DNA
gaatatggaacccacagatg

SEQ ID NO: 47627 - DNA, 20 bp, synthetic construct
  source 1..20: mol_type = other DNA
tgaatatggaacccacagat

SEQ ID NO: 47628 - DNA, 20 bp, synthetic construct
  source 1..20: mol_type = other DNA
atgaatatggaacccacaga

SEQ ID NO: 47629 - DNA, 20 bp, synthetic construct
  source 1..20: mol_type = other DNA
catgaatatggaacccacag

SEQ ID NO: 47630 - DNA, 20 bp, synthetic construct
  source 1..20: mol_type = other DNA
ccatgaatatggaacccaca

SEQ ID NO: 47631 - DNA, 20 bp, synthetic construct
  source 1..20: mol_type = other DNA
tccatgaatatggaacccac

SEQ ID NO: 47632 - DNA, 20 bp, synthetic construct
  source 1..20: mol_type = other DNA
atccatgaatatggaaccca

SEQ ID NO: 47633 - DNA, 20 bp, synthetic construct
  source 1..20: mol_type = other DNA
aatccatgaatatggaaccc

SEQ ID NO: 47634 - DNA, 20 bp, synthetic construct
  source 1..20: mol_type = other DNA
gaatccatgaatatggaacc

SEQ ID NO: 47635 - DNA, 20 bp, synthetic construct
  source 1..20: mol_type = other DNA
tgaatccatgaatatggaac

SEQ ID NO: 47636 - DNA, 20 bp, synthetic construct
  source 1..20: mol_type = other DNA
ctgaatccatgaatatggaa

SEQ ID NO: 47637 - DNA, 20 bp, synthetic construct
  source 1..20: mol_type = other DNA
gctgaatccatgaatatgga

SEQ ID NO: 47638 - DNA, 20 bp, synthetic construct
  source 1..20: mol_type = other DNA
ggctgaatccatgaatatgg

SEQ ID NO: 47639 - DNA, 20 bp, synthetic construct
  source 1..20: mol_type = other DNA
tggctgaatccatgaatatg

SEQ ID NO: 47640 - DNA, 20 bp, synthetic construct
  source 1..20: mol_type = other DNA
ttggctgaatccatgaatat

SEQ ID NO: 47641 - DNA, 20 bp, synthetic construct
  source 1..20: mol_type = other DNA
gttggctgaatccatgaata

SEQ ID NO: 47642 - DNA, 20 bp, synthetic construct
  source 1..20: mol_type = other DNA
ggttggctgaatccatgaat

SEQ ID NO: 47643 - DNA, 20 bp, synthetic construct
  source 1..20: mol_type = other DNA
aggttggctgaatccatgaa

SEQ ID NO: 47644 - DNA, 20 bp, synthetic construct
  source 1..20: mol_type = other DNA
aaggttggctgaatccatga

SEQ ID NO: 47645 - DNA, 20 bp, synthetic construct
  source 1..20: mol_type = other DNA
caaggttggctgaatccatg

SEQ ID NO: 47646 - DNA, 20 bp, synthetic construct
  source 1..20: mol_type = other DNA
ccaaggttggctgaatccat

SEQ ID NO: 47647 - DNA, 20 bp, synthetic construct
  source 1..20: mol_type = other DNA
tccaaggttggctgaatcca

SEQ ID NO: 47648 - DNA, 20 bp, synthetic construct
  source 1..20: mol_type = other DNA
atccaaggttggctgaatcc

SEQ ID NO: 47649 - DNA, 20 bp, synthetic construct
  source 1..20: mol_type = other DNA
gatccaaggttggctgaatc

SEQ ID NO: 47650 - DNA, 20 bp, synthetic construct
  source 1..20: mol_type = other DNA
tgatccaaggttggctgaat

SEQ ID NO: 47651 - DNA, 20 bp, synthetic construct
  source 1..20: mol_type = other DNA
ttgatccaaggttggctgaa

SEQ ID NO: 47652 - DNA, 20 bp, synthetic construct
  source 1..20: mol_type = other DNA
tttgatccaaggttggctga

SEQ ID NO: 47653 - DNA, 20 bp, synthetic construct
  source 1..20: mol_type = other DNA
ttttgatccaaggttggctg

SEQ ID NO: 47654 - DNA, 20 bp, synthetic construct
  source 1..20: mol_type = other DNA
tttttgatccaaggttggct

SEQ ID NO: 47655 - DNA, 20 bp, synthetic construct
  source 1..20: mol_type = other DNA
atttttgatccaaggttggc

SEQ ID NO: 47656 - DNA, 20 bp, synthetic construct
  source 1..20: mol_type = other DNA
tatttttgatccaaggttgg

SEQ ID NO: 47657 - DNA, 20 bp, synthetic construct
  source 1..20: mol_type = other DNA
atatttttgatccaaggttg

SEQ ID NO: 47658 - DNA, 20 bp, synthetic construct
  source 1..20: mol_type = other DNA
aatatttttgatccaaggtt

SEQ ID NO: 47659 - DNA, 20 bp, synthetic construct
  source 1..20: mol_type = other DNA
aaatatttttgatccaaggt

SEQ ID NO: 47660 - DNA, 20 bp, synthetic construct
  source 1..20: mol_type = other DNA
caaatatttttgatccaagg

SEQ ID NO: 47661 - DNA, 20 bp, synthetic construct
  source 1..20: mol_type = other DNA
acaaatatttttgatccaag

SEQ ID NO: 47662 - DNA, 20 bp, synthetic construct
  source 1..20: mol_type = other DNA
aacaaatatttttgatccaa

SEQ ID NO: 47663 - DNA, 20 bp, synthetic construct
  source 1..20: mol_type = other DNA
taacaaatatttttgatcca

SEQ ID NO: 47664 - DNA, 20 bp, synthetic construct
  source 1..20: mol_type = other DNA
ttaacaaatatttttgatcc

SEQ ID NO: 47665 - DNA, 20 bp, synthetic construct
  source 1..20: mol_type = other DNA
tttaacaaatatttttgatc

SEQ ID NO: 47666 - DNA, 20 bp, synthetic construct
  source 1..20: mol_type = other DNA
ttttaacaaatatttttgat

SEQ ID NO: 47667 - DNA, 20 bp, synthetic construct
  source 1..20: mol_type = other DNA
tttttaacaaatatttttga

SEQ ID NO: 47668 - DNA, 20 bp, synthetic construct
  source 1..20: mol_type = other DNA
ctttttaacaaatatttttg

SEQ ID NO: 47669 - DNA, 20 bp, synthetic construct
  source 1..20: mol_type = other DNA
cctttttaacaaatattttt

SEQ ID NO: 47670 - DNA, 20 bp, synthetic construct
  source 1..20: mol_type = other DNA
gcctttttaacaaatatttt

SEQ ID NO: 47671 - DNA, 20 bp, synthetic construct
  source 1..20: mol_type = other DNA
ggcctttttaacaaatattt

SEQ ID NO: 47672 - DNA, 20 bp, synthetic construct
  source 1..20: mol_type = other DNA
tggcctttttaacaaatatt

SEQ ID NO: 47673 - DNA, 20 bp, synthetic construct
  source 1..20: mol_type = other DNA
ctggcctttttaacaaatat

SEQ ID NO: 47674 - DNA, 20 bp, synthetic construct
  source 1..20: mol_type = other DNA
cctggcctttttaacaaata

SEQ ID NO: 47675 - DNA, 20 bp, synthetic construct
  source 1..20: mol_type = other DNA
gcctggcctttttaacaaat

SEQ ID NO: 47676 - DNA, 20 bp, synthetic construct
  source 1..20: mol_type = other DNA
tgcctggcctttttaacaaa

SEQ ID NO: 47677 - DNA, 20 bp, synthetic construct
  source 1..20: mol_type = other DNA
gtgcctggcctttttaacaa

SEQ ID NO: 47678 - DNA, 20 bp, synthetic construct
  source 1..20: mol_type = other DNA
tgtgcctggcctttttaaca

SEQ ID NO: 47679 - DNA, 20 bp, synthetic construct
  source 1..20: mol_type = other DNA
ctgtgcctggcctttttaac

SEQ ID NO: 47680 - DNA, 20 bp, synthetic construct
  source 1..20: mol_type = other DNA
actgtgcctggcctttttaa

SEQ ID NO: 47681 - DNA, 20 bp, synthetic construct
  source 1..20: mol_type = other DNA
cactgtgcctggccttttta

SEQ ID NO: 47682 - DNA, 20 bp, synthetic construct
  source 1..20: mol_type = other DNA
tcactgtgcctggccttttt

SEQ ID NO: 47683 - DNA, 20 bp, synthetic construct
  source 1..20: mol_type = other DNA
gtcactgtgcctggcctttt

SEQ ID NO: 47684 - DNA, 20 bp, synthetic construct
  source 1..20: mol_type = other DNA
agtcactgtgcctggccttt

SEQ ID NO: 47685 - DNA, 20 bp, synthetic construct
  source 1..20: mol_type = other DNA
gagtcactgtgcctggcctt

SEQ ID NO: 47686 - DNA, 20 bp, synthetic construct
  source 1..20: mol_type = other DNA
tgagtcactgtgcctggcct

SEQ ID NO: 47687 - DNA, 20 bp, synthetic construct
  source 1..20: mol_type = other DNA
gtgagtcactgtgcctggcc

SEQ ID NO: 47688 - DNA, 20 bp, synthetic construct
  source 1..20: mol_type = other DNA
cgtgagtcactgtgcctggc

SEQ ID NO: 47689 - DNA, 20 bp, synthetic construct
  source 1..20: mol_type = other DNA
gcgtgagtcactgtgcctgg

SEQ ID NO: 47690 - DNA, 20 bp, synthetic construct
  source 1..20: mol_type = other DNA
ggcgtgagtcactgtgcctg

SEQ ID NO: 47691 - DNA, 20 bp, synthetic construct
  source 1..20: mol_type = other DNA
aggcgtgagtcactgtgcct

SEQ ID NO: 47692 - DNA, 20 bp, synthetic construct
  source 1..20: mol_type = other DNA
caggcgtgagtcactgtgcc

SEQ ID NO: 47693 - DNA, 20 bp, synthetic construct
  source 1..20: mol_type = other DNA
acaggcgtgagtcactgtgc

SEQ ID NO: 47694 - DNA, 20 bp, synthetic construct
  source 1..20: mol_type = other DNA
tacaggcgtgagtcactgtg

SEQ ID NO: 47695 - DNA, 20 bp, synthetic construct
  source 1..20: mol_type = other DNA
ttacaggcgtgagtcactgt

SEQ ID NO: 47696 - DNA, 20 bp, synthetic construct
  source 1..20: mol_type = other DNA
attacaggcgtgagtcactg

SEQ ID NO: 47697 - DNA, 20 bp, synthetic construct
  source 1..20: mol_type = other DNA
gattacaggcgtgagtcact

SEQ ID NO: 47698 - DNA, 20 bp, synthetic construct
  source 1..20: mol_type = other DNA
ggattacaggcgtgagtcac

SEQ ID NO: 47699 - DNA, 20 bp, synthetic construct
  source 1..20: mol_type = other DNA
gggattacaggcgtgagtca

SEQ ID NO: 47700 - DNA, 20 bp, synthetic construct
  source 1..20: mol_type = other DNA
tgggattacaggcgtgagtc

SEQ ID NO: 47701 - DNA, 20 bp, synthetic construct
  source 1..20: mol_type = other DNA
ctgggattacaggcgtgagt

SEQ ID NO: 47702 - DNA, 20 bp, synthetic construct
  source 1..20: mol_type = other DNA
gctgggattacaggcgtgag

SEQ ID NO: 47703 - DNA, 20 bp, synthetic construct
  source 1..20: mol_type = other DNA
tgctgggattacaggcgtga

SEQ ID NO: 47704 - DNA, 20 bp, synthetic construct
  source 1..20: mol_type = other DNA
gtgctgggattacaggcgtg

SEQ ID NO: 47705 - DNA, 20 bp, synthetic construct
  source 1..20: mol_type = other DNA
agtgctgggattacaggcgt

SEQ ID NO: 47706 - DNA, 20 bp, synthetic construct
  source 1..20: mol_type = other DNA
aagtgctgggattacaggcg

SEQ ID NO: 47707 - DNA, 20 bp, synthetic construct
  source 1..20: mol_type = other DNA
aaagtgctgggattacaggc

SEQ ID NO: 47708 - DNA, 20 bp, synthetic construct
  source 1..20: mol_type = other DNA
caaagtgctgggattacagg

SEQ ID NO: 47709 - DNA, 20 bp, synthetic construct
  source 1..20: mol_type = other DNA
ccaaagtgctgggattacag

SEQ ID NO: 47710 - DNA, 20 bp, synthetic construct
  source 1..20: mol_type = other DNA
cccaaagtgctgggattaca

SEQ ID NO: 47711 - DNA, 20 bp, synthetic construct
  source 1..20: mol_type = other DNA
tcccaaagtgctgggattac

SEQ ID NO: 47712 - DNA, 20 bp, synthetic construct
  source 1..20: mol_type = other DNA
ctcccaaagtgctgggatta

SEQ ID NO: 47713 - DNA, 20 bp, synthetic construct
  source 1..20: mol_type = other DNA
actcccaaagtgctgggatt

SEQ ID NO: 47714 - DNA, 20 bp, synthetic construct
  source 1..20: mol_type = other DNA
aactcccaaagtgctgggat

SEQ ID NO: 47715 - DNA, 20 bp, synthetic construct
  source 1..20: mol_type = other DNA
aaactcccaaagtgctggga

SEQ ID NO: 47716 - DNA, 20 bp, synthetic construct
  source 1..20: mol_type = other DNA
caaactcccaaagtgctggg

SEQ ID NO: 47717 - DNA, 20 bp, synthetic construct
  source 1..20: mol_type = other DNA
tcaaactcccaaagtgctgg

SEQ ID NO: 47718 - DNA, 20 bp, synthetic construct
  source 1..20: mol_type = other DNA
ctcaaactcccaaagtgctg

SEQ ID NO: 47719 - DNA, 20 bp, synthetic construct
  source 1..20: mol_type = other DNA
cctcaaactcccaaagtgct

SEQ ID NO: 47720 - DNA, 20 bp, synthetic construct
  source 1..20: mol_type = other DNA
acctcaaactcccaaagtgc

SEQ ID NO: 47721 - DNA, 20 bp, synthetic construct
  source 1..20: mol_type = other DNA
cacctcaaactcccaaagtg

SEQ ID NO: 47722 - DNA, 20 bp, synthetic construct
  source 1..20: mol_type = other DNA
ccacctcaaactcccaaagt

SEQ ID NO: 47723 - DNA, 20 bp, synthetic construct
  source 1..20: mol_type = other DNA
cccacctcaaactcccaaag

SEQ ID NO: 47724 - DNA, 20 bp, synthetic construct
  source 1..20: mol_type = other DNA
gcccacctcaaactcccaaa

SEQ ID NO: 47725 - DNA, 20 bp, synthetic construct
  source 1..20: mol_type = other DNA
tgcccacctcaaactcccaa

SEQ ID NO: 47726 - DNA, 20 bp, synthetic construct
  source 1..20: mol_type = other DNA
ctgcccacctcaaactccca

SEQ ID NO: 47727 - DNA, 20 bp, synthetic construct
  source 1..20: mol_type = other DNA
tctgcccacctcaaactccc

SEQ ID NO: 47728 - DNA, 20 bp, synthetic construct
  source 1..20: mol_type = other DNA
atctgcccacctcaaactcc

SEQ ID NO: 47729 - DNA, 20 bp, synthetic construct
  source 1..20: mol_type = other DNA
catctgcccacctcaaactc

SEQ ID NO: 47730 - DNA, 20 bp, synthetic construct
  source 1..20: mol_type = other DNA
ccatctgcccacctcaaact

SEQ ID NO: 47731 - DNA, 20 bp, synthetic construct
  source 1..20: mol_type = other DNA
gccatctgcccacctcaaac

SEQ ID NO: 47732 - DNA, 20 bp, synthetic construct
  source 1..20: mol_type = other DNA
agccatctgcccacctcaaa

SEQ ID NO: 47733 - DNA, 20 bp, synthetic construct
  source 1..20: mol_type = other DNA
aagccatctgcccacctcaa

SEQ ID NO: 47734 - DNA, 20 bp, synthetic construct
  source 1..20: mol_type = other DNA
caagccatctgcccacctca

SEQ ID NO: 47735 - DNA, 20 bp, synthetic construct
  source 1..20: mol_type = other DNA
tcaagccatctgcccacctc

SEQ ID NO: 47736 - DNA, 20 bp, synthetic construct
  source 1..20: mol_type = other DNA
ctcaagccatctgcccacct

SEQ ID NO: 47737 - DNA, 20 bp, synthetic construct
  source 1..20: mol_type = other DNA
gctcaagccatctgcccacc

SEQ ID NO: 47738 - DNA, 20 bp, synthetic construct
  source 1..20: mol_type = other DNA
agctcaagccatctgcccac

SEQ ID NO: 47739 - DNA, 20 bp, synthetic construct
  source 1..20: mol_type = other DNA
gagctcaagccatctgccca

SEQ ID NO: 47740 - DNA, 20 bp, synthetic construct
  source 1..20: mol_type = other DNA
tgagctcaagccatctgccc

SEQ ID NO: 47741 - DNA, 20 bp, synthetic construct
  source 1..20: mol_type = other DNA
gtgagctcaagccatctgcc

SEQ ID NO: 47742 - DNA, 20 bp, synthetic construct
  source 1..20: mol_type = other DNA
tgtgagctcaagccatctgc

SEQ ID NO: 47743 - DNA, 20 bp, synthetic construct
  source 1..20: mol_type = other DNA
ttgtgagctcaagccatctg

SEQ ID NO: 47744 - DNA, 20 bp, synthetic construct
  source 1..20: mol_type = other DNA
cttgtgagctcaagccatct

SEQ ID NO: 47745 - DNA, 20 bp, synthetic construct
  source 1..20: mol_type = other DNA
acttgtgagctcaagccatc

SEQ ID NO: 47746 - DNA, 20 bp, synthetic construct
  source 1..20: mol_type = other DNA
aacttgtgagctcaagccat

SEQ ID NO: 47747 - DNA, 20 bp, synthetic construct
  source 1..20: mol_type = other DNA
aaacttgtgagctcaagcca

SEQ ID NO: 47748 - DNA, 20 bp, synthetic construct
  source 1..20: mol_type = other DNA
taaacttgtgagctcaagcc

SEQ ID NO: 47749 - DNA, 20 bp, synthetic construct
  source 1..20: mol_type = other DNA
ttaaacttgtgagctcaagc

SEQ ID NO: 47750 - DNA, 20 bp, synthetic construct
  source 1..20: mol_type = other DNA
cttaaacttgtgagctcaag

SEQ ID NO: 47751 - DNA, 20 bp, synthetic construct
  source 1..20: mol_type = other DNA
tcttaaacttgtgagctcaa

SEQ ID NO: 47752 - DNA, 20 bp, synthetic construct
  source 1..20: mol_type = other DNA
gtcttaaacttgtgagctca

SEQ ID NO: 47753 - DNA, 20 bp, synthetic construct
  source 1..20: mol_type = other DNA
ggtcttaaacttgtgagctc

SEQ ID NO: 47754 - DNA, 20 bp, synthetic construct
  source 1..20: mol_type = other DNA
tggtcttaaacttgtgagct

SEQ ID NO: 47755 - DNA, 20 bp, synthetic construct
  source 1..20: mol_type = other DNA
ctggtcttaaacttgtgagc

SEQ ID NO: 47756 - DNA, 20 bp, synthetic construct
  source 1..20: mol_type = other DNA
gctggtcttaaacttgtgag

SEQ ID NO: 47757 - DNA, 20 bp, synthetic construct
  source 1..20: mol_type = other DNA
ggctggtcttaaacttgtga

SEQ ID NO: 47758 - DNA, 20 bp, synthetic construct
  source 1..20: mol_type = other DNA
aggctggtcttaaacttgtg

SEQ ID NO: 47759 - DNA, 20 bp, synthetic construct
  source 1..20: mol_type = other DNA
caggctggtcttaaacttgt

SEQ ID NO: 47760 - DNA, 20 bp, synthetic construct
  source 1..20: mol_type = other DNA
ccaggctggtcttaaacttg

SEQ ID NO: 47761 - DNA, 20 bp, synthetic construct
  source 1..20: mol_type = other DNA
cccaggctggtcttaaactt

SEQ ID NO: 47762 - DNA, 20 bp, synthetic construct
  source 1..20: mol_type = other DNA
gcccaggctggtcttaaact

SEQ ID NO: 47763 - DNA, 20 bp, synthetic construct
  source 1..20: mol_type = other DNA
tgcccaggctggtcttaaac

SEQ ID NO: 47764 - DNA, 20 bp, synthetic construct
  source 1..20: mol_type = other DNA
ttgcccaggctggtcttaaa

SEQ ID NO: 47765 - DNA, 20 bp, synthetic construct
  source 1..20: mol_type = other DNA
gttgcccaggctggtcttaa

SEQ ID NO: 47766 - DNA, 20 bp, synthetic construct
  source 1..20: mol_type = other DNA
tgttgcccaggctggtctta

SEQ ID NO: 47767 - DNA, 20 bp, synthetic construct
  source 1..20: mol_type = other DNA
atgttgcccaggctggtctt

SEQ ID NO: 47768 - DNA, 20 bp, synthetic construct
  source 1..20: mol_type = other DNA
catgttgcccaggctggtct

SEQ ID NO: 47769 - DNA, 20 bp, synthetic construct
  source 1..20: mol_type = other DNA
ccatgttgcccaggctggtc

SEQ ID NO: 47770 - DNA, 20 bp, synthetic construct
  source 1..20: mol_type = other DNA
gccatgttgcccaggctggt

SEQ ID NO: 47771 - DNA, 20 bp, synthetic construct
  source 1..20: mol_type = other DNA
tgccatgttgcccaggctgg

SEQ ID NO: 47772 - DNA, 20 bp, synthetic construct
  source 1..20: mol_type = other DNA
ctgccatgttgcccaggctg

SEQ ID NO: 47773 - DNA, 20 bp, synthetic construct
  source 1..20: mol_type = other DNA
tctgccatgttgcccaggct

SEQ ID NO: 47774 - DNA, 20 bp, synthetic construct
  source 1..20: mol_type = other DNA
ttctgccatgttgcccaggc

SEQ ID NO: 47775 - DNA, 20 bp, synthetic construct
  source 1..20: mol_type = other DNA
gttctgccatgttgcccagg

SEQ ID NO: 47776 - DNA, 20 bp, synthetic construct
  source 1..20: mol_type = other DNA
agttctgccatgttgcccag

SEQ ID NO: 47777 - DNA, 20 bp, synthetic construct
  source 1..20: mol_type = other DNA
gagttctgccatgttgccca

SEQ ID NO: 47778 - DNA, 20 bp, synthetic construct
  source 1..20: mol_type = other DNA
ggagttctgccatgttgccc

SEQ ID NO: 47779 - DNA, 20 bp, synthetic construct
  source 1..20: mol_type = other DNA
cggagttctgccatgttgcc

SEQ ID NO: 47780 - DNA, 20 bp, synthetic construct
  source 1..20: mol_type = other DNA
acggagttctgccatgttgc

SEQ ID NO: 47781 - DNA, 20 bp, synthetic construct
  source 1..20: mol_type = other DNA
gacggagttctgccatgttg

SEQ ID NO: 47782 - DNA, 20 bp, synthetic construct
  source 1..20: mol_type = other DNA
agacggagttctgccatgtt

SEQ ID NO: 47783 - DNA, 20 bp, synthetic construct
  source 1..20: mol_type = other DNA
gagacggagttctgccatgt

SEQ ID NO: 47784 - DNA, 20 bp, synthetic construct
  source 1..20: mol_type = other DNA
agagacggagttctgccatg

SEQ ID NO: 47785 - DNA, 20 bp, synthetic construct
  source 1..20: mol_type = other DNA
tagagacggagttctgccat

SEQ ID NO: 47786 - DNA, 20 bp, synthetic construct
  source 1..20: mol_type = other DNA
gtagagacggagttctgcca

SEQ ID NO: 47787 - DNA, 20 bp, synthetic construct
  source 1..20: mol_type = other DNA
tgtagagacggagttctgcc

SEQ ID NO: 47788 - DNA, 20 bp, synthetic construct
  source 1..20: mol_type = other DNA
ttgtagagacggagttctgc

SEQ ID NO: 47789 - DNA, 20 bp, synthetic construct
  source 1..20: mol_type = other DNA
tttgtagagacggagttctg

SEQ ID NO: 47790 - DNA, 20 bp, synthetic construct
  source 1..20: mol_type = other DNA
ttttgtagagacggagttct

SEQ ID NO: 47791 - DNA, 20 bp, synthetic construct
  source 1..20: mol_type = other DNA
tttttgtagagacggagttc

SEQ ID NO: 47792 - DNA, 20 bp, synthetic construct
  source 1..20: mol_type = other DNA
ctttttgtagagacggagtt

SEQ ID NO: 47793 - DNA, 20 bp, synthetic construct
  source 1..20: mol_type = other DNA
actttttgtagagacggagt

SEQ ID NO: 47794 - DNA, 20 bp, synthetic construct
  source 1..20: mol_type = other DNA
tactttttgtagagacggag

SEQ ID NO: 47795 - DNA, 20 bp, synthetic construct
  source 1..20: mol_type = other DNA
ttactttttgtagagacgga

SEQ ID NO: 47796 - DNA, 20 bp, synthetic construct
  source 1..20: mol_type = other DNA
tttactttttgtagagacgg

SEQ ID NO: 47797 - DNA, 20 bp, synthetic construct
  source 1..20: mol_type = other DNA
ttttactttttgtagagacg

SEQ ID NO: 47798 - DNA, 20 bp, synthetic construct
  source 1..20: mol_type = other DNA
tttttactttttgtagagac

SEQ ID NO: 47799 - DNA, 20 bp, synthetic construct
  source 1..20: mol_type = other DNA
ttttttactttttgtagaga

SEQ ID NO: 47800 - DNA, 20 bp, synthetic construct
  source 1..20: mol_type = other DNA
tttttttactttttgtagag

SEQ ID NO: 47801 - DNA, 20 bp, synthetic construct
  source 1..20: mol_type = other DNA
gtttttttactttttgtaga

SEQ ID NO: 47802 - DNA, 20 bp, synthetic construct
  source 1..20: mol_type = other DNA
agtttttttactttttgtag

SEQ ID NO: 47803 - DNA, 20 bp, synthetic construct
  source 1..20: mol_type = other DNA
tagtttttttactttttgta

SEQ ID NO: 47804 - DNA, 20 bp, synthetic construct
  source 1..20: mol_type = other DNA
ctagtttttttactttttgt

SEQ ID NO: 47805 - DNA, 20 bp, synthetic construct
  source 1..20: mol_type = other DNA
gctagtttttttactttttg

SEQ ID NO: 47806 - DNA, 20 bp, synthetic construct
  source 1..20: mol_type = other DNA
ggctagtttttttacttttt

SEQ ID NO: 47807 - DNA, 20 bp, synthetic construct
  source 1..20: mol_type = other DNA
cggctagtttttttactttt

SEQ ID NO: 47808 - DNA, 20 bp, synthetic construct
  source 1..20: mol_type = other DNA
tcggctagtttttttacttt

SEQ ID NO: 47809 - DNA, 20 bp, synthetic construct
  source 1..20: mol_type = other DNA
ttcggctagtttttttactt

SEQ ID NO: 47810 - DNA, 20 bp, synthetic construct
  source 1..20: mol_type = other DNA
gttcggctagtttttttact

SEQ ID NO: 47811 - DNA, 20 bp, synthetic construct
  source 1..20: mol_type = other DNA
cgttcggctagtttttttac

SEQ ID NO: 47812 - DNA, 20 bp, synthetic construct
  source 1..20: mol_type = other DNA
acgttcggctagttttttta

SEQ ID NO: 47813 - DNA, 20 bp, synthetic construct
  source 1..20: mol_type = other DNA
cacgttcggctagttttttt

SEQ ID NO: 47814 - DNA, 20 bp, synthetic construct
  source 1..20: mol_type = other DNA
ccacgttcggctagtttttt

SEQ ID NO: 47815 - DNA, 20 bp, synthetic construct
  source 1..20: mol_type = other DNA
accacgttcggctagttttt

SEQ ID NO: 47816 - DNA, 20 bp, synthetic construct
  source 1..20: mol_type = other DNA
caccacgttcggctagtttt

SEQ ID NO: 47817 - DNA, 20 bp, synthetic construct
  source 1..20: mol_type = other DNA
ccaccacgttcggctagttt

SEQ ID NO: 47818 - DNA, 20 bp, synthetic construct
  source 1..20: mol_type = other DNA
accaccacgttcggctagtt

SEQ ID NO: 47819 - DNA, 20 bp, synthetic construct
  source 1..20: mol_type = other DNA
taccaccacgttcggctagt

SEQ ID NO: 47820 - DNA, 20 bp, synthetic construct
  source 1..20: mol_type = other DNA
gtaccaccacgttcggctag

SEQ ID NO: 47821 - DNA, 20 bp, synthetic construct
  source 1..20: mol_type = other DNA
cgtaccaccacgttcggcta

SEQ ID NO: 47822 - DNA, 20 bp, synthetic construct
  source 1..20: mol_type = other DNA
acgtaccaccacgttcggct

SEQ ID NO: 47823 - DNA, 20 bp, synthetic construct
  source 1..20: mol_type = other DNA
cacgtaccaccacgttcggc

SEQ ID NO: 47824 - DNA, 20 bp, synthetic construct
  source 1..20: mol_type = other DNA
gcacgtaccaccacgttcgg

SEQ ID NO: 47825 - DNA, 20 bp, synthetic construct
  source 1..20: mol_type = other DNA
ggcacgtaccaccacgttcg

SEQ ID NO: 47826 - DNA, 20 bp, synthetic construct
  source 1..20: mol_type = other DNA
aggcacgtaccaccacgttc

SEQ ID NO: 47827 - DNA, 20 bp, synthetic construct
  source 1..20: mol_type = other DNA
caggcacgtaccaccacgtt

SEQ ID NO: 47828 - DNA, 20 bp, synthetic construct
  source 1..20: mol_type = other DNA
acaggcacgtaccaccacgt

SEQ ID NO: 47829 - DNA, 20 bp, synthetic construct
  source 1..20: mol_type = other DNA
tacaggcacgtaccaccacg

SEQ ID NO: 47830 - DNA, 20 bp, synthetic construct
  source 1..20: mol_type = other DNA
ctacaggcacgtaccaccac

SEQ ID NO: 47831 - DNA, 20 bp, synthetic construct
  source 1..20: mol_type = other DNA
actacaggcacgtaccacca

SEQ ID NO: 47832 - DNA, 20 bp, synthetic construct
  source 1..20: mol_type = other DNA
gactacaggcacgtaccacc

SEQ ID NO: 47833 - DNA, 20 bp, synthetic construct
  source 1..20: mol_type = other DNA
ggactacaggcacgtaccac

SEQ ID NO: 47834 - DNA, 20 bp, synthetic construct
  source 1..20: mol_type = other DNA
aggactacaggcacgtacca

SEQ ID NO: 47835 - DNA, 20 bp, synthetic construct
  source 1..20: mol_type = other DNA
taggactacaggcacgtacc

SEQ ID NO: 47836 - DNA, 20 bp, synthetic construct
  source 1..20: mol_type = other DNA
ctaggactacaggcacgtac

SEQ ID NO: 47837 - DNA, 20 bp, synthetic construct
  source 1..20: mol_type = other DNA
actaggactacaggcacgta

SEQ ID NO: 47838 - DNA, 20 bp, synthetic construct
  source 1..20: mol_type = other DNA
cactaggactacaggcacgt

SEQ ID NO: 47839 - DNA, 20 bp, synthetic construct
  source 1..20: mol_type = other DNA
tcactaggactacaggcacg

SEQ ID NO: 47840 - DNA, 20 bp, synthetic construct
  source 1..20: mol_type = other DNA
gtcactaggactacaggcac

SEQ ID NO: 47841 - DNA, 20 bp, synthetic construct
  source 1..20: mol_type = other DNA
agtcactaggactacaggca

SEQ ID NO: 47842 - DNA, 20 bp, synthetic construct
  source 1..20: mol_type = other DNA
aagtcactaggactacaggc

SEQ ID NO: 47843 - DNA, 20 bp, synthetic construct
  source 1..20: mol_type = other DNA
caagtcactaggactacagg

SEQ ID NO: 47844 - DNA, 20 bp, synthetic construct
  source 1..20: mol_type = other DNA
ccaagtcactaggactacag

SEQ ID NO: 47845 - DNA, 20 bp, synthetic construct
  source 1..20: mol_type = other DNA
cccaagtcactaggactaca

SEQ ID NO: 47846 - DNA, 20 bp, synthetic construct
  source 1..20: mol_type = other DNA
tcccaagtcactaggactac

SEQ ID NO: 47847 - DNA, 20 bp, synthetic construct
  source 1..20: mol_type = other DNA
ctcccaagtcactaggacta

SEQ ID NO: 47848 - DNA, 20 bp, synthetic construct
  source 1..20: mol_type = other DNA
cctcccaagtcactaggact

SEQ ID NO: 47849 - DNA, 20 bp, synthetic construct
  source 1..20: mol_type = other DNA
gcctcccaagtcactaggac

SEQ ID NO: 47850 - DNA, 20 bp, synthetic construct
  source 1..20: mol_type = other DNA
agcctcccaagtcactagga

SEQ ID NO: 47851 - DNA, 20 bp, synthetic construct
  source 1..20: mol_type = other DNA
cagcctcccaagtcactagg

SEQ ID NO: 47852 - DNA, 20 bp, synthetic construct
  source 1..20: mol_type = other DNA
tcagcctcccaagtcactag

SEQ ID NO: 47853 - DNA, 20 bp, synthetic construct
  source 1..20: mol_type = other DNA
gtcagcctcccaagtcacta

SEQ ID NO: 47854 - DNA, 20 bp, synthetic construct
  source 1..20: mol_type = other DNA
cgtcagcctcccaagtcact

SEQ ID NO: 47855 - DNA, 20 bp, synthetic construct
  source 1..20: mol_type = other DNA
acgtcagcctcccaagtcac

SEQ ID NO: 47856 - DNA, 20 bp, synthetic construct
  source 1..20: mol_type = other DNA
cacgtcagcctcccaagtca

SEQ ID NO: 47857 - DNA, 20 bp, synthetic construct
  source 1..20: mol_type = other DNA
ccacgtcagcctcccaagtc

SEQ ID NO: 47858 - DNA, 20 bp, synthetic construct
  source 1..20: mol_type = other DNA
cccacgtcagcctcccaagt

SEQ ID NO: 47859 - DNA, 20 bp, synthetic construct
  source 1..20: mol_type = other DNA
tcccacgtcagcctcccaag

SEQ ID NO: 47860 - DNA, 20 bp, synthetic construct
  source 1..20: mol_type = other DNA
ctcccacgtcagcctcccaa

SEQ ID NO: 47861 - DNA, 20 bp, synthetic construct
  source 1..20: mol_type = other DNA
cctcccacgtcagcctccca

SEQ ID NO: 47862 - DNA, 20 bp, synthetic construct
  source 1..20: mol_type = other DNA
tcctcccacgtcagcctccc

SEQ ID NO: 47863 - DNA, 20 bp, synthetic construct
  source 1..20: mol_type = other DNA
atcctcccacgtcagcctcc

SEQ ID NO: 47864 - DNA, 20 bp, synthetic construct
  source 1..20: mol_type = other DNA
aatcctcccacgtcagcctc

SEQ ID NO: 47865 - DNA, 20 bp, synthetic construct
  source 1..20: mol_type = other DNA
caatcctcccacgtcagcct

SEQ ID NO: 47866 - DNA, 20 bp, synthetic construct
  source 1..20: mol_type = other DNA
acaatcctcccacgtcagcc

SEQ ID NO: 47867 - DNA, 20 bp, synthetic construct
  source 1..20: mol_type = other DNA
aacaatcctcccacgtcagc

SEQ ID NO: 47868 - DNA, 20 bp, synthetic construct
  source 1..20: mol_type = other DNA
aaacaatcctcccacgtcag

SEQ ID NO: 47869 - DNA, 20 bp, synthetic construct
  source 1..20: mol_type = other DNA
caaacaatcctcccacgtca

SEQ ID NO: 47870 - DNA, 20 bp, synthetic construct
  source 1..20: mol_type = other DNA
tcaaacaatcctcccacgtc

SEQ ID NO: 47871 - DNA, 20 bp, synthetic construct
  source 1..20: mol_type = other DNA
ctcaaacaatcctcccacgt

SEQ ID NO: 47872 - DNA, 20 bp, synthetic construct
  source 1..20: mol_type = other DNA
gctcaaacaatcctcccacg

SEQ ID NO: 47873 - DNA, 20 bp, synthetic construct
  source 1..20: mol_type = other DNA
ggctcaaacaatcctcccac

SEQ ID NO: 47874 - DNA, 20 bp, synthetic construct
  source 1..20: mol_type = other DNA
aggctcaaacaatcctccca

SEQ ID NO: 47875 - DNA, 20 bp, synthetic construct
  source 1..20: mol_type = other DNA
caggctcaaacaatcctccc

SEQ ID NO: 47876 - DNA, 20 bp, synthetic construct
  source 1..20: mol_type = other DNA
ccaggctcaaacaatcctcc

SEQ ID NO: 47877 - DNA, 20 bp, synthetic construct
  source 1..20: mol_type = other DNA
cccaggctcaaacaatcctc

SEQ ID NO: 47878 - DNA, 20 bp, synthetic construct
  source 1..20: mol_type = other DNA
tcccaggctcaaacaatcct

SEQ ID NO: 47879 - DNA, 20 bp, synthetic construct
  source 1..20: mol_type = other DNA
ctcccaggctcaaacaatcc

SEQ ID NO: 47880 - DNA, 20 bp, synthetic construct
  source 1..20: mol_type = other DNA
cctcccaggctcaaacaatc

SEQ ID NO: 47881 - DNA, 20 bp, synthetic construct
  source 1..20: mol_type = other DNA
acctcccaggctcaaacaat

SEQ ID NO: 47882 - DNA, 20 bp, synthetic construct
  source 1..20: mol_type = other DNA
cacctcccaggctcaaacaa

SEQ ID NO: 47883 - DNA, 20 bp, synthetic construct
  source 1..20: mol_type = other DNA
ccacctcccaggctcaaaca

SEQ ID NO: 47884 - DNA, 20 bp, synthetic construct
  source 1..20: mol_type = other DNA
tccacctcccaggctcaaac

SEQ ID NO: 47885 - DNA, 20 bp, synthetic construct
  source 1..20: mol_type = other DNA
ctccacctcccaggctcaaa

SEQ ID NO: 47886 - DNA, 20 bp, synthetic construct
  source 1..20: mol_type = other DNA
cctccacctcccaggctcaa

SEQ ID NO: 47887 - DNA, 20 bp, synthetic construct
  source 1..20: mol_type = other DNA
acctccacctcccaggctca

SEQ ID NO: 47888 - DNA, 20 bp, synthetic construct
  source 1..20: mol_type = other DNA
aacctccacctcccaggctc

SEQ ID NO: 47889 - DNA, 20 bp, synthetic construct
  source 1..20: mol_type = other DNA
aaacctccacctcccaggct

SEQ ID NO: 47890 - DNA, 20 bp, synthetic construct
  source 1..20: mol_type = other DNA
gaaacctccacctcccaggc

SEQ ID NO: 47891 - DNA, 20 bp, synthetic construct
  source 1..20: mol_type = other DNA
tgaaacctccacctcccagg

SEQ ID NO: 47892 - DNA, 20 bp, synthetic construct
  source 1..20: mol_type = other DNA
gtgaaacctccacctcccag

SEQ ID NO: 47893 - DNA, 20 bp, synthetic construct
  source 1..20: mol_type = other DNA
agtgaaacctccacctccca

SEQ ID NO: 47894 - DNA, 20 bp, synthetic construct
  source 1..20: mol_type = other DNA
cagtgaaacctccacctccc

SEQ ID NO: 47895 - DNA, 20 bp, synthetic construct
  source 1..20: mol_type = other DNA
tcagtgaaacctccacctcc

SEQ ID NO: 47896 - DNA, 20 bp, synthetic construct
  source 1..20: mol_type = other DNA
ctcagtgaaacctccacctc

SEQ ID NO: 47897 - DNA, 20 bp, synthetic construct
  source 1..20: mol_type = other DNA
gctcagtgaaacctccacct

SEQ ID NO: 47898 - DNA, 20 bp, synthetic construct
  source 1..20: mol_type = other DNA
agctcagtgaaacctccacc

SEQ ID NO: 47899 - DNA, 20 bp, synthetic construct
  source 1..20: mol_type = other DNA
cagctcagtgaaacctccac

SEQ ID NO: 47900 - DNA, 20 bp, synthetic construct
  source 1..20: mol_type = other DNA
tcagctcagtgaaacctcca

SEQ ID NO: 47901 - DNA, 20 bp, synthetic construct
  source 1..20: mol_type = other DNA
ctcagctcagtgaaacctcc

SEQ ID NO: 47902 - DNA, 20 bp, synthetic construct
  source 1..20: mol_type = other DNA
tctcagctcagtgaaacctc

SEQ ID NO: 47903 - DNA, 20 bp, synthetic construct
  source 1..20: mol_type = other DNA
atctcagctcagtgaaacct

SEQ ID NO: 47904 - DNA, 20 bp, synthetic construct
  source 1..20: mol_type = other DNA
tatctcagctcagtgaaacc

SEQ ID NO: 47905 - DNA, 20 bp, synthetic construct
  source 1..20: mol_type = other DNA
ttatctcagctcagtgaaac

SEQ ID NO: 47906 - DNA, 20 bp, synthetic construct
  source 1..20: mol_type = other DNA
attatctcagctcagtgaaa

SEQ ID NO: 47907 - DNA, 20 bp, synthetic construct
  source 1..20: mol_type = other DNA
cattatctcagctcagtgaa

SEQ ID NO: 47908 - DNA, 20 bp, synthetic construct
  source 1..20: mol_type = other DNA
gcattatctcagctcagtga

SEQ ID NO: 47909 - DNA, 20 bp, synthetic construct
  source 1..20: mol_type = other DNA
ggcattatctcagctcagtg

SEQ ID NO: 47910 - DNA, 20 bp, synthetic construct
  source 1..20: mol_type = other DNA
gggcattatctcagctcagt

SEQ ID NO: 47911 - DNA, 20 bp, synthetic construct
  source 1..20: mol_type = other DNA
ggggcattatctcagctcag

SEQ ID NO: 47912 - DNA, 20 bp, synthetic construct
  source 1..20: mol_type = other DNA
aggggcattatctcagctca

SEQ ID NO: 47913 - DNA, 20 bp, synthetic construct
  source 1..20: mol_type = other DNA
caggggcattatctcagctc

SEQ ID NO: 47914 - DNA, 20 bp, synthetic construct
  source 1..20: mol_type = other DNA
gcaggggcattatctcagct

SEQ ID NO: 47915 - DNA, 20 bp, synthetic construct
  source 1..20: mol_type = other DNA
tgcaggggcattatctcagc

SEQ ID NO: 47916 - DNA, 20 bp, synthetic construct
  source 1..20: mol_type = other DNA
gtgcaggggcattatctcag

SEQ ID NO: 47917 - DNA, 20 bp, synthetic construct
  source 1..20: mol_type = other DNA
agtgcaggggcattatctca

SEQ ID NO: 47918 - DNA, 20 bp, synthetic construct
  source 1..20: mol_type = other DNA
gagtgcaggggcattatctc

SEQ ID NO: 47919 - DNA, 20 bp, synthetic construct
  source 1..20: mol_type = other DNA
tgagtgcaggggcattatct

SEQ ID NO: 47920 - DNA, 20 bp, synthetic construct
  source 1..20: mol_type = other DNA
ctgagtgcaggggcattatc

SEQ ID NO: 47921 - DNA, 20 bp, synthetic construct
  source 1..20: mol_type = other DNA
gctgagtgcaggggcattat

SEQ ID NO: 47922 - DNA, 20 bp, synthetic construct
  source 1..20: mol_type = other DNA
ggctgagtgcaggggcatta

SEQ ID NO: 47923 - DNA, 20 bp, synthetic construct
  source 1..20: mol_type = other DNA
aggctgagtgcaggggcatt

SEQ ID NO: 47924 - DNA, 20 bp, synthetic construct
  source 1..20: mol_type = other DNA
caggctgagtgcaggggcat

SEQ ID NO: 47925 - DNA, 20 bp, synthetic construct
  source 1..20: mol_type = other DNA
ccaggctgagtgcaggggca

SEQ ID NO: 47926 - DNA, 20 bp, synthetic construct
  source 1..20: mol_type = other DNA
accaggctgagtgcaggggc

SEQ ID NO: 47927 - DNA, 20 bp, synthetic construct
  source 1..20: mol_type = other DNA
gaccaggctgagtgcagggg

SEQ ID NO: 47928 - DNA, 20 bp, synthetic construct
  source 1..20: mol_type = other DNA
tgaccaggctgagtgcaggg

SEQ ID NO: 47929 - DNA, 20 bp, synthetic construct
  source 1..20: mol_type = other DNA
ttgaccaggctgagtgcagg

SEQ ID NO: 47930 - DNA, 20 bp, synthetic construct
  source 1..20: mol_type = other DNA
gttgaccaggctgagtgcag

SEQ ID NO: 47931 - DNA, 20 bp, synthetic construct
  source 1..20: mol_type = other DNA
tgttgaccaggctgagtgca

SEQ ID NO: 47932 - DNA, 20 bp, synthetic construct
  source 1..20: mol_type = other DNA
ctgttgaccaggctgagtgc

SEQ ID NO: 47933 - DNA, 20 bp, synthetic construct
  source 1..20: mol_type = other DNA
actgttgaccaggctgagtg

SEQ ID NO: 47934 - DNA, 20 bp, synthetic construct
  source 1..20: mol_type = other DNA
cactgttgaccaggctgagt

SEQ ID NO: 47935 - DNA, 20 bp, synthetic construct
  source 1..20: mol_type = other DNA
gcactgttgaccaggctgag

SEQ ID NO: 47936 - DNA, 20 bp, synthetic construct
  source 1..20: mol_type = other DNA
ggcactgttgaccaggctga

SEQ ID NO: 47937 - DNA, 20 bp, synthetic construct
  source 1..20: mol_type = other DNA
tggcactgttgaccaggctg

SEQ ID NO: 47938 - DNA, 20 bp, synthetic construct
  source 1..20: mol_type = other DNA
ctggcactgttgaccaggct

SEQ ID NO: 47939 - DNA, 20 bp, synthetic construct
  source 1..20: mol_type = other DNA
tctggcactgttgaccaggc

SEQ ID NO: 47940 - DNA, 20 bp, synthetic construct
  source 1..20: mol_type = other DNA
gtctggcactgttgaccagg

SEQ ID NO: 47941 - DNA, 20 bp, synthetic construct
  source 1..20: mol_type = other DNA
tgtctggcactgttgaccag

SEQ ID NO: 47942 - DNA, 20 bp, synthetic construct
  source 1..20: mol_type = other DNA
ctgtctggcactgttgacca

SEQ ID NO: 47943 - DNA, 20 bp, synthetic construct
  source 1..20: mol_type = other DNA
tctgtctggcactgttgacc

SEQ ID NO: 47944 - DNA, 20 bp, synthetic construct
  source 1..20: mol_type = other DNA
gtctgtctggcactgttgac

SEQ ID NO: 47945 - DNA, 20 bp, synthetic construct
  source 1..20: mol_type = other DNA
ggtctgtctggcactgttga

SEQ ID NO: 47946 - DNA, 20 bp, synthetic construct
  source 1..20: mol_type = other DNA
gggtctgtctggcactgttg

SEQ ID NO: 47947 - DNA, 20 bp, synthetic construct
  source 1..20: mol_type = other DNA
ggggtctgtctggcactgtt

SEQ ID NO: 47948 - DNA, 20 bp, synthetic construct
  source 1..20: mol_type = other DNA
aggggtctgtctggcactgt

SEQ ID NO: 47949 - DNA, 20 bp, synthetic construct
  source 1..20: mol_type = other DNA
aaggggtctgtctggcactg

SEQ ID NO: 47950 - DNA, 20 bp, synthetic construct
  source 1..20: mol_type = other DNA
gaaggggtctgtctggcact

SEQ ID NO: 47951 - DNA, 20 bp, synthetic construct
  source 1..20: mol_type = other DNA
agaaggggtctgtctggcac

SEQ ID NO: 47952 - DNA, 20 bp, synthetic construct
  source 1..20: mol_type = other DNA
gagaaggggtctgtctggca

SEQ ID NO: 47953 - DNA, 20 bp, synthetic construct
  source 1..20: mol_type = other DNA
tgagaaggggtctgtctggc

SEQ ID NO: 47954 - DNA, 20 bp, synthetic construct
  source 1..20: mol_type = other DNA
ttgagaaggggtctgtctgg

SEQ ID NO: 47955 - DNA, 20 bp, synthetic construct
  source 1..20: mol_type = other DNA
tttgagaaggggtctgtctg

SEQ ID NO: 47956 - DNA, 20 bp, synthetic construct
  source 1..20: mol_type = other DNA
ttttgagaaggggtctgtct

SEQ ID NO: 47957 - DNA, 20 bp, synthetic construct
  source 1..20: mol_type = other DNA
tttttgagaaggggtctgtc

SEQ ID NO: 47958 - DNA, 20 bp, synthetic construct
  source 1..20: mol_type = other DNA
ttttttgagaaggggtctgt

SEQ ID NO: 47959 - DNA, 20 bp, synthetic construct
  source 1..20: mol_type = other DNA
tttttttgagaaggggtctg

SEQ ID NO: 47960 - DNA, 20 bp, synthetic construct
  source 1..20: mol_type = other DNA
ttttttttgagaaggggtct

SEQ ID NO: 47961 - DNA, 20 bp, synthetic construct
  source 1..20: mol_type = other DNA
tttttttttgagaaggggtc

SEQ ID NO: 47962 - DNA, 20 bp, synthetic construct
  source 1..20: mol_type = other DNA
ttttttttttgagaaggggt

SEQ ID NO: 47963 - DNA, 20 bp, synthetic construct
  source 1..20: mol_type = other DNA
tttttttttttgagaagggg

SEQ ID NO: 47964 - DNA, 20 bp, synthetic construct
  source 1..20: mol_type = other DNA
atttttttttttgagaaggg

SEQ ID NO: 47965 - DNA, 20 bp, synthetic construct
  source 1..20: mol_type = other DNA
aatttttttttttgagaagg

SEQ ID NO: 47966 - DNA, 20 bp, synthetic construct
  source 1..20: mol_type = other DNA
aaatttttttttttgagaag

SEQ ID NO: 47967 - DNA, 20 bp, synthetic construct
  source 1..20: mol_type = other DNA
aaaatttttttttttgagaa

SEQ ID NO: 47968 - DNA, 20 bp, synthetic construct
  source 1..20: mol_type = other DNA
aaaaatttttttttttgaga

SEQ ID NO: 47969 - DNA, 20 bp, synthetic construct
  source 1..20: mol_type = other DNA
aaaaaatttttttttttgag

SEQ ID NO: 47970 - DNA, 20 bp, synthetic construct
  source 1..20: mol_type = other DNA
aaaaaaatttttttttttga

SEQ ID NO: 47971 - DNA, 20 bp, synthetic construct
  source 1..20: mol_type = other DNA
aaaaaaaatttttttttttg

SEQ ID NO: 47972 - DNA, 20 bp, synthetic construct
  source 1..20: mol_type = other DNA
aaaaaaaaattttttttttt

SEQ ID NO: 47973 - DNA, 20 bp, synthetic construct
  source 1..20: mol_type = other DNA
aaaaaaaaaatttttttttt

SEQ ID NO: 47974 - DNA, 20 bp, synthetic construct
  source 1..20: mol_type = other DNA
aaaaaaaaaaattttttttt

SEQ ID NO: 47975 - DNA, 20 bp, synthetic construct
  source 1..20: mol_type = other DNA
aaaaaaaaaaaatttttttt

SEQ ID NO: 47976 - DNA, 20 bp, synthetic construct
  source 1..20: mol_type = other DNA
aaaaaaaaaaaaattttttt

SEQ ID NO: 47977 - DNA, 20 bp, synthetic construct
  source 1..20: mol_type = other DNA
aaaaaaaaaaaaaatttttt

SEQ ID NO: 47978 - DNA, 20 bp, synthetic construct
  source 1..20: mol_type = other DNA
aaaaaaaaaaaaaaattttt

SEQ ID NO: 47979 - DNA, 20 bp, synthetic construct
  source 1..20: mol_type = other DNA
aaaaaaaaaaaaaaaatttt

SEQ ID NO: 47980 - DNA, 20 bp, synthetic construct
  source 1..20: mol_type = other DNA
aaaaaaaaaaaaaaaaattt

SEQ ID NO: 47981 - DNA, 20 bp, synthetic construct
  source 1..20: mol_type = other DNA
aaaaaaaaaaaaaaaaaatt

SEQ ID NO: 47982 - DNA, 20 bp, synthetic construct
  source 1..20: mol_type = other DNA
aaaaaaaaaaaaaaaaaaat

SEQ ID NO: 47983 - DNA, 20 bp, synthetic construct
  source 1..20: mol_type = other DNA
aaaaaaaaaaaaaaaaaaaa

SEQ ID NO: 47984 - DNA, 20 bp, synthetic construct
  source 1..20: mol_type = other DNA
aaaaaaaaaaaaaaaaaaaa

SEQ ID NO: 47985 - DNA, 20 bp, synthetic construct
  source 1..20: mol_type = other DNA
aaaaaaaaaaaaaaaaaaaa

SEQ ID NO: 47986 - DNA, 20 bp, synthetic construct
  source 1..20: mol_type = other DNA
aaaaaaaaaaaaaaaaaaaa

SEQ ID NO: 47987 - DNA, 20 bp, synthetic construct
  source 1..20: mol_type = other DNA
aaaaaaaaaaaaaaaaaaaa

SEQ ID NO: 47988 - DNA, 20 bp, synthetic construct
  source 1..20: mol_type = other DNA
aaaaaaaaaaaaaaaaaaaa

SEQ ID NO: 47989 - DNA, 20 bp, synthetic construct
  source 1..20: mol_type = other DNA
aaaaaaaaaaaaaaaaaaaa

SEQ ID NO: 47990 - DNA, 20 bp, synthetic construct
  source 1..20: mol_type = other DNA
aaaaaaaaaaaaaaaaaaaa

SEQ ID NO: 47991 - DNA, 20 bp, synthetic construct
  source 1..20: mol_type = other DNA
aaaaaaaaaaaaaaaaaaaa

SEQ ID NO: 47992 - DNA, 20 bp, synthetic construct
  source 1..20: mol_type = other DNA
aaaaaaaaaaaaaaaaaaaa

SEQ ID NO: 47993 - DNA, 20 bp, synthetic construct
  source 1..20: mol_type = other DNA
aaaaaaaaaaaaaaaaaaaa

SEQ ID NO: 47994 - DNA, 20 bp, synthetic construct
  source 1..20: mol_type = other DNA
aaaaaaaaaaaaaaaaaaaa

SEQ ID NO: 47995 - DNA, 20 bp, synthetic construct
  source 1..20: mol_type = other DNA
aaaaaaaaaaaaaaaaaaaa

SEQ ID NO: 47996 - DNA, 20 bp, synthetic construct
  source 1..20: mol_type = other DNA
caaaaaaaaaaaaaaaaaaa

SEQ ID NO: 47997 - DNA, 20 bp, synthetic construct
  source 1..20: mol_type = other DNA
tcaaaaaaaaaaaaaaaaaa

SEQ ID NO: 47998 - DNA, 20 bp, synthetic construct
  source 1..20: mol_type = other DNA
ctcaaaaaaaaaaaaaaaaa

SEQ ID NO: 47999 - DNA, 20 bp, synthetic construct
  source 1..20: mol_type = other DNA
tctcaaaaaaaaaaaaaaaa

SEQ ID NO: 48000 - DNA, 20 bp, synthetic construct
  source 1..20: mol_type = other DNA
ttctcaaaaaaaaaaaaaaa

SEQ ID NO: 48001 - DNA, 20 bp, synthetic construct
  source 1..20: mol_type = other DNA
tttctcaaaaaaaaaaaaaa

SEQ ID NO: 48002 - DNA, 20 bp, synthetic construct
  source 1..20: mol_type = other DNA
ttttctcaaaaaaaaaaaaa

SEQ ID NO: 48003 - DNA, 20 bp, synthetic construct
  source 1..20: mol_type = other DNA
tttttctcaaaaaaaaaaaa

SEQ ID NO: 48004 - DNA, 20 bp, synthetic construct
  source 1..20: mol_type = other DNA
ttttttctcaaaaaaaaaaa

SEQ ID NO: 48005 - DNA, 20 bp, synthetic construct
  source 1..20: mol_type = other DNA
cttttttctcaaaaaaaaaa

SEQ ID NO: 48006 - DNA, 20 bp, synthetic construct
  source 1..20: mol_type = other DNA
tcttttttctcaaaaaaaaa

SEQ ID NO: 48007 - DNA, 20 bp, synthetic construct
  source 1..20: mol_type = other DNA
ctcttttttctcaaaaaaaa

SEQ ID NO: 48008 - DNA, 20 bp, synthetic construct
  source 1..20: mol_type = other DNA
cctcttttttctcaaaaaaa

SEQ ID NO: 48009 - DNA, 20 bp, synthetic construct
  source 1..20: mol_type = other DNA
gcctcttttttctcaaaaaa

SEQ ID NO: 48010 - DNA, 20 bp, synthetic construct
  source 1..20: mol_type = other DNA
tgcctcttttttctcaaaaa

SEQ ID NO: 48011 - DNA, 20 bp, synthetic construct
  source 1..20: mol_type = other DNA
atgcctcttttttctcaaaa

SEQ ID NO: 48012 - DNA, 20 bp, synthetic construct
  source 1..20: mol_type = other DNA
catgcctcttttttctcaaa

SEQ ID NO: 48013 - DNA, 20 bp, synthetic construct
  source 1..20: mol_type = other DNA
ccatgcctcttttttctcaa

SEQ ID NO: 48014 - DNA, 20 bp, synthetic construct
  source 1..20: mol_type = other DNA
accatgcctcttttttctca

SEQ ID NO: 48015 - DNA, 20 bp, synthetic construct
  source 1..20: mol_type = other DNA
aaccatgcctcttttttctc

SEQ ID NO: 48016 - DNA, 20 bp, synthetic construct
  source 1..20: mol_type = other DNA
caaccatgcctcttttttct

SEQ ID NO: 48017 - DNA, 20 bp, synthetic construct
  source 1..20: mol_type = other DNA
gcaaccatgcctcttttttc

SEQ ID NO: 48018 - DNA, 20 bp, synthetic construct
  source 1..20: mol_type = other DNA
cgcaaccatgcctctttttt

SEQ ID NO: 48019 - DNA, 20 bp, synthetic construct
  source 1..20: mol_type = other DNA
acgcaaccatgcctcttttt

SEQ ID NO: 48020 - DNA, 20 bp, synthetic construct
  source 1..20: mol_type = other DNA
gacgcaaccatgcctctttt

SEQ ID NO: 48021 - DNA, 20 bp, synthetic construct
  source 1..20: mol_type = other DNA
agacgcaaccatgcctcttt

SEQ ID NO: 48022 - DNA, 20 bp, synthetic construct
  source 1..20: mol_type = other DNA
cagacgcaaccatgcctctt

SEQ ID NO: 48023 - DNA, 20 bp, synthetic construct
  source 1..20: mol_type = other DNA
tcagacgcaaccatgcctct

SEQ ID NO: 48024 - DNA, 20 bp, synthetic construct
  source 1..20: mol_type = other DNA
ttcagacgcaaccatgcctc

SEQ ID NO: 48025 - DNA, 20 bp, synthetic construct
  source 1..20: mol_type = other DNA
gttcagacgcaaccatgcct

SEQ ID NO: 48026 - DNA, 20 bp, synthetic construct
  source 1..20: mol_type = other DNA
ggttcagacgcaaccatgcc

SEQ ID NO: 48027 - DNA, 20 bp, synthetic construct
  source 1..20: mol_type = other DNA
tggttcagacgcaaccatgc

SEQ ID NO: 48028 - DNA, 20 bp, synthetic construct
  source 1..20: mol_type = other DNA
ttggttcagacgcaaccatg

SEQ ID NO: 48029 - DNA, 20 bp, synthetic construct
  source 1..20: mol_type = other DNA
tttggttcagacgcaaccat

SEQ ID NO: 48030 - DNA, 20 bp, synthetic construct
  source 1..20: mol_type = other DNA
ctttggttcagacgcaacca

SEQ ID NO: 48031 - DNA, 20 bp, synthetic construct
  source 1..20: mol_type = other DNA
tctttggttcagacgcaacc

SEQ ID NO: 48032 - DNA, 20 bp, synthetic construct
  source 1..20: mol_type = other DNA
atctttggttcagacgcaac

SEQ ID NO: 48033 - DNA, 20 bp, synthetic construct
  source 1..20: mol_type = other DNA
catctttggttcagacgcaa

SEQ ID NO: 48034 - DNA, 20 bp, synthetic construct
  source 1..20: mol_type = other DNA
acatctttggttcagacgca

SEQ ID NO: 48035 - DNA, 20 bp, synthetic construct
  source 1..20: mol_type = other DNA
tacatctttggttcagacgc

SEQ ID NO: 48036 - DNA, 20 bp, synthetic construct
  source 1..20: mol_type = other DNA
gtacatctttggttcagacg

SEQ ID NO: 48037 - DNA, 20 bp, synthetic construct
  source 1..20: mol_type = other DNA
cgtacatctttggttcagac

SEQ ID NO: 48038 - DNA, 20 bp, synthetic construct
  source 1..20: mol_type = other DNA
ccgtacatctttggttcaga

SEQ ID NO: 48039 - DNA, 20 bp, synthetic construct
  source 1..20: mol_type = other DNA
tccgtacatctttggttcag

SEQ ID NO: 48040 - DNA, 20 bp, synthetic construct
  source 1..20: mol_type = other DNA
gtccgtacatctttggttca

SEQ ID NO: 48041 - DNA, 20 bp, synthetic construct
  source 1..20: mol_type = other DNA
cgtccgtacatctttggttc

SEQ ID NO: 48042 - DNA, 20 bp, synthetic construct
  source 1..20: mol_type = other DNA
acgtccgtacatctttggtt

SEQ ID NO: 48043 - DNA, 20 bp, synthetic construct
  source 1..20: mol_type = other DNA
aacgtccgtacatctttggt

SEQ ID NO: 48044 - DNA, 20 bp, synthetic construct
  source 1..20: mol_type = other DNA
aaacgtccgtacatctttgg

SEQ ID NO: 48045 - DNA, 20 bp, synthetic construct
  source 1..20: mol_type = other DNA
aaaacgtccgtacatctttg

SEQ ID NO: 48046 - DNA, 20 bp, synthetic construct
  source 1..20: mol_type = other DNA
aaaaacgtccgtacatcttt

SEQ ID NO: 48047 - DNA, 20 bp, synthetic construct
  source 1..20: mol_type = other DNA
gaaaaacgtccgtacatctt

SEQ ID NO: 48048 - DNA, 20 bp, synthetic construct
  source 1..20: mol_type = other DNA
agaaaaacgtccgtacatct

SEQ ID NO: 48049 - DNA, 20 bp, synthetic construct
  source 1..20: mol_type = other DNA
aagaaaaacgtccgtacatc

SEQ ID NO: 48050 - DNA, 20 bp, synthetic construct
  source 1..20: mol_type = other DNA
caagaaaaacgtccgtacat

SEQ ID NO: 48051 - DNA, 20 bp, synthetic construct
  source 1..20: mol_type = other DNA
acaagaaaaacgtccgtaca

SEQ ID NO: 48052 - DNA, 20 bp, synthetic construct
  source 1..20: mol_type = other DNA
gacaagaaaaacgtccgtac

SEQ ID NO: 48053 - DNA, 20 bp, synthetic construct
  source 1..20: mol_type = other DNA
tgacaagaaaaacgtccgta

SEQ ID NO: 48054 - DNA, 20 bp, synthetic construct
  source 1..20: mol_type = other DNA
atgacaagaaaaacgtccgt

SEQ ID NO: 48055 - DNA, 20 bp, synthetic construct
  source 1..20: mol_type = other DNA
aatgacaagaaaaacgtccg

SEQ ID NO: 48056 - DNA, 20 bp, synthetic construct
  source 1..20: mol_type = other DNA
taatgacaagaaaaacgtcc

SEQ ID NO: 48057 - DNA, 20 bp, synthetic construct
  source 1..20: mol_type = other DNA
ataatgacaagaaaaacgtc

SEQ ID NO: 48058 - DNA, 20 bp, synthetic construct
  source 1..20: mol_type = other DNA
aataatgacaagaaaaacgt

SEQ ID NO: 48059 - DNA, 20 bp, synthetic construct
  source 1..20: mol_type = other DNA
gaataatgacaagaaaaacg

SEQ ID NO: 48060 - DNA, 20 bp, synthetic construct
  source 1..20: mol_type = other DNA
ggaataatgacaagaaaaac

SEQ ID NO: 48061 - DNA, 20 bp, synthetic construct
  source 1..20: mol_type = other DNA
aggaataatgacaagaaaaa

SEQ ID NO: 48062 - DNA, 20 bp, synthetic construct
  source 1..20: mol_type = other DNA
taggaataatgacaagaaaa

SEQ ID NO: 48063 - DNA, 20 bp, synthetic construct
  source 1..20: mol_type = other DNA
ttaggaataatgacaagaaa

SEQ ID NO: 48064 - DNA, 20 bp, synthetic construct
  source 1..20: mol_type = other DNA
tttaggaataatgacaagaa

SEQ ID NO: 48065 - DNA, 20 bp, synthetic construct
  source 1..20: mol_type = other DNA
ttttaggaataatgacaaga

SEQ ID NO: 48066 - DNA, 20 bp, synthetic construct
  source 1..20: mol_type = other DNA
gttttaggaataatgacaag

SEQ ID NO: 48067 - DNA, 20 bp, synthetic construct
  source 1..20: mol_type = other DNA
tgttttaggaataatgacaa

SEQ ID NO: 48068 - DNA, 20 bp, synthetic construct
  source 1..20: mol_type = other DNA
ttgttttaggaataatgaca

SEQ ID NO: 48069 - DNA, 20 bp, synthetic construct
  source 1..20: mol_type = other DNA
attgttttaggaataatgac

SEQ ID NO: 48070 - DNA, 20 bp, synthetic construct
  source 1..20: mol_type = other DNA
tattgttttaggaataatga

SEQ ID NO: 48071 - DNA, 20 bp, synthetic construct
  source 1..20: mol_type = other DNA
gtattgttttaggaataatg

SEQ ID NO: 48072 - DNA, 20 bp, synthetic construct
  source 1..20: mol_type = other DNA
tgtattgttttaggaataat

SEQ ID NO: 48073 - DNA, 20 bp, synthetic construct
  source 1..20: mol_type = other DNA
ctgtattgttttaggaataa

SEQ ID NO: 48074 - DNA, 20 bp, synthetic construct
  source 1..20: mol_type = other DNA
actgtattgttttaggaata

SEQ ID NO: 48075 - DNA, 20 bp, synthetic construct
  source 1..20: mol_type = other DNA
tactgtattgttttaggaat

SEQ ID NO: 48076 - DNA, 20 bp, synthetic construct
  source 1..20: mol_type = other DNA
atactgtattgttttaggaa

SEQ ID NO: 48077 - DNA, 20 bp, synthetic construct
  source 1..20: mol_type = other DNA
catactgtattgttttagga

SEQ ID NO: 48078 - DNA, 20 bp, synthetic construct
  source 1..20: mol_type = other DNA
tcatactgtattgttttagg

SEQ ID NO: 48079 - DNA, 20 bp, synthetic construct
  source 1..20: mol_type = other DNA
gtcatactgtattgttttag

SEQ ID NO: 48080 - DNA, 20 bp, synthetic construct
  source 1..20: mol_type = other DNA
tgtcatactgtattgtttta

SEQ ID NO: 48081 - DNA, 20 bp, synthetic construct
  source 1..20: mol_type = other DNA
ttgtcatactgtattgtttt

SEQ ID NO: 48082 - DNA, 20 bp, synthetic construct
  source 1..20: mol_type = other DNA
attgtcatactgtattgttt

SEQ ID NO: 48083 - DNA, 20 bp, synthetic construct
  source 1..20: mol_type = other DNA
aattgtcatactgtattgtt

SEQ ID NO: 48084 - DNA, 20 bp, synthetic construct
  source 1..20: mol_type = other DNA
aaattgtcatactgtattgt

SEQ ID NO: 48085 - DNA, 20 bp, synthetic construct
  source 1..20: mol_type = other DNA
taaattgtcatactgtattg

SEQ ID NO: 48086 - DNA, 20 bp, synthetic construct
  source 1..20: mol_type = other DNA
gtaaattgtcatactgtatt

SEQ ID NO: 48087 - DNA, 20 bp, synthetic construct
  source 1..20: mol_type = other DNA
tgtaaattgtcatactgtat

SEQ ID NO: 48088 - DNA, 20 bp, synthetic construct
  source 1..20: mol_type = other DNA
atgtaaattgtcatactgta

SEQ ID NO: 48089 - DNA, 20 bp, synthetic construct
  source 1..20: mol_type = other DNA
tatgtaaattgtcatactgt

SEQ ID NO: 48090 - DNA, 20 bp, synthetic construct
  source 1..20: mol_type = other DNA
ctatgtaaattgtcatactg

SEQ ID NO: 48091 - DNA, 20 bp, synthetic construct
  source 1..20: mol_type = other DNA
gctatgtaaattgtcatact

SEQ ID NO: 48092 - DNA, 20 bp, synthetic construct
  source 1..20: mol_type = other DNA
tgctatgtaaattgtcatac

SEQ ID NO: 48093 - DNA, 20 bp, synthetic construct
  source 1..20: mol_type = other DNA
atgctatgtaaattgtcata

SEQ ID NO: 48094 - DNA, 20 bp, synthetic construct
  source 1..20: mol_type = other DNA
aatgctatgtaaattgtcat

SEQ ID NO: 48095 - DNA, 20 bp, synthetic construct
  source 1..20: mol_type = other DNA
aaatgctatgtaaattgtca

SEQ ID NO: 48096 - DNA, 20 bp, synthetic construct
  source 1..20: mol_type = other DNA
taaatgctatgtaaattgtc

SEQ ID NO: 48097 - DNA, 20 bp, synthetic construct
  source 1..20: mol_type = other DNA
gtaaatgctatgtaaattgt

SEQ ID NO: 48098 - DNA, 20 bp, synthetic construct
  source 1..20: mol_type = other DNA
tgtaaatgctatgtaaattg

SEQ ID NO: 48099 - DNA, 20 bp, synthetic construct
  source 1..20: mol_type = other DNA
atgtaaatgctatgtaaatt

SEQ ID NO: 48100 - DNA, 20 bp, synthetic construct
  source 1..20: mol_type = other DNA
aatgtaaatgctatgtaaat

SEQ ID NO: 48101 - DNA, 20 bp, synthetic construct
  source 1..20: mol_type = other DNA
taatgtaaatgctatgtaaa

SEQ ID NO: 48102 - DNA, 20 bp, synthetic construct
  source 1..20: mol_type = other DNA
ataatgtaaatgctatgtaa

SEQ ID NO: 48103 - DNA, 20 bp, synthetic construct
  source 1..20: mol_type = other DNA
tataatgtaaatgctatgta

SEQ ID NO: 48104 - DNA, 20 bp, synthetic construct
  source 1..20: mol_type = other DNA
atataatgtaaatgctatgt

SEQ ID NO: 48105 - DNA, 20 bp, synthetic construct
  source 1..20: mol_type = other DNA
aatataatgtaaatgctatg

SEQ ID NO: 48106 - DNA, 20 bp, synthetic construct
  source 1..20: mol_type = other DNA
taatataatgtaaatgctat

SEQ ID NO: 48107 - DNA, 20 bp, synthetic construct
  source 1..20: mol_type = other DNA
ctaatataatgtaaatgcta

SEQ ID NO: 48108 - DNA, 20 bp, synthetic construct
  source 1..20: mol_type = other DNA
cctaatataatgtaaatgct

SEQ ID NO: 48109 - DNA, 20 bp, synthetic construct
  source 1..20: mol_type = other DNA
acctaatataatgtaaatgc

SEQ ID NO: 48110 - DNA, 20 bp, synthetic construct
  source 1..20: mol_type = other DNA
tacctaatataatgtaaatg

SEQ ID NO: 48111 - DNA, 20 bp, synthetic construct
  source 1..20: mol_type = other DNA
atacctaatataatgtaaat

SEQ ID NO: 48112 - DNA, 20 bp, synthetic construct
  source 1..20: mol_type = other DNA
aatacctaatataatgtaaa

SEQ ID NO: 48113 - DNA, 20 bp, synthetic construct
  source 1..20: mol_type = other DNA
taatacctaatataatgtaa

SEQ ID NO: 48114 - DNA, 20 bp, synthetic construct
  source 1..20: mol_type = other DNA
gtaatacctaatataatgta

SEQ ID NO: 48115 - DNA, 20 bp, synthetic construct
  source 1..20: mol_type = other DNA
tgtaatacctaatataatgt

SEQ ID NO: 48116 - DNA, 20 bp, synthetic construct
  source 1..20: mol_type = other DNA
ttgtaatacctaatataatg

SEQ ID NO: 48117 - DNA, 20 bp, synthetic construct
  source 1..20: mol_type = other DNA
cttgtaatacctaatataat

SEQ ID NO: 48118 - DNA, 20 bp, synthetic construct
  source 1..20: mol_type = other DNA
acttgtaatacctaatataa

SEQ ID NO: 48119 - DNA, 20 bp, synthetic construct
  source 1..20: mol_type = other DNA
tacttgtaatacctaatata

SEQ ID NO: 48120 - DNA, 20 bp, synthetic construct
  source 1..20: mol_type = other DNA
ttacttgtaatacctaatat

SEQ ID NO: 48121 - DNA, 20 bp, synthetic construct
  source 1..20: mol_type = other DNA
attacttgtaatacctaata

SEQ ID NO: 48122 - DNA, 20 bp, synthetic construct
  source 1..20: mol_type = other DNA
aattacttgtaatacctaat

SEQ ID NO: 48123 - DNA, 20 bp, synthetic construct
  source 1..20: mol_type = other DNA
aaattacttgtaatacctaa

SEQ ID NO: 48124 - DNA, 20 bp, synthetic construct
  source 1..20: mol_type = other DNA
taaattacttgtaataccta

SEQ ID NO: 48125 - DNA, 20 bp, synthetic construct
  source 1..20: mol_type = other DNA
ctaaattacttgtaatacct

SEQ ID NO: 48126 - DNA, 20 bp, synthetic construct
  source 1..20: mol_type = other DNA
cctaaattacttgtaatacc

SEQ ID NO: 48127 - DNA, 20 bp, synthetic construct
  source 1..20: mol_type = other DNA
ccctaaattacttgtaatac

SEQ ID NO: 48128 - DNA, 20 bp, synthetic construct
  source 1..20: mol_type = other DNA
tccctaaattacttgtaata

SEQ ID NO: 48129 - DNA, 20 bp, synthetic construct
  source 1..20: mol_type = other DNA
atccctaaattacttgtaat

SEQ ID NO: 48130 - DNA, 20 bp, synthetic construct
  source 1..20: mol_type = other DNA
tatccctaaattacttgtaa

SEQ ID NO: 48131 - DNA, 20 bp, synthetic construct
  source 1..20: mol_type = other DNA
ctatccctaaattacttgta

SEQ ID NO: 48132 - DNA, 20 bp, synthetic construct
  source 1..20: mol_type = other DNA
actatccctaaattacttgt

SEQ ID NO: 48133 - DNA, 20 bp, synthetic construct
  source 1..20: mol_type = other DNA
aactatccctaaattacttg

SEQ ID NO: 48134 - DNA, 20 bp, synthetic construct
  source 1..20: mol_type = other DNA
aaactatccctaaattactt

SEQ ID NO: 48135 - DNA, 20 bp, synthetic construct
  source 1..20: mol_type = other DNA
taaactatccctaaattact

SEQ ID NO: 48136 - DNA, 20 bp, synthetic construct
  source 1..20: mol_type = other DNA
ttaaactatccctaaattac

SEQ ID NO: 48137 - DNA, 20 bp, synthetic construct
  source 1..20: mol_type = other DNA
tttaaactatccctaaatta

SEQ ID NO: 48138 - DNA, 20 bp, synthetic construct
  source 1..20: mol_type = other DNA
ctttaaactatccctaaatt

SEQ ID NO: 48139 - DNA, 20 bp, synthetic construct
  source 1..20: mol_type = other DNA
actttaaactatccctaaat

SEQ ID NO: 48140 - DNA, 20 bp, synthetic construct
  source 1..20: mol_type = other DNA
tactttaaactatccctaaa

SEQ ID NO: 48141 - DNA, 20 bp, synthetic construct
  source 1..20: mol_type = other DNA
atactttaaactatccctaa

SEQ ID NO: 48142 - DNA, 20 bp, synthetic construct
  source 1..20: mol_type = other DNA
aatactttaaactatcccta

SEQ ID NO: 48143 - DNA, 20 bp, synthetic construct
  source 1..20: mol_type = other DNA
aaatactttaaactatccct

SEQ ID NO: 48144 - DNA, 20 bp, synthetic construct
  source 1..20: mol_type = other DNA
caaatactttaaactatccc

SEQ ID NO: 48145 - DNA, 20 bp, synthetic construct
  source 1..20: mol_type = other DNA
ccaaatactttaaactatcc

SEQ ID NO: 48146 - DNA, 20 bp, synthetic construct
  source 1..20: mol_type = other DNA
cccaaatactttaaactatc

SEQ ID NO: 48147 - DNA, 20 bp, synthetic construct
  source 1..20: mol_type = other DNA
tcccaaatactttaaactat

SEQ ID NO: 48148 - DNA, 20 bp, synthetic construct
  source 1..20: mol_type = other DNA
ctcccaaatactttaaacta

SEQ ID NO: 48149 - DNA, 20 bp, synthetic construct
  source 1..20: mol_type = other DNA
tctcccaaatactttaaact

SEQ ID NO: 48150 - DNA, 20 bp, synthetic construct
  source 1..20: mol_type = other DNA
ttctcccaaatactttaaac

SEQ ID NO: 48151 - DNA, 20 bp, synthetic construct
  source 1..20: mol_type = other DNA
attctcccaaatactttaaa

SEQ ID NO: 48152 - DNA, 20 bp, synthetic construct
  source 1..20: mol_type = other DNA
cattctcccaaatactttaa

SEQ ID NO: 48153 - DNA, 20 bp, synthetic construct
  source 1..20: mol_type = other DNA
acattctcccaaatacttta

SEQ ID NO: 48154 - DNA, 20 bp, synthetic construct
  source 1..20: mol_type = other DNA
cacattctcccaaatacttt

SEQ ID NO: 48155 - DNA, 20 bp, synthetic construct
  source 1..20: mol_type = other DNA
gcacattctcccaaatactt

SEQ ID NO: 48156 - DNA, 20 bp, synthetic construct
  source 1..20: mol_type = other DNA
agcacattctcccaaatact

SEQ ID NO: 48157 - DNA, 20 bp, synthetic construct
  source 1..20: mol_type = other DNA
aagcacattctcccaaatac

SEQ ID NO: 48158 - DNA, 20 bp, synthetic construct
  source 1..20: mol_type = other DNA
taagcacattctcccaaata

SEQ ID NO: 48159 - DNA, 20 bp, synthetic construct
  source 1..20: mol_type = other DNA
ctaagcacattctcccaaat

SEQ ID NO: 48160 - DNA, 20 bp, synthetic construct
  source 1..20: mol_type = other DNA
actaagcacattctcccaaa

SEQ ID NO: 48161 - DNA, 20 bp, synthetic construct
  source 1..20: mol_type = other DNA
aactaagcacattctcccaa

SEQ ID NO: 48162 - DNA, 20 bp, synthetic construct
  source 1..20: mol_type = other DNA
taactaagcacattctccca

SEQ ID NO: 48163 - DNA, 20 bp, synthetic construct
  source 1..20: mol_type = other DNA
ataactaagcacattctccc

SEQ ID NO: 48164 - DNA, 20 bp, synthetic construct
  source 1..20: mol_type = other DNA
tataactaagcacattctcc

SEQ ID NO: 48165 - DNA, 20 bp, synthetic construct
  source 1..20: mol_type = other DNA
atataactaagcacattctc

SEQ ID NO: 48166 - DNA, 20 bp, synthetic construct
  source 1..20: mol_type = other DNA
catataactaagcacattct

SEQ ID NO: 48167 - DNA, 20 bp, synthetic construct
  source 1..20: mol_type = other DNA
gcatataactaagcacattc

SEQ ID NO: 48168 - DNA, 20 bp, synthetic construct
  source 1..20: mol_type = other DNA
tgcatataactaagcacatt

SEQ ID NO: 48169 - DNA, 20 bp, synthetic construct
  source 1..20: mol_type = other DNA
ttgcatataactaagcacat

SEQ ID NO: 48170 - DNA, 20 bp, synthetic construct
  source 1..20: mol_type = other DNA
tttgcatataactaagcaca

SEQ ID NO: 48171 - DNA, 20 bp, synthetic construct
  source 1..20: mol_type = other DNA
atttgcatataactaagcac

SEQ ID NO: 48172 - DNA, 20 bp, synthetic construct
  source 1..20: mol_type = other DNA
tatttgcatataactaagca

SEQ ID NO: 48173 - DNA, 20 bp, synthetic construct
  source 1..20: mol_type = other DNA
gtatttgcatataactaagc

SEQ ID NO: 48174 - DNA, 20 bp, synthetic construct
  source 1..20: mol_type = other DNA
agtatttgcatataactaag

SEQ ID NO: 48175 - DNA, 20 bp, synthetic construct
  source 1..20: mol_type = other DNA
tagtatttgcatataactaa

SEQ ID NO: 48176 - DNA, 20 bp, synthetic construct
  source 1..20: mol_type = other DNA
atagtatttgcatataacta

SEQ ID NO: 48177 - DNA, 20 bp, synthetic construct
  source 1..20: mol_type = other DNA
aatagtatttgcatataact

SEQ ID NO: 48178 - DNA, 20 bp, synthetic construct
  source 1..20: mol_type = other DNA
taatagtatttgcatataac

SEQ ID NO: 48179 - DNA, 20 bp, synthetic construct
  source 1..20: mol_type = other DNA
gtaatagtatttgcatataa

SEQ ID NO: 48180 - DNA, 20 bp, synthetic construct
  source 1..20: mol_type = other DNA
tgtaatagtatttgcatata

SEQ ID NO: 48181 - DNA, 20 bp, synthetic construct
  source 1..20: mol_type = other DNA
atgtaatagtatttgcatat

SEQ ID NO: 48182 - DNA, 20 bp, synthetic construct
  source 1..20: mol_type = other DNA
aatgtaatagtatttgcata

SEQ ID NO: 48183 - DNA, 20 bp, synthetic construct
  source 1..20: mol_type = other DNA
aaatgtaatagtatttgcat

SEQ ID NO: 48184 - DNA, 20 bp, synthetic construct
  source 1..20: mol_type = other DNA
aaaatgtaatagtatttgca

SEQ ID NO: 48185 - DNA, 20 bp, synthetic construct
  source 1..20: mol_type = other DNA
taaaatgtaatagtatttgc

SEQ ID NO: 48186 - DNA, 20 bp, synthetic construct
  source 1..20: mol_type = other DNA
ataaaatgtaatagtatttg

SEQ ID NO: 48187 - DNA, 20 bp, synthetic construct
  source 1..20: mol_type = other DNA
cataaaatgtaatagtattt

SEQ ID NO: 48188 - DNA, 20 bp, synthetic construct
  source 1..20: mol_type = other DNA
acataaaatgtaatagtatt

SEQ ID NO: 48189 - DNA, 20 bp, synthetic construct
  source 1..20: mol_type = other DNA
tacataaaatgtaatagtat

SEQ ID NO: 48190 - DNA, 20 bp, synthetic construct
  source 1..20: mol_type = other DNA
ttacataaaatgtaatagta

SEQ ID NO: 48191 - DNA, 20 bp, synthetic construct
  source 1..20: mol_type = other DNA
cttacataaaatgtaatagt

SEQ ID NO: 48192 - DNA, 20 bp, synthetic construct
  source 1..20: mol_type = other DNA
acttacataaaatgtaatag

SEQ ID NO: 48193 - DNA, 20 bp, synthetic construct
  source 1..20: mol_type = other DNA
cacttacataaaatgtaata

SEQ ID NO: 48194 - DNA, 20 bp, synthetic construct
  source 1..20: mol_type = other DNA
tcacttacataaaatgtaat

SEQ ID NO: 48195 - DNA, 20 bp, synthetic construct
  source 1..20: mol_type = other DNA
gtcacttacataaaatgtaa

SEQ ID NO: 48196 - DNA, 20 bp, synthetic construct
  source 1..20: mol_type = other DNA
agtcacttacataaaatgta

SEQ ID NO: 48197 - DNA, 20 bp, synthetic construct
  source 1..20: mol_type = other DNA
aagtcacttacataaaatgt

SEQ ID NO: 48198 - DNA, 20 bp, synthetic construct
  source 1..20: mol_type = other DNA
taagtcacttacataaaatg

SEQ ID NO: 48199 - DNA, 20 bp, synthetic construct
  source 1..20: mol_type = other DNA
ttaagtcacttacataaaat

SEQ ID NO: 48200 - DNA, 20 bp, synthetic construct
  source 1..20: mol_type = other DNA
cttaagtcacttacataaaa

SEQ ID NO: 48201 - DNA, 20 bp, synthetic construct
  source 1..20: mol_type = other DNA
acttaagtcacttacataaa

SEQ ID NO: 48202 - DNA, 20 bp, synthetic construct
  source 1..20: mol_type = other DNA
tacttaagtcacttacataa

SEQ ID NO: 48203 - DNA, 20 bp, synthetic construct
  source 1..20: mol_type = other DNA
atacttaagtcacttacata

SEQ ID NO: 48204 - DNA, 20 bp, synthetic construct
  source 1..20: mol_type = other DNA
aatacttaagtcacttacat

SEQ ID NO: 48205 - DNA, 20 bp, synthetic construct
  source 1..20: mol_type = other DNA
taatacttaagtcacttaca

SEQ ID NO: 48206 - DNA, 20 bp, synthetic construct
  source 1..20: mol_type = other DNA
ataatacttaagtcacttac

SEQ ID NO: 48207 - DNA, 20 bp, synthetic construct
  source 1..20: mol_type = other DNA
cataatacttaagtcactta

SEQ ID NO: 48208 - DNA, 20 bp, synthetic construct
  source 1..20: mol_type = other DNA
acataatacttaagtcactt

SEQ ID NO: 48209 - DNA, 20 bp, synthetic construct
  source 1..20: mol_type = other DNA
tacataatacttaagtcact

SEQ ID NO: 48210 - DNA, 20 bp, synthetic construct
  source 1..20: mol_type = other DNA
ttacataatacttaagtcac

SEQ ID NO: 48211 - DNA, 20 bp, synthetic construct
  source 1..20: mol_type = other DNA
attacataatacttaagtca

SEQ ID NO: 48212 - DNA, 20 bp, synthetic construct
  source 1..20: mol_type = other DNA
aattacataatacttaagtc

SEQ ID NO: 48213 - DNA, 20 bp, synthetic construct
  source 1..20: mol_type = other DNA
gaattacataatacttaagt

SEQ ID NO: 48214 - DNA, 20 bp, synthetic construct
  source 1..20: mol_type = other DNA
cgaattacataatacttaag

SEQ ID NO: 48215 - DNA, 20 bp, synthetic construct
  source 1..20: mol_type = other DNA
ccgaattacataatacttaa

SEQ ID NO: 48216 - DNA, 20 bp, synthetic construct
  source 1..20: mol_type = other DNA
accgaattacataatactta

SEQ ID NO: 48217 - DNA, 20 bp, synthetic construct
  source 1..20: mol_type = other DNA
taccgaattacataatactt

SEQ ID NO: 48218 - DNA, 20 bp, synthetic construct
  source 1..20: mol_type = other DNA
ataccgaattacataatact

SEQ ID NO: 48219 - DNA, 20 bp, synthetic construct
  source 1..20: mol_type = other DNA
gataccgaattacataatac

SEQ ID NO: 48220 - DNA, 20 bp, synthetic construct
  source 1..20: mol_type = other DNA
agataccgaattacataata

SEQ ID NO: 48221 - DNA, 20 bp, synthetic construct
  source 1..20: mol_type = other DNA
cagataccgaattacataat

SEQ ID NO: 48222 - DNA, 20 bp, synthetic construct
  source 1..20: mol_type = other DNA
tcagataccgaattacataa

SEQ ID NO: 48223 - DNA, 20 bp, synthetic construct
  source 1..20: mol_type = other DNA
ttcagataccgaattacata

SEQ ID NO: 48224 - DNA, 20 bp, synthetic construct
  source 1..20: mol_type = other DNA
cttcagataccgaattacat

SEQ ID NO: 48225 - DNA, 20 bp, synthetic construct
  source 1..20: mol_type = other DNA
ccttcagataccgaattaca

SEQ ID NO: 48226 - DNA, 20 bp, synthetic construct
  source 1..20: mol_type = other DNA
tccttcagataccgaattac

SEQ ID NO: 48227 - DNA, 20 bp, synthetic construct
  source 1..20: mol_type = other DNA
ctccttcagataccgaatta

SEQ ID NO: 48228 - DNA, 20 bp, synthetic construct
  source 1..20: mol_type = other DNA
cctccttcagataccgaatt

SEQ ID NO: 48229 - DNA, 20 bp, synthetic construct
  source 1..20: mol_type = other DNA
acctccttcagataccgaat

SEQ ID NO: 48230 - DNA, 20 bp, synthetic construct
  source 1..20: mol_type = other DNA
gacctccttcagataccgaa

SEQ ID NO: 48231 - DNA, 20 bp, synthetic construct
  source 1..20: mol_type = other DNA
ggacctccttcagataccga

SEQ ID NO: 48232 - DNA, 20 bp, synthetic construct
  source 1..20: mol_type = other DNA
aggacctccttcagataccg

SEQ ID NO: 48233 - DNA, 20 bp, synthetic construct
  source 1..20: mol_type = other DNA
caggacctccttcagatacc

SEQ ID NO: 48234 - DNA, 20 bp, synthetic construct
  source 1..20: mol_type = other DNA
ccaggacctccttcagatac

SEQ ID NO: 48235 - DNA, 20 bp, synthetic construct
  source 1..20: mol_type = other DNA
tccaggacctccttcagata

SEQ ID NO: 48236 - DNA, 20 bp, synthetic construct
  source 1..20: mol_type = other DNA
ttccaggacctccttcagat

SEQ ID NO: 48237 - DNA, 20 bp, synthetic construct
  source 1..20: mol_type = other DNA
gttccaggacctccttcaga

SEQ ID NO: 48238 - DNA, 20 bp, synthetic construct
  source 1..20: mol_type = other DNA
ggttccaggacctccttcag

SEQ ID NO: 48239 - DNA, 20 bp, synthetic construct
  source 1..20: mol_type = other DNA
tggttccaggacctccttca

SEQ ID NO: 48240 - DNA, 20 bp, synthetic construct
  source 1..20: mol_type = other DNA
ctggttccaggacctccttc

SEQ ID NO: 48241 - DNA, 20 bp, synthetic construct
  source 1..20: mol_type = other DNA
actggttccaggacctcctt

SEQ ID NO: 48242 - DNA, 20 bp, synthetic construct
  source 1..20: mol_type = other DNA
gactggttccaggacctcct

SEQ ID NO: 48243 - DNA, 20 bp, synthetic construct
  source 1..20: mol_type = other DNA
ggactggttccaggacctcc

SEQ ID NO: 48244 - DNA, 20 bp, synthetic construct
  source 1..20: mol_type = other DNA
gggactggttccaggacctc

SEQ ID NO: 48245 - DNA, 20 bp, synthetic construct
  source 1..20: mol_type = other DNA
ggggactggttccaggacct

SEQ ID NO: 48246 - DNA, 20 bp, synthetic construct
  source 1..20: mol_type = other DNA
aggggactggttccaggacc

SEQ ID NO: 48247 - DNA, 20 bp, synthetic construct
  source 1..20: mol_type = other DNA
taggggactggttccaggac

SEQ ID NO: 48248 - DNA, 20 bp, synthetic construct
  source 1..20: mol_type = other DNA
gtaggggactggttccagga

SEQ ID NO: 48249 - DNA, 20 bp, synthetic construct
  source 1..20: mol_type = other DNA
ggtaggggactggttccagg

SEQ ID NO: 48250 - DNA, 20 bp, synthetic construct
  source 1..20: mol_type = other DNA
tggtaggggactggttccag

SEQ ID NO: 48251 - DNA, 20 bp, synthetic construct
  source 1..20: mol_type = other DNA
ttggtaggggactggttcca

SEQ ID NO: 48252 - DNA, 20 bp, synthetic construct
  source 1..20: mol_type = other DNA
attggtaggggactggttcc

SEQ ID NO: 48253 - DNA, 20 bp, synthetic construct
  source 1..20: mol_type = other DNA
tattggtaggggactggttc

SEQ ID NO: 48254 - DNA, 20 bp, synthetic construct
  source 1..20: mol_type = other DNA
ttattggtaggggactggtt

SEQ ID NO: 48255 - DNA, 20 bp, synthetic construct
  source 1..20: mol_type = other DNA
gttattggtaggggactggt

SEQ ID NO: 48256 - DNA, 20 bp, synthetic construct
  source 1..20: mol_type = other DNA
tgttattggtaggggactgg

SEQ ID NO: 48257 - DNA, 20 bp, synthetic construct
  source 1..20: mol_type = other DNA
ttgttattggtaggggactg

SEQ ID NO: 48258 - DNA, 20 bp, synthetic construct
  source 1..20: mol_type = other DNA
gttgttattggtaggggact

SEQ ID NO: 48259 - DNA, 20 bp, synthetic construct
  source 1..20: mol_type = other DNA
tgttgttattggtaggggac

SEQ ID NO: 48260 - DNA, 20 bp, synthetic construct
  source 1..20: mol_type = other DNA
ctgttgttattggtagggga

SEQ ID NO: 48261 - DNA, 20 bp, synthetic construct
  source 1..20: mol_type = other DNA
tctgttgttattggtagggg

SEQ ID NO: 48262 - DNA, 20 bp, synthetic construct
  source 1..20: mol_type = other DNA
atctgttgttattggtaggg

SEQ ID NO: 48263 - DNA, 20 bp, synthetic construct
  source 1..20: mol_type = other DNA
tatctgttgttattggtagg

SEQ ID NO: 48264 - DNA, 20 bp, synthetic construct
  source 1..20: mol_type = other DNA
ctatctgttgttattggtag

SEQ ID NO: 48265 - DNA, 20 bp, synthetic construct
  source 1..20: mol_type = other DNA
gctatctgttgttattggta

SEQ ID NO: 48266 - DNA, 20 bp, synthetic construct
  source 1..20: mol_type = other DNA
agctatctgttgttattggt

SEQ ID NO: 48267 - DNA, 20 bp, synthetic construct
  source 1..20: mol_type = other DNA
cagctatctgttgttattgg

SEQ ID NO: 48268 - DNA, 20 bp, synthetic construct
  source 1..20: mol_type = other DNA
acagctatctgttgttattg

SEQ ID NO: 48269 - DNA, 20 bp, synthetic construct
  source 1..20: mol_type = other DNA
tacagctatctgttgttatt

SEQ ID NO: 48270 - DNA, 20 bp, synthetic construct
  source 1..20: mol_type = other DNA
atacagctatctgttgttat

SEQ ID NO: 48271 - DNA, 20 bp, synthetic construct
  source 1..20: mol_type = other DNA
aatacagctatctgttgtta

SEQ ID NO: 48272 - DNA, 20 bp, synthetic construct
  source 1..20: mol_type = other DNA
gaatacagctatctgttgtt

SEQ ID NO: 48273 - DNA, 20 bp, synthetic construct
  source 1..20: mol_type = other DNA
agaatacagctatctgttgt

SEQ ID NO: 48274 - DNA, 20 bp, synthetic construct
  source 1..20: mol_type = other DNA
aagaatacagctatctgttg

SEQ ID NO: 48275 - DNA, 20 bp, synthetic construct
  source 1..20: mol_type = other DNA
caagaatacagctatctgtt

SEQ ID NO: 48276 - DNA, 20 bp, synthetic construct
  source 1..20: mol_type = other DNA
acaagaatacagctatctgt

SEQ ID NO: 48277 - DNA, 20 bp, synthetic construct
  source 1..20: mol_type = other DNA
aacaagaatacagctatctg

SEQ ID NO: 48278 - DNA, 20 bp, synthetic construct
  source 1..20: mol_type = other DNA
taacaagaatacagctatct

SEQ ID NO: 48279 - DNA, 20 bp, synthetic construct
  source 1..20: mol_type = other DNA
ttaacaagaatacagctatc

SEQ ID NO: 48280 - DNA, 20 bp, synthetic construct
  source 1..20: mol_type = other DNA
gttaacaagaatacagctat

SEQ ID NO: 48281 - DNA, 20 bp, synthetic construct
  source 1..20: mol_type = other DNA
ggttaacaagaatacagcta

SEQ ID NO: 48282 - DNA, 20 bp, synthetic construct
  source 1..20: mol_type = other DNA
gggttaacaagaatacagct

SEQ ID NO: 48283 - DNA, 20 bp, synthetic construct
  source 1..20: mol_type = other DNA
agggttaacaagaatacagc

SEQ ID NO: 48284 - DNA, 20 bp, synthetic construct
  source 1..20: mol_type = other DNA
cagggttaacaagaatacag

SEQ ID NO: 48285 - DNA, 20 bp, synthetic construct
  source 1..20: mol_type = other DNA
gcagggttaacaagaataca

SEQ ID NO: 48286 - DNA, 20 bp, synthetic construct
  source 1..20: mol_type = other DNA
agcagggttaacaagaatac

SEQ ID NO: 48287 - DNA, 20 bp, synthetic construct
  source 1..20: mol_type = other DNA
cagcagggttaacaagaata

SEQ ID NO: 48288 - DNA, 20 bp, synthetic construct
  source 1..20: mol_type = other DNA
acagcagggttaacaagaat

SEQ ID NO: 48289 - DNA, 20 bp, synthetic construct
  source 1..20: mol_type = other DNA
cacagcagggttaacaagaa

SEQ ID NO: 48290 - DNA, 20 bp, synthetic construct
  source 1..20: mol_type = other DNA
acacagcagggttaacaaga

SEQ ID NO: 48291 - DNA, 20 bp, synthetic construct
  source 1..20: mol_type = other DNA
cacacagcagggttaacaag

SEQ ID NO: 48292 - DNA, 20 bp, synthetic construct
  source 1..20: mol_type = other DNA
acacacagcagggttaacaa

SEQ ID NO: 48293 - DNA, 20 bp, synthetic construct
  source 1..20: mol_type = other DNA
cacacacagcagggttaaca

SEQ ID NO: 48294 - DNA, 20 bp, synthetic construct
  source 1..20: mol_type = other DNA
acacacacagcagggttaac

SEQ ID NO: 48295 - DNA, 20 bp, synthetic construct
  source 1..20: mol_type = other DNA
tacacacacagcagggttaa

SEQ ID NO: 48296 - DNA, 20 bp, synthetic construct
  source 1..20: mol_type = other DNA
ttacacacacagcagggtta

SEQ ID NO: 48297 - DNA, 20 bp, synthetic construct
  source 1..20: mol_type = other DNA
tttacacacacagcagggtt

SEQ ID NO: 48298 - DNA, 20 bp, synthetic construct
  source 1..20: mol_type = other DNA
ttttacacacacagcagggt

SEQ ID NO: 48299 - DNA, 20 bp, synthetic construct
  source 1..20: mol_type = other DNA
attttacacacacagcaggg

SEQ ID NO: 48300 - DNA, 20 bp, synthetic construct
  source 1..20: mol_type = other DNA
tattttacacacacagcagg

SEQ ID NO: 48301 - DNA, 20 bp, synthetic construct
  source 1..20: mol_type = other DNA
ttattttacacacacagcag

SEQ ID NO: 48302 - DNA, 20 bp, synthetic construct
  source 1..20: mol_type = other DNA
attattttacacacacagca

SEQ ID NO: 48303 - DNA, 20 bp, synthetic construct
  source 1..20: mol_type = other DNA
cattattttacacacacagc

SEQ ID NO: 48304 - DNA, 20 bp, synthetic construct
  source 1..20: mol_type = other DNA
acattattttacacacacag

SEQ ID NO: 48305 - DNA, 20 bp, synthetic construct
  source 1..20: mol_type = other DNA
aacattattttacacacaca

SEQ ID NO: 48306 - DNA, 20 bp, synthetic construct
  source 1..20: mol_type = other DNA
taacattattttacacacac

SEQ ID NO: 48307 - DNA, 20 bp, synthetic construct
  source 1..20: mol_type = other DNA
ctaacattattttacacaca

SEQ ID NO: 48308 - DNA, 20 bp, synthetic construct
  source 1..20: mol_type = other DNA
actaacattattttacacac

SEQ ID NO: 48309 - DNA, 20 bp, synthetic construct
  source 1..20: mol_type = other DNA
tactaacattattttacaca

SEQ ID NO: 48310 - DNA, 20 bp, synthetic construct
  source 1..20: mol_type = other DNA
ctactaacattattttacac

SEQ ID NO: 48311 - DNA, 20 bp, synthetic construct
  source 1..20: mol_type = other DNA
actactaacattattttaca

SEQ ID NO: 48312 - DNA, 20 bp, synthetic construct
  source 1..20: mol_type = other DNA
aactactaacattattttac

SEQ ID NO: 48313 - DNA, 20 bp, synthetic construct
  source 1..20: mol_type = other DNA
caactactaacattatttta

SEQ ID NO: 48314 - DNA, 20 bp, synthetic construct
  source 1..20: mol_type = other DNA
tcaactactaacattatttt

SEQ ID NO: 48315 - DNA, 20 bp, synthetic construct
  source 1..20: mol_type = other DNA
atcaactactaacattattt

SEQ ID NO: 48316 - DNA, 20 bp, synthetic construct
  source 1..20: mol_type = other DNA
aatcaactactaacattatt

SEQ ID NO: 48317 - DNA, 20 bp, synthetic construct
  source 1..20: mol_type = other DNA
caatcaactactaacattat

SEQ ID NO: 48318 - DNA, 20 bp, synthetic construct
  source 1..20: mol_type = other DNA
acaatcaactactaacatta

SEQ ID NO: 48319 - DNA, 20 bp, synthetic construct
  source 1..20: mol_type = other DNA
gacaatcaactactaacatt

SEQ ID NO: 48320 - DNA, 20 bp, synthetic construct
  source 1..20: mol_type = other DNA
agacaatcaactactaacat

SEQ ID NO: 48321 - DNA, 20 bp, synthetic construct
  source 1..20: mol_type = other DNA
aagacaatcaactactaaca

SEQ ID NO: 48322 - DNA, 20 bp, synthetic construct
  source 1..20: mol_type = other DNA
aaagacaatcaactactaac

SEQ ID NO: 48323 - DNA, 20 bp, synthetic construct
  source 1..20: mol_type = other DNA
aaaagacaatcaactactaa

SEQ ID NO: 48324 - DNA, 20 bp, synthetic construct
  source 1..20: mol_type = other DNA
caaaagacaatcaactacta

SEQ ID NO: 48325 - DNA, 20 bp, synthetic construct
  source 1..20: mol_type = other DNA
acaaaagacaatcaactact

SEQ ID NO: 48326 - DNA, 20 bp, synthetic construct
  source 1..20: mol_type = other DNA
tacaaaagacaatcaactac

SEQ ID NO: 48327 - DNA, 20 bp, synthetic construct
  source 1..20: mol_type = other DNA
gtacaaaagacaatcaacta

SEQ ID NO: 48328 - DNA, 20 bp, synthetic construct
  source 1..20: mol_type = other DNA
tgtacaaaagacaatcaact

SEQ ID NO: 48329 - DNA, 20 bp, synthetic construct
  source 1..20: mol_type = other DNA
atgtacaaaagacaatcaac

SEQ ID NO: 48330 - DNA, 20 bp, synthetic construct
  source 1..20: mol_type = other DNA
aatgtacaaaagacaatcaa

SEQ ID NO: 48331 - DNA, 20 bp, synthetic construct
  source 1..20: mol_type = other DNA
taatgtacaaaagacaatca

SEQ ID NO: 48332 - DNA, 20 bp, synthetic construct
  source 1..20: mol_type = other DNA
ataatgtacaaaagacaatc

SEQ ID NO: 48333 - DNA, 20 bp, synthetic construct
  source 1..20: mol_type = other DNA
aataatgtacaaaagacaat

SEQ ID NO: 48334 - DNA, 20 bp, synthetic construct
  source 1..20: mol_type = other DNA
aaataatgtacaaaagacaa

SEQ ID NO: 48335 - DNA, 20 bp, synthetic construct
  source 1..20: mol_type = other DNA
aaaataatgtacaaaagaca

SEQ ID NO: 48336 - DNA, 20 bp, synthetic construct
  source 1..20: mol_type = other DNA
caaaataatgtacaaaagac

SEQ ID NO: 48337 - DNA, 20 bp, synthetic construct
  source 1..20: mol_type = other DNA
acaaaataatgtacaaaaga

SEQ ID NO: 48338 - DNA, 20 bp, synthetic construct
  source 1..20: mol_type = other DNA
gacaaaataatgtacaaaag

SEQ ID NO: 48339 - DNA, 20 bp, synthetic construct
  source 1..20: mol_type = other DNA
tgacaaaataatgtacaaaa

SEQ ID NO: 48340 - DNA, 20 bp, synthetic construct
  source 1..20: mol_type = other DNA
gtgacaaaataatgtacaaa

SEQ ID NO: 48341 - DNA, 20 bp, synthetic construct
  source 1..20: mol_type = other DNA
agtgacaaaataatgtacaa

SEQ ID NO: 48342 - DNA, 20 bp, synthetic construct
  source 1..20: mol_type = other DNA
aagtgacaaaataatgtaca

SEQ ID NO: 48343 - DNA, 20 bp, synthetic construct
  source 1..20: mol_type = other DNA
taagtgacaaaataatgtac

SEQ ID NO: 48344 - DNA, 20 bp, synthetic construct
  source 1..20: mol_type = other DNA
ttaagtgacaaaataatgta

SEQ ID NO: 48345 - DNA, 20 bp, synthetic construct
  source 1..20: mol_type = other DNA
tttaagtgacaaaataatgt

SEQ ID NO: 48346 - DNA, 20 bp, synthetic construct
  source 1..20: mol_type = other DNA
ttttaagtgacaaaataatg

SEQ ID NO: 48347 - DNA, 20 bp, synthetic construct
  source 1..20: mol_type = other DNA
attttaagtgacaaaataat

SEQ ID NO: 48348 - DNA, 20 bp, synthetic construct
  source 1..20: mol_type = other DNA
tattttaagtgacaaaataa

SEQ ID NO: 48349 - DNA, 20 bp, synthetic construct
  source 1..20: mol_type = other DNA
ctattttaagtgacaaaata

SEQ ID NO: 48350 - DNA, 20 bp, synthetic construct
  source 1..20: mol_type = other DNA
gctattttaagtgacaaaat

SEQ ID NO: 48351 - DNA, 20 bp, synthetic construct
  source 1..20: mol_type = other DNA
agctattttaagtgacaaaa

SEQ ID NO: 48352 - DNA, 20 bp, synthetic construct
  source 1..20: mol_type = other DNA
cagctattttaagtgacaaa

SEQ ID NO: 48353 - DNA, 20 bp, synthetic construct
  source 1..20: mol_type = other DNA
ccagctattttaagtgacaa

SEQ ID NO: 48354 - DNA, 20 bp, synthetic construct
  source 1..20: mol_type = other DNA
cccagctattttaagtgaca

SEQ ID NO: 48355 - DNA, 20 bp, synthetic construct
  source 1..20: mol_type = other DNA
ccccagctattttaagtgac

SEQ ID NO: 48356 - DNA, 20 bp, synthetic construct
  source 1..20: mol_type = other DNA
accccagctattttaagtga

SEQ ID NO: 48357 - DNA, 20 bp, synthetic construct
  source 1..20: mol_type = other DNA
gaccccagctattttaagtg

SEQ ID NO: 48358 - DNA, 20 bp, synthetic construct
  source 1..20: mol_type = other DNA
tgaccccagctattttaagt

SEQ ID NO: 48359 - DNA, 20 bp, synthetic construct
  source 1..20: mol_type = other DNA
ctgaccccagctattttaag

SEQ ID NO: 48360 - DNA, 20 bp, synthetic construct
  source 1..20: mol_type = other DNA
tctgaccccagctattttaa

SEQ ID NO: 48361 - DNA, 20 bp, synthetic construct
  source 1..20: mol_type = other DNA
ttctgaccccagctatttta

SEQ ID NO: 48362 - DNA, 20 bp, synthetic construct
  source 1..20: mol_type = other DNA
tttctgaccccagctatttt

SEQ ID NO: 48363 - DNA, 20 bp, synthetic construct
  source 1..20: mol_type = other DNA
atttctgaccccagctattt

SEQ ID NO: 48364 - DNA, 20 bp, synthetic construct
  source 1..20: mol_type = other DNA
catttctgaccccagctatt

SEQ ID NO: 48365 - DNA, 20 bp, synthetic construct
  source 1..20: mol_type = other DNA
acatttctgaccccagctat

SEQ ID NO: 48366 - DNA, 20 bp, synthetic construct
  source 1..20: mol_type = other DNA
aacatttctgaccccagcta

SEQ ID NO: 48367 - DNA, 20 bp, synthetic construct
  source 1..20: mol_type = other DNA
aaacatttctgaccccagct

SEQ ID NO: 48368 - DNA, 20 bp, synthetic construct
  source 1..20: mol_type = other DNA
caaacatttctgaccccagc

SEQ ID NO: 48369 - DNA, 20 bp, synthetic construct
  source 1..20: mol_type = other DNA
tcaaacatttctgaccccag

SEQ ID NO: 48370 - DNA, 20 bp, synthetic construct
  source 1..20: mol_type = other DNA
gtcaaacatttctgacccca

SEQ ID NO: 48371 - DNA, 20 bp, synthetic construct
  source 1..20: mol_type = other DNA
agtcaaacatttctgacccc

SEQ ID NO: 48372 - DNA, 20 bp, synthetic construct
  source 1..20: mol_type = other DNA
aagtcaaacatttctgaccc

SEQ ID NO: 48373 - DNA, 20 bp, synthetic construct
  source 1..20: mol_type = other DNA
gaagtcaaacatttctgacc

SEQ ID NO: 48374 - DNA, 20 bp, synthetic construct
  source 1..20: mol_type = other DNA
tgaagtcaaacatttctgac

SEQ ID NO: 48375 - DNA, 20 bp, synthetic construct
  source 1..20: mol_type = other DNA
ctgaagtcaaacatttctga

SEQ ID NO: 48376 - DNA, 20 bp, synthetic construct
  source 1..20: mol_type = other DNA
actgaagtcaaacatttctg

SEQ ID NO: 48377 - DNA, 20 bp, synthetic construct
  source 1..20: mol_type = other DNA
tactgaagtcaaacatttct

SEQ ID NO: 48378 - DNA, 20 bp, synthetic construct
  source 1..20: mol_type = other DNA
atactgaagtcaaacatttc

SEQ ID NO: 48379 - DNA, 20 bp, synthetic construct
  source 1..20: mol_type = other DNA
aatactgaagtcaaacattt

SEQ ID NO: 48380 - DNA, 20 bp, synthetic construct
  source 1..20: mol_type = other DNA
taatactgaagtcaaacatt

SEQ ID NO: 48381 - DNA, 20 bp, synthetic construct
  source 1..20: mol_type = other DNA
ttaatactgaagtcaaacat

SEQ ID NO: 48382 - DNA, 20 bp, synthetic construct
  source 1..20: mol_type = other DNA
tttaatactgaagtcaaaca

SEQ ID NO: 48383 - DNA, 20 bp, synthetic construct
  source 1..20: mol_type = other DNA
ttttaatactgaagtcaaac

SEQ ID NO: 48384 - DNA, 20 bp, synthetic construct
  source 1..20: mol_type = other DNA
attttaatactgaagtcaaa

SEQ ID NO: 48385 - DNA, 20 bp, synthetic construct
  source 1..20: mol_type = other DNA
aattttaatactgaagtcaa

SEQ ID NO: 48386 - DNA, 20 bp, synthetic construct
  source 1..20: mol_type = other DNA
gaattttaatactgaagtca

SEQ ID NO: 48387 - DNA, 20 bp, synthetic construct
  source 1..20: mol_type = other DNA
cgaattttaatactgaagtc

SEQ ID NO: 48388 - DNA, 20 bp, synthetic construct
  source 1..20: mol_type = other DNA
acgaattttaatactgaagt

SEQ ID NO: 48389 - DNA, 20 bp, synthetic construct
  source 1..20: mol_type = other DNA
tacgaattttaatactgaag

SEQ ID NO: 48390 - DNA, 20 bp, synthetic construct
  source 1..20: mol_type = other DNA
gtacgaattttaatactgaa

SEQ ID NO: 48391 - DNA, 20 bp, synthetic construct
  source 1..20: mol_type = other DNA
agtacgaattttaatactga

SEQ ID NO: 48392 - DNA, 20 bp, synthetic construct
  source 1..20: mol_type = other DNA
cagtacgaattttaatactg

SEQ ID NO: 48393 - DNA, 20 bp, synthetic construct
  source 1..20: mol_type = other DNA
gcagtacgaattttaatact

SEQ ID NO: 48394 - DNA, 20 bp, synthetic construct
  source 1..20: mol_type = other DNA
tgcagtacgaattttaatac

SEQ ID NO: 48395 - DNA, 20 bp, synthetic construct
  source 1..20: mol_type = other DNA
ttgcagtacgaattttaata

SEQ ID NO: 48396 - DNA, 20 bp, synthetic construct
  source 1..20: mol_type = other DNA
tttgcagtacgaattttaat

SEQ ID NO: 48397 - DNA, 20 bp, synthetic construct
  source 1..20: mol_type = other DNA
gtttgcagtacgaattttaa

SEQ ID NO: 48398 - DNA, 20 bp, synthetic construct
  source 1..20: mol_type = other DNA
agtttgcagtacgaatttta

SEQ ID NO: 48399 - DNA, 20 bp, synthetic construct
  source 1..20: mol_type = other DNA
gagtttgcagtacgaatttt

SEQ ID NO: 48400 - DNA, 20 bp, synthetic construct
  source 1..20: mol_type = other DNA
agagtttgcagtacgaattt

SEQ ID NO: 48401 - DNA, 20 bp, synthetic construct
  source 1..20: mol_type = other DNA
cagagtttgcagtacgaatt

SEQ ID NO: 48402 - DNA, 20 bp, synthetic construct
  source 1..20: mol_type = other DNA
tcagagtttgcagtacgaat

SEQ ID NO: 48403 - DNA, 20 bp, synthetic construct
  source 1..20: mol_type = other DNA
ctcagagtttgcagtacgaa

SEQ ID NO: 48404 - DNA, 20 bp, synthetic construct
  source 1..20: mol_type = other DNA
actcagagtttgcagtacga

SEQ ID NO: 48405 - DNA, 20 bp, synthetic construct
  source 1..20: mol_type = other DNA
tactcagagtttgcagtacg

SEQ ID NO: 48406 - DNA, 20 bp, synthetic construct
  source 1..20: mol_type = other DNA
ctactcagagtttgcagtac

SEQ ID NO: 48407 - DNA, 20 bp, synthetic construct
  source 1..20: mol_type = other DNA
tctactcagagtttgcagta

SEQ ID NO: 48408 - DNA, 20 bp, synthetic construct
  source 1..20: mol_type = other DNA
ctctactcagagtttgcagt

SEQ ID NO: 48409 - DNA, 20 bp, synthetic construct
  source 1..20: mol_type = other DNA
gctctactcagagtttgcag

SEQ ID NO: 48410 - DNA, 20 bp, synthetic construct
  source 1..20: mol_type = other DNA
ggctctactcagagtttgca

SEQ ID NO: 48411 - DNA, 20 bp, synthetic construct
  source 1..20: mol_type = other DNA
aggctctactcagagtttgc

SEQ ID NO: 48412 - DNA, 20 bp, synthetic construct
  source 1..20: mol_type = other DNA
gaggctctactcagagtttg

SEQ ID NO: 48413 - DNA, 20 bp, synthetic construct
  source 1..20: mol_type = other DNA
ggaggctctactcagagttt

SEQ ID NO: 48414 - DNA, 20 bp, synthetic construct
  source 1..20: mol_type = other DNA
aggaggctctactcagagtt

SEQ ID NO: 48415 - DNA, 20 bp, synthetic construct
  source 1..20: mol_type = other DNA
caggaggctctactcagagt

SEQ ID NO: 48416 - DNA, 20 bp, synthetic construct
  source 1..20: mol_type = other DNA
tcaggaggctctactcagag

SEQ ID NO: 48417 - DNA, 20 bp, synthetic construct
  source 1..20: mol_type = other DNA
ttcaggaggctctactcaga

SEQ ID NO: 48418 - DNA, 20 bp, synthetic construct
  source 1..20: mol_type = other DNA
cttcaggaggctctactcag

SEQ ID NO: 48419 - DNA, 20 bp, synthetic construct
  source 1..20: mol_type = other DNA
tcttcaggaggctctactca

SEQ ID NO: 48420 - DNA, 20 bp, synthetic construct
  source 1..20: mol_type = other DNA
ttcttcaggaggctctactc

SEQ ID NO: 48421 - DNA, 20 bp, synthetic construct
  source 1..20: mol_type = other DNA
attcttcaggaggctctact

SEQ ID NO: 48422 - DNA, 20 bp, synthetic construct
  source 1..20: mol_type = other DNA
aattcttcaggaggctctac

SEQ ID NO: 48423 - DNA, 20 bp, synthetic construct
  source 1..20: mol_type = other DNA
aaattcttcaggaggctcta

SEQ ID NO: 48424 - DNA, 20 bp, synthetic construct
  source 1..20: mol_type = other DNA
gaaattcttcaggaggctct

SEQ ID NO: 48425 - DNA, 20 bp, synthetic construct
  source 1..20: mol_type = other DNA
tgaaattcttcaggaggctc

SEQ ID NO: 48426 - DNA, 20 bp, synthetic construct
  source 1..20: mol_type = other DNA
ttgaaattcttcaggaggct

SEQ ID NO: 48427 - DNA, 20 bp, synthetic construct
  source 1..20: mol_type = other DNA
cttgaaattcttcaggaggc

SEQ ID NO: 48428 - DNA, 20 bp, synthetic construct
  source 1..20: mol_type = other DNA
tcttgaaattcttcaggagg

SEQ ID NO: 48429 - DNA, 20 bp, synthetic construct
  source 1..20: mol_type = other DNA
ctcttgaaattcttcaggag

SEQ ID NO: 48430 - DNA, 20 bp, synthetic construct
  source 1..20: mol_type = other DNA
actcttgaaattcttcagga

SEQ ID NO: 48431 - DNA, 20 bp, synthetic construct
  source 1..20: mol_type = other DNA
aactcttgaaattcttcagg

SEQ ID NO: 48432 - DNA, 20 bp, synthetic construct
  source 1..20: mol_type = other DNA
gaactcttgaaattcttcag

SEQ ID NO: 48433 - DNA, 20 bp, synthetic construct
  source 1..20: mol_type = other DNA
tgaactcttgaaattcttca

SEQ ID NO: 48434 - DNA, 20 bp, synthetic construct
  source 1..20: mol_type = other DNA
ctgaactcttgaaattcttc

SEQ ID NO: 48435 - DNA, 20 bp, synthetic construct
  source 1..20: mol_type = other DNA
actgaactcttgaaattctt

SEQ ID NO: 48436 - DNA, 20 bp, synthetic construct
  source 1..20: mol_type = other DNA
cactgaactcttgaaattct

SEQ ID NO: 48437 - DNA, 20 bp, synthetic construct
  source 1..20: mol_type = other DNA
acactgaactcttgaaattc

SEQ ID NO: 48438 - DNA, 20 bp, synthetic construct
  source 1..20: mol_type = other DNA
tacactgaactcttgaaatt

SEQ ID NO: 48439 - DNA, 20 bp, synthetic construct
  source 1..20: mol_type = other DNA
atacactgaactcttgaaat

SEQ ID NO: 48440 - DNA, 20 bp, synthetic construct
  source 1..20: mol_type = other DNA
aatacactgaactcttgaaa

SEQ ID NO: 48441 - DNA, 20 bp, synthetic construct
  source 1..20: mol_type = other DNA
caatacactgaactcttgaa

SEQ ID NO: 48442 - DNA, 20 bp, synthetic construct
  source 1..20: mol_type = other DNA
acaatacactgaactcttga

SEQ ID NO: 48443 - DNA, 20 bp, synthetic construct
  source 1..20: mol_type = other DNA
aacaatacactgaactcttg

SEQ ID NO: 48444 - DNA, 20 bp, synthetic construct
  source 1..20: mol_type = other DNA
taacaatacactgaactctt

SEQ ID NO: 48445 - DNA, 20 bp, synthetic construct
  source 1..20: mol_type = other DNA
ttaacaatacactgaactct

SEQ ID NO: 48446 - DNA, 20 bp, synthetic construct
  source 1..20: mol_type = other DNA
attaacaatacactgaactc

SEQ ID NO: 48447 - DNA, 20 bp, synthetic construct
  source 1..20: mol_type = other DNA
cattaacaatacactgaact

SEQ ID NO: 48448 - DNA, 20 bp, synthetic construct
  source 1..20: mol_type = other DNA
acattaacaatacactgaac

SEQ ID NO: 48449 - DNA, 20 bp, synthetic construct
  source 1..20: mol_type = other DNA
aacattaacaatacactgaa

SEQ ID NO: 48450 - DNA, 20 bp, synthetic construct
  source 1..20: mol_type = other DNA
aaacattaacaatacactga

SEQ ID NO: 48451 - DNA, 20 bp, synthetic construct
  source 1..20: mol_type = other DNA
aaaacattaacaatacactg

SEQ ID NO: 48452 - DNA, 20 bp, synthetic construct
  source 1..20: mol_type = other DNA
caaaacattaacaatacact

SEQ ID NO: 48453 - DNA, 20 bp, synthetic construct
  source 1..20: mol_type = other DNA
tcaaaacattaacaatacac

SEQ ID NO: 48454 - DNA, 20 bp, synthetic construct
  source 1..20: mol_type = other DNA
ttcaaaacattaacaataca

SEQ ID NO: 48455 - DNA, 20 bp, synthetic construct
  source 1..20: mol_type = other DNA
tttcaaaacattaacaatac

SEQ ID NO: 48456 - DNA, 20 bp, synthetic construct
  source 1..20: mol_type = other DNA
atttcaaaacattaacaata

SEQ ID NO: 48457 - DNA, 20 bp, synthetic construct
  source 1..20: mol_type = other DNA
aatttcaaaacattaacaat

SEQ ID NO: 48458 - DNA, 20 bp, synthetic construct
  source 1..20: mol_type = other DNA
aaatttcaaaacattaacaa

SEQ ID NO: 48459 - DNA, 20 bp, synthetic construct
  source 1..20: mol_type = other DNA
aaaatttcaaaacattaaca

SEQ ID NO: 48460 - DNA, 20 bp, synthetic construct
  source 1..20: mol_type = other DNA
aaaaatttcaaaacattaac

SEQ ID NO: 48461 - DNA, 20 bp, synthetic construct
  source 1..20: mol_type = other DNA
aaaaaatttcaaaacattaa

SEQ ID NO: 48462 - DNA, 20 bp, synthetic construct
  source 1..20: mol_type = other DNA
aaaaaaatttcaaaacatta

SEQ ID NO: 48463 - DNA, 20 bp, synthetic construct
  source 1..20: mol_type = other DNA
taaaaaaatttcaaaacatt

SEQ ID NO: 48464 - DNA, 20 bp, synthetic construct
  source 1..20: mol_type = other DNA
ataaaaaaatttcaaaacat

SEQ ID NO: 48465 - DNA, 20 bp, synthetic construct
  source 1..20: mol_type = other DNA
aataaaaaaatttcaaaaca

SEQ ID NO: 48466 - DNA, 20 bp, synthetic construct
  source 1..20: mol_type = other DNA
caataaaaaaatttcaaaac

SEQ ID NO: 48467 - DNA, 20 bp, synthetic construct
  source 1..20: mol_type = other DNA
acaataaaaaaatttcaaaa

SEQ ID NO: 48468 - DNA, 20 bp, synthetic construct
  source 1..20: mol_type = other DNA
aacaataaaaaaatttcaaa

SEQ ID NO: 48469 - DNA, 20 bp, synthetic construct
  source 1..20: mol_type = other DNA
aaacaataaaaaaatttcaa

SEQ ID NO: 48470 - DNA, 20 bp, synthetic construct
  source 1..20: mol_type = other DNA
aaaacaataaaaaaatttca

SEQ ID NO: 48471 - DNA, 20 bp, synthetic construct
  source 1..20: mol_type = other DNA
caaaacaataaaaaaatttc

SEQ ID NO: 48472 - DNA, 20 bp, synthetic construct
  source 1..20: mol_type = other DNA
acaaaacaataaaaaaattt

SEQ ID NO: 48473 - DNA, 20 bp, synthetic construct
  source 1..20: mol_type = other DNA
aacaaaacaataaaaaaatt

SEQ ID NO: 48474 - DNA, 20 bp, synthetic construct
  source 1..20: mol_type = other DNA
taacaaaacaataaaaaaat

SEQ ID NO: 48475 - DNA, 20 bp, synthetic construct
  source 1..20: mol_type = other DNA
ctaacaaaacaataaaaaaa

SEQ ID NO: 48476 - DNA, 20 bp, synthetic construct
  source 1..20: mol_type = other DNA
actaacaaaacaataaaaaa

SEQ ID NO: 48477 - DNA, 20 bp, synthetic construct
  source 1..20: mol_type = other DNA
cactaacaaaacaataaaaa

SEQ ID NO: 48478 - DNA, 20 bp, synthetic construct
  source 1..20: mol_type = other DNA
tcactaacaaaacaataaaa

SEQ ID NO: 48479 - DNA, 20 bp, synthetic construct
  source 1..20: mol_type = other DNA
ttcactaacaaaacaataaa

SEQ ID NO: 48480 - DNA, 20 bp, synthetic construct
  source 1..20: mol_type = other DNA
attcactaacaaaacaataa

SEQ ID NO: 48481 - DNA, 20 bp, synthetic construct
  source 1..20: mol_type = other DNA
tattcactaacaaaacaata

SEQ ID NO: 48482 - DNA, 20 bp, synthetic construct
  source 1..20: mol_type = other DNA
gtattcactaacaaaacaat

SEQ ID NO: 48483 - DNA, 20 bp, synthetic construct
  source 1..20: mol_type = other DNA
ggtattcactaacaaaacaa

SEQ ID NO: 48484 - DNA, 20 bp, synthetic construct
  source 1..20: mol_type = other DNA
aggtattcactaacaaaaca

SEQ ID NO: 48485 - DNA, 20 bp, synthetic construct
  source 1..20: mol_type = other DNA
taggtattcactaacaaaac

SEQ ID NO: 48486 - DNA, 20 bp, synthetic construct
  source 1..20: mol_type = other DNA
ttaggtattcactaacaaaa

SEQ ID NO: 48487 - DNA, 20 bp, synthetic construct
  source 1..20: mol_type = other DNA
attaggtattcactaacaaa

SEQ ID NO: 48488 - DNA, 20 bp, synthetic construct
  source 1..20: mol_type = other DNA
tattaggtattcactaacaa

SEQ ID NO: 48489 - DNA, 20 bp, synthetic construct
  source 1..20: mol_type = other DNA
atattaggtattcactaaca

SEQ ID NO: 48490 - DNA, 20 bp, synthetic construct
  source 1..20: mol_type = other DNA
aatattaggtattcactaac

SEQ ID NO: 48491 - DNA, 20 bp, synthetic construct
  source 1..20: mol_type = other DNA
caatattaggtattcactaa

SEQ ID NO: 48492 - DNA, 20 bp, synthetic construct
  source 1..20: mol_type = other DNA
tcaatattaggtattcacta

SEQ ID NO: 48493 - DNA, 20 bp, synthetic construct
  source 1..20: mol_type = other DNA
ttcaatattaggtattcact

SEQ ID NO: 48494 - DNA, 20 bp, synthetic construct
  source 1..20: mol_type = other DNA
attcaatattaggtattcac

SEQ ID NO: 48495 - DNA, 20 bp, synthetic construct
  source 1..20: mol_type = other DNA
cattcaatattaggtattca

SEQ ID NO: 48496 - DNA, 20 bp, synthetic construct
  source 1..20: mol_type = other DNA
tcattcaatattaggtattc

SEQ ID NO: 48497 - DNA, 20 bp, synthetic construct
  source 1..20: mol_type = other DNA
ttcattcaatattaggtatt

SEQ ID NO: 48498 - DNA, 20 bp, synthetic construct
  source 1..20: mol_type = other DNA
cttcattcaatattaggtat

SEQ ID NO: 48499 - DNA, 20 bp, synthetic construct
  source 1..20: mol_type = other DNA
gcttcattcaatattaggta

SEQ ID NO: 48500 - DNA, 20 bp, synthetic construct
  source 1..20: mol_type = other DNA
ggcttcattcaatattaggt

SEQ ID NO: 48501 - DNA, 20 bp, synthetic construct
  source 1..20: mol_type = other DNA
aggcttcattcaatattagg

SEQ ID NO: 48502 - DNA, 20 bp, synthetic construct
  source 1..20: mol_type = other DNA
caggcttcattcaatattag

SEQ ID NO: 48503 - DNA, 20 bp, synthetic construct
  source 1..20: mol_type = other DNA
tcaggcttcattcaatatta

SEQ ID NO: 48504 - DNA, 20 bp, synthetic construct
  source 1..20: mol_type = other DNA
atcaggcttcattcaatatt

SEQ ID NO: 48505 - DNA, 20 bp, synthetic construct
  source 1..20: mol_type = other DNA
catcaggcttcattcaatat

SEQ ID NO: 48506 - DNA, 20 bp, synthetic construct
  source 1..20: mol_type = other DNA
tcatcaggcttcattcaata

SEQ ID NO: 48507 - DNA, 20 bp, synthetic construct
  source 1..20: mol_type = other DNA
ctcatcaggcttcattcaat

SEQ ID NO: 48508 - DNA, 20 bp, synthetic construct
  source 1..20: mol_type = other DNA
cctcatcaggcttcattcaa

SEQ ID NO: 48509 - DNA, 20 bp, synthetic construct
  source 1..20: mol_type = other DNA
acctcatcaggcttcattca

SEQ ID NO: 48510 - DNA, 20 bp, synthetic construct
  source 1..20: mol_type = other DNA
tacctcatcaggcttcattc

SEQ ID NO: 48511 - DNA, 20 bp, synthetic construct
  source 1..20: mol_type = other DNA
atacctcatcaggcttcatt

SEQ ID NO: 48512 - DNA, 20 bp, synthetic construct
  source 1..20: mol_type = other DNA
tatacctcatcaggcttcat

SEQ ID NO: 48513 - DNA, 20 bp, synthetic construct
  source 1..20: mol_type = other DNA
ttatacctcatcaggcttca

SEQ ID NO: 48514 - DNA, 20 bp, synthetic construct
  source 1..20: mol_type = other DNA
tttatacctcatcaggcttc

SEQ ID NO: 48515 - DNA, 20 bp, synthetic construct
  source 1..20: mol_type = other DNA
ttttatacctcatcaggctt

SEQ ID NO: 48516 - DNA, 20 bp, synthetic construct
  source 1..20: mol_type = other DNA
tttttatacctcatcaggct

SEQ ID NO: 48517 - DNA, 20 bp, synthetic construct
  source 1..20: mol_type = other DNA
ctttttatacctcatcaggc

SEQ ID NO: 48518 - DNA, 20 bp, synthetic construct
  source 1..20: mol_type = other DNA
actttttatacctcatcagg

SEQ ID NO: 48519 - DNA, 20 bp, synthetic construct
  source 1..20: mol_type = other DNA
tactttttatacctcatcag

SEQ ID NO: 48520 - DNA, 20 bp, synthetic construct
  source 1..20: mol_type = other DNA
ttactttttatacctcatca

SEQ ID NO: 48521 - DNA, 20 bp, synthetic construct
  source 1..20: mol_type = other DNA
tttactttttatacctcatc

SEQ ID NO: 48522 - DNA, 20 bp, synthetic construct
  source 1..20: mol_type = other DNA
ttttactttttatacctcat

SEQ ID NO: 48523 - DNA, 20 bp, synthetic construct
  source 1..20: mol_type = other DNA
attttactttttatacctca

SEQ ID NO: 48524 - DNA, 20 bp, synthetic construct
  source 1..20: mol_type = other DNA
cattttactttttatacctc

SEQ ID NO: 48525 - DNA, 20 bp, synthetic construct
  source 1..20: mol_type = other DNA
tcattttactttttatacct

SEQ ID NO: 48526 - DNA, 20 bp, synthetic construct
  source 1..20: mol_type = other DNA
ttcattttactttttatacc

SEQ ID NO: 48527 - DNA, 20 bp, synthetic construct
  source 1..20: mol_type = other DNA
tttcattttactttttatac

SEQ ID NO: 48528 - DNA, 20 bp, synthetic construct
  source 1..20: mol_type = other DNA
ttttcattttactttttata

SEQ ID NO: 48529 - DNA, 20 bp, synthetic construct
  source 1..20: mol_type = other DNA
gttttcattttactttttat

SEQ ID NO: 48530 - DNA, 20 bp, synthetic construct
  source 1..20: mol_type = other DNA
tgttttcattttacttttta

SEQ ID NO: 48531 - DNA, 20 bp, synthetic construct
  source 1..20: mol_type = other DNA
ttgttttcattttacttttt

SEQ ID NO: 48532 - DNA, 20 bp, synthetic construct
  source 1..20: mol_type = other DNA
tttgttttcattttactttt

SEQ ID NO: 48533 - DNA, 20 bp, synthetic construct
  source 1..20: mol_type = other DNA
atttgttttcattttacttt

SEQ ID NO: 48534 - DNA, 20 bp, synthetic construct
  source 1..20: mol_type = other DNA
tatttgttttcattttactt

SEQ ID NO: 48535 - DNA, 20 bp, synthetic construct
  source 1..20: mol_type = other DNA
atatttgttttcattttact

SEQ ID NO: 48536 - DNA, 20 bp, synthetic construct
  source 1..20: mol_type = other DNA
gatatttgttttcattttac

SEQ ID NO: 48537 - DNA, 20 bp, synthetic construct
  source 1..20: mol_type = other DNA
ggatatttgttttcatttta

SEQ ID NO: 48538 - DNA, 20 bp, synthetic construct
  source 1..20: mol_type = other DNA
gggatatttgttttcatttt

SEQ ID NO: 48539 - DNA, 20 bp, synthetic construct
  source 1..20: mol_type = other DNA
agggatatttgttttcattt

SEQ ID NO: 48540 - DNA, 20 bp, synthetic construct
  source 1..20: mol_type = other DNA
cagggatatttgttttcatt

SEQ ID NO: 48541 - DNA, 20 bp, synthetic construct
  source 1..20: mol_type = other DNA
ccagggatatttgttttcat

SEQ ID NO: 48542 - DNA, 20 bp, synthetic construct
  source 1..20: mol_type = other DNA
accagggatatttgttttca

SEQ ID NO: 48543 - DNA, 20 bp, synthetic construct
  source 1..20: mol_type = other DNA
caccagggatatttgttttc

SEQ ID NO: 48544 - DNA, 20 bp, synthetic construct
  source 1..20: mol_type = other DNA
tcaccagggatatttgtttt

SEQ ID NO: 48545 - DNA, 20 bp, synthetic construct
  source 1..20: mol_type = other DNA
gtcaccagggatatttgttt

SEQ ID NO: 48546 - DNA, 20 bp, synthetic construct
  source 1..20: mol_type = other DNA
ggtcaccagggatatttgtt

SEQ ID NO: 48547 - DNA, 20 bp, synthetic construct
  source 1..20: mol_type = other DNA
cggtcaccagggatatttgt

SEQ ID NO: 48548 - DNA, 20 bp, synthetic construct
  source 1..20: mol_type = other DNA
ccggtcaccagggatatttg

SEQ ID NO: 48549 - DNA, 20 bp, synthetic construct
  source 1..20: mol_type = other DNA
cccggtcaccagggatattt

SEQ ID NO: 48550 - DNA, 20 bp, synthetic construct
  source 1..20: mol_type = other DNA
acccggtcaccagggatatt

SEQ ID NO: 48551 - DNA, 20 bp, synthetic construct
  source 1..20: mol_type = other DNA
tacccggtcaccagggatat

SEQ ID NO: 48552 - DNA, 20 bp, synthetic construct
  source 1..20: mol_type = other DNA
ctacccggtcaccagggata

SEQ ID NO: 48553 - DNA, 20 bp, synthetic construct
  source 1..20: mol_type = other DNA
actacccggtcaccagggat

SEQ ID NO: 48554 - DNA, 20 bp, synthetic construct
  source 1..20: mol_type = other DNA
tactacccggtcaccaggga

SEQ ID NO: 48555 - DNA, 20 bp, synthetic construct
  source 1..20: mol_type = other DNA
atactacccggtcaccaggg

SEQ ID NO: 48556 - DNA, 20 bp, synthetic construct
  source 1..20: mol_type = other DNA
tatactacccggtcaccagg

SEQ ID NO: 48557 - DNA, 20 bp, synthetic construct
  source 1..20: mol_type = other DNA
gtatactacccggtcaccag

SEQ ID NO: 48558 - DNA, 20 bp, synthetic construct
  source 1..20: mol_type = other DNA
agtatactacccggtcacca

SEQ ID NO: 48559 - DNA, 20 bp, synthetic construct
  source 1..20: mol_type = other DNA
cagtatactacccggtcacc

SEQ ID NO: 48560 - DNA, 20 bp, synthetic construct
  source 1..20: mol_type = other DNA
acagtatactacccggtcac

SEQ ID NO: 48561 - DNA, 20 bp, synthetic construct
  source 1..20: mol_type = other DNA
aacagtatactacccggtca

SEQ ID NO: 48562 - DNA, 20 bp, synthetic construct
  source 1..20: mol_type = other DNA
aaacagtatactacccggtc

SEQ ID NO: 48563 - DNA, 20 bp, synthetic construct
  source 1..20: mol_type = other DNA
gaaacagtatactacccggt

SEQ ID NO: 48564 - DNA, 20 bp, synthetic construct
  source 1..20: mol_type = other DNA
agaaacagtatactacccgg

SEQ ID NO: 48565 - DNA, 20 bp, synthetic construct
  source 1..20: mol_type = other DNA
aagaaacagtatactacccg

SEQ ID NO: 48566 - DNA, 20 bp, synthetic construct
  source 1..20: mol_type = other DNA
aaagaaacagtatactaccc

SEQ ID NO: 48567 - DNA, 20 bp, synthetic construct
  source 1..20: mol_type = other DNA
caaagaaacagtatactacc

SEQ ID NO: 48568 - DNA, 20 bp, synthetic construct
  source 1..20: mol_type = other DNA
tcaaagaaacagtatactac

SEQ ID NO: 48569 - DNA, 20 bp, synthetic construct
  source 1..20: mol_type = other DNA
atcaaagaaacagtatacta

SEQ ID NO: 48570 - DNA, 20 bp, synthetic construct
  source 1..20: mol_type = other DNA
tatcaaagaaacagtatact

SEQ ID NO: 48571 - DNA, 20 bp, synthetic construct
  source 1..20: mol_type = other DNA
ttatcaaagaaacagtatac

SEQ ID NO: 48572 - DNA, 20 bp, synthetic construct
  source 1..20: mol_type = other DNA
tttatcaaagaaacagtata

SEQ ID NO: 48573 - DNA, 20 bp, synthetic construct
  source 1..20: mol_type = other DNA
atttatcaaagaaacagtat

SEQ ID NO: 48574 - DNA, 20 bp, synthetic construct
  source 1..20: mol_type = other DNA
tatttatcaaagaaacagta

SEQ ID NO: 48575 - DNA, 20 bp, synthetic construct
  source 1..20: mol_type = other DNA
ttatttatcaaagaaacagt

SEQ ID NO: 48576 - DNA, 20 bp, synthetic construct
  source 1..20: mol_type = other DNA
tttatttatcaaagaaacag

SEQ ID NO: 48577 - DNA, 20 bp, synthetic construct
  source 1..20: mol_type = other DNA
atttatttatcaaagaaaca

SEQ ID NO: 48578 - DNA, 20 bp, synthetic construct
  source 1..20: mol_type = other DNA
aatttatttatcaaagaaac

SEQ ID NO: 48579 - DNA, 20 bp, synthetic construct
  source 1..20: mol_type = other DNA
taatttatttatcaaagaaa

SEQ ID NO: 48580 - DNA, 20 bp, synthetic construct
  source 1..20: mol_type = other DNA
ataatttatttatcaaagaa

SEQ ID NO: 48581 - DNA, 20 bp, synthetic construct
  source 1..20: mol_type = other DNA
tataatttatttatcaaaga

SEQ ID NO: 48582 - DNA, 20 bp, synthetic construct
  source 1..20: mol_type = other DNA
atataatttatttatcaaag

SEQ ID NO: 48583 - DNA, 20 bp, synthetic construct
  source 1..20: mol_type = other DNA
catataatttatttatcaaa

SEQ ID NO: 48584 - DNA, 20 bp, synthetic construct
  source 1..20: mol_type = other DNA
acatataatttatttatcaa

SEQ ID NO: 48585 - DNA, 20 bp, synthetic construct
  source 1..20: mol_type = other DNA
aacatataatttatttatca

SEQ ID NO: 48586 - DNA, 20 bp, synthetic construct
  source 1..20: mol_type = other DNA
aaacatataatttatttatc

SEQ ID NO: 48587 - DNA, 20 bp, synthetic construct
  source 1..20: mol_type = other DNA
aaaacatataatttatttat

SEQ ID NO: 48588 - DNA, 20 bp, synthetic construct
  source 1..20: mol_type = other DNA
aaaaacatataatttattta

SEQ ID NO: 48589 - DNA, 20 bp, synthetic construct
  source 1..20: mol_type = other DNA
taaaaacatataatttattt

SEQ ID NO: 48590 - DNA, 20 bp, synthetic construct
  source 1..20: mol_type = other DNA
ctaaaaacatataatttatt

SEQ ID NO: 48591 - DNA, 20 bp, synthetic construct
  source 1..20: mol_type = other DNA
cctaaaaacatataatttat

SEQ ID NO: 48592 - DNA, 20 bp, synthetic construct
  source 1..20: mol_type = other DNA
ccctaaaaacatataattta

SEQ ID NO: 48593 - DNA, 20 bp, synthetic construct
  source 1..20: mol_type = other DNA
gccctaaaaacatataattt

SEQ ID NO: 48594 - DNA, 20 bp, synthetic construct
  source 1..20: mol_type = other DNA
agccctaaaaacatataatt

SEQ ID NO: 48595 - DNA, 20 bp, synthetic construct
  source 1..20: mol_type = other DNA
gagccctaaaaacatataat

SEQ ID NO: 48596 - DNA, 20 bp, synthetic construct
  source 1..20: mol_type = other DNA
ggagccctaaaaacatataa

SEQ ID NO: 48597 - DNA, 20 bp, synthetic construct
  source 1..20: mol_type = other DNA
tggagccctaaaaacatata

SEQ ID NO: 48598 - DNA, 20 bp, synthetic construct
  source 1..20: mol_type = other DNA
ttggagccctaaaaacatat

SEQ ID NO: 48599 - DNA, 20 bp, synthetic construct
  source 1..20: mol_type = other DNA
tttggagccctaaaaacata

SEQ ID NO: 48600 - DNA, 20 bp, synthetic construct
  source 1..20: mol_type = other DNA
atttggagccctaaaaacat

SEQ ID NO: 48601 - DNA, 20 bp, synthetic construct
  source 1..20: mol_type = other DNA
catttggagccctaaaaaca

SEQ ID NO: 48602 - DNA, 20 bp, synthetic construct
  source 1..20: mol_type = other DNA
acatttggagccctaaaaac

SEQ ID NO: 48603 - DNA, 20 bp, synthetic construct
  source 1..20: mol_type = other DNA
cacatttggagccctaaaaa

SEQ ID NO: 48604 - DNA, 20 bp, synthetic construct
  source 1..20: mol_type = other DNA
tcacatttggagccctaaaa

SEQ ID NO: 48605 - DNA, 20 bp, synthetic construct
  source 1..20: mol_type = other DNA
ttcacatttggagccctaaa

SEQ ID NO: 48606 - DNA, 20 bp, synthetic construct
  source 1..20: mol_type = other DNA
cttcacatttggagccctaa

SEQ ID NO: 48607 - DNA, 20 bp, synthetic construct
  source 1..20: mol_type = other DNA
acttcacatttggagcccta

SEQ ID NO: 48608 - DNA, 20 bp, synthetic construct
  source 1..20: mol_type = other DNA
tacttcacatttggagccct

SEQ ID NO: 48609 - DNA, 20 bp, synthetic construct
  source 1..20: mol_type = other DNA
gtacttcacatttggagccc

SEQ ID NO: 48610 - DNA, 20 bp, synthetic construct
  source 1..20: mol_type = other DNA
tgtacttcacatttggagcc

SEQ ID NO: 48611 - DNA, 20 bp, synthetic construct
  source 1..20: mol_type = other DNA
ttgtacttcacatttggagc

SEQ ID NO: 48612 - DNA, 20 bp, synthetic construct
  source 1..20: mol_type = other DNA
cttgtacttcacatttggag

SEQ ID NO: 48613 - DNA, 20 bp, synthetic construct
  source 1..20: mol_type = other DNA
acttgtacttcacatttgga

SEQ ID NO: 48614 - DNA, 20 bp, synthetic construct
  source 1..20: mol_type = other DNA
cacttgtacttcacatttgg

SEQ ID NO: 48615 - DNA, 20 bp, synthetic construct
  source 1..20: mol_type = other DNA
tcacttgtacttcacatttg

SEQ ID NO: 48616 - DNA, 20 bp, synthetic construct
  source 1..20: mol_type = other DNA
ttcacttgtacttcacattt

SEQ ID NO: 48617 - DNA, 20 bp, synthetic construct
  source 1..20: mol_type = other DNA
tttcacttgtacttcacatt

SEQ ID NO: 48618 - DNA, 20 bp, synthetic construct
  source 1..20: mol_type = other DNA
ttttcacttgtacttcacat

SEQ ID NO: 48619 - DNA, 20 bp, synthetic construct
  source 1..20: mol_type = other DNA
tttttcacttgtacttcaca

SEQ ID NO: 48620 - DNA, 20 bp, synthetic construct
  source 1..20: mol_type = other DNA
atttttcacttgtacttcac

SEQ ID NO: 48621 - DNA, 20 bp, synthetic construct
  source 1..20: mol_type = other DNA
catttttcacttgtacttca

SEQ ID NO: 48622 - DNA, 20 bp, synthetic construct
  source 1..20: mol_type = other DNA
ccatttttcacttgtacttc

SEQ ID NO: 48623 - DNA, 20 bp, synthetic construct
  source 1..20: mol_type = other DNA
tccatttttcacttgtactt

SEQ ID NO: 48624 - DNA, 20 bp, synthetic construct
  source 1..20: mol_type = other DNA
ctccatttttcacttgtact

SEQ ID NO: 48625 - DNA, 20 bp, synthetic construct
  source 1..20: mol_type = other DNA
cctccatttttcacttgtac

SEQ ID NO: 48626 - DNA, 20 bp, synthetic construct
  source 1..20: mol_type = other DNA
acctccatttttcacttgta

SEQ ID NO: 48627 - DNA, 20 bp, synthetic construct
  source 1..20: mol_type = other DNA
tacctccatttttcacttgt

SEQ ID NO: 48628 - DNA, 20 bp, synthetic construct
  source 1..20: mol_type = other DNA
atacctccatttttcacttg

SEQ ID NO: 48629 - DNA, 20 bp, synthetic construct
  source 1..20: mol_type = other DNA
tatacctccatttttcactt

SEQ ID NO: 48630 - DNA, 20 bp, synthetic construct
  source 1..20: mol_type = other DNA
atatacctccatttttcact

SEQ ID NO: 48631 - DNA, 20 bp, synthetic construct
  source 1..20: mol_type = other DNA
tatatacctccatttttcac

SEQ ID NO: 48632 - DNA, 20 bp, synthetic construct
  source 1..20: mol_type = other DNA
atatatacctccatttttca

SEQ ID NO: 48633 - DNA, 20 bp, synthetic construct
  source 1..20: mol_type = other DNA
catatatacctccatttttc

SEQ ID NO: 48634 - DNA, 20 bp, synthetic construct
  source 1..20: mol_type = other DNA
tcatatatacctccattttt

SEQ ID NO: 48635 - DNA, 20 bp, synthetic construct
  source 1..20: mol_type = other DNA
ttcatatatacctccatttt

SEQ ID NO: 48636 - DNA, 20 bp, synthetic construct
  source 1..20: mol_type = other DNA
cttcatatatacctccattt

SEQ ID NO: 48637 - DNA, 20 bp, synthetic construct
  source 1..20: mol_type = other DNA
ccttcatatatacctccatt

SEQ ID NO: 48638 - DNA, 20 bp, synthetic construct
  source 1..20: mol_type = other DNA
tccttcatatatacctccat

SEQ ID NO: 48639 - DNA, 20 bp, synthetic construct
  source 1..20: mol_type = other DNA
ctccttcatatatacctcca

SEQ ID NO: 48640 - DNA, 20 bp, synthetic construct
  source 1..20: mol_type = other DNA
actccttcatatatacctcc

SEQ ID NO: 48641 - DNA, 20 bp, synthetic construct
  source 1..20: mol_type = other DNA
aactccttcatatatacctc

SEQ ID NO: 48642 - DNA, 20 bp, synthetic construct
  source 1..20: mol_type = other DNA
aaactccttcatatatacct

SEQ ID NO: 48643 - DNA, 20 bp, synthetic construct
  source 1..20: mol_type = other DNA
aaaactccttcatatatacc

SEQ ID NO: 48644 - DNA, 20 bp, synthetic construct
  source 1..20: mol_type = other DNA
aaaaactccttcatatatac

SEQ ID NO: 48645 - DNA, 20 bp, synthetic construct
  source 1..20: mol_type = other DNA
taaaaactccttcatatata

SEQ ID NO: 48646 - DNA, 20 bp, synthetic construct
  source 1..20: mol_type = other DNA
ttaaaaactccttcatatat

SEQ ID NO: 48647 - DNA, 20 bp, synthetic construct
  source 1..20: mol_type = other DNA
tttaaaaactccttcatata

SEQ ID NO: 48648 - DNA, 20 bp, synthetic construct
  source 1..20: mol_type = other DNA
ttttaaaaactccttcatat

SEQ ID NO: 48649 - DNA, 20 bp, synthetic construct
  source 1..20: mol_type = other DNA
gttttaaaaactccttcata

SEQ ID NO: 48650 - DNA, 20 bp, synthetic construct
  source 1..20: mol_type = other DNA
agttttaaaaactccttcat

SEQ ID NO: 48651 - DNA, 20 bp, synthetic construct
  source 1..20: mol_type = other DNA
aagttttaaaaactccttca

SEQ ID NO: 48652 - DNA, 20 bp, synthetic construct
  source 1..20: mol_type = other DNA
taagttttaaaaactccttc

SEQ ID NO: 48653 - DNA, 20 bp, synthetic construct
  source 1..20: mol_type = other DNA
gtaagttttaaaaactcctt

SEQ ID NO: 48654 - DNA, 20 bp, synthetic construct
  source 1..20: mol_type = other DNA
tgtaagttttaaaaactcct

SEQ ID NO: 48655 - DNA, 20 bp, synthetic construct
  source 1..20: mol_type = other DNA
ctgtaagttttaaaaactcc

SEQ ID NO: 48656 - DNA, 20 bp, synthetic construct
  source 1..20: mol_type = other DNA
actgtaagttttaaaaactc

SEQ ID NO: 48657 - DNA, 20 bp, synthetic construct
  source 1..20: mol_type = other DNA
gactgtaagttttaaaaact

SEQ ID NO: 48658 - DNA, 20 bp, synthetic construct
  source 1..20: mol_type = other DNA
ggactgtaagttttaaaaac

SEQ ID NO: 48659 - DNA, 20 bp, synthetic construct
  source 1..20: mol_type = other DNA
cggactgtaagttttaaaaa

SEQ ID NO: 48660 - DNA, 20 bp, synthetic construct
  source 1..20: mol_type = other DNA
tcggactgtaagttttaaaa

SEQ ID NO: 48661 - DNA, 20 bp, synthetic construct
  source 1..20: mol_type = other DNA
ttcggactgtaagttttaaa

SEQ ID NO: 48662 - DNA, 20 bp, synthetic construct
  source 1..20: mol_type = other DNA
cttcggactgtaagttttaa

SEQ ID NO: 48663 - DNA, 20 bp, synthetic construct
  source 1..20: mol_type = other DNA
ccttcggactgtaagtttta

SEQ ID NO: 48664 - DNA, 20 bp, synthetic construct
  source 1..20: mol_type = other DNA
accttcggactgtaagtttt

SEQ ID NO: 48665 - DNA, 20 bp, synthetic construct
  source 1..20: mol_type = other DNA
taccttcggactgtaagttt

SEQ ID NO: 48666 - DNA, 20 bp, synthetic construct
  source 1..20: mol_type = other DNA
ttaccttcggactgtaagtt

SEQ ID NO: 48667 - DNA, 20 bp, synthetic construct
  source 1..20: mol_type = other DNA
attaccttcggactgtaagt

SEQ ID NO: 48668 - DNA, 20 bp, synthetic construct
  source 1..20: mol_type = other DNA
aattaccttcggactgtaag

SEQ ID NO: 48669 - DNA, 20 bp, synthetic construct
  source 1..20: mol_type = other DNA
aaattaccttcggactgtaa

SEQ ID NO: 48670 - DNA, 20 bp, synthetic construct
  source 1..20: mol_type = other DNA
aaaattaccttcggactgta

SEQ ID NO: 48671 - DNA, 20 bp, synthetic construct
  source 1..20: mol_type = other DNA
aaaaattaccttcggactgt

SEQ ID NO: 48672 - DNA, 20 bp, synthetic construct
  source 1..20: mol_type = other DNA
taaaaattaccttcggactg

SEQ ID NO: 48673 - DNA, 20 bp, synthetic construct
  source 1..20: mol_type = other DNA
gtaaaaattaccttcggact

SEQ ID NO: 48674 - DNA, 20 bp, synthetic construct
  source 1..20: mol_type = other DNA
agtaaaaattaccttcggac

SEQ ID NO: 48675 - DNA, 20 bp, synthetic construct
  source 1..20: mol_type = other DNA
aagtaaaaattaccttcgga

SEQ ID NO: 48676 - DNA, 20 bp, synthetic construct
  source 1..20: mol_type = other DNA
aaagtaaaaattaccttcgg

SEQ ID NO: 48677 - DNA, 20 bp, synthetic construct
  source 1..20: mol_type = other DNA
aaaagtaaaaattaccttcg

SEQ ID NO: 48678 - DNA, 20 bp, synthetic construct
  source 1..20: mol_type = other DNA
aaaaagtaaaaattaccttc

SEQ ID NO: 48679 - DNA, 20 bp, synthetic construct
  source 1..20: mol_type = other DNA
aaaaaagtaaaaattacctt

SEQ ID NO: 48680 - DNA, 20 bp, synthetic construct
  source 1..20: mol_type = other DNA
aaaaaaagtaaaaattacct

SEQ ID NO: 48681 - DNA, 20 bp, synthetic construct
  source 1..20: mol_type = other DNA
gaaaaaaagtaaaaattacc

SEQ ID NO: 48682 - DNA, 20 bp, synthetic construct
  source 1..20: mol_type = other DNA
agaaaaaaagtaaaaattac

SEQ ID NO: 48683 - DNA, 20 bp, synthetic construct
  source 1..20: mol_type = other DNA
aagaaaaaaagtaaaaatta

SEQ ID NO: 48684 - DNA, 20 bp, synthetic construct
  source 1..20: mol_type = other DNA
aaagaaaaaaagtaaaaatt

SEQ ID NO: 48685 - DNA, 20 bp, synthetic construct
  source 1..20: mol_type = other DNA
aaaagaaaaaaagtaaaaat

SEQ ID NO: 48686 - DNA, 20 bp, synthetic construct
  source 1..20: mol_type = other DNA
aaaaagaaaaaaagtaaaaa

SEQ ID NO: 48687 - DNA, 20 bp, synthetic construct
  source 1..20: mol_type = other DNA
gaaaaagaaaaaaagtaaaa

SEQ ID NO: 48688 - DNA, 20 bp, synthetic construct
  source 1..20: mol_type = other DNA
agaaaaagaaaaaaagtaaa

SEQ ID NO: 48689 - DNA, 20 bp, synthetic construct
  source 1..20: mol_type = other DNA
aagaaaaagaaaaaaagtaa

SEQ ID NO: 48690 - DNA, 20 bp, synthetic construct
  source 1..20: mol_type = other DNA
taagaaaaagaaaaaaagta

SEQ ID NO: 48691 - DNA, 20 bp, synthetic construct
  source 1..20: mol_type = other DNA
gtaagaaaaagaaaaaaagt

SEQ ID NO: 48692 - DNA, 20 bp, synthetic construct
  source 1..20: mol_type = other DNA
tgtaagaaaaagaaaaaaag

SEQ ID NO: 48693 - DNA, 20 bp, synthetic construct
  source 1..20: mol_type = other DNA
ttgtaagaaaaagaaaaaaa

SEQ ID NO: 48694 - DNA, 20 bp, synthetic construct
  source 1..20: mol_type = other DNA
tttgtaagaaaaagaaaaaa

SEQ ID NO: 48695 - DNA, 20 bp, synthetic construct
  source 1..20: mol_type = other DNA
ctttgtaagaaaaagaaaaa

SEQ ID NO: 48696 - DNA, 20 bp, synthetic construct
  source 1..20: mol_type = other DNA
actttgtaagaaaaagaaaa

SEQ ID NO: 48697 - DNA, 20 bp, synthetic construct
  source 1..20: mol_type = other DNA
tactttgtaagaaaaagaaa

SEQ ID NO: 48698 - DNA, 20 bp, synthetic construct
  source 1..20: mol_type = other DNA
ttactttgtaagaaaaagaa

SEQ ID NO: 48699 - DNA, 20 bp, synthetic construct
  source 1..20: mol_type = other DNA
tttactttgtaagaaaaaga

SEQ ID NO: 48700 - DNA, 20 bp, synthetic construct
  source 1..20: mol_type = other DNA
ttttactttgtaagaaaaag

SEQ ID NO: 48701 - DNA, 20 bp, synthetic construct
  source 1..20: mol_type = other DNA
cttttactttgtaagaaaaa

SEQ ID NO: 48702 - DNA, 20 bp, synthetic construct
  source 1..20: mol_type = other DNA
tcttttactttgtaagaaaa

SEQ ID NO: 48703 - DNA, 20 bp, synthetic construct
  source 1..20: mol_type = other DNA
ttcttttactttgtaagaaa

SEQ ID NO: 48704 - DNA, 20 bp, synthetic construct
  source 1..20: mol_type = other DNA
gttcttttactttgtaagaa

SEQ ID NO: 48705 - DNA, 20 bp, synthetic construct
  source 1..20: mol_type = other DNA
tgttcttttactttgtaaga

SEQ ID NO: 48706 - DNA, 20 bp, synthetic construct
  source 1..20: mol_type = other DNA
atgttcttttactttgtaag

SEQ ID NO: 48707 - DNA, 20 bp, synthetic construct
  source 1..20: mol_type = other DNA
aatgttcttttactttgtaa

SEQ ID NO: 48708 - DNA, 20 bp, synthetic construct
  source 1..20: mol_type = other DNA
aaatgttcttttactttgta

SEQ ID NO: 48709 - DNA, 20 bp, synthetic construct
  source 1..20: mol_type = other DNA
aaaatgttcttttactttgt

SEQ ID NO: 48710 - DNA, 20 bp, synthetic construct
  source 1..20: mol_type = other DNA
gaaaatgttcttttactttg

SEQ ID NO: 48711 - DNA, 20 bp, synthetic construct
  source 1..20: mol_type = other DNA
tgaaaatgttcttttacttt

SEQ ID NO: 48712 - DNA, 20 bp, synthetic construct
  source 1..20: mol_type = other DNA
atgaaaatgttcttttactt

SEQ ID NO: 48713 - DNA, 20 bp, synthetic construct
  source 1..20: mol_type = other DNA
tatgaaaatgttcttttact

SEQ ID NO: 48714 - DNA, 20 bp, synthetic construct
  source 1..20: mol_type = other DNA
ctatgaaaatgttcttttac

SEQ ID NO: 48715 - DNA, 20 bp, synthetic construct
  source 1..20: mol_type = other DNA
actatgaaaatgttctttta

SEQ ID NO: 48716 - DNA, 20 bp, synthetic construct
  source 1..20: mol_type = other DNA
gactatgaaaatgttctttt

SEQ ID NO: 48717 - DNA, 20 bp, synthetic construct
  source 1..20: mol_type = other DNA
tgactatgaaaatgttcttt

SEQ ID NO: 48718 - DNA, 20 bp, synthetic construct
  source 1..20: mol_type = other DNA
ctgactatgaaaatgttctt

SEQ ID NO: 48719 - DNA, 20 bp, synthetic construct
  source 1..20: mol_type = other DNA
actgactatgaaaatgttct

SEQ ID NO: 48720 - DNA, 20 bp, synthetic construct
  source 1..20: mol_type = other DNA
cactgactatgaaaatgttc

SEQ ID NO: 48721 - DNA, 20 bp, synthetic construct
  source 1..20: mol_type = other DNA
acactgactatgaaaatgtt

SEQ ID NO: 48722 - DNA, 20 bp, synthetic construct
  source 1..20: mol_type = other DNA
aacactgactatgaaaatgt

SEQ ID NO: 48723 - DNA, 20 bp, synthetic construct
  source 1..20: mol_type = other DNA
aaacactgactatgaaaatg

SEQ ID NO: 48724 - DNA, 20 bp, synthetic construct
  source 1..20: mol_type = other DNA
aaaacactgactatgaaaat

SEQ ID NO: 48725 - DNA, 20 bp, synthetic construct
  source 1..20: mol_type = other DNA
taaaacactgactatgaaaa

SEQ ID NO: 48726 - DNA, 20 bp, synthetic construct
  source 1..20: mol_type = other DNA
gtaaaacactgactatgaaa

SEQ ID NO: 48727 - DNA, 20 bp, synthetic construct
  source 1..20: mol_type = other DNA
ggtaaaacactgactatgaa

SEQ ID NO: 48728 - DNA, 20 bp, synthetic construct
  source 1..20: mol_type = other DNA
aggtaaaacactgactatga

SEQ ID NO: 48729 - DNA, 20 bp, synthetic construct
  source 1..20: mol_type = other DNA
taggtaaaacactgactatg

SEQ ID NO: 48730 - DNA, 20 bp, synthetic construct
  source 1..20: mol_type = other DNA
ctaggtaaaacactgactat

SEQ ID NO: 48731 - DNA, 20 bp, synthetic construct
  source 1..20: mol_type = other DNA
actaggtaaaacactgacta

SEQ ID NO: 48732 - DNA, 20 bp, synthetic construct
  source 1..20: mol_type = other DNA
aactaggtaaaacactgact

SEQ ID NO: 48733 - DNA, 20 bp, synthetic construct
  source 1..20: mol_type = other DNA
aaactaggtaaaacactgac

SEQ ID NO: 48734 - DNA, 20 bp, synthetic construct
  source 1..20: mol_type = other DNA
aaaactaggtaaaacactga

SEQ ID NO: 48735 - DNA, 20 bp, synthetic construct
  source 1..20: mol_type = other DNA
aaaaactaggtaaaacactg

SEQ ID NO: 48736 - DNA, 20 bp, synthetic construct
  source 1..20: mol_type = other DNA
taaaaactaggtaaaacact

SEQ ID NO: 48737 - DNA, 20 bp, synthetic construct
  source 1..20: mol_type = other DNA
ttaaaaactaggtaaaacac

SEQ ID NO: 48738 - DNA, 20 bp, synthetic construct
  source 1..20: mol_type = other DNA
tttaaaaactaggtaaaaca

SEQ ID NO: 48739 - DNA, 20 bp, synthetic construct
  source 1..20: mol_type = other DNA
ctttaaaaactaggtaaaac

SEQ ID NO: 48740 - DNA, 20 bp, synthetic construct
  source 1..20: mol_type = other DNA
gctttaaaaactaggtaaaa

SEQ ID NO: 48741 - DNA, 20 bp, synthetic construct
  source 1..20: mol_type = other DNA
ggctttaaaaactaggtaaa

SEQ ID NO: 48742 - DNA, 20 bp, synthetic construct
  source 1..20: mol_type = other DNA
tggctttaaaaactaggtaa

SEQ ID NO: 48743 - DNA, 20 bp, synthetic construct
  source 1..20: mol_type = other DNA
gtggctttaaaaactaggta

SEQ ID NO: 48744 - DNA, 20 bp, synthetic construct
  source 1..20: mol_type = other DNA
agtggctttaaaaactaggt

SEQ ID NO: 48745 - DNA, 20 bp, synthetic construct
  source 1..20: mol_type = other DNA
aagtggctttaaaaactagg

SEQ ID NO: 48746 - DNA, 20 bp, synthetic construct
  source 1..20: mol_type = other DNA
aaagtggctttaaaaactag

SEQ ID NO: 48747 - DNA, 20 bp, synthetic construct
  source 1..20: mol_type = other DNA
caaagtggctttaaaaacta

SEQ ID NO: 48748 - DNA, 20 bp, synthetic construct
  source 1..20: mol_type = other DNA
tcaaagtggctttaaaaact

SEQ ID NO: 48749 - DNA, 20 bp, synthetic construct
  source 1..20: mol_type = other DNA
ttcaaagtggctttaaaaac

SEQ ID NO: 48750 - DNA, 20 bp, synthetic construct
  source 1..20: mol_type = other DNA
attcaaagtggctttaaaaa

SEQ ID NO: 48751 - DNA, 20 bp, synthetic construct
  source 1..20: mol_type = other DNA
cattcaaagtggctttaaaa

SEQ ID NO: 48752 - DNA, 20 bp, synthetic construct
  source 1..20: mol_type = other DNA
tcattcaaagtggctttaaa

SEQ ID NO: 48753 - DNA, 20 bp, synthetic construct
  source 1..20: mol_type = other DNA
atcattcaaagtggctttaa

SEQ ID NO: 48754 - DNA, 20 bp, synthetic construct
  source 1..20: mol_type = other DNA
aatcattcaaagtggcttta

SEQ ID NO: 48755 - DNA, 20 bp, synthetic construct
  source 1..20: mol_type = other DNA
aaatcattcaaagtggcttt

SEQ ID NO: 48756 - DNA, 20 bp, synthetic construct
  source 1..20: mol_type = other DNA
aaaatcattcaaagtggctt

SEQ ID NO: 48757 - DNA, 20 bp, synthetic construct
  source 1..20: mol_type = other DNA
taaaatcattcaaagtggct

SEQ ID NO: 48758 - DNA, 20 bp, synthetic construct
  source 1..20: mol_type = other DNA
gtaaaatcattcaaagtggc

SEQ ID NO: 48759 - DNA, 20 bp, synthetic construct
  source 1..20: mol_type = other DNA
agtaaaatcattcaaagtgg

SEQ ID NO: 48760 - DNA, 20 bp, synthetic construct
  source 1..20: mol_type = other DNA
aagtaaaatcattcaaagtg

SEQ ID NO: 48761 - DNA, 20 bp, synthetic construct
  source 1..20: mol_type = other DNA
gaagtaaaatcattcaaagt

SEQ ID NO: 48762 - DNA, 20 bp, synthetic construct
  source 1..20: mol_type = other DNA
agaagtaaaatcattcaaag

SEQ ID NO: 48763 - DNA, 20 bp, synthetic construct
  source 1..20: mol_type = other DNA
gagaagtaaaatcattcaaa

SEQ ID NO: 48764 - DNA, 20 bp, synthetic construct
  source 1..20: mol_type = other DNA
tgagaagtaaaatcattcaa

SEQ ID NO: 48765 - DNA, 20 bp, synthetic construct
  source 1..20: mol_type = other DNA
ctgagaagtaaaatcattca

SEQ ID NO: 48766 - DNA, 20 bp, synthetic construct
  source 1..20: mol_type = other DNA
actgagaagtaaaatcattc

SEQ ID NO: 48767 - DNA, 20 bp, synthetic construct
  source 1..20: mol_type = other DNA
aactgagaagtaaaatcatt

SEQ ID NO: 48768 - DNA, 20 bp, synthetic construct
  source 1..20: mol_type = other DNA
aaactgagaagtaaaatcat

SEQ ID NO: 48769 - DNA, 20 bp, synthetic construct
  source 1..20: mol_type = other DNA
gaaactgagaagtaaaatca

SEQ ID NO: 48770 - DNA, 20 bp, synthetic construct
  source 1..20: mol_type = other DNA
tgaaactgagaagtaaaatc

SEQ ID NO: 48771 - DNA, 20 bp, synthetic construct
  source 1..20: mol_type = other DNA
ttgaaactgagaagtaaaat

SEQ ID NO: 48772 - DNA, 20 bp, synthetic construct
  source 1..20: mol_type = other DNA
tttgaaactgagaagtaaaa

SEQ ID NO: 48773 - DNA, 20 bp, synthetic construct
  source 1..20: mol_type = other DNA
atttgaaactgagaagtaaa

SEQ ID NO: 48774 - DNA, 20 bp, synthetic construct
  source 1..20: mol_type = other DNA
tatttgaaactgagaagtaa

SEQ ID NO: 48775 - DNA, 20 bp, synthetic construct
  source 1..20: mol_type = other DNA
gtatttgaaactgagaagta

SEQ ID NO: 48776 - DNA, 20 bp, synthetic construct
  source 1..20: mol_type = other DNA
agtatttgaaactgagaagt

SEQ ID NO: 48777 - DNA, 20 bp, synthetic construct
  source 1..20: mol_type = other DNA
cagtatttgaaactgagaag

SEQ ID NO: 48778 - DNA, 20 bp, synthetic construct
  source 1..20: mol_type = other DNA
tcagtatttgaaactgagaa

SEQ ID NO: 48779 - DNA, 20 bp, synthetic construct
  source 1..20: mol_type = other DNA
atcagtatttgaaactgaga

SEQ ID NO: 48780 - DNA, 20 bp, synthetic construct
  source 1..20: mol_type = other DNA
aatcagtatttgaaactgag

SEQ ID NO: 48781 - DNA, 20 bp, synthetic construct
  source 1..20: mol_type = other DNA
taatcagtatttgaaactga

SEQ ID NO: 48782 - DNA, 20 bp, synthetic construct
  source 1..20: mol_type = other DNA
ataatcagtatttgaaactg

SEQ ID NO: 48783 - DNA, 20 bp, synthetic construct
  source 1..20: mol_type = other DNA
aataatcagtatttgaaact

SEQ ID NO: 48784 - DNA, 20 bp, synthetic construct
  source 1..20: mol_type = other DNA
aaataatcagtatttgaaac

SEQ ID NO: 48785 - DNA, 20 bp, synthetic construct
  source 1..20: mol_type = other DNA
aaaataatcagtatttgaaa

SEQ ID NO: 48786 - DNA, 20 bp, synthetic construct
  source 1..20: mol_type = other DNA
taaaataatcagtatttgaa

SEQ ID NO: 48787 - DNA, 20 bp, synthetic construct
  source 1..20: mol_type = other DNA
ataaaataatcagtatttga

SEQ ID NO: 48788 - DNA, 20 bp, synthetic construct
  source 1..20: mol_type = other DNA
tataaaataatcagtatttg

SEQ ID NO: 48789 - DNA, 20 bp, synthetic construct
  source 1..20: mol_type = other DNA
ctataaaataatcagtattt

SEQ ID NO: 48790 - DNA, 20 bp, synthetic construct
  source 1..20: mol_type = other DNA
tctataaaataatcagtatt

SEQ ID NO: 48791 - DNA, 20 bp, synthetic construct
  source 1..20: mol_type = other DNA
gtctataaaataatcagtat

SEQ ID NO: 48792 - DNA, 20 bp, synthetic construct
  source 1..20: mol_type = other DNA
agtctataaaataatcagta

SEQ ID NO: 48793 - DNA, 20 bp, synthetic construct
  source 1..20: mol_type = other DNA
cagtctataaaataatcagt

SEQ ID NO: 48794 - DNA, 20 bp, synthetic construct
  source 1..20: mol_type = other DNA
ccagtctataaaataatcag

SEQ ID NO: 48795 - DNA, 20 bp, synthetic construct
  source 1..20: mol_type = other DNA
accagtctataaaataatca

SEQ ID NO: 48796 - DNA, 20 bp, synthetic construct
  source 1..20: mol_type = other DNA
aaccagtctataaaataatc

SEQ ID NO: 48797 - DNA, 20 bp, synthetic construct
  source 1..20: mol_type = other DNA
aaaccagtctataaaataat

SEQ ID NO: 48798 - DNA, 20 bp, synthetic construct
  source 1..20: mol_type = other DNA
caaaccagtctataaaataa

SEQ ID NO: 48799 - DNA, 20 bp, synthetic construct
  source 1..20: mol_type = other DNA
acaaaccagtctataaaata

SEQ ID NO: 48800 - DNA, 20 bp, synthetic construct
  source 1..20: mol_type = other DNA
cacaaaccagtctataaaat

SEQ ID NO: 48801 - DNA, 20 bp, synthetic construct
  source 1..20: mol_type = other DNA
acacaaaccagtctataaaa

SEQ ID NO: 48802 - DNA, 20 bp, synthetic construct
  source 1..20: mol_type = other DNA
tacacaaaccagtctataaa

SEQ ID NO: 48803 - DNA, 20 bp, synthetic construct
  source 1..20: mol_type = other DNA
ttacacaaaccagtctataa

SEQ ID NO: 48804 - DNA, 20 bp, synthetic construct
  source 1..20: mol_type = other DNA
attacacaaaccagtctata

SEQ ID NO: 48805 - DNA, 20 bp, synthetic construct
  source 1..20: mol_type = other DNA
gattacacaaaccagtctat

SEQ ID NO: 48806 - DNA, 20 bp, synthetic construct
  source 1..20: mol_type = other DNA
tgattacacaaaccagtcta

SEQ ID NO: 48807 - DNA, 20 bp, synthetic construct
  source 1..20: mol_type = other DNA
ctgattacacaaaccagtct

SEQ ID NO: 48808 - DNA, 20 bp, synthetic construct
  source 1..20: mol_type = other DNA
tctgattacacaaaccagtc

SEQ ID NO: 48809 - DNA, 20 bp, synthetic construct
  source 1..20: mol_type = other DNA
ctctgattacacaaaccagt

SEQ ID NO: 48810 - DNA, 20 bp, synthetic construct
  source 1..20: mol_type = other DNA
tctctgattacacaaaccag

SEQ ID NO: 48811 - DNA, 20 bp, synthetic construct
  source 1..20: mol_type = other DNA
ctctctgattacacaaacca

SEQ ID NO: 48812 - DNA, 20 bp, synthetic construct
  source 1..20: mol_type = other DNA
cctctctgattacacaaacc

SEQ ID NO: 48813 - DNA, 20 bp, synthetic construct
  source 1..20: mol_type = other DNA
gcctctctgattacacaaac

SEQ ID NO: 48814 - DNA, 20 bp, synthetic construct
  source 1..20: mol_type = other DNA
agcctctctgattacacaaa

SEQ ID NO: 48815 - DNA, 20 bp, synthetic construct
  source 1..20: mol_type = other DNA
aagcctctctgattacacaa

SEQ ID NO: 48816 - DNA, 20 bp, synthetic construct
  source 1..20: mol_type = other DNA
gaagcctctctgattacaca

SEQ ID NO: 48817 - DNA, 20 bp, synthetic construct
  source 1..20: mol_type = other DNA
agaagcctctctgattacac

SEQ ID NO: 48818 - DNA, 20 bp, synthetic construct
  source 1..20: mol_type = other DNA
aagaagcctctctgattaca

SEQ ID NO: 48819 - DNA, 20 bp, synthetic construct
  source 1..20: mol_type = other DNA
caagaagcctctctgattac

SEQ ID NO: 48820 - DNA, 20 bp, synthetic construct
  source 1..20: mol_type = other DNA
tcaagaagcctctctgatta

SEQ ID NO: 48821 - DNA, 20 bp, synthetic construct
  source 1..20: mol_type = other DNA
atcaagaagcctctctgatt

SEQ ID NO: 48822 - DNA, 20 bp, synthetic construct
  source 1..20: mol_type = other DNA
catcaagaagcctctctgat

SEQ ID NO: 48823 - DNA, 20 bp, synthetic construct
  source 1..20: mol_type = other DNA
acatcaagaagcctctctga

SEQ ID NO: 48824 - DNA, 20 bp, synthetic construct
  source 1..20: mol_type = other DNA
cacatcaagaagcctctctg

SEQ ID NO: 48825 - DNA, 20 bp, synthetic construct
  source 1..20: mol_type = other DNA
acacatcaagaagcctctct

SEQ ID NO: 48826 - DNA, 20 bp, synthetic construct
  source 1..20: mol_type = other DNA
cacacatcaagaagcctctc

SEQ ID NO: 48827 - DNA, 20 bp, synthetic construct
  source 1..20: mol_type = other DNA
acacacatcaagaagcctct

SEQ ID NO: 48828 - DNA, 20 bp, synthetic construct
  source 1..20: mol_type = other DNA
cacacacatcaagaagcctc

SEQ ID NO: 48829 - DNA, 20 bp, synthetic construct
  source 1..20: mol_type = other DNA
gcacacacatcaagaagcct

SEQ ID NO: 48830 - DNA, 20 bp, synthetic construct
  source 1..20: mol_type = other DNA
agcacacacatcaagaagcc

SEQ ID NO: 48831 - DNA, 20 bp, synthetic construct
  source 1..20: mol_type = other DNA
aagcacacacatcaagaagc

SEQ ID NO: 48832 - DNA, 20 bp, synthetic construct
  source 1..20: mol_type = other DNA
taagcacacacatcaagaag

SEQ ID NO: 48833 - DNA, 20 bp, synthetic construct
  source 1..20: mol_type = other DNA
ataagcacacacatcaagaa

SEQ ID NO: 48834 - DNA, 20 bp, synthetic construct
  source 1..20: mol_type = other DNA
aataagcacacacatcaaga

SEQ ID NO: 48835 - DNA, 20 bp, synthetic construct
  source 1..20: mol_type = other DNA
taataagcacacacatcaag

SEQ ID NO: 48836 - DNA, 20 bp, synthetic construct
  source 1..20: mol_type = other DNA
ttaataagcacacacatcaa

SEQ ID NO: 48837 - DNA, 20 bp, synthetic construct
  source 1..20: mol_type = other DNA
tttaataagcacacacatca

SEQ ID NO: 48838 - DNA, 20 bp, synthetic construct
  source 1..20: mol_type = other DNA
ttttaataagcacacacatc

SEQ ID NO: 48839 - DNA, 20 bp, synthetic construct
  source 1..20: mol_type = other DNA
attttaataagcacacacat

SEQ ID NO: 48840 - DNA, 20 bp, synthetic construct
  source 1..20: mol_type = other DNA
tattttaataagcacacaca

SEQ ID NO: 48841 - DNA, 20 bp, synthetic construct
  source 1..20: mol_type = other DNA
atattttaataagcacacac

SEQ ID NO: 48842 - DNA, 20 bp, synthetic construct
  source 1..20: mol_type = other DNA
aatattttaataagcacaca

SEQ ID NO: 48843 - DNA, 20 bp, synthetic construct
  source 1..20: mol_type = other DNA
aaatattttaataagcacac

SEQ ID NO: 48844 - DNA, 20 bp, synthetic construct
  source 1..20: mol_type = other DNA
gaaatattttaataagcaca

SEQ ID NO: 48845 - DNA, 20 bp, synthetic construct
  source 1..20: mol_type = other DNA
tgaaatattttaataagcac

SEQ ID NO: 48846 - DNA, 20 bp, synthetic construct
  source 1..20: mol_type = other DNA
ttgaaatattttaataagca

SEQ ID NO: 48847 - DNA, 20 bp, synthetic construct
  source 1..20: mol_type = other DNA
gttgaaatattttaataagc

SEQ ID NO: 48848 - DNA, 20 bp, synthetic construct
  source 1..20: mol_type = other DNA
ggttgaaatattttaataag

SEQ ID NO: 48849 - DNA, 20 bp, synthetic construct
  source 1..20: mol_type = other DNA
tggttgaaatattttaataa

SEQ ID NO: 48850 - DNA, 20 bp, synthetic construct
  source 1..20: mol_type = other DNA
atggttgaaatattttaata

SEQ ID NO: 48851 - DNA, 20 bp, synthetic construct
  source 1..20: mol_type = other DNA
aatggttgaaatattttaat

SEQ ID NO: 48852 - DNA, 20 bp, synthetic construct
  source 1..20: mol_type = other DNA
aaatggttgaaatattttaa

SEQ ID NO: 48853 - DNA, 20 bp, synthetic construct
  source 1..20: mol_type = other DNA
aaaatggttgaaatatttta

SEQ ID NO: 48854 - DNA, 20 bp, synthetic construct
  source 1..20: mol_type = other DNA
aaaaatggttgaaatatttt

SEQ ID NO: 48855 - DNA, 20 bp, synthetic construct
  source 1..20: mol_type = other DNA
taaaaatggttgaaatattt

SEQ ID NO: 48856 - DNA, 20 bp, synthetic construct
  source 1..20: mol_type = other DNA
ttaaaaatggttgaaatatt

SEQ ID NO: 48857 - DNA, 20 bp, synthetic construct
  source 1..20: mol_type = other DNA
cttaaaaatggttgaaatat

SEQ ID NO: 48858 - DNA, 20 bp, synthetic construct
  source 1..20: mol_type = other DNA
gcttaaaaatggttgaaata

SEQ ID NO: 48859 - DNA, 20 bp, synthetic construct
  source 1..20: mol_type = other DNA
tgcttaaaaatggttgaaat

SEQ ID NO: 48860 - DNA, 20 bp, synthetic construct
  source 1..20: mol_type = other DNA
atgcttaaaaatggttgaaa

SEQ ID NO: 48861 - DNA, 20 bp, synthetic construct
  source 1..20: mol_type = other DNA
aatgcttaaaaatggttgaa

SEQ ID NO: 48862 - DNA, 20 bp, synthetic construct
  source 1..20: mol_type = other DNA
caatgcttaaaaatggttga

SEQ ID NO: 48863 - DNA, 20 bp, synthetic construct
  source 1..20: mol_type = other DNA
acaatgcttaaaaatggttg

SEQ ID NO: 48864 - DNA, 20 bp, synthetic construct
  source 1..20: mol_type = other DNA
cacaatgcttaaaaatggtt

SEQ ID NO: 48865 - DNA, 20 bp, synthetic construct
  source 1..20: mol_type = other DNA
tcacaatgcttaaaaatggt

SEQ ID NO: 48866 - DNA, 20 bp, synthetic construct
  source 1..20: mol_type = other DNA
ctcacaatgcttaaaaatgg

SEQ ID NO: 48867 - DNA, 20 bp, synthetic construct
  source 1..20: mol_type = other DNA
gctcacaatgcttaaaaatg

SEQ ID NO: 48868 - DNA, 20 bp, synthetic construct
  source 1..20: mol_type = other DNA
agctcacaatgcttaaaaat

SEQ ID NO: 48869 - DNA, 20 bp, synthetic construct
  source 1..20: mol_type = other DNA
tagctcacaatgcttaaaaa

SEQ ID NO: 48870 - DNA, 20 bp, synthetic construct
  source 1..20: mol_type = other DNA
ttagctcacaatgcttaaaa

SEQ ID NO: 48871 - DNA, 20 bp, synthetic construct
  source 1..20: mol_type = other DNA
attagctcacaatgcttaaa

SEQ ID NO: 48872 - DNA, 20 bp, synthetic construct
  source 1..20: mol_type = other DNA
tattagctcacaatgcttaa

SEQ ID NO: 48873 - DNA, 20 bp, synthetic construct
  source 1..20: mol_type = other DNA
ctattagctcacaatgctta

SEQ ID NO: 48874 - DNA, 20 bp, synthetic construct
  source 1..20: mol_type = other DNA
tctattagctcacaatgctt

SEQ ID NO: 48875 - DNA, 20 bp, synthetic construct
  source 1..20: mol_type = other DNA
ctctattagctcacaatgct

SEQ ID NO: 48876 - DNA, 20 bp, synthetic construct
  source 1..20: mol_type = other DNA
cctctattagctcacaatgc

SEQ ID NO: 48877 - DNA, 20 bp, synthetic construct
  source 1..20: mol_type = other DNA
ccctctattagctcacaatg

SEQ ID NO: 48878 - DNA, 20 bp, synthetic construct
  source 1..20: mol_type = other DNA
tccctctattagctcacaat

SEQ ID NO: 48879 - DNA, 20 bp, synthetic construct
  source 1..20: mol_type = other DNA
atccctctattagctcacaa

SEQ ID NO: 48880 - DNA, 20 bp, synthetic construct
  source 1..20: mol_type = other DNA
catccctctattagctcaca

SEQ ID NO: 48881 - DNA, 20 bp, synthetic construct
  source 1..20: mol_type = other DNA
acatccctctattagctcac

SEQ ID NO: 48882 - DNA, 20 bp, synthetic construct
  source 1..20: mol_type = other DNA
cacatccctctattagctca

SEQ ID NO: 48883 - DNA, 20 bp, synthetic construct
  source 1..20: mol_type = other DNA
ccacatccctctattagctc

SEQ ID NO: 48884 - DNA, 20 bp, synthetic construct
  source 1..20: mol_type = other DNA
accacatccctctattagct

SEQ ID NO: 48885 - DNA, 20 bp, synthetic construct
  source 1..20: mol_type = other DNA
caccacatccctctattagc

SEQ ID NO: 48886 - DNA, 20 bp, synthetic construct
  source 1..20: mol_type = other DNA
ccaccacatccctctattag

SEQ ID NO: 48887 - DNA, 20 bp, synthetic construct
  source 1..20: mol_type = other DNA
accaccacatccctctatta

SEQ ID NO: 48888 - DNA, 20 bp, synthetic construct
  source 1..20: mol_type = other DNA
aaccaccacatccctctatt

SEQ ID NO: 48889 - DNA, 20 bp, synthetic construct
  source 1..20: mol_type = other DNA
aaaccaccacatccctctat

SEQ ID NO: 48890 - DNA, 20 bp, synthetic construct
  source 1..20: mol_type = other DNA
caaaccaccacatccctcta

SEQ ID NO: 48891 - DNA, 20 bp, synthetic construct
  source 1..20: mol_type = other DNA
acaaaccaccacatccctct

SEQ ID NO: 48892 - DNA, 20 bp, synthetic construct
  source 1..20: mol_type = other DNA
aacaaaccaccacatccctc

SEQ ID NO: 48893 - DNA, 20 bp, synthetic construct
  source 1..20: mol_type = other DNA
aaacaaaccaccacatccct

SEQ ID NO: 48894 - DNA, 20 bp, synthetic construct
  source 1..20: mol_type = other DNA
aaaacaaaccaccacatccc

SEQ ID NO: 48895 - DNA, 20 bp, synthetic construct
  source 1..20: mol_type = other DNA
aaaaacaaaccaccacatcc

SEQ ID NO: 48896 - DNA, 20 bp, synthetic construct
  source 1..20: mol_type = other DNA
aaaaaacaaaccaccacatc

SEQ ID NO: 48897 - DNA, 20 bp, synthetic construct
  source 1..20: mol_type = other DNA
gaaaaaacaaaccaccacat

SEQ ID NO: 48898 - DNA, 20 bp, synthetic construct
  source 1..20: mol_type = other DNA
ggaaaaaacaaaccaccaca

SEQ ID NO: 48899 - DNA, 20 bp, synthetic construct
  source 1..20: mol_type = other DNA
aggaaaaaacaaaccaccac

SEQ ID NO: 48900 - DNA, 20 bp, synthetic construct
  source 1..20: mol_type = other DNA
gaggaaaaaacaaaccacca

SEQ ID NO: 48901 - DNA, 20 bp, synthetic construct
  source 1..20: mol_type = other DNA
agaggaaaaaacaaaccacc

SEQ ID NO: 48902 - DNA, 20 bp, synthetic construct
  source 1..20: mol_type = other DNA
aagaggaaaaaacaaaccac

SEQ ID NO: 48903 - DNA, 20 bp, synthetic construct
  source 1..20: mol_type = other DNA
taagaggaaaaaacaaacca

SEQ ID NO: 48904 - DNA, 20 bp, synthetic construct
  source 1..20: mol_type = other DNA
ttaagaggaaaaaacaaacc

SEQ ID NO: 48905 - DNA, 20 bp, synthetic construct
  source 1..20: mol_type = other DNA
tttaagaggaaaaaacaaac

SEQ ID NO: 48906 - DNA, 20 bp, synthetic construct
  source 1..20: mol_type = other DNA
ttttaagaggaaaaaacaaa

SEQ ID NO: 48907 - DNA, 20 bp, synthetic construct
  source 1..20: mol_type = other DNA
tttttaagaggaaaaaacaa

SEQ ID NO: 48908 - DNA, 20 bp, synthetic construct
  source 1..20: mol_type = other DNA
atttttaagaggaaaaaaca

SEQ ID NO: 48909 - DNA, 20 bp, synthetic construct
  source 1..20: mol_type = other DNA
aatttttaagaggaaaaaac

SEQ ID NO: 48910 - DNA, 20 bp, synthetic construct
  source 1..20: mol_type = other DNA
taatttttaagaggaaaaaa

SEQ ID NO: 48911 - DNA, 20 bp, synthetic construct
  source 1..20: mol_type = other DNA
ataatttttaagaggaaaaa

SEQ ID NO: 48912 - DNA, 20 bp, synthetic construct
  source 1..20: mol_type = other DNA
aataatttttaagaggaaaa

SEQ ID NO: 48913 - DNA, 20 bp, synthetic construct
  source 1..20: mol_type = other DNA
taataatttttaagaggaaa

SEQ ID NO: 48914 - DNA, 20 bp, synthetic construct
  source 1..20: mol_type = other DNA
ataataatttttaagaggaa

SEQ ID NO: 48915 - DNA, 20 bp, synthetic construct
  source 1..20: mol_type = other DNA
aataataatttttaagagga

SEQ ID NO: 48916 - DNA, 20 bp, synthetic construct
  source 1..20: mol_type = other DNA
taataataatttttaagagg

SEQ ID NO: 48917 - DNA, 20 bp, synthetic construct
  source 1..20: mol_type = other DNA
ttaataataatttttaagag

SEQ ID NO: 48918 - DNA, 20 bp, synthetic construct
  source 1..20: mol_type = other DNA
attaataataatttttaaga

SEQ ID NO: 48919 - DNA, 20 bp, synthetic construct
  source 1..20: mol_type = other DNA
cattaataataatttttaag

SEQ ID NO: 48920 - DNA, 20 bp, synthetic construct
  source 1..20: mol_type = other DNA
acattaataataatttttaa

SEQ ID NO: 48921 - DNA, 20 bp, synthetic construct
  source 1..20: mol_type = other DNA
tacattaataataattttta

SEQ ID NO: 48922 - DNA, 20 bp, synthetic construct
  source 1..20: mol_type = other DNA
gtacattaataataattttt

SEQ ID NO: 48923 - DNA, 20 bp, synthetic construct
  source 1..20: mol_type = other DNA
agtacattaataataatttt

SEQ ID NO: 48924 - DNA, 20 bp, synthetic construct
  source 1..20: mol_type = other DNA
aagtacattaataataattt

SEQ ID NO: 48925 - DNA, 20 bp, synthetic construct
  source 1..20: mol_type = other DNA
taagtacattaataataatt

SEQ ID NO: 48926 - DNA, 20 bp, synthetic construct
  source 1..20: mol_type = other DNA
ttaagtacattaataataat

SEQ ID NO: 48927 - DNA, 20 bp, synthetic construct
  source 1..20: mol_type = other DNA
cttaagtacattaataataa

SEQ ID NO: 48928 - DNA, 20 bp, synthetic construct
  source 1..20: mol_type = other DNA
tcttaagtacattaataata

SEQ ID NO: 48929 - DNA, 20 bp, synthetic construct
  source 1..20: mol_type = other DNA
gtcttaagtacattaataat

SEQ ID NO: 48930 - DNA, 20 bp, synthetic construct
  source 1..20: mol_type = other DNA
tgtcttaagtacattaataa

SEQ ID NO: 48931 - DNA, 20 bp, synthetic construct
  source 1..20: mol_type = other DNA
ttgtcttaagtacattaata

SEQ ID NO: 48932 - DNA, 20 bp, synthetic construct
  source 1..20: mol_type = other DNA
tttgtcttaagtacattaat

SEQ ID NO: 48933 - DNA, 20 bp, synthetic construct
  source 1..20: mol_type = other DNA
gtttgtcttaagtacattaa

SEQ ID NO: 48934 - DNA, 20 bp, synthetic construct
  source 1..20: mol_type = other DNA
ggtttgtcttaagtacatta

SEQ ID NO: 48935 - DNA, 20 bp, synthetic construct
  source 1..20: mol_type = other DNA
tggtttgtcttaagtacatt

SEQ ID NO: 48936 - DNA, 20 bp, synthetic construct
  source 1..20: mol_type = other DNA
atggtttgtcttaagtacat

SEQ ID NO: 48937 - DNA, 20 bp, synthetic construct
  source 1..20: mol_type = other DNA
tatggtttgtcttaagtaca

SEQ ID NO: 48938 - DNA, 20 bp, synthetic construct
  source 1..20: mol_type = other DNA
ctatggtttgtcttaagtac

SEQ ID NO: 48939 - DNA, 20 bp, synthetic construct
  source 1..20: mol_type = other DNA
tctatggtttgtcttaagta

SEQ ID NO: 48940 - DNA, 20 bp, synthetic construct
  source 1..20: mol_type = other DNA
ttctatggtttgtcttaagt

SEQ ID NO: 48941 - DNA, 20 bp, synthetic construct
  source 1..20: mol_type = other DNA
tttctatggtttgtcttaag

SEQ ID NO: 48942 - DNA, 20 bp, synthetic construct
  source 1..20: mol_type = other DNA
gtttctatggtttgtcttaa

SEQ ID NO: 48943 - DNA, 20 bp, synthetic construct
  source 1..20: mol_type = other DNA
tgtttctatggtttgtctta

SEQ ID NO: 48944 - DNA, 20 bp, synthetic construct
  source 1..20: mol_type = other DNA
ttgtttctatggtttgtctt

SEQ ID NO: 48945 - DNA, 20 bp, synthetic construct
  source 1..20: mol_type = other DNA
tttgtttctatggtttgtct

SEQ ID NO: 48946 - DNA, 20 bp, synthetic construct
  source 1..20: mol_type = other DNA
ttttgtttctatggtttgtc

SEQ ID NO: 48947 - DNA, 20 bp, synthetic construct
  source 1..20: mol_type = other DNA
tttttgtttctatggtttgt

SEQ ID NO: 48948 - DNA, 20 bp, synthetic construct
  source 1..20: mol_type = other DNA
ttttttgtttctatggtttg

SEQ ID NO: 48949 - DNA, 20 bp, synthetic construct
  source 1..20: mol_type = other DNA
gttttttgtttctatggttt

SEQ ID NO: 48950 - DNA, 20 bp, synthetic construct
  source 1..20: mol_type = other DNA
tgttttttgtttctatggtt

SEQ ID NO: 48951 - DNA, 20 bp, synthetic construct
  source 1..20: mol_type = other DNA
atgttttttgtttctatggt

SEQ ID NO: 48952 - DNA, 20 bp, synthetic construct
  source 1..20: mol_type = other DNA
aatgttttttgtttctatgg

SEQ ID NO: 48953 - DNA, 20 bp, synthetic construct
  source 1..20: mol_type = other DNA
aaatgttttttgtttctatg

SEQ ID NO: 48954 - DNA, 20 bp, synthetic construct
  source 1..20: mol_type = other DNA
taaatgttttttgtttctat

SEQ ID NO: 48955 - DNA, 20 bp, synthetic construct
  source 1..20: mol_type = other DNA
ctaaatgttttttgtttcta

SEQ ID NO: 48956 - DNA, 20 bp, synthetic construct
  source 1..20: mol_type = other DNA
tctaaatgttttttgtttct

SEQ ID NO: 48957 - DNA, 20 bp, synthetic construct
  source 1..20: mol_type = other DNA
atctaaatgttttttgtttc

SEQ ID NO: 48958 - DNA, 20 bp, synthetic construct
  source 1..20: mol_type = other DNA
tatctaaatgttttttgttt

SEQ ID NO: 48959 - DNA, 20 bp, synthetic construct
  source 1..20: mol_type = other DNA
atatctaaatgttttttgtt

SEQ ID NO: 48960 - DNA, 20 bp, synthetic construct
  source 1..20: mol_type = other DNA
catatctaaatgttttttgt

SEQ ID NO: 48961 - DNA, 20 bp, synthetic construct
  source 1..20: mol_type = other DNA
tcatatctaaatgttttttg

SEQ ID NO: 48962 - DNA, 20 bp, synthetic construct
  source 1..20: mol_type = other DNA
ctcatatctaaatgtttttt

SEQ ID NO: 48963 - DNA, 20 bp, synthetic construct
  source 1..20: mol_type = other DNA
cctcatatctaaatgttttt

SEQ ID NO: 48964 - DNA, 20 bp, synthetic construct
  source 1..20: mol_type = other DNA
tcctcatatctaaatgtttt

SEQ ID NO: 48965 - DNA, 20 bp, synthetic construct
  source 1..20: mol_type = other DNA
atcctcatatctaaatgttt

SEQ ID NO: 48966 - DNA, 20 bp, synthetic construct
  source 1..20: mol_type = other DNA
aatcctcatatctaaatgtt

SEQ ID NO: 48967 - DNA, 20 bp, synthetic construct
  source 1..20: mol_type = other DNA
aaatcctcatatctaaatgt

SEQ ID NO: 48968 - DNA, 20 bp, synthetic construct
  source 1..20: mol_type = other DNA
aaaatcctcatatctaaatg

SEQ ID NO: 48969 - DNA, 20 bp, synthetic construct
  source 1..20: mol_type = other DNA
aaaaatcctcatatctaaat

SEQ ID NO: 48970 - DNA, 20 bp, synthetic construct
  source 1..20: mol_type = other DNA
taaaaatcctcatatctaaa

SEQ ID NO: 48971 - DNA, 20 bp, synthetic construct
  source 1..20: mol_type = other DNA
ttaaaaatcctcatatctaa

SEQ ID NO: 48972 - DNA, 20 bp, synthetic construct
  source 1..20: mol_type = other DNA
tttaaaaatcctcatatcta

SEQ ID NO: 48973 - DNA, 20 bp, synthetic construct
  source 1..20: mol_type = other DNA
atttaaaaatcctcatatct

SEQ ID NO: 48974 - DNA, 20 bp, synthetic construct
  source 1..20: mol_type = other DNA
catttaaaaatcctcatatc

SEQ ID NO: 48975 - DNA, 20 bp, synthetic construct
  source 1..20: mol_type = other DNA
tcatttaaaaatcctcatat

SEQ ID NO: 48976 - DNA, 20 bp, synthetic construct
  source 1..20: mol_type = other DNA
atcatttaaaaatcctcata

SEQ ID NO: 48977 - DNA, 20 bp, synthetic construct
  source 1..20: mol_type = other DNA
catcatttaaaaatcctcat

SEQ ID NO: 48978 - DNA, 20 bp, synthetic construct
  source 1..20: mol_type = other DNA
ccatcatttaaaaatcctca

SEQ ID NO: 48979 - DNA, 20 bp, synthetic construct
  source 1..20: mol_type = other DNA
tccatcatttaaaaatcctc

SEQ ID NO: 48980 - DNA, 20 bp, synthetic construct
  source 1..20: mol_type = other DNA
ttccatcatttaaaaatcct

SEQ ID NO: 48981 - DNA, 20 bp, synthetic construct
  source 1..20: mol_type = other DNA
attccatcatttaaaaatcc

SEQ ID NO: 48982 - DNA, 20 bp, synthetic construct
  source 1..20: mol_type = other DNA
cattccatcatttaaaaatc

SEQ ID NO: 48983 - DNA, 20 bp, synthetic construct
  source 1..20: mol_type = other DNA
ccattccatcatttaaaaat

SEQ ID NO: 48984 - DNA, 20 bp, synthetic construct
  source 1..20: mol_type = other DNA
tccattccatcatttaaaaa

SEQ ID NO: 48985 - DNA, 20 bp, synthetic construct
  source 1..20: mol_type = other DNA
atccattccatcatttaaaa

SEQ ID NO: 48986 - DNA, 20 bp, synthetic construct
  source 1..20: mol_type = other DNA
tatccattccatcatttaaa

SEQ ID NO: 48987 - DNA, 20 bp, synthetic construct
  source 1..20: mol_type = other DNA
ttatccattccatcatttaa

SEQ ID NO: 48988 - DNA, 20 bp, synthetic construct
  source 1..20: mol_type = other DNA
attatccattccatcattta

SEQ ID NO: 48989 - DNA, 20 bp, synthetic construct
  source 1..20: mol_type = other DNA
tattatccattccatcattt

SEQ ID NO: 48990 - DNA, 20 bp, synthetic construct
  source 1..20: mol_type = other DNA
ctattatccattccatcatt

SEQ ID NO: 48991 - DNA, 20 bp, synthetic construct
  source 1..20: mol_type = other DNA
tctattatccattccatcat

SEQ ID NO: 48992 - DNA, 20 bp, synthetic construct
  source 1..20: mol_type = other DNA
atctattatccattccatca

SEQ ID NO: 48993 - DNA, 20 bp, synthetic construct
  source 1..20: mol_type = other DNA
gatctattatccattccatc

SEQ ID NO: 48994 - DNA, 20 bp, synthetic construct
  source 1..20: mol_type = other DNA
tgatctattatccattccat

SEQ ID NO: 48995 - DNA, 20 bp, synthetic construct
  source 1..20: mol_type = other DNA
atgatctattatccattcca

SEQ ID NO: 48996 - DNA, 20 bp, synthetic construct
  source 1..20: mol_type = other DNA
tatgatctattatccattcc

SEQ ID NO: 48997 - DNA, 20 bp, synthetic construct
  source 1..20: mol_type = other DNA
atatgatctattatccattc

SEQ ID NO: 48998 - DNA, 20 bp, synthetic construct
  source 1..20: mol_type = other DNA
catatgatctattatccatt

SEQ ID NO: 48999 - DNA, 20 bp, synthetic construct
  source 1..20: mol_type = other DNA
gcatatgatctattatccat

SEQ ID NO: 49000 - DNA, 20 bp, synthetic construct
  source 1..20: mol_type = other DNA
ggcatatgatctattatcca

SEQ ID NO: 49001 - DNA, 20 bp, synthetic construct
  source 1..20: mol_type = other DNA
aggcatatgatctattatcc

SEQ ID NO: 49002 - DNA, 20 bp, synthetic construct
  source 1..20: mol_type = other DNA
caggcatatgatctattatc

SEQ ID NO: 49003 - DNA, 20 bp, synthetic construct
  source 1..20: mol_type = other DNA
ccaggcatatgatctattat

SEQ ID NO: 49004 - DNA, 20 bp, synthetic construct
  source 1..20: mol_type = other DNA
cccaggcatatgatctatta

SEQ ID NO: 49005 - DNA, 20 bp, synthetic construct
  source 1..20: mol_type = other DNA
tcccaggcatatgatctatt

SEQ ID NO: 49006 - DNA, 20 bp, synthetic construct
  source 1..20: mol_type = other DNA
ttcccaggcatatgatctat

SEQ ID NO: 49007 - DNA, 20 bp, synthetic construct
  source 1..20: mol_type = other DNA
tttcccaggcatatgatcta

SEQ ID NO: 49008 - DNA, 20 bp, synthetic construct
  source 1..20: mol_type = other DNA
ttttcccaggcatatgatct

SEQ ID NO: 49009 - DNA, 20 bp, synthetic construct
  source 1..20: mol_type = other DNA
tttttcccaggcatatgatc

SEQ ID NO: 49010 - DNA, 20 bp, synthetic construct
  source 1..20: mol_type = other DNA
ctttttcccaggcatatgat

SEQ ID NO: 49011 - DNA, 20 bp, synthetic construct
  source 1..20: mol_type = other DNA
cctttttcccaggcatatga

SEQ ID NO: 49012 - DNA, 20 bp, synthetic construct
  source 1..20: mol_type = other DNA
ccctttttcccaggcatatg

SEQ ID NO: 49013 - DNA, 20 bp, synthetic construct
  source 1..20: mol_type = other DNA
accctttttcccaggcatat

SEQ ID NO: 49014 - DNA, 20 bp, synthetic construct
  source 1..20: mol_type = other DNA
taccctttttcccaggcata

SEQ ID NO: 49015 - DNA, 20 bp, synthetic construct
  source 1..20: mol_type = other DNA
ataccctttttcccaggcat

SEQ ID NO: 49016 - DNA, 20 bp, synthetic construct
  source 1..20: mol_type = other DNA
cataccctttttcccaggca

SEQ ID NO: 49017 - DNA, 20 bp, synthetic construct
  source 1..20: mol_type = other DNA
tcataccctttttcccaggc

SEQ ID NO: 49018 - DNA, 20 bp, synthetic construct
  source 1..20: mol_type = other DNA
atcataccctttttcccagg

SEQ ID NO: 49019 - DNA, 20 bp, synthetic construct
  source 1..20: mol_type = other DNA
aatcataccctttttcccag

SEQ ID NO: 49020 - DNA, 20 bp, synthetic construct
  source 1..20: mol_type = other DNA
gaatcataccctttttccca

SEQ ID NO: 49021 - DNA, 20 bp, synthetic construct
  source 1..20: mol_type = other DNA
agaatcataccctttttccc

SEQ ID NO: 49022 - DNA, 20 bp, synthetic construct
  source 1..20: mol_type = other DNA
gagaatcataccctttttcc

SEQ ID NO: 49023 - DNA, 20 bp, synthetic construct
  source 1..20: mol_type = other DNA
agagaatcataccctttttc

SEQ ID NO: 49024 - DNA, 20 bp, synthetic construct
  source 1..20: mol_type = other DNA
aagagaatcatacccttttt

SEQ ID NO: 49025 - DNA, 20 bp, synthetic construct
  source 1..20: mol_type = other DNA
caagagaatcataccctttt

SEQ ID NO: 49026 - DNA, 20 bp, synthetic construct
  source 1..20: mol_type = other DNA
tcaagagaatcatacccttt

SEQ ID NO: 49027 - DNA, 20 bp, synthetic construct
  source 1..20: mol_type = other DNA
ctcaagagaatcataccctt

SEQ ID NO: 49028 - DNA, 20 bp, synthetic construct
  source 1..20: mol_type = other DNA
tctcaagagaatcataccct

SEQ ID NO: 49029 - DNA, 20 bp, synthetic construct
  source 1..20: mol_type = other DNA
atctcaagagaatcataccc

SEQ ID NO: 49030 - DNA, 20 bp, synthetic construct
  source 1..20: mol_type = other DNA
aatctcaagagaatcatacc

SEQ ID NO: 49031 - DNA, 20 bp, synthetic construct
  source 1..20: mol_type = other DNA
taatctcaagagaatcatac

SEQ ID NO: 49032 - DNA, 20 bp, synthetic construct
  source 1..20: mol_type = other DNA
ataatctcaagagaatcata

SEQ ID NO: 49033 - DNA, 20 bp, synthetic construct
  source 1..20: mol_type = other DNA
aataatctcaagagaatcat

SEQ ID NO: 49034 - DNA, 20 bp, synthetic construct
  source 1..20: mol_type = other DNA
aaataatctcaagagaatca

SEQ ID NO: 49035 - DNA, 20 bp, synthetic construct
  source 1..20: mol_type = other DNA
aaaataatctcaagagaatc

SEQ ID NO: 49036 - DNA, 20 bp, synthetic construct
  source 1..20: mol_type = other DNA
aaaaataatctcaagagaat

SEQ ID NO: 49037 - DNA, 20 bp, synthetic construct
  source 1..20: mol_type = other DNA
caaaaataatctcaagagaa

SEQ ID NO: 49038 - DNA, 20 bp, synthetic construct
  source 1..20: mol_type = other DNA
acaaaaataatctcaagaga

SEQ ID NO: 49039 - DNA, 20 bp, synthetic construct
  source 1..20: mol_type = other DNA
gacaaaaataatctcaagag

SEQ ID NO: 49040 - DNA, 20 bp, synthetic construct
  source 1..20: mol_type = other DNA
tgacaaaaataatctcaaga

SEQ ID NO: 49041 - DNA, 20 bp, synthetic construct
  source 1..20: mol_type = other DNA
ttgacaaaaataatctcaag

SEQ ID NO: 49042 - DNA, 20 bp, synthetic construct
  source 1..20: mol_type = other DNA
tttgacaaaaataatctcaa

SEQ ID NO: 49043 - DNA, 20 bp, synthetic construct
  source 1..20: mol_type = other DNA
ctttgacaaaaataatctca

SEQ ID NO: 49044 - DNA, 20 bp, synthetic construct
  source 1..20: mol_type = other DNA
cctttgacaaaaataatctc

SEQ ID NO: 49045 - DNA, 20 bp, synthetic construct
  source 1..20: mol_type = other DNA
gcctttgacaaaaataatct

SEQ ID NO: 49046 - DNA, 20 bp, synthetic construct
  source 1..20: mol_type = other DNA
tgcctttgacaaaaataatc

SEQ ID NO: 49047 - DNA, 20 bp, synthetic construct
  source 1..20: mol_type = other DNA
atgcctttgacaaaaataat

SEQ ID NO: 49048 - DNA, 20 bp, synthetic construct
  source 1..20: mol_type = other DNA
tatgcctttgacaaaaataa

SEQ ID NO: 49049 - DNA, 20 bp, synthetic construct
  source 1..20: mol_type = other DNA
atatgcctttgacaaaaata

SEQ ID NO: 49050 - DNA, 20 bp, synthetic construct
  source 1..20: mol_type = other DNA
tatatgcctttgacaaaaat

SEQ ID NO: 49051 - DNA, 20 bp, synthetic construct
  source 1..20: mol_type = other DNA
ttatatgcctttgacaaaaa

SEQ ID NO: 49052 - DNA, 20 bp, synthetic construct
  source 1..20: mol_type = other DNA
cttatatgcctttgacaaaa

SEQ ID NO: 49053 - DNA, 20 bp, synthetic construct
  source 1..20: mol_type = other DNA
tcttatatgcctttgacaaa

SEQ ID NO: 49054 - DNA, 20 bp, synthetic construct
  source 1..20: mol_type = other DNA
ttcttatatgcctttgacaa

SEQ ID NO: 49055 - DNA, 20 bp, synthetic construct
  source 1..20: mol_type = other DNA
gttcttatatgcctttgaca

SEQ ID NO: 49056 - DNA, 20 bp, synthetic construct
  source 1..20: mol_type = other DNA
agttcttatatgcctttgac

SEQ ID NO: 49057 - DNA, 20 bp, synthetic construct
  source 1..20: mol_type = other DNA
cagttcttatatgcctttga

SEQ ID NO: 49058 - DNA, 20 bp, synthetic construct
  source 1..20: mol_type = other DNA
ccagttcttatatgcctttg

SEQ ID NO: 49059 - DNA, 20 bp, synthetic construct
  source 1..20: mol_type = other DNA
accagttcttatatgccttt

SEQ ID NO: 49060 - DNA, 20 bp, synthetic construct
  source 1..20: mol_type = other DNA
taccagttcttatatgcctt

SEQ ID NO: 49061 - DNA, 20 bp, synthetic construct
  source 1..20: mol_type = other DNA
gtaccagttcttatatgcct

SEQ ID NO: 49062 - DNA, 20 bp, synthetic construct
  source 1..20: mol_type = other DNA
ggtaccagttcttatatgcc

SEQ ID NO: 49063 - DNA, 20 bp, synthetic construct
  source 1..20: mol_type = other DNA
aggtaccagttcttatatgc

SEQ ID NO: 49064 - DNA, 20 bp, synthetic construct
  source 1..20: mol_type = other DNA
aaggtaccagttcttatatg

SEQ ID NO: 49065 - DNA, 20 bp, synthetic construct
  source 1..20: mol_type = other DNA
caaggtaccagttcttatat

SEQ ID NO: 49066 - DNA, 20 bp, synthetic construct
  source 1..20: mol_type = other DNA
tcaaggtaccagttcttata

SEQ ID NO: 49067 - DNA, 20 bp, synthetic construct
  source 1..20: mol_type = other DNA
atcaaggtaccagttcttat

SEQ ID NO: 49068 - DNA, 20 bp, synthetic construct
  source 1..20: mol_type = other DNA
catcaaggtaccagttctta

SEQ ID NO: 49069 - DNA, 20 bp, synthetic construct
  source 1..20: mol_type = other DNA
tcatcaaggtaccagttctt

SEQ ID NO: 49070 - DNA, 20 bp, synthetic construct
  source 1..20: mol_type = other DNA
ctcatcaaggtaccagttct

SEQ ID NO: 49071 - DNA, 20 bp, synthetic construct
  source 1..20: mol_type = other DNA
gctcatcaaggtaccagttc

SEQ ID NO: 49072 - DNA, 20 bp, synthetic construct
  source 1..20: mol_type = other DNA
agctcatcaaggtaccagtt

SEQ ID NO: 49073 - DNA, 20 bp, synthetic construct
  source 1..20: mol_type = other DNA
tagctcatcaaggtaccagt

SEQ ID NO: 49074 - DNA, 20 bp, synthetic construct
  source 1..20: mol_type = other DNA
ttagctcatcaaggtaccag

SEQ ID NO: 49075 - DNA, 20 bp, synthetic construct
  source 1..20: mol_type = other DNA
tttagctcatcaaggtacca

SEQ ID NO: 49076 - DNA, 20 bp, synthetic construct
  source 1..20: mol_type = other DNA
ctttagctcatcaaggtacc

SEQ ID NO: 49077 - DNA, 20 bp, synthetic construct
  source 1..20: mol_type = other DNA
tctttagctcatcaaggtac

SEQ ID NO: 49078 - DNA, 20 bp, synthetic construct
  source 1..20: mol_type = other DNA
ttctttagctcatcaaggta

SEQ ID NO: 49079 - DNA, 20 bp, synthetic construct
  source 1..20: mol_type = other DNA
attctttagctcatcaaggt

SEQ ID NO: 49080 - DNA, 20 bp, synthetic construct
  source 1..20: mol_type = other DNA
aattctttagctcatcaagg

SEQ ID NO: 49081 - DNA, 20 bp, synthetic construct
  source 1..20: mol_type = other DNA
gaattctttagctcatcaag

SEQ ID NO: 49082 - DNA, 20 bp, synthetic construct
  source 1..20: mol_type = other DNA
ggaattctttagctcatcaa

SEQ ID NO: 49083 - DNA, 20 bp, synthetic construct
  source 1..20: mol_type = other DNA
aggaattctttagctcatca

SEQ ID NO: 49084 - DNA, 20 bp, synthetic construct
  source 1..20: mol_type = other DNA
taggaattctttagctcatc

SEQ ID NO: 49085 - DNA, 20 bp, synthetic construct
  source 1..20: mol_type = other DNA
ttaggaattctttagctcat

SEQ ID NO: 49086 - DNA, 20 bp, synthetic construct
  source 1..20: mol_type = other DNA
gttaggaattctttagctca

SEQ ID NO: 49087 - DNA, 20 bp, synthetic construct
  source 1..20: mol_type = other DNA
tgttaggaattctttagctc

SEQ ID NO: 49088 - DNA, 20 bp, synthetic construct
  source 1..20: mol_type = other DNA
ttgttaggaattctttagct

SEQ ID NO: 49089 - DNA, 20 bp, synthetic construct
  source 1..20: mol_type = other DNA
tttgttaggaattctttagc

SEQ ID NO: 49090 - DNA, 20 bp, synthetic construct
  source 1..20: mol_type = other DNA
atttgttaggaattctttag

SEQ ID NO: 49091 - DNA, 20 bp, synthetic construct
  source 1..20: mol_type = other DNA
aatttgttaggaattcttta

SEQ ID NO: 49092 - DNA, 20 bp, synthetic construct
  source 1..20: mol_type = other DNA
aaatttgttaggaattcttt

SEQ ID NO: 49093 - DNA, 20 bp, synthetic construct
  source 1..20: mol_type = other DNA
aaaatttgttaggaattctt

SEQ ID NO: 49094 - DNA, 20 bp, synthetic construct
  source 1..20: mol_type = other DNA
taaaatttgttaggaattct

SEQ ID NO: 49095 - DNA, 20 bp, synthetic construct
  source 1..20: mol_type = other DNA
ataaaatttgttaggaattc

SEQ ID NO: 49096 - DNA, 20 bp, synthetic construct
  source 1..20: mol_type = other DNA
aataaaatttgttaggaatt

SEQ ID NO: 49097 - DNA, 20 bp, synthetic construct
  source 1..20: mol_type = other DNA
aaataaaatttgttaggaat

SEQ ID NO: 49098 - DNA, 20 bp, synthetic construct
  source 1..20: mol_type = other DNA
aaaataaaatttgttaggaa

SEQ ID NO: 49099 - DNA, 20 bp, synthetic construct
  source 1..20: mol_type = other DNA
caaaataaaatttgttagga

SEQ ID NO: 49100 - DNA, 20 bp, synthetic construct
  source 1..20: mol_type = other DNA
acaaaataaaatttgttagg

SEQ ID NO: 49101 - DNA, 20 bp, synthetic construct
  source 1..20: mol_type = other DNA
tacaaaataaaatttgttag

SEQ ID NO: 49102 - DNA, 20 bp, synthetic construct
  source 1..20: mol_type = other DNA
ttacaaaataaaatttgtta

SEQ ID NO: 49103 - DNA, 20 bp, synthetic construct
  source 1..20: mol_type = other DNA
tttacaaaataaaatttgtt

SEQ ID NO: 49104 - DNA, 20 bp, synthetic construct
  source 1..20: mol_type = other DNA
ctttacaaaataaaatttgt

SEQ ID NO: 49105 - DNA, 20 bp, synthetic construct
  source 1..20: mol_type = other DNA
cctttacaaaataaaatttg

SEQ ID NO: 49106 - DNA, 20 bp, synthetic construct
  source 1..20: mol_type = other DNA
acctttacaaaataaaattt

SEQ ID NO: 49107 - DNA, 20 bp, synthetic construct
  source 1..20: mol_type = other DNA
aacctttacaaaataaaatt

SEQ ID NO: 49108 - DNA, 20 bp, synthetic construct
  source 1..20: mol_type = other DNA
aaacctttacaaaataaaat

SEQ ID NO: 49109 - DNA, 20 bp, synthetic construct
  source 1..20: mol_type = other DNA
caaacctttacaaaataaaa

SEQ ID NO: 49110 - DNA, 20 bp, synthetic construct
  source 1..20: mol_type = other DNA
ccaaacctttacaaaataaa

SEQ ID NO: 49111 - DNA, 20 bp, synthetic construct
  source 1..20: mol_type = other DNA
tccaaacctttacaaaataa

SEQ ID NO: 49112 - DNA, 20 bp, synthetic construct
  source 1..20: mol_type = other DNA
ctccaaacctttacaaaata

SEQ ID NO: 49113 - DNA, 20 bp, synthetic construct
  source 1..20: mol_type = other DNA
actccaaacctttacaaaat

SEQ ID NO: 49114 - DNA, 20 bp, synthetic construct
  source 1..20: mol_type = other DNA
tactccaaacctttacaaaa

SEQ ID NO: 49115 - DNA, 20 bp, synthetic construct
  source 1..20: mol_type = other DNA
gtactccaaacctttacaaa

SEQ ID NO: 49116 - DNA, 20 bp, synthetic construct
  source 1..20: mol_type = other DNA
agtactccaaacctttacaa

SEQ ID NO: 49117 - DNA, 20 bp, synthetic construct
  source 1..20: mol_type = other DNA
aagtactccaaacctttaca

SEQ ID NO: 49118 - DNA, 20 bp, synthetic construct
  source 1..20: mol_type = other DNA
taagtactccaaacctttac

SEQ ID NO: 49119 - DNA, 20 bp, synthetic construct
  source 1..20: mol_type = other DNA
gtaagtactccaaaccttta

SEQ ID NO: 49120 - DNA, 20 bp, synthetic construct
  source 1..20: mol_type = other DNA
agtaagtactccaaaccttt

SEQ ID NO: 49121 - DNA, 20 bp, synthetic construct
  source 1..20: mol_type = other DNA
aagtaagtactccaaacctt

SEQ ID NO: 49122 - DNA, 20 bp, synthetic construct
  source 1..20: mol_type = other DNA
caagtaagtactccaaacct

SEQ ID NO: 49123 - DNA, 20 bp, synthetic construct
  source 1..20: mol_type = other DNA
acaagtaagtactccaaacc

SEQ ID NO: 49124 - DNA, 20 bp, synthetic construct
  source 1..20: mol_type = other DNA
cacaagtaagtactccaaac

SEQ ID NO: 49125 - DNA, 20 bp, synthetic construct
  source 1..20: mol_type = other DNA
acacaagtaagtactccaaa

SEQ ID NO: 49126 - DNA, 20 bp, synthetic construct
  source 1..20: mol_type = other DNA
aacacaagtaagtactccaa

SEQ ID NO: 49127 - DNA, 20 bp, synthetic construct
  source 1..20: mol_type = other DNA
aaacacaagtaagtactcca

SEQ ID NO: 49128 - DNA, 20 bp, synthetic construct
  source 1..20: mol_type = other DNA
aaaacacaagtaagtactcc

SEQ ID NO: 49129 - DNA, 20 bp, synthetic construct
  source 1..20: mol_type = other DNA
aaaaacacaagtaagtactc

SEQ ID NO: 49130 - DNA, 20 bp, synthetic construct
  source 1..20: mol_type = other DNA
gaaaaacacaagtaagtact

SEQ ID NO: 49131 - DNA, 20 bp, synthetic construct
  source 1..20: mol_type = other DNA
tgaaaaacacaagtaagtac

SEQ ID NO: 49132 - DNA, 20 bp, synthetic construct
  source 1..20: mol_type = other DNA
atgaaaaacacaagtaagta

SEQ ID NO: 49133 - DNA, 20 bp, synthetic construct
  source 1..20: mol_type = other DNA
aatgaaaaacacaagtaagt

SEQ ID NO: 49134 - DNA, 20 bp, synthetic construct
  source 1..20: mol_type = other DNA
aaatgaaaaacacaagtaag

SEQ ID NO: 49135 - DNA, 20 bp, synthetic construct
  source 1..20: mol_type = other DNA
aaaatgaaaaacacaagtaa

SEQ ID NO: 49136 - DNA, 20 bp, synthetic construct
  source 1..20: mol_type = other DNA
taaaatgaaaaacacaagta

SEQ ID NO: 49137 - DNA, 20 bp, synthetic construct
  source 1..20: mol_type = other DNA
ctaaaatgaaaaacacaagt

SEQ ID NO: 49138 - DNA, 20 bp, synthetic construct
  source 1..20: mol_type = other DNA
actaaaatgaaaaacacaag

SEQ ID NO: 49139 - DNA, 20 bp, synthetic construct
  source 1..20: mol_type = other DNA
cactaaaatgaaaaacacaa

SEQ ID NO: 49140 - DNA, 20 bp, synthetic construct
  source 1..20: mol_type = other DNA
acactaaaatgaaaaacaca

SEQ ID NO: 49141 - DNA, 20 bp, synthetic construct
  source 1..20: mol_type = other DNA
cacactaaaatgaaaaacac

SEQ ID NO: 49142 - DNA, 20 bp, synthetic construct
  source 1..20: mol_type = other DNA
tcacactaaaatgaaaaaca

SEQ ID NO: 49143 - DNA, 20 bp, synthetic construct
  source 1..20: mol_type = other DNA
atcacactaaaatgaaaaac

SEQ ID NO: 49144 - DNA, 20 bp, synthetic construct
  source 1..20: mol_type = other DNA
aatcacactaaaatgaaaaa

SEQ ID NO: 49145 - DNA, 20 bp, synthetic construct
  source 1..20: mol_type = other DNA
aaatcacactaaaatgaaaa

SEQ ID NO: 49146 - DNA, 20 bp, synthetic construct
  source 1..20: mol_type = other DNA
caaatcacactaaaatgaaa

SEQ ID NO: 49147 - DNA, 20 bp, synthetic construct
  source 1..20: mol_type = other DNA
ccaaatcacactaaaatgaa

SEQ ID NO: 49148 - DNA, 20 bp, synthetic construct
  source 1..20: mol_type = other DNA
accaaatcacactaaaatga

SEQ ID NO: 49149 - DNA, 20 bp, synthetic construct
  source 1..20: mol_type = other DNA
taccaaatcacactaaaatg

SEQ ID NO: 49150 - DNA, 20 bp, synthetic construct
  source 1..20: mol_type = other DNA
gtaccaaatcacactaaaat

SEQ ID NO: 49151 - DNA, 20 bp, synthetic construct
  source 1..20: mol_type = other DNA
agtaccaaatcacactaaaa

SEQ ID NO: 49152 - DNA, 20 bp, synthetic construct
  source 1..20: mol_type = other DNA
aagtaccaaatcacactaaa

SEQ ID NO: 49153 - DNA, 20 bp, synthetic construct
  source 1..20: mol_type = other DNA
caagtaccaaatcacactaa

SEQ ID NO: 49154 - DNA, 20 bp, synthetic construct
  source 1..20: mol_type = other DNA
tcaagtaccaaatcacacta

SEQ ID NO: 49155 - DNA, 20 bp, synthetic construct
  source 1..20: mol_type = other DNA
atcaagtaccaaatcacact

SEQ ID NO: 49156 - DNA, 20 bp, synthetic construct
  source 1..20: mol_type = other DNA
catcaagtaccaaatcacac

SEQ ID NO: 49157 - DNA, 20 bp, synthetic construct
  source 1..20: mol_type = other DNA
gcatcaagtaccaaatcaca

SEQ ID NO: 49158 - DNA, 20 bp, synthetic construct
  source 1..20: mol_type = other DNA
ggcatcaagtaccaaatcac

SEQ ID NO: 49159 - DNA, 20 bp, synthetic construct
  source 1..20: mol_type = other DNA
cggcatcaagtaccaaatca

SEQ ID NO: 49160 - DNA, 20 bp, synthetic construct
  source 1..20: mol_type = other DNA
gcggcatcaagtaccaaatc

SEQ ID NO: 49161 - DNA, 20 bp, synthetic construct
  source 1..20: mol_type = other DNA
tgcggcatcaagtaccaaat

SEQ ID NO: 49162 - DNA, 20 bp, synthetic construct
  source 1..20: mol_type = other DNA
gtgcggcatcaagtaccaaa

SEQ ID NO: 49163 - DNA, 20 bp, synthetic construct
  source 1..20: mol_type = other DNA
tgtgcggcatcaagtaccaa

SEQ ID NO: 49164 - DNA, 20 bp, synthetic construct
  source 1..20: mol_type = other DNA
atgtgcggcatcaagtacca

SEQ ID NO: 49165 - DNA, 20 bp, synthetic construct
  source 1..20: mol_type = other DNA
catgtgcggcatcaagtacc

SEQ ID NO: 49166 - DNA, 20 bp, synthetic construct
  source 1..20: mol_type = other DNA
tcatgtgcggcatcaagtac

SEQ ID NO: 49167 - DNA, 20 bp, synthetic construct
  source 1..20: mol_type = other DNA
ctcatgtgcggcatcaagta

SEQ ID NO: 49168 - DNA, 20 bp, synthetic construct
  source 1..20: mol_type = other DNA
tctcatgtgcggcatcaagt

SEQ ID NO: 49169 - DNA, 20 bp, synthetic construct
  source 1..20: mol_type = other DNA
ttctcatgtgcggcatcaag

SEQ ID NO: 49170 - DNA, 20 bp, synthetic construct
  source 1..20: mol_type = other DNA
tttctcatgtgcggcatcaa

SEQ ID NO: 49171 - DNA, 20 bp, synthetic construct
  source 1..20: mol_type = other DNA
ttttctcatgtgcggcatca

SEQ ID NO: 49172 - DNA, 20 bp, synthetic construct
  source 1..20: mol_type = other DNA
cttttctcatgtgcggcatc

SEQ ID NO: 49173 - DNA, 20 bp, synthetic construct
  source 1..20: mol_type = other DNA
acttttctcatgtgcggcat

SEQ ID NO: 49174 - DNA, 20 bp, synthetic construct
  source 1..20: mol_type = other DNA
tacttttctcatgtgcggca

SEQ ID NO: 49175 - DNA, 20 bp, synthetic construct
  source 1..20: mol_type = other DNA
gtacttttctcatgtgcggc

SEQ ID NO: 49176 - DNA, 20 bp, synthetic construct
  source 1..20: mol_type = other DNA
tgtacttttctcatgtgcgg

SEQ ID NO: 49177 - DNA, 20 bp, synthetic construct
  source 1..20: mol_type = other DNA
ctgtacttttctcatgtgcg

SEQ ID NO: 49178 - DNA, 20 bp, synthetic construct
  source 1..20: mol_type = other DNA
tctgtacttttctcatgtgc

SEQ ID NO: 49179 - DNA, 20 bp, synthetic construct
  source 1..20: mol_type = other DNA
ttctgtacttttctcatgtg

SEQ ID NO: 49180 - DNA, 20 bp, synthetic construct
  source 1..20: mol_type = other DNA
attctgtacttttctcatgt

SEQ ID NO: 49181 - DNA, 20 bp, synthetic construct
  source 1..20: mol_type = other DNA
gattctgtacttttctcatg

SEQ ID NO: 49182 - DNA, 20 bp, synthetic construct
  source 1..20: mol_type = other DNA
ggattctgtacttttctcat

SEQ ID NO: 49183 - DNA, 20 bp, synthetic construct
  source 1..20: mol_type = other DNA
tggattctgtacttttctca

SEQ ID NO: 49184 - DNA, 20 bp, synthetic construct
  source 1..20: mol_type = other DNA
ctggattctgtacttttctc

SEQ ID NO: 49185 - DNA, 20 bp, synthetic construct
  source 1..20: mol_type = other DNA
actggattctgtacttttct

SEQ ID NO: 49186 - DNA, 20 bp, synthetic construct
  source 1..20: mol_type = other DNA
aactggattctgtacttttc

SEQ ID NO: 49187 - DNA, 20 bp, synthetic construct
  source 1..20: mol_type = other DNA
gaactggattctgtactttt

SEQ ID NO: 49188 - DNA, 20 bp, synthetic construct
  source 1..20: mol_type = other DNA
cgaactggattctgtacttt

SEQ ID NO: 49189 - DNA, 20 bp, synthetic construct
  source 1..20: mol_type = other DNA
ccgaactggattctgtactt

SEQ ID NO: 49190 - DNA, 20 bp, synthetic construct
  source 1..20: mol_type = other DNA
cccgaactggattctgtact

SEQ ID NO: 49191 - DNA, 20 bp, synthetic construct
  source 1..20: mol_type = other DNA
ccccgaactggattctgtac

SEQ ID NO: 49192 - DNA, 20 bp, synthetic construct
  source 1..20: mol_type = other DNA
gccccgaactggattctgta

SEQ ID NO: 49193 - DNA, 20 bp, synthetic construct
  source 1..20: mol_type = other DNA
ggccccgaactggattctgt

SEQ ID NO: 49194 - DNA, 20 bp, synthetic construct
  source 1..20: mol_type = other DNA
cggccccgaactggattctg

SEQ ID NO: 49195 - DNA, 20 bp, synthetic construct
  source 1..20: mol_type = other DNA
tcggccccgaactggattct

SEQ ID NO: 49196 - DNA, 20 bp, synthetic construct
  source 1..20: mol_type = other DNA
ttcggccccgaactggattc

SEQ ID NO: 49197 - DNA, 20 bp, synthetic construct
  source 1..20: mol_type = other DNA
tttcggccccgaactggatt

SEQ ID NO: 49198 - DNA, 20 bp, synthetic construct
  source 1..20: mol_type = other DNA
gtttcggccccgaactggat

SEQ ID NO: 49199 - DNA, 20 bp, synthetic construct
  source 1..20: mol_type = other DNA
cgtttcggccccgaactgga

SEQ ID NO: 49200 - DNA, 20 bp, synthetic construct
  source 1..20: mol_type = other DNA
acgtttcggccccgaactgg

SEQ ID NO: 49201 - DNA, 20 bp, synthetic construct
  source 1..20: mol_type = other DNA
cacgtttcggccccgaactg

SEQ ID NO: 49202 - DNA, 20 bp, synthetic construct
  source 1..20: mol_type = other DNA
tcacgtttcggccccgaact

SEQ ID NO: 49203 - DNA, 20 bp, synthetic construct
  source 1..20: mol_type = other DNA
ttcacgtttcggccccgaac

SEQ ID NO: 49204 - DNA, 20 bp, synthetic construct
  source 1..20: mol_type = other DNA
cttcacgtttcggccccgaa

SEQ ID NO: 49205 - DNA, 20 bp, synthetic construct
  source 1..20: mol_type = other DNA
tcttcacgtttcggccccga

SEQ ID NO: 49206 - DNA, 20 bp, synthetic construct
  source 1..20: mol_type = other DNA
ttcttcacgtttcggccccg

SEQ ID NO: 49207 - DNA, 20 bp, synthetic construct
  source 1..20: mol_type = other DNA
tttcttcacgtttcggcccc

SEQ ID NO: 49208 - DNA, 20 bp, synthetic construct
  source 1..20: mol_type = other DNA
atttcttcacgtttcggccc

SEQ ID NO: 49209 - DNA, 20 bp, synthetic construct
  source 1..20: mol_type = other DNA
tatttcttcacgtttcggcc

SEQ ID NO: 49210 - DNA, 20 bp, synthetic construct
  source 1..20: mol_type = other DNA
ttatttcttcacgtttcggc

SEQ ID NO: 49211 - DNA, 20 bp, synthetic construct
  source 1..20: mol_type = other DNA
attatttcttcacgtttcgg

SEQ ID NO: 49212 - DNA, 20 bp, synthetic construct
  source 1..20: mol_type = other DNA
cattatttcttcacgtttcg

SEQ ID NO: 49213 - DNA, 20 bp, synthetic construct
  source 1..20: mol_type = other DNA
ccattatttcttcacgtttc

SEQ ID NO: 49214 - DNA, 20 bp, synthetic construct
  source 1..20: mol_type = other DNA
tccattatttcttcacgttt

SEQ ID NO: 49215 - DNA, 20 bp, synthetic construct
  source 1..20: mol_type = other DNA
ctccattatttcttcacgtt

SEQ ID NO: 49216 - DNA, 20 bp, synthetic construct
  source 1..20: mol_type = other DNA
tctccattatttcttcacgt

SEQ ID NO: 49217 - DNA, 20 bp, synthetic construct
  source 1..20: mol_type = other DNA
ctctccattatttcttcacg

SEQ ID NO: 49218 - DNA, 20 bp, synthetic construct
  source 1..20: mol_type = other DNA
actctccattatttcttcac

SEQ ID NO: 49219 - DNA, 20 bp, synthetic construct
  source 1..20: mol_type = other DNA
tactctccattatttcttca

SEQ ID NO: 49220 - DNA, 20 bp, synthetic construct
  source 1..20: mol_type = other DNA
atactctccattatttcttc

SEQ ID NO: 49221 - DNA, 20 bp, synthetic construct
  source 1..20: mol_type = other DNA
aatactctccattatttctt

SEQ ID NO: 49222 - DNA, 20 bp, synthetic construct
  source 1..20: mol_type = other DNA
aaatactctccattatttct

SEQ ID NO: 49223 - DNA, 20 bp, synthetic construct
  source 1..20: mol_type = other DNA
aaaatactctccattatttc

SEQ ID NO: 49224 - DNA, 20 bp, synthetic construct
  source 1..20: mol_type = other DNA
caaaatactctccattattt

SEQ ID NO: 49225 - DNA, 20 bp, synthetic construct
  source 1..20: mol_type = other DNA
acaaaatactctccattatt

SEQ ID NO: 49226 - DNA, 20 bp, synthetic construct
  source 1..20: mol_type = other DNA
aacaaaatactctccattat

SEQ ID NO: 49227 - DNA, 20 bp, synthetic construct
  source 1..20: mol_type = other DNA
gaacaaaatactctccatta

SEQ ID NO: 49228 - DNA, 20 bp, synthetic construct
  source 1..20: mol_type = other DNA
tgaacaaaatactctccatt

SEQ ID NO: 49229 - DNA, 20 bp, synthetic construct
  source 1..20: mol_type = other DNA
ttgaacaaaatactctccat

SEQ ID NO: 49230 - DNA, 20 bp, synthetic construct
  source 1..20: mol_type = other DNA
tttgaacaaaatactctcca

SEQ ID NO: 49231 - DNA, 20 bp, synthetic construct
  source 1..20: mol_type = other DNA
atttgaacaaaatactctcc

SEQ ID NO: 49232 - DNA, 20 bp, synthetic construct
  source 1..20: mol_type = other DNA
catttgaacaaaatactctc

SEQ ID NO: 49233 - DNA, 20 bp, synthetic construct
  source 1..20: mol_type = other DNA
acatttgaacaaaatactct

SEQ ID NO: 49234 - DNA, 20 bp, synthetic construct
  source 1..20: mol_type = other DNA
aacatttgaacaaaatactc

SEQ ID NO: 49235 - DNA, 20 bp, synthetic construct
  source 1..20: mol_type = other DNA
gaacatttgaacaaaatact

SEQ ID NO: 49236 - DNA, 20 bp, synthetic construct
  source 1..20: mol_type = other DNA
tgaacatttgaacaaaatac

SEQ ID NO: 49237 - DNA, 20 bp, synthetic construct
  source 1..20: mol_type = other DNA
ctgaacatttgaacaaaata

SEQ ID NO: 49238 - DNA, 20 bp, synthetic construct
  source 1..20: mol_type = other DNA
tctgaacatttgaacaaaat

SEQ ID NO: 49239 - DNA, 20 bp, synthetic construct
  source 1..20: mol_type = other DNA
gtctgaacatttgaacaaaa

SEQ ID NO: 49240 - DNA, 20 bp, synthetic construct
  source 1..20: mol_type = other DNA
agtctgaacatttgaacaaa

SEQ ID NO: 49241 - DNA, 20 bp, synthetic construct
  source 1..20: mol_type = other DNA
aagtctgaacatttgaacaa

SEQ ID NO: 49242 - DNA, 20 bp, synthetic construct
  source 1..20: mol_type = other DNA
aaagtctgaacatttgaaca

SEQ ID NO: 49243 - DNA, 20 bp, synthetic construct
  source 1..20: mol_type = other DNA
caaagtctgaacatttgaac

SEQ ID NO: 49244 - DNA, 20 bp, synthetic construct
  source 1..20: mol_type = other DNA
acaaagtctgaacatttgaa

SEQ ID NO: 49245 - DNA, 20 bp, synthetic construct
  source 1..20: mol_type = other DNA
aacaaagtctgaacatttga

SEQ ID NO: 49246 - DNA, 20 bp, synthetic construct
  source 1..20: mol_type = other DNA
caacaaagtctgaacatttg

SEQ ID NO: 49247 - DNA, 20 bp, synthetic construct
  source 1..20: mol_type = other DNA
acaacaaagtctgaacattt

SEQ ID NO: 49248 - DNA, 20 bp, synthetic construct
  source 1..20: mol_type = other DNA
cacaacaaagtctgaacatt

SEQ ID NO: 49249 - DNA, 20 bp, synthetic construct
  source 1..20: mol_type = other DNA
ccacaacaaagtctgaacat

SEQ ID NO: 49250 - DNA, 20 bp, synthetic construct
  source 1..20: mol_type = other DNA
accacaacaaagtctgaaca

SEQ ID NO: 49251 - DNA, 20 bp, synthetic construct
  source 1..20: mol_type = other DNA
taccacaacaaagtctgaac

SEQ ID NO: 49252 - DNA, 20 bp, synthetic construct
  source 1..20: mol_type = other DNA
gtaccacaacaaagtctgaa

SEQ ID NO: 49253 - DNA, 20 bp, synthetic construct
  source 1..20: mol_type = other DNA
tgtaccacaacaaagtctga

SEQ ID NO: 49254 - DNA, 20 bp, synthetic construct
  source 1..20: mol_type = other DNA
ctgtaccacaacaaagtctg

SEQ ID NO: 49255 - DNA, 20 bp, synthetic construct
  source 1..20: mol_type = other DNA
actgtaccacaacaaagtct

SEQ ID NO: 49256 - DNA, 20 bp, synthetic construct
  source 1..20: mol_type = other DNA
aactgtaccacaacaaagtc

SEQ ID NO: 49257 - DNA, 20 bp, synthetic construct
  source 1..20: mol_type = other DNA
aaactgtaccacaacaaagt

SEQ ID NO: 49258 - DNA, 20 bp, synthetic construct
  source 1..20: mol_type = other DNA
taaactgtaccacaacaaag

SEQ ID NO: 49259 - DNA, 20 bp, synthetic construct
  source 1..20: mol_type = other DNA
ttaaactgtaccacaacaaa

SEQ ID NO: 49260 - DNA, 20 bp, synthetic construct
  source 1..20: mol_type = other DNA
tttaaactgtaccacaacaa

SEQ ID NO: 49261 - DNA, 20 bp, synthetic construct
  source 1..20: mol_type = other DNA
ctttaaactgtaccacaaca

SEQ ID NO: 49262 - DNA, 20 bp, synthetic construct
  source 1..20: mol_type = other DNA
tctttaaactgtaccacaac

SEQ ID NO: 49263 - DNA, 20 bp, synthetic construct
  source 1..20: mol_type = other DNA
atctttaaactgtaccacaa

SEQ ID NO: 49264 - DNA, 20 bp, synthetic construct
  source 1..20: mol_type = other DNA
tatctttaaactgtaccaca

SEQ ID NO: 49265 - DNA, 20 bp, synthetic construct
  source 1..20: mol_type = other DNA
atatctttaaactgtaccac

SEQ ID NO: 49266 - DNA, 20 bp, synthetic construct
  source 1..20: mol_type = other DNA
catatctttaaactgtacca

SEQ ID NO: 49267 - DNA, 20 bp, synthetic construct
  source 1..20: mol_type = other DNA
ccatatctttaaactgtacc

SEQ ID NO: 49268 - DNA, 20 bp, synthetic construct
  source 1..20: mol_type = other DNA
tccatatctttaaactgtac

SEQ ID NO: 49269 - DNA, 20 bp, synthetic construct
  source 1..20: mol_type = other DNA
gtccatatctttaaactgta

SEQ ID NO: 49270 - DNA, 20 bp, synthetic construct
  source 1..20: mol_type = other DNA
agtccatatctttaaactgt

SEQ ID NO: 49271 - DNA, 20 bp, synthetic construct
  source 1..20: mol_type = other DNA
gagtccatatctttaaactg

SEQ ID NO: 49272 - DNA, 20 bp, synthetic construct
  source 1..20: mol_type = other DNA
ggagtccatatctttaaact

SEQ ID NO: 49273 - DNA, 20 bp, synthetic construct
  source 1..20: mol_type = other DNA
tggagtccatatctttaaac

SEQ ID NO: 49274 - DNA, 20 bp, synthetic construct
  source 1..20: mol_type = other DNA
ctggagtccatatctttaaa

SEQ ID NO: 49275 - DNA, 20 bp, synthetic construct
  source 1..20: mol_type = other DNA
actggagtccatatctttaa

SEQ ID NO: 49276 - DNA, 20 bp, synthetic construct
  source 1..20: mol_type = other DNA
aactggagtccatatcttta

SEQ ID NO: 49277 - DNA, 20 bp, synthetic construct
  source 1..20: mol_type = other DNA
taactggagtccatatcttt

SEQ ID NO: 49278 - DNA, 20 bp, synthetic construct
  source 1..20: mol_type = other DNA
ataactggagtccatatctt

SEQ ID NO: 49279 - DNA, 20 bp, synthetic construct
  source 1..20: mol_type = other DNA
cataactggagtccatatct

SEQ ID NO: 49280 - DNA, 20 bp, synthetic construct
  source 1..20: mol_type = other DNA
gcataactggagtccatatc

SEQ ID NO: 49281 - DNA, 20 bp, synthetic construct
  source 1..20: mol_type = other DNA
tgcataactggagtccatat

SEQ ID NO: 49282 - DNA, 20 bp, synthetic construct
  source 1..20: mol_type = other DNA
ttgcataactggagtccata

SEQ ID NO: 49283 - DNA, 20 bp, synthetic construct
  source 1..20: mol_type = other DNA
tttgcataactggagtccat

SEQ ID NO: 49284 - DNA, 20 bp, synthetic construct
  source 1..20: mol_type = other DNA
ttttgcataactggagtcca

SEQ ID NO: 49285 - DNA, 20 bp, synthetic construct
  source 1..20: mol_type = other DNA
tttttgcataactggagtcc

SEQ ID NO: 49286 - DNA, 20 bp, synthetic construct
  source 1..20: mol_type = other DNA
ctttttgcataactggagtc

SEQ ID NO: 49287 - DNA, 20 bp, synthetic construct
  source 1..20: mol_type = other DNA
tctttttgcataactggagt

SEQ ID NO: 49288 - DNA, 20 bp, synthetic construct
  source 1..20: mol_type = other DNA
ctctttttgcataactggag

SEQ ID NO: 49289 - DNA, 20 bp, synthetic construct
  source 1..20: mol_type = other DNA
cctctttttgcataactgga

SEQ ID NO: 49290 - DNA, 20 bp, synthetic construct
  source 1..20: mol_type = other DNA
acctctttttgcataactgg

SEQ ID NO: 49291 - DNA, 20 bp, synthetic construct
  source 1..20: mol_type = other DNA
cacctctttttgcataactg

SEQ ID NO: 49292 - DNA, 20 bp, synthetic construct
  source 1..20: mol_type = other DNA
ccacctctttttgcataact

SEQ ID NO: 49293 - DNA, 20 bp, synthetic construct
  source 1..20: mol_type = other DNA
cccacctctttttgcataac

SEQ ID NO: 49294 - DNA, 20 bp, synthetic construct
  source 1..20: mol_type = other DNA
acccacctctttttgcataa

SEQ ID NO: 49295 - DNA, 20 bp, synthetic construct
  source 1..20: mol_type = other DNA
aacccacctctttttgcata

SEQ ID NO: 49296 - DNA, 20 bp, synthetic construct
  source 1..20: mol_type = other DNA
aaacccacctctttttgcat

SEQ ID NO: 49297 - DNA, 20 bp, synthetic construct
  source 1..20: mol_type = other DNA
aaaacccacctctttttgca

SEQ ID NO: 49298 - DNA, 20 bp, synthetic construct
  source 1..20: mol_type = other DNA
caaaacccacctctttttgc

SEQ ID NO: 49299 - DNA, 20 bp, synthetic construct
  source 1..20: mol_type = other DNA
tcaaaacccacctctttttg

SEQ ID NO: 49300 - DNA, 20 bp, synthetic construct
  source 1..20: mol_type = other DNA
atcaaaacccacctcttttt

SEQ ID NO: 49301 - DNA, 20 bp, synthetic construct
  source 1..20: mol_type = other DNA
aatcaaaacccacctctttt

SEQ ID NO: 49302 - DNA, 20 bp, synthetic construct
  source 1..20: mol_type = other DNA
aaatcaaaacccacctcttt

SEQ ID NO: 49303 - DNA, 20 bp, synthetic construct
  source 1..20: mol_type = other DNA
gaaatcaaaacccacctctt

SEQ ID NO: 49304 - DNA, 20 bp, synthetic construct
  source 1..20: mol_type = other DNA
ggaaatcaaaacccacctct

SEQ ID NO: 49305 - DNA, 20 bp, synthetic construct
  source 1..20: mol_type = other DNA
aggaaatcaaaacccacctc

SEQ ID NO: 49306 - DNA, 20 bp, synthetic construct
  source 1..20: mol_type = other DNA
taggaaatcaaaacccacct

SEQ ID NO: 49307 - DNA, 20 bp, synthetic construct
  source 1..20: mol_type = other DNA
ttaggaaatcaaaacccacc

SEQ ID NO: 49308 - DNA, 20 bp, synthetic construct
  source 1..20: mol_type = other DNA
tttaggaaatcaaaacccac

SEQ ID NO: 49309 - DNA, 20 bp, synthetic construct
  source 1..20: mol_type = other DNA
atttaggaaatcaaaaccca

SEQ ID NO: 49310 - DNA, 20 bp, synthetic construct
  source 1..20: mol_type = other DNA
tatttaggaaatcaaaaccc

SEQ ID NO: 49311 - DNA, 20 bp, synthetic construct
  source 1..20: mol_type = other DNA
atatttaggaaatcaaaacc

SEQ ID NO: 49312 - DNA, 20 bp, synthetic construct
  source 1..20: mol_type = other DNA
catatttaggaaatcaaaac

SEQ ID NO: 49313 - DNA, 20 bp, synthetic construct
  source 1..20: mol_type = other DNA
gcatatttaggaaatcaaaa

SEQ ID NO: 49314 - DNA, 20 bp, synthetic construct
  source 1..20: mol_type = other DNA
ggcatatttaggaaatcaaa

SEQ ID NO: 49315 - DNA, 20 bp, synthetic construct
  source 1..20: mol_type = other DNA
aggcatatttaggaaatcaa

SEQ ID NO: 49316 - DNA, 20 bp, synthetic construct
  source 1..20: mol_type = other DNA
gaggcatatttaggaaatca

SEQ ID NO: 49317 - DNA, 20 bp, synthetic construct
  source 1..20: mol_type = other DNA
tgaggcatatttaggaaatc

SEQ ID NO: 49318 - DNA, 20 bp, synthetic construct
  source 1..20: mol_type = other DNA
atgaggcatatttaggaaat

SEQ ID NO: 49319 - DNA, 20 bp, synthetic construct
  source 1..20: mol_type = other DNA
catgaggcatatttaggaaa

SEQ ID NO: 49320 - DNA, 20 bp, synthetic construct
  source 1..20: mol_type = other DNA
ccatgaggcatatttaggaa

SEQ ID NO: 49321 - DNA, 20 bp, synthetic construct
  source 1..20: mol_type = other DNA
accatgaggcatatttagga

SEQ ID NO: 49322 - DNA, 20 bp, synthetic construct
  source 1..20: mol_type = other DNA
aaccatgaggcatatttagg

SEQ ID NO: 49323 - DNA, 20 bp, synthetic construct
  source 1..20: mol_type = other DNA
aaaccatgaggcatatttag

SEQ ID NO: 49324 - DNA, 20 bp, synthetic construct
  source 1..20: mol_type = other DNA
taaaccatgaggcatattta

SEQ ID NO: 49325 - DNA, 20 bp, synthetic construct
  source 1..20: mol_type = other DNA
ataaaccatgaggcatattt

SEQ ID NO: 49326 - DNA, 20 bp, synthetic construct
  source 1..20: mol_type = other DNA
aataaaccatgaggcatatt

SEQ ID NO: 49327 - DNA, 20 bp, synthetic construct
  source 1..20: mol_type = other DNA
taataaaccatgaggcatat

SEQ ID NO: 49328 - DNA, 20 bp, synthetic construct
  source 1..20: mol_type = other DNA
ctaataaaccatgaggcata

SEQ ID NO: 49329 - DNA, 20 bp, synthetic construct
  source 1..20: mol_type = other DNA
tctaataaaccatgaggcat

SEQ ID NO: 49330 - DNA, 20 bp, synthetic construct
  source 1..20: mol_type = other DNA
atctaataaaccatgaggca

SEQ ID NO: 49331 - DNA, 20 bp, synthetic construct
  source 1..20: mol_type = other DNA
aatctaataaaccatgaggc

SEQ ID NO: 49332 - DNA, 20 bp, synthetic construct
  source 1..20: mol_type = other DNA
aaatctaataaaccatgagg

SEQ ID NO: 49333 - DNA, 20 bp, synthetic construct
  source 1..20: mol_type = other DNA
taaatctaataaaccatgag

SEQ ID NO: 49334 - DNA, 20 bp, synthetic construct
  source 1..20: mol_type = other DNA
ataaatctaataaaccatga

SEQ ID NO: 49335 - DNA, 20 bp, synthetic construct
  source 1..20: mol_type = other DNA
aataaatctaataaaccatg

SEQ ID NO: 49336 - DNA, 20 bp, synthetic construct
  source 1..20: mol_type = other DNA
gaataaatctaataaaccat

SEQ ID NO: 49337 - DNA, 20 bp, synthetic construct
  source 1..20: mol_type = other DNA
tgaataaatctaataaacca

SEQ ID NO: 49338 - DNA, 20 bp, synthetic construct
  source 1..20: mol_type = other DNA
ttgaataaatctaataaacc

SEQ ID NO: 49339 - DNA, 20 bp, synthetic construct
  source 1..20: mol_type = other DNA
cttgaataaatctaataaac

SEQ ID NO: 49340 - DNA, 20 bp, synthetic construct
  source 1..20: mol_type = other DNA
gcttgaataaatctaataaa

SEQ ID NO: 49341 - DNA, 20 bp, synthetic construct
  source 1..20: mol_type = other DNA
tgcttgaataaatctaataa

SEQ ID NO: 49342 - DNA, 20 bp, synthetic construct
  source 1..20: mol_type = other DNA
ttgcttgaataaatctaata

SEQ ID NO: 49343 - DNA, 20 bp, synthetic construct
  source 1..20: mol_type = other DNA
tttgcttgaataaatctaat

SEQ ID NO: 49344 - DNA, 20 bp, synthetic construct
  source 1..20: mol_type = other DNA
ctttgcttgaataaatctaa

SEQ ID NO: 49345 - DNA, 20 bp, synthetic construct
  source 1..20: mol_type = other DNA
tctttgcttgaataaatcta

SEQ ID NO: 49346 - DNA, 20 bp, synthetic construct
  source 1..20: mol_type = other DNA
atctttgcttgaataaatct

SEQ ID NO: 49347 - DNA, 20 bp, synthetic construct
  source 1..20: mol_type = other DNA
aatctttgcttgaataaatc

SEQ ID NO: 49348 - DNA, 20 bp, synthetic construct
  source 1..20: mol_type = other DNA
aaatctttgcttgaataaat

SEQ ID NO: 49349 - DNA, 20 bp, synthetic construct
  source 1..20: mol_type = other DNA
aaaatctttgcttgaataaa

SEQ ID NO: 49350 - DNA, 20 bp, synthetic construct
  source 1..20: mol_type = other DNA
gaaaatctttgcttgaataa

SEQ ID NO: 49351 - DNA, 20 bp, synthetic construct
  source 1..20: mol_type = other DNA
tgaaaatctttgcttgaata

SEQ ID NO: 49352 - DNA, 20 bp, synthetic construct
  source 1..20: mol_type = other DNA
gtgaaaatctttgcttgaat

SEQ ID NO: 49353 - DNA, 20 bp, synthetic construct
  source 1..20: mol_type = other DNA
tgtgaaaatctttgcttgaa

SEQ ID NO: 49354 - DNA, 20 bp, synthetic construct
  source 1..20: mol_type = other DNA
ctgtgaaaatctttgcttga

SEQ ID NO: 49355 - DNA, 20 bp, synthetic construct
  source 1..20: mol_type = other DNA
actgtgaaaatctttgcttg

SEQ ID NO: 49356 - DNA, 20 bp, synthetic construct
  source 1..20: mol_type = other DNA
cactgtgaaaatctttgctt

SEQ ID NO: 49357 - DNA, 20 bp, synthetic construct
  source 1..20: mol_type = other DNA
tcactgtgaaaatctttgct

SEQ ID NO: 49358 - DNA, 20 bp, synthetic construct
  source 1..20: mol_type = other DNA
atcactgtgaaaatctttgc

SEQ ID NO: 49359 - DNA, 20 bp, synthetic construct
  source 1..20: mol_type = other DNA
gatcactgtgaaaatctttg

SEQ ID NO: 49360 - DNA, 20 bp, synthetic construct
  source 1..20: mol_type = other DNA
agatcactgtgaaaatcttt

SEQ ID NO: 49361 - DNA, 20 bp, synthetic construct
  source 1..20: mol_type = other DNA
aagatcactgtgaaaatctt

SEQ ID NO: 49362 - DNA, 20 bp, synthetic construct
  source 1..20: mol_type = other DNA
taagatcactgtgaaaatct

SEQ ID NO: 49363 - DNA, 20 bp, synthetic construct
  source 1..20: mol_type = other DNA
gtaagatcactgtgaaaatc

SEQ ID NO: 49364 - DNA, 20 bp, synthetic construct
  source 1..20: mol_type = other DNA
tgtaagatcactgtgaaaat

SEQ ID NO: 49365 - DNA, 20 bp, synthetic construct
  source 1..20: mol_type = other DNA
ttgtaagatcactgtgaaaa

SEQ ID NO: 49366 - DNA, 20 bp, synthetic construct
  source 1..20: mol_type = other DNA
tttgtaagatcactgtgaaa

SEQ ID NO: 49367 - DNA, 20 bp, synthetic construct
  source 1..20: mol_type = other DNA
gtttgtaagatcactgtgaa

SEQ ID NO: 49368 - DNA, 20 bp, synthetic construct
  source 1..20: mol_type = other DNA
agtttgtaagatcactgtga

SEQ ID NO: 49369 - DNA, 20 bp, synthetic construct
  source 1..20: mol_type = other DNA
aagtttgtaagatcactgtg

SEQ ID NO: 49370 - DNA, 20 bp, synthetic construct
  source 1..20: mol_type = other DNA
aaagtttgtaagatcactgt

SEQ ID NO: 49371 - DNA, 20 bp, synthetic construct
  source 1..20: mol_type = other DNA
aaaagtttgtaagatcactg

SEQ ID NO: 49372 - DNA, 20 bp, synthetic construct
  source 1..20: mol_type = other DNA
aaaaagtttgtaagatcact

SEQ ID NO: 49373 - DNA, 20 bp, synthetic construct
  source 1..20: mol_type = other DNA
aaaaaagtttgtaagatcac

SEQ ID NO: 49374 - DNA, 20 bp, synthetic construct
  source 1..20: mol_type = other DNA
aaaaaaagtttgtaagatca

SEQ ID NO: 49375 - DNA, 20 bp, synthetic construct
  source 1..20: mol_type = other DNA
taaaaaaagtttgtaagatc

SEQ ID NO: 49376 - DNA, 20 bp, synthetic construct
  source 1..20: mol_type = other DNA
ttaaaaaaagtttgtaagat

SEQ ID NO: 49377 - DNA, 20 bp, synthetic construct
  source 1..20: mol_type = other DNA
tttaaaaaaagtttgtaaga

SEQ ID NO: 49378 - DNA, 20 bp, synthetic construct
  source 1..20: mol_type = other DNA
ctttaaaaaaagtttgtaag

SEQ ID NO: 49379 - DNA, 20 bp, synthetic construct
  source 1..20: mol_type = other DNA
tctttaaaaaaagtttgtaa

SEQ ID NO: 49380 - DNA, 20 bp, synthetic construct
  source 1..20: mol_type = other DNA
ttctttaaaaaaagtttgta

SEQ ID NO: 49381 - DNA, 20 bp, synthetic construct
  source 1..20: mol_type = other DNA
tttctttaaaaaaagtttgt

SEQ ID NO: 49382 - DNA, 20 bp, synthetic construct
  source 1..20: mol_type = other DNA
atttctttaaaaaaagtttg

SEQ ID NO: 49383 - DNA, 20 bp, synthetic construct
  source 1..20: mol_type = other DNA
tatttctttaaaaaaagttt

SEQ ID NO: 49384 - DNA, 20 bp, synthetic construct
  source 1..20: mol_type = other DNA
atatttctttaaaaaaagtt

SEQ ID NO: 49385 - DNA, 20 bp, synthetic construct
  source 1..20: mol_type = other DNA
gatatttctttaaaaaaagt

SEQ ID NO: 49386 - DNA, 20 bp, synthetic construct
  source 1..20: mol_type = other DNA
agatatttctttaaaaaaag

SEQ ID NO: 49387 - DNA, 20 bp, synthetic construct
  source 1..20: mol_type = other DNA
cagatatttctttaaaaaaa

SEQ ID NO: 49388 - DNA, 20 bp, synthetic construct
  source 1..20: mol_type = other DNA
ccagatatttctttaaaaaa

SEQ ID NO: 49389 - DNA, 20 bp, synthetic construct
  source 1..20: mol_type = other DNA
cccagatatttctttaaaaa

SEQ ID NO: 49390 - DNA, 20 bp, synthetic construct
  source 1..20: mol_type = other DNA
gcccagatatttctttaaaa

SEQ ID NO: 49391 - DNA, 20 bp, synthetic construct
  source 1..20: mol_type = other DNA
agcccagatatttctttaaa

SEQ ID NO: 49392 - DNA, 20 bp, synthetic construct
  source 1..20: mol_type = other DNA
cagcccagatatttctttaa

SEQ ID NO: 49393 - DNA, 20 bp, synthetic construct
  source 1..20: mol_type = other DNA
ccagcccagatatttcttta

SEQ ID NO: 49394 - DNA, 20 bp, synthetic construct
  source 1..20: mol_type = other DNA
cccagcccagatatttcttt

SEQ ID NO: 49395 - DNA, 20 bp, synthetic construct
  source 1..20: mol_type = other DNA
acccagcccagatatttctt

SEQ ID NO: 49396 - DNA, 20 bp, synthetic construct
  source 1..20: mol_type = other DNA
tacccagcccagatatttct

SEQ ID NO: 49397 - DNA, 20 bp, synthetic construct
  source 1..20: mol_type = other DNA
atacccagcccagatatttc

SEQ ID NO: 49398 - DNA, 20 bp, synthetic construct
  source 1..20: mol_type = other DNA
catacccagcccagatattt

SEQ ID NO: 49399 - DNA, 20 bp, synthetic construct
  source 1..20: mol_type = other DNA
ccatacccagcccagatatt

SEQ ID NO: 49400 - DNA, 20 bp, synthetic construct
  source 1..20: mol_type = other DNA
gccatacccagcccagatat

SEQ ID NO: 49401 - DNA, 20 bp, synthetic construct
  source 1..20: mol_type = other DNA
cgccatacccagcccagata

SEQ ID NO: 49402 - DNA, 20 bp, synthetic construct
  source 1..20: mol_type = other DNA
ccgccatacccagcccagat

SEQ ID NO: 49403 - DNA, 20 bp, synthetic construct
  source 1..20: mol_type = other DNA
gccgccatacccagcccaga

SEQ ID NO: 49404 - DNA, 20 bp, synthetic construct
  source 1..20: mol_type = other DNA
agccgccatacccagcccag

SEQ ID NO: 49405 - DNA, 20 bp, synthetic construct
  source 1..20: mol_type = other DNA
gagccgccatacccagccca

SEQ ID NO: 49406 - DNA, 20 bp, synthetic construct
  source 1..20: mol_type = other DNA
tgagccgccatacccagccc

SEQ ID NO: 49407 - DNA, 20 bp, synthetic construct
  source 1..20: mol_type = other DNA
atgagccgccatacccagcc

SEQ ID NO: 49408 - DNA, 20 bp, synthetic construct
  source 1..20: mol_type = other DNA
aatgagccgccatacccagc

SEQ ID NO: 49409 - DNA, 20 bp, synthetic construct
  source 1..20: mol_type = other DNA
gaatgagccgccatacccag

SEQ ID NO: 49410 - DNA, 20 bp, synthetic construct
  source 1..20: mol_type = other DNA
ggaatgagccgccataccca

SEQ ID NO: 49411 - DNA, 20 bp, synthetic construct
  source 1..20: mol_type = other DNA
aggaatgagccgccataccc

SEQ ID NO: 49412 - DNA, 20 bp, synthetic construct
  source 1..20: mol_type = other DNA
caggaatgagccgccatacc

SEQ ID NO: 49413 - DNA, 20 bp, synthetic construct
  source 1..20: mol_type = other DNA
acaggaatgagccgccatac

SEQ ID NO: 49414 - DNA, 20 bp, synthetic construct
  source 1..20: mol_type = other DNA
tacaggaatgagccgccata

SEQ ID NO: 49415 - DNA, 20 bp, synthetic construct
  source 1..20: mol_type = other DNA
ttacaggaatgagccgccat

SEQ ID NO: 49416 - DNA, 20 bp, synthetic construct
  source 1..20: mol_type = other DNA
attacaggaatgagccgcca

SEQ ID NO: 49417 - DNA, 20 bp, synthetic construct
  source 1..20: mol_type = other DNA
gattacaggaatgagccgcc

SEQ ID NO: 49418 - DNA, 20 bp, synthetic construct
  source 1..20: mol_type = other DNA
agattacaggaatgagccgc

SEQ ID NO: 49419 - DNA, 20 bp, synthetic construct
  source 1..20: mol_type = other DNA
aagattacaggaatgagccg

SEQ ID NO: 49420 - DNA, 20 bp, synthetic construct
  source 1..20: mol_type = other DNA
taagattacaggaatgagcc

SEQ ID NO: 49421 - DNA, 20 bp, synthetic construct
  source 1..20: mol_type = other DNA
ctaagattacaggaatgagc

SEQ ID NO: 49422 - DNA, 20 bp, synthetic construct
  source 1..20: mol_type = other DNA
gctaagattacaggaatgag

SEQ ID NO: 49423 - DNA, 20 bp, synthetic construct
  source 1..20: mol_type = other DNA
tgctaagattacaggaatga

SEQ ID NO: 49424 - DNA, 20 bp, synthetic construct
  source 1..20: mol_type = other DNA
gtgctaagattacaggaatg

SEQ ID NO: 49425 - DNA, 20 bp, synthetic construct
  source 1..20: mol_type = other DNA
agtgctaagattacaggaat

SEQ ID NO: 49426 - DNA, 20 bp, synthetic construct
  source 1..20: mol_type = other DNA
aagtgctaagattacaggaa

SEQ ID NO: 49427 - DNA, 20 bp, synthetic construct
  source 1..20: mol_type = other DNA
taagtgctaagattacagga

SEQ ID NO: 49428 - DNA, 20 bp, synthetic construct
  source 1..20: mol_type = other DNA
ctaagtgctaagattacagg

SEQ ID NO: 49429 - DNA, 20 bp, synthetic construct
  source 1..20: mol_type = other DNA
cctaagtgctaagattacag

SEQ ID NO: 49430 - DNA, 20 bp, synthetic construct
  source 1..20: mol_type = other DNA
ccctaagtgctaagattaca

SEQ ID NO: 49431 - DNA, 20 bp, synthetic construct
  source 1..20: mol_type = other DNA
tccctaagtgctaagattac

SEQ ID NO: 49432 - DNA, 20 bp, synthetic construct
  source 1..20: mol_type = other DNA
ctccctaagtgctaagatta

SEQ ID NO: 49433 - DNA, 20 bp, synthetic construct
  source 1..20: mol_type = other DNA
cctccctaagtgctaagatt

SEQ ID NO: 49434 - DNA, 20 bp, synthetic construct
  source 1..20: mol_type = other DNA
gcctccctaagtgctaagat

SEQ ID NO: 49435 - DNA, 20 bp, synthetic construct
  source 1..20: mol_type = other DNA
agcctccctaagtgctaaga

SEQ ID NO: 49436 - DNA, 20 bp, synthetic construct
  source 1..20: mol_type = other DNA
cagcctccctaagtgctaag

SEQ ID NO: 49437 - DNA, 20 bp, synthetic construct
  source 1..20: mol_type = other DNA
tcagcctccctaagtgctaa

SEQ ID NO: 49438 - DNA, 20 bp, synthetic construct
  source 1..20: mol_type = other DNA
ctcagcctccctaagtgcta

SEQ ID NO: 49439 - DNA, 20 bp, synthetic construct
  source 1..20: mol_type = other DNA
cctcagcctccctaagtgct

SEQ ID NO: 49440 - DNA, 20 bp, synthetic construct
  source 1..20: mol_type = other DNA
gcctcagcctccctaagtgc

SEQ ID NO: 49441 - DNA, 20 bp, synthetic construct
  source 1..20: mol_type = other DNA
cgcctcagcctccctaagtg

SEQ ID NO: 49442 - DNA, 20 bp, synthetic construct
  source 1..20: mol_type = other DNA
ccgcctcagcctccctaagt

SEQ ID NO: 49443 - DNA, 20 bp, synthetic construct
  source 1..20: mol_type = other DNA
cccgcctcagcctccctaag

SEQ ID NO: 49444 - DNA, 20 bp, synthetic construct
  source 1..20: mol_type = other DNA
acccgcctcagcctccctaa

SEQ ID NO: 49445 - DNA, 20 bp, synthetic construct
  source 1..20: mol_type = other DNA
cacccgcctcagcctcccta

SEQ ID NO: 49446 - DNA, 20 bp, synthetic construct
  source 1..20: mol_type = other DNA
ccacccgcctcagcctccct

SEQ ID NO: 49447 - DNA, 20 bp, synthetic construct
  source 1..20: mol_type = other DNA
tccacccgcctcagcctccc

SEQ ID NO: 49448 - DNA, 20 bp, synthetic construct
  source 1..20: mol_type = other DNA
atccacccgcctcagcctcc

SEQ ID NO: 49449 - DNA, 20 bp, synthetic construct
  source 1..20: mol_type = other DNA
gatccacccgcctcagcctc

SEQ ID NO: 49450 - DNA, 20 bp, synthetic construct
  source 1..20: mol_type = other DNA
tgatccacccgcctcagcct

SEQ ID NO: 49451 - DNA, 20 bp, synthetic construct
  source 1..20: mol_type = other DNA
gtgatccacccgcctcagcc

SEQ ID NO: 49452 - DNA, 20 bp, synthetic construct
  source 1..20: mol_type = other DNA
ggtgatccacccgcctcagc

SEQ ID NO: 49453 - DNA, 20 bp, synthetic construct
  source 1..20: mol_type = other DNA
aggtgatccacccgcctcag

SEQ ID NO: 49454 - DNA, 20 bp, synthetic construct
  source 1..20: mol_type = other DNA
caggtgatccacccgcctca

SEQ ID NO: 49455 - DNA, 20 bp, synthetic construct
  source 1..20: mol_type = other DNA
tcaggtgatccacccgcctc

SEQ ID NO: 49456 - DNA, 20 bp, synthetic construct
  source 1..20: mol_type = other DNA
ctcaggtgatccacccgcct

SEQ ID NO: 49457 - DNA, 20 bp, synthetic construct
  source 1..20: mol_type = other DNA
cctcaggtgatccacccgcc

SEQ ID NO: 49458 - DNA, 20 bp, synthetic construct
  source 1..20: mol_type = other DNA
acctcaggtgatccacccgc

SEQ ID NO: 49459 - DNA, 20 bp, synthetic construct
  source 1..20: mol_type = other DNA
gacctcaggtgatccacccg

SEQ ID NO: 49460 - DNA, 20 bp, synthetic construct
  source 1..20: mol_type = other DNA
tgacctcaggtgatccaccc

SEQ ID NO: 49461 - DNA, 20 bp, synthetic construct
  source 1..20: mol_type = other DNA
ctgacctcaggtgatccacc

SEQ ID NO: 49462 - DNA, 20 bp, synthetic construct
  source 1..20: mol_type = other DNA
cctgacctcaggtgatccac

SEQ ID NO: 49463 - DNA, 20 bp, synthetic construct
  source 1..20: mol_type = other DNA
tcctgacctcaggtgatcca

SEQ ID NO: 49464 - DNA, 20 bp, synthetic construct
  source 1..20: mol_type = other DNA
ctcctgacctcaggtgatcc

SEQ ID NO: 49465 - DNA, 20 bp, synthetic construct
  source 1..20: mol_type = other DNA
actcctgacctcaggtgatc

SEQ ID NO: 49466 - DNA, 20 bp, synthetic construct
  source 1..20: mol_type = other DNA
aactcctgacctcaggtgat

SEQ ID NO: 49467 - DNA, 20 bp, synthetic construct
  source 1..20: mol_type = other DNA
gaactcctgacctcaggtga

SEQ ID NO: 49468 - DNA, 20 bp, synthetic construct
  source 1..20: mol_type = other DNA
cgaactcctgacctcaggtg

SEQ ID NO: 49469 - DNA, 20 bp, synthetic construct
  source 1..20: mol_type = other DNA
tcgaactcctgacctcaggt

SEQ ID NO: 49470 - DNA, 20 bp, synthetic construct
  source 1..20: mol_type = other DNA
ctcgaactcctgacctcagg

SEQ ID NO: 49471 - DNA, 20 bp, synthetic construct
  source 1..20: mol_type = other DNA
tctcgaactcctgacctcag

SEQ ID NO: 49472 - DNA, 20 bp, synthetic construct
  source 1..20: mol_type = other DNA
gtctcgaactcctgacctca

SEQ ID NO: 49473 - DNA, 20 bp, synthetic construct
  source 1..20: mol_type = other DNA
ggtctcgaactcctgacctc

SEQ ID NO: 49474 - DNA, 20 bp, synthetic construct
  source 1..20: mol_type = other DNA
tggtctcgaactcctgacct

SEQ ID NO: 49475 - DNA, 20 bp, synthetic construct
  source 1..20: mol_type = other DNA
ctggtctcgaactcctgacc

SEQ ID NO: 49476 - DNA, 20 bp, synthetic construct
  source 1..20: mol_type = other DNA
gctggtctcgaactcctgac

SEQ ID NO: 49477 - DNA, 20 bp, synthetic construct
  source 1..20: mol_type = other DNA
ggctggtctcgaactcctga

SEQ ID NO: 49478 - DNA, 20 bp, synthetic construct
  source 1..20: mol_type = other DNA
aggctggtctcgaactcctg

SEQ ID NO: 49479 - DNA, 20 bp, synthetic construct
  source 1..20: mol_type = other DNA
caggctggtctcgaactcct

SEQ ID NO: 49480 - DNA, 20 bp, synthetic construct
  source 1..20: mol_type = other DNA
ccaggctggtctcgaactcc

SEQ ID NO: 49481 - DNA, 20 bp, synthetic construct
  source 1..20: mol_type = other DNA
gccaggctggtctcgaactc

SEQ ID NO: 49482 - DNA, 20 bp, synthetic construct
  source 1..20: mol_type = other DNA
ggccaggctggtctcgaact

SEQ ID NO: 49483 - DNA, 20 bp, synthetic construct
  source 1..20: mol_type = other DNA
tggccaggctggtctcgaac

SEQ ID NO: 49484 - DNA, 20 bp, synthetic construct
  source 1..20: mol_type = other DNA
ttggccaggctggtctcgaa

SEQ ID NO: 49485 - DNA, 20 bp, synthetic construct
  source 1..20: mol_type = other DNA
gttggccaggctggtctcga

SEQ ID NO: 49486 - DNA, 20 bp, synthetic construct
  source 1..20: mol_type = other DNA
tgttggccaggctggtctcg

SEQ ID NO: 49487 - DNA, 20 bp, synthetic construct
  source 1..20: mol_type = other DNA
atgttggccaggctggtctc

SEQ ID NO: 49488 - DNA, 20 bp, synthetic construct
  source 1..20: mol_type = other DNA
catgttggccaggctggtct

SEQ ID NO: 49489 - DNA, 20 bp, synthetic construct
  source 1..20: mol_type = other DNA
ccatgttggccaggctggtc

SEQ ID NO: 49490 - DNA, 20 bp, synthetic construct
  source 1..20: mol_type = other DNA
gccatgttggccaggctggt

SEQ ID NO: 49491 - DNA, 20 bp, synthetic construct
  source 1..20: mol_type = other DNA
cgccatgttggccaggctgg

SEQ ID NO: 49492 - DNA, 20 bp, synthetic construct
  source 1..20: mol_type = other DNA
tcgccatgttggccaggctg

SEQ ID NO: 49493 - DNA, 20 bp, synthetic construct
  source 1..20: mol_type = other DNA
ttcgccatgttggccaggct

SEQ ID NO: 49494 - DNA, 20 bp, synthetic construct
  source 1..20: mol_type = other DNA
tttcgccatgttggccaggc

SEQ ID NO: 49495 - DNA, 20 bp, synthetic construct
  source 1..20: mol_type = other DNA
gtttcgccatgttggccagg

SEQ ID NO: 49496 - DNA, 20 bp, synthetic construct
  source 1..20: mol_type = other DNA
ggtttcgccatgttggccag

SEQ ID NO: 49497 - DNA, 20 bp, synthetic construct
  source 1..20: mol_type = other DNA
gggtttcgccatgttggcca

SEQ ID NO: 49498 - DNA, 20 bp, synthetic construct
  source 1..20: mol_type = other DNA
ggggtttcgccatgttggcc

SEQ ID NO: 49499 - DNA, 20 bp, synthetic construct
  source 1..20: mol_type = other DNA
cggggtttcgccatgttggc

SEQ ID NO: 49500 - DNA, 20 bp, synthetic construct
  source 1..20: mol_type = other DNA
acggggtttcgccatgttgg

SEQ ID NO: 49501 - DNA, 20 bp, synthetic construct
  source 1..20: mol_type = other DNA
gacggggtttcgccatgttg

SEQ ID NO: 49502 - DNA, 20 bp, synthetic construct
  source 1..20: mol_type = other DNA
agacggggtttcgccatgtt

SEQ ID NO: 49503 - DNA, 20 bp, synthetic construct
  source 1..20: mol_type = other DNA
gagacggggtttcgccatgt

SEQ ID NO: 49504 - DNA, 20 bp, synthetic construct
  source 1..20: mol_type = other DNA
agagacggggtttcgccatg

SEQ ID NO: 49505 - DNA, 20 bp, synthetic construct
  source 1..20: mol_type = other DNA
tagagacggggtttcgccat

SEQ ID NO: 49506 - DNA, 20 bp, synthetic construct
  source 1..20: mol_type = other DNA
gtagagacggggtttcgcca

SEQ ID NO: 49507 - DNA, 20 bp, synthetic construct
  source 1..20: mol_type = other DNA
agtagagacggggtttcgcc

SEQ ID NO: 49508 - DNA, 20 bp, synthetic construct
  source 1..20: mol_type = other DNA
tagtagagacggggtttcgc

SEQ ID NO: 49509 - DNA, 20 bp, synthetic construct
  source 1..20: mol_type = other DNA
ttagtagagacggggtttcg

SEQ ID NO: 49510 - DNA, 20 bp, synthetic construct
  source 1..20: mol_type = other DNA
tttagtagagacggggtttc

SEQ ID NO: 49511 - DNA, 20 bp, synthetic construct
  source 1..20: mol_type = other DNA
ttttagtagagacggggttt

SEQ ID NO: 49512 - DNA, 20 bp, synthetic construct
  source 1..20: mol_type = other DNA
tttttagtagagacggggtt

SEQ ID NO: 49513 - DNA, 20 bp, synthetic construct
  source 1..20: mol_type = other DNA
atttttagtagagacggggt

SEQ ID NO: 49514 - DNA, 20 bp, synthetic construct
  source 1..20: mol_type = other DNA
tatttttagtagagacgggg

SEQ ID NO: 49515 - DNA, 20 bp, synthetic construct
  source 1..20: mol_type = other DNA
gtatttttagtagagacggg

SEQ ID NO: 49516 - DNA, 20 bp, synthetic construct
  source 1..20: mol_type = other DNA
tgtatttttagtagagacgg

SEQ ID NO: 49517 - DNA, 20 bp, synthetic construct
  source 1..20: mol_type = other DNA
ttgtatttttagtagagacg

SEQ ID NO: 49518 - DNA, 20 bp, synthetic construct
  source 1..20: mol_type = other DNA
tttgtatttttagtagagac

SEQ ID NO: 49519 - DNA, 20 bp, synthetic construct
  source 1..20: mol_type = other DNA
ttttgtatttttagtagaga

SEQ ID NO: 49520 - DNA, 20 bp, synthetic construct
  source 1..20: mol_type = other DNA
tttttgtatttttagtagag

SEQ ID NO: 49521 - DNA, 20 bp, synthetic construct
  source 1..20: mol_type = other DNA
atttttgtatttttagtaga

SEQ ID NO: 49522 - DNA, 20 bp, synthetic construct
  source 1..20: mol_type = other DNA
aatttttgtatttttagtag

SEQ ID NO: 49523 - DNA, 20 bp, synthetic construct
  source 1..20: mol_type = other DNA
aaatttttgtatttttagta

SEQ ID NO: 49524 - DNA, 20 bp, synthetic construct
  source 1..20: mol_type = other DNA
taaatttttgtatttttagt

SEQ ID NO: 49525 - DNA, 20 bp, synthetic construct
  source 1..20: mol_type = other DNA
ataaatttttgtatttttag

SEQ ID NO: 49526 - DNA, 20 bp, synthetic construct
  source 1..20: mol_type = other DNA
aataaatttttgtattttta

SEQ ID NO: 49527 - DNA, 20 bp, synthetic construct
  source 1..20: mol_type = other DNA
aaataaatttttgtattttt

SEQ ID NO: 49528 - DNA, 20 bp, synthetic construct
  source 1..20: mol_type = other DNA
aaaataaatttttgtatttt

SEQ ID NO: 49529 - DNA, 20 bp, synthetic construct
  source 1..20: mol_type = other DNA
aaaaataaatttttgtattt

SEQ ID NO: 49530 - DNA, 20 bp, synthetic construct
  source 1..20: mol_type = other DNA
caaaaataaatttttgtatt

SEQ ID NO: 49531 - DNA, 20 bp, synthetic construct
  source 1..20: mol_type = other DNA
acaaaaataaatttttgtat

SEQ ID NO: 49532 - DNA, 20 bp, synthetic construct
  source 1..20: mol_type = other DNA
cacaaaaataaatttttgta

SEQ ID NO: 49533 - DNA, 20 bp, synthetic construct
  source 1..20: mol_type = other DNA
acacaaaaataaatttttgt

SEQ ID NO: 49534 - DNA, 20 bp, synthetic construct
  source 1..20: mol_type = other DNA
cacacaaaaataaatttttg

SEQ ID NO: 49535 - DNA, 20 bp, synthetic construct
  source 1..20: mol_type = other DNA
acacacaaaaataaattttt

SEQ ID NO: 49536 - DNA, 20 bp, synthetic construct
  source 1..20: mol_type = other DNA
cacacacaaaaataaatttt

SEQ ID NO: 49537 - DNA, 20 bp, synthetic construct
  source 1..20: mol_type = other DNA
ccacacacaaaaataaattt

SEQ ID NO: 49538 - DNA, 20 bp, synthetic construct
  source 1..20: mol_type = other DNA
accacacacaaaaataaatt

SEQ ID NO: 49539 - DNA, 20 bp, synthetic construct
  source 1..20: mol_type = other DNA
caccacacacaaaaataaat

SEQ ID NO: 49540 - DNA, 20 bp, synthetic construct
  source 1..20: mol_type = other DNA
ccaccacacacaaaaataaa

SEQ ID NO: 49541 - DNA, 20 bp, synthetic construct
  source 1..20: mol_type = other DNA
gccaccacacacaaaaataa

SEQ ID NO: 49542 - DNA, 20 bp, synthetic construct
  source 1..20: mol_type = other DNA
cgccaccacacacaaaaata

SEQ ID NO: 49543 - DNA, 20 bp, synthetic construct
  source 1..20: mol_type = other DNA
acgccaccacacacaaaaat

SEQ ID NO: 49544 - DNA, 20 bp, synthetic construct
  source 1..20: mol_type = other DNA
cacgccaccacacacaaaaa

SEQ ID NO: 49545 - DNA, 20 bp, synthetic construct
  source 1..20: mol_type = other DNA
gcacgccaccacacacaaaa

SEQ ID NO: 49546 - DNA, 20 bp, synthetic construct
  source 1..20: mol_type = other DNA
cgcacgccaccacacacaaa

SEQ ID NO: 49547 - DNA, 20 bp, synthetic construct
  source 1..20: mol_type = other DNA
gcgcacgccaccacacacaa

SEQ ID NO: 49548 - DNA, 20 bp, synthetic construct
  source 1..20: mol_type = other DNA
ggcgcacgccaccacacaca

SEQ ID NO: 49549 - DNA, 20 bp, synthetic construct
  source 1..20: mol_type = other DNA
aggcgcacgccaccacacac

SEQ ID NO: 49550 - DNA, 20 bp, synthetic construct
  source 1..20: mol_type = other DNA
taggcgcacgccaccacaca

SEQ ID NO: 49551 - DNA, 20 bp, synthetic construct
  source 1..20: mol_type = other DNA
ataggcgcacgccaccacac

SEQ ID NO: 49552 - DNA, 20 bp, synthetic construct
  source 1..20: mol_type = other DNA
tataggcgcacgccaccaca

SEQ ID NO: 49553 - DNA, 20 bp, synthetic construct
  source 1..20: mol_type = other DNA
ctataggcgcacgccaccac

SEQ ID NO: 49554 - DNA, 20 bp, synthetic construct
  source 1..20: mol_type = other DNA
actataggcgcacgccacca

SEQ ID NO: 49555 - DNA, 20 bp, synthetic construct
  source 1..20: mol_type = other DNA
gactataggcgcacgccacc

SEQ ID NO: 49556 - DNA, 20 bp, synthetic construct
  source 1..20: mol_type = other DNA
ggactataggcgcacgccac

SEQ ID NO: 49557 - DNA, 20 bp, synthetic construct
  source 1..20: mol_type = other DNA
aggactataggcgcacgcca

SEQ ID NO: 49558 - DNA, 20 bp, synthetic construct
  source 1..20: mol_type = other DNA
taggactataggcgcacgcc

SEQ ID NO: 49559 - DNA, 20 bp, synthetic construct
  source 1..20: mol_type = other DNA
ctaggactataggcgcacgc

SEQ ID NO: 49560 - DNA, 20 bp, synthetic construct
  source 1..20: mol_type = other DNA
gctaggactataggcgcacg

SEQ ID NO: 49561 - DNA, 20 bp, synthetic construct
  source 1..20: mol_type = other DNA
agctaggactataggcgcac

SEQ ID NO: 49562 - DNA, 20 bp, synthetic construct
  source 1..20: mol_type = other DNA
tagctaggactataggcgca

SEQ ID NO: 49563 - DNA, 20 bp, synthetic construct
  source 1..20: mol_type = other DNA
gtagctaggactataggcgc

SEQ ID NO: 49564 - DNA, 20 bp, synthetic construct
  source 1..20: mol_type = other DNA
agtagctaggactataggcg

SEQ ID NO: 49565 - DNA, 20 bp, synthetic construct
  source 1..20: mol_type = other DNA
tagtagctaggactataggc

SEQ ID NO: 49566 - DNA, 20 bp, synthetic construct
  source 1..20: mol_type = other DNA
ctagtagctaggactatagg

SEQ ID NO: 49567 - DNA, 20 bp, synthetic construct
  source 1..20: mol_type = other DNA
cctagtagctaggactatag

SEQ ID NO: 49568 - DNA, 20 bp, synthetic construct
  source 1..20: mol_type = other DNA
ccctagtagctaggactata

SEQ ID NO: 49569 - DNA, 20 bp, synthetic construct
  source 1..20: mol_type = other DNA
tccctagtagctaggactat

SEQ ID NO: 49570 - DNA, 20 bp, synthetic construct
  source 1..20: mol_type = other DNA
ctccctagtagctaggacta

SEQ ID NO: 49571 - DNA, 20 bp, synthetic construct
  source 1..20: mol_type = other DNA
cctccctagtagctaggact

SEQ ID NO: 49572 - DNA, 20 bp, synthetic construct
  source 1..20: mol_type = other DNA
gcctccctagtagctaggac

SEQ ID NO: 49573 - DNA, 20 bp, synthetic construct
  source 1..20: mol_type = other DNA
agcctccctagtagctagga

SEQ ID NO: 49574 - DNA, 20 bp, synthetic construct
  source 1..20: mol_type = other DNA
cagcctccctagtagctagg

SEQ ID NO: 49575 - DNA, 20 bp, synthetic construct
  source 1..20: mol_type = other DNA
tcagcctccctagtagctag

SEQ ID NO: 49576 - DNA, 20 bp, synthetic construct
  source 1..20: mol_type = other DNA
ctcagcctccctagtagcta

SEQ ID NO: 49577 - DNA, 20 bp, synthetic construct
  source 1..20: mol_type = other DNA
tctcagcctccctagtagct

SEQ ID NO: 49578 - DNA, 20 bp, synthetic construct
  source 1..20: mol_type = other DNA
gtctcagcctccctagtagc

SEQ ID NO: 49579 - DNA, 20 bp, synthetic construct
  source 1..20: mol_type = other DNA
tgtctcagcctccctagtag

SEQ ID NO: 49580 - DNA, 20 bp, synthetic construct
  source 1..20: mol_type = other DNA
ctgtctcagcctccctagta

SEQ ID NO: 49581 - DNA, 20 bp, synthetic construct
  source 1..20: mol_type = other DNA
tctgtctcagcctccctagt

SEQ ID NO: 49582 - DNA, 20 bp, synthetic construct
  source 1..20: mol_type = other DNA
ttctgtctcagcctccctag

SEQ ID NO: 49583 - DNA, 20 bp, synthetic construct
  source 1..20: mol_type = other DNA
attctgtctcagcctcccta

SEQ ID NO: 49584 - DNA, 20 bp, synthetic construct
  source 1..20: mol_type = other DNA
aattctgtctcagcctccct

SEQ ID NO: 49585 - DNA, 20 bp, synthetic construct
  source 1..20: mol_type = other DNA
caattctgtctcagcctccc

SEQ ID NO: 49586 - DNA, 20 bp, synthetic construct
  source 1..20: mol_type = other DNA
gcaattctgtctcagcctcc

SEQ ID NO: 49587 - DNA, 20 bp, synthetic construct
  source 1..20: mol_type = other DNA
agcaattctgtctcagcctc

SEQ ID NO: 49588 - DNA, 20 bp, synthetic construct
  source 1..20: mol_type = other DNA
aagcaattctgtctcagcct

SEQ ID NO: 49589 - DNA, 20 bp, synthetic construct
  source 1..20: mol_type = other DNA
caagcaattctgtctcagcc

SEQ ID NO: 49590 - DNA, 20 bp, synthetic construct
  source 1..20: mol_type = other DNA
tcaagcaattctgtctcagc

SEQ ID NO: 49591 - DNA, 20 bp, synthetic construct
  source 1..20: mol_type = other DNA
ttcaagcaattctgtctcag

SEQ ID NO: 49592 - DNA, 20 bp, synthetic construct
  source 1..20: mol_type = other DNA
gttcaagcaattctgtctca

SEQ ID NO: 49593 - DNA, 20 bp, synthetic construct
  source 1..20: mol_type = other DNA
ggttcaagcaattctgtctc

SEQ ID NO: 49594 - DNA, 20 bp, synthetic construct
  source 1..20: mol_type = other DNA
gggttcaagcaattctgtct

SEQ ID NO: 49595 - DNA, 20 bp, synthetic construct
  source 1..20: mol_type = other DNA
tgggttcaagcaattctgtc

SEQ ID NO: 49596 - DNA, 20 bp, synthetic construct
  source 1..20: mol_type = other DNA
ctgggttcaagcaattctgt

SEQ ID NO: 49597 - DNA, 20 bp, synthetic construct
  source 1..20: mol_type = other DNA
cctgggttcaagcaattctg

SEQ ID NO: 49598 - DNA, 20 bp, synthetic construct
  source 1..20: mol_type = other DNA
tcctgggttcaagcaattct

SEQ ID NO: 49599 - DNA, 20 bp, synthetic construct
  source 1..20: mol_type = other DNA
ctcctgggttcaagcaattc

SEQ ID NO: 49600 - DNA, 20 bp, synthetic construct
  source 1..20: mol_type = other DNA
cctcctgggttcaagcaatt

SEQ ID NO: 49601 - DNA, 20 bp, synthetic construct
  source 1..20: mol_type = other DNA
gcctcctgggttcaagcaat

SEQ ID NO: 49602 - DNA, 20 bp, synthetic construct
  source 1..20: mol_type = other DNA
tgcctcctgggttcaagcaa

SEQ ID NO: 49603 - DNA, 20 bp, synthetic construct
  source 1..20: mol_type = other DNA
ctgcctcctgggttcaagca

SEQ ID NO: 49604 - DNA, 20 bp, synthetic construct
  source 1..20: mol_type = other DNA
tctgcctcctgggttcaagc

SEQ ID NO: 49605 - DNA, 20 bp, synthetic construct
  source 1..20: mol_type = other DNA
ctctgcctcctgggttcaag

SEQ ID NO: 49606 - DNA, 20 bp, synthetic construct
  source 1..20: mol_type = other DNA
cctctgcctcctgggttcaa

SEQ ID NO: 49607 - DNA, 20 bp, synthetic construct
  source 1..20: mol_type = other DNA
acctctgcctcctgggttca

SEQ ID NO: 49608 - DNA, 20 bp, synthetic construct
  source 1..20: mol_type = other DNA
aacctctgcctcctgggttc

SEQ ID NO: 49609 - DNA, 20 bp, synthetic construct
  source 1..20: mol_type = other DNA
caacctctgcctcctgggtt

SEQ ID NO: 49610 - DNA, 20 bp, synthetic construct
  source 1..20: mol_type = other DNA
gcaacctctgcctcctgggt

SEQ ID NO: 49611 - DNA, 20 bp, synthetic construct
  source 1..20: mol_type = other DNA
tgcaacctctgcctcctggg

SEQ ID NO: 49612 - DNA, 20 bp, synthetic construct
  source 1..20: mol_type = other DNA
ctgcaacctctgcctcctgg

SEQ ID NO: 49613 - DNA, 20 bp, synthetic construct
  source 1..20: mol_type = other DNA
actgcaacctctgcctcctg

SEQ ID NO: 49614 - DNA, 20 bp, synthetic construct
  source 1..20: mol_type = other DNA
cactgcaacctctgcctcct

SEQ ID NO: 49615 - DNA, 20 bp, synthetic construct
  source 1..20: mol_type = other DNA
tcactgcaacctctgcctcc

SEQ ID NO: 49616 - DNA, 20 bp, synthetic construct
  source 1..20: mol_type = other DNA
ctcactgcaacctctgcctc

SEQ ID NO: 49617 - DNA, 20 bp, synthetic construct
  source 1..20: mol_type = other DNA
gctcactgcaacctctgcct

SEQ ID NO: 49618 - DNA, 20 bp, synthetic construct
  source 1..20: mol_type = other DNA
agctcactgcaacctctgcc

SEQ ID NO: 49619 - DNA, 20 bp, synthetic construct
  source 1..20: mol_type = other DNA
cagctcactgcaacctctgc

SEQ ID NO: 49620 - DNA, 20 bp, synthetic construct
  source 1..20: mol_type = other DNA
tcagctcactgcaacctctg

SEQ ID NO: 49621 - DNA, 20 bp, synthetic construct
  source 1..20: mol_type = other DNA
atcagctcactgcaacctct

SEQ ID NO: 49622 - DNA, 20 bp, synthetic construct
  source 1..20: mol_type = other DNA
tatcagctcactgcaacctc

SEQ ID NO: 49623 - DNA, 20 bp, synthetic construct
  source 1..20: mol_type = other DNA
gtatcagctcactgcaacct

SEQ ID NO: 49624 - DNA, 20 bp, synthetic construct
  source 1..20: mol_type = other DNA
ggtatcagctcactgcaacc

SEQ ID NO: 49625 - DNA, 20 bp, synthetic construct
  source 1..20: mol_type = other DNA
cggtatcagctcactgcaac

SEQ ID NO: 49626 - DNA, 20 bp, synthetic construct
  source 1..20: mol_type = other DNA
gcggtatcagctcactgcaa

SEQ ID NO: 49627 - DNA, 20 bp, synthetic construct
  source 1..20: mol_type = other DNA
tgcggtatcagctcactgca

SEQ ID NO: 49628 - DNA, 20 bp, synthetic construct
  source 1..20: mol_type = other DNA
gtgcggtatcagctcactgc

SEQ ID NO: 49629 - DNA, 20 bp, synthetic construct
  source 1..20: mol_type = other DNA
ggtgcggtatcagctcactg

SEQ ID NO: 49630 - DNA, 20 bp, synthetic construct
  source 1..20: mol_type = other DNA
tggtgcggtatcagctcact

SEQ ID NO: 49631 - DNA, 20 bp, synthetic construct
  source 1..20: mol_type = other DNA
gtggtgcggtatcagctcac

SEQ ID NO: 49632 - DNA, 20 bp, synthetic construct
  source 1..20: mol_type = other DNA
agtggtgcggtatcagctca

SEQ ID NO: 49633 - DNA, 20 bp, synthetic construct
  source 1..20: mol_type = other DNA
cagtggtgcggtatcagctc

SEQ ID NO: 49634 - DNA, 20 bp, synthetic construct
  source 1..20: mol_type = other DNA
gcagtggtgcggtatcagct

SEQ ID NO: 49635 - DNA, 20 bp, synthetic construct
  source 1..20: mol_type = other DNA
tgcagtggtgcggtatcagc

SEQ ID NO: 49636 - DNA, 20 bp, synthetic construct
  source 1..20: mol_type = other DNA
gtgcagtggtgcggtatcag

SEQ ID NO: 49637 - DNA, 20 bp, synthetic construct
  source 1..20: mol_type = other DNA
agtgcagtggtgcggtatca

SEQ ID NO: 49638 - DNA, 20 bp, synthetic construct
  source 1..20: mol_type = other DNA
gagtgcagtggtgcggtatc

SEQ ID NO: 49639 - DNA, 20 bp, synthetic construct
  source 1..20: mol_type = other DNA
ggagtgcagtggtgcggtat

SEQ ID NO: 49640 - DNA, 20 bp, synthetic construct
  source 1..20: mol_type = other DNA
tggagtgcagtggtgcggta

SEQ ID NO: 49641 - DNA, 20 bp, synthetic construct
  source 1..20: mol_type = other DNA
ctggagtgcagtggtgcggt

SEQ ID NO: 49642 - DNA, 20 bp, synthetic construct
  source 1..20: mol_type = other DNA
gctggagtgcagtggtgcgg

SEQ ID NO: 49643 - DNA, 20 bp, synthetic construct
  source 1..20: mol_type = other DNA
ggctggagtgcagtggtgcg

SEQ ID NO: 49644 - DNA, 20 bp, synthetic construct
  source 1..20: mol_type = other DNA
aggctggagtgcagtggtgc

SEQ ID NO: 49645 - DNA, 20 bp, synthetic construct
  source 1..20: mol_type = other DNA
caggctggagtgcagtggtg

SEQ ID NO: 49646 - DNA, 20 bp, synthetic construct
  source 1..20: mol_type = other DNA
ccaggctggagtgcagtggt

SEQ ID NO: 49647 - DNA, 20 bp, synthetic construct
  source 1..20: mol_type = other DNA
cccaggctggagtgcagtgg

SEQ ID NO: 49648 - DNA, 20 bp, synthetic construct
  source 1..20: mol_type = other DNA
acccaggctggagtgcagtg

SEQ ID NO: 49649 - DNA, 20 bp, synthetic construct
  source 1..20: mol_type = other DNA
cacccaggctggagtgcagt

SEQ ID NO: 49650 - DNA, 20 bp, synthetic construct
  source 1..20: mol_type = other DNA
tcacccaggctggagtgcag

SEQ ID NO: 49651 - DNA, 20 bp, synthetic construct
  source 1..20: mol_type = other DNA
gtcacccaggctggagtgca

SEQ ID NO: 49652 - DNA, 20 bp, synthetic construct
  source 1..20: mol_type = other DNA
tgtcacccaggctggagtgc

SEQ ID NO: 49653 - DNA, 20 bp, synthetic construct
  source 1..20: mol_type = other DNA
ctgtcacccaggctggagtg

SEQ ID NO: 49654 - DNA, 20 bp, synthetic construct
  source 1..20: mol_type = other DNA
tctgtcacccaggctggagt

SEQ ID NO: 49655 - DNA, 20 bp, synthetic construct
  source 1..20: mol_type = other DNA
ctctgtcacccaggctggag

SEQ ID NO: 49656 - DNA, 20 bp, synthetic construct
  source 1..20: mol_type = other DNA
gctctgtcacccaggctgga

SEQ ID NO: 49657 - DNA, 20 bp, synthetic construct
  source 1..20: mol_type = other DNA
tgctctgtcacccaggctgg

SEQ ID NO: 49658 - DNA, 20 bp, synthetic construct
  source 1..20: mol_type = other DNA
ttgctctgtcacccaggctg

SEQ ID NO: 49659 - DNA, 20 bp, synthetic construct
  source 1..20: mol_type = other DNA
cttgctctgtcacccaggct

SEQ ID NO: 49660 - DNA, 20 bp, synthetic construct
  source 1..20: mol_type = other DNA
tcttgctctgtcacccaggc

SEQ ID NO: 49661 - DNA, 20 bp, synthetic construct
  source 1..20: mol_type = other DNA
gtcttgctctgtcacccagg

SEQ ID NO: 49662 - DNA, 20 bp, synthetic construct
  source 1..20: mol_type = other DNA
agtcttgctctgtcacccag

SEQ ID NO: 49663 - DNA, 20 bp, synthetic construct
  source 1..20: mol_type = other DNA
gagtcttgctctgtcaccca

SEQ ID NO: 49664 - DNA, 20 bp, synthetic construct
  source 1..20: mol_type = other DNA
ggagtcttgctctgtcaccc

SEQ ID NO: 49665 - DNA, 20 bp, synthetic construct
  source 1..20: mol_type = other DNA
cggagtcttgctctgtcacc

SEQ ID NO: 49666 - DNA, 20 bp, synthetic construct
  source 1..20: mol_type = other DNA
acggagtcttgctctgtcac

SEQ ID NO: 49667 - DNA, 20 bp, synthetic construct
  source 1..20: mol_type = other DNA
aacggagtcttgctctgtca

SEQ ID NO: 49668 - DNA, 20 bp, synthetic construct
  source 1..20: mol_type = other DNA
aaacggagtcttgctctgtc

SEQ ID NO: 49669 - DNA, 20 bp, synthetic construct
  source 1..20: mol_type = other DNA
gaaacggagtcttgctctgt

SEQ ID NO: 49670 - DNA, 20 bp, synthetic construct
  source 1..20: mol_type = other DNA
tgaaacggagtcttgctctg

SEQ ID NO: 49671 - DNA, 20 bp, synthetic construct
  source 1..20: mol_type = other DNA
ttgaaacggagtcttgctct

SEQ ID NO: 49672 - DNA, 20 bp, synthetic construct
  source 1..20: mol_type = other DNA
tttgaaacggagtcttgctc

SEQ ID NO: 49673 - DNA, 20 bp, synthetic construct
  source 1..20: mol_type = other DNA
ttttgaaacggagtcttgct

SEQ ID NO: 49674 - DNA, 20 bp, synthetic construct
  source 1..20: mol_type = other DNA
tttttgaaacggagtcttgc

SEQ ID NO: 49675 - DNA, 20 bp, synthetic construct
  source 1..20: mol_type = other DNA
ttttttgaaacggagtcttg

SEQ ID NO: 49676 - DNA, 20 bp, synthetic construct
  source 1..20: mol_type = other DNA
tttttttgaaacggagtctt

SEQ ID NO: 49677 - DNA, 20 bp, synthetic construct
  source 1..20: mol_type = other DNA
ttttttttgaaacggagtct

SEQ ID NO: 49678 - DNA, 20 bp, synthetic construct
  source 1..20: mol_type = other DNA
tttttttttgaaacggagtc

SEQ ID NO: 49679 - DNA, 20 bp, synthetic construct
  source 1..20: mol_type = other DNA
ttttttttttgaaacggagt

SEQ ID NO: 49680 - DNA, 20 bp, synthetic construct
  source 1..20: mol_type = other DNA
tttttttttttgaaacggag

SEQ ID NO: 49681 - DNA, 20 bp, synthetic construct
  source 1..20: mol_type = other DNA
ctttttttttttgaaacgga

SEQ ID NO: 49682 - DNA, 20 bp, synthetic construct
  source 1..20: mol_type = other DNA
tctttttttttttgaaacgg

SEQ ID NO: 49683 - DNA, 20 bp, synthetic construct
  source 1..20: mol_type = other DNA
ttctttttttttttgaaacg

SEQ ID NO: 49684 - DNA, 20 bp, synthetic construct
  source 1..20: mol_type = other DNA
tttctttttttttttgaaac

SEQ ID NO: 49685 - DNA, 20 bp, synthetic construct
  source 1..20: mol_type = other DNA
ctttctttttttttttgaaa

SEQ ID NO: 49686 - DNA, 20 bp, synthetic construct
  source 1..20: mol_type = other DNA
tctttctttttttttttgaa

SEQ ID NO: 49687 - DNA, 20 bp, synthetic construct
  source 1..20: mol_type = other DNA
ttctttctttttttttttga

SEQ ID NO: 49688 - DNA, 20 bp, synthetic construct
  source 1..20: mol_type = other DNA
tttctttctttttttttttg

SEQ ID NO: 49689 - DNA, 20 bp, synthetic construct
  source 1..20: mol_type = other DNA
ttttctttcttttttttttt

SEQ ID NO: 49690 - DNA, 20 bp, synthetic construct
  source 1..20: mol_type = other DNA
tttttctttctttttttttt

SEQ ID NO: 49691 - DNA, 20 bp, synthetic construct
  source 1..20: mol_type = other DNA
ttttttctttcttttttttt

SEQ ID NO: 49692 - DNA, 20 bp, synthetic construct
  source 1..20: mol_type = other DNA
cttttttctttctttttttt

SEQ ID NO: 49693 - DNA, 20 bp, synthetic construct
  source 1..20: mol_type = other DNA
tcttttttctttcttttttt

SEQ ID NO: 49694 - DNA, 20 bp, synthetic construct
  source 1..20: mol_type = other DNA
ttcttttttctttctttttt

SEQ ID NO: 49695 - DNA, 20 bp, synthetic construct
  source 1..20: mol_type = other DNA
tttcttttttctttcttttt

SEQ ID NO: 49696 - DNA, 20 bp, synthetic construct
  source 1..20: mol_type = other DNA
atttcttttttctttctttt

SEQ ID NO: 49697 - DNA, 20 bp, synthetic construct
  source 1..20: mol_type = other DNA
tatttcttttttctttcttt

SEQ ID NO: 49698 - DNA, 20 bp, synthetic construct
  source 1..20: mol_type = other DNA
atatttcttttttctttctt

SEQ ID NO: 49699 - DNA, 20 bp, synthetic construct
  source 1..20: mol_type = other DNA
gatatttcttttttctttct

SEQ ID NO: 49700 - DNA, 20 bp, synthetic construct
  source 1..20: mol_type = other DNA
agatatttcttttttctttc

SEQ ID NO: 49701 - DNA, 20 bp, synthetic construct
  source 1..20: mol_type = other DNA
tagatatttcttttttcttt

SEQ ID NO: 49702 - DNA, 20 bp, synthetic construct
  source 1..20: mol_type = other DNA
gtagatatttcttttttctt

SEQ ID NO: 49703 - DNA, 20 bp, synthetic construct
  source 1..20: mol_type = other DNA
agtagatatttcttttttct

SEQ ID NO: 49704 - DNA, 20 bp, synthetic construct
  source 1..20: mol_type = other DNA
aagtagatatttcttttttc

SEQ ID NO: 49705 - DNA, 20 bp, synthetic construct
  source 1..20: mol_type = other DNA
aaagtagatatttctttttt

SEQ ID NO: 49706 - DNA, 20 bp, synthetic construct
  source 1..20: mol_type = other DNA
gaaagtagatatttcttttt

SEQ ID NO: 49707 - DNA, 20 bp, synthetic construct
  source 1..20: mol_type = other DNA
agaaagtagatatttctttt

SEQ ID NO: 49708 - DNA, 20 bp, synthetic construct
  source 1..20: mol_type = other DNA
tagaaagtagatatttcttt

SEQ ID NO: 49709 - DNA, 20 bp, synthetic construct
  source 1..20: mol_type = other DNA
ctagaaagtagatatttctt

SEQ ID NO: 49710 - DNA, 20 bp, synthetic construct
  source 1..20: mol_type = other DNA
tctagaaagtagatatttct

SEQ ID NO: 49711 - DNA, 20 bp, synthetic construct
  source 1..20: mol_type = other DNA
ttctagaaagtagatatttc

SEQ ID NO: 49712 - DNA, 20 bp, synthetic construct
  source 1..20: mol_type = other DNA
attctagaaagtagatattt

SEQ ID NO: 49713 - DNA, 20 bp, synthetic construct
  source 1..20: mol_type = other DNA
tattctagaaagtagatatt

SEQ ID NO: 49714 - DNA, 20 bp, synthetic construct
  source 1..20: mol_type = other DNA
ctattctagaaagtagatat

SEQ ID NO: 49715 - DNA, 20 bp, synthetic construct
  source 1..20: mol_type = other DNA
gctattctagaaagtagata

SEQ ID NO: 49716 - DNA, 20 bp, synthetic construct
  source 1..20: mol_type = other DNA
ggctattctagaaagtagat

SEQ ID NO: 49717 - DNA, 20 bp, synthetic construct
  source 1..20: mol_type = other DNA
gggctattctagaaagtaga

SEQ ID NO: 49718 - DNA, 20 bp, synthetic construct
  source 1..20: mol_type = other DNA
tgggctattctagaaagtag

SEQ ID NO: 49719 - DNA, 20 bp, synthetic construct
  source 1..20: mol_type = other DNA
ttgggctattctagaaagta

SEQ ID NO: 49720 - DNA, 20 bp, synthetic construct
  source 1..20: mol_type = other DNA
cttgggctattctagaaagt

SEQ ID NO: 49721 - DNA, 20 bp, synthetic construct
  source 1..20: mol_type = other DNA
acttgggctattctagaaag

SEQ ID NO: 49722 - DNA, 20 bp, synthetic construct
  source 1..20: mol_type = other DNA
tacttgggctattctagaaa

SEQ ID NO: 49723 - DNA, 20 bp, synthetic construct
  source 1..20: mol_type = other DNA
ttacttgggctattctagaa

SEQ ID NO: 49724 - DNA, 20 bp, synthetic construct
  source 1..20: mol_type = other DNA
cttacttgggctattctaga

SEQ ID NO: 49725 - DNA, 20 bp, synthetic construct
  source 1..20: mol_type = other DNA
ccttacttgggctattctag

SEQ ID NO: 49726 - DNA, 20 bp, synthetic construct
  source 1..20: mol_type = other DNA
accttacttgggctattcta

SEQ ID NO: 49727 - DNA, 20 bp, synthetic construct
  source 1..20: mol_type = other DNA
taccttacttgggctattct

SEQ ID NO: 49728 - DNA, 20 bp, synthetic construct
  source 1..20: mol_type = other DNA
ttaccttacttgggctattc

SEQ ID NO: 49729 - DNA, 20 bp, synthetic construct
  source 1..20: mol_type = other DNA
attaccttacttgggctatt

SEQ ID NO: 49730 - DNA, 20 bp, synthetic construct
  source 1..20: mol_type = other DNA
aattaccttacttgggctat

SEQ ID NO: 49731 - DNA, 20 bp, synthetic construct
  source 1..20: mol_type = other DNA
aaattaccttacttgggcta

SEQ ID NO: 49732 - DNA, 20 bp, synthetic construct
  source 1..20: mol_type = other DNA
aaaattaccttacttgggct

SEQ ID NO: 49733 - DNA, 20 bp, synthetic construct
  source 1..20: mol_type = other DNA
aaaaattaccttacttgggc

SEQ ID NO: 49734 - DNA, 20 bp, synthetic construct
  source 1..20: mol_type = other DNA
aaaaaattaccttacttggg

SEQ ID NO: 49735 - DNA, 20 bp, synthetic construct
  source 1..20: mol_type = other DNA
taaaaaattaccttacttgg

SEQ ID NO: 49736 - DNA, 20 bp, synthetic construct
  source 1..20: mol_type = other DNA
ctaaaaaattaccttacttg

SEQ ID NO: 49737 - DNA, 20 bp, synthetic construct
  source 1..20: mol_type = other DNA
tctaaaaaattaccttactt

SEQ ID NO: 49738 - DNA, 20 bp, synthetic construct
  source 1..20: mol_type = other DNA
ttctaaaaaattaccttact

SEQ ID NO: 49739 - DNA, 20 bp, synthetic construct
  source 1..20: mol_type = other DNA
tttctaaaaaattaccttac

SEQ ID NO: 49740 - DNA, 20 bp, synthetic construct
  source 1..20: mol_type = other DNA
ttttctaaaaaattacctta

SEQ ID NO: 49741 - DNA, 20 bp, synthetic construct
  source 1..20: mol_type = other DNA
tttttctaaaaaattacctt

SEQ ID NO: 49742 - DNA, 20 bp, synthetic construct
  source 1..20: mol_type = other DNA
atttttctaaaaaattacct

SEQ ID NO: 49743 - DNA, 20 bp, synthetic construct
  source 1..20: mol_type = other DNA
catttttctaaaaaattacc

SEQ ID NO: 49744 - DNA, 20 bp, synthetic construct
  source 1..20: mol_type = other DNA
tcatttttctaaaaaattac

SEQ ID NO: 49745 - DNA, 20 bp, synthetic construct
  source 1..20: mol_type = other DNA
ctcatttttctaaaaaatta

SEQ ID NO: 49746 - DNA, 20 bp, synthetic construct
  source 1..20: mol_type = other DNA
tctcatttttctaaaaaatt

SEQ ID NO: 49747 - DNA, 20 bp, synthetic construct
  source 1..20: mol_type = other DNA
ttctcatttttctaaaaaat

SEQ ID NO: 49748 - DNA, 20 bp, synthetic construct
  source 1..20: mol_type = other DNA
attctcatttttctaaaaaa

SEQ ID NO: 49749 - DNA, 20 bp, synthetic construct
  source 1..20: mol_type = other DNA
cattctcatttttctaaaaa

SEQ ID NO: 49750 - DNA, 20 bp, synthetic construct
  source 1..20: mol_type = other DNA
acattctcatttttctaaaa

SEQ ID NO: 49751 - DNA, 20 bp, synthetic construct
  source 1..20: mol_type = other DNA
aacattctcatttttctaaa

SEQ ID NO: 49752 - DNA, 20 bp, synthetic construct
  source 1..20: mol_type = other DNA
taacattctcatttttctaa

SEQ ID NO: 49753 - DNA, 20 bp, synthetic construct
  source 1..20: mol_type = other DNA
ttaacattctcatttttcta

SEQ ID NO: 49754 - DNA, 20 bp, synthetic construct
  source 1..20: mol_type = other DNA
attaacattctcatttttct

SEQ ID NO: 49755 - DNA, 20 bp, synthetic construct
  source 1..20: mol_type = other DNA
cattaacattctcatttttc

SEQ ID NO: 49756 - DNA, 20 bp, synthetic construct
  source 1..20: mol_type = other DNA
gcattaacattctcattttt

SEQ ID NO: 49757 - DNA, 20 bp, synthetic construct
  source 1..20: mol_type = other DNA
tgcattaacattctcatttt

SEQ ID NO: 49758 - DNA, 20 bp, synthetic construct
  source 1..20: mol_type = other DNA
atgcattaacattctcattt

SEQ ID NO: 49759 - DNA, 20 bp, synthetic construct
  source 1..20: mol_type = other DNA
aatgcattaacattctcatt

SEQ ID NO: 49760 - DNA, 20 bp, synthetic construct
  source 1..20: mol_type = other DNA
aaatgcattaacattctcat

SEQ ID NO: 49761 - DNA, 20 bp, synthetic construct
  source 1..20: mol_type = other DNA
aaaatgcattaacattctca

SEQ ID NO: 49762 - DNA, 20 bp, synthetic construct
  source 1..20: mol_type = other DNA
aaaaatgcattaacattctc

SEQ ID NO: 49763 - DNA, 20 bp, synthetic construct
  source 1..20: mol_type = other DNA
caaaaatgcattaacattct

SEQ ID NO: 49764 - DNA, 20 bp, synthetic construct
  source 1..20: mol_type = other DNA
acaaaaatgcattaacattc

SEQ ID NO: 49765 - DNA, 20 bp, synthetic construct
  source 1..20: mol_type = other DNA
aacaaaaatgcattaacatt

SEQ ID NO: 49766 - DNA, 20 bp, synthetic construct
  source 1..20: mol_type = other DNA
caacaaaaatgcattaacat

SEQ ID NO: 49767 - DNA, 20 bp, synthetic construct
  source 1..20: mol_type = other DNA
ccaacaaaaatgcattaaca

SEQ ID NO: 49768 - DNA, 20 bp, synthetic construct
  source 1..20: mol_type = other DNA
tccaacaaaaatgcattaac

SEQ ID NO: 49769 - DNA, 20 bp, synthetic construct
  source 1..20: mol_type = other DNA
ttccaacaaaaatgcattaa

SEQ ID NO: 49770 - DNA, 20 bp, synthetic construct
  source 1..20: mol_type = other DNA
tttccaacaaaaatgcatta

SEQ ID NO: 49771 - DNA, 20 bp, synthetic construct
  source 1..20: mol_type = other DNA
ttttccaacaaaaatgcatt

SEQ ID NO: 49772 - DNA, 20 bp, synthetic construct
  source 1..20: mol_type = other DNA
gttttccaacaaaaatgcat

SEQ ID NO: 49773 - DNA, 20 bp, synthetic construct
  source 1..20: mol_type = other DNA
tgttttccaacaaaaatgca

SEQ ID NO: 49774 - DNA, 20 bp, synthetic construct
  source 1..20: mol_type = other DNA
ttgttttccaacaaaaatgc

SEQ ID NO: 49775 - DNA, 20 bp, synthetic construct
  source 1..20: mol_type = other DNA
attgttttccaacaaaaatg

SEQ ID NO: 49776 - DNA, 20 bp, synthetic construct
  source 1..20: mol_type = other DNA
aattgttttccaacaaaaat

SEQ ID NO: 49777 - DNA, 20 bp, synthetic construct
  source 1..20: mol_type = other DNA
taattgttttccaacaaaaa

SEQ ID NO: 49778 - DNA, 20 bp, synthetic construct
  source 1..20: mol_type = other DNA
ctaattgttttccaacaaaa

SEQ ID NO: 49779 - DNA, 20 bp, synthetic construct
  source 1..20: mol_type = other DNA
tctaattgttttccaacaaa

SEQ ID NO: 49780 - DNA, 20 bp, synthetic construct
  source 1..20: mol_type = other DNA
ttctaattgttttccaacaa

SEQ ID NO: 49781 - DNA, 20 bp, synthetic construct
  source 1..20: mol_type = other DNA
gttctaattgttttccaaca

SEQ ID NO: 49782 - DNA, 20 bp, synthetic construct
  source 1..20: mol_type = other DNA
agttctaattgttttccaac

SEQ ID NO: 49783 - DNA, 20 bp, synthetic construct
  source 1..20: mol_type = other DNA
aagttctaattgttttccaa

SEQ ID NO: 49784 - DNA, 20 bp, synthetic construct
  source 1..20: mol_type = other DNA
aaagttctaattgttttcca

SEQ ID NO: 49785 - DNA, 20 bp, synthetic construct
  source 1..20: mol_type = other DNA
taaagttctaattgttttcc

SEQ ID NO: 49786 - DNA, 20 bp, synthetic construct
  source 1..20: mol_type = other DNA
ctaaagttctaattgttttc

SEQ ID NO: 49787 - DNA, 20 bp, synthetic construct
  source 1..20: mol_type = other DNA
tctaaagttctaattgtttt

SEQ ID NO: 49788 - DNA, 20 bp, synthetic construct
  source 1..20: mol_type = other DNA
ctctaaagttctaattgttt

SEQ ID NO: 49789 - DNA, 20 bp, synthetic construct
  source 1..20: mol_type = other DNA
tctctaaagttctaattgtt

SEQ ID NO: 49790 - DNA, 20 bp, synthetic construct
  source 1..20: mol_type = other DNA
ttctctaaagttctaattgt

SEQ ID NO: 49791 - DNA, 20 bp, synthetic construct
  source 1..20: mol_type = other DNA
tttctctaaagttctaattg

SEQ ID NO: 49792 - DNA, 20 bp, synthetic construct
  source 1..20: mol_type = other DNA
ttttctctaaagttctaatt

SEQ ID NO: 49793 - DNA, 20 bp, synthetic construct
  source 1..20: mol_type = other DNA
tttttctctaaagttctaat

SEQ ID NO: 49794 - DNA, 20 bp, synthetic construct
  source 1..20: mol_type = other DNA
atttttctctaaagttctaa

SEQ ID NO: 49795 - DNA, 20 bp, synthetic construct
  source 1..20: mol_type = other DNA
aatttttctctaaagttcta

SEQ ID NO: 49796 - DNA, 20 bp, synthetic construct
  source 1..20: mol_type = other DNA
taatttttctctaaagttct

SEQ ID NO: 49797 - DNA, 20 bp, synthetic construct
  source 1..20: mol_type = other DNA
ttaatttttctctaaagttc

SEQ ID NO: 49798 - DNA, 20 bp, synthetic construct
  source 1..20: mol_type = other DNA
tttaatttttctctaaagtt

SEQ ID NO: 49799 - DNA, 20 bp, synthetic construct
  source 1..20: mol_type = other DNA
atttaatttttctctaaagt

SEQ ID NO: 49800 - DNA, 20 bp, synthetic construct
  source 1..20: mol_type = other DNA
tatttaatttttctctaaag

SEQ ID NO: 49801 - DNA, 20 bp, synthetic construct
  source 1..20: mol_type = other DNA
ctatttaatttttctctaaa

SEQ ID NO: 49802 - DNA, 20 bp, synthetic construct
  source 1..20: mol_type = other DNA
tctatttaatttttctctaa

SEQ ID NO: 49803 - DNA, 20 bp, synthetic construct
  source 1..20: mol_type = other DNA
ctctatttaatttttctcta

SEQ ID NO: 49804 - DNA, 20 bp, synthetic construct
  source 1..20: mol_type = other DNA
actctatttaatttttctct

SEQ ID NO: 49805 - DNA, 20 bp, synthetic construct
  source 1..20: mol_type = other DNA
aactctatttaatttttctc

SEQ ID NO: 49806 - DNA, 20 bp, synthetic construct
  source 1..20: mol_type = other DNA
aaactctatttaatttttct

SEQ ID NO: 49807 - DNA, 20 bp, synthetic construct
  source 1..20: mol_type = other DNA
aaaactctatttaatttttc

SEQ ID NO: 49808 - DNA, 20 bp, synthetic construct
  source 1..20: mol_type = other DNA
aaaaactctatttaattttt

SEQ ID NO: 49809 - DNA, 20 bp, synthetic construct
  source 1..20: mol_type = other DNA
caaaaactctatttaatttt

SEQ ID NO: 49810 - DNA, 20 bp, synthetic construct
  source 1..20: mol_type = other DNA
acaaaaactctatttaattt

SEQ ID NO: 49811 - DNA, 20 bp, synthetic construct
  source 1..20: mol_type = other DNA
cacaaaaactctatttaatt

SEQ ID NO: 49812 - DNA, 20 bp, synthetic construct
  source 1..20: mol_type = other DNA
tcacaaaaactctatttaat

SEQ ID NO: 49813 - DNA, 20 bp, synthetic construct
  source 1..20: mol_type = other DNA
atcacaaaaactctatttaa

SEQ ID NO: 49814 - DNA, 20 bp, synthetic construct
  source 1..20: mol_type = other DNA
gatcacaaaaactctattta

SEQ ID NO: 49815 - DNA, 20 bp, synthetic construct
  source 1..20: mol_type = other DNA
agatcacaaaaactctattt

SEQ ID NO: 49816 - DNA, 20 bp, synthetic construct
  source 1..20: mol_type = other DNA
gagatcacaaaaactctatt

SEQ ID NO: 49817 - DNA, 20 bp, synthetic construct
  source 1..20: mol_type = other DNA
agagatcacaaaaactctat

SEQ ID NO: 49818 - DNA, 20 bp, synthetic construct
  source 1..20: mol_type = other DNA
aagagatcacaaaaactcta

SEQ ID NO: 49819 - DNA, 20 bp, synthetic construct
  source 1..20: mol_type = other DNA
taagagatcacaaaaactct

SEQ ID NO: 49820 - DNA, 20 bp, synthetic construct
  source 1..20: mol_type = other DNA
ttaagagatcacaaaaactc

SEQ ID NO: 49821 - DNA, 20 bp, synthetic construct
  source 1..20: mol_type = other DNA
tttaagagatcacaaaaact

SEQ ID NO: 49822 - DNA, 20 bp, synthetic construct
  source 1..20: mol_type = other DNA
ttttaagagatcacaaaaac

SEQ ID NO: 49823 - DNA, 20 bp, synthetic construct
  source 1..20: mol_type = other DNA
tttttaagagatcacaaaaa

SEQ ID NO: 49824 - DNA, 20 bp, synthetic construct
  source 1..20: mol_type = other DNA
ttttttaagagatcacaaaa

SEQ ID NO: 49825 - DNA, 20 bp, synthetic construct
  source 1..20: mol_type = other DNA
attttttaagagatcacaaa

SEQ ID NO: 49826 - DNA, 20 bp, synthetic construct
  source 1..20: mol_type = other DNA
aattttttaagagatcacaa

SEQ ID NO: 49827 - DNA, 20 bp, synthetic construct
  source 1..20: mol_type = other DNA
taattttttaagagatcaca

SEQ ID NO: 49828 - DNA, 20 bp, synthetic construct
  source 1..20: mol_type = other DNA
ctaattttttaagagatcac

SEQ ID NO: 49829 - DNA, 20 bp, synthetic construct
  source 1..20: mol_type = other DNA
actaattttttaagagatca

SEQ ID NO: 49830 - DNA, 20 bp, synthetic construct
  source 1..20: mol_type = other DNA
aactaattttttaagagatc

SEQ ID NO: 49831 - DNA, 20 bp, synthetic construct
  source 1..20: mol_type = other DNA
aaactaattttttaagagat

SEQ ID NO: 49832 - DNA, 20 bp, synthetic construct
  source 1..20: mol_type = other DNA
caaactaattttttaagaga

SEQ ID NO: 49833 - DNA, 20 bp, synthetic construct
  source 1..20: mol_type = other DNA
acaaactaattttttaagag

SEQ ID NO: 49834 - DNA, 20 bp, synthetic construct
  source 1..20: mol_type = other DNA
tacaaactaattttttaaga

SEQ ID NO: 49835 - DNA, 20 bp, synthetic construct
  source 1..20: mol_type = other DNA
ttacaaactaattttttaag

SEQ ID NO: 49836 - DNA, 20 bp, synthetic construct
  source 1..20: mol_type = other DNA
tttacaaactaattttttaa

SEQ ID NO: 49837 - DNA, 20 bp, synthetic construct
  source 1..20: mol_type = other DNA
ctttacaaactaatttttta

SEQ ID NO: 49838 - DNA, 20 bp, synthetic construct
  source 1..20: mol_type = other DNA
gctttacaaactaatttttt

SEQ ID NO: 49839 - DNA, 20 bp, synthetic construct
  source 1..20: mol_type = other DNA
tgctttacaaactaattttt

SEQ ID NO: 49840 - DNA, 20 bp, synthetic construct
  source 1..20: mol_type = other DNA
atgctttacaaactaatttt

SEQ ID NO: 49841 - DNA, 20 bp, synthetic construct
  source 1..20: mol_type = other DNA
aatgctttacaaactaattt

SEQ ID NO: 49842 - DNA, 20 bp, synthetic construct
  source 1..20: mol_type = other DNA
aaatgctttacaaactaatt

SEQ ID NO: 49843 - DNA, 20 bp, synthetic construct
  source 1..20: mol_type = other DNA
aaaatgctttacaaactaat

SEQ ID NO: 49844 - DNA, 20 bp, synthetic construct
  source 1..20: mol_type = other DNA
gaaaatgctttacaaactaa

SEQ ID NO: 49845 - DNA, 20 bp, synthetic construct
  source 1..20: mol_type = other DNA
agaaaatgctttacaaacta

SEQ ID NO: 49846 - DNA, 20 bp, synthetic construct
  source 1..20: mol_type = other DNA
tagaaaatgctttacaaact

SEQ ID NO: 49847 - DNA, 20 bp, synthetic construct
  source 1..20: mol_type = other DNA
gtagaaaatgctttacaaac

SEQ ID NO: 49848 - DNA, 20 bp, synthetic construct
  source 1..20: mol_type = other DNA
tgtagaaaatgctttacaaa

SEQ ID NO: 49849 - DNA, 20 bp, synthetic construct
  source 1..20: mol_type = other DNA
ctgtagaaaatgctttacaa

SEQ ID NO: 49850 - DNA, 20 bp, synthetic construct
  source 1..20: mol_type = other DNA
actgtagaaaatgctttaca

SEQ ID NO: 49851 - DNA, 20 bp, synthetic construct
  source 1..20: mol_type = other DNA
aactgtagaaaatgctttac

SEQ ID NO: 49852 - DNA, 20 bp, synthetic construct
  source 1..20: mol_type = other DNA
aaactgtagaaaatgcttta

SEQ ID NO: 49853 - DNA, 20 bp, synthetic construct
  source 1..20: mol_type = other DNA
aaaactgtagaaaatgcttt

SEQ ID NO: 49854 - DNA, 20 bp, synthetic construct
  source 1..20: mol_type = other DNA
caaaactgtagaaaatgctt

SEQ ID NO: 49855 - DNA, 20 bp, synthetic construct
  source 1..20: mol_type = other DNA
acaaaactgtagaaaatgct

SEQ ID NO: 49856 - DNA, 20 bp, synthetic construct
  source 1..20: mol_type = other DNA
cacaaaactgtagaaaatgc

SEQ ID NO: 49857 - DNA, 20 bp, synthetic construct
  source 1..20: mol_type = other DNA
ccacaaaactgtagaaaatg

SEQ ID NO: 49858 - DNA, 20 bp, synthetic construct
  source 1..20: mol_type = other DNA
accacaaaactgtagaaaat

SEQ ID NO: 49859 - DNA, 20 bp, synthetic construct
  source 1..20: mol_type = other DNA
gaccacaaaactgtagaaaa

SEQ ID NO: 49860 - DNA, 20 bp, synthetic construct
  source 1..20: mol_type = other DNA
tgaccacaaaactgtagaaa

SEQ ID NO: 49861 - DNA, 20 bp, synthetic construct
  source 1..20: mol_type = other DNA
ttgaccacaaaactgtagaa

SEQ ID NO: 49862 - DNA, 20 bp, synthetic construct
  source 1..20: mol_type = other DNA
cttgaccacaaaactgtaga

SEQ ID NO: 49863 - DNA, 20 bp, synthetic construct
  source 1..20: mol_type = other DNA
tcttgaccacaaaactgtag

SEQ ID NO: 49864 - DNA, 20 bp, synthetic construct
  source 1..20: mol_type = other DNA
ttcttgaccacaaaactgta

SEQ ID NO: 49865 - DNA, 20 bp, synthetic construct
  source 1..20: mol_type = other DNA
attcttgaccacaaaactgt

SEQ ID NO: 49866 - DNA, 20 bp, synthetic construct
  source 1..20: mol_type = other DNA
cattcttgaccacaaaactg

SEQ ID NO: 49867 - DNA, 20 bp, synthetic construct
  source 1..20: mol_type = other DNA
gcattcttgaccacaaaact

SEQ ID NO: 49868 - DNA, 20 bp, synthetic construct
  source 1..20: mol_type = other DNA
agcattcttgaccacaaaac

SEQ ID NO: 49869 - DNA, 20 bp, synthetic construct
  source 1..20: mol_type = other DNA
tagcattcttgaccacaaaa

SEQ ID NO: 49870 - DNA, 20 bp, synthetic construct
  source 1..20: mol_type = other DNA
gtagcattcttgaccacaaa

SEQ ID NO: 49871 - DNA, 20 bp, synthetic construct
  source 1..20: mol_type = other DNA
agtagcattcttgaccacaa

SEQ ID NO: 49872 - DNA, 20 bp, synthetic construct
  source 1..20: mol_type = other DNA
cagtagcattcttgaccaca

SEQ ID NO: 49873 - DNA, 20 bp, synthetic construct
  source 1..20: mol_type = other DNA
tcagtagcattcttgaccac

SEQ ID NO: 49874 - DNA, 20 bp, synthetic construct
  source 1..20: mol_type = other DNA
atcagtagcattcttgacca

SEQ ID NO: 49875 - DNA, 20 bp, synthetic construct
  source 1..20: mol_type = other DNA
aatcagtagcattcttgacc

SEQ ID NO: 49876 - DNA, 20 bp, synthetic construct
  source 1..20: mol_type = other DNA
taatcagtagcattcttgac

SEQ ID NO: 49877 - DNA, 20 bp, synthetic construct
  source 1..20: mol_type = other DNA
ataatcagtagcattcttga

SEQ ID NO: 49878 - DNA, 20 bp, synthetic construct
  source 1..20: mol_type = other DNA
tataatcagtagcattcttg

SEQ ID NO: 49879 - DNA, 20 bp, synthetic construct
  source 1..20: mol_type = other DNA
atataatcagtagcattctt

SEQ ID NO: 49880 - DNA, 20 bp, synthetic construct
  source 1..20: mol_type = other DNA
aatataatcagtagcattct

SEQ ID NO: 49881 - DNA, 20 bp, synthetic construct
  source 1..20: mol_type = other DNA
gaatataatcagtagcattc

SEQ ID NO: 49882 - DNA, 20 bp, synthetic construct
  source 1..20: mol_type = other DNA
tgaatataatcagtagcatt

SEQ ID NO: 49883 - DNA, 20 bp, synthetic construct
  source 1..20: mol_type = other DNA
ttgaatataatcagtagcat

SEQ ID NO: 49884 - DNA, 20 bp, synthetic construct
  source 1..20: mol_type = other DNA
gttgaatataatcagtagca

SEQ ID NO: 49885 - DNA, 20 bp, synthetic construct
  source 1..20: mol_type = other DNA
agttgaatataatcagtagc

SEQ ID NO: 49886 - DNA, 20 bp, synthetic construct
  source 1..20: mol_type = other DNA
cagttgaatataatcagtag

SEQ ID NO: 49887 - DNA, 20 bp, synthetic construct
  source 1..20: mol_type = other DNA
tcagttgaatataatcagta

SEQ ID NO: 49888 - DNA, 20 bp, synthetic construct
  source 1..20: mol_type = other DNA
ttcagttgaatataatcagt

SEQ ID NO: 49889 - DNA, 20 bp, synthetic construct
  source 1..20: mol_type = other DNA
tttcagttgaatataatcag

SEQ ID NO: 49890 - DNA, 20 bp, synthetic construct
  source 1..20: mol_type = other DNA
ttttcagttgaatataatca

SEQ ID NO: 49891 - DNA, 20 bp, synthetic construct
  source 1..20: mol_type = other DNA
attttcagttgaatataatc

SEQ ID NO: 49892 - DNA, 20 bp, synthetic construct
  source 1..20: mol_type = other DNA
aattttcagttgaatataat

SEQ ID NO: 49893 - DNA, 20 bp, synthetic construct
  source 1..20: mol_type = other DNA
aaattttcagttgaatataa

SEQ ID NO: 49894 - DNA, 20 bp, synthetic construct
  source 1..20: mol_type = other DNA
gaaattttcagttgaatata

SEQ ID NO: 49895 - DNA, 20 bp, synthetic construct
  source 1..20: mol_type = other DNA
agaaattttcagttgaatat

SEQ ID NO: 49896 - DNA, 20 bp, synthetic construct
  source 1..20: mol_type = other DNA
aagaaattttcagttgaata

SEQ ID NO: 49897 - DNA, 20 bp, synthetic construct
  source 1..20: mol_type = other DNA
caagaaattttcagttgaat

SEQ ID NO: 49898 - DNA, 20 bp, synthetic construct
  source 1..20: mol_type = other DNA
acaagaaattttcagttgaa

SEQ ID NO: 49899 - DNA, 20 bp, synthetic construct
  source 1..20: mol_type = other DNA
gacaagaaattttcagttga

SEQ ID NO: 49900 - DNA, 20 bp, synthetic construct
  source 1..20: mol_type = other DNA
ggacaagaaattttcagttg

SEQ ID NO: 49901 - DNA, 20 bp, synthetic construct
  source 1..20: mol_type = other DNA
gggacaagaaattttcagtt

SEQ ID NO: 49902 - DNA, 20 bp, synthetic construct
  source 1..20: mol_type = other DNA
tgggacaagaaattttcagt

SEQ ID NO: 49903 - DNA, 20 bp, synthetic construct
  source 1..20: mol_type = other DNA
atgggacaagaaattttcag

SEQ ID NO: 49904 - DNA, 20 bp, synthetic construct
  source 1..20: mol_type = other DNA
aatgggacaagaaattttca

SEQ ID NO: 49905 - DNA, 20 bp, synthetic construct
  source 1..20: mol_type = other DNA
aaatgggacaagaaattttc

SEQ ID NO: 49906 - DNA, 20 bp, synthetic construct
  source 1..20: mol_type = other DNA
caaatgggacaagaaatttt

SEQ ID NO: 49907 - DNA, 20 bp, synthetic construct
  source 1..20: mol_type = other DNA
ccaaatgggacaagaaattt

SEQ ID NO: 49908 - DNA, 20 bp, synthetic construct
  source 1..20: mol_type = other DNA
gccaaatgggacaagaaatt

SEQ ID NO: 49909 - DNA, 20 bp, synthetic construct
  source 1..20: mol_type = other DNA
ggccaaatgggacaagaaat

SEQ ID NO: 49910 - DNA, 20 bp, synthetic construct
  source 1..20: mol_type = other DNA
aggccaaatgggacaagaaa

SEQ ID NO: 49911 - DNA, 20 bp, synthetic construct
  source 1..20: mol_type = other DNA
taggccaaatgggacaagaa

SEQ ID NO: 49912 - DNA, 20 bp, synthetic construct
  source 1..20: mol_type = other DNA
gtaggccaaatgggacaaga

SEQ ID NO: 49913 - DNA, 20 bp, synthetic construct
  source 1..20: mol_type = other DNA
tgtaggccaaatgggacaag

SEQ ID NO: 49914 - DNA, 20 bp, synthetic construct
  source 1..20: mol_type = other DNA
ttgtaggccaaatgggacaa

SEQ ID NO: 49915 - DNA, 20 bp, synthetic construct
  source 1..20: mol_type = other DNA
attgtaggccaaatgggaca

SEQ ID NO: 49916 - DNA, 20 bp, synthetic construct
  source 1..20: mol_type = other DNA
cattgtaggccaaatgggac

SEQ ID NO: 49917 - DNA, 20 bp, synthetic construct
  source 1..20: mol_type = other DNA
gcattgtaggccaaatggga

SEQ ID NO: 49918 - DNA, 20 bp, synthetic construct
  source 1..20: mol_type = other DNA
agcattgtaggccaaatggg

SEQ ID NO: 49919 - DNA, 20 bp, synthetic construct
  source 1..20: mol_type = other DNA
aagcattgtaggccaaatgg

SEQ ID NO: 49920 - DNA, 20 bp, synthetic construct
  source 1..20: mol_type = other DNA
aaagcattgtaggccaaatg

SEQ ID NO: 49921 - DNA, 20 bp, synthetic construct
  source 1..20: mol_type = other DNA
taaagcattgtaggccaaat

SEQ ID NO: 49922 - DNA, 20 bp, synthetic construct
  source 1..20: mol_type = other DNA
ctaaagcattgtaggccaaa

SEQ ID NO: 49923 - DNA, 20 bp, synthetic construct
  source 1..20: mol_type = other DNA
actaaagcattgtaggccaa

SEQ ID NO: 49924 - DNA, 20 bp, synthetic construct
  source 1..20: mol_type = other DNA
aactaaagcattgtaggcca

SEQ ID NO: 49925 - DNA, 20 bp, synthetic construct
  source 1..20: mol_type = other DNA
aaactaaagcattgtaggcc

SEQ ID NO: 49926 - DNA, 20 bp, synthetic construct
  source 1..20: mol_type = other DNA
taaactaaagcattgtaggc

SEQ ID NO: 49927 - DNA, 20 bp, synthetic construct
  source 1..20: mol_type = other DNA
ataaactaaagcattgtagg

SEQ ID NO: 49928 - DNA, 20 bp, synthetic construct
  source 1..20: mol_type = other DNA
tataaactaaagcattgtag

SEQ ID NO: 49929 - DNA, 20 bp, synthetic construct
  source 1..20: mol_type = other DNA
ttataaactaaagcattgta

SEQ ID NO: 49930 - DNA, 20 bp, synthetic construct
  source 1..20: mol_type = other DNA
cttataaactaaagcattgt

SEQ ID NO: 49931 - DNA, 20 bp, synthetic construct
  source 1..20: mol_type = other DNA
acttataaactaaagcattg

SEQ ID NO: 49932 - DNA, 20 bp, synthetic construct
  source 1..20: mol_type = other DNA
cacttataaactaaagcatt

SEQ ID NO: 49933 - DNA, 20 bp, synthetic construct
  source 1..20: mol_type = other DNA
ccacttataaactaaagcat

SEQ ID NO: 49934 - DNA, 20 bp, synthetic construct
  source 1..20: mol_type = other DNA
cccacttataaactaaagca

SEQ ID NO: 49935 - DNA, 20 bp, synthetic construct
  source 1..20: mol_type = other DNA
gcccacttataaactaaagc

SEQ ID NO: 49936 - DNA, 20 bp, synthetic construct
  source 1..20: mol_type = other DNA
tgcccacttataaactaaag

SEQ ID NO: 49937 - DNA, 20 bp, synthetic construct
  source 1..20: mol_type = other DNA
atgcccacttataaactaaa

SEQ ID NO: 49938 - DNA, 20 bp, synthetic construct
  source 1..20: mol_type = other DNA
catgcccacttataaactaa

SEQ ID NO: 49939 - DNA, 20 bp, synthetic construct
  source 1..20: mol_type = other DNA
acatgcccacttataaacta

SEQ ID NO: 49940 - DNA, 20 bp, synthetic construct
  source 1..20: mol_type = other DNA
cacatgcccacttataaact

SEQ ID NO: 49941 - DNA, 20 bp, synthetic construct
  source 1..20: mol_type = other DNA
ccacatgcccacttataaac

SEQ ID NO: 49942 - DNA, 20 bp, synthetic construct
  source 1..20: mol_type = other DNA
gccacatgcccacttataaa

SEQ ID NO: 49943 - DNA, 20 bp, synthetic construct
  source 1..20: mol_type = other DNA
tgccacatgcccacttataa

SEQ ID NO: 49944 - DNA, 20 bp, synthetic construct
  source 1..20: mol_type = other DNA
ttgccacatgcccacttata

SEQ ID NO: 49945 - DNA, 20 bp, synthetic construct
  source 1..20: mol_type = other DNA
tttgccacatgcccacttat

SEQ ID NO: 49946 - DNA, 20 bp, synthetic construct
  source 1..20: mol_type = other DNA
atttgccacatgcccactta

SEQ ID NO: 49947 - DNA, 20 bp, synthetic construct
  source 1..20: mol_type = other DNA
gatttgccacatgcccactt

SEQ ID NO: 49948 - DNA, 20 bp, synthetic construct
  source 1..20: mol_type = other DNA
agatttgccacatgcccact

SEQ ID NO: 49949 - DNA, 20 bp, synthetic construct
  source 1..20: mol_type = other DNA
cagatttgccacatgcccac

SEQ ID NO: 49950 - DNA, 20 bp, synthetic construct
  source 1..20: mol_type = other DNA
ccagatttgccacatgccca

SEQ ID NO: 49951 - DNA, 20 bp, synthetic construct
  source 1..20: mol_type = other DNA
tccagatttgccacatgccc

SEQ ID NO: 49952 - DNA, 20 bp, synthetic construct
  source 1..20: mol_type = other DNA
ttccagatttgccacatgcc

SEQ ID NO: 49953 - DNA, 20 bp, synthetic construct
  source 1..20: mol_type = other DNA
tttccagatttgccacatgc

SEQ ID NO: 49954 - DNA, 20 bp, synthetic construct
  source 1..20: mol_type = other DNA
ctttccagatttgccacatg

SEQ ID NO: 49955 - DNA, 20 bp, synthetic construct
  source 1..20: mol_type = other DNA
tctttccagatttgccacat

SEQ ID NO: 49956 - DNA, 20 bp, synthetic construct
  source 1..20: mol_type = other DNA
ttctttccagatttgccaca

SEQ ID NO: 49957 - DNA, 20 bp, synthetic construct
  source 1..20: mol_type = other DNA
tttctttccagatttgccac

SEQ ID NO: 49958 - DNA, 20 bp, synthetic construct
  source 1..20: mol_type = other DNA
atttctttccagatttgcca

SEQ ID NO: 49959 - DNA, 20 bp, synthetic construct
  source 1..20: mol_type = other DNA
gatttctttccagatttgcc

SEQ ID NO: 49960 - DNA, 20 bp, synthetic construct
  source 1..20: mol_type = other DNA
tgatttctttccagatttgc

SEQ ID NO: 49961 - DNA, 20 bp, synthetic construct
  source 1..20: mol_type = other DNA
ttgatttctttccagatttg

SEQ ID NO: 49962 - DNA, 20 bp, synthetic construct
  source 1..20: mol_type = other DNA
tttgatttctttccagattt

SEQ ID NO: 49963 - DNA, 20 bp, synthetic construct
  source 1..20: mol_type = other DNA
ctttgatttctttccagatt

SEQ ID NO: 49964 - DNA, 20 bp, synthetic construct
  source 1..20: mol_type = other DNA
actttgatttctttccagat

SEQ ID NO: 49965 - DNA, 20 bp, synthetic construct
  source 1..20: mol_type = other DNA
tactttgatttctttccaga

SEQ ID NO: 49966 - DNA, 20 bp, synthetic construct
  source 1..20: mol_type = other DNA
atactttgatttctttccag

SEQ ID NO: 49967 - DNA, 20 bp, synthetic construct
  source 1..20: mol_type = other DNA
tatactttgatttctttcca

SEQ ID NO: 49968 - DNA, 20 bp, synthetic construct
  source 1..20: mol_type = other DNA
ttatactttgatttctttcc

SEQ ID NO: 49969 - DNA, 20 bp, synthetic construct
  source 1..20: mol_type = other DNA
cttatactttgatttctttc

SEQ ID NO: 49970 - DNA, 20 bp, synthetic construct
  source 1..20: mol_type = other DNA
ccttatactttgatttcttt

SEQ ID NO: 49971 - DNA, 20 bp, synthetic construct
  source 1..20: mol_type = other DNA
gccttatactttgatttctt

SEQ ID NO: 49972 - DNA, 20 bp, synthetic construct
  source 1..20: mol_type = other DNA
agccttatactttgatttct

SEQ ID NO: 49973 - DNA, 20 bp, synthetic construct
  source 1..20: mol_type = other DNA
tagccttatactttgatttc

SEQ ID NO: 49974 - DNA, 20 bp, synthetic construct
  source 1..20: mol_type = other DNA
ttagccttatactttgattt

SEQ ID NO: 49975 - DNA, 20 bp, synthetic construct
  source 1..20: mol_type = other DNA
cttagccttatactttgatt

SEQ ID NO: 49976 - DNA, 20 bp, synthetic construct
  source 1..20: mol_type = other DNA
ccttagccttatactttgat

SEQ ID NO: 49977 - DNA, 20 bp, synthetic construct
  source 1..20: mol_type = other DNA
tccttagccttatactttga

SEQ ID NO: 49978 - DNA, 20 bp, synthetic construct
  source 1..20: mol_type = other DNA
ttccttagccttatactttg

SEQ ID NO: 49979 - DNA, 20 bp, synthetic construct
  source 1..20: mol_type = other DNA
cttccttagccttatacttt

SEQ ID NO: 49980 - DNA, 20 bp, synthetic construct
  source 1..20: mol_type = other DNA
tcttccttagccttatactt

SEQ ID NO: 49981 - DNA, 20 bp, synthetic construct
  source 1..20: mol_type = other DNA
ttcttccttagccttatact

SEQ ID NO: 49982 - DNA, 20 bp, synthetic construct
  source 1..20: mol_type = other DNA
tttcttccttagccttatac

SEQ ID NO: 49983 - DNA, 20 bp, synthetic construct
  source 1..20: mol_type = other DNA
ctttcttccttagccttata

SEQ ID NO: 49984 - DNA, 20 bp, synthetic construct
  source 1..20: mol_type = other DNA
cctttcttccttagccttat

SEQ ID NO: 49985 - DNA, 20 bp, synthetic construct
  source 1..20: mol_type = other DNA
acctttcttccttagcctta

SEQ ID NO: 49986 - DNA, 20 bp, synthetic construct
  source 1..20: mol_type = other DNA
tacctttcttccttagcctt

SEQ ID NO: 49987 - DNA, 20 bp, synthetic construct
  source 1..20: mol_type = other DNA
ctacctttcttccttagcct

SEQ ID NO: 49988 - DNA, 20 bp, synthetic construct
  source 1..20: mol_type = other DNA
tctacctttcttccttagcc

SEQ ID NO: 49989 - DNA, 20 bp, synthetic construct
  source 1..20: mol_type = other DNA
ctctacctttcttccttagc

SEQ ID NO: 49990 - DNA, 20 bp, synthetic construct
  source 1..20: mol_type = other DNA
tctctacctttcttccttag

SEQ ID NO: 49991 - DNA, 20 bp, synthetic construct
  source 1..20: mol_type = other DNA
ttctctacctttcttcctta

SEQ ID NO: 49992 - DNA, 20 bp, synthetic construct
  source 1..20: mol_type = other DNA
gttctctacctttcttcctt

SEQ ID NO: 49993 - DNA, 20 bp, synthetic construct
  source 1..20: mol_type = other DNA
cgttctctacctttcttcct

SEQ ID NO: 49994 - DNA, 20 bp, synthetic construct
  source 1..20: mol_type = other DNA
ccgttctctacctttcttcc

SEQ ID NO: 49995 - DNA, 20 bp, synthetic construct
  source 1..20: mol_type = other DNA
accgttctctacctttcttc

SEQ ID NO: 49996 - DNA, 20 bp, synthetic construct
  source 1..20: mol_type = other DNA
aaccgttctctacctttctt

SEQ ID NO: 49997 - DNA, 20 bp, synthetic construct
  source 1..20: mol_type = other DNA
caaccgttctctacctttct

SEQ ID NO: 49998 - DNA, 20 bp, synthetic construct
  source 1..20: mol_type = other DNA
ccaaccgttctctacctttc

SEQ ID NO: 49999 - DNA, 20 bp, synthetic construct
  source 1..20: mol_type = other DNA
accaaccgttctctaccttt

SEQ ID NO: 50000 - DNA, 20 bp, synthetic construct
  source 1..20: mol_type = other DNA
taccaaccgttctctacctt

SEQ ID NO: 50001 - DNA, 20 bp, synthetic construct
  source 1..20: mol_type = other DNA
ctaccaaccgttctctacct

SEQ ID NO: 50002 - DNA, 20 bp, synthetic construct
  source 1..20: mol_type = other DNA
tctaccaaccgttctctacc

SEQ ID NO: 50003 - DNA, 20 bp, synthetic construct
  source 1..20: mol_type = other DNA
ttctaccaaccgttctctac

SEQ ID NO: 50004 - DNA, 20 bp, synthetic construct
  source 1..20: mol_type = other DNA
tttctaccaaccgttctcta

SEQ ID NO: 50005 - DNA, 20 bp, synthetic construct
  source 1..20: mol_type = other DNA
ttttctaccaaccgttctct

SEQ ID NO: 50006 - DNA, 20 bp, synthetic construct
  source 1..20: mol_type = other DNA
gttttctaccaaccgttctc

SEQ ID NO: 50007 - DNA, 20 bp, synthetic construct
  source 1..20: mol_type = other DNA
tgttttctaccaaccgttct

SEQ ID NO: 50008 - DNA, 20 bp, synthetic construct
  source 1..20: mol_type = other DNA
ttgttttctaccaaccgttc

SEQ ID NO: 50009 - DNA, 20 bp, synthetic construct
  source 1..20: mol_type = other DNA
attgttttctaccaaccgtt

SEQ ID NO: 50010 - DNA, 20 bp, synthetic construct
  source 1..20: mol_type = other DNA
aattgttttctaccaaccgt

SEQ ID NO: 50011 - DNA, 20 bp, synthetic construct
  source 1..20: mol_type = other DNA
caattgttttctaccaaccg

SEQ ID NO: 50012 - DNA, 20 bp, synthetic construct
  source 1..20: mol_type = other DNA
acaattgttttctaccaacc

SEQ ID NO: 50013 - DNA, 20 bp, synthetic construct
  source 1..20: mol_type = other DNA
gacaattgttttctaccaac

SEQ ID NO: 50014 - DNA, 20 bp, synthetic construct
  source 1..20: mol_type = other DNA
agacaattgttttctaccaa

SEQ ID NO: 50015 - DNA, 20 bp, synthetic construct
  source 1..20: mol_type = other DNA
tagacaattgttttctacca

SEQ ID NO: 50016 - DNA, 20 bp, synthetic construct
  source 1..20: mol_type = other DNA
ttagacaattgttttctacc

SEQ ID NO: 50017 - DNA, 20 bp, synthetic construct
  source 1..20: mol_type = other DNA
attagacaattgttttctac

SEQ ID NO: 50018 - DNA, 20 bp, synthetic construct
  source 1..20: mol_type = other DNA
cattagacaattgttttcta

SEQ ID NO: 50019 - DNA, 20 bp, synthetic construct
  source 1..20: mol_type = other DNA
tcattagacaattgttttct

SEQ ID NO: 50020 - DNA, 20 bp, synthetic construct
  source 1..20: mol_type = other DNA
ttcattagacaattgttttc

SEQ ID NO: 50021 - DNA, 20 bp, synthetic construct
  source 1..20: mol_type = other DNA
tttcattagacaattgtttt

SEQ ID NO: 50022 - DNA, 20 bp, synthetic construct
  source 1..20: mol_type = other DNA
ttttcattagacaattgttt

SEQ ID NO: 50023 - DNA, 20 bp, synthetic construct
  source 1..20: mol_type = other DNA
attttcattagacaattgtt

SEQ ID NO: 50024 - DNA, 20 bp, synthetic construct
  source 1..20: mol_type = other DNA
cattttcattagacaattgt

SEQ ID NO: 50025 - DNA, 20 bp, synthetic construct
  source 1..20: mol_type = other DNA
tcattttcattagacaattg

SEQ ID NO: 50026 - DNA, 20 bp, synthetic construct
  source 1..20: mol_type = other DNA
ttcattttcattagacaatt

SEQ ID NO: 50027 - DNA, 20 bp, synthetic construct
  source 1..20: mol_type = other DNA
tttcattttcattagacaat

SEQ ID NO: 50028 - DNA, 20 bp, synthetic construct
  source 1..20: mol_type = other DNA
ttttcattttcattagacaa

SEQ ID NO: 50029 - DNA, 20 bp, synthetic construct
  source 1..20: mol_type = other DNA
tttttcattttcattagaca

SEQ ID NO: 50030 - DNA, 20 bp, synthetic construct
  source 1..20: mol_type = other DNA
ctttttcattttcattagac

SEQ ID NO: 50031 - DNA, 20 bp, synthetic construct
  source 1..20: mol_type = other DNA
cctttttcattttcattaga

SEQ ID NO: 50032 - DNA, 20 bp, synthetic construct
  source 1..20: mol_type = other DNA
ccctttttcattttcattag

SEQ ID NO: 50033 - DNA, 20 bp, synthetic construct
  source 1..20: mol_type = other DNA
accctttttcattttcatta

SEQ ID NO: 50034 - DNA, 20 bp, synthetic construct
  source 1..20: mol_type = other DNA
caccctttttcattttcatt

SEQ ID NO: 50035 - DNA, 20 bp, synthetic construct
  source 1..20: mol_type = other DNA
tcaccctttttcattttcat

SEQ ID NO: 50036 - DNA, 20 bp, synthetic construct
  source 1..20: mol_type = other DNA
ttcaccctttttcattttca

SEQ ID NO: 50037 - DNA, 20 bp, synthetic construct
  source 1..20: mol_type = other DNA
cttcaccctttttcattttc

SEQ ID NO: 50038 - DNA, 20 bp, synthetic construct
  source 1..20: mol_type = other DNA
tcttcaccctttttcatttt

SEQ ID NO: 50039 - DNA, 20 bp, synthetic construct
  source 1..20: mol_type = other DNA
ttcttcaccctttttcattt

SEQ ID NO: 50040 - DNA, 20 bp, synthetic construct
  source 1..20: mol_type = other DNA
cttcttcaccctttttcatt

SEQ ID NO: 50041 - DNA, 20 bp, synthetic construct
  source 1..20: mol_type = other DNA
acttcttcaccctttttcat

SEQ ID NO: 50042 - DNA, 20 bp, synthetic construct
  source 1..20: mol_type = other DNA
tacttcttcaccctttttca

SEQ ID NO: 50043 - DNA, 20 bp, synthetic construct
  source 1..20: mol_type = other DNA
ctacttcttcaccctttttc

SEQ ID NO: 50044 - DNA, 20 bp, synthetic construct
  source 1..20: mol_type = other DNA
tctacttcttcacccttttt

SEQ ID NO: 50045 - DNA, 20 bp, synthetic construct
  source 1..20: mol_type = other DNA
ttctacttcttcaccctttt

SEQ ID NO: 50046 - DNA, 20 bp, synthetic construct
  source 1..20: mol_type = other DNA
gttctacttcttcacccttt

SEQ ID NO: 50047 - DNA, 20 bp, synthetic construct
  source 1..20: mol_type = other DNA
tgttctacttcttcaccctt

SEQ ID NO: 50048 - DNA, 20 bp, synthetic construct
  source 1..20: mol_type = other DNA
atgttctacttcttcaccct

SEQ ID NO: 50049 - DNA, 20 bp, synthetic construct
  source 1..20: mol_type = other DNA
tatgttctacttcttcaccc

SEQ ID NO: 50050 - DNA, 20 bp, synthetic construct
  source 1..20: mol_type = other DNA
gtatgttctacttcttcacc

SEQ ID NO: 50051 - DNA, 20 bp, synthetic construct
  source 1..20: mol_type = other DNA
cgtatgttctacttcttcac

SEQ ID NO: 50052 - DNA, 20 bp, synthetic construct
  source 1..20: mol_type = other DNA
acgtatgttctacttcttca

SEQ ID NO: 50053 - DNA, 20 bp, synthetic construct
  source 1..20: mol_type = other DNA
tacgtatgttctacttcttc

SEQ ID NO: 50054 - DNA, 20 bp, synthetic construct
  source 1..20: mol_type = other DNA
atacgtatgttctacttctt

SEQ ID NO: 50055 - DNA, 20 bp, synthetic construct
  source 1..20: mol_type = other DNA
aatacgtatgttctacttct

SEQ ID NO: 50056 - DNA, 20 bp, synthetic construct
  source 1..20: mol_type = other DNA
aaatacgtatgttctacttc

SEQ ID NO: 50057 - DNA, 20 bp, synthetic construct
  source 1..20: mol_type = other DNA
aaaatacgtatgttctactt

SEQ ID NO: 50058 - DNA, 20 bp, synthetic construct
  source 1..20: mol_type = other DNA
taaaatacgtatgttctact

SEQ ID NO: 50059 - DNA, 20 bp, synthetic construct
  source 1..20: mol_type = other DNA
ttaaaatacgtatgttctac

SEQ ID NO: 50060 - DNA, 20 bp, synthetic construct
  source 1..20: mol_type = other DNA
tttaaaatacgtatgttcta

SEQ ID NO: 50061 - DNA, 20 bp, synthetic construct
  source 1..20: mol_type = other DNA
ttttaaaatacgtatgttct

SEQ ID NO: 50062 - DNA, 20 bp, synthetic construct
  source 1..20: mol_type = other DNA
tttttaaaatacgtatgttc

SEQ ID NO: 50063 - DNA, 20 bp, synthetic construct
  source 1..20: mol_type = other DNA
atttttaaaatacgtatgtt

SEQ ID NO: 50064 - DNA, 20 bp, synthetic construct
  source 1..20: mol_type = other DNA
tatttttaaaatacgtatgt

SEQ ID NO: 50065 - DNA, 20 bp, synthetic construct
  source 1..20: mol_type = other DNA
atatttttaaaatacgtatg

SEQ ID NO: 50066 - DNA, 20 bp, synthetic construct
  source 1..20: mol_type = other DNA
aatatttttaaaatacgtat

SEQ ID NO: 50067 - DNA, 20 bp, synthetic construct
  source 1..20: mol_type = other DNA
gaatatttttaaaatacgta

SEQ ID NO: 50068 - DNA, 20 bp, synthetic construct
  source 1..20: mol_type = other DNA
tgaatatttttaaaatacgt

SEQ ID NO: 50069 - DNA, 20 bp, synthetic construct
  source 1..20: mol_type = other DNA
ctgaatatttttaaaatacg

SEQ ID NO: 50070 - DNA, 20 bp, synthetic construct
  source 1..20: mol_type = other DNA
tctgaatatttttaaaatac

SEQ ID NO: 50071 - DNA, 20 bp, synthetic construct
  source 1..20: mol_type = other DNA
ctctgaatatttttaaaata

SEQ ID NO: 50072 - DNA, 20 bp, synthetic construct
  source 1..20: mol_type = other DNA
actctgaatatttttaaaat

SEQ ID NO: 50073 - DNA, 20 bp, synthetic construct
  source 1..20: mol_type = other DNA
tactctgaatatttttaaaa

SEQ ID NO: 50074 - DNA, 20 bp, synthetic construct
  source 1..20: mol_type = other DNA
atactctgaatatttttaaa

SEQ ID NO: 50075 - DNA, 20 bp, synthetic construct
  source 1..20: mol_type = other DNA
catactctgaatatttttaa

SEQ ID NO: 50076 - DNA, 20 bp, synthetic construct
  source 1..20: mol_type = other DNA
tcatactctgaatattttta

SEQ ID NO: 50077 - DNA, 20 bp, synthetic construct
  source 1..20: mol_type = other DNA
ctcatactctgaatattttt

SEQ ID NO: 50078 - DNA, 20 bp, synthetic construct
  source 1..20: mol_type = other DNA
tctcatactctgaatatttt

SEQ ID NO: 50079 - DNA, 20 bp, synthetic construct
  source 1..20: mol_type = other DNA
gtctcatactctgaatattt

SEQ ID NO: 50080 - DNA, 20 bp, synthetic construct
  source 1..20: mol_type = other DNA
tgtctcatactctgaatatt

SEQ ID NO: 50081 - DNA, 20 bp, synthetic construct
  source 1..20: mol_type = other DNA
ttgtctcatactctgaatat

SEQ ID NO: 50082 - DNA, 20 bp, synthetic construct
  source 1..20: mol_type = other DNA
cttgtctcatactctgaata

SEQ ID NO: 50083 - DNA, 20 bp, synthetic construct
  source 1..20: mol_type = other DNA
ccttgtctcatactctgaat

SEQ ID NO: 50084 - DNA, 20 bp, synthetic construct
  source 1..20: mol_type = other DNA
accttgtctcatactctgaa

SEQ ID NO: 50085 - DNA, 20 bp, synthetic construct
  source 1..20: mol_type = other DNA
aaccttgtctcatactctga

SEQ ID NO: 50086 - DNA, 20 bp, synthetic construct
  source 1..20: mol_type = other DNA
aaaccttgtctcatactctg

SEQ ID NO: 50087 - DNA, 20 bp, synthetic construct
  source 1..20: mol_type = other DNA
aaaaccttgtctcatactct

SEQ ID NO: 50088 - DNA, 20 bp, synthetic construct
  source 1..20: mol_type = other DNA
caaaaccttgtctcatactc

SEQ ID NO: 50089 - DNA, 20 bp, synthetic construct
  source 1..20: mol_type = other DNA
tcaaaaccttgtctcatact

SEQ ID NO: 50090 - DNA, 20 bp, synthetic construct
  source 1..20: mol_type = other DNA
ctcaaaaccttgtctcatac

SEQ ID NO: 50091 - DNA, 20 bp, synthetic construct
  source 1..20: mol_type = other DNA
tctcaaaaccttgtctcata

SEQ ID NO: 50092 - DNA, 20 bp, synthetic construct
  source 1..20: mol_type = other DNA
ttctcaaaaccttgtctcat

SEQ ID NO: 50093 - DNA, 20 bp, synthetic construct
  source 1..20: mol_type = other DNA
attctcaaaaccttgtctca

SEQ ID NO: 50094 - DNA, 20 bp, synthetic construct
  source 1..20: mol_type = other DNA
aattctcaaaaccttgtctc

SEQ ID NO: 50095 - DNA, 20 bp, synthetic construct
  source 1..20: mol_type = other DNA
aaattctcaaaaccttgtct

SEQ ID NO: 50096 - DNA, 20 bp, synthetic construct
  source 1..20: mol_type = other DNA
taaattctcaaaaccttgtc

SEQ ID NO: 50097 - DNA, 20 bp, synthetic construct
  source 1..20: mol_type = other DNA
ttaaattctcaaaaccttgt

SEQ ID NO: 50098 - DNA, 20 bp, synthetic construct
  source 1..20: mol_type = other DNA
tttaaattctcaaaaccttg

SEQ ID NO: 50099 - DNA, 20 bp, synthetic construct
  source 1..20: mol_type = other DNA
ttttaaattctcaaaacctt

SEQ ID NO: 50100 - DNA, 20 bp, synthetic construct
  source 1..20: mol_type = other DNA
cttttaaattctcaaaacct

SEQ ID NO: 50101 - DNA, 20 bp, synthetic construct
  source 1..20: mol_type = other DNA
gcttttaaattctcaaaacc

SEQ ID NO: 50102 - DNA, 20 bp, synthetic construct
  source 1..20: mol_type = other DNA
cgcttttaaattctcaaaac

SEQ ID NO: 50103 - DNA, 20 bp, synthetic construct
  source 1..20: mol_type = other DNA
tcgcttttaaattctcaaaa

SEQ ID NO: 50104 - DNA, 20 bp, synthetic construct
  source 1..20: mol_type = other DNA
atcgcttttaaattctcaaa

SEQ ID NO: 50105 - DNA, 20 bp, synthetic construct
  source 1..20: mol_type = other DNA
aatcgcttttaaattctcaa

SEQ ID NO: 50106 - DNA, 20 bp, synthetic construct
  source 1..20: mol_type = other DNA
taatcgcttttaaattctca

SEQ ID NO: 50107 - DNA, 20 bp, synthetic construct
  source 1..20: mol_type = other DNA
ataatcgcttttaaattctc

SEQ ID NO: 50108 - DNA, 20 bp, synthetic construct
  source 1..20: mol_type = other DNA
cataatcgcttttaaattct

SEQ ID NO: 50109 - DNA, 20 bp, synthetic construct
  source 1..20: mol_type = other DNA
acataatcgcttttaaattc

SEQ ID NO: 50110 - DNA, 20 bp, synthetic construct
  source 1..20: mol_type = other DNA
tacataatcgcttttaaatt

SEQ ID NO: 50111 - DNA, 20 bp, synthetic construct
  source 1..20: mol_type = other DNA
ctacataatcgcttttaaat

SEQ ID NO: 50112 - DNA, 20 bp, synthetic construct
  source 1..20: mol_type = other DNA
actacataatcgcttttaaa

SEQ ID NO: 50113 - DNA, 20 bp, synthetic construct
  source 1..20: mol_type = other DNA
aactacataatcgcttttaa

SEQ ID NO: 50114 - DNA, 20 bp, synthetic construct
  source 1..20: mol_type = other DNA
taactacataatcgctttta

SEQ ID NO: 50115 - DNA, 20 bp, synthetic construct
  source 1..20: mol_type = other DNA
ataactacataatcgctttt

SEQ ID NO: 50116 - DNA, 20 bp, synthetic construct
  source 1..20: mol_type = other DNA
tataactacataatcgcttt

SEQ ID NO: 50117 - DNA, 20 bp, synthetic construct
  source 1..20: mol_type = other DNA
atataactacataatcgctt

SEQ ID NO: 50118 - DNA, 20 bp, synthetic construct
  source 1..20: mol_type = other DNA
aatataactacataatcgct

SEQ ID NO: 50119 - DNA, 20 bp, synthetic construct
  source 1..20: mol_type = other DNA
taatataactacataatcgc

SEQ ID NO: 50120 - DNA, 20 bp, synthetic construct
  source 1..20: mol_type = other DNA
ttaatataactacataatcg

SEQ ID NO: 50121 - DNA, 20 bp, synthetic construct
  source 1..20: mol_type = other DNA
tttaatataactacataatc

SEQ ID NO: 50122 - DNA, 20 bp, synthetic construct
  source 1..20: mol_type = other DNA
ttttaatataactacataat

SEQ ID NO: 50123 - DNA, 20 bp, synthetic construct
  source 1..20: mol_type = other DNA
tttttaatataactacataa

SEQ ID NO: 50124 - DNA, 20 bp, synthetic construct
  source 1..20: mol_type = other DNA
atttttaatataactacata

SEQ ID NO: 50125 - DNA, 20 bp, synthetic construct
  source 1..20: mol_type = other DNA
aatttttaatataactacat

SEQ ID NO: 50126 - DNA, 20 bp, synthetic construct
  source 1..20: mol_type = other DNA
aaatttttaatataactaca

SEQ ID NO: 50127 - DNA, 20 bp, synthetic construct
  source 1..20: mol_type = other DNA
taaatttttaatataactac

SEQ ID NO: 50128 - DNA, 20 bp, synthetic construct
  source 1..20: mol_type = other DNA
ctaaatttttaatataacta

SEQ ID NO: 50129 - DNA, 20 bp, synthetic construct
  source 1..20: mol_type = other DNA
actaaatttttaatataact

SEQ ID NO: 50130 - DNA, 20 bp, synthetic construct
  source 1..20: mol_type = other DNA
gactaaatttttaatataac

SEQ ID NO: 50131 - DNA, 20 bp, synthetic construct
  source 1..20: mol_type = other DNA
agactaaatttttaatataa

SEQ ID NO: 50132 - DNA, 20 bp, synthetic construct
  source 1..20: mol_type = other DNA
gagactaaatttttaatata

SEQ ID NO: 50133 - DNA, 20 bp, synthetic construct
  source 1..20: mol_type = other DNA
agagactaaatttttaatat

SEQ ID NO: 50134 - DNA, 20 bp, synthetic construct
  source 1..20: mol_type = other DNA
aagagactaaatttttaata

SEQ ID NO: 50135 - DNA, 20 bp, synthetic construct
  source 1..20: mol_type = other DNA
aaagagactaaatttttaat

SEQ ID NO: 50136 - DNA, 20 bp, synthetic construct
  source 1..20: mol_type = other DNA
aaaagagactaaatttttaa

SEQ ID NO: 50137 - DNA, 20 bp, synthetic construct
  source 1..20: mol_type = other DNA
aaaaagagactaaattttta

SEQ ID NO: 50138 - DNA, 20 bp, synthetic construct
  source 1..20: mol_type = other DNA
taaaaagagactaaattttt

SEQ ID NO: 50139 - DNA, 20 bp, synthetic construct
  source 1..20: mol_type = other DNA
ttaaaaagagactaaatttt

SEQ ID NO: 50140 - DNA, 20 bp, synthetic construct
  source 1..20: mol_type = other DNA
cttaaaaagagactaaattt

SEQ ID NO: 50141 - DNA, 20 bp, synthetic construct
  source 1..20: mol_type = other DNA
acttaaaaagagactaaatt

SEQ ID NO: 50142 - DNA, 20 bp, synthetic construct
  source 1..20: mol_type = other DNA
cacttaaaaagagactaaat

SEQ ID NO: 50143 - DNA, 20 bp, synthetic construct
  source 1..20: mol_type = other DNA
acacttaaaaagagactaaa

SEQ ID NO: 50144 - DNA, 20 bp, synthetic construct
  source 1..20: mol_type = other DNA
gacacttaaaaagagactaa

SEQ ID NO: 50145 - DNA, 20 bp, synthetic construct
  source 1..20: mol_type = other DNA
ggacacttaaaaagagacta

SEQ ID NO: 50146 - DNA, 20 bp, synthetic construct
  source 1..20: mol_type = other DNA
tggacacttaaaaagagact

SEQ ID NO: 50147 - DNA, 20 bp, synthetic construct
  source 1..20: mol_type = other DNA
atggacacttaaaaagagac

SEQ ID NO: 50148 - DNA, 20 bp, synthetic construct
  source 1..20: mol_type = other DNA
aatggacacttaaaaagaga

SEQ ID NO: 50149 - DNA, 20 bp, synthetic construct
  source 1..20: mol_type = other DNA
caatggacacttaaaaagag

SEQ ID NO: 50150 - DNA, 20 bp, synthetic construct
  source 1..20: mol_type = other DNA
tcaatggacacttaaaaaga

SEQ ID NO: 50151 - DNA, 20 bp, synthetic construct
  source 1..20: mol_type = other DNA
atcaatggacacttaaaaag

SEQ ID NO: 50152 - DNA, 20 bp, synthetic construct
  source 1..20: mol_type = other DNA
catcaatggacacttaaaaa

SEQ ID NO: 50153 - DNA, 20 bp, synthetic construct
  source 1..20: mol_type = other DNA
tcatcaatggacacttaaaa

SEQ ID NO: 50154 - DNA, 20 bp, synthetic construct
  source 1..20: mol_type = other DNA
ttcatcaatggacacttaaa

SEQ ID NO: 50155 - DNA, 20 bp, synthetic construct
  source 1..20: mol_type = other DNA
gttcatcaatggacacttaa

SEQ ID NO: 50156 - DNA, 20 bp, synthetic construct
  source 1..20: mol_type = other DNA
tgttcatcaatggacactta

SEQ ID NO: 50157 - DNA, 20 bp, synthetic construct
  source 1..20: mol_type = other DNA
ttgttcatcaatggacactt

SEQ ID NO: 50158 - DNA, 20 bp, synthetic construct
  source 1..20: mol_type = other DNA
tttgttcatcaatggacact

SEQ ID NO: 50159 - DNA, 20 bp, synthetic construct
  source 1..20: mol_type = other DNA
ctttgttcatcaatggacac

SEQ ID NO: 50160 - DNA, 20 bp, synthetic construct
  source 1..20: mol_type = other DNA
actttgttcatcaatggaca

SEQ ID NO: 50161 - DNA, 20 bp, synthetic construct
  source 1..20: mol_type = other DNA
cactttgttcatcaatggac

SEQ ID NO: 50162 - DNA, 20 bp, synthetic construct
  source 1..20: mol_type = other DNA
ccactttgttcatcaatgga

SEQ ID NO: 50163 - DNA, 20 bp, synthetic construct
  source 1..20: mol_type = other DNA
cccactttgttcatcaatgg

SEQ ID NO: 50164 - DNA, 20 bp, synthetic construct
  source 1..20: mol_type = other DNA
tcccactttgttcatcaatg

SEQ ID NO: 50165 - DNA, 20 bp, synthetic construct
  source 1..20: mol_type = other DNA
ttcccactttgttcatcaat

SEQ ID NO: 50166 - DNA, 20 bp, synthetic construct
  source 1..20: mol_type = other DNA
attcccactttgttcatcaa

SEQ ID NO: 50167 - DNA, 20 bp, synthetic construct
  source 1..20: mol_type = other DNA
aattcccactttgttcatca

SEQ ID NO: 50168 - DNA, 20 bp, synthetic construct
  source 1..20: mol_type = other DNA
gaattcccactttgttcatc

SEQ ID NO: 50169 - DNA, 20 bp, synthetic construct
  source 1..20: mol_type = other DNA
ggaattcccactttgttcat

SEQ ID NO: 50170 - DNA, 20 bp, synthetic construct
  source 1..20: mol_type = other DNA
aggaattcccactttgttca

SEQ ID NO: 50171 - DNA, 20 bp, synthetic construct
  source 1..20: mol_type = other DNA
caggaattcccactttgttc

SEQ ID NO: 50172 - DNA, 20 bp, synthetic construct
  source 1..20: mol_type = other DNA
acaggaattcccactttgtt

SEQ ID NO: 50173 - DNA, 20 bp, synthetic construct
  source 1..20: mol_type = other DNA
aacaggaattcccactttgt

SEQ ID NO: 50174 - DNA, 20 bp, synthetic construct
  source 1..20: mol_type = other DNA
taacaggaattcccactttg

SEQ ID NO: 50175 - DNA, 20 bp, synthetic construct
  source 1..20: mol_type = other DNA
gtaacaggaattcccacttt

SEQ ID NO: 50176 - DNA, 20 bp, synthetic construct
  source 1..20: mol_type = other DNA
agtaacaggaattcccactt

SEQ ID NO: 50177 - DNA, 20 bp, synthetic construct
  source 1..20: mol_type = other DNA
gagtaacaggaattcccact

SEQ ID NO: 50178 - DNA, 20 bp, synthetic construct
  source 1..20: mol_type = other DNA
tgagtaacaggaattcccac

SEQ ID NO: 50179 - DNA, 20 bp, synthetic construct
  source 1..20: mol_type = other DNA
atgagtaacaggaattccca

SEQ ID NO: 50180 - DNA, 20 bp, synthetic construct
  source 1..20: mol_type = other DNA
aatgagtaacaggaattccc

SEQ ID NO: 50181 - DNA, 20 bp, synthetic construct
  source 1..20: mol_type = other DNA
aaatgagtaacaggaattcc

SEQ ID NO: 50182 - DNA, 20 bp, synthetic construct
  source 1..20: mol_type = other DNA
caaatgagtaacaggaattc

SEQ ID NO: 50183 - DNA, 20 bp, synthetic construct
  source 1..20: mol_type = other DNA
gcaaatgagtaacaggaatt

SEQ ID NO: 50184 - DNA, 20 bp, synthetic construct
  source 1..20: mol_type = other DNA
tgcaaatgagtaacaggaat

SEQ ID NO: 50185 - DNA, 20 bp, synthetic construct
  source 1..20: mol_type = other DNA
ttgcaaatgagtaacaggaa

SEQ ID NO: 50186 - DNA, 20 bp, synthetic construct
  source 1..20: mol_type = other DNA
cttgcaaatgagtaacagga

SEQ ID NO: 50187 - DNA, 20 bp, synthetic construct
  source 1..20: mol_type = other DNA
ccttgcaaatgagtaacagg

SEQ ID NO: 50188 - DNA, 20 bp, synthetic construct
  source 1..20: mol_type = other DNA
gccttgcaaatgagtaacag

SEQ ID NO: 50189 - DNA, 20 bp, synthetic construct
  source 1..20: mol_type = other DNA
tgccttgcaaatgagtaaca

SEQ ID NO: 50190 - DNA, 20 bp, synthetic construct
  source 1..20: mol_type = other DNA
atgccttgcaaatgagtaac

SEQ ID NO: 50191 - DNA, 20 bp, synthetic construct
  source 1..20: mol_type = other DNA
aatgccttgcaaatgagtaa

SEQ ID NO: 50192 - DNA, 20 bp, synthetic construct
  source 1..20: mol_type = other DNA
taatgccttgcaaatgagta

SEQ ID NO: 50193 - DNA, 20 bp, synthetic construct
  source 1..20: mol_type = other DNA
ataatgccttgcaaatgagt

SEQ ID NO: 50194 - DNA, 20 bp, synthetic construct
  source 1..20: mol_type = other DNA
aataatgccttgcaaatgag

SEQ ID NO: 50195 - DNA, 20 bp, synthetic construct
  source 1..20: mol_type = other DNA
caataatgccttgcaaatga

SEQ ID NO: 50196 - DNA, 20 bp, synthetic construct
  source 1..20: mol_type = other DNA
tcaataatgccttgcaaatg

SEQ ID NO: 50197 - DNA, 20 bp, synthetic construct
  source 1..20: mol_type = other DNA
ctcaataatgccttgcaaat

SEQ ID NO: 50198 - DNA, 20 bp, synthetic construct
  source 1..20: mol_type = other DNA
actcaataatgccttgcaaa

SEQ ID NO: 50199 - DNA, 20 bp, synthetic construct
  source 1..20: mol_type = other DNA
cactcaataatgccttgcaa

SEQ ID NO: 50200 - DNA, 20 bp, synthetic construct
  source 1..20: mol_type = other DNA
acactcaataatgccttgca

SEQ ID NO: 50201 - DNA, 20 bp, synthetic construct
  source 1..20: mol_type = other DNA
aacactcaataatgccttgc

SEQ ID NO: 50202 - DNA, 20 bp, synthetic construct
  source 1..20: mol_type = other DNA
gaacactcaataatgccttg

SEQ ID NO: 50203 - DNA, 20 bp, synthetic construct
  source 1..20: mol_type = other DNA
tgaacactcaataatgcctt

SEQ ID NO: 50204 - DNA, 20 bp, synthetic construct
  source 1..20: mol_type = other DNA
ctgaacactcaataatgcct

SEQ ID NO: 50205 - DNA, 20 bp, synthetic construct
  source 1..20: mol_type = other DNA
actgaacactcaataatgcc

SEQ ID NO: 50206 - DNA, 20 bp, synthetic construct
  source 1..20: mol_type = other DNA
tactgaacactcaataatgc

SEQ ID NO: 50207 - DNA, 20 bp, synthetic construct
  source 1..20: mol_type = other DNA
ttactgaacactcaataatg

SEQ ID NO: 50208 - DNA, 20 bp, synthetic construct
  source 1..20: mol_type = other DNA
gttactgaacactcaataat

SEQ ID NO: 50209 - DNA, 20 bp, synthetic construct
  source 1..20: mol_type = other DNA
tgttactgaacactcaataa

SEQ ID NO: 50210 - DNA, 20 bp, synthetic construct
  source 1..20: mol_type = other DNA
gtgttactgaacactcaata

SEQ ID NO: 50211 - DNA, 20 bp, synthetic construct
  source 1..20: mol_type = other DNA
cgtgttactgaacactcaat

SEQ ID NO: 50212 - DNA, 20 bp, synthetic construct
  source 1..20: mol_type = other DNA
acgtgttactgaacactcaa

SEQ ID NO: 50213 - DNA, 20 bp, synthetic construct
  source 1..20: mol_type = other DNA
aacgtgttactgaacactca

SEQ ID NO: 50214 - DNA, 20 bp, synthetic construct
  source 1..20: mol_type = other DNA
caacgtgttactgaacactc

SEQ ID NO: 50215 - DNA, 20 bp, synthetic construct
  source 1..20: mol_type = other DNA
gcaacgtgttactgaacact

SEQ ID NO: 50216 - DNA, 20 bp, synthetic construct
  source 1..20: mol_type = other DNA
tgcaacgtgttactgaacac

SEQ ID NO: 50217 - DNA, 20 bp, synthetic construct
  source 1..20: mol_type = other DNA
ttgcaacgtgttactgaaca

SEQ ID NO: 50218 - DNA, 20 bp, synthetic construct
  source 1..20: mol_type = other DNA
cttgcaacgtgttactgaac

SEQ ID NO: 50219 - DNA, 20 bp, synthetic construct
  source 1..20: mol_type = other DNA
ccttgcaacgtgttactgaa

SEQ ID NO: 50220 - DNA, 20 bp, synthetic construct
  source 1..20: mol_type = other DNA
gccttgcaacgtgttactga

SEQ ID NO: 50221 - DNA, 20 bp, synthetic construct
  source 1..20: mol_type = other DNA
tgccttgcaacgtgttactg

SEQ ID NO: 50222 - DNA, 20 bp, synthetic construct
  source 1..20: mol_type = other DNA
gtgccttgcaacgtgttact

SEQ ID NO: 50223 - DNA, 20 bp, synthetic construct
  source 1..20: mol_type = other DNA
agtgccttgcaacgtgttac

SEQ ID NO: 50224 - DNA, 20 bp, synthetic construct
  source 1..20: mol_type = other DNA
aagtgccttgcaacgtgtta

SEQ ID NO: 50225 - DNA, 20 bp, synthetic construct
  source 1..20: mol_type = other DNA
gaagtgccttgcaacgtgtt

SEQ ID NO: 50226 - DNA, 20 bp, synthetic construct
  source 1..20: mol_type = other DNA
agaagtgccttgcaacgtgt

SEQ ID NO: 50227 - DNA, 20 bp, synthetic construct
  source 1..20: mol_type = other DNA
cagaagtgccttgcaacgtg

SEQ ID NO: 50228 - DNA, 20 bp, synthetic construct
  source 1..20: mol_type = other DNA
ccagaagtgccttgcaacgt

SEQ ID NO: 50229 - DNA, 20 bp, synthetic construct
  source 1..20: mol_type = other DNA
cccagaagtgccttgcaacg

SEQ ID NO: 50230 - DNA, 20 bp, synthetic construct
  source 1..20: mol_type = other DNA
gcccagaagtgccttgcaac

SEQ ID NO: 50231 - DNA, 20 bp, synthetic construct
  source 1..20: mol_type = other DNA
tgcccagaagtgccttgcaa

SEQ ID NO: 50232 - DNA, 20 bp, synthetic construct
  source 1..20: mol_type = other DNA
ttgcccagaagtgccttgca

SEQ ID NO: 50233 - DNA, 20 bp, synthetic construct
  source 1..20: mol_type = other DNA
attgcccagaagtgccttgc

SEQ ID NO: 50234 - DNA, 20 bp, synthetic construct
  source 1..20: mol_type = other DNA
gattgcccagaagtgccttg

SEQ ID NO: 50235 - DNA, 20 bp, synthetic construct
  source 1..20: mol_type = other DNA
ggattgcccagaagtgcctt

SEQ ID NO: 50236 - DNA, 20 bp, synthetic construct
  source 1..20: mol_type = other DNA
aggattgcccagaagtgcct

SEQ ID NO: 50237 - DNA, 20 bp, synthetic construct
  source 1..20: mol_type = other DNA
caggattgcccagaagtgcc

SEQ ID NO: 50238 - DNA, 20 bp, synthetic construct
  source 1..20: mol_type = other DNA
tcaggattgcccagaagtgc

SEQ ID NO: 50239 - DNA, 20 bp, synthetic construct
  source 1..20: mol_type = other DNA
ttcaggattgcccagaagtg

SEQ ID NO: 50240 - DNA, 20 bp, synthetic construct
  source 1..20: mol_type = other DNA
gttcaggattgcccagaagt

SEQ ID NO: 50241 - DNA, 20 bp, synthetic construct
  source 1..20: mol_type = other DNA
agttcaggattgcccagaag

SEQ ID NO: 50242 - DNA, 20 bp, synthetic construct
  source 1..20: mol_type = other DNA
aagttcaggattgcccagaa

SEQ ID NO: 50243 - DNA, 20 bp, synthetic construct
  source 1..20: mol_type = other DNA
caagttcaggattgcccaga

SEQ ID NO: 50244 - DNA, 20 bp, synthetic construct
  source 1..20: mol_type = other DNA
ccaagttcaggattgcccag

SEQ ID NO: 50245 - DNA, 20 bp, synthetic construct
  source 1..20: mol_type = other DNA
accaagttcaggattgccca

SEQ ID NO: 50246 - DNA, 20 bp, synthetic construct
  source 1..20: mol_type = other DNA
aaccaagttcaggattgccc

SEQ ID NO: 50247 - DNA, 20 bp, synthetic construct
  source 1..20: mol_type = other DNA
gaaccaagttcaggattgcc

SEQ ID NO: 50248 - DNA, 20 bp, synthetic construct
  source 1..20: mol_type = other DNA
agaaccaagttcaggattgc

SEQ ID NO: 50249 - DNA, 20 bp, synthetic construct
  source 1..20: mol_type = other DNA
gagaaccaagttcaggattg

SEQ ID NO: 50250 - DNA, 20 bp, synthetic construct
  source 1..20: mol_type = other DNA
tgagaaccaagttcaggatt

SEQ ID NO: 50251 - DNA, 20 bp, synthetic construct
  source 1..20: mol_type = other DNA
ttgagaaccaagttcaggat

SEQ ID NO: 50252 - DNA, 20 bp, synthetic construct
  source 1..20: mol_type = other DNA
tttgagaaccaagttcagga

SEQ ID NO: 50253 - DNA, 20 bp, synthetic construct
  source 1..20: mol_type = other DNA
atttgagaaccaagttcagg

SEQ ID NO: 50254 - DNA, 20 bp, synthetic construct
  source 1..20: mol_type = other DNA
aatttgagaaccaagttcag

SEQ ID NO: 50255 - DNA, 20 bp, synthetic construct
  source 1..20: mol_type = other DNA
gaatttgagaaccaagttca

SEQ ID NO: 50256 - DNA, 20 bp, synthetic construct
  source 1..20: mol_type = other DNA
agaatttgagaaccaagttc

SEQ ID NO: 50257 - DNA, 20 bp, synthetic construct
  source 1..20: mol_type = other DNA
aagaatttgagaaccaagtt

SEQ ID NO: 50258 - DNA, 20 bp, synthetic construct
  source 1..20: mol_type = other DNA
aaagaatttgagaaccaagt

SEQ ID NO: 50259 - DNA, 20 bp, synthetic construct
  source 1..20: mol_type = other DNA
aaaagaatttgagaaccaag

SEQ ID NO: 50260 - DNA, 20 bp, synthetic construct
  source 1..20: mol_type = other DNA
aaaaagaatttgagaaccaa

SEQ ID NO: 50261 - DNA, 20 bp, synthetic construct
  source 1..20: mol_type = other DNA
aaaaaagaatttgagaacca

SEQ ID NO: 50262 - DNA, 20 bp, synthetic construct
  source 1..20: mol_type = other DNA
aaaaaaagaatttgagaacc

SEQ ID NO: 50263 - DNA, 20 bp, synthetic construct
  source 1..20: mol_type = other DNA
aaaaaaaagaatttgagaac

SEQ ID NO: 50264 - DNA, 20 bp, synthetic construct
  source 1..20: mol_type = other DNA
aaaaaaaaagaatttgagaa

SEQ ID NO: 50265 - DNA, 20 bp, synthetic construct
  source 1..20: mol_type = other DNA
aaaaaaaaaagaatttgaga

SEQ ID NO: 50266 - DNA, 20 bp, synthetic construct
  source 1..20: mol_type = other DNA
aaaaaaaaaaagaatttgag

SEQ ID NO: 50267 - DNA, 20 bp, synthetic construct
  source 1..20: mol_type = other DNA
aaaaaaaaaaaagaatttga

SEQ ID NO: 50268 - DNA, 20 bp, synthetic construct
  source 1..20: mol_type = other DNA
aaaaaaaaaaaaagaatttg

SEQ ID NO: 50269 - DNA, 20 bp, synthetic construct
  source 1..20: mol_type = other DNA
aaaaaaaaaaaaaagaattt

SEQ ID NO: 50270 - DNA, 20 bp, synthetic construct
  source 1..20: mol_type = other DNA
aaaaaaaaaaaaaaagaatt

SEQ ID NO: 50271 - DNA, 20 bp, synthetic construct
  source 1..20: mol_type = other DNA
aaaaaaaaaaaaaaaagaat

SEQ ID NO: 50272 - DNA, 20 bp, synthetic construct
  source 1..20: mol_type = other DNA
aaaaaaaaaaaaaaaaagaa

SEQ ID NO: 50273 - DNA, 20 bp, synthetic construct
  source 1..20: mol_type = other DNA
caaaaaaaaaaaaaaaaaga

SEQ ID NO: 50274 - DNA, 20 bp, synthetic construct
  source 1..20: mol_type = other DNA
tcaaaaaaaaaaaaaaaaag

SEQ ID NO: 50275 - DNA, 20 bp, synthetic construct
  source 1..20: mol_type = other DNA
ctcaaaaaaaaaaaaaaaaa

SEQ ID NO: 50276 - DNA, 20 bp, synthetic construct
  source 1..20: mol_type = other DNA
tctcaaaaaaaaaaaaaaaa

SEQ ID NO: 50277 - DNA, 20 bp, synthetic construct
  source 1..20: mol_type = other DNA
gtctcaaaaaaaaaaaaaaa

SEQ ID NO: 50278 - DNA, 20 bp, synthetic construct
  source 1..20: mol_type = other DNA
cgtctcaaaaaaaaaaaaaa

SEQ ID NO: 50279 - DNA, 20 bp, synthetic construct
  source 1..20: mol_type = other DNA
ccgtctcaaaaaaaaaaaaa

SEQ ID NO: 50280 - DNA, 20 bp, synthetic construct
  source 1..20: mol_type = other DNA
tccgtctcaaaaaaaaaaaa

SEQ ID NO: 50281 - DNA, 20 bp, synthetic construct
  source 1..20: mol_type = other DNA
ctccgtctcaaaaaaaaaaa

SEQ ID NO: 50282 - DNA, 20 bp, synthetic construct
  source 1..20: mol_type = other DNA
actccgtctcaaaaaaaaaa

SEQ ID NO: 50283 - DNA, 20 bp, synthetic construct
  source 1..20: mol_type = other DNA
gactccgtctcaaaaaaaaa

SEQ ID NO: 50284 - DNA, 20 bp, synthetic construct
  source 1..20: mol_type = other DNA
agactccgtctcaaaaaaaa

SEQ ID NO: 50285 - DNA, 20 bp, synthetic construct
  source 1..20: mol_type = other DNA
aagactccgtctcaaaaaaa

SEQ ID NO: 50286 - DNA, 20 bp, synthetic construct
  source 1..20: mol_type = other DNA
caagactccgtctcaaaaaa

SEQ ID NO: 50287 - DNA, 20 bp, synthetic construct
  source 1..20: mol_type = other DNA
acaagactccgtctcaaaaa

SEQ ID NO: 50288 - DNA, 20 bp, synthetic construct
  source 1..20: mol_type = other DNA
aacaagactccgtctcaaaa

SEQ ID NO: 50289 - DNA, 20 bp, synthetic construct
  source 1..20: mol_type = other DNA
gaacaagactccgtctcaaa

SEQ ID NO: 50290 - DNA, 20 bp, synthetic construct
  source 1..20: mol_type = other DNA
agaacaagactccgtctcaa

SEQ ID NO: 50291 - DNA, 20 bp, synthetic construct
  source 1..20: mol_type = other DNA
cagaacaagactccgtctca

SEQ ID NO: 50292 - DNA, 20 bp, synthetic construct
  source 1..20: mol_type = other DNA
acagaacaagactccgtctc

SEQ ID NO: 50293 - DNA, 20 bp, synthetic construct
  source 1..20: mol_type = other DNA
gacagaacaagactccgtct

SEQ ID NO: 50294 - DNA, 20 bp, synthetic construct
  source 1..20: mol_type = other DNA
ggacagaacaagactccgtc

SEQ ID NO: 50295 - DNA, 20 bp, synthetic construct
  source 1..20: mol_type = other DNA
gggacagaacaagactccgt

SEQ ID NO: 50296 - DNA, 20 bp, synthetic construct
  source 1..20: mol_type = other DNA
ggggacagaacaagactccg

SEQ ID NO: 50297 - DNA, 20 bp, synthetic construct
  source 1..20: mol_type = other DNA
aggggacagaacaagactcc

SEQ ID NO: 50298 - DNA, 20 bp, synthetic construct
  source 1..20: mol_type = other DNA
caggggacagaacaagactc

SEQ ID NO: 50299 - DNA, 20 bp, synthetic construct
  source 1..20: mol_type = other DNA
ccaggggacagaacaagact

SEQ ID NO: 50300 - DNA, 20 bp, synthetic construct
  source 1..20: mol_type = other DNA
cccaggggacagaacaagac

SEQ ID NO: 50301 - DNA, 20 bp, synthetic construct
  source 1..20: mol_type = other DNA
acccaggggacagaacaaga

SEQ ID NO: 50302 - DNA, 20 bp, synthetic construct
  source 1..20: mol_type = other DNA
cacccaggggacagaacaag

SEQ ID NO: 50303 - DNA, 20 bp, synthetic construct
  source 1..20: mol_type = other DNA
ccacccaggggacagaacaa

SEQ ID NO: 50304 - DNA, 20 bp, synthetic construct
  source 1..20: mol_type = other DNA
tccacccaggggacagaaca

SEQ ID NO: 50305 - DNA, 20 bp, synthetic construct
  source 1..20: mol_type = other DNA
ctccacccaggggacagaac

SEQ ID NO: 50306 - DNA, 20 bp, synthetic construct
  source 1..20: mol_type = other DNA
actccacccaggggacagaa

SEQ ID NO: 50307 - DNA, 20 bp, synthetic construct
  source 1..20: mol_type = other DNA
cactccacccaggggacaga

SEQ ID NO: 50308 - DNA, 20 bp, synthetic construct
  source 1..20: mol_type = other DNA
gcactccacccaggggacag

SEQ ID NO: 50309 - DNA, 20 bp, synthetic construct
  source 1..20: mol_type = other DNA
tgcactccacccaggggaca

SEQ ID NO: 50310 - DNA, 20 bp, synthetic construct
  source 1..20: mol_type = other DNA
ctgcactccacccaggggac

SEQ ID NO: 50311 - DNA, 20 bp, synthetic construct
  source 1..20: mol_type = other DNA
actgcactccacccagggga

SEQ ID NO: 50312 - DNA, 20 bp, synthetic construct
  source 1..20: mol_type = other DNA
cactgcactccacccagggg

SEQ ID NO: 50313 - DNA, 20 bp, synthetic construct
  source 1..20: mol_type = other DNA
ccactgcactccacccaggg

SEQ ID NO: 50314 - DNA, 20 bp, synthetic construct
  source 1..20: mol_type = other DNA
gccactgcactccacccagg

SEQ ID NO: 50315 - DNA, 20 bp, synthetic construct
  source 1..20: mol_type = other DNA
tgccactgcactccacccag

SEQ ID NO: 50316 - DNA, 20 bp, synthetic construct
  source 1..20: mol_type = other DNA
gtgccactgcactccaccca

SEQ ID NO: 50317 - DNA, 20 bp, synthetic construct
  source 1..20: mol_type = other DNA
cgtgccactgcactccaccc

SEQ ID NO: 50318 - DNA, 20 bp, synthetic construct
  source 1..20: mol_type = other DNA
tcgtgccactgcactccacc

SEQ ID NO: 50319 - DNA, 20 bp, synthetic construct
  source 1..20: mol_type = other DNA
atcgtgccactgcactccac

SEQ ID NO: 50320 - DNA, 20 bp, synthetic construct
  source 1..20: mol_type = other DNA
gatcgtgccactgcactcca

SEQ ID NO: 50321 - DNA, 20 bp, synthetic construct
  source 1..20: mol_type = other DNA
agatcgtgccactgcactcc

SEQ ID NO: 50322 - DNA, 20 bp, synthetic construct
  source 1..20: mol_type = other DNA
gagatcgtgccactgcactc

SEQ ID NO: 50323 - DNA, 20 bp, synthetic construct
  source 1..20: mol_type = other DNA
cgagatcgtgccactgcact

SEQ ID NO: 50324 - DNA, 20 bp, synthetic construct
  source 1..20: mol_type = other DNA
ccgagatcgtgccactgcac

SEQ ID NO: 50325 - DNA, 20 bp, synthetic construct
  source 1..20: mol_type = other DNA
gccgagatcgtgccactgca

SEQ ID NO: 50326 - DNA, 20 bp, synthetic construct
  source 1..20: mol_type = other DNA
agccgagatcgtgccactgc

SEQ ID NO: 50327 - DNA, 20 bp, synthetic construct
  source 1..20: mol_type = other DNA
gagccgagatcgtgccactg

SEQ ID NO: 50328 - DNA, 20 bp, synthetic construct
  source 1..20: mol_type = other DNA
tgagccgagatcgtgccact

SEQ ID NO: 50329 - DNA, 20 bp, synthetic construct
  source 1..20: mol_type = other DNA
gtgagccgagatcgtgccac

SEQ ID NO: 50330 - DNA, 20 bp, synthetic construct
  source 1..20: mol_type = other DNA
agtgagccgagatcgtgcca

SEQ ID NO: 50331 - DNA, 20 bp, synthetic construct
  source 1..20: mol_type = other DNA
cagtgagccgagatcgtgcc

SEQ ID NO: 50332 - DNA, 20 bp, synthetic construct
  source 1..20: mol_type = other DNA
gcagtgagccgagatcgtgc

SEQ ID NO: 50333 - DNA, 20 bp, synthetic construct
  source 1..20: mol_type = other DNA
tgcagtgagccgagatcgtg

SEQ ID NO: 50334 - DNA, 20 bp, synthetic construct
  source 1..20: mol_type = other DNA
ctgcagtgagccgagatcgt

SEQ ID NO: 50335 - DNA, 20 bp, synthetic construct
  source 1..20: mol_type = other DNA
gctgcagtgagccgagatcg

SEQ ID NO: 50336 - DNA, 20 bp, synthetic construct
  source 1..20: mol_type = other DNA
ggctgcagtgagccgagatc

SEQ ID NO: 50337 - DNA, 20 bp, synthetic construct
  source 1..20: mol_type = other DNA
aggctgcagtgagccgagat

SEQ ID NO: 50338 - DNA, 20 bp, synthetic construct
  source 1..20: mol_type = other DNA
gaggctgcagtgagccgaga

SEQ ID NO: 50339 - DNA, 20 bp, synthetic construct
  source 1..20: mol_type = other DNA
agaggctgcagtgagccgag

SEQ ID NO: 50340 - DNA, 20 bp, synthetic construct
  source 1..20: mol_type = other DNA
cagaggctgcagtgagccga

SEQ ID NO: 50341 - DNA, 20 bp, synthetic construct
  source 1..20: mol_type = other DNA
gcagaggctgcagtgagccg

SEQ ID NO: 50342 - DNA, 20 bp, synthetic construct
  source 1..20: mol_type = other DNA
ggcagaggctgcagtgagcc

SEQ ID NO: 50343 - DNA, 20 bp, synthetic construct
  source 1..20: mol_type = other DNA
aggcagaggctgcagtgagc

SEQ ID NO: 50344 - DNA, 20 bp, synthetic construct
  source 1..20: mol_type = other DNA
gaggcagaggctgcagtgag

SEQ ID NO: 50345 - DNA, 20 bp, synthetic construct
  source 1..20: mol_type = other DNA
ggaggcagaggctgcagtga

SEQ ID NO: 50346 - DNA, 20 bp, synthetic construct
  source 1..20: mol_type = other DNA
gggaggcagaggctgcagtg

SEQ ID NO: 50347 - DNA, 20 bp, synthetic construct
  source 1..20: mol_type = other DNA
tgggaggcagaggctgcagt

SEQ ID NO: 50348 - DNA, 20 bp, synthetic construct
  source 1..20: mol_type = other DNA
ctgggaggcagaggctgcag

SEQ ID NO: 50349 - DNA, 20 bp, synthetic construct
  source 1..20: mol_type = other DNA
cctgggaggcagaggctgca

SEQ ID NO: 50350 - DNA, 20 bp, synthetic construct
  source 1..20: mol_type = other DNA
acctgggaggcagaggctgc

SEQ ID NO: 50351 - DNA, 20 bp, synthetic construct
  source 1..20: mol_type = other DNA
aacctgggaggcagaggctg

SEQ ID NO: 50352 - DNA, 20 bp, synthetic construct
  source 1..20: mol_type = other DNA
gaacctgggaggcagaggct

SEQ ID NO: 50353 - DNA, 20 bp, synthetic construct
  source 1..20: mol_type = other DNA
tgaacctgggaggcagaggc

SEQ ID NO: 50354 - DNA, 20 bp, synthetic construct
  source 1..20: mol_type = other DNA
ttgaacctgggaggcagagg

SEQ ID NO: 50355 - DNA, 20 bp, synthetic construct
  source 1..20: mol_type = other DNA
cttgaacctgggaggcagag

SEQ ID NO: 50356 - DNA, 20 bp, synthetic construct
  source 1..20: mol_type = other DNA
gcttgaacctgggaggcaga

SEQ ID NO: 50357 - DNA, 20 bp, synthetic construct
  source 1..20: mol_type = other DNA
cgcttgaacctgggaggcag

SEQ ID NO: 50358 - DNA, 20 bp, synthetic construct
  source 1..20: mol_type = other DNA
tcgcttgaacctgggaggca

SEQ ID NO: 50359 - DNA, 20 bp, synthetic construct
  source 1..20: mol_type = other DNA
atcgcttgaacctgggaggc

SEQ ID NO: 50360 - DNA, 20 bp, synthetic construct
  source 1..20: mol_type = other DNA
aatcgcttgaacctgggagg

SEQ ID NO: 50361 - DNA, 20 bp, synthetic construct
  source 1..20: mol_type = other DNA
gaatcgcttgaacctgggag

SEQ ID NO: 50362 - DNA, 20 bp, synthetic construct
  source 1..20: mol_type = other DNA
agaatcgcttgaacctggga

SEQ ID NO: 50363 - DNA, 20 bp, synthetic construct
  source 1..20: mol_type = other DNA
gagaatcgcttgaacctggg

SEQ ID NO: 50364 - DNA, 20 bp, synthetic construct
  source 1..20: mol_type = other DNA
ggagaatcgcttgaacctgg

SEQ ID NO: 50365 - DNA, 20 bp, synthetic construct
  source 1..20: mol_type = other DNA
aggagaatcgcttgaacctg

SEQ ID NO: 50366 - DNA, 20 bp, synthetic construct
  source 1..20: mol_type = other DNA
caggagaatcgcttgaacct

SEQ ID NO: 50367 - DNA, 20 bp, synthetic construct
  source 1..20: mol_type = other DNA
gcaggagaatcgcttgaacc

SEQ ID NO: 50368 - DNA, 20 bp, synthetic construct
  source 1..20: mol_type = other DNA
ggcaggagaatcgcttgaac

SEQ ID NO: 50369 - DNA, 20 bp, synthetic construct
  source 1..20: mol_type = other DNA
aggcaggagaatcgcttgaa

SEQ ID NO: 50370 - DNA, 20 bp, synthetic construct
  source 1..20: mol_type = other DNA
gaggcaggagaatcgcttga

SEQ ID NO: 50371 - DNA, 20 bp, synthetic construct
  source 1..20: mol_type = other DNA
tgaggcaggagaatcgcttg

SEQ ID NO: 50372 - DNA, 20 bp, synthetic construct
  source 1..20: mol_type = other DNA
ctgaggcaggagaatcgctt

SEQ ID NO: 50373 - DNA, 20 bp, synthetic construct
  source 1..20: mol_type = other DNA
gctgaggcaggagaatcgct

SEQ ID NO: 50374 - DNA, 20 bp, synthetic construct
  source 1..20: mol_type = other DNA
ggctgaggcaggagaatcgc

SEQ ID NO: 50375 - DNA, 20 bp, synthetic construct
  source 1..20: mol_type = other DNA
aggctgaggcaggagaatcg

SEQ ID NO: 50376 - DNA, 20 bp, synthetic construct
  source 1..20: mol_type = other DNA
gaggctgaggcaggagaatc

SEQ ID NO: 50377 - DNA, 20 bp, synthetic construct
  source 1..20: mol_type = other DNA
ggaggctgaggcaggagaat

SEQ ID NO: 50378 - DNA, 20 bp, synthetic construct
  source 1..20: mol_type = other DNA
aggaggctgaggcaggagaa

SEQ ID NO: 50379 - DNA, 20 bp, synthetic construct
  source 1..20: mol_type = other DNA
caggaggctgaggcaggaga

SEQ ID NO: 50380 - DNA, 20 bp, synthetic construct
  source 1..20: mol_type = other DNA
tcaggaggctgaggcaggag

SEQ ID NO: 50381 - DNA, 20 bp, synthetic construct
  source 1..20: mol_type = other DNA
ctcaggaggctgaggcagga

SEQ ID NO: 50382 - DNA, 20 bp, synthetic construct
  source 1..20: mol_type = other DNA
actcaggaggctgaggcagg

SEQ ID NO: 50383 - DNA, 20 bp, synthetic construct
  source 1..20: mol_type = other DNA
tactcaggaggctgaggcag

SEQ ID NO: 50384 - DNA, 20 bp, synthetic construct
  source 1..20: mol_type = other DNA
ctactcaggaggctgaggca

SEQ ID NO: 50385 - DNA, 20 bp, synthetic construct
  source 1..20: mol_type = other DNA
gctactcaggaggctgaggc

SEQ ID NO: 50386 - DNA, 20 bp, synthetic construct
  source 1..20: mol_type = other DNA
agctactcaggaggctgagg

SEQ ID NO: 50387 - DNA, 20 bp, synthetic construct
  source 1..20: mol_type = other DNA
cagctactcaggaggctgag

SEQ ID NO: 50388 - DNA, 20 bp, synthetic construct
  source 1..20: mol_type = other DNA
ccagctactcaggaggctga

SEQ ID NO: 50389 - DNA, 20 bp, synthetic construct
  source 1..20: mol_type = other DNA
cccagctactcaggaggctg

SEQ ID NO: 50390 - DNA, 20 bp, synthetic construct
  source 1..20: mol_type = other DNA
tcccagctactcaggaggct

SEQ ID NO: 50391 - DNA, 20 bp, synthetic construct
  source 1..20: mol_type = other DNA
gtcccagctactcaggaggc

SEQ ID NO: 50392 - DNA, 20 bp, synthetic construct
  source 1..20: mol_type = other DNA
agtcccagctactcaggagg

SEQ ID NO: 50393 - DNA, 20 bp, synthetic construct
  source 1..20: mol_type = other DNA
tagtcccagctactcaggag

SEQ ID NO: 50394 - DNA, 20 bp, synthetic construct
  source 1..20: mol_type = other DNA
gtagtcccagctactcagga

SEQ ID NO: 50395 - DNA, 20 bp, synthetic construct
  source 1..20: mol_type = other DNA
tgtagtcccagctactcagg

SEQ ID NO: 50396 - DNA, 20 bp, synthetic construct
  source 1..20: mol_type = other DNA
ctgtagtcccagctactcag

SEQ ID NO: 50397 - DNA, 20 bp, synthetic construct
  source 1..20: mol_type = other DNA
cctgtagtcccagctactca

SEQ ID NO: 50398 - DNA, 20 bp, synthetic construct
  source 1..20: mol_type = other DNA
gcctgtagtcccagctactc

SEQ ID NO: 50399 - DNA, 20 bp, synthetic construct
  source 1..20: mol_type = other DNA
cgcctgtagtcccagctact

SEQ ID NO: 50400 - DNA, 20 bp, synthetic construct
  source 1..20: mol_type = other DNA
acgcctgtagtcccagctac

SEQ ID NO: 50401 - DNA, 20 bp, synthetic construct
  source 1..20: mol_type = other DNA
cacgcctgtagtcccagcta

SEQ ID NO: 50402 - DNA, 20 bp, synthetic construct
  source 1..20: mol_type = other DNA
acacgcctgtagtcccagct

SEQ ID NO: 50403 - DNA, 20 bp, synthetic construct
  source 1..20: mol_type = other DNA
cacacgcctgtagtcccagc

SEQ ID NO: 50404 - DNA, 20 bp, synthetic construct
  source 1..20: mol_type = other DNA
gcacacgcctgtagtcccag

SEQ ID NO: 50405 - DNA, 20 bp, synthetic construct
  source 1..20: mol_type = other DNA
ggcacacgcctgtagtccca

SEQ ID NO: 50406 - DNA, 20 bp, synthetic construct
  source 1..20: mol_type = other DNA
tggcacacgcctgtagtccc

SEQ ID NO: 50407 - DNA, 20 bp, synthetic construct
  source 1..20: mol_type = other DNA
gtggcacacgcctgtagtcc

SEQ ID NO: 50408 - DNA, 20 bp, synthetic construct
  source 1..20: mol_type = other DNA
ggtggcacacgcctgtagtc

SEQ ID NO: 50409 - DNA, 20 bp, synthetic construct
  source 1..20: mol_type = other DNA
tggtggcacacgcctgtagt

SEQ ID NO: 50410 - DNA, 20 bp, synthetic construct
  source 1..20: mol_type = other DNA
gtggtggcacacgcctgtag

SEQ ID NO: 50411 - DNA, 20 bp, synthetic construct
  source 1..20: mol_type = other DNA
tgtggtggcacacgcctgta

SEQ ID NO: 50412 - DNA, 20 bp, synthetic construct
  source 1..20: mol_type = other DNA
gtgtggtggcacacgcctgt

SEQ ID NO: 50413 - DNA, 20 bp, synthetic construct
  source 1..20: mol_type = other DNA
ggtgtggtggcacacgcctg

SEQ ID NO: 50414 - DNA, 20 bp, synthetic construct
  source 1..20: mol_type = other DNA
tggtgtggtggcacacgcct

SEQ ID NO: 50415 - DNA, 20 bp, synthetic construct
  source 1..20: mol_type = other DNA
ttggtgtggtggcacacgcc

SEQ ID NO: 50416 - DNA, 20 bp, synthetic construct
  source 1..20: mol_type = other DNA
cttggtgtggtggcacacgc

SEQ ID NO: 50417 - DNA, 20 bp, synthetic construct
  source 1..20: mol_type = other DNA
gcttggtgtggtggcacacg

SEQ ID NO: 50418 - DNA, 20 bp, synthetic construct
  source 1..20: mol_type = other DNA
agcttggtgtggtggcacac

SEQ ID NO: 50419 - DNA, 20 bp, synthetic construct
  source 1..20: mol_type = other DNA
tagcttggtgtggtggcaca

SEQ ID NO: 50420 - DNA, 20 bp, synthetic construct
  source 1..20: mol_type = other DNA
ttagcttggtgtggtggcac

SEQ ID NO: 50421 - DNA, 20 bp, synthetic construct
  source 1..20: mol_type = other DNA
attagcttggtgtggtggca

SEQ ID NO: 50422 - DNA, 20 bp, synthetic construct
  source 1..20: mol_type = other DNA
aattagcttggtgtggtggc

SEQ ID NO: 50423 - DNA, 20 bp, synthetic construct
  source 1..20: mol_type = other DNA
aaattagcttggtgtggtgg

SEQ ID NO: 50424 - DNA, 20 bp, synthetic construct
  source 1..20: mol_type = other DNA
aaaattagcttggtgtggtg

SEQ ID NO: 50425 - DNA, 20 bp, synthetic construct
  source 1..20: mol_type = other DNA
aaaaattagcttggtgtggt

SEQ ID NO: 50426 - DNA, 20 bp, synthetic construct
  source 1..20: mol_type = other DNA
caaaaattagcttggtgtgg

SEQ ID NO: 50427 - DNA, 20 bp, synthetic construct
  source 1..20: mol_type = other DNA
acaaaaattagcttggtgtg

SEQ ID NO: 50428 - DNA, 20 bp, synthetic construct
  source 1..20: mol_type = other DNA
tacaaaaattagcttggtgt

SEQ ID NO: 50429 - DNA, 20 bp, synthetic construct
  source 1..20: mol_type = other DNA
atacaaaaattagcttggtg

SEQ ID NO: 50430 - DNA, 20 bp, synthetic construct
  source 1..20: mol_type = other DNA
aatacaaaaattagcttggt

SEQ ID NO: 50431 - DNA, 20 bp, synthetic construct
  source 1..20: mol_type = other DNA
aaatacaaaaattagcttgg

SEQ ID NO: 50432 - DNA, 20 bp, synthetic construct
  source 1..20: mol_type = other DNA
aaaatacaaaaattagcttg

SEQ ID NO: 50433 - DNA, 20 bp, synthetic construct
  source 1..20: mol_type = other DNA
aaaaatacaaaaattagctt

SEQ ID NO: 50434 - DNA, 20 bp, synthetic construct
  source 1..20: mol_type = other DNA
aaaaaatacaaaaattagct

SEQ ID NO: 50435 - DNA, 20 bp, synthetic construct
  source 1..20: mol_type = other DNA
caaaaaatacaaaaattagc

SEQ ID NO: 50436 - DNA, 20 bp, synthetic construct
  source 1..20: mol_type = other DNA
acaaaaaatacaaaaattag

SEQ ID NO: 50437 - DNA, 20 bp, synthetic construct
  source 1..20: mol_type = other DNA
tacaaaaaatacaaaaatta

SEQ ID NO: 50438 - DNA, 20 bp, synthetic construct
  source 1..20: mol_type = other DNA
ctacaaaaaatacaaaaatt

SEQ ID NO: 50439 - DNA, 20 bp, synthetic construct
  source 1..20: mol_type = other DNA
tctacaaaaaatacaaaaat

SEQ ID NO: 50440 - DNA, 20 bp, synthetic construct
  source 1..20: mol_type = other DNA
ctctacaaaaaatacaaaaa

SEQ ID NO: 50441 - DNA, 20 bp, synthetic construct
  source 1..20: mol_type = other DNA
tctctacaaaaaatacaaaa

SEQ ID NO: 50442 - DNA, 20 bp, synthetic construct
  source 1..20: mol_type = other DNA
gtctctacaaaaaatacaaa

SEQ ID NO: 50443 - DNA, 20 bp, synthetic construct
  source 1..20: mol_type = other DNA
tgtctctacaaaaaatacaa

SEQ ID NO: 50444 - DNA, 20 bp, synthetic construct
  source 1..20: mol_type = other DNA
ctgtctctacaaaaaataca

SEQ ID NO: 50445 - DNA, 20 bp, synthetic construct
  source 1..20: mol_type = other DNA
cctgtctctacaaaaaatac

SEQ ID NO: 50446 - DNA, 20 bp, synthetic construct
  source 1..20: mol_type = other DNA
ccctgtctctacaaaaaata

SEQ ID NO: 50447 - DNA, 20 bp, synthetic construct
  source 1..20: mol_type = other DNA
accctgtctctacaaaaaat

SEQ ID NO: 50448 - DNA, 20 bp, synthetic construct
  source 1..20: mol_type = other DNA
aaccctgtctctacaaaaaa

SEQ ID NO: 50449 - DNA, 20 bp, synthetic construct
  source 1..20: mol_type = other DNA
aaaccctgtctctacaaaaa

SEQ ID NO: 50450 - DNA, 20 bp, synthetic construct
  source 1..20: mol_type = other DNA
gaaaccctgtctctacaaaa

SEQ ID NO: 50451 - DNA, 20 bp, synthetic construct
  source 1..20: mol_type = other DNA
tgaaaccctgtctctacaaa

SEQ ID NO: 50452 - DNA, 20 bp, synthetic construct
  source 1..20: mol_type = other DNA
gtgaaaccctgtctctacaa

SEQ ID NO: 50453 - DNA, 20 bp, synthetic construct
  source 1..20: mol_type = other DNA
ggtgaaaccctgtctctaca

SEQ ID NO: 50454 - DNA, 20 bp, synthetic construct
  source 1..20: mol_type = other DNA
tggtgaaaccctgtctctac

SEQ ID NO: 50455 - DNA, 20 bp, synthetic construct
  source 1..20: mol_type = other DNA
atggtgaaaccctgtctcta

SEQ ID NO: 50456 - DNA, 20 bp, synthetic construct
  source 1..20: mol_type = other DNA
catggtgaaaccctgtctct

SEQ ID NO: 50457 - DNA, 20 bp, synthetic construct
  source 1..20: mol_type = other DNA
acatggtgaaaccctgtctc

SEQ ID NO: 50458 - DNA, 20 bp, synthetic construct
  source 1..20: mol_type = other DNA
aacatggtgaaaccctgtct

SEQ ID NO: 50459 - DNA, 20 bp, synthetic construct
  source 1..20: mol_type = other DNA
caacatggtgaaaccctgtc

SEQ ID NO: 50460 - DNA, 20 bp, synthetic construct
  source 1..20: mol_type = other DNA
ccaacatggtgaaaccctgt

SEQ ID NO: 50461 - DNA, 20 bp, synthetic construct
  source 1..20: mol_type = other DNA
gccaacatggtgaaaccctg

SEQ ID NO: 50462 - DNA, 20 bp, synthetic construct
  source 1..20: mol_type = other DNA
ggccaacatggtgaaaccct

SEQ ID NO: 50463 - DNA, 20 bp, synthetic construct
  source 1..20: mol_type = other DNA
tggccaacatggtgaaaccc

SEQ ID NO: 50464 - DNA, 20 bp, synthetic construct
  source 1..20: mol_type = other DNA
ctggccaacatggtgaaacc

SEQ ID NO: 50465 - DNA, 20 bp, synthetic construct
  source 1..20: mol_type = other DNA
cctggccaacatggtgaaac

SEQ ID NO: 50466 - DNA, 20 bp, synthetic construct
  source 1..20: mol_type = other DNA
tcctggccaacatggtgaaa

SEQ ID NO: 50467 - DNA, 20 bp, synthetic construct
  source 1..20: mol_type = other DNA
atcctggccaacatggtgaa

SEQ ID NO: 50468 - DNA, 20 bp, synthetic construct
  source 1..20: mol_type = other DNA
catcctggccaacatggtga

SEQ ID NO: 50469 - DNA, 20 bp, synthetic construct
  source 1..20: mol_type = other DNA
ccatcctggccaacatggtg

SEQ ID NO: 50470 - DNA, 20 bp, synthetic construct
  source 1..20: mol_type = other DNA
accatcctggccaacatggt

SEQ ID NO: 50471 - DNA, 20 bp, synthetic construct
  source 1..20: mol_type = other DNA
gaccatcctggccaacatgg

SEQ ID NO: 50472 - DNA, 20 bp, synthetic construct
  source 1..20: mol_type = other DNA
agaccatcctggccaacatg

SEQ ID NO: 50473 - DNA, 20 bp, synthetic construct
  source 1..20: mol_type = other DNA
gagaccatcctggccaacat

SEQ ID NO: 50474 - DNA, 20 bp, synthetic construct
  source 1..20: mol_type = other DNA
cgagaccatcctggccaaca

SEQ ID NO: 50475 - DNA, 20 bp, synthetic construct
  source 1..20: mol_type = other DNA
tcgagaccatcctggccaac

SEQ ID NO: 50476 - DNA, 20 bp, synthetic construct
  source 1..20: mol_type = other DNA
atcgagaccatcctggccaa

SEQ ID NO: 50477 - DNA, 20 bp, synthetic construct
  source 1..20: mol_type = other DNA
aatcgagaccatcctggcca

SEQ ID NO: 50478 - DNA, 20 bp, synthetic construct
  source 1..20: mol_type = other DNA
caatcgagaccatcctggcc

SEQ ID NO: 50479 - DNA, 20 bp, synthetic construct
  source 1..20: mol_type = other DNA
acaatcgagaccatcctggc

SEQ ID NO: 50480 - DNA, 20 bp, synthetic construct
  source 1..20: mol_type = other DNA
aacaatcgagaccatcctgg

SEQ ID NO: 50481 - DNA, 20 bp, synthetic construct
  source 1..20: mol_type = other DNA
aaacaatcgagaccatcctg

SEQ ID NO: 50482 - DNA, 20 bp, synthetic construct
  source 1..20: mol_type = other DNA
caaacaatcgagaccatcct

SEQ ID NO: 50483 - DNA, 20 bp, synthetic construct
  source 1..20: mol_type = other DNA
tcaaacaatcgagaccatcc

SEQ ID NO: 50484 - DNA, 20 bp, synthetic construct
  source 1..20: mol_type = other DNA
gtcaaacaatcgagaccatc

SEQ ID NO: 50485 - DNA, 20 bp, synthetic construct
  source 1..20: mol_type = other DNA
ggtcaaacaatcgagaccat

SEQ ID NO: 50486 - DNA, 20 bp, synthetic construct
  source 1..20: mol_type = other DNA
aggtcaaacaatcgagacca

SEQ ID NO: 50487 - DNA, 20 bp, synthetic construct
  source 1..20: mol_type = other DNA
gaggtcaaacaatcgagacc

SEQ ID NO: 50488 - DNA, 20 bp, synthetic construct
  source 1..20: mol_type = other DNA
cgaggtcaaacaatcgagac

SEQ ID NO: 50489 - DNA, 20 bp, synthetic construct
  source 1..20: mol_type = other DNA
acgaggtcaaacaatcgaga

SEQ ID NO: 50490 - DNA, 20 bp, synthetic construct
  source 1..20: mol_type = other DNA
cacgaggtcaaacaatcgag

SEQ ID NO: 50491 - DNA, 20 bp, synthetic construct
  source 1..20: mol_type = other DNA
tcacgaggtcaaacaatcga

SEQ ID NO: 50492 - DNA, 20 bp, synthetic construct
  source 1..20: mol_type = other DNA
atcacgaggtcaaacaatcg

SEQ ID NO: 50493 - DNA, 20 bp, synthetic construct
  source 1..20: mol_type = other DNA
gatcacgaggtcaaacaatc

SEQ ID NO: 50494 - DNA, 20 bp, synthetic construct
  source 1..20: mol_type = other DNA
ggatcacgaggtcaaacaat

SEQ ID NO: 50495 - DNA, 20 bp, synthetic construct
  source 1..20: mol_type = other DNA
cggatcacgaggtcaaacaa

SEQ ID NO: 50496 - DNA, 20 bp, synthetic construct
  source 1..20: mol_type = other DNA
gcggatcacgaggtcaaaca

SEQ ID NO: 50497 - DNA, 20 bp, synthetic construct
  source 1..20: mol_type = other DNA
ggcggatcacgaggtcaaac

SEQ ID NO: 50498 - DNA, 20 bp, synthetic construct
  source 1..20: mol_type = other DNA
gggcggatcacgaggtcaaa

SEQ ID NO: 50499 - DNA, 20 bp, synthetic construct
  source 1..20: mol_type = other DNA
cgggcggatcacgaggtcaa

SEQ ID NO: 50500 - DNA, 20 bp, synthetic construct
  source 1..20: mol_type = other DNA
gcgggcggatcacgaggtca

SEQ ID NO: 50501 - DNA, 20 bp, synthetic construct
  source 1..20: mol_type = other DNA
ggcgggcggatcacgaggtc

SEQ ID NO: 50502 - DNA, 20 bp, synthetic construct
  source 1..20: mol_type = other DNA
aggcgggcggatcacgaggt

SEQ ID NO: 50503 - DNA, 20 bp, synthetic construct
  source 1..20: mol_type = other DNA
gaggcgggcggatcacgagg

SEQ ID NO: 50504 - DNA, 20 bp, synthetic construct
  source 1..20: mol_type = other DNA
cgaggcgggcggatcacgag

SEQ ID NO: 50505 - DNA, 20 bp, synthetic construct
  source 1..20: mol_type = other DNA
ccgaggcgggcggatcacga

SEQ ID NO: 50506 - DNA, 20 bp, synthetic construct
  source 1..20: mol_type = other DNA
gccgaggcgggcggatcacg

SEQ ID NO: 50507 - DNA, 20 bp, synthetic construct
  source 1..20: mol_type = other DNA
ggccgaggcgggcggatcac

SEQ ID NO: 50508 - DNA, 20 bp, synthetic construct
  source 1..20: mol_type = other DNA
aggccgaggcgggcggatca

SEQ ID NO: 50509 - DNA, 20 bp, synthetic construct
  source 1..20: mol_type = other DNA
gaggccgaggcgggcggatc

SEQ ID NO: 50510 - DNA, 20 bp, synthetic construct
  source 1..20: mol_type = other DNA
ggaggccgaggcgggcggat

SEQ ID NO: 50511 - DNA, 20 bp, synthetic construct
  source 1..20: mol_type = other DNA
gggaggccgaggcgggcgga

SEQ ID NO: 50512 - DNA, 20 bp, synthetic construct
  source 1..20: mol_type = other DNA
tgggaggccgaggcgggcgg

SEQ ID NO: 50513 - DNA, 20 bp, synthetic construct
  source 1..20: mol_type = other DNA
ttgggaggccgaggcgggcg

SEQ ID NO: 50514 - DNA, 20 bp, synthetic construct
  source 1..20: mol_type = other DNA
tttgggaggccgaggcgggc

SEQ ID NO: 50515 - DNA, 20 bp, synthetic construct
  source 1..20: mol_type = other DNA
ctttgggaggccgaggcggg

SEQ ID NO: 50516 - DNA, 20 bp, synthetic construct
  source 1..20: mol_type = other DNA
actttgggaggccgaggcgg

SEQ ID NO: 50517 - DNA, 20 bp, synthetic construct
  source 1..20: mol_type = other DNA
cactttgggaggccgaggcg

SEQ ID NO: 50518 - DNA, 20 bp, synthetic construct
  source 1..20: mol_type = other DNA
gcactttgggaggccgaggc

SEQ ID NO: 50519 - DNA, 20 bp, synthetic construct
  source 1..20: mol_type = other DNA
agcactttgggaggccgagg

SEQ ID NO: 50520 - DNA, 20 bp, synthetic construct
  source 1..20: mol_type = other DNA
cagcactttgggaggccgag

SEQ ID NO: 50521 - DNA, 20 bp, synthetic construct
  source 1..20: mol_type = other DNA
ccagcactttgggaggccga

SEQ ID NO: 50522 - DNA, 20 bp, synthetic construct
  source 1..20: mol_type = other DNA
tccagcactttgggaggccg

SEQ ID NO: 50523 - DNA, 20 bp, synthetic construct
  source 1..20: mol_type = other DNA
ttccagcactttgggaggcc

SEQ ID NO: 50524 - DNA, 20 bp, synthetic construct
  source 1..20: mol_type = other DNA
attccagcactttgggaggc

SEQ ID NO: 50525 - DNA, 20 bp, synthetic construct
  source 1..20: mol_type = other DNA
aattccagcactttgggagg

SEQ ID NO: 50526 - DNA, 20 bp, synthetic construct
  source 1..20: mol_type = other DNA
taattccagcactttgggag

SEQ ID NO: 50527 - DNA, 20 bp, synthetic construct
  source 1..20: mol_type = other DNA
gtaattccagcactttggga

SEQ ID NO: 50528 - DNA, 20 bp, synthetic construct
  source 1..20: mol_type = other DNA
tgtaattccagcactttggg

SEQ ID NO: 50529 - DNA, 20 bp, synthetic construct
  source 1..20: mol_type = other DNA
ctgtaattccagcactttgg

SEQ ID NO: 50530 - DNA, 20 bp, synthetic construct
  source 1..20: mol_type = other DNA
cctgtaattccagcactttg

SEQ ID NO: 50531 - DNA, 20 bp, synthetic construct
  source 1..20: mol_type = other DNA
gcctgtaattccagcacttt

SEQ ID NO: 50532 - DNA, 20 bp, synthetic construct
  source 1..20: mol_type = other DNA
tgcctgtaattccagcactt

SEQ ID NO: 50533 - DNA, 20 bp, synthetic construct
  source 1..20: mol_type = other DNA
atgcctgtaattccagcact

SEQ ID NO: 50534 - DNA, 20 bp, synthetic construct
  source 1..20: mol_type = other DNA
catgcctgtaattccagcac

SEQ ID NO: 50535 - DNA, 20 bp, synthetic construct
  source 1..20: mol_type = other DNA
tcatgcctgtaattccagca

SEQ ID NO: 50536 - DNA, 20 bp, synthetic construct
  source 1..20: mol_type = other DNA
ctcatgcctgtaattccagc

SEQ ID NO: 50537 - DNA, 20 bp, synthetic construct
  source 1..20: mol_type = other DNA
gctcatgcctgtaattccag

SEQ ID NO: 50538 - DNA, 20 bp, synthetic construct
  source 1..20: mol_type = other DNA
ggctcatgcctgtaattcca

SEQ ID NO: 50539 - DNA, 20 bp, synthetic construct
  source 1..20: mol_type = other DNA
tggctcatgcctgtaattcc

SEQ ID NO: 50540 - DNA, 20 bp, synthetic construct
  source 1..20: mol_type = other DNA
gtggctcatgcctgtaattc

SEQ ID NO: 50541 - DNA, 20 bp, synthetic construct
  source 1..20: mol_type = other DNA
agtggctcatgcctgtaatt

SEQ ID NO: 50542 - DNA, 20 bp, synthetic construct
  source 1..20: mol_type = other DNA
cagtggctcatgcctgtaat

SEQ ID NO: 50543 - DNA, 20 bp, synthetic construct
  source 1..20: mol_type = other DNA
gcagtggctcatgcctgtaa

SEQ ID NO: 50544 - DNA, 20 bp, synthetic construct
  source 1..20: mol_type = other DNA
tgcagtggctcatgcctgta

SEQ ID NO: 50545 - DNA, 20 bp, synthetic construct
  source 1..20: mol_type = other DNA
gtgcagtggctcatgcctgt

SEQ ID NO: 50546 - DNA, 20 bp, synthetic construct
  source 1..20: mol_type = other DNA
ggtgcagtggctcatgcctg

SEQ ID NO: 50547 - DNA, 20 bp, synthetic construct
  source 1..20: mol_type = other DNA
gggtgcagtggctcatgcct

SEQ ID NO: 50548 - DNA, 20 bp, synthetic construct
  source 1..20: mol_type = other DNA
tgggtgcagtggctcatgcc

SEQ ID NO: 50549 - DNA, 20 bp, synthetic construct
  source 1..20: mol_type = other DNA
ctgggtgcagtggctcatgc

SEQ ID NO: 50550 - DNA, 20 bp, synthetic construct
  source 1..20: mol_type = other DNA
gctgggtgcagtggctcatg

SEQ ID NO: 50551 - DNA, 20 bp, synthetic construct
  source 1..20: mol_type = other DNA
ggctgggtgcagtggctcat

SEQ ID NO: 50552 - DNA, 20 bp, synthetic construct
  source 1..20: mol_type = other DNA
cggctgggtgcagtggctca

SEQ ID NO: 50553 - DNA, 20 bp, synthetic construct
  source 1..20: mol_type = other DNA
ccggctgggtgcagtggctc

SEQ ID NO: 50554 - DNA, 20 bp, synthetic construct
  source 1..20: mol_type = other DNA
accggctgggtgcagtggct

SEQ ID NO: 50555 - DNA, 20 bp, synthetic construct
  source 1..20: mol_type = other DNA
aaccggctgggtgcagtggc

SEQ ID NO: 50556 - DNA, 20 bp, synthetic construct
  source 1..20: mol_type = other DNA
gaaccggctgggtgcagtgg

SEQ ID NO: 50557 - DNA, 20 bp, synthetic construct
  source 1..20: mol_type = other DNA
agaaccggctgggtgcagtg

SEQ ID NO: 50558 - DNA, 20 bp, synthetic construct
  source 1..20: mol_type = other DNA
tagaaccggctgggtgcagt

SEQ ID NO: 50559 - DNA, 20 bp, synthetic construct
  source 1..20: mol_type = other DNA
ttagaaccggctgggtgcag

SEQ ID NO: 50560 - DNA, 20 bp, synthetic construct
  source 1..20: mol_type = other DNA
tttagaaccggctgggtgca

SEQ ID NO: 50561 - DNA, 20 bp, synthetic construct
  source 1..20: mol_type = other DNA
ttttagaaccggctgggtgc

SEQ ID NO: 50562 - DNA, 20 bp, synthetic construct
  source 1..20: mol_type = other DNA
attttagaaccggctgggtg

SEQ ID NO: 50563 - DNA, 20 bp, synthetic construct
  source 1..20: mol_type = other DNA
aattttagaaccggctgggt

SEQ ID NO: 50564 - DNA, 20 bp, synthetic construct
  source 1..20: mol_type = other DNA
gaattttagaaccggctggg

SEQ ID NO: 50565 - DNA, 20 bp, synthetic construct
  source 1..20: mol_type = other DNA
agaattttagaaccggctgg

SEQ ID NO: 50566 - DNA, 20 bp, synthetic construct
  source 1..20: mol_type = other DNA
aagaattttagaaccggctg

SEQ ID NO: 50567 - DNA, 20 bp, synthetic construct
  source 1..20: mol_type = other DNA
aaagaattttagaaccggct

SEQ ID NO: 50568 - DNA, 20 bp, synthetic construct
  source 1..20: mol_type = other DNA
aaaagaattttagaaccggc

SEQ ID NO: 50569 - DNA, 20 bp, synthetic construct
  source 1..20: mol_type = other DNA
taaaagaattttagaaccgg

SEQ ID NO: 50570 - DNA, 20 bp, synthetic construct
  source 1..20: mol_type = other DNA
ataaaagaattttagaaccg

SEQ ID NO: 50571 - DNA, 20 bp, synthetic construct
  source 1..20: mol_type = other DNA
aataaaagaattttagaacc

SEQ ID NO: 50572 - DNA, 20 bp, synthetic construct
  source 1..20: mol_type = other DNA
aaataaaagaattttagaac

SEQ ID NO: 50573 - DNA, 20 bp, synthetic construct
  source 1..20: mol_type = other DNA
taaataaaagaattttagaa

SEQ ID NO: 50574 - DNA, 20 bp, synthetic construct
  source 1..20: mol_type = other DNA
ataaataaaagaattttaga

SEQ ID NO: 50575 - DNA, 20 bp, synthetic construct
  source 1..20: mol_type = other DNA
aataaataaaagaattttag

SEQ ID NO: 50576 - DNA, 20 bp, synthetic construct
  source 1..20: mol_type = other DNA
aaataaataaaagaatttta

SEQ ID NO: 50577 - DNA, 20 bp, synthetic construct
  source 1..20: mol_type = other DNA
caaataaataaaagaatttt

SEQ ID NO: 50578 - DNA, 20 bp, synthetic construct
  source 1..20: mol_type = other DNA
acaaataaataaaagaattt

SEQ ID NO: 50579 - DNA, 20 bp, synthetic construct
  source 1..20: mol_type = other DNA
tacaaataaataaaagaatt

SEQ ID NO: 50580 - DNA, 20 bp, synthetic construct
  source 1..20: mol_type = other DNA
atacaaataaataaaagaat

SEQ ID NO: 50581 - DNA, 20 bp, synthetic construct
  source 1..20: mol_type = other DNA
tatacaaataaataaaagaa

SEQ ID NO: 50582 - DNA, 20 bp, synthetic construct
  source 1..20: mol_type = other DNA
atatacaaataaataaaaga

SEQ ID NO: 50583 - DNA, 20 bp, synthetic construct
  source 1..20: mol_type = other DNA
catatacaaataaataaaag

SEQ ID NO: 50584 - DNA, 20 bp, synthetic construct
  source 1..20: mol_type = other DNA
gcatatacaaataaataaaa

SEQ ID NO: 50585 - DNA, 20 bp, synthetic construct
  source 1..20: mol_type = other DNA
ggcatatacaaataaataaa

SEQ ID NO: 50586 - DNA, 20 bp, synthetic construct
  source 1..20: mol_type = other DNA
tggcatatacaaataaataa

SEQ ID NO: 50587 - DNA, 20 bp, synthetic construct
  source 1..20: mol_type = other DNA
ttggcatatacaaataaata

SEQ ID NO: 50588 - DNA, 20 bp, synthetic construct
  source 1..20: mol_type = other DNA
tttggcatatacaaataaat

SEQ ID NO: 50589 - DNA, 20 bp, synthetic construct
  source 1..20: mol_type = other DNA
atttggcatatacaaataaa

SEQ ID NO: 50590 - DNA, 20 bp, synthetic construct
  source 1..20: mol_type = other DNA
aatttggcatatacaaataa

SEQ ID NO: 50591 - DNA, 20 bp, synthetic construct
  source 1..20: mol_type = other DNA
gaatttggcatatacaaata

SEQ ID NO: 50592 - DNA, 20 bp, synthetic construct
  source 1..20: mol_type = other DNA
agaatttggcatatacaaat

SEQ ID NO: 50593 - DNA, 20 bp, synthetic construct
  source 1..20: mol_type = other DNA
cagaatttggcatatacaaa

SEQ ID NO: 50594 - DNA, 20 bp, synthetic construct
  source 1..20: mol_type = other DNA
acagaatttggcatatacaa

SEQ ID NO: 50595 - DNA, 20 bp, synthetic construct
  source 1..20: mol_type = other DNA
tacagaatttggcatataca

SEQ ID NO: 50596 - DNA, 20 bp, synthetic construct
  source 1..20: mol_type = other DNA
ctacagaatttggcatatac

SEQ ID NO: 50597 - DNA, 20 bp, synthetic construct
  source 1..20: mol_type = other DNA
actacagaatttggcatata

SEQ ID NO: 50598 - DNA, 20 bp, synthetic construct
  source 1..20: mol_type = other DNA
cactacagaatttggcatat

SEQ ID NO: 50599 - DNA, 20 bp, synthetic construct
  source 1..20: mol_type = other DNA
tcactacagaatttggcata

SEQ ID NO: 50600 - DNA, 20 bp, synthetic construct
  source 1..20: mol_type = other DNA
ttcactacagaatttggcat

SEQ ID NO: 50601 - DNA, 20 bp, synthetic construct
  source 1..20: mol_type = other DNA
tttcactacagaatttggca

SEQ ID NO: 50602 - DNA, 20 bp, synthetic construct
  source 1..20: mol_type = other DNA
atttcactacagaatttggc

SEQ ID NO: 50603 - DNA, 20 bp, synthetic construct
  source 1..20: mol_type = other DNA
tatttcactacagaatttgg

SEQ ID NO: 50604 - DNA, 20 bp, synthetic construct
  source 1..20: mol_type = other DNA
gtatttcactacagaatttg

SEQ ID NO: 50605 - DNA, 20 bp, synthetic construct
  source 1..20: mol_type = other DNA
cgtatttcactacagaattt

SEQ ID NO: 50606 - DNA, 20 bp, synthetic construct
  source 1..20: mol_type = other DNA
acgtatttcactacagaatt

SEQ ID NO: 50607 - DNA, 20 bp, synthetic construct
  source 1..20: mol_type = other DNA
tacgtatttcactacagaat

SEQ ID NO: 50608 - DNA, 20 bp, synthetic construct
  source 1..20: mol_type = other DNA
ttacgtatttcactacagaa

SEQ ID NO: 50609 - DNA, 20 bp, synthetic construct
  source 1..20: mol_type = other DNA
attacgtatttcactacaga

SEQ ID NO: 50610 - DNA, 20 bp, synthetic construct
  source 1..20: mol_type = other DNA
aattacgtatttcactacag

SEQ ID NO: 50611 - DNA, 20 bp, synthetic construct
  source 1..20: mol_type = other DNA
gaattacgtatttcactaca

SEQ ID NO: 50612 - DNA, 20 bp, synthetic construct
  source 1..20: mol_type = other DNA
agaattacgtatttcactac

SEQ ID NO: 50613 - DNA, 20 bp, synthetic construct
  source 1..20: mol_type = other DNA
cagaattacgtatttcacta

SEQ ID NO: 50614 - DNA, 20 bp, synthetic construct
  source 1..20: mol_type = other DNA
acagaattacgtatttcact

SEQ ID NO: 50615 - DNA, 20 bp, synthetic construct
  source 1..20: mol_type = other DNA
aacagaattacgtatttcac

SEQ ID NO: 50616 - DNA, 20 bp, synthetic construct
  source 1..20: mol_type = other DNA
caacagaattacgtatttca

SEQ ID NO: 50617 - DNA, 20 bp, synthetic construct
  source 1..20: mol_type = other DNA
acaacagaattacgtatttc

SEQ ID NO: 50618 - DNA, 20 bp, synthetic construct
  source 1..20: mol_type = other DNA
tacaacagaattacgtattt

SEQ ID NO: 50619 - DNA, 20 bp, synthetic construct
  source 1..20: mol_type = other DNA
ttacaacagaattacgtatt

SEQ ID NO: 50620 - DNA, 20 bp, synthetic construct
  source 1..20: mol_type = other DNA
tttacaacagaattacgtat

SEQ ID NO: 50621 - DNA, 20 bp, synthetic construct
  source 1..20: mol_type = other DNA
atttacaacagaattacgta

SEQ ID NO: 50622 - DNA, 20 bp, synthetic construct
  source 1..20: mol_type = other DNA
aatttacaacagaattacgt

SEQ ID NO: 50623 - DNA, 20 bp, synthetic construct
  source 1..20: mol_type = other DNA
caatttacaacagaattacg

SEQ ID NO: 50624 - DNA, 20 bp, synthetic construct
  source 1..20: mol_type = other DNA
acaatttacaacagaattac

SEQ ID NO: 50625 - DNA, 20 bp, synthetic construct
  source 1..20: mol_type = other DNA
tacaatttacaacagaatta

SEQ ID NO: 50626 - DNA, 20 bp, synthetic construct
  source 1..20: mol_type = other DNA
ctacaatttacaacagaatt

SEQ ID NO: 50627 - DNA, 20 bp, synthetic construct
  source 1..20: mol_type = other DNA
actacaatttacaacagaat

SEQ ID NO: 50628 - DNA, 20 bp, synthetic construct
  source 1..20: mol_type = other DNA
aactacaatttacaacagaa

SEQ ID NO: 50629 - DNA, 20 bp, synthetic construct
  source 1..20: mol_type = other DNA
gaactacaatttacaacaga

SEQ ID NO: 50630 - DNA, 20 bp, synthetic construct
  source 1..20: mol_type = other DNA
tgaactacaatttacaacag

SEQ ID NO: 50631 - DNA, 20 bp, synthetic construct
  source 1..20: mol_type = other DNA
ctgaactacaatttacaaca

SEQ ID NO: 50632 - DNA, 20 bp, synthetic construct
  source 1..20: mol_type = other DNA
actgaactacaatttacaac

SEQ ID NO: 50633 - DNA, 20 bp, synthetic construct
  source 1..20: mol_type = other DNA
tactgaactacaatttacaa

SEQ ID NO: 50634 - DNA, 20 bp, synthetic construct
  source 1..20: mol_type = other DNA
gtactgaactacaatttaca

SEQ ID NO: 50635 - DNA, 20 bp, synthetic construct
  source 1..20: mol_type = other DNA
tgtactgaactacaatttac

SEQ ID NO: 50636 - DNA, 20 bp, synthetic construct
  source 1..20: mol_type = other DNA
ttgtactgaactacaattta

SEQ ID NO: 50637 - DNA, 20 bp, synthetic construct
  source 1..20: mol_type = other DNA
attgtactgaactacaattt

SEQ ID NO: 50638 - DNA, 20 bp, synthetic construct
  source 1..20: mol_type = other DNA
aattgtactgaactacaatt

SEQ ID NO: 50639 - DNA, 20 bp, synthetic construct
  source 1..20: mol_type = other DNA
aaattgtactgaactacaat

SEQ ID NO: 50640 - DNA, 20 bp, synthetic construct
  source 1..20: mol_type = other DNA
caaattgtactgaactacaa

SEQ ID NO: 50641 - DNA, 20 bp, synthetic construct
  source 1..20: mol_type = other DNA
tcaaattgtactgaactaca

SEQ ID NO: 50642 - DNA, 20 bp, synthetic construct
  source 1..20: mol_type = other DNA
atcaaattgtactgaactac

SEQ ID NO: 50643 - DNA, 20 bp, synthetic construct
  source 1..20: mol_type = other DNA
aatcaaattgtactgaacta

SEQ ID NO: 50644 - DNA, 20 bp, synthetic construct
  source 1..20: mol_type = other DNA
aaatcaaattgtactgaact

SEQ ID NO: 50645 - DNA, 20 bp, synthetic construct
  source 1..20: mol_type = other DNA
aaaatcaaattgtactgaac

SEQ ID NO: 50646 - DNA, 20 bp, synthetic construct
  source 1..20: mol_type = other DNA
gaaaatcaaattgtactgaa

SEQ ID NO: 50647 - DNA, 20 bp, synthetic construct
  source 1..20: mol_type = other DNA
tgaaaatcaaattgtactga

SEQ ID NO: 50648 - DNA, 20 bp, synthetic construct
  source 1..20: mol_type = other DNA
gtgaaaatcaaattgtactg

SEQ ID NO: 50649 - DNA, 20 bp, synthetic construct
  source 1..20: mol_type = other DNA
agtgaaaatcaaattgtact

SEQ ID NO: 50650 - DNA, 20 bp, synthetic construct
  source 1..20: mol_type = other DNA
tagtgaaaatcaaattgtac

SEQ ID NO: 50651 - DNA, 20 bp, synthetic construct
  source 1..20: mol_type = other DNA
atagtgaaaatcaaattgta

SEQ ID NO: 50652 - DNA, 20 bp, synthetic construct
  source 1..20: mol_type = other DNA
aatagtgaaaatcaaattgt

SEQ ID NO: 50653 - DNA, 20 bp, synthetic construct
  source 1..20: mol_type = other DNA
gaatagtgaaaatcaaattg

SEQ ID NO: 50654 - DNA, 20 bp, synthetic construct
  source 1..20: mol_type = other DNA
tgaatagtgaaaatcaaatt

SEQ ID NO: 50655 - DNA, 20 bp, synthetic construct
  source 1..20: mol_type = other DNA
ttgaatagtgaaaatcaaat

SEQ ID NO: 50656 - DNA, 20 bp, synthetic construct
  source 1..20: mol_type = other DNA
tttgaatagtgaaaatcaaa

SEQ ID NO: 50657 - DNA, 20 bp, synthetic construct
  source 1..20: mol_type = other DNA
atttgaatagtgaaaatcaa

SEQ ID NO: 50658 - DNA, 20 bp, synthetic construct
  source 1..20: mol_type = other DNA
gatttgaatagtgaaaatca

SEQ ID NO: 50659 - DNA, 20 bp, synthetic construct
  source 1..20: mol_type = other DNA
agatttgaatagtgaaaatc

SEQ ID NO: 50660 - DNA, 20 bp, synthetic construct
  source 1..20: mol_type = other DNA
tagatttgaatagtgaaaat

SEQ ID NO: 50661 - DNA, 20 bp, synthetic construct
  source 1..20: mol_type = other DNA
atagatttgaatagtgaaaa

SEQ ID NO: 50662 - DNA, 20 bp, synthetic construct
  source 1..20: mol_type = other DNA
tatagatttgaatagtgaaa

SEQ ID NO: 50663 - DNA, 20 bp, synthetic construct
  source 1..20: mol_type = other DNA
gtatagatttgaatagtgaa

SEQ ID NO: 50664 - DNA, 20 bp, synthetic construct
  source 1..20: mol_type = other DNA
ggtatagatttgaatagtga

SEQ ID NO: 50665 - DNA, 20 bp, synthetic construct
  source 1..20: mol_type = other DNA
tggtatagatttgaatagtg

SEQ ID NO: 50666 - DNA, 20 bp, synthetic construct
  source 1..20: mol_type = other DNA
ttggtatagatttgaatagt

SEQ ID NO: 50667 - DNA, 20 bp, synthetic construct
  source 1..20: mol_type = other DNA
tttggtatagatttgaatag

SEQ ID NO: 50668 - DNA, 20 bp, synthetic construct
  source 1..20: mol_type = other DNA
ttttggtatagatttgaata

SEQ ID NO: 50669 - DNA, 20 bp, synthetic construct
  source 1..20: mol_type = other DNA
cttttggtatagatttgaat

SEQ ID NO: 50670 - DNA, 20 bp, synthetic construct
  source 1..20: mol_type = other DNA
gcttttggtatagatttgaa

SEQ ID NO: 50671 - DNA, 20 bp, synthetic construct
  source 1..20: mol_type = other DNA
agcttttggtatagatttga

SEQ ID NO: 50672 - DNA, 20 bp, synthetic construct
  source 1..20: mol_type = other DNA
cagcttttggtatagatttg

SEQ ID NO: 50673 - DNA, 20 bp, synthetic construct
  source 1..20: mol_type = other DNA
acagcttttggtatagattt

SEQ ID NO: 50674 - DNA, 20 bp, synthetic construct
  source 1..20: mol_type = other DNA
aacagcttttggtatagatt

SEQ ID NO: 50675 - DNA, 20 bp, synthetic construct
  source 1..20: mol_type = other DNA
aaacagcttttggtatagat

SEQ ID NO: 50676 - DNA, 20 bp, synthetic construct
  source 1..20: mol_type = other DNA
aaaacagcttttggtataga

SEQ ID NO: 50677 - DNA, 20 bp, synthetic construct
  source 1..20: mol_type = other DNA
aaaaacagcttttggtatag

SEQ ID NO: 50678 - DNA, 20 bp, synthetic construct
  source 1..20: mol_type = other DNA
taaaaacagcttttggtata

SEQ ID NO: 50679 - DNA, 20 bp, synthetic construct
  source 1..20: mol_type = other DNA
ataaaaacagcttttggtat

SEQ ID NO: 50680 - DNA, 20 bp, synthetic construct
  source 1..20: mol_type = other DNA
aataaaaacagcttttggta

SEQ ID NO: 50681 - DNA, 20 bp, synthetic construct
  source 1..20: mol_type = other DNA
caataaaaacagcttttggt

SEQ ID NO: 50682 - DNA, 20 bp, synthetic construct
  source 1..20: mol_type = other DNA
acaataaaaacagcttttgg

SEQ ID NO: 50683 - DNA, 20 bp, synthetic construct
  source 1..20: mol_type = other DNA
aacaataaaaacagcttttg

SEQ ID NO: 50684 - DNA, 20 bp, synthetic construct
  source 1..20: mol_type = other DNA
caacaataaaaacagctttt

SEQ ID NO: 50685 - DNA, 20 bp, synthetic construct
  source 1..20: mol_type = other DNA
ccaacaataaaaacagcttt

SEQ ID NO: 50686 - DNA, 20 bp, synthetic construct
  source 1..20: mol_type = other DNA
cccaacaataaaaacagctt

SEQ ID NO: 50687 - DNA, 20 bp, synthetic construct
  source 1..20: mol_type = other DNA
gcccaacaataaaaacagct

SEQ ID NO: 50688 - DNA, 20 bp, synthetic construct
  source 1..20: mol_type = other DNA
agcccaacaataaaaacagc

SEQ ID NO: 50689 - DNA, 20 bp, synthetic construct
  source 1..20: mol_type = other DNA
cagcccaacaataaaaacag

SEQ ID NO: 50690 - DNA, 20 bp, synthetic construct
  source 1..20: mol_type = other DNA
tcagcccaacaataaaaaca

SEQ ID NO: 50691 - DNA, 20 bp, synthetic construct
  source 1..20: mol_type = other DNA
atcagcccaacaataaaaac

SEQ ID NO: 50692 - DNA, 20 bp, synthetic construct
  source 1..20: mol_type = other DNA
aatcagcccaacaataaaaa

SEQ ID NO: 50693 - DNA, 20 bp, synthetic construct
  source 1..20: mol_type = other DNA
gaatcagcccaacaataaaa

SEQ ID NO: 50694 - DNA, 20 bp, synthetic construct
  source 1..20: mol_type = other DNA
agaatcagcccaacaataaa

SEQ ID NO: 50695 - DNA, 20 bp, synthetic construct
  source 1..20: mol_type = other DNA
aagaatcagcccaacaataa

SEQ ID NO: 50696 - DNA, 20 bp, synthetic construct
  source 1..20: mol_type = other DNA
gaagaatcagcccaacaata

SEQ ID NO: 50697 - DNA, 20 bp, synthetic construct
  source 1..20: mol_type = other DNA
agaagaatcagcccaacaat

SEQ ID NO: 50698 - DNA, 20 bp, synthetic construct
  source 1..20: mol_type = other DNA
tagaagaatcagcccaacaa

SEQ ID NO: 50699 - DNA, 20 bp, synthetic construct
  source 1..20: mol_type = other DNA
gtagaagaatcagcccaaca

SEQ ID NO: 50700 - DNA, 20 bp, synthetic construct
  source 1..20: mol_type = other DNA
tgtagaagaatcagcccaac

SEQ ID NO: 50701 - DNA, 20 bp, synthetic construct
  source 1..20: mol_type = other DNA
gtgtagaagaatcagcccaa

SEQ ID NO: 50702 - DNA, 20 bp, synthetic construct
  source 1..20: mol_type = other DNA
agtgtagaagaatcagccca

SEQ ID NO: 50703 - DNA, 20 bp, synthetic construct
  source 1..20: mol_type = other DNA
cagtgtagaagaatcagccc

SEQ ID NO: 50704 - DNA, 20 bp, synthetic construct
  source 1..20: mol_type = other DNA
acagtgtagaagaatcagcc

SEQ ID NO: 50705 - DNA, 20 bp, synthetic construct
  source 1..20: mol_type = other DNA
aacagtgtagaagaatcagc

SEQ ID NO: 50706 - DNA, 20 bp, synthetic construct
  source 1..20: mol_type = other DNA
taacagtgtagaagaatcag

SEQ ID NO: 50707 - DNA, 20 bp, synthetic construct
  source 1..20: mol_type = other DNA
gtaacagtgtagaagaatca

SEQ ID NO: 50708 - DNA, 20 bp, synthetic construct
  source 1..20: mol_type = other DNA
agtaacagtgtagaagaatc

SEQ ID NO: 50709 - DNA, 20 bp, synthetic construct
  source 1..20: mol_type = other DNA
aagtaacagtgtagaagaat

SEQ ID NO: 50710 - DNA, 20 bp, synthetic construct
  source 1..20: mol_type = other DNA
caagtaacagtgtagaagaa

SEQ ID NO: 50711 - DNA, 20 bp, synthetic construct
  source 1..20: mol_type = other DNA
ccaagtaacagtgtagaaga

SEQ ID NO: 50712 - DNA, 20 bp, synthetic construct
  source 1..20: mol_type = other DNA
tccaagtaacagtgtagaag

SEQ ID NO: 50713 - DNA, 20 bp, synthetic construct
  source 1..20: mol_type = other DNA
ttccaagtaacagtgtagaa

SEQ ID NO: 50714 - DNA, 20 bp, synthetic construct
  source 1..20: mol_type = other DNA
tttccaagtaacagtgtaga

SEQ ID NO: 50715 - DNA, 20 bp, synthetic construct
  source 1..20: mol_type = other DNA
atttccaagtaacagtgtag

SEQ ID NO: 50716 - DNA, 20 bp, synthetic construct
  source 1..20: mol_type = other DNA
tatttccaagtaacagtgta

SEQ ID NO: 50717 - DNA, 20 bp, synthetic construct
  source 1..20: mol_type = other DNA
ttatttccaagtaacagtgt

SEQ ID NO: 50718 - DNA, 20 bp, synthetic construct
  source 1..20: mol_type = other DNA
attatttccaagtaacagtg

SEQ ID NO: 50719 - DNA, 20 bp, synthetic construct
  source 1..20: mol_type = other DNA
tattatttccaagtaacagt

SEQ ID NO: 50720 - DNA, 20 bp, synthetic construct
  source 1..20: mol_type = other DNA
ttattatttccaagtaacag

SEQ ID NO: 50721 - DNA, 20 bp, synthetic construct
  source 1..20: mol_type = other DNA
attattatttccaagtaaca

SEQ ID NO: 50722 - DNA, 20 bp, synthetic construct
  source 1..20: mol_type = other DNA
tattattatttccaagtaac

SEQ ID NO: 50723 - DNA, 20 bp, synthetic construct
  source 1..20: mol_type = other DNA
atattattatttccaagtaa

SEQ ID NO: 50724 - DNA, 20 bp, synthetic construct
  source 1..20: mol_type = other DNA
tatattattatttccaagta

SEQ ID NO: 50725 - DNA, 20 bp, synthetic construct
  source 1..20: mol_type = other DNA
gtatattattatttccaagt

SEQ ID NO: 50726 - DNA, 20 bp, synthetic construct
  source 1..20: mol_type = other DNA
ggtatattattatttccaag

SEQ ID NO: 50727 - DNA, 20 bp, synthetic construct
  source 1..20: mol_type = other DNA
tggtatattattatttccaa

SEQ ID NO: 50728 - DNA, 20 bp, synthetic construct
  source 1..20: mol_type = other DNA
ctggtatattattatttcca

SEQ ID NO: 50729 - DNA, 20 bp, synthetic construct
  source 1..20: mol_type = other DNA
cctggtatattattatttcc

SEQ ID NO: 50730 - DNA, 20 bp, synthetic construct
  source 1..20: mol_type = other DNA
tcctggtatattattatttc

SEQ ID NO: 50731 - DNA, 20 bp, synthetic construct
  source 1..20: mol_type = other DNA
atcctggtatattattattt

SEQ ID NO: 50732 - DNA, 20 bp, synthetic construct
  source 1..20: mol_type = other DNA
aatcctggtatattattatt

SEQ ID NO: 50733 - DNA, 20 bp, synthetic construct
  source 1..20: mol_type = other DNA
gaatcctggtatattattat

SEQ ID NO: 50734 - DNA, 20 bp, synthetic construct
  source 1..20: mol_type = other DNA
agaatcctggtatattatta

SEQ ID NO: 50735 - DNA, 20 bp, synthetic construct
  source 1..20: mol_type = other DNA
aagaatcctggtatattatt

SEQ ID NO: 50736 - DNA, 20 bp, synthetic construct
  source 1..20: mol_type = other DNA
aaagaatcctggtatattat

SEQ ID NO: 50737 - DNA, 20 bp, synthetic construct
  source 1..20: mol_type = other DNA
gaaagaatcctggtatatta

SEQ ID NO: 50738 - DNA, 20 bp, synthetic construct
  source 1..20: mol_type = other DNA
agaaagaatcctggtatatt

SEQ ID NO: 50739 - DNA, 20 bp, synthetic construct
  source 1..20: mol_type = other DNA
gagaaagaatcctggtatat

SEQ ID NO: 50740 - DNA, 20 bp, synthetic construct
  source 1..20: mol_type = other DNA
agagaaagaatcctggtata

SEQ ID NO: 50741 - DNA, 20 bp, synthetic construct
  source 1..20: mol_type = other DNA
aagagaaagaatcctggtat

SEQ ID NO: 50742 - DNA, 20 bp, synthetic construct
  source 1..20: mol_type = other DNA
taagagaaagaatcctggta

SEQ ID NO: 50743 - DNA, 20 bp, synthetic construct
  source 1..20: mol_type = other DNA
ctaagagaaagaatcctggt

SEQ ID NO: 50744 - DNA, 20 bp, synthetic construct
  source 1..20: mol_type = other DNA
tctaagagaaagaatcctgg

SEQ ID NO: 50745 - DNA, 20 bp, synthetic construct
  source 1..20: mol_type = other DNA
gtctaagagaaagaatcctg

SEQ ID NO: 50746 - DNA, 20 bp, synthetic construct
  source 1..20: mol_type = other DNA
agtctaagagaaagaatcct

SEQ ID NO: 50747 - DNA, 20 bp, synthetic construct
  source 1..20: mol_type = other DNA
aagtctaagagaaagaatcc

SEQ ID NO: 50748 - DNA, 20 bp, synthetic construct
  source 1..20: mol_type = other DNA
taagtctaagagaaagaatc

SEQ ID NO: 50749 - DNA, 20 bp, synthetic construct
  source 1..20: mol_type = other DNA
ctaagtctaagagaaagaat

SEQ ID NO: 50750 - DNA, 20 bp, synthetic construct
  source 1..20: mol_type = other DNA
cctaagtctaagagaaagaa

SEQ ID NO: 50751 - DNA, 20 bp, synthetic construct
  source 1..20: mol_type = other DNA
tcctaagtctaagagaaaga

SEQ ID NO: 50752 - DNA, 20 bp, synthetic construct
  source 1..20: mol_type = other DNA
ctcctaagtctaagagaaag

SEQ ID NO: 50753 - DNA, 20 bp, synthetic construct
  source 1..20: mol_type = other DNA
actcctaagtctaagagaaa

SEQ ID NO: 50754 - DNA, 20 bp, synthetic construct
  source 1..20: mol_type = other DNA
gactcctaagtctaagagaa

SEQ ID NO: 50755 - DNA, 20 bp, synthetic construct
  source 1..20: mol_type = other DNA
agactcctaagtctaagaga

SEQ ID NO: 50756 - DNA, 20 bp, synthetic construct
  source 1..20: mol_type = other DNA
aagactcctaagtctaagag

SEQ ID NO: 50757 - DNA, 20 bp, synthetic construct
  source 1..20: mol_type = other DNA
aaagactcctaagtctaaga

SEQ ID NO: 50758 - DNA, 20 bp, synthetic construct
  source 1..20: mol_type = other DNA
gaaagactcctaagtctaag

SEQ ID NO: 50759 - DNA, 20 bp, synthetic construct
  source 1..20: mol_type = other DNA
agaaagactcctaagtctaa

SEQ ID NO: 50760 - DNA, 20 bp, synthetic construct
  source 1..20: mol_type = other DNA
gagaaagactcctaagtcta

SEQ ID NO: 50761 - DNA, 20 bp, synthetic construct
  source 1..20: mol_type = other DNA
agagaaagactcctaagtct

SEQ ID NO: 50762 - DNA, 20 bp, synthetic construct
  source 1..20: mol_type = other DNA
aagagaaagactcctaagtc

SEQ ID NO: 50763 - DNA, 20 bp, synthetic construct
  source 1..20: mol_type = other DNA
aaagagaaagactcctaagt

SEQ ID NO: 50764 - DNA, 20 bp, synthetic construct
  source 1..20: mol_type = other DNA
caaagagaaagactcctaag

SEQ ID NO: 50765 - DNA, 20 bp, synthetic construct
  source 1..20: mol_type = other DNA
gcaaagagaaagactcctaa

SEQ ID NO: 50766 - DNA, 20 bp, synthetic construct
  source 1..20: mol_type = other DNA
agcaaagagaaagactccta

SEQ ID NO: 50767 - DNA, 20 bp, synthetic construct
  source 1..20: mol_type = other DNA
aagcaaagagaaagactcct

SEQ ID NO: 50768 - DNA, 20 bp, synthetic construct
  source 1..20: mol_type = other DNA
caagcaaagagaaagactcc

SEQ ID NO: 50769 - DNA, 20 bp, synthetic construct
  source 1..20: mol_type = other DNA
gcaagcaaagagaaagactc

SEQ ID NO: 50770 - DNA, 20 bp, synthetic construct
  source 1..20: mol_type = other DNA
agcaagcaaagagaaagact

SEQ ID NO: 50771 - DNA, 20 bp, synthetic construct
  source 1..20: mol_type = other DNA
aagcaagcaaagagaaagac

SEQ ID NO: 50772 - DNA, 20 bp, synthetic construct
  source 1..20: mol_type = other DNA
aaagcaagcaaagagaaaga

SEQ ID NO: 50773 - DNA, 20 bp, synthetic construct
  source 1..20: mol_type = other DNA
aaaagcaagcaaagagaaag

SEQ ID NO: 50774 - DNA, 20 bp, synthetic construct
  source 1..20: mol_type = other DNA
aaaaagcaagcaaagagaaa

SEQ ID NO: 50775 - DNA, 20 bp, synthetic construct
  source 1..20: mol_type = other DNA
gaaaaagcaagcaaagagaa

SEQ ID NO: 50776 - DNA, 20 bp, synthetic construct
  source 1..20: mol_type = other DNA
tgaaaaagcaagcaaagaga

SEQ ID NO: 50777 - DNA, 20 bp, synthetic construct
  source 1..20: mol_type = other DNA
ctgaaaaagcaagcaaagag

SEQ ID NO: 50778 - DNA, 20 bp, synthetic construct
  source 1..20: mol_type = other DNA
tctgaaaaagcaagcaaaga

SEQ ID NO: 50779 - DNA, 20 bp, synthetic construct
  source 1..20: mol_type = other DNA
ctctgaaaaagcaagcaaag

SEQ ID NO: 50780 - DNA, 20 bp, synthetic construct
  source 1..20: mol_type = other DNA
cctctgaaaaagcaagcaaa

SEQ ID NO: 50781 - DNA, 20 bp, synthetic construct
  source 1..20: mol_type = other DNA
gcctctgaaaaagcaagcaa

SEQ ID NO: 50782 - DNA, 20 bp, synthetic construct
  source 1..20: mol_type = other DNA
agcctctgaaaaagcaagca

SEQ ID NO: 50783 - DNA, 20 bp, synthetic construct
  source 1..20: mol_type = other DNA
tagcctctgaaaaagcaagc

SEQ ID NO: 50784 - DNA, 20 bp, synthetic construct
  source 1..20: mol_type = other DNA
ttagcctctgaaaaagcaag

SEQ ID NO: 50785 - DNA, 20 bp, synthetic construct
  source 1..20: mol_type = other DNA
gttagcctctgaaaaagcaa

SEQ ID NO: 50786 - DNA, 20 bp, synthetic construct
  source 1..20: mol_type = other DNA
tgttagcctctgaaaaagca

SEQ ID NO: 50787 - DNA, 20 bp, synthetic construct
  source 1..20: mol_type = other DNA
ctgttagcctctgaaaaagc

SEQ ID NO: 50788 - DNA, 20 bp, synthetic construct
  source 1..20: mol_type = other DNA
actgttagcctctgaaaaag

SEQ ID NO: 50789 - DNA, 20 bp, synthetic construct
  source 1..20: mol_type = other DNA
tactgttagcctctgaaaaa

SEQ ID NO: 50790 - DNA, 20 bp, synthetic construct
  source 1..20: mol_type = other DNA
gtactgttagcctctgaaaa

SEQ ID NO: 50791 - DNA, 20 bp, synthetic construct
  source 1..20: mol_type = other DNA
agtactgttagcctctgaaa

SEQ ID NO: 50792 - DNA, 20 bp, synthetic construct
  source 1..20: mol_type = other DNA
cagtactgttagcctctgaa

SEQ ID NO: 50793 - DNA, 20 bp, synthetic construct
  source 1..20: mol_type = other DNA
ccagtactgttagcctctga

SEQ ID NO: 50794 - DNA, 20 bp, synthetic construct
  source 1..20: mol_type = other DNA
cccagtactgttagcctctg

SEQ ID NO: 50795 - DNA, 20 bp, synthetic construct
  source 1..20: mol_type = other DNA
acccagtactgttagcctct

SEQ ID NO: 50796 - DNA, 20 bp, synthetic construct
  source 1..20: mol_type = other DNA
tacccagtactgttagcctc

SEQ ID NO: 50797 - DNA, 20 bp, synthetic construct
  source 1..20: mol_type = other DNA
atacccagtactgttagcct

SEQ ID NO: 50798 - DNA, 20 bp, synthetic construct
  source 1..20: mol_type = other DNA
aatacccagtactgttagcc

SEQ ID NO: 50799 - DNA, 20 bp, synthetic construct
  source 1..20: mol_type = other DNA
gaatacccagtactgttagc

SEQ ID NO: 50800 - DNA, 20 bp, synthetic construct
  source 1..20: mol_type = other DNA
agaatacccagtactgttag

SEQ ID NO: 50801 - DNA, 20 bp, synthetic construct
  source 1..20: mol_type = other DNA
aagaatacccagtactgtta

SEQ ID NO: 50802 - DNA, 20 bp, synthetic construct
  source 1..20: mol_type = other DNA
aaagaatacccagtactgtt

SEQ ID NO: 50803 - DNA, 20 bp, synthetic construct
  source 1..20: mol_type = other DNA
taaagaatacccagtactgt

SEQ ID NO: 50804 - DNA, 20 bp, synthetic construct
  source 1..20: mol_type = other DNA
ttaaagaatacccagtactg

SEQ ID NO: 50805 - DNA, 20 bp, synthetic construct
  source 1..20: mol_type = other DNA
gttaaagaatacccagtact

SEQ ID NO: 50806 - DNA, 20 bp, synthetic construct
  source 1..20: mol_type = other DNA
agttaaagaatacccagtac

SEQ ID NO: 50807 - DNA, 20 bp, synthetic construct
  source 1..20: mol_type = other DNA
cagttaaagaatacccagta

SEQ ID NO: 50808 - DNA, 20 bp, synthetic construct
  source 1..20: mol_type = other DNA
acagttaaagaatacccagt

SEQ ID NO: 50809 - DNA, 20 bp, synthetic construct
  source 1..20: mol_type = other DNA
gacagttaaagaatacccag

SEQ ID NO: 50810 - DNA, 20 bp, synthetic construct
  source 1..20: mol_type = other DNA
agacagttaaagaataccca

SEQ ID NO: 50811 - DNA, 20 bp, synthetic construct
  source 1..20: mol_type = other DNA
aagacagttaaagaataccc

SEQ ID NO: 50812 - DNA, 20 bp, synthetic construct
  source 1..20: mol_type = other DNA
caagacagttaaagaatacc

SEQ ID NO: 50813 - DNA, 20 bp, synthetic construct
  source 1..20: mol_type = other DNA
tcaagacagttaaagaatac

SEQ ID NO: 50814 - DNA, 20 bp, synthetic construct
  source 1..20: mol_type = other DNA
atcaagacagttaaagaata

SEQ ID NO: 50815 - DNA, 20 bp, synthetic construct
  source 1..20: mol_type = other DNA
tatcaagacagttaaagaat

SEQ ID NO: 50816 - DNA, 20 bp, synthetic construct
  source 1..20: mol_type = other DNA
atatcaagacagttaaagaa

SEQ ID NO: 50817 - DNA, 20 bp, synthetic construct
  source 1..20: mol_type = other DNA
catatcaagacagttaaaga

SEQ ID NO: 50818 - DNA, 20 bp, synthetic construct
  source 1..20: mol_type = other DNA
gcatatcaagacagttaaag

SEQ ID NO: 50819 - DNA, 20 bp, synthetic construct
  source 1..20: mol_type = other DNA
agcatatcaagacagttaaa

SEQ ID NO: 50820 - DNA, 20 bp, synthetic construct
  source 1..20: mol_type = other DNA
cagcatatcaagacagttaa

SEQ ID NO: 50821 - DNA, 20 bp, synthetic construct
  source 1..20: mol_type = other DNA
tcagcatatcaagacagtta

SEQ ID NO: 50822 - DNA, 20 bp, synthetic construct
  source 1..20: mol_type = other DNA
atcagcatatcaagacagtt

SEQ ID NO: 50823 - DNA, 20 bp, synthetic construct
  source 1..20: mol_type = other DNA
catcagcatatcaagacagt

SEQ ID NO: 50824 - DNA, 20 bp, synthetic construct
  source 1..20: mol_type = other DNA
tcatcagcatatcaagacag

SEQ ID NO: 50825 - DNA, 20 bp, synthetic construct
  source 1..20: mol_type = other DNA
ttcatcagcatatcaagaca

SEQ ID NO: 50826 - DNA, 20 bp, synthetic construct
  source 1..20: mol_type = other DNA
tttcatcagcatatcaagac

SEQ ID NO: 50827 - DNA, 20 bp, synthetic construct
  source 1..20: mol_type = other DNA
ctttcatcagcatatcaaga

SEQ ID NO: 50828 - DNA, 20 bp, synthetic construct
  source 1..20: mol_type = other DNA
gctttcatcagcatatcaag

SEQ ID NO: 50829 - DNA, 20 bp, synthetic construct
  source 1..20: mol_type = other DNA
tgctttcatcagcatatcaa

SEQ ID NO: 50830 - DNA, 20 bp, synthetic construct
  source 1..20: mol_type = other DNA
gtgctttcatcagcatatca

SEQ ID NO: 50831 - DNA, 20 bp, synthetic construct
  source 1..20: mol_type = other DNA
tgtgctttcatcagcatatc

SEQ ID NO: 50832 - DNA, 20 bp, synthetic construct
  source 1..20: mol_type = other DNA
ctgtgctttcatcagcatat

SEQ ID NO: 50833 - DNA, 20 bp, synthetic construct
  source 1..20: mol_type = other DNA
actgtgctttcatcagcata

SEQ ID NO: 50834 - DNA, 20 bp, synthetic construct
  source 1..20: mol_type = other DNA
cactgtgctttcatcagcat

SEQ ID NO: 50835 - DNA, 20 bp, synthetic construct
  source 1..20: mol_type = other DNA
acactgtgctttcatcagca

SEQ ID NO: 50836 - DNA, 20 bp, synthetic construct
  source 1..20: mol_type = other DNA
aacactgtgctttcatcagc

SEQ ID NO: 50837 - DNA, 20 bp, synthetic construct
  source 1..20: mol_type = other DNA
gaacactgtgctttcatcag

SEQ ID NO: 50838 - DNA, 20 bp, synthetic construct
  source 1..20: mol_type = other DNA
agaacactgtgctttcatca

SEQ ID NO: 50839 - DNA, 20 bp, synthetic construct
  source 1..20: mol_type = other DNA
cagaacactgtgctttcatc

SEQ ID NO: 50840 - DNA, 20 bp, synthetic construct
  source 1..20: mol_type = other DNA
acagaacactgtgctttcat

SEQ ID NO: 50841 - DNA, 20 bp, synthetic construct
  source 1..20: mol_type = other DNA
aacagaacactgtgctttca

SEQ ID NO: 50842 - DNA, 20 bp, synthetic construct
  source 1..20: mol_type = other DNA
aaacagaacactgtgctttc

SEQ ID NO: 50843 - DNA, 20 bp, synthetic construct
  source 1..20: mol_type = other DNA
aaaacagaacactgtgcttt

SEQ ID NO: 50844 - DNA, 20 bp, synthetic construct
  source 1..20: mol_type = other DNA
aaaaacagaacactgtgctt

SEQ ID NO: 50845 - DNA, 20 bp, synthetic construct
  source 1..20: mol_type = other DNA
caaaaacagaacactgtgct

SEQ ID NO: 50846 - DNA, 20 bp, synthetic construct
  source 1..20: mol_type = other DNA
tcaaaaacagaacactgtgc

SEQ ID NO: 50847 - DNA, 20 bp, synthetic construct
  source 1..20: mol_type = other DNA
ttcaaaaacagaacactgtg

SEQ ID NO: 50848 - DNA, 20 bp, synthetic construct
  source 1..20: mol_type = other DNA
attcaaaaacagaacactgt

SEQ ID NO: 50849 - DNA, 20 bp, synthetic construct
  source 1..20: mol_type = other DNA
gattcaaaaacagaacactg

SEQ ID NO: 50850 - DNA, 20 bp, synthetic construct
  source 1..20: mol_type = other DNA
agattcaaaaacagaacact

SEQ ID NO: 50851 - DNA, 20 bp, synthetic construct
  source 1..20: mol_type = other DNA
aagattcaaaaacagaacac

SEQ ID NO: 50852 - DNA, 20 bp, synthetic construct
  source 1..20: mol_type = other DNA
gaagattcaaaaacagaaca

SEQ ID NO: 50853 - DNA, 20 bp, synthetic construct
  source 1..20: mol_type = other DNA
agaagattcaaaaacagaac

SEQ ID NO: 50854 - DNA, 20 bp, synthetic construct
  source 1..20: mol_type = other DNA
gagaagattcaaaaacagaa

SEQ ID NO: 50855 - DNA, 20 bp, synthetic construct
  source 1..20: mol_type = other DNA
tgagaagattcaaaaacaga

SEQ ID NO: 50856 - DNA, 20 bp, synthetic construct
  source 1..20: mol_type = other DNA
ttgagaagattcaaaaacag

SEQ ID NO: 50857 - DNA, 20 bp, synthetic construct
  source 1..20: mol_type = other DNA
tttgagaagattcaaaaaca

SEQ ID NO: 50858 - DNA, 20 bp, synthetic construct
  source 1..20: mol_type = other DNA
atttgagaagattcaaaaac

SEQ ID NO: 50859 - DNA, 20 bp, synthetic construct
  source 1..20: mol_type = other DNA
catttgagaagattcaaaaa

SEQ ID NO: 50860 - DNA, 20 bp, synthetic construct
  source 1..20: mol_type = other DNA
acatttgagaagattcaaaa

SEQ ID NO: 50861 - DNA, 20 bp, synthetic construct
  source 1..20: mol_type = other DNA
gacatttgagaagattcaaa

SEQ ID NO: 50862 - DNA, 20 bp, synthetic construct
  source 1..20: mol_type = other DNA
ggacatttgagaagattcaa

SEQ ID NO: 50863 - DNA, 20 bp, synthetic construct
  source 1..20: mol_type = other DNA
aggacatttgagaagattca

SEQ ID NO: 50864 - DNA, 20 bp, synthetic construct
  source 1..20: mol_type = other DNA
aaggacatttgagaagattc

SEQ ID NO: 50865 - DNA, 20 bp, synthetic construct
  source 1..20: mol_type = other DNA
caaggacatttgagaagatt

SEQ ID NO: 50866 - DNA, 20 bp, synthetic construct
  source 1..20: mol_type = other DNA
acaaggacatttgagaagat

SEQ ID NO: 50867 - DNA, 20 bp, synthetic construct
  source 1..20: mol_type = other DNA
gacaaggacatttgagaaga

SEQ ID NO: 50868 - DNA, 20 bp, synthetic construct
  source 1..20: mol_type = other DNA
agacaaggacatttgagaag

SEQ ID NO: 50869 - DNA, 20 bp, synthetic construct
  source 1..20: mol_type = other DNA
aagacaaggacatttgagaa

SEQ ID NO: 50870 - DNA, 20 bp, synthetic construct
  source 1..20: mol_type = other DNA
aaagacaaggacatttgaga

SEQ ID NO: 50871 - DNA, 20 bp, synthetic construct
  source 1..20: mol_type = other DNA
caaagacaaggacatttgag

SEQ ID NO: 50872 - DNA, 20 bp, synthetic construct
  source 1..20: mol_type = other DNA
tcaaagacaaggacatttga

SEQ ID NO: 50873 - DNA, 20 bp, synthetic construct
  source 1..20: mol_type = other DNA
atcaaagacaaggacatttg

SEQ ID NO: 50874 - DNA, 20 bp, synthetic construct
  source 1..20: mol_type = other DNA
aatcaaagacaaggacattt

SEQ ID NO: 50875 - DNA, 20 bp, synthetic construct
  source 1..20: mol_type = other DNA
gaatcaaagacaaggacatt

SEQ ID NO: 50876 - DNA, 20 bp, synthetic construct
  source 1..20: mol_type = other DNA
tgaatcaaagacaaggacat

SEQ ID NO: 50877 - DNA, 20 bp, synthetic construct
  source 1..20: mol_type = other DNA
gtgaatcaaagacaaggaca

SEQ ID NO: 50878 - DNA, 20 bp, synthetic construct
  source 1..20: mol_type = other DNA
tgtgaatcaaagacaaggac

SEQ ID NO: 50879 - DNA, 20 bp, synthetic construct
  source 1..20: mol_type = other DNA
ttgtgaatcaaagacaagga

SEQ ID NO: 50880 - DNA, 20 bp, synthetic construct
  source 1..20: mol_type = other DNA
gttgtgaatcaaagacaagg

SEQ ID NO: 50881 - DNA, 20 bp, synthetic construct
  source 1..20: mol_type = other DNA
agttgtgaatcaaagacaag

SEQ ID NO: 50882 - DNA, 20 bp, synthetic construct
  source 1..20: mol_type = other DNA
aagttgtgaatcaaagacaa

SEQ ID NO: 50883 - DNA, 20 bp, synthetic construct
  source 1..20: mol_type = other DNA
aaagttgtgaatcaaagaca

SEQ ID NO: 50884 - DNA, 20 bp, synthetic construct
  source 1..20: mol_type = other DNA
aaaagttgtgaatcaaagac

SEQ ID NO: 50885 - DNA, 20 bp, synthetic construct
  source 1..20: mol_type = other DNA
aaaaagttgtgaatcaaaga

SEQ ID NO: 50886 - DNA, 20 bp, synthetic construct
  source 1..20: mol_type = other DNA
caaaaagttgtgaatcaaag

SEQ ID NO: 50887 - DNA, 20 bp, synthetic construct
  source 1..20: mol_type = other DNA
acaaaaagttgtgaatcaaa

SEQ ID NO: 50888 - DNA, 20 bp, synthetic construct
  source 1..20: mol_type = other DNA
gacaaaaagttgtgaatcaa

SEQ ID NO: 50889 - DNA, 20 bp, synthetic construct
  source 1..20: mol_type = other DNA
agacaaaaagttgtgaatca

SEQ ID NO: 50890 - DNA, 20 bp, synthetic construct
  source 1..20: mol_type = other DNA
aagacaaaaagttgtgaatc

SEQ ID NO: 50891 - DNA, 20 bp, synthetic construct
  source 1..20: mol_type = other DNA
taagacaaaaagttgtgaat

SEQ ID NO: 50892 - DNA, 20 bp, synthetic construct
  source 1..20: mol_type = other DNA
ttaagacaaaaagttgtgaa

SEQ ID NO: 50893 - DNA, 20 bp, synthetic construct
  source 1..20: mol_type = other DNA
cttaagacaaaaagttgtga

SEQ ID NO: 50894 - DNA, 20 bp, synthetic construct
  source 1..20: mol_type = other DNA
tcttaagacaaaaagttgtg

SEQ ID NO: 50895 - DNA, 20 bp, synthetic construct
  source 1..20: mol_type = other DNA
ctcttaagacaaaaagttgt

SEQ ID NO: 50896 - DNA, 20 bp, synthetic construct
  source 1..20: mol_type = other DNA
cctcttaagacaaaaagttg

SEQ ID NO: 50897 - DNA, 20 bp, synthetic construct
  source 1..20: mol_type = other DNA
gcctcttaagacaaaaagtt

SEQ ID NO: 50898 - DNA, 20 bp, synthetic construct
  source 1..20: mol_type = other DNA
ggcctcttaagacaaaaagt

SEQ ID NO: 50899 - DNA, 20 bp, synthetic construct
  source 1..20: mol_type = other DNA
aggcctcttaagacaaaaag

SEQ ID NO: 50900 - DNA, 20 bp, synthetic construct
  source 1..20: mol_type = other DNA
aaggcctcttaagacaaaaa

SEQ ID NO: 50901 - DNA, 20 bp, synthetic construct
  source 1..20: mol_type = other DNA
gaaggcctcttaagacaaaa

SEQ ID NO: 50902 - DNA, 20 bp, synthetic construct
  source 1..20: mol_type = other DNA
tgaaggcctcttaagacaaa

SEQ ID NO: 50903 - DNA, 20 bp, synthetic construct
  source 1..20: mol_type = other DNA
ctgaaggcctcttaagacaa

SEQ ID NO: 50904 - DNA, 20 bp, synthetic construct
  source 1..20: mol_type = other DNA
gctgaaggcctcttaagaca

SEQ ID NO: 50905 - DNA, 20 bp, synthetic construct
  source 1..20: mol_type = other DNA
tgctgaaggcctcttaagac

SEQ ID NO: 50906 - DNA, 20 bp, synthetic construct
  source 1..20: mol_type = other DNA
atgctgaaggcctcttaaga

SEQ ID NO: 50907 - DNA, 20 bp, synthetic construct
  source 1..20: mol_type = other DNA
gatgctgaaggcctcttaag

SEQ ID NO: 50908 - DNA, 20 bp, synthetic construct
  source 1..20: mol_type = other DNA
ggatgctgaaggcctcttaa

SEQ ID NO: 50909 - DNA, 20 bp, synthetic construct
  source 1..20: mol_type = other DNA
gggatgctgaaggcctctta

SEQ ID NO: 50910 - DNA, 20 bp, synthetic construct
  source 1..20: mol_type = other DNA
tgggatgctgaaggcctctt

SEQ ID NO: 50911 - DNA, 20 bp, synthetic construct
  source 1..20: mol_type = other DNA
atgggatgctgaaggcctct

SEQ ID NO: 50912 - DNA, 20 bp, synthetic construct
  source 1..20: mol_type = other DNA
tatgggatgctgaaggcctc

SEQ ID NO: 50913 - DNA, 20 bp, synthetic construct
  source 1..20: mol_type = other DNA
gtatgggatgctgaaggcct

SEQ ID NO: 50914 - DNA, 20 bp, synthetic construct
  source 1..20: mol_type = other DNA
tgtatgggatgctgaaggcc

SEQ ID NO: 50915 - DNA, 20 bp, synthetic construct
  source 1..20: mol_type = other DNA
ttgtatgggatgctgaaggc

SEQ ID NO: 50916 - DNA, 20 bp, synthetic construct
  source 1..20: mol_type = other DNA
cttgtatgggatgctgaagg

SEQ ID NO: 50917 - DNA, 20 bp, synthetic construct
  source 1..20: mol_type = other DNA
ccttgtatgggatgctgaag

SEQ ID NO: 50918 - DNA, 20 bp, synthetic construct
  source 1..20: mol_type = other DNA
tccttgtatgggatgctgaa

SEQ ID NO: 50919 - DNA, 20 bp, synthetic construct
  source 1..20: mol_type = other DNA
ttccttgtatgggatgctga

SEQ ID NO: 50920 - DNA, 20 bp, synthetic construct
  source 1..20: mol_type = other DNA
tttccttgtatgggatgctg

SEQ ID NO: 50921 - DNA, 20 bp, synthetic construct
  source 1..20: mol_type = other DNA
gtttccttgtatgggatgct

SEQ ID NO: 50922 - DNA, 20 bp, synthetic construct
  source 1..20: mol_type = other DNA
tgtttccttgtatgggatgc

SEQ ID NO: 50923 - DNA, 20 bp, synthetic construct
  source 1..20: mol_type = other DNA
ttgtttccttgtatgggatg

SEQ ID NO: 50924 - DNA, 20 bp, synthetic construct
  source 1..20: mol_type = other DNA
cttgtttccttgtatgggat

SEQ ID NO: 50925 - DNA, 20 bp, synthetic construct
  source 1..20: mol_type = other DNA
acttgtttccttgtatggga

SEQ ID NO: 50926 - DNA, 20 bp, synthetic construct
  source 1..20: mol_type = other DNA
gacttgtttccttgtatggg

SEQ ID NO: 50927 - DNA, 20 bp, synthetic construct
  source 1..20: mol_type = other DNA
agacttgtttccttgtatgg

SEQ ID NO: 50928 - DNA, 20 bp, synthetic construct
  source 1..20: mol_type = other DNA
aagacttgtttccttgtatg

SEQ ID NO: 50929 - DNA, 20 bp, synthetic construct
  source 1..20: mol_type = other DNA
aaagacttgtttccttgtat

SEQ ID NO: 50930 - DNA, 20 bp, synthetic construct
  source 1..20: mol_type = other DNA
aaaagacttgtttccttgta

SEQ ID NO: 50931 - DNA, 20 bp, synthetic construct
  source 1..20: mol_type = other DNA
aaaaagacttgtttccttgt

SEQ ID NO: 50932 - DNA, 20 bp, synthetic construct
  source 1..20: mol_type = other DNA
aaaaaagacttgtttccttg

SEQ ID NO: 50933 - DNA, 20 bp, synthetic construct
  source 1..20: mol_type = other DNA
aaaaaaagacttgtttcctt

SEQ ID NO: 50934 - DNA, 20 bp, synthetic construct
  source 1..20: mol_type = other DNA
taaaaaaagacttgtttcct

SEQ ID NO: 50935 - DNA, 20 bp, synthetic construct
  source 1..20: mol_type = other DNA
ctaaaaaaagacttgtttcc

SEQ ID NO: 50936 - DNA, 20 bp, synthetic construct
  source 1..20: mol_type = other DNA
gctaaaaaaagacttgtttc

SEQ ID NO: 50937 - DNA, 20 bp, synthetic construct
  source 1..20: mol_type = other DNA
agctaaaaaaagacttgttt

SEQ ID NO: 50938 - DNA, 20 bp, synthetic construct
  source 1..20: mol_type = other DNA
cagctaaaaaaagacttgtt

SEQ ID NO: 50939 - DNA, 20 bp, synthetic construct
  source 1..20: mol_type = other DNA
gcagctaaaaaaagacttgt

SEQ ID NO: 50940 - DNA, 20 bp, synthetic construct
  source 1..20: mol_type = other DNA
agcagctaaaaaaagacttg

SEQ ID NO: 50941 - DNA, 20 bp, synthetic construct
  source 1..20: mol_type = other DNA
tagcagctaaaaaaagactt

SEQ ID NO: 50942 - DNA, 20 bp, synthetic construct
  source 1..20: mol_type = other DNA
gtagcagctaaaaaaagact

SEQ ID NO: 50943 - DNA, 20 bp, synthetic construct
  source 1..20: mol_type = other DNA
ggtagcagctaaaaaaagac

SEQ ID NO: 50944 - DNA, 20 bp, synthetic construct
  source 1..20: mol_type = other DNA
aggtagcagctaaaaaaaga

SEQ ID NO: 50945 - DNA, 20 bp, synthetic construct
  source 1..20: mol_type = other DNA
aaggtagcagctaaaaaaag

SEQ ID NO: 50946 - DNA, 20 bp, synthetic construct
  source 1..20: mol_type = other DNA
aaaggtagcagctaaaaaaa

SEQ ID NO: 50947 - DNA, 20 bp, synthetic construct
  source 1..20: mol_type = other DNA
caaaggtagcagctaaaaaa

SEQ ID NO: 50948 - DNA, 20 bp, synthetic construct
  source 1..20: mol_type = other DNA
ccaaaggtagcagctaaaaa

SEQ ID NO: 50949 - DNA, 20 bp, synthetic construct
  source 1..20: mol_type = other DNA
tccaaaggtagcagctaaaa

SEQ ID NO: 50950 - DNA, 20 bp, synthetic construct
  source 1..20: mol_type = other DNA
ctccaaaggtagcagctaaa

SEQ ID NO: 50951 - DNA, 20 bp, synthetic construct
  source 1..20: mol_type = other DNA
actccaaaggtagcagctaa

SEQ ID NO: 50952 - DNA, 20 bp, synthetic construct
  source 1..20: mol_type = other DNA
aactccaaaggtagcagcta

SEQ ID NO: 50953 - DNA, 20 bp, synthetic construct
  source 1..20: mol_type = other DNA
caactccaaaggtagcagct

SEQ ID NO: 50954 - DNA, 20 bp, synthetic construct
  source 1..20: mol_type = other DNA
tcaactccaaaggtagcagc

SEQ ID NO: 50955 - DNA, 20 bp, synthetic construct
  source 1..20: mol_type = other DNA
atcaactccaaaggtagcag

SEQ ID NO: 50956 - DNA, 20 bp, synthetic construct
  source 1..20: mol_type = other DNA
aatcaactccaaaggtagca

SEQ ID NO: 50957 - DNA, 20 bp, synthetic construct
  source 1..20: mol_type = other DNA
aaatcaactccaaaggtagc

SEQ ID NO: 50958 - DNA, 20 bp, synthetic construct
  source 1..20: mol_type = other DNA
aaaatcaactccaaaggtag

SEQ ID NO: 50959 - DNA, 20 bp, synthetic construct
  source 1..20: mol_type = other DNA
caaaatcaactccaaaggta

SEQ ID NO: 50960 - DNA, 20 bp, synthetic construct
  source 1..20: mol_type = other DNA
acaaaatcaactccaaaggt

SEQ ID NO: 50961 - DNA, 20 bp, synthetic construct
  source 1..20: mol_type = other DNA
aacaaaatcaactccaaagg

SEQ ID NO: 50962 - DNA, 20 bp, synthetic construct
  source 1..20: mol_type = other DNA
aaacaaaatcaactccaaag

SEQ ID NO: 50963 - DNA, 20 bp, synthetic construct
  source 1..20: mol_type = other DNA
taaacaaaatcaactccaaa

SEQ ID NO: 50964 - DNA, 20 bp, synthetic construct
  source 1..20: mol_type = other DNA
ataaacaaaatcaactccaa

SEQ ID NO: 50965 - DNA, 20 bp, synthetic construct
  source 1..20: mol_type = other DNA
cataaacaaaatcaactcca

SEQ ID NO: 50966 - DNA, 20 bp, synthetic construct
  source 1..20: mol_type = other DNA
acataaacaaaatcaactcc

SEQ ID NO: 50967 - DNA, 20 bp, synthetic construct
  source 1..20: mol_type = other DNA
gacataaacaaaatcaactc

SEQ ID NO: 50968 - DNA, 20 bp, synthetic construct
  source 1..20: mol_type = other DNA
agacataaacaaaatcaact

SEQ ID NO: 50969 - DNA, 20 bp, synthetic construct
  source 1..20: mol_type = other DNA
tagacataaacaaaatcaac

SEQ ID NO: 50970 - DNA, 20 bp, synthetic construct
  source 1..20: mol_type = other DNA
ctagacataaacaaaatcaa

SEQ ID NO: 50971 - DNA, 20 bp, synthetic construct
  source 1..20: mol_type = other DNA
cctagacataaacaaaatca

SEQ ID NO: 50972 - DNA, 20 bp, synthetic construct
  source 1..20: mol_type = other DNA
tcctagacataaacaaaatc

SEQ ID NO: 50973 - DNA, 20 bp, synthetic construct
  source 1..20: mol_type = other DNA
ctcctagacataaacaaaat

SEQ ID NO: 50974 - DNA, 20 bp, synthetic construct
  source 1..20: mol_type = other DNA
gctcctagacataaacaaaa

SEQ ID NO: 50975 - DNA, 20 bp, synthetic construct
  source 1..20: mol_type = other DNA
tgctcctagacataaacaaa

SEQ ID NO: 50976 - DNA, 20 bp, synthetic construct
  source 1..20: mol_type = other DNA
gtgctcctagacataaacaa

SEQ ID NO: 50977 - DNA, 20 bp, synthetic construct
  source 1..20: mol_type = other DNA
agtgctcctagacataaaca

SEQ ID NO: 50978 - DNA, 20 bp, synthetic construct
  source 1..20: mol_type = other DNA
tagtgctcctagacataaac

SEQ ID NO: 50979 - DNA, 20 bp, synthetic construct
  source 1..20: mol_type = other DNA
ttagtgctcctagacataaa

SEQ ID NO: 50980 - DNA, 20 bp, synthetic construct
  source 1..20: mol_type = other DNA
tttagtgctcctagacataa

SEQ ID NO: 50981 - DNA, 20 bp, synthetic construct
  source 1..20: mol_type = other DNA
atttagtgctcctagacata

SEQ ID NO: 50982 - DNA, 20 bp, synthetic construct
  source 1..20: mol_type = other DNA
aatttagtgctcctagacat

SEQ ID NO: 50983 - DNA, 20 bp, synthetic construct
  source 1..20: mol_type = other DNA
taatttagtgctcctagaca

SEQ ID NO: 50984 - DNA, 20 bp, synthetic construct
  source 1..20: mol_type = other DNA
ataatttagtgctcctagac

SEQ ID NO: 50985 - DNA, 20 bp, synthetic construct
  source 1..20: mol_type = other DNA
aataatttagtgctcctaga

SEQ ID NO: 50986 - DNA, 20 bp, synthetic construct
  source 1..20: mol_type = other DNA
aaataatttagtgctcctag

SEQ ID NO: 50987 - DNA, 20 bp, synthetic construct
  source 1..20: mol_type = other DNA
taaataatttagtgctccta

SEQ ID NO: 50988 - DNA, 20 bp, synthetic construct
  source 1..20: mol_type = other DNA
ataaataatttagtgctcct

SEQ ID NO: 50989 - DNA, 20 bp, synthetic construct
  source 1..20: mol_type = other DNA
tataaataatttagtgctcc

SEQ ID NO: 50990 - DNA, 20 bp, synthetic construct
  source 1..20: mol_type = other DNA
gtataaataatttagtgctc

SEQ ID NO: 50991 - DNA, 20 bp, synthetic construct
  source 1..20: mol_type = other DNA
agtataaataatttagtgct

SEQ ID NO: 50992 - DNA, 20 bp, synthetic construct
  source 1..20: mol_type = other DNA
aagtataaataatttagtgc

SEQ ID NO: 50993 - DNA, 20 bp, synthetic construct
  source 1..20: mol_type = other DNA
taagtataaataatttagtg

SEQ ID NO: 50994 - DNA, 20 bp, synthetic construct
  source 1..20: mol_type = other DNA
ataagtataaataatttagt

SEQ ID NO: 50995 - DNA, 20 bp, synthetic construct
  source 1..20: mol_type = other DNA
tataagtataaataatttag

SEQ ID NO: 50996 - DNA, 20 bp, synthetic construct
  source 1..20: mol_type = other DNA
gtataagtataaataattta

SEQ ID NO: 50997 - DNA, 20 bp, synthetic construct
  source 1..20: mol_type = other DNA
agtataagtataaataattt

SEQ ID NO: 50998 - DNA, 20 bp, synthetic construct
  source 1..20: mol_type = other DNA
tagtataagtataaataatt

SEQ ID NO: 50999 - DNA, 20 bp, synthetic construct
  source 1..20: mol_type = other DNA
atagtataagtataaataat

SEQ ID NO: 51000 - DNA, 20 bp, synthetic construct
  source 1..20: mol_type = other DNA
aatagtataagtataaataa

SEQ ID NO: 51001 - DNA, 20 bp, synthetic construct
  source 1..20: mol_type = other DNA
caatagtataagtataaata

SEQ ID NO: 51002 - DNA, 20 bp, synthetic construct
  source 1..20: mol_type = other DNA
tcaatagtataagtataaat

SEQ ID NO: 51003 - DNA, 20 bp, synthetic construct
  source 1..20: mol_type = other DNA
ttcaatagtataagtataaa

SEQ ID NO: 51004 - DNA, 20 bp, synthetic construct
  source 1..20: mol_type = other DNA
tttcaatagtataagtataa

SEQ ID NO: 51005 - DNA, 20 bp, synthetic construct
  source 1..20: mol_type = other DNA
atttcaatagtataagtata

SEQ ID NO: 51006 - DNA, 20 bp, synthetic construct
  source 1..20: mol_type = other DNA
tatttcaatagtataagtat

SEQ ID NO: 51007 - DNA, 20 bp, synthetic construct
  source 1..20: mol_type = other DNA
atatttcaatagtataagta

SEQ ID NO: 51008 - DNA, 20 bp, synthetic construct
  source 1..20: mol_type = other DNA
aatatttcaatagtataagt

SEQ ID NO: 51009 - DNA, 20 bp, synthetic construct
  source 1..20: mol_type = other DNA
gaatatttcaatagtataag

SEQ ID NO: 51010 - DNA, 20 bp, synthetic construct
  source 1..20: mol_type = other DNA
ggaatatttcaatagtataa

SEQ ID NO: 51011 - DNA, 20 bp, synthetic construct
  source 1..20: mol_type = other DNA
aggaatatttcaatagtata

SEQ ID NO: 51012 - DNA, 20 bp, synthetic construct
  source 1..20: mol_type = other DNA
gaggaatatttcaatagtat

SEQ ID NO: 51013 - DNA, 20 bp, synthetic construct
  source 1..20: mol_type = other DNA
agaggaatatttcaatagta

SEQ ID NO: 51014 - DNA, 20 bp, synthetic construct
  source 1..20: mol_type = other DNA
cagaggaatatttcaatagt

SEQ ID NO: 51015 - DNA, 20 bp, synthetic construct
  source 1..20: mol_type = other DNA
acagaggaatatttcaatag

SEQ ID NO: 51016 - DNA, 20 bp, synthetic construct
  source 1..20: mol_type = other DNA
aacagaggaatatttcaata

SEQ ID NO: 51017 - DNA, 20 bp, synthetic construct
  source 1..20: mol_type = other DNA
taacagaggaatatttcaat

SEQ ID NO: 51018 - DNA, 20 bp, synthetic construct
  source 1..20: mol_type = other DNA
ataacagaggaatatttcaa

SEQ ID NO: 51019 - DNA, 20 bp, synthetic construct
  source 1..20: mol_type = other DNA
tataacagaggaatatttca

SEQ ID NO: 51020 - DNA, 20 bp, synthetic construct
  source 1..20: mol_type = other DNA
ttataacagaggaatatttc

SEQ ID NO: 51021 - DNA, 20 bp, synthetic construct
  source 1..20: mol_type = other DNA
tttataacagaggaatattt

SEQ ID NO: 51022 - DNA, 20 bp, synthetic construct
  source 1..20: mol_type = other DNA
atttataacagaggaatatt

SEQ ID NO: 51023 - DNA, 20 bp, synthetic construct
  source 1..20: mol_type = other DNA
aatttataacagaggaatat

SEQ ID NO: 51024 - DNA, 20 bp, synthetic construct
  source 1..20: mol_type = other DNA
gaatttataacagaggaata

SEQ ID NO: 51025 - DNA, 20 bp, synthetic construct
  source 1..20: mol_type = other DNA
tgaatttataacagaggaat

SEQ ID NO: 51026 - DNA, 20 bp, synthetic construct
  source 1..20: mol_type = other DNA
ttgaatttataacagaggaa

SEQ ID NO: 51027 - DNA, 20 bp, synthetic construct
  source 1..20: mol_type = other DNA
tttgaatttataacagagga

SEQ ID NO: 51028 - DNA, 20 bp, synthetic construct
  source 1..20: mol_type = other DNA
ttttgaatttataacagagg

SEQ ID NO: 51029 - DNA, 20 bp, synthetic construct
  source 1..20: mol_type = other DNA
tttttgaatttataacagag

SEQ ID NO: 51030 - DNA, 20 bp, synthetic construct
  source 1..20: mol_type = other DNA
atttttgaatttataacaga

SEQ ID NO: 51031 - DNA, 20 bp, synthetic construct
  source 1..20: mol_type = other DNA
aatttttgaatttataacag

SEQ ID NO: 51032 - DNA, 20 bp, synthetic construct
  source 1..20: mol_type = other DNA
caatttttgaatttataaca

SEQ ID NO: 51033 - DNA, 20 bp, synthetic construct
  source 1..20: mol_type = other DNA
tcaatttttgaatttataac

SEQ ID NO: 51034 - DNA, 20 bp, synthetic construct
  source 1..20: mol_type = other DNA
gtcaatttttgaatttataa

SEQ ID NO: 51035 - DNA, 20 bp, synthetic construct
  source 1..20: mol_type = other DNA
agtcaatttttgaatttata

SEQ ID NO: 51036 - DNA, 20 bp, synthetic construct
  source 1..20: mol_type = other DNA
aagtcaatttttgaatttat

SEQ ID NO: 51037 - DNA, 20 bp, synthetic construct
  source 1..20: mol_type = other DNA
aaagtcaatttttgaattta

SEQ ID NO: 51038 - DNA, 20 bp, synthetic construct
  source 1..20: mol_type = other DNA
caaagtcaatttttgaattt

SEQ ID NO: 51039 - DNA, 20 bp, synthetic construct
  source 1..20: mol_type = other DNA
ccaaagtcaatttttgaatt

SEQ ID NO: 51040 - DNA, 20 bp, synthetic construct
  source 1..20: mol_type = other DNA
tccaaagtcaatttttgaat

SEQ ID NO: 51041 - DNA, 20 bp, synthetic construct
  source 1..20: mol_type = other DNA
ttccaaagtcaatttttgaa

SEQ ID NO: 51042 - DNA, 20 bp, synthetic construct
  source 1..20: mol_type = other DNA
cttccaaagtcaatttttga

SEQ ID NO: 51043 - DNA, 20 bp, synthetic construct
  source 1..20: mol_type = other DNA
tcttccaaagtcaatttttg

SEQ ID NO: 51044 - DNA, 20 bp, synthetic construct
  source 1..20: mol_type = other DNA
atcttccaaagtcaattttt

SEQ ID NO: 51045 - DNA, 20 bp, synthetic construct
  source 1..20: mol_type = other DNA
tatcttccaaagtcaatttt

SEQ ID NO: 51046 - DNA, 20 bp, synthetic construct
  source 1..20: mol_type = other DNA
ttatcttccaaagtcaattt

SEQ ID NO: 51047 - DNA, 20 bp, synthetic construct
  source 1..20: mol_type = other DNA
tttatcttccaaagtcaatt

SEQ ID NO: 51048 - DNA, 20 bp, synthetic construct
  source 1..20: mol_type = other DNA
ttttatcttccaaagtcaat

SEQ ID NO: 51049 - DNA, 20 bp, synthetic construct
  source 1..20: mol_type = other DNA
attttatcttccaaagtcaa

SEQ ID NO: 51050 - DNA, 20 bp, synthetic construct
  source 1..20: mol_type = other DNA
aattttatcttccaaagtca

SEQ ID NO: 51051 - DNA, 20 bp, synthetic construct
  source 1..20: mol_type = other DNA
aaattttatcttccaaagtc

SEQ ID NO: 51052 - DNA, 20 bp, synthetic construct
  source 1..20: mol_type = other DNA
aaaattttatcttccaaagt

SEQ ID NO: 51053 - DNA, 20 bp, synthetic construct
  source 1..20: mol_type = other DNA
taaaattttatcttccaaag

SEQ ID NO: 51054 - DNA, 20 bp, synthetic construct
  source 1..20: mol_type = other DNA
ctaaaattttatcttccaaa

SEQ ID NO: 51055 - DNA, 20 bp, synthetic construct
  source 1..20: mol_type = other DNA
actaaaattttatcttccaa

SEQ ID NO: 51056 - DNA, 20 bp, synthetic construct
  source 1..20: mol_type = other DNA
aactaaaattttatcttcca

SEQ ID NO: 51057 - DNA, 20 bp, synthetic construct
  source 1..20: mol_type = other DNA
caactaaaattttatcttcc

SEQ ID NO: 51058 - DNA, 20 bp, synthetic construct
  source 1..20: mol_type = other DNA
tcaactaaaattttatcttc

SEQ ID NO: 51059 - DNA, 20 bp, synthetic construct
  source 1..20: mol_type = other DNA
ttcaactaaaattttatctt

SEQ ID NO: 51060 - DNA, 20 bp, synthetic construct
  source 1..20: mol_type = other DNA
attcaactaaaattttatct

SEQ ID NO: 51061 - DNA, 20 bp, synthetic construct
  source 1..20: mol_type = other DNA
aattcaactaaaattttatc

SEQ ID NO: 51062 - DNA, 20 bp, synthetic construct
  source 1..20: mol_type = other DNA
aaattcaactaaaattttat

SEQ ID NO: 51063 - DNA, 20 bp, synthetic construct
  source 1..20: mol_type = other DNA
taaattcaactaaaatttta

SEQ ID NO: 51064 - DNA, 20 bp, synthetic construct
  source 1..20: mol_type = other DNA
ttaaattcaactaaaatttt

SEQ ID NO: 51065 - DNA, 20 bp, synthetic construct
  source 1..20: mol_type = other DNA
attaaattcaactaaaattt

SEQ ID NO: 51066 - DNA, 20 bp, synthetic construct
  source 1..20: mol_type = other DNA
tattaaattcaactaaaatt

SEQ ID NO: 51067 - DNA, 20 bp, synthetic construct
  source 1..20: mol_type = other DNA
gtattaaattcaactaaaat

SEQ ID NO: 51068 - DNA, 20 bp, synthetic construct
  source 1..20: mol_type = other DNA
tgtattaaattcaactaaaa

SEQ ID NO: 51069 - DNA, 20 bp, synthetic construct
  source 1..20: mol_type = other DNA
atgtattaaattcaactaaa

SEQ ID NO: 51070 - DNA, 20 bp, synthetic construct
  source 1..20: mol_type = other DNA
tatgtattaaattcaactaa

SEQ ID NO: 51071 - DNA, 20 bp, synthetic construct
  source 1..20: mol_type = other DNA
ctatgtattaaattcaacta

SEQ ID NO: 51072 - DNA, 20 bp, synthetic construct
  source 1..20: mol_type = other DNA
gctatgtattaaattcaact

SEQ ID NO: 51073 - DNA, 20 bp, synthetic construct
  source 1..20: mol_type = other DNA
tgctatgtattaaattcaac

SEQ ID NO: 51074 - DNA, 20 bp, synthetic construct
  source 1..20: mol_type = other DNA
gtgctatgtattaaattcaa

SEQ ID NO: 51075 - DNA, 20 bp, synthetic construct
  source 1..20: mol_type = other DNA
agtgctatgtattaaattca

SEQ ID NO: 51076 - DNA, 20 bp, synthetic construct
  source 1..20: mol_type = other DNA
gagtgctatgtattaaattc

SEQ ID NO: 51077 - DNA, 20 bp, synthetic construct
  source 1..20: mol_type = other DNA
agagtgctatgtattaaatt

SEQ ID NO: 51078 - DNA, 20 bp, synthetic construct
  source 1..20: mol_type = other DNA
cagagtgctatgtattaaat

SEQ ID NO: 51079 - DNA, 20 bp, synthetic construct
  source 1..20: mol_type = other DNA
ccagagtgctatgtattaaa

SEQ ID NO: 51080 - DNA, 20 bp, synthetic construct
  source 1..20: mol_type = other DNA
tccagagtgctatgtattaa

SEQ ID NO: 51081 - DNA, 20 bp, synthetic construct
  source 1..20: mol_type = other DNA
ttccagagtgctatgtatta

SEQ ID NO: 51082 - DNA, 20 bp, synthetic construct
  source 1..20: mol_type = other DNA
tttccagagtgctatgtatt

SEQ ID NO: 51083 - DNA, 20 bp, synthetic construct
  source 1..20: mol_type = other DNA
ctttccagagtgctatgtat

SEQ ID NO: 51084 - DNA, 20 bp, synthetic construct
  source 1..20: mol_type = other DNA
tctttccagagtgctatgta

SEQ ID NO: 51085 - DNA, 20 bp, synthetic construct
  source 1..20: mol_type = other DNA
ctctttccagagtgctatgt

SEQ ID NO: 51086 - DNA, 20 bp, synthetic construct
  source 1..20: mol_type = other DNA
actctttccagagtgctatg

SEQ ID NO: 51087 - DNA, 20 bp, synthetic construct
  source 1..20: mol_type = other DNA
tactctttccagagtgctat

SEQ ID NO: 51088 - DNA, 20 bp, synthetic construct
  source 1..20: mol_type = other DNA
atactctttccagagtgcta

SEQ ID NO: 51089 - DNA, 20 bp, synthetic construct
  source 1..20: mol_type = other DNA
aatactctttccagagtgct

SEQ ID NO: 51090 - DNA, 20 bp, synthetic construct
  source 1..20: mol_type = other DNA
caatactctttccagagtgc

SEQ ID NO: 51091 - DNA, 20 bp, synthetic construct
  source 1..20: mol_type = other DNA
ccaatactctttccagagtg

SEQ ID NO: 51092 - DNA, 20 bp, synthetic construct
  source 1..20: mol_type = other DNA
gccaatactctttccagagt

SEQ ID NO: 51093 - DNA, 20 bp, synthetic construct
  source 1..20: mol_type = other DNA
ggccaatactctttccagag

SEQ ID NO: 51094 - DNA, 20 bp, synthetic construct
  source 1..20: mol_type = other DNA
tggccaatactctttccaga

SEQ ID NO: 51095 - DNA, 20 bp, synthetic construct
  source 1..20: mol_type = other DNA
gtggccaatactctttccag

SEQ ID NO: 51096 - DNA, 20 bp, synthetic construct
  source 1..20: mol_type = other DNA
tgtggccaatactctttcca

SEQ ID NO: 51097 - DNA, 20 bp, synthetic construct
  source 1..20: mol_type = other DNA
ttgtggccaatactctttcc

SEQ ID NO: 51098 - DNA, 20 bp, synthetic construct
  source 1..20: mol_type = other DNA
gttgtggccaatactctttc

SEQ ID NO: 51099 - DNA, 20 bp, synthetic construct
  source 1..20: mol_type = other DNA
tgttgtggccaatactcttt

SEQ ID NO: 51100 - DNA, 20 bp, synthetic construct
  source 1..20: mol_type = other DNA
ttgttgtggccaatactctt

SEQ ID NO: 51101 - DNA, 20 bp, synthetic construct
  source 1..20: mol_type = other DNA
tttgttgtggccaatactct

SEQ ID NO: 51102 - DNA, 20 bp, synthetic construct
  source 1..20: mol_type = other DNA
ttttgttgtggccaatactc

SEQ ID NO: 51103 - DNA, 20 bp, synthetic construct
  source 1..20: mol_type = other DNA
tttttgttgtggccaatact

SEQ ID NO: 51104 - DNA, 20 bp, synthetic construct
  source 1..20: mol_type = other DNA
ttttttgttgtggccaatac

SEQ ID NO: 51105 - DNA, 20 bp, synthetic construct
  source 1..20: mol_type = other DNA
tttttttgttgtggccaata

SEQ ID NO: 51106 - DNA, 20 bp, synthetic construct
  source 1..20: mol_type = other DNA
ttttttttgttgtggccaat

SEQ ID NO: 51107 - DNA, 20 bp, synthetic construct
  source 1..20: mol_type = other DNA
tttttttttgttgtggccaa

SEQ ID NO: 51108 - DNA, 20 bp, synthetic construct
  source 1..20: mol_type = other DNA
ctttttttttgttgtggcca

SEQ ID NO: 51109 - DNA, 20 bp, synthetic construct
  source 1..20: mol_type = other DNA
cctttttttttgttgtggcc

SEQ ID NO: 51110 - DNA, 20 bp, synthetic construct
  source 1..20: mol_type = other DNA
acctttttttttgttgtggc

SEQ ID NO: 51111 - DNA, 20 bp, synthetic construct
  source 1..20: mol_type = other DNA
aacctttttttttgttgtgg

SEQ ID NO: 51112 - DNA, 20 bp, synthetic construct
  source 1..20: mol_type = other DNA
gaacctttttttttgttgtg

SEQ ID NO: 51113 - DNA, 20 bp, synthetic construct
  source 1..20: mol_type = other DNA
ggaacctttttttttgttgt

SEQ ID NO: 51114 - DNA, 20 bp, synthetic construct
  source 1..20: mol_type = other DNA
gggaacctttttttttgttg

SEQ ID NO: 51115 - DNA, 20 bp, synthetic construct
  source 1..20: mol_type = other DNA
agggaacctttttttttgtt

SEQ ID NO: 51116 - DNA, 20 bp, synthetic construct
  source 1..20: mol_type = other DNA
tagggaacctttttttttgt

SEQ ID NO: 51117 - DNA, 20 bp, synthetic construct
  source 1..20: mol_type = other DNA
gtagggaacctttttttttg

SEQ ID NO: 51118 - DNA, 20 bp, synthetic construct
  source 1..20: mol_type = other DNA
agtagggaaccttttttttt

SEQ ID NO: 51119 - DNA, 20 bp, synthetic construct
  source 1..20: mol_type = other DNA
gagtagggaacctttttttt

SEQ ID NO: 51120 - DNA, 20 bp, synthetic construct
  source 1..20: mol_type = other DNA
agagtagggaaccttttttt

SEQ ID NO: 51121 - DNA, 20 bp, synthetic construct
  source 1..20: mol_type = other DNA
tagagtagggaacctttttt

SEQ ID NO: 51122 - DNA, 20 bp, synthetic construct
  source 1..20: mol_type = other DNA
atagagtagggaaccttttt

SEQ ID NO: 51123 - DNA, 20 bp, synthetic construct
  source 1..20: mol_type = other DNA
aatagagtagggaacctttt

SEQ ID NO: 51124 - DNA, 20 bp, synthetic construct
  source 1..20: mol_type = other DNA
caatagagtagggaaccttt

SEQ ID NO: 51125 - DNA, 20 bp, synthetic construct
  source 1..20: mol_type = other DNA
ccaatagagtagggaacctt

SEQ ID NO: 51126 - DNA, 20 bp, synthetic construct
  source 1..20: mol_type = other DNA
tccaatagagtagggaacct

SEQ ID NO: 51127 - DNA, 20 bp, synthetic construct
  source 1..20: mol_type = other DNA
atccaatagagtagggaacc

SEQ ID NO: 51128 - DNA, 20 bp, synthetic construct
  source 1..20: mol_type = other DNA
tatccaatagagtagggaac

SEQ ID NO: 51129 - DNA, 20 bp, synthetic construct
  source 1..20: mol_type = other DNA
gtatccaatagagtagggaa

SEQ ID NO: 51130 - DNA, 20 bp, synthetic construct
  source 1..20: mol_type = other DNA
ggtatccaatagagtaggga

SEQ ID NO: 51131 - DNA, 20 bp, synthetic construct
  source 1..20: mol_type = other DNA
tggtatccaatagagtaggg

SEQ ID NO: 51132 - DNA, 20 bp, synthetic construct
  source 1..20: mol_type = other DNA
ctggtatccaatagagtagg

SEQ ID NO: 51133 - DNA, 20 bp, synthetic construct
  source 1..20: mol_type = other DNA
cctggtatccaatagagtag

SEQ ID NO: 51134 - DNA, 20 bp, synthetic construct
  source 1..20: mol_type = other DNA
acctggtatccaatagagta

SEQ ID NO: 51135 - DNA, 20 bp, synthetic construct
  source 1..20: mol_type = other DNA
gacctggtatccaatagagt

SEQ ID NO: 51136 - DNA, 20 bp, synthetic construct
  source 1..20: mol_type = other DNA
tgacctggtatccaatagag

SEQ ID NO: 51137 - DNA, 20 bp, synthetic construct
  source 1..20: mol_type = other DNA
atgacctggtatccaataga

SEQ ID NO: 51138 - DNA, 20 bp, synthetic construct
  source 1..20: mol_type = other DNA
aatgacctggtatccaatag

SEQ ID NO: 51139 - DNA, 20 bp, synthetic construct
  source 1..20: mol_type = other DNA
aaatgacctggtatccaata

SEQ ID NO: 51140 - DNA, 20 bp, synthetic construct
  source 1..20: mol_type = other DNA
taaatgacctggtatccaat

SEQ ID NO: 51141 - DNA, 20 bp, synthetic construct
  source 1..20: mol_type = other DNA
ttaaatgacctggtatccaa

SEQ ID NO: 51142 - DNA, 20 bp, synthetic construct
  source 1..20: mol_type = other DNA
gttaaatgacctggtatcca

SEQ ID NO: 51143 - DNA, 20 bp, synthetic construct
  source 1..20: mol_type = other DNA
tgttaaatgacctggtatcc

SEQ ID NO: 51144 - DNA, 20 bp, synthetic construct
  source 1..20: mol_type = other DNA
ctgttaaatgacctggtatc

SEQ ID NO: 51145 - DNA, 20 bp, synthetic construct
  source 1..20: mol_type = other DNA
gctgttaaatgacctggtat

SEQ ID NO: 51146 - DNA, 20 bp, synthetic construct
  source 1..20: mol_type = other DNA
ggctgttaaatgacctggta

SEQ ID NO: 51147 - DNA, 20 bp, synthetic construct
  source 1..20: mol_type = other DNA
tggctgttaaatgacctggt

SEQ ID NO: 51148 - DNA, 20 bp, synthetic construct
  source 1..20: mol_type = other DNA
atggctgttaaatgacctgg

SEQ ID NO: 51149 - DNA, 20 bp, synthetic construct
  source 1..20: mol_type = other DNA
aatggctgttaaatgacctg

SEQ ID NO: 51150 - DNA, 20 bp, synthetic construct
  source 1..20: mol_type = other DNA
aaatggctgttaaatgacct

SEQ ID NO: 51151 - DNA, 20 bp, synthetic construct
  source 1..20: mol_type = other DNA
taaatggctgttaaatgacc

SEQ ID NO: 51152 - DNA, 20 bp, synthetic construct
  source 1..20: mol_type = other DNA
gtaaatggctgttaaatgac

SEQ ID NO: 51153 - DNA, 20 bp, synthetic construct
  source 1..20: mol_type = other DNA
cgtaaatggctgttaaatga

SEQ ID NO: 51154 - DNA, 20 bp, synthetic construct
  source 1..20: mol_type = other DNA
ccgtaaatggctgttaaatg

SEQ ID NO: 51155 - DNA, 20 bp, synthetic construct
  source 1..20: mol_type = other DNA
accgtaaatggctgttaaat

SEQ ID NO: 51156 - DNA, 20 bp, synthetic construct
  source 1..20: mol_type = other DNA
taccgtaaatggctgttaaa

SEQ ID NO: 51157 - DNA, 20 bp, synthetic construct
  source 1..20: mol_type = other DNA
ataccgtaaatggctgttaa

SEQ ID NO: 51158 - DNA, 20 bp, synthetic construct
  source 1..20: mol_type = other DNA
cataccgtaaatggctgtta

SEQ ID NO: 51159 - DNA, 20 bp, synthetic construct
  source 1..20: mol_type = other DNA
gcataccgtaaatggctgtt

SEQ ID NO: 51160 - DNA, 20 bp, synthetic construct
  source 1..20: mol_type = other DNA
tgcataccgtaaatggctgt

SEQ ID NO: 51161 - DNA, 20 bp, synthetic construct
  source 1..20: mol_type = other DNA
atgcataccgtaaatggctg

SEQ ID NO: 51162 - DNA, 20 bp, synthetic construct
  source 1..20: mol_type = other DNA
aatgcataccgtaaatggct

SEQ ID NO: 51163 - DNA, 20 bp, synthetic construct
  source 1..20: mol_type = other DNA
caatgcataccgtaaatggc

SEQ ID NO: 51164 - DNA, 20 bp, synthetic construct
  source 1..20: mol_type = other DNA
acaatgcataccgtaaatgg

SEQ ID NO: 51165 - DNA, 20 bp, synthetic construct
  source 1..20: mol_type = other DNA
gacaatgcataccgtaaatg

SEQ ID NO: 51166 - DNA, 20 bp, synthetic construct
  source 1..20: mol_type = other DNA
agacaatgcataccgtaaat

SEQ ID NO: 51167 - DNA, 20 bp, synthetic construct
  source 1..20: mol_type = other DNA
aagacaatgcataccgtaaa

SEQ ID NO: 51168 - DNA, 20 bp, synthetic construct
  source 1..20: mol_type = other DNA
aaagacaatgcataccgtaa

SEQ ID NO: 51169 - DNA, 20 bp, synthetic construct
  source 1..20: mol_type = other DNA
aaaagacaatgcataccgta

SEQ ID NO: 51170 - DNA, 20 bp, synthetic construct
  source 1..20: mol_type = other DNA
aaaaagacaatgcataccgt

SEQ ID NO: 51171 - DNA, 20 bp, synthetic construct
  source 1..20: mol_type = other DNA
caaaaagacaatgcataccg

SEQ ID NO: 51172 - DNA, 20 bp, synthetic construct
  source 1..20: mol_type = other DNA
acaaaaagacaatgcatacc

SEQ ID NO: 51173 - DNA, 20 bp, synthetic construct
  source 1..20: mol_type = other DNA
aacaaaaagacaatgcatac

SEQ ID NO: 51174 - DNA, 20 bp, synthetic construct
  source 1..20: mol_type = other DNA
aaacaaaaagacaatgcata

SEQ ID NO: 51175 - DNA, 20 bp, synthetic construct
  source 1..20: mol_type = other DNA
aaaacaaaaagacaatgcat

SEQ ID NO: 51176 - DNA, 20 bp, synthetic construct
  source 1..20: mol_type = other DNA
aaaaacaaaaagacaatgca

SEQ ID NO: 51177 - DNA, 20 bp, synthetic construct
  source 1..20: mol_type = other DNA
taaaaacaaaaagacaatgc

SEQ ID NO: 51178 - DNA, 20 bp, synthetic construct
  source 1..20: mol_type = other DNA
ataaaaacaaaaagacaatg

SEQ ID NO: 51179 - DNA, 20 bp, synthetic construct
  source 1..20: mol_type = other DNA
cataaaaacaaaaagacaat

SEQ ID NO: 51180 - DNA, 20 bp, synthetic construct
  source 1..20: mol_type = other DNA
tcataaaaacaaaaagacaa

SEQ ID NO: 51181 - DNA, 20 bp, synthetic construct
  source 1..20: mol_type = other DNA
atcataaaaacaaaaagaca

SEQ ID NO: 51182 - DNA, 20 bp, synthetic construct
  source 1..20: mol_type = other DNA
catcataaaaacaaaaagac

SEQ ID NO: 51183 - DNA, 20 bp, synthetic construct
  source 1..20: mol_type = other DNA
tcatcataaaaacaaaaaga

SEQ ID NO: 51184 - DNA, 20 bp, synthetic construct
  source 1..20: mol_type = other DNA
ttcatcataaaaacaaaaag

SEQ ID NO: 51185 - DNA, 20 bp, synthetic construct
  source 1..20: mol_type = other DNA
attcatcataaaaacaaaaa

SEQ ID NO: 51186 - DNA, 20 bp, synthetic construct
  source 1..20: mol_type = other DNA
aattcatcataaaaacaaaa

SEQ ID NO: 51187 - DNA, 20 bp, synthetic construct
  source 1..20: mol_type = other DNA
caattcatcataaaaacaaa

SEQ ID NO: 51188 - DNA, 20 bp, synthetic construct
  source 1..20: mol_type = other DNA
tcaattcatcataaaaacaa

SEQ ID NO: 51189 - DNA, 20 bp, synthetic construct
  source 1..20: mol_type = other DNA
atcaattcatcataaaaaca

SEQ ID NO: 51190 - DNA, 20 bp, synthetic construct
  source 1..20: mol_type = other DNA
tatcaattcatcataaaaac

SEQ ID NO: 51191 - DNA, 20 bp, synthetic construct
  source 1..20: mol_type = other DNA
atatcaattcatcataaaaa

SEQ ID NO: 51192 - DNA, 20 bp, synthetic construct
  source 1..20: mol_type = other DNA
aatatcaattcatcataaaa

SEQ ID NO: 51193 - DNA, 20 bp, synthetic construct
  source 1..20: mol_type = other DNA
aaatatcaattcatcataaa

SEQ ID NO: 51194 - DNA, 20 bp, synthetic construct
  source 1..20: mol_type = other DNA
gaaatatcaattcatcataa

SEQ ID NO: 51195 - DNA, 20 bp, synthetic construct
  source 1..20: mol_type = other DNA
ggaaatatcaattcatcata

SEQ ID NO: 51196 - DNA, 20 bp, synthetic construct
  source 1..20: mol_type = other DNA
gggaaatatcaattcatcat

SEQ ID NO: 51197 - DNA, 20 bp, synthetic construct
  source 1..20: mol_type = other DNA
tgggaaatatcaattcatca

SEQ ID NO: 51198 - DNA, 20 bp, synthetic construct
  source 1..20: mol_type = other DNA
ttgggaaatatcaattcatc

SEQ ID NO: 51199 - DNA, 20 bp, synthetic construct
  source 1..20: mol_type = other DNA
tttgggaaatatcaattcat

SEQ ID NO: 51200 - DNA, 20 bp, synthetic construct
  source 1..20: mol_type = other DNA
atttgggaaatatcaattca

SEQ ID NO: 51201 - DNA, 20 bp, synthetic construct
  source 1..20: mol_type = other DNA
catttgggaaatatcaattc

SEQ ID NO: 51202 - DNA, 20 bp, synthetic construct
  source 1..20: mol_type = other DNA
acatttgggaaatatcaatt

SEQ ID NO: 51203 - DNA, 20 bp, synthetic construct
  source 1..20: mol_type = other DNA
cacatttgggaaatatcaat

SEQ ID NO: 51204 - DNA, 20 bp, synthetic construct
  source 1..20: mol_type = other DNA
ccacatttgggaaatatcaa

SEQ ID NO: 51205 - DNA, 20 bp, synthetic construct
  source 1..20: mol_type = other DNA
tccacatttgggaaatatca

SEQ ID NO: 51206 - DNA, 20 bp, synthetic construct
  source 1..20: mol_type = other DNA
ttccacatttgggaaatatc

SEQ ID NO: 51207 - DNA, 20 bp, synthetic construct
  source 1..20: mol_type = other DNA
cttccacatttgggaaatat

SEQ ID NO: 51208 - DNA, 20 bp, synthetic construct
  source 1..20: mol_type = other DNA
tcttccacatttgggaaata

SEQ ID NO: 51209 - DNA, 20 bp, synthetic construct
  source 1..20: mol_type = other DNA
ctcttccacatttgggaaat

SEQ ID NO: 51210 - DNA, 20 bp, synthetic construct
  source 1..20: mol_type = other DNA
actcttccacatttgggaaa

SEQ ID NO: 51211 - DNA, 20 bp, synthetic construct
  source 1..20: mol_type = other DNA
cactcttccacatttgggaa

SEQ ID NO: 51212 - DNA, 20 bp, synthetic construct
  source 1..20: mol_type = other DNA
tcactcttccacatttggga

SEQ ID NO: 51213 - DNA, 20 bp, synthetic construct
  source 1..20: mol_type = other DNA
ttcactcttccacatttggg

SEQ ID NO: 51214 - DNA, 20 bp, synthetic construct
  source 1..20: mol_type = other DNA
attcactcttccacatttgg

SEQ ID NO: 51215 - DNA, 20 bp, synthetic construct
  source 1..20: mol_type = other DNA
tattcactcttccacatttg

SEQ ID NO: 51216 - DNA, 20 bp, synthetic construct
  source 1..20: mol_type = other DNA
atattcactcttccacattt

SEQ ID NO: 51217 - DNA, 20 bp, synthetic construct
  source 1..20: mol_type = other DNA
aatattcactcttccacatt

SEQ ID NO: 51218 - DNA, 20 bp, synthetic construct
  source 1..20: mol_type = other DNA
taatattcactcttccacat

SEQ ID NO: 51219 - DNA, 20 bp, synthetic construct
  source 1..20: mol_type = other DNA
gtaatattcactcttccaca

SEQ ID NO: 51220 - DNA, 20 bp, synthetic construct
  source 1..20: mol_type = other DNA
agtaatattcactcttccac

SEQ ID NO: 51221 - DNA, 20 bp, synthetic construct
  source 1..20: mol_type = other DNA
aagtaatattcactcttcca

SEQ ID NO: 51222 - DNA, 20 bp, synthetic construct
  source 1..20: mol_type = other DNA
aaagtaatattcactcttcc

SEQ ID NO: 51223 - DNA, 20 bp, synthetic construct
  source 1..20: mol_type = other DNA
caaagtaatattcactcttc

SEQ ID NO: 51224 - DNA, 20 bp, synthetic construct
  source 1..20: mol_type = other DNA
tcaaagtaatattcactctt

SEQ ID NO: 51225 - DNA, 20 bp, synthetic construct
  source 1..20: mol_type = other DNA
ctcaaagtaatattcactct

SEQ ID NO: 51226 - DNA, 20 bp, synthetic construct
  source 1..20: mol_type = other DNA
tctcaaagtaatattcactc

SEQ ID NO: 51227 - DNA, 20 bp, synthetic construct
  source 1..20: mol_type = other DNA
atctcaaagtaatattcact

SEQ ID NO: 51228 - DNA, 20 bp, synthetic construct
  source 1..20: mol_type = other DNA
catctcaaagtaatattcac

SEQ ID NO: 51229 - DNA, 20 bp, synthetic construct
  source 1..20: mol_type = other DNA
acatctcaaagtaatattca

SEQ ID NO: 51230 - DNA, 20 bp, synthetic construct
  source 1..20: mol_type = other DNA
aacatctcaaagtaatattc

SEQ ID NO: 51231 - DNA, 20 bp, synthetic construct
  source 1..20: mol_type = other DNA
aaacatctcaaagtaatatt

SEQ ID NO: 51232 - DNA, 20 bp, synthetic construct
  source 1..20: mol_type = other DNA
caaacatctcaaagtaatat

SEQ ID NO: 51233 - DNA, 20 bp, synthetic construct
  source 1..20: mol_type = other DNA
acaaacatctcaaagtaata

SEQ ID NO: 51234 - DNA, 20 bp, synthetic construct
  source 1..20: mol_type = other DNA
cacaaacatctcaaagtaat

SEQ ID NO: 51235 - DNA, 20 bp, synthetic construct
  source 1..20: mol_type = other DNA
tcacaaacatctcaaagtaa

SEQ ID NO: 51236 - DNA, 20 bp, synthetic construct
  source 1..20: mol_type = other DNA
atcacaaacatctcaaagta

SEQ ID NO: 51237 - DNA, 20 bp, synthetic construct
  source 1..20: mol_type = other DNA
tatcacaaacatctcaaagt

SEQ ID NO: 51238 - DNA, 20 bp, synthetic construct
  source 1..20: mol_type = other DNA
ctatcacaaacatctcaaag

SEQ ID NO: 51239 - DNA, 20 bp, synthetic construct
  source 1..20: mol_type = other DNA
actatcacaaacatctcaaa

SEQ ID NO: 51240 - DNA, 20 bp, synthetic construct
  source 1..20: mol_type = other DNA
gactatcacaaacatctcaa

SEQ ID NO: 51241 - DNA, 20 bp, synthetic construct
  source 1..20: mol_type = other DNA
ggactatcacaaacatctca

SEQ ID NO: 51242 - DNA, 20 bp, synthetic construct
  source 1..20: mol_type = other DNA
tggactatcacaaacatctc

SEQ ID NO: 51243 - DNA, 20 bp, synthetic construct
  source 1..20: mol_type = other DNA
atggactatcacaaacatct

SEQ ID NO: 51244 - DNA, 20 bp, synthetic construct
  source 1..20: mol_type = other DNA
aatggactatcacaaacatc

SEQ ID NO: 51245 - DNA, 20 bp, synthetic construct
  source 1..20: mol_type = other DNA
gaatggactatcacaaacat

SEQ ID NO: 51246 - DNA, 20 bp, synthetic construct
  source 1..20: mol_type = other DNA
ggaatggactatcacaaaca

SEQ ID NO: 51247 - DNA, 20 bp, synthetic construct
  source 1..20: mol_type = other DNA
aggaatggactatcacaaac

SEQ ID NO: 51248 - DNA, 20 bp, synthetic construct
  source 1..20: mol_type = other DNA
aaggaatggactatcacaaa

SEQ ID NO: 51249 - DNA, 20 bp, synthetic construct
  source 1..20: mol_type = other DNA
caaggaatggactatcacaa

SEQ ID NO: 51250 - DNA, 20 bp, synthetic construct
  source 1..20: mol_type = other DNA
gcaaggaatggactatcaca

SEQ ID NO: 51251 - DNA, 20 bp, synthetic construct
  source 1..20: mol_type = other DNA
agcaaggaatggactatcac

SEQ ID NO: 51252 - DNA, 20 bp, synthetic construct
  source 1..20: mol_type = other DNA
gagcaaggaatggactatca

SEQ ID NO: 51253 - DNA, 20 bp, synthetic construct
  source 1..20: mol_type = other DNA
ggagcaaggaatggactatc

SEQ ID NO: 51254 - DNA, 20 bp, synthetic construct
  source 1..20: mol_type = other DNA
aggagcaaggaatggactat

SEQ ID NO: 51255 - DNA, 20 bp, synthetic construct
  source 1..20: mol_type = other DNA
gaggagcaaggaatggacta

SEQ ID NO: 51256 - DNA, 20 bp, synthetic construct
  source 1..20: mol_type = other DNA
agaggagcaaggaatggact

SEQ ID NO: 51257 - DNA, 20 bp, synthetic construct
  source 1..20: mol_type = other DNA
aagaggagcaaggaatggac

SEQ ID NO: 51258 - DNA, 20 bp, synthetic construct
  source 1..20: mol_type = other DNA
gaagaggagcaaggaatgga

SEQ ID NO: 51259 - DNA, 20 bp, synthetic construct
  source 1..20: mol_type = other DNA
tgaagaggagcaaggaatgg

SEQ ID NO: 51260 - DNA, 20 bp, synthetic construct
  source 1..20: mol_type = other DNA
ttgaagaggagcaaggaatg

SEQ ID NO: 51261 - DNA, 20 bp, synthetic construct
  source 1..20: mol_type = other DNA
tttgaagaggagcaaggaat

SEQ ID NO: 51262 - DNA, 20 bp, synthetic construct
  source 1..20: mol_type = other DNA
ttttgaagaggagcaaggaa

SEQ ID NO: 51263 - DNA, 20 bp, synthetic construct
  source 1..20: mol_type = other DNA
attttgaagaggagcaagga

SEQ ID NO: 51264 - DNA, 20 bp, synthetic construct
  source 1..20: mol_type = other DNA
aattttgaagaggagcaagg

SEQ ID NO: 51265 - DNA, 20 bp, synthetic construct
  source 1..20: mol_type = other DNA
taattttgaagaggagcaag

SEQ ID NO: 51266 - DNA, 20 bp, synthetic construct
  source 1..20: mol_type = other DNA
ttaattttgaagaggagcaa

SEQ ID NO: 51267 - DNA, 20 bp, synthetic construct
  source 1..20: mol_type = other DNA
attaattttgaagaggagca

SEQ ID NO: 51268 - DNA, 20 bp, synthetic construct
  source 1..20: mol_type = other DNA
cattaattttgaagaggagc

SEQ ID NO: 51269 - DNA, 20 bp, synthetic construct
  source 1..20: mol_type = other DNA
acattaattttgaagaggag

SEQ ID NO: 51270 - DNA, 20 bp, synthetic construct
  source 1..20: mol_type = other DNA
gacattaattttgaagagga

SEQ ID NO: 51271 - DNA, 20 bp, synthetic construct
  source 1..20: mol_type = other DNA
tgacattaattttgaagagg

SEQ ID NO: 51272 - DNA, 20 bp, synthetic construct
  source 1..20: mol_type = other DNA
atgacattaattttgaagag

SEQ ID NO: 51273 - DNA, 20 bp, synthetic construct
  source 1..20: mol_type = other DNA
aatgacattaattttgaaga

SEQ ID NO: 51274 - DNA, 20 bp, synthetic construct
  source 1..20: mol_type = other DNA
taatgacattaattttgaag

SEQ ID NO: 51275 - DNA, 20 bp, synthetic construct
  source 1..20: mol_type = other DNA
ttaatgacattaattttgaa

SEQ ID NO: 51276 - DNA, 20 bp, synthetic construct
  source 1..20: mol_type = other DNA
tttaatgacattaattttga

SEQ ID NO: 51277 - DNA, 20 bp, synthetic construct
  source 1..20: mol_type = other DNA
atttaatgacattaattttg

SEQ ID NO: 51278 - DNA, 20 bp, synthetic construct
  source 1..20: mol_type = other DNA
aatttaatgacattaatttt

SEQ ID NO: 51279 - DNA, 20 bp, synthetic construct
  source 1..20: mol_type = other DNA
aaatttaatgacattaattt

SEQ ID NO: 51280 - DNA, 20 bp, synthetic construct
  source 1..20: mol_type = other DNA
aaaatttaatgacattaatt

SEQ ID NO: 51281 - DNA, 20 bp, synthetic construct
  source 1..20: mol_type = other DNA
aaaaatttaatgacattaat

SEQ ID NO: 51282 - DNA, 20 bp, synthetic construct
  source 1..20: mol_type = other DNA
taaaaatttaatgacattaa

SEQ ID NO: 51283 - DNA, 20 bp, synthetic construct
  source 1..20: mol_type = other DNA
ataaaaatttaatgacatta

SEQ ID NO: 51284 - DNA, 20 bp, synthetic construct
  source 1..20: mol_type = other DNA
aataaaaatttaatgacatt

SEQ ID NO: 51285 - DNA, 20 bp, synthetic construct
  source 1..20: mol_type = other DNA
taataaaaatttaatgacat

SEQ ID NO: 51286 - DNA, 20 bp, synthetic construct
  source 1..20: mol_type = other DNA
gtaataaaaatttaatgaca

SEQ ID NO: 51287 - DNA, 20 bp, synthetic construct
  source 1..20: mol_type = other DNA
agtaataaaaatttaatgac

SEQ ID NO: 51288 - DNA, 20 bp, synthetic construct
  source 1..20: mol_type = other DNA
aagtaataaaaatttaatga

SEQ ID NO: 51289 - DNA, 20 bp, synthetic construct
  source 1..20: mol_type = other DNA
aaagtaataaaaatttaatg

SEQ ID NO: 51290 - DNA, 20 bp, synthetic construct
  source 1..20: mol_type = other DNA
taaagtaataaaaatttaat

SEQ ID NO: 51291 - DNA, 20 bp, synthetic construct
  source 1..20: mol_type = other DNA
ataaagtaataaaaatttaa

SEQ ID NO: 51292 - DNA, 20 bp, synthetic construct
  source 1..20: mol_type = other DNA
aataaagtaataaaaattta

SEQ ID NO: 51293 - DNA, 20 bp, synthetic construct
  source 1..20: mol_type = other DNA
taataaagtaataaaaattt

SEQ ID NO: 51294 - DNA, 20 bp, synthetic construct
  source 1..20: mol_type = other DNA
ctaataaagtaataaaaatt

SEQ ID NO: 51295 - DNA, 20 bp, synthetic construct
  source 1..20: mol_type = other DNA
tctaataaagtaataaaaat

SEQ ID NO: 51296 - DNA, 20 bp, synthetic construct
  source 1..20: mol_type = other DNA
atctaataaagtaataaaaa

SEQ ID NO: 51297 - DNA, 20 bp, synthetic construct
  source 1..20: mol_type = other DNA
gatctaataaagtaataaaa

SEQ ID NO: 51298 - DNA, 20 bp, synthetic construct
  source 1..20: mol_type = other DNA
agatctaataaagtaataaa

SEQ ID NO: 51299 - DNA, 20 bp, synthetic construct
  source 1..20: mol_type = other DNA
aagatctaataaagtaataa

SEQ ID NO: 51300 - DNA, 20 bp, synthetic construct
  source 1..20: mol_type = other DNA
gaagatctaataaagtaata

SEQ ID NO: 51301 - DNA, 20 bp, synthetic construct
  source 1..20: mol_type = other DNA
tgaagatctaataaagtaat

SEQ ID NO: 51302 - DNA, 20 bp, synthetic construct
  source 1..20: mol_type = other DNA
atgaagatctaataaagtaa

SEQ ID NO: 51303 - DNA, 20 bp, synthetic construct
  source 1..20: mol_type = other DNA
aatgaagatctaataaagta

SEQ ID NO: 51304 - DNA, 20 bp, synthetic construct
  source 1..20: mol_type = other DNA
aaatgaagatctaataaagt

SEQ ID NO: 51305 - DNA, 20 bp, synthetic construct
  source 1..20: mol_type = other DNA
gaaatgaagatctaataaag

SEQ ID NO: 51306 - DNA, 20 bp, synthetic construct
  source 1..20: mol_type = other DNA
agaaatgaagatctaataaa

SEQ ID NO: 51307 - DNA, 20 bp, synthetic construct
  source 1..20: mol_type = other DNA
gagaaatgaagatctaataa

SEQ ID NO: 51308 - DNA, 20 bp, synthetic construct
  source 1..20: mol_type = other DNA
tgagaaatgaagatctaata

SEQ ID NO: 51309 - DNA, 20 bp, synthetic construct
  source 1..20: mol_type = other DNA
ctgagaaatgaagatctaat

SEQ ID NO: 51310 - DNA, 20 bp, synthetic construct
  source 1..20: mol_type = other DNA
tctgagaaatgaagatctaa

SEQ ID NO: 51311 - DNA, 20 bp, synthetic construct
  source 1..20: mol_type = other DNA
atctgagaaatgaagatcta

SEQ ID NO: 51312 - DNA, 20 bp, synthetic construct
  source 1..20: mol_type = other DNA
tatctgagaaatgaagatct

SEQ ID NO: 51313 - DNA, 20 bp, synthetic construct
  source 1..20: mol_type = other DNA
ttatctgagaaatgaagatc

SEQ ID NO: 51314 - DNA, 20 bp, synthetic construct
  source 1..20: mol_type = other DNA
attatctgagaaatgaagat

SEQ ID NO: 51315 - DNA, 20 bp, synthetic construct
  source 1..20: mol_type = other DNA
aattatctgagaaatgaaga

SEQ ID NO: 51316 - DNA, 20 bp, synthetic construct
  source 1..20: mol_type = other DNA
aaattatctgagaaatgaag

SEQ ID NO: 51317 - DNA, 20 bp, synthetic construct
  source 1..20: mol_type = other DNA
aaaattatctgagaaatgaa

SEQ ID NO: 51318 - DNA, 20 bp, synthetic construct
  source 1..20: mol_type = other DNA
taaaattatctgagaaatga

SEQ ID NO: 51319 - DNA, 20 bp, synthetic construct
  source 1..20: mol_type = other DNA
ctaaaattatctgagaaatg

SEQ ID NO: 51320 - DNA, 20 bp, synthetic construct
  source 1..20: mol_type = other DNA
actaaaattatctgagaaat

SEQ ID NO: 51321 - DNA, 20 bp, synthetic construct
  source 1..20: mol_type = other DNA
aactaaaattatctgagaaa

SEQ ID NO: 51322 - DNA, 20 bp, synthetic construct
  source 1..20: mol_type = other DNA
gaactaaaattatctgagaa

SEQ ID NO: 51323 - DNA, 20 bp, synthetic construct
  source 1..20: mol_type = other DNA
tgaactaaaattatctgaga

SEQ ID NO: 51324 - DNA, 20 bp, synthetic construct
  source 1..20: mol_type = other DNA
atgaactaaaattatctgag

SEQ ID NO: 51325 - DNA, 20 bp, synthetic construct
  source 1..20: mol_type = other DNA
aatgaactaaaattatctga

SEQ ID NO: 51326 - DNA, 20 bp, synthetic construct
  source 1..20: mol_type = other DNA
taatgaactaaaattatctg

SEQ ID NO: 51327 - DNA, 20 bp, synthetic construct
  source 1..20: mol_type = other DNA
ataatgaactaaaattatct

SEQ ID NO: 51328 - DNA, 20 bp, synthetic construct
  source 1..20: mol_type = other DNA
tataatgaactaaaattatc

SEQ ID NO: 51329 - DNA, 20 bp, synthetic construct
  source 1..20: mol_type = other DNA
ctataatgaactaaaattat

SEQ ID NO: 51330 - DNA, 20 bp, synthetic construct
  source 1..20: mol_type = other DNA
tctataatgaactaaaatta

SEQ ID NO: 51331 - DNA, 20 bp, synthetic construct
  source 1..20: mol_type = other DNA
ttctataatgaactaaaatt

SEQ ID NO: 51332 - DNA, 20 bp, synthetic construct
  source 1..20: mol_type = other DNA
tttctataatgaactaaaat

SEQ ID NO: 51333 - DNA, 20 bp, synthetic construct
  source 1..20: mol_type = other DNA
ctttctataatgaactaaaa

SEQ ID NO: 51334 - DNA, 20 bp, synthetic construct
  source 1..20: mol_type = other DNA
cctttctataatgaactaaa

SEQ ID NO: 51335 - DNA, 20 bp, synthetic construct
  source 1..20: mol_type = other DNA
gcctttctataatgaactaa

SEQ ID NO: 51336 - DNA, 20 bp, synthetic construct
  source 1..20: mol_type = other DNA
tgcctttctataatgaacta

SEQ ID NO: 51337 - DNA, 20 bp, synthetic construct
  source 1..20: mol_type = other DNA
ttgcctttctataatgaact

SEQ ID NO: 51338 - DNA, 20 bp, synthetic construct
  source 1..20: mol_type = other DNA
cttgcctttctataatgaac

SEQ ID NO: 51339 - DNA, 20 bp, synthetic construct
  source 1..20: mol_type = other DNA
tcttgcctttctataatgaa

SEQ ID NO: 51340 - DNA, 20 bp, synthetic construct
  source 1..20: mol_type = other DNA
ttcttgcctttctataatga

SEQ ID NO: 51341 - DNA, 20 bp, synthetic construct
  source 1..20: mol_type = other DNA
tttcttgcctttctataatg

SEQ ID NO: 51342 - DNA, 20 bp, synthetic construct
  source 1..20: mol_type = other DNA
ttttcttgcctttctataat

SEQ ID NO: 51343 - DNA, 20 bp, synthetic construct
  source 1..20: mol_type = other DNA
attttcttgcctttctataa

SEQ ID NO: 51344 - DNA, 20 bp, synthetic construct
  source 1..20: mol_type = other DNA
tattttcttgcctttctata

SEQ ID NO: 51345 - DNA, 20 bp, synthetic construct
  source 1..20: mol_type = other DNA
gtattttcttgcctttctat

SEQ ID NO: 51346 - DNA, 20 bp, synthetic construct
  source 1..20: mol_type = other DNA
tgtattttcttgcctttcta

SEQ ID NO: 51347 - DNA, 20 bp, synthetic construct
  source 1..20: mol_type = other DNA
ctgtattttcttgcctttct

SEQ ID NO: 51348 - DNA, 20 bp, synthetic construct
  source 1..20: mol_type = other DNA
tctgtattttcttgcctttc

SEQ ID NO: 51349 - DNA, 20 bp, synthetic construct
  source 1..20: mol_type = other DNA
atctgtattttcttgccttt

SEQ ID NO: 51350 - DNA, 20 bp, synthetic construct
  source 1..20: mol_type = other DNA
gatctgtattttcttgcctt

SEQ ID NO: 51351 - DNA, 20 bp, synthetic construct
  source 1..20: mol_type = other DNA
tgatctgtattttcttgcct

SEQ ID NO: 51352 - DNA, 20 bp, synthetic construct
  source 1..20: mol_type = other DNA
ctgatctgtattttcttgcc

SEQ ID NO: 51353 - DNA, 20 bp, synthetic construct
  source 1..20: mol_type = other DNA
tctgatctgtattttcttgc

SEQ ID NO: 51354 - DNA, 20 bp, synthetic construct
  source 1..20: mol_type = other DNA
ctctgatctgtattttcttg

SEQ ID NO: 51355 - DNA, 20 bp, synthetic construct
  source 1..20: mol_type = other DNA
actctgatctgtattttctt

SEQ ID NO: 51356 - DNA, 20 bp, synthetic construct
  source 1..20: mol_type = other DNA
cactctgatctgtattttct

SEQ ID NO: 51357 - DNA, 20 bp, synthetic construct
  source 1..20: mol_type = other DNA
tcactctgatctgtattttc

SEQ ID NO: 51358 - DNA, 20 bp, synthetic construct
  source 1..20: mol_type = other DNA
gtcactctgatctgtatttt

SEQ ID NO: 51359 - DNA, 20 bp, synthetic construct
  source 1..20: mol_type = other DNA
tgtcactctgatctgtattt

SEQ ID NO: 51360 - DNA, 20 bp, synthetic construct
  source 1..20: mol_type = other DNA
ttgtcactctgatctgtatt

SEQ ID NO: 51361 - DNA, 20 bp, synthetic construct
  source 1..20: mol_type = other DNA
gttgtcactctgatctgtat

SEQ ID NO: 51362 - DNA, 20 bp, synthetic construct
  source 1..20: mol_type = other DNA
agttgtcactctgatctgta

SEQ ID NO: 51363 - DNA, 20 bp, synthetic construct
  source 1..20: mol_type = other DNA
aagttgtcactctgatctgt

SEQ ID NO: 51364 - DNA, 20 bp, synthetic construct
  source 1..20: mol_type = other DNA
aaagttgtcactctgatctg

SEQ ID NO: 51365 - DNA, 20 bp, synthetic construct
  source 1..20: mol_type = other DNA
caaagttgtcactctgatct

SEQ ID NO: 51366 - DNA, 20 bp, synthetic construct
  source 1..20: mol_type = other DNA
tcaaagttgtcactctgatc

SEQ ID NO: 51367 - DNA, 20 bp, synthetic construct
  source 1..20: mol_type = other DNA
ttcaaagttgtcactctgat

SEQ ID NO: 51368 - DNA, 20 bp, synthetic construct
  source 1..20: mol_type = other DNA
tttcaaagttgtcactctga

SEQ ID NO: 51369 - DNA, 20 bp, synthetic construct
  source 1..20: mol_type = other DNA
ttttcaaagttgtcactctg

SEQ ID NO: 51370 - DNA, 20 bp, synthetic construct
  source 1..20: mol_type = other DNA
attttcaaagttgtcactct

SEQ ID NO: 51371 - DNA, 20 bp, synthetic construct
  source 1..20: mol_type = other DNA
gattttcaaagttgtcactc

SEQ ID NO: 51372 - DNA, 20 bp, synthetic construct
  source 1..20: mol_type = other DNA
agattttcaaagttgtcact

SEQ ID NO: 51373 - DNA, 20 bp, synthetic construct
  source 1..20: mol_type = other DNA
gagattttcaaagttgtcac

SEQ ID NO: 51374 - DNA, 20 bp, synthetic construct
  source 1..20: mol_type = other DNA
tgagattttcaaagttgtca

SEQ ID NO: 51375 - DNA, 20 bp, synthetic construct
  source 1..20: mol_type = other DNA
gtgagattttcaaagttgtc

SEQ ID NO: 51376 - DNA, 20 bp, synthetic construct
  source 1..20: mol_type = other DNA
agtgagattttcaaagttgt

SEQ ID NO: 51377 - DNA, 20 bp, synthetic construct
  source 1..20: mol_type = other DNA
gagtgagattttcaaagttg

SEQ ID NO: 51378 - DNA, 20 bp, synthetic construct
  source 1..20: mol_type = other DNA
agagtgagattttcaaagtt

SEQ ID NO: 51379 - DNA, 20 bp, synthetic construct
  source 1..20: mol_type = other DNA
tagagtgagattttcaaagt

SEQ ID NO: 51380 - DNA, 20 bp, synthetic construct
  source 1..20: mol_type = other DNA
gtagagtgagattttcaaag

SEQ ID NO: 51381 - DNA, 20 bp, synthetic construct
  source 1..20: mol_type = other DNA
agtagagtgagattttcaaa

SEQ ID NO: 51382 - DNA, 20 bp, synthetic construct
  source 1..20: mol_type = other DNA
gagtagagtgagattttcaa

SEQ ID NO: 51383 - DNA, 20 bp, synthetic construct
  source 1..20: mol_type = other DNA
tgagtagagtgagattttca

SEQ ID NO: 51384 - DNA, 20 bp, synthetic construct
  source 1..20: mol_type = other DNA
atgagtagagtgagattttc

SEQ ID NO: 51385 - DNA, 20 bp, synthetic construct
  source 1..20: mol_type = other DNA
tatgagtagagtgagatttt

SEQ ID NO: 51386 - DNA, 20 bp, synthetic construct
  source 1..20: mol_type = other DNA
ttatgagtagagtgagattt

SEQ ID NO: 51387 - DNA, 20 bp, synthetic construct
  source 1..20: mol_type = other DNA
cttatgagtagagtgagatt

SEQ ID NO: 51388 - DNA, 20 bp, synthetic construct
  source 1..20: mol_type = other DNA
ccttatgagtagagtgagat

SEQ ID NO: 51389 - DNA, 20 bp, synthetic construct
  source 1..20: mol_type = other DNA
cccttatgagtagagtgaga

SEQ ID NO: 51390 - DNA, 20 bp, synthetic construct
  source 1..20: mol_type = other DNA
ccccttatgagtagagtgag

SEQ ID NO: 51391 - DNA, 20 bp, synthetic construct
  source 1..20: mol_type = other DNA
tccccttatgagtagagtga

SEQ ID NO: 51392 - DNA, 20 bp, synthetic construct
  source 1..20: mol_type = other DNA
atccccttatgagtagagtg

SEQ ID NO: 51393 - DNA, 20 bp, synthetic construct
  source 1..20: mol_type = other DNA
catccccttatgagtagagt

SEQ ID NO: 51394 - DNA, 20 bp, synthetic construct
  source 1..20: mol_type = other DNA
ccatccccttatgagtagag

SEQ ID NO: 51395 - DNA, 20 bp, synthetic construct
  source 1..20: mol_type = other DNA
cccatccccttatgagtaga

SEQ ID NO: 51396 - DNA, 20 bp, synthetic construct
  source 1..20: mol_type = other DNA
acccatccccttatgagtag

SEQ ID NO: 51397 - DNA, 20 bp, synthetic construct
  source 1..20: mol_type = other DNA
cacccatccccttatgagta

SEQ ID NO: 51398 - DNA, 20 bp, synthetic construct
  source 1..20: mol_type = other DNA
acacccatccccttatgagt

SEQ ID NO: 51399 - DNA, 20 bp, synthetic construct
  source 1..20: mol_type = other DNA
tacacccatccccttatgag

SEQ ID NO: 51400 - DNA, 20 bp, synthetic construct
  source 1..20: mol_type = other DNA
atacacccatccccttatga

SEQ ID NO: 51401 - DNA, 20 bp, synthetic construct
  source 1..20: mol_type = other DNA
aatacacccatccccttatg

SEQ ID NO: 51402 - DNA, 20 bp, synthetic construct
  source 1..20: mol_type = other DNA
aaatacacccatccccttat

SEQ ID NO: 51403 - DNA, 20 bp, synthetic construct
  source 1..20: mol_type = other DNA
aaaatacacccatcccctta

SEQ ID NO: 51404 - DNA, 20 bp, synthetic construct
  source 1..20: mol_type = other DNA
caaaatacacccatcccctt

SEQ ID NO: 51405 - DNA, 20 bp, synthetic construct
  source 1..20: mol_type = other DNA
gcaaaatacacccatcccct

SEQ ID NO: 51406 - DNA, 20 bp, synthetic construct
  source 1..20: mol_type = other DNA
agcaaaatacacccatcccc

SEQ ID NO: 51407 - DNA, 20 bp, synthetic construct
  source 1..20: mol_type = other DNA
tagcaaaatacacccatccc

SEQ ID NO: 51408 - DNA, 20 bp, synthetic construct
  source 1..20: mol_type = other DNA
atagcaaaatacacccatcc

SEQ ID NO: 51409 - DNA, 20 bp, synthetic construct
  source 1..20: mol_type = other DNA
tatagcaaaatacacccatc

SEQ ID NO: 51410 - DNA, 20 bp, synthetic construct
  source 1..20: mol_type = other DNA
atatagcaaaatacacccat

SEQ ID NO: 51411 - DNA, 20 bp, synthetic construct
  source 1..20: mol_type = other DNA
tatatagcaaaatacaccca

SEQ ID NO: 51412 - DNA, 20 bp, synthetic construct
  source 1..20: mol_type = other DNA
atatatagcaaaatacaccc

SEQ ID NO: 51413 - DNA, 20 bp, synthetic construct
  source 1..20: mol_type = other DNA
aatatatagcaaaatacacc

SEQ ID NO: 51414 - DNA, 20 bp, synthetic construct
  source 1..20: mol_type = other DNA
taatatatagcaaaatacac

SEQ ID NO: 51415 - DNA, 20 bp, synthetic construct
  source 1..20: mol_type = other DNA
gtaatatatagcaaaataca

SEQ ID NO: 51416 - DNA, 20 bp, synthetic construct
  source 1..20: mol_type = other DNA
tgtaatatatagcaaaatac

SEQ ID NO: 51417 - DNA, 20 bp, synthetic construct
  source 1..20: mol_type = other DNA
ttgtaatatatagcaaaata

SEQ ID NO: 51418 - DNA, 20 bp, synthetic construct
  source 1..20: mol_type = other DNA
tttgtaatatatagcaaaat

SEQ ID NO: 51419 - DNA, 20 bp, synthetic construct
  source 1..20: mol_type = other DNA
ttttgtaatatatagcaaaa

SEQ ID NO: 51420 - DNA, 20 bp, synthetic construct
  source 1..20: mol_type = other DNA
attttgtaatatatagcaaa

SEQ ID NO: 51421 - DNA, 20 bp, synthetic construct
  source 1..20: mol_type = other DNA
aattttgtaatatatagcaa

SEQ ID NO: 51422 - DNA, 20 bp, synthetic construct
  source 1..20: mol_type = other DNA
taattttgtaatatatagca

SEQ ID NO: 51423 - DNA, 20 bp, synthetic construct
  source 1..20: mol_type = other DNA
ctaattttgtaatatatagc

SEQ ID NO: 51424 - DNA, 20 bp, synthetic construct
  source 1..20: mol_type = other DNA
actaattttgtaatatatag

SEQ ID NO: 51425 - DNA, 20 bp, synthetic construct
  source 1..20: mol_type = other DNA
aactaattttgtaatatata

SEQ ID NO: 51426 - DNA, 20 bp, synthetic construct
  source 1..20: mol_type = other DNA
aaactaattttgtaatatat

SEQ ID NO: 51427 - DNA, 20 bp, synthetic construct
  source 1..20: mol_type = other DNA
aaaactaattttgtaatata

SEQ ID NO: 51428 - DNA, 20 bp, synthetic construct
  source 1..20: mol_type = other DNA
gaaaactaattttgtaatat

SEQ ID NO: 51429 - DNA, 20 bp, synthetic construct
  source 1..20: mol_type = other DNA
agaaaactaattttgtaata

SEQ ID NO: 51430 - DNA, 20 bp, synthetic construct
  source 1..20: mol_type = other DNA
aagaaaactaattttgtaat

SEQ ID NO: 51431 - DNA, 20 bp, synthetic construct
  source 1..20: mol_type = other DNA
caagaaaactaattttgtaa

SEQ ID NO: 51432 - DNA, 20 bp, synthetic construct
  source 1..20: mol_type = other DNA
tcaagaaaactaattttgta

SEQ ID NO: 51433 - DNA, 20 bp, synthetic construct
  source 1..20: mol_type = other DNA
atcaagaaaactaattttgt

SEQ ID NO: 51434 - DNA, 20 bp, synthetic construct
  source 1..20: mol_type = other DNA
catcaagaaaactaattttg

SEQ ID NO: 51435 - DNA, 20 bp, synthetic construct
  source 1..20: mol_type = other DNA
tcatcaagaaaactaatttt

SEQ ID NO: 51436 - DNA, 20 bp, synthetic construct
  source 1..20: mol_type = other DNA
ctcatcaagaaaactaattt

SEQ ID NO: 51437 - DNA, 20 bp, synthetic construct
  source 1..20: mol_type = other DNA
cctcatcaagaaaactaatt

SEQ ID NO: 51438 - DNA, 20 bp, synthetic construct
  source 1..20: mol_type = other DNA
tcctcatcaagaaaactaat

SEQ ID NO: 51439 - DNA, 20 bp, synthetic construct
  source 1..20: mol_type = other DNA
gtcctcatcaagaaaactaa

SEQ ID NO: 51440 - DNA, 20 bp, synthetic construct
  source 1..20: mol_type = other DNA
tgtcctcatcaagaaaacta

SEQ ID NO: 51441 - DNA, 20 bp, synthetic construct
  source 1..20: mol_type = other DNA
atgtcctcatcaagaaaact

SEQ ID NO: 51442 - DNA, 20 bp, synthetic construct
  source 1..20: mol_type = other DNA
gatgtcctcatcaagaaaac

SEQ ID NO: 51443 - DNA, 20 bp, synthetic construct
  source 1..20: mol_type = other DNA
ggatgtcctcatcaagaaaa

SEQ ID NO: 51444 - DNA, 20 bp, synthetic construct
  source 1..20: mol_type = other DNA
tggatgtcctcatcaagaaa

SEQ ID NO: 51445 - DNA, 20 bp, synthetic construct
  source 1..20: mol_type = other DNA
gtggatgtcctcatcaagaa

SEQ ID NO: 51446 - DNA, 20 bp, synthetic construct
  source 1..20: mol_type = other DNA
agtggatgtcctcatcaaga

SEQ ID NO: 51447 - DNA, 20 bp, synthetic construct
  source 1..20: mol_type = other DNA
tagtggatgtcctcatcaag

SEQ ID NO: 51448 - DNA, 20 bp, synthetic construct
  source 1..20: mol_type = other DNA
atagtggatgtcctcatcaa

SEQ ID NO: 51449 - DNA, 20 bp, synthetic construct
  source 1..20: mol_type = other DNA
aatagtggatgtcctcatca

SEQ ID NO: 51450 - DNA, 20 bp, synthetic construct
  source 1..20: mol_type = other DNA
caatagtggatgtcctcatc

SEQ ID NO: 51451 - DNA, 20 bp, synthetic construct
  source 1..20: mol_type = other DNA
ccaatagtggatgtcctcat

SEQ ID NO: 51452 - DNA, 20 bp, synthetic construct
  source 1..20: mol_type = other DNA
tccaatagtggatgtcctca

SEQ ID NO: 51453 - DNA, 20 bp, synthetic construct
  source 1..20: mol_type = other DNA
ctccaatagtggatgtcctc

SEQ ID NO: 51454 - DNA, 20 bp, synthetic construct
  source 1..20: mol_type = other DNA
actccaatagtggatgtcct

SEQ ID NO: 51455 - DNA, 20 bp, synthetic construct
  source 1..20: mol_type = other DNA
tactccaatagtggatgtcc

SEQ ID NO: 51456 - DNA, 20 bp, synthetic construct
  source 1..20: mol_type = other DNA
ttactccaatagtggatgtc

SEQ ID NO: 51457 - DNA, 20 bp, synthetic construct
  source 1..20: mol_type = other DNA
attactccaatagtggatgt

SEQ ID NO: 51458 - DNA, 20 bp, synthetic construct
  source 1..20: mol_type = other DNA
aattactccaatagtggatg

SEQ ID NO: 51459 - DNA, 20 bp, synthetic construct
  source 1..20: mol_type = other DNA
aaattactccaatagtggat

SEQ ID NO: 51460 - DNA, 20 bp, synthetic construct
  source 1..20: mol_type = other DNA
gaaattactccaatagtgga

SEQ ID NO: 51461 - DNA, 20 bp, synthetic construct
  source 1..20: mol_type = other DNA
tgaaattactccaatagtgg

SEQ ID NO: 51462 - DNA, 20 bp, synthetic construct
  source 1..20: mol_type = other DNA
ctgaaattactccaatagtg

SEQ ID NO: 51463 - DNA, 20 bp, synthetic construct
  source 1..20: mol_type = other DNA
cctgaaattactccaatagt

SEQ ID NO: 51464 - DNA, 20 bp, synthetic construct
  source 1..20: mol_type = other DNA
acctgaaattactccaatag

SEQ ID NO: 51465 - DNA, 20 bp, synthetic construct
  source 1..20: mol_type = other DNA
tacctgaaattactccaata

SEQ ID NO: 51466 - DNA, 20 bp, synthetic construct
  source 1..20: mol_type = other DNA
atacctgaaattactccaat

SEQ ID NO: 51467 - DNA, 20 bp, synthetic construct
  source 1..20: mol_type = other DNA
gatacctgaaattactccaa

SEQ ID NO: 51468 - DNA, 20 bp, synthetic construct
  source 1..20: mol_type = other DNA
agatacctgaaattactcca

SEQ ID NO: 51469 - DNA, 20 bp, synthetic construct
  source 1..20: mol_type = other DNA
aagatacctgaaattactcc

SEQ ID NO: 51470 - DNA, 20 bp, synthetic construct
  source 1..20: mol_type = other DNA
taagatacctgaaattactc

SEQ ID NO: 51471 - DNA, 20 bp, synthetic construct
  source 1..20: mol_type = other DNA
ataagatacctgaaattact

SEQ ID NO: 51472 - DNA, 20 bp, synthetic construct
  source 1..20: mol_type = other DNA
aataagatacctgaaattac

SEQ ID NO: 51473 - DNA, 20 bp, synthetic construct
  source 1..20: mol_type = other DNA
aaataagatacctgaaatta

SEQ ID NO: 51474 - DNA, 20 bp, synthetic construct
  source 1..20: mol_type = other DNA
aaaataagatacctgaaatt

SEQ ID NO: 51475 - DNA, 20 bp, synthetic construct
  source 1..20: mol_type = other DNA
aaaaataagatacctgaaat

SEQ ID NO: 51476 - DNA, 20 bp, synthetic construct
  source 1..20: mol_type = other DNA
aaaaaataagatacctgaaa

SEQ ID NO: 51477 - DNA, 20 bp, synthetic construct
  source 1..20: mol_type = other DNA
gaaaaaataagatacctgaa

SEQ ID NO: 51478 - DNA, 20 bp, synthetic construct
  source 1..20: mol_type = other DNA
agaaaaaataagatacctga

SEQ ID NO: 51479 - DNA, 20 bp, synthetic construct
  source 1..20: mol_type = other DNA
aagaaaaaataagatacctg

SEQ ID NO: 51480 - DNA, 20 bp, synthetic construct
  source 1..20: mol_type = other DNA
aaagaaaaaataagatacct

SEQ ID NO: 51481 - DNA, 20 bp, synthetic construct
  source 1..20: mol_type = other DNA
aaaagaaaaaataagatacc

SEQ ID NO: 51482 - DNA, 20 bp, synthetic construct
  source 1..20: mol_type = other DNA
gaaaagaaaaaataagatac

SEQ ID NO: 51483 - DNA, 20 bp, synthetic construct
  source 1..20: mol_type = other DNA
agaaaagaaaaaataagata

SEQ ID NO: 51484 - DNA, 20 bp, synthetic construct
  source 1..20: mol_type = other DNA
gagaaaagaaaaaataagat

SEQ ID NO: 51485 - DNA, 20 bp, synthetic construct
  source 1..20: mol_type = other DNA
agagaaaagaaaaaataaga

SEQ ID NO: 51486 - DNA, 20 bp, synthetic construct
  source 1..20: mol_type = other DNA
gagagaaaagaaaaaataag

SEQ ID NO: 51487 - DNA, 20 bp, synthetic construct
  source 1..20: mol_type = other DNA
agagagaaaagaaaaaataa

SEQ ID NO: 51488 - DNA, 20 bp, synthetic construct
  source 1..20: mol_type = other DNA
gagagagaaaagaaaaaata

SEQ ID NO: 51489 - DNA, 20 bp, synthetic construct
  source 1..20: mol_type = other DNA
agagagagaaaagaaaaaat

SEQ ID NO: 51490 - DNA, 20 bp, synthetic construct
  source 1..20: mol_type = other DNA
aagagagagaaaagaaaaaa

SEQ ID NO: 51491 - DNA, 20 bp, synthetic construct
  source 1..20: mol_type = other DNA
aaagagagagaaaagaaaaa

SEQ ID NO: 51492 - DNA, 20 bp, synthetic construct
  source 1..20: mol_type = other DNA
aaaagagagagaaaagaaaa

SEQ ID NO: 51493 - DNA, 20 bp, synthetic construct
  source 1..20: mol_type = other DNA
aaaaagagagagaaaagaaa

SEQ ID NO: 51494 - DNA, 20 bp, synthetic construct
  source 1..20: mol_type = other DNA
aaaaaagagagagaaaagaa

SEQ ID NO: 51495 - DNA, 20 bp, synthetic construct
  source 1..20: mol_type = other DNA
aaaaaaagagagagaaaaga

SEQ ID NO: 51496 - DNA, 20 bp, synthetic construct
  source 1..20: mol_type = other DNA
aaaaaaaagagagagaaaag

SEQ ID NO: 51497 - DNA, 20 bp, synthetic construct
  source 1..20: mol_type = other DNA
aaaaaaaaagagagagaaaa

SEQ ID NO: 51498 - DNA, 20 bp, synthetic construct
  source 1..20: mol_type = other DNA
aaaaaaaaaagagagagaaa

SEQ ID NO: 51499 - DNA, 20 bp, synthetic construct
  source 1..20: mol_type = other DNA
aaaaaaaaaaagagagagaa

SEQ ID NO: 51500 - DNA, 20 bp, synthetic construct
  source 1..20: mol_type = other DNA
aaaaaaaaaaaagagagaga

SEQ ID NO: 51501 - DNA, 20 bp, synthetic construct
  source 1..20: mol_type = other DNA
aaaaaaaaaaaaagagagag

SEQ ID NO: 51502 - DNA, 20 bp, synthetic construct
  source 1..20: mol_type = other DNA
aaaaaaaaaaaaaagagaga

SEQ ID NO: 51503 - DNA, 20 bp, synthetic construct
  source 1..20: mol_type = other DNA
aaaaaaaaaaaaaaagagag

SEQ ID NO: 51504 - DNA, 20 bp, synthetic construct
  source 1..20: mol_type = other DNA
aaaaaaaaaaaaaaaagaga

SEQ ID NO: 51505 - DNA, 20 bp, synthetic construct
  source 1..20: mol_type = other DNA
aaaaaaaaaaaaaaaaagag

SEQ ID NO: 51506 - DNA, 20 bp, synthetic construct
  source 1..20: mol_type = other DNA
caaaaaaaaaaaaaaaaaga

SEQ ID NO: 51507 - DNA, 20 bp, synthetic construct
  source 1..20: mol_type = other DNA
ccaaaaaaaaaaaaaaaaag

SEQ ID NO: 51508 - DNA, 20 bp, synthetic construct
  source 1..20: mol_type = other DNA
tccaaaaaaaaaaaaaaaaa

SEQ ID NO: 51509 - DNA, 20 bp, synthetic construct
  source 1..20: mol_type = other DNA
ctccaaaaaaaaaaaaaaaa

SEQ ID NO: 51510 - DNA, 20 bp, synthetic construct
  source 1..20: mol_type = other DNA
tctccaaaaaaaaaaaaaaa

SEQ ID NO: 51511 - DNA, 20 bp, synthetic construct
  source 1..20: mol_type = other DNA
gtctccaaaaaaaaaaaaaa

SEQ ID NO: 51512 - DNA, 20 bp, synthetic construct
  source 1..20: mol_type = other DNA
cgtctccaaaaaaaaaaaaa

SEQ ID NO: 51513 - DNA, 20 bp, synthetic construct
  source 1..20: mol_type = other DNA
ccgtctccaaaaaaaaaaaa

SEQ ID NO: 51514 - DNA, 20 bp, synthetic construct
  source 1..20: mol_type = other DNA
tccgtctccaaaaaaaaaaa

SEQ ID NO: 51515 - DNA, 20 bp, synthetic construct
  source 1..20: mol_type = other DNA
ctccgtctccaaaaaaaaaa

SEQ ID NO: 51516 - DNA, 20 bp, synthetic construct
  source 1..20: mol_type = other DNA
actccgtctccaaaaaaaaa

SEQ ID NO: 51517 - DNA, 20 bp, synthetic construct
  source 1..20: mol_type = other DNA
aactccgtctccaaaaaaaa

SEQ ID NO: 51518 - DNA, 20 bp, synthetic construct
  source 1..20: mol_type = other DNA
aaactccgtctccaaaaaaa

SEQ ID NO: 51519 - DNA, 20 bp, synthetic construct
  source 1..20: mol_type = other DNA
gaaactccgtctccaaaaaa

SEQ ID NO: 51520 - DNA, 20 bp, synthetic construct
  source 1..20: mol_type = other DNA
cgaaactccgtctccaaaaa

SEQ ID NO: 51521 - DNA, 20 bp, synthetic construct
  source 1..20: mol_type = other DNA
gcgaaactccgtctccaaaa

SEQ ID NO: 51522 - DNA, 20 bp, synthetic construct
  source 1..20: mol_type = other DNA
agcgaaactccgtctccaaa

SEQ ID NO: 51523 - DNA, 20 bp, synthetic construct
  source 1..20: mol_type = other DNA
gagcgaaactccgtctccaa

SEQ ID NO: 51524 - DNA, 20 bp, synthetic construct
  source 1..20: mol_type = other DNA
agagcgaaactccgtctcca

SEQ ID NO: 51525 - DNA, 20 bp, synthetic construct
  source 1..20: mol_type = other DNA
cagagcgaaactccgtctcc

SEQ ID NO: 51526 - DNA, 20 bp, synthetic construct
  source 1..20: mol_type = other DNA
acagagcgaaactccgtctc

SEQ ID NO: 51527 - DNA, 20 bp, synthetic construct
  source 1..20: mol_type = other DNA
aacagagcgaaactccgtct

SEQ ID NO: 51528 - DNA, 20 bp, synthetic construct
  source 1..20: mol_type = other DNA
caacagagcgaaactccgtc

SEQ ID NO: 51529 - DNA, 20 bp, synthetic construct
  source 1..20: mol_type = other DNA
gcaacagagcgaaactccgt

SEQ ID NO: 51530 - DNA, 20 bp, synthetic construct
  source 1..20: mol_type = other DNA
ggcaacagagcgaaactccg

SEQ ID NO: 51531 - DNA, 20 bp, synthetic construct
  source 1..20: mol_type = other DNA
gggcaacagagcgaaactcc

SEQ ID NO: 51532 - DNA, 20 bp, synthetic construct
  source 1..20: mol_type = other DNA
tgggcaacagagcgaaactc

SEQ ID NO: 51533 - DNA, 20 bp, synthetic construct
  source 1..20: mol_type = other DNA
ctgggcaacagagcgaaact

SEQ ID NO: 51534 - DNA, 20 bp, synthetic construct
  source 1..20: mol_type = other DNA
cctgggcaacagagcgaaac

SEQ ID NO: 51535 - DNA, 20 bp, synthetic construct
  source 1..20: mol_type = other DNA
gcctgggcaacagagcgaaa

SEQ ID NO: 51536 - DNA, 20 bp, synthetic construct
  source 1..20: mol_type = other DNA
agcctgggcaacagagcgaa

SEQ ID NO: 51537 - DNA, 20 bp, synthetic construct
  source 1..20: mol_type = other DNA
cagcctgggcaacagagcga

SEQ ID NO: 51538 - DNA, 20 bp, synthetic construct
  source 1..20: mol_type = other DNA
ccagcctgggcaacagagcg

SEQ ID NO: 51539 - DNA, 20 bp, synthetic construct
  source 1..20: mol_type = other DNA
tccagcctgggcaacagagc

SEQ ID NO: 51540 - DNA, 20 bp, synthetic construct
  source 1..20: mol_type = other DNA
ctccagcctgggcaacagag

SEQ ID NO: 51541 - DNA, 20 bp, synthetic construct
  source 1..20: mol_type = other DNA
actccagcctgggcaacaga

SEQ ID NO: 51542 - DNA, 20 bp, synthetic construct
  source 1..20: mol_type = other DNA
cactccagcctgggcaacag

SEQ ID NO: 51543 - DNA, 20 bp, synthetic construct
  source 1..20: mol_type = other DNA
gcactccagcctgggcaaca

SEQ ID NO: 51544 - DNA, 20 bp, synthetic construct
  source 1..20: mol_type = other DNA
tgcactccagcctgggcaac

SEQ ID NO: 51545 - DNA, 20 bp, synthetic construct
  source 1..20: mol_type = other DNA
ctgcactccagcctgggcaa

SEQ ID NO: 51546 - DNA, 20 bp, synthetic construct
  source 1..20: mol_type = other DNA
actgcactccagcctgggca

SEQ ID NO: 51547 - DNA, 20 bp, synthetic construct
  source 1..20: mol_type = other DNA
cactgcactccagcctgggc

SEQ ID NO: 51548 - DNA, 20 bp, synthetic construct
  source 1..20: mol_type = other DNA
ccactgcactccagcctggg

SEQ ID NO: 51549 - DNA, 20 bp, synthetic construct
  source 1..20: mol_type = other DNA
gccactgcactccagcctgg

SEQ ID NO: 51550 - DNA, 20 bp, synthetic construct
  source 1..20: mol_type = other DNA
ggccactgcactccagcctg

SEQ ID NO: 51551 - DNA, 20 bp, synthetic construct
  source 1..20: mol_type = other DNA
aggccactgcactccagcct

SEQ ID NO: 51552 - DNA, 20 bp, synthetic construct
  source 1..20: mol_type = other DNA
caggccactgcactccagcc

SEQ ID NO: 51553 - DNA, 20 bp, synthetic construct
  source 1..20: mol_type = other DNA
tcaggccactgcactccagc

SEQ ID NO: 51554 - DNA, 20 bp, synthetic construct
  source 1..20: mol_type = other DNA
atcaggccactgcactccag

SEQ ID NO: 51555 - DNA, 20 bp, synthetic construct
  source 1..20: mol_type = other DNA
gatcaggccactgcactcca

SEQ ID NO: 51556 - DNA, 20 bp, synthetic construct
  source 1..20: mol_type = other DNA
agatcaggccactgcactcc

SEQ ID NO: 51557 - DNA, 20 bp, synthetic construct
  source 1..20: mol_type = other DNA
gagatcaggccactgcactc

SEQ ID NO: 51558 - DNA, 20 bp, synthetic construct
  source 1..20: mol_type = other DNA
cgagatcaggccactgcact

SEQ ID NO: 51559 - DNA, 20 bp, synthetic construct
  source 1..20: mol_type = other DNA
ccgagatcaggccactgcac

SEQ ID NO: 51560 - DNA, 20 bp, synthetic construct
  source 1..20: mol_type = other DNA
gccgagatcaggccactgca

SEQ ID NO: 51561 - DNA, 20 bp, synthetic construct
  source 1..20: mol_type = other DNA
agccgagatcaggccactgc

SEQ ID NO: 51562 - DNA, 20 bp, synthetic construct
  source 1..20: mol_type = other DNA
gagccgagatcaggccactg

SEQ ID NO: 51563 - DNA, 20 bp, synthetic construct
  source 1..20: mol_type = other DNA
tgagccgagatcaggccact

SEQ ID NO: 51564 - DNA, 20 bp, synthetic construct
  source 1..20: mol_type = other DNA
gtgagccgagatcaggccac

SEQ ID NO: 51565 - DNA, 20 bp, synthetic construct
  source 1..20: mol_type = other DNA
ggtgagccgagatcaggcca

SEQ ID NO: 51566 - DNA, 20 bp, synthetic construct
  source 1..20: mol_type = other DNA
cggtgagccgagatcaggcc

SEQ ID NO: 51567 - DNA, 20 bp, synthetic construct
  source 1..20: mol_type = other DNA
gcggtgagccgagatcaggc

SEQ ID NO: 51568 - DNA, 20 bp, synthetic construct
  source 1..20: mol_type = other DNA
tgcggtgagccgagatcagg

SEQ ID NO: 51569 - DNA, 20 bp, synthetic construct
  source 1..20: mol_type = other DNA
ttgcggtgagccgagatcag

SEQ ID NO: 51570 - DNA, 20 bp, synthetic construct
  source 1..20: mol_type = other DNA
gttgcggtgagccgagatca

SEQ ID NO: 51571 - DNA, 20 bp, synthetic construct
  source 1..20: mol_type = other DNA
ggttgcggtgagccgagatc

SEQ ID NO: 51572 - DNA, 20 bp, synthetic construct
  source 1..20: mol_type = other DNA
aggttgcggtgagccgagat

SEQ ID NO: 51573 - DNA, 20 bp, synthetic construct
  source 1..20: mol_type = other DNA
gaggttgcggtgagccgaga

SEQ ID NO: 51574 - DNA, 20 bp, synthetic construct
  source 1..20: mol_type = other DNA
agaggttgcggtgagccgag

SEQ ID NO: 51575 - DNA, 20 bp, synthetic construct
  source 1..20: mol_type = other DNA
cagaggttgcggtgagccga

SEQ ID NO: 51576 - DNA, 20 bp, synthetic construct
  source 1..20: mol_type = other DNA
gcagaggttgcggtgagccg

SEQ ID NO: 51577 - DNA, 20 bp, synthetic construct
  source 1..20: mol_type = other DNA
ggcagaggttgcggtgagcc

SEQ ID NO: 51578 - DNA, 20 bp, synthetic construct
  source 1..20: mol_type = other DNA
aggcagaggttgcggtgagc

SEQ ID NO: 51579 - DNA, 20 bp, synthetic construct
  source 1..20: mol_type = other DNA
gaggcagaggttgcggtgag

SEQ ID NO: 51580 - DNA, 20 bp, synthetic construct
  source 1..20: mol_type = other DNA
ggaggcagaggttgcggtga

SEQ ID NO: 51581 - DNA, 20 bp, synthetic construct
  source 1..20: mol_type = other DNA
aggaggcagaggttgcggtg

SEQ ID NO: 51582 - DNA, 20 bp, synthetic construct
  source 1..20: mol_type = other DNA
caggaggcagaggttgcggt

SEQ ID NO: 51583 - DNA, 20 bp, synthetic construct
  source 1..20: mol_type = other DNA
ccaggaggcagaggttgcgg

SEQ ID NO: 51584 - DNA, 20 bp, synthetic construct
  source 1..20: mol_type = other DNA
cccaggaggcagaggttgcg

SEQ ID NO: 51585 - DNA, 20 bp, synthetic construct
  source 1..20: mol_type = other DNA
acccaggaggcagaggttgc

SEQ ID NO: 51586 - DNA, 20 bp, synthetic construct
  source 1..20: mol_type = other DNA
aacccaggaggcagaggttg

SEQ ID NO: 51587 - DNA, 20 bp, synthetic construct
  source 1..20: mol_type = other DNA
gaacccaggaggcagaggtt

SEQ ID NO: 51588 - DNA, 20 bp, synthetic construct
  source 1..20: mol_type = other DNA
tgaacccaggaggcagaggt

SEQ ID NO: 51589 - DNA, 20 bp, synthetic construct
  source 1..20: mol_type = other DNA
ttgaacccaggaggcagagg

SEQ ID NO: 51590 - DNA, 20 bp, synthetic construct
  source 1..20: mol_type = other DNA
cttgaacccaggaggcagag

SEQ ID NO: 51591 - DNA, 20 bp, synthetic construct
  source 1..20: mol_type = other DNA
gcttgaacccaggaggcaga

SEQ ID NO: 51592 - DNA, 20 bp, synthetic construct
  source 1..20: mol_type = other DNA
cgcttgaacccaggaggcag

SEQ ID NO: 51593 - DNA, 20 bp, synthetic construct
  source 1..20: mol_type = other DNA
tcgcttgaacccaggaggca

SEQ ID NO: 51594 - DNA, 20 bp, synthetic construct
  source 1..20: mol_type = other DNA
atcgcttgaacccaggaggc

SEQ ID NO: 51595 - DNA, 20 bp, synthetic construct
  source 1..20: mol_type = other DNA
aatcgcttgaacccaggagg

SEQ ID NO: 51596 - DNA, 20 bp, synthetic construct
  source 1..20: mol_type = other DNA
gaatcgcttgaacccaggag

SEQ ID NO: 51597 - DNA, 20 bp, synthetic construct
  source 1..20: mol_type = other DNA
agaatcgcttgaacccagga

SEQ ID NO: 51598 - DNA, 20 bp, synthetic construct
  source 1..20: mol_type = other DNA
gagaatcgcttgaacccagg

SEQ ID NO: 51599 - DNA, 20 bp, synthetic construct
  source 1..20: mol_type = other DNA
agagaatcgcttgaacccag

SEQ ID NO: 51600 - DNA, 20 bp, synthetic construct
  source 1..20: mol_type = other DNA
aagagaatcgcttgaaccca

SEQ ID NO: 51601 - DNA, 20 bp, synthetic construct
  source 1..20: mol_type = other DNA
caagagaatcgcttgaaccc

SEQ ID NO: 51602 - DNA, 20 bp, synthetic construct
  source 1..20: mol_type = other DNA
gcaagagaatcgcttgaacc

SEQ ID NO: 51603 - DNA, 20 bp, synthetic construct
  source 1..20: mol_type = other DNA
ggcaagagaatcgcttgaac

SEQ ID NO: 51604 - DNA, 20 bp, synthetic construct
  source 1..20: mol_type = other DNA
aggcaagagaatcgcttgaa

SEQ ID NO: 51605 - DNA, 20 bp, synthetic construct
  source 1..20: mol_type = other DNA
gaggcaagagaatcgcttga

SEQ ID NO: 51606 - DNA, 20 bp, synthetic construct
  source 1..20: mol_type = other DNA
tgaggcaagagaatcgcttg

SEQ ID NO: 51607 - DNA, 20 bp, synthetic construct
  source 1..20: mol_type = other DNA
ctgaggcaagagaatcgctt

SEQ ID NO: 51608 - DNA, 20 bp, synthetic construct
  source 1..20: mol_type = other DNA
gctgaggcaagagaatcgct

SEQ ID NO: 51609 - DNA, 20 bp, synthetic construct
  source 1..20: mol_type = other DNA
ggctgaggcaagagaatcgc

SEQ ID NO: 51610 - DNA, 20 bp, synthetic construct
  source 1..20: mol_type = other DNA
aggctgaggcaagagaatcg

SEQ ID NO: 51611 - DNA, 20 bp, synthetic construct
  source 1..20: mol_type = other DNA
gaggctgaggcaagagaatc

SEQ ID NO: 51612 - DNA, 20 bp, synthetic construct
  source 1..20: mol_type = other DNA
ggaggctgaggcaagagaat

SEQ ID NO: 51613 - DNA, 20 bp, synthetic construct
  source 1..20: mol_type = other DNA
gggaggctgaggcaagagaa

SEQ ID NO: 51614 - DNA, 20 bp, synthetic construct
  source 1..20: mol_type = other DNA
cgggaggctgaggcaagaga

SEQ ID NO: 51615 - DNA, 20 bp, synthetic construct
  source 1..20: mol_type = other DNA
tcgggaggctgaggcaagag

SEQ ID NO: 51616 - DNA, 20 bp, synthetic construct
  source 1..20: mol_type = other DNA
ctcgggaggctgaggcaaga

SEQ ID NO: 51617 - DNA, 20 bp, synthetic construct
  source 1..20: mol_type = other DNA
actcgggaggctgaggcaag

SEQ ID NO: 51618 - DNA, 20 bp, synthetic construct
  source 1..20: mol_type = other DNA
tactcgggaggctgaggcaa

SEQ ID NO: 51619 - DNA, 20 bp, synthetic construct
  source 1..20: mol_type = other DNA
ctactcgggaggctgaggca

SEQ ID NO: 51620 - DNA, 20 bp, synthetic construct
  source 1..20: mol_type = other DNA
gctactcgggaggctgaggc

SEQ ID NO: 51621 - DNA, 20 bp, synthetic construct
  source 1..20: mol_type = other DNA
agctactcgggaggctgagg

SEQ ID NO: 51622 - DNA, 20 bp, synthetic construct
  source 1..20: mol_type = other DNA
cagctactcgggaggctgag

SEQ ID NO: 51623 - DNA, 20 bp, synthetic construct
  source 1..20: mol_type = other DNA
ccagctactcgggaggctga

SEQ ID NO: 51624 - DNA, 20 bp, synthetic construct
  source 1..20: mol_type = other DNA
accagctactcgggaggctg

SEQ ID NO: 51625 - DNA, 20 bp, synthetic construct
  source 1..20: mol_type = other DNA
aaccagctactcgggaggct

SEQ ID NO: 51626 - DNA, 20 bp, synthetic construct
  source 1..20: mol_type = other DNA
taaccagctactcgggaggc

SEQ ID NO: 51627 - DNA, 20 bp, synthetic construct
  source 1..20: mol_type = other DNA
gtaaccagctactcgggagg

SEQ ID NO: 51628 - DNA, 20 bp, synthetic construct
  source 1..20: mol_type = other DNA
agtaaccagctactcgggag

SEQ ID NO: 51629 - DNA, 20 bp, synthetic construct
  source 1..20: mol_type = other DNA
cagtaaccagctactcggga

SEQ ID NO: 51630 - DNA, 20 bp, synthetic construct
  source 1..20: mol_type = other DNA
tcagtaaccagctactcggg

SEQ ID NO: 51631 - DNA, 20 bp, synthetic construct
  source 1..20: mol_type = other DNA
ctcagtaaccagctactcgg

SEQ ID NO: 51632 - DNA, 20 bp, synthetic construct
  source 1..20: mol_type = other DNA
cctcagtaaccagctactcg

SEQ ID NO: 51633 - DNA, 20 bp, synthetic construct
  source 1..20: mol_type = other DNA
gcctcagtaaccagctactc

SEQ ID NO: 51634 - DNA, 20 bp, synthetic construct
  source 1..20: mol_type = other DNA
tgcctcagtaaccagctact

SEQ ID NO: 51635 - DNA, 20 bp, synthetic construct
  source 1..20: mol_type = other DNA
atgcctcagtaaccagctac

SEQ ID NO: 51636 - DNA, 20 bp, synthetic construct
  source 1..20: mol_type = other DNA
catgcctcagtaaccagcta

SEQ ID NO: 51637 - DNA, 20 bp, synthetic construct
  source 1..20: mol_type = other DNA
acatgcctcagtaaccagct

SEQ ID NO: 51638 - DNA, 20 bp, synthetic construct
  source 1..20: mol_type = other DNA
cacatgcctcagtaaccagc

SEQ ID NO: 51639 - DNA, 20 bp, synthetic construct
  source 1..20: mol_type = other DNA
gcacatgcctcagtaaccag

SEQ ID NO: 51640 - DNA, 20 bp, synthetic construct
  source 1..20: mol_type = other DNA
ggcacatgcctcagtaacca

SEQ ID NO: 51641 - DNA, 20 bp, synthetic construct
  source 1..20: mol_type = other DNA
tggcacatgcctcagtaacc

SEQ ID NO: 51642 - DNA, 20 bp, synthetic construct
  source 1..20: mol_type = other DNA
gtggcacatgcctcagtaac

SEQ ID NO: 51643 - DNA, 20 bp, synthetic construct
  source 1..20: mol_type = other DNA
ggtggcacatgcctcagtaa

SEQ ID NO: 51644 - DNA, 20 bp, synthetic construct
  source 1..20: mol_type = other DNA
tggtggcacatgcctcagta

SEQ ID NO: 51645 - DNA, 20 bp, synthetic construct
  source 1..20: mol_type = other DNA
atggtggcacatgcctcagt

SEQ ID NO: 51646 - DNA, 20 bp, synthetic construct
  source 1..20: mol_type = other DNA
catggtggcacatgcctcag

SEQ ID NO: 51647 - DNA, 20 bp, synthetic construct
  source 1..20: mol_type = other DNA
gcatggtggcacatgcctca

SEQ ID NO: 51648 - DNA, 20 bp, synthetic construct
  source 1..20: mol_type = other DNA
ggcatggtggcacatgcctc

SEQ ID NO: 51649 - DNA, 20 bp, synthetic construct
  source 1..20: mol_type = other DNA
gggcatggtggcacatgcct

SEQ ID NO: 51650 - DNA, 20 bp, synthetic construct
  source 1..20: mol_type = other DNA
cgggcatggtggcacatgcc

SEQ ID NO: 51651 - DNA, 20 bp, synthetic construct
  source 1..20: mol_type = other DNA
ccgggcatggtggcacatgc

SEQ ID NO: 51652 - DNA, 20 bp, synthetic construct
  source 1..20: mol_type = other DNA
gccgggcatggtggcacatg

SEQ ID NO: 51653 - DNA, 20 bp, synthetic construct
  source 1..20: mol_type = other DNA
agccgggcatggtggcacat

SEQ ID NO: 51654 - DNA, 20 bp, synthetic construct
  source 1..20: mol_type = other DNA
tagccgggcatggtggcaca

SEQ ID NO: 51655 - DNA, 20 bp, synthetic construct
  source 1..20: mol_type = other DNA
ttagccgggcatggtggcac

SEQ ID NO: 51656 - DNA, 20 bp, synthetic construct
  source 1..20: mol_type = other DNA
attagccgggcatggtggca

SEQ ID NO: 51657 - DNA, 20 bp, synthetic construct
  source 1..20: mol_type = other DNA
aattagccgggcatggtggc

SEQ ID NO: 51658 - DNA, 20 bp, synthetic construct
  source 1..20: mol_type = other DNA
aaattagccgggcatggtgg

SEQ ID NO: 51659 - DNA, 20 bp, synthetic construct
  source 1..20: mol_type = other DNA
aaaattagccgggcatggtg

SEQ ID NO: 51660 - DNA, 20 bp, synthetic construct
  source 1..20: mol_type = other DNA
aaaaattagccgggcatggt

SEQ ID NO: 51661 - DNA, 20 bp, synthetic construct
  source 1..20: mol_type = other DNA
caaaaattagccgggcatgg

SEQ ID NO: 51662 - DNA, 20 bp, synthetic construct
  source 1..20: mol_type = other DNA
acaaaaattagccgggcatg

SEQ ID NO: 51663 - DNA, 20 bp, synthetic construct
  source 1..20: mol_type = other DNA
tacaaaaattagccgggcat

SEQ ID NO: 51664 - DNA, 20 bp, synthetic construct
  source 1..20: mol_type = other DNA
atacaaaaattagccgggca

SEQ ID NO: 51665 - DNA, 20 bp, synthetic construct
  source 1..20: mol_type = other DNA
aatacaaaaattagccgggc

SEQ ID NO: 51666 - DNA, 20 bp, synthetic construct
  source 1..20: mol_type = other DNA
aaatacaaaaattagccggg

SEQ ID NO: 51667 - DNA, 20 bp, synthetic construct
  source 1..20: mol_type = other DNA
aaaatacaaaaattagccgg

SEQ ID NO: 51668 - DNA, 20 bp, synthetic construct
  source 1..20: mol_type = other DNA
aaaaatacaaaaattagccg

SEQ ID NO: 51669 - DNA, 20 bp, synthetic construct
  source 1..20: mol_type = other DNA
taaaaatacaaaaattagcc

SEQ ID NO: 51670 - DNA, 20 bp, synthetic construct
  source 1..20: mol_type = other DNA
ctaaaaatacaaaaattagc

SEQ ID NO: 51671 - DNA, 20 bp, synthetic construct
  source 1..20: mol_type = other DNA
actaaaaatacaaaaattag

SEQ ID NO: 51672 - DNA, 20 bp, synthetic construct
  source 1..20: mol_type = other DNA
tactaaaaatacaaaaatta

SEQ ID NO: 51673 - DNA, 20 bp, synthetic construct
  source 1..20: mol_type = other DNA
ctactaaaaatacaaaaatt

SEQ ID NO: 51674 - DNA, 20 bp, synthetic construct
  source 1..20: mol_type = other DNA
tctactaaaaatacaaaaat

SEQ ID NO: 51675 - DNA, 20 bp, synthetic construct
  source 1..20: mol_type = other DNA
ctctactaaaaatacaaaaa

SEQ ID NO: 51676 - DNA, 20 bp, synthetic construct
  source 1..20: mol_type = other DNA
tctctactaaaaatacaaaa

SEQ ID NO: 51677 - DNA, 20 bp, synthetic construct
  source 1..20: mol_type = other DNA
gtctctactaaaaatacaaa

SEQ ID NO: 51678 - DNA, 20 bp, synthetic construct
  source 1..20: mol_type = other DNA
cgtctctactaaaaatacaa

SEQ ID NO: 51679 - DNA, 20 bp, synthetic construct
  source 1..20: mol_type = other DNA
ccgtctctactaaaaataca

SEQ ID NO: 51680 - DNA, 20 bp, synthetic construct
  source 1..20: mol_type = other DNA
cccgtctctactaaaaatac

SEQ ID NO: 51681 - DNA, 20 bp, synthetic construct
  source 1..20: mol_type = other DNA
ccccgtctctactaaaaata

SEQ ID NO: 51682 - DNA, 20 bp, synthetic construct
  source 1..20: mol_type = other DNA
accccgtctctactaaaaat

SEQ ID NO: 51683 - DNA, 20 bp, synthetic construct
  source 1..20: mol_type = other DNA
aaccccgtctctactaaaaa

SEQ ID NO: 51684 - DNA, 20 bp, synthetic construct
  source 1..20: mol_type = other DNA
aaaccccgtctctactaaaa

SEQ ID NO: 51685 - DNA, 20 bp, synthetic construct
  source 1..20: mol_type = other DNA
gaaaccccgtctctactaaa

SEQ ID NO: 51686 - DNA, 20 bp, synthetic construct
  source 1..20: mol_type = other DNA
tgaaaccccgtctctactaa

SEQ ID NO: 51687 - DNA, 20 bp, synthetic construct
  source 1..20: mol_type = other DNA
gtgaaaccccgtctctacta

SEQ ID NO: 51688 - DNA, 20 bp, synthetic construct
  source 1..20: mol_type = other DNA
agtgaaaccccgtctctact

SEQ ID NO: 51689 - DNA, 20 bp, synthetic construct
  source 1..20: mol_type = other DNA
tagtgaaaccccgtctctac

SEQ ID NO: 51690 - DNA, 20 bp, synthetic construct
  source 1..20: mol_type = other DNA
atagtgaaaccccgtctcta

SEQ ID NO: 51691 - DNA, 20 bp, synthetic construct
  source 1..20: mol_type = other DNA
catagtgaaaccccgtctct

SEQ ID NO: 51692 - DNA, 20 bp, synthetic construct
  source 1..20: mol_type = other DNA
acatagtgaaaccccgtctc

SEQ ID NO: 51693 - DNA, 20 bp, synthetic construct
  source 1..20: mol_type = other DNA
aacatagtgaaaccccgtct

SEQ ID NO: 51694 - DNA, 20 bp, synthetic construct
  source 1..20: mol_type = other DNA
caacatagtgaaaccccgtc

SEQ ID NO: 51695 - DNA, 20 bp, synthetic construct
  source 1..20: mol_type = other DNA
ccaacatagtgaaaccccgt

SEQ ID NO: 51696 - DNA, 20 bp, synthetic construct
  source 1..20: mol_type = other DNA
gccaacatagtgaaaccccg

SEQ ID NO: 51697 - DNA, 20 bp, synthetic construct
  source 1..20: mol_type = other DNA
ggccaacatagtgaaacccc

SEQ ID NO: 51698 - DNA, 20 bp, synthetic construct
  source 1..20: mol_type = other DNA
tggccaacatagtgaaaccc

SEQ ID NO: 51699 - DNA, 20 bp, synthetic construct
  source 1..20: mol_type = other DNA
ctggccaacatagtgaaacc

SEQ ID NO: 51700 - DNA, 20 bp, synthetic construct
  source 1..20: mol_type = other DNA
cctggccaacatagtgaaac

SEQ ID NO: 51701 - DNA, 20 bp, synthetic construct
  source 1..20: mol_type = other DNA
gcctggccaacatagtgaaa

SEQ ID NO: 51702 - DNA, 20 bp, synthetic construct
  source 1..20: mol_type = other DNA
agcctggccaacatagtgaa

SEQ ID NO: 51703 - DNA, 20 bp, synthetic construct
  source 1..20: mol_type = other DNA
cagcctggccaacatagtga

SEQ ID NO: 51704 - DNA, 20 bp, synthetic construct
  source 1..20: mol_type = other DNA
ccagcctggccaacatagtg

SEQ ID NO: 51705 - DNA, 20 bp, synthetic construct
  source 1..20: mol_type = other DNA
accagcctggccaacatagt

SEQ ID NO: 51706 - DNA, 20 bp, synthetic construct
  source 1..20: mol_type = other DNA
gaccagcctggccaacatag

SEQ ID NO: 51707 - DNA, 20 bp, synthetic construct
  source 1..20: mol_type = other DNA
agaccagcctggccaacata

SEQ ID NO: 51708 - DNA, 20 bp, synthetic construct
  source 1..20: mol_type = other DNA
aagaccagcctggccaacat

SEQ ID NO: 51709 - DNA, 20 bp, synthetic construct
  source 1..20: mol_type = other DNA
caagaccagcctggccaaca

SEQ ID NO: 51710 - DNA, 20 bp, synthetic construct
  source 1..20: mol_type = other DNA
tcaagaccagcctggccaac

SEQ ID NO: 51711 - DNA, 20 bp, synthetic construct
  source 1..20: mol_type = other DNA
ttcaagaccagcctggccaa

SEQ ID NO: 51712 - DNA, 20 bp, synthetic construct
  source 1..20: mol_type = other DNA
gttcaagaccagcctggcca

SEQ ID NO: 51713 - DNA, 20 bp, synthetic construct
  source 1..20: mol_type = other DNA
agttcaagaccagcctggcc

SEQ ID NO: 51714 - DNA, 20 bp, synthetic construct
  source 1..20: mol_type = other DNA
gagttcaagaccagcctggc

SEQ ID NO: 51715 - DNA, 20 bp, synthetic construct
  source 1..20: mol_type = other DNA
ggagttcaagaccagcctgg

SEQ ID NO: 51716 - DNA, 20 bp, synthetic construct
  source 1..20: mol_type = other DNA
aggagttcaagaccagcctg

SEQ ID NO: 51717 - DNA, 20 bp, synthetic construct
  source 1..20: mol_type = other DNA
caggagttcaagaccagcct

SEQ ID NO: 51718 - DNA, 20 bp, synthetic construct
  source 1..20: mol_type = other DNA
tcaggagttcaagaccagcc

SEQ ID NO: 51719 - DNA, 20 bp, synthetic construct
  source 1..20: mol_type = other DNA
gtcaggagttcaagaccagc

SEQ ID NO: 51720 - DNA, 20 bp, synthetic construct
  source 1..20: mol_type = other DNA
ggtcaggagttcaagaccag

SEQ ID NO: 51721 - DNA, 20 bp, synthetic construct
  source 1..20: mol_type = other DNA
aggtcaggagttcaagacca

SEQ ID NO: 51722 - DNA, 20 bp, synthetic construct
  source 1..20: mol_type = other DNA
aaggtcaggagttcaagacc

SEQ ID NO: 51723 - DNA, 20 bp, synthetic construct
  source 1..20: mol_type = other DNA
caaggtcaggagttcaagac

SEQ ID NO: 51724 - DNA, 20 bp, synthetic construct
  source 1..20: mol_type = other DNA
acaaggtcaggagttcaaga

SEQ ID NO: 51725 - DNA, 20 bp, synthetic construct
  source 1..20: mol_type = other DNA
cacaaggtcaggagttcaag

SEQ ID NO: 51726 - DNA, 20 bp, synthetic construct
  source 1..20: mol_type = other DNA
tcacaaggtcaggagttcaa

SEQ ID NO: 51727 - DNA, 20 bp, synthetic construct
  source 1..20: mol_type = other DNA
atcacaaggtcaggagttca

SEQ ID NO: 51728 - DNA, 20 bp, synthetic construct
  source 1..20: mol_type = other DNA
gatcacaaggtcaggagttc

SEQ ID NO: 51729 - DNA, 20 bp, synthetic construct
  source 1..20: mol_type = other DNA
ggatcacaaggtcaggagtt

SEQ ID NO: 51730 - DNA, 20 bp, synthetic construct
  source 1..20: mol_type = other DNA
aggatcacaaggtcaggagt

SEQ ID NO: 51731 - DNA, 20 bp, synthetic construct
  source 1..20: mol_type = other DNA
gaggatcacaaggtcaggag

SEQ ID NO: 51732 - DNA, 20 bp, synthetic construct
  source 1..20: mol_type = other DNA
ggaggatcacaaggtcagga

SEQ ID NO: 51733 - DNA, 20 bp, synthetic construct
  source 1..20: mol_type = other DNA
aggaggatcacaaggtcagg

SEQ ID NO: 51734 - DNA, 20 bp, synthetic construct
  source 1..20: mol_type = other DNA
caggaggatcacaaggtcag

SEQ ID NO: 51735 - DNA, 20 bp, synthetic construct
  source 1..20: mol_type = other DNA
gcaggaggatcacaaggtca

SEQ ID NO: 51736 - DNA, 20 bp, synthetic construct
  source 1..20: mol_type = other DNA
ggcaggaggatcacaaggtc

SEQ ID NO: 51737 - DNA, 20 bp, synthetic construct
  source 1..20: mol_type = other DNA
aggcaggaggatcacaaggt

SEQ ID NO: 51738 - DNA, 20 bp, synthetic construct
  source 1..20: mol_type = other DNA
aaggcaggaggatcacaagg

SEQ ID NO: 51739 - DNA, 20 bp, synthetic construct
  source 1..20: mol_type = other DNA
caaggcaggaggatcacaag

SEQ ID NO: 51740 - DNA, 20 bp, synthetic construct
  source 1..20: mol_type = other DNA
ccaaggcaggaggatcacaa

SEQ ID NO: 51741 - DNA, 20 bp, synthetic construct
  source 1..20: mol_type = other DNA
gccaaggcaggaggatcaca

SEQ ID NO: 51742 - DNA, 20 bp, synthetic construct
  source 1..20: mol_type = other DNA
ggccaaggcaggaggatcac

SEQ ID NO: 51743 - DNA, 20 bp, synthetic construct
  source 1..20: mol_type = other DNA
aggccaaggcaggaggatca

SEQ ID NO: 51744 - DNA, 20 bp, synthetic construct
  source 1..20: mol_type = other DNA
gaggccaaggcaggaggatc

SEQ ID NO: 51745 - DNA, 20 bp, synthetic construct
  source 1..20: mol_type = other DNA
ggaggccaaggcaggaggat

SEQ ID NO: 51746 - DNA, 20 bp, synthetic construct
  source 1..20: mol_type = other DNA
gggaggccaaggcaggagga

SEQ ID NO: 51747 - DNA, 20 bp, synthetic construct
  source 1..20: mol_type = other DNA
tgggaggccaaggcaggagg

SEQ ID NO: 51748 - DNA, 20 bp, synthetic construct
  source 1..20: mol_type = other DNA
ctgggaggccaaggcaggag

SEQ ID NO: 51749 - DNA, 20 bp, synthetic construct
  source 1..20: mol_type = other DNA
tctgggaggccaaggcagga

SEQ ID NO: 51750 - DNA, 20 bp, synthetic construct
  source 1..20: mol_type = other DNA
ctctgggaggccaaggcagg

SEQ ID NO: 51751 - DNA, 20 bp, synthetic construct
  source 1..20: mol_type = other DNA
actctgggaggccaaggcag

SEQ ID NO: 51752 - DNA, 20 bp, synthetic construct
  source 1..20: mol_type = other DNA
cactctgggaggccaaggca

SEQ ID NO: 51753 - DNA, 20 bp, synthetic construct
  source 1..20: mol_type = other DNA
gcactctgggaggccaaggc

SEQ ID NO: 51754 - DNA, 20 bp, synthetic construct
  source 1..20: mol_type = other DNA
agcactctgggaggccaagg

SEQ ID NO: 51755 - DNA, 20 bp, synthetic construct
  source 1..20: mol_type = other DNA
cagcactctgggaggccaag

SEQ ID NO: 51756 - DNA, 20 bp, synthetic construct
  source 1..20: mol_type = other DNA
ccagcactctgggaggccaa

SEQ ID NO: 51757 - DNA, 20 bp, synthetic construct
  source 1..20: mol_type = other DNA
cccagcactctgggaggcca

SEQ ID NO: 51758 - DNA, 20 bp, synthetic construct
  source 1..20: mol_type = other DNA
tcccagcactctgggaggcc

SEQ ID NO: 51759 - DNA, 20 bp, synthetic construct
  source 1..20: mol_type = other DNA
atcccagcactctgggaggc

SEQ ID NO: 51760 - DNA, 20 bp, synthetic construct
  source 1..20: mol_type = other DNA
aatcccagcactctgggagg

SEQ ID NO: 51761 - DNA, 20 bp, synthetic construct
  source 1..20: mol_type = other DNA
taatcccagcactctgggag

SEQ ID NO: 51762 - DNA, 20 bp, synthetic construct
  source 1..20: mol_type = other DNA
ataatcccagcactctggga

SEQ ID NO: 51763 - DNA, 20 bp, synthetic construct
  source 1..20: mol_type = other DNA
tataatcccagcactctggg

SEQ ID NO: 51764 - DNA, 20 bp, synthetic construct
  source 1..20: mol_type = other DNA
ctataatcccagcactctgg

SEQ ID NO: 51765 - DNA, 20 bp, synthetic construct
  source 1..20: mol_type = other DNA
cctataatcccagcactctg

SEQ ID NO: 51766 - DNA, 20 bp, synthetic construct
  source 1..20: mol_type = other DNA
gcctataatcccagcactct

SEQ ID NO: 51767 - DNA, 20 bp, synthetic construct
  source 1..20: mol_type = other DNA
cgcctataatcccagcactc

SEQ ID NO: 51768 - DNA, 20 bp, synthetic construct
  source 1..20: mol_type = other DNA
acgcctataatcccagcact

SEQ ID NO: 51769 - DNA, 20 bp, synthetic construct
  source 1..20: mol_type = other DNA
cacgcctataatcccagcac

SEQ ID NO: 51770 - DNA, 20 bp, synthetic construct
  source 1..20: mol_type = other DNA
tcacgcctataatcccagca

SEQ ID NO: 51771 - DNA, 20 bp, synthetic construct
  source 1..20: mol_type = other DNA
ctcacgcctataatcccagc

SEQ ID NO: 51772 - DNA, 20 bp, synthetic construct
  source 1..20: mol_type = other DNA
gctcacgcctataatcccag

SEQ ID NO: 51773 - DNA, 20 bp, synthetic construct
  source 1..20: mol_type = other DNA
ggctcacgcctataatccca

SEQ ID NO: 51774 - DNA, 20 bp, synthetic construct
  source 1..20: mol_type = other DNA
tggctcacgcctataatccc

SEQ ID NO: 51775 - DNA, 20 bp, synthetic construct
  source 1..20: mol_type = other DNA
gtggctcacgcctataatcc

SEQ ID NO: 51776 - DNA, 20 bp, synthetic construct
  source 1..20: mol_type = other DNA
ggtggctcacgcctataatc

SEQ ID NO: 51777 - DNA, 20 bp, synthetic construct
  source 1..20: mol_type = other DNA
tggtggctcacgcctataat

SEQ ID NO: 51778 - DNA, 20 bp, synthetic construct
  source 1..20: mol_type = other DNA
gtggtggctcacgcctataa

SEQ ID NO: 51779 - DNA, 20 bp, synthetic construct
  source 1..20: mol_type = other DNA
cgtggtggctcacgcctata

SEQ ID NO: 51780 - DNA, 20 bp, synthetic construct
  source 1..20: mol_type = other DNA
gcgtggtggctcacgcctat

SEQ ID NO: 51781 - DNA, 20 bp, synthetic construct
  source 1..20: mol_type = other DNA
ggcgtggtggctcacgccta

SEQ ID NO: 51782 - DNA, 20 bp, synthetic construct
  source 1..20: mol_type = other DNA
aggcgtggtggctcacgcct

SEQ ID NO: 51783 - DNA, 20 bp, synthetic construct
  source 1..20: mol_type = other DNA
caggcgtggtggctcacgcc

SEQ ID NO: 51784 - DNA, 20 bp, synthetic construct
  source 1..20: mol_type = other DNA
ccaggcgtggtggctcacgc

SEQ ID NO: 51785 - DNA, 20 bp, synthetic construct
  source 1..20: mol_type = other DNA
cccaggcgtggtggctcacg

SEQ ID NO: 51786 - DNA, 20 bp, synthetic construct
  source 1..20: mol_type = other DNA
gcccaggcgtggtggctcac

SEQ ID NO: 51787 - DNA, 20 bp, synthetic construct
  source 1..20: mol_type = other DNA
tgcccaggcgtggtggctca

SEQ ID NO: 51788 - DNA, 20 bp, synthetic construct
  source 1..20: mol_type = other DNA
ctgcccaggcgtggtggctc

SEQ ID NO: 51789 - DNA, 20 bp, synthetic construct
  source 1..20: mol_type = other DNA
cctgcccaggcgtggtggct

SEQ ID NO: 51790 - DNA, 20 bp, synthetic construct
  source 1..20: mol_type = other DNA
acctgcccaggcgtggtggc

SEQ ID NO: 51791 - DNA, 20 bp, synthetic construct
  source 1..20: mol_type = other DNA
tacctgcccaggcgtggtgg

SEQ ID NO: 51792 - DNA, 20 bp, synthetic construct
  source 1..20: mol_type = other DNA
atacctgcccaggcgtggtg

SEQ ID NO: 51793 - DNA, 20 bp, synthetic construct
  source 1..20: mol_type = other DNA
gatacctgcccaggcgtggt

SEQ ID NO: 51794 - DNA, 20 bp, synthetic construct
  source 1..20: mol_type = other DNA
agatacctgcccaggcgtgg

SEQ ID NO: 51795 - DNA, 20 bp, synthetic construct
  source 1..20: mol_type = other DNA
aagatacctgcccaggcgtg

SEQ ID NO: 51796 - DNA, 20 bp, synthetic construct
  source 1..20: mol_type = other DNA
taagatacctgcccaggcgt

SEQ ID NO: 51797 - DNA, 20 bp, synthetic construct
  source 1..20: mol_type = other DNA
ataagatacctgcccaggcg

SEQ ID NO: 51798 - DNA, 20 bp, synthetic construct
  source 1..20: mol_type = other DNA
aataagatacctgcccaggc

SEQ ID NO: 51799 - DNA, 20 bp, synthetic construct
  source 1..20: mol_type = other DNA
aaataagatacctgcccagg

SEQ ID NO: 51800 - DNA, 20 bp, synthetic construct
  source 1..20: mol_type = other DNA
gaaataagatacctgcccag

SEQ ID NO: 51801 - DNA, 20 bp, synthetic construct
  source 1..20: mol_type = other DNA
tgaaataagatacctgccca

SEQ ID NO: 51802 - DNA, 20 bp, synthetic construct
  source 1..20: mol_type = other DNA
ttgaaataagatacctgccc

SEQ ID NO: 51803 - DNA, 20 bp, synthetic construct
  source 1..20: mol_type = other DNA
tttgaaataagatacctgcc

SEQ ID NO: 51804 - DNA, 20 bp, synthetic construct
  source 1..20: mol_type = other DNA
ttttgaaataagatacctgc

SEQ ID NO: 51805 - DNA, 20 bp, synthetic construct
  source 1..20: mol_type = other DNA
gttttgaaataagatacctg

SEQ ID NO: 51806 - DNA, 20 bp, synthetic construct
  source 1..20: mol_type = other DNA
agttttgaaataagatacct

SEQ ID NO: 51807 - DNA, 20 bp, synthetic construct
  source 1..20: mol_type = other DNA
aagttttgaaataagatacc

SEQ ID NO: 51808 - DNA, 20 bp, synthetic construct
  source 1..20: mol_type = other DNA
taagttttgaaataagatac

SEQ ID NO: 51809 - DNA, 20 bp, synthetic construct
  source 1..20: mol_type = other DNA
gtaagttttgaaataagata

SEQ ID NO: 51810 - DNA, 20 bp, synthetic construct
  source 1..20: mol_type = other DNA
tgtaagttttgaaataagat

SEQ ID NO: 51811 - DNA, 20 bp, synthetic construct
  source 1..20: mol_type = other DNA
ctgtaagttttgaaataaga

SEQ ID NO: 51812 - DNA, 20 bp, synthetic construct
  source 1..20: mol_type = other DNA
actgtaagttttgaaataag

SEQ ID NO: 51813 - DNA, 20 bp, synthetic construct
  source 1..20: mol_type = other DNA
cactgtaagttttgaaataa

SEQ ID NO: 51814 - DNA, 20 bp, synthetic construct
  source 1..20: mol_type = other DNA
ccactgtaagttttgaaata

SEQ ID NO: 51815 - DNA, 20 bp, synthetic construct
  source 1..20: mol_type = other DNA
accactgtaagttttgaaat

SEQ ID NO: 51816 - DNA, 20 bp, synthetic construct
  source 1..20: mol_type = other DNA
aaccactgtaagttttgaaa

SEQ ID NO: 51817 - DNA, 20 bp, synthetic construct
  source 1..20: mol_type = other DNA
aaaccactgtaagttttgaa

SEQ ID NO: 51818 - DNA, 20 bp, synthetic construct
  source 1..20: mol_type = other DNA
taaaccactgtaagttttga

SEQ ID NO: 51819 - DNA, 20 bp, synthetic construct
  source 1..20: mol_type = other DNA
ctaaaccactgtaagttttg

SEQ ID NO: 51820 - DNA, 20 bp, synthetic construct
  source 1..20: mol_type = other DNA
actaaaccactgtaagtttt

SEQ ID NO: 51821 - DNA, 20 bp, synthetic construct
  source 1..20: mol_type = other DNA
cactaaaccactgtaagttt

SEQ ID NO: 51822 - DNA, 20 bp, synthetic construct
  source 1..20: mol_type = other DNA
tcactaaaccactgtaagtt

SEQ ID NO: 51823 - DNA, 20 bp, synthetic construct
  source 1..20: mol_type = other DNA
ttcactaaaccactgtaagt

SEQ ID NO: 51824 - DNA, 20 bp, synthetic construct
  source 1..20: mol_type = other DNA
attcactaaaccactgtaag

SEQ ID NO: 51825 - DNA, 20 bp, synthetic construct
  source 1..20: mol_type = other DNA
aattcactaaaccactgtaa

SEQ ID NO: 51826 - DNA, 20 bp, synthetic construct
  source 1..20: mol_type = other DNA
taattcactaaaccactgta

SEQ ID NO: 51827 - DNA, 20 bp, synthetic construct
  source 1..20: mol_type = other DNA
ataattcactaaaccactgt

SEQ ID NO: 51828 - DNA, 20 bp, synthetic construct
  source 1..20: mol_type = other DNA
tataattcactaaaccactg

SEQ ID NO: 51829 - DNA, 20 bp, synthetic construct
  source 1..20: mol_type = other DNA
gtataattcactaaaccact

SEQ ID NO: 51830 - DNA, 20 bp, synthetic construct
  source 1..20: mol_type = other DNA
tgtataattcactaaaccac

SEQ ID NO: 51831 - DNA, 20 bp, synthetic construct
  source 1..20: mol_type = other DNA
ttgtataattcactaaacca

SEQ ID NO: 51832 - DNA, 20 bp, synthetic construct
  source 1..20: mol_type = other DNA
attgtataattcactaaacc

SEQ ID NO: 51833 - DNA, 20 bp, synthetic construct
  source 1..20: mol_type = other DNA
aattgtataattcactaaac

SEQ ID NO: 51834 - DNA, 20 bp, synthetic construct
  source 1..20: mol_type = other DNA
caattgtataattcactaaa

SEQ ID NO: 51835 - DNA, 20 bp, synthetic construct
  source 1..20: mol_type = other DNA
gcaattgtataattcactaa

SEQ ID NO: 51836 - DNA, 20 bp, synthetic construct
  source 1..20: mol_type = other DNA
cgcaattgtataattcacta

SEQ ID NO: 51837 - DNA, 20 bp, synthetic construct
  source 1..20: mol_type = other DNA
acgcaattgtataattcact

SEQ ID NO: 51838 - DNA, 20 bp, synthetic construct
  source 1..20: mol_type = other DNA
gacgcaattgtataattcac

SEQ ID NO: 51839 - DNA, 20 bp, synthetic construct
  source 1..20: mol_type = other DNA
ggacgcaattgtataattca

SEQ ID NO: 51840 - DNA, 20 bp, synthetic construct
  source 1..20: mol_type = other DNA
tggacgcaattgtataattc

SEQ ID NO: 51841 - DNA, 20 bp, synthetic construct
  source 1..20: mol_type = other DNA
ctggacgcaattgtataatt

SEQ ID NO: 51842 - DNA, 20 bp, synthetic construct
  source 1..20: mol_type = other DNA
actggacgcaattgtataat

SEQ ID NO: 51843 - DNA, 20 bp, synthetic construct
  source 1..20: mol_type = other DNA
cactggacgcaattgtataa

SEQ ID NO: 51844 - DNA, 20 bp, synthetic construct
  source 1..20: mol_type = other DNA
gcactggacgcaattgtata

SEQ ID NO: 51845 - DNA, 20 bp, synthetic construct
  source 1..20: mol_type = other DNA
cgcactggacgcaattgtat

SEQ ID NO: 51846 - DNA, 20 bp, synthetic construct
  source 1..20: mol_type = other DNA
acgcactggacgcaattgta

SEQ ID NO: 51847 - DNA, 20 bp, synthetic construct
  source 1..20: mol_type = other DNA
tacgcactggacgcaattgt

SEQ ID NO: 51848 - DNA, 20 bp, synthetic construct
  source 1..20: mol_type = other DNA
ctacgcactggacgcaattg

SEQ ID NO: 51849 - DNA, 20 bp, synthetic construct
  source 1..20: mol_type = other DNA
actacgcactggacgcaatt

SEQ ID NO: 51850 - DNA, 20 bp, synthetic construct
  source 1..20: mol_type = other DNA
tactacgcactggacgcaat

SEQ ID NO: 51851 - DNA, 20 bp, synthetic construct
  source 1..20: mol_type = other DNA
atactacgcactggacgcaa

SEQ ID NO: 51852 - DNA, 20 bp, synthetic construct
  source 1..20: mol_type = other DNA
gatactacgcactggacgca

SEQ ID NO: 51853 - DNA, 20 bp, synthetic construct
  source 1..20: mol_type = other DNA
ggatactacgcactggacgc

SEQ ID NO: 51854 - DNA, 20 bp, synthetic construct
  source 1..20: mol_type = other DNA
aggatactacgcactggacg

SEQ ID NO: 51855 - DNA, 20 bp, synthetic construct
  source 1..20: mol_type = other DNA
caggatactacgcactggac

SEQ ID NO: 51856 - DNA, 20 bp, synthetic construct
  source 1..20: mol_type = other DNA
tcaggatactacgcactgga

SEQ ID NO: 51857 - DNA, 20 bp, synthetic construct
  source 1..20: mol_type = other DNA
ttcaggatactacgcactgg

SEQ ID NO: 51858 - DNA, 20 bp, synthetic construct
  source 1..20: mol_type = other DNA
tttcaggatactacgcactg

SEQ ID NO: 51859 - DNA, 20 bp, synthetic construct
  source 1..20: mol_type = other DNA
ttttcaggatactacgcact

SEQ ID NO: 51860 - DNA, 20 bp, synthetic construct
  source 1..20: mol_type = other DNA
attttcaggatactacgcac

SEQ ID NO: 51861 - DNA, 20 bp, synthetic construct
  source 1..20: mol_type = other DNA
tattttcaggatactacgca

SEQ ID NO: 51862 - DNA, 20 bp, synthetic construct
  source 1..20: mol_type = other DNA
ctattttcaggatactacgc

SEQ ID NO: 51863 - DNA, 20 bp, synthetic construct
  source 1..20: mol_type = other DNA
actattttcaggatactacg

SEQ ID NO: 51864 - DNA, 20 bp, synthetic construct
  source 1..20: mol_type = other DNA
tactattttcaggatactac

SEQ ID NO: 51865 - DNA, 20 bp, synthetic construct
  source 1..20: mol_type = other DNA
atactattttcaggatacta

SEQ ID NO: 51866 - DNA, 20 bp, synthetic construct
  source 1..20: mol_type = other DNA
aatactattttcaggatact

SEQ ID NO: 51867 - DNA, 20 bp, synthetic construct
  source 1..20: mol_type = other DNA
taatactattttcaggatac

SEQ ID NO: 51868 - DNA, 20 bp, synthetic construct
  source 1..20: mol_type = other DNA
ttaatactattttcaggata

SEQ ID NO: 51869 - DNA, 20 bp, synthetic construct
  source 1..20: mol_type = other DNA
cttaatactattttcaggat

SEQ ID NO: 51870 - DNA, 20 bp, synthetic construct
  source 1..20: mol_type = other DNA
acttaatactattttcagga

SEQ ID NO: 51871 - DNA, 20 bp, synthetic construct
  source 1..20: mol_type = other DNA
gacttaatactattttcagg

SEQ ID NO: 51872 - DNA, 20 bp, synthetic construct
  source 1..20: mol_type = other DNA
tgacttaatactattttcag

SEQ ID NO: 51873 - DNA, 20 bp, synthetic construct
  source 1..20: mol_type = other DNA
atgacttaatactattttca

SEQ ID NO: 51874 - DNA, 20 bp, synthetic construct
  source 1..20: mol_type = other DNA
catgacttaatactattttc

SEQ ID NO: 51875 - DNA, 20 bp, synthetic construct
  source 1..20: mol_type = other DNA
acatgacttaatactatttt

SEQ ID NO: 51876 - DNA, 20 bp, synthetic construct
  source 1..20: mol_type = other DNA
cacatgacttaatactattt

SEQ ID NO: 51877 - DNA, 20 bp, synthetic construct
  source 1..20: mol_type = other DNA
acacatgacttaatactatt

SEQ ID NO: 51878 - DNA, 20 bp, synthetic construct
  source 1..20: mol_type = other DNA
aacacatgacttaatactat

SEQ ID NO: 51879 - DNA, 20 bp, synthetic construct
  source 1..20: mol_type = other DNA
aaacacatgacttaatacta

SEQ ID NO: 51880 - DNA, 20 bp, synthetic construct
  source 1..20: mol_type = other DNA
taaacacatgacttaatact

SEQ ID NO: 51881 - DNA, 20 bp, synthetic construct
  source 1..20: mol_type = other DNA
ctaaacacatgacttaatac

SEQ ID NO: 51882 - DNA, 20 bp, synthetic construct
  source 1..20: mol_type = other DNA
cctaaacacatgacttaata

SEQ ID NO: 51883 - DNA, 20 bp, synthetic construct
  source 1..20: mol_type = other DNA
tcctaaacacatgacttaat

SEQ ID NO: 51884 - DNA, 20 bp, synthetic construct
  source 1..20: mol_type = other DNA
gtcctaaacacatgacttaa

SEQ ID NO: 51885 - DNA, 20 bp, synthetic construct
  source 1..20: mol_type = other DNA
tgtcctaaacacatgactta

SEQ ID NO: 51886 - DNA, 20 bp, synthetic construct
  source 1..20: mol_type = other DNA
atgtcctaaacacatgactt

SEQ ID NO: 51887 - DNA, 20 bp, synthetic construct
  source 1..20: mol_type = other DNA
gatgtcctaaacacatgact

SEQ ID NO: 51888 - DNA, 20 bp, synthetic construct
  source 1..20: mol_type = other DNA
tgatgtcctaaacacatgac

SEQ ID NO: 51889 - DNA, 20 bp, synthetic construct
  source 1..20: mol_type = other DNA
ctgatgtcctaaacacatga

SEQ ID NO: 51890 - DNA, 20 bp, synthetic construct
  source 1..20: mol_type = other DNA
cctgatgtcctaaacacatg

SEQ ID NO: 51891 - DNA, 20 bp, synthetic construct
  source 1..20: mol_type = other DNA
acctgatgtcctaaacacat

SEQ ID NO: 51892 - DNA, 20 bp, synthetic construct
  source 1..20: mol_type = other DNA
gacctgatgtcctaaacaca

SEQ ID NO: 51893 - DNA, 20 bp, synthetic construct
  source 1..20: mol_type = other DNA
agacctgatgtcctaaacac

SEQ ID NO: 51894 - DNA, 20 bp, synthetic construct
  source 1..20: mol_type = other DNA
gagacctgatgtcctaaaca

SEQ ID NO: 51895 - DNA, 20 bp, synthetic construct
  source 1..20: mol_type = other DNA
agagacctgatgtcctaaac

SEQ ID NO: 51896 - DNA, 20 bp, synthetic construct
  source 1..20: mol_type = other DNA
aagagacctgatgtcctaaa

SEQ ID NO: 51897 - DNA, 20 bp, synthetic construct
  source 1..20: mol_type = other DNA
taagagacctgatgtcctaa

SEQ ID NO: 51898 - DNA, 20 bp, synthetic construct
  source 1..20: mol_type = other DNA
ttaagagacctgatgtccta

SEQ ID NO: 51899 - DNA, 20 bp, synthetic construct
  source 1..20: mol_type = other DNA
cttaagagacctgatgtcct

SEQ ID NO: 51900 - DNA, 20 bp, synthetic construct
  source 1..20: mol_type = other DNA
gcttaagagacctgatgtcc

SEQ ID NO: 51901 - DNA, 20 bp, synthetic construct
  source 1..20: mol_type = other DNA
agcttaagagacctgatgtc

SEQ ID NO: 51902 - DNA, 20 bp, synthetic construct
  source 1..20: mol_type = other DNA
tagcttaagagacctgatgt

SEQ ID NO: 51903 - DNA, 20 bp, synthetic construct
  source 1..20: mol_type = other DNA
ttagcttaagagacctgatg

SEQ ID NO: 51904 - DNA, 20 bp, synthetic construct
  source 1..20: mol_type = other DNA
cttagcttaagagacctgat

SEQ ID NO: 51905 - DNA, 20 bp, synthetic construct
  source 1..20: mol_type = other DNA
tcttagcttaagagacctga

SEQ ID NO: 51906 - DNA, 20 bp, synthetic construct
  source 1..20: mol_type = other DNA
gtcttagcttaagagacctg

SEQ ID NO: 51907 - DNA, 20 bp, synthetic construct
  source 1..20: mol_type = other DNA
agtcttagcttaagagacct

SEQ ID NO: 51908 - DNA, 20 bp, synthetic construct
  source 1..20: mol_type = other DNA
tagtcttagcttaagagacc

SEQ ID NO: 51909 - DNA, 20 bp, synthetic construct
  source 1..20: mol_type = other DNA
atagtcttagcttaagagac

SEQ ID NO: 51910 - DNA, 20 bp, synthetic construct
  source 1..20: mol_type = other DNA
gatagtcttagcttaagaga

SEQ ID NO: 51911 - DNA, 20 bp, synthetic construct
  source 1..20: mol_type = other DNA
ggatagtcttagcttaagag

SEQ ID NO: 51912 - DNA, 20 bp, synthetic construct
  source 1..20: mol_type = other DNA
tggatagtcttagcttaaga

SEQ ID NO: 51913 - DNA, 20 bp, synthetic construct
  source 1..20: mol_type = other DNA
ctggatagtcttagcttaag

SEQ ID NO: 51914 - DNA, 20 bp, synthetic construct
  source 1..20: mol_type = other DNA
cctggatagtcttagcttaa

SEQ ID NO: 51915 - DNA, 20 bp, synthetic construct
  source 1..20: mol_type = other DNA
gcctggatagtcttagctta

SEQ ID NO: 51916 - DNA, 20 bp, synthetic construct
  source 1..20: mol_type = other DNA
tgcctggatagtcttagctt

SEQ ID NO: 51917 - DNA, 20 bp, synthetic construct
  source 1..20: mol_type = other DNA
ctgcctggatagtcttagct

SEQ ID NO: 51918 - DNA, 20 bp, synthetic construct
  source 1..20: mol_type = other DNA
tctgcctggatagtcttagc

SEQ ID NO: 51919 - DNA, 20 bp, synthetic construct
  source 1..20: mol_type = other DNA
ttctgcctggatagtcttag

SEQ ID NO: 51920 - DNA, 20 bp, synthetic construct
  source 1..20: mol_type = other DNA
tttctgcctggatagtctta

SEQ ID NO: 51921 - DNA, 20 bp, synthetic construct
  source 1..20: mol_type = other DNA
atttctgcctggatagtctt

SEQ ID NO: 51922 - DNA, 20 bp, synthetic construct
  source 1..20: mol_type = other DNA
aatttctgcctggatagtct

SEQ ID NO: 51923 - DNA, 20 bp, synthetic construct
  source 1..20: mol_type = other DNA
caatttctgcctggatagtc

SEQ ID NO: 51924 - DNA, 20 bp, synthetic construct
  source 1..20: mol_type = other DNA
gcaatttctgcctggatagt

SEQ ID NO: 51925 - DNA, 20 bp, synthetic construct
  source 1..20: mol_type = other DNA
ggcaatttctgcctggatag

SEQ ID NO: 51926 - DNA, 20 bp, synthetic construct
  source 1..20: mol_type = other DNA
gggcaatttctgcctggata

SEQ ID NO: 51927 - DNA, 20 bp, synthetic construct
  source 1..20: mol_type = other DNA
agggcaatttctgcctggat

SEQ ID NO: 51928 - DNA, 20 bp, synthetic construct
  source 1..20: mol_type = other DNA
gagggcaatttctgcctgga

SEQ ID NO: 51929 - DNA, 20 bp, synthetic construct
  source 1..20: mol_type = other DNA
agagggcaatttctgcctgg

SEQ ID NO: 51930 - DNA, 20 bp, synthetic construct
  source 1..20: mol_type = other DNA
aagagggcaatttctgcctg

SEQ ID NO: 51931 - DNA, 20 bp, synthetic construct
  source 1..20: mol_type = other DNA
gaagagggcaatttctgcct

SEQ ID NO: 51932 - DNA, 20 bp, synthetic construct
  source 1..20: mol_type = other DNA
agaagagggcaatttctgcc

SEQ ID NO: 51933 - DNA, 20 bp, synthetic construct
  source 1..20: mol_type = other DNA
tagaagagggcaatttctgc

SEQ ID NO: 51934 - DNA, 20 bp, synthetic construct
  source 1..20: mol_type = other DNA
atagaagagggcaatttctg

SEQ ID NO: 51935 - DNA, 20 bp, synthetic construct
  source 1..20: mol_type = other DNA
tatagaagagggcaatttct

SEQ ID NO: 51936 - DNA, 20 bp, synthetic construct
  source 1..20: mol_type = other DNA
ttatagaagagggcaatttc

SEQ ID NO: 51937 - DNA, 20 bp, synthetic construct
  source 1..20: mol_type = other DNA
tttatagaagagggcaattt

SEQ ID NO: 51938 - DNA, 20 bp, synthetic construct
  source 1..20: mol_type = other DNA
ttttatagaagagggcaatt

SEQ ID NO: 51939 - DNA, 20 bp, synthetic construct
  source 1..20: mol_type = other DNA
cttttatagaagagggcaat

SEQ ID NO: 51940 - DNA, 20 bp, synthetic construct
  source 1..20: mol_type = other DNA
tcttttatagaagagggcaa

SEQ ID NO: 51941 - DNA, 20 bp, synthetic construct
  source 1..20: mol_type = other DNA
ttcttttatagaagagggca

SEQ ID NO: 51942 - DNA, 20 bp, synthetic construct
  source 1..20: mol_type = other DNA
cttcttttatagaagagggc

SEQ ID NO: 51943 - DNA, 20 bp, synthetic construct
  source 1..20: mol_type = other DNA
tcttcttttatagaagaggg

SEQ ID NO: 51944 - DNA, 20 bp, synthetic construct
  source 1..20: mol_type = other DNA
ttcttcttttatagaagagg

SEQ ID NO: 51945 - DNA, 20 bp, synthetic construct
  source 1..20: mol_type = other DNA
tttcttcttttatagaagag

SEQ ID NO: 51946 - DNA, 20 bp, synthetic construct
  source 1..20: mol_type = other DNA
ttttcttcttttatagaaga

SEQ ID NO: 51947 - DNA, 20 bp, synthetic construct
  source 1..20: mol_type = other DNA
cttttcttcttttatagaag

SEQ ID NO: 51948 - DNA, 20 bp, synthetic construct
  source 1..20: mol_type = other DNA
acttttcttcttttatagaa

SEQ ID NO: 51949 - DNA, 20 bp, synthetic construct
  source 1..20: mol_type = other DNA
tacttttcttcttttataga

SEQ ID NO: 51950 - DNA, 20 bp, synthetic construct
  source 1..20: mol_type = other DNA
atacttttcttcttttatag

SEQ ID NO: 51951 - DNA, 20 bp, synthetic construct
  source 1..20: mol_type = other DNA
aatacttttcttcttttata

SEQ ID NO: 51952 - DNA, 20 bp, synthetic construct
  source 1..20: mol_type = other DNA
taatacttttcttcttttat

SEQ ID NO: 51953 - DNA, 20 bp, synthetic construct
  source 1..20: mol_type = other DNA
ttaatacttttcttctttta

SEQ ID NO: 51954 - DNA, 20 bp, synthetic construct
  source 1..20: mol_type = other DNA
attaatacttttcttctttt

SEQ ID NO: 51955 - DNA, 20 bp, synthetic construct
  source 1..20: mol_type = other DNA
aattaatacttttcttcttt

SEQ ID NO: 51956 - DNA, 20 bp, synthetic construct
  source 1..20: mol_type = other DNA
taattaatacttttcttctt

SEQ ID NO: 51957 - DNA, 20 bp, synthetic construct
  source 1..20: mol_type = other DNA
ctaattaatacttttcttct

SEQ ID NO: 51958 - DNA, 20 bp, synthetic construct
  source 1..20: mol_type = other DNA
cctaattaatacttttcttc

SEQ ID NO: 51959 - DNA, 20 bp, synthetic construct
  source 1..20: mol_type = other DNA
tcctaattaatacttttctt

SEQ ID NO: 51960 - DNA, 20 bp, synthetic construct
  source 1..20: mol_type = other DNA
ttcctaattaatacttttct

SEQ ID NO: 51961 - DNA, 20 bp, synthetic construct
  source 1..20: mol_type = other DNA
cttcctaattaatacttttc

SEQ ID NO: 51962 - DNA, 20 bp, synthetic construct
  source 1..20: mol_type = other DNA
acttcctaattaatactttt

SEQ ID NO: 51963 - DNA, 20 bp, synthetic construct
  source 1..20: mol_type = other DNA
tacttcctaattaatacttt

SEQ ID NO: 51964 - DNA, 20 bp, synthetic construct
  source 1..20: mol_type = other DNA
gtacttcctaattaatactt

SEQ ID NO: 51965 - DNA, 20 bp, synthetic construct
  source 1..20: mol_type = other DNA
agtacttcctaattaatact

SEQ ID NO: 51966 - DNA, 20 bp, synthetic construct
  source 1..20: mol_type = other DNA
tagtacttcctaattaatac

SEQ ID NO: 51967 - DNA, 20 bp, synthetic construct
  source 1..20: mol_type = other DNA
atagtacttcctaattaata

SEQ ID NO: 51968 - DNA, 20 bp, synthetic construct
  source 1..20: mol_type = other DNA
gatagtacttcctaattaat

SEQ ID NO: 51969 - DNA, 20 bp, synthetic construct
  source 1..20: mol_type = other DNA
tgatagtacttcctaattaa

SEQ ID NO: 51970 - DNA, 20 bp, synthetic construct
  source 1..20: mol_type = other DNA
ctgatagtacttcctaatta

SEQ ID NO: 51971 - DNA, 20 bp, synthetic construct
  source 1..20: mol_type = other DNA
actgatagtacttcctaatt

SEQ ID NO: 51972 - DNA, 20 bp, synthetic construct
  source 1..20: mol_type = other DNA
tactgatagtacttcctaat

SEQ ID NO: 51973 - DNA, 20 bp, synthetic construct
  source 1..20: mol_type = other DNA
atactgatagtacttcctaa

SEQ ID NO: 51974 - DNA, 20 bp, synthetic construct
  source 1..20: mol_type = other DNA
catactgatagtacttccta

SEQ ID NO: 51975 - DNA, 20 bp, synthetic construct
  source 1..20: mol_type = other DNA
ccatactgatagtacttcct

SEQ ID NO: 51976 - DNA, 20 bp, synthetic construct
  source 1..20: mol_type = other DNA
tccatactgatagtacttcc

SEQ ID NO: 51977 - DNA, 20 bp, synthetic construct
  source 1..20: mol_type = other DNA
ctccatactgatagtacttc

SEQ ID NO: 51978 - DNA, 20 bp, synthetic construct
  source 1..20: mol_type = other DNA
tctccatactgatagtactt

SEQ ID NO: 51979 - DNA, 20 bp, synthetic construct
  source 1..20: mol_type = other DNA
ttctccatactgatagtact

SEQ ID NO: 51980 - DNA, 20 bp, synthetic construct
  source 1..20: mol_type = other DNA
tttctccatactgatagtac

SEQ ID NO: 51981 - DNA, 20 bp, synthetic construct
  source 1..20: mol_type = other DNA
ttttctccatactgatagta

SEQ ID NO: 51982 - DNA, 20 bp, synthetic construct
  source 1..20: mol_type = other DNA
gttttctccatactgatagt

SEQ ID NO: 51983 - DNA, 20 bp, synthetic construct
  source 1..20: mol_type = other DNA
ggttttctccatactgatag

SEQ ID NO: 51984 - DNA, 20 bp, synthetic construct
  source 1..20: mol_type = other DNA
tggttttctccatactgata

SEQ ID NO: 51985 - DNA, 20 bp, synthetic construct
  source 1..20: mol_type = other DNA
atggttttctccatactgat

SEQ ID NO: 51986 - DNA, 20 bp, synthetic construct
  source 1..20: mol_type = other DNA
aatggttttctccatactga

SEQ ID NO: 51987 - DNA, 20 bp, synthetic construct
  source 1..20: mol_type = other DNA
aaatggttttctccatactg

SEQ ID NO: 51988 - DNA, 20 bp, synthetic construct
  source 1..20: mol_type = other DNA
aaaatggttttctccatact

SEQ ID NO: 51989 - DNA, 20 bp, synthetic construct
  source 1..20: mol_type = other DNA
taaaatggttttctccatac

SEQ ID NO: 51990 - DNA, 20 bp, synthetic construct
  source 1..20: mol_type = other DNA
ctaaaatggttttctccata

SEQ ID NO: 51991 - DNA, 20 bp, synthetic construct
  source 1..20: mol_type = other DNA
tctaaaatggttttctccat

SEQ ID NO: 51992 - DNA, 20 bp, synthetic construct
  source 1..20: mol_type = other DNA
ttctaaaatggttttctcca

SEQ ID NO: 51993 - DNA, 20 bp, synthetic construct
  source 1..20: mol_type = other DNA
attctaaaatggttttctcc

SEQ ID NO: 51994 - DNA, 20 bp, synthetic construct
  source 1..20: mol_type = other DNA
aattctaaaatggttttctc

SEQ ID NO: 51995 - DNA, 20 bp, synthetic construct
  source 1..20: mol_type = other DNA
taattctaaaatggttttct

SEQ ID NO: 51996 - DNA, 20 bp, synthetic construct
  source 1..20: mol_type = other DNA
ataattctaaaatggttttc

SEQ ID NO: 51997 - DNA, 20 bp, synthetic construct
  source 1..20: mol_type = other DNA
aataattctaaaatggtttt

SEQ ID NO: 51998 - DNA, 20 bp, synthetic construct
  source 1..20: mol_type = other DNA
taataattctaaaatggttt

SEQ ID NO: 51999 - DNA, 20 bp, synthetic construct
  source 1..20: mol_type = other DNA
ttaataattctaaaatggtt

SEQ ID NO: 52000 - DNA, 20 bp, synthetic construct
  source 1..20: mol_type = other DNA
attaataattctaaaatggt

SEQ ID NO: 52001 - DNA, 20 bp, synthetic construct
  source 1..20: mol_type = other DNA
aattaataattctaaaatgg

SEQ ID NO: 52002 - DNA, 20 bp, synthetic construct
  source 1..20: mol_type = other DNA
caattaataattctaaaatg

SEQ ID NO: 52003 - DNA, 20 bp, synthetic construct
  source 1..20: mol_type = other DNA
ccaattaataattctaaaat

SEQ ID NO: 52004 - DNA, 20 bp, synthetic construct
  source 1..20: mol_type = other DNA
gccaattaataattctaaaa

SEQ ID NO: 52005 - DNA, 20 bp, synthetic construct
  source 1..20: mol_type = other DNA
tgccaattaataattctaaa

SEQ ID NO: 52006 - DNA, 20 bp, synthetic construct
  source 1..20: mol_type = other DNA
atgccaattaataattctaa

SEQ ID NO: 52007 - DNA, 20 bp, synthetic construct
  source 1..20: mol_type = other DNA
catgccaattaataattcta

SEQ ID NO: 52008 - DNA, 20 bp, synthetic construct
  source 1..20: mol_type = other DNA
ccatgccaattaataattct

SEQ ID NO: 52009 - DNA, 20 bp, synthetic construct
  source 1..20: mol_type = other DNA
accatgccaattaataattc

SEQ ID NO: 52010 - DNA, 20 bp, synthetic construct
  source 1..20: mol_type = other DNA
aaccatgccaattaataatt

SEQ ID NO: 52011 - DNA, 20 bp, synthetic construct
  source 1..20: mol_type = other DNA
aaaccatgccaattaataat

SEQ ID NO: 52012 - DNA, 20 bp, synthetic construct
  source 1..20: mol_type = other DNA
gaaaccatgccaattaataa

SEQ ID NO: 52013 - DNA, 20 bp, synthetic construct
  source 1..20: mol_type = other DNA
ggaaaccatgccaattaata

SEQ ID NO: 52014 - DNA, 20 bp, synthetic construct
  source 1..20: mol_type = other DNA
aggaaaccatgccaattaat

SEQ ID NO: 52015 - DNA, 20 bp, synthetic construct
  source 1..20: mol_type = other DNA
aaggaaaccatgccaattaa

SEQ ID NO: 52016 - DNA, 20 bp, synthetic construct
  source 1..20: mol_type = other DNA
gaaggaaaccatgccaatta

SEQ ID NO: 52017 - DNA, 20 bp, synthetic construct
  source 1..20: mol_type = other DNA
agaaggaaaccatgccaatt

SEQ ID NO: 52018 - DNA, 20 bp, synthetic construct
  source 1..20: mol_type = other DNA
aagaaggaaaccatgccaat

SEQ ID NO: 52019 - DNA, 20 bp, synthetic construct
  source 1..20: mol_type = other DNA
aaagaaggaaaccatgccaa

SEQ ID NO: 52020 - DNA, 20 bp, synthetic construct
  source 1..20: mol_type = other DNA
aaaagaaggaaaccatgcca

SEQ ID NO: 52021 - DNA, 20 bp, synthetic construct
  source 1..20: mol_type = other DNA
aaaaagaaggaaaccatgcc

SEQ ID NO: 52022 - DNA, 20 bp, synthetic construct
  source 1..20: mol_type = other DNA
aaaaaagaaggaaaccatgc

SEQ ID NO: 52023 - DNA, 20 bp, synthetic construct
  source 1..20: mol_type = other DNA
aaaaaaagaaggaaaccatg

SEQ ID NO: 52024 - DNA, 20 bp, synthetic construct
  source 1..20: mol_type = other DNA
aaaaaaaagaaggaaaccat

SEQ ID NO: 52025 - DNA, 20 bp, synthetic construct
  source 1..20: mol_type = other DNA
aaaaaaaaagaaggaaacca

SEQ ID NO: 52026 - DNA, 20 bp, synthetic construct
  source 1..20: mol_type = other DNA
aaaaaaaaaagaaggaaacc

SEQ ID NO: 52027 - DNA, 20 bp, synthetic construct
  source 1..20: mol_type = other DNA
aaaaaaaaaaagaaggaaac

SEQ ID NO: 52028 - DNA, 20 bp, synthetic construct
  source 1..20: mol_type = other DNA
taaaaaaaaaaagaaggaaa

SEQ ID NO: 52029 - DNA, 20 bp, synthetic construct
  source 1..20: mol_type = other DNA
ataaaaaaaaaaagaaggaa

SEQ ID NO: 52030 - DNA, 20 bp, synthetic construct
  source 1..20: mol_type = other DNA
aataaaaaaaaaaagaagga

SEQ ID NO: 52031 - DNA, 20 bp, synthetic construct
  source 1..20: mol_type = other DNA
aaataaaaaaaaaaagaagg

SEQ ID NO: 52032 - DNA, 20 bp, synthetic construct
  source 1..20: mol_type = other DNA
gaaataaaaaaaaaaagaag

SEQ ID NO: 52033 - DNA, 20 bp, synthetic construct
  source 1..20: mol_type = other DNA
cgaaataaaaaaaaaaagaa

SEQ ID NO: 52034 - DNA, 20 bp, synthetic construct
  source 1..20: mol_type = other DNA
tcgaaataaaaaaaaaaaga

SEQ ID NO: 52035 - DNA, 20 bp, synthetic construct
  source 1..20: mol_type = other DNA
ctcgaaataaaaaaaaaaag

SEQ ID NO: 52036 - DNA, 20 bp, synthetic construct
  source 1..20: mol_type = other DNA
tctcgaaataaaaaaaaaaa

SEQ ID NO: 52037 - DNA, 20 bp, synthetic construct
  source 1..20: mol_type = other DNA
atctcgaaataaaaaaaaaa

SEQ ID NO: 52038 - DNA, 20 bp, synthetic construct
  source 1..20: mol_type = other DNA
catctcgaaataaaaaaaaa

SEQ ID NO: 52039 - DNA, 20 bp, synthetic construct
  source 1..20: mol_type = other DNA
ccatctcgaaataaaaaaaa

SEQ ID NO: 52040 - DNA, 20 bp, synthetic construct
  source 1..20: mol_type = other DNA
tccatctcgaaataaaaaaa

SEQ ID NO: 52041 - DNA, 20 bp, synthetic construct
  source 1..20: mol_type = other DNA
ctccatctcgaaataaaaaa

SEQ ID NO: 52042 - DNA, 20 bp, synthetic construct
  source 1..20: mol_type = other DNA
actccatctcgaaataaaaa

SEQ ID NO: 52043 - DNA, 20 bp, synthetic construct
  source 1..20: mol_type = other DNA
gactccatctcgaaataaaa

SEQ ID NO: 52044 - DNA, 20 bp, synthetic construct
  source 1..20: mol_type = other DNA
agactccatctcgaaataaa

SEQ ID NO: 52045 - DNA, 20 bp, synthetic construct
  source 1..20: mol_type = other DNA
gagactccatctcgaaataa

SEQ ID NO: 52046 - DNA, 20 bp, synthetic construct
  source 1..20: mol_type = other DNA
tgagactccatctcgaaata

SEQ ID NO: 52047 - DNA, 20 bp, synthetic construct
  source 1..20: mol_type = other DNA
gtgagactccatctcgaaat

SEQ ID NO: 52048 - DNA, 20 bp, synthetic construct
  source 1..20: mol_type = other DNA
agtgagactccatctcgaaa

SEQ ID NO: 52049 - DNA, 20 bp, synthetic construct
  source 1..20: mol_type = other DNA
gagtgagactccatctcgaa

SEQ ID NO: 52050 - DNA, 20 bp, synthetic construct
  source 1..20: mol_type = other DNA
agagtgagactccatctcga

SEQ ID NO: 52051 - DNA, 20 bp, synthetic construct
  source 1..20: mol_type = other DNA
tagagtgagactccatctcg

SEQ ID NO: 52052 - DNA, 20 bp, synthetic construct
  source 1..20: mol_type = other DNA
atagagtgagactccatctc

SEQ ID NO: 52053 - DNA, 20 bp, synthetic construct
  source 1..20: mol_type = other DNA
aatagagtgagactccatct

SEQ ID NO: 52054 - DNA, 20 bp, synthetic construct
  source 1..20: mol_type = other DNA
aaatagagtgagactccatc

SEQ ID NO: 52055 - DNA, 20 bp, synthetic construct
  source 1..20: mol_type = other DNA
gaaatagagtgagactccat

SEQ ID NO: 52056 - DNA, 20 bp, synthetic construct
  source 1..20: mol_type = other DNA
ggaaatagagtgagactcca

SEQ ID NO: 52057 - DNA, 20 bp, synthetic construct
  source 1..20: mol_type = other DNA
gggaaatagagtgagactcc

SEQ ID NO: 52058 - DNA, 20 bp, synthetic construct
  source 1..20: mol_type = other DNA
tgggaaatagagtgagactc

SEQ ID NO: 52059 - DNA, 20 bp, synthetic construct
  source 1..20: mol_type = other DNA
ctgggaaatagagtgagact

SEQ ID NO: 52060 - DNA, 20 bp, synthetic construct
  source 1..20: mol_type = other DNA
cctgggaaatagagtgagac

SEQ ID NO: 52061 - DNA, 20 bp, synthetic construct
  source 1..20: mol_type = other DNA
gcctgggaaatagagtgaga

SEQ ID NO: 52062 - DNA, 20 bp, synthetic construct
  source 1..20: mol_type = other DNA
agcctgggaaatagagtgag

SEQ ID NO: 52063 - DNA, 20 bp, synthetic construct
  source 1..20: mol_type = other DNA
cagcctgggaaatagagtga

SEQ ID NO: 52064 - DNA, 20 bp, synthetic construct
  source 1..20: mol_type = other DNA
ccagcctgggaaatagagtg

SEQ ID NO: 52065 - DNA, 20 bp, synthetic construct
  source 1..20: mol_type = other DNA
tccagcctgggaaatagagt

SEQ ID NO: 52066 - DNA, 20 bp, synthetic construct
  source 1..20: mol_type = other DNA
ctccagcctgggaaatagag

SEQ ID NO: 52067 - DNA, 20 bp, synthetic construct
  source 1..20: mol_type = other DNA
actccagcctgggaaataga

SEQ ID NO: 52068 - DNA, 20 bp, synthetic construct
  source 1..20: mol_type = other DNA
cactccagcctgggaaatag

SEQ ID NO: 52069 - DNA, 20 bp, synthetic construct
  source 1..20: mol_type = other DNA
gcactccagcctgggaaata

SEQ ID NO: 52070 - DNA, 20 bp, synthetic construct
  source 1..20: mol_type = other DNA
tgcactccagcctgggaaat

SEQ ID NO: 52071 - DNA, 20 bp, synthetic construct
  source 1..20: mol_type = other DNA
ctgcactccagcctgggaaa

SEQ ID NO: 52072 - DNA, 20 bp, synthetic construct
  source 1..20: mol_type = other DNA
actgcactccagcctgggaa

SEQ ID NO: 52073 - DNA, 20 bp, synthetic construct
  source 1..20: mol_type = other DNA
cactgcactccagcctggga

SEQ ID NO: 52074 - DNA, 20 bp, synthetic construct
  source 1..20: mol_type = other DNA
ccactgcactccagcctggg

SEQ ID NO: 52075 - DNA, 20 bp, synthetic construct
  source 1..20: mol_type = other DNA
accactgcactccagcctgg

SEQ ID NO: 52076 - DNA, 20 bp, synthetic construct
  source 1..20: mol_type = other DNA
caccactgcactccagcctg

SEQ ID NO: 52077 - DNA, 20 bp, synthetic construct
  source 1..20: mol_type = other DNA
gcaccactgcactccagcct

SEQ ID NO: 52078 - DNA, 20 bp, synthetic construct
  source 1..20: mol_type = other DNA
cgcaccactgcactccagcc

SEQ ID NO: 52079 - DNA, 20 bp, synthetic construct
  source 1..20: mol_type = other DNA
tcgcaccactgcactccagc

SEQ ID NO: 52080 - DNA, 20 bp, synthetic construct
  source 1..20: mol_type = other DNA
atcgcaccactgcactccag

SEQ ID NO: 52081 - DNA, 20 bp, synthetic construct
  source 1..20: mol_type = other DNA
gatcgcaccactgcactcca

SEQ ID NO: 52082 - DNA, 20 bp, synthetic construct
  source 1..20: mol_type = other DNA
agatcgcaccactgcactcc

SEQ ID NO: 52083 - DNA, 20 bp, synthetic construct
  source 1..20: mol_type = other DNA
gagatcgcaccactgcactc

SEQ ID NO: 52084 - DNA, 20 bp, synthetic construct
  source 1..20: mol_type = other DNA
cgagatcgcaccactgcact

SEQ ID NO: 52085 - DNA, 20 bp, synthetic construct
  source 1..20: mol_type = other DNA
ccgagatcgcaccactgcac

SEQ ID NO: 52086 - DNA, 20 bp, synthetic construct
  source 1..20: mol_type = other DNA
gccgagatcgcaccactgca

SEQ ID NO: 52087 - DNA, 20 bp, synthetic construct
  source 1..20: mol_type = other DNA
agccgagatcgcaccactgc

SEQ ID NO: 52088 - DNA, 20 bp, synthetic construct
  source 1..20: mol_type = other DNA
gagccgagatcgcaccactg

SEQ ID NO: 52089 - DNA, 20 bp, synthetic construct
  source 1..20: mol_type = other DNA
tgagccgagatcgcaccact

SEQ ID NO: 52090 - DNA, 20 bp, synthetic construct
  source 1..20: mol_type = other DNA
gtgagccgagatcgcaccac

SEQ ID NO: 52091 - DNA, 20 bp, synthetic construct
  source 1..20: mol_type = other DNA
agtgagccgagatcgcacca

SEQ ID NO: 52092 - DNA, 20 bp, synthetic construct
  source 1..20: mol_type = other DNA
cagtgagccgagatcgcacc

SEQ ID NO: 52093 - DNA, 20 bp, synthetic construct
  source 1..20: mol_type = other DNA
gcagtgagccgagatcgcac

SEQ ID NO: 52094 - DNA, 20 bp, synthetic construct
  source 1..20: mol_type = other DNA
tgcagtgagccgagatcgca

SEQ ID NO: 52095 - DNA, 20 bp, synthetic construct
  source 1..20: mol_type = other DNA
ttgcagtgagccgagatcgc

SEQ ID NO: 52096 - DNA, 20 bp, synthetic construct
  source 1..20: mol_type = other DNA
gttgcagtgagccgagatcg

SEQ ID NO: 52097 - DNA, 20 bp, synthetic construct
  source 1..20: mol_type = other DNA
ggttgcagtgagccgagatc

SEQ ID NO: 52098 - DNA, 20 bp, synthetic construct
  source 1..20: mol_type = other DNA
aggttgcagtgagccgagat

SEQ ID NO: 52099 - DNA, 20 bp, synthetic construct
  source 1..20: mol_type = other DNA
gaggttgcagtgagccgaga

SEQ ID NO: 52100 - DNA, 20 bp, synthetic construct
  source 1..20: mol_type = other DNA
agaggttgcagtgagccgag

SEQ ID NO: 52101 - DNA, 20 bp, synthetic construct
  source 1..20: mol_type = other DNA
cagaggttgcagtgagccga

SEQ ID NO: 52102 - DNA, 20 bp, synthetic construct
  source 1..20: mol_type = other DNA
gcagaggttgcagtgagccg

SEQ ID NO: 52103 - DNA, 20 bp, synthetic construct
  source 1..20: mol_type = other DNA
ggcagaggttgcagtgagcc

SEQ ID NO: 52104 - DNA, 20 bp, synthetic construct
  source 1..20: mol_type = other DNA
aggcagaggttgcagtgagc

SEQ ID NO: 52105 - DNA, 20 bp, synthetic construct
  source 1..20: mol_type = other DNA
gaggcagaggttgcagtgag

SEQ ID NO: 52106 - DNA, 20 bp, synthetic construct
  source 1..20: mol_type = other DNA
ggaggcagaggttgcagtga

SEQ ID NO: 52107 - DNA, 20 bp, synthetic construct
  source 1..20: mol_type = other DNA
aggaggcagaggttgcagtg

SEQ ID NO: 52108 - DNA, 20 bp, synthetic construct
  source 1..20: mol_type = other DNA
caggaggcagaggttgcagt

SEQ ID NO: 52109 - DNA, 20 bp, synthetic construct
  source 1..20: mol_type = other DNA
ccaggaggcagaggttgcag

SEQ ID NO: 52110 - DNA, 20 bp, synthetic construct
  source 1..20: mol_type = other DNA
cccaggaggcagaggttgca

SEQ ID NO: 52111 - DNA, 20 bp, synthetic construct
  source 1..20: mol_type = other DNA
acccaggaggcagaggttgc

SEQ ID NO: 52112 - DNA, 20 bp, synthetic construct
  source 1..20: mol_type = other DNA
aacccaggaggcagaggttg

SEQ ID NO: 52113 - DNA, 20 bp, synthetic construct
  source 1..20: mol_type = other DNA
aaacccaggaggcagaggtt

SEQ ID NO: 52114 - DNA, 20 bp, synthetic construct
  source 1..20: mol_type = other DNA
taaacccaggaggcagaggt

SEQ ID NO: 52115 - DNA, 20 bp, synthetic construct
  source 1..20: mol_type = other DNA
ttaaacccaggaggcagagg

SEQ ID NO: 52116 - DNA, 20 bp, synthetic construct
  source 1..20: mol_type = other DNA
cttaaacccaggaggcagag

SEQ ID NO: 52117 - DNA, 20 bp, synthetic construct
  source 1..20: mol_type = other DNA
gcttaaacccaggaggcaga

SEQ ID NO: 52118 - DNA, 20 bp, synthetic construct
  source 1..20: mol_type = other DNA
cgcttaaacccaggaggcag

SEQ ID NO: 52119 - DNA, 20 bp, synthetic construct
  source 1..20: mol_type = other DNA
tcgcttaaacccaggaggca

SEQ ID NO: 52120 - DNA, 20 bp, synthetic construct
  source 1..20: mol_type = other DNA
atcgcttaaacccaggaggc

SEQ ID NO: 52121 - DNA, 20 bp, synthetic construct
  source 1..20: mol_type = other DNA
aatcgcttaaacccaggagg

SEQ ID NO: 52122 - DNA, 20 bp, synthetic construct
  source 1..20: mol_type = other DNA
gaatcgcttaaacccaggag

SEQ ID NO: 52123 - DNA, 20 bp, synthetic construct
  source 1..20: mol_type = other DNA
agaatcgcttaaacccagga

SEQ ID NO: 52124 - DNA, 20 bp, synthetic construct
  source 1..20: mol_type = other DNA
gagaatcgcttaaacccagg

SEQ ID NO: 52125 - DNA, 20 bp, synthetic construct
  source 1..20: mol_type = other DNA
ggagaatcgcttaaacccag

SEQ ID NO: 52126 - DNA, 20 bp, synthetic construct
  source 1..20: mol_type = other DNA
aggagaatcgcttaaaccca

SEQ ID NO: 52127 - DNA, 20 bp, synthetic construct
  source 1..20: mol_type = other DNA
caggagaatcgcttaaaccc

SEQ ID NO: 52128 - DNA, 20 bp, synthetic construct
  source 1..20: mol_type = other DNA
gcaggagaatcgcttaaacc

SEQ ID NO: 52129 - DNA, 20 bp, synthetic construct
  source 1..20: mol_type = other DNA
ggcaggagaatcgcttaaac

SEQ ID NO: 52130 - DNA, 20 bp, synthetic construct
  source 1..20: mol_type = other DNA
aggcaggagaatcgcttaaa

SEQ ID NO: 52131 - DNA, 20 bp, synthetic construct
  source 1..20: mol_type = other DNA
gaggcaggagaatcgcttaa

SEQ ID NO: 52132 - DNA, 20 bp, synthetic construct
  source 1..20: mol_type = other DNA
tgaggcaggagaatcgctta

SEQ ID NO: 52133 - DNA, 20 bp, synthetic construct
  source 1..20: mol_type = other DNA
ctgaggcaggagaatcgctt

SEQ ID NO: 52134 - DNA, 20 bp, synthetic construct
  source 1..20: mol_type = other DNA
gctgaggcaggagaatcgct

SEQ ID NO: 52135 - DNA, 20 bp, synthetic construct
  source 1..20: mol_type = other DNA
ggctgaggcaggagaatcgc

SEQ ID NO: 52136 - DNA, 20 bp, synthetic construct
  source 1..20: mol_type = other DNA
aggctgaggcaggagaatcg

SEQ ID NO: 52137 - DNA, 20 bp, synthetic construct
  source 1..20: mol_type = other DNA
gaggctgaggcaggagaatc

SEQ ID NO: 52138 - DNA, 20 bp, synthetic construct
  source 1..20: mol_type = other DNA
ggaggctgaggcaggagaat

SEQ ID NO: 52139 - DNA, 20 bp, synthetic construct
  source 1..20: mol_type = other DNA
gggaggctgaggcaggagaa

SEQ ID NO: 52140 - DNA, 20 bp, synthetic construct
  source 1..20: mol_type = other DNA
cgggaggctgaggcaggaga

SEQ ID NO: 52141 - DNA, 20 bp, synthetic construct
  source 1..20: mol_type = other DNA
tcgggaggctgaggcaggag

SEQ ID NO: 52142 - DNA, 20 bp, synthetic construct
  source 1..20: mol_type = other DNA
ctcgggaggctgaggcagga

SEQ ID NO: 52143 - DNA, 20 bp, synthetic construct
  source 1..20: mol_type = other DNA
actcgggaggctgaggcagg

SEQ ID NO: 52144 - DNA, 20 bp, synthetic construct
  source 1..20: mol_type = other DNA
tactcgggaggctgaggcag

SEQ ID NO: 52145 - DNA, 20 bp, synthetic construct
  source 1..20: mol_type = other DNA
ctactcgggaggctgaggca

SEQ ID NO: 52146 - DNA, 20 bp, synthetic construct
  source 1..20: mol_type = other DNA
gctactcgggaggctgaggc

SEQ ID NO: 52147 - DNA, 20 bp, synthetic construct
  source 1..20: mol_type = other DNA
agctactcgggaggctgagg

SEQ ID NO: 52148 - DNA, 20 bp, synthetic construct
  source 1..20: mol_type = other DNA
cagctactcgggaggctgag

SEQ ID NO: 52149 - DNA, 20 bp, synthetic construct
  source 1..20: mol_type = other DNA
ccagctactcgggaggctga

SEQ ID NO: 52150 - DNA, 20 bp, synthetic construct
  source 1..20: mol_type = other DNA
cccagctactcgggaggctg

SEQ ID NO: 52151 - DNA, 20 bp, synthetic construct
  source 1..20: mol_type = other DNA
tcccagctactcgggaggct

SEQ ID NO: 52152 - DNA, 20 bp, synthetic construct
  source 1..20: mol_type = other DNA
atcccagctactcgggaggc

SEQ ID NO: 52153 - DNA, 20 bp, synthetic construct
  source 1..20: mol_type = other DNA
aatcccagctactcgggagg

SEQ ID NO: 52154 - DNA, 20 bp, synthetic construct
  source 1..20: mol_type = other DNA
taatcccagctactcgggag

SEQ ID NO: 52155 - DNA, 20 bp, synthetic construct
  source 1..20: mol_type = other DNA
ataatcccagctactcggga

SEQ ID NO: 52156 - DNA, 20 bp, synthetic construct
  source 1..20: mol_type = other DNA
tataatcccagctactcggg

SEQ ID NO: 52157 - DNA, 20 bp, synthetic construct
  source 1..20: mol_type = other DNA
ctataatcccagctactcgg

SEQ ID NO: 52158 - DNA, 20 bp, synthetic construct
  source 1..20: mol_type = other DNA
cctataatcccagctactcg

SEQ ID NO: 52159 - DNA, 20 bp, synthetic construct
  source 1..20: mol_type = other DNA
gcctataatcccagctactc

SEQ ID NO: 52160 - DNA, 20 bp, synthetic construct
  source 1..20: mol_type = other DNA
tgcctataatcccagctact

SEQ ID NO: 52161 - DNA, 20 bp, synthetic construct
  source 1..20: mol_type = other DNA
gtgcctataatcccagctac

SEQ ID NO: 52162 - DNA, 20 bp, synthetic construct
  source 1..20: mol_type = other DNA
tgtgcctataatcccagcta

SEQ ID NO: 52163 - DNA, 20 bp, synthetic construct
  source 1..20: mol_type = other DNA
atgtgcctataatcccagct

SEQ ID NO: 52164 - DNA, 20 bp, synthetic construct
  source 1..20: mol_type = other DNA
tatgtgcctataatcccagc

SEQ ID NO: 52165 - DNA, 20 bp, synthetic construct
  source 1..20: mol_type = other DNA
gtatgtgcctataatcccag

SEQ ID NO: 52166 - DNA, 20 bp, synthetic construct
  source 1..20: mol_type = other DNA
ggtatgtgcctataatccca

SEQ ID NO: 52167 - DNA, 20 bp, synthetic construct
  source 1..20: mol_type = other DNA
tggtatgtgcctataatccc

SEQ ID NO: 52168 - DNA, 20 bp, synthetic construct
  source 1..20: mol_type = other DNA
gtggtatgtgcctataatcc

SEQ ID NO: 52169 - DNA, 20 bp, synthetic construct
  source 1..20: mol_type = other DNA
ggtggtatgtgcctataatc

SEQ ID NO: 52170 - DNA, 20 bp, synthetic construct
  source 1..20: mol_type = other DNA
tggtggtatgtgcctataat

SEQ ID NO: 52171 - DNA, 20 bp, synthetic construct
  source 1..20: mol_type = other DNA
atggtggtatgtgcctataa

SEQ ID NO: 52172 - DNA, 20 bp, synthetic construct
  source 1..20: mol_type = other DNA
catggtggtatgtgcctata

SEQ ID NO: 52173 - DNA, 20 bp, synthetic construct
  source 1..20: mol_type = other DNA
gcatggtggtatgtgcctat

SEQ ID NO: 52174 - DNA, 20 bp, synthetic construct
  source 1..20: mol_type = other DNA
ggcatggtggtatgtgccta

SEQ ID NO: 52175 - DNA, 20 bp, synthetic construct
  source 1..20: mol_type = other DNA
gggcatggtggtatgtgcct

SEQ ID NO: 52176 - DNA, 20 bp, synthetic construct
  source 1..20: mol_type = other DNA
agggcatggtggtatgtgcc

SEQ ID NO: 52177 - DNA, 20 bp, synthetic construct
  source 1..20: mol_type = other DNA
cagggcatggtggtatgtgc

SEQ ID NO: 52178 - DNA, 20 bp, synthetic construct
  source 1..20: mol_type = other DNA
gcagggcatggtggtatgtg

SEQ ID NO: 52179 - DNA, 20 bp, synthetic construct
  source 1..20: mol_type = other DNA
agcagggcatggtggtatgt

SEQ ID NO: 52180 - DNA, 20 bp, synthetic construct
  source 1..20: mol_type = other DNA
tagcagggcatggtggtatg

SEQ ID NO: 52181 - DNA, 20 bp, synthetic construct
  source 1..20: mol_type = other DNA
ttagcagggcatggtggtat

SEQ ID NO: 52182 - DNA, 20 bp, synthetic construct
  source 1..20: mol_type = other DNA
attagcagggcatggtggta

SEQ ID NO: 52183 - DNA, 20 bp, synthetic construct
  source 1..20: mol_type = other DNA
aattagcagggcatggtggt

SEQ ID NO: 52184 - DNA, 20 bp, synthetic construct
  source 1..20: mol_type = other DNA
aaattagcagggcatggtgg

SEQ ID NO: 52185 - DNA, 20 bp, synthetic construct
  source 1..20: mol_type = other DNA
aaaattagcagggcatggtg

SEQ ID NO: 52186 - DNA, 20 bp, synthetic construct
  source 1..20: mol_type = other DNA
aaaaattagcagggcatggt

SEQ ID NO: 52187 - DNA, 20 bp, synthetic construct
  source 1..20: mol_type = other DNA
aaaaaattagcagggcatgg

SEQ ID NO: 52188 - DNA, 20 bp, synthetic construct
  source 1..20: mol_type = other DNA
aaaaaaattagcagggcatg

SEQ ID NO: 52189 - DNA, 20 bp, synthetic construct
  source 1..20: mol_type = other DNA
aaaaaaaattagcagggcat

SEQ ID NO: 52190 - DNA, 20 bp, synthetic construct
  source 1..20: mol_type = other DNA
aaaaaaaaattagcagggca

SEQ ID NO: 52191 - DNA, 20 bp, synthetic construct
  source 1..20: mol_type = other DNA
aaaaaaaaaattagcagggc

SEQ ID NO: 52192 - DNA, 20 bp, synthetic construct
  source 1..20: mol_type = other DNA
aaaaaaaaaaattagcaggg

SEQ ID NO: 52193 - DNA, 20 bp, synthetic construct
  source 1..20: mol_type = other DNA
caaaaaaaaaaattagcagg

SEQ ID NO: 52194 - DNA, 20 bp, synthetic construct
  source 1..20: mol_type = other DNA
acaaaaaaaaaaattagcag

SEQ ID NO: 52195 - DNA, 20 bp, synthetic construct
  source 1..20: mol_type = other DNA
aacaaaaaaaaaaattagca

SEQ ID NO: 52196 - DNA, 20 bp, synthetic construct
  source 1..20: mol_type = other DNA
aaacaaaaaaaaaaattagc

SEQ ID NO: 52197 - DNA, 20 bp, synthetic construct
  source 1..20: mol_type = other DNA
caaacaaaaaaaaaaattag

SEQ ID NO: 52198 - DNA, 20 bp, synthetic construct
  source 1..20: mol_type = other DNA
acaaacaaaaaaaaaaatta

SEQ ID NO: 52199 - DNA, 20 bp, synthetic construct
  source 1..20: mol_type = other DNA
tacaaacaaaaaaaaaaatt

SEQ ID NO: 52200 - DNA, 20 bp, synthetic construct
  source 1..20: mol_type = other DNA
atacaaacaaaaaaaaaaat

SEQ ID NO: 52201 - DNA, 20 bp, synthetic construct
  source 1..20: mol_type = other DNA
aatacaaacaaaaaaaaaaa

SEQ ID NO: 52202 - DNA, 20 bp, synthetic construct
  source 1..20: mol_type = other DNA
gaatacaaacaaaaaaaaaa

SEQ ID NO: 52203 - DNA, 20 bp, synthetic construct
  source 1..20: mol_type = other DNA
agaatacaaacaaaaaaaaa

SEQ ID NO: 52204 - DNA, 20 bp, synthetic construct
  source 1..20: mol_type = other DNA
aagaatacaaacaaaaaaaa

SEQ ID NO: 52205 - DNA, 20 bp, synthetic construct
  source 1..20: mol_type = other DNA
taagaatacaaacaaaaaaa

SEQ ID NO: 52206 - DNA, 20 bp, synthetic construct
  source 1..20: mol_type = other DNA
ctaagaatacaaacaaaaaa

SEQ ID NO: 52207 - DNA, 20 bp, synthetic construct
  source 1..20: mol_type = other DNA
actaagaatacaaacaaaaa

SEQ ID NO: 52208 - DNA, 20 bp, synthetic construct
  source 1..20: mol_type = other DNA
tactaagaatacaaacaaaa

SEQ ID NO: 52209 - DNA, 20 bp, synthetic construct
  source 1..20: mol_type = other DNA
gtactaagaatacaaacaaa

SEQ ID NO: 52210 - DNA, 20 bp, synthetic construct
  source 1..20: mol_type = other DNA
tgtactaagaatacaaacaa

SEQ ID NO: 52211 - DNA, 20 bp, synthetic construct
  source 1..20: mol_type = other DNA
ctgtactaagaatacaaaca

SEQ ID NO: 52212 - DNA, 20 bp, synthetic construct
  source 1..20: mol_type = other DNA
tctgtactaagaatacaaac

SEQ ID NO: 52213 - DNA, 20 bp, synthetic construct
  source 1..20: mol_type = other DNA
gtctgtactaagaatacaaa

SEQ ID NO: 52214 - DNA, 20 bp, synthetic construct
  source 1..20: mol_type = other DNA
agtctgtactaagaatacaa

SEQ ID NO: 52215 - DNA, 20 bp, synthetic construct
  source 1..20: mol_type = other DNA
cagtctgtactaagaataca

SEQ ID NO: 52216 - DNA, 20 bp, synthetic construct
  source 1..20: mol_type = other DNA
ccagtctgtactaagaatac

SEQ ID NO: 52217 - DNA, 20 bp, synthetic construct
  source 1..20: mol_type = other DNA
cccagtctgtactaagaata

SEQ ID NO: 52218 - DNA, 20 bp, synthetic construct
  source 1..20: mol_type = other DNA
acccagtctgtactaagaat

SEQ ID NO: 52219 - DNA, 20 bp, synthetic construct
  source 1..20: mol_type = other DNA
aacccagtctgtactaagaa

SEQ ID NO: 52220 - DNA, 20 bp, synthetic construct
  source 1..20: mol_type = other DNA
aaacccagtctgtactaaga

SEQ ID NO: 52221 - DNA, 20 bp, synthetic construct
  source 1..20: mol_type = other DNA
gaaacccagtctgtactaag

SEQ ID NO: 52222 - DNA, 20 bp, synthetic construct
  source 1..20: mol_type = other DNA
tgaaacccagtctgtactaa

SEQ ID NO: 52223 - DNA, 20 bp, synthetic construct
  source 1..20: mol_type = other DNA
gtgaaacccagtctgtacta

SEQ ID NO: 52224 - DNA, 20 bp, synthetic construct
  source 1..20: mol_type = other DNA
ggtgaaacccagtctgtact

SEQ ID NO: 52225 - DNA, 20 bp, synthetic construct
  source 1..20: mol_type = other DNA
tggtgaaacccagtctgtac

SEQ ID NO: 52226 - DNA, 20 bp, synthetic construct
  source 1..20: mol_type = other DNA
atggtgaaacccagtctgta

SEQ ID NO: 52227 - DNA, 20 bp, synthetic construct
  source 1..20: mol_type = other DNA
catggtgaaacccagtctgt

SEQ ID NO: 52228 - DNA, 20 bp, synthetic construct
  source 1..20: mol_type = other DNA
acatggtgaaacccagtctg

SEQ ID NO: 52229 - DNA, 20 bp, synthetic construct
  source 1..20: mol_type = other DNA
aacatggtgaaacccagtct

SEQ ID NO: 52230 - DNA, 20 bp, synthetic construct
  source 1..20: mol_type = other DNA
caacatggtgaaacccagtc

SEQ ID NO: 52231 - DNA, 20 bp, synthetic construct
  source 1..20: mol_type = other DNA
ccaacatggtgaaacccagt

SEQ ID NO: 52232 - DNA, 20 bp, synthetic construct
  source 1..20: mol_type = other DNA
gccaacatggtgaaacccag

SEQ ID NO: 52233 - DNA, 20 bp, synthetic construct
  source 1..20: mol_type = other DNA
ggccaacatggtgaaaccca

SEQ ID NO: 52234 - DNA, 20 bp, synthetic construct
  source 1..20: mol_type = other DNA
tggccaacatggtgaaaccc

SEQ ID NO: 52235 - DNA, 20 bp, synthetic construct
  source 1..20: mol_type = other DNA
ctggccaacatggtgaaacc

SEQ ID NO: 52236 - DNA, 20 bp, synthetic construct
  source 1..20: mol_type = other DNA
cctggccaacatggtgaaac

SEQ ID NO: 52237 - DNA, 20 bp, synthetic construct
  source 1..20: mol_type = other DNA
gcctggccaacatggtgaaa

SEQ ID NO: 52238 - DNA, 20 bp, synthetic construct
  source 1..20: mol_type = other DNA
ggcctggccaacatggtgaa

SEQ ID NO: 52239 - DNA, 20 bp, synthetic construct
  source 1..20: mol_type = other DNA
cggcctggccaacatggtga

SEQ ID NO: 52240 - DNA, 20 bp, synthetic construct
  source 1..20: mol_type = other DNA
gcggcctggccaacatggtg

SEQ ID NO: 52241 - DNA, 20 bp, synthetic construct
  source 1..20: mol_type = other DNA
tgcggcctggccaacatggt

SEQ ID NO: 52242 - DNA, 20 bp, synthetic construct
  source 1..20: mol_type = other DNA
atgcggcctggccaacatgg

SEQ ID NO: 52243 - DNA, 20 bp, synthetic construct
  source 1..20: mol_type = other DNA
catgcggcctggccaacatg

SEQ ID NO: 52244 - DNA, 20 bp, synthetic construct
  source 1..20: mol_type = other DNA
ccatgcggcctggccaacat

SEQ ID NO: 52245 - DNA, 20 bp, synthetic construct
  source 1..20: mol_type = other DNA
accatgcggcctggccaaca

SEQ ID NO: 52246 - DNA, 20 bp, synthetic construct
  source 1..20: mol_type = other DNA
aaccatgcggcctggccaac

SEQ ID NO: 52247 - DNA, 20 bp, synthetic construct
  source 1..20: mol_type = other DNA
aaaccatgcggcctggccaa

SEQ ID NO: 52248 - DNA, 20 bp, synthetic construct
  source 1..20: mol_type = other DNA
aaaaccatgcggcctggcca

SEQ ID NO: 52249 - DNA, 20 bp, synthetic construct
  source 1..20: mol_type = other DNA
gaaaaccatgcggcctggcc

SEQ ID NO: 52250 - DNA, 20 bp, synthetic construct
  source 1..20: mol_type = other DNA
ggaaaaccatgcggcctggc

SEQ ID NO: 52251 - DNA, 20 bp, synthetic construct
  source 1..20: mol_type = other DNA
aggaaaaccatgcggcctgg

SEQ ID NO: 52252 - DNA, 20 bp, synthetic construct
  source 1..20: mol_type = other DNA
aaggaaaaccatgcggcctg

SEQ ID NO: 52253 - DNA, 20 bp, synthetic construct
  source 1..20: mol_type = other DNA
taaggaaaaccatgcggcct

SEQ ID NO: 52254 - DNA, 20 bp, synthetic construct
  source 1..20: mol_type = other DNA
ttaaggaaaaccatgcggcc

SEQ ID NO: 52255 - DNA, 20 bp, synthetic construct
  source 1..20: mol_type = other DNA
attaaggaaaaccatgcggc

SEQ ID NO: 52256 - DNA, 20 bp, synthetic construct
  source 1..20: mol_type = other DNA
tattaaggaaaaccatgcgg

SEQ ID NO: 52257 - DNA, 20 bp, synthetic construct
  source 1..20: mol_type = other DNA
ttattaaggaaaaccatgcg

SEQ ID NO: 52258 - DNA, 20 bp, synthetic construct
  source 1..20: mol_type = other DNA
gttattaaggaaaaccatgc

SEQ ID NO: 52259 - DNA, 20 bp, synthetic construct
  source 1..20: mol_type = other DNA
tgttattaaggaaaaccatg

SEQ ID NO: 52260 - DNA, 20 bp, synthetic construct
  source 1..20: mol_type = other DNA
ttgttattaaggaaaaccat

SEQ ID NO: 52261 - DNA, 20 bp, synthetic construct
  source 1..20: mol_type = other DNA
tttgttattaaggaaaacca

SEQ ID NO: 52262 - DNA, 20 bp, synthetic construct
  source 1..20: mol_type = other DNA
ttttgttattaaggaaaacc

SEQ ID NO: 52263 - DNA, 20 bp, synthetic construct
  source 1..20: mol_type = other DNA
attttgttattaaggaaaac

SEQ ID NO: 52264 - DNA, 20 bp, synthetic construct
  source 1..20: mol_type = other DNA
aattttgttattaaggaaaa

SEQ ID NO: 52265 - DNA, 20 bp, synthetic construct
  source 1..20: mol_type = other DNA
taattttgttattaaggaaa

SEQ ID NO: 52266 - DNA, 20 bp, synthetic construct
  source 1..20: mol_type = other DNA
ttaattttgttattaaggaa

SEQ ID NO: 52267 - DNA, 20 bp, synthetic construct
  source 1..20: mol_type = other DNA
cttaattttgttattaagga

SEQ ID NO: 52268 - DNA, 20 bp, synthetic construct
  source 1..20: mol_type = other DNA
ccttaattttgttattaagg

SEQ ID NO: 52269 - DNA, 20 bp, synthetic construct
  source 1..20: mol_type = other DNA
gccttaattttgttattaag

SEQ ID NO: 52270 - DNA, 20 bp, synthetic construct
  source 1..20: mol_type = other DNA
tgccttaattttgttattaa

SEQ ID NO: 52271 - DNA, 20 bp, synthetic construct
  source 1..20: mol_type = other DNA
atgccttaattttgttatta

SEQ ID NO: 52272 - DNA, 20 bp, synthetic construct
  source 1..20: mol_type = other DNA
aatgccttaattttgttatt

SEQ ID NO: 52273 - DNA, 20 bp, synthetic construct
  source 1..20: mol_type = other DNA
aaatgccttaattttgttat

SEQ ID NO: 52274 - DNA, 20 bp, synthetic construct
  source 1..20: mol_type = other DNA
taaatgccttaattttgtta

SEQ ID NO: 52275 - DNA, 20 bp, synthetic construct
  source 1..20: mol_type = other DNA
ataaatgccttaattttgtt

SEQ ID NO: 52276 - DNA, 20 bp, synthetic construct
  source 1..20: mol_type = other DNA
aataaatgccttaattttgt

SEQ ID NO: 52277 - DNA, 20 bp, synthetic construct
  source 1..20: mol_type = other DNA
taataaatgccttaattttg

SEQ ID NO: 52278 - DNA, 20 bp, synthetic construct
  source 1..20: mol_type = other DNA
gtaataaatgccttaatttt

SEQ ID NO: 52279 - DNA, 20 bp, synthetic construct
  source 1..20: mol_type = other DNA
agtaataaatgccttaattt

SEQ ID NO: 52280 - DNA, 20 bp, synthetic construct
  source 1..20: mol_type = other DNA
cagtaataaatgccttaatt

SEQ ID NO: 52281 - DNA, 20 bp, synthetic construct
  source 1..20: mol_type = other DNA
gcagtaataaatgccttaat

SEQ ID NO: 52282 - DNA, 20 bp, synthetic construct
  source 1..20: mol_type = other DNA
tgcagtaataaatgccttaa

SEQ ID NO: 52283 - DNA, 20 bp, synthetic construct
  source 1..20: mol_type = other DNA
atgcagtaataaatgcctta

SEQ ID NO: 52284 - DNA, 20 bp, synthetic construct
  source 1..20: mol_type = other DNA
gatgcagtaataaatgcctt

SEQ ID NO: 52285 - DNA, 20 bp, synthetic construct
  source 1..20: mol_type = other DNA
agatgcagtaataaatgcct

SEQ ID NO: 52286 - DNA, 20 bp, synthetic construct
  source 1..20: mol_type = other DNA
tagatgcagtaataaatgcc

SEQ ID NO: 52287 - DNA, 20 bp, synthetic construct
  source 1..20: mol_type = other DNA
ctagatgcagtaataaatgc

SEQ ID NO: 52288 - DNA, 20 bp, synthetic construct
  source 1..20: mol_type = other DNA
tctagatgcagtaataaatg

SEQ ID NO: 52289 - DNA, 20 bp, synthetic construct
  source 1..20: mol_type = other DNA
atctagatgcagtaataaat

SEQ ID NO: 52290 - DNA, 20 bp, synthetic construct
  source 1..20: mol_type = other DNA
aatctagatgcagtaataaa

SEQ ID NO: 52291 - DNA, 20 bp, synthetic construct
  source 1..20: mol_type = other DNA
aaatctagatgcagtaataa

SEQ ID NO: 52292 - DNA, 20 bp, synthetic construct
  source 1..20: mol_type = other DNA
aaaatctagatgcagtaata

SEQ ID NO: 52293 - DNA, 20 bp, synthetic construct
  source 1..20: mol_type = other DNA
aaaaatctagatgcagtaat

SEQ ID NO: 52294 - DNA, 20 bp, synthetic construct
  source 1..20: mol_type = other DNA
aaaaaatctagatgcagtaa

SEQ ID NO: 52295 - DNA, 20 bp, synthetic construct
  source 1..20: mol_type = other DNA
aaaaaaatctagatgcagta

SEQ ID NO: 52296 - DNA, 20 bp, synthetic construct
  source 1..20: mol_type = other DNA
aaaaaaaatctagatgcagt

SEQ ID NO: 52297 - DNA, 20 bp, synthetic construct
  source 1..20: mol_type = other DNA
taaaaaaaatctagatgcag

SEQ ID NO: 52298 - DNA, 20 bp, synthetic construct
  source 1..20: mol_type = other DNA
ataaaaaaaatctagatgca

SEQ ID NO: 52299 - DNA, 20 bp, synthetic construct
  source 1..20: mol_type = other DNA
aataaaaaaaatctagatgc

SEQ ID NO: 52300 - DNA, 20 bp, synthetic construct
  source 1..20: mol_type = other DNA
aaataaaaaaaatctagatg

SEQ ID NO: 52301 - DNA, 20 bp, synthetic construct
  source 1..20: mol_type = other DNA
aaaataaaaaaaatctagat

SEQ ID NO: 52302 - DNA, 20 bp, synthetic construct
  source 1..20: mol_type = other DNA
aaaaataaaaaaaatctaga

SEQ ID NO: 52303 - DNA, 20 bp, synthetic construct
  source 1..20: mol_type = other DNA
aaaaaataaaaaaaatctag

SEQ ID NO: 52304 - DNA, 20 bp, synthetic construct
  source 1..20: mol_type = other DNA
taaaaaataaaaaaaatcta

SEQ ID NO: 52305 - DNA, 20 bp, synthetic construct
  source 1..20: mol_type = other DNA
ataaaaaataaaaaaaatct

SEQ ID NO: 52306 - DNA, 20 bp, synthetic construct
  source 1..20: mol_type = other DNA
aataaaaaataaaaaaaatc

SEQ ID NO: 52307 - DNA, 20 bp, synthetic construct
  source 1..20: mol_type = other DNA
taataaaaaataaaaaaaat

SEQ ID NO: 52308 - DNA, 20 bp, synthetic construct
  source 1..20: mol_type = other DNA
ctaataaaaaataaaaaaaa

SEQ ID NO: 52309 - DNA, 20 bp, synthetic construct
  source 1..20: mol_type = other DNA
tctaataaaaaataaaaaaa

SEQ ID NO: 52310 - DNA, 20 bp, synthetic construct
  source 1..20: mol_type = other DNA
ctctaataaaaaataaaaaa

SEQ ID NO: 52311 - DNA, 20 bp, synthetic construct
  source 1..20: mol_type = other DNA
tctctaataaaaaataaaaa

SEQ ID NO: 52312 - DNA, 20 bp, synthetic construct
  source 1..20: mol_type = other DNA
gtctctaataaaaaataaaa

SEQ ID NO: 52313 - DNA, 20 bp, synthetic construct
  source 1..20: mol_type = other DNA
agtctctaataaaaaataaa

SEQ ID NO: 52314 - DNA, 20 bp, synthetic construct
  source 1..20: mol_type = other DNA
aagtctctaataaaaaataa

SEQ ID NO: 52315 - DNA, 20 bp, synthetic construct
  source 1..20: mol_type = other DNA
taagtctctaataaaaaata

SEQ ID NO: 52316 - DNA, 20 bp, synthetic construct
  source 1..20: mol_type = other DNA
gtaagtctctaataaaaaat

SEQ ID NO: 52317 - DNA, 20 bp, synthetic construct
  source 1..20: mol_type = other DNA
agtaagtctctaataaaaaa

SEQ ID NO: 52318 - DNA, 20 bp, synthetic construct
  source 1..20: mol_type = other DNA
gagtaagtctctaataaaaa

SEQ ID NO: 52319 - DNA, 20 bp, synthetic construct
  source 1..20: mol_type = other DNA
tgagtaagtctctaataaaa

SEQ ID NO: 52320 - DNA, 20 bp, synthetic construct
  source 1..20: mol_type = other DNA
ctgagtaagtctctaataaa

SEQ ID NO: 52321 - DNA, 20 bp, synthetic construct
  source 1..20: mol_type = other DNA
tctgagtaagtctctaataa

SEQ ID NO: 52322 - DNA, 20 bp, synthetic construct
  source 1..20: mol_type = other DNA
atctgagtaagtctctaata

SEQ ID NO: 52323 - DNA, 20 bp, synthetic construct
  source 1..20: mol_type = other DNA
aatctgagtaagtctctaat

SEQ ID NO: 52324 - DNA, 20 bp, synthetic construct
  source 1..20: mol_type = other DNA
taatctgagtaagtctctaa

SEQ ID NO: 52325 - DNA, 20 bp, synthetic construct
  source 1..20: mol_type = other DNA
gtaatctgagtaagtctcta

SEQ ID NO: 52326 - DNA, 20 bp, synthetic construct
  source 1..20: mol_type = other DNA
agtaatctgagtaagtctct

SEQ ID NO: 52327 - DNA, 20 bp, synthetic construct
  source 1..20: mol_type = other DNA
gagtaatctgagtaagtctc

SEQ ID NO: 52328 - DNA, 20 bp, synthetic construct
  source 1..20: mol_type = other DNA
ggagtaatctgagtaagtct

SEQ ID NO: 52329 - DNA, 20 bp, synthetic construct
  source 1..20: mol_type = other DNA
gggagtaatctgagtaagtc

SEQ ID NO: 52330 - DNA, 20 bp, synthetic construct
  source 1..20: mol_type = other DNA
tgggagtaatctgagtaagt

SEQ ID NO: 52331 - DNA, 20 bp, synthetic construct
  source 1..20: mol_type = other DNA
ttgggagtaatctgagtaag

SEQ ID NO: 52332 - DNA, 20 bp, synthetic construct
  source 1..20: mol_type = other DNA
tttgggagtaatctgagtaa

SEQ ID NO: 52333 - DNA, 20 bp, synthetic construct
  source 1..20: mol_type = other DNA
ctttgggagtaatctgagta

SEQ ID NO: 52334 - DNA, 20 bp, synthetic construct
  source 1..20: mol_type = other DNA
actttgggagtaatctgagt

SEQ ID NO: 52335 - DNA, 20 bp, synthetic construct
  source 1..20: mol_type = other DNA
tactttgggagtaatctgag

SEQ ID NO: 52336 - DNA, 20 bp, synthetic construct
  source 1..20: mol_type = other DNA
ttactttgggagtaatctga

SEQ ID NO: 52337 - DNA, 20 bp, synthetic construct
  source 1..20: mol_type = other DNA
tttactttgggagtaatctg

SEQ ID NO: 52338 - DNA, 20 bp, synthetic construct
  source 1..20: mol_type = other DNA
ctttactttgggagtaatct

SEQ ID NO: 52339 - DNA, 20 bp, synthetic construct
  source 1..20: mol_type = other DNA
cctttactttgggagtaatc

SEQ ID NO: 52340 - DNA, 20 bp, synthetic construct
  source 1..20: mol_type = other DNA
tcctttactttgggagtaat

SEQ ID NO: 52341 - DNA, 20 bp, synthetic construct
  source 1..20: mol_type = other DNA
ttcctttactttgggagtaa

SEQ ID NO: 52342 - DNA, 20 bp, synthetic construct
  source 1..20: mol_type = other DNA
cttcctttactttgggagta

SEQ ID NO: 52343 - DNA, 20 bp, synthetic construct
  source 1..20: mol_type = other DNA
ccttcctttactttgggagt

SEQ ID NO: 52344 - DNA, 20 bp, synthetic construct
  source 1..20: mol_type = other DNA
accttcctttactttgggag

SEQ ID NO: 52345 - DNA, 20 bp, synthetic construct
  source 1..20: mol_type = other DNA
taccttcctttactttggga

SEQ ID NO: 52346 - DNA, 20 bp, synthetic construct
  source 1..20: mol_type = other DNA
ataccttcctttactttggg

SEQ ID NO: 52347 - DNA, 20 bp, synthetic construct
  source 1..20: mol_type = other DNA
cataccttcctttactttgg

SEQ ID NO: 52348 - DNA, 20 bp, synthetic construct
  source 1..20: mol_type = other DNA
ccataccttcctttactttg

SEQ ID NO: 52349 - DNA, 20 bp, synthetic construct
  source 1..20: mol_type = other DNA
accataccttcctttacttt

SEQ ID NO: 52350 - DNA, 20 bp, synthetic construct
  source 1..20: mol_type = other DNA
aaccataccttcctttactt

SEQ ID NO: 52351 - DNA, 20 bp, synthetic construct
  source 1..20: mol_type = other DNA
aaaccataccttcctttact

SEQ ID NO: 52352 - DNA, 20 bp, synthetic construct
  source 1..20: mol_type = other DNA
taaaccataccttcctttac

SEQ ID NO: 52353 - DNA, 20 bp, synthetic construct
  source 1..20: mol_type = other DNA
ttaaaccataccttccttta

SEQ ID NO: 52354 - DNA, 20 bp, synthetic construct
  source 1..20: mol_type = other DNA
attaaaccataccttccttt

SEQ ID NO: 52355 - DNA, 20 bp, synthetic construct
  source 1..20: mol_type = other DNA
gattaaaccataccttcctt

SEQ ID NO: 52356 - DNA, 20 bp, synthetic construct
  source 1..20: mol_type = other DNA
tgattaaaccataccttcct

SEQ ID NO: 52357 - DNA, 20 bp, synthetic construct
  source 1..20: mol_type = other DNA
ttgattaaaccataccttcc

SEQ ID NO: 52358 - DNA, 20 bp, synthetic construct
  source 1..20: mol_type = other DNA
attgattaaaccataccttc

SEQ ID NO: 52359 - DNA, 20 bp, synthetic construct
  source 1..20: mol_type = other DNA
cattgattaaaccatacctt

SEQ ID NO: 52360 - DNA, 20 bp, synthetic construct
  source 1..20: mol_type = other DNA
gcattgattaaaccatacct

SEQ ID NO: 52361 - DNA, 20 bp, synthetic construct
  source 1..20: mol_type = other DNA
agcattgattaaaccatacc

SEQ ID NO: 52362 - DNA, 20 bp, synthetic construct
  source 1..20: mol_type = other DNA
aagcattgattaaaccatac

SEQ ID NO: 52363 - DNA, 20 bp, synthetic construct
  source 1..20: mol_type = other DNA
gaagcattgattaaaccata

SEQ ID NO: 52364 - DNA, 20 bp, synthetic construct
  source 1..20: mol_type = other DNA
agaagcattgattaaaccat

SEQ ID NO: 52365 - DNA, 20 bp, synthetic construct
  source 1..20: mol_type = other DNA
aagaagcattgattaaacca

SEQ ID NO: 52366 - DNA, 20 bp, synthetic construct
  source 1..20: mol_type = other DNA
taagaagcattgattaaacc

SEQ ID NO: 52367 - DNA, 20 bp, synthetic construct
  source 1..20: mol_type = other DNA
ttaagaagcattgattaaac

SEQ ID NO: 52368 - DNA, 20 bp, synthetic construct
  source 1..20: mol_type = other DNA
attaagaagcattgattaaa

SEQ ID NO: 52369 - DNA, 20 bp, synthetic construct
  source 1..20: mol_type = other DNA
cattaagaagcattgattaa

SEQ ID NO: 52370 - DNA, 20 bp, synthetic construct
  source 1..20: mol_type = other DNA
gcattaagaagcattgatta

SEQ ID NO: 52371 - DNA, 20 bp, synthetic construct
  source 1..20: mol_type = other DNA
agcattaagaagcattgatt

SEQ ID NO: 52372 - DNA, 20 bp, synthetic construct
  source 1..20: mol_type = other DNA
cagcattaagaagcattgat

SEQ ID NO: 52373 - DNA, 20 bp, synthetic construct
  source 1..20: mol_type = other DNA
ccagcattaagaagcattga

SEQ ID NO: 52374 - DNA, 20 bp, synthetic construct
  source 1..20: mol_type = other DNA
cccagcattaagaagcattg

SEQ ID NO: 52375 - DNA, 20 bp, synthetic construct
  source 1..20: mol_type = other DNA
acccagcattaagaagcatt

SEQ ID NO: 52376 - DNA, 20 bp, synthetic construct
  source 1..20: mol_type = other DNA
aacccagcattaagaagcat

SEQ ID NO: 52377 - DNA, 20 bp, synthetic construct
  source 1..20: mol_type = other DNA
gaacccagcattaagaagca

SEQ ID NO: 52378 - DNA, 20 bp, synthetic construct
  source 1..20: mol_type = other DNA
tgaacccagcattaagaagc

SEQ ID NO: 52379 - DNA, 20 bp, synthetic construct
  source 1..20: mol_type = other DNA
gtgaacccagcattaagaag

SEQ ID NO: 52380 - DNA, 20 bp, synthetic construct
  source 1..20: mol_type = other DNA
cgtgaacccagcattaagaa

SEQ ID NO: 52381 - DNA, 20 bp, synthetic construct
  source 1..20: mol_type = other DNA
acgtgaacccagcattaaga

SEQ ID NO: 52382 - DNA, 20 bp, synthetic construct
  source 1..20: mol_type = other DNA
aacgtgaacccagcattaag

SEQ ID NO: 52383 - DNA, 20 bp, synthetic construct
  source 1..20: mol_type = other DNA
aaacgtgaacccagcattaa

SEQ ID NO: 52384 - DNA, 20 bp, synthetic construct
  source 1..20: mol_type = other DNA
taaacgtgaacccagcatta

SEQ ID NO: 52385 - DNA, 20 bp, synthetic construct
  source 1..20: mol_type = other DNA
ctaaacgtgaacccagcatt

SEQ ID NO: 52386 - DNA, 20 bp, synthetic construct
  source 1..20: mol_type = other DNA
actaaacgtgaacccagcat

SEQ ID NO: 52387 - DNA, 20 bp, synthetic construct
  source 1..20: mol_type = other DNA
gactaaacgtgaacccagca

SEQ ID NO: 52388 - DNA, 20 bp, synthetic construct
  source 1..20: mol_type = other DNA
tgactaaacgtgaacccagc

SEQ ID NO: 52389 - DNA, 20 bp, synthetic construct
  source 1..20: mol_type = other DNA
gtgactaaacgtgaacccag

SEQ ID NO: 52390 - DNA, 20 bp, synthetic construct
  source 1..20: mol_type = other DNA
ggtgactaaacgtgaaccca

SEQ ID NO: 52391 - DNA, 20 bp, synthetic construct
  source 1..20: mol_type = other DNA
aggtgactaaacgtgaaccc

SEQ ID NO: 52392 - DNA, 20 bp, synthetic construct
  source 1..20: mol_type = other DNA
caggtgactaaacgtgaacc

SEQ ID NO: 52393 - DNA, 20 bp, synthetic construct
  source 1..20: mol_type = other DNA
ccaggtgactaaacgtgaac

SEQ ID NO: 52394 - DNA, 20 bp, synthetic construct
  source 1..20: mol_type = other DNA
cccaggtgactaaacgtgaa

SEQ ID NO: 52395 - DNA, 20 bp, synthetic construct
  source 1..20: mol_type = other DNA
ccccaggtgactaaacgtga

SEQ ID NO: 52396 - DNA, 20 bp, synthetic construct
  source 1..20: mol_type = other DNA
tccccaggtgactaaacgtg

SEQ ID NO: 52397 - DNA, 20 bp, synthetic construct
  source 1..20: mol_type = other DNA
ctccccaggtgactaaacgt

SEQ ID NO: 52398 - DNA, 20 bp, synthetic construct
  source 1..20: mol_type = other DNA
actccccaggtgactaaacg

SEQ ID NO: 52399 - DNA, 20 bp, synthetic construct
  source 1..20: mol_type = other DNA
aactccccaggtgactaaac

SEQ ID NO: 52400 - DNA, 20 bp, synthetic construct
  source 1..20: mol_type = other DNA
aaactccccaggtgactaaa

SEQ ID NO: 52401 - DNA, 20 bp, synthetic construct
  source 1..20: mol_type = other DNA
aaaactccccaggtgactaa

SEQ ID NO: 52402 - DNA, 20 bp, synthetic construct
  source 1..20: mol_type = other DNA
aaaaactccccaggtgacta

SEQ ID NO: 52403 - DNA, 20 bp, synthetic construct
  source 1..20: mol_type = other DNA
taaaaactccccaggtgact

SEQ ID NO: 52404 - DNA, 20 bp, synthetic construct
  source 1..20: mol_type = other DNA
ttaaaaactccccaggtgac

SEQ ID NO: 52405 - DNA, 20 bp, synthetic construct
  source 1..20: mol_type = other DNA
tttaaaaactccccaggtga

SEQ ID NO: 52406 - DNA, 20 bp, synthetic construct
  source 1..20: mol_type = other DNA
ttttaaaaactccccaggtg

SEQ ID NO: 52407 - DNA, 20 bp, synthetic construct
  source 1..20: mol_type = other DNA
tttttaaaaactccccaggt

SEQ ID NO: 52408 - DNA, 20 bp, synthetic construct
  source 1..20: mol_type = other DNA
atttttaaaaactccccagg

SEQ ID NO: 52409 - DNA, 20 bp, synthetic construct
  source 1..20: mol_type = other DNA
catttttaaaaactccccag

SEQ ID NO: 52410 - DNA, 20 bp, synthetic construct
  source 1..20: mol_type = other DNA
acatttttaaaaactcccca

SEQ ID NO: 52411 - DNA, 20 bp, synthetic construct
  source 1..20: mol_type = other DNA
aacatttttaaaaactcccc

SEQ ID NO: 52412 - DNA, 20 bp, synthetic construct
  source 1..20: mol_type = other DNA
gaacatttttaaaaactccc

SEQ ID NO: 52413 - DNA, 20 bp, synthetic construct
  source 1..20: mol_type = other DNA
agaacatttttaaaaactcc

SEQ ID NO: 52414 - DNA, 20 bp, synthetic construct
  source 1..20: mol_type = other DNA
gagaacatttttaaaaactc

SEQ ID NO: 52415 - DNA, 20 bp, synthetic construct
  source 1..20: mol_type = other DNA
tgagaacatttttaaaaact

SEQ ID NO: 52416 - DNA, 20 bp, synthetic construct
  source 1..20: mol_type = other DNA
gtgagaacatttttaaaaac

SEQ ID NO: 52417 - DNA, 20 bp, synthetic construct
  source 1..20: mol_type = other DNA
agtgagaacatttttaaaaa

SEQ ID NO: 52418 - DNA, 20 bp, synthetic construct
  source 1..20: mol_type = other DNA
aagtgagaacatttttaaaa

SEQ ID NO: 52419 - DNA, 20 bp, synthetic construct
  source 1..20: mol_type = other DNA
gaagtgagaacatttttaaa

SEQ ID NO: 52420 - DNA, 20 bp, synthetic construct
  source 1..20: mol_type = other DNA
agaagtgagaacatttttaa

SEQ ID NO: 52421 - DNA, 20 bp, synthetic construct
  source 1..20: mol_type = other DNA
tagaagtgagaacattttta

SEQ ID NO: 52422 - DNA, 20 bp, synthetic construct
  source 1..20: mol_type = other DNA
ctagaagtgagaacattttt

SEQ ID NO: 52423 - DNA, 20 bp, synthetic construct
  source 1..20: mol_type = other DNA
cctagaagtgagaacatttt

SEQ ID NO: 52424 - DNA, 20 bp, synthetic construct
  source 1..20: mol_type = other DNA
ccctagaagtgagaacattt

SEQ ID NO: 52425 - DNA, 20 bp, synthetic construct
  source 1..20: mol_type = other DNA
tccctagaagtgagaacatt

SEQ ID NO: 52426 - DNA, 20 bp, synthetic construct
  source 1..20: mol_type = other DNA
atccctagaagtgagaacat

SEQ ID NO: 52427 - DNA, 20 bp, synthetic construct
  source 1..20: mol_type = other DNA
gatccctagaagtgagaaca

SEQ ID NO: 52428 - DNA, 20 bp, synthetic construct
  source 1..20: mol_type = other DNA
ggatccctagaagtgagaac

SEQ ID NO: 52429 - DNA, 20 bp, synthetic construct
  source 1..20: mol_type = other DNA
aggatccctagaagtgagaa

SEQ ID NO: 52430 - DNA, 20 bp, synthetic construct
  source 1..20: mol_type = other DNA
caggatccctagaagtgaga

SEQ ID NO: 52431 - DNA, 20 bp, synthetic construct
  source 1..20: mol_type = other DNA
ccaggatccctagaagtgag

SEQ ID NO: 52432 - DNA, 20 bp, synthetic construct
  source 1..20: mol_type = other DNA
accaggatccctagaagtga

SEQ ID NO: 52433 - DNA, 20 bp, synthetic construct
  source 1..20: mol_type = other DNA
aaccaggatccctagaagtg

SEQ ID NO: 52434 - DNA, 20 bp, synthetic construct
  source 1..20: mol_type = other DNA
aaaccaggatccctagaagt

SEQ ID NO: 52435 - DNA, 20 bp, synthetic construct
  source 1..20: mol_type = other DNA
taaaccaggatccctagaag

SEQ ID NO: 52436 - DNA, 20 bp, synthetic construct
  source 1..20: mol_type = other DNA
ttaaaccaggatccctagaa

SEQ ID NO: 52437 - DNA, 20 bp, synthetic construct
  source 1..20: mol_type = other DNA
attaaaccaggatccctaga

SEQ ID NO: 52438 - DNA, 20 bp, synthetic construct
  source 1..20: mol_type = other DNA
aattaaaccaggatccctag

SEQ ID NO: 52439 - DNA, 20 bp, synthetic construct
  source 1..20: mol_type = other DNA
taattaaaccaggatcccta

SEQ ID NO: 52440 - DNA, 20 bp, synthetic construct
  source 1..20: mol_type = other DNA
ataattaaaccaggatccct

SEQ ID NO: 52441 - DNA, 20 bp, synthetic construct
  source 1..20: mol_type = other DNA
tataattaaaccaggatccc

SEQ ID NO: 52442 - DNA, 20 bp, synthetic construct
  source 1..20: mol_type = other DNA
ttataattaaaccaggatcc

SEQ ID NO: 52443 - DNA, 20 bp, synthetic construct
  source 1..20: mol_type = other DNA
attataattaaaccaggatc

SEQ ID NO: 52444 - DNA, 20 bp, synthetic construct
  source 1..20: mol_type = other DNA
aattataattaaaccaggat

SEQ ID NO: 52445 - DNA, 20 bp, synthetic construct
  source 1..20: mol_type = other DNA
taattataattaaaccagga

SEQ ID NO: 52446 - DNA, 20 bp, synthetic construct
  source 1..20: mol_type = other DNA
ctaattataattaaaccagg

SEQ ID NO: 52447 - DNA, 20 bp, synthetic construct
  source 1..20: mol_type = other DNA
gctaattataattaaaccag

SEQ ID NO: 52448 - DNA, 20 bp, synthetic construct
  source 1..20: mol_type = other DNA
ggctaattataattaaacca

SEQ ID NO: 52449 - DNA, 20 bp, synthetic construct
  source 1..20: mol_type = other DNA
aggctaattataattaaacc

SEQ ID NO: 52450 - DNA, 20 bp, synthetic construct
  source 1..20: mol_type = other DNA
caggctaattataattaaac

SEQ ID NO: 52451 - DNA, 20 bp, synthetic construct
  source 1..20: mol_type = other DNA
ccaggctaattataattaaa

SEQ ID NO: 52452 - DNA, 20 bp, synthetic construct
  source 1..20: mol_type = other DNA
cccaggctaattataattaa

SEQ ID NO: 52453 - DNA, 20 bp, synthetic construct
  source 1..20: mol_type = other DNA
acccaggctaattataatta

SEQ ID NO: 52454 - DNA, 20 bp, synthetic construct
  source 1..20: mol_type = other DNA
cacccaggctaattataatt

SEQ ID NO: 52455 - DNA, 20 bp, synthetic construct
  source 1..20: mol_type = other DNA
tcacccaggctaattataat

SEQ ID NO: 52456 - DNA, 20 bp, synthetic construct
  source 1..20: mol_type = other DNA
ctcacccaggctaattataa

SEQ ID NO: 52457 - DNA, 20 bp, synthetic construct
  source 1..20: mol_type = other DNA
cctcacccaggctaattata

SEQ ID NO: 52458 - DNA, 20 bp, synthetic construct
  source 1..20: mol_type = other DNA
gcctcacccaggctaattat

SEQ ID NO: 52459 - DNA, 20 bp, synthetic construct
  source 1..20: mol_type = other DNA
agcctcacccaggctaatta

SEQ ID NO: 52460 - DNA, 20 bp, synthetic construct
  source 1..20: mol_type = other DNA
gagcctcacccaggctaatt

SEQ ID NO: 52461 - DNA, 20 bp, synthetic construct
  source 1..20: mol_type = other DNA
agagcctcacccaggctaat

SEQ ID NO: 52462 - DNA, 20 bp, synthetic construct
  source 1..20: mol_type = other DNA
cagagcctcacccaggctaa

SEQ ID NO: 52463 - DNA, 20 bp, synthetic construct
  source 1..20: mol_type = other DNA
ccagagcctcacccaggcta

SEQ ID NO: 52464 - DNA, 20 bp, synthetic construct
  source 1..20: mol_type = other DNA
tccagagcctcacccaggct

SEQ ID NO: 52465 - DNA, 20 bp, synthetic construct
  source 1..20: mol_type = other DNA
gtccagagcctcacccaggc

SEQ ID NO: 52466 - DNA, 20 bp, synthetic construct
  source 1..20: mol_type = other DNA
tgtccagagcctcacccagg

SEQ ID NO: 52467 - DNA, 20 bp, synthetic construct
  source 1..20: mol_type = other DNA
ctgtccagagcctcacccag

SEQ ID NO: 52468 - DNA, 20 bp, synthetic construct
  source 1..20: mol_type = other DNA
actgtccagagcctcaccca

SEQ ID NO: 52469 - DNA, 20 bp, synthetic construct
  source 1..20: mol_type = other DNA
gactgtccagagcctcaccc

SEQ ID NO: 52470 - DNA, 20 bp, synthetic construct
  source 1..20: mol_type = other DNA
tgactgtccagagcctcacc

SEQ ID NO: 52471 - DNA, 20 bp, synthetic construct
  source 1..20: mol_type = other DNA
ctgactgtccagagcctcac

SEQ ID NO: 52472 - DNA, 20 bp, synthetic construct
  source 1..20: mol_type = other DNA
cctgactgtccagagcctca

SEQ ID NO: 52473 - DNA, 20 bp, synthetic construct
  source 1..20: mol_type = other DNA
ccctgactgtccagagcctc

SEQ ID NO: 52474 - DNA, 20 bp, synthetic construct
  source 1..20: mol_type = other DNA
accctgactgtccagagcct

SEQ ID NO: 52475 - DNA, 20 bp, synthetic construct
  source 1..20: mol_type = other DNA
caccctgactgtccagagcc

SEQ ID NO: 52476 - DNA, 20 bp, synthetic construct
  source 1..20: mol_type = other DNA
acaccctgactgtccagagc

SEQ ID NO: 52477 - DNA, 20 bp, synthetic construct
  source 1..20: mol_type = other DNA
cacaccctgactgtccagag

SEQ ID NO: 52478 - DNA, 20 bp, synthetic construct
  source 1..20: mol_type = other DNA
tcacaccctgactgtccaga

SEQ ID NO: 52479 - DNA, 20 bp, synthetic construct
  source 1..20: mol_type = other DNA
ctcacaccctgactgtccag

SEQ ID NO: 52480 - DNA, 20 bp, synthetic construct
  source 1..20: mol_type = other DNA
gctcacaccctgactgtcca

SEQ ID NO: 52481 - DNA, 20 bp, synthetic construct
  source 1..20: mol_type = other DNA
agctcacaccctgactgtcc

SEQ ID NO: 52482 - DNA, 20 bp, synthetic construct
  source 1..20: mol_type = other DNA
tagctcacaccctgactgtc

SEQ ID NO: 52483 - DNA, 20 bp, synthetic construct
  source 1..20: mol_type = other DNA
atagctcacaccctgactgt

SEQ ID NO: 52484 - DNA, 20 bp, synthetic construct
  source 1..20: mol_type = other DNA
catagctcacaccctgactg

SEQ ID NO: 52485 - DNA, 20 bp, synthetic construct
  source 1..20: mol_type = other DNA
ccatagctcacaccctgact

SEQ ID NO: 52486 - DNA, 20 bp, synthetic construct
  source 1..20: mol_type = other DNA
cccatagctcacaccctgac

SEQ ID NO: 52487 - DNA, 20 bp, synthetic construct
  source 1..20: mol_type = other DNA
acccatagctcacaccctga

SEQ ID NO: 52488 - DNA, 20 bp, synthetic construct
  source 1..20: mol_type = other DNA
aacccatagctcacaccctg

SEQ ID NO: 52489 - DNA, 20 bp, synthetic construct
  source 1..20: mol_type = other DNA
aaacccatagctcacaccct

SEQ ID NO: 52490 - DNA, 20 bp, synthetic construct
  source 1..20: mol_type = other DNA
gaaacccatagctcacaccc

SEQ ID NO: 52491 - DNA, 20 bp, synthetic construct
  source 1..20: mol_type = other DNA
tgaaacccatagctcacacc

SEQ ID NO: 52492 - DNA, 20 bp, synthetic construct
  source 1..20: mol_type = other DNA
atgaaacccatagctcacac

SEQ ID NO: 52493 - DNA, 20 bp, synthetic construct
  source 1..20: mol_type = other DNA
catgaaacccatagctcaca

SEQ ID NO: 52494 - DNA, 20 bp, synthetic construct
  source 1..20: mol_type = other DNA
acatgaaacccatagctcac

SEQ ID NO: 52495 - DNA, 20 bp, synthetic construct
  source 1..20: mol_type = other DNA
cacatgaaacccatagctca

SEQ ID NO: 52496 - DNA, 20 bp, synthetic construct
  source 1..20: mol_type = other DNA
tcacatgaaacccatagctc

SEQ ID NO: 52497 - DNA, 20 bp, synthetic construct
  source 1..20: mol_type = other DNA
atcacatgaaacccatagct

SEQ ID NO: 52498 - DNA, 20 bp, synthetic construct
  source 1..20: mol_type = other DNA
catcacatgaaacccatagc

SEQ ID NO: 52499 - DNA, 20 bp, synthetic construct
  source 1..20: mol_type = other DNA
tcatcacatgaaacccatag

SEQ ID NO: 52500 - DNA, 20 bp, synthetic construct
  source 1..20: mol_type = other DNA
ctcatcacatgaaacccata

SEQ ID NO: 52501 - DNA, 20 bp, synthetic construct
  source 1..20: mol_type = other DNA
tctcatcacatgaaacccat

SEQ ID NO: 52502 - DNA, 20 bp, synthetic construct
  source 1..20: mol_type = other DNA
atctcatcacatgaaaccca

SEQ ID NO: 52503 - DNA, 20 bp, synthetic construct
  source 1..20: mol_type = other DNA
gatctcatcacatgaaaccc

SEQ ID NO: 52504 - DNA, 20 bp, synthetic construct
  source 1..20: mol_type = other DNA
ggatctcatcacatgaaacc

SEQ ID NO: 52505 - DNA, 20 bp, synthetic construct
  source 1..20: mol_type = other DNA
gggatctcatcacatgaaac

SEQ ID NO: 52506 - DNA, 20 bp, synthetic construct
  source 1..20: mol_type = other DNA
tgggatctcatcacatgaaa

SEQ ID NO: 52507 - DNA, 20 bp, synthetic construct
  source 1..20: mol_type = other DNA
ctgggatctcatcacatgaa

SEQ ID NO: 52508 - DNA, 20 bp, synthetic construct
  source 1..20: mol_type = other DNA
cctgggatctcatcacatga

SEQ ID NO: 52509 - DNA, 20 bp, synthetic construct
  source 1..20: mol_type = other DNA
tcctgggatctcatcacatg

SEQ ID NO: 52510 - DNA, 20 bp, synthetic construct
  source 1..20: mol_type = other DNA
ctcctgggatctcatcacat

SEQ ID NO: 52511 - DNA, 20 bp, synthetic construct
  source 1..20: mol_type = other DNA
actcctgggatctcatcaca

SEQ ID NO: 52512 - DNA, 20 bp, synthetic construct
  source 1..20: mol_type = other DNA
cactcctgggatctcatcac

SEQ ID NO: 52513 - DNA, 20 bp, synthetic construct
  source 1..20: mol_type = other DNA
ccactcctgggatctcatca

SEQ ID NO: 52514 - DNA, 20 bp, synthetic construct
  source 1..20: mol_type = other DNA
gccactcctgggatctcatc

SEQ ID NO: 52515 - DNA, 20 bp, synthetic construct
  source 1..20: mol_type = other DNA
agccactcctgggatctcat

SEQ ID NO: 52516 - DNA, 20 bp, synthetic construct
  source 1..20: mol_type = other DNA
gagccactcctgggatctca

SEQ ID NO: 52517 - DNA, 20 bp, synthetic construct
  source 1..20: mol_type = other DNA
agagccactcctgggatctc

SEQ ID NO: 52518 - DNA, 20 bp, synthetic construct
  source 1..20: mol_type = other DNA
cagagccactcctgggatct

SEQ ID NO: 52519 - DNA, 20 bp, synthetic construct
  source 1..20: mol_type = other DNA
acagagccactcctgggatc

SEQ ID NO: 52520 - DNA, 20 bp, synthetic construct
  source 1..20: mol_type = other DNA
aacagagccactcctgggat

SEQ ID NO: 52521 - DNA, 20 bp, synthetic construct
  source 1..20: mol_type = other DNA
gaacagagccactcctggga

SEQ ID NO: 52522 - DNA, 20 bp, synthetic construct
  source 1..20: mol_type = other DNA
agaacagagccactcctggg

SEQ ID NO: 52523 - DNA, 20 bp, synthetic construct
  source 1..20: mol_type = other DNA
cagaacagagccactcctgg

SEQ ID NO: 52524 - DNA, 20 bp, synthetic construct
  source 1..20: mol_type = other DNA
acagaacagagccactcctg

SEQ ID NO: 52525 - DNA, 20 bp, synthetic construct
  source 1..20: mol_type = other DNA
cacagaacagagccactcct

SEQ ID NO: 52526 - DNA, 20 bp, synthetic construct
  source 1..20: mol_type = other DNA
ccacagaacagagccactcc

SEQ ID NO: 52527 - DNA, 20 bp, synthetic construct
  source 1..20: mol_type = other DNA
gccacagaacagagccactc

SEQ ID NO: 52528 - DNA, 20 bp, synthetic construct
  source 1..20: mol_type = other DNA
ggccacagaacagagccact

SEQ ID NO: 52529 - DNA, 20 bp, synthetic construct
  source 1..20: mol_type = other DNA
aggccacagaacagagccac

SEQ ID NO: 52530 - DNA, 20 bp, synthetic construct
  source 1..20: mol_type = other DNA
aaggccacagaacagagcca

SEQ ID NO: 52531 - DNA, 20 bp, synthetic construct
  source 1..20: mol_type = other DNA
caaggccacagaacagagcc

SEQ ID NO: 52532 - DNA, 20 bp, synthetic construct
  source 1..20: mol_type = other DNA
tcaaggccacagaacagagc

SEQ ID NO: 52533 - DNA, 20 bp, synthetic construct
  source 1..20: mol_type = other DNA
ctcaaggccacagaacagag

SEQ ID NO: 52534 - DNA, 20 bp, synthetic construct
  source 1..20: mol_type = other DNA
tctcaaggccacagaacaga

SEQ ID NO: 52535 - DNA, 20 bp, synthetic construct
  source 1..20: mol_type = other DNA
ttctcaaggccacagaacag

SEQ ID NO: 52536 - DNA, 20 bp, synthetic construct
  source 1..20: mol_type = other DNA
attctcaaggccacagaaca

SEQ ID NO: 52537 - DNA, 20 bp, synthetic construct
  source 1..20: mol_type = other DNA
aattctcaaggccacagaac

SEQ ID NO: 52538 - DNA, 20 bp, synthetic construct
  source 1..20: mol_type = other DNA
aaattctcaaggccacagaa

SEQ ID NO: 52539 - DNA, 20 bp, synthetic construct
  source 1..20: mol_type = other DNA
caaattctcaaggccacaga

SEQ ID NO: 52540 - DNA, 20 bp, synthetic construct
  source 1..20: mol_type = other DNA
acaaattctcaaggccacag

SEQ ID NO: 52541 - DNA, 20 bp, synthetic construct
  source 1..20: mol_type = other DNA
cacaaattctcaaggccaca

SEQ ID NO: 52542 - DNA, 20 bp, synthetic construct
  source 1..20: mol_type = other DNA
gcacaaattctcaaggccac

SEQ ID NO: 52543 - DNA, 20 bp, synthetic construct
  source 1..20: mol_type = other DNA
agcacaaattctcaaggcca

SEQ ID NO: 52544 - DNA, 20 bp, synthetic construct
  source 1..20: mol_type = other DNA
aagcacaaattctcaaggcc

SEQ ID NO: 52545 - DNA, 20 bp, synthetic construct
  source 1..20: mol_type = other DNA
aaagcacaaattctcaaggc

SEQ ID NO: 52546 - DNA, 20 bp, synthetic construct
  source 1..20: mol_type = other DNA
gaaagcacaaattctcaagg

SEQ ID NO: 52547 - DNA, 20 bp, synthetic construct
  source 1..20: mol_type = other DNA
agaaagcacaaattctcaag

SEQ ID NO: 52548 - DNA, 20 bp, synthetic construct
  source 1..20: mol_type = other DNA
tagaaagcacaaattctcaa

SEQ ID NO: 52549 - DNA, 20 bp, synthetic construct
  source 1..20: mol_type = other DNA
ctagaaagcacaaattctca

SEQ ID NO: 52550 - DNA, 20 bp, synthetic construct
  source 1..20: mol_type = other DNA
cctagaaagcacaaattctc

SEQ ID NO: 52551 - DNA, 20 bp, synthetic construct
  source 1..20: mol_type = other DNA
gcctagaaagcacaaattct

SEQ ID NO: 52552 - DNA, 20 bp, synthetic construct
  source 1..20: mol_type = other DNA
ggcctagaaagcacaaattc

SEQ ID NO: 52553 - DNA, 20 bp, synthetic construct
  source 1..20: mol_type = other DNA
tggcctagaaagcacaaatt

SEQ ID NO: 52554 - DNA, 20 bp, synthetic construct
  source 1..20: mol_type = other DNA
ctggcctagaaagcacaaat

SEQ ID NO: 52555 - DNA, 20 bp, synthetic construct
  source 1..20: mol_type = other DNA
cctggcctagaaagcacaaa

SEQ ID NO: 52556 - DNA, 20 bp, synthetic construct
  source 1..20: mol_type = other DNA
acctggcctagaaagcacaa

SEQ ID NO: 52557 - DNA, 20 bp, synthetic construct
  source 1..20: mol_type = other DNA
cacctggcctagaaagcaca

SEQ ID NO: 52558 - DNA, 20 bp, synthetic construct
  source 1..20: mol_type = other DNA
gcacctggcctagaaagcac

SEQ ID NO: 52559 - DNA, 20 bp, synthetic construct
  source 1..20: mol_type = other DNA
cgcacctggcctagaaagca

SEQ ID NO: 52560 - DNA, 20 bp, synthetic construct
  source 1..20: mol_type = other DNA
ccgcacctggcctagaaagc

SEQ ID NO: 52561 - DNA, 20 bp, synthetic construct
  source 1..20: mol_type = other DNA
accgcacctggcctagaaag

SEQ ID NO: 52562 - DNA, 20 bp, synthetic construct
  source 1..20: mol_type = other DNA
caccgcacctggcctagaaa

SEQ ID NO: 52563 - DNA, 20 bp, synthetic construct
  source 1..20: mol_type = other DNA
ccaccgcacctggcctagaa

SEQ ID NO: 52564 - DNA, 20 bp, synthetic construct
  source 1..20: mol_type = other DNA
gccaccgcacctggcctaga

SEQ ID NO: 52565 - DNA, 20 bp, synthetic construct
  source 1..20: mol_type = other DNA
agccaccgcacctggcctag

SEQ ID NO: 52566 - DNA, 20 bp, synthetic construct
  source 1..20: mol_type = other DNA
gagccaccgcacctggccta

SEQ ID NO: 52567 - DNA, 20 bp, synthetic construct
  source 1..20: mol_type = other DNA
tgagccaccgcacctggcct

SEQ ID NO: 52568 - DNA, 20 bp, synthetic construct
  source 1..20: mol_type = other DNA
gtgagccaccgcacctggcc

SEQ ID NO: 52569 - DNA, 20 bp, synthetic construct
  source 1..20: mol_type = other DNA
agtgagccaccgcacctggc

SEQ ID NO: 52570 - DNA, 20 bp, synthetic construct
  source 1..20: mol_type = other DNA
gagtgagccaccgcacctgg

SEQ ID NO: 52571 - DNA, 20 bp, synthetic construct
  source 1..20: mol_type = other DNA
ggagtgagccaccgcacctg

SEQ ID NO: 52572 - DNA, 20 bp, synthetic construct
  source 1..20: mol_type = other DNA
aggagtgagccaccgcacct

SEQ ID NO: 52573 - DNA, 20 bp, synthetic construct
  source 1..20: mol_type = other DNA
caggagtgagccaccgcacc

SEQ ID NO: 52574 - DNA, 20 bp, synthetic construct
  source 1..20: mol_type = other DNA
acaggagtgagccaccgcac

SEQ ID NO: 52575 - DNA, 20 bp, synthetic construct
  source 1..20: mol_type = other DNA
tacaggagtgagccaccgca

SEQ ID NO: 52576 - DNA, 20 bp, synthetic construct
  source 1..20: mol_type = other DNA
ttacaggagtgagccaccgc

SEQ ID NO: 52577 - DNA, 20 bp, synthetic construct
  source 1..20: mol_type = other DNA
attacaggagtgagccaccg

SEQ ID NO: 52578 - DNA, 20 bp, synthetic construct
  source 1..20: mol_type = other DNA
gattacaggagtgagccacc

SEQ ID NO: 52579 - DNA, 20 bp, synthetic construct
  source 1..20: mol_type = other DNA
agattacaggagtgagccac

SEQ ID NO: 52580 - DNA, 20 bp, synthetic construct
  source 1..20: mol_type = other DNA
gagattacaggagtgagcca

SEQ ID NO: 52581 - DNA, 20 bp, synthetic construct
  source 1..20: mol_type = other DNA
tgagattacaggagtgagcc

SEQ ID NO: 52582 - DNA, 20 bp, synthetic construct
  source 1..20: mol_type = other DNA
gtgagattacaggagtgagc

SEQ ID NO: 52583 - DNA, 20 bp, synthetic construct
  source 1..20: mol_type = other DNA
agtgagattacaggagtgag

SEQ ID NO: 52584 - DNA, 20 bp, synthetic construct
  source 1..20: mol_type = other DNA
aagtgagattacaggagtga

SEQ ID NO: 52585 - DNA, 20 bp, synthetic construct
  source 1..20: mol_type = other DNA
aaagtgagattacaggagtg

SEQ ID NO: 52586 - DNA, 20 bp, synthetic construct
  source 1..20: mol_type = other DNA
caaagtgagattacaggagt

SEQ ID NO: 52587 - DNA, 20 bp, synthetic construct
  source 1..20: mol_type = other DNA
ccaaagtgagattacaggag

SEQ ID NO: 52588 - DNA, 20 bp, synthetic construct
  source 1..20: mol_type = other DNA
cccaaagtgagattacagga

SEQ ID NO: 52589 - DNA, 20 bp, synthetic construct
  source 1..20: mol_type = other DNA
tcccaaagtgagattacagg

SEQ ID NO: 52590 - DNA, 20 bp, synthetic construct
  source 1..20: mol_type = other DNA
ctcccaaagtgagattacag

SEQ ID NO: 52591 - DNA, 20 bp, synthetic construct
  source 1..20: mol_type = other DNA
tctcccaaagtgagattaca

SEQ ID NO: 52592 - DNA, 20 bp, synthetic construct
  source 1..20: mol_type = other DNA
gtctcccaaagtgagattac

SEQ ID NO: 52593 - DNA, 20 bp, synthetic construct
  source 1..20: mol_type = other DNA
ggtctcccaaagtgagatta

SEQ ID NO: 52594 - DNA, 20 bp, synthetic construct
  source 1..20: mol_type = other DNA
tggtctcccaaagtgagatt

SEQ ID NO: 52595 - DNA, 20 bp, synthetic construct
  source 1..20: mol_type = other DNA
ttggtctcccaaagtgagat

SEQ ID NO: 52596 - DNA, 20 bp, synthetic construct
  source 1..20: mol_type = other DNA
cttggtctcccaaagtgaga

SEQ ID NO: 52597 - DNA, 20 bp, synthetic construct
  source 1..20: mol_type = other DNA
ccttggtctcccaaagtgag

SEQ ID NO: 52598 - DNA, 20 bp, synthetic construct
  source 1..20: mol_type = other DNA
accttggtctcccaaagtga

SEQ ID NO: 52599 - DNA, 20 bp, synthetic construct
  source 1..20: mol_type = other DNA
caccttggtctcccaaagtg

SEQ ID NO: 52600 - DNA, 20 bp, synthetic construct
  source 1..20: mol_type = other DNA
ccaccttggtctcccaaagt

SEQ ID NO: 52601 - DNA, 20 bp, synthetic construct
  source 1..20: mol_type = other DNA
cccaccttggtctcccaaag

SEQ ID NO: 52602 - DNA, 20 bp, synthetic construct
  source 1..20: mol_type = other DNA
gcccaccttggtctcccaaa

SEQ ID NO: 52603 - DNA, 20 bp, synthetic construct
  source 1..20: mol_type = other DNA
tgcccaccttggtctcccaa

SEQ ID NO: 52604 - DNA, 20 bp, synthetic construct
  source 1..20: mol_type = other DNA
ctgcccaccttggtctccca

SEQ ID NO: 52605 - DNA, 20 bp, synthetic construct
  source 1..20: mol_type = other DNA
tctgcccaccttggtctccc

SEQ ID NO: 52606 - DNA, 20 bp, synthetic construct
  source 1..20: mol_type = other DNA
atctgcccaccttggtctcc

SEQ ID NO: 52607 - DNA, 20 bp, synthetic construct
  source 1..20: mol_type = other DNA
gatctgcccaccttggtctc

SEQ ID NO: 52608 - DNA, 20 bp, synthetic construct
  source 1..20: mol_type = other DNA
tgatctgcccaccttggtct

SEQ ID NO: 52609 - DNA, 20 bp, synthetic construct
  source 1..20: mol_type = other DNA
atgatctgcccaccttggtc

SEQ ID NO: 52610 - DNA, 20 bp, synthetic construct
  source 1..20: mol_type = other DNA
aatgatctgcccaccttggt

SEQ ID NO: 52611 - DNA, 20 bp, synthetic construct
  source 1..20: mol_type = other DNA
aaatgatctgcccaccttgg

SEQ ID NO: 52612 - DNA, 20 bp, synthetic construct
  source 1..20: mol_type = other DNA
caaatgatctgcccaccttg

SEQ ID NO: 52613 - DNA, 20 bp, synthetic construct
  source 1..20: mol_type = other DNA
tcaaatgatctgcccacctt

SEQ ID NO: 52614 - DNA, 20 bp, synthetic construct
  source 1..20: mol_type = other DNA
ctcaaatgatctgcccacct

SEQ ID NO: 52615 - DNA, 20 bp, synthetic construct
  source 1..20: mol_type = other DNA
cctcaaatgatctgcccacc

SEQ ID NO: 52616 - DNA, 20 bp, synthetic construct
  source 1..20: mol_type = other DNA
acctcaaatgatctgcccac

SEQ ID NO: 52617 - DNA, 20 bp, synthetic construct
  source 1..20: mol_type = other DNA
gacctcaaatgatctgccca

SEQ ID NO: 52618 - DNA, 20 bp, synthetic construct
  source 1..20: mol_type = other DNA
tgacctcaaatgatctgccc

SEQ ID NO: 52619 - DNA, 20 bp, synthetic construct
  source 1..20: mol_type = other DNA
ctgacctcaaatgatctgcc

SEQ ID NO: 52620 - DNA, 20 bp, synthetic construct
  source 1..20: mol_type = other DNA
cctgacctcaaatgatctgc

SEQ ID NO: 52621 - DNA, 20 bp, synthetic construct
  source 1..20: mol_type = other DNA
tcctgacctcaaatgatctg

SEQ ID NO: 52622 - DNA, 20 bp, synthetic construct
  source 1..20: mol_type = other DNA
ctcctgacctcaaatgatct

SEQ ID NO: 52623 - DNA, 20 bp, synthetic construct
  source 1..20: mol_type = other DNA
actcctgacctcaaatgatc

SEQ ID NO: 52624 - DNA, 20 bp, synthetic construct
  source 1..20: mol_type = other DNA
aactcctgacctcaaatgat

SEQ ID NO: 52625 - DNA, 20 bp, synthetic construct
  source 1..20: mol_type = other DNA
gaactcctgacctcaaatga

SEQ ID NO: 52626 - DNA, 20 bp, synthetic construct
  source 1..20: mol_type = other DNA
cgaactcctgacctcaaatg

SEQ ID NO: 52627 - DNA, 20 bp, synthetic construct
  source 1..20: mol_type = other DNA
tcgaactcctgacctcaaat

SEQ ID NO: 52628 - DNA, 20 bp, synthetic construct
  source 1..20: mol_type = other DNA
ctcgaactcctgacctcaaa

SEQ ID NO: 52629 - DNA, 20 bp, synthetic construct
  source 1..20: mol_type = other DNA
tctcgaactcctgacctcaa

SEQ ID NO: 52630 - DNA, 20 bp, synthetic construct
  source 1..20: mol_type = other DNA
gtctcgaactcctgacctca

SEQ ID NO: 52631 - DNA, 20 bp, synthetic construct
  source 1..20: mol_type = other DNA
ggtctcgaactcctgacctc

SEQ ID NO: 52632 - DNA, 20 bp, synthetic construct
  source 1..20: mol_type = other DNA
tggtctcgaactcctgacct

SEQ ID NO: 52633 - DNA, 20 bp, synthetic construct
  source 1..20: mol_type = other DNA
ctggtctcgaactcctgacc

SEQ ID NO: 52634 - DNA, 20 bp, synthetic construct
  source 1..20: mol_type = other DNA
gctggtctcgaactcctgac

SEQ ID NO: 52635 - DNA, 20 bp, synthetic construct
  source 1..20: mol_type = other DNA
ggctggtctcgaactcctga

SEQ ID NO: 52636 - DNA, 20 bp, synthetic construct
  source 1..20: mol_type = other DNA
aggctggtctcgaactcctg

SEQ ID NO: 52637 - DNA, 20 bp, synthetic construct
  source 1..20: mol_type = other DNA
caggctggtctcgaactcct

SEQ ID NO: 52638 - DNA, 20 bp, synthetic construct
  source 1..20: mol_type = other DNA
ccaggctggtctcgaactcc

SEQ ID NO: 52639 - DNA, 20 bp, synthetic construct
  source 1..20: mol_type = other DNA
gccaggctggtctcgaactc

SEQ ID NO: 52640 - DNA, 20 bp, synthetic construct
  source 1..20: mol_type = other DNA
ggccaggctggtctcgaact

SEQ ID NO: 52641 - DNA, 20 bp, synthetic construct
  source 1..20: mol_type = other DNA
tggccaggctggtctcgaac

SEQ ID NO: 52642 - DNA, 20 bp, synthetic construct
  source 1..20: mol_type = other DNA
ttggccaggctggtctcgaa

SEQ ID NO: 52643 - DNA, 20 bp, synthetic construct
  source 1..20: mol_type = other DNA
gttggccaggctggtctcga

SEQ ID NO: 52644 - DNA, 20 bp, synthetic construct
  source 1..20: mol_type = other DNA
tgttggccaggctggtctcg

SEQ ID NO: 52645 - DNA, 20 bp, synthetic construct
  source 1..20: mol_type = other DNA
atgttggccaggctggtctc

SEQ ID NO: 52646 - DNA, 20 bp, synthetic construct
  source 1..20: mol_type = other DNA
catgttggccaggctggtct

SEQ ID NO: 52647 - DNA, 20 bp, synthetic construct
  source 1..20: mol_type = other DNA
acatgttggccaggctggtc

SEQ ID NO: 52648 - DNA, 20 bp, synthetic construct
  source 1..20: mol_type = other DNA
aacatgttggccaggctggt

SEQ ID NO: 52649 - DNA, 20 bp, synthetic construct
  source 1..20: mol_type = other DNA
caacatgttggccaggctgg

SEQ ID NO: 52650 - DNA, 20 bp, synthetic construct
  source 1..20: mol_type = other DNA
tcaacatgttggccaggctg

SEQ ID NO: 52651 - DNA, 20 bp, synthetic construct
  source 1..20: mol_type = other DNA
ttcaacatgttggccaggct

SEQ ID NO: 52652 - DNA, 20 bp, synthetic construct
  source 1..20: mol_type = other DNA
tttcaacatgttggccaggc

SEQ ID NO: 52653 - DNA, 20 bp, synthetic construct
  source 1..20: mol_type = other DNA
gtttcaacatgttggccagg

SEQ ID NO: 52654 - DNA, 20 bp, synthetic construct
  source 1..20: mol_type = other DNA
ggtttcaacatgttggccag

SEQ ID NO: 52655 - DNA, 20 bp, synthetic construct
  source 1..20: mol_type = other DNA
gggtttcaacatgttggcca

SEQ ID NO: 52656 - DNA, 20 bp, synthetic construct
  source 1..20: mol_type = other DNA
ggggtttcaacatgttggcc

SEQ ID NO: 52657 - DNA, 20 bp, synthetic construct
  source 1..20: mol_type = other DNA
cggggtttcaacatgttggc

SEQ ID NO: 52658 - DNA, 20 bp, synthetic construct
  source 1..20: mol_type = other DNA
acggggtttcaacatgttgg

SEQ ID NO: 52659 - DNA, 20 bp, synthetic construct
  source 1..20: mol_type = other DNA
gacggggtttcaacatgttg

SEQ ID NO: 52660 - DNA, 20 bp, synthetic construct
  source 1..20: mol_type = other DNA
agacggggtttcaacatgtt

SEQ ID NO: 52661 - DNA, 20 bp, synthetic construct
  source 1..20: mol_type = other DNA
aagacggggtttcaacatgt

SEQ ID NO: 52662 - DNA, 20 bp, synthetic construct
  source 1..20: mol_type = other DNA
aaagacggggtttcaacatg

SEQ ID NO: 52663 - DNA, 20 bp, synthetic construct
  source 1..20: mol_type = other DNA
taaagacggggtttcaacat

SEQ ID NO: 52664 - DNA, 20 bp, synthetic construct
  source 1..20: mol_type = other DNA
gtaaagacggggtttcaaca

SEQ ID NO: 52665 - DNA, 20 bp, synthetic construct
  source 1..20: mol_type = other DNA
agtaaagacggggtttcaac

SEQ ID NO: 52666 - DNA, 20 bp, synthetic construct
  source 1..20: mol_type = other DNA
tagtaaagacggggtttcaa

SEQ ID NO: 52667 - DNA, 20 bp, synthetic construct
  source 1..20: mol_type = other DNA
ttagtaaagacggggtttca

SEQ ID NO: 52668 - DNA, 20 bp, synthetic construct
  source 1..20: mol_type = other DNA
tttagtaaagacggggtttc

SEQ ID NO: 52669 - DNA, 20 bp, synthetic construct
  source 1..20: mol_type = other DNA
ttttagtaaagacggggttt

SEQ ID NO: 52670 - DNA, 20 bp, synthetic construct
  source 1..20: mol_type = other DNA
tttttagtaaagacggggtt

SEQ ID NO: 52671 - DNA, 20 bp, synthetic construct
  source 1..20: mol_type = other DNA
ttttttagtaaagacggggt

SEQ ID NO: 52672 - DNA, 20 bp, synthetic construct
  source 1..20: mol_type = other DNA
cttttttagtaaagacgggg

SEQ ID NO: 52673 - DNA, 20 bp, synthetic construct
  source 1..20: mol_type = other DNA
acttttttagtaaagacggg

SEQ ID NO: 52674 - DNA, 20 bp, synthetic construct
  source 1..20: mol_type = other DNA
tacttttttagtaaagacgg

SEQ ID NO: 52675 - DNA, 20 bp, synthetic construct
  source 1..20: mol_type = other DNA
ttacttttttagtaaagacg

SEQ ID NO: 52676 - DNA, 20 bp, synthetic construct
  source 1..20: mol_type = other DNA
tttacttttttagtaaagac

SEQ ID NO: 52677 - DNA, 20 bp, synthetic construct
  source 1..20: mol_type = other DNA
ttttacttttttagtaaaga

SEQ ID NO: 52678 - DNA, 20 bp, synthetic construct
  source 1..20: mol_type = other DNA
tttttacttttttagtaaag

SEQ ID NO: 52679 - DNA, 20 bp, synthetic construct
  source 1..20: mol_type = other DNA
ttttttacttttttagtaaa

SEQ ID NO: 52680 - DNA, 20 bp, synthetic construct
  source 1..20: mol_type = other DNA
attttttacttttttagtaa

SEQ ID NO: 52681 - DNA, 20 bp, synthetic construct
  source 1..20: mol_type = other DNA
aattttttacttttttagta

SEQ ID NO: 52682 - DNA, 20 bp, synthetic construct
  source 1..20: mol_type = other DNA
taattttttacttttttagt

SEQ ID NO: 52683 - DNA, 20 bp, synthetic construct
  source 1..20: mol_type = other DNA
ctaattttttacttttttag

SEQ ID NO: 52684 - DNA, 20 bp, synthetic construct
  source 1..20: mol_type = other DNA
gctaattttttactttttta

SEQ ID NO: 52685 - DNA, 20 bp, synthetic construct
  source 1..20: mol_type = other DNA
cgctaattttttactttttt

SEQ ID NO: 52686 - DNA, 20 bp, synthetic construct
  source 1..20: mol_type = other DNA
ccgctaattttttacttttt

SEQ ID NO: 52687 - DNA, 20 bp, synthetic construct
  source 1..20: mol_type = other DNA
cccgctaattttttactttt

SEQ ID NO: 52688 - DNA, 20 bp, synthetic construct
  source 1..20: mol_type = other DNA
tcccgctaattttttacttt

SEQ ID NO: 52689 - DNA, 20 bp, synthetic construct
  source 1..20: mol_type = other DNA
gtcccgctaattttttactt

SEQ ID NO: 52690 - DNA, 20 bp, synthetic construct
  source 1..20: mol_type = other DNA
cgtcccgctaattttttact

SEQ ID NO: 52691 - DNA, 20 bp, synthetic construct
  source 1..20: mol_type = other DNA
acgtcccgctaattttttac

SEQ ID NO: 52692 - DNA, 20 bp, synthetic construct
  source 1..20: mol_type = other DNA
cacgtcccgctaatttttta

SEQ ID NO: 52693 - DNA, 20 bp, synthetic construct
  source 1..20: mol_type = other DNA
tcacgtcccgctaatttttt

SEQ ID NO: 52694 - DNA, 20 bp, synthetic construct
  source 1..20: mol_type = other DNA
atcacgtcccgctaattttt

SEQ ID NO: 52695 - DNA, 20 bp, synthetic construct
  source 1..20: mol_type = other DNA
catcacgtcccgctaatttt

SEQ ID NO: 52696 - DNA, 20 bp, synthetic construct
  source 1..20: mol_type = other DNA
ccatcacgtcccgctaattt

SEQ ID NO: 52697 - DNA, 20 bp, synthetic construct
  source 1..20: mol_type = other DNA
gccatcacgtcccgctaatt

SEQ ID NO: 52698 - DNA, 20 bp, synthetic construct
  source 1..20: mol_type = other DNA
tgccatcacgtcccgctaat

SEQ ID NO: 52699 - DNA, 20 bp, synthetic construct
  source 1..20: mol_type = other DNA
gtgccatcacgtcccgctaa

SEQ ID NO: 52700 - DNA, 20 bp, synthetic construct
  source 1..20: mol_type = other DNA
tgtgccatcacgtcccgcta

SEQ ID NO: 52701 - DNA, 20 bp, synthetic construct
  source 1..20: mol_type = other DNA
atgtgccatcacgtcccgct

SEQ ID NO: 52702 - DNA, 20 bp, synthetic construct
  source 1..20: mol_type = other DNA
catgtgccatcacgtcccgc

SEQ ID NO: 52703 - DNA, 20 bp, synthetic construct
  source 1..20: mol_type = other DNA
acatgtgccatcacgtcccg

SEQ ID NO: 52704 - DNA, 20 bp, synthetic construct
  source 1..20: mol_type = other DNA
gacatgtgccatcacgtccc

SEQ ID NO: 52705 - DNA, 20 bp, synthetic construct
  source 1..20: mol_type = other DNA
agacatgtgccatcacgtcc

SEQ ID NO: 52706 - DNA, 20 bp, synthetic construct
  source 1..20: mol_type = other DNA
tagacatgtgccatcacgtc

SEQ ID NO: 52707 - DNA, 20 bp, synthetic construct
  source 1..20: mol_type = other DNA
atagacatgtgccatcacgt

SEQ ID NO: 52708 - DNA, 20 bp, synthetic construct
  source 1..20: mol_type = other DNA
tatagacatgtgccatcacg

SEQ ID NO: 52709 - DNA, 20 bp, synthetic construct
  source 1..20: mol_type = other DNA
ttatagacatgtgccatcac

SEQ ID NO: 52710 - DNA, 20 bp, synthetic construct
  source 1..20: mol_type = other DNA
attatagacatgtgccatca

SEQ ID NO: 52711 - DNA, 20 bp, synthetic construct
  source 1..20: mol_type = other DNA
gattatagacatgtgccatc

SEQ ID NO: 52712 - DNA, 20 bp, synthetic construct
  source 1..20: mol_type = other DNA
ggattatagacatgtgccat

SEQ ID NO: 52713 - DNA, 20 bp, synthetic construct
  source 1..20: mol_type = other DNA
gggattatagacatgtgcca

SEQ ID NO: 52714 - DNA, 20 bp, synthetic construct
  source 1..20: mol_type = other DNA
tgggattatagacatgtgcc

SEQ ID NO: 52715 - DNA, 20 bp, synthetic construct
  source 1..20: mol_type = other DNA
ctgggattatagacatgtgc

SEQ ID NO: 52716 - DNA, 20 bp, synthetic construct
  source 1..20: mol_type = other DNA
gctgggattatagacatgtg

SEQ ID NO: 52717 - DNA, 20 bp, synthetic construct
  source 1..20: mol_type = other DNA
agctgggattatagacatgt

SEQ ID NO: 52718 - DNA, 20 bp, synthetic construct
  source 1..20: mol_type = other DNA
tagctgggattatagacatg

SEQ ID NO: 52719 - DNA, 20 bp, synthetic construct
  source 1..20: mol_type = other DNA
gtagctgggattatagacat

SEQ ID NO: 52720 - DNA, 20 bp, synthetic construct
  source 1..20: mol_type = other DNA
agtagctgggattatagaca

SEQ ID NO: 52721 - DNA, 20 bp, synthetic construct
  source 1..20: mol_type = other DNA
aagtagctgggattatagac

SEQ ID NO: 52722 - DNA, 20 bp, synthetic construct
  source 1..20: mol_type = other DNA
caagtagctgggattataga

SEQ ID NO: 52723 - DNA, 20 bp, synthetic construct
  source 1..20: mol_type = other DNA
ccaagtagctgggattatag

SEQ ID NO: 52724 - DNA, 20 bp, synthetic construct
  source 1..20: mol_type = other DNA
cccaagtagctgggattata

SEQ ID NO: 52725 - DNA, 20 bp, synthetic construct
  source 1..20: mol_type = other DNA
ccccaagtagctgggattat

SEQ ID NO: 52726 - DNA, 20 bp, synthetic construct
  source 1..20: mol_type = other DNA
tccccaagtagctgggatta

SEQ ID NO: 52727 - DNA, 20 bp, synthetic construct
  source 1..20: mol_type = other DNA
ctccccaagtagctgggatt

SEQ ID NO: 52728 - DNA, 20 bp, synthetic construct
  source 1..20: mol_type = other DNA
tctccccaagtagctgggat

SEQ ID NO: 52729 - DNA, 20 bp, synthetic construct
  source 1..20: mol_type = other DNA
ctctccccaagtagctggga

SEQ ID NO: 52730 - DNA, 20 bp, synthetic construct
  source 1..20: mol_type = other DNA
cctctccccaagtagctggg

SEQ ID NO: 52731 - DNA, 20 bp, synthetic construct
  source 1..20: mol_type = other DNA
gcctctccccaagtagctgg

SEQ ID NO: 52732 - DNA, 20 bp, synthetic construct
  source 1..20: mol_type = other DNA
agcctctccccaagtagctg

SEQ ID NO: 52733 - DNA, 20 bp, synthetic construct
  source 1..20: mol_type = other DNA
cagcctctccccaagtagct

SEQ ID NO: 52734 - DNA, 20 bp, synthetic construct
  source 1..20: mol_type = other DNA
tcagcctctccccaagtagc

SEQ ID NO: 52735 - DNA, 20 bp, synthetic construct
  source 1..20: mol_type = other DNA
ctcagcctctccccaagtag

SEQ ID NO: 52736 - DNA, 20 bp, synthetic construct
  source 1..20: mol_type = other DNA
cctcagcctctccccaagta

SEQ ID NO: 52737 - DNA, 20 bp, synthetic construct
  source 1..20: mol_type = other DNA
gcctcagcctctccccaagt

SEQ ID NO: 52738 - DNA, 20 bp, synthetic construct
  source 1..20: mol_type = other DNA
tgcctcagcctctccccaag

SEQ ID NO: 52739 - DNA, 20 bp, synthetic construct
  source 1..20: mol_type = other DNA
ctgcctcagcctctccccaa

SEQ ID NO: 52740 - DNA, 20 bp, synthetic construct
  source 1..20: mol_type = other DNA
tctgcctcagcctctcccca

SEQ ID NO: 52741 - DNA, 20 bp, synthetic construct
  source 1..20: mol_type = other DNA
ttctgcctcagcctctcccc

SEQ ID NO: 52742 - DNA, 20 bp, synthetic construct
  source 1..20: mol_type = other DNA
cttctgcctcagcctctccc

SEQ ID NO: 52743 - DNA, 20 bp, synthetic construct
  source 1..20: mol_type = other DNA
tcttctgcctcagcctctcc

SEQ ID NO: 52744 - DNA, 20 bp, synthetic construct
  source 1..20: mol_type = other DNA
ttcttctgcctcagcctctc

SEQ ID NO: 52745 - DNA, 20 bp, synthetic construct
  source 1..20: mol_type = other DNA
attcttctgcctcagcctct

SEQ ID NO: 52746 - DNA, 20 bp, synthetic construct
  source 1..20: mol_type = other DNA
gattcttctgcctcagcctc

SEQ ID NO: 52747 - DNA, 20 bp, synthetic construct
  source 1..20: mol_type = other DNA
cgattcttctgcctcagcct

SEQ ID NO: 52748 - DNA, 20 bp, synthetic construct
  source 1..20: mol_type = other DNA
gcgattcttctgcctcagcc

SEQ ID NO: 52749 - DNA, 20 bp, synthetic construct
  source 1..20: mol_type = other DNA
agcgattcttctgcctcagc

SEQ ID NO: 52750 - DNA, 20 bp, synthetic construct
  source 1..20: mol_type = other DNA
aagcgattcttctgcctcag

SEQ ID NO: 52751 - DNA, 20 bp, synthetic construct
  source 1..20: mol_type = other DNA
caagcgattcttctgcctca

SEQ ID NO: 52752 - DNA, 20 bp, synthetic construct
  source 1..20: mol_type = other DNA
tcaagcgattcttctgcctc

SEQ ID NO: 52753 - DNA, 20 bp, synthetic construct
  source 1..20: mol_type = other DNA
ttcaagcgattcttctgcct

SEQ ID NO: 52754 - DNA, 20 bp, synthetic construct
  source 1..20: mol_type = other DNA
gttcaagcgattcttctgcc

SEQ ID NO: 52755 - DNA, 20 bp, synthetic construct
  source 1..20: mol_type = other DNA
ggttcaagcgattcttctgc

SEQ ID NO: 52756 - DNA, 20 bp, synthetic construct
  source 1..20: mol_type = other DNA
gggttcaagcgattcttctg

SEQ ID NO: 52757 - DNA, 20 bp, synthetic construct
  source 1..20: mol_type = other DNA
cgggttcaagcgattcttct

SEQ ID NO: 52758 - DNA, 20 bp, synthetic construct
  source 1..20: mol_type = other DNA
ccgggttcaagcgattcttc

SEQ ID NO: 52759 - DNA, 20 bp, synthetic construct
  source 1..20: mol_type = other DNA
cccgggttcaagcgattctt

SEQ ID NO: 52760 - DNA, 20 bp, synthetic construct
  source 1..20: mol_type = other DNA
tcccgggttcaagcgattct

SEQ ID NO: 52761 - DNA, 20 bp, synthetic construct
  source 1..20: mol_type = other DNA
ctcccgggttcaagcgattc

SEQ ID NO: 52762 - DNA, 20 bp, synthetic construct
  source 1..20: mol_type = other DNA
cctcccgggttcaagcgatt

SEQ ID NO: 52763 - DNA, 20 bp, synthetic construct
  source 1..20: mol_type = other DNA
gcctcccgggttcaagcgat

SEQ ID NO: 52764 - DNA, 20 bp, synthetic construct
  source 1..20: mol_type = other DNA
tgcctcccgggttcaagcga

SEQ ID NO: 52765 - DNA, 20 bp, synthetic construct
  source 1..20: mol_type = other DNA
ctgcctcccgggttcaagcg

SEQ ID NO: 52766 - DNA, 20 bp, synthetic construct
  source 1..20: mol_type = other DNA
tctgcctcccgggttcaagc

SEQ ID NO: 52767 - DNA, 20 bp, synthetic construct
  source 1..20: mol_type = other DNA
ctctgcctcccgggttcaag

SEQ ID NO: 52768 - DNA, 20 bp, synthetic construct
  source 1..20: mol_type = other DNA
tctctgcctcccgggttcaa

SEQ ID NO: 52769 - DNA, 20 bp, synthetic construct
  source 1..20: mol_type = other DNA
atctctgcctcccgggttca

SEQ ID NO: 52770 - DNA, 20 bp, synthetic construct
  source 1..20: mol_type = other DNA
aatctctgcctcccgggttc

SEQ ID NO: 52771 - DNA, 20 bp, synthetic construct
  source 1..20: mol_type = other DNA
caatctctgcctcccgggtt

SEQ ID NO: 52772 - DNA, 20 bp, synthetic construct
  source 1..20: mol_type = other DNA
gcaatctctgcctcccgggt

SEQ ID NO: 52773 - DNA, 20 bp, synthetic construct
  source 1..20: mol_type = other DNA
cgcaatctctgcctcccggg

SEQ ID NO: 52774 - DNA, 20 bp, synthetic construct
  source 1..20: mol_type = other DNA
tcgcaatctctgcctcccgg

SEQ ID NO: 52775 - DNA, 20 bp, synthetic construct
  source 1..20: mol_type = other DNA
ctcgcaatctctgcctcccg

SEQ ID NO: 52776 - DNA, 20 bp, synthetic construct
  source 1..20: mol_type = other DNA
tctcgcaatctctgcctccc

SEQ ID NO: 52777 - DNA, 20 bp, synthetic construct
  source 1..20: mol_type = other DNA
atctcgcaatctctgcctcc

SEQ ID NO: 52778 - DNA, 20 bp, synthetic construct
  source 1..20: mol_type = other DNA
gatctcgcaatctctgcctc

SEQ ID NO: 52779 - DNA, 20 bp, synthetic construct
  source 1..20: mol_type = other DNA
tgatctcgcaatctctgcct

SEQ ID NO: 52780 - DNA, 20 bp, synthetic construct
  source 1..20: mol_type = other DNA
atgatctcgcaatctctgcc

SEQ ID NO: 52781 - DNA, 20 bp, synthetic construct
  source 1..20: mol_type = other DNA
catgatctcgcaatctctgc

SEQ ID NO: 52782 - DNA, 20 bp, synthetic construct
  source 1..20: mol_type = other DNA
gcatgatctcgcaatctctg

SEQ ID NO: 52783 - DNA, 20 bp, synthetic construct
  source 1..20: mol_type = other DNA
ggcatgatctcgcaatctct

SEQ ID NO: 52784 - DNA, 20 bp, synthetic construct
  source 1..20: mol_type = other DNA
tggcatgatctcgcaatctc

SEQ ID NO: 52785 - DNA, 20 bp, synthetic construct
  source 1..20: mol_type = other DNA
gtggcatgatctcgcaatct

SEQ ID NO: 52786 - DNA, 20 bp, synthetic construct
  source 1..20: mol_type = other DNA
agtggcatgatctcgcaatc

SEQ ID NO: 52787 - DNA, 20 bp, synthetic construct
  source 1..20: mol_type = other DNA
cagtggcatgatctcgcaat

SEQ ID NO: 52788 - DNA, 20 bp, synthetic construct
  source 1..20: mol_type = other DNA
gcagtggcatgatctcgcaa

SEQ ID NO: 52789 - DNA, 20 bp, synthetic construct
  source 1..20: mol_type = other DNA
tgcagtggcatgatctcgca

SEQ ID NO: 52790 - DNA, 20 bp, synthetic construct
  source 1..20: mol_type = other DNA
gtgcagtggcatgatctcgc

SEQ ID NO: 52791 - DNA, 20 bp, synthetic construct
  source 1..20: mol_type = other DNA
agtgcagtggcatgatctcg

SEQ ID NO: 52792 - DNA, 20 bp, synthetic construct
  source 1..20: mol_type = other DNA
gagtgcagtggcatgatctc

SEQ ID NO: 52793 - DNA, 20 bp, synthetic construct
  source 1..20: mol_type = other DNA
ggagtgcagtggcatgatct

SEQ ID NO: 52794 - DNA, 20 bp, synthetic construct
  source 1..20: mol_type = other DNA
tggagtgcagtggcatgatc

SEQ ID NO: 52795 - DNA, 20 bp, synthetic construct
  source 1..20: mol_type = other DNA
ctggagtgcagtggcatgat

SEQ ID NO: 52796 - DNA, 20 bp, synthetic construct
  source 1..20: mol_type = other DNA
gctggagtgcagtggcatga

SEQ ID NO: 52797 - DNA, 20 bp, synthetic construct
  source 1..20: mol_type = other DNA
ggctggagtgcagtggcatg

SEQ ID NO: 52798 - DNA, 20 bp, synthetic construct
  source 1..20: mol_type = other DNA
aggctggagtgcagtggcat

SEQ ID NO: 52799 - DNA, 20 bp, synthetic construct
  source 1..20: mol_type = other DNA
caggctggagtgcagtggca

SEQ ID NO: 52800 - DNA, 20 bp, synthetic construct
  source 1..20: mol_type = other DNA
ccaggctggagtgcagtggc

SEQ ID NO: 52801 - DNA, 20 bp, synthetic construct
  source 1..20: mol_type = other DNA
cccaggctggagtgcagtgg

SEQ ID NO: 52802 - DNA, 20 bp, synthetic construct
  source 1..20: mol_type = other DNA
gcccaggctggagtgcagtg

SEQ ID NO: 52803 - DNA, 20 bp, synthetic construct
  source 1..20: mol_type = other DNA
tgcccaggctggagtgcagt

SEQ ID NO: 52804 - DNA, 20 bp, synthetic construct
  source 1..20: mol_type = other DNA
ttgcccaggctggagtgcag

SEQ ID NO: 52805 - DNA, 20 bp, synthetic construct
  source 1..20: mol_type = other DNA
gttgcccaggctggagtgca

SEQ ID NO: 52806 - DNA, 20 bp, synthetic construct
  source 1..20: mol_type = other DNA
tgttgcccaggctggagtgc

SEQ ID NO: 52807 - DNA, 20 bp, synthetic construct
  source 1..20: mol_type = other DNA
ctgttgcccaggctggagtg

SEQ ID NO: 52808 - DNA, 20 bp, synthetic construct
  source 1..20: mol_type = other DNA
tctgttgcccaggctggagt

SEQ ID NO: 52809 - DNA, 20 bp, synthetic construct
  source 1..20: mol_type = other DNA
ttctgttgcccaggctggag

SEQ ID NO: 52810 - DNA, 20 bp, synthetic construct
  source 1..20: mol_type = other DNA
attctgttgcccaggctgga

SEQ ID NO: 52811 - DNA, 20 bp, synthetic construct
  source 1..20: mol_type = other DNA
tattctgttgcccaggctgg

SEQ ID NO: 52812 - DNA, 20 bp, synthetic construct
  source 1..20: mol_type = other DNA
ttattctgttgcccaggctg

SEQ ID NO: 52813 - DNA, 20 bp, synthetic construct
  source 1..20: mol_type = other DNA
tttattctgttgcccaggct

SEQ ID NO: 52814 - DNA, 20 bp, synthetic construct
  source 1..20: mol_type = other DNA
ttttattctgttgcccaggc

SEQ ID NO: 52815 - DNA, 20 bp, synthetic construct
  source 1..20: mol_type = other DNA
tttttattctgttgcccagg

SEQ ID NO: 52816 - DNA, 20 bp, synthetic construct
  source 1..20: mol_type = other DNA
ttttttattctgttgcccag

SEQ ID NO: 52817 - DNA, 20 bp, synthetic construct
  source 1..20: mol_type = other DNA
tttttttattctgttgccca

SEQ ID NO: 52818 - DNA, 20 bp, synthetic construct
  source 1..20: mol_type = other DNA
ctttttttattctgttgccc

SEQ ID NO: 52819 - DNA, 20 bp, synthetic construct
  source 1..20: mol_type = other DNA
tctttttttattctgttgcc

SEQ ID NO: 52820 - DNA, 20 bp, synthetic construct
  source 1..20: mol_type = other DNA
ttctttttttattctgttgc

SEQ ID NO: 52821 - DNA, 20 bp, synthetic construct
  source 1..20: mol_type = other DNA
attctttttttattctgttg

SEQ ID NO: 52822 - DNA, 20 bp, synthetic construct
  source 1..20: mol_type = other DNA
aattctttttttattctgtt

SEQ ID NO: 52823 - DNA, 20 bp, synthetic construct
  source 1..20: mol_type = other DNA
aaattctttttttattctgt

SEQ ID NO: 52824 - DNA, 20 bp, synthetic construct
  source 1..20: mol_type = other DNA
caaattctttttttattctg

SEQ ID NO: 52825 - DNA, 20 bp, synthetic construct
  source 1..20: mol_type = other DNA
acaaattctttttttattct

SEQ ID NO: 52826 - DNA, 20 bp, synthetic construct
  source 1..20: mol_type = other DNA
cacaaattctttttttattc

SEQ ID NO: 52827 - DNA, 20 bp, synthetic construct
  source 1..20: mol_type = other DNA
gcacaaattctttttttatt

SEQ ID NO: 52828 - DNA, 20 bp, synthetic construct
  source 1..20: mol_type = other DNA
agcacaaattctttttttat

SEQ ID NO: 52829 - DNA, 20 bp, synthetic construct
  source 1..20: mol_type = other DNA
aagcacaaattcttttttta

SEQ ID NO: 52830 - DNA, 20 bp, synthetic construct
  source 1..20: mol_type = other DNA
aaagcacaaattcttttttt

SEQ ID NO: 52831 - DNA, 20 bp, synthetic construct
  source 1..20: mol_type = other DNA
taaagcacaaattctttttt

SEQ ID NO: 52832 - DNA, 20 bp, synthetic construct
  source 1..20: mol_type = other DNA
ataaagcacaaattcttttt

SEQ ID NO: 52833 - DNA, 20 bp, synthetic construct
  source 1..20: mol_type = other DNA
aataaagcacaaattctttt

SEQ ID NO: 52834 - DNA, 20 bp, synthetic construct
  source 1..20: mol_type = other DNA
aaataaagcacaaattcttt

SEQ ID NO: 52835 - DNA, 20 bp, synthetic construct
  source 1..20: mol_type = other DNA
aaaataaagcacaaattctt

SEQ ID NO: 52836 - DNA, 20 bp, synthetic construct
  source 1..20: mol_type = other DNA
gaaaataaagcacaaattct

SEQ ID NO: 52837 - DNA, 20 bp, synthetic construct
  source 1..20: mol_type = other DNA
agaaaataaagcacaaattc

SEQ ID NO: 52838 - DNA, 20 bp, synthetic construct
  source 1..20: mol_type = other DNA
aagaaaataaagcacaaatt

SEQ ID NO: 52839 - DNA, 20 bp, synthetic construct
  source 1..20: mol_type = other DNA
caagaaaataaagcacaaat

SEQ ID NO: 52840 - DNA, 20 bp, synthetic construct
  source 1..20: mol_type = other DNA
gcaagaaaataaagcacaaa

SEQ ID NO: 52841 - DNA, 20 bp, synthetic construct
  source 1..20: mol_type = other DNA
ggcaagaaaataaagcacaa

SEQ ID NO: 52842 - DNA, 20 bp, synthetic construct
  source 1..20: mol_type = other DNA
aggcaagaaaataaagcaca

SEQ ID NO: 52843 - DNA, 20 bp, synthetic construct
  source 1..20: mol_type = other DNA
gaggcaagaaaataaagcac

SEQ ID NO: 52844 - DNA, 20 bp, synthetic construct
  source 1..20: mol_type = other DNA
tgaggcaagaaaataaagca

SEQ ID NO: 52845 - DNA, 20 bp, synthetic construct
  source 1..20: mol_type = other DNA
gtgaggcaagaaaataaagc

SEQ ID NO: 52846 - DNA, 20 bp, synthetic construct
  source 1..20: mol_type = other DNA
tgtgaggcaagaaaataaag

SEQ ID NO: 52847 - DNA, 20 bp, synthetic construct
  source 1..20: mol_type = other DNA
ctgtgaggcaagaaaataaa

SEQ ID NO: 52848 - DNA, 20 bp, synthetic construct
  source 1..20: mol_type = other DNA
actgtgaggcaagaaaataa

SEQ ID NO: 52849 - DNA, 20 bp, synthetic construct
  source 1..20: mol_type = other DNA
gactgtgaggcaagaaaata

SEQ ID NO: 52850 - DNA, 20 bp, synthetic construct
  source 1..20: mol_type = other DNA
ggactgtgaggcaagaaaat

SEQ ID NO: 52851 - DNA, 20 bp, synthetic construct
  source 1..20: mol_type = other DNA
gggactgtgaggcaagaaaa

SEQ ID NO: 52852 - DNA, 20 bp, synthetic construct
  source 1..20: mol_type = other DNA
ggggactgtgaggcaagaaa

SEQ ID NO: 52853 - DNA, 20 bp, synthetic construct
  source 1..20: mol_type = other DNA
aggggactgtgaggcaagaa

SEQ ID NO: 52854 - DNA, 20 bp, synthetic construct
  source 1..20: mol_type = other DNA
aaggggactgtgaggcaaga

SEQ ID NO: 52855 - DNA, 20 bp, synthetic construct
  source 1..20: mol_type = other DNA
aaaggggactgtgaggcaag

SEQ ID NO: 52856 - DNA, 20 bp, synthetic construct
  source 1..20: mol_type = other DNA
gaaaggggactgtgaggcaa

SEQ ID NO: 52857 - DNA, 20 bp, synthetic construct
  source 1..20: mol_type = other DNA
agaaaggggactgtgaggca

SEQ ID NO: 52858 - DNA, 20 bp, synthetic construct
  source 1..20: mol_type = other DNA
cagaaaggggactgtgaggc

SEQ ID NO: 52859 - DNA, 20 bp, synthetic construct
  source 1..20: mol_type = other DNA
acagaaaggggactgtgagg

SEQ ID NO: 52860 - DNA, 20 bp, synthetic construct
  source 1..20: mol_type = other DNA
gacagaaaggggactgtgag

SEQ ID NO: 52861 - DNA, 20 bp, synthetic construct
  source 1..20: mol_type = other DNA
agacagaaaggggactgtga

SEQ ID NO: 52862 - DNA, 20 bp, synthetic construct
  source 1..20: mol_type = other DNA
gagacagaaaggggactgtg

SEQ ID NO: 52863 - DNA, 20 bp, synthetic construct
  source 1..20: mol_type = other DNA
tgagacagaaaggggactgt

SEQ ID NO: 52864 - DNA, 20 bp, synthetic construct
  source 1..20: mol_type = other DNA
ctgagacagaaaggggactg

SEQ ID NO: 52865 - DNA, 20 bp, synthetic construct
  source 1..20: mol_type = other DNA
tctgagacagaaaggggact

SEQ ID NO: 52866 - DNA, 20 bp, synthetic construct
  source 1..20: mol_type = other DNA
ttctgagacagaaaggggac

SEQ ID NO: 52867 - DNA, 20 bp, synthetic construct
  source 1..20: mol_type = other DNA
attctgagacagaaagggga

SEQ ID NO: 52868 - DNA, 20 bp, synthetic construct
  source 1..20: mol_type = other DNA
aattctgagacagaaagggg

SEQ ID NO: 52869 - DNA, 20 bp, synthetic construct
  source 1..20: mol_type = other DNA
caattctgagacagaaaggg

SEQ ID NO: 52870 - DNA, 20 bp, synthetic construct
  source 1..20: mol_type = other DNA
ccaattctgagacagaaagg

SEQ ID NO: 52871 - DNA, 20 bp, synthetic construct
  source 1..20: mol_type = other DNA
gccaattctgagacagaaag

SEQ ID NO: 52872 - DNA, 20 bp, synthetic construct
  source 1..20: mol_type = other DNA
tgccaattctgagacagaaa

SEQ ID NO: 52873 - DNA, 20 bp, synthetic construct
  source 1..20: mol_type = other DNA
ttgccaattctgagacagaa

SEQ ID NO: 52874 - DNA, 20 bp, synthetic construct
  source 1..20: mol_type = other DNA
gttgccaattctgagacaga

SEQ ID NO: 52875 - DNA, 20 bp, synthetic construct
  source 1..20: mol_type = other DNA
agttgccaattctgagacag

SEQ ID NO: 52876 - DNA, 20 bp, synthetic construct
  source 1..20: mol_type = other DNA
cagttgccaattctgagaca

SEQ ID NO: 52877 - DNA, 20 bp, synthetic construct
  source 1..20: mol_type = other DNA
gcagttgccaattctgagac

SEQ ID NO: 52878 - DNA, 20 bp, synthetic construct
  source 1..20: mol_type = other DNA
ggcagttgccaattctgaga

SEQ ID NO: 52879 - DNA, 20 bp, synthetic construct
  source 1..20: mol_type = other DNA
aggcagttgccaattctgag

SEQ ID NO: 52880 - DNA, 20 bp, synthetic construct
  source 1..20: mol_type = other DNA
caggcagttgccaattctga

SEQ ID NO: 52881 - DNA, 20 bp, synthetic construct
  source 1..20: mol_type = other DNA
tcaggcagttgccaattctg

SEQ ID NO: 52882 - DNA, 20 bp, synthetic construct
  source 1..20: mol_type = other DNA
ttcaggcagttgccaattct

SEQ ID NO: 52883 - DNA, 20 bp, synthetic construct
  source 1..20: mol_type = other DNA
tttcaggcagttgccaattc

SEQ ID NO: 52884 - DNA, 20 bp, synthetic construct
  source 1..20: mol_type = other DNA
atttcaggcagttgccaatt

SEQ ID NO: 52885 - DNA, 20 bp, synthetic construct
  source 1..20: mol_type = other DNA
tatttcaggcagttgccaat

SEQ ID NO: 52886 - DNA, 20 bp, synthetic construct
  source 1..20: mol_type = other DNA
ctatttcaggcagttgccaa

SEQ ID NO: 52887 - DNA, 20 bp, synthetic construct
  source 1..20: mol_type = other DNA
actatttcaggcagttgcca

SEQ ID NO: 52888 - DNA, 20 bp, synthetic construct
  source 1..20: mol_type = other DNA
gactatttcaggcagttgcc

SEQ ID NO: 52889 - DNA, 20 bp, synthetic construct
  source 1..20: mol_type = other DNA
agactatttcaggcagttgc

SEQ ID NO: 52890 - DNA, 20 bp, synthetic construct
  source 1..20: mol_type = other DNA
gagactatttcaggcagttg

SEQ ID NO: 52891 - DNA, 20 bp, synthetic construct
  source 1..20: mol_type = other DNA
agagactatttcaggcagtt

SEQ ID NO: 52892 - DNA, 20 bp, synthetic construct
  source 1..20: mol_type = other DNA
cagagactatttcaggcagt

SEQ ID NO: 52893 - DNA, 20 bp, synthetic construct
  source 1..20: mol_type = other DNA
gcagagactatttcaggcag

SEQ ID NO: 52894 - DNA, 20 bp, synthetic construct
  source 1..20: mol_type = other DNA
agcagagactatttcaggca

SEQ ID NO: 52895 - DNA, 20 bp, synthetic construct
  source 1..20: mol_type = other DNA
cagcagagactatttcaggc

SEQ ID NO: 52896 - DNA, 20 bp, synthetic construct
  source 1..20: mol_type = other DNA
acagcagagactatttcagg

SEQ ID NO: 52897 - DNA, 20 bp, synthetic construct
  source 1..20: mol_type = other DNA
aacagcagagactatttcag

SEQ ID NO: 52898 - DNA, 20 bp, synthetic construct
  source 1..20: mol_type = other DNA
taacagcagagactatttca

SEQ ID NO: 52899 - DNA, 20 bp, synthetic construct
  source 1..20: mol_type = other DNA
ataacagcagagactatttc

SEQ ID NO: 52900 - DNA, 20 bp, synthetic construct
  source 1..20: mol_type = other DNA
gataacagcagagactattt

SEQ ID NO: 52901 - DNA, 20 bp, synthetic construct
  source 1..20: mol_type = other DNA
tgataacagcagagactatt

SEQ ID NO: 52902 - DNA, 20 bp, synthetic construct
  source 1..20: mol_type = other DNA
atgataacagcagagactat

SEQ ID NO: 52903 - DNA, 20 bp, synthetic construct
  source 1..20: mol_type = other DNA
aatgataacagcagagacta

SEQ ID NO: 52904 - DNA, 20 bp, synthetic construct
  source 1..20: mol_type = other DNA
aaatgataacagcagagact

SEQ ID NO: 52905 - DNA, 20 bp, synthetic construct
  source 1..20: mol_type = other DNA
caaatgataacagcagagac

SEQ ID NO: 52906 - DNA, 20 bp, synthetic construct
  source 1..20: mol_type = other DNA
tcaaatgataacagcagaga

SEQ ID NO: 52907 - DNA, 20 bp, synthetic construct
  source 1..20: mol_type = other DNA
atcaaatgataacagcagag

SEQ ID NO: 52908 - DNA, 20 bp, synthetic construct
  source 1..20: mol_type = other DNA
tatcaaatgataacagcaga

SEQ ID NO: 52909 - DNA, 20 bp, synthetic construct
  source 1..20: mol_type = other DNA
ctatcaaatgataacagcag

SEQ ID NO: 52910 - DNA, 20 bp, synthetic construct
  source 1..20: mol_type = other DNA
actatcaaatgataacagca

SEQ ID NO: 52911 - DNA, 20 bp, synthetic construct
  source 1..20: mol_type = other DNA
tactatcaaatgataacagc

SEQ ID NO: 52912 - DNA, 20 bp, synthetic construct
  source 1..20: mol_type = other DNA
gtactatcaaatgataacag

SEQ ID NO: 52913 - DNA, 20 bp, synthetic construct
  source 1..20: mol_type = other DNA
agtactatcaaatgataaca

SEQ ID NO: 52914 - DNA, 20 bp, synthetic construct
  source 1..20: mol_type = other DNA
aagtactatcaaatgataac

SEQ ID NO: 52915 - DNA, 20 bp, synthetic construct
  source 1..20: mol_type = other DNA
aaagtactatcaaatgataa

SEQ ID NO: 52916 - DNA, 20 bp, synthetic construct
  source 1..20: mol_type = other DNA
aaaagtactatcaaatgata

SEQ ID NO: 52917 - DNA, 20 bp, synthetic construct
  source 1..20: mol_type = other DNA
gaaaagtactatcaaatgat

SEQ ID NO: 52918 - DNA, 20 bp, synthetic construct
  source 1..20: mol_type = other DNA
ggaaaagtactatcaaatga

SEQ ID NO: 52919 - DNA, 20 bp, synthetic construct
  source 1..20: mol_type = other DNA
tggaaaagtactatcaaatg

SEQ ID NO: 52920 - DNA, 20 bp, synthetic construct
  source 1..20: mol_type = other DNA
gtggaaaagtactatcaaat

SEQ ID NO: 52921 - DNA, 20 bp, synthetic construct
  source 1..20: mol_type = other DNA
tgtggaaaagtactatcaaa

SEQ ID NO: 52922 - DNA, 20 bp, synthetic construct
  source 1..20: mol_type = other DNA
atgtggaaaagtactatcaa

SEQ ID NO: 52923 - DNA, 20 bp, synthetic construct
  source 1..20: mol_type = other DNA
gatgtggaaaagtactatca

SEQ ID NO: 52924 - DNA, 20 bp, synthetic construct
  source 1..20: mol_type = other DNA
agatgtggaaaagtactatc

SEQ ID NO: 52925 - DNA, 20 bp, synthetic construct
  source 1..20: mol_type = other DNA
aagatgtggaaaagtactat

SEQ ID NO: 52926 - DNA, 20 bp, synthetic construct
  source 1..20: mol_type = other DNA
caagatgtggaaaagtacta

SEQ ID NO: 52927 - DNA, 20 bp, synthetic construct
  source 1..20: mol_type = other DNA
tcaagatgtggaaaagtact

SEQ ID NO: 52928 - DNA, 20 bp, synthetic construct
  source 1..20: mol_type = other DNA
ttcaagatgtggaaaagtac

SEQ ID NO: 52929 - DNA, 20 bp, synthetic construct
  source 1..20: mol_type = other DNA
attcaagatgtggaaaagta

SEQ ID NO: 52930 - DNA, 20 bp, synthetic construct
  source 1..20: mol_type = other DNA
cattcaagatgtggaaaagt

SEQ ID NO: 52931 - DNA, 20 bp, synthetic construct
  source 1..20: mol_type = other DNA
ccattcaagatgtggaaaag

SEQ ID NO: 52932 - DNA, 20 bp, synthetic construct
  source 1..20: mol_type = other DNA
tccattcaagatgtggaaaa

SEQ ID NO: 52933 - DNA, 20 bp, synthetic construct
  source 1..20: mol_type = other DNA
atccattcaagatgtggaaa

SEQ ID NO: 52934 - DNA, 20 bp, synthetic construct
  source 1..20: mol_type = other DNA
tatccattcaagatgtggaa

SEQ ID NO: 52935 - DNA, 20 bp, synthetic construct
  source 1..20: mol_type = other DNA
ctatccattcaagatgtgga

SEQ ID NO: 52936 - DNA, 20 bp, synthetic construct
  source 1..20: mol_type = other DNA
tctatccattcaagatgtgg

SEQ ID NO: 52937 - DNA, 20 bp, synthetic construct
  source 1..20: mol_type = other DNA
atctatccattcaagatgtg

SEQ ID NO: 52938 - DNA, 20 bp, synthetic construct
  source 1..20: mol_type = other DNA
tatctatccattcaagatgt

SEQ ID NO: 52939 - DNA, 20 bp, synthetic construct
  source 1..20: mol_type = other DNA
ctatctatccattcaagatg

SEQ ID NO: 52940 - DNA, 20 bp, synthetic construct
  source 1..20: mol_type = other DNA
tctatctatccattcaagat

SEQ ID NO: 52941 - DNA, 20 bp, synthetic construct
  source 1..20: mol_type = other DNA
ctctatctatccattcaaga

SEQ ID NO: 52942 - DNA, 20 bp, synthetic construct
  source 1..20: mol_type = other DNA
actctatctatccattcaag

SEQ ID NO: 52943 - DNA, 20 bp, synthetic construct
  source 1..20: mol_type = other DNA
cactctatctatccattcaa

SEQ ID NO: 52944 - DNA, 20 bp, synthetic construct
  source 1..20: mol_type = other DNA
acactctatctatccattca

SEQ ID NO: 52945 - DNA, 20 bp, synthetic construct
  source 1..20: mol_type = other DNA
aacactctatctatccattc

SEQ ID NO: 52946 - DNA, 20 bp, synthetic construct
  source 1..20: mol_type = other DNA
aaacactctatctatccatt

SEQ ID NO: 52947 - DNA, 20 bp, synthetic construct
  source 1..20: mol_type = other DNA
aaaacactctatctatccat

SEQ ID NO: 52948 - DNA, 20 bp, synthetic construct
  source 1..20: mol_type = other DNA
aaaaacactctatctatcca

SEQ ID NO: 52949 - DNA, 20 bp, synthetic construct
  source 1..20: mol_type = other DNA
aaaaaacactctatctatcc

SEQ ID NO: 52950 - DNA, 20 bp, synthetic construct
  source 1..20: mol_type = other DNA
taaaaaacactctatctatc

SEQ ID NO: 52951 - DNA, 20 bp, synthetic construct
  source 1..20: mol_type = other DNA
ataaaaaacactctatctat

SEQ ID NO: 52952 - DNA, 20 bp, synthetic construct
  source 1..20: mol_type = other DNA
tataaaaaacactctatcta

SEQ ID NO: 52953 - DNA, 20 bp, synthetic construct
  source 1..20: mol_type = other DNA
ttataaaaaacactctatct

SEQ ID NO: 52954 - DNA, 20 bp, synthetic construct
  source 1..20: mol_type = other DNA
attataaaaaacactctatc

SEQ ID NO: 52955 - DNA, 20 bp, synthetic construct
  source 1..20: mol_type = other DNA
tattataaaaaacactctat

SEQ ID NO: 52956 - DNA, 20 bp, synthetic construct
  source 1..20: mol_type = other DNA
ctattataaaaaacactcta

SEQ ID NO: 52957 - DNA, 20 bp, synthetic construct
  source 1..20: mol_type = other DNA
tctattataaaaaacactct

SEQ ID NO: 52958 - DNA, 20 bp, synthetic construct
  source 1..20: mol_type = other DNA
ttctattataaaaaacactc

SEQ ID NO: 52959 - DNA, 20 bp, synthetic construct
  source 1..20: mol_type = other DNA
cttctattataaaaaacact

SEQ ID NO: 52960 - DNA, 20 bp, synthetic construct
  source 1..20: mol_type = other DNA
acttctattataaaaaacac

SEQ ID NO: 52961 - DNA, 20 bp, synthetic construct
  source 1..20: mol_type = other DNA
cacttctattataaaaaaca

SEQ ID NO: 52962 - DNA, 20 bp, synthetic construct
  source 1..20: mol_type = other DNA
ccacttctattataaaaaac

SEQ ID NO: 52963 - DNA, 20 bp, synthetic construct
  source 1..20: mol_type = other DNA
tccacttctattataaaaaa

SEQ ID NO: 52964 - DNA, 20 bp, synthetic construct
  source 1..20: mol_type = other DNA
atccacttctattataaaaa

SEQ ID NO: 52965 - DNA, 20 bp, synthetic construct
  source 1..20: mol_type = other DNA
catccacttctattataaaa

SEQ ID NO: 52966 - DNA, 20 bp, synthetic construct
  source 1..20: mol_type = other DNA
tcatccacttctattataaa

SEQ ID NO: 52967 - DNA, 20 bp, synthetic construct
  source 1..20: mol_type = other DNA
ttcatccacttctattataa

SEQ ID NO: 52968 - DNA, 20 bp, synthetic construct
  source 1..20: mol_type = other DNA
attcatccacttctattata

SEQ ID NO: 52969 - DNA, 20 bp, synthetic construct
  source 1..20: mol_type = other DNA
cattcatccacttctattat

SEQ ID NO: 52970 - DNA, 20 bp, synthetic construct
  source 1..20: mol_type = other DNA
tcattcatccacttctatta

SEQ ID NO: 52971 - DNA, 20 bp, synthetic construct
  source 1..20: mol_type = other DNA
atcattcatccacttctatt

SEQ ID NO: 52972 - DNA, 20 bp, synthetic construct
  source 1..20: mol_type = other DNA
aatcattcatccacttctat

SEQ ID NO: 52973 - DNA, 20 bp, synthetic construct
  source 1..20: mol_type = other DNA
taatcattcatccacttcta

SEQ ID NO: 52974 - DNA, 20 bp, synthetic construct
  source 1..20: mol_type = other DNA
ctaatcattcatccacttct

SEQ ID NO: 52975 - DNA, 20 bp, synthetic construct
  source 1..20: mol_type = other DNA
tctaatcattcatccacttc

SEQ ID NO: 52976 - DNA, 20 bp, synthetic construct
  source 1..20: mol_type = other DNA
ctctaatcattcatccactt

SEQ ID NO: 52977 - DNA, 20 bp, synthetic construct
  source 1..20: mol_type = other DNA
actctaatcattcatccact

SEQ ID NO: 52978 - DNA, 20 bp, synthetic construct
  source 1..20: mol_type = other DNA
tactctaatcattcatccac

SEQ ID NO: 52979 - DNA, 20 bp, synthetic construct
  source 1..20: mol_type = other DNA
atactctaatcattcatcca

SEQ ID NO: 52980 - DNA, 20 bp, synthetic construct
  source 1..20: mol_type = other DNA
tatactctaatcattcatcc

SEQ ID NO: 52981 - DNA, 20 bp, synthetic construct
  source 1..20: mol_type = other DNA
gtatactctaatcattcatc

SEQ ID NO: 52982 - DNA, 20 bp, synthetic construct
  source 1..20: mol_type = other DNA
agtatactctaatcattcat

SEQ ID NO: 52983 - DNA, 20 bp, synthetic construct
  source 1..20: mol_type = other DNA
tagtatactctaatcattca

SEQ ID NO: 52984 - DNA, 20 bp, synthetic construct
  source 1..20: mol_type = other DNA
ttagtatactctaatcattc

SEQ ID NO: 52985 - DNA, 20 bp, synthetic construct
  source 1..20: mol_type = other DNA
attagtatactctaatcatt

SEQ ID NO: 52986 - DNA, 20 bp, synthetic construct
  source 1..20: mol_type = other DNA
tattagtatactctaatcat

SEQ ID NO: 52987 - DNA, 20 bp, synthetic construct
  source 1..20: mol_type = other DNA
atattagtatactctaatca

SEQ ID NO: 52988 - DNA, 20 bp, synthetic construct
  source 1..20: mol_type = other DNA
catattagtatactctaatc

SEQ ID NO: 52989 - DNA, 20 bp, synthetic construct
  source 1..20: mol_type = other DNA
tcatattagtatactctaat

SEQ ID NO: 52990 - DNA, 20 bp, synthetic construct
  source 1..20: mol_type = other DNA
gtcatattagtatactctaa

SEQ ID NO: 52991 - DNA, 20 bp, synthetic construct
  source 1..20: mol_type = other DNA
tgtcatattagtatactcta

SEQ ID NO: 52992 - DNA, 20 bp, synthetic construct
  source 1..20: mol_type = other DNA
atgtcatattagtatactct

SEQ ID NO: 52993 - DNA, 20 bp, synthetic construct
  source 1..20: mol_type = other DNA
aatgtcatattagtatactc

SEQ ID NO: 52994 - DNA, 20 bp, synthetic construct
  source 1..20: mol_type = other DNA
caatgtcatattagtatact

SEQ ID NO: 52995 - DNA, 20 bp, synthetic construct
  source 1..20: mol_type = other DNA
acaatgtcatattagtatac

SEQ ID NO: 52996 - DNA, 20 bp, synthetic construct
  source 1..20: mol_type = other DNA
tacaatgtcatattagtata

SEQ ID NO: 52997 - DNA, 20 bp, synthetic construct
  source 1..20: mol_type = other DNA
atacaatgtcatattagtat

SEQ ID NO: 52998 - DNA, 20 bp, synthetic construct
  source 1..20: mol_type = other DNA
aatacaatgtcatattagta

SEQ ID NO: 52999 - DNA, 20 bp, synthetic construct
  source 1..20: mol_type = other DNA
aaatacaatgtcatattagt

SEQ ID NO: 53000 - DNA, 20 bp, synthetic construct
  source 1..20: mol_type = other DNA
aaaatacaatgtcatattag

SEQ ID NO: 53001 - DNA, 20 bp, synthetic construct
  source 1..20: mol_type = other DNA
gaaaatacaatgtcatatta

SEQ ID NO: 53002 - DNA, 20 bp, synthetic construct
  source 1..20: mol_type = other DNA
ggaaaatacaatgtcatatt

SEQ ID NO: 53003 - DNA, 20 bp, synthetic construct
  source 1..20: mol_type = other DNA
aggaaaatacaatgtcatat

SEQ ID NO: 53004 - DNA, 20 bp, synthetic construct
  source 1..20: mol_type = other DNA
taggaaaatacaatgtcata

SEQ ID NO: 53005 - DNA, 20 bp, synthetic construct
  source 1..20: mol_type = other DNA
ttaggaaaatacaatgtcat

SEQ ID NO: 53006 - DNA, 20 bp, synthetic construct
  source 1..20: mol_type = other DNA
tttaggaaaatacaatgtca

SEQ ID NO: 53007 - DNA, 20 bp, synthetic construct
  source 1..20: mol_type = other DNA
ttttaggaaaatacaatgtc

SEQ ID NO: 53008 - DNA, 20 bp, synthetic construct
  source 1..20: mol_type = other DNA
cttttaggaaaatacaatgt

SEQ ID NO: 53009 - DNA, 20 bp, synthetic construct
  source 1..20: mol_type = other DNA
tcttttaggaaaatacaatg

SEQ ID NO: 53010 - DNA, 20 bp, synthetic construct
  source 1..20: mol_type = other DNA
atcttttaggaaaatacaat

SEQ ID NO: 53011 - DNA, 20 bp, synthetic construct
  source 1..20: mol_type = other DNA
tatcttttaggaaaatacaa

SEQ ID NO: 53012 - DNA, 20 bp, synthetic construct
  source 1..20: mol_type = other DNA
atatcttttaggaaaataca

SEQ ID NO: 53013 - DNA, 20 bp, synthetic construct
  source 1..20: mol_type = other DNA
catatcttttaggaaaatac

SEQ ID NO: 53014 - DNA, 20 bp, synthetic construct
  source 1..20: mol_type = other DNA
tcatatcttttaggaaaata

SEQ ID NO: 53015 - DNA, 20 bp, synthetic construct
  source 1..20: mol_type = other DNA
ttcatatcttttaggaaaat

SEQ ID NO: 53016 - DNA, 20 bp, synthetic construct
  source 1..20: mol_type = other DNA
attcatatcttttaggaaaa

SEQ ID NO: 53017 - DNA, 20 bp, synthetic construct
  source 1..20: mol_type = other DNA
aattcatatcttttaggaaa

SEQ ID NO: 53018 - DNA, 20 bp, synthetic construct
  source 1..20: mol_type = other DNA
caattcatatcttttaggaa

SEQ ID NO: 53019 - DNA, 20 bp, synthetic construct
  source 1..20: mol_type = other DNA
tcaattcatatcttttagga

SEQ ID NO: 53020 - DNA, 20 bp, synthetic construct
  source 1..20: mol_type = other DNA
atcaattcatatcttttagg

SEQ ID NO: 53021 - DNA, 20 bp, synthetic construct
  source 1..20: mol_type = other DNA
aatcaattcatatcttttag

SEQ ID NO: 53022 - DNA, 20 bp, synthetic construct
  source 1..20: mol_type = other DNA
aaatcaattcatatctttta

SEQ ID NO: 53023 - DNA, 20 bp, synthetic construct
  source 1..20: mol_type = other DNA
gaaatcaattcatatctttt

SEQ ID NO: 53024 - DNA, 20 bp, synthetic construct
  source 1..20: mol_type = other DNA
tgaaatcaattcatatcttt

SEQ ID NO: 53025 - DNA, 20 bp, synthetic construct
  source 1..20: mol_type = other DNA
atgaaatcaattcatatctt

SEQ ID NO: 53026 - DNA, 20 bp, synthetic construct
  source 1..20: mol_type = other DNA
aatgaaatcaattcatatct

SEQ ID NO: 53027 - DNA, 20 bp, synthetic construct
  source 1..20: mol_type = other DNA
aaatgaaatcaattcatatc

SEQ ID NO: 53028 - DNA, 20 bp, synthetic construct
  source 1..20: mol_type = other DNA
gaaatgaaatcaattcatat

SEQ ID NO: 53029 - DNA, 20 bp, synthetic construct
  source 1..20: mol_type = other DNA
agaaatgaaatcaattcata

SEQ ID NO: 53030 - DNA, 20 bp, synthetic construct
  source 1..20: mol_type = other DNA
cagaaatgaaatcaattcat

SEQ ID NO: 53031 - DNA, 20 bp, synthetic construct
  source 1..20: mol_type = other DNA
tcagaaatgaaatcaattca

SEQ ID NO: 53032 - DNA, 20 bp, synthetic construct
  source 1..20: mol_type = other DNA
ctcagaaatgaaatcaattc

SEQ ID NO: 53033 - DNA, 20 bp, synthetic construct
  source 1..20: mol_type = other DNA
gctcagaaatgaaatcaatt

SEQ ID NO: 53034 - DNA, 20 bp, synthetic construct
  source 1..20: mol_type = other DNA
agctcagaaatgaaatcaat

SEQ ID NO: 53035 - DNA, 20 bp, synthetic construct
  source 1..20: mol_type = other DNA
aagctcagaaatgaaatcaa

SEQ ID NO: 53036 - DNA, 20 bp, synthetic construct
  source 1..20: mol_type = other DNA
aaagctcagaaatgaaatca

SEQ ID NO: 53037 - DNA, 20 bp, synthetic construct
  source 1..20: mol_type = other DNA
aaaagctcagaaatgaaatc

SEQ ID NO: 53038 - DNA, 20 bp, synthetic construct
  source 1..20: mol_type = other DNA
taaaagctcagaaatgaaat

SEQ ID NO: 53039 - DNA, 20 bp, synthetic construct
  source 1..20: mol_type = other DNA
ataaaagctcagaaatgaaa

SEQ ID NO: 53040 - DNA, 20 bp, synthetic construct
  source 1..20: mol_type = other DNA
tataaaagctcagaaatgaa

SEQ ID NO: 53041 - DNA, 20 bp, synthetic construct
  source 1..20: mol_type = other DNA
ttataaaagctcagaaatga

SEQ ID NO: 53042 - DNA, 20 bp, synthetic construct
  source 1..20: mol_type = other DNA
attataaaagctcagaaatg

SEQ ID NO: 53043 - DNA, 20 bp, synthetic construct
  source 1..20: mol_type = other DNA
aattataaaagctcagaaat

SEQ ID NO: 53044 - DNA, 20 bp, synthetic construct
  source 1..20: mol_type = other DNA
gaattataaaagctcagaaa

SEQ ID NO: 53045 - DNA, 20 bp, synthetic construct
  source 1..20: mol_type = other DNA
agaattataaaagctcagaa

SEQ ID NO: 53046 - DNA, 20 bp, synthetic construct
  source 1..20: mol_type = other DNA
gagaattataaaagctcaga

SEQ ID NO: 53047 - DNA, 20 bp, synthetic construct
  source 1..20: mol_type = other DNA
agagaattataaaagctcag

SEQ ID NO: 53048 - DNA, 20 bp, synthetic construct
  source 1..20: mol_type = other DNA
aagagaattataaaagctca

SEQ ID NO: 53049 - DNA, 20 bp, synthetic construct
  source 1..20: mol_type = other DNA
gaagagaattataaaagctc

SEQ ID NO: 53050 - DNA, 20 bp, synthetic construct
  source 1..20: mol_type = other DNA
agaagagaattataaaagct

SEQ ID NO: 53051 - DNA, 20 bp, synthetic construct
  source 1..20: mol_type = other DNA
cagaagagaattataaaagc

SEQ ID NO: 53052 - DNA, 20 bp, synthetic construct
  source 1..20: mol_type = other DNA
acagaagagaattataaaag

SEQ ID NO: 53053 - DNA, 20 bp, synthetic construct
  source 1..20: mol_type = other DNA
tacagaagagaattataaaa

SEQ ID NO: 53054 - DNA, 20 bp, synthetic construct
  source 1..20: mol_type = other DNA
ttacagaagagaattataaa

SEQ ID NO: 53055 - DNA, 20 bp, synthetic construct
  source 1..20: mol_type = other DNA
attacagaagagaattataa

SEQ ID NO: 53056 - DNA, 20 bp, synthetic construct
  source 1..20: mol_type = other DNA
tattacagaagagaattata

SEQ ID NO: 53057 - DNA, 20 bp, synthetic construct
  source 1..20: mol_type = other DNA
ctattacagaagagaattat

SEQ ID NO: 53058 - DNA, 20 bp, synthetic construct
  source 1..20: mol_type = other DNA
actattacagaagagaatta

SEQ ID NO: 53059 - DNA, 20 bp, synthetic construct
  source 1..20: mol_type = other DNA
gactattacagaagagaatt

SEQ ID NO: 53060 - DNA, 20 bp, synthetic construct
  source 1..20: mol_type = other DNA
agactattacagaagagaat

SEQ ID NO: 53061 - DNA, 20 bp, synthetic construct
  source 1..20: mol_type = other DNA
cagactattacagaagagaa

SEQ ID NO: 53062 - DNA, 20 bp, synthetic construct
  source 1..20: mol_type = other DNA
acagactattacagaagaga

SEQ ID NO: 53063 - DNA, 20 bp, synthetic construct
  source 1..20: mol_type = other DNA
gacagactattacagaagag

SEQ ID NO: 53064 - DNA, 20 bp, synthetic construct
  source 1..20: mol_type = other DNA
tgacagactattacagaaga

SEQ ID NO: 53065 - DNA, 20 bp, synthetic construct
  source 1..20: mol_type = other DNA
ttgacagactattacagaag

SEQ ID NO: 53066 - DNA, 20 bp, synthetic construct
  source 1..20: mol_type = other DNA
tttgacagactattacagaa

SEQ ID NO: 53067 - DNA, 20 bp, synthetic construct
  source 1..20: mol_type = other DNA
atttgacagactattacaga

SEQ ID NO: 53068 - DNA, 20 bp, synthetic construct
  source 1..20: mol_type = other DNA
aatttgacagactattacag

SEQ ID NO: 53069 - DNA, 20 bp, synthetic construct
  source 1..20: mol_type = other DNA
taatttgacagactattaca

SEQ ID NO: 53070 - DNA, 20 bp, synthetic construct
  source 1..20: mol_type = other DNA
ataatttgacagactattac

SEQ ID NO: 53071 - DNA, 20 bp, synthetic construct
  source 1..20: mol_type = other DNA
aataatttgacagactatta

SEQ ID NO: 53072 - DNA, 20 bp, synthetic construct
  source 1..20: mol_type = other DNA
taataatttgacagactatt

SEQ ID NO: 53073 - DNA, 20 bp, synthetic construct
  source 1..20: mol_type = other DNA
ttaataatttgacagactat

SEQ ID NO: 53074 - DNA, 20 bp, synthetic construct
  source 1..20: mol_type = other DNA
cttaataatttgacagacta

SEQ ID NO: 53075 - DNA, 20 bp, synthetic construct
  source 1..20: mol_type = other DNA
ccttaataatttgacagact

SEQ ID NO: 53076 - DNA, 20 bp, synthetic construct
  source 1..20: mol_type = other DNA
accttaataatttgacagac

SEQ ID NO: 53077 - DNA, 20 bp, synthetic construct
  source 1..20: mol_type = other DNA
aaccttaataatttgacaga

SEQ ID NO: 53078 - DNA, 20 bp, synthetic construct
  source 1..20: mol_type = other DNA
caaccttaataatttgacag

SEQ ID NO: 53079 - DNA, 20 bp, synthetic construct
  source 1..20: mol_type = other DNA
tcaaccttaataatttgaca

SEQ ID NO: 53080 - DNA, 20 bp, synthetic construct
  source 1..20: mol_type = other DNA
atcaaccttaataatttgac

SEQ ID NO: 53081 - DNA, 20 bp, synthetic construct
  source 1..20: mol_type = other DNA
tatcaaccttaataatttga

SEQ ID NO: 53082 - DNA, 20 bp, synthetic construct
  source 1..20: mol_type = other DNA
ttatcaaccttaataatttg

SEQ ID NO: 53083 - DNA, 20 bp, synthetic construct
  source 1..20: mol_type = other DNA
attatcaaccttaataattt

SEQ ID NO: 53084 - DNA, 20 bp, synthetic construct
  source 1..20: mol_type = other DNA
tattatcaaccttaataatt

SEQ ID NO: 53085 - DNA, 20 bp, synthetic construct
  source 1..20: mol_type = other DNA
atattatcaaccttaataat

SEQ ID NO: 53086 - DNA, 20 bp, synthetic construct
  source 1..20: mol_type = other DNA
aatattatcaaccttaataa

SEQ ID NO: 53087 - DNA, 20 bp, synthetic construct
  source 1..20: mol_type = other DNA
taatattatcaaccttaata

SEQ ID NO: 53088 - DNA, 20 bp, synthetic construct
  source 1..20: mol_type = other DNA
ttaatattatcaaccttaat

SEQ ID NO: 53089 - DNA, 20 bp, synthetic construct
  source 1..20: mol_type = other DNA
gttaatattatcaaccttaa

SEQ ID NO: 53090 - DNA, 20 bp, synthetic construct
  source 1..20: mol_type = other DNA
agttaatattatcaacctta

SEQ ID NO: 53091 - DNA, 20 bp, synthetic construct
  source 1..20: mol_type = other DNA
tagttaatattatcaacctt

SEQ ID NO: 53092 - DNA, 20 bp, synthetic construct
  source 1..20: mol_type = other DNA
ttagttaatattatcaacct

SEQ ID NO: 53093 - DNA, 20 bp, synthetic construct
  source 1..20: mol_type = other DNA
tttagttaatattatcaacc

SEQ ID NO: 53094 - DNA, 20 bp, synthetic construct
  source 1..20: mol_type = other DNA
ttttagttaatattatcaac

SEQ ID NO: 53095 - DNA, 20 bp, synthetic construct
  source 1..20: mol_type = other DNA
attttagttaatattatcaa

SEQ ID NO: 53096 - DNA, 20 bp, synthetic construct
  source 1..20: mol_type = other DNA
aattttagttaatattatca

SEQ ID NO: 53097 - DNA, 20 bp, synthetic construct
  source 1..20: mol_type = other DNA
aaattttagttaatattatc

SEQ ID NO: 53098 - DNA, 20 bp, synthetic construct
  source 1..20: mol_type = other DNA
caaattttagttaatattat

SEQ ID NO: 53099 - DNA, 20 bp, synthetic construct
  source 1..20: mol_type = other DNA
tcaaattttagttaatatta

SEQ ID NO: 53100 - DNA, 20 bp, synthetic construct
  source 1..20: mol_type = other DNA
ctcaaattttagttaatatt

SEQ ID NO: 53101 - DNA, 20 bp, synthetic construct
  source 1..20: mol_type = other DNA
actcaaattttagttaatat

SEQ ID NO: 53102 - DNA, 20 bp, synthetic construct
  source 1..20: mol_type = other DNA
cactcaaattttagttaata

SEQ ID NO: 53103 - DNA, 20 bp, synthetic construct
  source 1..20: mol_type = other DNA
gcactcaaattttagttaat

SEQ ID NO: 53104 - DNA, 20 bp, synthetic construct
  source 1..20: mol_type = other DNA
tgcactcaaattttagttaa

SEQ ID NO: 53105 - DNA, 20 bp, synthetic construct
  source 1..20: mol_type = other DNA
atgcactcaaattttagtta

SEQ ID NO: 53106 - DNA, 20 bp, synthetic construct
  source 1..20: mol_type = other DNA
tatgcactcaaattttagtt

SEQ ID NO: 53107 - DNA, 20 bp, synthetic construct
  source 1..20: mol_type = other DNA
atatgcactcaaattttagt

SEQ ID NO: 53108 - DNA, 20 bp, synthetic construct
  source 1..20: mol_type = other DNA
aatatgcactcaaattttag

SEQ ID NO: 53109 - DNA, 20 bp, synthetic construct
  source 1..20: mol_type = other DNA
gaatatgcactcaaatttta

SEQ ID NO: 53110 - DNA, 20 bp, synthetic construct
  source 1..20: mol_type = other DNA
agaatatgcactcaaatttt

SEQ ID NO: 53111 - DNA, 20 bp, synthetic construct
  source 1..20: mol_type = other DNA
tagaatatgcactcaaattt

SEQ ID NO: 53112 - DNA, 20 bp, synthetic construct
  source 1..20: mol_type = other DNA
atagaatatgcactcaaatt

SEQ ID NO: 53113 - DNA, 20 bp, synthetic construct
  source 1..20: mol_type = other DNA
catagaatatgcactcaaat

SEQ ID NO: 53114 - DNA, 20 bp, synthetic construct
  source 1..20: mol_type = other DNA
acatagaatatgcactcaaa

SEQ ID NO: 53115 - DNA, 20 bp, synthetic construct
  source 1..20: mol_type = other DNA
cacatagaatatgcactcaa

SEQ ID NO: 53116 - DNA, 20 bp, synthetic construct
  source 1..20: mol_type = other DNA
gcacatagaatatgcactca

SEQ ID NO: 53117 - DNA, 20 bp, synthetic construct
  source 1..20: mol_type = other DNA
ggcacatagaatatgcactc

SEQ ID NO: 53118 - DNA, 20 bp, synthetic construct
  source 1..20: mol_type = other DNA
tggcacatagaatatgcact

SEQ ID NO: 53119 - DNA, 20 bp, synthetic construct
  source 1..20: mol_type = other DNA
ctggcacatagaatatgcac

SEQ ID NO: 53120 - DNA, 20 bp, synthetic construct
  source 1..20: mol_type = other DNA
tctggcacatagaatatgca

SEQ ID NO: 53121 - DNA, 20 bp, synthetic construct
  source 1..20: mol_type = other DNA
gtctggcacatagaatatgc

SEQ ID NO: 53122 - DNA, 20 bp, synthetic construct
  source 1..20: mol_type = other DNA
agtctggcacatagaatatg

SEQ ID NO: 53123 - DNA, 20 bp, synthetic construct
  source 1..20: mol_type = other DNA
gagtctggcacatagaatat

SEQ ID NO: 53124 - DNA, 20 bp, synthetic construct
  source 1..20: mol_type = other DNA
agagtctggcacatagaata

SEQ ID NO: 53125 - DNA, 20 bp, synthetic construct
  source 1..20: mol_type = other DNA
cagagtctggcacatagaat

SEQ ID NO: 53126 - DNA, 20 bp, synthetic construct
  source 1..20: mol_type = other DNA
acagagtctggcacatagaa

SEQ ID NO: 53127 - DNA, 20 bp, synthetic construct
  source 1..20: mol_type = other DNA
cacagagtctggcacataga

SEQ ID NO: 53128 - DNA, 20 bp, synthetic construct
  source 1..20: mol_type = other DNA
gcacagagtctggcacatag

SEQ ID NO: 53129 - DNA, 20 bp, synthetic construct
  source 1..20: mol_type = other DNA
agcacagagtctggcacata

SEQ ID NO: 53130 - DNA, 20 bp, synthetic construct
  source 1..20: mol_type = other DNA
tagcacagagtctggcacat

SEQ ID NO: 53131 - DNA, 20 bp, synthetic construct
  source 1..20: mol_type = other DNA
ttagcacagagtctggcaca

SEQ ID NO: 53132 - DNA, 20 bp, synthetic construct
  source 1..20: mol_type = other DNA
gttagcacagagtctggcac

SEQ ID NO: 53133 - DNA, 20 bp, synthetic construct
  source 1..20: mol_type = other DNA
tgttagcacagagtctggca

SEQ ID NO: 53134 - DNA, 20 bp, synthetic construct
  source 1..20: mol_type = other DNA
ctgttagcacagagtctggc

SEQ ID NO: 53135 - DNA, 20 bp, synthetic construct
  source 1..20: mol_type = other DNA
tctgttagcacagagtctgg

SEQ ID NO: 53136 - DNA, 20 bp, synthetic construct
  source 1..20: mol_type = other DNA
atctgttagcacagagtctg

SEQ ID NO: 53137 - DNA, 20 bp, synthetic construct
  source 1..20: mol_type = other DNA
aatctgttagcacagagtct

SEQ ID NO: 53138 - DNA, 20 bp, synthetic construct
  source 1..20: mol_type = other DNA
aaatctgttagcacagagtc

SEQ ID NO: 53139 - DNA, 20 bp, synthetic construct
  source 1..20: mol_type = other DNA
taaatctgttagcacagagt

SEQ ID NO: 53140 - DNA, 20 bp, synthetic construct
  source 1..20: mol_type = other DNA
gtaaatctgttagcacagag

SEQ ID NO: 53141 - DNA, 20 bp, synthetic construct
  source 1..20: mol_type = other DNA
ggtaaatctgttagcacaga

SEQ ID NO: 53142 - DNA, 20 bp, synthetic construct
  source 1..20: mol_type = other DNA
aggtaaatctgttagcacag

SEQ ID NO: 53143 - DNA, 20 bp, synthetic construct
  source 1..20: mol_type = other DNA
taggtaaatctgttagcaca

SEQ ID NO: 53144 - DNA, 20 bp, synthetic construct
  source 1..20: mol_type = other DNA
gtaggtaaatctgttagcac

SEQ ID NO: 53145 - DNA, 20 bp, synthetic construct
  source 1..20: mol_type = other DNA
tgtaggtaaatctgttagca

SEQ ID NO: 53146 - DNA, 20 bp, synthetic construct
  source 1..20: mol_type = other DNA
atgtaggtaaatctgttagc

SEQ ID NO: 53147 - DNA, 20 bp, synthetic construct
  source 1..20: mol_type = other DNA
aatgtaggtaaatctgttag

SEQ ID NO: 53148 - DNA, 20 bp, synthetic construct
  source 1..20: mol_type = other DNA
aaatgtaggtaaatctgtta

SEQ ID NO: 53149 - DNA, 20 bp, synthetic construct
  source 1..20: mol_type = other DNA
caaatgtaggtaaatctgtt

SEQ ID NO: 53150 - DNA, 20 bp, synthetic construct
  source 1..20: mol_type = other DNA
acaaatgtaggtaaatctgt

SEQ ID NO: 53151 - DNA, 20 bp, synthetic construct
  source 1..20: mol_type = other DNA
aacaaatgtaggtaaatctg

SEQ ID NO: 53152 - DNA, 20 bp, synthetic construct
  source 1..20: mol_type = other DNA
gaacaaatgtaggtaaatct

SEQ ID NO: 53153 - DNA, 20 bp, synthetic construct
  source 1..20: mol_type = other DNA
tgaacaaatgtaggtaaatc

SEQ ID NO: 53154 - DNA, 20 bp, synthetic construct
  source 1..20: mol_type = other DNA
gtgaacaaatgtaggtaaat

SEQ ID NO: 53155 - DNA, 20 bp, synthetic construct
  source 1..20: mol_type = other DNA
tgtgaacaaatgtaggtaaa

SEQ ID NO: 53156 - DNA, 20 bp, synthetic construct
  source 1..20: mol_type = other DNA
atgtgaacaaatgtaggtaa

SEQ ID NO: 53157 - DNA, 20 bp, synthetic construct
  source 1..20: mol_type = other DNA
tatgtgaacaaatgtaggta

SEQ ID NO: 53158 - DNA, 20 bp, synthetic construct
  source 1..20: mol_type = other DNA
ttatgtgaacaaatgtaggt

SEQ ID NO: 53159 - DNA, 20 bp, synthetic construct
  source 1..20: mol_type = other DNA
attatgtgaacaaatgtagg

SEQ ID NO: 53160 - DNA, 20 bp, synthetic construct
  source 1..20: mol_type = other DNA
gattatgtgaacaaatgtag

SEQ ID NO: 53161 - DNA, 20 bp, synthetic construct
  source 1..20: mol_type = other DNA
tgattatgtgaacaaatgta

SEQ ID NO: 53162 - DNA, 20 bp, synthetic construct
  source 1..20: mol_type = other DNA
atgattatgtgaacaaatgt

SEQ ID NO: 53163 - DNA, 20 bp, synthetic construct
  source 1..20: mol_type = other DNA
gatgattatgtgaacaaatg

SEQ ID NO: 53164 - DNA, 20 bp, synthetic construct
  source 1..20: mol_type = other DNA
tgatgattatgtgaacaaat

SEQ ID NO: 53165 - DNA, 20 bp, synthetic construct
  source 1..20: mol_type = other DNA
gtgatgattatgtgaacaaa

SEQ ID NO: 53166 - DNA, 20 bp, synthetic construct
  source 1..20: mol_type = other DNA
tgtgatgattatgtgaacaa

SEQ ID NO: 53167 - DNA, 20 bp, synthetic construct
  source 1..20: mol_type = other DNA
ttgtgatgattatgtgaaca

SEQ ID NO: 53168 - DNA, 20 bp, synthetic construct
  source 1..20: mol_type = other DNA
cttgtgatgattatgtgaac

SEQ ID NO: 53169 - DNA, 20 bp, synthetic construct
  source 1..20: mol_type = other DNA
acttgtgatgattatgtgaa

SEQ ID NO: 53170 - DNA, 20 bp, synthetic construct
  source 1..20: mol_type = other DNA
aacttgtgatgattatgtga

SEQ ID NO: 53171 - DNA, 20 bp, synthetic construct
  source 1..20: mol_type = other DNA
caacttgtgatgattatgtg

SEQ ID NO: 53172 - DNA, 20 bp, synthetic construct
  source 1..20: mol_type = other DNA
acaacttgtgatgattatgt

SEQ ID NO: 53173 - DNA, 20 bp, synthetic construct
  source 1..20: mol_type = other DNA
aacaacttgtgatgattatg

SEQ ID NO: 53174 - DNA, 20 bp, synthetic construct
  source 1..20: mol_type = other DNA
aaacaacttgtgatgattat

SEQ ID NO: 53175 - DNA, 20 bp, synthetic construct
  source 1..20: mol_type = other DNA
gaaacaacttgtgatgatta

SEQ ID NO: 53176 - DNA, 20 bp, synthetic construct
  source 1..20: mol_type = other DNA
agaaacaacttgtgatgatt

SEQ ID NO: 53177 - DNA, 20 bp, synthetic construct
  source 1..20: mol_type = other DNA
cagaaacaacttgtgatgat

SEQ ID NO: 53178 - DNA, 20 bp, synthetic construct
  source 1..20: mol_type = other DNA
acagaaacaacttgtgatga

SEQ ID NO: 53179 - DNA, 20 bp, synthetic construct
  source 1..20: mol_type = other DNA
tacagaaacaacttgtgatg

SEQ ID NO: 53180 - DNA, 20 bp, synthetic construct
  source 1..20: mol_type = other DNA
ctacagaaacaacttgtgat

SEQ ID NO: 53181 - DNA, 20 bp, synthetic construct
  source 1..20: mol_type = other DNA
actacagaaacaacttgtga

SEQ ID NO: 53182 - DNA, 20 bp, synthetic construct
  source 1..20: mol_type = other DNA
tactacagaaacaacttgtg

SEQ ID NO: 53183 - DNA, 20 bp, synthetic construct
  source 1..20: mol_type = other DNA
ctactacagaaacaacttgt

SEQ ID NO: 53184 - DNA, 20 bp, synthetic construct
  source 1..20: mol_type = other DNA
tctactacagaaacaacttg

SEQ ID NO: 53185 - DNA, 20 bp, synthetic construct
  source 1..20: mol_type = other DNA
atctactacagaaacaactt

SEQ ID NO: 53186 - DNA, 20 bp, synthetic construct
  source 1..20: mol_type = other DNA
tatctactacagaaacaact

SEQ ID NO: 53187 - DNA, 20 bp, synthetic construct
  source 1..20: mol_type = other DNA
gtatctactacagaaacaac

SEQ ID NO: 53188 - DNA, 20 bp, synthetic construct
  source 1..20: mol_type = other DNA
tgtatctactacagaaacaa

SEQ ID NO: 53189 - DNA, 20 bp, synthetic construct
  source 1..20: mol_type = other DNA
ctgtatctactacagaaaca

SEQ ID NO: 53190 - DNA, 20 bp, synthetic construct
  source 1..20: mol_type = other DNA
gctgtatctactacagaaac

SEQ ID NO: 53191 - DNA, 20 bp, synthetic construct
  source 1..20: mol_type = other DNA
agctgtatctactacagaaa

SEQ ID NO: 53192 - DNA, 20 bp, synthetic construct
  source 1..20: mol_type = other DNA
tagctgtatctactacagaa

SEQ ID NO: 53193 - DNA, 20 bp, synthetic construct
  source 1..20: mol_type = other DNA
atagctgtatctactacaga

SEQ ID NO: 53194 - DNA, 20 bp, synthetic construct
  source 1..20: mol_type = other DNA
aatagctgtatctactacag

SEQ ID NO: 53195 - DNA, 20 bp, synthetic construct
  source 1..20: mol_type = other DNA
taatagctgtatctactaca

SEQ ID NO: 53196 - DNA, 20 bp, synthetic construct
  source 1..20: mol_type = other DNA
ataatagctgtatctactac

SEQ ID NO: 53197 - DNA, 20 bp, synthetic construct
  source 1..20: mol_type = other DNA
gataatagctgtatctacta

SEQ ID NO: 53198 - DNA, 20 bp, synthetic construct
  source 1..20: mol_type = other DNA
ggataatagctgtatctact

SEQ ID NO: 53199 - DNA, 20 bp, synthetic construct
  source 1..20: mol_type = other DNA
tggataatagctgtatctac

SEQ ID NO: 53200 - DNA, 20 bp, synthetic construct
  source 1..20: mol_type = other DNA
gtggataatagctgtatcta

SEQ ID NO: 53201 - DNA, 20 bp, synthetic construct
  source 1..20: mol_type = other DNA
cgtggataatagctgtatct

SEQ ID NO: 53202 - DNA, 20 bp, synthetic construct
  source 1..20: mol_type = other DNA
acgtggataatagctgtatc

SEQ ID NO: 53203 - DNA, 20 bp, synthetic construct
  source 1..20: mol_type = other DNA
gacgtggataatagctgtat

SEQ ID NO: 53204 - DNA, 20 bp, synthetic construct
  source 1..20: mol_type = other DNA
tgacgtggataatagctgta

SEQ ID NO: 53205 - DNA, 20 bp, synthetic construct
  source 1..20: mol_type = other DNA
atgacgtggataatagctgt

SEQ ID NO: 53206 - DNA, 20 bp, synthetic construct
  source 1..20: mol_type = other DNA
tatgacgtggataatagctg

SEQ ID NO: 53207 - DNA, 20 bp, synthetic construct
  source 1..20: mol_type = other DNA
ctatgacgtggataatagct

SEQ ID NO: 53208 - DNA, 20 bp, synthetic construct
  source 1..20: mol_type = other DNA
tctatgacgtggataatagc

SEQ ID NO: 53209 - DNA, 20 bp, synthetic construct
  source 1..20: mol_type = other DNA
atctatgacgtggataatag

SEQ ID NO: 53210 - DNA, 20 bp, synthetic construct
  source 1..20: mol_type = other DNA
catctatgacgtggataata

SEQ ID NO: 53211 - DNA, 20 bp, synthetic construct
  source 1..20: mol_type = other DNA
tcatctatgacgtggataat

SEQ ID NO: 53212 - DNA, 20 bp, synthetic construct
  source 1..20: mol_type = other DNA
ctcatctatgacgtggataa

SEQ ID NO: 53213 - DNA, 20 bp, synthetic construct
  source 1..20: mol_type = other DNA
cctcatctatgacgtggata

SEQ ID NO: 53214 - DNA, 20 bp, synthetic construct
  source 1..20: mol_type = other DNA
tcctcatctatgacgtggat

SEQ ID NO: 53215 - DNA, 20 bp, synthetic construct
  source 1..20: mol_type = other DNA
ttcctcatctatgacgtgga

SEQ ID NO: 53216 - DNA, 20 bp, synthetic construct
  source 1..20: mol_type = other DNA
tttcctcatctatgacgtgg

SEQ ID NO: 53217 - DNA, 20 bp, synthetic construct
  source 1..20: mol_type = other DNA
gtttcctcatctatgacgtg

SEQ ID NO: 53218 - DNA, 20 bp, synthetic construct
  source 1..20: mol_type = other DNA
tgtttcctcatctatgacgt

SEQ ID NO: 53219 - DNA, 20 bp, synthetic construct
  source 1..20: mol_type = other DNA
ctgtttcctcatctatgacg

SEQ ID NO: 53220 - DNA, 20 bp, synthetic construct
  source 1..20: mol_type = other DNA
cctgtttcctcatctatgac

SEQ ID NO: 53221 - DNA, 20 bp, synthetic construct
  source 1..20: mol_type = other DNA
gcctgtttcctcatctatga

SEQ ID NO: 53222 - DNA, 20 bp, synthetic construct
  source 1..20: mol_type = other DNA
tgcctgtttcctcatctatg

SEQ ID NO: 53223 - DNA, 20 bp, synthetic construct
  source 1..20: mol_type = other DNA
atgcctgtttcctcatctat

SEQ ID NO: 53224 - DNA, 20 bp, synthetic construct
  source 1..20: mol_type = other DNA
tatgcctgtttcctcatcta

SEQ ID NO: 53225 - DNA, 20 bp, synthetic construct
  source 1..20: mol_type = other DNA
atatgcctgtttcctcatct

SEQ ID NO: 53226 - DNA, 20 bp, synthetic construct
  source 1..20: mol_type = other DNA
aatatgcctgtttcctcatc

SEQ ID NO: 53227 - DNA, 20 bp, synthetic construct
  source 1..20: mol_type = other DNA
aaatatgcctgtttcctcat

SEQ ID NO: 53228 - DNA, 20 bp, synthetic construct
  source 1..20: mol_type = other DNA
taaatatgcctgtttcctca

SEQ ID NO: 53229 - DNA, 20 bp, synthetic construct
  source 1..20: mol_type = other DNA
ctaaatatgcctgtttcctc

SEQ ID NO: 53230 - DNA, 20 bp, synthetic construct
  source 1..20: mol_type = other DNA
cctaaatatgcctgtttcct

SEQ ID NO: 53231 - DNA, 20 bp, synthetic construct
  source 1..20: mol_type = other DNA
tcctaaatatgcctgtttcc

SEQ ID NO: 53232 - DNA, 20 bp, synthetic construct
  source 1..20: mol_type = other DNA
ttcctaaatatgcctgtttc

SEQ ID NO: 53233 - DNA, 20 bp, synthetic construct
  source 1..20: mol_type = other DNA
tttcctaaatatgcctgttt

SEQ ID NO: 53234 - DNA, 20 bp, synthetic construct
  source 1..20: mol_type = other DNA
gtttcctaaatatgcctgtt

SEQ ID NO: 53235 - DNA, 20 bp, synthetic construct
  source 1..20: mol_type = other DNA
agtttcctaaatatgcctgt

SEQ ID NO: 53236 - DNA, 20 bp, synthetic construct
  source 1..20: mol_type = other DNA
aagtttcctaaatatgcctg

SEQ ID NO: 53237 - DNA, 20 bp, synthetic construct
  source 1..20: mol_type = other DNA
caagtttcctaaatatgcct

SEQ ID NO: 53238 - DNA, 20 bp, synthetic construct
  source 1..20: mol_type = other DNA
gcaagtttcctaaatatgcc

SEQ ID NO: 53239 - DNA, 20 bp, synthetic construct
  source 1..20: mol_type = other DNA
agcaagtttcctaaatatgc

SEQ ID NO: 53240 - DNA, 20 bp, synthetic construct
  source 1..20: mol_type = other DNA
tagcaagtttcctaaatatg

SEQ ID NO: 53241 - DNA, 20 bp, synthetic construct
  source 1..20: mol_type = other DNA
ttagcaagtttcctaaatat

SEQ ID NO: 53242 - DNA, 20 bp, synthetic construct
  source 1..20: mol_type = other DNA
tttagcaagtttcctaaata

SEQ ID NO: 53243 - DNA, 20 bp, synthetic construct
  source 1..20: mol_type = other DNA
ctttagcaagtttcctaaat

SEQ ID NO: 53244 - DNA, 20 bp, synthetic construct
  source 1..20: mol_type = other DNA
actttagcaagtttcctaaa

SEQ ID NO: 53245 - DNA, 20 bp, synthetic construct
  source 1..20: mol_type = other DNA
cactttagcaagtttcctaa

SEQ ID NO: 53246 - DNA, 20 bp, synthetic construct
  source 1..20: mol_type = other DNA
tcactttagcaagtttccta

SEQ ID NO: 53247 - DNA, 20 bp, synthetic construct
  source 1..20: mol_type = other DNA
ctcactttagcaagtttcct

SEQ ID NO: 53248 - DNA, 20 bp, synthetic construct
  source 1..20: mol_type = other DNA
cctcactttagcaagtttcc

SEQ ID NO: 53249 - DNA, 20 bp, synthetic construct
  source 1..20: mol_type = other DNA
tcctcactttagcaagtttc

SEQ ID NO: 53250 - DNA, 20 bp, synthetic construct
  source 1..20: mol_type = other DNA
gtcctcactttagcaagttt

SEQ ID NO: 53251 - DNA, 20 bp, synthetic construct
  source 1..20: mol_type = other DNA
tgtcctcactttagcaagtt

SEQ ID NO: 53252 - DNA, 20 bp, synthetic construct
  source 1..20: mol_type = other DNA
gtgtcctcactttagcaagt

SEQ ID NO: 53253 - DNA, 20 bp, synthetic construct
  source 1..20: mol_type = other DNA
tgtgtcctcactttagcaag

SEQ ID NO: 53254 - DNA, 20 bp, synthetic construct
  source 1..20: mol_type = other DNA
ttgtgtcctcactttagcaa

SEQ ID NO: 53255 - DNA, 20 bp, synthetic construct
  source 1..20: mol_type = other DNA
tttgtgtcctcactttagca

SEQ ID NO: 53256 - DNA, 20 bp, synthetic construct
  source 1..20: mol_type = other DNA
atttgtgtcctcactttagc

SEQ ID NO: 53257 - DNA, 20 bp, synthetic construct
  source 1..20: mol_type = other DNA
gatttgtgtcctcactttag

SEQ ID NO: 53258 - DNA, 20 bp, synthetic construct
  source 1..20: mol_type = other DNA
agatttgtgtcctcacttta

SEQ ID NO: 53259 - DNA, 20 bp, synthetic construct
  source 1..20: mol_type = other DNA
tagatttgtgtcctcacttt

SEQ ID NO: 53260 - DNA, 20 bp, synthetic construct
  source 1..20: mol_type = other DNA
ctagatttgtgtcctcactt

SEQ ID NO: 53261 - DNA, 20 bp, synthetic construct
  source 1..20: mol_type = other DNA
gctagatttgtgtcctcact

SEQ ID NO: 53262 - DNA, 20 bp, synthetic construct
  source 1..20: mol_type = other DNA
agctagatttgtgtcctcac

SEQ ID NO: 53263 - DNA, 20 bp, synthetic construct
  source 1..20: mol_type = other DNA
aagctagatttgtgtcctca

SEQ ID NO: 53264 - DNA, 20 bp, synthetic construct
  source 1..20: mol_type = other DNA
aaagctagatttgtgtcctc

SEQ ID NO: 53265 - DNA, 20 bp, synthetic construct
  source 1..20: mol_type = other DNA
aaaagctagatttgtgtcct

SEQ ID NO: 53266 - DNA, 20 bp, synthetic construct
  source 1..20: mol_type = other DNA
gaaaagctagatttgtgtcc

SEQ ID NO: 53267 - DNA, 20 bp, synthetic construct
  source 1..20: mol_type = other DNA
agaaaagctagatttgtgtc

SEQ ID NO: 53268 - DNA, 20 bp, synthetic construct
  source 1..20: mol_type = other DNA
tagaaaagctagatttgtgt

SEQ ID NO: 53269 - DNA, 20 bp, synthetic construct
  source 1..20: mol_type = other DNA
gtagaaaagctagatttgtg

SEQ ID NO: 53270 - DNA, 20 bp, synthetic construct
  source 1..20: mol_type = other DNA
agtagaaaagctagatttgt

SEQ ID NO: 53271 - DNA, 20 bp, synthetic construct
  source 1..20: mol_type = other DNA
gagtagaaaagctagatttg

SEQ ID NO: 53272 - DNA, 20 bp, synthetic construct
  source 1..20: mol_type = other DNA
agagtagaaaagctagattt

SEQ ID NO: 53273 - DNA, 20 bp, synthetic construct
  source 1..20: mol_type = other DNA
tagagtagaaaagctagatt

SEQ ID NO: 53274 - DNA, 20 bp, synthetic construct
  source 1..20: mol_type = other DNA
ttagagtagaaaagctagat

SEQ ID NO: 53275 - DNA, 20 bp, synthetic construct
  source 1..20: mol_type = other DNA
gttagagtagaaaagctaga

SEQ ID NO: 53276 - DNA, 20 bp, synthetic construct
  source 1..20: mol_type = other DNA
agttagagtagaaaagctag

SEQ ID NO: 53277 - DNA, 20 bp, synthetic construct
  source 1..20: mol_type = other DNA
gagttagagtagaaaagcta

SEQ ID NO: 53278 - DNA, 20 bp, synthetic construct
  source 1..20: mol_type = other DNA
tgagttagagtagaaaagct

SEQ ID NO: 53279 - DNA, 20 bp, synthetic construct
  source 1..20: mol_type = other DNA
atgagttagagtagaaaagc

SEQ ID NO: 53280 - DNA, 20 bp, synthetic construct
  source 1..20: mol_type = other DNA
catgagttagagtagaaaag

SEQ ID NO: 53281 - DNA, 20 bp, synthetic construct
  source 1..20: mol_type = other DNA
acatgagttagagtagaaaa

SEQ ID NO: 53282 - DNA, 20 bp, synthetic construct
  source 1..20: mol_type = other DNA
aacatgagttagagtagaaa

SEQ ID NO: 53283 - DNA, 20 bp, synthetic construct
  source 1..20: mol_type = other DNA
gaacatgagttagagtagaa

SEQ ID NO: 53284 - DNA, 20 bp, synthetic construct
  source 1..20: mol_type = other DNA
agaacatgagttagagtaga

SEQ ID NO: 53285 - DNA, 20 bp, synthetic construct
  source 1..20: mol_type = other DNA
aagaacatgagttagagtag

SEQ ID NO: 53286 - DNA, 20 bp, synthetic construct
  source 1..20: mol_type = other DNA
taagaacatgagttagagta

SEQ ID NO: 53287 - DNA, 20 bp, synthetic construct
  source 1..20: mol_type = other DNA
ttaagaacatgagttagagt

SEQ ID NO: 53288 - DNA, 20 bp, synthetic construct
  source 1..20: mol_type = other DNA
gttaagaacatgagttagag

SEQ ID NO: 53289 - DNA, 20 bp, synthetic construct
  source 1..20: mol_type = other DNA
tgttaagaacatgagttaga

SEQ ID NO: 53290 - DNA, 20 bp, synthetic construct
  source 1..20: mol_type = other DNA
atgttaagaacatgagttag

SEQ ID NO: 53291 - DNA, 20 bp, synthetic construct
  source 1..20: mol_type = other DNA
aatgttaagaacatgagtta

SEQ ID NO: 53292 - DNA, 20 bp, synthetic construct
  source 1..20: mol_type = other DNA
taatgttaagaacatgagtt

SEQ ID NO: 53293 - DNA, 20 bp, synthetic construct
  source 1..20: mol_type = other DNA
ataatgttaagaacatgagt

SEQ ID NO: 53294 - DNA, 20 bp, synthetic construct
  source 1..20: mol_type = other DNA
tataatgttaagaacatgag

SEQ ID NO: 53295 - DNA, 20 bp, synthetic construct
  source 1..20: mol_type = other DNA
gtataatgttaagaacatga

SEQ ID NO: 53296 - DNA, 20 bp, synthetic construct
  source 1..20: mol_type = other DNA
agtataatgttaagaacatg

SEQ ID NO: 53297 - DNA, 20 bp, synthetic construct
  source 1..20: mol_type = other DNA
cagtataatgttaagaacat

SEQ ID NO: 53298 - DNA, 20 bp, synthetic construct
  source 1..20: mol_type = other DNA
gcagtataatgttaagaaca

SEQ ID NO: 53299 - DNA, 20 bp, synthetic construct
  source 1..20: mol_type = other DNA
tgcagtataatgttaagaac

SEQ ID NO: 53300 - DNA, 20 bp, synthetic construct
  source 1..20: mol_type = other DNA
ctgcagtataatgttaagaa

SEQ ID NO: 53301 - DNA, 20 bp, synthetic construct
  source 1..20: mol_type = other DNA
actgcagtataatgttaaga

SEQ ID NO: 53302 - DNA, 20 bp, synthetic construct
  source 1..20: mol_type = other DNA
cactgcagtataatgttaag

SEQ ID NO: 53303 - DNA, 20 bp, synthetic construct
  source 1..20: mol_type = other DNA
tcactgcagtataatgttaa

SEQ ID NO: 53304 - DNA, 20 bp, synthetic construct
  source 1..20: mol_type = other DNA
gtcactgcagtataatgtta

SEQ ID NO: 53305 - DNA, 20 bp, synthetic construct
  source 1..20: mol_type = other DNA
tgtcactgcagtataatgtt

SEQ ID NO: 53306 - DNA, 20 bp, synthetic construct
  source 1..20: mol_type = other DNA
atgtcactgcagtataatgt

SEQ ID NO: 53307 - DNA, 20 bp, synthetic construct
  source 1..20: mol_type = other DNA
tatgtcactgcagtataatg

SEQ ID NO: 53308 - DNA, 20 bp, synthetic construct
  source 1..20: mol_type = other DNA
ttatgtcactgcagtataat

SEQ ID NO: 53309 - DNA, 20 bp, synthetic construct
  source 1..20: mol_type = other DNA
tttatgtcactgcagtataa

SEQ ID NO: 53310 - DNA, 20 bp, synthetic construct
  source 1..20: mol_type = other DNA
atttatgtcactgcagtata

SEQ ID NO: 53311 - DNA, 20 bp, synthetic construct
  source 1..20: mol_type = other DNA
aatttatgtcactgcagtat

SEQ ID NO: 53312 - DNA, 20 bp, synthetic construct
  source 1..20: mol_type = other DNA
taatttatgtcactgcagta

SEQ ID NO: 53313 - DNA, 20 bp, synthetic construct
  source 1..20: mol_type = other DNA
ataatttatgtcactgcagt

SEQ ID NO: 53314 - DNA, 20 bp, synthetic construct
  source 1..20: mol_type = other DNA
cataatttatgtcactgcag

SEQ ID NO: 53315 - DNA, 20 bp, synthetic construct
  source 1..20: mol_type = other DNA
acataatttatgtcactgca

SEQ ID NO: 53316 - DNA, 20 bp, synthetic construct
  source 1..20: mol_type = other DNA
cacataatttatgtcactgc

SEQ ID NO: 53317 - DNA, 20 bp, synthetic construct
  source 1..20: mol_type = other DNA
ccacataatttatgtcactg

SEQ ID NO: 53318 - DNA, 20 bp, synthetic construct
  source 1..20: mol_type = other DNA
accacataatttatgtcact

SEQ ID NO: 53319 - DNA, 20 bp, synthetic construct
  source 1..20: mol_type = other DNA
aaccacataatttatgtcac

SEQ ID NO: 53320 - DNA, 20 bp, synthetic construct
  source 1..20: mol_type = other DNA
aaaccacataatttatgtca

SEQ ID NO: 53321 - DNA, 20 bp, synthetic construct
  source 1..20: mol_type = other DNA
caaaccacataatttatgtc

SEQ ID NO: 53322 - DNA, 20 bp, synthetic construct
  source 1..20: mol_type = other DNA
ccaaaccacataatttatgt

SEQ ID NO: 53323 - DNA, 20 bp, synthetic construct
  source 1..20: mol_type = other DNA
accaaaccacataatttatg

SEQ ID NO: 53324 - DNA, 20 bp, synthetic construct
  source 1..20: mol_type = other DNA
aaccaaaccacataatttat

SEQ ID NO: 53325 - DNA, 20 bp, synthetic construct
  source 1..20: mol_type = other DNA
aaaccaaaccacataattta

SEQ ID NO: 53326 - DNA, 20 bp, synthetic construct
  source 1..20: mol_type = other DNA
caaaccaaaccacataattt

SEQ ID NO: 53327 - DNA, 20 bp, synthetic construct
  source 1..20: mol_type = other DNA
acaaaccaaaccacataatt

SEQ ID NO: 53328 - DNA, 20 bp, synthetic construct
  source 1..20: mol_type = other DNA
aacaaaccaaaccacataat

SEQ ID NO: 53329 - DNA, 20 bp, synthetic construct
  source 1..20: mol_type = other DNA
caacaaaccaaaccacataa

SEQ ID NO: 53330 - DNA, 20 bp, synthetic construct
  source 1..20: mol_type = other DNA
acaacaaaccaaaccacata

SEQ ID NO: 53331 - DNA, 20 bp, synthetic construct
  source 1..20: mol_type = other DNA
aacaacaaaccaaaccacat

SEQ ID NO: 53332 - DNA, 20 bp, synthetic construct
  source 1..20: mol_type = other DNA
aaacaacaaaccaaaccaca

SEQ ID NO: 53333 - DNA, 20 bp, synthetic construct
  source 1..20: mol_type = other DNA
taaacaacaaaccaaaccac

SEQ ID NO: 53334 - DNA, 20 bp, synthetic construct
  source 1..20: mol_type = other DNA
ataaacaacaaaccaaacca

SEQ ID NO: 53335 - DNA, 20 bp, synthetic construct
  source 1..20: mol_type = other DNA
gataaacaacaaaccaaacc

SEQ ID NO: 53336 - DNA, 20 bp, synthetic construct
  source 1..20: mol_type = other DNA
agataaacaacaaaccaaac

SEQ ID NO: 53337 - DNA, 20 bp, synthetic construct
  source 1..20: mol_type = other DNA
gagataaacaacaaaccaaa

SEQ ID NO: 53338 - DNA, 20 bp, synthetic construct
  source 1..20: mol_type = other DNA
tgagataaacaacaaaccaa

SEQ ID NO: 53339 - DNA, 20 bp, synthetic construct
  source 1..20: mol_type = other DNA
ctgagataaacaacaaacca

SEQ ID NO: 53340 - DNA, 20 bp, synthetic construct
  source 1..20: mol_type = other DNA
actgagataaacaacaaacc

SEQ ID NO: 53341 - DNA, 20 bp, synthetic construct
  source 1..20: mol_type = other DNA
aactgagataaacaacaaac

SEQ ID NO: 53342 - DNA, 20 bp, synthetic construct
  source 1..20: mol_type = other DNA
caactgagataaacaacaaa

SEQ ID NO: 53343 - DNA, 20 bp, synthetic construct
  source 1..20: mol_type = other DNA
acaactgagataaacaacaa

SEQ ID NO: 53344 - DNA, 20 bp, synthetic construct
  source 1..20: mol_type = other DNA
gacaactgagataaacaaca

SEQ ID NO: 53345 - DNA, 20 bp, synthetic construct
  source 1..20: mol_type = other DNA
tgacaactgagataaacaac

SEQ ID NO: 53346 - DNA, 20 bp, synthetic construct
  source 1..20: mol_type = other DNA
atgacaactgagataaacaa

SEQ ID NO: 53347 - DNA, 20 bp, synthetic construct
  source 1..20: mol_type = other DNA
tatgacaactgagataaaca

SEQ ID NO: 53348 - DNA, 20 bp, synthetic construct
  source 1..20: mol_type = other DNA
ttatgacaactgagataaac

SEQ ID NO: 53349 - DNA, 20 bp, synthetic construct
  source 1..20: mol_type = other DNA
cttatgacaactgagataaa

SEQ ID NO: 53350 - DNA, 20 bp, synthetic construct
  source 1..20: mol_type = other DNA
acttatgacaactgagataa

SEQ ID NO: 53351 - DNA, 20 bp, synthetic construct
  source 1..20: mol_type = other DNA
gacttatgacaactgagata

SEQ ID NO: 53352 - DNA, 20 bp, synthetic construct
  source 1..20: mol_type = other DNA
cgacttatgacaactgagat

SEQ ID NO: 53353 - DNA, 20 bp, synthetic construct
  source 1..20: mol_type = other DNA
tcgacttatgacaactgaga

SEQ ID NO: 53354 - DNA, 20 bp, synthetic construct
  source 1..20: mol_type = other DNA
ttcgacttatgacaactgag

SEQ ID NO: 53355 - DNA, 20 bp, synthetic construct
  source 1..20: mol_type = other DNA
attcgacttatgacaactga

SEQ ID NO: 53356 - DNA, 20 bp, synthetic construct
  source 1..20: mol_type = other DNA
aattcgacttatgacaactg

SEQ ID NO: 53357 - DNA, 20 bp, synthetic construct
  source 1..20: mol_type = other DNA
taattcgacttatgacaact

SEQ ID NO: 53358 - DNA, 20 bp, synthetic construct
  source 1..20: mol_type = other DNA
ttaattcgacttatgacaac

SEQ ID NO: 53359 - DNA, 20 bp, synthetic construct
  source 1..20: mol_type = other DNA
attaattcgacttatgacaa

SEQ ID NO: 53360 - DNA, 20 bp, synthetic construct
  source 1..20: mol_type = other DNA
cattaattcgacttatgaca

SEQ ID NO: 53361 - DNA, 20 bp, synthetic construct
  source 1..20: mol_type = other DNA
acattaattcgacttatgac

SEQ ID NO: 53362 - DNA, 20 bp, synthetic construct
  source 1..20: mol_type = other DNA
aacattaattcgacttatga

SEQ ID NO: 53363 - DNA, 20 bp, synthetic construct
  source 1..20: mol_type = other DNA
aaacattaattcgacttatg

SEQ ID NO: 53364 - DNA, 20 bp, synthetic construct
  source 1..20: mol_type = other DNA
caaacattaattcgacttat

SEQ ID NO: 53365 - DNA, 20 bp, synthetic construct
  source 1..20: mol_type = other DNA
acaaacattaattcgactta

SEQ ID NO: 53366 - DNA, 20 bp, synthetic construct
  source 1..20: mol_type = other DNA
aacaaacattaattcgactt

SEQ ID NO: 53367 - DNA, 20 bp, synthetic construct
  source 1..20: mol_type = other DNA
aaacaaacattaattcgact

SEQ ID NO: 53368 - DNA, 20 bp, synthetic construct
  source 1..20: mol_type = other DNA
caaacaaacattaattcgac

SEQ ID NO: 53369 - DNA, 20 bp, synthetic construct
  source 1..20: mol_type = other DNA
acaaacaaacattaattcga

SEQ ID NO: 53370 - DNA, 20 bp, synthetic construct
  source 1..20: mol_type = other DNA
aacaaacaaacattaattcg

SEQ ID NO: 53371 - DNA, 20 bp, synthetic construct
  source 1..20: mol_type = other DNA
aaacaaacaaacattaattc

SEQ ID NO: 53372 - DNA, 20 bp, synthetic construct
  source 1..20: mol_type = other DNA
caaacaaacaaacattaatt

SEQ ID NO: 53373 - DNA, 20 bp, synthetic construct
  source 1..20: mol_type = other DNA
acaaacaaacaaacattaat

SEQ ID NO: 53374 - DNA, 20 bp, synthetic construct
  source 1..20: mol_type = other DNA
aacaaacaaacaaacattaa

SEQ ID NO: 53375 - DNA, 20 bp, synthetic construct
  source 1..20: mol_type = other DNA
aaacaaacaaacaaacatta

SEQ ID NO: 53376 - DNA, 20 bp, synthetic construct
  source 1..20: mol_type = other DNA
aaaacaaacaaacaaacatt

SEQ ID NO: 53377 - DNA, 20 bp, synthetic construct
  source 1..20: mol_type = other DNA
caaaacaaacaaacaaacat

SEQ ID NO: 53378 - DNA, 20 bp, synthetic construct
  source 1..20: mol_type = other DNA
tcaaaacaaacaaacaaaca

SEQ ID NO: 53379 - DNA, 20 bp, synthetic construct
  source 1..20: mol_type = other DNA
ctcaaaacaaacaaacaaac

SEQ ID NO: 53380 - DNA, 20 bp, synthetic construct
  source 1..20: mol_type = other DNA
tctcaaaacaaacaaacaaa

SEQ ID NO: 53381 - DNA, 20 bp, synthetic construct
  source 1..20: mol_type = other DNA
gtctcaaaacaaacaaacaa

SEQ ID NO: 53382 - DNA, 20 bp, synthetic construct
  source 1..20: mol_type = other DNA
tgtctcaaaacaaacaaaca

SEQ ID NO: 53383 - DNA, 20 bp, synthetic construct
  source 1..20: mol_type = other DNA
ctgtctcaaaacaaacaaac

SEQ ID NO: 53384 - DNA, 20 bp, synthetic construct
  source 1..20: mol_type = other DNA
tctgtctcaaaacaaacaaa

SEQ ID NO: 53385 - DNA, 20 bp, synthetic construct
  source 1..20: mol_type = other DNA
ctctgtctcaaaacaaacaa

SEQ ID NO: 53386 - DNA, 20 bp, synthetic construct
  source 1..20: mol_type = other DNA
actctgtctcaaaacaaaca

SEQ ID NO: 53387 - DNA, 20 bp, synthetic construct
  source 1..20: mol_type = other DNA
gactctgtctcaaaacaaac

SEQ ID NO: 53388 - DNA, 20 bp, synthetic construct
  source 1..20: mol_type = other DNA
agactctgtctcaaaacaaa

SEQ ID NO: 53389 - DNA, 20 bp, synthetic construct
  source 1..20: mol_type = other DNA
aagactctgtctcaaaacaa

SEQ ID NO: 53390 - DNA, 20 bp, synthetic construct
  source 1..20: mol_type = other DNA
caagactctgtctcaaaaca

SEQ ID NO: 53391 - DNA, 20 bp, synthetic construct
  source 1..20: mol_type = other DNA
gcaagactctgtctcaaaac

SEQ ID NO: 53392 - DNA, 20 bp, synthetic construct
  source 1..20: mol_type = other DNA
agcaagactctgtctcaaaa

SEQ ID NO: 53393 - DNA, 20 bp, synthetic construct
  source 1..20: mol_type = other DNA
gagcaagactctgtctcaaa

SEQ ID NO: 53394 - DNA, 20 bp, synthetic construct
  source 1..20: mol_type = other DNA
agagcaagactctgtctcaa

SEQ ID NO: 53395 - DNA, 20 bp, synthetic construct
  source 1..20: mol_type = other DNA
cagagcaagactctgtctca

SEQ ID NO: 53396 - DNA, 20 bp, synthetic construct
  source 1..20: mol_type = other DNA
acagagcaagactctgtctc

SEQ ID NO: 53397 - DNA, 20 bp, synthetic construct
  source 1..20: mol_type = other DNA
gacagagcaagactctgtct

SEQ ID NO: 53398 - DNA, 20 bp, synthetic construct
  source 1..20: mol_type = other DNA
cgacagagcaagactctgtc

SEQ ID NO: 53399 - DNA, 20 bp, synthetic construct
  source 1..20: mol_type = other DNA
gcgacagagcaagactctgt

SEQ ID NO: 53400 - DNA, 20 bp, synthetic construct
  source 1..20: mol_type = other DNA
ggcgacagagcaagactctg

SEQ ID NO: 53401 - DNA, 20 bp, synthetic construct
  source 1..20: mol_type = other DNA
gggcgacagagcaagactct

SEQ ID NO: 53402 - DNA, 20 bp, synthetic construct
  source 1..20: mol_type = other DNA
tgggcgacagagcaagactc

SEQ ID NO: 53403 - DNA, 20 bp, synthetic construct
  source 1..20: mol_type = other DNA
ctgggcgacagagcaagact

SEQ ID NO: 53404 - DNA, 20 bp, synthetic construct
  source 1..20: mol_type = other DNA
cctgggcgacagagcaagac

SEQ ID NO: 53405 - DNA, 20 bp, synthetic construct
  source 1..20: mol_type = other DNA
gcctgggcgacagagcaaga

SEQ ID NO: 53406 - DNA, 20 bp, synthetic construct
  source 1..20: mol_type = other DNA
agcctgggcgacagagcaag

SEQ ID NO: 53407 - DNA, 20 bp, synthetic construct
  source 1..20: mol_type = other DNA
cagcctgggcgacagagcaa

SEQ ID NO: 53408 - DNA, 20 bp, synthetic construct
  source 1..20: mol_type = other DNA
ccagcctgggcgacagagca

SEQ ID NO: 53409 - DNA, 20 bp, synthetic construct
  source 1..20: mol_type = other DNA
cccagcctgggcgacagagc

SEQ ID NO: 53410 - DNA, 20 bp, synthetic construct
  source 1..20: mol_type = other DNA
acccagcctgggcgacagag

SEQ ID NO: 53411 - DNA, 20 bp, synthetic construct
  source 1..20: mol_type = other DNA
tacccagcctgggcgacaga

SEQ ID NO: 53412 - DNA, 20 bp, synthetic construct
  source 1..20: mol_type = other DNA
gtacccagcctgggcgacag

SEQ ID NO: 53413 - DNA, 20 bp, synthetic construct
  source 1..20: mol_type = other DNA
tgtacccagcctgggcgaca

SEQ ID NO: 53414 - DNA, 20 bp, synthetic construct
  source 1..20: mol_type = other DNA
ctgtacccagcctgggcgac

SEQ ID NO: 53415 - DNA, 20 bp, synthetic construct
  source 1..20: mol_type = other DNA
actgtacccagcctgggcga

SEQ ID NO: 53416 - DNA, 20 bp, synthetic construct
  source 1..20: mol_type = other DNA
cactgtacccagcctgggcg

SEQ ID NO: 53417 - DNA, 20 bp, synthetic construct
  source 1..20: mol_type = other DNA
ccactgtacccagcctgggc

SEQ ID NO: 53418 - DNA, 20 bp, synthetic construct
  source 1..20: mol_type = other DNA
gccactgtacccagcctggg

SEQ ID NO: 53419 - DNA, 20 bp, synthetic construct
  source 1..20: mol_type = other DNA
cgccactgtacccagcctgg

SEQ ID NO: 53420 - DNA, 20 bp, synthetic construct
  source 1..20: mol_type = other DNA
acgccactgtacccagcctg

SEQ ID NO: 53421 - DNA, 20 bp, synthetic construct
  source 1..20: mol_type = other DNA
cacgccactgtacccagcct

SEQ ID NO: 53422 - DNA, 20 bp, synthetic construct
  source 1..20: mol_type = other DNA
tcacgccactgtacccagcc

SEQ ID NO: 53423 - DNA, 20 bp, synthetic construct
  source 1..20: mol_type = other DNA
atcacgccactgtacccagc

SEQ ID NO: 53424 - DNA, 20 bp, synthetic construct
  source 1..20: mol_type = other DNA
gatcacgccactgtacccag

SEQ ID NO: 53425 - DNA, 20 bp, synthetic construct
  source 1..20: mol_type = other DNA
agatcacgccactgtaccca

SEQ ID NO: 53426 - DNA, 20 bp, synthetic construct
  source 1..20: mol_type = other DNA
aagatcacgccactgtaccc

SEQ ID NO: 53427 - DNA, 20 bp, synthetic construct
  source 1..20: mol_type = other DNA
caagatcacgccactgtacc

SEQ ID NO: 53428 - DNA, 20 bp, synthetic construct
  source 1..20: mol_type = other DNA
ccaagatcacgccactgtac

SEQ ID NO: 53429 - DNA, 20 bp, synthetic construct
  source 1..20: mol_type = other DNA
gccaagatcacgccactgta

SEQ ID NO: 53430 - DNA, 20 bp, synthetic construct
  source 1..20: mol_type = other DNA
cgccaagatcacgccactgt

SEQ ID NO: 53431 - DNA, 20 bp, synthetic construct
  source 1..20: mol_type = other DNA
gcgccaagatcacgccactg

SEQ ID NO: 53432 - DNA, 20 bp, synthetic construct
  source 1..20: mol_type = other DNA
tgcgccaagatcacgccact

SEQ ID NO: 53433 - DNA, 20 bp, synthetic construct
  source 1..20: mol_type = other DNA
gtgcgccaagatcacgccac

SEQ ID NO: 53434 - DNA, 20 bp, synthetic construct
  source 1..20: mol_type = other DNA
agtgcgccaagatcacgcca

SEQ ID NO: 53435 - DNA, 20 bp, synthetic construct
  source 1..20: mol_type = other DNA
cagtgcgccaagatcacgcc

SEQ ID NO: 53436 - DNA, 20 bp, synthetic construct
  source 1..20: mol_type = other DNA
gcagtgcgccaagatcacgc

SEQ ID NO: 53437 - DNA, 20 bp, synthetic construct
  source 1..20: mol_type = other DNA
tgcagtgcgccaagatcacg

SEQ ID NO: 53438 - DNA, 20 bp, synthetic construct
  source 1..20: mol_type = other DNA
ttgcagtgcgccaagatcac

SEQ ID NO: 53439 - DNA, 20 bp, synthetic construct
  source 1..20: mol_type = other DNA
gttgcagtgcgccaagatca

SEQ ID NO: 53440 - DNA, 20 bp, synthetic construct
  source 1..20: mol_type = other DNA
ggttgcagtgcgccaagatc

SEQ ID NO: 53441 - DNA, 20 bp, synthetic construct
  source 1..20: mol_type = other DNA
aggttgcagtgcgccaagat

SEQ ID NO: 53442 - DNA, 20 bp, synthetic construct
  source 1..20: mol_type = other DNA
gaggttgcagtgcgccaaga

SEQ ID NO: 53443 - DNA, 20 bp, synthetic construct
  source 1..20: mol_type = other DNA
ggaggttgcagtgcgccaag

SEQ ID NO: 53444 - DNA, 20 bp, synthetic construct
  source 1..20: mol_type = other DNA
tggaggttgcagtgcgccaa

SEQ ID NO: 53445 - DNA, 20 bp, synthetic construct
  source 1..20: mol_type = other DNA
gtggaggttgcagtgcgcca

SEQ ID NO: 53446 - DNA, 20 bp, synthetic construct
  source 1..20: mol_type = other DNA
ggtggaggttgcagtgcgcc

SEQ ID NO: 53447 - DNA, 20 bp, synthetic construct
  source 1..20: mol_type = other DNA
aggtggaggttgcagtgcgc

SEQ ID NO: 53448 - DNA, 20 bp, synthetic construct
  source 1..20: mol_type = other DNA
gaggtggaggttgcagtgcg

SEQ ID NO: 53449 - DNA, 20 bp, synthetic construct
  source 1..20: mol_type = other DNA
ggaggtggaggttgcagtgc

SEQ ID NO: 53450 - DNA, 20 bp, synthetic construct
  source 1..20: mol_type = other DNA
aggaggtggaggttgcagtg

SEQ ID NO: 53451 - DNA, 20 bp, synthetic construct
  source 1..20: mol_type = other DNA
caggaggtggaggttgcagt

SEQ ID NO: 53452 - DNA, 20 bp, synthetic construct
  source 1..20: mol_type = other DNA
ccaggaggtggaggttgcag

SEQ ID NO: 53453 - DNA, 20 bp, synthetic construct
  source 1..20: mol_type = other DNA
cccaggaggtggaggttgca

SEQ ID NO: 53454 - DNA, 20 bp, synthetic construct
  source 1..20: mol_type = other DNA
acccaggaggtggaggttgc

SEQ ID NO: 53455 - DNA, 20 bp, synthetic construct
  source 1..20: mol_type = other DNA
aacccaggaggtggaggttg

SEQ ID NO: 53456 - DNA, 20 bp, synthetic construct
  source 1..20: mol_type = other DNA
gaacccaggaggtggaggtt

SEQ ID NO: 53457 - DNA, 20 bp, synthetic construct
  source 1..20: mol_type = other DNA
tgaacccaggaggtggaggt

SEQ ID NO: 53458 - DNA, 20 bp, synthetic construct
  source 1..20: mol_type = other DNA
ttgaacccaggaggtggagg

SEQ ID NO: 53459 - DNA, 20 bp, synthetic construct
  source 1..20: mol_type = other DNA
cttgaacccaggaggtggag

SEQ ID NO: 53460 - DNA, 20 bp, synthetic construct
  source 1..20: mol_type = other DNA
gcttgaacccaggaggtgga

SEQ ID NO: 53461 - DNA, 20 bp, synthetic construct
  source 1..20: mol_type = other DNA
tgcttgaacccaggaggtgg

SEQ ID NO: 53462 - DNA, 20 bp, synthetic construct
  source 1..20: mol_type = other DNA
ctgcttgaacccaggaggtg

SEQ ID NO: 53463 - DNA, 20 bp, synthetic construct
  source 1..20: mol_type = other DNA
actgcttgaacccaggaggt

SEQ ID NO: 53464 - DNA, 20 bp, synthetic construct
  source 1..20: mol_type = other DNA
aactgcttgaacccaggagg

SEQ ID NO: 53465 - DNA, 20 bp, synthetic construct
  source 1..20: mol_type = other DNA
taactgcttgaacccaggag

SEQ ID NO: 53466 - DNA, 20 bp, synthetic construct
  source 1..20: mol_type = other DNA
ataactgcttgaacccagga

SEQ ID NO: 53467 - DNA, 20 bp, synthetic construct
  source 1..20: mol_type = other DNA
gataactgcttgaacccagg

SEQ ID NO: 53468 - DNA, 20 bp, synthetic construct
  source 1..20: mol_type = other DNA
agataactgcttgaacccag

SEQ ID NO: 53469 - DNA, 20 bp, synthetic construct
  source 1..20: mol_type = other DNA
aagataactgcttgaaccca

SEQ ID NO: 53470 - DNA, 20 bp, synthetic construct
  source 1..20: mol_type = other DNA
caagataactgcttgaaccc

SEQ ID NO: 53471 - DNA, 20 bp, synthetic construct
  source 1..20: mol_type = other DNA
gcaagataactgcttgaacc

SEQ ID NO: 53472 - DNA, 20 bp, synthetic construct
  source 1..20: mol_type = other DNA
agcaagataactgcttgaac

SEQ ID NO: 53473 - DNA, 20 bp, synthetic construct
  source 1..20: mol_type = other DNA
aagcaagataactgcttgaa

SEQ ID NO: 53474 - DNA, 20 bp, synthetic construct
  source 1..20: mol_type = other DNA
gaagcaagataactgcttga

SEQ ID NO: 53475 - DNA, 20 bp, synthetic construct
  source 1..20: mol_type = other DNA
tgaagcaagataactgcttg

SEQ ID NO: 53476 - DNA, 20 bp, synthetic construct
  source 1..20: mol_type = other DNA
ctgaagcaagataactgctt

SEQ ID NO: 53477 - DNA, 20 bp, synthetic construct
  source 1..20: mol_type = other DNA
gctgaagcaagataactgct

SEQ ID NO: 53478 - DNA, 20 bp, synthetic construct
  source 1..20: mol_type = other DNA
ggctgaagcaagataactgc

SEQ ID NO: 53479 - DNA, 20 bp, synthetic construct
  source 1..20: mol_type = other DNA
aggctgaagcaagataactg

SEQ ID NO: 53480 - DNA, 20 bp, synthetic construct
  source 1..20: mol_type = other DNA
gaggctgaagcaagataact

SEQ ID NO: 53481 - DNA, 20 bp, synthetic construct
  source 1..20: mol_type = other DNA
ggaggctgaagcaagataac

SEQ ID NO: 53482 - DNA, 20 bp, synthetic construct
  source 1..20: mol_type = other DNA
gggaggctgaagcaagataa

SEQ ID NO: 53483 - DNA, 20 bp, synthetic construct
  source 1..20: mol_type = other DNA
agggaggctgaagcaagata

SEQ ID NO: 53484 - DNA, 20 bp, synthetic construct
  source 1..20: mol_type = other DNA
tagggaggctgaagcaagat

SEQ ID NO: 53485 - DNA, 20 bp, synthetic construct
  source 1..20: mol_type = other DNA
ttagggaggctgaagcaaga

SEQ ID NO: 53486 - DNA, 20 bp, synthetic construct
  source 1..20: mol_type = other DNA
attagggaggctgaagcaag

SEQ ID NO: 53487 - DNA, 20 bp, synthetic construct
  source 1..20: mol_type = other DNA
tattagggaggctgaagcaa

SEQ ID NO: 53488 - DNA, 20 bp, synthetic construct
  source 1..20: mol_type = other DNA
ttattagggaggctgaagca

SEQ ID NO: 53489 - DNA, 20 bp, synthetic construct
  source 1..20: mol_type = other DNA
gttattagggaggctgaagc

SEQ ID NO: 53490 - DNA, 20 bp, synthetic construct
  source 1..20: mol_type = other DNA
agttattagggaggctgaag

SEQ ID NO: 53491 - DNA, 20 bp, synthetic construct
  source 1..20: mol_type = other DNA
cagttattagggaggctgaa

SEQ ID NO: 53492 - DNA, 20 bp, synthetic construct
  source 1..20: mol_type = other DNA
ccagttattagggaggctga

SEQ ID NO: 53493 - DNA, 20 bp, synthetic construct
  source 1..20: mol_type = other DNA
cccagttattagggaggctg

SEQ ID NO: 53494 - DNA, 20 bp, synthetic construct
  source 1..20: mol_type = other DNA
tcccagttattagggaggct

SEQ ID NO: 53495 - DNA, 20 bp, synthetic construct
  source 1..20: mol_type = other DNA
atcccagttattagggaggc

SEQ ID NO: 53496 - DNA, 20 bp, synthetic construct
  source 1..20: mol_type = other DNA
aatcccagttattagggagg

SEQ ID NO: 53497 - DNA, 20 bp, synthetic construct
  source 1..20: mol_type = other DNA
taatcccagttattagggag

SEQ ID NO: 53498 - DNA, 20 bp, synthetic construct
  source 1..20: mol_type = other DNA
gtaatcccagttattaggga

SEQ ID NO: 53499 - DNA, 20 bp, synthetic construct
  source 1..20: mol_type = other DNA
tgtaatcccagttattaggg

SEQ ID NO: 53500 - DNA, 20 bp, synthetic construct
  source 1..20: mol_type = other DNA
ctgtaatcccagttattagg

SEQ ID NO: 53501 - DNA, 20 bp, synthetic construct
  source 1..20: mol_type = other DNA
cctgtaatcccagttattag

SEQ ID NO: 53502 - DNA, 20 bp, synthetic construct
  source 1..20: mol_type = other DNA
gcctgtaatcccagttatta

SEQ ID NO: 53503 - DNA, 20 bp, synthetic construct
  source 1..20: mol_type = other DNA
tgcctgtaatcccagttatt

SEQ ID NO: 53504 - DNA, 20 bp, synthetic construct
  source 1..20: mol_type = other DNA
gtgcctgtaatcccagttat

SEQ ID NO: 53505 - DNA, 20 bp, synthetic construct
  source 1..20: mol_type = other DNA
cgtgcctgtaatcccagtta

SEQ ID NO: 53506 - DNA, 20 bp, synthetic construct
  source 1..20: mol_type = other DNA
acgtgcctgtaatcccagtt

SEQ ID NO: 53507 - DNA, 20 bp, synthetic construct
  source 1..20: mol_type = other DNA
tacgtgcctgtaatcccagt

SEQ ID NO: 53508 - DNA, 20 bp, synthetic construct
  source 1..20: mol_type = other DNA
gtacgtgcctgtaatcccag

SEQ ID NO: 53509 - DNA, 20 bp, synthetic construct
  source 1..20: mol_type = other DNA
ggtacgtgcctgtaatccca

SEQ ID NO: 53510 - DNA, 20 bp, synthetic construct
  source 1..20: mol_type = other DNA
tggtacgtgcctgtaatccc

SEQ ID NO: 53511 - DNA, 20 bp, synthetic construct
  source 1..20: mol_type = other DNA
gtggtacgtgcctgtaatcc

SEQ ID NO: 53512 - DNA, 20 bp, synthetic construct
  source 1..20: mol_type = other DNA
ggtggtacgtgcctgtaatc

SEQ ID NO: 53513 - DNA, 20 bp, synthetic construct
  source 1..20: mol_type = other DNA
tggtggtacgtgcctgtaat

SEQ ID NO: 53514 - DNA, 20 bp, synthetic construct
  source 1..20: mol_type = other DNA
gtggtggtacgtgcctgtaa

SEQ ID NO: 53515 - DNA, 20 bp, synthetic construct
  source 1..20: mol_type = other DNA
tgtggtggtacgtgcctgta

SEQ ID NO: 53516 - DNA, 20 bp, synthetic construct
  source 1..20: mol_type = other DNA
gtgtggtggtacgtgcctgt

SEQ ID NO: 53517 - DNA, 20 bp, synthetic construct
  source 1..20: mol_type = other DNA
ggtgtggtggtacgtgcctg

SEQ ID NO: 53518 - DNA, 20 bp, synthetic construct
  source 1..20: mol_type = other DNA
gggtgtggtggtacgtgcct

SEQ ID NO: 53519 - DNA, 20 bp, synthetic construct
  source 1..20: mol_type = other DNA
cgggtgtggtggtacgtgcc

SEQ ID NO: 53520 - DNA, 20 bp, synthetic construct
  source 1..20: mol_type = other DNA
ccgggtgtggtggtacgtgc

SEQ ID NO: 53521 - DNA, 20 bp, synthetic construct
  source 1..20: mol_type = other DNA
cccgggtgtggtggtacgtg

SEQ ID NO: 53522 - DNA, 20 bp, synthetic construct
  source 1..20: mol_type = other DNA
acccgggtgtggtggtacgt

SEQ ID NO: 53523 - DNA, 20 bp, synthetic construct
  source 1..20: mol_type = other DNA
tacccgggtgtggtggtacg

SEQ ID NO: 53524 - DNA, 20 bp, synthetic construct
  source 1..20: mol_type = other DNA
ttacccgggtgtggtggtac

SEQ ID NO: 53525 - DNA, 20 bp, synthetic construct
  source 1..20: mol_type = other DNA
attacccgggtgtggtggta

SEQ ID NO: 53526 - DNA, 20 bp, synthetic construct
  source 1..20: mol_type = other DNA
aattacccgggtgtggtggt

SEQ ID NO: 53527 - DNA, 20 bp, synthetic construct
  source 1..20: mol_type = other DNA
aaattacccgggtgtggtgg

SEQ ID NO: 53528 - DNA, 20 bp, synthetic construct
  source 1..20: mol_type = other DNA
aaaattacccgggtgtggtg

SEQ ID NO: 53529 - DNA, 20 bp, synthetic construct
  source 1..20: mol_type = other DNA
aaaaattacccgggtgtggt

SEQ ID NO: 53530 - DNA, 20 bp, synthetic construct
  source 1..20: mol_type = other DNA
caaaaattacccgggtgtgg

SEQ ID NO: 53531 - DNA, 20 bp, synthetic construct
  source 1..20: mol_type = other DNA
acaaaaattacccgggtgtg

SEQ ID NO: 53532 - DNA, 20 bp, synthetic construct
  source 1..20: mol_type = other DNA
tacaaaaattacccgggtgt

SEQ ID NO: 53533 - DNA, 20 bp, synthetic construct
  source 1..20: mol_type = other DNA
atacaaaaattacccgggtg

SEQ ID NO: 53534 - DNA, 20 bp, synthetic construct
  source 1..20: mol_type = other DNA
aatacaaaaattacccgggt

SEQ ID NO: 53535 - DNA, 20 bp, synthetic construct
  source 1..20: mol_type = other DNA
aaatacaaaaattacccggg

SEQ ID NO: 53536 - DNA, 20 bp, synthetic construct
  source 1..20: mol_type = other DNA
aaaatacaaaaattacccgg

SEQ ID NO: 53537 - DNA, 20 bp, synthetic construct
  source 1..20: mol_type = other DNA
aaaaatacaaaaattacccg

SEQ ID NO: 53538 - DNA, 20 bp, synthetic construct
  source 1..20: mol_type = other DNA
taaaaatacaaaaattaccc

SEQ ID NO: 53539 - DNA, 20 bp, synthetic construct
  source 1..20: mol_type = other DNA
ctaaaaatacaaaaattacc

SEQ ID NO: 53540 - DNA, 20 bp, synthetic construct
  source 1..20: mol_type = other DNA
actaaaaatacaaaaattac

SEQ ID NO: 53541 - DNA, 20 bp, synthetic construct
  source 1..20: mol_type = other DNA
tactaaaaatacaaaaatta

SEQ ID NO: 53542 - DNA, 20 bp, synthetic construct
  source 1..20: mol_type = other DNA
ctactaaaaatacaaaaatt

SEQ ID NO: 53543 - DNA, 20 bp, synthetic construct
  source 1..20: mol_type = other DNA
tctactaaaaatacaaaaat

SEQ ID NO: 53544 - DNA, 20 bp, synthetic construct
  source 1..20: mol_type = other DNA
ctctactaaaaatacaaaaa

SEQ ID NO: 53545 - DNA, 20 bp, synthetic construct
  source 1..20: mol_type = other DNA
tctctactaaaaatacaaaa

SEQ ID NO: 53546 - DNA, 20 bp, synthetic construct
  source 1..20: mol_type = other DNA
atctctactaaaaatacaaa

SEQ ID NO: 53547 - DNA, 20 bp, synthetic construct
  source 1..20: mol_type = other DNA
catctctactaaaaatacaa

SEQ ID NO: 53548 - DNA, 20 bp, synthetic construct
  source 1..20: mol_type = other DNA
ccatctctactaaaaataca

SEQ ID NO: 53549 - DNA, 20 bp, synthetic construct
  source 1..20: mol_type = other DNA
cccatctctactaaaaatac

SEQ ID NO: 53550 - DNA, 20 bp, synthetic construct
  source 1..20: mol_type = other DNA
ccccatctctactaaaaata

SEQ ID NO: 53551 - DNA, 20 bp, synthetic construct
  source 1..20: mol_type = other DNA
accccatctctactaaaaat

SEQ ID NO: 53552 - DNA, 20 bp, synthetic construct
  source 1..20: mol_type = other DNA
aaccccatctctactaaaaa

SEQ ID NO: 53553 - DNA, 20 bp, synthetic construct
  source 1..20: mol_type = other DNA
aaaccccatctctactaaaa

SEQ ID NO: 53554 - DNA, 20 bp, synthetic construct
  source 1..20: mol_type = other DNA
aaaaccccatctctactaaa

SEQ ID NO: 53555 - DNA, 20 bp, synthetic construct
  source 1..20: mol_type = other DNA
taaaaccccatctctactaa

SEQ ID NO: 53556 - DNA, 20 bp, synthetic construct
  source 1..20: mol_type = other DNA
gtaaaaccccatctctacta

SEQ ID NO: 53557 - DNA, 20 bp, synthetic construct
  source 1..20: mol_type = other DNA
ggtaaaaccccatctctact

SEQ ID NO: 53558 - DNA, 20 bp, synthetic construct
  source 1..20: mol_type = other DNA
tggtaaaaccccatctctac

SEQ ID NO: 53559 - DNA, 20 bp, synthetic construct
  source 1..20: mol_type = other DNA
atggtaaaaccccatctcta

SEQ ID NO: 53560 - DNA, 20 bp, synthetic construct
  source 1..20: mol_type = other DNA
catggtaaaaccccatctct

SEQ ID NO: 53561 - DNA, 20 bp, synthetic construct
  source 1..20: mol_type = other DNA
acatggtaaaaccccatctc

SEQ ID NO: 53562 - DNA, 20 bp, synthetic construct
  source 1..20: mol_type = other DNA
aacatggtaaaaccccatct

SEQ ID NO: 53563 - DNA, 20 bp, synthetic construct
  source 1..20: mol_type = other DNA
caacatggtaaaaccccatc

SEQ ID NO: 53564 - DNA, 20 bp, synthetic construct
  source 1..20: mol_type = other DNA
ccaacatggtaaaaccccat

SEQ ID NO: 53565 - DNA, 20 bp, synthetic construct
  source 1..20: mol_type = other DNA
gccaacatggtaaaacccca

SEQ ID NO: 53566 - DNA, 20 bp, synthetic construct
  source 1..20: mol_type = other DNA
ggccaacatggtaaaacccc

SEQ ID NO: 53567 - DNA, 20 bp, synthetic construct
  source 1..20: mol_type = other DNA
tggccaacatggtaaaaccc

SEQ ID NO: 53568 - DNA, 20 bp, synthetic construct
  source 1..20: mol_type = other DNA
ctggccaacatggtaaaacc

SEQ ID NO: 53569 - DNA, 20 bp, synthetic construct
  source 1..20: mol_type = other DNA
cctggccaacatggtaaaac

SEQ ID NO: 53570 - DNA, 20 bp, synthetic construct
  source 1..20: mol_type = other DNA
gcctggccaacatggtaaaa

SEQ ID NO: 53571 - DNA, 20 bp, synthetic construct
  source 1..20: mol_type = other DNA
agcctggccaacatggtaaa

SEQ ID NO: 53572 - DNA, 20 bp, synthetic construct
  source 1..20: mol_type = other DNA
cagcctggccaacatggtaa

SEQ ID NO: 53573 - DNA, 20 bp, synthetic construct
  source 1..20: mol_type = other DNA
tcagcctggccaacatggta

SEQ ID NO: 53574 - DNA, 20 bp, synthetic construct
  source 1..20: mol_type = other DNA
atcagcctggccaacatggt

SEQ ID NO: 53575 - DNA, 20 bp, synthetic construct
  source 1..20: mol_type = other DNA
aatcagcctggccaacatgg

SEQ ID NO: 53576 - DNA, 20 bp, synthetic construct
  source 1..20: mol_type = other DNA
aaatcagcctggccaacatg

SEQ ID NO: 53577 - DNA, 20 bp, synthetic construct
  source 1..20: mol_type = other DNA
gaaatcagcctggccaacat

SEQ ID NO: 53578 - DNA, 20 bp, synthetic construct
  source 1..20: mol_type = other DNA
tgaaatcagcctggccaaca

SEQ ID NO: 53579 - DNA, 20 bp, synthetic construct
  source 1..20: mol_type = other DNA
ttgaaatcagcctggccaac

SEQ ID NO: 53580 - DNA, 20 bp, synthetic construct
  source 1..20: mol_type = other DNA
cttgaaatcagcctggccaa

SEQ ID NO: 53581 - DNA, 20 bp, synthetic construct
  source 1..20: mol_type = other DNA
gcttgaaatcagcctggcca

SEQ ID NO: 53582 - DNA, 20 bp, synthetic construct
  source 1..20: mol_type = other DNA
agcttgaaatcagcctggcc

SEQ ID NO: 53583 - DNA, 20 bp, synthetic construct
  source 1..20: mol_type = other DNA
gagcttgaaatcagcctggc

SEQ ID NO: 53584 - DNA, 20 bp, synthetic construct
  source 1..20: mol_type = other DNA
ggagcttgaaatcagcctgg

SEQ ID NO: 53585 - DNA, 20 bp, synthetic construct
  source 1..20: mol_type = other DNA
aggagcttgaaatcagcctg

SEQ ID NO: 53586 - DNA, 20 bp, synthetic construct
  source 1..20: mol_type = other DNA
caggagcttgaaatcagcct

SEQ ID NO: 53587 - DNA, 20 bp, synthetic construct
  source 1..20: mol_type = other DNA
tcaggagcttgaaatcagcc

SEQ ID NO: 53588 - DNA, 20 bp, synthetic construct
  source 1..20: mol_type = other DNA
gtcaggagcttgaaatcagc

SEQ ID NO: 53589 - DNA, 20 bp, synthetic construct
  source 1..20: mol_type = other DNA
ggtcaggagcttgaaatcag

SEQ ID NO: 53590 - DNA, 20 bp, synthetic construct
  source 1..20: mol_type = other DNA
aggtcaggagcttgaaatca

SEQ ID NO: 53591 - DNA, 20 bp, synthetic construct
  source 1..20: mol_type = other DNA
aaggtcaggagcttgaaatc

SEQ ID NO: 53592 - DNA, 20 bp, synthetic construct
  source 1..20: mol_type = other DNA
taaggtcaggagcttgaaat

SEQ ID NO: 53593 - DNA, 20 bp, synthetic construct
  source 1..20: mol_type = other DNA
ctaaggtcaggagcttgaaa

SEQ ID NO: 53594 - DNA, 20 bp, synthetic construct
  source 1..20: mol_type = other DNA
cctaaggtcaggagcttgaa

SEQ ID NO: 53595 - DNA, 20 bp, synthetic construct
  source 1..20: mol_type = other DNA
acctaaggtcaggagcttga

SEQ ID NO: 53596 - DNA, 20 bp, synthetic construct
  source 1..20: mol_type = other DNA
cacctaaggtcaggagcttg

SEQ ID NO: 53597 - DNA, 20 bp, synthetic construct
  source 1..20: mol_type = other DNA
tcacctaaggtcaggagctt

SEQ ID NO: 53598 - DNA, 20 bp, synthetic construct
  source 1..20: mol_type = other DNA
atcacctaaggtcaggagct

SEQ ID NO: 53599 - DNA, 20 bp, synthetic construct
  source 1..20: mol_type = other DNA
gatcacctaaggtcaggagc

SEQ ID NO: 53600 - DNA, 20 bp, synthetic construct
  source 1..20: mol_type = other DNA
ggatcacctaaggtcaggag

SEQ ID NO: 53601 - DNA, 20 bp, synthetic construct
  source 1..20: mol_type = other DNA
tggatcacctaaggtcagga

SEQ ID NO: 53602 - DNA, 20 bp, synthetic construct
  source 1..20: mol_type = other DNA
gtggatcacctaaggtcagg

SEQ ID NO: 53603 - DNA, 20 bp, synthetic construct
  source 1..20: mol_type = other DNA
ggtggatcacctaaggtcag

SEQ ID NO: 53604 - DNA, 20 bp, synthetic construct
  source 1..20: mol_type = other DNA
gggtggatcacctaaggtca

SEQ ID NO: 53605 - DNA, 20 bp, synthetic construct
  source 1..20: mol_type = other DNA
tgggtggatcacctaaggtc

SEQ ID NO: 53606 - DNA, 20 bp, synthetic construct
  source 1..20: mol_type = other DNA
gtgggtggatcacctaaggt

SEQ ID NO: 53607 - DNA, 20 bp, synthetic construct
  source 1..20: mol_type = other DNA
ggtgggtggatcacctaagg

SEQ ID NO: 53608 - DNA, 20 bp, synthetic construct
  source 1..20: mol_type = other DNA
aggtgggtggatcacctaag

SEQ ID NO: 53609 - DNA, 20 bp, synthetic construct
  source 1..20: mol_type = other DNA
caggtgggtggatcacctaa

SEQ ID NO: 53610 - DNA, 20 bp, synthetic construct
  source 1..20: mol_type = other DNA
ccaggtgggtggatcaccta

SEQ ID NO: 53611 - DNA, 20 bp, synthetic construct
  source 1..20: mol_type = other DNA
cccaggtgggtggatcacct

SEQ ID NO: 53612 - DNA, 20 bp, synthetic construct
  source 1..20: mol_type = other DNA
gcccaggtgggtggatcacc

SEQ ID NO: 53613 - DNA, 20 bp, synthetic construct
  source 1..20: mol_type = other DNA
ggcccaggtgggtggatcac

SEQ ID NO: 53614 - DNA, 20 bp, synthetic construct
  source 1..20: mol_type = other DNA
aggcccaggtgggtggatca

SEQ ID NO: 53615 - DNA, 20 bp, synthetic construct
  source 1..20: mol_type = other DNA
gaggcccaggtgggtggatc

SEQ ID NO: 53616 - DNA, 20 bp, synthetic construct
  source 1..20: mol_type = other DNA
ggaggcccaggtgggtggat

SEQ ID NO: 53617 - DNA, 20 bp, synthetic construct
  source 1..20: mol_type = other DNA
gggaggcccaggtgggtgga

SEQ ID NO: 53618 - DNA, 20 bp, synthetic construct
  source 1..20: mol_type = other DNA
tgggaggcccaggtgggtgg

SEQ ID NO: 53619 - DNA, 20 bp, synthetic construct
  source 1..20: mol_type = other DNA
ttgggaggcccaggtgggtg

SEQ ID NO: 53620 - DNA, 20 bp, synthetic construct
  source 1..20: mol_type = other DNA
tttgggaggcccaggtgggt

SEQ ID NO: 53621 - DNA, 20 bp, synthetic construct
  source 1..20: mol_type = other DNA
atttgggaggcccaggtggg

SEQ ID NO: 53622 - DNA, 20 bp, synthetic construct
  source 1..20: mol_type = other DNA
aatttgggaggcccaggtgg

SEQ ID NO: 53623 - DNA, 20 bp, synthetic construct
  source 1..20: mol_type = other DNA
caatttgggaggcccaggtg

SEQ ID NO: 53624 - DNA, 20 bp, synthetic construct
  source 1..20: mol_type = other DNA
gcaatttgggaggcccaggt

SEQ ID NO: 53625 - DNA, 20 bp, synthetic construct
  source 1..20: mol_type = other DNA
agcaatttgggaggcccagg

SEQ ID NO: 53626 - DNA, 20 bp, synthetic construct
  source 1..20: mol_type = other DNA
cagcaatttgggaggcccag

SEQ ID NO: 53627 - DNA, 20 bp, synthetic construct
  source 1..20: mol_type = other DNA
ccagcaatttgggaggccca

SEQ ID NO: 53628 - DNA, 20 bp, synthetic construct
  source 1..20: mol_type = other DNA
cccagcaatttgggaggccc

SEQ ID NO: 53629 - DNA, 20 bp, synthetic construct
  source 1..20: mol_type = other DNA
tcccagcaatttgggaggcc

SEQ ID NO: 53630 - DNA, 20 bp, synthetic construct
  source 1..20: mol_type = other DNA
atcccagcaatttgggaggc

SEQ ID NO: 53631 - DNA, 20 bp, synthetic construct
  source 1..20: mol_type = other DNA
aatcccagcaatttgggagg

SEQ ID NO: 53632 - DNA, 20 bp, synthetic construct
  source 1..20: mol_type = other DNA
caatcccagcaatttgggag

SEQ ID NO: 53633 - DNA, 20 bp, synthetic construct
  source 1..20: mol_type = other DNA
acaatcccagcaatttggga

SEQ ID NO: 53634 - DNA, 20 bp, synthetic construct
  source 1..20: mol_type = other DNA
tacaatcccagcaatttggg

SEQ ID NO: 53635 - DNA, 20 bp, synthetic construct
  source 1..20: mol_type = other DNA
ctacaatcccagcaatttgg

SEQ ID NO: 53636 - DNA, 20 bp, synthetic construct
  source 1..20: mol_type = other DNA
cctacaatcccagcaatttg

SEQ ID NO: 53637 - DNA, 20 bp, synthetic construct
  source 1..20: mol_type = other DNA
gcctacaatcccagcaattt

SEQ ID NO: 53638 - DNA, 20 bp, synthetic construct
  source 1..20: mol_type = other DNA
tgcctacaatcccagcaatt

SEQ ID NO: 53639 - DNA, 20 bp, synthetic construct
  source 1..20: mol_type = other DNA
atgcctacaatcccagcaat

SEQ ID NO: 53640 - DNA, 20 bp, synthetic construct
  source 1..20: mol_type = other DNA
catgcctacaatcccagcaa

SEQ ID NO: 53641 - DNA, 20 bp, synthetic construct
  source 1..20: mol_type = other DNA
tcatgcctacaatcccagca

SEQ ID NO: 53642 - DNA, 20 bp, synthetic construct
  source 1..20: mol_type = other DNA
ttcatgcctacaatcccagc

SEQ ID NO: 53643 - DNA, 20 bp, synthetic construct
  source 1..20: mol_type = other DNA
gttcatgcctacaatcccag

SEQ ID NO: 53644 - DNA, 20 bp, synthetic construct
  source 1..20: mol_type = other DNA
ggttcatgcctacaatccca

SEQ ID NO: 53645 - DNA, 20 bp, synthetic construct
  source 1..20: mol_type = other DNA
tggttcatgcctacaatccc

SEQ ID NO: 53646 - DNA, 20 bp, synthetic construct
  source 1..20: mol_type = other DNA
gtggttcatgcctacaatcc

SEQ ID NO: 53647 - DNA, 20 bp, synthetic construct
  source 1..20: mol_type = other DNA
agtggttcatgcctacaatc

SEQ ID NO: 53648 - DNA, 20 bp, synthetic construct
  source 1..20: mol_type = other DNA
cagtggttcatgcctacaat

SEQ ID NO: 53649 - DNA, 20 bp, synthetic construct
  source 1..20: mol_type = other DNA
acagtggttcatgcctacaa

SEQ ID NO: 53650 - DNA, 20 bp, synthetic construct
  source 1..20: mol_type = other DNA
cacagtggttcatgcctaca

SEQ ID NO: 53651 - DNA, 20 bp, synthetic construct
  source 1..20: mol_type = other DNA
gcacagtggttcatgcctac

SEQ ID NO: 53652 - DNA, 20 bp, synthetic construct
  source 1..20: mol_type = other DNA
ggcacagtggttcatgccta

SEQ ID NO: 53653 - DNA, 20 bp, synthetic construct
  source 1..20: mol_type = other DNA
gggcacagtggttcatgcct

SEQ ID NO: 53654 - DNA, 20 bp, synthetic construct
  source 1..20: mol_type = other DNA
tgggcacagtggttcatgcc

SEQ ID NO: 53655 - DNA, 20 bp, synthetic construct
  source 1..20: mol_type = other DNA
ctgggcacagtggttcatgc

SEQ ID NO: 53656 - DNA, 20 bp, synthetic construct
  source 1..20: mol_type = other DNA
gctgggcacagtggttcatg

SEQ ID NO: 53657 - DNA, 20 bp, synthetic construct
  source 1..20: mol_type = other DNA
ggctgggcacagtggttcat

SEQ ID NO: 53658 - DNA, 20 bp, synthetic construct
  source 1..20: mol_type = other DNA
tggctgggcacagtggttca

SEQ ID NO: 53659 - DNA, 20 bp, synthetic construct
  source 1..20: mol_type = other DNA
ctggctgggcacagtggttc

SEQ ID NO: 53660 - DNA, 20 bp, synthetic construct
  source 1..20: mol_type = other DNA
actggctgggcacagtggtt

SEQ ID NO: 53661 - DNA, 20 bp, synthetic construct
  source 1..20: mol_type = other DNA
tactggctgggcacagtggt

SEQ ID NO: 53662 - DNA, 20 bp, synthetic construct
  source 1..20: mol_type = other DNA
ttactggctgggcacagtgg

SEQ ID NO: 53663 - DNA, 20 bp, synthetic construct
  source 1..20: mol_type = other DNA
cttactggctgggcacagtg

SEQ ID NO: 53664 - DNA, 20 bp, synthetic construct
  source 1..20: mol_type = other DNA
acttactggctgggcacagt

SEQ ID NO: 53665 - DNA, 20 bp, synthetic construct
  source 1..20: mol_type = other DNA
aacttactggctgggcacag

SEQ ID NO: 53666 - DNA, 20 bp, synthetic construct
  source 1..20: mol_type = other DNA
gaacttactggctgggcaca

SEQ ID NO: 53667 - DNA, 20 bp, synthetic construct
  source 1..20: mol_type = other DNA
ggaacttactggctgggcac

SEQ ID NO: 53668 - DNA, 20 bp, synthetic construct
  source 1..20: mol_type = other DNA
tggaacttactggctgggca

SEQ ID NO: 53669 - DNA, 20 bp, synthetic construct
  source 1..20: mol_type = other DNA
atggaacttactggctgggc

SEQ ID NO: 53670 - DNA, 20 bp, synthetic construct
  source 1..20: mol_type = other DNA
catggaacttactggctggg

SEQ ID NO: 53671 - DNA, 20 bp, synthetic construct
  source 1..20: mol_type = other DNA
ccatggaacttactggctgg

SEQ ID NO: 53672 - DNA, 20 bp, synthetic construct
  source 1..20: mol_type = other DNA
accatggaacttactggctg

SEQ ID NO: 53673 - DNA, 20 bp, synthetic construct
  source 1..20: mol_type = other DNA
aaccatggaacttactggct

SEQ ID NO: 53674 - DNA, 20 bp, synthetic construct
  source 1..20: mol_type = other DNA
caaccatggaacttactggc

SEQ ID NO: 53675 - DNA, 20 bp, synthetic construct
  source 1..20: mol_type = other DNA
acaaccatggaacttactgg

SEQ ID NO: 53676 - DNA, 20 bp, synthetic construct
  source 1..20: mol_type = other DNA
aacaaccatggaacttactg

SEQ ID NO: 53677 - DNA, 20 bp, synthetic construct
  source 1..20: mol_type = other DNA
taacaaccatggaacttact

SEQ ID NO: 53678 - DNA, 20 bp, synthetic construct
  source 1..20: mol_type = other DNA
ttaacaaccatggaacttac

SEQ ID NO: 53679 - DNA, 20 bp, synthetic construct
  source 1..20: mol_type = other DNA
tttaacaaccatggaactta

SEQ ID NO: 53680 - DNA, 20 bp, synthetic construct
  source 1..20: mol_type = other DNA
ctttaacaaccatggaactt

SEQ ID NO: 53681 - DNA, 20 bp, synthetic construct
  source 1..20: mol_type = other DNA
cctttaacaaccatggaact

SEQ ID NO: 53682 - DNA, 20 bp, synthetic construct
  source 1..20: mol_type = other DNA
tcctttaacaaccatggaac

SEQ ID NO: 53683 - DNA, 20 bp, synthetic construct
  source 1..20: mol_type = other DNA
atcctttaacaaccatggaa

SEQ ID NO: 53684 - DNA, 20 bp, synthetic construct
  source 1..20: mol_type = other DNA
aatcctttaacaaccatgga

SEQ ID NO: 53685 - DNA, 20 bp, synthetic construct
  source 1..20: mol_type = other DNA
aaatcctttaacaaccatgg

SEQ ID NO: 53686 - DNA, 20 bp, synthetic construct
  source 1..20: mol_type = other DNA
gaaatcctttaacaaccatg

SEQ ID NO: 53687 - DNA, 20 bp, synthetic construct
  source 1..20: mol_type = other DNA
agaaatcctttaacaaccat

SEQ ID NO: 53688 - DNA, 20 bp, synthetic construct
  source 1..20: mol_type = other DNA
gagaaatcctttaacaacca

SEQ ID NO: 53689 - DNA, 20 bp, synthetic construct
  source 1..20: mol_type = other DNA
ggagaaatcctttaacaacc

SEQ ID NO: 53690 - DNA, 20 bp, synthetic construct
  source 1..20: mol_type = other DNA
tggagaaatcctttaacaac

SEQ ID NO: 53691 - DNA, 20 bp, synthetic construct
  source 1..20: mol_type = other DNA
gtggagaaatcctttaacaa

SEQ ID NO: 53692 - DNA, 20 bp, synthetic construct
  source 1..20: mol_type = other DNA
tgtggagaaatcctttaaca

SEQ ID NO: 53693 - DNA, 20 bp, synthetic construct
  source 1..20: mol_type = other DNA
ttgtggagaaatcctttaac

SEQ ID NO: 53694 - DNA, 20 bp, synthetic construct
  source 1..20: mol_type = other DNA
tttgtggagaaatcctttaa

SEQ ID NO: 53695 - DNA, 20 bp, synthetic construct
  source 1..20: mol_type = other DNA
atttgtggagaaatccttta

SEQ ID NO: 53696 - DNA, 20 bp, synthetic construct
  source 1..20: mol_type = other DNA
tatttgtggagaaatccttt

SEQ ID NO: 53697 - DNA, 20 bp, synthetic construct
  source 1..20: mol_type = other DNA
ttatttgtggagaaatcctt

SEQ ID NO: 53698 - DNA, 20 bp, synthetic construct
  source 1..20: mol_type = other DNA
tttatttgtggagaaatcct

SEQ ID NO: 53699 - DNA, 20 bp, synthetic construct
  source 1..20: mol_type = other DNA
ctttatttgtggagaaatcc

SEQ ID NO: 53700 - DNA, 20 bp, synthetic construct
  source 1..20: mol_type = other DNA
gctttatttgtggagaaatc

SEQ ID NO: 53701 - DNA, 20 bp, synthetic construct
  source 1..20: mol_type = other DNA
agctttatttgtggagaaat

SEQ ID NO: 53702 - DNA, 20 bp, synthetic construct
  source 1..20: mol_type = other DNA
tagctttatttgtggagaaa

SEQ ID NO: 53703 - DNA, 20 bp, synthetic construct
  source 1..20: mol_type = other DNA
ttagctttatttgtggagaa

SEQ ID NO: 53704 - DNA, 20 bp, synthetic construct
  source 1..20: mol_type = other DNA
tttagctttatttgtggaga

SEQ ID NO: 53705 - DNA, 20 bp, synthetic construct
  source 1..20: mol_type = other DNA
ttttagctttatttgtggag

SEQ ID NO: 53706 - DNA, 20 bp, synthetic construct
  source 1..20: mol_type = other DNA
cttttagctttatttgtgga

SEQ ID NO: 53707 - DNA, 20 bp, synthetic construct
  source 1..20: mol_type = other DNA
acttttagctttatttgtgg

SEQ ID NO: 53708 - DNA, 20 bp, synthetic construct
  source 1..20: mol_type = other DNA
tacttttagctttatttgtg

SEQ ID NO: 53709 - DNA, 20 bp, synthetic construct
  source 1..20: mol_type = other DNA
ttacttttagctttatttgt

SEQ ID NO: 53710 - DNA, 20 bp, synthetic construct
  source 1..20: mol_type = other DNA
tttacttttagctttatttg

SEQ ID NO: 53711 - DNA, 20 bp, synthetic construct
  source 1..20: mol_type = other DNA
ttttacttttagctttattt

SEQ ID NO: 53712 - DNA, 20 bp, synthetic construct
  source 1..20: mol_type = other DNA
tttttacttttagctttatt

SEQ ID NO: 53713 - DNA, 20 bp, synthetic construct
  source 1..20: mol_type = other DNA
ttttttacttttagctttat

SEQ ID NO: 53714 - DNA, 20 bp, synthetic construct
  source 1..20: mol_type = other DNA
tttttttacttttagcttta

SEQ ID NO: 53715 - DNA, 20 bp, synthetic construct
  source 1..20: mol_type = other DNA
ttttttttacttttagcttt

SEQ ID NO: 53716 - DNA, 20 bp, synthetic construct
  source 1..20: mol_type = other DNA
tttttttttacttttagctt

SEQ ID NO: 53717 - DNA, 20 bp, synthetic construct
  source 1..20: mol_type = other DNA
ttttttttttacttttagct

SEQ ID NO: 53718 - DNA, 20 bp, synthetic construct
  source 1..20: mol_type = other DNA
tttttttttttacttttagc

SEQ ID NO: 53719 - DNA, 20 bp, synthetic construct
  source 1..20: mol_type = other DNA
ttttttttttttacttttag

SEQ ID NO: 53720 - DNA, 20 bp, synthetic construct
  source 1..20: mol_type = other DNA
tttttttttttttactttta

SEQ ID NO: 53721 - DNA, 20 bp, synthetic construct
  source 1..20: mol_type = other DNA
ttttttttttttttactttt

SEQ ID NO: 53722 - DNA, 20 bp, synthetic construct
  source 1..20: mol_type = other DNA
tttttttttttttttacttt

SEQ ID NO: 53723 - DNA, 20 bp, synthetic construct
  source 1..20: mol_type = other DNA
ttttttttttttttttactt

SEQ ID NO: 53724 - DNA, 20 bp, synthetic construct
  source 1..20: mol_type = other DNA
tttttttttttttttttact

SEQ ID NO: 53725 - DNA, 20 bp, synthetic construct
  source 1..20: mol_type = other DNA
ttttttttttttttttttac

SEQ ID NO: 53726 - DNA, 20 bp, synthetic construct
  source 1..20: mol_type = other DNA
ttttttttttttttttttta

SEQ ID NO: 53727 - DNA, 20 bp, synthetic construct
  source 1..20: mol_type = other DNA
tttttttttttttttttttt

SEQ ID NO: 53728 - DNA, 20 bp, synthetic construct
  source 1..20: mol_type = other DNA
tttttttttttttttttttt

SEQ ID NO: 53729 - DNA, 20 bp, synthetic construct
  source 1..20: mol_type = other DNA
tttttttttttttttttttt

SEQ ID NO: 53730 - DNA, 20 bp, synthetic construct
  source 1..20: mol_type = other DNA
tttttttttttttttttttt

SEQ ID NO: 53731 - DNA, 20 bp, synthetic construct
  source 1..20: mol_type = other DNA
tttttttttttttttttttt

SEQ ID NO: 53732 - DNA, 20 bp, synthetic construct
  source 1..20: mol_type = other DNA
attttttttttttttttttt

SEQ ID NO: 53733 - DNA, 20 bp, synthetic construct
  source 1..20: mol_type = other DNA
aatttttttttttttttttt

SEQ ID NO: 53734 - DNA, 20 bp, synthetic construct
  source 1..20: mol_type = other DNA
gaattttttttttttttttt

SEQ ID NO: 53735 - DNA, 20 bp, synthetic construct
  source 1..20: mol_type = other DNA
agaatttttttttttttttt

SEQ ID NO: 53736 - DNA, 20 bp, synthetic construct
  source 1..20: mol_type = other DNA
gagaattttttttttttttt

SEQ ID NO: 53737 - DNA, 20 bp, synthetic construct
  source 1..20: mol_type = other DNA
tgagaatttttttttttttt

SEQ ID NO: 53738 - DNA, 20 bp, synthetic construct
  source 1..20: mol_type = other DNA
ttgagaattttttttttttt

SEQ ID NO: 53739 - DNA, 20 bp, synthetic construct
  source 1..20: mol_type = other DNA
cttgagaatttttttttttt

SEQ ID NO: 53740 - DNA, 20 bp, synthetic construct
  source 1..20: mol_type = other DNA
gcttgagaattttttttttt

SEQ ID NO: 53741 - DNA, 20 bp, synthetic construct
  source 1..20: mol_type = other DNA
tgcttgagaatttttttttt

SEQ ID NO: 53742 - DNA, 20 bp, synthetic construct
  source 1..20: mol_type = other DNA
ttgcttgagaattttttttt

SEQ ID NO: 53743 - DNA, 20 bp, synthetic construct
  source 1..20: mol_type = other DNA
attgcttgagaatttttttt

SEQ ID NO: 53744 - DNA, 20 bp, synthetic construct
  source 1..20: mol_type = other DNA
tattgcttgagaattttttt

SEQ ID NO: 53745 - DNA, 20 bp, synthetic construct
  source 1..20: mol_type = other DNA
atattgcttgagaatttttt

SEQ ID NO: 53746 - DNA, 20 bp, synthetic construct
  source 1..20: mol_type = other DNA
tatattgcttgagaattttt

SEQ ID NO: 53747 - DNA, 20 bp, synthetic construct
  source 1..20: mol_type = other DNA
ttatattgcttgagaatttt

SEQ ID NO: 53748 - DNA, 20 bp, synthetic construct
  source 1..20: mol_type = other DNA
cttatattgcttgagaattt

SEQ ID NO: 53749 - DNA, 20 bp, synthetic construct
  source 1..20: mol_type = other DNA
tcttatattgcttgagaatt

SEQ ID NO: 53750 - DNA, 20 bp, synthetic construct
  source 1..20: mol_type = other DNA
atcttatattgcttgagaat

SEQ ID NO: 53751 - DNA, 20 bp, synthetic construct
  source 1..20: mol_type = other DNA
catcttatattgcttgagaa

SEQ ID NO: 53752 - DNA, 20 bp, synthetic construct
  source 1..20: mol_type = other DNA
gcatcttatattgcttgaga

SEQ ID NO: 53753 - DNA, 20 bp, synthetic construct
  source 1..20: mol_type = other DNA
tgcatcttatattgcttgag

SEQ ID NO: 53754 - DNA, 20 bp, synthetic construct
  source 1..20: mol_type = other DNA
ctgcatcttatattgcttga

SEQ ID NO: 53755 - DNA, 20 bp, synthetic construct
  source 1..20: mol_type = other DNA
tctgcatcttatattgcttg

SEQ ID NO: 53756 - DNA, 20 bp, synthetic construct
  source 1..20: mol_type = other DNA
gtctgcatcttatattgctt

SEQ ID NO: 53757 - DNA, 20 bp, synthetic construct
  source 1..20: mol_type = other DNA
agtctgcatcttatattgct

SEQ ID NO: 53758 - DNA, 20 bp, synthetic construct
  source 1..20: mol_type = other DNA
tagtctgcatcttatattgc

SEQ ID NO: 53759 - DNA, 20 bp, synthetic construct
  source 1..20: mol_type = other DNA
atagtctgcatcttatattg

SEQ ID NO: 53760 - DNA, 20 bp, synthetic construct
  source 1..20: mol_type = other DNA
aatagtctgcatcttatatt

SEQ ID NO: 53761 - DNA, 20 bp, synthetic construct
  source 1..20: mol_type = other DNA
taatagtctgcatcttatat

SEQ ID NO: 53762 - DNA, 20 bp, synthetic construct
  source 1..20: mol_type = other DNA
ataatagtctgcatcttata

SEQ ID NO: 53763 - DNA, 20 bp, synthetic construct
  source 1..20: mol_type = other DNA
cataatagtctgcatcttat

SEQ ID NO: 53764 - DNA, 20 bp, synthetic construct
  source 1..20: mol_type = other DNA
acataatagtctgcatctta

SEQ ID NO: 53765 - DNA, 20 bp, synthetic construct
  source 1..20: mol_type = other DNA
aacataatagtctgcatctt

SEQ ID NO: 53766 - DNA, 20 bp, synthetic construct
  source 1..20: mol_type = other DNA
caacataatagtctgcatct

SEQ ID NO: 53767 - DNA, 20 bp, synthetic construct
  source 1..20: mol_type = other DNA
acaacataatagtctgcatc

SEQ ID NO: 53768 - DNA, 20 bp, synthetic construct
  source 1..20: mol_type = other DNA
aacaacataatagtctgcat

SEQ ID NO: 53769 - DNA, 20 bp, synthetic construct
  source 1..20: mol_type = other DNA
gaacaacataatagtctgca

SEQ ID NO: 53770 - DNA, 20 bp, synthetic construct
  source 1..20: mol_type = other DNA
tgaacaacataatagtctgc

SEQ ID NO: 53771 - DNA, 20 bp, synthetic construct
  source 1..20: mol_type = other DNA
ttgaacaacataatagtctg

SEQ ID NO: 53772 - DNA, 20 bp, synthetic construct
  source 1..20: mol_type = other DNA
cttgaacaacataatagtct

SEQ ID NO: 53773 - DNA, 20 bp, synthetic construct
  source 1..20: mol_type = other DNA
acttgaacaacataatagtc

SEQ ID NO: 53774 - DNA, 20 bp, synthetic construct
  source 1..20: mol_type = other DNA
aacttgaacaacataatagt

SEQ ID NO: 53775 - DNA, 20 bp, synthetic construct
  source 1..20: mol_type = other DNA
aaacttgaacaacataatag

SEQ ID NO: 53776 - DNA, 20 bp, synthetic construct
  source 1..20: mol_type = other DNA
aaaacttgaacaacataata

SEQ ID NO: 53777 - DNA, 20 bp, synthetic construct
  source 1..20: mol_type = other DNA
aaaaacttgaacaacataat

SEQ ID NO: 53778 - DNA, 20 bp, synthetic construct
  source 1..20: mol_type = other DNA
aaaaaacttgaacaacataa

SEQ ID NO: 53779 - DNA, 20 bp, synthetic construct
  source 1..20: mol_type = other DNA
aaaaaaacttgaacaacata

SEQ ID NO: 53780 - DNA, 20 bp, synthetic construct
  source 1..20: mol_type = other DNA
aaaaaaaacttgaacaacat

SEQ ID NO: 53781 - DNA, 20 bp, synthetic construct
  source 1..20: mol_type = other DNA
aaaaaaaaacttgaacaaca

SEQ ID NO: 53782 - DNA, 20 bp, synthetic construct
  source 1..20: mol_type = other DNA
aaaaaaaaaacttgaacaac

SEQ ID NO: 53783 - DNA, 20 bp, synthetic construct
  source 1..20: mol_type = other DNA
aaaaaaaaaaacttgaacaa

SEQ ID NO: 53784 - DNA, 20 bp, synthetic construct
  source 1..20: mol_type = other DNA
aaaaaaaaaaaacttgaaca

SEQ ID NO: 53785 - DNA, 20 bp, synthetic construct
  source 1..20: mol_type = other DNA
aaaaaaaaaaaaacttgaac

SEQ ID NO: 53786 - DNA, 20 bp, synthetic construct
  source 1..20: mol_type = other DNA
aaaaaaaaaaaaaacttgaa

SEQ ID NO: 53787 - DNA, 20 bp, synthetic construct
  source 1..20: mol_type = other DNA
aaaaaaaaaaaaaaacttga

SEQ ID NO: 53788 - DNA, 20 bp, synthetic construct
  source 1..20: mol_type = other DNA
aaaaaaaaaaaaaaaacttg

SEQ ID NO: 53789 - DNA, 20 bp, synthetic construct
  source 1..20: mol_type = other DNA
aaaaaaaaaaaaaaaaactt

SEQ ID NO: 53790 - DNA, 20 bp, synthetic construct
  source 1..20: mol_type = other DNA
aaaaaaaaaaaaaaaaaact

SEQ ID NO: 53791 - DNA, 20 bp, synthetic construct
  source 1..20: mol_type = other DNA
taaaaaaaaaaaaaaaaaac

SEQ ID NO: 53792 - DNA, 20 bp, synthetic construct
  source 1..20: mol_type = other DNA
ttaaaaaaaaaaaaaaaaaa

SEQ ID NO: 53793 - DNA, 20 bp, synthetic construct
  source 1..20: mol_type = other DNA
attaaaaaaaaaaaaaaaaa

SEQ ID NO: 53794 - DNA, 20 bp, synthetic construct
  source 1..20: mol_type = other DNA
gattaaaaaaaaaaaaaaaa

SEQ ID NO: 53795 - DNA, 20 bp, synthetic construct
  source 1..20: mol_type = other DNA
agattaaaaaaaaaaaaaaa

SEQ ID NO: 53796 - DNA, 20 bp, synthetic construct
  source 1..20: mol_type = other DNA
aagattaaaaaaaaaaaaaa

SEQ ID NO: 53797 - DNA, 20 bp, synthetic construct
  source 1..20: mol_type = other DNA
aaagattaaaaaaaaaaaaa

SEQ ID NO: 53798 - DNA, 20 bp, synthetic construct
  source 1..20: mol_type = other DNA
caaagattaaaaaaaaaaaa

SEQ ID NO: 53799 - DNA, 20 bp, synthetic construct
  source 1..20: mol_type = other DNA
ccaaagattaaaaaaaaaaa

SEQ ID NO: 53800 - DNA, 20 bp, synthetic construct
  source 1..20: mol_type = other DNA
gccaaagattaaaaaaaaaa

SEQ ID NO: 53801 - DNA, 20 bp, synthetic construct
  source 1..20: mol_type = other DNA
agccaaagattaaaaaaaaa

SEQ ID NO: 53802 - DNA, 20 bp, synthetic construct
  source 1..20: mol_type = other DNA
aagccaaagattaaaaaaaa

SEQ ID NO: 53803 - DNA, 20 bp, synthetic construct
  source 1..20: mol_type = other DNA
aaagccaaagattaaaaaaa

SEQ ID NO: 53804 - DNA, 20 bp, synthetic construct
  source 1..20: mol_type = other DNA
taaagccaaagattaaaaaa

SEQ ID NO: 53805 - DNA, 20 bp, synthetic construct
  source 1..20: mol_type = other DNA
ataaagccaaagattaaaaa

SEQ ID NO: 53806 - DNA, 20 bp, synthetic construct
  source 1..20: mol_type = other DNA
aataaagccaaagattaaaa

SEQ ID NO: 53807 - DNA, 20 bp, synthetic construct
  source 1..20: mol_type = other DNA
aaataaagccaaagattaaa

SEQ ID NO: 53808 - DNA, 20 bp, synthetic construct
  source 1..20: mol_type = other DNA
aaaataaagccaaagattaa

SEQ ID NO: 53809 - DNA, 20 bp, synthetic construct
  source 1..20: mol_type = other DNA
aaaaataaagccaaagatta

SEQ ID NO: 53810 - DNA, 20 bp, synthetic construct
  source 1..20: mol_type = other DNA
caaaaataaagccaaagatt

SEQ ID NO: 53811 - DNA, 20 bp, synthetic construct
  source 1..20: mol_type = other DNA
ccaaaaataaagccaaagat

SEQ ID NO: 53812 - DNA, 20 bp, synthetic construct
  source 1..20: mol_type = other DNA
cccaaaaataaagccaaaga

SEQ ID NO: 53813 - DNA, 20 bp, synthetic construct
  source 1..20: mol_type = other DNA
ccccaaaaataaagccaaag

SEQ ID NO: 53814 - DNA, 20 bp, synthetic construct
  source 1..20: mol_type = other DNA
tccccaaaaataaagccaaa

SEQ ID NO: 53815 - DNA, 20 bp, synthetic construct
  source 1..20: mol_type = other DNA
ttccccaaaaataaagccaa

SEQ ID NO: 53816 - DNA, 20 bp, synthetic construct
  source 1..20: mol_type = other DNA
tttccccaaaaataaagcca

SEQ ID NO: 53817 - DNA, 20 bp, synthetic construct
  source 1..20: mol_type = other DNA
gtttccccaaaaataaagcc

SEQ ID NO: 53818 - DNA, 20 bp, synthetic construct
  source 1..20: mol_type = other DNA
ggtttccccaaaaataaagc

SEQ ID NO: 53819 - DNA, 20 bp, synthetic construct
  source 1..20: mol_type = other DNA
aggtttccccaaaaataaag

SEQ ID NO: 53820 - DNA, 20 bp, synthetic construct
  source 1..20: mol_type = other DNA
aaggtttccccaaaaataaa

SEQ ID NO: 53821 - DNA, 20 bp, synthetic construct
  source 1..20: mol_type = other DNA
aaaggtttccccaaaaataa

SEQ ID NO: 53822 - DNA, 20 bp, synthetic construct
  source 1..20: mol_type = other DNA
aaaaggtttccccaaaaata

SEQ ID NO: 53823 - DNA, 20 bp, synthetic construct
  source 1..20: mol_type = other DNA
aaaaaggtttccccaaaaat

SEQ ID NO: 53824 - DNA, 20 bp, synthetic construct
  source 1..20: mol_type = other DNA
aaaaaaggtttccccaaaaa

SEQ ID NO: 53825 - DNA, 20 bp, synthetic construct
  source 1..20: mol_type = other DNA
aaaaaaaggtttccccaaaa

SEQ ID NO: 53826 - DNA, 20 bp, synthetic construct
  source 1..20: mol_type = other DNA
aaaaaaaaggtttccccaaa

SEQ ID NO: 53827 - DNA, 20 bp, synthetic construct
  source 1..20: mol_type = other DNA
gaaaaaaaaggtttccccaa

SEQ ID NO: 53828 - DNA, 20 bp, synthetic construct
  source 1..20: mol_type = other DNA
agaaaaaaaaggtttcccca

SEQ ID NO: 53829 - DNA, 20 bp, synthetic construct
  source 1..20: mol_type = other DNA
aagaaaaaaaaggtttcccc

SEQ ID NO: 53830 - DNA, 20 bp, synthetic construct
  source 1..20: mol_type = other DNA
aaagaaaaaaaaggtttccc

SEQ ID NO: 53831 - DNA, 20 bp, synthetic construct
  source 1..20: mol_type = other DNA
aaaagaaaaaaaaggtttcc

SEQ ID NO: 53832 - DNA, 20 bp, synthetic construct
  source 1..20: mol_type = other DNA
aaaaagaaaaaaaaggtttc

SEQ ID NO: 53833 - DNA, 20 bp, synthetic construct
  source 1..20: mol_type = other DNA
aaaaaagaaaaaaaaggttt

SEQ ID NO: 53834 - DNA, 20 bp, synthetic construct
  source 1..20: mol_type = other DNA
caaaaaagaaaaaaaaggtt

SEQ ID NO: 53835 - DNA, 20 bp, synthetic construct
  source 1..20: mol_type = other DNA
acaaaaaagaaaaaaaaggt

SEQ ID NO: 53836 - DNA, 20 bp, synthetic construct
  source 1..20: mol_type = other DNA
aacaaaaaagaaaaaaaagg

SEQ ID NO: 53837 - DNA, 20 bp, synthetic construct
  source 1..20: mol_type = other DNA
aaacaaaaaagaaaaaaaag

SEQ ID NO: 53838 - DNA, 20 bp, synthetic construct
  source 1..20: mol_type = other DNA
aaaacaaaaaagaaaaaaaa

SEQ ID NO: 53839 - DNA, 20 bp, synthetic construct
  source 1..20: mol_type = other DNA
gaaaacaaaaaagaaaaaaa

SEQ ID NO: 53840 - DNA, 20 bp, synthetic construct
  source 1..20: mol_type = other DNA
ggaaaacaaaaaagaaaaaa

SEQ ID NO: 53841 - DNA, 20 bp, synthetic construct
  source 1..20: mol_type = other DNA
aggaaaacaaaaaagaaaaa

SEQ ID NO: 53842 - DNA, 20 bp, synthetic construct
  source 1..20: mol_type = other DNA
aaggaaaacaaaaaagaaaa

SEQ ID NO: 53843 - DNA, 20 bp, synthetic construct
  source 1..20: mol_type = other DNA
caaggaaaacaaaaaagaaa

SEQ ID NO: 53844 - DNA, 20 bp, synthetic construct
  source 1..20: mol_type = other DNA
ccaaggaaaacaaaaaagaa

SEQ ID NO: 53845 - DNA, 20 bp, synthetic construct
  source 1..20: mol_type = other DNA
cccaaggaaaacaaaaaaga

SEQ ID NO: 53846 - DNA, 20 bp, synthetic construct
  source 1..20: mol_type = other DNA
tcccaaggaaaacaaaaaag

SEQ ID NO: 53847 - DNA, 20 bp, synthetic construct
  source 1..20: mol_type = other DNA
gtcccaaggaaaacaaaaaa

SEQ ID NO: 53848 - DNA, 20 bp, synthetic construct
  source 1..20: mol_type = other DNA
cgtcccaaggaaaacaaaaa

SEQ ID NO: 53849 - DNA, 20 bp, synthetic construct
  source 1..20: mol_type = other DNA
ccgtcccaaggaaaacaaaa

SEQ ID NO: 53850 - DNA, 20 bp, synthetic construct
  source 1..20: mol_type = other DNA
tccgtcccaaggaaaacaaa

SEQ ID NO: 53851 - DNA, 20 bp, synthetic construct
  source 1..20: mol_type = other DNA
ctccgtcccaaggaaaacaa

SEQ ID NO: 53852 - DNA, 20 bp, synthetic construct
  source 1..20: mol_type = other DNA
actccgtcccaaggaaaaca

SEQ ID NO: 53853 - DNA, 20 bp, synthetic construct
  source 1..20: mol_type = other DNA
aactccgtcccaaggaaaac

SEQ ID NO: 53854 - DNA, 20 bp, synthetic construct
  source 1..20: mol_type = other DNA
aaactccgtcccaaggaaaa

SEQ ID NO: 53855 - DNA, 20 bp, synthetic construct
  source 1..20: mol_type = other DNA
aaaactccgtcccaaggaaa

SEQ ID NO: 53856 - DNA, 20 bp, synthetic construct
  source 1..20: mol_type = other DNA
caaaactccgtcccaaggaa

SEQ ID NO: 53857 - DNA, 20 bp, synthetic construct
  source 1..20: mol_type = other DNA
gcaaaactccgtcccaagga

SEQ ID NO: 53858 - DNA, 20 bp, synthetic construct
  source 1..20: mol_type = other DNA
agcaaaactccgtcccaagg

SEQ ID NO: 53859 - DNA, 20 bp, synthetic construct
  source 1..20: mol_type = other DNA
gagcaaaactccgtcccaag

SEQ ID NO: 53860 - DNA, 20 bp, synthetic construct
  source 1..20: mol_type = other DNA
agagcaaaactccgtcccaa

SEQ ID NO: 53861 - DNA, 20 bp, synthetic construct
  source 1..20: mol_type = other DNA
aagagcaaaactccgtccca

SEQ ID NO: 53862 - DNA, 20 bp, synthetic construct
  source 1..20: mol_type = other DNA
caagagcaaaactccgtccc

SEQ ID NO: 53863 - DNA, 20 bp, synthetic construct
  source 1..20: mol_type = other DNA
acaagagcaaaactccgtcc

SEQ ID NO: 53864 - DNA, 20 bp, synthetic construct
  source 1..20: mol_type = other DNA
gacaagagcaaaactccgtc

SEQ ID NO: 53865 - DNA, 20 bp, synthetic construct
  source 1..20: mol_type = other DNA
cgacaagagcaaaactccgt

SEQ ID NO: 53866 - DNA, 20 bp, synthetic construct
  source 1..20: mol_type = other DNA
gcgacaagagcaaaactccg

SEQ ID NO: 53867 - DNA, 20 bp, synthetic construct
  source 1..20: mol_type = other DNA
ggcgacaagagcaaaactcc

SEQ ID NO: 53868 - DNA, 20 bp, synthetic construct
  source 1..20: mol_type = other DNA
gggcgacaagagcaaaactc

SEQ ID NO: 53869 - DNA, 20 bp, synthetic construct
  source 1..20: mol_type = other DNA
tgggcgacaagagcaaaact

SEQ ID NO: 53870 - DNA, 20 bp, synthetic construct
  source 1..20: mol_type = other DNA
ctgggcgacaagagcaaaac

SEQ ID NO: 53871 - DNA, 20 bp, synthetic construct
  source 1..20: mol_type = other DNA
cctgggcgacaagagcaaaa

SEQ ID NO: 53872 - DNA, 20 bp, synthetic construct
  source 1..20: mol_type = other DNA
gcctgggcgacaagagcaaa

SEQ ID NO: 53873 - DNA, 20 bp, synthetic construct
  source 1..20: mol_type = other DNA
agcctgggcgacaagagcaa

SEQ ID NO: 53874 - DNA, 20 bp, synthetic construct
  source 1..20: mol_type = other DNA
cagcctgggcgacaagagca

SEQ ID NO: 53875 - DNA, 20 bp, synthetic construct
  source 1..20: mol_type = other DNA
ccagcctgggcgacaagagc

SEQ ID NO: 53876 - DNA, 20 bp, synthetic construct
  source 1..20: mol_type = other DNA
tccagcctgggcgacaagag

SEQ ID NO: 53877 - DNA, 20 bp, synthetic construct
  source 1..20: mol_type = other DNA
ctccagcctgggcgacaaga

SEQ ID NO: 53878 - DNA, 20 bp, synthetic construct
  source 1..20: mol_type = other DNA
actccagcctgggcgacaag

SEQ ID NO: 53879 - DNA, 20 bp, synthetic construct
  source 1..20: mol_type = other DNA
cactccagcctgggcgacaa

SEQ ID NO: 53880 - DNA, 20 bp, synthetic construct
  source 1..20: mol_type = other DNA
gcactccagcctgggcgaca

SEQ ID NO: 53881 - DNA, 20 bp, synthetic construct
  source 1..20: mol_type = other DNA
tgcactccagcctgggcgac

SEQ ID NO: 53882 - DNA, 20 bp, synthetic construct
  source 1..20: mol_type = other DNA
ttgcactccagcctgggcga

SEQ ID NO: 53883 - DNA, 20 bp, synthetic construct
  source 1..20: mol_type = other DNA
attgcactccagcctgggcg

SEQ ID NO: 53884 - DNA, 20 bp, synthetic construct
  source 1..20: mol_type = other DNA
cattgcactccagcctgggc

SEQ ID NO: 53885 - DNA, 20 bp, synthetic construct
  source 1..20: mol_type = other DNA
ccattgcactccagcctggg

SEQ ID NO: 53886 - DNA, 20 bp, synthetic construct
  source 1..20: mol_type = other DNA
accattgcactccagcctgg

SEQ ID NO: 53887 - DNA, 20 bp, synthetic construct
  source 1..20: mol_type = other DNA
caccattgcactccagcctg

SEQ ID NO: 53888 - DNA, 20 bp, synthetic construct
  source 1..20: mol_type = other DNA
gcaccattgcactccagcct

SEQ ID NO: 53889 - DNA, 20 bp, synthetic construct
  source 1..20: mol_type = other DNA
tgcaccattgcactccagcc

SEQ ID NO: 53890 - DNA, 20 bp, synthetic construct
  source 1..20: mol_type = other DNA
ttgcaccattgcactccagc

SEQ ID NO: 53891 - DNA, 20 bp, synthetic construct
  source 1..20: mol_type = other DNA
attgcaccattgcactccag

SEQ ID NO: 53892 - DNA, 20 bp, synthetic construct
  source 1..20: mol_type = other DNA
gattgcaccattgcactcca

SEQ ID NO: 53893 - DNA, 20 bp, synthetic construct
  source 1..20: mol_type = other DNA
agattgcaccattgcactcc

SEQ ID NO: 53894 - DNA, 20 bp, synthetic construct
  source 1..20: mol_type = other DNA
aagattgcaccattgcactc

SEQ ID NO: 53895 - DNA, 20 bp, synthetic construct
  source 1..20: mol_type = other DNA
gaagattgcaccattgcact

SEQ ID NO: 53896 - DNA, 20 bp, synthetic construct
  source 1..20: mol_type = other DNA
cgaagattgcaccattgcac

SEQ ID NO: 53897 - DNA, 20 bp, synthetic construct
  source 1..20: mol_type = other DNA
gcgaagattgcaccattgca

SEQ ID NO: 53898 - DNA, 20 bp, synthetic construct
  source 1..20: mol_type = other DNA
agcgaagattgcaccattgc

SEQ ID NO: 53899 - DNA, 20 bp, synthetic construct
  source 1..20: mol_type = other DNA
gagcgaagattgcaccattg

SEQ ID NO: 53900 - DNA, 20 bp, synthetic construct
  source 1..20: mol_type = other DNA
tgagcgaagattgcaccatt

SEQ ID NO: 53901 - DNA, 20 bp, synthetic construct
  source 1..20: mol_type = other DNA
gtgagcgaagattgcaccat

SEQ ID NO: 53902 - DNA, 20 bp, synthetic construct
  source 1..20: mol_type = other DNA
agtgagcgaagattgcacca

SEQ ID NO: 53903 - DNA, 20 bp, synthetic construct
  source 1..20: mol_type = other DNA
cagtgagcgaagattgcacc

SEQ ID NO: 53904 - DNA, 20 bp, synthetic construct
  source 1..20: mol_type = other DNA
gcagtgagcgaagattgcac

SEQ ID NO: 53905 - DNA, 20 bp, synthetic construct
  source 1..20: mol_type = other DNA
tgcagtgagcgaagattgca

SEQ ID NO: 53906 - DNA, 20 bp, synthetic construct
  source 1..20: mol_type = other DNA
ttgcagtgagcgaagattgc

SEQ ID NO: 53907 - DNA, 20 bp, synthetic construct
  source 1..20: mol_type = other DNA
gttgcagtgagcgaagattg

SEQ ID NO: 53908 - DNA, 20 bp, synthetic construct
  source 1..20: mol_type = other DNA
ggttgcagtgagcgaagatt

SEQ ID NO: 53909 - DNA, 20 bp, synthetic construct
  source 1..20: mol_type = other DNA
aggttgcagtgagcgaagat

SEQ ID NO: 53910 - DNA, 20 bp, synthetic construct
  source 1..20: mol_type = other DNA
gaggttgcagtgagcgaaga

SEQ ID NO: 53911 - DNA, 20 bp, synthetic construct
  source 1..20: mol_type = other DNA
ggaggttgcagtgagcgaag

SEQ ID NO: 53912 - DNA, 20 bp, synthetic construct
  source 1..20: mol_type = other DNA
cggaggttgcagtgagcgaa

SEQ ID NO: 53913 - DNA, 20 bp, synthetic construct
  source 1..20: mol_type = other DNA
gcggaggttgcagtgagcga

SEQ ID NO: 53914 - DNA, 20 bp, synthetic construct
  source 1..20: mol_type = other DNA
ggcggaggttgcagtgagcg

SEQ ID NO: 53915 - DNA, 20 bp, synthetic construct
  source 1..20: mol_type = other DNA
aggcggaggttgcagtgagc

SEQ ID NO: 53916 - DNA, 20 bp, synthetic construct
  source 1..20: mol_type = other DNA
aaggcggaggttgcagtgag

SEQ ID NO: 53917 - DNA, 20 bp, synthetic construct
  source 1..20: mol_type = other DNA
gaaggcggaggttgcagtga

SEQ ID NO: 53918 - DNA, 20 bp, synthetic construct
  source 1..20: mol_type = other DNA
agaaggcggaggttgcagtg

SEQ ID NO: 53919 - DNA, 20 bp, synthetic construct
  source 1..20: mol_type = other DNA
cagaaggcggaggttgcagt

SEQ ID NO: 53920 - DNA, 20 bp, synthetic construct
  source 1..20: mol_type = other DNA
ccagaaggcggaggttgcag

SEQ ID NO: 53921 - DNA, 20 bp, synthetic construct
  source 1..20: mol_type = other DNA
cccagaaggcggaggttgca

SEQ ID NO: 53922 - DNA, 20 bp, synthetic construct
  source 1..20: mol_type = other DNA
acccagaaggcggaggttgc

SEQ ID NO: 53923 - DNA, 20 bp, synthetic construct
  source 1..20: mol_type = other DNA
aacccagaaggcggaggttg

SEQ ID NO: 53924 - DNA, 20 bp, synthetic construct
  source 1..20: mol_type = other DNA
gaacccagaaggcggaggtt

SEQ ID NO: 53925 - DNA, 20 bp, synthetic construct
  source 1..20: mol_type = other DNA
tgaacccagaaggcggaggt

SEQ ID NO: 53926 - DNA, 20 bp, synthetic construct
  source 1..20: mol_type = other DNA
ttgaacccagaaggcggagg

SEQ ID NO: 53927 - DNA, 20 bp, synthetic construct
  source 1..20: mol_type = other DNA
cttgaacccagaaggcggag

SEQ ID NO: 53928 - DNA, 20 bp, synthetic construct
  source 1..20: mol_type = other DNA
gcttgaacccagaaggcgga

SEQ ID NO: 53929 - DNA, 20 bp, synthetic construct
  source 1..20: mol_type = other DNA
cgcttgaacccagaaggcgg

SEQ ID NO: 53930 - DNA, 20 bp, synthetic construct
  source 1..20: mol_type = other DNA
tcgcttgaacccagaaggcg

SEQ ID NO: 53931 - DNA, 20 bp, synthetic construct
  source 1..20: mol_type = other DNA
atcgcttgaacccagaaggc

SEQ ID NO: 53932 - DNA, 20 bp, synthetic construct
  source 1..20: mol_type = other DNA
aatcgcttgaacccagaagg

SEQ ID NO: 53933 - DNA, 20 bp, synthetic construct
  source 1..20: mol_type = other DNA
gaatcgcttgaacccagaag

SEQ ID NO: 53934 - DNA, 20 bp, synthetic construct
  source 1..20: mol_type = other DNA
agaatcgcttgaacccagaa

SEQ ID NO: 53935 - DNA, 20 bp, synthetic construct
  source 1..20: mol_type = other DNA
gagaatcgcttgaacccaga

SEQ ID NO: 53936 - DNA, 20 bp, synthetic construct
  source 1..20: mol_type = other DNA
ggagaatcgcttgaacccag

SEQ ID NO: 53937 - DNA, 20 bp, synthetic construct
  source 1..20: mol_type = other DNA
aggagaatcgcttgaaccca

SEQ ID NO: 53938 - DNA, 20 bp, synthetic construct
  source 1..20: mol_type = other DNA
taggagaatcgcttgaaccc

SEQ ID NO: 53939 - DNA, 20 bp, synthetic construct
  source 1..20: mol_type = other DNA
ataggagaatcgcttgaacc

SEQ ID NO: 53940 - DNA, 20 bp, synthetic construct
  source 1..20: mol_type = other DNA
gataggagaatcgcttgaac

SEQ ID NO: 53941 - DNA, 20 bp, synthetic construct
  source 1..20: mol_type = other DNA
agataggagaatcgcttgaa

SEQ ID NO: 53942 - DNA, 20 bp, synthetic construct
  source 1..20: mol_type = other DNA
gagataggagaatcgcttga

SEQ ID NO: 53943 - DNA, 20 bp, synthetic construct
  source 1..20: mol_type = other DNA
tgagataggagaatcgcttg

SEQ ID NO: 53944 - DNA, 20 bp, synthetic construct
  source 1..20: mol_type = other DNA
ctgagataggagaatcgctt

SEQ ID NO: 53945 - DNA, 20 bp, synthetic construct
  source 1..20: mol_type = other DNA
gctgagataggagaatcgct

SEQ ID NO: 53946 - DNA, 20 bp, synthetic construct
  source 1..20: mol_type = other DNA
ggctgagataggagaatcgc

SEQ ID NO: 53947 - DNA, 20 bp, synthetic construct
  source 1..20: mol_type = other DNA
aggctgagataggagaatcg

SEQ ID NO: 53948 - DNA, 20 bp, synthetic construct
  source 1..20: mol_type = other DNA
gaggctgagataggagaatc

SEQ ID NO: 53949 - DNA, 20 bp, synthetic construct
  source 1..20: mol_type = other DNA
ggaggctgagataggagaat

SEQ ID NO: 53950 - DNA, 20 bp, synthetic construct
  source 1..20: mol_type = other DNA
gggaggctgagataggagaa

SEQ ID NO: 53951 - DNA, 20 bp, synthetic construct
  source 1..20: mol_type = other DNA
cgggaggctgagataggaga

SEQ ID NO: 53952 - DNA, 20 bp, synthetic construct
  source 1..20: mol_type = other DNA
tcgggaggctgagataggag

SEQ ID NO: 53953 - DNA, 20 bp, synthetic construct
  source 1..20: mol_type = other DNA
ctcgggaggctgagatagga

SEQ ID NO: 53954 - DNA, 20 bp, synthetic construct
  source 1..20: mol_type = other DNA
actcgggaggctgagatagg

SEQ ID NO: 53955 - DNA, 20 bp, synthetic construct
  source 1..20: mol_type = other DNA
tactcgggaggctgagatag

SEQ ID NO: 53956 - DNA, 20 bp, synthetic construct
  source 1..20: mol_type = other DNA
ctactcgggaggctgagata

SEQ ID NO: 53957 - DNA, 20 bp, synthetic construct
  source 1..20: mol_type = other DNA
gctactcgggaggctgagat

SEQ ID NO: 53958 - DNA, 20 bp, synthetic construct
  source 1..20: mol_type = other DNA
agctactcgggaggctgaga

SEQ ID NO: 53959 - DNA, 20 bp, synthetic construct
  source 1..20: mol_type = other DNA
cagctactcgggaggctgag

SEQ ID NO: 53960 - DNA, 20 bp, synthetic construct
  source 1..20: mol_type = other DNA
ccagctactcgggaggctga

SEQ ID NO: 53961 - DNA, 20 bp, synthetic construct
  source 1..20: mol_type = other DNA
cccagctactcgggaggctg

SEQ ID NO: 53962 - DNA, 20 bp, synthetic construct
  source 1..20: mol_type = other DNA
tcccagctactcgggaggct

SEQ ID NO: 53963 - DNA, 20 bp, synthetic construct
  source 1..20: mol_type = other DNA
atcccagctactcgggaggc

SEQ ID NO: 53964 - DNA, 20 bp, synthetic construct
  source 1..20: mol_type = other DNA
aatcccagctactcgggagg

SEQ ID NO: 53965 - DNA, 20 bp, synthetic construct
  source 1..20: mol_type = other DNA
taatcccagctactcgggag

SEQ ID NO: 53966 - DNA, 20 bp, synthetic construct
  source 1..20: mol_type = other DNA
gtaatcccagctactcggga

SEQ ID NO: 53967 - DNA, 20 bp, synthetic construct
  source 1..20: mol_type = other DNA
tgtaatcccagctactcggg

SEQ ID NO: 53968 - DNA, 20 bp, synthetic construct
  source 1..20: mol_type = other DNA
ctgtaatcccagctactcgg

SEQ ID NO: 53969 - DNA, 20 bp, synthetic construct
  source 1..20: mol_type = other DNA
cctgtaatcccagctactcg

SEQ ID NO: 53970 - DNA, 20 bp, synthetic construct
  source 1..20: mol_type = other DNA
gcctgtaatcccagctactc

SEQ ID NO: 53971 - DNA, 20 bp, synthetic construct
  source 1..20: mol_type = other DNA
tgcctgtaatcccagctact

SEQ ID NO: 53972 - DNA, 20 bp, synthetic construct
  source 1..20: mol_type = other DNA
atgcctgtaatcccagctac

SEQ ID NO: 53973 - DNA, 20 bp, synthetic construct
  source 1..20: mol_type = other DNA
catgcctgtaatcccagcta

SEQ ID NO: 53974 - DNA, 20 bp, synthetic construct
  source 1..20: mol_type = other DNA
acatgcctgtaatcccagct

SEQ ID NO: 53975 - DNA, 20 bp, synthetic construct
  source 1..20: mol_type = other DNA
cacatgcctgtaatcccagc

SEQ ID NO: 53976 - DNA, 20 bp, synthetic construct
  source 1..20: mol_type = other DNA
gcacatgcctgtaatcccag

SEQ ID NO: 53977 - DNA, 20 bp, synthetic construct
  source 1..20: mol_type = other DNA
ggcacatgcctgtaatccca

SEQ ID NO: 53978 - DNA, 20 bp, synthetic construct
  source 1..20: mol_type = other DNA
tggcacatgcctgtaatccc

SEQ ID NO: 53979 - DNA, 20 bp, synthetic construct
  source 1..20: mol_type = other DNA
gtggcacatgcctgtaatcc

SEQ ID NO: 53980 - DNA, 20 bp, synthetic construct
  source 1..20: mol_type = other DNA
ggtggcacatgcctgtaatc

SEQ ID NO: 53981 - DNA, 20 bp, synthetic construct
  source 1..20: mol_type = other DNA
tggtggcacatgcctgtaat

SEQ ID NO: 53982 - DNA, 20 bp, synthetic construct
  source 1..20: mol_type = other DNA
atggtggcacatgcctgtaa

SEQ ID NO: 53983 - DNA, 20 bp, synthetic construct
  source 1..20: mol_type = other DNA
catggtggcacatgcctgta

SEQ ID NO: 53984 - DNA, 20 bp, synthetic construct
  source 1..20: mol_type = other DNA
gcatggtggcacatgcctgt

SEQ ID NO: 53985 - DNA, 20 bp, synthetic construct
  source 1..20: mol_type = other DNA
ggcatggtggcacatgcctg

SEQ ID NO: 53986 - DNA, 20 bp, synthetic construct
  source 1..20: mol_type = other DNA
gggcatggtggcacatgcct

SEQ ID NO: 53987 - DNA, 20 bp, synthetic construct
  source 1..20: mol_type = other DNA
cgggcatggtggcacatgcc

SEQ ID NO: 53988 - DNA, 20 bp, synthetic construct
  source 1..20: mol_type = other DNA
ccgggcatggtggcacatgc

SEQ ID NO: 53989 - DNA, 20 bp, synthetic construct
  source 1..20: mol_type = other DNA
gccgggcatggtggcacatg

SEQ ID NO: 53990 - DNA, 20 bp, synthetic construct
  source 1..20: mol_type = other DNA
agccgggcatggtggcacat

SEQ ID NO: 53991 - DNA, 20 bp, synthetic construct
  source 1..20: mol_type = other DNA
tagccgggcatggtggcaca

SEQ ID NO: 53992 - DNA, 20 bp, synthetic construct
  source 1..20: mol_type = other DNA
ttagccgggcatggtggcac

SEQ ID NO: 53993 - DNA, 20 bp, synthetic construct
  source 1..20: mol_type = other DNA
gttagccgggcatggtggca

SEQ ID NO: 53994 - DNA, 20 bp, synthetic construct
  source 1..20: mol_type = other DNA
agttagccgggcatggtggc

SEQ ID NO: 53995 - DNA, 20 bp, synthetic construct
  source 1..20: mol_type = other DNA
aagttagccgggcatggtgg

SEQ ID NO: 53996 - DNA, 20 bp, synthetic construct
  source 1..20: mol_type = other DNA
aaagttagccgggcatggtg

SEQ ID NO: 53997 - DNA, 20 bp, synthetic construct
  source 1..20: mol_type = other DNA
caaagttagccgggcatggt

SEQ ID NO: 53998 - DNA, 20 bp, synthetic construct
  source 1..20: mol_type = other DNA
acaaagttagccgggcatgg

SEQ ID NO: 53999 - DNA, 20 bp, synthetic construct
  source 1..20: mol_type = other DNA
tacaaagttagccgggcatg

SEQ ID NO: 54000 - DNA, 20 bp, synthetic construct
  source 1..20: mol_type = other DNA
atacaaagttagccgggcat

SEQ ID NO: 54001 - DNA, 20 bp, synthetic construct
  source 1..20: mol_type = other DNA
aatacaaagttagccgggca

SEQ ID NO: 54002 - DNA, 20 bp, synthetic construct
  source 1..20: mol_type = other DNA
aaatacaaagttagccgggc

SEQ ID NO: 54003 - DNA, 20 bp, synthetic construct
  source 1..20: mol_type = other DNA
aaaatacaaagttagccggg

SEQ ID NO: 54004 - DNA, 20 bp, synthetic construct
  source 1..20: mol_type = other DNA
aaaaatacaaagttagccgg

SEQ ID NO: 54005 - DNA, 20 bp, synthetic construct
  source 1..20: mol_type = other DNA
taaaaatacaaagttagccg

SEQ ID NO: 54006 - DNA, 20 bp, synthetic construct
  source 1..20: mol_type = other DNA
ctaaaaatacaaagttagcc

SEQ ID NO: 54007 - DNA, 20 bp, synthetic construct
  source 1..20: mol_type = other DNA
actaaaaatacaaagttagc

SEQ ID NO: 54008 - DNA, 20 bp, synthetic construct
  source 1..20: mol_type = other DNA
tactaaaaatacaaagttag

SEQ ID NO: 54009 - DNA, 20 bp, synthetic construct
  source 1..20: mol_type = other DNA
ctactaaaaatacaaagtta

SEQ ID NO: 54010 - DNA, 20 bp, synthetic construct
  source 1..20: mol_type = other DNA
tctactaaaaatacaaagtt

SEQ ID NO: 54011 - DNA, 20 bp, synthetic construct
  source 1..20: mol_type = other DNA
ctctactaaaaatacaaagt

SEQ ID NO: 54012 - DNA, 20 bp, synthetic construct
  source 1..20: mol_type = other DNA
tctctactaaaaatacaaag

SEQ ID NO: 54013 - DNA, 20 bp, synthetic construct
  source 1..20: mol_type = other DNA
gtctctactaaaaatacaaa

SEQ ID NO: 54014 - DNA, 20 bp, synthetic construct
  source 1..20: mol_type = other DNA
agtctctactaaaaatacaa

SEQ ID NO: 54015 - DNA, 20 bp, synthetic construct
  source 1..20: mol_type = other DNA
cagtctctactaaaaataca

SEQ ID NO: 54016 - DNA, 20 bp, synthetic construct
  source 1..20: mol_type = other DNA
ccagtctctactaaaaatac

SEQ ID NO: 54017 - DNA, 20 bp, synthetic construct
  source 1..20: mol_type = other DNA
cccagtctctactaaaaata

SEQ ID NO: 54018 - DNA, 20 bp, synthetic construct
  source 1..20: mol_type = other DNA
acccagtctctactaaaaat

SEQ ID NO: 54019 - DNA, 20 bp, synthetic construct
  source 1..20: mol_type = other DNA
aacccagtctctactaaaaa

SEQ ID NO: 54020 - DNA, 20 bp, synthetic construct
  source 1..20: mol_type = other DNA
aaacccagtctctactaaaa

SEQ ID NO: 54021 - DNA, 20 bp, synthetic construct
  source 1..20: mol_type = other DNA
gaaacccagtctctactaaa

SEQ ID NO: 54022 - DNA, 20 bp, synthetic construct
  source 1..20: mol_type = other DNA
agaaacccagtctctactaa

SEQ ID NO: 54023 - DNA, 20 bp, synthetic construct
  source 1..20: mol_type = other DNA
gagaaacccagtctctacta

SEQ ID NO: 54024 - DNA, 20 bp, synthetic construct
  source 1..20: mol_type = other DNA
ggagaaacccagtctctact

SEQ ID NO: 54025 - DNA, 20 bp, synthetic construct
  source 1..20: mol_type = other DNA
tggagaaacccagtctctac

SEQ ID NO: 54026 - DNA, 20 bp, synthetic construct
  source 1..20: mol_type = other DNA
gtggagaaacccagtctcta

SEQ ID NO: 54027 - DNA, 20 bp, synthetic construct
  source 1..20: mol_type = other DNA
cgtggagaaacccagtctct

SEQ ID NO: 54028 - DNA, 20 bp, synthetic construct
  source 1..20: mol_type = other DNA
acgtggagaaacccagtctc

SEQ ID NO: 54029 - DNA, 20 bp, synthetic construct
  source 1..20: mol_type = other DNA
aacgtggagaaacccagtct

SEQ ID NO: 54030 - DNA, 20 bp, synthetic construct
  source 1..20: mol_type = other DNA
caacgtggagaaacccagtc

SEQ ID NO: 54031 - DNA, 20 bp, synthetic construct
  source 1..20: mol_type = other DNA
ccaacgtggagaaacccagt

SEQ ID NO: 54032 - DNA, 20 bp, synthetic construct
  source 1..20: mol_type = other DNA
accaacgtggagaaacccag

SEQ ID NO: 54033 - DNA, 20 bp, synthetic construct
  source 1..20: mol_type = other DNA
gaccaacgtggagaaaccca

SEQ ID NO: 54034 - DNA, 20 bp, synthetic construct
  source 1..20: mol_type = other DNA
tgaccaacgtggagaaaccc

SEQ ID NO: 54035 - DNA, 20 bp, synthetic construct
  source 1..20: mol_type = other DNA
ctgaccaacgtggagaaacc

SEQ ID NO: 54036 - DNA, 20 bp, synthetic construct
  source 1..20: mol_type = other DNA
cctgaccaacgtggagaaac

SEQ ID NO: 54037 - DNA, 20 bp, synthetic construct
  source 1..20: mol_type = other DNA
gcctgaccaacgtggagaaa

SEQ ID NO: 54038 - DNA, 20 bp, synthetic construct
  source 1..20: mol_type = other DNA
agcctgaccaacgtggagaa

SEQ ID NO: 54039 - DNA, 20 bp, synthetic construct
  source 1..20: mol_type = other DNA
cagcctgaccaacgtggaga

SEQ ID NO: 54040 - DNA, 20 bp, synthetic construct
  source 1..20: mol_type = other DNA
ccagcctgaccaacgtggag

SEQ ID NO: 54041 - DNA, 20 bp, synthetic construct
  source 1..20: mol_type = other DNA
accagcctgaccaacgtgga

SEQ ID NO: 54042 - DNA, 20 bp, synthetic construct
  source 1..20: mol_type = other DNA
gaccagcctgaccaacgtgg

SEQ ID NO: 54043 - DNA, 20 bp, synthetic construct
  source 1..20: mol_type = other DNA
agaccagcctgaccaacgtg

SEQ ID NO: 54044 - DNA, 20 bp, synthetic construct
  source 1..20: mol_type = other DNA
aagaccagcctgaccaacgt

SEQ ID NO: 54045 - DNA, 20 bp, synthetic construct
  source 1..20: mol_type = other DNA
caagaccagcctgaccaacg

SEQ ID NO: 54046 - DNA, 20 bp, synthetic construct
  source 1..20: mol_type = other DNA
tcaagaccagcctgaccaac

SEQ ID NO: 54047 - DNA, 20 bp, synthetic construct
  source 1..20: mol_type = other DNA
ttcaagaccagcctgaccaa

SEQ ID NO: 54048 - DNA, 20 bp, synthetic construct
  source 1..20: mol_type = other DNA
gttcaagaccagcctgacca

SEQ ID NO: 54049 - DNA, 20 bp, synthetic construct
  source 1..20: mol_type = other DNA
agttcaagaccagcctgacc

SEQ ID NO: 54050 - DNA, 20 bp, synthetic construct
  source 1..20: mol_type = other DNA
gagttcaagaccagcctgac

SEQ ID NO: 54051 - DNA, 20 bp, synthetic construct
  source 1..20: mol_type = other DNA
ggagttcaagaccagcctga

SEQ ID NO: 54052 - DNA, 20 bp, synthetic construct
  source 1..20: mol_type = other DNA
aggagttcaagaccagcctg

SEQ ID NO: 54053 - DNA, 20 bp, synthetic construct
  source 1..20: mol_type = other DNA
caggagttcaagaccagcct

SEQ ID NO: 54054 - DNA, 20 bp, synthetic construct
  source 1..20: mol_type = other DNA
tcaggagttcaagaccagcc

SEQ ID NO: 54055 - DNA, 20 bp, synthetic construct
  source 1..20: mol_type = other DNA
gtcaggagttcaagaccagc

SEQ ID NO: 54056 - DNA, 20 bp, synthetic construct
  source 1..20: mol_type = other DNA
ggtcaggagttcaagaccag

SEQ ID NO: 54057 - DNA, 20 bp, synthetic construct
  source 1..20: mol_type = other DNA
aggtcaggagttcaagacca

SEQ ID NO: 54058 - DNA, 20 bp, synthetic construct
  source 1..20: mol_type = other DNA
gaggtcaggagttcaagacc

SEQ ID NO: 54059 - DNA, 20 bp, synthetic construct
  source 1..20: mol_type = other DNA
tgaggtcaggagttcaagac

SEQ ID NO: 54060 - DNA, 20 bp, synthetic construct
  source 1..20: mol_type = other DNA
ctgaggtcaggagttcaaga

SEQ ID NO: 54061 - DNA, 20 bp, synthetic construct
  source 1..20: mol_type = other DNA
cctgaggtcaggagttcaag

SEQ ID NO: 54062 - DNA, 20 bp, synthetic construct
  source 1..20: mol_type = other DNA
acctgaggtcaggagttcaa

SEQ ID NO: 54063 - DNA, 20 bp, synthetic construct
  source 1..20: mol_type = other DNA
cacctgaggtcaggagttca

SEQ ID NO: 54064 - DNA, 20 bp, synthetic construct
  source 1..20: mol_type = other DNA
tcacctgaggtcaggagttc

SEQ ID NO: 54065 - DNA, 20 bp, synthetic construct
  source 1..20: mol_type = other DNA
atcacctgaggtcaggagtt

SEQ ID NO: 54066 - DNA, 20 bp, synthetic construct
  source 1..20: mol_type = other DNA
gatcacctgaggtcaggagt

SEQ ID NO: 54067 - DNA, 20 bp, synthetic construct
  source 1..20: mol_type = other DNA
ggatcacctgaggtcaggag

SEQ ID NO: 54068 - DNA, 20 bp, synthetic construct
  source 1..20: mol_type = other DNA
tggatcacctgaggtcagga

SEQ ID NO: 54069 - DNA, 20 bp, synthetic construct
  source 1..20: mol_type = other DNA
gtggatcacctgaggtcagg

SEQ ID NO: 54070 - DNA, 20 bp, synthetic construct
  source 1..20: mol_type = other DNA
ggtggatcacctgaggtcag

SEQ ID NO: 54071 - DNA, 20 bp, synthetic construct
  source 1..20: mol_type = other DNA
aggtggatcacctgaggtca

SEQ ID NO: 54072 - DNA, 20 bp, synthetic construct
  source 1..20: mol_type = other DNA
caggtggatcacctgaggtc

SEQ ID NO: 54073 - DNA, 20 bp, synthetic construct
  source 1..20: mol_type = other DNA
gcaggtggatcacctgaggt

SEQ ID NO: 54074 - DNA, 20 bp, synthetic construct
  source 1..20: mol_type = other DNA
ggcaggtggatcacctgagg

SEQ ID NO: 54075 - DNA, 20 bp, synthetic construct
  source 1..20: mol_type = other DNA
aggcaggtggatcacctgag

SEQ ID NO: 54076 - DNA, 20 bp, synthetic construct
  source 1..20: mol_type = other DNA
taggcaggtggatcacctga

SEQ ID NO: 54077 - DNA, 20 bp, synthetic construct
  source 1..20: mol_type = other DNA
ctaggcaggtggatcacctg

SEQ ID NO: 54078 - DNA, 20 bp, synthetic construct
  source 1..20: mol_type = other DNA
cctaggcaggtggatcacct

SEQ ID NO: 54079 - DNA, 20 bp, synthetic construct
  source 1..20: mol_type = other DNA
gcctaggcaggtggatcacc

SEQ ID NO: 54080 - DNA, 20 bp, synthetic construct
  source 1..20: mol_type = other DNA
ggcctaggcaggtggatcac

SEQ ID NO: 54081 - DNA, 20 bp, synthetic construct
  source 1..20: mol_type = other DNA
aggcctaggcaggtggatca

SEQ ID NO: 54082 - DNA, 20 bp, synthetic construct
  source 1..20: mol_type = other DNA
gaggcctaggcaggtggatc

SEQ ID NO: 54083 - DNA, 20 bp, synthetic construct
  source 1..20: mol_type = other DNA
ggaggcctaggcaggtggat

SEQ ID NO: 54084 - DNA, 20 bp, synthetic construct
  source 1..20: mol_type = other DNA
gggaggcctaggcaggtgga

SEQ ID NO: 54085 - DNA, 20 bp, synthetic construct
  source 1..20: mol_type = other DNA
tgggaggcctaggcaggtgg

SEQ ID NO: 54086 - DNA, 20 bp, synthetic construct
  source 1..20: mol_type = other DNA
ttgggaggcctaggcaggtg

SEQ ID NO: 54087 - DNA, 20 bp, synthetic construct
  source 1..20: mol_type = other DNA
tttgggaggcctaggcaggt

SEQ ID NO: 54088 - DNA, 20 bp, synthetic construct
  source 1..20: mol_type = other DNA
ctttgggaggcctaggcagg

SEQ ID NO: 54089 - DNA, 20 bp, synthetic construct
  source 1..20: mol_type = other DNA
actttgggaggcctaggcag

SEQ ID NO: 54090 - DNA, 20 bp, synthetic construct
  source 1..20: mol_type = other DNA
cactttgggaggcctaggca

SEQ ID NO: 54091 - DNA, 20 bp, synthetic construct
  source 1..20: mol_type = other DNA
gcactttgggaggcctaggc

SEQ ID NO: 54092 - DNA, 20 bp, synthetic construct
  source 1..20: mol_type = other DNA
agcactttgggaggcctagg

SEQ ID NO: 54093 - DNA, 20 bp, synthetic construct
  source 1..20: mol_type = other DNA
cagcactttgggaggcctag

SEQ ID NO: 54094 - DNA, 20 bp, synthetic construct
  source 1..20: mol_type = other DNA
ccagcactttgggaggccta

SEQ ID NO: 54095 - DNA, 20 bp, synthetic construct
  source 1..20: mol_type = other DNA
cccagcactttgggaggcct

SEQ ID NO: 54096 - DNA, 20 bp, synthetic construct
  source 1..20: mol_type = other DNA
tcccagcactttgggaggcc

SEQ ID NO: 54097 - DNA, 20 bp, synthetic construct
  source 1..20: mol_type = other DNA
atcccagcactttgggaggc

SEQ ID NO: 54098 - DNA, 20 bp, synthetic construct
  source 1..20: mol_type = other DNA
gatcccagcactttgggagg

SEQ ID NO: 54099 - DNA, 20 bp, synthetic construct
  source 1..20: mol_type = other DNA
tgatcccagcactttgggag

SEQ ID NO: 54100 - DNA, 20 bp, synthetic construct
  source 1..20: mol_type = other DNA
gtgatcccagcactttggga

SEQ ID NO: 54101 - DNA, 20 bp, synthetic construct
  source 1..20: mol_type = other DNA
tgtgatcccagcactttggg

SEQ ID NO: 54102 - DNA, 20 bp, synthetic construct
  source 1..20: mol_type = other DNA
ttgtgatcccagcactttgg

SEQ ID NO: 54103 - DNA, 20 bp, synthetic construct
  source 1..20: mol_type = other DNA
cttgtgatcccagcactttg

SEQ ID NO: 54104 - DNA, 20 bp, synthetic construct
  source 1..20: mol_type = other DNA
gcttgtgatcccagcacttt

SEQ ID NO: 54105 - DNA, 20 bp, synthetic construct
  source 1..20: mol_type = other DNA
cgcttgtgatcccagcactt

SEQ ID NO: 54106 - DNA, 20 bp, synthetic construct
  source 1..20: mol_type = other DNA
acgcttgtgatcccagcact

SEQ ID NO: 54107 - DNA, 20 bp, synthetic construct
  source 1..20: mol_type = other DNA
cacgcttgtgatcccagcac

SEQ ID NO: 54108 - DNA, 20 bp, synthetic construct
  source 1..20: mol_type = other DNA
tcacgcttgtgatcccagca

SEQ ID NO: 54109 - DNA, 20 bp, synthetic construct
  source 1..20: mol_type = other DNA
ctcacgcttgtgatcccagc

SEQ ID NO: 54110 - DNA, 20 bp, synthetic construct
  source 1..20: mol_type = other DNA
gctcacgcttgtgatcccag

SEQ ID NO: 54111 - DNA, 20 bp, synthetic construct
  source 1..20: mol_type = other DNA
ggctcacgcttgtgatccca

SEQ ID NO: 54112 - DNA, 20 bp, synthetic construct
  source 1..20: mol_type = other DNA
tggctcacgcttgtgatccc

SEQ ID NO: 54113 - DNA, 20 bp, synthetic construct
  source 1..20: mol_type = other DNA
gtggctcacgcttgtgatcc

SEQ ID NO: 54114 - DNA, 20 bp, synthetic construct
  source 1..20: mol_type = other DNA
ggtggctcacgcttgtgatc

SEQ ID NO: 54115 - DNA, 20 bp, synthetic construct
  source 1..20: mol_type = other DNA
cggtggctcacgcttgtgat

SEQ ID NO: 54116 - DNA, 20 bp, synthetic construct
  source 1..20: mol_type = other DNA
gcggtggctcacgcttgtga

SEQ ID NO: 54117 - DNA, 20 bp, synthetic construct
  source 1..20: mol_type = other DNA
cgcggtggctcacgcttgtg

SEQ ID NO: 54118 - DNA, 20 bp, synthetic construct
  source 1..20: mol_type = other DNA
gcgcggtggctcacgcttgt

SEQ ID NO: 54119 - DNA, 20 bp, synthetic construct
  source 1..20: mol_type = other DNA
ggcgcggtggctcacgcttg

SEQ ID NO: 54120 - DNA, 20 bp, synthetic construct
  source 1..20: mol_type = other DNA
gggcgcggtggctcacgctt

SEQ ID NO: 54121 - DNA, 20 bp, synthetic construct
  source 1..20: mol_type = other DNA
tgggcgcggtggctcacgct

SEQ ID NO: 54122 - DNA, 20 bp, synthetic construct
  source 1..20: mol_type = other DNA
ctgggcgcggtggctcacgc

SEQ ID NO: 54123 - DNA, 20 bp, synthetic construct
  source 1..20: mol_type = other DNA
gctgggcgcggtggctcacg

SEQ ID NO: 54124 - DNA, 20 bp, synthetic construct
  source 1..20: mol_type = other DNA
ggctgggcgcggtggctcac

SEQ ID NO: 54125 - DNA, 20 bp, synthetic construct
  source 1..20: mol_type = other DNA
tggctgggcgcggtggctca

SEQ ID NO: 54126 - DNA, 20 bp, synthetic construct
  source 1..20: mol_type = other DNA
ctggctgggcgcggtggctc

SEQ ID NO: 54127 - DNA, 20 bp, synthetic construct
  source 1..20: mol_type = other DNA
cctggctgggcgcggtggct

SEQ ID NO: 54128 - DNA, 20 bp, synthetic construct
  source 1..20: mol_type = other DNA
ccctggctgggcgcggtggc

SEQ ID NO: 54129 - DNA, 20 bp, synthetic construct
  source 1..20: mol_type = other DNA
tccctggctgggcgcggtgg

SEQ ID NO: 54130 - DNA, 20 bp, synthetic construct
  source 1..20: mol_type = other DNA
ttccctggctgggcgcggtg

SEQ ID NO: 54131 - DNA, 20 bp, synthetic construct
  source 1..20: mol_type = other DNA
tttccctggctgggcgcggt

SEQ ID NO: 54132 - DNA, 20 bp, synthetic construct
  source 1..20: mol_type = other DNA
gtttccctggctgggcgcgg

SEQ ID NO: 54133 - DNA, 20 bp, synthetic construct
  source 1..20: mol_type = other DNA
ggtttccctggctgggcgcg

SEQ ID NO: 54134 - DNA, 20 bp, synthetic construct
  source 1..20: mol_type = other DNA
aggtttccctggctgggcgc

SEQ ID NO: 54135 - DNA, 20 bp, synthetic construct
  source 1..20: mol_type = other DNA
aaggtttccctggctgggcg

SEQ ID NO: 54136 - DNA, 20 bp, synthetic construct
  source 1..20: mol_type = other DNA
aaaggtttccctggctgggc

SEQ ID NO: 54137 - DNA, 20 bp, synthetic construct
  source 1..20: mol_type = other DNA
taaaggtttccctggctggg

SEQ ID NO: 54138 - DNA, 20 bp, synthetic construct
  source 1..20: mol_type = other DNA
ataaaggtttccctggctgg

SEQ ID NO: 54139 - DNA, 20 bp, synthetic construct
  source 1..20: mol_type = other DNA
aataaaggtttccctggctg

SEQ ID NO: 54140 - DNA, 20 bp, synthetic construct
  source 1..20: mol_type = other DNA
aaataaaggtttccctggct

SEQ ID NO: 54141 - DNA, 20 bp, synthetic construct
  source 1..20: mol_type = other DNA
aaaataaaggtttccctggc

SEQ ID NO: 54142 - DNA, 20 bp, synthetic construct
  source 1..20: mol_type = other DNA
caaaataaaggtttccctgg

SEQ ID NO: 54143 - DNA, 20 bp, synthetic construct
  source 1..20: mol_type = other DNA
tcaaaataaaggtttccctg

SEQ ID NO: 54144 - DNA, 20 bp, synthetic construct
  source 1..20: mol_type = other DNA
ctcaaaataaaggtttccct

SEQ ID NO: 54145 - DNA, 20 bp, synthetic construct
  source 1..20: mol_type = other DNA
cctcaaaataaaggtttccc

SEQ ID NO: 54146 - DNA, 20 bp, synthetic construct
  source 1..20: mol_type = other DNA
gcctcaaaataaaggtttcc

SEQ ID NO: 54147 - DNA, 20 bp, synthetic construct
  source 1..20: mol_type = other DNA
cgcctcaaaataaaggtttc

SEQ ID NO: 54148 - DNA, 20 bp, synthetic construct
  source 1..20: mol_type = other DNA
ccgcctcaaaataaaggttt

SEQ ID NO: 54149 - DNA, 20 bp, synthetic construct
  source 1..20: mol_type = other DNA
tccgcctcaaaataaaggtt

SEQ ID NO: 54150 - DNA, 20 bp, synthetic construct
  source 1..20: mol_type = other DNA
ctccgcctcaaaataaaggt

SEQ ID NO: 54151 - DNA, 20 bp, synthetic construct
  source 1..20: mol_type = other DNA
actccgcctcaaaataaagg

SEQ ID NO: 54152 - DNA, 20 bp, synthetic construct
  source 1..20: mol_type = other DNA
gactccgcctcaaaataaag

SEQ ID NO: 54153 - DNA, 20 bp, synthetic construct
  source 1..20: mol_type = other DNA
agactccgcctcaaaataaa

SEQ ID NO: 54154 - DNA, 20 bp, synthetic construct
  source 1..20: mol_type = other DNA
gagactccgcctcaaaataa

SEQ ID NO: 54155 - DNA, 20 bp, synthetic construct
  source 1..20: mol_type = other DNA
cgagactccgcctcaaaata

SEQ ID NO: 54156 - DNA, 20 bp, synthetic construct
  source 1..20: mol_type = other DNA
gcgagactccgcctcaaaat

SEQ ID NO: 54157 - DNA, 20 bp, synthetic construct
  source 1..20: mol_type = other DNA
agcgagactccgcctcaaaa

SEQ ID NO: 54158 - DNA, 20 bp, synthetic construct
  source 1..20: mol_type = other DNA
gagcgagactccgcctcaaa

SEQ ID NO: 54159 - DNA, 20 bp, synthetic construct
  source 1..20: mol_type = other DNA
agagcgagactccgcctcaa

SEQ ID NO: 54160 - DNA, 20 bp, synthetic construct
  source 1..20: mol_type = other DNA
cagagcgagactccgcctca

SEQ ID NO: 54161 - DNA, 20 bp, synthetic construct
  source 1..20: mol_type = other DNA
acagagcgagactccgcctc

SEQ ID NO: 54162 - DNA, 20 bp, synthetic construct
  source 1..20: mol_type = other DNA
gacagagcgagactccgcct

SEQ ID NO: 54163 - DNA, 20 bp, synthetic construct
  source 1..20: mol_type = other DNA
tgacagagcgagactccgcc

SEQ ID NO: 54164 - DNA, 20 bp, synthetic construct
  source 1..20: mol_type = other DNA
gtgacagagcgagactccgc

SEQ ID NO: 54165 - DNA, 20 bp, synthetic construct
  source 1..20: mol_type = other DNA
ggtgacagagcgagactccg

SEQ ID NO: 54166 - DNA, 20 bp, synthetic construct
  source 1..20: mol_type = other DNA
gggtgacagagcgagactcc

SEQ ID NO: 54167 - DNA, 20 bp, synthetic construct
  source 1..20: mol_type = other DNA
tgggtgacagagcgagactc

SEQ ID NO: 54168 - DNA, 20 bp, synthetic construct
  source 1..20: mol_type = other DNA
ctgggtgacagagcgagact

SEQ ID NO: 54169 - DNA, 20 bp, synthetic construct
  source 1..20: mol_type = other DNA
cctgggtgacagagcgagac

SEQ ID NO: 54170 - DNA, 20 bp, synthetic construct
  source 1..20: mol_type = other DNA
gcctgggtgacagagcgaga

SEQ ID NO: 54171 - DNA, 20 bp, synthetic construct
  source 1..20: mol_type = other DNA
agcctgggtgacagagcgag

SEQ ID NO: 54172 - DNA, 20 bp, synthetic construct
  source 1..20: mol_type = other DNA
cagcctgggtgacagagcga

SEQ ID NO: 54173 - DNA, 20 bp, synthetic construct
  source 1..20: mol_type = other DNA
ccagcctgggtgacagagcg

SEQ ID NO: 54174 - DNA, 20 bp, synthetic construct
  source 1..20: mol_type = other DNA
tccagcctgggtgacagagc

SEQ ID NO: 54175 - DNA, 20 bp, synthetic construct
  source 1..20: mol_type = other DNA
ctccagcctgggtgacagag

SEQ ID NO: 54176 - DNA, 20 bp, synthetic construct
  source 1..20: mol_type = other DNA
actccagcctgggtgacaga

SEQ ID NO: 54177 - DNA, 20 bp, synthetic construct
  source 1..20: mol_type = other DNA
cactccagcctgggtgacag

SEQ ID NO: 54178 - DNA, 20 bp, synthetic construct
  source 1..20: mol_type = other DNA
gcactccagcctgggtgaca

SEQ ID NO: 54179 - DNA, 20 bp, synthetic construct
  source 1..20: mol_type = other DNA
tgcactccagcctgggtgac

SEQ ID NO: 54180 - DNA, 20 bp, synthetic construct
  source 1..20: mol_type = other DNA
ctgcactccagcctgggtga

SEQ ID NO: 54181 - DNA, 20 bp, synthetic construct
  source 1..20: mol_type = other DNA
actgcactccagcctgggtg

SEQ ID NO: 54182 - DNA, 20 bp, synthetic construct
  source 1..20: mol_type = other DNA
cactgcactccagcctgggt

SEQ ID NO: 54183 - DNA, 20 bp, synthetic construct
  source 1..20: mol_type = other DNA
ccactgcactccagcctggg

SEQ ID NO: 54184 - DNA, 20 bp, synthetic construct
  source 1..20: mol_type = other DNA
gccactgcactccagcctgg

SEQ ID NO: 54185 - DNA, 20 bp, synthetic construct
  source 1..20: mol_type = other DNA
cgccactgcactccagcctg

SEQ ID NO: 54186 - DNA, 20 bp, synthetic construct
  source 1..20: mol_type = other DNA
acgccactgcactccagcct

SEQ ID NO: 54187 - DNA, 20 bp, synthetic construct
  source 1..20: mol_type = other DNA
cacgccactgcactccagcc

SEQ ID NO: 54188 - DNA, 20 bp, synthetic construct
  source 1..20: mol_type = other DNA
tcacgccactgcactccagc

SEQ ID NO: 54189 - DNA, 20 bp, synthetic construct
  source 1..20: mol_type = other DNA
atcacgccactgcactccag

SEQ ID NO: 54190 - DNA, 20 bp, synthetic construct
  source 1..20: mol_type = other DNA
gatcacgccactgcactcca

SEQ ID NO: 54191 - DNA, 20 bp, synthetic construct
  source 1..20: mol_type = other DNA
agatcacgccactgcactcc

SEQ ID NO: 54192 - DNA, 20 bp, synthetic construct
  source 1..20: mol_type = other DNA
gagatcacgccactgcactc

SEQ ID NO: 54193 - DNA, 20 bp, synthetic construct
  source 1..20: mol_type = other DNA
tgagatcacgccactgcact

SEQ ID NO: 54194 - DNA, 20 bp, synthetic construct
  source 1..20: mol_type = other DNA
ctgagatcacgccactgcac

SEQ ID NO: 54195 - DNA, 20 bp, synthetic construct
  source 1..20: mol_type = other DNA
gctgagatcacgccactgca

SEQ ID NO: 54196 - DNA, 20 bp, synthetic construct
  source 1..20: mol_type = other DNA
agctgagatcacgccactgc

SEQ ID NO: 54197 - DNA, 20 bp, synthetic construct
  source 1..20: mol_type = other DNA
gagctgagatcacgccactg

SEQ ID NO: 54198 - DNA, 20 bp, synthetic construct
  source 1..20: mol_type = other DNA
tgagctgagatcacgccact

SEQ ID NO: 54199 - DNA, 20 bp, synthetic construct
  source 1..20: mol_type = other DNA
gtgagctgagatcacgccac

SEQ ID NO: 54200 - DNA, 20 bp, synthetic construct
  source 1..20: mol_type = other DNA
agtgagctgagatcacgcca

SEQ ID NO: 54201 - DNA, 20 bp, synthetic construct
  source 1..20: mol_type = other DNA
cagtgagctgagatcacgcc

SEQ ID NO: 54202 - DNA, 20 bp, synthetic construct
  source 1..20: mol_type = other DNA
gcagtgagctgagatcacgc

SEQ ID NO: 54203 - DNA, 20 bp, synthetic construct
  source 1..20: mol_type = other DNA
tgcagtgagctgagatcacg

SEQ ID NO: 54204 - DNA, 20 bp, synthetic construct
  source 1..20: mol_type = other DNA
ttgcagtgagctgagatcac

SEQ ID NO: 54205 - DNA, 20 bp, synthetic construct
  source 1..20: mol_type = other DNA
gttgcagtgagctgagatca

SEQ ID NO: 54206 - DNA, 20 bp, synthetic construct
  source 1..20: mol_type = other DNA
ggttgcagtgagctgagatc

SEQ ID NO: 54207 - DNA, 20 bp, synthetic construct
  source 1..20: mol_type = other DNA
aggttgcagtgagctgagat

SEQ ID NO: 54208 - DNA, 20 bp, synthetic construct
  source 1..20: mol_type = other DNA
gaggttgcagtgagctgaga

SEQ ID NO: 54209 - DNA, 20 bp, synthetic construct
  source 1..20: mol_type = other DNA
agaggttgcagtgagctgag

SEQ ID NO: 54210 - DNA, 20 bp, synthetic construct
  source 1..20: mol_type = other DNA
cagaggttgcagtgagctga

SEQ ID NO: 54211 - DNA, 20 bp, synthetic construct
  source 1..20: mol_type = other DNA
gcagaggttgcagtgagctg

SEQ ID NO: 54212 - DNA, 20 bp, synthetic construct
  source 1..20: mol_type = other DNA
agcagaggttgcagtgagct

SEQ ID NO: 54213 - DNA, 20 bp, synthetic construct
  source 1..20: mol_type = other DNA
aagcagaggttgcagtgagc

SEQ ID NO: 54214 - DNA, 20 bp, synthetic construct
  source 1..20: mol_type = other DNA
gaagcagaggttgcagtgag

SEQ ID NO: 54215 - DNA, 20 bp, synthetic construct
  source 1..20: mol_type = other DNA
ggaagcagaggttgcagtga

SEQ ID NO: 54216 - DNA, 20 bp, synthetic construct
  source 1..20: mol_type = other DNA
aggaagcagaggttgcagtg

SEQ ID NO: 54217 - DNA, 20 bp, synthetic construct
  source 1..20: mol_type = other DNA
taggaagcagaggttgcagt

SEQ ID NO: 54218 - DNA, 20 bp, synthetic construct
  source 1..20: mol_type = other DNA
ctaggaagcagaggttgcag

SEQ ID NO: 54219 - DNA, 20 bp, synthetic construct
  source 1..20: mol_type = other DNA
cctaggaagcagaggttgca

SEQ ID NO: 54220 - DNA, 20 bp, synthetic construct
  source 1..20: mol_type = other DNA
acctaggaagcagaggttgc

SEQ ID NO: 54221 - DNA, 20 bp, synthetic construct
  source 1..20: mol_type = other DNA
aacctaggaagcagaggttg

SEQ ID NO: 54222 - DNA, 20 bp, synthetic construct
  source 1..20: mol_type = other DNA
gaacctaggaagcagaggtt

SEQ ID NO: 54223 - DNA, 20 bp, synthetic construct
  source 1..20: mol_type = other DNA
tgaacctaggaagcagaggt

SEQ ID NO: 54224 - DNA, 20 bp, synthetic construct
  source 1..20: mol_type = other DNA
ttgaacctaggaagcagagg

SEQ ID NO: 54225 - DNA, 20 bp, synthetic construct
  source 1..20: mol_type = other DNA
cttgaacctaggaagcagag

SEQ ID NO: 54226 - DNA, 20 bp, synthetic construct
  source 1..20: mol_type = other DNA
gcttgaacctaggaagcaga

SEQ ID NO: 54227 - DNA, 20 bp, synthetic construct
  source 1..20: mol_type = other DNA
tgcttgaacctaggaagcag

SEQ ID NO: 54228 - DNA, 20 bp, synthetic construct
  source 1..20: mol_type = other DNA
ttgcttgaacctaggaagca

SEQ ID NO: 54229 - DNA, 20 bp, synthetic construct
  source 1..20: mol_type = other DNA
attgcttgaacctaggaagc

SEQ ID NO: 54230 - DNA, 20 bp, synthetic construct
  source 1..20: mol_type = other DNA
aattgcttgaacctaggaag

SEQ ID NO: 54231 - DNA, 20 bp, synthetic construct
  source 1..20: mol_type = other DNA
gaattgcttgaacctaggaa

SEQ ID NO: 54232 - DNA, 20 bp, synthetic construct
  source 1..20: mol_type = other DNA
agaattgcttgaacctagga

SEQ ID NO: 54233 - DNA, 20 bp, synthetic construct
  source 1..20: mol_type = other DNA
aagaattgcttgaacctagg

SEQ ID NO: 54234 - DNA, 20 bp, synthetic construct
  source 1..20: mol_type = other DNA
gaagaattgcttgaacctag

SEQ ID NO: 54235 - DNA, 20 bp, synthetic construct
  source 1..20: mol_type = other DNA
agaagaattgcttgaaccta

SEQ ID NO: 54236 - DNA, 20 bp, synthetic construct
  source 1..20: mol_type = other DNA
cagaagaattgcttgaacct

SEQ ID NO: 54237 - DNA, 20 bp, synthetic construct
  source 1..20: mol_type = other DNA
gcagaagaattgcttgaacc

SEQ ID NO: 54238 - DNA, 20 bp, synthetic construct
  source 1..20: mol_type = other DNA
ggcagaagaattgcttgaac

SEQ ID NO: 54239 - DNA, 20 bp, synthetic construct
  source 1..20: mol_type = other DNA
aggcagaagaattgcttgaa

SEQ ID NO: 54240 - DNA, 20 bp, synthetic construct
  source 1..20: mol_type = other DNA
taggcagaagaattgcttga

SEQ ID NO: 54241 - DNA, 20 bp, synthetic construct
  source 1..20: mol_type = other DNA
ttaggcagaagaattgcttg

SEQ ID NO: 54242 - DNA, 20 bp, synthetic construct
  source 1..20: mol_type = other DNA
cttaggcagaagaattgctt

SEQ ID NO: 54243 - DNA, 20 bp, synthetic construct
  source 1..20: mol_type = other DNA
gcttaggcagaagaattgct

SEQ ID NO: 54244 - DNA, 20 bp, synthetic construct
  source 1..20: mol_type = other DNA
ggcttaggcagaagaattgc

SEQ ID NO: 54245 - DNA, 20 bp, synthetic construct
  source 1..20: mol_type = other DNA
aggcttaggcagaagaattg

SEQ ID NO: 54246 - DNA, 20 bp, synthetic construct
  source 1..20: mol_type = other DNA
gaggcttaggcagaagaatt

SEQ ID NO: 54247 - DNA, 20 bp, synthetic construct
  source 1..20: mol_type = other DNA
ggaggcttaggcagaagaat

SEQ ID NO: 54248 - DNA, 20 bp, synthetic construct
  source 1..20: mol_type = other DNA
gggaggcttaggcagaagaa

SEQ ID NO: 54249 - DNA, 20 bp, synthetic construct
  source 1..20: mol_type = other DNA
cgggaggcttaggcagaaga

SEQ ID NO: 54250 - DNA, 20 bp, synthetic construct
  source 1..20: mol_type = other DNA
tcgggaggcttaggcagaag

SEQ ID NO: 54251 - DNA, 20 bp, synthetic construct
  source 1..20: mol_type = other DNA
ctcgggaggcttaggcagaa

SEQ ID NO: 54252 - DNA, 20 bp, synthetic construct
  source 1..20: mol_type = other DNA
cctcgggaggcttaggcaga

SEQ ID NO: 54253 - DNA, 20 bp, synthetic construct
  source 1..20: mol_type = other DNA
tcctcgggaggcttaggcag

SEQ ID NO: 54254 - DNA, 20 bp, synthetic construct
  source 1..20: mol_type = other DNA
ctcctcgggaggcttaggca

SEQ ID NO: 54255 - DNA, 20 bp, synthetic construct
  source 1..20: mol_type = other DNA
gctcctcgggaggcttaggc

SEQ ID NO: 54256 - DNA, 20 bp, synthetic construct
  source 1..20: mol_type = other DNA
agctcctcgggaggcttagg

SEQ ID NO: 54257 - DNA, 20 bp, synthetic construct
  source 1..20: mol_type = other DNA
cagctcctcgggaggcttag

SEQ ID NO: 54258 - DNA, 20 bp, synthetic construct
  source 1..20: mol_type = other DNA
ccagctcctcgggaggctta

SEQ ID NO: 54259 - DNA, 20 bp, synthetic construct
  source 1..20: mol_type = other DNA
cccagctcctcgggaggctt

SEQ ID NO: 54260 - DNA, 20 bp, synthetic construct
  source 1..20: mol_type = other DNA
tcccagctcctcgggaggct

SEQ ID NO: 54261 - DNA, 20 bp, synthetic construct
  source 1..20: mol_type = other DNA
atcccagctcctcgggaggc

SEQ ID NO: 54262 - DNA, 20 bp, synthetic construct
  source 1..20: mol_type = other DNA
aatcccagctcctcgggagg

SEQ ID NO: 54263 - DNA, 20 bp, synthetic construct
  source 1..20: mol_type = other DNA
taatcccagctcctcgggag

SEQ ID NO: 54264 - DNA, 20 bp, synthetic construct
  source 1..20: mol_type = other DNA
ataatcccagctcctcggga

SEQ ID NO: 54265 - DNA, 20 bp, synthetic construct
  source 1..20: mol_type = other DNA
tataatcccagctcctcggg

SEQ ID NO: 54266 - DNA, 20 bp, synthetic construct
  source 1..20: mol_type = other DNA
ctataatcccagctcctcgg

SEQ ID NO: 54267 - DNA, 20 bp, synthetic construct
  source 1..20: mol_type = other DNA
cctataatcccagctcctcg

SEQ ID NO: 54268 - DNA, 20 bp, synthetic construct
  source 1..20: mol_type = other DNA
gcctataatcccagctcctc

SEQ ID NO: 54269 - DNA, 20 bp, synthetic construct
  source 1..20: mol_type = other DNA
cgcctataatcccagctcct

SEQ ID NO: 54270 - DNA, 20 bp, synthetic construct
  source 1..20: mol_type = other DNA
acgcctataatcccagctcc

SEQ ID NO: 54271 - DNA, 20 bp, synthetic construct
  source 1..20: mol_type = other DNA
gacgcctataatcccagctc

SEQ ID NO: 54272 - DNA, 20 bp, synthetic construct
  source 1..20: mol_type = other DNA
agacgcctataatcccagct

SEQ ID NO: 54273 - DNA, 20 bp, synthetic construct
  source 1..20: mol_type = other DNA
cagacgcctataatcccagc

SEQ ID NO: 54274 - DNA, 20 bp, synthetic construct
  source 1..20: mol_type = other DNA
gcagacgcctataatcccag

SEQ ID NO: 54275 - DNA, 20 bp, synthetic construct
  source 1..20: mol_type = other DNA
ggcagacgcctataatccca

SEQ ID NO: 54276 - DNA, 20 bp, synthetic construct
  source 1..20: mol_type = other DNA
tggcagacgcctataatccc

SEQ ID NO: 54277 - DNA, 20 bp, synthetic construct
  source 1..20: mol_type = other DNA
gtggcagacgcctataatcc

SEQ ID NO: 54278 - DNA, 20 bp, synthetic construct
  source 1..20: mol_type = other DNA
ggtggcagacgcctataatc

SEQ ID NO: 54279 - DNA, 20 bp, synthetic construct
  source 1..20: mol_type = other DNA
tggtggcagacgcctataat

SEQ ID NO: 54280 - DNA, 20 bp, synthetic construct
  source 1..20: mol_type = other DNA
atggtggcagacgcctataa

SEQ ID NO: 54281 - DNA, 20 bp, synthetic construct
  source 1..20: mol_type = other DNA
catggtggcagacgcctata

SEQ ID NO: 54282 - DNA, 20 bp, synthetic construct
  source 1..20: mol_type = other DNA
gcatggtggcagacgcctat

SEQ ID NO: 54283 - DNA, 20 bp, synthetic construct
  source 1..20: mol_type = other DNA
ggcatggtggcagacgccta

SEQ ID NO: 54284 - DNA, 20 bp, synthetic construct
  source 1..20: mol_type = other DNA
gggcatggtggcagacgcct

SEQ ID NO: 54285 - DNA, 20 bp, synthetic construct
  source 1..20: mol_type = other DNA
tgggcatggtggcagacgcc

SEQ ID NO: 54286 - DNA, 20 bp, synthetic construct
  source 1..20: mol_type = other DNA
ctgggcatggtggcagacgc

SEQ ID NO: 54287 - DNA, 20 bp, synthetic construct
  source 1..20: mol_type = other DNA
gctgggcatggtggcagacg

SEQ ID NO: 54288 - DNA, 20 bp, synthetic construct
  source 1..20: mol_type = other DNA
agctgggcatggtggcagac

SEQ ID NO: 54289 - DNA, 20 bp, synthetic construct
  source 1..20: mol_type = other DNA
tagctgggcatggtggcaga

SEQ ID NO: 54290 - DNA, 20 bp, synthetic construct
  source 1..20: mol_type = other DNA
ttagctgggcatggtggcag

SEQ ID NO: 54291 - DNA, 20 bp, synthetic construct
  source 1..20: mol_type = other DNA
attagctgggcatggtggca

SEQ ID NO: 54292 - DNA, 20 bp, synthetic construct
  source 1..20: mol_type = other DNA
aattagctgggcatggtggc

SEQ ID NO: 54293 - DNA, 20 bp, synthetic construct
  source 1..20: mol_type = other DNA
aaattagctgggcatggtgg

SEQ ID NO: 54294 - DNA, 20 bp, synthetic construct
  source 1..20: mol_type = other DNA
aaaattagctgggcatggtg

SEQ ID NO: 54295 - DNA, 20 bp, synthetic construct
  source 1..20: mol_type = other DNA
aaaaattagctgggcatggt

SEQ ID NO: 54296 - DNA, 20 bp, synthetic construct
  source 1..20: mol_type = other DNA
taaaaattagctgggcatgg

SEQ ID NO: 54297 - DNA, 20 bp, synthetic construct
  source 1..20: mol_type = other DNA
ataaaaattagctgggcatg

SEQ ID NO: 54298 - DNA, 20 bp, synthetic construct
  source 1..20: mol_type = other DNA
tataaaaattagctgggcat

SEQ ID NO: 54299 - DNA, 20 bp, synthetic construct
  source 1..20: mol_type = other DNA
atataaaaattagctgggca

SEQ ID NO: 54300 - DNA, 20 bp, synthetic construct
  source 1..20: mol_type = other DNA
aatataaaaattagctgggc

SEQ ID NO: 54301 - DNA, 20 bp, synthetic construct
  source 1..20: mol_type = other DNA
aaatataaaaattagctggg

SEQ ID NO: 54302 - DNA, 20 bp, synthetic construct
  source 1..20: mol_type = other DNA
aaaatataaaaattagctgg

SEQ ID NO: 54303 - DNA, 20 bp, synthetic construct
  source 1..20: mol_type = other DNA
aaaaatataaaaattagctg

SEQ ID NO: 54304 - DNA, 20 bp, synthetic construct
  source 1..20: mol_type = other DNA
taaaaatataaaaattagct

SEQ ID NO: 54305 - DNA, 20 bp, synthetic construct
  source 1..20: mol_type = other DNA
ctaaaaatataaaaattagc

SEQ ID NO: 54306 - DNA, 20 bp, synthetic construct
  source 1..20: mol_type = other DNA
actaaaaatataaaaattag

SEQ ID NO: 54307 - DNA, 20 bp, synthetic construct
  source 1..20: mol_type = other DNA
tactaaaaatataaaaatta

SEQ ID NO: 54308 - DNA, 20 bp, synthetic construct
  source 1..20: mol_type = other DNA
ctactaaaaatataaaaatt

SEQ ID NO: 54309 - DNA, 20 bp, synthetic construct
  source 1..20: mol_type = other DNA
tctactaaaaatataaaaat

SEQ ID NO: 54310 - DNA, 20 bp, synthetic construct
  source 1..20: mol_type = other DNA
ctctactaaaaatataaaaa

SEQ ID NO: 54311 - DNA, 20 bp, synthetic construct
  source 1..20: mol_type = other DNA
tctctactaaaaatataaaa

SEQ ID NO: 54312 - DNA, 20 bp, synthetic construct
  source 1..20: mol_type = other DNA
gtctctactaaaaatataaa

SEQ ID NO: 54313 - DNA, 20 bp, synthetic construct
  source 1..20: mol_type = other DNA
cgtctctactaaaaatataa

SEQ ID NO: 54314 - DNA, 20 bp, synthetic construct
  source 1..20: mol_type = other DNA
ccgtctctactaaaaatata

SEQ ID NO: 54315 - DNA, 20 bp, synthetic construct
  source 1..20: mol_type = other DNA
cccgtctctactaaaaatat

SEQ ID NO: 54316 - DNA, 20 bp, synthetic construct
  source 1..20: mol_type = other DNA
ccccgtctctactaaaaata

SEQ ID NO: 54317 - DNA, 20 bp, synthetic construct
  source 1..20: mol_type = other DNA
accccgtctctactaaaaat

SEQ ID NO: 54318 - DNA, 20 bp, synthetic construct
  source 1..20: mol_type = other DNA
aaccccgtctctactaaaaa

SEQ ID NO: 54319 - DNA, 20 bp, synthetic construct
  source 1..20: mol_type = other DNA
aaaccccgtctctactaaaa

SEQ ID NO: 54320 - DNA, 20 bp, synthetic construct
  source 1..20: mol_type = other DNA
gaaaccccgtctctactaaa

SEQ ID NO: 54321 - DNA, 20 bp, synthetic construct
  source 1..20: mol_type = other DNA
tgaaaccccgtctctactaa

SEQ ID NO: 54322 - DNA, 20 bp, synthetic construct
  source 1..20: mol_type = other DNA
gtgaaaccccgtctctacta

SEQ ID NO: 54323 - DNA, 20 bp, synthetic construct
  source 1..20: mol_type = other DNA
ggtgaaaccccgtctctact

SEQ ID NO: 54324 - DNA, 20 bp, synthetic construct
  source 1..20: mol_type = other DNA
tggtgaaaccccgtctctac

SEQ ID NO: 54325 - DNA, 20 bp, synthetic construct
  source 1..20: mol_type = other DNA
atggtgaaaccccgtctcta

SEQ ID NO: 54326 - DNA, 20 bp, synthetic construct
  source 1..20: mol_type = other DNA
tatggtgaaaccccgtctct

SEQ ID NO: 54327 - DNA, 20 bp, synthetic construct
  source 1..20: mol_type = other DNA
atatggtgaaaccccgtctc

SEQ ID NO: 54328 - DNA, 20 bp, synthetic construct
  source 1..20: mol_type = other DNA
aatatggtgaaaccccgtct

SEQ ID NO: 54329 - DNA, 20 bp, synthetic construct
  source 1..20: mol_type = other DNA
caatatggtgaaaccccgtc

SEQ ID NO: 54330 - DNA, 20 bp, synthetic construct
  source 1..20: mol_type = other DNA
ccaatatggtgaaaccccgt

SEQ ID NO: 54331 - DNA, 20 bp, synthetic construct
  source 1..20: mol_type = other DNA
gccaatatggtgaaaccccg

SEQ ID NO: 54332 - DNA, 20 bp, synthetic construct
  source 1..20: mol_type = other DNA
ggccaatatggtgaaacccc

SEQ ID NO: 54333 - DNA, 20 bp, synthetic construct
  source 1..20: mol_type = other DNA
tggccaatatggtgaaaccc

SEQ ID NO: 54334 - DNA, 20 bp, synthetic construct
  source 1..20: mol_type = other DNA
ctggccaatatggtgaaacc

SEQ ID NO: 54335 - DNA, 20 bp, synthetic construct
  source 1..20: mol_type = other DNA
cctggccaatatggtgaaac

SEQ ID NO: 54336 - DNA, 20 bp, synthetic construct
  source 1..20: mol_type = other DNA
gcctggccaatatggtgaaa

SEQ ID NO: 54337 - DNA, 20 bp, synthetic construct
  source 1..20: mol_type = other DNA
agcctggccaatatggtgaa

SEQ ID NO: 54338 - DNA, 20 bp, synthetic construct
  source 1..20: mol_type = other DNA
gagcctggccaatatggtga

SEQ ID NO: 54339 - DNA, 20 bp, synthetic construct
  source 1..20: mol_type = other DNA
agagcctggccaatatggtg

SEQ ID NO: 54340 - DNA, 20 bp, synthetic construct
  source 1..20: mol_type = other DNA
aagagcctggccaatatggt

SEQ ID NO: 54341 - DNA, 20 bp, synthetic construct
  source 1..20: mol_type = other DNA
gaagagcctggccaatatgg

SEQ ID NO: 54342 - DNA, 20 bp, synthetic construct
  source 1..20: mol_type = other DNA
agaagagcctggccaatatg

SEQ ID NO: 54343 - DNA, 20 bp, synthetic construct
  source 1..20: mol_type = other DNA
gagaagagcctggccaatat

SEQ ID NO: 54344 - DNA, 20 bp, synthetic construct
  source 1..20: mol_type = other DNA
tgagaagagcctggccaata

SEQ ID NO: 54345 - DNA, 20 bp, synthetic construct
  source 1..20: mol_type = other DNA
ttgagaagagcctggccaat

SEQ ID NO: 54346 - DNA, 20 bp, synthetic construct
  source 1..20: mol_type = other DNA
tttgagaagagcctggccaa

SEQ ID NO: 54347 - DNA, 20 bp, synthetic construct
  source 1..20: mol_type = other DNA
atttgagaagagcctggcca

SEQ ID NO: 54348 - DNA, 20 bp, synthetic construct
  source 1..20: mol_type = other DNA
aatttgagaagagcctggcc

SEQ ID NO: 54349 - DNA, 20 bp, synthetic construct
  source 1..20: mol_type = other DNA
gaatttgagaagagcctggc

SEQ ID NO: 54350 - DNA, 20 bp, synthetic construct
  source 1..20: mol_type = other DNA
ggaatttgagaagagcctgg

SEQ ID NO: 54351 - DNA, 20 bp, synthetic construct
  source 1..20: mol_type = other DNA
aggaatttgagaagagcctg

SEQ ID NO: 54352 - DNA, 20 bp, synthetic construct
  source 1..20: mol_type = other DNA
caggaatttgagaagagcct

SEQ ID NO: 54353 - DNA, 20 bp, synthetic construct
  source 1..20: mol_type = other DNA
tcaggaatttgagaagagcc

SEQ ID NO: 54354 - DNA, 20 bp, synthetic construct
  source 1..20: mol_type = other DNA
gtcaggaatttgagaagagc

SEQ ID NO: 54355 - DNA, 20 bp, synthetic construct
  source 1..20: mol_type = other DNA
ggtcaggaatttgagaagag

SEQ ID NO: 54356 - DNA, 20 bp, synthetic construct
  source 1..20: mol_type = other DNA
aggtcaggaatttgagaaga

SEQ ID NO: 54357 - DNA, 20 bp, synthetic construct
  source 1..20: mol_type = other DNA
gaggtcaggaatttgagaag

SEQ ID NO: 54358 - DNA, 20 bp, synthetic construct
  source 1..20: mol_type = other DNA
tgaggtcaggaatttgagaa

SEQ ID NO: 54359 - DNA, 20 bp, synthetic construct
  source 1..20: mol_type = other DNA
atgaggtcaggaatttgaga

SEQ ID NO: 54360 - DNA, 20 bp, synthetic construct
  source 1..20: mol_type = other DNA
catgaggtcaggaatttgag

SEQ ID NO: 54361 - DNA, 20 bp, synthetic construct
  source 1..20: mol_type = other DNA
tcatgaggtcaggaatttga

SEQ ID NO: 54362 - DNA, 20 bp, synthetic construct
  source 1..20: mol_type = other DNA
atcatgaggtcaggaatttg

SEQ ID NO: 54363 - DNA, 20 bp, synthetic construct
  source 1..20: mol_type = other DNA
gatcatgaggtcaggaattt

SEQ ID NO: 54364 - DNA, 20 bp, synthetic construct
  source 1..20: mol_type = other DNA
ggatcatgaggtcaggaatt

SEQ ID NO: 54365 - DNA, 20 bp, synthetic construct
  source 1..20: mol_type = other DNA
tggatcatgaggtcaggaat

SEQ ID NO: 54366 - DNA, 20 bp, synthetic construct
  source 1..20: mol_type = other DNA
gtggatcatgaggtcaggaa

SEQ ID NO: 54367 - DNA, 20 bp, synthetic construct
  source 1..20: mol_type = other DNA
ggtggatcatgaggtcagga

SEQ ID NO: 54368 - DNA, 20 bp, synthetic construct
  source 1..20: mol_type = other DNA
gggtggatcatgaggtcagg

SEQ ID NO: 54369 - DNA, 20 bp, synthetic construct
  source 1..20: mol_type = other DNA
tgggtggatcatgaggtcag

SEQ ID NO: 54370 - DNA, 20 bp, synthetic construct
  source 1..20: mol_type = other DNA
gtgggtggatcatgaggtca

SEQ ID NO: 54371 - DNA, 20 bp, synthetic construct
  source 1..20: mol_type = other DNA
ggtgggtggatcatgaggtc

SEQ ID NO: 54372 - DNA, 20 bp, synthetic construct
  source 1..20: mol_type = other DNA
aggtgggtggatcatgaggt

SEQ ID NO: 54373 - DNA, 20 bp, synthetic construct
  source 1..20: mol_type = other DNA
aaggtgggtggatcatgagg

SEQ ID NO: 54374 - DNA, 20 bp, synthetic construct
  source 1..20: mol_type = other DNA
caaggtgggtggatcatgag

SEQ ID NO: 54375 - DNA, 20 bp, synthetic construct
  source 1..20: mol_type = other DNA
ccaaggtgggtggatcatga

SEQ ID NO: 54376 - DNA, 20 bp, synthetic construct
  source 1..20: mol_type = other DNA
gccaaggtgggtggatcatg

SEQ ID NO: 54377 - DNA, 20 bp, synthetic construct
  source 1..20: mol_type = other DNA
ggccaaggtgggtggatcat

SEQ ID NO: 54378 - DNA, 20 bp, synthetic construct
  source 1..20: mol_type = other DNA
aggccaaggtgggtggatca

SEQ ID NO: 54379 - DNA, 20 bp, synthetic construct
  source 1..20: mol_type = other DNA
gaggccaaggtgggtggatc

SEQ ID NO: 54380 - DNA, 20 bp, synthetic construct
  source 1..20: mol_type = other DNA
ggaggccaaggtgggtggat

SEQ ID NO: 54381 - DNA, 20 bp, synthetic construct
  source 1..20: mol_type = other DNA
gggaggccaaggtgggtgga

SEQ ID NO: 54382 - DNA, 20 bp, synthetic construct
  source 1..20: mol_type = other DNA
tgggaggccaaggtgggtgg

SEQ ID NO: 54383 - DNA, 20 bp, synthetic construct
  source 1..20: mol_type = other DNA
ttgggaggccaaggtgggtg

SEQ ID NO: 54384 - DNA, 20 bp, synthetic construct
  source 1..20: mol_type = other DNA
tttgggaggccaaggtgggt

SEQ ID NO: 54385 - DNA, 20 bp, synthetic construct
  source 1..20: mol_type = other DNA
ctttgggaggccaaggtggg

SEQ ID NO: 54386 - DNA, 20 bp, synthetic construct
  source 1..20: mol_type = other DNA
actttgggaggccaaggtgg

SEQ ID NO: 54387 - DNA, 20 bp, synthetic construct
  source 1..20: mol_type = other DNA
cactttgggaggccaaggtg

SEQ ID NO: 54388 - DNA, 20 bp, synthetic construct
  source 1..20: mol_type = other DNA
gcactttgggaggccaaggt

SEQ ID NO: 54389 - DNA, 20 bp, synthetic construct
  source 1..20: mol_type = other DNA
agcactttgggaggccaagg

SEQ ID NO: 54390 - DNA, 20 bp, synthetic construct
  source 1..20: mol_type = other DNA
tagcactttgggaggccaag

SEQ ID NO: 54391 - DNA, 20 bp, synthetic construct
  source 1..20: mol_type = other DNA
ctagcactttgggaggccaa

SEQ ID NO: 54392 - DNA, 20 bp, synthetic construct
  source 1..20: mol_type = other DNA
cctagcactttgggaggcca

SEQ ID NO: 54393 - DNA, 20 bp, synthetic construct
  source 1..20: mol_type = other DNA
tcctagcactttgggaggcc

SEQ ID NO: 54394 - DNA, 20 bp, synthetic construct
  source 1..20: mol_type = other DNA
atcctagcactttgggaggc

SEQ ID NO: 54395 - DNA, 20 bp, synthetic construct
  source 1..20: mol_type = other DNA
aatcctagcactttgggagg

SEQ ID NO: 54396 - DNA, 20 bp, synthetic construct
  source 1..20: mol_type = other DNA
taatcctagcactttgggag

SEQ ID NO: 54397 - DNA, 20 bp, synthetic construct
  source 1..20: mol_type = other DNA
gtaatcctagcactttggga

SEQ ID NO: 54398 - DNA, 20 bp, synthetic construct
  source 1..20: mol_type = other DNA
tgtaatcctagcactttggg

SEQ ID NO: 54399 - DNA, 20 bp, synthetic construct
  source 1..20: mol_type = other DNA
ctgtaatcctagcactttgg

SEQ ID NO: 54400 - DNA, 20 bp, synthetic construct
  source 1..20: mol_type = other DNA
cctgtaatcctagcactttg

SEQ ID NO: 54401 - DNA, 20 bp, synthetic construct
  source 1..20: mol_type = other DNA
gcctgtaatcctagcacttt

SEQ ID NO: 54402 - DNA, 20 bp, synthetic construct
  source 1..20: mol_type = other DNA
cgcctgtaatcctagcactt

SEQ ID NO: 54403 - DNA, 20 bp, synthetic construct
  source 1..20: mol_type = other DNA
acgcctgtaatcctagcact

SEQ ID NO: 54404 - DNA, 20 bp, synthetic construct
  source 1..20: mol_type = other DNA
cacgcctgtaatcctagcac

SEQ ID NO: 54405 - DNA, 20 bp, synthetic construct
  source 1..20: mol_type = other DNA
tcacgcctgtaatcctagca

SEQ ID NO: 54406 - DNA, 20 bp, synthetic construct
  source 1..20: mol_type = other DNA
ctcacgcctgtaatcctagc

SEQ ID NO: 54407 - DNA, 20 bp, synthetic construct
  source 1..20: mol_type = other DNA
gctcacgcctgtaatcctag

SEQ ID NO: 54408 - DNA, 20 bp, synthetic construct
  source 1..20: mol_type = other DNA
ggctcacgcctgtaatccta

SEQ ID NO: 54409 - DNA, 20 bp, synthetic construct
  source 1..20: mol_type = other DNA
tggctcacgcctgtaatcct

SEQ ID NO: 54410 - DNA, 20 bp, synthetic construct
  source 1..20: mol_type = other DNA
gtggctcacgcctgtaatcc

SEQ ID NO: 54411 - DNA, 20 bp, synthetic construct
  source 1..20: mol_type = other DNA
ggtggctcacgcctgtaatc

SEQ ID NO: 54412 - DNA, 20 bp, synthetic construct
  source 1..20: mol_type = other DNA
tggtggctcacgcctgtaat

SEQ ID NO: 54413 - DNA, 20 bp, synthetic construct
  source 1..20: mol_type = other DNA
gtggtggctcacgcctgtaa

SEQ ID NO: 54414 - DNA, 20 bp, synthetic construct
  source 1..20: mol_type = other DNA
tgtggtggctcacgcctgta

SEQ ID NO: 54415 - DNA, 20 bp, synthetic construct
  source 1..20: mol_type = other DNA
gtgtggtggctcacgcctgt

SEQ ID NO: 54416 - DNA, 20 bp, synthetic construct
  source 1..20: mol_type = other DNA
agtgtggtggctcacgcctg

SEQ ID NO: 54417 - DNA, 20 bp, synthetic construct
  source 1..20: mol_type = other DNA
gagtgtggtggctcacgcct

SEQ ID NO: 54418 - DNA, 20 bp, synthetic construct
  source 1..20: mol_type = other DNA
cgagtgtggtggctcacgcc

SEQ ID NO: 54419 - DNA, 20 bp, synthetic construct
  source 1..20: mol_type = other DNA
ccgagtgtggtggctcacgc

SEQ ID NO: 54420 - DNA, 20 bp, synthetic construct
  source 1..20: mol_type = other DNA
gccgagtgtggtggctcacg

SEQ ID NO: 54421 - DNA, 20 bp, synthetic construct
  source 1..20: mol_type = other DNA
agccgagtgtggtggctcac

SEQ ID NO: 54422 - DNA, 20 bp, synthetic construct
  source 1..20: mol_type = other DNA
cagccgagtgtggtggctca

SEQ ID NO: 54423 - DNA, 20 bp, synthetic construct
  source 1..20: mol_type = other DNA
gcagccgagtgtggtggctc

SEQ ID NO: 54424 - DNA, 20 bp, synthetic construct
  source 1..20: mol_type = other DNA
agcagccgagtgtggtggct

SEQ ID NO: 54425 - DNA, 20 bp, synthetic construct
  source 1..20: mol_type = other DNA
cagcagccgagtgtggtggc

SEQ ID NO: 54426 - DNA, 20 bp, synthetic construct
  source 1..20: mol_type = other DNA
ccagcagccgagtgtggtgg

SEQ ID NO: 54427 - DNA, 20 bp, synthetic construct
  source 1..20: mol_type = other DNA
cccagcagccgagtgtggtg

SEQ ID NO: 54428 - DNA, 20 bp, synthetic construct
  source 1..20: mol_type = other DNA
ccccagcagccgagtgtggt

SEQ ID NO: 54429 - DNA, 20 bp, synthetic construct
  source 1..20: mol_type = other DNA
tccccagcagccgagtgtgg

SEQ ID NO: 54430 - DNA, 20 bp, synthetic construct
  source 1..20: mol_type = other DNA
ttccccagcagccgagtgtg

SEQ ID NO: 54431 - DNA, 20 bp, synthetic construct
  source 1..20: mol_type = other DNA
tttccccagcagccgagtgt

SEQ ID NO: 54432 - DNA, 20 bp, synthetic construct
  source 1..20: mol_type = other DNA
gtttccccagcagccgagtg

SEQ ID NO: 54433 - DNA, 20 bp, synthetic construct
  source 1..20: mol_type = other DNA
ggtttccccagcagccgagt

SEQ ID NO: 54434 - DNA, 20 bp, synthetic construct
  source 1..20: mol_type = other DNA
aggtttccccagcagccgag

SEQ ID NO: 54435 - DNA, 20 bp, synthetic construct
  source 1..20: mol_type = other DNA
aaggtttccccagcagccga

SEQ ID NO: 54436 - DNA, 20 bp, synthetic construct
  source 1..20: mol_type = other DNA
aaaggtttccccagcagccg

SEQ ID NO: 54437 - DNA, 20 bp, synthetic construct
  source 1..20: mol_type = other DNA
aaaaggtttccccagcagcc

SEQ ID NO: 54438 - DNA, 20 bp, synthetic construct
  source 1..20: mol_type = other DNA
taaaaggtttccccagcagc

SEQ ID NO: 54439 - DNA, 20 bp, synthetic construct
  source 1..20: mol_type = other DNA
ttaaaaggtttccccagcag

SEQ ID NO: 54440 - DNA, 20 bp, synthetic construct
  source 1..20: mol_type = other DNA
gttaaaaggtttccccagca

SEQ ID NO: 54441 - DNA, 20 bp, synthetic construct
  source 1..20: mol_type = other DNA
tgttaaaaggtttccccagc

SEQ ID NO: 54442 - DNA, 20 bp, synthetic construct
  source 1..20: mol_type = other DNA
atgttaaaaggtttccccag

SEQ ID NO: 54443 - DNA, 20 bp, synthetic construct
  source 1..20: mol_type = other DNA
catgttaaaaggtttcccca

SEQ ID NO: 54444 - DNA, 20 bp, synthetic construct
  source 1..20: mol_type = other DNA
tcatgttaaaaggtttcccc

SEQ ID NO: 54445 - DNA, 20 bp, synthetic construct
  source 1..20: mol_type = other DNA
ctcatgttaaaaggtttccc

SEQ ID NO: 54446 - DNA, 20 bp, synthetic construct
  source 1..20: mol_type = other DNA
actcatgttaaaaggtttcc

SEQ ID NO: 54447 - DNA, 20 bp, synthetic construct
  source 1..20: mol_type = other DNA
tactcatgttaaaaggtttc

SEQ ID NO: 54448 - DNA, 20 bp, synthetic construct
  source 1..20: mol_type = other DNA
ttactcatgttaaaaggttt

SEQ ID NO: 54449 - DNA, 20 bp, synthetic construct
  source 1..20: mol_type = other DNA
cttactcatgttaaaaggtt

SEQ ID NO: 54450 - DNA, 20 bp, synthetic construct
  source 1..20: mol_type = other DNA
ccttactcatgttaaaaggt

SEQ ID NO: 54451 - DNA, 20 bp, synthetic construct
  source 1..20: mol_type = other DNA
accttactcatgttaaaagg

SEQ ID NO: 54452 - DNA, 20 bp, synthetic construct
  source 1..20: mol_type = other DNA
gaccttactcatgttaaaag

SEQ ID NO: 54453 - DNA, 20 bp, synthetic construct
  source 1..20: mol_type = other DNA
tgaccttactcatgttaaaa

SEQ ID NO: 54454 - DNA, 20 bp, synthetic construct
  source 1..20: mol_type = other DNA
ctgaccttactcatgttaaa

SEQ ID NO: 54455 - DNA, 20 bp, synthetic construct
  source 1..20: mol_type = other DNA
actgaccttactcatgttaa

SEQ ID NO: 54456 - DNA, 20 bp, synthetic construct
  source 1..20: mol_type = other DNA
cactgaccttactcatgtta

SEQ ID NO: 54457 - DNA, 20 bp, synthetic construct
  source 1..20: mol_type = other DNA
acactgaccttactcatgtt

SEQ ID NO: 54458 - DNA, 20 bp, synthetic construct
  source 1..20: mol_type = other DNA
cacactgaccttactcatgt

SEQ ID NO: 54459 - DNA, 20 bp, synthetic construct
  source 1..20: mol_type = other DNA
tcacactgaccttactcatg

SEQ ID NO: 54460 - DNA, 20 bp, synthetic construct
  source 1..20: mol_type = other DNA
gtcacactgaccttactcat

SEQ ID NO: 54461 - DNA, 20 bp, synthetic construct
  source 1..20: mol_type = other DNA
agtcacactgaccttactca

SEQ ID NO: 54462 - DNA, 20 bp, synthetic construct
  source 1..20: mol_type = other DNA
aagtcacactgaccttactc

SEQ ID NO: 54463 - DNA, 20 bp, synthetic construct
  source 1..20: mol_type = other DNA
aaagtcacactgaccttact

SEQ ID NO: 54464 - DNA, 20 bp, synthetic construct
  source 1..20: mol_type = other DNA
aaaagtcacactgaccttac

SEQ ID NO: 54465 - DNA, 20 bp, synthetic construct
  source 1..20: mol_type = other DNA
taaaagtcacactgacctta

SEQ ID NO: 54466 - DNA, 20 bp, synthetic construct
  source 1..20: mol_type = other DNA
ttaaaagtcacactgacctt

SEQ ID NO: 54467 - DNA, 20 bp, synthetic construct
  source 1..20: mol_type = other DNA
cttaaaagtcacactgacct

SEQ ID NO: 54468 - DNA, 20 bp, synthetic construct
  source 1..20: mol_type = other DNA
acttaaaagtcacactgacc

SEQ ID NO: 54469 - DNA, 20 bp, synthetic construct
  source 1..20: mol_type = other DNA
aacttaaaagtcacactgac

SEQ ID NO: 54470 - DNA, 20 bp, synthetic construct
  source 1..20: mol_type = other DNA
gaacttaaaagtcacactga

SEQ ID NO: 54471 - DNA, 20 bp, synthetic construct
  source 1..20: mol_type = other DNA
agaacttaaaagtcacactg

SEQ ID NO: 54472 - DNA, 20 bp, synthetic construct
  source 1..20: mol_type = other DNA
aagaacttaaaagtcacact

SEQ ID NO: 54473 - DNA, 20 bp, synthetic construct
  source 1..20: mol_type = other DNA
caagaacttaaaagtcacac

SEQ ID NO: 54474 - DNA, 20 bp, synthetic construct
  source 1..20: mol_type = other DNA
tcaagaacttaaaagtcaca

SEQ ID NO: 54475 - DNA, 20 bp, synthetic construct
  source 1..20: mol_type = other DNA
atcaagaacttaaaagtcac

SEQ ID NO: 54476 - DNA, 20 bp, synthetic construct
  source 1..20: mol_type = other DNA
catcaagaacttaaaagtca

SEQ ID NO: 54477 - DNA, 20 bp, synthetic construct
  source 1..20: mol_type = other DNA
gcatcaagaacttaaaagtc

SEQ ID NO: 54478 - DNA, 20 bp, synthetic construct
  source 1..20: mol_type = other DNA
agcatcaagaacttaaaagt

SEQ ID NO: 54479 - DNA, 20 bp, synthetic construct
  source 1..20: mol_type = other DNA
tagcatcaagaacttaaaag

SEQ ID NO: 54480 - DNA, 20 bp, synthetic construct
  source 1..20: mol_type = other DNA
ttagcatcaagaacttaaaa

SEQ ID NO: 54481 - DNA, 20 bp, synthetic construct
  source 1..20: mol_type = other DNA
gttagcatcaagaacttaaa

SEQ ID NO: 54482 - DNA, 20 bp, synthetic construct
  source 1..20: mol_type = other DNA
tgttagcatcaagaacttaa

SEQ ID NO: 54483 - DNA, 20 bp, synthetic construct
  source 1..20: mol_type = other DNA
atgttagcatcaagaactta

SEQ ID NO: 54484 - DNA, 20 bp, synthetic construct
  source 1..20: mol_type = other DNA
gatgttagcatcaagaactt

SEQ ID NO: 54485 - DNA, 20 bp, synthetic construct
  source 1..20: mol_type = other DNA
tgatgttagcatcaagaact

SEQ ID NO: 54486 - DNA, 20 bp, synthetic construct
  source 1..20: mol_type = other DNA
atgatgttagcatcaagaac

SEQ ID NO: 54487 - DNA, 20 bp, synthetic construct
  source 1..20: mol_type = other DNA
aatgatgttagcatcaagaa

SEQ ID NO: 54488 - DNA, 20 bp, synthetic construct
  source 1..20: mol_type = other DNA
caatgatgttagcatcaaga

SEQ ID NO: 54489 - DNA, 20 bp, synthetic construct
  source 1..20: mol_type = other DNA
tcaatgatgttagcatcaag

SEQ ID NO: 54490 - DNA, 20 bp, synthetic construct
  source 1..20: mol_type = other DNA
atcaatgatgttagcatcaa

SEQ ID NO: 54491 - DNA, 20 bp, synthetic construct
  source 1..20: mol_type = other DNA
aatcaatgatgttagcatca

SEQ ID NO: 54492 - DNA, 20 bp, synthetic construct
  source 1..20: mol_type = other DNA
aaatcaatgatgttagcatc

SEQ ID NO: 54493 - DNA, 20 bp, synthetic construct
  source 1..20: mol_type = other DNA
gaaatcaatgatgttagcat

SEQ ID NO: 54494 - DNA, 20 bp, synthetic construct
  source 1..20: mol_type = other DNA
tgaaatcaatgatgttagca

SEQ ID NO: 54495 - DNA, 20 bp, synthetic construct
  source 1..20: mol_type = other DNA
ttgaaatcaatgatgttagc

SEQ ID NO: 54496 - DNA, 20 bp, synthetic construct
  source 1..20: mol_type = other DNA
attgaaatcaatgatgttag

SEQ ID NO: 54497 - DNA, 20 bp, synthetic construct
  source 1..20: mol_type = other DNA
tattgaaatcaatgatgtta

SEQ ID NO: 54498 - DNA, 20 bp, synthetic construct
  source 1..20: mol_type = other DNA
ttattgaaatcaatgatgtt

SEQ ID NO: 54499 - DNA, 20 bp, synthetic construct
  source 1..20: mol_type = other DNA
tttattgaaatcaatgatgt

SEQ ID NO: 54500 - DNA, 20 bp, synthetic construct
  source 1..20: mol_type = other DNA
ctttattgaaatcaatgatg

SEQ ID NO: 54501 - DNA, 20 bp, synthetic construct
  source 1..20: mol_type = other DNA
actttattgaaatcaatgat

SEQ ID NO: 54502 - DNA, 20 bp, synthetic construct
  source 1..20: mol_type = other DNA
aactttattgaaatcaatga

SEQ ID NO: 54503 - DNA, 20 bp, synthetic construct
  source 1..20: mol_type = other DNA
aaactttattgaaatcaatg

SEQ ID NO: 54504 - DNA, 20 bp, synthetic construct
  source 1..20: mol_type = other DNA
taaactttattgaaatcaat

SEQ ID NO: 54505 - DNA, 20 bp, synthetic construct
  source 1..20: mol_type = other DNA
ttaaactttattgaaatcaa

SEQ ID NO: 54506 - DNA, 20 bp, synthetic construct
  source 1..20: mol_type = other DNA
tttaaactttattgaaatca

SEQ ID NO: 54507 - DNA, 20 bp, synthetic construct
  source 1..20: mol_type = other DNA
ttttaaactttattgaaatc

SEQ ID NO: 54508 - DNA, 20 bp, synthetic construct
  source 1..20: mol_type = other DNA
cttttaaactttattgaaat

SEQ ID NO: 54509 - DNA, 20 bp, synthetic construct
  source 1..20: mol_type = other DNA
acttttaaactttattgaaa

SEQ ID NO: 54510 - DNA, 20 bp, synthetic construct
  source 1..20: mol_type = other DNA
aacttttaaactttattgaa

SEQ ID NO: 54511 - DNA, 20 bp, synthetic construct
  source 1..20: mol_type = other DNA
taacttttaaactttattga

SEQ ID NO: 54512 - DNA, 20 bp, synthetic construct
  source 1..20: mol_type = other DNA
ataacttttaaactttattg

SEQ ID NO: 54513 - DNA, 20 bp, synthetic construct
  source 1..20: mol_type = other DNA
tataacttttaaactttatt

SEQ ID NO: 54514 - DNA, 20 bp, synthetic construct
  source 1..20: mol_type = other DNA
atataacttttaaactttat

SEQ ID NO: 54515 - DNA, 20 bp, synthetic construct
  source 1..20: mol_type = other DNA
aatataacttttaaacttta

SEQ ID NO: 54516 - DNA, 20 bp, synthetic construct
  source 1..20: mol_type = other DNA
gaatataacttttaaacttt

SEQ ID NO: 54517 - DNA, 20 bp, synthetic construct
  source 1..20: mol_type = other DNA
tgaatataacttttaaactt

SEQ ID NO: 54518 - DNA, 20 bp, synthetic construct
  source 1..20: mol_type = other DNA
atgaatataacttttaaact

SEQ ID NO: 54519 - DNA, 20 bp, synthetic construct
  source 1..20: mol_type = other DNA
catgaatataacttttaaac

SEQ ID NO: 54520 - DNA, 20 bp, synthetic construct
  source 1..20: mol_type = other DNA
gcatgaatataacttttaaa

SEQ ID NO: 54521 - DNA, 20 bp, synthetic construct
  source 1..20: mol_type = other DNA
tgcatgaatataacttttaa

SEQ ID NO: 54522 - DNA, 20 bp, synthetic construct
  source 1..20: mol_type = other DNA
atgcatgaatataactttta

SEQ ID NO: 54523 - DNA, 20 bp, synthetic construct
  source 1..20: mol_type = other DNA
tatgcatgaatataactttt

SEQ ID NO: 54524 - DNA, 20 bp, synthetic construct
  source 1..20: mol_type = other DNA
atatgcatgaatataacttt

SEQ ID NO: 54525 - DNA, 20 bp, synthetic construct
  source 1..20: mol_type = other DNA
tatatgcatgaatataactt

SEQ ID NO: 54526 - DNA, 20 bp, synthetic construct
  source 1..20: mol_type = other DNA
atatatgcatgaatataact

SEQ ID NO: 54527 - DNA, 20 bp, synthetic construct
  source 1..20: mol_type = other DNA
catatatgcatgaatataac

SEQ ID NO: 54528 - DNA, 20 bp, synthetic construct
  source 1..20: mol_type = other DNA
gcatatatgcatgaatataa

SEQ ID NO: 54529 - DNA, 20 bp, synthetic construct
  source 1..20: mol_type = other DNA
tgcatatatgcatgaatata

SEQ ID NO: 54530 - DNA, 20 bp, synthetic construct
  source 1..20: mol_type = other DNA
ttgcatatatgcatgaatat

SEQ ID NO: 54531 - DNA, 20 bp, synthetic construct
  source 1..20: mol_type = other DNA
tttgcatatatgcatgaata

SEQ ID NO: 54532 - DNA, 20 bp, synthetic construct
  source 1..20: mol_type = other DNA
atttgcatatatgcatgaat

SEQ ID NO: 54533 - DNA, 20 bp, synthetic construct
  source 1..20: mol_type = other DNA
catttgcatatatgcatgaa

SEQ ID NO: 54534 - DNA, 20 bp, synthetic construct
  source 1..20: mol_type = other DNA
tcatttgcatatatgcatga

SEQ ID NO: 54535 - DNA, 20 bp, synthetic construct
  source 1..20: mol_type = other DNA
ttcatttgcatatatgcatg

SEQ ID NO: 54536 - DNA, 20 bp, synthetic construct
  source 1..20: mol_type = other DNA
attcatttgcatatatgcat

SEQ ID NO: 54537 - DNA, 20 bp, synthetic construct
  source 1..20: mol_type = other DNA
tattcatttgcatatatgca

SEQ ID NO: 54538 - DNA, 20 bp, synthetic construct
  source 1..20: mol_type = other DNA
ttattcatttgcatatatgc

SEQ ID NO: 54539 - DNA, 20 bp, synthetic construct
  source 1..20: mol_type = other DNA
tttattcatttgcatatatg

SEQ ID NO: 54540 - DNA, 20 bp, synthetic construct
  source 1..20: mol_type = other DNA
ttttattcatttgcatatat

SEQ ID NO: 54541 - DNA, 20 bp, synthetic construct
  source 1..20: mol_type = other DNA
cttttattcatttgcatata

SEQ ID NO: 54542 - DNA, 20 bp, synthetic construct
  source 1..20: mol_type = other DNA
ccttttattcatttgcatat

SEQ ID NO: 54543 - DNA, 20 bp, synthetic construct
  source 1..20: mol_type = other DNA
gccttttattcatttgcata

SEQ ID NO: 54544 - DNA, 20 bp, synthetic construct
  source 1..20: mol_type = other DNA
agccttttattcatttgcat

SEQ ID NO: 54545 - DNA, 20 bp, synthetic construct
  source 1..20: mol_type = other DNA
aagccttttattcatttgca

SEQ ID NO: 54546 - DNA, 20 bp, synthetic construct
  source 1..20: mol_type = other DNA
aaagccttttattcatttgc

SEQ ID NO: 54547 - DNA, 20 bp, synthetic construct
  source 1..20: mol_type = other DNA
caaagccttttattcatttg

SEQ ID NO: 54548 - DNA, 20 bp, synthetic construct
  source 1..20: mol_type = other DNA
tcaaagccttttattcattt

SEQ ID NO: 54549 - DNA, 20 bp, synthetic construct
  source 1..20: mol_type = other DNA
ttcaaagccttttattcatt

SEQ ID NO: 54550 - DNA, 20 bp, synthetic construct
  source 1..20: mol_type = other DNA
tttcaaagccttttattcat

SEQ ID NO: 54551 - DNA, 20 bp, synthetic construct
  source 1..20: mol_type = other DNA
atttcaaagccttttattca

SEQ ID NO: 54552 - DNA, 20 bp, synthetic construct
  source 1..20: mol_type = other DNA
tatttcaaagccttttattc

SEQ ID NO: 54553 - DNA, 20 bp, synthetic construct
  source 1..20: mol_type = other DNA
ctatttcaaagccttttatt

SEQ ID NO: 54554 - DNA, 20 bp, synthetic construct
  source 1..20: mol_type = other DNA
actatttcaaagccttttat

SEQ ID NO: 54555 - DNA, 20 bp, synthetic construct
  source 1..20: mol_type = other DNA
cactatttcaaagcctttta

SEQ ID NO: 54556 - DNA, 20 bp, synthetic construct
  source 1..20: mol_type = other DNA
tcactatttcaaagcctttt

SEQ ID NO: 54557 - DNA, 20 bp, synthetic construct
  source 1..20: mol_type = other DNA
gtcactatttcaaagccttt

SEQ ID NO: 54558 - DNA, 20 bp, synthetic construct
  source 1..20: mol_type = other DNA
agtcactatttcaaagcctt

SEQ ID NO: 54559 - DNA, 20 bp, synthetic construct
  source 1..20: mol_type = other DNA
aagtcactatttcaaagcct

SEQ ID NO: 54560 - DNA, 20 bp, synthetic construct
  source 1..20: mol_type = other DNA
gaagtcactatttcaaagcc

SEQ ID NO: 54561 - DNA, 20 bp, synthetic construct
  source 1..20: mol_type = other DNA
agaagtcactatttcaaagc

SEQ ID NO: 54562 - DNA, 20 bp, synthetic construct
  source 1..20: mol_type = other DNA
aagaagtcactatttcaaag

SEQ ID NO: 54563 - DNA, 20 bp, synthetic construct
  source 1..20: mol_type = other DNA
taagaagtcactatttcaaa

SEQ ID NO: 54564 - DNA, 20 bp, synthetic construct
  source 1..20: mol_type = other DNA
gtaagaagtcactatttcaa

SEQ ID NO: 54565 - DNA, 20 bp, synthetic construct
  source 1..20: mol_type = other DNA
cgtaagaagtcactatttca

SEQ ID NO: 54566 - DNA, 20 bp, synthetic construct
  source 1..20: mol_type = other DNA
ccgtaagaagtcactatttc

SEQ ID NO: 54567 - DNA, 20 bp, synthetic construct
  source 1..20: mol_type = other DNA
accgtaagaagtcactattt

SEQ ID NO: 54568 - DNA, 20 bp, synthetic construct
  source 1..20: mol_type = other DNA
taccgtaagaagtcactatt

SEQ ID NO: 54569 - DNA, 20 bp, synthetic construct
  source 1..20: mol_type = other DNA
gtaccgtaagaagtcactat

SEQ ID NO: 54570 - DNA, 20 bp, synthetic construct
  source 1..20: mol_type = other DNA
tgtaccgtaagaagtcacta

SEQ ID NO: 54571 - DNA, 20 bp, synthetic construct
  source 1..20: mol_type = other DNA
ctgtaccgtaagaagtcact

SEQ ID NO: 54572 - DNA, 20 bp, synthetic construct
  source 1..20: mol_type = other DNA
actgtaccgtaagaagtcac

SEQ ID NO: 54573 - DNA, 20 bp, synthetic construct
  source 1..20: mol_type = other DNA
cactgtaccgtaagaagtca

SEQ ID NO: 54574 - DNA, 20 bp, synthetic construct
  source 1..20: mol_type = other DNA
tcactgtaccgtaagaagtc

SEQ ID NO: 54575 - DNA, 20 bp, synthetic construct
  source 1..20: mol_type = other DNA
ttcactgtaccgtaagaagt

SEQ ID NO: 54576 - DNA, 20 bp, synthetic construct
  source 1..20: mol_type = other DNA
attcactgtaccgtaagaag

SEQ ID NO: 54577 - DNA, 20 bp, synthetic construct
  source 1..20: mol_type = other DNA
tattcactgtaccgtaagaa

SEQ ID NO: 54578 - DNA, 20 bp, synthetic construct
  source 1..20: mol_type = other DNA
ttattcactgtaccgtaaga

SEQ ID NO: 54579 - DNA, 20 bp, synthetic construct
  source 1..20: mol_type = other DNA
cttattcactgtaccgtaag

SEQ ID NO: 54580 - DNA, 20 bp, synthetic construct
  source 1..20: mol_type = other DNA
acttattcactgtaccgtaa

SEQ ID NO: 54581 - DNA, 20 bp, synthetic construct
  source 1..20: mol_type = other DNA
aacttattcactgtaccgta

SEQ ID NO: 54582 - DNA, 20 bp, synthetic construct
  source 1..20: mol_type = other DNA
aaacttattcactgtaccgt

SEQ ID NO: 54583 - DNA, 20 bp, synthetic construct
  source 1..20: mol_type = other DNA
gaaacttattcactgtaccg

SEQ ID NO: 54584 - DNA, 20 bp, synthetic construct
  source 1..20: mol_type = other DNA
ggaaacttattcactgtacc

SEQ ID NO: 54585 - DNA, 20 bp, synthetic construct
  source 1..20: mol_type = other DNA
aggaaacttattcactgtac

SEQ ID NO: 54586 - DNA, 20 bp, synthetic construct
  source 1..20: mol_type = other DNA
aaggaaacttattcactgta

SEQ ID NO: 54587 - DNA, 20 bp, synthetic construct
  source 1..20: mol_type = other DNA
aaaggaaacttattcactgt

SEQ ID NO: 54588 - DNA, 20 bp, synthetic construct
  source 1..20: mol_type = other DNA
caaaggaaacttattcactg

SEQ ID NO: 54589 - DNA, 20 bp, synthetic construct
  source 1..20: mol_type = other DNA
ccaaaggaaacttattcact

SEQ ID NO: 54590 - DNA, 20 bp, synthetic construct
  source 1..20: mol_type = other DNA
accaaaggaaacttattcac

SEQ ID NO: 54591 - DNA, 20 bp, synthetic construct
  source 1..20: mol_type = other DNA
gaccaaaggaaacttattca

SEQ ID NO: 54592 - DNA, 20 bp, synthetic construct
  source 1..20: mol_type = other DNA
agaccaaaggaaacttattc

SEQ ID NO: 54593 - DNA, 20 bp, synthetic construct
  source 1..20: mol_type = other DNA
gagaccaaaggaaacttatt

SEQ ID NO: 54594 - DNA, 20 bp, synthetic construct
  source 1..20: mol_type = other DNA
agagaccaaaggaaacttat

SEQ ID NO: 54595 - DNA, 20 bp, synthetic construct
  source 1..20: mol_type = other DNA
aagagaccaaaggaaactta

SEQ ID NO: 54596 - DNA, 20 bp, synthetic construct
  source 1..20: mol_type = other DNA
caagagaccaaaggaaactt

SEQ ID NO: 54597 - DNA, 20 bp, synthetic construct
  source 1..20: mol_type = other DNA
tcaagagaccaaaggaaact

SEQ ID NO: 54598 - DNA, 20 bp, synthetic construct
  source 1..20: mol_type = other DNA
ttcaagagaccaaaggaaac

SEQ ID NO: 54599 - DNA, 20 bp, synthetic construct
  source 1..20: mol_type = other DNA
attcaagagaccaaaggaaa

SEQ ID NO: 54600 - DNA, 20 bp, synthetic construct
  source 1..20: mol_type = other DNA
cattcaagagaccaaaggaa

SEQ ID NO: 54601 - DNA, 20 bp, synthetic construct
  source 1..20: mol_type = other DNA
acattcaagagaccaaagga

SEQ ID NO: 54602 - DNA, 20 bp, synthetic construct
  source 1..20: mol_type = other DNA
aacattcaagagaccaaagg

SEQ ID NO: 54603 - DNA, 20 bp, synthetic construct
  source 1..20: mol_type = other DNA
taacattcaagagaccaaag

SEQ ID NO: 54604 - DNA, 20 bp, synthetic construct
  source 1..20: mol_type = other DNA
ataacattcaagagaccaaa

SEQ ID NO: 54605 - DNA, 20 bp, synthetic construct
  source 1..20: mol_type = other DNA
tataacattcaagagaccaa

SEQ ID NO: 54606 - DNA, 20 bp, synthetic construct
  source 1..20: mol_type = other DNA
gtataacattcaagagacca

SEQ ID NO: 54607 - DNA, 20 bp, synthetic construct
  source 1..20: mol_type = other DNA
tgtataacattcaagagacc

SEQ ID NO: 54608 - DNA, 20 bp, synthetic construct
  source 1..20: mol_type = other DNA
atgtataacattcaagagac

SEQ ID NO: 54609 - DNA, 20 bp, synthetic construct
  source 1..20: mol_type = other DNA
catgtataacattcaagaga

SEQ ID NO: 54610 - DNA, 20 bp, synthetic construct
  source 1..20: mol_type = other DNA
acatgtataacattcaagag

SEQ ID NO: 54611 - DNA, 20 bp, synthetic construct
  source 1..20: mol_type = other DNA
aacatgtataacattcaaga

SEQ ID NO: 54612 - DNA, 20 bp, synthetic construct
  source 1..20: mol_type = other DNA
gaacatgtataacattcaag

SEQ ID NO: 54613 - DNA, 20 bp, synthetic construct
  source 1..20: mol_type = other DNA
ggaacatgtataacattcaa

SEQ ID NO: 54614 - DNA, 20 bp, synthetic construct
  source 1..20: mol_type = other DNA
tggaacatgtataacattca

SEQ ID NO: 54615 - DNA, 20 bp, synthetic construct
  source 1..20: mol_type = other DNA
ctggaacatgtataacattc

SEQ ID NO: 54616 - DNA, 20 bp, synthetic construct
  source 1..20: mol_type = other DNA
actggaacatgtataacatt

SEQ ID NO: 54617 - DNA, 20 bp, synthetic construct
  source 1..20: mol_type = other DNA
aactggaacatgtataacat

SEQ ID NO: 54618 - DNA, 20 bp, synthetic construct
  source 1..20: mol_type = other DNA
aaactggaacatgtataaca

SEQ ID NO: 54619 - DNA, 20 bp, synthetic construct
  source 1..20: mol_type = other DNA
caaactggaacatgtataac

SEQ ID NO: 54620 - DNA, 20 bp, synthetic construct
  source 1..20: mol_type = other DNA
tcaaactggaacatgtataa

SEQ ID NO: 54621 - DNA, 20 bp, synthetic construct
  source 1..20: mol_type = other DNA
atcaaactggaacatgtata

SEQ ID NO: 54622 - DNA, 20 bp, synthetic construct
  source 1..20: mol_type = other DNA
aatcaaactggaacatgtat

SEQ ID NO: 54623 - DNA, 20 bp, synthetic construct
  source 1..20: mol_type = other DNA
aaatcaaactggaacatgta

SEQ ID NO: 54624 - DNA, 20 bp, synthetic construct
  source 1..20: mol_type = other DNA
taaatcaaactggaacatgt

SEQ ID NO: 54625 - DNA, 20 bp, synthetic construct
  source 1..20: mol_type = other DNA
gtaaatcaaactggaacatg

SEQ ID NO: 54626 - DNA, 20 bp, synthetic construct
  source 1..20: mol_type = other DNA
agtaaatcaaactggaacat

SEQ ID NO: 54627 - DNA, 20 bp, synthetic construct
  source 1..20: mol_type = other DNA
cagtaaatcaaactggaaca

SEQ ID NO: 54628 - DNA, 20 bp, synthetic construct
  source 1..20: mol_type = other DNA
tcagtaaatcaaactggaac

SEQ ID NO: 54629 - DNA, 20 bp, synthetic construct
  source 1..20: mol_type = other DNA
ctcagtaaatcaaactggaa

SEQ ID NO: 54630 - DNA, 20 bp, synthetic construct
  source 1..20: mol_type = other DNA
tctcagtaaatcaaactgga

SEQ ID NO: 54631 - DNA, 20 bp, synthetic construct
  source 1..20: mol_type = other DNA
ttctcagtaaatcaaactgg

SEQ ID NO: 54632 - DNA, 20 bp, synthetic construct
  source 1..20: mol_type = other DNA
tttctcagtaaatcaaactg

SEQ ID NO: 54633 - DNA, 20 bp, synthetic construct
  source 1..20: mol_type = other DNA
gtttctcagtaaatcaaact

SEQ ID NO: 54634 - DNA, 20 bp, synthetic construct
  source 1..20: mol_type = other DNA
agtttctcagtaaatcaaac

SEQ ID NO: 54635 - DNA, 20 bp, synthetic construct
  source 1..20: mol_type = other DNA
cagtttctcagtaaatcaaa

SEQ ID NO: 54636 - DNA, 20 bp, synthetic construct
  source 1..20: mol_type = other DNA
tcagtttctcagtaaatcaa

SEQ ID NO: 54637 - DNA, 20 bp, synthetic construct
  source 1..20: mol_type = other DNA
ttcagtttctcagtaaatca

SEQ ID NO: 54638 - DNA, 20 bp, synthetic construct
  source 1..20: mol_type = other DNA
tttcagtttctcagtaaatc

SEQ ID NO: 54639 - DNA, 20 bp, synthetic construct
  source 1..20: mol_type = other DNA
ctttcagtttctcagtaaat

SEQ ID NO: 54640 - DNA, 20 bp, synthetic construct
  source 1..20: mol_type = other DNA
actttcagtttctcagtaaa

SEQ ID NO: 54641 - DNA, 20 bp, synthetic construct
  source 1..20: mol_type = other DNA
tactttcagtttctcagtaa

SEQ ID NO: 54642 - DNA, 20 bp, synthetic construct
  source 1..20: mol_type = other DNA
gtactttcagtttctcagta

SEQ ID NO: 54643 - DNA, 20 bp, synthetic construct
  source 1..20: mol_type = other DNA
ggtactttcagtttctcagt

SEQ ID NO: 54644 - DNA, 20 bp, synthetic construct
  source 1..20: mol_type = other DNA
aggtactttcagtttctcag

SEQ ID NO: 54645 - DNA, 20 bp, synthetic construct
  source 1..20: mol_type = other DNA
aaggtactttcagtttctca

SEQ ID NO: 54646 - DNA, 20 bp, synthetic construct
  source 1..20: mol_type = other DNA
aaaggtactttcagtttctc

SEQ ID NO: 54647 - DNA, 20 bp, synthetic construct
  source 1..20: mol_type = other DNA
taaaggtactttcagtttct

SEQ ID NO: 54648 - DNA, 20 bp, synthetic construct
  source 1..20: mol_type = other DNA
gtaaaggtactttcagtttc

SEQ ID NO: 54649 - DNA, 20 bp, synthetic construct
  source 1..20: mol_type = other DNA
cgtaaaggtactttcagttt

SEQ ID NO: 54650 - DNA, 20 bp, synthetic construct
  source 1..20: mol_type = other DNA
acgtaaaggtactttcagtt

SEQ ID NO: 54651 - DNA, 20 bp, synthetic construct
  source 1..20: mol_type = other DNA
gacgtaaaggtactttcagt

SEQ ID NO: 54652 - DNA, 20 bp, synthetic construct
  source 1..20: mol_type = other DNA
tgacgtaaaggtactttcag

SEQ ID NO: 54653 - DNA, 20 bp, synthetic construct
  source 1..20: mol_type = other DNA
atgacgtaaaggtactttca

SEQ ID NO: 54654 - DNA, 20 bp, synthetic construct
  source 1..20: mol_type = other DNA
tatgacgtaaaggtactttc

SEQ ID NO: 54655 - DNA, 20 bp, synthetic construct
  source 1..20: mol_type = other DNA
atatgacgtaaaggtacttt

SEQ ID NO: 54656 - DNA, 20 bp, synthetic construct
  source 1..20: mol_type = other DNA
catatgacgtaaaggtactt

SEQ ID NO: 54657 - DNA, 20 bp, synthetic construct
  source 1..20: mol_type = other DNA
tcatatgacgtaaaggtact

SEQ ID NO: 54658 - DNA, 20 bp, synthetic construct
  source 1..20: mol_type = other DNA
ctcatatgacgtaaaggtac

SEQ ID NO: 54659 - DNA, 20 bp, synthetic construct
  source 1..20: mol_type = other DNA
gctcatatgacgtaaaggta

SEQ ID NO: 54660 - DNA, 20 bp, synthetic construct
  source 1..20: mol_type = other DNA
agctcatatgacgtaaaggt

SEQ ID NO: 54661 - DNA, 20 bp, synthetic construct
  source 1..20: mol_type = other DNA
cagctcatatgacgtaaagg

SEQ ID NO: 54662 - DNA, 20 bp, synthetic construct
  source 1..20: mol_type = other DNA
acagctcatatgacgtaaag

SEQ ID NO: 54663 - DNA, 20 bp, synthetic construct
  source 1..20: mol_type = other DNA
cacagctcatatgacgtaaa

SEQ ID NO: 54664 - DNA, 20 bp, synthetic construct
  source 1..20: mol_type = other DNA
tcacagctcatatgacgtaa

SEQ ID NO: 54665 - DNA, 20 bp, synthetic construct
  source 1..20: mol_type = other DNA
ctcacagctcatatgacgta

SEQ ID NO: 54666 - DNA, 20 bp, synthetic construct
  source 1..20: mol_type = other DNA
actcacagctcatatgacgt

SEQ ID NO: 54667 - DNA, 20 bp, synthetic construct
  source 1..20: mol_type = other DNA
gactcacagctcatatgacg

SEQ ID NO: 54668 - DNA, 20 bp, synthetic construct
  source 1..20: mol_type = other DNA
tgactcacagctcatatgac

SEQ ID NO: 54669 - DNA, 20 bp, synthetic construct
  source 1..20: mol_type = other DNA
gtgactcacagctcatatga

SEQ ID NO: 54670 - DNA, 20 bp, synthetic construct
  source 1..20: mol_type = other DNA
ggtgactcacagctcatatg

SEQ ID NO: 54671 - DNA, 20 bp, synthetic construct
  source 1..20: mol_type = other DNA
aggtgactcacagctcatat

SEQ ID NO: 54672 - DNA, 20 bp, synthetic construct
  source 1..20: mol_type = other DNA
aaggtgactcacagctcata

SEQ ID NO: 54673 - DNA, 20 bp, synthetic construct
  source 1..20: mol_type = other DNA
caaggtgactcacagctcat

SEQ ID NO: 54674 - DNA, 20 bp, synthetic construct
  source 1..20: mol_type = other DNA
ccaaggtgactcacagctca

SEQ ID NO: 54675 - DNA, 20 bp, synthetic construct
  source 1..20: mol_type = other DNA
gccaaggtgactcacagctc

SEQ ID NO: 54676 - DNA, 20 bp, synthetic construct
  source 1..20: mol_type = other DNA
tgccaaggtgactcacagct

SEQ ID NO: 54677 - DNA, 20 bp, synthetic construct
  source 1..20: mol_type = other DNA
gtgccaaggtgactcacagc

SEQ ID NO: 54678 - DNA, 20 bp, synthetic construct
  source 1..20: mol_type = other DNA
tgtgccaaggtgactcacag

SEQ ID NO: 54679 - DNA, 20 bp, synthetic construct
  source 1..20: mol_type = other DNA
atgtgccaaggtgactcaca

SEQ ID NO: 54680 - DNA, 20 bp, synthetic construct
  source 1..20: mol_type = other DNA
aatgtgccaaggtgactcac

SEQ ID NO: 54681 - DNA, 20 bp, synthetic construct
  source 1..20: mol_type = other DNA
gaatgtgccaaggtgactca

SEQ ID NO: 54682 - DNA, 20 bp, synthetic construct
  source 1..20: mol_type = other DNA
tgaatgtgccaaggtgactc

SEQ ID NO: 54683 - DNA, 20 bp, synthetic construct
  source 1..20: mol_type = other DNA
atgaatgtgccaaggtgact

SEQ ID NO: 54684 - DNA, 20 bp, synthetic construct
  source 1..20: mol_type = other DNA
tatgaatgtgccaaggtgac

SEQ ID NO: 54685 - DNA, 20 bp, synthetic construct
  source 1..20: mol_type = other DNA
ttatgaatgtgccaaggtga

SEQ ID NO: 54686 - DNA, 20 bp, synthetic construct
  source 1..20: mol_type = other DNA
attatgaatgtgccaaggtg

SEQ ID NO: 54687 - DNA, 20 bp, synthetic construct
  source 1..20: mol_type = other DNA
aattatgaatgtgccaaggt

SEQ ID NO: 54688 - DNA, 20 bp, synthetic construct
  source 1..20: mol_type = other DNA
taattatgaatgtgccaagg

SEQ ID NO: 54689 - DNA, 20 bp, synthetic construct
  source 1..20: mol_type = other DNA
ctaattatgaatgtgccaag

SEQ ID NO: 54690 - DNA, 20 bp, synthetic construct
  source 1..20: mol_type = other DNA
tctaattatgaatgtgccaa

SEQ ID NO: 54691 - DNA, 20 bp, synthetic construct
  source 1..20: mol_type = other DNA
ttctaattatgaatgtgcca

SEQ ID NO: 54692 - DNA, 20 bp, synthetic construct
  source 1..20: mol_type = other DNA
cttctaattatgaatgtgcc

SEQ ID NO: 54693 - DNA, 20 bp, synthetic construct
  source 1..20: mol_type = other DNA
tcttctaattatgaatgtgc

SEQ ID NO: 54694 - DNA, 20 bp, synthetic construct
  source 1..20: mol_type = other DNA
ctcttctaattatgaatgtg

SEQ ID NO: 54695 - DNA, 20 bp, synthetic construct
  source 1..20: mol_type = other DNA
tctcttctaattatgaatgt

SEQ ID NO: 54696 - DNA, 20 bp, synthetic construct
  source 1..20: mol_type = other DNA
gtctcttctaattatgaatg

SEQ ID NO: 54697 - DNA, 20 bp, synthetic construct
  source 1..20: mol_type = other DNA
ggtctcttctaattatgaat

SEQ ID NO: 54698 - DNA, 20 bp, synthetic construct
  source 1..20: mol_type = other DNA
tggtctcttctaattatgaa

SEQ ID NO: 54699 - DNA, 20 bp, synthetic construct
  source 1..20: mol_type = other DNA
atggtctcttctaattatga

SEQ ID NO: 54700 - DNA, 20 bp, synthetic construct
  source 1..20: mol_type = other DNA
gatggtctcttctaattatg

SEQ ID NO: 54701 - DNA, 20 bp, synthetic construct
  source 1..20: mol_type = other DNA
tgatggtctcttctaattat

SEQ ID NO: 54702 - DNA, 20 bp, synthetic construct
  source 1..20: mol_type = other DNA
ctgatggtctcttctaatta

SEQ ID NO: 54703 - DNA, 20 bp, synthetic construct
  source 1..20: mol_type = other DNA
tctgatggtctcttctaatt

SEQ ID NO: 54704 - DNA, 20 bp, synthetic construct
  source 1..20: mol_type = other DNA
atctgatggtctcttctaat

SEQ ID NO: 54705 - DNA, 20 bp, synthetic construct
  source 1..20: mol_type = other DNA
aatctgatggtctcttctaa

SEQ ID NO: 54706 - DNA, 20 bp, synthetic construct
  source 1..20: mol_type = other DNA
taatctgatggtctcttcta

SEQ ID NO: 54707 - DNA, 20 bp, synthetic construct
  source 1..20: mol_type = other DNA
ataatctgatggtctcttct

SEQ ID NO: 54708 - DNA, 20 bp, synthetic construct
  source 1..20: mol_type = other DNA
gataatctgatggtctcttc

SEQ ID NO: 54709 - DNA, 20 bp, synthetic construct
  source 1..20: mol_type = other DNA
tgataatctgatggtctctt

SEQ ID NO: 54710 - DNA, 20 bp, synthetic construct
  source 1..20: mol_type = other DNA
atgataatctgatggtctct

SEQ ID NO: 54711 - DNA, 20 bp, synthetic construct
  source 1..20: mol_type = other DNA
aatgataatctgatggtctc

SEQ ID NO: 54712 - DNA, 20 bp, synthetic construct
  source 1..20: mol_type = other DNA
caatgataatctgatggtct

SEQ ID NO: 54713 - DNA, 20 bp, synthetic construct
  source 1..20: mol_type = other DNA
ccaatgataatctgatggtc

SEQ ID NO: 54714 - DNA, 20 bp, synthetic construct
  source 1..20: mol_type = other DNA
tccaatgataatctgatggt

SEQ ID NO: 54715 - DNA, 20 bp, synthetic construct
  source 1..20: mol_type = other DNA
ttccaatgataatctgatgg

SEQ ID NO: 54716 - DNA, 20 bp, synthetic construct
  source 1..20: mol_type = other DNA
tttccaatgataatctgatg

SEQ ID NO: 54717 - DNA, 20 bp, synthetic construct
  source 1..20: mol_type = other DNA
ttttccaatgataatctgat

SEQ ID NO: 54718 - DNA, 20 bp, synthetic construct
  source 1..20: mol_type = other DNA
attttccaatgataatctga

SEQ ID NO: 54719 - DNA, 20 bp, synthetic construct
  source 1..20: mol_type = other DNA
gattttccaatgataatctg

SEQ ID NO: 54720 - DNA, 20 bp, synthetic construct
  source 1..20: mol_type = other DNA
tgattttccaatgataatct

SEQ ID NO: 54721 - DNA, 20 bp, synthetic construct
  source 1..20: mol_type = other DNA
ctgattttccaatgataatc

SEQ ID NO: 54722 - DNA, 20 bp, synthetic construct
  source 1..20: mol_type = other DNA
actgattttccaatgataat

SEQ ID NO: 54723 - DNA, 20 bp, synthetic construct
  source 1..20: mol_type = other DNA
aactgattttccaatgataa

SEQ ID NO: 54724 - DNA, 20 bp, synthetic construct
  source 1..20: mol_type = other DNA
aaactgattttccaatgata

SEQ ID NO: 54725 - DNA, 20 bp, synthetic construct
  source 1..20: mol_type = other DNA
caaactgattttccaatgat

SEQ ID NO: 54726 - DNA, 20 bp, synthetic construct
  source 1..20: mol_type = other DNA
acaaactgattttccaatga

SEQ ID NO: 54727 - DNA, 20 bp, synthetic construct
  source 1..20: mol_type = other DNA
tacaaactgattttccaatg

SEQ ID NO: 54728 - DNA, 20 bp, synthetic construct
  source 1..20: mol_type = other DNA
atacaaactgattttccaat

SEQ ID NO: 54729 - DNA, 20 bp, synthetic construct
  source 1..20: mol_type = other DNA
aatacaaactgattttccaa

SEQ ID NO: 54730 - DNA, 20 bp, synthetic construct
  source 1..20: mol_type = other DNA
aaatacaaactgattttcca

SEQ ID NO: 54731 - DNA, 20 bp, synthetic construct
  source 1..20: mol_type = other DNA
taaatacaaactgattttcc

SEQ ID NO: 54732 - DNA, 20 bp, synthetic construct
  source 1..20: mol_type = other DNA
ataaatacaaactgattttc

SEQ ID NO: 54733 - DNA, 20 bp, synthetic construct
  source 1..20: mol_type = other DNA
gataaatacaaactgatttt

SEQ ID NO: 54734 - DNA, 20 bp, synthetic construct
  source 1..20: mol_type = other DNA
ggataaatacaaactgattt

SEQ ID NO: 54735 - DNA, 20 bp, synthetic construct
  source 1..20: mol_type = other DNA
aggataaatacaaactgatt

SEQ ID NO: 54736 - DNA, 20 bp, synthetic construct
  source 1..20: mol_type = other DNA
aaggataaatacaaactgat

SEQ ID NO: 54737 - DNA, 20 bp, synthetic construct
  source 1..20: mol_type = other DNA
aaaggataaatacaaactga

SEQ ID NO: 54738 - DNA, 20 bp, synthetic construct
  source 1..20: mol_type = other DNA
taaaggataaatacaaactg

SEQ ID NO: 54739 - DNA, 20 bp, synthetic construct
  source 1..20: mol_type = other DNA
ataaaggataaatacaaact

SEQ ID NO: 54740 - DNA, 20 bp, synthetic construct
  source 1..20: mol_type = other DNA
aataaaggataaatacaaac

SEQ ID NO: 54741 - DNA, 20 bp, synthetic construct
  source 1..20: mol_type = other DNA
aaataaaggataaatacaaa

SEQ ID NO: 54742 - DNA, 20 bp, synthetic construct
  source 1..20: mol_type = other DNA
caaataaaggataaatacaa

SEQ ID NO: 54743 - DNA, 20 bp, synthetic construct
  source 1..20: mol_type = other DNA
tcaaataaaggataaataca

SEQ ID NO: 54744 - DNA, 20 bp, synthetic construct
  source 1..20: mol_type = other DNA
ttcaaataaaggataaatac

SEQ ID NO: 54745 - DNA, 20 bp, synthetic construct
  source 1..20: mol_type = other DNA
attcaaataaaggataaata

SEQ ID NO: 54746 - DNA, 20 bp, synthetic construct
  source 1..20: mol_type = other DNA
aattcaaataaaggataaat

SEQ ID NO: 54747 - DNA, 20 bp, synthetic construct
  source 1..20: mol_type = other DNA
gaattcaaataaaggataaa

SEQ ID NO: 54748 - DNA, 20 bp, synthetic construct
  source 1..20: mol_type = other DNA
ggaattcaaataaaggataa

SEQ ID NO: 54749 - DNA, 20 bp, synthetic construct
  source 1..20: mol_type = other DNA
tggaattcaaataaaggata

SEQ ID NO: 54750 - DNA, 20 bp, synthetic construct
  source 1..20: mol_type = other DNA
ctggaattcaaataaaggat

SEQ ID NO: 54751 - DNA, 20 bp, synthetic construct
  source 1..20: mol_type = other DNA
actggaattcaaataaagga

SEQ ID NO: 54752 - DNA, 20 bp, synthetic construct
  source 1..20: mol_type = other DNA
cactggaattcaaataaagg

SEQ ID NO: 54753 - DNA, 20 bp, synthetic construct
  source 1..20: mol_type = other DNA
gcactggaattcaaataaag

SEQ ID NO: 54754 - DNA, 20 bp, synthetic construct
  source 1..20: mol_type = other DNA
tgcactggaattcaaataaa

SEQ ID NO: 54755 - DNA, 20 bp, synthetic construct
  source 1..20: mol_type = other DNA
ctgcactggaattcaaataa

SEQ ID NO: 54756 - DNA, 20 bp, synthetic construct
  source 1..20: mol_type = other DNA
tctgcactggaattcaaata

SEQ ID NO: 54757 - DNA, 20 bp, synthetic construct
  source 1..20: mol_type = other DNA
gtctgcactggaattcaaat

SEQ ID NO: 54758 - DNA, 20 bp, synthetic construct
  source 1..20: mol_type = other DNA
tgtctgcactggaattcaaa

SEQ ID NO: 54759 - DNA, 20 bp, synthetic construct
  source 1..20: mol_type = other DNA
ctgtctgcactggaattcaa

SEQ ID NO: 54760 - DNA, 20 bp, synthetic construct
  source 1..20: mol_type = other DNA
tctgtctgcactggaattca

SEQ ID NO: 54761 - DNA, 20 bp, synthetic construct
  source 1..20: mol_type = other DNA
atctgtctgcactggaattc

SEQ ID NO: 54762 - DNA, 20 bp, synthetic construct
  source 1..20: mol_type = other DNA
gatctgtctgcactggaatt

SEQ ID NO: 54763 - DNA, 20 bp, synthetic construct
  source 1..20: mol_type = other DNA
agatctgtctgcactggaat

SEQ ID NO: 54764 - DNA, 20 bp, synthetic construct
  source 1..20: mol_type = other DNA
cagatctgtctgcactggaa

SEQ ID NO: 54765 - DNA, 20 bp, synthetic construct
  source 1..20: mol_type = other DNA
tcagatctgtctgcactgga

SEQ ID NO: 54766 - DNA, 20 bp, synthetic construct
  source 1..20: mol_type = other DNA
ctcagatctgtctgcactgg

SEQ ID NO: 54767 - DNA, 20 bp, synthetic construct
  source 1..20: mol_type = other DNA
cctcagatctgtctgcactg

SEQ ID NO: 54768 - DNA, 20 bp, synthetic construct
  source 1..20: mol_type = other DNA
acctcagatctgtctgcact

SEQ ID NO: 54769 - DNA, 20 bp, synthetic construct
  source 1..20: mol_type = other DNA
aacctcagatctgtctgcac

SEQ ID NO: 54770 - DNA, 20 bp, synthetic construct
  source 1..20: mol_type = other DNA
gaacctcagatctgtctgca

SEQ ID NO: 54771 - DNA, 20 bp, synthetic construct
  source 1..20: mol_type = other DNA
agaacctcagatctgtctgc

SEQ ID NO: 54772 - DNA, 20 bp, synthetic construct
  source 1..20: mol_type = other DNA
gagaacctcagatctgtctg

SEQ ID NO: 54773 - DNA, 20 bp, synthetic construct
  source 1..20: mol_type = other DNA
agagaacctcagatctgtct

SEQ ID NO: 54774 - DNA, 20 bp, synthetic construct
  source 1..20: mol_type = other DNA
aagagaacctcagatctgtc

SEQ ID NO: 54775 - DNA, 20 bp, synthetic construct
  source 1..20: mol_type = other DNA
gaagagaacctcagatctgt

SEQ ID NO: 54776 - DNA, 20 bp, synthetic construct
  source 1..20: mol_type = other DNA
tgaagagaacctcagatctg

SEQ ID NO: 54777 - DNA, 20 bp, synthetic construct
  source 1..20: mol_type = other DNA
atgaagagaacctcagatct

SEQ ID NO: 54778 - DNA, 20 bp, synthetic construct
  source 1..20: mol_type = other DNA
aatgaagagaacctcagatc

SEQ ID NO: 54779 - DNA, 20 bp, synthetic construct
  source 1..20: mol_type = other DNA
aaatgaagagaacctcagat

SEQ ID NO: 54780 - DNA, 20 bp, synthetic construct
  source 1..20: mol_type = other DNA
aaaatgaagagaacctcaga

SEQ ID NO: 54781 - DNA, 20 bp, synthetic construct
  source 1..20: mol_type = other DNA
caaaatgaagagaacctcag

SEQ ID NO: 54782 - DNA, 20 bp, synthetic construct
  source 1..20: mol_type = other DNA
gcaaaatgaagagaacctca

SEQ ID NO: 54783 - DNA, 20 bp, synthetic construct
  source 1..20: mol_type = other DNA
agcaaaatgaagagaacctc

SEQ ID NO: 54784 - DNA, 20 bp, synthetic construct
  source 1..20: mol_type = other DNA
tagcaaaatgaagagaacct

SEQ ID NO: 54785 - DNA, 20 bp, synthetic construct
  source 1..20: mol_type = other DNA
ttagcaaaatgaagagaacc

SEQ ID NO: 54786 - DNA, 20 bp, synthetic construct
  source 1..20: mol_type = other DNA
tttagcaaaatgaagagaac

SEQ ID NO: 54787 - DNA, 20 bp, synthetic construct
  source 1..20: mol_type = other DNA
ttttagcaaaatgaagagaa

SEQ ID NO: 54788 - DNA, 20 bp, synthetic construct
  source 1..20: mol_type = other DNA
gttttagcaaaatgaagaga

SEQ ID NO: 54789 - DNA, 20 bp, synthetic construct
  source 1..20: mol_type = other DNA
agttttagcaaaatgaagag

SEQ ID NO: 54790 - DNA, 20 bp, synthetic construct
  source 1..20: mol_type = other DNA
aagttttagcaaaatgaaga

SEQ ID NO: 54791 - DNA, 20 bp, synthetic construct
  source 1..20: mol_type = other DNA
gaagttttagcaaaatgaag

SEQ ID NO: 54792 - DNA, 20 bp, synthetic construct
  source 1..20: mol_type = other DNA
agaagttttagcaaaatgaa

SEQ ID NO: 54793 - DNA, 20 bp, synthetic construct
  source 1..20: mol_type = other DNA
aagaagttttagcaaaatga

SEQ ID NO: 54794 - DNA, 20 bp, synthetic construct
  source 1..20: mol_type = other DNA
taagaagttttagcaaaatg

SEQ ID NO: 54795 - DNA, 20 bp, synthetic construct
  source 1..20: mol_type = other DNA
ctaagaagttttagcaaaat

SEQ ID NO: 54796 - DNA, 20 bp, synthetic construct
  source 1..20: mol_type = other DNA
cctaagaagttttagcaaaa

SEQ ID NO: 54797 - DNA, 20 bp, synthetic construct
  source 1..20: mol_type = other DNA
ccctaagaagttttagcaaa

SEQ ID NO: 54798 - DNA, 20 bp, synthetic construct
  source 1..20: mol_type = other DNA
gccctaagaagttttagcaa

SEQ ID NO: 54799 - DNA, 20 bp, synthetic construct
  source 1..20: mol_type = other DNA
ggccctaagaagttttagca

SEQ ID NO: 54800 - DNA, 20 bp, synthetic construct
  source 1..20: mol_type = other DNA
aggccctaagaagttttagc

SEQ ID NO: 54801 - DNA, 20 bp, synthetic construct
  source 1..20: mol_type = other DNA
aaggccctaagaagttttag

SEQ ID NO: 54802 - DNA, 20 bp, synthetic construct
  source 1..20: mol_type = other DNA
gaaggccctaagaagtttta

SEQ ID NO: 54803 - DNA, 20 bp, synthetic construct
  source 1..20: mol_type = other DNA
tgaaggccctaagaagtttt

SEQ ID NO: 54804 - DNA, 20 bp, synthetic construct
  source 1..20: mol_type = other DNA
ctgaaggccctaagaagttt

SEQ ID NO: 54805 - DNA, 20 bp, synthetic construct
  source 1..20: mol_type = other DNA
actgaaggccctaagaagtt

SEQ ID NO: 54806 - DNA, 20 bp, synthetic construct
  source 1..20: mol_type = other DNA
gactgaaggccctaagaagt

SEQ ID NO: 54807 - DNA, 20 bp, synthetic construct
  source 1..20: mol_type = other DNA
cgactgaaggccctaagaag

SEQ ID NO: 54808 - DNA, 20 bp, synthetic construct
  source 1..20: mol_type = other DNA
gcgactgaaggccctaagaa

SEQ ID NO: 54809 - DNA, 20 bp, synthetic construct
  source 1..20: mol_type = other DNA
agcgactgaaggccctaaga

SEQ ID NO: 54810 - DNA, 20 bp, synthetic construct
  source 1..20: mol_type = other DNA
aagcgactgaaggccctaag

SEQ ID NO: 54811 - DNA, 20 bp, synthetic construct
  source 1..20: mol_type = other DNA
aaagcgactgaaggccctaa

SEQ ID NO: 54812 - DNA, 20 bp, synthetic construct
  source 1..20: mol_type = other DNA
aaaagcgactgaaggcccta

SEQ ID NO: 54813 - DNA, 20 bp, synthetic construct
  source 1..20: mol_type = other DNA
caaaagcgactgaaggccct

SEQ ID NO: 54814 - DNA, 20 bp, synthetic construct
  source 1..20: mol_type = other DNA
ccaaaagcgactgaaggccc

SEQ ID NO: 54815 - DNA, 20 bp, synthetic construct
  source 1..20: mol_type = other DNA
gccaaaagcgactgaaggcc

SEQ ID NO: 54816 - DNA, 20 bp, synthetic construct
  source 1..20: mol_type = other DNA
agccaaaagcgactgaaggc

SEQ ID NO: 54817 - DNA, 20 bp, synthetic construct
  source 1..20: mol_type = other DNA
gagccaaaagcgactgaagg

SEQ ID NO: 54818 - DNA, 20 bp, synthetic construct
  source 1..20: mol_type = other DNA
agagccaaaagcgactgaag

SEQ ID NO: 54819 - DNA, 20 bp, synthetic construct
  source 1..20: mol_type = other DNA
cagagccaaaagcgactgaa

SEQ ID NO: 54820 - DNA, 20 bp, synthetic construct
  source 1..20: mol_type = other DNA
acagagccaaaagcgactga

SEQ ID NO: 54821 - DNA, 20 bp, synthetic construct
  source 1..20: mol_type = other DNA
tacagagccaaaagcgactg

SEQ ID NO: 54822 - DNA, 20 bp, synthetic construct
  source 1..20: mol_type = other DNA
atacagagccaaaagcgact

SEQ ID NO: 54823 - DNA, 20 bp, synthetic construct
  source 1..20: mol_type = other DNA
aatacagagccaaaagcgac

SEQ ID NO: 54824 - DNA, 20 bp, synthetic construct
  source 1..20: mol_type = other DNA
gaatacagagccaaaagcga

SEQ ID NO: 54825 - DNA, 20 bp, synthetic construct
  source 1..20: mol_type = other DNA
cgaatacagagccaaaagcg

SEQ ID NO: 54826 - DNA, 20 bp, synthetic construct
  source 1..20: mol_type = other DNA
acgaatacagagccaaaagc

SEQ ID NO: 54827 - DNA, 20 bp, synthetic construct
  source 1..20: mol_type = other DNA
cacgaatacagagccaaaag

SEQ ID NO: 54828 - DNA, 20 bp, synthetic construct
  source 1..20: mol_type = other DNA
acacgaatacagagccaaaa

SEQ ID NO: 54829 - DNA, 20 bp, synthetic construct
  source 1..20: mol_type = other DNA
tacacgaatacagagccaaa

SEQ ID NO: 54830 - DNA, 20 bp, synthetic construct
  source 1..20: mol_type = other DNA
atacacgaatacagagccaa

SEQ ID NO: 54831 - DNA, 20 bp, synthetic construct
  source 1..20: mol_type = other DNA
gatacacgaatacagagcca

SEQ ID NO: 54832 - DNA, 20 bp, synthetic construct
  source 1..20: mol_type = other DNA
agatacacgaatacagagcc

SEQ ID NO: 54833 - DNA, 20 bp, synthetic construct
  source 1..20: mol_type = other DNA
aagatacacgaatacagagc

SEQ ID NO: 54834 - DNA, 20 bp, synthetic construct
  source 1..20: mol_type = other DNA
aaagatacacgaatacagag

SEQ ID NO: 54835 - DNA, 20 bp, synthetic construct
  source 1..20: mol_type = other DNA
caaagatacacgaatacaga

SEQ ID NO: 54836 - DNA, 20 bp, synthetic construct
  source 1..20: mol_type = other DNA
ccaaagatacacgaatacag

SEQ ID NO: 54837 - DNA, 20 bp, synthetic construct
  source 1..20: mol_type = other DNA
tccaaagatacacgaataca

SEQ ID NO: 54838 - DNA, 20 bp, synthetic construct
  source 1..20: mol_type = other DNA
ttccaaagatacacgaatac

SEQ ID NO: 54839 - DNA, 20 bp, synthetic construct
  source 1..20: mol_type = other DNA
attccaaagatacacgaata

SEQ ID NO: 54840 - DNA, 20 bp, synthetic construct
  source 1..20: mol_type = other DNA
aattccaaagatacacgaat

SEQ ID NO: 54841 - DNA, 20 bp, synthetic construct
  source 1..20: mol_type = other DNA
caattccaaagatacacgaa

SEQ ID NO: 54842 - DNA, 20 bp, synthetic construct
  source 1..20: mol_type = other DNA
acaattccaaagatacacga

SEQ ID NO: 54843 - DNA, 20 bp, synthetic construct
  source 1..20: mol_type = other DNA
gacaattccaaagatacacg

SEQ ID NO: 54844 - DNA, 20 bp, synthetic construct
  source 1..20: mol_type = other DNA
ggacaattccaaagatacac

SEQ ID NO: 54845 - DNA, 20 bp, synthetic construct
  source 1..20: mol_type = other DNA
aggacaattccaaagataca

SEQ ID NO: 54846 - DNA, 20 bp, synthetic construct
  source 1..20: mol_type = other DNA
caggacaattccaaagatac

SEQ ID NO: 54847 - DNA, 20 bp, synthetic construct
  source 1..20: mol_type = other DNA
acaggacaattccaaagata

SEQ ID NO: 54848 - DNA, 20 bp, synthetic construct
  source 1..20: mol_type = other DNA
aacaggacaattccaaagat

SEQ ID NO: 54849 - DNA, 20 bp, synthetic construct
  source 1..20: mol_type = other DNA
taacaggacaattccaaaga

SEQ ID NO: 54850 - DNA, 20 bp, synthetic construct
  source 1..20: mol_type = other DNA
ataacaggacaattccaaag

SEQ ID NO: 54851 - DNA, 20 bp, synthetic construct
  source 1..20: mol_type = other DNA
gataacaggacaattccaaa

SEQ ID NO: 54852 - DNA, 20 bp, synthetic construct
  source 1..20: mol_type = other DNA
agataacaggacaattccaa

SEQ ID NO: 54853 - DNA, 20 bp, synthetic construct
  source 1..20: mol_type = other DNA
gagataacaggacaattcca

SEQ ID NO: 54854 - DNA, 20 bp, synthetic construct
  source 1..20: mol_type = other DNA
agagataacaggacaattcc

SEQ ID NO: 54855 - DNA, 20 bp, synthetic construct
  source 1..20: mol_type = other DNA
cagagataacaggacaattc

SEQ ID NO: 54856 - DNA, 20 bp, synthetic construct
  source 1..20: mol_type = other DNA
gcagagataacaggacaatt

SEQ ID NO: 54857 - DNA, 20 bp, synthetic construct
  source 1..20: mol_type = other DNA
agcagagataacaggacaat

SEQ ID NO: 54858 - DNA, 20 bp, synthetic construct
  source 1..20: mol_type = other DNA
aagcagagataacaggacaa

SEQ ID NO: 54859 - DNA, 20 bp, synthetic construct
  source 1..20: mol_type = other DNA
caagcagagataacaggaca

SEQ ID NO: 54860 - DNA, 20 bp, synthetic construct
  source 1..20: mol_type = other DNA
acaagcagagataacaggac

SEQ ID NO: 54861 - DNA, 20 bp, synthetic construct
  source 1..20: mol_type = other DNA
aacaagcagagataacagga

SEQ ID NO: 54862 - DNA, 20 bp, synthetic construct
  source 1..20: mol_type = other DNA
aaacaagcagagataacagg

SEQ ID NO: 54863 - DNA, 20 bp, synthetic construct
  source 1..20: mol_type = other DNA
aaaacaagcagagataacag

SEQ ID NO: 54864 - DNA, 20 bp, synthetic construct
  source 1..20: mol_type = other DNA
aaaaacaagcagagataaca

SEQ ID NO: 54865 - DNA, 20 bp, synthetic construct
  source 1..20: mol_type = other DNA
aaaaaacaagcagagataac

SEQ ID NO: 54866 - DNA, 20 bp, synthetic construct
  source 1..20: mol_type = other DNA
taaaaaacaagcagagataa

SEQ ID NO: 54867 - DNA, 20 bp, synthetic construct
  source 1..20: mol_type = other DNA
gtaaaaaacaagcagagata

SEQ ID NO: 54868 - DNA, 20 bp, synthetic construct
  source 1..20: mol_type = other DNA
agtaaaaaacaagcagagat

SEQ ID NO: 54869 - DNA, 20 bp, synthetic construct
  source 1..20: mol_type = other DNA
aagtaaaaaacaagcagaga

SEQ ID NO: 54870 - DNA, 20 bp, synthetic construct
  source 1..20: mol_type = other DNA
caagtaaaaaacaagcagag

SEQ ID NO: 54871 - DNA, 20 bp, synthetic construct
  source 1..20: mol_type = other DNA
tcaagtaaaaaacaagcaga

SEQ ID NO: 54872 - DNA, 20 bp, synthetic construct
  source 1..20: mol_type = other DNA
atcaagtaaaaaacaagcag

SEQ ID NO: 54873 - DNA, 20 bp, synthetic construct
  source 1..20: mol_type = other DNA
aatcaagtaaaaaacaagca

SEQ ID NO: 54874 - DNA, 20 bp, synthetic construct
  source 1..20: mol_type = other DNA
aaatcaagtaaaaaacaagc

SEQ ID NO: 54875 - DNA, 20 bp, synthetic construct
  source 1..20: mol_type = other DNA
aaaatcaagtaaaaaacaag

SEQ ID NO: 54876 - DNA, 20 bp, synthetic construct
  source 1..20: mol_type = other DNA
gaaaatcaagtaaaaaacaa

SEQ ID NO: 54877 - DNA, 20 bp, synthetic construct
  source 1..20: mol_type = other DNA
ggaaaatcaagtaaaaaaca

SEQ ID NO: 54878 - DNA, 20 bp, synthetic construct
  source 1..20: mol_type = other DNA
tggaaaatcaagtaaaaaac

SEQ ID NO: 54879 - DNA, 20 bp, synthetic construct
  source 1..20: mol_type = other DNA
atggaaaatcaagtaaaaaa

SEQ ID NO: 54880 - DNA, 20 bp, synthetic construct
  source 1..20: mol_type = other DNA
gatggaaaatcaagtaaaaa

SEQ ID NO: 54881 - DNA, 20 bp, synthetic construct
  source 1..20: mol_type = other DNA
ggatggaaaatcaagtaaaa

SEQ ID NO: 54882 - DNA, 20 bp, synthetic construct
  source 1..20: mol_type = other DNA
tggatggaaaatcaagtaaa

SEQ ID NO: 54883 - DNA, 20 bp, synthetic construct
  source 1..20: mol_type = other DNA
atggatggaaaatcaagtaa

SEQ ID NO: 54884 - DNA, 20 bp, synthetic construct
  source 1..20: mol_type = other DNA
aatggatggaaaatcaagta

SEQ ID NO: 54885 - DNA, 20 bp, synthetic construct
  source 1..20: mol_type = other DNA
aaatggatggaaaatcaagt

SEQ ID NO: 54886 - DNA, 20 bp, synthetic construct
  source 1..20: mol_type = other DNA
gaaatggatggaaaatcaag

SEQ ID NO: 54887 - DNA, 20 bp, synthetic construct
  source 1..20: mol_type = other DNA
ggaaatggatggaaaatcaa

SEQ ID NO: 54888 - DNA, 20 bp, synthetic construct
  source 1..20: mol_type = other DNA
tggaaatggatggaaaatca

SEQ ID NO: 54889 - DNA, 20 bp, synthetic construct
  source 1..20: mol_type = other DNA
ctggaaatggatggaaaatc

SEQ ID NO: 54890 - DNA, 20 bp, synthetic construct
  source 1..20: mol_type = other DNA
actggaaatggatggaaaat

SEQ ID NO: 54891 - DNA, 20 bp, synthetic construct
  source 1..20: mol_type = other DNA
tactggaaatggatggaaaa

SEQ ID NO: 54892 - DNA, 20 bp, synthetic construct
  source 1..20: mol_type = other DNA
atactggaaatggatggaaa

SEQ ID NO: 54893 - DNA, 20 bp, synthetic construct
  source 1..20: mol_type = other DNA
aatactggaaatggatggaa

SEQ ID NO: 54894 - DNA, 20 bp, synthetic construct
  source 1..20: mol_type = other DNA
gaatactggaaatggatgga

SEQ ID NO: 54895 - DNA, 20 bp, synthetic construct
  source 1..20: mol_type = other DNA
ggaatactggaaatggatgg

SEQ ID NO: 54896 - DNA, 20 bp, synthetic construct
  source 1..20: mol_type = other DNA
aggaatactggaaatggatg

SEQ ID NO: 54897 - DNA, 20 bp, synthetic construct
  source 1..20: mol_type = other DNA
aaggaatactggaaatggat

SEQ ID NO: 54898 - DNA, 20 bp, synthetic construct
  source 1..20: mol_type = other DNA
aaaggaatactggaaatgga

SEQ ID NO: 54899 - DNA, 20 bp, synthetic construct
  source 1..20: mol_type = other DNA
gaaaggaatactggaaatgg

SEQ ID NO: 54900 - DNA, 20 bp, synthetic construct
  source 1..20: mol_type = other DNA
agaaaggaatactggaaatg

SEQ ID NO: 54901 - DNA, 20 bp, synthetic construct
  source 1..20: mol_type = other DNA
gagaaaggaatactggaaat

SEQ ID NO: 54902 - DNA, 20 bp, synthetic construct
  source 1..20: mol_type = other DNA
ggagaaaggaatactggaaa

SEQ ID NO: 54903 - DNA, 20 bp, synthetic construct
  source 1..20: mol_type = other DNA
aggagaaaggaatactggaa

SEQ ID NO: 54904 - DNA, 20 bp, synthetic construct
  source 1..20: mol_type = other DNA
gaggagaaaggaatactgga

SEQ ID NO: 54905 - DNA, 20 bp, synthetic construct
  source 1..20: mol_type = other DNA
agaggagaaaggaatactgg

SEQ ID NO: 54906 - DNA, 20 bp, synthetic construct
  source 1..20: mol_type = other DNA
tagaggagaaaggaatactg

SEQ ID NO: 54907 - DNA, 20 bp, synthetic construct
  source 1..20: mol_type = other DNA
atagaggagaaaggaatact

SEQ ID NO: 54908 - DNA, 20 bp, synthetic construct
  source 1..20: mol_type = other DNA
aatagaggagaaaggaatac

SEQ ID NO: 54909 - DNA, 20 bp, synthetic construct
  source 1..20: mol_type = other DNA
aaatagaggagaaaggaata

SEQ ID NO: 54910 - DNA, 20 bp, synthetic construct
  source 1..20: mol_type = other DNA
aaaatagaggagaaaggaat

SEQ ID NO: 54911 - DNA, 20 bp, synthetic construct
  source 1..20: mol_type = other DNA
aaaaatagaggagaaaggaa

SEQ ID NO: 54912 - DNA, 20 bp, synthetic construct
  source 1..20: mol_type = other DNA
aaaaaatagaggagaaagga

SEQ ID NO: 54913 - DNA, 20 bp, synthetic construct
  source 1..20: mol_type = other DNA
aaaaaaatagaggagaaagg

SEQ ID NO: 54914 - DNA, 20 bp, synthetic construct
  source 1..20: mol_type = other DNA
gaaaaaaatagaggagaaag

SEQ ID NO: 54915 - DNA, 20 bp, synthetic construct
  source 1..20: mol_type = other DNA
ggaaaaaaatagaggagaaa

SEQ ID NO: 54916 - DNA, 20 bp, synthetic construct
  source 1..20: mol_type = other DNA
aggaaaaaaatagaggagaa

SEQ ID NO: 54917 - DNA, 20 bp, synthetic construct
  source 1..20: mol_type = other DNA
aaggaaaaaaatagaggaga

SEQ ID NO: 54918 - DNA, 20 bp, synthetic construct
  source 1..20: mol_type = other DNA
gaaggaaaaaaatagaggag

SEQ ID NO: 54919 - DNA, 20 bp, synthetic construct
  source 1..20: mol_type = other DNA
tgaaggaaaaaaatagagga

SEQ ID NO: 54920 - DNA, 20 bp, synthetic construct
  source 1..20: mol_type = other DNA
atgaaggaaaaaaatagagg

SEQ ID NO: 54921 - DNA, 20 bp, synthetic construct
  source 1..20: mol_type = other DNA
aatgaaggaaaaaaatagag

SEQ ID NO: 54922 - DNA, 20 bp, synthetic construct
  source 1..20: mol_type = other DNA
aaatgaaggaaaaaaataga

SEQ ID NO: 54923 - DNA, 20 bp, synthetic construct
  source 1..20: mol_type = other DNA
aaaatgaaggaaaaaaatag

SEQ ID NO: 54924 - DNA, 20 bp, synthetic construct
  source 1..20: mol_type = other DNA
gaaaatgaaggaaaaaaata

SEQ ID NO: 54925 - DNA, 20 bp, synthetic construct
  source 1..20: mol_type = other DNA
agaaaatgaaggaaaaaaat

SEQ ID NO: 54926 - DNA, 20 bp, synthetic construct
  source 1..20: mol_type = other DNA
aagaaaatgaaggaaaaaaa

SEQ ID NO: 54927 - DNA, 20 bp, synthetic construct
  source 1..20: mol_type = other DNA
aaagaaaatgaaggaaaaaa

SEQ ID NO: 54928 - DNA, 20 bp, synthetic construct
  source 1..20: mol_type = other DNA
gaaagaaaatgaaggaaaaa

SEQ ID NO: 54929 - DNA, 20 bp, synthetic construct
  source 1..20: mol_type = other DNA
agaaagaaaatgaaggaaaa

SEQ ID NO: 54930 - DNA, 20 bp, synthetic construct
  source 1..20: mol_type = other DNA
cagaaagaaaatgaaggaaa

SEQ ID NO: 54931 - DNA, 20 bp, synthetic construct
  source 1..20: mol_type = other DNA
gcagaaagaaaatgaaggaa

SEQ ID NO: 54932 - DNA, 20 bp, synthetic construct
  source 1..20: mol_type = other DNA
agcagaaagaaaatgaagga

SEQ ID NO: 54933 - DNA, 20 bp, synthetic construct
  source 1..20: mol_type = other DNA
gagcagaaagaaaatgaagg

SEQ ID NO: 54934 - DNA, 20 bp, synthetic construct
  source 1..20: mol_type = other DNA
agagcagaaagaaaatgaag

SEQ ID NO: 54935 - DNA, 20 bp, synthetic construct
  source 1..20: mol_type = other DNA
aagagcagaaagaaaatgaa

SEQ ID NO: 54936 - DNA, 20 bp, synthetic construct
  source 1..20: mol_type = other DNA
gaagagcagaaagaaaatga

SEQ ID NO: 54937 - DNA, 20 bp, synthetic construct
  source 1..20: mol_type = other DNA
ggaagagcagaaagaaaatg

SEQ ID NO: 54938 - DNA, 20 bp, synthetic construct
  source 1..20: mol_type = other DNA
aggaagagcagaaagaaaat

SEQ ID NO: 54939 - DNA, 20 bp, synthetic construct
  source 1..20: mol_type = other DNA
caggaagagcagaaagaaaa

SEQ ID NO: 54940 - DNA, 20 bp, synthetic construct
  source 1..20: mol_type = other DNA
acaggaagagcagaaagaaa

SEQ ID NO: 54941 - DNA, 20 bp, synthetic construct
  source 1..20: mol_type = other DNA
aacaggaagagcagaaagaa

SEQ ID NO: 54942 - DNA, 20 bp, synthetic construct
  source 1..20: mol_type = other DNA
caacaggaagagcagaaaga

SEQ ID NO: 54943 - DNA, 20 bp, synthetic construct
  source 1..20: mol_type = other DNA
gcaacaggaagagcagaaag

SEQ ID NO: 54944 - DNA, 20 bp, synthetic construct
  source 1..20: mol_type = other DNA
cgcaacaggaagagcagaaa

SEQ ID NO: 54945 - DNA, 20 bp, synthetic construct
  source 1..20: mol_type = other DNA
gcgcaacaggaagagcagaa

SEQ ID NO: 54946 - DNA, 20 bp, synthetic construct
  source 1..20: mol_type = other DNA
ggcgcaacaggaagagcaga

SEQ ID NO: 54947 - DNA, 20 bp, synthetic construct
  source 1..20: mol_type = other DNA
tggcgcaacaggaagagcag

SEQ ID NO: 54948 - DNA, 20 bp, synthetic construct
  source 1..20: mol_type = other DNA
atggcgcaacaggaagagca

SEQ ID NO: 54949 - DNA, 20 bp, synthetic construct
  source 1..20: mol_type = other DNA
aatggcgcaacaggaagagc

SEQ ID NO: 54950 - DNA, 20 bp, synthetic construct
  source 1..20: mol_type = other DNA
taatggcgcaacaggaagag

SEQ ID NO: 54951 - DNA, 20 bp, synthetic construct
  source 1..20: mol_type = other DNA
ataatggcgcaacaggaaga

SEQ ID NO: 54952 - DNA, 20 bp, synthetic construct
  source 1..20: mol_type = other DNA
aataatggcgcaacaggaag

SEQ ID NO: 54953 - DNA, 20 bp, synthetic construct
  source 1..20: mol_type = other DNA
gaataatggcgcaacaggaa

SEQ ID NO: 54954 - DNA, 20 bp, synthetic construct
  source 1..20: mol_type = other DNA
tgaataatggcgcaacagga

SEQ ID NO: 54955 - DNA, 20 bp, synthetic construct
  source 1..20: mol_type = other DNA
atgaataatggcgcaacagg

SEQ ID NO: 54956 - DNA, 20 bp, synthetic construct
  source 1..20: mol_type = other DNA
catgaataatggcgcaacag

SEQ ID NO: 54957 - DNA, 20 bp, synthetic construct
  source 1..20: mol_type = other DNA
acatgaataatggcgcaaca

SEQ ID NO: 54958 - DNA, 20 bp, synthetic construct
  source 1..20: mol_type = other DNA
aacatgaataatggcgcaac

SEQ ID NO: 54959 - DNA, 20 bp, synthetic construct
  source 1..20: mol_type = other DNA
aaacatgaataatggcgcaa

SEQ ID NO: 54960 - DNA, 20 bp, synthetic construct
  source 1..20: mol_type = other DNA
aaaacatgaataatggcgca

SEQ ID NO: 54961 - DNA, 20 bp, synthetic construct
  source 1..20: mol_type = other DNA
gaaaacatgaataatggcgc

SEQ ID NO: 54962 - DNA, 20 bp, synthetic construct
  source 1..20: mol_type = other DNA
ggaaaacatgaataatggcg

SEQ ID NO: 54963 - DNA, 20 bp, synthetic construct
  source 1..20: mol_type = other DNA
aggaaaacatgaataatggc

SEQ ID NO: 54964 - DNA, 20 bp, synthetic construct
  source 1..20: mol_type = other DNA
gaggaaaacatgaataatgg

SEQ ID NO: 54965 - DNA, 20 bp, synthetic construct
  source 1..20: mol_type = other DNA
agaggaaaacatgaataatg

SEQ ID NO: 54966 - DNA, 20 bp, synthetic construct
  source 1..20: mol_type = other DNA
aagaggaaaacatgaataat

SEQ ID NO: 54967 - DNA, 20 bp, synthetic construct
  source 1..20: mol_type = other DNA
aaagaggaaaacatgaataa

SEQ ID NO: 54968 - DNA, 20 bp, synthetic construct
  source 1..20: mol_type = other DNA
taaagaggaaaacatgaata

SEQ ID NO: 54969 - DNA, 20 bp, synthetic construct
  source 1..20: mol_type = other DNA
gtaaagaggaaaacatgaat

SEQ ID NO: 54970 - DNA, 20 bp, synthetic construct
  source 1..20: mol_type = other DNA
agtaaagaggaaaacatgaa

SEQ ID NO: 54971 - DNA, 20 bp, synthetic construct
  source 1..20: mol_type = other DNA
gagtaaagaggaaaacatga

SEQ ID NO: 54972 - DNA, 20 bp, synthetic construct
  source 1..20: mol_type = other DNA
ggagtaaagaggaaaacatg

SEQ ID NO: 54973 - DNA, 20 bp, synthetic construct
  source 1..20: mol_type = other DNA
tggagtaaagaggaaaacat

SEQ ID NO: 54974 - DNA, 20 bp, synthetic construct
  source 1..20: mol_type = other DNA
ttggagtaaagaggaaaaca

SEQ ID NO: 54975 - DNA, 20 bp, synthetic construct
  source 1..20: mol_type = other DNA
gttggagtaaagaggaaaac

SEQ ID NO: 54976 - DNA, 20 bp, synthetic construct
  source 1..20: mol_type = other DNA
agttggagtaaagaggaaaa

SEQ ID NO: 54977 - DNA, 20 bp, synthetic construct
  source 1..20: mol_type = other DNA
gagttggagtaaagaggaaa

SEQ ID NO: 54978 - DNA, 20 bp, synthetic construct
  source 1..20: mol_type = other DNA
tgagttggagtaaagaggaa

SEQ ID NO: 54979 - DNA, 20 bp, synthetic construct
  source 1..20: mol_type = other DNA
ttgagttggagtaaagagga

SEQ ID NO: 54980 - DNA, 20 bp, synthetic construct
  source 1..20: mol_type = other DNA
gttgagttggagtaaagagg

SEQ ID NO: 54981 - DNA, 20 bp, synthetic construct
  source 1..20: mol_type = other DNA
agttgagttggagtaaagag

SEQ ID NO: 54982 - DNA, 20 bp, synthetic construct
  source 1..20: mol_type = other DNA
tagttgagttggagtaaaga

SEQ ID NO: 54983 - DNA, 20 bp, synthetic construct
  source 1..20: mol_type = other DNA
atagttgagttggagtaaag

SEQ ID NO: 54984 - DNA, 20 bp, synthetic construct
  source 1..20: mol_type = other DNA
catagttgagttggagtaaa

SEQ ID NO: 54985 - DNA, 20 bp, synthetic construct
  source 1..20: mol_type = other DNA
ccatagttgagttggagtaa

SEQ ID NO: 54986 - DNA, 20 bp, synthetic construct
  source 1..20: mol_type = other DNA
gccatagttgagttggagta

SEQ ID NO: 54987 - DNA, 20 bp, synthetic construct
  source 1..20: mol_type = other DNA
agccatagttgagttggagt

SEQ ID NO: 54988 - DNA, 20 bp, synthetic construct
  source 1..20: mol_type = other DNA
aagccatagttgagttggag

SEQ ID NO: 54989 - DNA, 20 bp, synthetic construct
  source 1..20: mol_type = other DNA
aaagccatagttgagttgga

SEQ ID NO: 54990 - DNA, 20 bp, synthetic construct
  source 1..20: mol_type = other DNA
taaagccatagttgagttgg

SEQ ID NO: 54991 - DNA, 20 bp, synthetic construct
  source 1..20: mol_type = other DNA
gtaaagccatagttgagttg

SEQ ID NO: 54992 - DNA, 20 bp, synthetic construct
  source 1..20: mol_type = other DNA
agtaaagccatagttgagtt

SEQ ID NO: 54993 - DNA, 20 bp, synthetic construct
  source 1..20: mol_type = other DNA
aagtaaagccatagttgagt

SEQ ID NO: 54994 - DNA, 20 bp, synthetic construct
  source 1..20: mol_type = other DNA
gaagtaaagccatagttgag

SEQ ID NO: 54995 - DNA, 20 bp, synthetic construct
  source 1..20: mol_type = other DNA
agaagtaaagccatagttga

SEQ ID NO: 54996 - DNA, 20 bp, synthetic construct
  source 1..20: mol_type = other DNA
cagaagtaaagccatagttg

SEQ ID NO: 54997 - DNA, 20 bp, synthetic construct
  source 1..20: mol_type = other DNA
acagaagtaaagccatagtt

SEQ ID NO: 54998 - DNA, 20 bp, synthetic construct
  source 1..20: mol_type = other DNA
aacagaagtaaagccatagt

SEQ ID NO: 54999 - DNA, 20 bp, synthetic construct
  source 1..20: mol_type = other DNA
aaacagaagtaaagccatag

SEQ ID NO: 55000 - DNA, 20 bp, synthetic construct
  source 1..20: mol_type = other DNA
gaaacagaagtaaagccata

SEQ ID NO: 55001 - DNA, 20 bp, synthetic construct
  source 1..20: mol_type = other DNA
ggaaacagaagtaaagccat

SEQ ID NO: 55002 - DNA, 20 bp, synthetic construct
  source 1..20: mol_type = other DNA
aggaaacagaagtaaagcca

SEQ ID NO: 55003 - DNA, 20 bp, synthetic construct
  source 1..20: mol_type = other DNA
aaggaaacagaagtaaagcc

SEQ ID NO: 55004 - DNA, 20 bp, synthetic construct
  source 1..20: mol_type = other DNA
taaggaaacagaagtaaagc

SEQ ID NO: 55005 - DNA, 20 bp, synthetic construct
  source 1..20: mol_type = other DNA
ataaggaaacagaagtaaag

SEQ ID NO: 55006 - DNA, 20 bp, synthetic construct
  source 1..20: mol_type = other DNA
aataaggaaacagaagtaaa

SEQ ID NO: 55007 - DNA, 20 bp, synthetic construct
  source 1..20: mol_type = other DNA
gaataaggaaacagaagtaa

SEQ ID NO: 55008 - DNA, 20 bp, synthetic construct
  source 1..20: mol_type = other DNA
ggaataaggaaacagaagta

SEQ ID NO: 55009 - DNA, 20 bp, synthetic construct
  source 1..20: mol_type = other DNA
tggaataaggaaacagaagt

SEQ ID NO: 55010 - DNA, 20 bp, synthetic construct
  source 1..20: mol_type = other DNA
atggaataaggaaacagaag

SEQ ID NO: 55011 - DNA, 20 bp, synthetic construct
  source 1..20: mol_type = other DNA
aatggaataaggaaacagaa

SEQ ID NO: 55012 - DNA, 20 bp, synthetic construct
  source 1..20: mol_type = other DNA
caatggaataaggaaacaga

SEQ ID NO: 55013 - DNA, 20 bp, synthetic construct
  source 1..20: mol_type = other DNA
acaatggaataaggaaacag

SEQ ID NO: 55014 - DNA, 20 bp, synthetic construct
  source 1..20: mol_type = other DNA
aacaatggaataaggaaaca

SEQ ID NO: 55015 - DNA, 20 bp, synthetic construct
  source 1..20: mol_type = other DNA
gaacaatggaataaggaaac

SEQ ID NO: 55016 - DNA, 20 bp, synthetic construct
  source 1..20: mol_type = other DNA
ggaacaatggaataaggaaa

SEQ ID NO: 55017 - DNA, 20 bp, synthetic construct
  source 1..20: mol_type = other DNA
aggaacaatggaataaggaa

SEQ ID NO: 55018 - DNA, 20 bp, synthetic construct
  source 1..20: mol_type = other DNA
gaggaacaatggaataagga

SEQ ID NO: 55019 - DNA, 20 bp, synthetic construct
  source 1..20: mol_type = other DNA
tgaggaacaatggaataagg

SEQ ID NO: 55020 - DNA, 20 bp, synthetic construct
  source 1..20: mol_type = other DNA
atgaggaacaatggaataag

SEQ ID NO: 55021 - DNA, 20 bp, synthetic construct
  source 1..20: mol_type = other DNA
tatgaggaacaatggaataa

SEQ ID NO: 55022 - DNA, 20 bp, synthetic construct
  source 1..20: mol_type = other DNA
gtatgaggaacaatggaata

SEQ ID NO: 55023 - DNA, 20 bp, synthetic construct
  source 1..20: mol_type = other DNA
agtatgaggaacaatggaat

SEQ ID NO: 55024 - DNA, 20 bp, synthetic construct
  source 1..20: mol_type = other DNA
aagtatgaggaacaatggaa

SEQ ID NO: 55025 - DNA, 20 bp, synthetic construct
  source 1..20: mol_type = other DNA
aaagtatgaggaacaatgga

SEQ ID NO: 55026 - DNA, 20 bp, synthetic construct
  source 1..20: mol_type = other DNA
aaaagtatgaggaacaatgg

SEQ ID NO: 55027 - DNA, 20 bp, synthetic construct
  source 1..20: mol_type = other DNA
aaaaagtatgaggaacaatg

SEQ ID NO: 55028 - DNA, 20 bp, synthetic construct
  source 1..20: mol_type = other DNA
gaaaaagtatgaggaacaat

SEQ ID NO: 55029 - DNA, 20 bp, synthetic construct
  source 1..20: mol_type = other DNA
ggaaaaagtatgaggaacaa

SEQ ID NO: 55030 - DNA, 20 bp, synthetic construct
  source 1..20: mol_type = other DNA
aggaaaaagtatgaggaaca

SEQ ID NO: 55031 - DNA, 20 bp, synthetic construct
  source 1..20: mol_type = other DNA
taggaaaaagtatgaggaac

SEQ ID NO: 55032 - DNA, 20 bp, synthetic construct
  source 1..20: mol_type = other DNA
gtaggaaaaagtatgaggaa

SEQ ID NO: 55033 - DNA, 20 bp, synthetic construct
  source 1..20: mol_type = other DNA
agtaggaaaaagtatgagga

SEQ ID NO: 55034 - DNA, 20 bp, synthetic construct
  source 1..20: mol_type = other DNA
cagtaggaaaaagtatgagg

SEQ ID NO: 55035 - DNA, 20 bp, synthetic construct
  source 1..20: mol_type = other DNA
gcagtaggaaaaagtatgag

SEQ ID NO: 55036 - DNA, 20 bp, synthetic construct
  source 1..20: mol_type = other DNA
agcagtaggaaaaagtatga

SEQ ID NO: 55037 - DNA, 20 bp, synthetic construct
  source 1..20: mol_type = other DNA
aagcagtaggaaaaagtatg

SEQ ID NO: 55038 - DNA, 20 bp, synthetic construct
  source 1..20: mol_type = other DNA
gaagcagtaggaaaaagtat

SEQ ID NO: 55039 - DNA, 20 bp, synthetic construct
  source 1..20: mol_type = other DNA
tgaagcagtaggaaaaagta

SEQ ID NO: 55040 - DNA, 20 bp, synthetic construct
  source 1..20: mol_type = other DNA
atgaagcagtaggaaaaagt

SEQ ID NO: 55041 - DNA, 20 bp, synthetic construct
  source 1..20: mol_type = other DNA
aatgaagcagtaggaaaaag

SEQ ID NO: 55042 - DNA, 20 bp, synthetic construct
  source 1..20: mol_type = other DNA
aaatgaagcagtaggaaaaa

SEQ ID NO: 55043 - DNA, 20 bp, synthetic construct
  source 1..20: mol_type = other DNA
aaaatgaagcagtaggaaaa

SEQ ID NO: 55044 - DNA, 20 bp, synthetic construct
  source 1..20: mol_type = other DNA
gaaaatgaagcagtaggaaa

SEQ ID NO: 55045 - DNA, 20 bp, synthetic construct
  source 1..20: mol_type = other DNA
agaaaatgaagcagtaggaa

SEQ ID NO: 55046 - DNA, 20 bp, synthetic construct
  source 1..20: mol_type = other DNA
aagaaaatgaagcagtagga

SEQ ID NO: 55047 - DNA, 20 bp, synthetic construct
  source 1..20: mol_type = other DNA
aaagaaaatgaagcagtagg

SEQ ID NO: 55048 - DNA, 20 bp, synthetic construct
  source 1..20: mol_type = other DNA
caaagaaaatgaagcagtag

SEQ ID NO: 55049 - DNA, 20 bp, synthetic construct
  source 1..20: mol_type = other DNA
gcaaagaaaatgaagcagta

SEQ ID NO: 55050 - DNA, 20 bp, synthetic construct
  source 1..20: mol_type = other DNA
tgcaaagaaaatgaagcagt

SEQ ID NO: 55051 - DNA, 20 bp, synthetic construct
  source 1..20: mol_type = other DNA
ctgcaaagaaaatgaagcag

SEQ ID NO: 55052 - DNA, 20 bp, synthetic construct
  source 1..20: mol_type = other DNA
actgcaaagaaaatgaagca

SEQ ID NO: 55053 - DNA, 20 bp, synthetic construct
  source 1..20: mol_type = other DNA
tactgcaaagaaaatgaagc

SEQ ID NO: 55054 - DNA, 20 bp, synthetic construct
  source 1..20: mol_type = other DNA
atactgcaaagaaaatgaag

SEQ ID NO: 55055 - DNA, 20 bp, synthetic construct
  source 1..20: mol_type = other DNA
aatactgcaaagaaaatgaa

SEQ ID NO: 55056 - DNA, 20 bp, synthetic construct
  source 1..20: mol_type = other DNA
gaatactgcaaagaaaatga

SEQ ID NO: 55057 - DNA, 20 bp, synthetic construct
  source 1..20: mol_type = other DNA
agaatactgcaaagaaaatg

SEQ ID NO: 55058 - DNA, 20 bp, synthetic construct
  source 1..20: mol_type = other DNA
gagaatactgcaaagaaaat

SEQ ID NO: 55059 - DNA, 20 bp, synthetic construct
  source 1..20: mol_type = other DNA
tgagaatactgcaaagaaaa

SEQ ID NO: 55060 - DNA, 20 bp, synthetic construct
  source 1..20: mol_type = other DNA
ctgagaatactgcaaagaaa

SEQ ID NO: 55061 - DNA, 20 bp, synthetic construct
  source 1..20: mol_type = other DNA
gctgagaatactgcaaagaa

SEQ ID NO: 55062 - DNA, 20 bp, synthetic construct
  source 1..20: mol_type = other DNA
ggctgagaatactgcaaaga

SEQ ID NO: 55063 - DNA, 20 bp, synthetic construct
  source 1..20: mol_type = other DNA
aggctgagaatactgcaaag

SEQ ID NO: 55064 - DNA, 20 bp, synthetic construct
  source 1..20: mol_type = other DNA
taggctgagaatactgcaaa

SEQ ID NO: 55065 - DNA, 20 bp, synthetic construct
  source 1..20: mol_type = other DNA
ctaggctgagaatactgcaa

SEQ ID NO: 55066 - DNA, 20 bp, synthetic construct
  source 1..20: mol_type = other DNA
tctaggctgagaatactgca

SEQ ID NO: 55067 - DNA, 20 bp, synthetic construct
  source 1..20: mol_type = other DNA
atctaggctgagaatactgc

SEQ ID NO: 55068 - DNA, 20 bp, synthetic construct
  source 1..20: mol_type = other DNA
catctaggctgagaatactg

SEQ ID NO: 55069 - DNA, 20 bp, synthetic construct
  source 1..20: mol_type = other DNA
tcatctaggctgagaatact

SEQ ID NO: 55070 - DNA, 20 bp, synthetic construct
  source 1..20: mol_type = other DNA
atcatctaggctgagaatac

SEQ ID NO: 55071 - DNA, 20 bp, synthetic construct
  source 1..20: mol_type = other DNA
tatcatctaggctgagaata

SEQ ID NO: 55072 - DNA, 20 bp, synthetic construct
  source 1..20: mol_type = other DNA
ctatcatctaggctgagaat

SEQ ID NO: 55073 - DNA, 20 bp, synthetic construct
  source 1..20: mol_type = other DNA
cctatcatctaggctgagaa

SEQ ID NO: 55074 - DNA, 20 bp, synthetic construct
  source 1..20: mol_type = other DNA
ccctatcatctaggctgaga

SEQ ID NO: 55075 - DNA, 20 bp, synthetic construct
  source 1..20: mol_type = other DNA
cccctatcatctaggctgag

SEQ ID NO: 55076 - DNA, 20 bp, synthetic construct
  source 1..20: mol_type = other DNA
acccctatcatctaggctga

SEQ ID NO: 55077 - DNA, 20 bp, synthetic construct
  source 1..20: mol_type = other DNA
gacccctatcatctaggctg

SEQ ID NO: 55078 - DNA, 20 bp, synthetic construct
  source 1..20: mol_type = other DNA
tgacccctatcatctaggct

SEQ ID NO: 55079 - DNA, 20 bp, synthetic construct
  source 1..20: mol_type = other DNA
ctgacccctatcatctaggc

SEQ ID NO: 55080 - DNA, 20 bp, synthetic construct
  source 1..20: mol_type = other DNA
gctgacccctatcatctagg

SEQ ID NO: 55081 - DNA, 20 bp, synthetic construct
  source 1..20: mol_type = other DNA
tgctgacccctatcatctag

SEQ ID NO: 55082 - DNA, 20 bp, synthetic construct
  source 1..20: mol_type = other DNA
ttgctgacccctatcatcta

SEQ ID NO: 55083 - DNA, 20 bp, synthetic construct
  source 1..20: mol_type = other DNA
tttgctgacccctatcatct

SEQ ID NO: 55084 - DNA, 20 bp, synthetic construct
  source 1..20: mol_type = other DNA
atttgctgacccctatcatc

SEQ ID NO: 55085 - DNA, 20 bp, synthetic construct
  source 1..20: mol_type = other DNA
gatttgctgacccctatcat

SEQ ID NO: 55086 - DNA, 20 bp, synthetic construct
  source 1..20: mol_type = other DNA
agatttgctgacccctatca

SEQ ID NO: 55087 - DNA, 20 bp, synthetic construct
  source 1..20: mol_type = other DNA
cagatttgctgacccctatc

SEQ ID NO: 55088 - DNA, 20 bp, synthetic construct
  source 1..20: mol_type = other DNA
gcagatttgctgacccctat

SEQ ID NO: 55089 - DNA, 20 bp, synthetic construct
  source 1..20: mol_type = other DNA
agcagatttgctgaccccta

SEQ ID NO: 55090 - DNA, 20 bp, synthetic construct
  source 1..20: mol_type = other DNA
gagcagatttgctgacccct

SEQ ID NO: 55091 - DNA, 20 bp, synthetic construct
  source 1..20: mol_type = other DNA
tgagcagatttgctgacccc

SEQ ID NO: 55092 - DNA, 20 bp, synthetic construct
  source 1..20: mol_type = other DNA
atgagcagatttgctgaccc

SEQ ID NO: 55093 - DNA, 20 bp, synthetic construct
  source 1..20: mol_type = other DNA
gatgagcagatttgctgacc

SEQ ID NO: 55094 - DNA, 20 bp, synthetic construct
  source 1..20: mol_type = other DNA
tgatgagcagatttgctgac

SEQ ID NO: 55095 - DNA, 20 bp, synthetic construct
  source 1..20: mol_type = other DNA
ctgatgagcagatttgctga

SEQ ID NO: 55096 - DNA, 20 bp, synthetic construct
  source 1..20: mol_type = other DNA
actgatgagcagatttgctg

SEQ ID NO: 55097 - DNA, 20 bp, synthetic construct
  source 1..20: mol_type = other DNA
tactgatgagcagatttgct

SEQ ID NO: 55098 - DNA, 20 bp, synthetic construct
  source 1..20: mol_type = other DNA
ttactgatgagcagatttgc

SEQ ID NO: 55099 - DNA, 20 bp, synthetic construct
  source 1..20: mol_type = other DNA
tttactgatgagcagatttg

SEQ ID NO: 55100 - DNA, 20 bp, synthetic construct
  source 1..20: mol_type = other DNA
atttactgatgagcagattt

SEQ ID NO: 55101 - DNA, 20 bp, synthetic construct
  source 1..20: mol_type = other DNA
tatttactgatgagcagatt

SEQ ID NO: 55102 - DNA, 20 bp, synthetic construct
  source 1..20: mol_type = other DNA
ttatttactgatgagcagat

SEQ ID NO: 55103 - DNA, 20 bp, synthetic construct
  source 1..20: mol_type = other DNA
tttatttactgatgagcaga

SEQ ID NO: 55104 - DNA, 20 bp, synthetic construct
  source 1..20: mol_type = other DNA
atttatttactgatgagcag

SEQ ID NO: 55105 - DNA, 20 bp, synthetic construct
  source 1..20: mol_type = other DNA
aatttatttactgatgagca

SEQ ID NO: 55106 - DNA, 20 bp, synthetic construct
  source 1..20: mol_type = other DNA
aaatttatttactgatgagc

SEQ ID NO: 55107 - DNA, 20 bp, synthetic construct
  source 1..20: mol_type = other DNA
aaaatttatttactgatgag

SEQ ID NO: 55108 - DNA, 20 bp, synthetic construct
  source 1..20: mol_type = other DNA
taaaatttatttactgatga

SEQ ID NO: 55109 - DNA, 20 bp, synthetic construct
  source 1..20: mol_type = other DNA
ataaaatttatttactgatg

SEQ ID NO: 55110 - DNA, 20 bp, synthetic construct
  source 1..20: mol_type = other DNA
aataaaatttatttactgat

SEQ ID NO: 55111 - DNA, 20 bp, synthetic construct
  source 1..20: mol_type = other DNA
caataaaatttatttactga

SEQ ID NO: 55112 - DNA, 20 bp, synthetic construct
  source 1..20: mol_type = other DNA
acaataaaatttatttactg

SEQ ID NO: 55113 - DNA, 20 bp, synthetic construct
  source 1..20: mol_type = other DNA
tacaataaaatttatttact

SEQ ID NO: 55114 - DNA, 20 bp, synthetic construct
  source 1..20: mol_type = other DNA
ctacaataaaatttatttac

SEQ ID NO: 55115 - DNA, 20 bp, synthetic construct
  source 1..20: mol_type = other DNA
gctacaataaaatttattta

SEQ ID NO: 55116 - DNA, 20 bp, synthetic construct
  source 1..20: mol_type = other DNA
tgctacaataaaatttattt

SEQ ID NO: 55117 - DNA, 20 bp, synthetic construct
  source 1..20: mol_type = other DNA
atgctacaataaaatttatt

SEQ ID NO: 55118 - DNA, 20 bp, synthetic construct
  source 1..20: mol_type = other DNA
tatgctacaataaaatttat

SEQ ID NO: 55119 - DNA, 20 bp, synthetic construct
  source 1..20: mol_type = other DNA
ctatgctacaataaaattta

SEQ ID NO: 55120 - DNA, 20 bp, synthetic construct
  source 1..20: mol_type = other DNA
gctatgctacaataaaattt

SEQ ID NO: 55121 - DNA, 20 bp, synthetic construct
  source 1..20: mol_type = other DNA
agctatgctacaataaaatt

SEQ ID NO: 55122 - DNA, 20 bp, synthetic construct
  source 1..20: mol_type = other DNA
tagctatgctacaataaaat

SEQ ID NO: 55123 - DNA, 20 bp, synthetic construct
  source 1..20: mol_type = other DNA
atagctatgctacaataaaa

SEQ ID NO: 55124 - DNA, 20 bp, synthetic construct
  source 1..20: mol_type = other DNA
catagctatgctacaataaa

SEQ ID NO: 55125 - DNA, 20 bp, synthetic construct
  source 1..20: mol_type = other DNA
gcatagctatgctacaataa

SEQ ID NO: 55126 - DNA, 20 bp, synthetic construct
  source 1..20: mol_type = other DNA
ggcatagctatgctacaata

SEQ ID NO: 55127 - DNA, 20 bp, synthetic construct
  source 1..20: mol_type = other DNA
gggcatagctatgctacaat

SEQ ID NO: 55128 - DNA, 20 bp, synthetic construct
  source 1..20: mol_type = other DNA
tgggcatagctatgctacaa

SEQ ID NO: 55129 - DNA, 20 bp, synthetic construct
  source 1..20: mol_type = other DNA
atgggcatagctatgctaca

SEQ ID NO: 55130 - DNA, 20 bp, synthetic construct
  source 1..20: mol_type = other DNA
catgggcatagctatgctac

SEQ ID NO: 55131 - DNA, 20 bp, synthetic construct
  source 1..20: mol_type = other DNA
gcatgggcatagctatgcta

SEQ ID NO: 55132 - DNA, 20 bp, synthetic construct
  source 1..20: mol_type = other DNA
cgcatgggcatagctatgct

SEQ ID NO: 55133 - DNA, 20 bp, synthetic construct
  source 1..20: mol_type = other DNA
acgcatgggcatagctatgc

SEQ ID NO: 55134 - DNA, 20 bp, synthetic construct
  source 1..20: mol_type = other DNA
aacgcatgggcatagctatg

SEQ ID NO: 55135 - DNA, 20 bp, synthetic construct
  source 1..20: mol_type = other DNA
aaacgcatgggcatagctat

SEQ ID NO: 55136 - DNA, 20 bp, synthetic construct
  source 1..20: mol_type = other DNA
caaacgcatgggcatagcta

SEQ ID NO: 55137 - DNA, 20 bp, synthetic construct
  source 1..20: mol_type = other DNA
acaaacgcatgggcatagct

SEQ ID NO: 55138 - DNA, 20 bp, synthetic construct
  source 1..20: mol_type = other DNA
cacaaacgcatgggcatagc

SEQ ID NO: 55139 - DNA, 20 bp, synthetic construct
  source 1..20: mol_type = other DNA
gcacaaacgcatgggcatag

SEQ ID NO: 55140 - DNA, 20 bp, synthetic construct
  source 1..20: mol_type = other DNA
tgcacaaacgcatgggcata

SEQ ID NO: 55141 - DNA, 20 bp, synthetic construct
  source 1..20: mol_type = other DNA
atgcacaaacgcatgggcat

SEQ ID NO: 55142 - DNA, 20 bp, synthetic construct
  source 1..20: mol_type = other DNA
aatgcacaaacgcatgggca

SEQ ID NO: 55143 - DNA, 20 bp, synthetic construct
  source 1..20: mol_type = other DNA
caatgcacaaacgcatgggc

SEQ ID NO: 55144 - DNA, 20 bp, synthetic construct
  source 1..20: mol_type = other DNA
acaatgcacaaacgcatggg

SEQ ID NO: 55145 - DNA, 20 bp, synthetic construct
  source 1..20: mol_type = other DNA
gacaatgcacaaacgcatgg

SEQ ID NO: 55146 - DNA, 20 bp, synthetic construct
  source 1..20: mol_type = other DNA
agacaatgcacaaacgcatg

SEQ ID NO: 55147 - DNA, 20 bp, synthetic construct
  source 1..20: mol_type = other DNA
tagacaatgcacaaacgcat

SEQ ID NO: 55148 - DNA, 20 bp, synthetic construct
  source 1..20: mol_type = other DNA
atagacaatgcacaaacgca

SEQ ID NO: 55149 - DNA, 20 bp, synthetic construct
  source 1..20: mol_type = other DNA
catagacaatgcacaaacgc

SEQ ID NO: 55150 - DNA, 20 bp, synthetic construct
  source 1..20: mol_type = other DNA
ccatagacaatgcacaaacg

SEQ ID NO: 55151 - DNA, 20 bp, synthetic construct
  source 1..20: mol_type = other DNA
gccatagacaatgcacaaac

SEQ ID NO: 55152 - DNA, 20 bp, synthetic construct
  source 1..20: mol_type = other DNA
agccatagacaatgcacaaa

SEQ ID NO: 55153 - DNA, 20 bp, synthetic construct
  source 1..20: mol_type = other DNA
cagccatagacaatgcacaa

SEQ ID NO: 55154 - DNA, 20 bp, synthetic construct
  source 1..20: mol_type = other DNA
acagccatagacaatgcaca

SEQ ID NO: 55155 - DNA, 20 bp, synthetic construct
  source 1..20: mol_type = other DNA
aacagccatagacaatgcac

SEQ ID NO: 55156 - DNA, 20 bp, synthetic construct
  source 1..20: mol_type = other DNA
aaacagccatagacaatgca

SEQ ID NO: 55157 - DNA, 20 bp, synthetic construct
  source 1..20: mol_type = other DNA
aaaacagccatagacaatgc

SEQ ID NO: 55158 - DNA, 20 bp, synthetic construct
  source 1..20: mol_type = other DNA
caaaacagccatagacaatg

SEQ ID NO: 55159 - DNA, 20 bp, synthetic construct
  source 1..20: mol_type = other DNA
tcaaaacagccatagacaat

SEQ ID NO: 55160 - DNA, 20 bp, synthetic construct
  source 1..20: mol_type = other DNA
atcaaaacagccatagacaa

SEQ ID NO: 55161 - DNA, 20 bp, synthetic construct
  source 1..20: mol_type = other DNA
catcaaaacagccatagaca

SEQ ID NO: 55162 - DNA, 20 bp, synthetic construct
  source 1..20: mol_type = other DNA
ccatcaaaacagccatagac

SEQ ID NO: 55163 - DNA, 20 bp, synthetic construct
  source 1..20: mol_type = other DNA
gccatcaaaacagccataga

SEQ ID NO: 55164 - DNA, 20 bp, synthetic construct
  source 1..20: mol_type = other DNA
agccatcaaaacagccatag

SEQ ID NO: 55165 - DNA, 20 bp, synthetic construct
  source 1..20: mol_type = other DNA
cagccatcaaaacagccata

SEQ ID NO: 55166 - DNA, 20 bp, synthetic construct
  source 1..20: mol_type = other DNA
acagccatcaaaacagccat

SEQ ID NO: 55167 - DNA, 20 bp, synthetic construct
  source 1..20: mol_type = other DNA
tacagccatcaaaacagcca

SEQ ID NO: 55168 - DNA, 20 bp, synthetic construct
  source 1..20: mol_type = other DNA
ctacagccatcaaaacagcc

SEQ ID NO: 55169 - DNA, 20 bp, synthetic construct
  source 1..20: mol_type = other DNA
gctacagccatcaaaacagc

SEQ ID NO: 55170 - DNA, 20 bp, synthetic construct
  source 1..20: mol_type = other DNA
ggctacagccatcaaaacag

SEQ ID NO: 55171 - DNA, 20 bp, synthetic construct
  source 1..20: mol_type = other DNA
tggctacagccatcaaaaca

SEQ ID NO: 55172 - DNA, 20 bp, synthetic construct
  source 1..20: mol_type = other DNA
atggctacagccatcaaaac

SEQ ID NO: 55173 - DNA, 20 bp, synthetic construct
  source 1..20: mol_type = other DNA
tatggctacagccatcaaaa

SEQ ID NO: 55174 - DNA, 20 bp, synthetic construct
  source 1..20: mol_type = other DNA
ctatggctacagccatcaaa

SEQ ID NO: 55175 - DNA, 20 bp, synthetic construct
  source 1..20: mol_type = other DNA
tctatggctacagccatcaa

SEQ ID NO: 55176 - DNA, 20 bp, synthetic construct
  source 1..20: mol_type = other DNA
ctctatggctacagccatca

SEQ ID NO: 55177 - DNA, 20 bp, synthetic construct
  source 1..20: mol_type = other DNA
actctatggctacagccatc

SEQ ID NO: 55178 - DNA, 20 bp, synthetic construct
  source 1..20: mol_type = other DNA
aactctatggctacagccat

SEQ ID NO: 55179 - DNA, 20 bp, synthetic construct
  source 1..20: mol_type = other DNA
caactctatggctacagcca

SEQ ID NO: 55180 - DNA, 20 bp, synthetic construct
  source 1..20: mol_type = other DNA
tcaactctatggctacagcc

SEQ ID NO: 55181 - DNA, 20 bp, synthetic construct
  source 1..20: mol_type = other DNA
ctcaactctatggctacagc

SEQ ID NO: 55182 - DNA, 20 bp, synthetic construct
  source 1..20: mol_type = other DNA
actcaactctatggctacag

SEQ ID NO: 55183 - DNA, 20 bp, synthetic construct
  source 1..20: mol_type = other DNA
tactcaactctatggctaca

SEQ ID NO: 55184 - DNA, 20 bp, synthetic construct
  source 1..20: mol_type = other DNA
ctactcaactctatggctac

SEQ ID NO: 55185 - DNA, 20 bp, synthetic construct
  source 1..20: mol_type = other DNA
actactcaactctatggcta

SEQ ID NO: 55186 - DNA, 20 bp, synthetic construct
  source 1..20: mol_type = other DNA
aactactcaactctatggct

SEQ ID NO: 55187 - DNA, 20 bp, synthetic construct
  source 1..20: mol_type = other DNA
caactactcaactctatggc

SEQ ID NO: 55188 - DNA, 20 bp, synthetic construct
  source 1..20: mol_type = other DNA
acaactactcaactctatgg

SEQ ID NO: 55189 - DNA, 20 bp, synthetic construct
  source 1..20: mol_type = other DNA
tacaactactcaactctatg

SEQ ID NO: 55190 - DNA, 20 bp, synthetic construct
  source 1..20: mol_type = other DNA
ctacaactactcaactctat

SEQ ID NO: 55191 - DNA, 20 bp, synthetic construct
  source 1..20: mol_type = other DNA
gctacaactactcaactcta

SEQ ID NO: 55192 - DNA, 20 bp, synthetic construct
  source 1..20: mol_type = other DNA
agctacaactactcaactct

SEQ ID NO: 55193 - DNA, 20 bp, synthetic construct
  source 1..20: mol_type = other DNA
cagctacaactactcaactc

SEQ ID NO: 55194 - DNA, 20 bp, synthetic construct
  source 1..20: mol_type = other DNA
tcagctacaactactcaact

SEQ ID NO: 55195 - DNA, 20 bp, synthetic construct
  source 1..20: mol_type = other DNA
gtcagctacaactactcaac

SEQ ID NO: 55196 - DNA, 20 bp, synthetic construct
  source 1..20: mol_type = other DNA
agtcagctacaactactcaa

SEQ ID NO: 55197 - DNA, 20 bp, synthetic construct
  source 1..20: mol_type = other DNA
cagtcagctacaactactca

SEQ ID NO: 55198 - DNA, 20 bp, synthetic construct
  source 1..20: mol_type = other DNA
acagtcagctacaactactc

SEQ ID NO: 55199 - DNA, 20 bp, synthetic construct
  source 1..20: mol_type = other DNA
tacagtcagctacaactact

SEQ ID NO: 55200 - DNA, 20 bp, synthetic construct
  source 1..20: mol_type = other DNA
ctacagtcagctacaactac

SEQ ID NO: 55201 - DNA, 20 bp, synthetic construct
  source 1..20: mol_type = other DNA
cctacagtcagctacaacta

SEQ ID NO: 55202 - DNA, 20 bp, synthetic construct
  source 1..20: mol_type = other DNA
tcctacagtcagctacaact

SEQ ID NO: 55203 - DNA, 20 bp, synthetic construct
  source 1..20: mol_type = other DNA
gtcctacagtcagctacaac

SEQ ID NO: 55204 - DNA, 20 bp, synthetic construct
  source 1..20: mol_type = other DNA
agtcctacagtcagctacaa

SEQ ID NO: 55205 - DNA, 20 bp, synthetic construct
  source 1..20: mol_type = other DNA
aagtcctacagtcagctaca

SEQ ID NO: 55206 - DNA, 20 bp, synthetic construct
  source 1..20: mol_type = other DNA
caagtcctacagtcagctac

SEQ ID NO: 55207 - DNA, 20 bp, synthetic construct
  source 1..20: mol_type = other DNA
gcaagtcctacagtcagcta

SEQ ID NO: 55208 - DNA, 20 bp, synthetic construct
  source 1..20: mol_type = other DNA
tgcaagtcctacagtcagct

SEQ ID NO: 55209 - DNA, 20 bp, synthetic construct
  source 1..20: mol_type = other DNA
ttgcaagtcctacagtcagc

SEQ ID NO: 55210 - DNA, 20 bp, synthetic construct
  source 1..20: mol_type = other DNA
tttgcaagtcctacagtcag

SEQ ID NO: 55211 - DNA, 20 bp, synthetic construct
  source 1..20: mol_type = other DNA
ctttgcaagtcctacagtca

SEQ ID NO: 55212 - DNA, 20 bp, synthetic construct
  source 1..20: mol_type = other DNA
gctttgcaagtcctacagtc

SEQ ID NO: 55213 - DNA, 20 bp, synthetic construct
  source 1..20: mol_type = other DNA
ggctttgcaagtcctacagt

SEQ ID NO: 55214 - DNA, 20 bp, synthetic construct
  source 1..20: mol_type = other DNA
tggctttgcaagtcctacag

SEQ ID NO: 55215 - DNA, 20 bp, synthetic construct
  source 1..20: mol_type = other DNA
ctggctttgcaagtcctaca

SEQ ID NO: 55216 - DNA, 20 bp, synthetic construct
  source 1..20: mol_type = other DNA
tctggctttgcaagtcctac

SEQ ID NO: 55217 - DNA, 20 bp, synthetic construct
  source 1..20: mol_type = other DNA
ttctggctttgcaagtccta

SEQ ID NO: 55218 - DNA, 20 bp, synthetic construct
  source 1..20: mol_type = other DNA
tttctggctttgcaagtcct

SEQ ID NO: 55219 - DNA, 20 bp, synthetic construct
  source 1..20: mol_type = other DNA
ttttctggctttgcaagtcc

SEQ ID NO: 55220 - DNA, 20 bp, synthetic construct
  source 1..20: mol_type = other DNA
attttctggctttgcaagtc

SEQ ID NO: 55221 - DNA, 20 bp, synthetic construct
  source 1..20: mol_type = other DNA
aattttctggctttgcaagt

SEQ ID NO: 55222 - DNA, 20 bp, synthetic construct
  source 1..20: mol_type = other DNA
aaattttctggctttgcaag

SEQ ID NO: 55223 - DNA, 20 bp, synthetic construct
  source 1..20: mol_type = other DNA
caaattttctggctttgcaa

SEQ ID NO: 55224 - DNA, 20 bp, synthetic construct
  source 1..20: mol_type = other DNA
tcaaattttctggctttgca

SEQ ID NO: 55225 - DNA, 20 bp, synthetic construct
  source 1..20: mol_type = other DNA
gtcaaattttctggctttgc

SEQ ID NO: 55226 - DNA, 20 bp, synthetic construct
  source 1..20: mol_type = other DNA
agtcaaattttctggctttg

SEQ ID NO: 55227 - DNA, 20 bp, synthetic construct
  source 1..20: mol_type = other DNA
cagtcaaattttctggcttt

SEQ ID NO: 55228 - DNA, 20 bp, synthetic construct
  source 1..20: mol_type = other DNA
acagtcaaattttctggctt

SEQ ID NO: 55229 - DNA, 20 bp, synthetic construct
  source 1..20: mol_type = other DNA
gacagtcaaattttctggct

SEQ ID NO: 55230 - DNA, 20 bp, synthetic construct
  source 1..20: mol_type = other DNA
agacagtcaaattttctggc

SEQ ID NO: 55231 - DNA, 20 bp, synthetic construct
  source 1..20: mol_type = other DNA
gagacagtcaaattttctgg

SEQ ID NO: 55232 - DNA, 20 bp, synthetic construct
  source 1..20: mol_type = other DNA
agagacagtcaaattttctg

SEQ ID NO: 55233 - DNA, 20 bp, synthetic construct
  source 1..20: mol_type = other DNA
aagagacagtcaaattttct

SEQ ID NO: 55234 - DNA, 20 bp, synthetic construct
  source 1..20: mol_type = other DNA
aaagagacagtcaaattttc

SEQ ID NO: 55235 - DNA, 20 bp, synthetic construct
  source 1..20: mol_type = other DNA
taaagagacagtcaaatttt

SEQ ID NO: 55236 - DNA, 20 bp, synthetic construct
  source 1..20: mol_type = other DNA
gtaaagagacagtcaaattt

SEQ ID NO: 55237 - DNA, 20 bp, synthetic construct
  source 1..20: mol_type = other DNA
tgtaaagagacagtcaaatt

SEQ ID NO: 55238 - DNA, 20 bp, synthetic construct
  source 1..20: mol_type = other DNA
ctgtaaagagacagtcaaat

SEQ ID NO: 55239 - DNA, 20 bp, synthetic construct
  source 1..20: mol_type = other DNA
tctgtaaagagacagtcaaa

SEQ ID NO: 55240 - DNA, 20 bp, synthetic construct
  source 1..20: mol_type = other DNA
ttctgtaaagagacagtcaa

SEQ ID NO: 55241 - DNA, 20 bp, synthetic construct
  source 1..20: mol_type = other DNA
tttctgtaaagagacagtca

SEQ ID NO: 55242 - DNA, 20 bp, synthetic construct
  source 1..20: mol_type = other DNA
ttttctgtaaagagacagtc

SEQ ID NO: 55243 - DNA, 20 bp, synthetic construct
  source 1..20: mol_type = other DNA
cttttctgtaaagagacagt

SEQ ID NO: 55244 - DNA, 20 bp, synthetic construct
  source 1..20: mol_type = other DNA
acttttctgtaaagagacag

SEQ ID NO: 55245 - DNA, 20 bp, synthetic construct
  source 1..20: mol_type = other DNA
aacttttctgtaaagagaca

SEQ ID NO: 55246 - DNA, 20 bp, synthetic construct
  source 1..20: mol_type = other DNA
aaacttttctgtaaagagac

SEQ ID NO: 55247 - DNA, 20 bp, synthetic construct
  source 1..20: mol_type = other DNA
caaacttttctgtaaagaga

SEQ ID NO: 55248 - DNA, 20 bp, synthetic construct
  source 1..20: mol_type = other DNA
gcaaacttttctgtaaagag

SEQ ID NO: 55249 - DNA, 20 bp, synthetic construct
  source 1..20: mol_type = other DNA
ggcaaacttttctgtaaaga

SEQ ID NO: 55250 - DNA, 20 bp, synthetic construct
  source 1..20: mol_type = other DNA
tggcaaacttttctgtaaag

SEQ ID NO: 55251 - DNA, 20 bp, synthetic construct
  source 1..20: mol_type = other DNA
ctggcaaacttttctgtaaa

SEQ ID NO: 55252 - DNA, 20 bp, synthetic construct
  source 1..20: mol_type = other DNA
gctggcaaacttttctgtaa

SEQ ID NO: 55253 - DNA, 20 bp, synthetic construct
  source 1..20: mol_type = other DNA
agctggcaaacttttctgta

SEQ ID NO: 55254 - DNA, 20 bp, synthetic construct
  source 1..20: mol_type = other DNA
gagctggcaaacttttctgt

SEQ ID NO: 55255 - DNA, 20 bp, synthetic construct
  source 1..20: mol_type = other DNA
agagctggcaaacttttctg

SEQ ID NO: 55256 - DNA, 20 bp, synthetic construct
  source 1..20: mol_type = other DNA
aagagctggcaaacttttct

SEQ ID NO: 55257 - DNA, 20 bp, synthetic construct
  source 1..20: mol_type = other DNA
caagagctggcaaacttttc

SEQ ID NO: 55258 - DNA, 20 bp, synthetic construct
  source 1..20: mol_type = other DNA
ccaagagctggcaaactttt

SEQ ID NO: 55259 - DNA, 20 bp, synthetic construct
  source 1..20: mol_type = other DNA
gccaagagctggcaaacttt

SEQ ID NO: 55260 - DNA, 20 bp, synthetic construct
  source 1..20: mol_type = other DNA
ggccaagagctggcaaactt

SEQ ID NO: 55261 - DNA, 20 bp, synthetic construct
  source 1..20: mol_type = other DNA
aggccaagagctggcaaact

SEQ ID NO: 55262 - DNA, 20 bp, synthetic construct
  source 1..20: mol_type = other DNA
taggccaagagctggcaaac

SEQ ID NO: 55263 - DNA, 20 bp, synthetic construct
  source 1..20: mol_type = other DNA
ttaggccaagagctggcaaa

SEQ ID NO: 55264 - DNA, 20 bp, synthetic construct
  source 1..20: mol_type = other DNA
tttaggccaagagctggcaa

SEQ ID NO: 55265 - DNA, 20 bp, synthetic construct
  source 1..20: mol_type = other DNA
atttaggccaagagctggca

SEQ ID NO: 55266 - DNA, 20 bp, synthetic construct
  source 1..20: mol_type = other DNA
gatttaggccaagagctggc

SEQ ID NO: 55267 - DNA, 20 bp, synthetic construct
  source 1..20: mol_type = other DNA
tgatttaggccaagagctgg

SEQ ID NO: 55268 - DNA, 20 bp, synthetic construct
  source 1..20: mol_type = other DNA
atgatttaggccaagagctg

SEQ ID NO: 55269 - DNA, 20 bp, synthetic construct
  source 1..20: mol_type = other DNA
tatgatttaggccaagagct

SEQ ID NO: 55270 - DNA, 20 bp, synthetic construct
  source 1..20: mol_type = other DNA
atatgatttaggccaagagc

SEQ ID NO: 55271 - DNA, 20 bp, synthetic construct
  source 1..20: mol_type = other DNA
aatatgatttaggccaagag

SEQ ID NO: 55272 - DNA, 20 bp, synthetic construct
  source 1..20: mol_type = other DNA
aaatatgatttaggccaaga

SEQ ID NO: 55273 - DNA, 20 bp, synthetic construct
  source 1..20: mol_type = other DNA
aaaatatgatttaggccaag

SEQ ID NO: 55274 - DNA, 20 bp, synthetic construct
  source 1..20: mol_type = other DNA
gaaaatatgatttaggccaa

SEQ ID NO: 55275 - DNA, 20 bp, synthetic construct
  source 1..20: mol_type = other DNA
ggaaaatatgatttaggcca

SEQ ID NO: 55276 - DNA, 20 bp, synthetic construct
  source 1..20: mol_type = other DNA
cggaaaatatgatttaggcc

SEQ ID NO: 55277 - DNA, 20 bp, synthetic construct
  source 1..20: mol_type = other DNA
gcggaaaatatgatttaggc

SEQ ID NO: 55278 - DNA, 20 bp, synthetic construct
  source 1..20: mol_type = other DNA
agcggaaaatatgatttagg

SEQ ID NO: 55279 - DNA, 20 bp, synthetic construct
  source 1..20: mol_type = other DNA
cagcggaaaatatgatttag

SEQ ID NO: 55280 - DNA, 20 bp, synthetic construct
  source 1..20: mol_type = other DNA
gcagcggaaaatatgattta

SEQ ID NO: 55281 - DNA, 20 bp, synthetic construct
  source 1..20: mol_type = other DNA
tgcagcggaaaatatgattt

SEQ ID NO: 55282 - DNA, 20 bp, synthetic construct
  source 1..20: mol_type = other DNA
atgcagcggaaaatatgatt

SEQ ID NO: 55283 - DNA, 20 bp, synthetic construct
  source 1..20: mol_type = other DNA
aatgcagcggaaaatatgat

SEQ ID NO: 55284 - DNA, 20 bp, synthetic construct
  source 1..20: mol_type = other DNA
aaatgcagcggaaaatatga

SEQ ID NO: 55285 - DNA, 20 bp, synthetic construct
  source 1..20: mol_type = other DNA
taaatgcagcggaaaatatg

SEQ ID NO: 55286 - DNA, 20 bp, synthetic construct
  source 1..20: mol_type = other DNA
ctaaatgcagcggaaaatat

SEQ ID NO: 55287 - DNA, 20 bp, synthetic construct
  source 1..20: mol_type = other DNA
cctaaatgcagcggaaaata

SEQ ID NO: 55288 - DNA, 20 bp, synthetic construct
  source 1..20: mol_type = other DNA
ccctaaatgcagcggaaaat

SEQ ID NO: 55289 - DNA, 20 bp, synthetic construct
  source 1..20: mol_type = other DNA
gccctaaatgcagcggaaaa

SEQ ID NO: 55290 - DNA, 20 bp, synthetic construct
  source 1..20: mol_type = other DNA
agccctaaatgcagcggaaa

SEQ ID NO: 55291 - DNA, 20 bp, synthetic construct
  source 1..20: mol_type = other DNA
aagccctaaatgcagcggaa

SEQ ID NO: 55292 - DNA, 20 bp, synthetic construct
  source 1..20: mol_type = other DNA
aaagccctaaatgcagcgga

SEQ ID NO: 55293 - DNA, 20 bp, synthetic construct
  source 1..20: mol_type = other DNA
aaaagccctaaatgcagcgg

SEQ ID NO: 55294 - DNA, 20 bp, synthetic construct
  source 1..20: mol_type = other DNA
aaaaagccctaaatgcagcg

SEQ ID NO: 55295 - DNA, 20 bp, synthetic construct
  source 1..20: mol_type = other DNA
taaaaagccctaaatgcagc

SEQ ID NO: 55296 - DNA, 20 bp, synthetic construct
  source 1..20: mol_type = other DNA
ctaaaaagccctaaatgcag

SEQ ID NO: 55297 - DNA, 20 bp, synthetic construct
  source 1..20: mol_type = other DNA
cctaaaaagccctaaatgca

SEQ ID NO: 55298 - DNA, 20 bp, synthetic construct
  source 1..20: mol_type = other DNA
tcctaaaaagccctaaatgc

SEQ ID NO: 55299 - DNA, 20 bp, synthetic construct
  source 1..20: mol_type = other DNA
gtcctaaaaagccctaaatg

SEQ ID NO: 55300 - DNA, 20 bp, synthetic construct
  source 1..20: mol_type = other DNA
agtcctaaaaagccctaaat

SEQ ID NO: 55301 - DNA, 20 bp, synthetic construct
  source 1..20: mol_type = other DNA
cagtcctaaaaagccctaaa

SEQ ID NO: 55302 - DNA, 20 bp, synthetic construct
  source 1..20: mol_type = other DNA
tcagtcctaaaaagccctaa

SEQ ID NO: 55303 - DNA, 20 bp, synthetic construct
  source 1..20: mol_type = other DNA
atcagtcctaaaaagcccta

SEQ ID NO: 55304 - DNA, 20 bp, synthetic construct
  source 1..20: mol_type = other DNA
gatcagtcctaaaaagccct

SEQ ID NO: 55305 - DNA, 20 bp, synthetic construct
  source 1..20: mol_type = other DNA
tgatcagtcctaaaaagccc

SEQ ID NO: 55306 - DNA, 20 bp, synthetic construct
  source 1..20: mol_type = other DNA
ttgatcagtcctaaaaagcc

SEQ ID NO: 55307 - DNA, 20 bp, synthetic construct
  source 1..20: mol_type = other DNA
tttgatcagtcctaaaaagc

SEQ ID NO: 55308 - DNA, 20 bp, synthetic construct
  source 1..20: mol_type = other DNA
ttttgatcagtcctaaaaag

SEQ ID NO: 55309 - DNA, 20 bp, synthetic construct
  source 1..20: mol_type = other DNA
tttttgatcagtcctaaaaa

SEQ ID NO: 55310 - DNA, 20 bp, synthetic construct
  source 1..20: mol_type = other DNA
atttttgatcagtcctaaaa

SEQ ID NO: 55311 - DNA, 20 bp, synthetic construct
  source 1..20: mol_type = other DNA
tatttttgatcagtcctaaa

SEQ ID NO: 55312 - DNA, 20 bp, synthetic construct
  source 1..20: mol_type = other DNA
gtatttttgatcagtcctaa

SEQ ID NO: 55313 - DNA, 20 bp, synthetic construct
  source 1..20: mol_type = other DNA
tgtatttttgatcagtccta

SEQ ID NO: 55314 - DNA, 20 bp, synthetic construct
  source 1..20: mol_type = other DNA
atgtatttttgatcagtcct

SEQ ID NO: 55315 - DNA, 20 bp, synthetic construct
  source 1..20: mol_type = other DNA
catgtatttttgatcagtcc

SEQ ID NO: 55316 - DNA, 20 bp, synthetic construct
  source 1..20: mol_type = other DNA
gcatgtatttttgatcagtc

SEQ ID NO: 55317 - DNA, 20 bp, synthetic construct
  source 1..20: mol_type = other DNA
agcatgtatttttgatcagt

SEQ ID NO: 55318 - DNA, 20 bp, synthetic construct
  source 1..20: mol_type = other DNA
tagcatgtatttttgatcag

SEQ ID NO: 55319 - DNA, 20 bp, synthetic construct
  source 1..20: mol_type = other DNA
atagcatgtatttttgatca

SEQ ID NO: 55320 - DNA, 20 bp, synthetic construct
  source 1..20: mol_type = other DNA
tatagcatgtatttttgatc

SEQ ID NO: 55321 - DNA, 20 bp, synthetic construct
  source 1..20: mol_type = other DNA
gtatagcatgtatttttgat

SEQ ID NO: 55322 - DNA, 20 bp, synthetic construct
  source 1..20: mol_type = other DNA
agtatagcatgtatttttga

SEQ ID NO: 55323 - DNA, 20 bp, synthetic construct
  source 1..20: mol_type = other DNA
cagtatagcatgtatttttg

SEQ ID NO: 55324 - DNA, 20 bp, synthetic construct
  source 1..20: mol_type = other DNA
ccagtatagcatgtattttt

SEQ ID NO: 55325 - DNA, 20 bp, synthetic construct
  source 1..20: mol_type = other DNA
gccagtatagcatgtatttt

SEQ ID NO: 55326 - DNA, 20 bp, synthetic construct
  source 1..20: mol_type = other DNA
agccagtatagcatgtattt

SEQ ID NO: 55327 - DNA, 20 bp, synthetic construct
  source 1..20: mol_type = other DNA
aagccagtatagcatgtatt

SEQ ID NO: 55328 - DNA, 20 bp, synthetic construct
  source 1..20: mol_type = other DNA
aaagccagtatagcatgtat

SEQ ID NO: 55329 - DNA, 20 bp, synthetic construct
  source 1..20: mol_type = other DNA
caaagccagtatagcatgta

SEQ ID NO: 55330 - DNA, 20 bp, synthetic construct
  source 1..20: mol_type = other DNA
ccaaagccagtatagcatgt

SEQ ID NO: 55331 - DNA, 20 bp, synthetic construct
  source 1..20: mol_type = other DNA
accaaagccagtatagcatg

SEQ ID NO: 55332 - DNA, 20 bp, synthetic construct
  source 1..20: mol_type = other DNA
caccaaagccagtatagcat

SEQ ID NO: 55333 - DNA, 20 bp, synthetic construct
  source 1..20: mol_type = other DNA
tcaccaaagccagtatagca

SEQ ID NO: 55334 - DNA, 20 bp, synthetic construct
  source 1..20: mol_type = other DNA
ttcaccaaagccagtatagc

SEQ ID NO: 55335 - DNA, 20 bp, synthetic construct
  source 1..20: mol_type = other DNA
cttcaccaaagccagtatag

SEQ ID NO: 55336 - DNA, 20 bp, synthetic construct
  source 1..20: mol_type = other DNA
acttcaccaaagccagtata

SEQ ID NO: 55337 - DNA, 20 bp, synthetic construct
  source 1..20: mol_type = other DNA
tacttcaccaaagccagtat

SEQ ID NO: 55338 - DNA, 20 bp, synthetic construct
  source 1..20: mol_type = other DNA
ttacttcaccaaagccagta

SEQ ID NO: 55339 - DNA, 20 bp, synthetic construct
  source 1..20: mol_type = other DNA
gttacttcaccaaagccagt

SEQ ID NO: 55340 - DNA, 20 bp, synthetic construct
  source 1..20: mol_type = other DNA
tgttacttcaccaaagccag

SEQ ID NO: 55341 - DNA, 20 bp, synthetic construct
  source 1..20: mol_type = other DNA
ctgttacttcaccaaagcca

SEQ ID NO: 55342 - DNA, 20 bp, synthetic construct
  source 1..20: mol_type = other DNA
tctgttacttcaccaaagcc

SEQ ID NO: 55343 - DNA, 20 bp, synthetic construct
  source 1..20: mol_type = other DNA
ttctgttacttcaccaaagc

SEQ ID NO: 55344 - DNA, 20 bp, synthetic construct
  source 1..20: mol_type = other DNA
attctgttacttcaccaaag

SEQ ID NO: 55345 - DNA, 20 bp, synthetic construct
  source 1..20: mol_type = other DNA
cattctgttacttcaccaaa

SEQ ID NO: 55346 - DNA, 20 bp, synthetic construct
  source 1..20: mol_type = other DNA
acattctgttacttcaccaa

SEQ ID NO: 55347 - DNA, 20 bp, synthetic construct
  source 1..20: mol_type = other DNA
cacattctgttacttcacca

SEQ ID NO: 55348 - DNA, 20 bp, synthetic construct
  source 1..20: mol_type = other DNA
gcacattctgttacttcacc

SEQ ID NO: 55349 - DNA, 20 bp, synthetic construct
  source 1..20: mol_type = other DNA
agcacattctgttacttcac

SEQ ID NO: 55350 - DNA, 20 bp, synthetic construct
  source 1..20: mol_type = other DNA
gagcacattctgttacttca

SEQ ID NO: 55351 - DNA, 20 bp, synthetic construct
  source 1..20: mol_type = other DNA
agagcacattctgttacttc

SEQ ID NO: 55352 - DNA, 20 bp, synthetic construct
  source 1..20: mol_type = other DNA
cagagcacattctgttactt

SEQ ID NO: 55353 - DNA, 20 bp, synthetic construct
  source 1..20: mol_type = other DNA
acagagcacattctgttact

SEQ ID NO: 55354 - DNA, 20 bp, synthetic construct
  source 1..20: mol_type = other DNA
gacagagcacattctgttac

SEQ ID NO: 55355 - DNA, 20 bp, synthetic construct
  source 1..20: mol_type = other DNA
ggacagagcacattctgtta

SEQ ID NO: 55356 - DNA, 20 bp, synthetic construct
  source 1..20: mol_type = other DNA
aggacagagcacattctgtt

SEQ ID NO: 55357 - DNA, 20 bp, synthetic construct
  source 1..20: mol_type = other DNA
aaggacagagcacattctgt

SEQ ID NO: 55358 - DNA, 20 bp, synthetic construct
  source 1..20: mol_type = other DNA
aaaggacagagcacattctg

SEQ ID NO: 55359 - DNA, 20 bp, synthetic construct
  source 1..20: mol_type = other DNA
taaaggacagagcacattct

SEQ ID NO: 55360 - DNA, 20 bp, synthetic construct
  source 1..20: mol_type = other DNA
ttaaaggacagagcacattc

SEQ ID NO: 55361 - DNA, 20 bp, synthetic construct
  source 1..20: mol_type = other DNA
tttaaaggacagagcacatt

SEQ ID NO: 55362 - DNA, 20 bp, synthetic construct
  source 1..20: mol_type = other DNA
gtttaaaggacagagcacat

SEQ ID NO: 55363 - DNA, 20 bp, synthetic construct
  source 1..20: mol_type = other DNA
agtttaaaggacagagcaca

SEQ ID NO: 55364 - DNA, 20 bp, synthetic construct
  source 1..20: mol_type = other DNA
aagtttaaaggacagagcac

SEQ ID NO: 55365 - DNA, 20 bp, synthetic construct
  source 1..20: mol_type = other DNA
taagtttaaaggacagagca

SEQ ID NO: 55366 - DNA, 20 bp, synthetic construct
  source 1..20: mol_type = other DNA
gtaagtttaaaggacagagc

SEQ ID NO: 55367 - DNA, 20 bp, synthetic construct
  source 1..20: mol_type = other DNA
tgtaagtttaaaggacagag

SEQ ID NO: 55368 - DNA, 20 bp, synthetic construct
  source 1..20: mol_type = other DNA
ttgtaagtttaaaggacaga

SEQ ID NO: 55369 - DNA, 20 bp, synthetic construct
  source 1..20: mol_type = other DNA
gttgtaagtttaaaggacag

SEQ ID NO: 55370 - DNA, 20 bp, synthetic construct
  source 1..20: mol_type = other DNA
agttgtaagtttaaaggaca

SEQ ID NO: 55371 - DNA, 20 bp, synthetic construct
  source 1..20: mol_type = other DNA
tagttgtaagtttaaaggac

SEQ ID NO: 55372 - DNA, 20 bp, synthetic construct
  source 1..20: mol_type = other DNA
ttagttgtaagtttaaagga

SEQ ID NO: 55373 - DNA, 20 bp, synthetic construct
  source 1..20: mol_type = other DNA
attagttgtaagtttaaagg

SEQ ID NO: 55374 - DNA, 20 bp, synthetic construct
  source 1..20: mol_type = other DNA
aattagttgtaagtttaaag

SEQ ID NO: 55375 - DNA, 20 bp, synthetic construct
  source 1..20: mol_type = other DNA
caattagttgtaagtttaaa

SEQ ID NO: 55376 - DNA, 20 bp, synthetic construct
  source 1..20: mol_type = other DNA
gcaattagttgtaagtttaa

SEQ ID NO: 55377 - DNA, 20 bp, synthetic construct
  source 1..20: mol_type = other DNA
tgcaattagttgtaagttta

SEQ ID NO: 55378 - DNA, 20 bp, synthetic construct
  source 1..20: mol_type = other DNA
atgcaattagttgtaagttt

SEQ ID NO: 55379 - DNA, 20 bp, synthetic construct
  source 1..20: mol_type = other DNA
catgcaattagttgtaagtt

SEQ ID NO: 55380 - DNA, 20 bp, synthetic construct
  source 1..20: mol_type = other DNA
gcatgcaattagttgtaagt

SEQ ID NO: 55381 - DNA, 20 bp, synthetic construct
  source 1..20: mol_type = other DNA
agcatgcaattagttgtaag

SEQ ID NO: 55382 - DNA, 20 bp, synthetic construct
  source 1..20: mol_type = other DNA
aagcatgcaattagttgtaa

SEQ ID NO: 55383 - DNA, 20 bp, synthetic construct
  source 1..20: mol_type = other DNA
aaagcatgcaattagttgta

SEQ ID NO: 55384 - DNA, 20 bp, synthetic construct
  source 1..20: mol_type = other DNA
caaagcatgcaattagttgt

SEQ ID NO: 55385 - DNA, 20 bp, synthetic construct
  source 1..20: mol_type = other DNA
tcaaagcatgcaattagttg

SEQ ID NO: 55386 - DNA, 20 bp, synthetic construct
  source 1..20: mol_type = other DNA
atcaaagcatgcaattagtt

SEQ ID NO: 55387 - DNA, 20 bp, synthetic construct
  source 1..20: mol_type = other DNA
aatcaaagcatgcaattagt

SEQ ID NO: 55388 - DNA, 20 bp, synthetic construct
  source 1..20: mol_type = other DNA
gaatcaaagcatgcaattag

SEQ ID NO: 55389 - DNA, 20 bp, synthetic construct
  source 1..20: mol_type = other DNA
agaatcaaagcatgcaatta

SEQ ID NO: 55390 - DNA, 20 bp, synthetic construct
  source 1..20: mol_type = other DNA
tagaatcaaagcatgcaatt

SEQ ID NO: 55391 - DNA, 20 bp, synthetic construct
  source 1..20: mol_type = other DNA
ttagaatcaaagcatgcaat

SEQ ID NO: 55392 - DNA, 20 bp, synthetic construct
  source 1..20: mol_type = other DNA
attagaatcaaagcatgcaa

SEQ ID NO: 55393 - DNA, 20 bp, synthetic construct
  source 1..20: mol_type = other DNA
tattagaatcaaagcatgca

SEQ ID NO: 55394 - DNA, 20 bp, synthetic construct
  source 1..20: mol_type = other DNA
gtattagaatcaaagcatgc

SEQ ID NO: 55395 - DNA, 20 bp, synthetic construct
  source 1..20: mol_type = other DNA
agtattagaatcaaagcatg

SEQ ID NO: 55396 - DNA, 20 bp, synthetic construct
  source 1..20: mol_type = other DNA
cagtattagaatcaaagcat

SEQ ID NO: 55397 - DNA, 20 bp, synthetic construct
  source 1..20: mol_type = other DNA
acagtattagaatcaaagca

SEQ ID NO: 55398 - DNA, 20 bp, synthetic construct
  source 1..20: mol_type = other DNA
tacagtattagaatcaaagc

SEQ ID NO: 55399 - DNA, 20 bp, synthetic construct
  source 1..20: mol_type = other DNA
atacagtattagaatcaaag

SEQ ID NO: 55400 - DNA, 20 bp, synthetic construct
  source 1..20: mol_type = other DNA
tatacagtattagaatcaaa

SEQ ID NO: 55401 - DNA, 20 bp, synthetic construct
  source 1..20: mol_type = other DNA
ttatacagtattagaatcaa

SEQ ID NO: 55402 - DNA, 20 bp, synthetic construct
  source 1..20: mol_type = other DNA
attatacagtattagaatca

SEQ ID NO: 55403 - DNA, 20 bp, synthetic construct
  source 1..20: mol_type = other DNA
tattatacagtattagaatc

SEQ ID NO: 55404 - DNA, 20 bp, synthetic construct
  source 1..20: mol_type = other DNA
atattatacagtattagaat

SEQ ID NO: 55405 - DNA, 20 bp, synthetic construct
  source 1..20: mol_type = other DNA
gatattatacagtattagaa

SEQ ID NO: 55406 - DNA, 20 bp, synthetic construct
  source 1..20: mol_type = other DNA
ggatattatacagtattaga

SEQ ID NO: 55407 - DNA, 20 bp, synthetic construct
  source 1..20: mol_type = other DNA
aggatattatacagtattag

SEQ ID NO: 55408 - DNA, 20 bp, synthetic construct
  source 1..20: mol_type = other DNA
caggatattatacagtatta

SEQ ID NO: 55409 - DNA, 20 bp, synthetic construct
  source 1..20: mol_type = other DNA
gcaggatattatacagtatt

SEQ ID NO: 55410 - DNA, 20 bp, synthetic construct
  source 1..20: mol_type = other DNA
cgcaggatattatacagtat

SEQ ID NO: 55411 - DNA, 20 bp, synthetic construct
  source 1..20: mol_type = other DNA
tcgcaggatattatacagta

SEQ ID NO: 55412 - DNA, 20 bp, synthetic construct
  source 1..20: mol_type = other DNA
atcgcaggatattatacagt

SEQ ID NO: 55413 - DNA, 20 bp, synthetic construct
  source 1..20: mol_type = other DNA
aatcgcaggatattatacag

SEQ ID NO: 55414 - DNA, 20 bp, synthetic construct
  source 1..20: mol_type = other DNA
gaatcgcaggatattataca

SEQ ID NO: 55415 - DNA, 20 bp, synthetic construct
  source 1..20: mol_type = other DNA
agaatcgcaggatattatac

SEQ ID NO: 55416 - DNA, 20 bp, synthetic construct
  source 1..20: mol_type = other DNA
aagaatcgcaggatattata

SEQ ID NO: 55417 - DNA, 20 bp, synthetic construct
  source 1..20: mol_type = other DNA
taagaatcgcaggatattat

SEQ ID NO: 55418 - DNA, 20 bp, synthetic construct
  source 1..20: mol_type = other DNA
ataagaatcgcaggatatta

SEQ ID NO: 55419 - DNA, 20 bp, synthetic construct
  source 1..20: mol_type = other DNA
aataagaatcgcaggatatt

SEQ ID NO: 55420 - DNA, 20 bp, synthetic construct
  source 1..20: mol_type = other DNA
gaataagaatcgcaggatat

SEQ ID NO: 55421 - DNA, 20 bp, synthetic construct
  source 1..20: mol_type = other DNA
tgaataagaatcgcaggata

SEQ ID NO: 55422 - DNA, 20 bp, synthetic construct
  source 1..20: mol_type = other DNA
atgaataagaatcgcaggat

SEQ ID NO: 55423 - DNA, 20 bp, synthetic construct
  source 1..20: mol_type = other DNA
catgaataagaatcgcagga

SEQ ID NO: 55424 - DNA, 20 bp, synthetic construct
  source 1..20: mol_type = other DNA
tcatgaataagaatcgcagg

SEQ ID NO: 55425 - DNA, 20 bp, synthetic construct
  source 1..20: mol_type = other DNA
gtcatgaataagaatcgcag

SEQ ID NO: 55426 - DNA, 20 bp, synthetic construct
  source 1..20: mol_type = other DNA
ggtcatgaataagaatcgca

SEQ ID NO: 55427 - DNA, 20 bp, synthetic construct
  source 1..20: mol_type = other DNA
tggtcatgaataagaatcgc

SEQ ID NO: 55428 - DNA, 20 bp, synthetic construct
  source 1..20: mol_type = other DNA
atggtcatgaataagaatcg

SEQ ID NO: 55429 - DNA, 20 bp, synthetic construct
  source 1..20: mol_type = other DNA
aatggtcatgaataagaatc

SEQ ID NO: 55430 - DNA, 20 bp, synthetic construct
  source 1..20: mol_type = other DNA
gaatggtcatgaataagaat

SEQ ID NO: 55431 - DNA, 20 bp, synthetic construct
  source 1..20: mol_type = other DNA
agaatggtcatgaataagaa

SEQ ID NO: 55432 - DNA, 20 bp, synthetic construct
  source 1..20: mol_type = other DNA
tagaatggtcatgaataaga

SEQ ID NO: 55433 - DNA, 20 bp, synthetic construct
  source 1..20: mol_type = other DNA
ttagaatggtcatgaataag

SEQ ID NO: 55434 - DNA, 20 bp, synthetic construct
  source 1..20: mol_type = other DNA
attagaatggtcatgaataa

SEQ ID NO: 55435 - DNA, 20 bp, synthetic construct
  source 1..20: mol_type = other DNA
aattagaatggtcatgaata

SEQ ID NO: 55436 - DNA, 20 bp, synthetic construct
  source 1..20: mol_type = other DNA
caattagaatggtcatgaat

SEQ ID NO: 55437 - DNA, 20 bp, synthetic construct
  source 1..20: mol_type = other DNA
ccaattagaatggtcatgaa

SEQ ID NO: 55438 - DNA, 20 bp, synthetic construct
  source 1..20: mol_type = other DNA
tccaattagaatggtcatga

SEQ ID NO: 55439 - DNA, 20 bp, synthetic construct
  source 1..20: mol_type = other DNA
atccaattagaatggtcatg

SEQ ID NO: 55440 - DNA, 20 bp, synthetic construct
  source 1..20: mol_type = other DNA
aatccaattagaatggtcat

SEQ ID NO: 55441 - DNA, 20 bp, synthetic construct
  source 1..20: mol_type = other DNA
aaatccaattagaatggtca

SEQ ID NO: 55442 - DNA, 20 bp, synthetic construct
  source 1..20: mol_type = other DNA
taaatccaattagaatggtc

SEQ ID NO: 55443 - DNA, 20 bp, synthetic construct
  source 1..20: mol_type = other DNA
ctaaatccaattagaatggt

SEQ ID NO: 55444 - DNA, 20 bp, synthetic construct
  source 1..20: mol_type = other DNA
actaaatccaattagaatgg

SEQ ID NO: 55445 - DNA, 20 bp, synthetic construct
  source 1..20: mol_type = other DNA
gactaaatccaattagaatg

SEQ ID NO: 55446 - DNA, 20 bp, synthetic construct
  source 1..20: mol_type = other DNA
agactaaatccaattagaat

SEQ ID NO: 55447 - DNA, 20 bp, synthetic construct
  source 1..20: mol_type = other DNA
cagactaaatccaattagaa

SEQ ID NO: 55448 - DNA, 20 bp, synthetic construct
  source 1..20: mol_type = other DNA
tcagactaaatccaattaga

SEQ ID NO: 55449 - DNA, 20 bp, synthetic construct
  source 1..20: mol_type = other DNA
ttcagactaaatccaattag

SEQ ID NO: 55450 - DNA, 20 bp, synthetic construct
  source 1..20: mol_type = other DNA
cttcagactaaatccaatta

SEQ ID NO: 55451 - DNA, 20 bp, synthetic construct
  source 1..20: mol_type = other DNA
tcttcagactaaatccaatt

SEQ ID NO: 55452 - DNA, 20 bp, synthetic construct
  source 1..20: mol_type = other DNA
ttcttcagactaaatccaat

SEQ ID NO: 55453 - DNA, 20 bp, synthetic construct
  source 1..20: mol_type = other DNA
attcttcagactaaatccaa

SEQ ID NO: 55454 - DNA, 20 bp, synthetic construct
  source 1..20: mol_type = other DNA
aattcttcagactaaatcca

SEQ ID NO: 55455 - DNA, 20 bp, synthetic construct
  source 1..20: mol_type = other DNA
taattcttcagactaaatcc

SEQ ID NO: 55456 - DNA, 20 bp, synthetic construct
  source 1..20: mol_type = other DNA
gtaattcttcagactaaatc

SEQ ID NO: 55457 - DNA, 20 bp, synthetic construct
  source 1..20: mol_type = other DNA
agtaattcttcagactaaat

SEQ ID NO: 55458 - DNA, 20 bp, synthetic construct
  source 1..20: mol_type = other DNA
aagtaattcttcagactaaa

SEQ ID NO: 55459 - DNA, 20 bp, synthetic construct
  source 1..20: mol_type = other DNA
aaagtaattcttcagactaa

SEQ ID NO: 55460 - DNA, 20 bp, synthetic construct
  source 1..20: mol_type = other DNA
aaaagtaattcttcagacta

SEQ ID NO: 55461 - DNA, 20 bp, synthetic construct
  source 1..20: mol_type = other DNA
caaaagtaattcttcagact

SEQ ID NO: 55462 - DNA, 20 bp, synthetic construct
  source 1..20: mol_type = other DNA
gcaaaagtaattcttcagac

SEQ ID NO: 55463 - DNA, 20 bp, synthetic construct
  source 1..20: mol_type = other DNA
agcaaaagtaattcttcaga

SEQ ID NO: 55464 - DNA, 20 bp, synthetic construct
  source 1..20: mol_type = other DNA
aagcaaaagtaattcttcag

SEQ ID NO: 55465 - DNA, 20 bp, synthetic construct
  source 1..20: mol_type = other DNA
taagcaaaagtaattcttca

SEQ ID NO: 55466 - DNA, 20 bp, synthetic construct
  source 1..20: mol_type = other DNA
ttaagcaaaagtaattcttc

SEQ ID NO: 55467 - DNA, 20 bp, synthetic construct
  source 1..20: mol_type = other DNA
gttaagcaaaagtaattctt

SEQ ID NO: 55468 - DNA, 20 bp, synthetic construct
  source 1..20: mol_type = other DNA
tgttaagcaaaagtaattct

SEQ ID NO: 55469 - DNA, 20 bp, synthetic construct
  source 1..20: mol_type = other DNA
ctgttaagcaaaagtaattc

SEQ ID NO: 55470 - DNA, 20 bp, synthetic construct
  source 1..20: mol_type = other DNA
tctgttaagcaaaagtaatt

SEQ ID NO: 55471 - DNA, 20 bp, synthetic construct
  source 1..20: mol_type = other DNA
atctgttaagcaaaagtaat

SEQ ID NO: 55472 - DNA, 20 bp, synthetic construct
  source 1..20: mol_type = other DNA
aatctgttaagcaaaagtaa

SEQ ID NO: 55473 - DNA, 20 bp, synthetic construct
  source 1..20: mol_type = other DNA
gaatctgttaagcaaaagta

SEQ ID NO: 55474 - DNA, 20 bp, synthetic construct
  source 1..20: mol_type = other DNA
agaatctgttaagcaaaagt

SEQ ID NO: 55475 - DNA, 20 bp, synthetic construct
  source 1..20: mol_type = other DNA
aagaatctgttaagcaaaag

SEQ ID NO: 55476 - DNA, 20 bp, synthetic construct
  source 1..20: mol_type = other DNA
aaagaatctgttaagcaaaa

SEQ ID NO: 55477 - DNA, 20 bp, synthetic construct
  source 1..20: mol_type = other DNA
caaagaatctgttaagcaaa

SEQ ID NO: 55478 - DNA, 20 bp, synthetic construct
  source 1..20: mol_type = other DNA
acaaagaatctgttaagcaa

SEQ ID NO: 55479 - DNA, 20 bp, synthetic construct
  source 1..20: mol_type = other DNA
gacaaagaatctgttaagca

SEQ ID NO: 55480 - DNA, 20 bp, synthetic construct
  source 1..20: mol_type = other DNA
tgacaaagaatctgttaagc

SEQ ID NO: 55481 - DNA, 20 bp, synthetic construct
  source 1..20: mol_type = other DNA
gtgacaaagaatctgttaag

SEQ ID NO: 55482 - DNA, 20 bp, synthetic construct
  source 1..20: mol_type = other DNA
tgtgacaaagaatctgttaa

SEQ ID NO: 55483 - DNA, 20 bp, synthetic construct
  source 1..20: mol_type = other DNA
atgtgacaaagaatctgtta

SEQ ID NO: 55484 - DNA, 20 bp, synthetic construct
  source 1..20: mol_type = other DNA
aatgtgacaaagaatctgtt

SEQ ID NO: 55485 - DNA, 20 bp, synthetic construct
  source 1..20: mol_type = other DNA
aaatgtgacaaagaatctgt

SEQ ID NO: 55486 - DNA, 20 bp, synthetic construct
  source 1..20: mol_type = other DNA
taaatgtgacaaagaatctg

SEQ ID NO: 55487 - DNA, 20 bp, synthetic construct
  source 1..20: mol_type = other DNA
ctaaatgtgacaaagaatct

SEQ ID NO: 55488 - DNA, 20 bp, synthetic construct
  source 1..20: mol_type = other DNA
actaaatgtgacaaagaatc

SEQ ID NO: 55489 - DNA, 20 bp, synthetic construct
  source 1..20: mol_type = other DNA
cactaaatgtgacaaagaat

SEQ ID NO: 55490 - DNA, 20 bp, synthetic construct
  source 1..20: mol_type = other DNA
tcactaaatgtgacaaagaa

SEQ ID NO: 55491 - DNA, 20 bp, synthetic construct
  source 1..20: mol_type = other DNA
ttcactaaatgtgacaaaga

SEQ ID NO: 55492 - DNA, 20 bp, synthetic construct
  source 1..20: mol_type = other DNA
tttcactaaatgtgacaaag

SEQ ID NO: 55493 - DNA, 20 bp, synthetic construct
  source 1..20: mol_type = other DNA
ttttcactaaatgtgacaaa

SEQ ID NO: 55494 - DNA, 20 bp, synthetic construct
  source 1..20: mol_type = other DNA
tttttcactaaatgtgacaa

SEQ ID NO: 55495 - DNA, 20 bp, synthetic construct
  source 1..20: mol_type = other DNA
atttttcactaaatgtgaca

SEQ ID NO: 55496 - DNA, 20 bp, synthetic construct
  source 1..20: mol_type = other DNA
gatttttcactaaatgtgac

SEQ ID NO: 55497 - DNA, 20 bp, synthetic construct
  source 1..20: mol_type = other DNA
tgatttttcactaaatgtga

SEQ ID NO: 55498 - DNA, 20 bp, synthetic construct
  source 1..20: mol_type = other DNA
atgatttttcactaaatgtg

SEQ ID NO: 55499 - DNA, 20 bp, synthetic construct
  source 1..20: mol_type = other DNA
tatgatttttcactaaatgt

SEQ ID NO: 55500 - DNA, 20 bp, synthetic construct
  source 1..20: mol_type = other DNA
ttatgatttttcactaaatg

SEQ ID NO: 55501 - DNA, 20 bp, synthetic construct
  source 1..20: mol_type = other DNA
tttatgatttttcactaaat

SEQ ID NO: 55502 - DNA, 20 bp, synthetic construct
  source 1..20: mol_type = other DNA
ttttatgatttttcactaaa

SEQ ID NO: 55503 - DNA, 20 bp, synthetic construct
  source 1..20: mol_type = other DNA
cttttatgatttttcactaa

SEQ ID NO: 55504 - DNA, 20 bp, synthetic construct
  source 1..20: mol_type = other DNA
ccttttatgatttttcacta

SEQ ID NO: 55505 - DNA, 20 bp, synthetic construct
  source 1..20: mol_type = other DNA
cccttttatgatttttcact

SEQ ID NO: 55506 - DNA, 20 bp, synthetic construct
  source 1..20: mol_type = other DNA
ccccttttatgatttttcac

SEQ ID NO: 55507 - DNA, 20 bp, synthetic construct
  source 1..20: mol_type = other DNA
tccccttttatgatttttca

SEQ ID NO: 55508 - DNA, 20 bp, synthetic construct
  source 1..20: mol_type = other DNA
ttccccttttatgatttttc

SEQ ID NO: 55509 - DNA, 20 bp, synthetic construct
  source 1..20: mol_type = other DNA
cttccccttttatgattttt

SEQ ID NO: 55510 - DNA, 20 bp, synthetic construct
  source 1..20: mol_type = other DNA
ccttccccttttatgatttt

SEQ ID NO: 55511 - DNA, 20 bp, synthetic construct
  source 1..20: mol_type = other DNA
accttccccttttatgattt

SEQ ID NO: 55512 - DNA, 20 bp, synthetic construct
  source 1..20: mol_type = other DNA
aaccttccccttttatgatt

SEQ ID NO: 55513 - DNA, 20 bp, synthetic construct
  source 1..20: mol_type = other DNA
caaccttccccttttatgat

SEQ ID NO: 55514 - DNA, 20 bp, synthetic construct
  source 1..20: mol_type = other DNA
ccaaccttccccttttatga

SEQ ID NO: 55515 - DNA, 20 bp, synthetic construct
  source 1..20: mol_type = other DNA
accaaccttccccttttatg

SEQ ID NO: 55516 - DNA, 20 bp, synthetic construct
  source 1..20: mol_type = other DNA
aaccaaccttccccttttat

SEQ ID NO: 55517 - DNA, 20 bp, synthetic construct
  source 1..20: mol_type = other DNA
taaccaaccttcccctttta

SEQ ID NO: 55518 - DNA, 20 bp, synthetic construct
  source 1..20: mol_type = other DNA
ttaaccaaccttcccctttt

SEQ ID NO: 55519 - DNA, 20 bp, synthetic construct
  source 1..20: mol_type = other DNA
attaaccaaccttccccttt

SEQ ID NO: 55520 - DNA, 20 bp, synthetic construct
  source 1..20: mol_type = other DNA
cattaaccaaccttcccctt

SEQ ID NO: 55521 - DNA, 20 bp, synthetic construct
  source 1..20: mol_type = other DNA
ccattaaccaaccttcccct

SEQ ID NO: 55522 - DNA, 20 bp, synthetic construct
  source 1..20: mol_type = other DNA
tccattaaccaaccttcccc

SEQ ID NO: 55523 - DNA, 20 bp, synthetic construct
  source 1..20: mol_type = other DNA
ttccattaaccaaccttccc

SEQ ID NO: 55524 - DNA, 20 bp, synthetic construct
  source 1..20: mol_type = other DNA
tttccattaaccaaccttcc

SEQ ID NO: 55525 - DNA, 20 bp, synthetic construct
  source 1..20: mol_type = other DNA
ttttccattaaccaaccttc

SEQ ID NO: 55526 - DNA, 20 bp, synthetic construct
  source 1..20: mol_type = other DNA
cttttccattaaccaacctt

SEQ ID NO: 55527 - DNA, 20 bp, synthetic construct
  source 1..20: mol_type = other DNA
tcttttccattaaccaacct

SEQ ID NO: 55528 - DNA, 20 bp, synthetic construct
  source 1..20: mol_type = other DNA
atcttttccattaaccaacc

SEQ ID NO: 55529 - DNA, 20 bp, synthetic construct
  source 1..20: mol_type = other DNA
gatcttttccattaaccaac

SEQ ID NO: 55530 - DNA, 20 bp, synthetic construct
  source 1..20: mol_type = other DNA
agatcttttccattaaccaa

SEQ ID NO: 55531 - DNA, 20 bp, synthetic construct
  source 1..20: mol_type = other DNA
gagatcttttccattaacca

SEQ ID NO: 55532 - DNA, 20 bp, synthetic construct
  source 1..20: mol_type = other DNA
ggagatcttttccattaacc

SEQ ID NO: 55533 - DNA, 20 bp, synthetic construct
  source 1..20: mol_type = other DNA
tggagatcttttccattaac

SEQ ID NO: 55534 - DNA, 20 bp, synthetic construct
  source 1..20: mol_type = other DNA
atggagatcttttccattaa

SEQ ID NO: 55535 - DNA, 20 bp, synthetic construct
  source 1..20: mol_type = other DNA
gatggagatcttttccatta

SEQ ID NO: 55536 - DNA, 20 bp, synthetic construct
  source 1..20: mol_type = other DNA
tgatggagatcttttccatt

SEQ ID NO: 55537 - DNA, 20 bp, synthetic construct
  source 1..20: mol_type = other DNA
ttgatggagatcttttccat

SEQ ID NO: 55538 - DNA, 20 bp, synthetic construct
  source 1..20: mol_type = other DNA
gttgatggagatcttttcca

SEQ ID NO: 55539 - DNA, 20 bp, synthetic construct
  source 1..20: mol_type = other DNA
agttgatggagatcttttcc

SEQ ID NO: 55540 - DNA, 20 bp, synthetic construct
  source 1..20: mol_type = other DNA
tagttgatggagatcttttc

SEQ ID NO: 55541 - DNA, 20 bp, synthetic construct
  source 1..20: mol_type = other DNA
ttagttgatggagatctttt

SEQ ID NO: 55542 - DNA, 20 bp, synthetic construct
  source 1..20: mol_type = other DNA
gttagttgatggagatcttt

SEQ ID NO: 55543 - DNA, 20 bp, synthetic construct
  source 1..20: mol_type = other DNA
ggttagttgatggagatctt

SEQ ID NO: 55544 - DNA, 20 bp, synthetic construct
  source 1..20: mol_type = other DNA
tggttagttgatggagatct

SEQ ID NO: 55545 - DNA, 20 bp, synthetic construct
  source 1..20: mol_type = other DNA
gtggttagttgatggagatc

SEQ ID NO: 55546 - DNA, 20 bp, synthetic construct
  source 1..20: mol_type = other DNA
agtggttagttgatggagat

SEQ ID NO: 55547 - DNA, 20 bp, synthetic construct
  source 1..20: mol_type = other DNA
tagtggttagttgatggaga

SEQ ID NO: 55548 - DNA, 20 bp, synthetic construct
  source 1..20: mol_type = other DNA
gtagtggttagttgatggag

SEQ ID NO: 55549 - DNA, 20 bp, synthetic construct
  source 1..20: mol_type = other DNA
ggtagtggttagttgatgga

SEQ ID NO: 55550 - DNA, 20 bp, synthetic construct
  source 1..20: mol_type = other DNA
aggtagtggttagttgatgg

SEQ ID NO: 55551 - DNA, 20 bp, synthetic construct
  source 1..20: mol_type = other DNA
aaggtagtggttagttgatg

SEQ ID NO: 55552 - DNA, 20 bp, synthetic construct
  source 1..20: mol_type = other DNA
gaaggtagtggttagttgat

SEQ ID NO: 55553 - DNA, 20 bp, synthetic construct
  source 1..20: mol_type = other DNA
ggaaggtagtggttagttga

SEQ ID NO: 55554 - DNA, 20 bp, synthetic construct
  source 1..20: mol_type = other DNA
aggaaggtagtggttagttg

SEQ ID NO: 55555 - DNA, 20 bp, synthetic construct
  source 1..20: mol_type = other DNA
aaggaaggtagtggttagtt

SEQ ID NO: 55556 - DNA, 20 bp, synthetic construct
  source 1..20: mol_type = other DNA
taaggaaggtagtggttagt

SEQ ID NO: 55557 - DNA, 20 bp, synthetic construct
  source 1..20: mol_type = other DNA
ataaggaaggtagtggttag

SEQ ID NO: 55558 - DNA, 20 bp, synthetic construct
  source 1..20: mol_type = other DNA
gataaggaaggtagtggtta

SEQ ID NO: 55559 - DNA, 20 bp, synthetic construct
  source 1..20: mol_type = other DNA
agataaggaaggtagtggtt

SEQ ID NO: 55560 - DNA, 20 bp, synthetic construct
  source 1..20: mol_type = other DNA
tagataaggaaggtagtggt

SEQ ID NO: 55561 - DNA, 20 bp, synthetic construct
  source 1..20: mol_type = other DNA
gtagataaggaaggtagtgg

SEQ ID NO: 55562 - DNA, 20 bp, synthetic construct
  source 1..20: mol_type = other DNA
tgtagataaggaaggtagtg

SEQ ID NO: 55563 - DNA, 20 bp, synthetic construct
  source 1..20: mol_type = other DNA
ttgtagataaggaaggtagt

SEQ ID NO: 55564 - DNA, 20 bp, synthetic construct
  source 1..20: mol_type = other DNA
tttgtagataaggaaggtag

SEQ ID NO: 55565 - DNA, 20 bp, synthetic construct
  source 1..20: mol_type = other DNA
atttgtagataaggaaggta

SEQ ID NO: 55566 - DNA, 20 bp, synthetic construct
  source 1..20: mol_type = other DNA
aatttgtagataaggaaggt

SEQ ID NO: 55567 - DNA, 20 bp, synthetic construct
  source 1..20: mol_type = other DNA
aaatttgtagataaggaagg

SEQ ID NO: 55568 - DNA, 20 bp, synthetic construct
  source 1..20: mol_type = other DNA
taaatttgtagataaggaag

SEQ ID NO: 55569 - DNA, 20 bp, synthetic construct
  source 1..20: mol_type = other DNA
ataaatttgtagataaggaa

SEQ ID NO: 55570 - DNA, 20 bp, synthetic construct
  source 1..20: mol_type = other DNA
gataaatttgtagataagga

SEQ ID NO: 55571 - DNA, 20 bp, synthetic construct
  source 1..20: mol_type = other DNA
agataaatttgtagataagg

SEQ ID NO: 55572 - DNA, 20 bp, synthetic construct
  source 1..20: mol_type = other DNA
aagataaatttgtagataag

SEQ ID NO: 55573 - DNA, 20 bp, synthetic construct
  source 1..20: mol_type = other DNA
gaagataaatttgtagataa

SEQ ID NO: 55574 - DNA, 20 bp, synthetic construct
  source 1..20: mol_type = other DNA
agaagataaatttgtagata

SEQ ID NO: 55575 - DNA, 20 bp, synthetic construct
  source 1..20: mol_type = other DNA
aagaagataaatttgtagat

SEQ ID NO: 55576 - DNA, 20 bp, synthetic construct
  source 1..20: mol_type = other DNA
gaagaagataaatttgtaga

SEQ ID NO: 55577 - DNA, 20 bp, synthetic construct
  source 1..20: mol_type = other DNA
ggaagaagataaatttgtag

SEQ ID NO: 55578 - DNA, 20 bp, synthetic construct
  source 1..20: mol_type = other DNA
aggaagaagataaatttgta

SEQ ID NO: 55579 - DNA, 20 bp, synthetic construct
  source 1..20: mol_type = other DNA
gaggaagaagataaatttgt

SEQ ID NO: 55580 - DNA, 20 bp, synthetic construct
  source 1..20: mol_type = other DNA
ggaggaagaagataaatttg

SEQ ID NO: 55581 - DNA, 20 bp, synthetic construct
  source 1..20: mol_type = other DNA
cggaggaagaagataaattt

SEQ ID NO: 55582 - DNA, 20 bp, synthetic construct
  source 1..20: mol_type = other DNA
acggaggaagaagataaatt

SEQ ID NO: 55583 - DNA, 20 bp, synthetic construct
  source 1..20: mol_type = other DNA
cacggaggaagaagataaat

SEQ ID NO: 55584 - DNA, 20 bp, synthetic construct
  source 1..20: mol_type = other DNA
gcacggaggaagaagataaa

SEQ ID NO: 55585 - DNA, 20 bp, synthetic construct
  source 1..20: mol_type = other DNA
ggcacggaggaagaagataa

SEQ ID NO: 55586 - DNA, 20 bp, synthetic construct
  source 1..20: mol_type = other DNA
tggcacggaggaagaagata

SEQ ID NO: 55587 - DNA, 20 bp, synthetic construct
  source 1..20: mol_type = other DNA
atggcacggaggaagaagat

SEQ ID NO: 55588 - DNA, 20 bp, synthetic construct
  source 1..20: mol_type = other DNA
gatggcacggaggaagaaga

SEQ ID NO: 55589 - DNA, 20 bp, synthetic construct
  source 1..20: mol_type = other DNA
agatggcacggaggaagaag

SEQ ID NO: 55590 - DNA, 20 bp, synthetic construct
  source 1..20: mol_type = other DNA
aagatggcacggaggaagaa

SEQ ID NO: 55591 - DNA, 20 bp, synthetic construct
  source 1..20: mol_type = other DNA
aaagatggcacggaggaaga

SEQ ID NO: 55592 - DNA, 20 bp, synthetic construct
  source 1..20: mol_type = other DNA
aaaagatggcacggaggaag

SEQ ID NO: 55593 - DNA, 20 bp, synthetic construct
  source 1..20: mol_type = other DNA
aaaaagatggcacggaggaa

SEQ ID NO: 55594 - DNA, 20 bp, synthetic construct
  source 1..20: mol_type = other DNA
aaaaaagatggcacggagga

SEQ ID NO: 55595 - DNA, 20 bp, synthetic construct
  source 1..20: mol_type = other DNA
aaaaaaagatggcacggagg

SEQ ID NO: 55596 - DNA, 20 bp, synthetic construct
  source 1..20: mol_type = other DNA
aaaaaaaagatggcacggag

SEQ ID NO: 55597 - DNA, 20 bp, synthetic construct
  source 1..20: mol_type = other DNA
aaaaaaaaagatggcacgga

SEQ ID NO: 55598 - DNA, 20 bp, synthetic construct
  source 1..20: mol_type = other DNA
aaaaaaaaaagatggcacgg

SEQ ID NO: 55599 - DNA, 20 bp, synthetic construct
  source 1..20: mol_type = other DNA
aaaaaaaaaaagatggcacg

SEQ ID NO: 55600 - DNA, 20 bp, synthetic construct
  source 1..20: mol_type = other DNA
aaaaaaaaaaaagatggcac

SEQ ID NO: 55601 - DNA, 20 bp, synthetic construct
  source 1..20: mol_type = other DNA
aaaaaaaaaaaaagatggca

SEQ ID NO: 55602 - DNA, 20 bp, synthetic construct
  source 1..20: mol_type = other DNA
aaaaaaaaaaaaaagatggc

SEQ ID NO: 55603 - DNA, 20 bp, synthetic construct
  source 1..20: mol_type = other DNA
aaaaaaaaaaaaaaagatgg

SEQ ID NO: 55604 - DNA, 20 bp, synthetic construct
  source 1..20: mol_type = other DNA
aaaaaaaaaaaaaaaagatg

SEQ ID NO: 55605 - DNA, 20 bp, synthetic construct
  source 1..20: mol_type = other DNA
aaaaaaaaaaaaaaaaagat

SEQ ID NO: 55606 - DNA, 20 bp, synthetic construct
  source 1..20: mol_type = other DNA
gaaaaaaaaaaaaaaaaaga

SEQ ID NO: 55607 - DNA, 20 bp, synthetic construct
  source 1..20: mol_type = other DNA
tgaaaaaaaaaaaaaaaaag

SEQ ID NO: 55608 - DNA, 20 bp, synthetic construct
  source 1..20: mol_type = other DNA
ctgaaaaaaaaaaaaaaaaa

SEQ ID NO: 55609 - DNA, 20 bp, synthetic construct
  source 1..20: mol_type = other DNA
tctgaaaaaaaaaaaaaaaa

SEQ ID NO: 55610 - DNA, 20 bp, synthetic construct
  source 1..20: mol_type = other DNA
atctgaaaaaaaaaaaaaaa

SEQ ID NO: 55611 - DNA, 20 bp, synthetic construct
  source 1..20: mol_type = other DNA
catctgaaaaaaaaaaaaaa

SEQ ID NO: 55612 - DNA, 20 bp, synthetic construct
  source 1..20: mol_type = other DNA
tcatctgaaaaaaaaaaaaa

SEQ ID NO: 55613 - DNA, 20 bp, synthetic construct
  source 1..20: mol_type = other DNA
atcatctgaaaaaaaaaaaa

SEQ ID NO: 55614 - DNA, 20 bp, synthetic construct
  source 1..20: mol_type = other DNA
gatcatctgaaaaaaaaaaa

SEQ ID NO: 55615 - DNA, 20 bp, synthetic construct
  source 1..20: mol_type = other DNA
agatcatctgaaaaaaaaaa

SEQ ID NO: 55616 - DNA, 20 bp, synthetic construct
  source 1..20: mol_type = other DNA
aagatcatctgaaaaaaaaa

SEQ ID NO: 55617 - DNA, 20 bp, synthetic construct
  source 1..20: mol_type = other DNA
caagatcatctgaaaaaaaa

SEQ ID NO: 55618 - DNA, 20 bp, synthetic construct
  source 1..20: mol_type = other DNA
gcaagatcatctgaaaaaaa

SEQ ID NO: 55619 - DNA, 20 bp, synthetic construct
  source 1..20: mol_type = other DNA
agcaagatcatctgaaaaaa

SEQ ID NO: 55620 - DNA, 20 bp, synthetic construct
  source 1..20: mol_type = other DNA
gagcaagatcatctgaaaaa

SEQ ID NO: 55621 - DNA, 20 bp, synthetic construct
  source 1..20: mol_type = other DNA
agagcaagatcatctgaaaa

SEQ ID NO: 55622 - DNA, 20 bp, synthetic construct
  source 1..20: mol_type = other DNA
cagagcaagatcatctgaaa

SEQ ID NO: 55623 - DNA, 20 bp, synthetic construct
  source 1..20: mol_type = other DNA
acagagcaagatcatctgaa

SEQ ID NO: 55624 - DNA, 20 bp, synthetic construct
  source 1..20: mol_type = other DNA
aacagagcaagatcatctga

SEQ ID NO: 55625 - DNA, 20 bp, synthetic construct
  source 1..20: mol_type = other DNA
caacagagcaagatcatctg

SEQ ID NO: 55626 - DNA, 20 bp, synthetic construct
  source 1..20: mol_type = other DNA
gcaacagagcaagatcatct

SEQ ID NO: 55627 - DNA, 20 bp, synthetic construct
  source 1..20: mol_type = other DNA
ggcaacagagcaagatcatc

SEQ ID NO: 55628 - DNA, 20 bp, synthetic construct
  source 1..20: mol_type = other DNA
gggcaacagagcaagatcat

SEQ ID NO: 55629 - DNA, 20 bp, synthetic construct
  source 1..20: mol_type = other DNA
tgggcaacagagcaagatca

SEQ ID NO: 55630 - DNA, 20 bp, synthetic construct
  source 1..20: mol_type = other DNA
ctgggcaacagagcaagatc

SEQ ID NO: 55631 - DNA, 20 bp, synthetic construct
  source 1..20: mol_type = other DNA
cctgggcaacagagcaagat

SEQ ID NO: 55632 - DNA, 20 bp, synthetic construct
  source 1..20: mol_type = other DNA
gcctgggcaacagagcaaga

SEQ ID NO: 55633 - DNA, 20 bp, synthetic construct
  source 1..20: mol_type = other DNA
agcctgggcaacagagcaag

SEQ ID NO: 55634 - DNA, 20 bp, synthetic construct
  source 1..20: mol_type = other DNA
cagcctgggcaacagagcaa

SEQ ID NO: 55635 - DNA, 20 bp, synthetic construct
  source 1..20: mol_type = other DNA
ccagcctgggcaacagagca

SEQ ID NO: 55636 - DNA, 20 bp, synthetic construct
  source 1..20: mol_type = other DNA
tccagcctgggcaacagagc

SEQ ID NO: 55637 - DNA, 20 bp, synthetic construct
  source 1..20: mol_type = other DNA
ctccagcctgggcaacagag

SEQ ID NO: 55638 - DNA, 20 bp, synthetic construct
  source 1..20: mol_type = other DNA
actccagcctgggcaacaga

SEQ ID NO: 55639 - DNA, 20 bp, synthetic construct
  source 1..20: mol_type = other DNA
cactccagcctgggcaacag

SEQ ID NO: 55640 - DNA, 20 bp, synthetic construct
  source 1..20: mol_type = other DNA
gcactccagcctgggcaaca

SEQ ID NO: 55641 - DNA, 20 bp, synthetic construct
  source 1..20: mol_type = other DNA
tgcactccagcctgggcaac

SEQ ID NO: 55642 - DNA, 20 bp, synthetic construct
  source 1..20: mol_type = other DNA
ctgcactccagcctgggcaa

SEQ ID NO: 55643 - DNA, 20 bp, synthetic construct
  source 1..20: mol_type = other DNA
actgcactccagcctgggca

SEQ ID NO: 55644 - DNA, 20 bp, synthetic construct
  source 1..20: mol_type = other DNA
cactgcactccagcctgggc

SEQ ID NO: 55645 - DNA, 20 bp, synthetic construct
  source 1..20: mol_type = other DNA
tcactgcactccagcctggg

SEQ ID NO: 55646 - DNA, 20 bp, synthetic construct
  source 1..20: mol_type = other DNA
atcactgcactccagcctgg

SEQ ID NO: 55647 - DNA, 20 bp, synthetic construct
  source 1..20: mol_type = other DNA
catcactgcactccagcctg

SEQ ID NO: 55648 - DNA, 20 bp, synthetic construct
  source 1..20: mol_type = other DNA
gcatcactgcactccagcct

SEQ ID NO: 55649 - DNA, 20 bp, synthetic construct
  source 1..20: mol_type = other DNA
tgcatcactgcactccagcc

SEQ ID NO: 55650 - DNA, 20 bp, synthetic construct
  source 1..20: mol_type = other DNA
ttgcatcactgcactccagc

SEQ ID NO: 55651 - DNA, 20 bp, synthetic construct
  source 1..20: mol_type = other DNA
attgcatcactgcactccag

SEQ ID NO: 55652 - DNA, 20 bp, synthetic construct
  source 1..20: mol_type = other DNA
gattgcatcactgcactcca

SEQ ID NO: 55653 - DNA, 20 bp, synthetic construct
  source 1..20: mol_type = other DNA
tgattgcatcactgcactcc

SEQ ID NO: 55654 - DNA, 20 bp, synthetic construct
  source 1..20: mol_type = other DNA
gtgattgcatcactgcactc

SEQ ID NO: 55655 - DNA, 20 bp, synthetic construct
  source 1..20: mol_type = other DNA
tgtgattgcatcactgcact

SEQ ID NO: 55656 - DNA, 20 bp, synthetic construct
  source 1..20: mol_type = other DNA
ctgtgattgcatcactgcac

SEQ ID NO: 55657 - DNA, 20 bp, synthetic construct
  source 1..20: mol_type = other DNA
gctgtgattgcatcactgca

SEQ ID NO: 55658 - DNA, 20 bp, synthetic construct
  source 1..20: mol_type = other DNA
agctgtgattgcatcactgc

SEQ ID NO: 55659 - DNA, 20 bp, synthetic construct
  source 1..20: mol_type = other DNA
gagctgtgattgcatcactg

SEQ ID NO: 55660 - DNA, 20 bp, synthetic construct
  source 1..20: mol_type = other DNA
tgagctgtgattgcatcact

SEQ ID NO: 55661 - DNA, 20 bp, synthetic construct
  source 1..20: mol_type = other DNA
gtgagctgtgattgcatcac

SEQ ID NO: 55662 - DNA, 20 bp, synthetic construct
  source 1..20: mol_type = other DNA
agtgagctgtgattgcatca

SEQ ID NO: 55663 - DNA, 20 bp, synthetic construct
  source 1..20: mol_type = other DNA
cagtgagctgtgattgcatc

SEQ ID NO: 55664 - DNA, 20 bp, synthetic construct
  source 1..20: mol_type = other DNA
gcagtgagctgtgattgcat

SEQ ID NO: 55665 - DNA, 20 bp, synthetic construct
  source 1..20: mol_type = other DNA
tgcagtgagctgtgattgca

SEQ ID NO: 55666 - DNA, 20 bp, synthetic construct
  source 1..20: mol_type = other DNA
ctgcagtgagctgtgattgc

SEQ ID NO: 55667 - DNA, 20 bp, synthetic construct
  source 1..20: mol_type = other DNA
gctgcagtgagctgtgattg

SEQ ID NO: 55668 - DNA, 20 bp, synthetic construct
  source 1..20: mol_type = other DNA
ggctgcagtgagctgtgatt

SEQ ID NO: 55669 - DNA, 20 bp, synthetic construct
  source 1..20: mol_type = other DNA
aggctgcagtgagctgtgat

SEQ ID NO: 55670 - DNA, 20 bp, synthetic construct
  source 1..20: mol_type = other DNA
gaggctgcagtgagctgtga

SEQ ID NO: 55671 - DNA, 20 bp, synthetic construct
  source 1..20: mol_type = other DNA
cgaggctgcagtgagctgtg

SEQ ID NO: 55672 - DNA, 20 bp, synthetic construct
  source 1..20: mol_type = other DNA
tcgaggctgcagtgagctgt

SEQ ID NO: 55673 - DNA, 20 bp, synthetic construct
  source 1..20: mol_type = other DNA
gtcgaggctgcagtgagctg

SEQ ID NO: 55674 - DNA, 20 bp, synthetic construct
  source 1..20: mol_type = other DNA
agtcgaggctgcagtgagct

SEQ ID NO: 55675 - DNA, 20 bp, synthetic construct
  source 1..20: mol_type = other DNA
aagtcgaggctgcagtgagc

SEQ ID NO: 55676 - DNA, 20 bp, synthetic construct
  source 1..20: mol_type = other DNA
gaagtcgaggctgcagtgag

SEQ ID NO: 55677 - DNA, 20 bp, synthetic construct
  source 1..20: mol_type = other DNA
ggaagtcgaggctgcagtga

SEQ ID NO: 55678 - DNA, 20 bp, synthetic construct
  source 1..20: mol_type = other DNA
gggaagtcgaggctgcagtg

SEQ ID NO: 55679 - DNA, 20 bp, synthetic construct
  source 1..20: mol_type = other DNA
tgggaagtcgaggctgcagt

SEQ ID NO: 55680 - DNA, 20 bp, synthetic construct
  source 1..20: mol_type = other DNA
ctgggaagtcgaggctgcag

SEQ ID NO: 55681 - DNA, 20 bp, synthetic construct
  source 1..20: mol_type = other DNA
cctgggaagtcgaggctgca

SEQ ID NO: 55682 - DNA, 20 bp, synthetic construct
  source 1..20: mol_type = other DNA
gcctgggaagtcgaggctgc

SEQ ID NO: 55683 - DNA, 20 bp, synthetic construct
  source 1..20: mol_type = other DNA
agcctgggaagtcgaggctg

SEQ ID NO: 55684 - DNA, 20 bp, synthetic construct
  source 1..20: mol_type = other DNA
gagcctgggaagtcgaggct

SEQ ID NO: 55685 - DNA, 20 bp, synthetic construct
  source 1..20: mol_type = other DNA
tgagcctgggaagtcgaggc

SEQ ID NO: 55686 - DNA, 20 bp, synthetic construct
  source 1..20: mol_type = other DNA
ctgagcctgggaagtcgagg

SEQ ID NO: 55687 - DNA, 20 bp, synthetic construct
  source 1..20: mol_type = other DNA
cctgagcctgggaagtcgag

SEQ ID NO: 55688 - DNA, 20 bp, synthetic construct
  source 1..20: mol_type = other DNA
acctgagcctgggaagtcga

SEQ ID NO: 55689 - DNA, 20 bp, synthetic construct
  source 1..20: mol_type = other DNA
cacctgagcctgggaagtcg

SEQ ID NO: 55690 - DNA, 20 bp, synthetic construct
  source 1..20: mol_type = other DNA
tcacctgagcctgggaagtc

SEQ ID NO: 55691 - DNA, 20 bp, synthetic construct
  source 1..20: mol_type = other DNA
atcacctgagcctgggaagt

SEQ ID NO: 55692 - DNA, 20 bp, synthetic construct
  source 1..20: mol_type = other DNA
gatcacctgagcctgggaag

SEQ ID NO: 55693 - DNA, 20 bp, synthetic construct
  source 1..20: mol_type = other DNA
ggatcacctgagcctgggaa

SEQ ID NO: 55694 - DNA, 20 bp, synthetic construct
  source 1..20: mol_type = other DNA
aggatcacctgagcctggga

SEQ ID NO: 55695 - DNA, 20 bp, synthetic construct
  source 1..20: mol_type = other DNA
gaggatcacctgagcctggg

SEQ ID NO: 55696 - DNA, 20 bp, synthetic construct
  source 1..20: mol_type = other DNA
agaggatcacctgagcctgg

SEQ ID NO: 55697 - DNA, 20 bp, synthetic construct
  source 1..20: mol_type = other DNA
gagaggatcacctgagcctg

SEQ ID NO: 55698 - DNA, 20 bp, synthetic construct
  source 1..20: mol_type = other DNA
tgagaggatcacctgagcct

SEQ ID NO: 55699 - DNA, 20 bp, synthetic construct
  source 1..20: mol_type = other DNA
gtgagaggatcacctgagcc

SEQ ID NO: 55700 - DNA, 20 bp, synthetic construct
  source 1..20: mol_type = other DNA
ggtgagaggatcacctgagc

SEQ ID NO: 55701 - DNA, 20 bp, synthetic construct
  source 1..20: mol_type = other DNA
aggtgagaggatcacctgag

SEQ ID NO: 55702 - DNA, 20 bp, synthetic construct
  source 1..20: mol_type = other DNA
gaggtgagaggatcacctga

SEQ ID NO: 55703 - DNA, 20 bp, synthetic construct
  source 1..20: mol_type = other DNA
tgaggtgagaggatcacctg

SEQ ID NO: 55704 - DNA, 20 bp, synthetic construct
  source 1..20: mol_type = other DNA
ttgaggtgagaggatcacct

SEQ ID NO: 55705 - DNA, 20 bp, synthetic construct
  source 1..20: mol_type = other DNA
gttgaggtgagaggatcacc

SEQ ID NO: 55706 - DNA, 20 bp, synthetic construct
  source 1..20: mol_type = other DNA
ggttgaggtgagaggatcac

SEQ ID NO: 55707 - DNA, 20 bp, synthetic construct
  source 1..20: mol_type = other DNA
aggttgaggtgagaggatca

SEQ ID NO: 55708 - DNA, 20 bp, synthetic construct
  source 1..20: mol_type = other DNA
gaggttgaggtgagaggatc

SEQ ID NO: 55709 - DNA, 20 bp, synthetic construct
  source 1..20: mol_type = other DNA
ggaggttgaggtgagaggat

SEQ ID NO: 55710 - DNA, 20 bp, synthetic construct
  source 1..20: mol_type = other DNA
aggaggttgaggtgagagga

SEQ ID NO: 55711 - DNA, 20 bp, synthetic construct
  source 1..20: mol_type = other DNA
taggaggttgaggtgagagg

SEQ ID NO: 55712 - DNA, 20 bp, synthetic construct
  source 1..20: mol_type = other DNA
gtaggaggttgaggtgagag

SEQ ID NO: 55713 - DNA, 20 bp, synthetic construct
  source 1..20: mol_type = other DNA
tgtaggaggttgaggtgaga

SEQ ID NO: 55714 - DNA, 20 bp, synthetic construct
  source 1..20: mol_type = other DNA
atgtaggaggttgaggtgag

SEQ ID NO: 55715 - DNA, 20 bp, synthetic construct
  source 1..20: mol_type = other DNA
tatgtaggaggttgaggtga

SEQ ID NO: 55716 - DNA, 20 bp, synthetic construct
  source 1..20: mol_type = other DNA
ttatgtaggaggttgaggtg

SEQ ID NO: 55717 - DNA, 20 bp, synthetic construct
  source 1..20: mol_type = other DNA
gttatgtaggaggttgaggt

SEQ ID NO: 55718 - DNA, 20 bp, synthetic construct
  source 1..20: mol_type = other DNA
agttatgtaggaggttgagg

SEQ ID NO: 55719 - DNA, 20 bp, synthetic construct
  source 1..20: mol_type = other DNA
cagttatgtaggaggttgag

SEQ ID NO: 55720 - DNA, 20 bp, synthetic construct
  source 1..20: mol_type = other DNA
ccagttatgtaggaggttga

SEQ ID NO: 55721 - DNA, 20 bp, synthetic construct
  source 1..20: mol_type = other DNA
cccagttatgtaggaggttg

SEQ ID NO: 55722 - DNA, 20 bp, synthetic construct
  source 1..20: mol_type = other DNA
tcccagttatgtaggaggtt

SEQ ID NO: 55723 - DNA, 20 bp, synthetic construct
  source 1..20: mol_type = other DNA
gtcccagttatgtaggaggt

SEQ ID NO: 55724 - DNA, 20 bp, synthetic construct
  source 1..20: mol_type = other DNA
agtcccagttatgtaggagg

SEQ ID NO: 55725 - DNA, 20 bp, synthetic construct
  source 1..20: mol_type = other DNA
cagtcccagttatgtaggag

SEQ ID NO: 55726 - DNA, 20 bp, synthetic construct
  source 1..20: mol_type = other DNA
acagtcccagttatgtagga

SEQ ID NO: 55727 - DNA, 20 bp, synthetic construct
  source 1..20: mol_type = other DNA
tacagtcccagttatgtagg

SEQ ID NO: 55728 - DNA, 20 bp, synthetic construct
  source 1..20: mol_type = other DNA
atacagtcccagttatgtag

SEQ ID NO: 55729 - DNA, 20 bp, synthetic construct
  source 1..20: mol_type = other DNA
catacagtcccagttatgta

SEQ ID NO: 55730 - DNA, 20 bp, synthetic construct
  source 1..20: mol_type = other DNA
acatacagtcccagttatgt

SEQ ID NO: 55731 - DNA, 20 bp, synthetic construct
  source 1..20: mol_type = other DNA
cacatacagtcccagttatg

SEQ ID NO: 55732 - DNA, 20 bp, synthetic construct
  source 1..20: mol_type = other DNA
gcacatacagtcccagttat

SEQ ID NO: 55733 - DNA, 20 bp, synthetic construct
  source 1..20: mol_type = other DNA
tgcacatacagtcccagtta

SEQ ID NO: 55734 - DNA, 20 bp, synthetic construct
  source 1..20: mol_type = other DNA
gtgcacatacagtcccagtt

SEQ ID NO: 55735 - DNA, 20 bp, synthetic construct
  source 1..20: mol_type = other DNA
tgtgcacatacagtcccagt

SEQ ID NO: 55736 - DNA, 20 bp, synthetic construct
  source 1..20: mol_type = other DNA
atgtgcacatacagtcccag

SEQ ID NO: 55737 - DNA, 20 bp, synthetic construct
  source 1..20: mol_type = other DNA
gatgtgcacatacagtccca

SEQ ID NO: 55738 - DNA, 20 bp, synthetic construct
  source 1..20: mol_type = other DNA
tgatgtgcacatacagtccc

SEQ ID NO: 55739 - DNA, 20 bp, synthetic construct
  source 1..20: mol_type = other DNA
gtgatgtgcacatacagtcc

SEQ ID NO: 55740 - DNA, 20 bp, synthetic construct
  source 1..20: mol_type = other DNA
agtgatgtgcacatacagtc

SEQ ID NO: 55741 - DNA, 20 bp, synthetic construct
  source 1..20: mol_type = other DNA
tagtgatgtgcacatacagt

SEQ ID NO: 55742 - DNA, 20 bp, synthetic construct
  source 1..20: mol_type = other DNA
atagtgatgtgcacatacag

SEQ ID NO: 55743 - DNA, 20 bp, synthetic construct
  source 1..20: mol_type = other DNA
catagtgatgtgcacataca

SEQ ID NO: 55744 - DNA, 20 bp, synthetic construct
  source 1..20: mol_type = other DNA
gcatagtgatgtgcacatac

SEQ ID NO: 55745 - DNA, 20 bp, synthetic construct
  source 1..20: mol_type = other DNA
ggcatagtgatgtgcacata

SEQ ID NO: 55746 - DNA, 20 bp, synthetic construct
  source 1..20: mol_type = other DNA
aggcatagtgatgtgcacat

SEQ ID NO: 55747 - DNA, 20 bp, synthetic construct
  source 1..20: mol_type = other DNA
caggcatagtgatgtgcaca

SEQ ID NO: 55748 - DNA, 20 bp, synthetic construct
  source 1..20: mol_type = other DNA
tcaggcatagtgatgtgcac

SEQ ID NO: 55749 - DNA, 20 bp, synthetic construct
  source 1..20: mol_type = other DNA
gtcaggcatagtgatgtgca

SEQ ID NO: 55750 - DNA, 20 bp, synthetic construct
  source 1..20: mol_type = other DNA
agtcaggcatagtgatgtgc

SEQ ID NO: 55751 - DNA, 20 bp, synthetic construct
  source 1..20: mol_type = other DNA
tagtcaggcatagtgatgtg

SEQ ID NO: 55752 - DNA, 20 bp, synthetic construct
  source 1..20: mol_type = other DNA
ttagtcaggcatagtgatgt

SEQ ID NO: 55753 - DNA, 20 bp, synthetic construct
  source 1..20: mol_type = other DNA
attagtcaggcatagtgatg

SEQ ID NO: 55754 - DNA, 20 bp, synthetic construct
  source 1..20: mol_type = other DNA
aattagtcaggcatagtgat

SEQ ID NO: 55755 - DNA, 20 bp, synthetic construct
  source 1..20: mol_type = other DNA
aaattagtcaggcatagtga

SEQ ID NO: 55756 - DNA, 20 bp, synthetic construct
  source 1..20: mol_type = other DNA
aaaattagtcaggcatagtg

SEQ ID NO: 55757 - DNA, 20 bp, synthetic construct
  source 1..20: mol_type = other DNA
aaaaattagtcaggcatagt

SEQ ID NO: 55758 - DNA, 20 bp, synthetic construct
  source 1..20: mol_type = other DNA
aaaaaattagtcaggcatag

SEQ ID NO: 55759 - DNA, 20 bp, synthetic construct
  source 1..20: mol_type = other DNA
taaaaaattagtcaggcata

SEQ ID NO: 55760 - DNA, 20 bp, synthetic construct
  source 1..20: mol_type = other DNA
ataaaaaattagtcaggcat

SEQ ID NO: 55761 - DNA, 20 bp, synthetic construct
  source 1..20: mol_type = other DNA
tataaaaaattagtcaggca

SEQ ID NO: 55762 - DNA, 20 bp, synthetic construct
  source 1..20: mol_type = other DNA
atataaaaaattagtcaggc

SEQ ID NO: 55763 - DNA, 20 bp, synthetic construct
  source 1..20: mol_type = other DNA
aatataaaaaattagtcagg

SEQ ID NO: 55764 - DNA, 20 bp, synthetic construct
  source 1..20: mol_type = other DNA
aaatataaaaaattagtcag

SEQ ID NO: 55765 - DNA, 20 bp, synthetic construct
  source 1..20: mol_type = other DNA
taaatataaaaaattagtca

SEQ ID NO: 55766 - DNA, 20 bp, synthetic construct
  source 1..20: mol_type = other DNA
ataaatataaaaaattagtc

SEQ ID NO: 55767 - DNA, 20 bp, synthetic construct
  source 1..20: mol_type = other DNA
tataaatataaaaaattagt

SEQ ID NO: 55768 - DNA, 20 bp, synthetic construct
  source 1..20: mol_type = other DNA
atataaatataaaaaattag

SEQ ID NO: 55769 - DNA, 20 bp, synthetic construct
  source 1..20: mol_type = other DNA
aatataaatataaaaaatta

SEQ ID NO: 55770 - DNA, 20 bp, synthetic construct
  source 1..20: mol_type = other DNA
aaatataaatataaaaaatt

SEQ ID NO: 55771 - DNA, 20 bp, synthetic construct
  source 1..20: mol_type = other DNA
aaaatataaatataaaaaat

SEQ ID NO: 55772 - DNA, 20 bp, synthetic construct
  source 1..20: mol_type = other DNA
aaaaatataaatataaaaaa

SEQ ID NO: 55773 - DNA, 20 bp, synthetic construct
  source 1..20: mol_type = other DNA
aaaaaatataaatataaaaa

SEQ ID NO: 55774 - DNA, 20 bp, synthetic construct
  source 1..20: mol_type = other DNA
caaaaaatataaatataaaa

SEQ ID NO: 55775 - DNA, 20 bp, synthetic construct
  source 1..20: mol_type = other DNA
acaaaaaatataaatataaa

SEQ ID NO: 55776 - DNA, 20 bp, synthetic construct
  source 1..20: mol_type = other DNA
tacaaaaaatataaatataa

SEQ ID NO: 55777 - DNA, 20 bp, synthetic construct
  source 1..20: mol_type = other DNA
ctacaaaaaatataaatata

SEQ ID NO: 55778 - DNA, 20 bp, synthetic construct
  source 1..20: mol_type = other DNA
tctacaaaaaatataaatat

SEQ ID NO: 55779 - DNA, 20 bp, synthetic construct
  source 1..20: mol_type = other DNA
ctctacaaaaaatataaata

SEQ ID NO: 55780 - DNA, 20 bp, synthetic construct
  source 1..20: mol_type = other DNA
tctctacaaaaaatataaat

SEQ ID NO: 55781 - DNA, 20 bp, synthetic construct
  source 1..20: mol_type = other DNA
atctctacaaaaaatataaa

SEQ ID NO: 55782 - DNA, 20 bp, synthetic construct
  source 1..20: mol_type = other DNA
catctctacaaaaaatataa

SEQ ID NO: 55783 - DNA, 20 bp, synthetic construct
  source 1..20: mol_type = other DNA
ccatctctacaaaaaatata

SEQ ID NO: 55784 - DNA, 20 bp, synthetic construct
  source 1..20: mol_type = other DNA
cccatctctacaaaaaatat

SEQ ID NO: 55785 - DNA, 20 bp, synthetic construct
  source 1..20: mol_type = other DNA
ccccatctctacaaaaaata

SEQ ID NO: 55786 - DNA, 20 bp, synthetic construct
  source 1..20: mol_type = other DNA
accccatctctacaaaaaat

SEQ ID NO: 55787 - DNA, 20 bp, synthetic construct
  source 1..20: mol_type = other DNA
aaccccatctctacaaaaaa

SEQ ID NO: 55788 - DNA, 20 bp, synthetic construct
  source 1..20: mol_type = other DNA
aaaccccatctctacaaaaa

SEQ ID NO: 55789 - DNA, 20 bp, synthetic construct
  source 1..20: mol_type = other DNA
gaaaccccatctctacaaaa

SEQ ID NO: 55790 - DNA, 20 bp, synthetic construct
  source 1..20: mol_type = other DNA
ggaaaccccatctctacaaa

SEQ ID NO: 55791 - DNA, 20 bp, synthetic construct
  source 1..20: mol_type = other DNA
gggaaaccccatctctacaa

SEQ ID NO: 55792 - DNA, 20 bp, synthetic construct
  source 1..20: mol_type = other DNA
agggaaaccccatctctaca

SEQ ID NO: 55793 - DNA, 20 bp, synthetic construct
  source 1..20: mol_type = other DNA
cagggaaaccccatctctac

SEQ ID NO: 55794 - DNA, 20 bp, synthetic construct
  source 1..20: mol_type = other DNA
acagggaaaccccatctcta

SEQ ID NO: 55795 - DNA, 20 bp, synthetic construct
  source 1..20: mol_type = other DNA
tacagggaaaccccatctct

SEQ ID NO: 55796 - DNA, 20 bp, synthetic construct
  source 1..20: mol_type = other DNA
atacagggaaaccccatctc

SEQ ID NO: 55797 - DNA, 20 bp, synthetic construct
  source 1..20: mol_type = other DNA
aatacagggaaaccccatct

SEQ ID NO: 55798 - DNA, 20 bp, synthetic construct
  source 1..20: mol_type = other DNA
caatacagggaaaccccatc

SEQ ID NO: 55799 - DNA, 20 bp, synthetic construct
  source 1..20: mol_type = other DNA
gcaatacagggaaaccccat

SEQ ID NO: 55800 - DNA, 20 bp, synthetic construct
  source 1..20: mol_type = other DNA
tgcaatacagggaaacccca

SEQ ID NO: 55801 - DNA, 20 bp, synthetic construct
  source 1..20: mol_type = other DNA
gtgcaatacagggaaacccc

SEQ ID NO: 55802 - DNA, 20 bp, synthetic construct
  source 1..20: mol_type = other DNA
tgtgcaatacagggaaaccc

SEQ ID NO: 55803 - DNA, 20 bp, synthetic construct
  source 1..20: mol_type = other DNA
ctgtgcaatacagggaaacc

SEQ ID NO: 55804 - DNA, 20 bp, synthetic construct
  source 1..20: mol_type = other DNA
cctgtgcaatacagggaaac

SEQ ID NO: 55805 - DNA, 20 bp, synthetic construct
  source 1..20: mol_type = other DNA
gcctgtgcaatacagggaaa

SEQ ID NO: 55806 - DNA, 20 bp, synthetic construct
  source 1..20: mol_type = other DNA
agcctgtgcaatacagggaa

SEQ ID NO: 55807 - DNA, 20 bp, synthetic construct
  source 1..20: mol_type = other DNA
cagcctgtgcaatacaggga

SEQ ID NO: 55808 - DNA, 20 bp, synthetic construct
  source 1..20: mol_type = other DNA
ccagcctgtgcaatacaggg

SEQ ID NO: 55809 - DNA, 20 bp, synthetic construct
  source 1..20: mol_type = other DNA
accagcctgtgcaatacagg

SEQ ID NO: 55810 - DNA, 20 bp, synthetic construct
  source 1..20: mol_type = other DNA
gaccagcctgtgcaatacag

SEQ ID NO: 55811 - DNA, 20 bp, synthetic construct
  source 1..20: mol_type = other DNA
agaccagcctgtgcaataca

SEQ ID NO: 55812 - DNA, 20 bp, synthetic construct
  source 1..20: mol_type = other DNA
gagaccagcctgtgcaatac

SEQ ID NO: 55813 - DNA, 20 bp, synthetic construct
  source 1..20: mol_type = other DNA
tgagaccagcctgtgcaata

SEQ ID NO: 55814 - DNA, 20 bp, synthetic construct
  source 1..20: mol_type = other DNA
ttgagaccagcctgtgcaat

SEQ ID NO: 55815 - DNA, 20 bp, synthetic construct
  source 1..20: mol_type = other DNA
tttgagaccagcctgtgcaa

SEQ ID NO: 55816 - DNA, 20 bp, synthetic construct
  source 1..20: mol_type = other DNA
gtttgagaccagcctgtgca

SEQ ID NO: 55817 - DNA, 20 bp, synthetic construct
  source 1..20: mol_type = other DNA
agtttgagaccagcctgtgc

SEQ ID NO: 55818 - DNA, 20 bp, synthetic construct
  source 1..20: mol_type = other DNA
cagtttgagaccagcctgtg

SEQ ID NO: 55819 - DNA, 20 bp, synthetic construct
  source 1..20: mol_type = other DNA
gcagtttgagaccagcctgt

SEQ ID NO: 55820 - DNA, 20 bp, synthetic construct
  source 1..20: mol_type = other DNA
agcagtttgagaccagcctg

SEQ ID NO: 55821 - DNA, 20 bp, synthetic construct
  source 1..20: mol_type = other DNA
cagcagtttgagaccagcct

SEQ ID NO: 55822 - DNA, 20 bp, synthetic construct
  source 1..20: mol_type = other DNA
ccagcagtttgagaccagcc

SEQ ID NO: 55823 - DNA, 20 bp, synthetic construct
  source 1..20: mol_type = other DNA
cccagcagtttgagaccagc

SEQ ID NO: 55824 - DNA, 20 bp, synthetic construct
  source 1..20: mol_type = other DNA
gcccagcagtttgagaccag

SEQ ID NO: 55825 - DNA, 20 bp, synthetic construct
  source 1..20: mol_type = other DNA
ggcccagcagtttgagacca

SEQ ID NO: 55826 - DNA, 20 bp, synthetic construct
  source 1..20: mol_type = other DNA
aggcccagcagtttgagacc

SEQ ID NO: 55827 - DNA, 20 bp, synthetic construct
  source 1..20: mol_type = other DNA
taggcccagcagtttgagac

SEQ ID NO: 55828 - DNA, 20 bp, synthetic construct
  source 1..20: mol_type = other DNA
ttaggcccagcagtttgaga

SEQ ID NO: 55829 - DNA, 20 bp, synthetic construct
  source 1..20: mol_type = other DNA
cttaggcccagcagtttgag

SEQ ID NO: 55830 - DNA, 20 bp, synthetic construct
  source 1..20: mol_type = other DNA
tcttaggcccagcagtttga

SEQ ID NO: 55831 - DNA, 20 bp, synthetic construct
  source 1..20: mol_type = other DNA
ctcttaggcccagcagtttg

SEQ ID NO: 55832 - DNA, 20 bp, synthetic construct
  source 1..20: mol_type = other DNA
actcttaggcccagcagttt

SEQ ID NO: 55833 - DNA, 20 bp, synthetic construct
  source 1..20: mol_type = other DNA
gactcttaggcccagcagtt

SEQ ID NO: 55834 - DNA, 20 bp, synthetic construct
  source 1..20: mol_type = other DNA
agactcttaggcccagcagt

SEQ ID NO: 55835 - DNA, 20 bp, synthetic construct
  source 1..20: mol_type = other DNA
aagactcttaggcccagcag

SEQ ID NO: 55836 - DNA, 20 bp, synthetic construct
  source 1..20: mol_type = other DNA
gaagactcttaggcccagca

SEQ ID NO: 55837 - DNA, 20 bp, synthetic construct
  source 1..20: mol_type = other DNA
ggaagactcttaggcccagc

SEQ ID NO: 55838 - DNA, 20 bp, synthetic construct
  source 1..20: mol_type = other DNA
gggaagactcttaggcccag

SEQ ID NO: 55839 - DNA, 20 bp, synthetic construct
  source 1..20: mol_type = other DNA
tgggaagactcttaggccca

SEQ ID NO: 55840 - DNA, 20 bp, synthetic construct
  source 1..20: mol_type = other DNA
gtgggaagactcttaggccc

SEQ ID NO: 55841 - DNA, 20 bp, synthetic construct
  source 1..20: mol_type = other DNA
ggtgggaagactcttaggcc

SEQ ID NO: 55842 - DNA, 20 bp, synthetic construct
  source 1..20: mol_type = other DNA
aggtgggaagactcttaggc

SEQ ID NO: 55843 - DNA, 20 bp, synthetic construct
  source 1..20: mol_type = other DNA
aaggtgggaagactcttagg

SEQ ID NO: 55844 - DNA, 20 bp, synthetic construct
  source 1..20: mol_type = other DNA
caaggtgggaagactcttag

SEQ ID NO: 55845 - DNA, 20 bp, synthetic construct
  source 1..20: mol_type = other DNA
ccaaggtgggaagactctta

SEQ ID NO: 55846 - DNA, 20 bp, synthetic construct
  source 1..20: mol_type = other DNA
gccaaggtgggaagactctt

SEQ ID NO: 55847 - DNA, 20 bp, synthetic construct
  source 1..20: mol_type = other DNA
ggccaaggtgggaagactct

SEQ ID NO: 55848 - DNA, 20 bp, synthetic construct
  source 1..20: mol_type = other DNA
aggccaaggtgggaagactc

SEQ ID NO: 55849 - DNA, 20 bp, synthetic construct
  source 1..20: mol_type = other DNA
gaggccaaggtgggaagact

SEQ ID NO: 55850 - DNA, 20 bp, synthetic construct
  source 1..20: mol_type = other DNA
ggaggccaaggtgggaagac

SEQ ID NO: 55851 - DNA, 20 bp, synthetic construct
  source 1..20: mol_type = other DNA
gggaggccaaggtgggaaga

SEQ ID NO: 55852 - DNA, 20 bp, synthetic construct
  source 1..20: mol_type = other DNA
tgggaggccaaggtgggaag

SEQ ID NO: 55853 - DNA, 20 bp, synthetic construct
  source 1..20: mol_type = other DNA
ttgggaggccaaggtgggaa

SEQ ID NO: 55854 - DNA, 20 bp, synthetic construct
  source 1..20: mol_type = other DNA
tttgggaggccaaggtggga

SEQ ID NO: 55855 - DNA, 20 bp, synthetic construct
  source 1..20: mol_type = other DNA
ctttgggaggccaaggtggg

SEQ ID NO: 55856 - DNA, 20 bp, synthetic construct
  source 1..20: mol_type = other DNA
actttgggaggccaaggtgg

SEQ ID NO: 55857 - DNA, 20 bp, synthetic construct
  source 1..20: mol_type = other DNA
gactttgggaggccaaggtg

SEQ ID NO: 55858 - DNA, 20 bp, synthetic construct
  source 1..20: mol_type = other DNA
ggactttgggaggccaaggt

SEQ ID NO: 55859 - DNA, 20 bp, synthetic construct
  source 1..20: mol_type = other DNA
aggactttgggaggccaagg

SEQ ID NO: 55860 - DNA, 20 bp, synthetic construct
  source 1..20: mol_type = other DNA
caggactttgggaggccaag

SEQ ID NO: 55861 - DNA, 20 bp, synthetic construct
  source 1..20: mol_type = other DNA
ccaggactttgggaggccaa

SEQ ID NO: 55862 - DNA, 20 bp, synthetic construct
  source 1..20: mol_type = other DNA
cccaggactttgggaggcca

SEQ ID NO: 55863 - DNA, 20 bp, synthetic construct
  source 1..20: mol_type = other DNA
tcccaggactttgggaggcc

SEQ ID NO: 55864 - DNA, 20 bp, synthetic construct
  source 1..20: mol_type = other DNA
atcccaggactttgggaggc

SEQ ID NO: 55865 - DNA, 20 bp, synthetic construct
  source 1..20: mol_type = other DNA
aatcccaggactttgggagg

SEQ ID NO: 55866 - DNA, 20 bp, synthetic construct
  source 1..20: mol_type = other DNA
taatcccaggactttgggag

SEQ ID NO: 55867 - DNA, 20 bp, synthetic construct
  source 1..20: mol_type = other DNA
gtaatcccaggactttggga

SEQ ID NO: 55868 - DNA, 20 bp, synthetic construct
  source 1..20: mol_type = other DNA
tgtaatcccaggactttggg

SEQ ID NO: 55869 - DNA, 20 bp, synthetic construct
  source 1..20: mol_type = other DNA
atgtaatcccaggactttgg

SEQ ID NO: 55870 - DNA, 20 bp, synthetic construct
  source 1..20: mol_type = other DNA
catgtaatcccaggactttg

SEQ ID NO: 55871 - DNA, 20 bp, synthetic construct
  source 1..20: mol_type = other DNA
tcatgtaatcccaggacttt

SEQ ID NO: 55872 - DNA, 20 bp, synthetic construct
  source 1..20: mol_type = other DNA
ctcatgtaatcccaggactt

SEQ ID NO: 55873 - DNA, 20 bp, synthetic construct
  source 1..20: mol_type = other DNA
actcatgtaatcccaggact

SEQ ID NO: 55874 - DNA, 20 bp, synthetic construct
  source 1..20: mol_type = other DNA
gactcatgtaatcccaggac

SEQ ID NO: 55875 - DNA, 20 bp, synthetic construct
  source 1..20: mol_type = other DNA
tgactcatgtaatcccagga

SEQ ID NO: 55876 - DNA, 20 bp, synthetic construct
  source 1..20: mol_type = other DNA
gtgactcatgtaatcccagg

SEQ ID NO: 55877 - DNA, 20 bp, synthetic construct
  source 1..20: mol_type = other DNA
ggtgactcatgtaatcccag

SEQ ID NO: 55878 - DNA, 20 bp, synthetic construct
  source 1..20: mol_type = other DNA
cggtgactcatgtaatccca

SEQ ID NO: 55879 - DNA, 20 bp, synthetic construct
  source 1..20: mol_type = other DNA
gcggtgactcatgtaatccc

SEQ ID NO: 55880 - DNA, 20 bp, synthetic construct
  source 1..20: mol_type = other DNA
tgcggtgactcatgtaatcc

SEQ ID NO: 55881 - DNA, 20 bp, synthetic construct
  source 1..20: mol_type = other DNA
gtgcggtgactcatgtaatc

SEQ ID NO: 55882 - DNA, 20 bp, synthetic construct
  source 1..20: mol_type = other DNA
ggtgcggtgactcatgtaat

SEQ ID NO: 55883 - DNA, 20 bp, synthetic construct
  source 1..20: mol_type = other DNA
gggtgcggtgactcatgtaa

SEQ ID NO: 55884 - DNA, 20 bp, synthetic construct
  source 1..20: mol_type = other DNA
cgggtgcggtgactcatgta

SEQ ID NO: 55885 - DNA, 20 bp, synthetic construct
  source 1..20: mol_type = other DNA
ccgggtgcggtgactcatgt

SEQ ID NO: 55886 - DNA, 20 bp, synthetic construct
  source 1..20: mol_type = other DNA
gccgggtgcggtgactcatg

SEQ ID NO: 55887 - DNA, 20 bp, synthetic construct
  source 1..20: mol_type = other DNA
ggccgggtgcggtgactcat

SEQ ID NO: 55888 - DNA, 20 bp, synthetic construct
  source 1..20: mol_type = other DNA
aggccgggtgcggtgactca

SEQ ID NO: 55889 - DNA, 20 bp, synthetic construct
  source 1..20: mol_type = other DNA
gaggccgggtgcggtgactc

SEQ ID NO: 55890 - DNA, 20 bp, synthetic construct
  source 1..20: mol_type = other DNA
tgaggccgggtgcggtgact

SEQ ID NO: 55891 - DNA, 20 bp, synthetic construct
  source 1..20: mol_type = other DNA
atgaggccgggtgcggtgac

SEQ ID NO: 55892 - DNA, 20 bp, synthetic construct
  source 1..20: mol_type = other DNA
aatgaggccgggtgcggtga

SEQ ID NO: 55893 - DNA, 20 bp, synthetic construct
  source 1..20: mol_type = other DNA
taatgaggccgggtgcggtg

SEQ ID NO: 55894 - DNA, 20 bp, synthetic construct
  source 1..20: mol_type = other DNA
ataatgaggccgggtgcggt

SEQ ID NO: 55895 - DNA, 20 bp, synthetic construct
  source 1..20: mol_type = other DNA
aataatgaggccgggtgcgg

SEQ ID NO: 55896 - DNA, 20 bp, synthetic construct
  source 1..20: mol_type = other DNA
taataatgaggccgggtgcg

SEQ ID NO: 55897 - DNA, 20 bp, synthetic construct
  source 1..20: mol_type = other DNA
ataataatgaggccgggtgc

SEQ ID NO: 55898 - DNA, 20 bp, synthetic construct
  source 1..20: mol_type = other DNA
aataataatgaggccgggtg

SEQ ID NO: 55899 - DNA, 20 bp, synthetic construct
  source 1..20: mol_type = other DNA
aaataataatgaggccgggt

SEQ ID NO: 55900 - DNA, 20 bp, synthetic construct
  source 1..20: mol_type = other DNA
aaaataataatgaggccggg

SEQ ID NO: 55901 - DNA, 20 bp, synthetic construct
  source 1..20: mol_type = other DNA
aaaaataataatgaggccgg

SEQ ID NO: 55902 - DNA, 20 bp, synthetic construct
  source 1..20: mol_type = other DNA
gaaaaataataatgaggccg

SEQ ID NO: 55903 - DNA, 20 bp, synthetic construct
  source 1..20: mol_type = other DNA
ggaaaaataataatgaggcc

SEQ ID NO: 55904 - DNA, 20 bp, synthetic construct
  source 1..20: mol_type = other DNA
aggaaaaataataatgaggc

SEQ ID NO: 55905 - DNA, 20 bp, synthetic construct
  source 1..20: mol_type = other DNA
gaggaaaaataataatgagg

SEQ ID NO: 55906 - DNA, 20 bp, synthetic construct
  source 1..20: mol_type = other DNA
agaggaaaaataataatgag

SEQ ID NO: 55907 - DNA, 20 bp, synthetic construct
  source 1..20: mol_type = other DNA
cagaggaaaaataataatga

SEQ ID NO: 55908 - DNA, 20 bp, synthetic construct
  source 1..20: mol_type = other DNA
ccagaggaaaaataataatg

SEQ ID NO: 55909 - DNA, 20 bp, synthetic construct
  source 1..20: mol_type = other DNA
accagaggaaaaataataat

SEQ ID NO: 55910 - DNA, 20 bp, synthetic construct
  source 1..20: mol_type = other DNA
aaccagaggaaaaataataa

SEQ ID NO: 55911 - DNA, 20 bp, synthetic construct
  source 1..20: mol_type = other DNA
aaaccagaggaaaaataata

SEQ ID NO: 55912 - DNA, 20 bp, synthetic construct
  source 1..20: mol_type = other DNA
aaaaccagaggaaaaataat

SEQ ID NO: 55913 - DNA, 20 bp, synthetic construct
  source 1..20: mol_type = other DNA
taaaaccagaggaaaaataa

SEQ ID NO: 55914 - DNA, 20 bp, synthetic construct
  source 1..20: mol_type = other DNA
ctaaaaccagaggaaaaata

SEQ ID NO: 55915 - DNA, 20 bp, synthetic construct
  source 1..20: mol_type = other DNA
actaaaaccagaggaaaaat

SEQ ID NO: 55916 - DNA, 20 bp, synthetic construct
  source 1..20: mol_type = other DNA
tactaaaaccagaggaaaaa

SEQ ID NO: 55917 - DNA, 20 bp, synthetic construct
  source 1..20: mol_type = other DNA
ctactaaaaccagaggaaaa

SEQ ID NO: 55918 - DNA, 20 bp, synthetic construct
  source 1..20: mol_type = other DNA
tctactaaaaccagaggaaa

SEQ ID NO: 55919 - DNA, 20 bp, synthetic construct
  source 1..20: mol_type = other DNA
ctctactaaaaccagaggaa

SEQ ID NO: 55920 - DNA, 20 bp, synthetic construct
  source 1..20: mol_type = other DNA
tctctactaaaaccagagga

SEQ ID NO: 55921 - DNA, 20 bp, synthetic construct
  source 1..20: mol_type = other DNA
ctctctactaaaaccagagg

SEQ ID NO: 55922 - DNA, 20 bp, synthetic construct
  source 1..20: mol_type = other DNA
cctctctactaaaaccagag

SEQ ID NO: 55923 - DNA, 20 bp, synthetic construct
  source 1..20: mol_type = other DNA
tcctctctactaaaaccaga

SEQ ID NO: 55924 - DNA, 20 bp, synthetic construct
  source 1..20: mol_type = other DNA
atcctctctactaaaaccag

SEQ ID NO: 55925 - DNA, 20 bp, synthetic construct
  source 1..20: mol_type = other DNA
aatcctctctactaaaacca

SEQ ID NO: 55926 - DNA, 20 bp, synthetic construct
  source 1..20: mol_type = other DNA
aaatcctctctactaaaacc

SEQ ID NO: 55927 - DNA, 20 bp, synthetic construct
  source 1..20: mol_type = other DNA
aaaatcctctctactaaaac

SEQ ID NO: 55928 - DNA, 20 bp, synthetic construct
  source 1..20: mol_type = other DNA
aaaaatcctctctactaaaa

SEQ ID NO: 55929 - DNA, 20 bp, synthetic construct
  source 1..20: mol_type = other DNA
taaaaatcctctctactaaa

SEQ ID NO: 55930 - DNA, 20 bp, synthetic construct
  source 1..20: mol_type = other DNA
ttaaaaatcctctctactaa

SEQ ID NO: 55931 - DNA, 20 bp, synthetic construct
  source 1..20: mol_type = other DNA
cttaaaaatcctctctacta

SEQ ID NO: 55932 - DNA, 20 bp, synthetic construct
  source 1..20: mol_type = other DNA
gcttaaaaatcctctctact

SEQ ID NO: 55933 - DNA, 20 bp, synthetic construct
  source 1..20: mol_type = other DNA
ggcttaaaaatcctctctac

SEQ ID NO: 55934 - DNA, 20 bp, synthetic construct
  source 1..20: mol_type = other DNA
tggcttaaaaatcctctcta

SEQ ID NO: 55935 - DNA, 20 bp, synthetic construct
  source 1..20: mol_type = other DNA
ttggcttaaaaatcctctct

SEQ ID NO: 55936 - DNA, 20 bp, synthetic construct
  source 1..20: mol_type = other DNA
gttggcttaaaaatcctctc

SEQ ID NO: 55937 - DNA, 20 bp, synthetic construct
  source 1..20: mol_type = other DNA
agttggcttaaaaatcctct

SEQ ID NO: 55938 - DNA, 20 bp, synthetic construct
  source 1..20: mol_type = other DNA
aagttggcttaaaaatcctc

SEQ ID NO: 55939 - DNA, 20 bp, synthetic construct
  source 1..20: mol_type = other DNA
gaagttggcttaaaaatcct

SEQ ID NO: 55940 - DNA, 20 bp, synthetic construct
  source 1..20: mol_type = other DNA
tgaagttggcttaaaaatcc

SEQ ID NO: 55941 - DNA, 20 bp, synthetic construct
  source 1..20: mol_type = other DNA
ttgaagttggcttaaaaatc

SEQ ID NO: 55942 - DNA, 20 bp, synthetic construct
  source 1..20: mol_type = other DNA
attgaagttggcttaaaaat

SEQ ID NO: 55943 - DNA, 20 bp, synthetic construct
  source 1..20: mol_type = other DNA
gattgaagttggcttaaaaa

SEQ ID NO: 55944 - DNA, 20 bp, synthetic construct
  source 1..20: mol_type = other DNA
tgattgaagttggcttaaaa

SEQ ID NO: 55945 - DNA, 20 bp, synthetic construct
  source 1..20: mol_type = other DNA
atgattgaagttggcttaaa

SEQ ID NO: 55946 - DNA, 20 bp, synthetic construct
  source 1..20: mol_type = other DNA
catgattgaagttggcttaa

SEQ ID NO: 55947 - DNA, 20 bp, synthetic construct
  source 1..20: mol_type = other DNA
gcatgattgaagttggctta

SEQ ID NO: 55948 - DNA, 20 bp, synthetic construct
  source 1..20: mol_type = other DNA
ggcatgattgaagttggctt

SEQ ID NO: 55949 - DNA, 20 bp, synthetic construct
  source 1..20: mol_type = other DNA
gggcatgattgaagttggct

SEQ ID NO: 55950 - DNA, 20 bp, synthetic construct
  source 1..20: mol_type = other DNA
agggcatgattgaagttggc

SEQ ID NO: 55951 - DNA, 20 bp, synthetic construct
  source 1..20: mol_type = other DNA
aagggcatgattgaagttgg

SEQ ID NO: 55952 - DNA, 20 bp, synthetic construct
  source 1..20: mol_type = other DNA
caagggcatgattgaagttg

SEQ ID NO: 55953 - DNA, 20 bp, synthetic construct
  source 1..20: mol_type = other DNA
tcaagggcatgattgaagtt

SEQ ID NO: 55954 - DNA, 20 bp, synthetic construct
  source 1..20: mol_type = other DNA
gtcaagggcatgattgaagt

SEQ ID NO: 55955 - DNA, 20 bp, synthetic construct
  source 1..20: mol_type = other DNA
agtcaagggcatgattgaag

SEQ ID NO: 55956 - DNA, 20 bp, synthetic construct
  source 1..20: mol_type = other DNA
gagtcaagggcatgattgaa

SEQ ID NO: 55957 - DNA, 20 bp, synthetic construct
  source 1..20: mol_type = other DNA
agagtcaagggcatgattga

SEQ ID NO: 55958 - DNA, 20 bp, synthetic construct
  source 1..20: mol_type = other DNA
gagagtcaagggcatgattg

SEQ ID NO: 55959 - DNA, 20 bp, synthetic construct
  source 1..20: mol_type = other DNA
agagagtcaagggcatgatt

SEQ ID NO: 55960 - DNA, 20 bp, synthetic construct
  source 1..20: mol_type = other DNA
gagagagtcaagggcatgat

SEQ ID NO: 55961 - DNA, 20 bp, synthetic construct
  source 1..20: mol_type = other DNA
ggagagagtcaagggcatga

SEQ ID NO: 55962 - DNA, 20 bp, synthetic construct
  source 1..20: mol_type = other DNA
gggagagagtcaagggcatg

SEQ ID NO: 55963 - DNA, 20 bp, synthetic construct
  source 1..20: mol_type = other DNA
agggagagagtcaagggcat

SEQ ID NO: 55964 - DNA, 20 bp, synthetic construct
  source 1..20: mol_type = other DNA
aagggagagagtcaagggca

SEQ ID NO: 55965 - DNA, 20 bp, synthetic construct
  source 1..20: mol_type = other DNA
gaagggagagagtcaagggc

SEQ ID NO: 55966 - DNA, 20 bp, synthetic construct
  source 1..20: mol_type = other DNA
agaagggagagagtcaaggg

SEQ ID NO: 55967 - DNA, 20 bp, synthetic construct
  source 1..20: mol_type = other DNA
tagaagggagagagtcaagg

SEQ ID NO: 55968 - DNA, 20 bp, synthetic construct
  source 1..20: mol_type = other DNA
gtagaagggagagagtcaag

SEQ ID NO: 55969 - DNA, 20 bp, synthetic construct
  source 1..20: mol_type = other DNA
agtagaagggagagagtcaa

SEQ ID NO: 55970 - DNA, 20 bp, synthetic construct
  source 1..20: mol_type = other DNA
aagtagaagggagagagtca

SEQ ID NO: 55971 - DNA, 20 bp, synthetic construct
  source 1..20: mol_type = other DNA
taagtagaagggagagagtc

SEQ ID NO: 55972 - DNA, 20 bp, synthetic construct
  source 1..20: mol_type = other DNA
gtaagtagaagggagagagt

SEQ ID NO: 55973 - DNA, 20 bp, synthetic construct
  source 1..20: mol_type = other DNA
ggtaagtagaagggagagag

SEQ ID NO: 55974 - DNA, 20 bp, synthetic construct
  source 1..20: mol_type = other DNA
aggtaagtagaagggagaga

SEQ ID NO: 55975 - DNA, 20 bp, synthetic construct
  source 1..20: mol_type = other DNA
gaggtaagtagaagggagag

SEQ ID NO: 55976 - DNA, 20 bp, synthetic construct
  source 1..20: mol_type = other DNA
ggaggtaagtagaagggaga

SEQ ID NO: 55977 - DNA, 20 bp, synthetic construct
  source 1..20: mol_type = other DNA
aggaggtaagtagaagggag

SEQ ID NO: 55978 - DNA, 20 bp, synthetic construct
  source 1..20: mol_type = other DNA
aaggaggtaagtagaaggga

SEQ ID NO: 55979 - DNA, 20 bp, synthetic construct
  source 1..20: mol_type = other DNA
caaggaggtaagtagaaggg

SEQ ID NO: 55980 - DNA, 20 bp, synthetic construct
  source 1..20: mol_type = other DNA
acaaggaggtaagtagaagg

SEQ ID NO: 55981 - DNA, 20 bp, synthetic construct
  source 1..20: mol_type = other DNA
aacaaggaggtaagtagaag

SEQ ID NO: 55982 - DNA, 20 bp, synthetic construct
  source 1..20: mol_type = other DNA
gaacaaggaggtaagtagaa

SEQ ID NO: 55983 - DNA, 20 bp, synthetic construct
  source 1..20: mol_type = other DNA
agaacaaggaggtaagtaga

SEQ ID NO: 55984 - DNA, 20 bp, synthetic construct
  source 1..20: mol_type = other DNA
gagaacaaggaggtaagtag

SEQ ID NO: 55985 - DNA, 20 bp, synthetic construct
  source 1..20: mol_type = other DNA
agagaacaaggaggtaagta

SEQ ID NO: 55986 - DNA, 20 bp, synthetic construct
  source 1..20: mol_type = other DNA
aagagaacaaggaggtaagt

SEQ ID NO: 55987 - DNA, 20 bp, synthetic construct
  source 1..20: mol_type = other DNA
aaagagaacaaggaggtaag

SEQ ID NO: 55988 - DNA, 20 bp, synthetic construct
  source 1..20: mol_type = other DNA
aaaagagaacaaggaggtaa

SEQ ID NO: 55989 - DNA, 20 bp, synthetic construct
  source 1..20: mol_type = other DNA
aaaaagagaacaaggaggta

SEQ ID NO: 55990 - DNA, 20 bp, synthetic construct
  source 1..20: mol_type = other DNA
gaaaaagagaacaaggaggt

SEQ ID NO: 55991 - DNA, 20 bp, synthetic construct
  source 1..20: mol_type = other DNA
agaaaaagagaacaaggagg

SEQ ID NO: 55992 - DNA, 20 bp, synthetic construct
  source 1..20: mol_type = other DNA
aagaaaaagagaacaaggag

SEQ ID NO: 55993 - DNA, 20 bp, synthetic construct
  source 1..20: mol_type = other DNA
aaagaaaaagagaacaagga

SEQ ID NO: 55994 - DNA, 20 bp, synthetic construct
  source 1..20: mol_type = other DNA
aaaagaaaaagagaacaagg

SEQ ID NO: 55995 - DNA, 20 bp, synthetic construct
  source 1..20: mol_type = other DNA
aaaaagaaaaagagaacaag

SEQ ID NO: 55996 - DNA, 20 bp, synthetic construct
  source 1..20: mol_type = other DNA
gaaaaagaaaaagagaacaa

SEQ ID NO: 55997 - DNA, 20 bp, synthetic construct
  source 1..20: mol_type = other DNA
agaaaaagaaaaagagaaca

SEQ ID NO: 55998 - DNA, 20 bp, synthetic construct
  source 1..20: mol_type = other DNA
aagaaaaagaaaaagagaac

SEQ ID NO: 55999 - DNA, 20 bp, synthetic construct
  source 1..20: mol_type = other DNA
aaagaaaaagaaaaagagaa

SEQ ID NO: 56000 - DNA, 20 bp, synthetic construct
  source 1..20: mol_type = other DNA
aaaagaaaaagaaaaagaga

SEQ ID NO: 56001 - DNA, 20 bp, synthetic construct
  source 1..20: mol_type = other DNA
aaaaagaaaaagaaaaagag

SEQ ID NO: 56002 - DNA, 20 bp, synthetic construct
  source 1..20: mol_type = other DNA
aaaaaagaaaaagaaaaaga

SEQ ID NO: 56003 - DNA, 20 bp, synthetic construct
  source 1..20: mol_type = other DNA
aaaaaaagaaaaagaaaaag

SEQ ID NO: 56004 - DNA, 20 bp, synthetic construct
  source 1..20: mol_type = other DNA
aaaaaaaagaaaaagaaaaa

SEQ ID NO: 56005 - DNA, 20 bp, synthetic construct
  source 1..20: mol_type = other DNA
aaaaaaaaagaaaaagaaaa

SEQ ID NO: 56006 - DNA, 20 bp, synthetic construct
  source 1..20: mol_type = other DNA
taaaaaaaaagaaaaagaaa

SEQ ID NO: 56007 - DNA, 20 bp, synthetic construct
  source 1..20: mol_type = other DNA
ctaaaaaaaaagaaaaagaa

SEQ ID NO: 56008 - DNA, 20 bp, synthetic construct
  source 1..20: mol_type = other DNA
tctaaaaaaaaagaaaaaga

SEQ ID NO: 56009 - DNA, 20 bp, synthetic construct
  source 1..20: mol_type = other DNA
atctaaaaaaaaagaaaaag

SEQ ID NO: 56010 - DNA, 20 bp, synthetic construct
  source 1..20: mol_type = other DNA
catctaaaaaaaaagaaaaa

SEQ ID NO: 56011 - DNA, 20 bp, synthetic construct
  source 1..20: mol_type = other DNA
ccatctaaaaaaaaagaaaa

SEQ ID NO: 56012 - DNA, 20 bp, synthetic construct
  source 1..20: mol_type = other DNA
tccatctaaaaaaaaagaaa

SEQ ID NO: 56013 - DNA, 20 bp, synthetic construct
  source 1..20: mol_type = other DNA
ctccatctaaaaaaaaagaa

SEQ ID NO: 56014 - DNA, 20 bp, synthetic construct
  source 1..20: mol_type = other DNA
actccatctaaaaaaaaaga

SEQ ID NO: 56015 - DNA, 20 bp, synthetic construct
  source 1..20: mol_type = other DNA
gactccatctaaaaaaaaag

SEQ ID NO: 56016 - DNA, 20 bp, synthetic construct
  source 1..20: mol_type = other DNA
agactccatctaaaaaaaaa

SEQ ID NO: 56017 - DNA, 20 bp, synthetic construct
  source 1..20: mol_type = other DNA
gagactccatctaaaaaaaa

SEQ ID NO: 56018 - DNA, 20 bp, synthetic construct
  source 1..20: mol_type = other DNA
cgagactccatctaaaaaaa

SEQ ID NO: 56019 - DNA, 20 bp, synthetic construct
  source 1..20: mol_type = other DNA
ccgagactccatctaaaaaa

SEQ ID NO: 56020 - DNA, 20 bp, synthetic construct
  source 1..20: mol_type = other DNA
accgagactccatctaaaaa

SEQ ID NO: 56021 - DNA, 20 bp, synthetic construct
  source 1..20: mol_type = other DNA
gaccgagactccatctaaaa

SEQ ID NO: 56022 - DNA, 20 bp, synthetic construct
  source 1..20: mol_type = other DNA
agaccgagactccatctaaa

SEQ ID NO: 56023 - DNA, 20 bp, synthetic construct
  source 1..20: mol_type = other DNA
cagaccgagactccatctaa

SEQ ID NO: 56024 - DNA, 20 bp, synthetic construct
  source 1..20: mol_type = other DNA
acagaccgagactccatcta

SEQ ID NO: 56025 - DNA, 20 bp, synthetic construct
  source 1..20: mol_type = other DNA
gacagaccgagactccatct

SEQ ID NO: 56026 - DNA, 20 bp, synthetic construct
  source 1..20: mol_type = other DNA
tgacagaccgagactccatc

SEQ ID NO: 56027 - DNA, 20 bp, synthetic construct
  source 1..20: mol_type = other DNA
gtgacagaccgagactccat

SEQ ID NO: 56028 - DNA, 20 bp, synthetic construct
  source 1..20: mol_type = other DNA
ggtgacagaccgagactcca

SEQ ID NO: 56029 - DNA, 20 bp, synthetic construct
  source 1..20: mol_type = other DNA
gggtgacagaccgagactcc

SEQ ID NO: 56030 - DNA, 20 bp, synthetic construct
  source 1..20: mol_type = other DNA
tgggtgacagaccgagactc

SEQ ID NO: 56031 - DNA, 20 bp, synthetic construct
  source 1..20: mol_type = other DNA
ctgggtgacagaccgagact

SEQ ID NO: 56032 - DNA, 20 bp, synthetic construct
  source 1..20: mol_type = other DNA
cctgggtgacagaccgagac

SEQ ID NO: 56033 - DNA, 20 bp, synthetic construct
  source 1..20: mol_type = other DNA
gcctgggtgacagaccgaga

SEQ ID NO: 56034 - DNA, 20 bp, synthetic construct
  source 1..20: mol_type = other DNA
agcctgggtgacagaccgag

SEQ ID NO: 56035 - DNA, 20 bp, synthetic construct
  source 1..20: mol_type = other DNA
cagcctgggtgacagaccga

SEQ ID NO: 56036 - DNA, 20 bp, synthetic construct
  source 1..20: mol_type = other DNA
tcagcctgggtgacagaccg

SEQ ID NO: 56037 - DNA, 20 bp, synthetic construct
  source 1..20: mol_type = other DNA
ttcagcctgggtgacagacc

SEQ ID NO: 56038 - DNA, 20 bp, synthetic construct
  source 1..20: mol_type = other DNA
cttcagcctgggtgacagac

SEQ ID NO: 56039 - DNA, 20 bp, synthetic construct
  source 1..20: mol_type = other DNA
acttcagcctgggtgacaga

SEQ ID NO: 56040 - DNA, 20 bp, synthetic construct
  source 1..20: mol_type = other DNA
cacttcagcctgggtgacag

SEQ ID NO: 56041 - DNA, 20 bp, synthetic construct
  source 1..20: mol_type = other DNA
gcacttcagcctgggtgaca

SEQ ID NO: 56042 - DNA, 20 bp, synthetic construct
  source 1..20: mol_type = other DNA
tgcacttcagcctgggtgac

SEQ ID NO: 56043 - DNA, 20 bp, synthetic construct
  source 1..20: mol_type = other DNA
ctgcacttcagcctgggtga

SEQ ID NO: 56044 - DNA, 20 bp, synthetic construct
  source 1..20: mol_type = other DNA
actgcacttcagcctgggtg

SEQ ID NO: 56045 - DNA, 20 bp, synthetic construct
  source 1..20: mol_type = other DNA
cactgcacttcagcctgggt

SEQ ID NO: 56046 - DNA, 20 bp, synthetic construct
  source 1..20: mol_type = other DNA
ccactgcacttcagcctggg

SEQ ID NO: 56047 - DNA, 20 bp, synthetic construct
  source 1..20: mol_type = other DNA
gccactgcacttcagcctgg

SEQ ID NO: 56048 - DNA, 20 bp, synthetic construct
  source 1..20: mol_type = other DNA
cgccactgcacttcagcctg

SEQ ID NO: 56049 - DNA, 20 bp, synthetic construct
  source 1..20: mol_type = other DNA
acgccactgcacttcagcct

SEQ ID NO: 56050 - DNA, 20 bp, synthetic construct
  source 1..20: mol_type = other DNA
cacgccactgcacttcagcc

SEQ ID NO: 56051 - DNA, 20 bp, synthetic construct
  source 1..20: mol_type = other DNA
tcacgccactgcacttcagc

SEQ ID NO: 56052 - DNA, 20 bp, synthetic construct
  source 1..20: mol_type = other DNA
atcacgccactgcacttcag

SEQ ID NO: 56053 - DNA, 20 bp, synthetic construct
  source 1..20: mol_type = other DNA
aatcacgccactgcacttca

SEQ ID NO: 56054 - DNA, 20 bp, synthetic construct
  source 1..20: mol_type = other DNA
aaatcacgccactgcacttc

SEQ ID NO: 56055 - DNA, 20 bp, synthetic construct
  source 1..20: mol_type = other DNA
gaaatcacgccactgcactt

SEQ ID NO: 56056 - DNA, 20 bp, synthetic construct
  source 1..20: mol_type = other DNA
tgaaatcacgccactgcact

SEQ ID NO: 56057 - DNA, 20 bp, synthetic construct
  source 1..20: mol_type = other DNA
ctgaaatcacgccactgcac

SEQ ID NO: 56058 - DNA, 20 bp, synthetic construct
  source 1..20: mol_type = other DNA
gctgaaatcacgccactgca

SEQ ID NO: 56059 - DNA, 20 bp, synthetic construct
  source 1..20: mol_type = other DNA
agctgaaatcacgccactgc

SEQ ID NO: 56060 - DNA, 20 bp, synthetic construct
  source 1..20: mol_type = other DNA
gagctgaaatcacgccactg

SEQ ID NO: 56061 - DNA, 20 bp, synthetic construct
  source 1..20: mol_type = other DNA
tgagctgaaatcacgccact

SEQ ID NO: 56062 - DNA, 20 bp, synthetic construct
  source 1..20: mol_type = other DNA
gtgagctgaaatcacgccac

SEQ ID NO: 56063 - DNA, 20 bp, synthetic construct
  source 1..20: mol_type = other DNA
agtgagctgaaatcacgcca

SEQ ID NO: 56064 - DNA, 20 bp, synthetic construct
  source 1..20: mol_type = other DNA
cagtgagctgaaatcacgcc

SEQ ID NO: 56065 - DNA, 20 bp, synthetic construct
  source 1..20: mol_type = other DNA
gcagtgagctgaaatcacgc

SEQ ID NO: 56066 - DNA, 20 bp, synthetic construct
  source 1..20: mol_type = other DNA
tgcagtgagctgaaatcacg

SEQ ID NO: 56067 - DNA, 20 bp, synthetic construct
  source 1..20: mol_type = other DNA
ctgcagtgagctgaaatcac

SEQ ID NO: 56068 - DNA, 20 bp, synthetic construct
  source 1..20: mol_type = other DNA
gctgcagtgagctgaaatca

SEQ ID NO: 56069 - DNA, 20 bp, synthetic construct
  source 1..20: mol_type = other DNA
ggctgcagtgagctgaaatc

SEQ ID NO: 56070 - DNA, 20 bp, synthetic construct
  source 1..20: mol_type = other DNA
aggctgcagtgagctgaaat

SEQ ID NO: 56071 - DNA, 20 bp, synthetic construct
  source 1..20: mol_type = other DNA
gaggctgcagtgagctgaaa

SEQ ID NO: 56072 - DNA, 20 bp, synthetic construct
  source 1..20: mol_type = other DNA
tgaggctgcagtgagctgaa

SEQ ID NO: 56073 - DNA, 20 bp, synthetic construct
  source 1..20: mol_type = other DNA
ctgaggctgcagtgagctga

SEQ ID NO: 56074 - DNA, 20 bp, synthetic construct
  source 1..20: mol_type = other DNA
gctgaggctgcagtgagctg

SEQ ID NO: 56075 - DNA, 20 bp, synthetic construct
  source 1..20: mol_type = other DNA
ggctgaggctgcagtgagct

SEQ ID NO: 56076 - DNA, 20 bp, synthetic construct
  source 1..20: mol_type = other DNA
aggctgaggctgcagtgagc

SEQ ID NO: 56077 - DNA, 20 bp, synthetic construct
  source 1..20: mol_type = other DNA
gaggctgaggctgcagtgag

SEQ ID NO: 56078 - DNA, 20 bp, synthetic construct
  source 1..20: mol_type = other DNA
ggaggctgaggctgcagtga

SEQ ID NO: 56079 - DNA, 20 bp, synthetic construct
  source 1..20: mol_type = other DNA
aggaggctgaggctgcagtg

SEQ ID NO: 56080 - DNA, 20 bp, synthetic construct
  source 1..20: mol_type = other DNA
caggaggctgaggctgcagt

SEQ ID NO: 56081 - DNA, 20 bp, synthetic construct
  source 1..20: mol_type = other DNA
tcaggaggctgaggctgcag

SEQ ID NO: 56082 - DNA, 20 bp, synthetic construct
  source 1..20: mol_type = other DNA
ctcaggaggctgaggctgca

SEQ ID NO: 56083 - DNA, 20 bp, synthetic construct
  source 1..20: mol_type = other DNA
actcaggaggctgaggctgc

SEQ ID NO: 56084 - DNA, 20 bp, synthetic construct
  source 1..20: mol_type = other DNA
tactcaggaggctgaggctg

SEQ ID NO: 56085 - DNA, 20 bp, synthetic construct
  source 1..20: mol_type = other DNA
ctactcaggaggctgaggct

SEQ ID NO: 56086 - DNA, 20 bp, synthetic construct
  source 1..20: mol_type = other DNA
gctactcaggaggctgaggc

SEQ ID NO: 56087 - DNA, 20 bp, synthetic construct
  source 1..20: mol_type = other DNA
agctactcaggaggctgagg

SEQ ID NO: 56088 - DNA, 20 bp, synthetic construct
  source 1..20: mol_type = other DNA
cagctactcaggaggctgag

SEQ ID NO: 56089 - DNA, 20 bp, synthetic construct
  source 1..20: mol_type = other DNA
ccagctactcaggaggctga

SEQ ID NO: 56090 - DNA, 20 bp, synthetic construct
  source 1..20: mol_type = other DNA
cccagctactcaggaggctg

SEQ ID NO: 56091 - DNA, 20 bp, synthetic construct
  source 1..20: mol_type = other DNA
ccccagctactcaggaggct

SEQ ID NO: 56092 - DNA, 20 bp, synthetic construct
  source 1..20: mol_type = other DNA
gccccagctactcaggaggc

SEQ ID NO: 56093 - DNA, 20 bp, synthetic construct
  source 1..20: mol_type = other DNA
agccccagctactcaggagg

SEQ ID NO: 56094 - DNA, 20 bp, synthetic construct
  source 1..20: mol_type = other DNA
tagccccagctactcaggag

SEQ ID NO: 56095 - DNA, 20 bp, synthetic construct
  source 1..20: mol_type = other DNA
atagccccagctactcagga

SEQ ID NO: 56096 - DNA, 20 bp, synthetic construct
  source 1..20: mol_type = other DNA
tatagccccagctactcagg

SEQ ID NO: 56097 - DNA, 20 bp, synthetic construct
  source 1..20: mol_type = other DNA
ctatagccccagctactcag

SEQ ID NO: 56098 - DNA, 20 bp, synthetic construct
  source 1..20: mol_type = other DNA
cctatagccccagctactca

SEQ ID NO: 56099 - DNA, 20 bp, synthetic construct
  source 1..20: mol_type = other DNA
acctatagccccagctactc

SEQ ID NO: 56100 - DNA, 20 bp, synthetic construct
  source 1..20: mol_type = other DNA
cacctatagccccagctact

SEQ ID NO: 56101 - DNA, 20 bp, synthetic construct
  source 1..20: mol_type = other DNA
gcacctatagccccagctac

SEQ ID NO: 56102 - DNA, 20 bp, synthetic construct
  source 1..20: mol_type = other DNA
ggcacctatagccccagcta

SEQ ID NO: 56103 - DNA, 20 bp, synthetic construct
  source 1..20: mol_type = other DNA
aggcacctatagccccagct

SEQ ID NO: 56104 - DNA, 20 bp, synthetic construct
  source 1..20: mol_type = other DNA
caggcacctatagccccagc

SEQ ID NO: 56105 - DNA, 20 bp, synthetic construct
  source 1..20: mol_type = other DNA
gcaggcacctatagccccag

SEQ ID NO: 56106 - DNA, 20 bp, synthetic construct
  source 1..20: mol_type = other DNA
ggcaggcacctatagcccca

SEQ ID NO: 56107 - DNA, 20 bp, synthetic construct
  source 1..20: mol_type = other DNA
tggcaggcacctatagcccc

SEQ ID NO: 56108 - DNA, 20 bp, synthetic construct
  source 1..20: mol_type = other DNA
gtggcaggcacctatagccc

SEQ ID NO: 56109 - DNA, 20 bp, synthetic construct
  source 1..20: mol_type = other DNA
ggtggcaggcacctatagcc

SEQ ID NO: 56110 - DNA, 20 bp, synthetic construct
  source 1..20: mol_type = other DNA
tggtggcaggcacctatagc

SEQ ID NO: 56111 - DNA, 20 bp, synthetic construct
  source 1..20: mol_type = other DNA
gtggtggcaggcacctatag

SEQ ID NO: 56112 - DNA, 20 bp, synthetic construct
  source 1..20: mol_type = other DNA
cgtggtggcaggcacctata

SEQ ID NO: 56113 - DNA, 20 bp, synthetic construct
  source 1..20: mol_type = other DNA
gcgtggtggcaggcacctat

SEQ ID NO: 56114 - DNA, 20 bp, synthetic construct
  source 1..20: mol_type = other DNA
ggcgtggtggcaggcaccta

SEQ ID NO: 56115 - DNA, 20 bp, synthetic construct
  source 1..20: mol_type = other DNA
gggcgtggtggcaggcacct

SEQ ID NO: 56116 - DNA, 20 bp, synthetic construct
  source 1..20: mol_type = other DNA
cgggcgtggtggcaggcacc

SEQ ID NO: 56117 - DNA, 20 bp, synthetic construct
  source 1..20: mol_type = other DNA
ccgggcgtggtggcaggcac

SEQ ID NO: 56118 - DNA, 20 bp, synthetic construct
  source 1..20: mol_type = other DNA
gccgggcgtggtggcaggca

SEQ ID NO: 56119 - DNA, 20 bp, synthetic construct
  source 1..20: mol_type = other DNA
agccgggcgtggtggcaggc

SEQ ID NO: 56120 - DNA, 20 bp, synthetic construct
  source 1..20: mol_type = other DNA
tagccgggcgtggtggcagg

SEQ ID NO: 56121 - DNA, 20 bp, synthetic construct
  source 1..20: mol_type = other DNA
ttagccgggcgtggtggcag

SEQ ID NO: 56122 - DNA, 20 bp, synthetic construct
  source 1..20: mol_type = other DNA
attagccgggcgtggtggca

SEQ ID NO: 56123 - DNA, 20 bp, synthetic construct
  source 1..20: mol_type = other DNA
aattagccgggcgtggtggc

SEQ ID NO: 56124 - DNA, 20 bp, synthetic construct
  source 1..20: mol_type = other DNA
aaattagccgggcgtggtgg

SEQ ID NO: 56125 - DNA, 20 bp, synthetic construct
  source 1..20: mol_type = other DNA
aaaattagccgggcgtggtg

SEQ ID NO: 56126 - DNA, 20 bp, synthetic construct
  source 1..20: mol_type = other DNA
aaaaattagccgggcgtggt

SEQ ID NO: 56127 - DNA, 20 bp, synthetic construct
  source 1..20: mol_type = other DNA
caaaaattagccgggcgtgg

SEQ ID NO: 56128 - DNA, 20 bp, synthetic construct
  source 1..20: mol_type = other DNA
acaaaaattagccgggcgtg

SEQ ID NO: 56129 - DNA, 20 bp, synthetic construct
  source 1..20: mol_type = other DNA
tacaaaaattagccgggcgt

SEQ ID NO: 56130 - DNA, 20 bp, synthetic construct
  source 1..20: mol_type = other DNA
atacaaaaattagccgggcg

SEQ ID NO: 56131 - DNA, 20 bp, synthetic construct
  source 1..20: mol_type = other DNA
aatacaaaaattagccgggc

SEQ ID NO: 56132 - DNA, 20 bp, synthetic construct
  source 1..20: mol_type = other DNA
aaatacaaaaattagccggg

SEQ ID NO: 56133 - DNA, 20 bp, synthetic construct
  source 1..20: mol_type = other DNA
aaaatacaaaaattagccgg

SEQ ID NO: 56134 - DNA, 20 bp, synthetic construct
  source 1..20: mol_type = other DNA
aaaaatacaaaaattagccg

SEQ ID NO: 56135 - DNA, 20 bp, synthetic construct
  source 1..20: mol_type = other DNA
taaaaatacaaaaattagcc

SEQ ID NO: 56136 - DNA, 20 bp, synthetic construct
  source 1..20: mol_type = other DNA
ctaaaaatacaaaaattagc

SEQ ID NO: 56137 - DNA, 20 bp, synthetic construct
  source 1..20: mol_type = other DNA
actaaaaatacaaaaattag

SEQ ID NO: 56138 - DNA, 20 bp, synthetic construct
  source 1..20: mol_type = other DNA
tactaaaaatacaaaaatta

SEQ ID NO: 56139 - DNA, 20 bp, synthetic construct
  source 1..20: mol_type = other DNA
ctactaaaaatacaaaaatt

SEQ ID NO: 56140 - DNA, 20 bp, synthetic construct
  source 1..20: mol_type = other DNA
tctactaaaaatacaaaaat

SEQ ID NO: 56141 - DNA, 20 bp, synthetic construct
  source 1..20: mol_type = other DNA
ctctactaaaaatacaaaaa

SEQ ID NO: 56142 - DNA, 20 bp, synthetic construct
  source 1..20: mol_type = other DNA
tctctactaaaaatacaaaa

SEQ ID NO: 56143 - DNA, 20 bp, synthetic construct
  source 1..20: mol_type = other DNA
atctctactaaaaatacaaa

SEQ ID NO: 56144 - DNA, 20 bp, synthetic construct
  source 1..20: mol_type = other DNA
catctctactaaaaatacaa

SEQ ID NO: 56145 - DNA, 20 bp, synthetic construct
  source 1..20: mol_type = other DNA
ccatctctactaaaaataca

SEQ ID NO: 56146 - DNA, 20 bp, synthetic construct
  source 1..20: mol_type = other DNA
cccatctctactaaaaatac

SEQ ID NO: 56147 - DNA, 20 bp, synthetic construct
  source 1..20: mol_type = other DNA
ccccatctctactaaaaata

SEQ ID NO: 56148 - DNA, 20 bp, synthetic construct
  source 1..20: mol_type = other DNA
accccatctctactaaaaat

SEQ ID NO: 56149 - DNA, 20 bp, synthetic construct
  source 1..20: mol_type = other DNA
aaccccatctctactaaaaa

SEQ ID NO: 56150 - DNA, 20 bp, synthetic construct
  source 1..20: mol_type = other DNA
aaaccccatctctactaaaa

SEQ ID NO: 56151 - DNA, 20 bp, synthetic construct
  source 1..20: mol_type = other DNA
gaaaccccatctctactaaa

SEQ ID NO: 56152 - DNA, 20 bp, synthetic construct
  source 1..20: mol_type = other DNA
tgaaaccccatctctactaa

SEQ ID NO: 56153 - DNA, 20 bp, synthetic construct
  source 1..20: mol_type = other DNA
gtgaaaccccatctctacta

SEQ ID NO: 56154 - DNA, 20 bp, synthetic construct
  source 1..20: mol_type = other DNA
ggtgaaaccccatctctact

SEQ ID NO: 56155 - DNA, 20 bp, synthetic construct
  source 1..20: mol_type = other DNA
tggtgaaaccccatctctac

SEQ ID NO: 56156 - DNA, 20 bp, synthetic construct
  source 1..20: mol_type = other DNA
atggtgaaaccccatctcta

SEQ ID NO: 56157 - DNA, 20 bp, synthetic construct
  source 1..20: mol_type = other DNA
catggtgaaaccccatctct

SEQ ID NO: 56158 - DNA, 20 bp, synthetic construct
  source 1..20: mol_type = other DNA
acatggtgaaaccccatctc

SEQ ID NO: 56159 - DNA, 20 bp, synthetic construct
  source 1..20: mol_type = other DNA
aacatggtgaaaccccatct

SEQ ID NO: 56160 - DNA, 20 bp, synthetic construct
  source 1..20: mol_type = other DNA
caacatggtgaaaccccatc

SEQ ID NO: 56161 - DNA, 20 bp, synthetic construct
  source 1..20: mol_type = other DNA
ccaacatggtgaaaccccat

SEQ ID NO: 56162 - DNA, 20 bp, synthetic construct
  source 1..20: mol_type = other DNA
gccaacatggtgaaacccca

SEQ ID NO: 56163 - DNA, 20 bp, synthetic construct
  source 1..20: mol_type = other DNA
ggccaacatggtgaaacccc

SEQ ID NO: 56164 - DNA, 20 bp, synthetic construct
  source 1..20: mol_type = other DNA
tggccaacatggtgaaaccc

SEQ ID NO: 56165 - DNA, 20 bp, synthetic construct
  source 1..20: mol_type = other DNA
ctggccaacatggtgaaacc

SEQ ID NO: 56166 - DNA, 20 bp, synthetic construct
  source 1..20: mol_type = other DNA
cctggccaacatggtgaaac

SEQ ID NO: 56167 - DNA, 20 bp, synthetic construct
  source 1..20: mol_type = other DNA
gcctggccaacatggtgaaa

SEQ ID NO: 56168 - DNA, 20 bp, synthetic construct
  source 1..20: mol_type = other DNA
agcctggccaacatggtgaa

SEQ ID NO: 56169 - DNA, 20 bp, synthetic construct
  source 1..20: mol_type = other DNA
cagcctggccaacatggtga

SEQ ID NO: 56170 - DNA, 20 bp, synthetic construct
  source 1..20: mol_type = other DNA
ccagcctggccaacatggtg

SEQ ID NO: 56171 - DNA, 20 bp, synthetic construct
  source 1..20: mol_type = other DNA
accagcctggccaacatggt

SEQ ID NO: 56172 - DNA, 20 bp, synthetic construct
  source 1..20: mol_type = other DNA
gaccagcctggccaacatgg

SEQ ID NO: 56173 - DNA, 20 bp, synthetic construct
  source 1..20: mol_type = other DNA
agaccagcctggccaacatg

SEQ ID NO: 56174 - DNA, 20 bp, synthetic construct
  source 1..20: mol_type = other DNA
gagaccagcctggccaacat

SEQ ID NO: 56175 - DNA, 20 bp, synthetic construct
  source 1..20: mol_type = other DNA
cgagaccagcctggccaaca

SEQ ID NO: 56176 - DNA, 20 bp, synthetic construct
  source 1..20: mol_type = other DNA
tcgagaccagcctggccaac

SEQ ID NO: 56177 - DNA, 20 bp, synthetic construct
  source 1..20: mol_type = other DNA
ttcgagaccagcctggccaa

SEQ ID NO: 56178 - DNA, 20 bp, synthetic construct
  source 1..20: mol_type = other DNA
gttcgagaccagcctggcca

SEQ ID NO: 56179 - DNA, 20 bp, synthetic construct
  source 1..20: mol_type = other DNA
agttcgagaccagcctggcc

SEQ ID NO: 56180 - DNA, 20 bp, synthetic construct
  source 1..20: mol_type = other DNA
gagttcgagaccagcctggc

SEQ ID NO: 56181 - DNA, 20 bp, synthetic construct
  source 1..20: mol_type = other DNA
ggagttcgagaccagcctgg

SEQ ID NO: 56182 - DNA, 20 bp, synthetic construct
  source 1..20: mol_type = other DNA
aggagttcgagaccagcctg

SEQ ID NO: 56183 - DNA, 20 bp, synthetic construct
  source 1..20: mol_type = other DNA
caggagttcgagaccagcct

SEQ ID NO: 56184 - DNA, 20 bp, synthetic construct
  source 1..20: mol_type = other DNA
tcaggagttcgagaccagcc

SEQ ID NO: 56185 - DNA, 20 bp, synthetic construct
  source 1..20: mol_type = other DNA
gtcaggagttcgagaccagc

SEQ ID NO: 56186 - DNA, 20 bp, synthetic construct
  source 1..20: mol_type = other DNA
ggtcaggagttcgagaccag

SEQ ID NO: 56187 - DNA, 20 bp, synthetic construct
  source 1..20: mol_type = other DNA
aggtcaggagttcgagacca

SEQ ID NO: 56188 - DNA, 20 bp, synthetic construct
  source 1..20: mol_type = other DNA
gaggtcaggagttcgagacc

SEQ ID NO: 56189 - DNA, 20 bp, synthetic construct
  source 1..20: mol_type = other DNA
tgaggtcaggagttcgagac

SEQ ID NO: 56190 - DNA, 20 bp, synthetic construct
  source 1..20: mol_type = other DNA
ttgaggtcaggagttcgaga

SEQ ID NO: 56191 - DNA, 20 bp, synthetic construct
  source 1..20: mol_type = other DNA
cttgaggtcaggagttcgag

SEQ ID NO: 56192 - DNA, 20 bp, synthetic construct
  source 1..20: mol_type = other DNA
acttgaggtcaggagttcga

SEQ ID NO: 56193 - DNA, 20 bp, synthetic construct
  source 1..20: mol_type = other DNA
cacttgaggtcaggagttcg

SEQ ID NO: 56194 - DNA, 20 bp, synthetic construct
  source 1..20: mol_type = other DNA
tcacttgaggtcaggagttc

SEQ ID NO: 56195 - DNA, 20 bp, synthetic construct
  source 1..20: mol_type = other DNA
atcacttgaggtcaggagtt

SEQ ID NO: 56196 - DNA, 20 bp, synthetic construct
  source 1..20: mol_type = other DNA
gatcacttgaggtcaggagt

SEQ ID NO: 56197 - DNA, 20 bp, synthetic construct
  source 1..20: mol_type = other DNA
tgatcacttgaggtcaggag

SEQ ID NO: 56198 - DNA, 20 bp, synthetic construct
  source 1..20: mol_type = other DNA
gtgatcacttgaggtcagga

SEQ ID NO: 56199 - DNA, 20 bp, synthetic construct
  source 1..20: mol_type = other DNA
ggtgatcacttgaggtcagg

SEQ ID NO: 56200 - DNA, 20 bp, synthetic construct
  source 1..20: mol_type = other DNA
aggtgatcacttgaggtcag

SEQ ID NO: 56201 - DNA, 20 bp, synthetic construct
  source 1..20: mol_type = other DNA
caggtgatcacttgaggtca

SEQ ID NO: 56202 - DNA, 20 bp, synthetic construct
  source 1..20: mol_type = other DNA
gcaggtgatcacttgaggtc

SEQ ID NO: 56203 - DNA, 20 bp, synthetic construct
  source 1..20: mol_type = other DNA
ggcaggtgatcacttgaggt

SEQ ID NO: 56204 - DNA, 20 bp, synthetic construct
  source 1..20: mol_type = other DNA
aggcaggtgatcacttgagg

SEQ ID NO: 56205 - DNA, 20 bp, synthetic construct
  source 1..20: mol_type = other DNA
gaggcaggtgatcacttgag

SEQ ID NO: 56206 - DNA, 20 bp, synthetic construct
  source 1..20: mol_type = other DNA
tgaggcaggtgatcacttga

SEQ ID NO: 56207 - DNA, 20 bp, synthetic construct
  source 1..20: mol_type = other DNA
ctgaggcaggtgatcacttg

SEQ ID NO: 56208 - DNA, 20 bp, synthetic construct
  source 1..20: mol_type = other DNA
gctgaggcaggtgatcactt

SEQ ID NO: 56209 - DNA, 20 bp, synthetic construct
  source 1..20: mol_type = other DNA
ggctgaggcaggtgatcact

SEQ ID NO: 56210 - DNA, 20 bp, synthetic construct
  source 1..20: mol_type = other DNA
aggctgaggcaggtgatcac

SEQ ID NO: 56211 - DNA, 20 bp, synthetic construct
  source 1..20: mol_type = other DNA
gaggctgaggcaggtgatca

SEQ ID NO: 56212 - DNA, 20 bp, synthetic construct
  source 1..20: mol_type = other DNA
ggaggctgaggcaggtgatc

SEQ ID NO: 56213 - DNA, 20 bp, synthetic construct
  source 1..20: mol_type = other DNA
gggaggctgaggcaggtgat

SEQ ID NO: 56214 - DNA, 20 bp, synthetic construct
  source 1..20: mol_type = other DNA
tgggaggctgaggcaggtga

SEQ ID NO: 56215 - DNA, 20 bp, synthetic construct
  source 1..20: mol_type = other DNA
ttgggaggctgaggcaggtg

SEQ ID NO: 56216 - DNA, 20 bp, synthetic construct
  source 1..20: mol_type = other DNA
tttgggaggctgaggcaggt

SEQ ID NO: 56217 - DNA, 20 bp, synthetic construct
  source 1..20: mol_type = other DNA
ctttgggaggctgaggcagg

SEQ ID NO: 56218 - DNA, 20 bp, synthetic construct
  source 1..20: mol_type = other DNA
actttgggaggctgaggcag

SEQ ID NO: 56219 - DNA, 20 bp, synthetic construct
  source 1..20: mol_type = other DNA
cactttgggaggctgaggca

SEQ ID NO: 56220 - DNA, 20 bp, synthetic construct
  source 1..20: mol_type = other DNA
gcactttgggaggctgaggc

SEQ ID NO: 56221 - DNA, 20 bp, synthetic construct
  source 1..20: mol_type = other DNA
agcactttgggaggctgagg

SEQ ID NO: 56222 - DNA, 20 bp, synthetic construct
  source 1..20: mol_type = other DNA
cagcactttgggaggctgag

SEQ ID NO: 56223 - DNA, 20 bp, synthetic construct
  source 1..20: mol_type = other DNA
ccagcactttgggaggctga

SEQ ID NO: 56224 - DNA, 20 bp, synthetic construct
  source 1..20: mol_type = other DNA
cccagcactttgggaggctg

SEQ ID NO: 56225 - DNA, 20 bp, synthetic construct
  source 1..20: mol_type = other DNA
tcccagcactttgggaggct

SEQ ID NO: 56226 - DNA, 20 bp, synthetic construct
  source 1..20: mol_type = other DNA
atcccagcactttgggaggc

SEQ ID NO: 56227 - DNA, 20 bp, synthetic construct
  source 1..20: mol_type = other DNA
aatcccagcactttgggagg

SEQ ID NO: 56228 - DNA, 20 bp, synthetic construct
  source 1..20: mol_type = other DNA
taatcccagcactttgggag

SEQ ID NO: 56229 - DNA, 20 bp, synthetic construct
  source 1..20: mol_type = other DNA
gtaatcccagcactttggga

SEQ ID NO: 56230 - DNA, 20 bp, synthetic construct
  source 1..20: mol_type = other DNA
tgtaatcccagcactttggg

SEQ ID NO: 56231 - DNA, 20 bp, synthetic construct
  source 1..20: mol_type = other DNA
ctgtaatcccagcactttgg

SEQ ID NO: 56232 - DNA, 20 bp, synthetic construct
  source 1..20: mol_type = other DNA
cctgtaatcccagcactttg

SEQ ID NO: 56233 - DNA, 20 bp, synthetic construct
  source 1..20: mol_type = other DNA
gcctgtaatcccagcacttt

SEQ ID NO: 56234 - DNA, 20 bp, synthetic construct
  source 1..20: mol_type = other DNA
cgcctgtaatcccagcactt

SEQ ID NO: 56235 - DNA, 20 bp, synthetic construct
  source 1..20: mol_type = other DNA
acgcctgtaatcccagcact

SEQ ID NO: 56236 - DNA, 20 bp, synthetic construct
  source 1..20: mol_type = other DNA
cacgcctgtaatcccagcac

SEQ ID NO: 56237 - DNA, 20 bp, synthetic construct
  source 1..20: mol_type = other DNA
tcacgcctgtaatcccagca

SEQ ID NO: 56238 - DNA, 20 bp, synthetic construct
  source 1..20: mol_type = other DNA
ctcacgcctgtaatcccagc

SEQ ID NO: 56239 - DNA, 20 bp, synthetic construct
  source 1..20: mol_type = other DNA
gctcacgcctgtaatcccag

SEQ ID NO: 56240 - DNA, 20 bp, synthetic construct
  source 1..20: mol_type = other DNA
ggctcacgcctgtaatccca

SEQ ID NO: 56241 - DNA, 20 bp, synthetic construct
  source 1..20: mol_type = other DNA
tggctcacgcctgtaatccc

SEQ ID NO: 56242 - DNA, 20 bp, synthetic construct
  source 1..20: mol_type = other DNA
gtggctcacgcctgtaatcc

SEQ ID NO: 56243 - DNA, 20 bp, synthetic construct
  source 1..20: mol_type = other DNA
ggtggctcacgcctgtaatc

SEQ ID NO: 56244 - DNA, 20 bp, synthetic construct
  source 1..20: mol_type = other DNA
tggtggctcacgcctgtaat

SEQ ID NO: 56245 - DNA, 20 bp, synthetic construct
  source 1..20: mol_type = other DNA
gtggtggctcacgcctgtaa

SEQ ID NO: 56246 - DNA, 20 bp, synthetic construct
  source 1..20: mol_type = other DNA
cgtggtggctcacgcctgta

SEQ ID NO: 56247 - DNA, 20 bp, synthetic construct
  source 1..20: mol_type = other DNA
gcgtggtggctcacgcctgt

SEQ ID NO: 56248 - DNA, 20 bp, synthetic construct
  source 1..20: mol_type = other DNA
ggcgtggtggctcacgcctg

SEQ ID NO: 56249 - DNA, 20 bp, synthetic construct
  source 1..20: mol_type = other DNA
aggcgtggtggctcacgcct

SEQ ID NO: 56250 - DNA, 20 bp, synthetic construct
  source 1..20: mol_type = other DNA
caggcgtggtggctcacgcc

SEQ ID NO: 56251 - DNA, 20 bp, synthetic construct
  source 1..20: mol_type = other DNA
ccaggcgtggtggctcacgc

SEQ ID NO: 56252 - DNA, 20 bp, synthetic construct
  source 1..20: mol_type = other DNA
gccaggcgtggtggctcacg

SEQ ID NO: 56253 - DNA, 20 bp, synthetic construct
  source 1..20: mol_type = other DNA
ggccaggcgtggtggctcac

SEQ ID NO: 56254 - DNA, 20 bp, synthetic construct
  source 1..20: mol_type = other DNA
tggccaggcgtggtggctca

SEQ ID NO: 56255 - DNA, 20 bp, synthetic construct
  source 1..20: mol_type = other DNA
atggccaggcgtggtggctc

SEQ ID NO: 56256 - DNA, 20 bp, synthetic construct
  source 1..20: mol_type = other DNA
gatggccaggcgtggtggct

SEQ ID NO: 56257 - DNA, 20 bp, synthetic construct
  source 1..20: mol_type = other DNA
agatggccaggcgtggtggc

SEQ ID NO: 56258 - DNA, 20 bp, synthetic construct
  source 1..20: mol_type = other DNA
aagatggccaggcgtggtgg

SEQ ID NO: 56259 - DNA, 20 bp, synthetic construct
  source 1..20: mol_type = other DNA
aaagatggccaggcgtggtg

SEQ ID NO: 56260 - DNA, 20 bp, synthetic construct
  source 1..20: mol_type = other DNA
aaaagatggccaggcgtggt

SEQ ID NO: 56261 - DNA, 20 bp, synthetic construct
  source 1..20: mol_type = other DNA
aaaaagatggccaggcgtgg

SEQ ID NO: 56262 - DNA, 20 bp, synthetic construct
  source 1..20: mol_type = other DNA
aaaaaagatggccaggcgtg

SEQ ID NO: 56263 - DNA, 20 bp, synthetic construct
  source 1..20: mol_type = other DNA
aaaaaaagatggccaggcgt

SEQ ID NO: 56264 - DNA, 20 bp, synthetic construct
  source 1..20: mol_type = other DNA
aaaaaaaagatggccaggcg

SEQ ID NO: 56265 - DNA, 20 bp, synthetic construct
  source 1..20: mol_type = other DNA
aaaaaaaaagatggccaggc

SEQ ID NO: 56266 - DNA, 20 bp, synthetic construct
  source 1..20: mol_type = other DNA
gaaaaaaaaagatggccagg

SEQ ID NO: 56267 - DNA, 20 bp, synthetic construct
  source 1..20: mol_type = other DNA
agaaaaaaaaagatggccag

SEQ ID NO: 56268 - DNA, 20 bp, synthetic construct
  source 1..20: mol_type = other DNA
gagaaaaaaaaagatggcca

SEQ ID NO: 56269 - DNA, 20 bp, synthetic construct
  source 1..20: mol_type = other DNA
ggagaaaaaaaaagatggcc

SEQ ID NO: 56270 - DNA, 20 bp, synthetic construct
  source 1..20: mol_type = other DNA
aggagaaaaaaaaagatggc

SEQ ID NO: 56271 - DNA, 20 bp, synthetic construct
  source 1..20: mol_type = other DNA
aaggagaaaaaaaaagatgg

SEQ ID NO: 56272 - DNA, 20 bp, synthetic construct
  source 1..20: mol_type = other DNA
caaggagaaaaaaaaagatg

SEQ ID NO: 56273 - DNA, 20 bp, synthetic construct
  source 1..20: mol_type = other DNA
gcaaggagaaaaaaaaagat

SEQ ID NO: 56274 - DNA, 20 bp, synthetic construct
  source 1..20: mol_type = other DNA
agcaaggagaaaaaaaaaga

SEQ ID NO: 56275 - DNA, 20 bp, synthetic construct
  source 1..20: mol_type = other DNA
gagcaaggagaaaaaaaaag

SEQ ID NO: 56276 - DNA, 20 bp, synthetic construct
  source 1..20: mol_type = other DNA
agagcaaggagaaaaaaaaa

SEQ ID NO: 56277 - DNA, 20 bp, synthetic construct
  source 1..20: mol_type = other DNA
aagagcaaggagaaaaaaaa

SEQ ID NO: 56278 - DNA, 20 bp, synthetic construct
  source 1..20: mol_type = other DNA
aaagagcaaggagaaaaaaa

SEQ ID NO: 56279 - DNA, 20 bp, synthetic construct
  source 1..20: mol_type = other DNA
aaaagagcaaggagaaaaaa

SEQ ID NO: 56280 - DNA, 20 bp, synthetic construct
  source 1..20: mol_type = other DNA
taaaagagcaaggagaaaaa

SEQ ID NO: 56281 - DNA, 20 bp, synthetic construct
  source 1..20: mol_type = other DNA
ataaaagagcaaggagaaaa

SEQ ID NO: 56282 - DNA, 20 bp, synthetic construct
  source 1..20: mol_type = other DNA
tataaaagagcaaggagaaa

SEQ ID NO: 56283 - DNA, 20 bp, synthetic construct
  source 1..20: mol_type = other DNA
gtataaaagagcaaggagaa

SEQ ID NO: 56284 - DNA, 20 bp, synthetic construct
  source 1..20: mol_type = other DNA
ggtataaaagagcaaggaga

SEQ ID NO: 56285 - DNA, 20 bp, synthetic construct
  source 1..20: mol_type = other DNA
tggtataaaagagcaaggag

SEQ ID NO: 56286 - DNA, 20 bp, synthetic construct
  source 1..20: mol_type = other DNA
gtggtataaaagagcaagga

SEQ ID NO: 56287 - DNA, 20 bp, synthetic construct
  source 1..20: mol_type = other DNA
agtggtataaaagagcaagg

SEQ ID NO: 56288 - DNA, 20 bp, synthetic construct
  source 1..20: mol_type = other DNA
aagtggtataaaagagcaag

SEQ ID NO: 56289 - DNA, 20 bp, synthetic construct
  source 1..20: mol_type = other DNA
gaagtggtataaaagagcaa

SEQ ID NO: 56290 - DNA, 20 bp, synthetic construct
  source 1..20: mol_type = other DNA
agaagtggtataaaagagca

SEQ ID NO: 56291 - DNA, 20 bp, synthetic construct
  source 1..20: mol_type = other DNA
gagaagtggtataaaagagc

SEQ ID NO: 56292 - DNA, 20 bp, synthetic construct
  source 1..20: mol_type = other DNA
agagaagtggtataaaagag

SEQ ID NO: 56293 - DNA, 20 bp, synthetic construct
  source 1..20: mol_type = other DNA
cagagaagtggtataaaaga

SEQ ID NO: 56294 - DNA, 20 bp, synthetic construct
  source 1..20: mol_type = other DNA
acagagaagtggtataaaag

SEQ ID NO: 56295 - DNA, 20 bp, synthetic construct
  source 1..20: mol_type = other DNA
aacagagaagtggtataaaa

SEQ ID NO: 56296 - DNA, 20 bp, synthetic construct
  source 1..20: mol_type = other DNA
aaacagagaagtggtataaa

SEQ ID NO: 56297 - DNA, 20 bp, synthetic construct
  source 1..20: mol_type = other DNA
gaaacagagaagtggtataa

SEQ ID NO: 56298 - DNA, 20 bp, synthetic construct
  source 1..20: mol_type = other DNA
agaaacagagaagtggtata

SEQ ID NO: 56299 - DNA, 20 bp, synthetic construct
  source 1..20: mol_type = other DNA
cagaaacagagaagtggtat

SEQ ID NO: 56300 - DNA, 20 bp, synthetic construct
  source 1..20: mol_type = other DNA
ccagaaacagagaagtggta

SEQ ID NO: 56301 - DNA, 20 bp, synthetic construct
  source 1..20: mol_type = other DNA
cccagaaacagagaagtggt

SEQ ID NO: 56302 - DNA, 20 bp, synthetic construct
  source 1..20: mol_type = other DNA
gcccagaaacagagaagtgg

SEQ ID NO: 56303 - DNA, 20 bp, synthetic construct
  source 1..20: mol_type = other DNA
agcccagaaacagagaagtg

SEQ ID NO: 56304 - DNA, 20 bp, synthetic construct
  source 1..20: mol_type = other DNA
gagcccagaaacagagaagt

SEQ ID NO: 56305 - DNA, 20 bp, synthetic construct
  source 1..20: mol_type = other DNA
agagcccagaaacagagaag

SEQ ID NO: 56306 - DNA, 20 bp, synthetic construct
  source 1..20: mol_type = other DNA
aagagcccagaaacagagaa

SEQ ID NO: 56307 - DNA, 20 bp, synthetic construct
  source 1..20: mol_type = other DNA
gaagagcccagaaacagaga

SEQ ID NO: 56308 - DNA, 20 bp, synthetic construct
  source 1..20: mol_type = other DNA
tgaagagcccagaaacagag

SEQ ID NO: 56309 - DNA, 20 bp, synthetic construct
  source 1..20: mol_type = other DNA
ttgaagagcccagaaacaga

SEQ ID NO: 56310 - DNA, 20 bp, synthetic construct
  source 1..20: mol_type = other DNA
gttgaagagcccagaaacag

SEQ ID NO: 56311 - DNA, 20 bp, synthetic construct
  source 1..20: mol_type = other DNA
tgttgaagagcccagaaaca

SEQ ID NO: 56312 - DNA, 20 bp, synthetic construct
  source 1..20: mol_type = other DNA
atgttgaagagcccagaaac

SEQ ID NO: 56313 - DNA, 20 bp, synthetic construct
  source 1..20: mol_type = other DNA
gatgttgaagagcccagaaa

SEQ ID NO: 56314 - DNA, 20 bp, synthetic construct
  source 1..20: mol_type = other DNA
agatgttgaagagcccagaa

SEQ ID NO: 56315 - DNA, 20 bp, synthetic construct
  source 1..20: mol_type = other DNA
cagatgttgaagagcccaga

SEQ ID NO: 56316 - DNA, 20 bp, synthetic construct
  source 1..20: mol_type = other DNA
gcagatgttgaagagcccag

SEQ ID NO: 56317 - DNA, 20 bp, synthetic construct
  source 1..20: mol_type = other DNA
ggcagatgttgaagagccca

SEQ ID NO: 56318 - DNA, 20 bp, synthetic construct
  source 1..20: mol_type = other DNA
aggcagatgttgaagagccc

SEQ ID NO: 56319 - DNA, 20 bp, synthetic construct
  source 1..20: mol_type = other DNA
aaggcagatgttgaagagcc

SEQ ID NO: 56320 - DNA, 20 bp, synthetic construct
  source 1..20: mol_type = other DNA
aaaggcagatgttgaagagc

SEQ ID NO: 56321 - DNA, 20 bp, synthetic construct
  source 1..20: mol_type = other DNA
gaaaggcagatgttgaagag

SEQ ID NO: 56322 - DNA, 20 bp, synthetic construct
  source 1..20: mol_type = other DNA
agaaaggcagatgttgaaga

SEQ ID NO: 56323 - DNA, 20 bp, synthetic construct
  source 1..20: mol_type = other DNA
tagaaaggcagatgttgaag

SEQ ID NO: 56324 - DNA, 20 bp, synthetic construct
  source 1..20: mol_type = other DNA
ctagaaaggcagatgttgaa

SEQ ID NO: 56325 - DNA, 20 bp, synthetic construct
  source 1..20: mol_type = other DNA
actagaaaggcagatgttga

SEQ ID NO: 56326 - DNA, 20 bp, synthetic construct
  source 1..20: mol_type = other DNA
aactagaaaggcagatgttg

SEQ ID NO: 56327 - DNA, 20 bp, synthetic construct
  source 1..20: mol_type = other DNA
taactagaaaggcagatgtt

SEQ ID NO: 56328 - DNA, 20 bp, synthetic construct
  source 1..20: mol_type = other DNA
ttaactagaaaggcagatgt

SEQ ID NO: 56329 - DNA, 20 bp, synthetic construct
  source 1..20: mol_type = other DNA
attaactagaaaggcagatg

SEQ ID NO: 56330 - DNA, 20 bp, synthetic construct
  source 1..20: mol_type = other DNA
gattaactagaaaggcagat

SEQ ID NO: 56331 - DNA, 20 bp, synthetic construct
  source 1..20: mol_type = other DNA
agattaactagaaaggcaga

SEQ ID NO: 56332 - DNA, 20 bp, synthetic construct
  source 1..20: mol_type = other DNA
aagattaactagaaaggcag

SEQ ID NO: 56333 - DNA, 20 bp, synthetic construct
  source 1..20: mol_type = other DNA
aaagattaactagaaaggca

SEQ ID NO: 56334 - DNA, 20 bp, synthetic construct
  source 1..20: mol_type = other DNA
gaaagattaactagaaaggc

SEQ ID NO: 56335 - DNA, 20 bp, synthetic construct
  source 1..20: mol_type = other DNA
ggaaagattaactagaaagg

SEQ ID NO: 56336 - DNA, 20 bp, synthetic construct
  source 1..20: mol_type = other DNA
gggaaagattaactagaaag

SEQ ID NO: 56337 - DNA, 20 bp, synthetic construct
  source 1..20: mol_type = other DNA
agggaaagattaactagaaa

SEQ ID NO: 56338 - DNA, 20 bp, synthetic construct
  source 1..20: mol_type = other DNA
aagggaaagattaactagaa

SEQ ID NO: 56339 - DNA, 20 bp, synthetic construct
  source 1..20: mol_type = other DNA
aaagggaaagattaactaga

SEQ ID NO: 56340 - DNA, 20 bp, synthetic construct
  source 1..20: mol_type = other DNA
taaagggaaagattaactag

SEQ ID NO: 56341 - DNA, 20 bp, synthetic construct
  source 1..20: mol_type = other DNA
ctaaagggaaagattaacta

SEQ ID NO: 56342 - DNA, 20 bp, synthetic construct
  source 1..20: mol_type = other DNA
gctaaagggaaagattaact

SEQ ID NO: 56343 - DNA, 20 bp, synthetic construct
  source 1..20: mol_type = other DNA
tgctaaagggaaagattaac

SEQ ID NO: 56344 - DNA, 20 bp, synthetic construct
  source 1..20: mol_type = other DNA
atgctaaagggaaagattaa

SEQ ID NO: 56345 - DNA, 20 bp, synthetic construct
  source 1..20: mol_type = other DNA
catgctaaagggaaagatta

SEQ ID NO: 56346 - DNA, 20 bp, synthetic construct
  source 1..20: mol_type = other DNA
tcatgctaaagggaaagatt

SEQ ID NO: 56347 - DNA, 20 bp, synthetic construct
  source 1..20: mol_type = other DNA
ttcatgctaaagggaaagat

SEQ ID NO: 56348 - DNA, 20 bp, synthetic construct
  source 1..20: mol_type = other DNA
tttcatgctaaagggaaaga

SEQ ID NO: 56349 - DNA, 20 bp, synthetic construct
  source 1..20: mol_type = other DNA
ttttcatgctaaagggaaag

SEQ ID NO: 56350 - DNA, 20 bp, synthetic construct
  source 1..20: mol_type = other DNA
gttttcatgctaaagggaaa

SEQ ID NO: 56351 - DNA, 20 bp, synthetic construct
  source 1..20: mol_type = other DNA
ggttttcatgctaaagggaa

SEQ ID NO: 56352 - DNA, 20 bp, synthetic construct
  source 1..20: mol_type = other DNA
aggttttcatgctaaaggga

SEQ ID NO: 56353 - DNA, 20 bp, synthetic construct
  source 1..20: mol_type = other DNA
taggttttcatgctaaaggg

SEQ ID NO: 56354 - DNA, 20 bp, synthetic construct
  source 1..20: mol_type = other DNA
ataggttttcatgctaaagg

SEQ ID NO: 56355 - DNA, 20 bp, synthetic construct
  source 1..20: mol_type = other DNA
aataggttttcatgctaaag

SEQ ID NO: 56356 - DNA, 20 bp, synthetic construct
  source 1..20: mol_type = other DNA
gaataggttttcatgctaaa

SEQ ID NO: 56357 - DNA, 20 bp, synthetic construct
  source 1..20: mol_type = other DNA
tgaataggttttcatgctaa

SEQ ID NO: 56358 - DNA, 20 bp, synthetic construct
  source 1..20: mol_type = other DNA
gtgaataggttttcatgcta

SEQ ID NO: 56359 - DNA, 20 bp, synthetic construct
  source 1..20: mol_type = other DNA
agtgaataggttttcatgct

SEQ ID NO: 56360 - DNA, 20 bp, synthetic construct
  source 1..20: mol_type = other DNA
aagtgaataggttttcatgc

SEQ ID NO: 56361 - DNA, 20 bp, synthetic construct
  source 1..20: mol_type = other DNA
gaagtgaataggttttcatg

SEQ ID NO: 56362 - DNA, 20 bp, synthetic construct
  source 1..20: mol_type = other DNA
ggaagtgaataggttttcat

SEQ ID NO: 56363 - DNA, 20 bp, synthetic construct
  source 1..20: mol_type = other DNA
aggaagtgaataggttttca

SEQ ID NO: 56364 - DNA, 20 bp, synthetic construct
  source 1..20: mol_type = other DNA
caggaagtgaataggttttc

SEQ ID NO: 56365 - DNA, 20 bp, synthetic construct
  source 1..20: mol_type = other DNA
gcaggaagtgaataggtttt

SEQ ID NO: 56366 - DNA, 20 bp, synthetic construct
  source 1..20: mol_type = other DNA
agcaggaagtgaataggttt

SEQ ID NO: 56367 - DNA, 20 bp, synthetic construct
  source 1..20: mol_type = other DNA
gagcaggaagtgaataggtt

SEQ ID NO: 56368 - DNA, 20 bp, synthetic construct
  source 1..20: mol_type = other DNA
tgagcaggaagtgaataggt

SEQ ID NO: 56369 - DNA, 20 bp, synthetic construct
  source 1..20: mol_type = other DNA
atgagcaggaagtgaatagg

SEQ ID NO: 56370 - DNA, 20 bp, synthetic construct
  source 1..20: mol_type = other DNA
gatgagcaggaagtgaatag

SEQ ID NO: 56371 - DNA, 20 bp, synthetic construct
  source 1..20: mol_type = other DNA
ggatgagcaggaagtgaata

SEQ ID NO: 56372 - DNA, 20 bp, synthetic construct
  source 1..20: mol_type = other DNA
aggatgagcaggaagtgaat

SEQ ID NO: 56373 - DNA, 20 bp, synthetic construct
  source 1..20: mol_type = other DNA
taggatgagcaggaagtgaa

SEQ ID NO: 56374 - DNA, 20 bp, synthetic construct
  source 1..20: mol_type = other DNA
ttaggatgagcaggaagtga

SEQ ID NO: 56375 - DNA, 20 bp, synthetic construct
  source 1..20: mol_type = other DNA
tttaggatgagcaggaagtg

SEQ ID NO: 56376 - DNA, 20 bp, synthetic construct
  source 1..20: mol_type = other DNA
ttttaggatgagcaggaagt

SEQ ID NO: 56377 - DNA, 20 bp, synthetic construct
  source 1..20: mol_type = other DNA
tttttaggatgagcaggaag

SEQ ID NO: 56378 - DNA, 20 bp, synthetic construct
  source 1..20: mol_type = other DNA
ctttttaggatgagcaggaa

SEQ ID NO: 56379 - DNA, 20 bp, synthetic construct
  source 1..20: mol_type = other DNA
cctttttaggatgagcagga

SEQ ID NO: 56380 - DNA, 20 bp, synthetic construct
  source 1..20: mol_type = other DNA
tcctttttaggatgagcagg

SEQ ID NO: 56381 - DNA, 20 bp, synthetic construct
  source 1..20: mol_type = other DNA
atcctttttaggatgagcag

SEQ ID NO: 56382 - DNA, 20 bp, synthetic construct
  source 1..20: mol_type = other DNA
aatcctttttaggatgagca

SEQ ID NO: 56383 - DNA, 20 bp, synthetic construct
  source 1..20: mol_type = other DNA
gaatcctttttaggatgagc

SEQ ID NO: 56384 - DNA, 20 bp, synthetic construct
  source 1..20: mol_type = other DNA
agaatcctttttaggatgag

SEQ ID NO: 56385 - DNA, 20 bp, synthetic construct
  source 1..20: mol_type = other DNA
aagaatcctttttaggatga

SEQ ID NO: 56386 - DNA, 20 bp, synthetic construct
  source 1..20: mol_type = other DNA
aaagaatcctttttaggatg

SEQ ID NO: 56387 - DNA, 20 bp, synthetic construct
  source 1..20: mol_type = other DNA
aaaagaatcctttttaggat

SEQ ID NO: 56388 - DNA, 20 bp, synthetic construct
  source 1..20: mol_type = other DNA
aaaaagaatcctttttagga

SEQ ID NO: 56389 - DNA, 20 bp, synthetic construct
  source 1..20: mol_type = other DNA
aaaaaagaatcctttttagg

SEQ ID NO: 56390 - DNA, 20 bp, synthetic construct
  source 1..20: mol_type = other DNA
caaaaaagaatcctttttag

SEQ ID NO: 56391 - DNA, 20 bp, synthetic construct
  source 1..20: mol_type = other DNA
acaaaaaagaatccttttta

SEQ ID NO: 56392 - DNA, 20 bp, synthetic construct
  source 1..20: mol_type = other DNA
aacaaaaaagaatccttttt

SEQ ID NO: 56393 - DNA, 20 bp, synthetic construct
  source 1..20: mol_type = other DNA
aaacaaaaaagaatcctttt

SEQ ID NO: 56394 - DNA, 20 bp, synthetic construct
  source 1..20: mol_type = other DNA
aaaacaaaaaagaatccttt

SEQ ID NO: 56395 - DNA, 20 bp, synthetic construct
  source 1..20: mol_type = other DNA
caaaacaaaaaagaatcctt

SEQ ID NO: 56396 - DNA, 20 bp, synthetic construct
  source 1..20: mol_type = other DNA
acaaaacaaaaaagaatcct

SEQ ID NO: 56397 - DNA, 20 bp, synthetic construct
  source 1..20: mol_type = other DNA
aacaaaacaaaaaagaatcc

SEQ ID NO: 56398 - DNA, 20 bp, synthetic construct
  source 1..20: mol_type = other DNA
aaacaaaacaaaaaagaatc

SEQ ID NO: 56399 - DNA, 20 bp, synthetic construct
  source 1..20: mol_type = other DNA
aaaacaaaacaaaaaagaat

SEQ ID NO: 56400 - DNA, 20 bp, synthetic construct
  source 1..20: mol_type = other DNA
caaaacaaaacaaaaaagaa

SEQ ID NO: 56401 - DNA, 20 bp, synthetic construct
  source 1..20: mol_type = other DNA
acaaaacaaaacaaaaaaga

SEQ ID NO: 56402 - DNA, 20 bp, synthetic construct
  source 1..20: mol_type = other DNA
aacaaaacaaaacaaaaaag

SEQ ID NO: 56403 - DNA, 20 bp, synthetic construct
  source 1..20: mol_type = other DNA
aaacaaaacaaaacaaaaaa

SEQ ID NO: 56404 - DNA, 20 bp, synthetic construct
  source 1..20: mol_type = other DNA
aaaacaaaacaaaacaaaaa

SEQ ID NO: 56405 - DNA, 20 bp, synthetic construct
  source 1..20: mol_type = other DNA
aaaaacaaaacaaaacaaaa

SEQ ID NO: 56406 - DNA, 20 bp, synthetic construct
  source 1..20: mol_type = other DNA
caaaaacaaaacaaaacaaa

SEQ ID NO: 56407 - DNA, 20 bp, synthetic construct
  source 1..20: mol_type = other DNA
acaaaaacaaaacaaaacaa

SEQ ID NO: 56408 - DNA, 20 bp, synthetic construct
  source 1..20: mol_type = other DNA
aacaaaaacaaaacaaaaca

SEQ ID NO: 56409 - DNA, 20 bp, synthetic construct
  source 1..20: mol_type = other DNA
aaacaaaaacaaaacaaaac

SEQ ID NO: 56410 - DNA, 20 bp, synthetic construct
  source 1..20: mol_type = other DNA
aaaacaaaaacaaaacaaaa

SEQ ID NO: 56411 - DNA, 20 bp, synthetic construct
  source 1..20: mol_type = other DNA
aaaaacaaaaacaaaacaaa

SEQ ID NO: 56412 - DNA, 20 bp, synthetic construct
  source 1..20: mol_type = other DNA
caaaaacaaaaacaaaacaa

SEQ ID NO: 56413 - DNA, 20 bp, synthetic construct
  source 1..20: mol_type = other DNA
tcaaaaacaaaaacaaaaca

SEQ ID NO: 56414 - DNA, 20 bp, synthetic construct
  source 1..20: mol_type = other DNA
ctcaaaaacaaaaacaaaac

SEQ ID NO: 56415 - DNA, 20 bp, synthetic construct
  source 1..20: mol_type = other DNA
tctcaaaaacaaaaacaaaa

SEQ ID NO: 56416 - DNA, 20 bp, synthetic construct
  source 1..20: mol_type = other DNA
gtctcaaaaacaaaaacaaa

SEQ ID NO: 56417 - DNA, 20 bp, synthetic construct
  source 1..20: mol_type = other DNA
tgtctcaaaaacaaaaacaa

SEQ ID NO: 56418 - DNA, 20 bp, synthetic construct
  source 1..20: mol_type = other DNA
ctgtctcaaaaacaaaaaca

SEQ ID NO: 56419 - DNA, 20 bp, synthetic construct
  source 1..20: mol_type = other DNA
tctgtctcaaaaacaaaaac

SEQ ID NO: 56420 - DNA, 20 bp, synthetic construct
  source 1..20: mol_type = other DNA
ctctgtctcaaaaacaaaaa

SEQ ID NO: 56421 - DNA, 20 bp, synthetic construct
  source 1..20: mol_type = other DNA
actctgtctcaaaaacaaaa

SEQ ID NO: 56422 - DNA, 20 bp, synthetic construct
  source 1..20: mol_type = other DNA
gactctgtctcaaaaacaaa

SEQ ID NO: 56423 - DNA, 20 bp, synthetic construct
  source 1..20: mol_type = other DNA
agactctgtctcaaaaacaa

SEQ ID NO: 56424 - DNA, 20 bp, synthetic construct
  source 1..20: mol_type = other DNA
gagactctgtctcaaaaaca

SEQ ID NO: 56425 - DNA, 20 bp, synthetic construct
  source 1..20: mol_type = other DNA
cgagactctgtctcaaaaac

SEQ ID NO: 56426 - DNA, 20 bp, synthetic construct
  source 1..20: mol_type = other DNA
gcgagactctgtctcaaaaa

SEQ ID NO: 56427 - DNA, 20 bp, synthetic construct
  source 1..20: mol_type = other DNA
agcgagactctgtctcaaaa

SEQ ID NO: 56428 - DNA, 20 bp, synthetic construct
  source 1..20: mol_type = other DNA
gagcgagactctgtctcaaa

SEQ ID NO: 56429 - DNA, 20 bp, synthetic construct
  source 1..20: mol_type = other DNA
agagcgagactctgtctcaa

SEQ ID NO: 56430 - DNA, 20 bp, synthetic construct
  source 1..20: mol_type = other DNA
aagagcgagactctgtctca

SEQ ID NO: 56431 - DNA, 20 bp, synthetic construct
  source 1..20: mol_type = other DNA
caagagcgagactctgtctc

SEQ ID NO: 56432 - DNA, 20 bp, synthetic construct
  source 1..20: mol_type = other DNA
gcaagagcgagactctgtct

SEQ ID NO: 56433 - DNA, 20 bp, synthetic construct
  source 1..20: mol_type = other DNA
ggcaagagcgagactctgtc

SEQ ID NO: 56434 - DNA, 20 bp, synthetic construct
  source 1..20: mol_type = other DNA
gggcaagagcgagactctgt

SEQ ID NO: 56435 - DNA, 20 bp, synthetic construct
  source 1..20: mol_type = other DNA
tgggcaagagcgagactctg

SEQ ID NO: 56436 - DNA, 20 bp, synthetic construct
  source 1..20: mol_type = other DNA
ctgggcaagagcgagactct

SEQ ID NO: 56437 - DNA, 20 bp, synthetic construct
  source 1..20: mol_type = other DNA
cctgggcaagagcgagactc

SEQ ID NO: 56438 - DNA, 20 bp, synthetic construct
  source 1..20: mol_type = other DNA
gcctgggcaagagcgagact

SEQ ID NO: 56439 - DNA, 20 bp, synthetic construct
  source 1..20: mol_type = other DNA
agcctgggcaagagcgagac

SEQ ID NO: 56440 - DNA, 20 bp, synthetic construct
  source 1..20: mol_type = other DNA
cagcctgggcaagagcgaga

SEQ ID NO: 56441 - DNA, 20 bp, synthetic construct
  source 1..20: mol_type = other DNA
ccagcctgggcaagagcgag

SEQ ID NO: 56442 - DNA, 20 bp, synthetic construct
  source 1..20: mol_type = other DNA
tccagcctgggcaagagcga

SEQ ID NO: 56443 - DNA, 20 bp, synthetic construct
  source 1..20: mol_type = other DNA
ctccagcctgggcaagagcg

SEQ ID NO: 56444 - DNA, 20 bp, synthetic construct
  source 1..20: mol_type = other DNA
actccagcctgggcaagagc

SEQ ID NO: 56445 - DNA, 20 bp, synthetic construct
  source 1..20: mol_type = other DNA
cactccagcctgggcaagag

SEQ ID NO: 56446 - DNA, 20 bp, synthetic construct
  source 1..20: mol_type = other DNA
gcactccagcctgggcaaga

SEQ ID NO: 56447 - DNA, 20 bp, synthetic construct
  source 1..20: mol_type = other DNA
tgcactccagcctgggcaag

SEQ ID NO: 56448 - DNA, 20 bp, synthetic construct
  source 1..20: mol_type = other DNA
ctgcactccagcctgggcaa

SEQ ID NO: 56449 - DNA, 20 bp, synthetic construct
  source 1..20: mol_type = other DNA
actgcactccagcctgggca

SEQ ID NO: 56450 - DNA, 20 bp, synthetic construct
  source 1..20: mol_type = other DNA
cactgcactccagcctgggc

SEQ ID NO: 56451 - DNA, 20 bp, synthetic construct
  source 1..20: mol_type = other DNA
ccactgcactccagcctggg

SEQ ID NO: 56452 - DNA, 20 bp, synthetic construct
  source 1..20: mol_type = other DNA
gccactgcactccagcctgg

SEQ ID NO: 56453 - DNA, 20 bp, synthetic construct
  source 1..20: mol_type = other DNA
tgccactgcactccagcctg

SEQ ID NO: 56454 - DNA, 20 bp, synthetic construct
  source 1..20: mol_type = other DNA
gtgccactgcactccagcct

SEQ ID NO: 56455 - DNA, 20 bp, synthetic construct
  source 1..20: mol_type = other DNA
agtgccactgcactccagcc

SEQ ID NO: 56456 - DNA, 20 bp, synthetic construct
  source 1..20: mol_type = other DNA
tagtgccactgcactccagc

SEQ ID NO: 56457 - DNA, 20 bp, synthetic construct
  source 1..20: mol_type = other DNA
atagtgccactgcactccag

SEQ ID NO: 56458 - DNA, 20 bp, synthetic construct
  source 1..20: mol_type = other DNA
gatagtgccactgcactcca

SEQ ID NO: 56459 - DNA, 20 bp, synthetic construct
  source 1..20: mol_type = other DNA
agatagtgccactgcactcc

SEQ ID NO: 56460 - DNA, 20 bp, synthetic construct
  source 1..20: mol_type = other DNA
aagatagtgccactgcactc

SEQ ID NO: 56461 - DNA, 20 bp, synthetic construct
  source 1..20: mol_type = other DNA
caagatagtgccactgcact

SEQ ID NO: 56462 - DNA, 20 bp, synthetic construct
  source 1..20: mol_type = other DNA
ccaagatagtgccactgcac

SEQ ID NO: 56463 - DNA, 20 bp, synthetic construct
  source 1..20: mol_type = other DNA
gccaagatagtgccactgca

SEQ ID NO: 56464 - DNA, 20 bp, synthetic construct
  source 1..20: mol_type = other DNA
agccaagatagtgccactgc

SEQ ID NO: 56465 - DNA, 20 bp, synthetic construct
  source 1..20: mol_type = other DNA
gagccaagatagtgccactg

SEQ ID NO: 56466 - DNA, 20 bp, synthetic construct
  source 1..20: mol_type = other DNA
tgagccaagatagtgccact

SEQ ID NO: 56467 - DNA, 20 bp, synthetic construct
  source 1..20: mol_type = other DNA
gtgagccaagatagtgccac

SEQ ID NO: 56468 - DNA, 20 bp, synthetic construct
  source 1..20: mol_type = other DNA
agtgagccaagatagtgcca

SEQ ID NO: 56469 - DNA, 20 bp, synthetic construct
  source 1..20: mol_type = other DNA
cagtgagccaagatagtgcc

SEQ ID NO: 56470 - DNA, 20 bp, synthetic construct
  source 1..20: mol_type = other DNA
gcagtgagccaagatagtgc

SEQ ID NO: 56471 - DNA, 20 bp, synthetic construct
  source 1..20: mol_type = other DNA
tgcagtgagccaagatagtg

SEQ ID NO: 56472 - DNA, 20 bp, synthetic construct
  source 1..20: mol_type = other DNA
ttgcagtgagccaagatagt

SEQ ID NO: 56473 - DNA, 20 bp, synthetic construct
  source 1..20: mol_type = other DNA
cttgcagtgagccaagatag

SEQ ID NO: 56474 - DNA, 20 bp, synthetic construct
  source 1..20: mol_type = other DNA
gcttgcagtgagccaagata

SEQ ID NO: 56475 - DNA, 20 bp, synthetic construct
  source 1..20: mol_type = other DNA
agcttgcagtgagccaagat

SEQ ID NO: 56476 - DNA, 20 bp, synthetic construct
  source 1..20: mol_type = other DNA
gagcttgcagtgagccaaga

SEQ ID NO: 56477 - DNA, 20 bp, synthetic construct
  source 1..20: mol_type = other DNA
ggagcttgcagtgagccaag

SEQ ID NO: 56478 - DNA, 20 bp, synthetic construct
  source 1..20: mol_type = other DNA
cggagcttgcagtgagccaa

SEQ ID NO: 56479 - DNA, 20 bp, synthetic construct
  source 1..20: mol_type = other DNA
gcggagcttgcagtgagcca

SEQ ID NO: 56480 - DNA, 20 bp, synthetic construct
  source 1..20: mol_type = other DNA
ggcggagcttgcagtgagcc

SEQ ID NO: 56481 - DNA, 20 bp, synthetic construct
  source 1..20: mol_type = other DNA
aggcggagcttgcagtgagc

SEQ ID NO: 56482 - DNA, 20 bp, synthetic construct
  source 1..20: mol_type = other DNA
gaggcggagcttgcagtgag

SEQ ID NO: 56483 - DNA, 20 bp, synthetic construct
  source 1..20: mol_type = other DNA
ggaggcggagcttgcagtga

SEQ ID NO: 56484 - DNA, 20 bp, synthetic construct
  source 1..20: mol_type = other DNA
gggaggcggagcttgcagtg

SEQ ID NO: 56485 - DNA, 20 bp, synthetic construct
  source 1..20: mol_type = other DNA
cgggaggcggagcttgcagt

SEQ ID NO: 56486 - DNA, 20 bp, synthetic construct
  source 1..20: mol_type = other DNA
ccgggaggcggagcttgcag

SEQ ID NO: 56487 - DNA, 20 bp, synthetic construct
  source 1..20: mol_type = other DNA
cccgggaggcggagcttgca

SEQ ID NO: 56488 - DNA, 20 bp, synthetic construct
  source 1..20: mol_type = other DNA
acccgggaggcggagcttgc

SEQ ID NO: 56489 - DNA, 20 bp, synthetic construct
  source 1..20: mol_type = other DNA
aacccgggaggcggagcttg

SEQ ID NO: 56490 - DNA, 20 bp, synthetic construct
  source 1..20: mol_type = other DNA
gaacccgggaggcggagctt

SEQ ID NO: 56491 - DNA, 20 bp, synthetic construct
  source 1..20: mol_type = other DNA
tgaacccgggaggcggagct

SEQ ID NO: 56492 - DNA, 20 bp, synthetic construct
  source 1..20: mol_type = other DNA
gtgaacccgggaggcggagc

SEQ ID NO: 56493 - DNA, 20 bp, synthetic construct
  source 1..20: mol_type = other DNA
cgtgaacccgggaggcggag

SEQ ID NO: 56494 - DNA, 20 bp, synthetic construct
  source 1..20: mol_type = other DNA
gcgtgaacccgggaggcgga

SEQ ID NO: 56495 - DNA, 20 bp, synthetic construct
  source 1..20: mol_type = other DNA
ggcgtgaacccgggaggcgg

SEQ ID NO: 56496 - DNA, 20 bp, synthetic construct
  source 1..20: mol_type = other DNA
tggcgtgaacccgggaggcg

SEQ ID NO: 56497 - DNA, 20 bp, synthetic construct
  source 1..20: mol_type = other DNA
atggcgtgaacccgggaggc

SEQ ID NO: 56498 - DNA, 20 bp, synthetic construct
  source 1..20: mol_type = other DNA
aatggcgtgaacccgggagg

SEQ ID NO: 56499 - DNA, 20 bp, synthetic construct
  source 1..20: mol_type = other DNA
gaatggcgtgaacccgggag

SEQ ID NO: 56500 - DNA, 20 bp, synthetic construct
  source 1..20: mol_type = other DNA
agaatggcgtgaacccggga

SEQ ID NO: 56501 - DNA, 20 bp, synthetic construct
  source 1..20: mol_type = other DNA
gagaatggcgtgaacccggg

SEQ ID NO: 56502 - DNA, 20 bp, synthetic construct
  source 1..20: mol_type = other DNA
ggagaatggcgtgaacccgg

SEQ ID NO: 56503 - DNA, 20 bp, synthetic construct
  source 1..20: mol_type = other DNA
aggagaatggcgtgaacccg

SEQ ID NO: 56504 - DNA, 20 bp, synthetic construct
  source 1..20: mol_type = other DNA
caggagaatggcgtgaaccc

SEQ ID NO: 56505 - DNA, 20 bp, synthetic construct
  source 1..20: mol_type = other DNA
gcaggagaatggcgtgaacc

SEQ ID NO: 56506 - DNA, 20 bp, synthetic construct
  source 1..20: mol_type = other DNA
ggcaggagaatggcgtgaac

SEQ ID NO: 56507 - DNA, 20 bp, synthetic construct
  source 1..20: mol_type = other DNA
aggcaggagaatggcgtgaa

SEQ ID NO: 56508 - DNA, 20 bp, synthetic construct
  source 1..20: mol_type = other DNA
gaggcaggagaatggcgtga

SEQ ID NO: 56509 - DNA, 20 bp, synthetic construct
  source 1..20: mol_type = other DNA
tgaggcaggagaatggcgtg

SEQ ID NO: 56510 - DNA, 20 bp, synthetic construct
  source 1..20: mol_type = other DNA
ctgaggcaggagaatggcgt

SEQ ID NO: 56511 - DNA, 20 bp, synthetic construct
  source 1..20: mol_type = other DNA
gctgaggcaggagaatggcg

SEQ ID NO: 56512 - DNA, 20 bp, synthetic construct
  source 1..20: mol_type = other DNA
ggctgaggcaggagaatggc

SEQ ID NO: 56513 - DNA, 20 bp, synthetic construct
  source 1..20: mol_type = other DNA
aggctgaggcaggagaatgg

SEQ ID NO: 56514 - DNA, 20 bp, synthetic construct
  source 1..20: mol_type = other DNA
gaggctgaggcaggagaatg

SEQ ID NO: 56515 - DNA, 20 bp, synthetic construct
  source 1..20: mol_type = other DNA
ggaggctgaggcaggagaat

SEQ ID NO: 56516 - DNA, 20 bp, synthetic construct
  source 1..20: mol_type = other DNA
gggaggctgaggcaggagaa

SEQ ID NO: 56517 - DNA, 20 bp, synthetic construct
  source 1..20: mol_type = other DNA
cgggaggctgaggcaggaga

SEQ ID NO: 56518 - DNA, 20 bp, synthetic construct
  source 1..20: mol_type = other DNA
tcgggaggctgaggcaggag

SEQ ID NO: 56519 - DNA, 20 bp, synthetic construct
  source 1..20: mol_type = other DNA
ctcgggaggctgaggcagga

SEQ ID NO: 56520 - DNA, 20 bp, synthetic construct
  source 1..20: mol_type = other DNA
actcgggaggctgaggcagg

SEQ ID NO: 56521 - DNA, 20 bp, synthetic construct
  source 1..20: mol_type = other DNA
tactcgggaggctgaggcag

SEQ ID NO: 56522 - DNA, 20 bp, synthetic construct
  source 1..20: mol_type = other DNA
ctactcgggaggctgaggca

SEQ ID NO: 56523 - DNA, 20 bp, synthetic construct
  source 1..20: mol_type = other DNA
gctactcgggaggctgaggc

SEQ ID NO: 56524 - DNA, 20 bp, synthetic construct
  source 1..20: mol_type = other DNA
agctactcgggaggctgagg

SEQ ID NO: 56525 - DNA, 20 bp, synthetic construct
  source 1..20: mol_type = other DNA
cagctactcgggaggctgag

SEQ ID NO: 56526 - DNA, 20 bp, synthetic construct
  source 1..20: mol_type = other DNA
ccagctactcgggaggctga

SEQ ID NO: 56527 - DNA, 20 bp, synthetic construct
  source 1..20: mol_type = other DNA
cccagctactcgggaggctg

SEQ ID NO: 56528 - DNA, 20 bp, synthetic construct
  source 1..20: mol_type = other DNA
tcccagctactcgggaggct

SEQ ID NO: 56529 - DNA, 20 bp, synthetic construct
  source 1..20: mol_type = other DNA
gtcccagctactcgggaggc

SEQ ID NO: 56530 - DNA, 20 bp, synthetic construct
  source 1..20: mol_type = other DNA
agtcccagctactcgggagg

SEQ ID NO: 56531 - DNA, 20 bp, synthetic construct
  source 1..20: mol_type = other DNA
tagtcccagctactcgggag

SEQ ID NO: 56532 - DNA, 20 bp, synthetic construct
  source 1..20: mol_type = other DNA
gtagtcccagctactcggga

SEQ ID NO: 56533 - DNA, 20 bp, synthetic construct
  source 1..20: mol_type = other DNA
tgtagtcccagctactcggg

SEQ ID NO: 56534 - DNA, 20 bp, synthetic construct
  source 1..20: mol_type = other DNA
ctgtagtcccagctactcgg

SEQ ID NO: 56535 - DNA, 20 bp, synthetic construct
  source 1..20: mol_type = other DNA
cctgtagtcccagctactcg

SEQ ID NO: 56536 - DNA, 20 bp, synthetic construct
  source 1..20: mol_type = other DNA
gcctgtagtcccagctactc

SEQ ID NO: 56537 - DNA, 20 bp, synthetic construct
  source 1..20: mol_type = other DNA
tgcctgtagtcccagctact

SEQ ID NO: 56538 - DNA, 20 bp, synthetic construct
  source 1..20: mol_type = other DNA
gtgcctgtagtcccagctac

SEQ ID NO: 56539 - DNA, 20 bp, synthetic construct
  source 1..20: mol_type = other DNA
ggtgcctgtagtcccagcta

SEQ ID NO: 56540 - DNA, 20 bp, synthetic construct
  source 1..20: mol_type = other DNA
aggtgcctgtagtcccagct

SEQ ID NO: 56541 - DNA, 20 bp, synthetic construct
  source 1..20: mol_type = other DNA
caggtgcctgtagtcccagc

SEQ ID NO: 56542 - DNA, 20 bp, synthetic construct
  source 1..20: mol_type = other DNA
gcaggtgcctgtagtcccag

SEQ ID NO: 56543 - DNA, 20 bp, synthetic construct
  source 1..20: mol_type = other DNA
ggcaggtgcctgtagtccca

SEQ ID NO: 56544 - DNA, 20 bp, synthetic construct
  source 1..20: mol_type = other DNA
tggcaggtgcctgtagtccc

SEQ ID NO: 56545 - DNA, 20 bp, synthetic construct
  source 1..20: mol_type = other DNA
gtggcaggtgcctgtagtcc

SEQ ID NO: 56546 - DNA, 20 bp, synthetic construct
  source 1..20: mol_type = other DNA
ggtggcaggtgcctgtagtc

SEQ ID NO: 56547 - DNA, 20 bp, synthetic construct
  source 1..20: mol_type = other DNA
tggtggcaggtgcctgtagt

SEQ ID NO: 56548 - DNA, 20 bp, synthetic construct
  source 1..20: mol_type = other DNA
gtggtggcaggtgcctgtag

SEQ ID NO: 56549 - DNA, 20 bp, synthetic construct
  source 1..20: mol_type = other DNA
cgtggtggcaggtgcctgta

SEQ ID NO: 56550 - DNA, 20 bp, synthetic construct
  source 1..20: mol_type = other DNA
gcgtggtggcaggtgcctgt

SEQ ID NO: 56551 - DNA, 20 bp, synthetic construct
  source 1..20: mol_type = other DNA
ggcgtggtggcaggtgcctg

SEQ ID NO: 56552 - DNA, 20 bp, synthetic construct
  source 1..20: mol_type = other DNA
gggcgtggtggcaggtgcct

SEQ ID NO: 56553 - DNA, 20 bp, synthetic construct
  source 1..20: mol_type = other DNA
tgggcgtggtggcaggtgcc

SEQ ID NO: 56554 - DNA, 20 bp, synthetic construct
  source 1..20: mol_type = other DNA
ctgggcgtggtggcaggtgc

SEQ ID NO: 56555 - DNA, 20 bp, synthetic construct
  source 1..20: mol_type = other DNA
gctgggcgtggtggcaggtg

SEQ ID NO: 56556 - DNA, 20 bp, synthetic construct
  source 1..20: mol_type = other DNA
agctgggcgtggtggcaggt

SEQ ID NO: 56557 - DNA, 20 bp, synthetic construct
  source 1..20: mol_type = other DNA
tagctgggcgtggtggcagg

SEQ ID NO: 56558 - DNA, 20 bp, synthetic construct
  source 1..20: mol_type = other DNA
ttagctgggcgtggtggcag

SEQ ID NO: 56559 - DNA, 20 bp, synthetic construct
  source 1..20: mol_type = other DNA
tttagctgggcgtggtggca

SEQ ID NO: 56560 - DNA, 20 bp, synthetic construct
  source 1..20: mol_type = other DNA
atttagctgggcgtggtggc

SEQ ID NO: 56561 - DNA, 20 bp, synthetic construct
  source 1..20: mol_type = other DNA
aatttagctgggcgtggtgg

SEQ ID NO: 56562 - DNA, 20 bp, synthetic construct
  source 1..20: mol_type = other DNA
aaatttagctgggcgtggtg

SEQ ID NO: 56563 - DNA, 20 bp, synthetic construct
  source 1..20: mol_type = other DNA
aaaatttagctgggcgtggt

SEQ ID NO: 56564 - DNA, 20 bp, synthetic construct
  source 1..20: mol_type = other DNA
aaaaatttagctgggcgtgg

SEQ ID NO: 56565 - DNA, 20 bp, synthetic construct
  source 1..20: mol_type = other DNA
caaaaatttagctgggcgtg

SEQ ID NO: 56566 - DNA, 20 bp, synthetic construct
  source 1..20: mol_type = other DNA
acaaaaatttagctgggcgt

SEQ ID NO: 56567 - DNA, 20 bp, synthetic construct
  source 1..20: mol_type = other DNA
tacaaaaatttagctgggcg

SEQ ID NO: 56568 - DNA, 20 bp, synthetic construct
  source 1..20: mol_type = other DNA
atacaaaaatttagctgggc

SEQ ID NO: 56569 - DNA, 20 bp, synthetic construct
  source 1..20: mol_type = other DNA
aatacaaaaatttagctggg

SEQ ID NO: 56570 - DNA, 20 bp, synthetic construct
  source 1..20: mol_type = other DNA
aaatacaaaaatttagctgg

SEQ ID NO: 56571 - DNA, 20 bp, synthetic construct
  source 1..20: mol_type = other DNA
aaaatacaaaaatttagctg

SEQ ID NO: 56572 - DNA, 20 bp, synthetic construct
  source 1..20: mol_type = other DNA
aaaaatacaaaaatttagct

SEQ ID NO: 56573 - DNA, 20 bp, synthetic construct
  source 1..20: mol_type = other DNA
taaaaatacaaaaatttagc

SEQ ID NO: 56574 - DNA, 20 bp, synthetic construct
  source 1..20: mol_type = other DNA
ctaaaaatacaaaaatttag

SEQ ID NO: 56575 - DNA, 20 bp, synthetic construct
  source 1..20: mol_type = other DNA
actaaaaatacaaaaattta

SEQ ID NO: 56576 - DNA, 20 bp, synthetic construct
  source 1..20: mol_type = other DNA
tactaaaaatacaaaaattt

SEQ ID NO: 56577 - DNA, 20 bp, synthetic construct
  source 1..20: mol_type = other DNA
ctactaaaaatacaaaaatt

SEQ ID NO: 56578 - DNA, 20 bp, synthetic construct
  source 1..20: mol_type = other DNA
tctactaaaaatacaaaaat

SEQ ID NO: 56579 - DNA, 20 bp, synthetic construct
  source 1..20: mol_type = other DNA
ctctactaaaaatacaaaaa

SEQ ID NO: 56580 - DNA, 20 bp, synthetic construct
  source 1..20: mol_type = other DNA
tctctactaaaaatacaaaa

SEQ ID NO: 56581 - DNA, 20 bp, synthetic construct
  source 1..20: mol_type = other DNA
atctctactaaaaatacaaa

SEQ ID NO: 56582 - DNA, 20 bp, synthetic construct
  source 1..20: mol_type = other DNA
catctctactaaaaatacaa

SEQ ID NO: 56583 - DNA, 20 bp, synthetic construct
  source 1..20: mol_type = other DNA
ccatctctactaaaaataca

SEQ ID NO: 56584 - DNA, 20 bp, synthetic construct
  source 1..20: mol_type = other DNA
cccatctctactaaaaatac

SEQ ID NO: 56585 - DNA, 20 bp, synthetic construct
  source 1..20: mol_type = other DNA
ccccatctctactaaaaata

SEQ ID NO: 56586 - DNA, 20 bp, synthetic construct
  source 1..20: mol_type = other DNA
accccatctctactaaaaat

SEQ ID NO: 56587 - DNA, 20 bp, synthetic construct
  source 1..20: mol_type = other DNA
aaccccatctctactaaaaa

SEQ ID NO: 56588 - DNA, 20 bp, synthetic construct
  source 1..20: mol_type = other DNA
aaaccccatctctactaaaa

SEQ ID NO: 56589 - DNA, 20 bp, synthetic construct
  source 1..20: mol_type = other DNA
gaaaccccatctctactaaa

SEQ ID NO: 56590 - DNA, 20 bp, synthetic construct
  source 1..20: mol_type = other DNA
tgaaaccccatctctactaa

SEQ ID NO: 56591 - DNA, 20 bp, synthetic construct
  source 1..20: mol_type = other DNA
gtgaaaccccatctctacta

SEQ ID NO: 56592 - DNA, 20 bp, synthetic construct
  source 1..20: mol_type = other DNA
ggtgaaaccccatctctact

SEQ ID NO: 56593 - DNA, 20 bp, synthetic construct
  source 1..20: mol_type = other DNA
cggtgaaaccccatctctac

SEQ ID NO: 56594 - DNA, 20 bp, synthetic construct
  source 1..20: mol_type = other DNA
acggtgaaaccccatctcta

SEQ ID NO: 56595 - DNA, 20 bp, synthetic construct
  source 1..20: mol_type = other DNA
cacggtgaaaccccatctct

SEQ ID NO: 56596 - DNA, 20 bp, synthetic construct
  source 1..20: mol_type = other DNA
acacggtgaaaccccatctc

SEQ ID NO: 56597 - DNA, 20 bp, synthetic construct
  source 1..20: mol_type = other DNA
aacacggtgaaaccccatct

SEQ ID NO: 56598 - DNA, 20 bp, synthetic construct
  source 1..20: mol_type = other DNA
taacacggtgaaaccccatc

SEQ ID NO: 56599 - DNA, 20 bp, synthetic construct
  source 1..20: mol_type = other DNA
ctaacacggtgaaaccccat

SEQ ID NO: 56600 - DNA, 20 bp, synthetic construct
  source 1..20: mol_type = other DNA
gctaacacggtgaaacccca

SEQ ID NO: 56601 - DNA, 20 bp, synthetic construct
  source 1..20: mol_type = other DNA
agctaacacggtgaaacccc

SEQ ID NO: 56602 - DNA, 20 bp, synthetic construct
  source 1..20: mol_type = other DNA
tagctaacacggtgaaaccc

SEQ ID NO: 56603 - DNA, 20 bp, synthetic construct
  source 1..20: mol_type = other DNA
ctagctaacacggtgaaacc

SEQ ID NO: 56604 - DNA, 20 bp, synthetic construct
  source 1..20: mol_type = other DNA
cctagctaacacggtgaaac

SEQ ID NO: 56605 - DNA, 20 bp, synthetic construct
  source 1..20: mol_type = other DNA
tcctagctaacacggtgaaa

SEQ ID NO: 56606 - DNA, 20 bp, synthetic construct
  source 1..20: mol_type = other DNA
atcctagctaacacggtgaa

SEQ ID NO: 56607 - DNA, 20 bp, synthetic construct
  source 1..20: mol_type = other DNA
catcctagctaacacggtga

SEQ ID NO: 56608 - DNA, 20 bp, synthetic construct
  source 1..20: mol_type = other DNA
ccatcctagctaacacggtg

SEQ ID NO: 56609 - DNA, 20 bp, synthetic construct
  source 1..20: mol_type = other DNA
accatcctagctaacacggt

SEQ ID NO: 56610 - DNA, 20 bp, synthetic construct
  source 1..20: mol_type = other DNA
gaccatcctagctaacacgg

SEQ ID NO: 56611 - DNA, 20 bp, synthetic construct
  source 1..20: mol_type = other DNA
agaccatcctagctaacacg

SEQ ID NO: 56612 - DNA, 20 bp, synthetic construct
  source 1..20: mol_type = other DNA
gagaccatcctagctaacac

SEQ ID NO: 56613 - DNA, 20 bp, synthetic construct
  source 1..20: mol_type = other DNA
cgagaccatcctagctaaca

SEQ ID NO: 56614 - DNA, 20 bp, synthetic construct
  source 1..20: mol_type = other DNA
tcgagaccatcctagctaac

SEQ ID NO: 56615 - DNA, 20 bp, synthetic construct
  source 1..20: mol_type = other DNA
atcgagaccatcctagctaa

SEQ ID NO: 56616 - DNA, 20 bp, synthetic construct
  source 1..20: mol_type = other DNA
gatcgagaccatcctagcta

SEQ ID NO: 56617 - DNA, 20 bp, synthetic construct
  source 1..20: mol_type = other DNA
agatcgagaccatcctagct

SEQ ID NO: 56618 - DNA, 20 bp, synthetic construct
  source 1..20: mol_type = other DNA
gagatcgagaccatcctagc

SEQ ID NO: 56619 - DNA, 20 bp, synthetic construct
  source 1..20: mol_type = other DNA
ggagatcgagaccatcctag

SEQ ID NO: 56620 - DNA, 20 bp, synthetic construct
  source 1..20: mol_type = other DNA
aggagatcgagaccatccta

SEQ ID NO: 56621 - DNA, 20 bp, synthetic construct
  source 1..20: mol_type = other DNA
caggagatcgagaccatcct

SEQ ID NO: 56622 - DNA, 20 bp, synthetic construct
  source 1..20: mol_type = other DNA
tcaggagatcgagaccatcc

SEQ ID NO: 56623 - DNA, 20 bp, synthetic construct
  source 1..20: mol_type = other DNA
gtcaggagatcgagaccatc

SEQ ID NO: 56624 - DNA, 20 bp, synthetic construct
  source 1..20: mol_type = other DNA
ggtcaggagatcgagaccat

SEQ ID NO: 56625 - DNA, 20 bp, synthetic construct
  source 1..20: mol_type = other DNA
aggtcaggagatcgagacca

SEQ ID NO: 56626 - DNA, 20 bp, synthetic construct
  source 1..20: mol_type = other DNA
aaggtcaggagatcgagacc

SEQ ID NO: 56627 - DNA, 20 bp, synthetic construct
  source 1..20: mol_type = other DNA
caaggtcaggagatcgagac

SEQ ID NO: 56628 - DNA, 20 bp, synthetic construct
  source 1..20: mol_type = other DNA
acaaggtcaggagatcgaga

SEQ ID NO: 56629 - DNA, 20 bp, synthetic construct
  source 1..20: mol_type = other DNA
cacaaggtcaggagatcgag

SEQ ID NO: 56630 - DNA, 20 bp, synthetic construct
  source 1..20: mol_type = other DNA
tcacaaggtcaggagatcga

SEQ ID NO: 56631 - DNA, 20 bp, synthetic construct
  source 1..20: mol_type = other DNA
atcacaaggtcaggagatcg

SEQ ID NO: 56632 - DNA, 20 bp, synthetic construct
  source 1..20: mol_type = other DNA
gatcacaaggtcaggagatc

SEQ ID NO: 56633 - DNA, 20 bp, synthetic construct
  source 1..20: mol_type = other DNA
ggatcacaaggtcaggagat

SEQ ID NO: 56634 - DNA, 20 bp, synthetic construct
  source 1..20: mol_type = other DNA
tggatcacaaggtcaggaga

SEQ ID NO: 56635 - DNA, 20 bp, synthetic construct
  source 1..20: mol_type = other DNA
atggatcacaaggtcaggag

SEQ ID NO: 56636 - DNA, 20 bp, synthetic construct
  source 1..20: mol_type = other DNA
gatggatcacaaggtcagga

SEQ ID NO: 56637 - DNA, 20 bp, synthetic construct
  source 1..20: mol_type = other DNA
agatggatcacaaggtcagg

SEQ ID NO: 56638 - DNA, 20 bp, synthetic construct
  source 1..20: mol_type = other DNA
cagatggatcacaaggtcag

SEQ ID NO: 56639 - DNA, 20 bp, synthetic construct
  source 1..20: mol_type = other DNA
gcagatggatcacaaggtca

SEQ ID NO: 56640 - DNA, 20 bp, synthetic construct
  source 1..20: mol_type = other DNA
ggcagatggatcacaaggtc

SEQ ID NO: 56641 - DNA, 20 bp, synthetic construct
  source 1..20: mol_type = other DNA
aggcagatggatcacaaggt

SEQ ID NO: 56642 - DNA, 20 bp, synthetic construct
  source 1..20: mol_type = other DNA
gaggcagatggatcacaagg

SEQ ID NO: 56643 - DNA, 20 bp, synthetic construct
  source 1..20: mol_type = other DNA
cgaggcagatggatcacaag

SEQ ID NO: 56644 - DNA, 20 bp, synthetic construct
  source 1..20: mol_type = other DNA
ccgaggcagatggatcacaa

SEQ ID NO: 56645 - DNA, 20 bp, synthetic construct
  source 1..20: mol_type = other DNA
gccgaggcagatggatcaca

SEQ ID NO: 56646 - DNA, 20 bp, synthetic construct
  source 1..20: mol_type = other DNA
ggccgaggcagatggatcac

SEQ ID NO: 56647 - DNA, 20 bp, synthetic construct
  source 1..20: mol_type = other DNA
aggccgaggcagatggatca

SEQ ID NO: 56648 - DNA, 20 bp, synthetic construct
  source 1..20: mol_type = other DNA
gaggccgaggcagatggatc

SEQ ID NO: 56649 - DNA, 20 bp, synthetic construct
  source 1..20: mol_type = other DNA
ggaggccgaggcagatggat

SEQ ID NO: 56650 - DNA, 20 bp, synthetic construct
  source 1..20: mol_type = other DNA
gggaggccgaggcagatgga

SEQ ID NO: 56651 - DNA, 20 bp, synthetic construct
  source 1..20: mol_type = other DNA
tgggaggccgaggcagatgg

SEQ ID NO: 56652 - DNA, 20 bp, synthetic construct
  source 1..20: mol_type = other DNA
ttgggaggccgaggcagatg

SEQ ID NO: 56653 - DNA, 20 bp, synthetic construct
  source 1..20: mol_type = other DNA
tttgggaggccgaggcagat

SEQ ID NO: 56654 - DNA, 20 bp, synthetic construct
  source 1..20: mol_type = other DNA
ctttgggaggccgaggcaga

SEQ ID NO: 56655 - DNA, 20 bp, synthetic construct
  source 1..20: mol_type = other DNA
actttgggaggccgaggcag

SEQ ID NO: 56656 - DNA, 20 bp, synthetic construct
  source 1..20: mol_type = other DNA
cactttgggaggccgaggca

SEQ ID NO: 56657 - DNA, 20 bp, synthetic construct
  source 1..20: mol_type = other DNA
gcactttgggaggccgaggc

SEQ ID NO: 56658 - DNA, 20 bp, synthetic construct
  source 1..20: mol_type = other DNA
agcactttgggaggccgagg

SEQ ID NO: 56659 - DNA, 20 bp, synthetic construct
  source 1..20: mol_type = other DNA
cagcactttgggaggccgag

SEQ ID NO: 56660 - DNA, 20 bp, synthetic construct
  source 1..20: mol_type = other DNA
ccagcactttgggaggccga

SEQ ID NO: 56661 - DNA, 20 bp, synthetic construct
  source 1..20: mol_type = other DNA
cccagcactttgggaggccg

SEQ ID NO: 56662 - DNA, 20 bp, synthetic construct
  source 1..20: mol_type = other DNA
tcccagcactttgggaggcc

SEQ ID NO: 56663 - DNA, 20 bp, synthetic construct
  source 1..20: mol_type = other DNA
atcccagcactttgggaggc

SEQ ID NO: 56664 - DNA, 20 bp, synthetic construct
  source 1..20: mol_type = other DNA
aatcccagcactttgggagg

SEQ ID NO: 56665 - DNA, 20 bp, synthetic construct
  source 1..20: mol_type = other DNA
taatcccagcactttgggag

SEQ ID NO: 56666 - DNA, 20 bp, synthetic construct
  source 1..20: mol_type = other DNA
gtaatcccagcactttggga

SEQ ID NO: 56667 - DNA, 20 bp, synthetic construct
  source 1..20: mol_type = other DNA
tgtaatcccagcactttggg

SEQ ID NO: 56668 - DNA, 20 bp, synthetic construct
  source 1..20: mol_type = other DNA
ctgtaatcccagcactttgg

SEQ ID NO: 56669 - DNA, 20 bp, synthetic construct
  source 1..20: mol_type = other DNA
cctgtaatcccagcactttg

SEQ ID NO: 56670 - DNA, 20 bp, synthetic construct
  source 1..20: mol_type = other DNA
gcctgtaatcccagcacttt

SEQ ID NO: 56671 - DNA, 20 bp, synthetic construct
  source 1..20: mol_type = other DNA
tgcctgtaatcccagcactt

SEQ ID NO: 56672 - DNA, 20 bp, synthetic construct
  source 1..20: mol_type = other DNA
atgcctgtaatcccagcact

SEQ ID NO: 56673 - DNA, 20 bp, synthetic construct
  source 1..20: mol_type = other DNA
catgcctgtaatcccagcac

SEQ ID NO: 56674 - DNA, 20 bp, synthetic construct
  source 1..20: mol_type = other DNA
tcatgcctgtaatcccagca

SEQ ID NO: 56675 - DNA, 20 bp, synthetic construct
  source 1..20: mol_type = other DNA
ctcatgcctgtaatcccagc

SEQ ID NO: 56676 - DNA, 20 bp, synthetic construct
  source 1..20: mol_type = other DNA
gctcatgcctgtaatcccag

SEQ ID NO: 56677 - DNA, 20 bp, synthetic construct
  source 1..20: mol_type = other DNA
ggctcatgcctgtaatccca

SEQ ID NO: 56678 - DNA, 20 bp, synthetic construct
  source 1..20: mol_type = other DNA
tggctcatgcctgtaatccc

SEQ ID NO: 56679 - DNA, 20 bp, synthetic construct
  source 1..20: mol_type = other DNA
gtggctcatgcctgtaatcc

SEQ ID NO: 56680 - DNA, 20 bp, synthetic construct
  source 1..20: mol_type = other DNA
ggtggctcatgcctgtaatc

SEQ ID NO: 56681 - DNA, 20 bp, synthetic construct
  source 1..20: mol_type = other DNA
cggtggctcatgcctgtaat

SEQ ID NO: 56682 - DNA, 20 bp, synthetic construct
  source 1..20: mol_type = other DNA
gcggtggctcatgcctgtaa

SEQ ID NO: 56683 - DNA, 20 bp, synthetic construct
  source 1..20: mol_type = other DNA
tgcggtggctcatgcctgta

SEQ ID NO: 56684 - DNA, 20 bp, synthetic construct
  source 1..20: mol_type = other DNA
gtgcggtggctcatgcctgt

SEQ ID NO: 56685 - DNA, 20 bp, synthetic construct
  source 1..20: mol_type = other DNA
agtgcggtggctcatgcctg

SEQ ID NO: 56686 - DNA, 20 bp, synthetic construct
  source 1..20: mol_type = other DNA
cagtgcggtggctcatgcct

SEQ ID NO: 56687 - DNA, 20 bp, synthetic construct
  source 1..20: mol_type = other DNA
ccagtgcggtggctcatgcc

SEQ ID NO: 56688 - DNA, 20 bp, synthetic construct
  source 1..20: mol_type = other DNA
cccagtgcggtggctcatgc

SEQ ID NO: 56689 - DNA, 20 bp, synthetic construct
  source 1..20: mol_type = other DNA
gcccagtgcggtggctcatg

SEQ ID NO: 56690 - DNA, 20 bp, synthetic construct
  source 1..20: mol_type = other DNA
ggcccagtgcggtggctcat

SEQ ID NO: 56691 - DNA, 20 bp, synthetic construct
  source 1..20: mol_type = other DNA
gggcccagtgcggtggctca

SEQ ID NO: 56692 - DNA, 20 bp, synthetic construct
  source 1..20: mol_type = other DNA
tgggcccagtgcggtggctc

SEQ ID NO: 56693 - DNA, 20 bp, synthetic construct
  source 1..20: mol_type = other DNA
ttgggcccagtgcggtggct

SEQ ID NO: 56694 - DNA, 20 bp, synthetic construct
  source 1..20: mol_type = other DNA
tttgggcccagtgcggtggc

SEQ ID NO: 56695 - DNA, 20 bp, synthetic construct
  source 1..20: mol_type = other DNA
ttttgggcccagtgcggtgg

SEQ ID NO: 56696 - DNA, 20 bp, synthetic construct
  source 1..20: mol_type = other DNA
cttttgggcccagtgcggtg

SEQ ID NO: 56697 - DNA, 20 bp, synthetic construct
  source 1..20: mol_type = other DNA
ccttttgggcccagtgcggt

SEQ ID NO: 56698 - DNA, 20 bp, synthetic construct
  source 1..20: mol_type = other DNA
tccttttgggcccagtgcgg

SEQ ID NO: 56699 - DNA, 20 bp, synthetic construct
  source 1..20: mol_type = other DNA
atccttttgggcccagtgcg

SEQ ID NO: 56700 - DNA, 20 bp, synthetic construct
  source 1..20: mol_type = other DNA
aatccttttgggcccagtgc

SEQ ID NO: 56701 - DNA, 20 bp, synthetic construct
  source 1..20: mol_type = other DNA
gaatccttttgggcccagtg

SEQ ID NO: 56702 - DNA, 20 bp, synthetic construct
  source 1..20: mol_type = other DNA
agaatccttttgggcccagt

SEQ ID NO: 56703 - DNA, 20 bp, synthetic construct
  source 1..20: mol_type = other DNA
aagaatccttttgggcccag

SEQ ID NO: 56704 - DNA, 20 bp, synthetic construct
  source 1..20: mol_type = other DNA
aaagaatccttttgggccca

SEQ ID NO: 56705 - DNA, 20 bp, synthetic construct
  source 1..20: mol_type = other DNA
aaaagaatccttttgggccc

SEQ ID NO: 56706 - DNA, 20 bp, synthetic construct
  source 1..20: mol_type = other DNA
aaaaagaatccttttgggcc

SEQ ID NO: 56707 - DNA, 20 bp, synthetic construct
  source 1..20: mol_type = other DNA
taaaaagaatccttttgggc

SEQ ID NO: 56708 - DNA, 20 bp, synthetic construct
  source 1..20: mol_type = other DNA
ttaaaaagaatccttttggg

SEQ ID NO: 56709 - DNA, 20 bp, synthetic construct
  source 1..20: mol_type = other DNA
attaaaaagaatccttttgg

SEQ ID NO: 56710 - DNA, 20 bp, synthetic construct
  source 1..20: mol_type = other DNA
gattaaaaagaatccttttg

SEQ ID NO: 56711 - DNA, 20 bp, synthetic construct
  source 1..20: mol_type = other DNA
ggattaaaaagaatcctttt

SEQ ID NO: 56712 - DNA, 20 bp, synthetic construct
  source 1..20: mol_type = other DNA
aggattaaaaagaatccttt

SEQ ID NO: 56713 - DNA, 20 bp, synthetic construct
  source 1..20: mol_type = other DNA
caggattaaaaagaatcctt

SEQ ID NO: 56714 - DNA, 20 bp, synthetic construct
  source 1..20: mol_type = other DNA
tcaggattaaaaagaatcct

SEQ ID NO: 56715 - DNA, 20 bp, synthetic construct
  source 1..20: mol_type = other DNA
ttcaggattaaaaagaatcc

SEQ ID NO: 56716 - DNA, 20 bp, synthetic construct
  source 1..20: mol_type = other DNA
attcaggattaaaaagaatc

SEQ ID NO: 56717 - DNA, 20 bp, synthetic construct
  source 1..20: mol_type = other DNA
aattcaggattaaaaagaat

SEQ ID NO: 56718 - DNA, 20 bp, synthetic construct
  source 1..20: mol_type = other DNA
gaattcaggattaaaaagaa

SEQ ID NO: 56719 - DNA, 20 bp, synthetic construct
  source 1..20: mol_type = other DNA
agaattcaggattaaaaaga

SEQ ID NO: 56720 - DNA, 20 bp, synthetic construct
  source 1..20: mol_type = other DNA
aagaattcaggattaaaaag

SEQ ID NO: 56721 - DNA, 20 bp, synthetic construct
  source 1..20: mol_type = other DNA
gaagaattcaggattaaaaa

SEQ ID NO: 56722 - DNA, 20 bp, synthetic construct
  source 1..20: mol_type = other DNA
agaagaattcaggattaaaa

SEQ ID NO: 56723 - DNA, 20 bp, synthetic construct
  source 1..20: mol_type = other DNA
tagaagaattcaggattaaa

SEQ ID NO: 56724 - DNA, 20 bp, synthetic construct
  source 1..20: mol_type = other DNA
ctagaagaattcaggattaa

SEQ ID NO: 56725 - DNA, 20 bp, synthetic construct
  source 1..20: mol_type = other DNA
gctagaagaattcaggatta

SEQ ID NO: 56726 - DNA, 20 bp, synthetic construct
  source 1..20: mol_type = other DNA
ggctagaagaattcaggatt

SEQ ID NO: 56727 - DNA, 20 bp, synthetic construct
  source 1..20: mol_type = other DNA
tggctagaagaattcaggat

SEQ ID NO: 56728 - DNA, 20 bp, synthetic construct
  source 1..20: mol_type = other DNA
atggctagaagaattcagga

SEQ ID NO: 56729 - DNA, 20 bp, synthetic construct
  source 1..20: mol_type = other DNA
aatggctagaagaattcagg

SEQ ID NO: 56730 - DNA, 20 bp, synthetic construct
  source 1..20: mol_type = other DNA
taatggctagaagaattcag

SEQ ID NO: 56731 - DNA, 20 bp, synthetic construct
  source 1..20: mol_type = other DNA
ataatggctagaagaattca

SEQ ID NO: 56732 - DNA, 20 bp, synthetic construct
  source 1..20: mol_type = other DNA
gataatggctagaagaattc

SEQ ID NO: 56733 - DNA, 20 bp, synthetic construct
  source 1..20: mol_type = other DNA
ggataatggctagaagaatt

SEQ ID NO: 56734 - DNA, 20 bp, synthetic construct
  source 1..20: mol_type = other DNA
aggataatggctagaagaat

SEQ ID NO: 56735 - DNA, 20 bp, synthetic construct
  source 1..20: mol_type = other DNA
caggataatggctagaagaa

SEQ ID NO: 56736 - DNA, 20 bp, synthetic construct
  source 1..20: mol_type = other DNA
gcaggataatggctagaaga

SEQ ID NO: 56737 - DNA, 20 bp, synthetic construct
  source 1..20: mol_type = other DNA
ggcaggataatggctagaag

SEQ ID NO: 56738 - DNA, 20 bp, synthetic construct
  source 1..20: mol_type = other DNA
aggcaggataatggctagaa

SEQ ID NO: 56739 - DNA, 20 bp, synthetic construct
  source 1..20: mol_type = other DNA
taggcaggataatggctaga

SEQ ID NO: 56740 - DNA, 20 bp, synthetic construct
  source 1..20: mol_type = other DNA
ttaggcaggataatggctag

SEQ ID NO: 56741 - DNA, 20 bp, synthetic construct
  source 1..20: mol_type = other DNA
cttaggcaggataatggcta

SEQ ID NO: 56742 - DNA, 20 bp, synthetic construct
  source 1..20: mol_type = other DNA
ccttaggcaggataatggct

SEQ ID NO: 56743 - DNA, 20 bp, synthetic construct
  source 1..20: mol_type = other DNA
gccttaggcaggataatggc

SEQ ID NO: 56744 - DNA, 20 bp, synthetic construct
  source 1..20: mol_type = other DNA
agccttaggcaggataatgg

SEQ ID NO: 56745 - DNA, 20 bp, synthetic construct
  source 1..20: mol_type = other DNA
tagccttaggcaggataatg

SEQ ID NO: 56746 - DNA, 20 bp, synthetic construct
  source 1..20: mol_type = other DNA
gtagccttaggcaggataat

SEQ ID NO: 56747 - DNA, 20 bp, synthetic construct
  source 1..20: mol_type = other DNA
cgtagccttaggcaggataa

SEQ ID NO: 56748 - DNA, 20 bp, synthetic construct
  source 1..20: mol_type = other DNA
tcgtagccttaggcaggata

SEQ ID NO: 56749 - DNA, 20 bp, synthetic construct
  source 1..20: mol_type = other DNA
atcgtagccttaggcaggat

SEQ ID NO: 56750 - DNA, 20 bp, synthetic construct
  source 1..20: mol_type = other DNA
aatcgtagccttaggcagga

SEQ ID NO: 56751 - DNA, 20 bp, synthetic construct
  source 1..20: mol_type = other DNA
taatcgtagccttaggcagg

SEQ ID NO: 56752 - DNA, 20 bp, synthetic construct
  source 1..20: mol_type = other DNA
ttaatcgtagccttaggcag

SEQ ID NO: 56753 - DNA, 20 bp, synthetic construct
  source 1..20: mol_type = other DNA
gttaatcgtagccttaggca

SEQ ID NO: 56754 - DNA, 20 bp, synthetic construct
  source 1..20: mol_type = other DNA
ggttaatcgtagccttaggc

SEQ ID NO: 56755 - DNA, 20 bp, synthetic construct
  source 1..20: mol_type = other DNA
aggttaatcgtagccttagg

SEQ ID NO: 56756 - DNA, 20 bp, synthetic construct
  source 1..20: mol_type = other DNA
gaggttaatcgtagccttag

SEQ ID NO: 56757 - DNA, 20 bp, synthetic construct
  source 1..20: mol_type = other DNA
agaggttaatcgtagcctta

SEQ ID NO: 56758 - DNA, 20 bp, synthetic construct
  source 1..20: mol_type = other DNA
tagaggttaatcgtagcctt

SEQ ID NO: 56759 - DNA, 20 bp, synthetic construct
  source 1..20: mol_type = other DNA
ttagaggttaatcgtagcct

SEQ ID NO: 56760 - DNA, 20 bp, synthetic construct
  source 1..20: mol_type = other DNA
gttagaggttaatcgtagcc

SEQ ID NO: 56761 - DNA, 20 bp, synthetic construct
  source 1..20: mol_type = other DNA
agttagaggttaatcgtagc

SEQ ID NO: 56762 - DNA, 20 bp, synthetic construct
  source 1..20: mol_type = other DNA
cagttagaggttaatcgtag

SEQ ID NO: 56763 - DNA, 20 bp, synthetic construct
  source 1..20: mol_type = other DNA
gcagttagaggttaatcgta

SEQ ID NO: 56764 - DNA, 20 bp, synthetic construct
  source 1..20: mol_type = other DNA
ggcagttagaggttaatcgt

SEQ ID NO: 56765 - DNA, 20 bp, synthetic construct
  source 1..20: mol_type = other DNA
tggcagttagaggttaatcg

SEQ ID NO: 56766 - DNA, 20 bp, synthetic construct
  source 1..20: mol_type = other DNA
ctggcagttagaggttaatc

SEQ ID NO: 56767 - DNA, 20 bp, synthetic construct
  source 1..20: mol_type = other DNA
cctggcagttagaggttaat

SEQ ID NO: 56768 - DNA, 20 bp, synthetic construct
  source 1..20: mol_type = other DNA
acctggcagttagaggttaa

SEQ ID NO: 56769 - DNA, 20 bp, synthetic construct
  source 1..20: mol_type = other DNA
gacctggcagttagaggtta

SEQ ID NO: 56770 - DNA, 20 bp, synthetic construct
  source 1..20: mol_type = other DNA
ggacctggcagttagaggtt

SEQ ID NO: 56771 - DNA, 20 bp, synthetic construct
  source 1..20: mol_type = other DNA
aggacctggcagttagaggt

SEQ ID NO: 56772 - DNA, 20 bp, synthetic construct
  source 1..20: mol_type = other DNA
aaggacctggcagttagagg

SEQ ID NO: 56773 - DNA, 20 bp, synthetic construct
  source 1..20: mol_type = other DNA
aaaggacctggcagttagag

SEQ ID NO: 56774 - DNA, 20 bp, synthetic construct
  source 1..20: mol_type = other DNA
caaaggacctggcagttaga

SEQ ID NO: 56775 - DNA, 20 bp, synthetic construct
  source 1..20: mol_type = other DNA
ccaaaggacctggcagttag

SEQ ID NO: 56776 - DNA, 20 bp, synthetic construct
  source 1..20: mol_type = other DNA
tccaaaggacctggcagtta

SEQ ID NO: 56777 - DNA, 20 bp, synthetic construct
  source 1..20: mol_type = other DNA
ttccaaaggacctggcagtt

SEQ ID NO: 56778 - DNA, 20 bp, synthetic construct
  source 1..20: mol_type = other DNA
attccaaaggacctggcagt

SEQ ID NO: 56779 - DNA, 20 bp, synthetic construct
  source 1..20: mol_type = other DNA
gattccaaaggacctggcag

SEQ ID NO: 56780 - DNA, 20 bp, synthetic construct
  source 1..20: mol_type = other DNA
agattccaaaggacctggca

SEQ ID NO: 56781 - DNA, 20 bp, synthetic construct
  source 1..20: mol_type = other DNA
aagattccaaaggacctggc

SEQ ID NO: 56782 - DNA, 20 bp, synthetic construct
  source 1..20: mol_type = other DNA
aaagattccaaaggacctgg

SEQ ID NO: 56783 - DNA, 20 bp, synthetic construct
  source 1..20: mol_type = other DNA
aaaagattccaaaggacctg

SEQ ID NO: 56784 - DNA, 20 bp, synthetic construct
  source 1..20: mol_type = other DNA
aaaaagattccaaaggacct

SEQ ID NO: 56785 - DNA, 20 bp, synthetic construct
  source 1..20: mol_type = other DNA
gaaaaagattccaaaggacc

SEQ ID NO: 56786 - DNA, 20 bp, synthetic construct
  source 1..20: mol_type = other DNA
agaaaaagattccaaaggac

SEQ ID NO: 56787 - DNA, 20 bp, synthetic construct
  source 1..20: mol_type = other DNA
cagaaaaagattccaaagga

SEQ ID NO: 56788 - DNA, 20 bp, synthetic construct
  source 1..20: mol_type = other DNA
acagaaaaagattccaaagg

SEQ ID NO: 56789 - DNA, 20 bp, synthetic construct
  source 1..20: mol_type = other DNA
gacagaaaaagattccaaag

SEQ ID NO: 56790 - DNA, 20 bp, synthetic construct
  source 1..20: mol_type = other DNA
agacagaaaaagattccaaa

SEQ ID NO: 56791 - DNA, 20 bp, synthetic construct
  source 1..20: mol_type = other DNA
aagacagaaaaagattccaa

SEQ ID NO: 56792 - DNA, 20 bp, synthetic construct
  source 1..20: mol_type = other DNA
aaagacagaaaaagattcca

SEQ ID NO: 56793 - DNA, 20 bp, synthetic construct
  source 1..20: mol_type = other DNA
taaagacagaaaaagattcc

SEQ ID NO: 56794 - DNA, 20 bp, synthetic construct
  source 1..20: mol_type = other DNA
ataaagacagaaaaagattc

SEQ ID NO: 56795 - DNA, 20 bp, synthetic construct
  source 1..20: mol_type = other DNA
aataaagacagaaaaagatt

SEQ ID NO: 56796 - DNA, 20 bp, synthetic construct
  source 1..20: mol_type = other DNA
caataaagacagaaaaagat

SEQ ID NO: 56797 - DNA, 20 bp, synthetic construct
  source 1..20: mol_type = other DNA
gcaataaagacagaaaaaga

SEQ ID NO: 56798 - DNA, 20 bp, synthetic construct
  source 1..20: mol_type = other DNA
agcaataaagacagaaaaag

SEQ ID NO: 56799 - DNA, 20 bp, synthetic construct
  source 1..20: mol_type = other DNA
cagcaataaagacagaaaaa

SEQ ID NO: 56800 - DNA, 20 bp, synthetic construct
  source 1..20: mol_type = other DNA
gcagcaataaagacagaaaa

SEQ ID NO: 56801 - DNA, 20 bp, synthetic construct
  source 1..20: mol_type = other DNA
tgcagcaataaagacagaaa

SEQ ID NO: 56802 - DNA, 20 bp, synthetic construct
  source 1..20: mol_type = other DNA
gtgcagcaataaagacagaa

SEQ ID NO: 56803 - DNA, 20 bp, synthetic construct
  source 1..20: mol_type = other DNA
agtgcagcaataaagacaga

SEQ ID NO: 56804 - DNA, 20 bp, synthetic construct
  source 1..20: mol_type = other DNA
aagtgcagcaataaagacag

SEQ ID NO: 56805 - DNA, 20 bp, synthetic construct
  source 1..20: mol_type = other DNA
caagtgcagcaataaagaca

SEQ ID NO: 56806 - DNA, 20 bp, synthetic construct
  source 1..20: mol_type = other DNA
tcaagtgcagcaataaagac

SEQ ID NO: 56807 - DNA, 20 bp, synthetic construct
  source 1..20: mol_type = other DNA
ttcaagtgcagcaataaaga

SEQ ID NO: 56808 - DNA, 20 bp, synthetic construct
  source 1..20: mol_type = other DNA
attcaagtgcagcaataaag

SEQ ID NO: 56809 - DNA, 20 bp, synthetic construct
  source 1..20: mol_type = other DNA
cattcaagtgcagcaataaa

SEQ ID NO: 56810 - DNA, 20 bp, synthetic construct
  source 1..20: mol_type = other DNA
acattcaagtgcagcaataa

SEQ ID NO: 56811 - DNA, 20 bp, synthetic construct
  source 1..20: mol_type = other DNA
aacattcaagtgcagcaata

SEQ ID NO: 56812 - DNA, 20 bp, synthetic construct
  source 1..20: mol_type = other DNA
caacattcaagtgcagcaat

SEQ ID NO: 56813 - DNA, 20 bp, synthetic construct
  source 1..20: mol_type = other DNA
ccaacattcaagtgcagcaa

SEQ ID NO: 56814 - DNA, 20 bp, synthetic construct
  source 1..20: mol_type = other DNA
accaacattcaagtgcagca

SEQ ID NO: 56815 - DNA, 20 bp, synthetic construct
  source 1..20: mol_type = other DNA
aaccaacattcaagtgcagc

SEQ ID NO: 56816 - DNA, 20 bp, synthetic construct
  source 1..20: mol_type = other DNA
aaaccaacattcaagtgcag

SEQ ID NO: 56817 - DNA, 20 bp, synthetic construct
  source 1..20: mol_type = other DNA
gaaaccaacattcaagtgca

SEQ ID NO: 56818 - DNA, 20 bp, synthetic construct
  source 1..20: mol_type = other DNA
tgaaaccaacattcaagtgc

SEQ ID NO: 56819 - DNA, 20 bp, synthetic construct
  source 1..20: mol_type = other DNA
gtgaaaccaacattcaagtg

SEQ ID NO: 56820 - DNA, 20 bp, synthetic construct
  source 1..20: mol_type = other DNA
ggtgaaaccaacattcaagt

SEQ ID NO: 56821 - DNA, 20 bp, synthetic construct
  source 1..20: mol_type = other DNA
gggtgaaaccaacattcaag

SEQ ID NO: 56822 - DNA, 20 bp, synthetic construct
  source 1..20: mol_type = other DNA
agggtgaaaccaacattcaa

SEQ ID NO: 56823 - DNA, 20 bp, synthetic construct
  source 1..20: mol_type = other DNA
gagggtgaaaccaacattca

SEQ ID NO: 56824 - DNA, 20 bp, synthetic construct
  source 1..20: mol_type = other DNA
ggagggtgaaaccaacattc

SEQ ID NO: 56825 - DNA, 20 bp, synthetic construct
  source 1..20: mol_type = other DNA
aggagggtgaaaccaacatt

SEQ ID NO: 56826 - DNA, 20 bp, synthetic construct
  source 1..20: mol_type = other DNA
aaggagggtgaaaccaacat

SEQ ID NO: 56827 - DNA, 20 bp, synthetic construct
  source 1..20: mol_type = other DNA
gaaggagggtgaaaccaaca

SEQ ID NO: 56828 - DNA, 20 bp, synthetic construct
  source 1..20: mol_type = other DNA
tgaaggagggtgaaaccaac

SEQ ID NO: 56829 - DNA, 20 bp, synthetic construct
  source 1..20: mol_type = other DNA
ctgaaggagggtgaaaccaa

SEQ ID NO: 56830 - DNA, 20 bp, synthetic construct
  source 1..20: mol_type = other DNA
tctgaaggagggtgaaacca

SEQ ID NO: 56831 - DNA, 20 bp, synthetic construct
  source 1..20: mol_type = other DNA
ttctgaaggagggtgaaacc

SEQ ID NO: 56832 - DNA, 20 bp, synthetic construct
  source 1..20: mol_type = other DNA
attctgaaggagggtgaaac

SEQ ID NO: 56833 - DNA, 20 bp, synthetic construct
  source 1..20: mol_type = other DNA
aattctgaaggagggtgaaa

SEQ ID NO: 56834 - DNA, 20 bp, synthetic construct
  source 1..20: mol_type = other DNA
aaattctgaaggagggtgaa

SEQ ID NO: 56835 - DNA, 20 bp, synthetic construct
  source 1..20: mol_type = other DNA
gaaattctgaaggagggtga

SEQ ID NO: 56836 - DNA, 20 bp, synthetic construct
  source 1..20: mol_type = other DNA
ggaaattctgaaggagggtg

SEQ ID NO: 56837 - DNA, 20 bp, synthetic construct
  source 1..20: mol_type = other DNA
aggaaattctgaaggagggt

SEQ ID NO: 56838 - DNA, 20 bp, synthetic construct
  source 1..20: mol_type = other DNA
gaggaaattctgaaggaggg

SEQ ID NO: 56839 - DNA, 20 bp, synthetic construct
  source 1..20: mol_type = other DNA
agaggaaattctgaaggagg

SEQ ID NO: 56840 - DNA, 20 bp, synthetic construct
  source 1..20: mol_type = other DNA
aagaggaaattctgaaggag

SEQ ID NO: 56841 - DNA, 20 bp, synthetic construct
  source 1..20: mol_type = other DNA
gaagaggaaattctgaagga

SEQ ID NO: 56842 - DNA, 20 bp, synthetic construct
  source 1..20: mol_type = other DNA
agaagaggaaattctgaagg

SEQ ID NO: 56843 - DNA, 20 bp, synthetic construct
  source 1..20: mol_type = other DNA
cagaagaggaaattctgaag

SEQ ID NO: 56844 - DNA, 20 bp, synthetic construct
  source 1..20: mol_type = other DNA
acagaagaggaaattctgaa

SEQ ID NO: 56845 - DNA, 20 bp, synthetic construct
  source 1..20: mol_type = other DNA
tacagaagaggaaattctga

SEQ ID NO: 56846 - DNA, 20 bp, synthetic construct
  source 1..20: mol_type = other DNA
atacagaagaggaaattctg

SEQ ID NO: 56847 - DNA, 20 bp, synthetic construct
  source 1..20: mol_type = other DNA
aatacagaagaggaaattct

SEQ ID NO: 56848 - DNA, 20 bp, synthetic construct
  source 1..20: mol_type = other DNA
aaatacagaagaggaaattc

SEQ ID NO: 56849 - DNA, 20 bp, synthetic construct
  source 1..20: mol_type = other DNA
aaaatacagaagaggaaatt

SEQ ID NO: 56850 - DNA, 20 bp, synthetic construct
  source 1..20: mol_type = other DNA
aaaaatacagaagaggaaat

SEQ ID NO: 56851 - DNA, 20 bp, synthetic construct
  source 1..20: mol_type = other DNA
aaaaaatacagaagaggaaa

SEQ ID NO: 56852 - DNA, 20 bp, synthetic construct
  source 1..20: mol_type = other DNA
taaaaaatacagaagaggaa

SEQ ID NO: 56853 - DNA, 20 bp, synthetic construct
  source 1..20: mol_type = other DNA
ataaaaaatacagaagagga

SEQ ID NO: 56854 - DNA, 20 bp, synthetic construct
  source 1..20: mol_type = other DNA
cataaaaaatacagaagagg

SEQ ID NO: 56855 - DNA, 20 bp, synthetic construct
  source 1..20: mol_type = other DNA
acataaaaaatacagaagag

SEQ ID NO: 56856 - DNA, 20 bp, synthetic construct
  source 1..20: mol_type = other DNA
aacataaaaaatacagaaga

SEQ ID NO: 56857 - DNA, 20 bp, synthetic construct
  source 1..20: mol_type = other DNA
aaacataaaaaatacagaag

SEQ ID NO: 56858 - DNA, 20 bp, synthetic construct
  source 1..20: mol_type = other DNA
taaacataaaaaatacagaa

SEQ ID NO: 56859 - DNA, 20 bp, synthetic construct
  source 1..20: mol_type = other DNA
ataaacataaaaaatacaga

SEQ ID NO: 56860 - DNA, 20 bp, synthetic construct
  source 1..20: mol_type = other DNA
aataaacataaaaaatacag

SEQ ID NO: 56861 - DNA, 20 bp, synthetic construct
  source 1..20: mol_type = other DNA
caataaacataaaaaataca

SEQ ID NO: 56862 - DNA, 20 bp, synthetic construct
  source 1..20: mol_type = other DNA
tcaataaacataaaaaatac

SEQ ID NO: 56863 - DNA, 20 bp, synthetic construct
  source 1..20: mol_type = other DNA
atcaataaacataaaaaata

SEQ ID NO: 56864 - DNA, 20 bp, synthetic construct
  source 1..20: mol_type = other DNA
gatcaataaacataaaaaat

SEQ ID NO: 56865 - DNA, 20 bp, synthetic construct
  source 1..20: mol_type = other DNA
tgatcaataaacataaaaaa

SEQ ID NO: 56866 - DNA, 20 bp, synthetic construct
  source 1..20: mol_type = other DNA
atgatcaataaacataaaaa

SEQ ID NO: 56867 - DNA, 20 bp, synthetic construct
  source 1..20: mol_type = other DNA
aatgatcaataaacataaaa

SEQ ID NO: 56868 - DNA, 20 bp, synthetic construct
  source 1..20: mol_type = other DNA
gaatgatcaataaacataaa

SEQ ID NO: 56869 - DNA, 20 bp, synthetic construct
  source 1..20: mol_type = other DNA
ggaatgatcaataaacataa

SEQ ID NO: 56870 - DNA, 20 bp, synthetic construct
  source 1..20: mol_type = other DNA
aggaatgatcaataaacata

SEQ ID NO: 56871 - DNA, 20 bp, synthetic construct
  source 1..20: mol_type = other DNA
aaggaatgatcaataaacat

SEQ ID NO: 56872 - DNA, 20 bp, synthetic construct
  source 1..20: mol_type = other DNA
gaaggaatgatcaataaaca

SEQ ID NO: 56873 - DNA, 20 bp, synthetic construct
  source 1..20: mol_type = other DNA
ggaaggaatgatcaataaac

SEQ ID NO: 56874 - DNA, 20 bp, synthetic construct
  source 1..20: mol_type = other DNA
gggaaggaatgatcaataaa

SEQ ID NO: 56875 - DNA, 20 bp, synthetic construct
  source 1..20: mol_type = other DNA
agggaaggaatgatcaataa

SEQ ID NO: 56876 - DNA, 20 bp, synthetic construct
  source 1..20: mol_type = other DNA
cagggaaggaatgatcaata

SEQ ID NO: 56877 - DNA, 20 bp, synthetic construct
  source 1..20: mol_type = other DNA
gcagggaaggaatgatcaat

SEQ ID NO: 56878 - DNA, 20 bp, synthetic construct
  source 1..20: mol_type = other DNA
ggcagggaaggaatgatcaa

SEQ ID NO: 56879 - DNA, 20 bp, synthetic construct
  source 1..20: mol_type = other DNA
aggcagggaaggaatgatca

SEQ ID NO: 56880 - DNA, 20 bp, synthetic construct
  source 1..20: mol_type = other DNA
gaggcagggaaggaatgatc

SEQ ID NO: 56881 - DNA, 20 bp, synthetic construct
  source 1..20: mol_type = other DNA
tgaggcagggaaggaatgat

SEQ ID NO: 56882 - DNA, 20 bp, synthetic construct
  source 1..20: mol_type = other DNA
atgaggcagggaaggaatga

SEQ ID NO: 56883 - DNA, 20 bp, synthetic construct
  source 1..20: mol_type = other DNA
aatgaggcagggaaggaatg

SEQ ID NO: 56884 - DNA, 20 bp, synthetic construct
  source 1..20: mol_type = other DNA
gaatgaggcagggaaggaat

SEQ ID NO: 56885 - DNA, 20 bp, synthetic construct
  source 1..20: mol_type = other DNA
ggaatgaggcagggaaggaa

SEQ ID NO: 56886 - DNA, 20 bp, synthetic construct
  source 1..20: mol_type = other DNA
aggaatgaggcagggaagga

SEQ ID NO: 56887 - DNA, 20 bp, synthetic construct
  source 1..20: mol_type = other DNA
caggaatgaggcagggaagg

SEQ ID NO: 56888 - DNA, 20 bp, synthetic construct
  source 1..20: mol_type = other DNA
ccaggaatgaggcagggaag

SEQ ID NO: 56889 - DNA, 20 bp, synthetic construct
  source 1..20: mol_type = other DNA
cccaggaatgaggcagggaa

SEQ ID NO: 56890 - DNA, 20 bp, synthetic construct
  source 1..20: mol_type = other DNA
gcccaggaatgaggcaggga

SEQ ID NO: 56891 - DNA, 20 bp, synthetic construct
  source 1..20: mol_type = other DNA
agcccaggaatgaggcaggg

SEQ ID NO: 56892 - DNA, 20 bp, synthetic construct
  source 1..20: mol_type = other DNA
aagcccaggaatgaggcagg

SEQ ID NO: 56893 - DNA, 20 bp, synthetic construct
  source 1..20: mol_type = other DNA
gaagcccaggaatgaggcag

SEQ ID NO: 56894 - DNA, 20 bp, synthetic construct
  source 1..20: mol_type = other DNA
agaagcccaggaatgaggca

SEQ ID NO: 56895 - DNA, 20 bp, synthetic construct
  source 1..20: mol_type = other DNA
aagaagcccaggaatgaggc

SEQ ID NO: 56896 - DNA, 20 bp, synthetic construct
  source 1..20: mol_type = other DNA
aaagaagcccaggaatgagg

SEQ ID NO: 56897 - DNA, 20 bp, synthetic construct
  source 1..20: mol_type = other DNA
aaaagaagcccaggaatgag

SEQ ID NO: 56898 - DNA, 20 bp, synthetic construct
  source 1..20: mol_type = other DNA
gaaaagaagcccaggaatga

SEQ ID NO: 56899 - DNA, 20 bp, synthetic construct
  source 1..20: mol_type = other DNA
ggaaaagaagcccaggaatg

SEQ ID NO: 56900 - DNA, 20 bp, synthetic construct
  source 1..20: mol_type = other DNA
aggaaaagaagcccaggaat

SEQ ID NO: 56901 - DNA, 20 bp, synthetic construct
  source 1..20: mol_type = other DNA
aaggaaaagaagcccaggaa

SEQ ID NO: 56902 - DNA, 20 bp, synthetic construct
  source 1..20: mol_type = other DNA
gaaggaaaagaagcccagga

SEQ ID NO: 56903 - DNA, 20 bp, synthetic construct
  source 1..20: mol_type = other DNA
tgaaggaaaagaagcccagg

SEQ ID NO: 56904 - DNA, 20 bp, synthetic construct
  source 1..20: mol_type = other DNA
gtgaaggaaaagaagcccag

SEQ ID NO: 56905 - DNA, 20 bp, synthetic construct
  source 1..20: mol_type = other DNA
tgtgaaggaaaagaagccca

SEQ ID NO: 56906 - DNA, 20 bp, synthetic construct
  source 1..20: mol_type = other DNA
gtgtgaaggaaaagaagccc

SEQ ID NO: 56907 - DNA, 20 bp, synthetic construct
  source 1..20: mol_type = other DNA
tgtgtgaaggaaaagaagcc

SEQ ID NO: 56908 - DNA, 20 bp, synthetic construct
  source 1..20: mol_type = other DNA
gtgtgtgaaggaaaagaagc

SEQ ID NO: 56909 - DNA, 20 bp, synthetic construct
  source 1..20: mol_type = other DNA
ggtgtgtgaaggaaaagaag

SEQ ID NO: 56910 - DNA, 20 bp, synthetic construct
  source 1..20: mol_type = other DNA
gggtgtgtgaaggaaaagaa

SEQ ID NO: 56911 - DNA, 20 bp, synthetic construct
  source 1..20: mol_type = other DNA
ggggtgtgtgaaggaaaaga

SEQ ID NO: 56912 - DNA, 20 bp, synthetic construct
  source 1..20: mol_type = other DNA
aggggtgtgtgaaggaaaag

SEQ ID NO: 56913 - DNA, 20 bp, synthetic construct
  source 1..20: mol_type = other DNA
aaggggtgtgtgaaggaaaa

SEQ ID NO: 56914 - DNA, 20 bp, synthetic construct
  source 1..20: mol_type = other DNA
taaggggtgtgtgaaggaaa

SEQ ID NO: 56915 - DNA, 20 bp, synthetic construct
  source 1..20: mol_type = other DNA
ctaaggggtgtgtgaaggaa

SEQ ID NO: 56916 - DNA, 20 bp, synthetic construct
  source 1..20: mol_type = other DNA
tctaaggggtgtgtgaagga

SEQ ID NO: 56917 - DNA, 20 bp, synthetic construct
  source 1..20: mol_type = other DNA
atctaaggggtgtgtgaagg

SEQ ID NO: 56918 - DNA, 20 bp, synthetic construct
  source 1..20: mol_type = other DNA
catctaaggggtgtgtgaag

SEQ ID NO: 56919 - DNA, 20 bp, synthetic construct
  source 1..20: mol_type = other DNA
acatctaaggggtgtgtgaa

SEQ ID NO: 56920 - DNA, 20 bp, synthetic construct
  source 1..20: mol_type = other DNA
cacatctaaggggtgtgtga

SEQ ID NO: 56921 - DNA, 20 bp, synthetic construct
  source 1..20: mol_type = other DNA
acacatctaaggggtgtgtg

SEQ ID NO: 56922 - DNA, 20 bp, synthetic construct
  source 1..20: mol_type = other DNA
cacacatctaaggggtgtgt

SEQ ID NO: 56923 - DNA, 20 bp, synthetic construct
  source 1..20: mol_type = other DNA
acacacatctaaggggtgtg

SEQ ID NO: 56924 - DNA, 20 bp, synthetic construct
  source 1..20: mol_type = other DNA
gacacacatctaaggggtgt

SEQ ID NO: 56925 - DNA, 20 bp, synthetic construct
  source 1..20: mol_type = other DNA
ggacacacatctaaggggtg

SEQ ID NO: 56926 - DNA, 20 bp, synthetic construct
  source 1..20: mol_type = other DNA
gggacacacatctaaggggt

SEQ ID NO: 56927 - DNA, 20 bp, synthetic construct
  source 1..20: mol_type = other DNA
ggggacacacatctaagggg

SEQ ID NO: 56928 - DNA, 20 bp, synthetic construct
  source 1..20: mol_type = other DNA
tggggacacacatctaaggg

SEQ ID NO: 56929 - DNA, 20 bp, synthetic construct
  source 1..20: mol_type = other DNA
ctggggacacacatctaagg

SEQ ID NO: 56930 - DNA, 20 bp, synthetic construct
  source 1..20: mol_type = other DNA
actggggacacacatctaag

SEQ ID NO: 56931 - DNA, 20 bp, synthetic construct
  source 1..20: mol_type = other DNA
cactggggacacacatctaa

SEQ ID NO: 56932 - DNA, 20 bp, synthetic construct
  source 1..20: mol_type = other DNA
acactggggacacacatcta

SEQ ID NO: 56933 - DNA, 20 bp, synthetic construct
  source 1..20: mol_type = other DNA
aacactggggacacacatct

SEQ ID NO: 56934 - DNA, 20 bp, synthetic construct
  source 1..20: mol_type = other DNA
aaacactggggacacacatc

SEQ ID NO: 56935 - DNA, 20 bp, synthetic construct
  source 1..20: mol_type = other DNA
caaacactggggacacacat

SEQ ID NO: 56936 - DNA, 20 bp, synthetic construct
  source 1..20: mol_type = other DNA
acaaacactggggacacaca

SEQ ID NO: 56937 - DNA, 20 bp, synthetic construct
  source 1..20: mol_type = other DNA
aacaaacactggggacacac

SEQ ID NO: 56938 - DNA, 20 bp, synthetic construct
  source 1..20: mol_type = other DNA
aaacaaacactggggacaca

SEQ ID NO: 56939 - DNA, 20 bp, synthetic construct
  source 1..20: mol_type = other DNA
gaaacaaacactggggacac

SEQ ID NO: 56940 - DNA, 20 bp, synthetic construct
  source 1..20: mol_type = other DNA
agaaacaaacactggggaca

SEQ ID NO: 56941 - DNA, 20 bp, synthetic construct
  source 1..20: mol_type = other DNA
aagaaacaaacactggggac

SEQ ID NO: 56942 - DNA, 20 bp, synthetic construct
  source 1..20: mol_type = other DNA
aaagaaacaaacactgggga

SEQ ID NO: 56943 - DNA, 20 bp, synthetic construct
  source 1..20: mol_type = other DNA
caaagaaacaaacactgggg

SEQ ID NO: 56944 - DNA, 20 bp, synthetic construct
  source 1..20: mol_type = other DNA
gcaaagaaacaaacactggg

SEQ ID NO: 56945 - DNA, 20 bp, synthetic construct
  source 1..20: mol_type = other DNA
ggcaaagaaacaaacactgg

SEQ ID NO: 56946 - DNA, 20 bp, synthetic construct
  source 1..20: mol_type = other DNA
aggcaaagaaacaaacactg

SEQ ID NO: 56947 - DNA, 20 bp, synthetic construct
  source 1..20: mol_type = other DNA
caggcaaagaaacaaacact

SEQ ID NO: 56948 - DNA, 20 bp, synthetic construct
  source 1..20: mol_type = other DNA
gcaggcaaagaaacaaacac

SEQ ID NO: 56949 - DNA, 20 bp, synthetic construct
  source 1..20: mol_type = other DNA
agcaggcaaagaaacaaaca

SEQ ID NO: 56950 - DNA, 20 bp, synthetic construct
  source 1..20: mol_type = other DNA
cagcaggcaaagaaacaaac

SEQ ID NO: 56951 - DNA, 20 bp, synthetic construct
  source 1..20: mol_type = other DNA
gcagcaggcaaagaaacaaa

SEQ ID NO: 56952 - DNA, 20 bp, synthetic construct
  source 1..20: mol_type = other DNA
agcagcaggcaaagaaacaa

SEQ ID NO: 56953 - DNA, 20 bp, synthetic construct
  source 1..20: mol_type = other DNA
gagcagcaggcaaagaaaca

SEQ ID NO: 56954 - DNA, 20 bp, synthetic construct
  source 1..20: mol_type = other DNA
agagcagcaggcaaagaaac

SEQ ID NO: 56955 - DNA, 20 bp, synthetic construct
  source 1..20: mol_type = other DNA
aagagcagcaggcaaagaaa

SEQ ID NO: 56956 - DNA, 20 bp, synthetic construct
  source 1..20: mol_type = other DNA
caagagcagcaggcaaagaa

SEQ ID NO: 56957 - DNA, 20 bp, synthetic construct
  source 1..20: mol_type = other DNA
gcaagagcagcaggcaaaga

SEQ ID NO: 56958 - DNA, 20 bp, synthetic construct
  source 1..20: mol_type = other DNA
ggcaagagcagcaggcaaag

SEQ ID NO: 56959 - DNA, 20 bp, synthetic construct
  source 1..20: mol_type = other DNA
tggcaagagcagcaggcaaa

SEQ ID NO: 56960 - DNA, 20 bp, synthetic construct
  source 1..20: mol_type = other DNA
gtggcaagagcagcaggcaa

SEQ ID NO: 56961 - DNA, 20 bp, synthetic construct
  source 1..20: mol_type = other DNA
tgtggcaagagcagcaggca

SEQ ID NO: 56962 - DNA, 20 bp, synthetic construct
  source 1..20: mol_type = other DNA
atgtggcaagagcagcaggc

SEQ ID NO: 56963 - DNA, 20 bp, synthetic construct
  source 1..20: mol_type = other DNA
catgtggcaagagcagcagg

SEQ ID NO: 56964 - DNA, 20 bp, synthetic construct
  source 1..20: mol_type = other DNA
tcatgtggcaagagcagcag

SEQ ID NO: 56965 - DNA, 20 bp, synthetic construct
  source 1..20: mol_type = other DNA
gtcatgtggcaagagcagca

SEQ ID NO: 56966 - DNA, 20 bp, synthetic construct
  source 1..20: mol_type = other DNA
tgtcatgtggcaagagcagc

SEQ ID NO: 56967 - DNA, 20 bp, synthetic construct
  source 1..20: mol_type = other DNA
gtgtcatgtggcaagagcag

SEQ ID NO: 56968 - DNA, 20 bp, synthetic construct
  source 1..20: mol_type = other DNA
tgtgtcatgtggcaagagca

SEQ ID NO: 56969 - DNA, 20 bp, synthetic construct
  source 1..20: mol_type = other DNA
gtgtgtcatgtggcaagagc

SEQ ID NO: 56970 - DNA, 20 bp, synthetic construct
  source 1..20: mol_type = other DNA
tgtgtgtcatgtggcaagag

SEQ ID NO: 56971 - DNA, 20 bp, synthetic construct
  source 1..20: mol_type = other DNA
gtgtgtgtcatgtggcaaga

SEQ ID NO: 56972 - DNA, 20 bp, synthetic construct
  source 1..20: mol_type = other DNA
agtgtgtgtcatgtggcaag

SEQ ID NO: 56973 - DNA, 20 bp, synthetic construct
  source 1..20: mol_type = other DNA
cagtgtgtgtcatgtggcaa

SEQ ID NO: 56974 - DNA, 20 bp, synthetic construct
  source 1..20: mol_type = other DNA
gcagtgtgtgtcatgtggca

SEQ ID NO: 56975 - DNA, 20 bp, synthetic construct
  source 1..20: mol_type = other DNA
ggcagtgtgtgtcatgtggc

SEQ ID NO: 56976 - DNA, 20 bp, synthetic construct
  source 1..20: mol_type = other DNA
tggcagtgtgtgtcatgtgg

SEQ ID NO: 56977 - DNA, 20 bp, synthetic construct
  source 1..20: mol_type = other DNA
ctggcagtgtgtgtcatgtg

SEQ ID NO: 56978 - DNA, 20 bp, synthetic construct
  source 1..20: mol_type = other DNA
gctggcagtgtgtgtcatgt

SEQ ID NO: 56979 - DNA, 20 bp, synthetic construct
  source 1..20: mol_type = other DNA
agctggcagtgtgtgtcatg

SEQ ID NO: 56980 - DNA, 20 bp, synthetic construct
  source 1..20: mol_type = other DNA
tagctggcagtgtgtgtcat

SEQ ID NO: 56981 - DNA, 20 bp, synthetic construct
  source 1..20: mol_type = other DNA
gtagctggcagtgtgtgtca

SEQ ID NO: 56982 - DNA, 20 bp, synthetic construct
  source 1..20: mol_type = other DNA
ggtagctggcagtgtgtgtc

SEQ ID NO: 56983 - DNA, 20 bp, synthetic construct
  source 1..20: mol_type = other DNA
tggtagctggcagtgtgtgt

SEQ ID NO: 56984 - DNA, 20 bp, synthetic construct
  source 1..20: mol_type = other DNA
gtggtagctggcagtgtgtg

SEQ ID NO: 56985 - DNA, 20 bp, synthetic construct
  source 1..20: mol_type = other DNA
tgtggtagctggcagtgtgt

SEQ ID NO: 56986 - DNA, 20 bp, synthetic construct
  source 1..20: mol_type = other DNA
gtgtggtagctggcagtgtg

SEQ ID NO: 56987 - DNA, 20 bp, synthetic construct
  source 1..20: mol_type = other DNA
tgtgtggtagctggcagtgt

SEQ ID NO: 56988 - DNA, 20 bp, synthetic construct
  source 1..20: mol_type = other DNA
gtgtgtggtagctggcagtg

SEQ ID NO: 56989 - DNA, 20 bp, synthetic construct
  source 1..20: mol_type = other DNA
tgtgtgtggtagctggcagt

SEQ ID NO: 56990 - DNA, 20 bp, synthetic construct
  source 1..20: mol_type = other DNA
ttgtgtgtggtagctggcag

SEQ ID NO: 56991 - DNA, 20 bp, synthetic construct
  source 1..20: mol_type = other DNA
cttgtgtgtggtagctggca

SEQ ID NO: 56992 - DNA, 20 bp, synthetic construct
  source 1..20: mol_type = other DNA
acttgtgtgtggtagctggc

SEQ ID NO: 56993 - DNA, 20 bp, synthetic construct
  source 1..20: mol_type = other DNA
aacttgtgtgtggtagctgg

SEQ ID NO: 56994 - DNA, 20 bp, synthetic construct
  source 1..20: mol_type = other DNA
gaacttgtgtgtggtagctg

SEQ ID NO: 56995 - DNA, 20 bp, synthetic construct
  source 1..20: mol_type = other DNA
ggaacttgtgtgtggtagct

SEQ ID NO: 56996 - DNA, 20 bp, synthetic construct
  source 1..20: mol_type = other DNA
gggaacttgtgtgtggtagc

SEQ ID NO: 56997 - DNA, 20 bp, synthetic construct
  source 1..20: mol_type = other DNA
agggaacttgtgtgtggtag

SEQ ID NO: 56998 - DNA, 20 bp, synthetic construct
  source 1..20: mol_type = other DNA
gagggaacttgtgtgtggta

SEQ ID NO: 56999 - DNA, 20 bp, synthetic construct
  source 1..20: mol_type = other DNA
ggagggaacttgtgtgtggt

SEQ ID NO: 57000 - DNA, 20 bp, synthetic construct
  source 1..20: mol_type = other DNA
aggagggaacttgtgtgtgg

SEQ ID NO: 57001 - DNA, 20 bp, synthetic construct
  source 1..20: mol_type = other DNA
taggagggaacttgtgtgtg

SEQ ID NO: 57002 - DNA, 20 bp, synthetic construct
  source 1..20: mol_type = other DNA
ataggagggaacttgtgtgt

SEQ ID NO: 57003 - DNA, 20 bp, synthetic construct
  source 1..20: mol_type = other DNA
gataggagggaacttgtgtg

SEQ ID NO: 57004 - DNA, 20 bp, synthetic construct
  source 1..20: mol_type = other DNA
tgataggagggaacttgtgt

SEQ ID NO: 57005 - DNA, 20 bp, synthetic construct
  source 1..20: mol_type = other DNA
atgataggagggaacttgtg

SEQ ID NO: 57006 - DNA, 20 bp, synthetic construct
  source 1..20: mol_type = other DNA
catgataggagggaacttgt

SEQ ID NO: 57007 - DNA, 20 bp, synthetic construct
  source 1..20: mol_type = other DNA
acatgataggagggaacttg

SEQ ID NO: 57008 - DNA, 20 bp, synthetic construct
  source 1..20: mol_type = other DNA
cacatgataggagggaactt

SEQ ID NO: 57009 - DNA, 20 bp, synthetic construct
  source 1..20: mol_type = other DNA
acacatgataggagggaact

SEQ ID NO: 57010 - DNA, 20 bp, synthetic construct
  source 1..20: mol_type = other DNA
cacacatgataggagggaac

SEQ ID NO: 57011 - DNA, 20 bp, synthetic construct
  source 1..20: mol_type = other DNA
acacacatgataggagggaa

SEQ ID NO: 57012 - DNA, 20 bp, synthetic construct
  source 1..20: mol_type = other DNA
tacacacatgataggaggga

SEQ ID NO: 57013 - DNA, 20 bp, synthetic construct
  source 1..20: mol_type = other DNA
atacacacatgataggaggg

SEQ ID NO: 57014 - DNA, 20 bp, synthetic construct
  source 1..20: mol_type = other DNA
gatacacacatgataggagg

SEQ ID NO: 57015 - DNA, 20 bp, synthetic construct
  source 1..20: mol_type = other DNA
tgatacacacatgataggag

SEQ ID NO: 57016 - DNA, 20 bp, synthetic construct
  source 1..20: mol_type = other DNA
atgatacacacatgatagga

SEQ ID NO: 57017 - DNA, 20 bp, synthetic construct
  source 1..20: mol_type = other DNA
aatgatacacacatgatagg

SEQ ID NO: 57018 - DNA, 20 bp, synthetic construct
  source 1..20: mol_type = other DNA
caatgatacacacatgatag

SEQ ID NO: 57019 - DNA, 20 bp, synthetic construct
  source 1..20: mol_type = other DNA
gcaatgatacacacatgata

SEQ ID NO: 57020 - DNA, 20 bp, synthetic construct
  source 1..20: mol_type = other DNA
ggcaatgatacacacatgat

SEQ ID NO: 57021 - DNA, 20 bp, synthetic construct
  source 1..20: mol_type = other DNA
gggcaatgatacacacatga

SEQ ID NO: 57022 - DNA, 20 bp, synthetic construct
  source 1..20: mol_type = other DNA
agggcaatgatacacacatg

SEQ ID NO: 57023 - DNA, 20 bp, synthetic construct
  source 1..20: mol_type = other DNA
aagggcaatgatacacacat

SEQ ID NO: 57024 - DNA, 20 bp, synthetic construct
  source 1..20: mol_type = other DNA
taagggcaatgatacacaca

SEQ ID NO: 57025 - DNA, 20 bp, synthetic construct
  source 1..20: mol_type = other DNA
ataagggcaatgatacacac

SEQ ID NO: 57026 - DNA, 20 bp, synthetic construct
  source 1..20: mol_type = other DNA
tataagggcaatgatacaca

SEQ ID NO: 57027 - DNA, 20 bp, synthetic construct
  source 1..20: mol_type = other DNA
gtataagggcaatgatacac

SEQ ID NO: 57028 - DNA, 20 bp, synthetic construct
  source 1..20: mol_type = other DNA
ggtataagggcaatgataca

SEQ ID NO: 57029 - DNA, 20 bp, synthetic construct
  source 1..20: mol_type = other DNA
tggtataagggcaatgatac

SEQ ID NO: 57030 - DNA, 20 bp, synthetic construct
  source 1..20: mol_type = other DNA
atggtataagggcaatgata

SEQ ID NO: 57031 - DNA, 20 bp, synthetic construct
  source 1..20: mol_type = other DNA
catggtataagggcaatgat

SEQ ID NO: 57032 - DNA, 20 bp, synthetic construct
  source 1..20: mol_type = other DNA
acatggtataagggcaatga

SEQ ID NO: 57033 - DNA, 20 bp, synthetic construct
  source 1..20: mol_type = other DNA
aacatggtataagggcaatg

SEQ ID NO: 57034 - DNA, 20 bp, synthetic construct
  source 1..20: mol_type = other DNA
caacatggtataagggcaat

SEQ ID NO: 57035 - DNA, 20 bp, synthetic construct
  source 1..20: mol_type = other DNA
acaacatggtataagggcaa

SEQ ID NO: 57036 - DNA, 20 bp, synthetic construct
  source 1..20: mol_type = other DNA
tacaacatggtataagggca

SEQ ID NO: 57037 - DNA, 20 bp, synthetic construct
  source 1..20: mol_type = other DNA
atacaacatggtataagggc

SEQ ID NO: 57038 - DNA, 20 bp, synthetic construct
  source 1..20: mol_type = other DNA
aatacaacatggtataaggg

SEQ ID NO: 57039 - DNA, 20 bp, synthetic construct
  source 1..20: mol_type = other DNA
taatacaacatggtataagg

SEQ ID NO: 57040 - DNA, 20 bp, synthetic construct
  source 1..20: mol_type = other DNA
ttaatacaacatggtataag

SEQ ID NO: 57041 - DNA, 20 bp, synthetic construct
  source 1..20: mol_type = other DNA
tttaatacaacatggtataa

SEQ ID NO: 57042 - DNA, 20 bp, synthetic construct
  source 1..20: mol_type = other DNA
ttttaatacaacatggtata

SEQ ID NO: 57043 - DNA, 20 bp, synthetic construct
  source 1..20: mol_type = other DNA
attttaatacaacatggtat

SEQ ID NO: 57044 - DNA, 20 bp, synthetic construct
  source 1..20: mol_type = other DNA
aattttaatacaacatggta

SEQ ID NO: 57045 - DNA, 20 bp, synthetic construct
  source 1..20: mol_type = other DNA
taattttaatacaacatggt

SEQ ID NO: 57046 - DNA, 20 bp, synthetic construct
  source 1..20: mol_type = other DNA
ataattttaatacaacatgg

SEQ ID NO: 57047 - DNA, 20 bp, synthetic construct
  source 1..20: mol_type = other DNA
tataattttaatacaacatg

SEQ ID NO: 57048 - DNA, 20 bp, synthetic construct
  source 1..20: mol_type = other DNA
atataattttaatacaacat

SEQ ID NO: 57049 - DNA, 20 bp, synthetic construct
  source 1..20: mol_type = other DNA
catataattttaatacaaca

SEQ ID NO: 57050 - DNA, 20 bp, synthetic construct
  source 1..20: mol_type = other DNA
gcatataattttaatacaac

SEQ ID NO: 57051 - DNA, 20 bp, synthetic construct
  source 1..20: mol_type = other DNA
agcatataattttaatacaa

SEQ ID NO: 57052 - DNA, 20 bp, synthetic construct
  source 1..20: mol_type = other DNA
aagcatataattttaataca

SEQ ID NO: 57053 - DNA, 20 bp, synthetic construct
  source 1..20: mol_type = other DNA
caagcatataattttaatac

SEQ ID NO: 57054 - DNA, 20 bp, synthetic construct
  source 1..20: mol_type = other DNA
acaagcatataattttaata

SEQ ID NO: 57055 - DNA, 20 bp, synthetic construct
  source 1..20: mol_type = other DNA
gacaagcatataattttaat

SEQ ID NO: 57056 - DNA, 20 bp, synthetic construct
  source 1..20: mol_type = other DNA
agacaagcatataattttaa

SEQ ID NO: 57057 - DNA, 20 bp, synthetic construct
  source 1..20: mol_type = other DNA
gagacaagcatataatttta

SEQ ID NO: 57058 - DNA, 20 bp, synthetic construct
  source 1..20: mol_type = other DNA
ggagacaagcatataatttt

SEQ ID NO: 57059 - DNA, 20 bp, synthetic construct
  source 1..20: mol_type = other DNA
gggagacaagcatataattt

SEQ ID NO: 57060 - DNA, 20 bp, synthetic construct
  source 1..20: mol_type = other DNA
ggggagacaagcatataatt

SEQ ID NO: 57061 - DNA, 20 bp, synthetic construct
  source 1..20: mol_type = other DNA
aggggagacaagcatataat

SEQ ID NO: 57062 - DNA, 20 bp, synthetic construct
  source 1..20: mol_type = other DNA
caggggagacaagcatataa

SEQ ID NO: 57063 - DNA, 20 bp, synthetic construct
  source 1..20: mol_type = other DNA
acaggggagacaagcatata

SEQ ID NO: 57064 - DNA, 20 bp, synthetic construct
  source 1..20: mol_type = other DNA
aacaggggagacaagcatat

SEQ ID NO: 57065 - DNA, 20 bp, synthetic construct
  source 1..20: mol_type = other DNA
taacaggggagacaagcata

SEQ ID NO: 57066 - DNA, 20 bp, synthetic construct
  source 1..20: mol_type = other DNA
gtaacaggggagacaagcat

SEQ ID NO: 57067 - DNA, 20 bp, synthetic construct
  source 1..20: mol_type = other DNA
tgtaacaggggagacaagca

SEQ ID NO: 57068 - DNA, 20 bp, synthetic construct
  source 1..20: mol_type = other DNA
ctgtaacaggggagacaagc

SEQ ID NO: 57069 - DNA, 20 bp, synthetic construct
  source 1..20: mol_type = other DNA
actgtaacaggggagacaag

SEQ ID NO: 57070 - DNA, 20 bp, synthetic construct
  source 1..20: mol_type = other DNA
aactgtaacaggggagacaa

SEQ ID NO: 57071 - DNA, 20 bp, synthetic construct
  source 1..20: mol_type = other DNA
aaactgtaacaggggagaca

SEQ ID NO: 57072 - DNA, 20 bp, synthetic construct
  source 1..20: mol_type = other DNA
caaactgtaacaggggagac

SEQ ID NO: 57073 - DNA, 20 bp, synthetic construct
  source 1..20: mol_type = other DNA
tcaaactgtaacaggggaga

SEQ ID NO: 57074 - DNA, 20 bp, synthetic construct
  source 1..20: mol_type = other DNA
ctcaaactgtaacaggggag

SEQ ID NO: 57075 - DNA, 20 bp, synthetic construct
  source 1..20: mol_type = other DNA
gctcaaactgtaacagggga

SEQ ID NO: 57076 - DNA, 20 bp, synthetic construct
  source 1..20: mol_type = other DNA
agctcaaactgtaacagggg

SEQ ID NO: 57077 - DNA, 20 bp, synthetic construct
  source 1..20: mol_type = other DNA
gagctcaaactgtaacaggg

SEQ ID NO: 57078 - DNA, 20 bp, synthetic construct
  source 1..20: mol_type = other DNA
agagctcaaactgtaacagg

SEQ ID NO: 57079 - DNA, 20 bp, synthetic construct
  source 1..20: mol_type = other DNA
aagagctcaaactgtaacag

SEQ ID NO: 57080 - DNA, 20 bp, synthetic construct
  source 1..20: mol_type = other DNA
aaagagctcaaactgtaaca

SEQ ID NO: 57081 - DNA, 20 bp, synthetic construct
  source 1..20: mol_type = other DNA
caaagagctcaaactgtaac

SEQ ID NO: 57082 - DNA, 20 bp, synthetic construct
  source 1..20: mol_type = other DNA
acaaagagctcaaactgtaa

SEQ ID NO: 57083 - DNA, 20 bp, synthetic construct
  source 1..20: mol_type = other DNA
cacaaagagctcaaactgta

SEQ ID NO: 57084 - DNA, 20 bp, synthetic construct
  source 1..20: mol_type = other DNA
gcacaaagagctcaaactgt

SEQ ID NO: 57085 - DNA, 20 bp, synthetic construct
  source 1..20: mol_type = other DNA
agcacaaagagctcaaactg

SEQ ID NO: 57086 - DNA, 20 bp, synthetic construct
  source 1..20: mol_type = other DNA
gagcacaaagagctcaaact

SEQ ID NO: 57087 - DNA, 20 bp, synthetic construct
  source 1..20: mol_type = other DNA
ggagcacaaagagctcaaac

SEQ ID NO: 57088 - DNA, 20 bp, synthetic construct
  source 1..20: mol_type = other DNA
tggagcacaaagagctcaaa

SEQ ID NO: 57089 - DNA, 20 bp, synthetic construct
  source 1..20: mol_type = other DNA
ttggagcacaaagagctcaa

SEQ ID NO: 57090 - DNA, 20 bp, synthetic construct
  source 1..20: mol_type = other DNA
cttggagcacaaagagctca

SEQ ID NO: 57091 - DNA, 20 bp, synthetic construct
  source 1..20: mol_type = other DNA
acttggagcacaaagagctc

SEQ ID NO: 57092 - DNA, 20 bp, synthetic construct
  source 1..20: mol_type = other DNA
tacttggagcacaaagagct

SEQ ID NO: 57093 - DNA, 20 bp, synthetic construct
  source 1..20: mol_type = other DNA
ttacttggagcacaaagagc

SEQ ID NO: 57094 - DNA, 20 bp, synthetic construct
  source 1..20: mol_type = other DNA
tttacttggagcacaaagag

SEQ ID NO: 57095 - DNA, 20 bp, synthetic construct
  source 1..20: mol_type = other DNA
ctttacttggagcacaaaga

SEQ ID NO: 57096 - DNA, 20 bp, synthetic construct
  source 1..20: mol_type = other DNA
tctttacttggagcacaaag

SEQ ID NO: 57097 - DNA, 20 bp, synthetic construct
  source 1..20: mol_type = other DNA
gtctttacttggagcacaaa

SEQ ID NO: 57098 - DNA, 20 bp, synthetic construct
  source 1..20: mol_type = other DNA
tgtctttacttggagcacaa

SEQ ID NO: 57099 - DNA, 20 bp, synthetic construct
  source 1..20: mol_type = other DNA
ctgtctttacttggagcaca

SEQ ID NO: 57100 - DNA, 20 bp, synthetic construct
  source 1..20: mol_type = other DNA
actgtctttacttggagcac

SEQ ID NO: 57101 - DNA, 20 bp, synthetic construct
  source 1..20: mol_type = other DNA
cactgtctttacttggagca

SEQ ID NO: 57102 - DNA, 20 bp, synthetic construct
  source 1..20: mol_type = other DNA
tcactgtctttacttggagc

SEQ ID NO: 57103 - DNA, 20 bp, synthetic construct
  source 1..20: mol_type = other DNA
atcactgtctttacttggag

SEQ ID NO: 57104 - DNA, 20 bp, synthetic construct
  source 1..20: mol_type = other DNA
tatcactgtctttacttgga

SEQ ID NO: 57105 - DNA, 20 bp, synthetic construct
  source 1..20: mol_type = other DNA
gtatcactgtctttacttgg

SEQ ID NO: 57106 - DNA, 20 bp, synthetic construct
  source 1..20: mol_type = other DNA
agtatcactgtctttacttg

SEQ ID NO: 57107 - DNA, 20 bp, synthetic construct
  source 1..20: mol_type = other DNA
cagtatcactgtctttactt

SEQ ID NO: 57108 - DNA, 20 bp, synthetic construct
  source 1..20: mol_type = other DNA
acagtatcactgtctttact

SEQ ID NO: 57109 - DNA, 20 bp, synthetic construct
  source 1..20: mol_type = other DNA
gacagtatcactgtctttac

SEQ ID NO: 57110 - DNA, 20 bp, synthetic construct
  source 1..20: mol_type = other DNA
agacagtatcactgtcttta

SEQ ID NO: 57111 - DNA, 20 bp, synthetic construct
  source 1..20: mol_type = other DNA
aagacagtatcactgtcttt

SEQ ID NO: 57112 - DNA, 20 bp, synthetic construct
  source 1..20: mol_type = other DNA
aaagacagtatcactgtctt

SEQ ID NO: 57113 - DNA, 20 bp, synthetic construct
  source 1..20: mol_type = other DNA
taaagacagtatcactgtct

SEQ ID NO: 57114 - DNA, 20 bp, synthetic construct
  source 1..20: mol_type = other DNA
ataaagacagtatcactgtc

SEQ ID NO: 57115 - DNA, 20 bp, synthetic construct
  source 1..20: mol_type = other DNA
aataaagacagtatcactgt

SEQ ID NO: 57116 - DNA, 20 bp, synthetic construct
  source 1..20: mol_type = other DNA
taataaagacagtatcactg

SEQ ID NO: 57117 - DNA, 20 bp, synthetic construct
  source 1..20: mol_type = other DNA
ataataaagacagtatcact

SEQ ID NO: 57118 - DNA, 20 bp, synthetic construct
  source 1..20: mol_type = other DNA
aataataaagacagtatcac

SEQ ID NO: 57119 - DNA, 20 bp, synthetic construct
  source 1..20: mol_type = other DNA
aaataataaagacagtatca

SEQ ID NO: 57120 - DNA, 20 bp, synthetic construct
  source 1..20: mol_type = other DNA
taaataataaagacagtatc

SEQ ID NO: 57121 - DNA, 20 bp, synthetic construct
  source 1..20: mol_type = other DNA
ataaataataaagacagtat

SEQ ID NO: 57122 - DNA, 20 bp, synthetic construct
  source 1..20: mol_type = other DNA
aataaataataaagacagta

SEQ ID NO: 57123 - DNA, 20 bp, synthetic construct
  source 1..20: mol_type = other DNA
gaataaataataaagacagt

SEQ ID NO: 57124 - DNA, 20 bp, synthetic construct
  source 1..20: mol_type = other DNA
agaataaataataaagacag

SEQ ID NO: 57125 - DNA, 20 bp, synthetic construct
  source 1..20: mol_type = other DNA
gagaataaataataaagaca

SEQ ID NO: 57126 - DNA, 20 bp, synthetic construct
  source 1..20: mol_type = other DNA
tgagaataaataataaagac

SEQ ID NO: 57127 - DNA, 20 bp, synthetic construct
  source 1..20: mol_type = other DNA
atgagaataaataataaaga

SEQ ID NO: 57128 - DNA, 20 bp, synthetic construct
  source 1..20: mol_type = other DNA
catgagaataaataataaag

SEQ ID NO: 57129 - DNA, 20 bp, synthetic construct
  source 1..20: mol_type = other DNA
ccatgagaataaataataaa

SEQ ID NO: 57130 - DNA, 20 bp, synthetic construct
  source 1..20: mol_type = other DNA
accatgagaataaataataa

SEQ ID NO: 57131 - DNA, 20 bp, synthetic construct
  source 1..20: mol_type = other DNA
gaccatgagaataaataata

SEQ ID NO: 57132 - DNA, 20 bp, synthetic construct
  source 1..20: mol_type = other DNA
agaccatgagaataaataat

SEQ ID NO: 57133 - DNA, 20 bp, synthetic construct
  source 1..20: mol_type = other DNA
tagaccatgagaataaataa

SEQ ID NO: 57134 - DNA, 20 bp, synthetic construct
  source 1..20: mol_type = other DNA
ctagaccatgagaataaata

SEQ ID NO: 57135 - DNA, 20 bp, synthetic construct
  source 1..20: mol_type = other DNA
actagaccatgagaataaat

SEQ ID NO: 57136 - DNA, 20 bp, synthetic construct
  source 1..20: mol_type = other DNA
tactagaccatgagaataaa

SEQ ID NO: 57137 - DNA, 20 bp, synthetic construct
  source 1..20: mol_type = other DNA
atactagaccatgagaataa

SEQ ID NO: 57138 - DNA, 20 bp, synthetic construct
  source 1..20: mol_type = other DNA
tatactagaccatgagaata

SEQ ID NO: 57139 - DNA, 20 bp, synthetic construct
  source 1..20: mol_type = other DNA
ctatactagaccatgagaat

SEQ ID NO: 57140 - DNA, 20 bp, synthetic construct
  source 1..20: mol_type = other DNA
actatactagaccatgagaa

SEQ ID NO: 57141 - DNA, 20 bp, synthetic construct
  source 1..20: mol_type = other DNA
cactatactagaccatgaga

SEQ ID NO: 57142 - DNA, 20 bp, synthetic construct
  source 1..20: mol_type = other DNA
gcactatactagaccatgag

SEQ ID NO: 57143 - DNA, 20 bp, synthetic construct
  source 1..20: mol_type = other DNA
agcactatactagaccatga

SEQ ID NO: 57144 - DNA, 20 bp, synthetic construct
  source 1..20: mol_type = other DNA
aagcactatactagaccatg

SEQ ID NO: 57145 - DNA, 20 bp, synthetic construct
  source 1..20: mol_type = other DNA
aaagcactatactagaccat

SEQ ID NO: 57146 - DNA, 20 bp, synthetic construct
  source 1..20: mol_type = other DNA
caaagcactatactagacca

SEQ ID NO: 57147 - DNA, 20 bp, synthetic construct
  source 1..20: mol_type = other DNA
ccaaagcactatactagacc

SEQ ID NO: 57148 - DNA, 20 bp, synthetic construct
  source 1..20: mol_type = other DNA
gccaaagcactatactagac

SEQ ID NO: 57149 - DNA, 20 bp, synthetic construct
  source 1..20: mol_type = other DNA
tgccaaagcactatactaga

SEQ ID NO: 57150 - DNA, 20 bp, synthetic construct
  source 1..20: mol_type = other DNA
gtgccaaagcactatactag

SEQ ID NO: 57151 - DNA, 20 bp, synthetic construct
  source 1..20: mol_type = other DNA
tgtgccaaagcactatacta

SEQ ID NO: 57152 - DNA, 20 bp, synthetic construct
  source 1..20: mol_type = other DNA
atgtgccaaagcactatact

SEQ ID NO: 57153 - DNA, 20 bp, synthetic construct
  source 1..20: mol_type = other DNA
tatgtgccaaagcactatac

SEQ ID NO: 57154 - DNA, 20 bp, synthetic construct
  source 1..20: mol_type = other DNA
ctatgtgccaaagcactata

SEQ ID NO: 57155 - DNA, 20 bp, synthetic construct
  source 1..20: mol_type = other DNA
actatgtgccaaagcactat

SEQ ID NO: 57156 - DNA, 20 bp, synthetic construct
  source 1..20: mol_type = other DNA
tactatgtgccaaagcacta

SEQ ID NO: 57157 - DNA, 20 bp, synthetic construct
  source 1..20: mol_type = other DNA
gtactatgtgccaaagcact

SEQ ID NO: 57158 - DNA, 20 bp, synthetic construct
  source 1..20: mol_type = other DNA
tgtactatgtgccaaagcac

SEQ ID NO: 57159 - DNA, 20 bp, synthetic construct
  source 1..20: mol_type = other DNA
ctgtactatgtgccaaagca

SEQ ID NO: 57160 - DNA, 20 bp, synthetic construct
  source 1..20: mol_type = other DNA
cctgtactatgtgccaaagc

SEQ ID NO: 57161 - DNA, 20 bp, synthetic construct
  source 1..20: mol_type = other DNA
gcctgtactatgtgccaaag

SEQ ID NO: 57162 - DNA, 20 bp, synthetic construct
  source 1..20: mol_type = other DNA
agcctgtactatgtgccaaa

SEQ ID NO: 57163 - DNA, 20 bp, synthetic construct
  source 1..20: mol_type = other DNA
gagcctgtactatgtgccaa

SEQ ID NO: 57164 - DNA, 20 bp, synthetic construct
  source 1..20: mol_type = other DNA
tgagcctgtactatgtgcca

SEQ ID NO: 57165 - DNA, 20 bp, synthetic construct
  source 1..20: mol_type = other DNA
ttgagcctgtactatgtgcc

SEQ ID NO: 57166 - DNA, 20 bp, synthetic construct
  source 1..20: mol_type = other DNA
attgagcctgtactatgtgc

SEQ ID NO: 57167 - DNA, 20 bp, synthetic construct
  source 1..20: mol_type = other DNA
tattgagcctgtactatgtg

SEQ ID NO: 57168 - DNA, 20 bp, synthetic construct
  source 1..20: mol_type = other DNA
atattgagcctgtactatgt

SEQ ID NO: 57169 - DNA, 20 bp, synthetic construct
  source 1..20: mol_type = other DNA
tatattgagcctgtactatg

SEQ ID NO: 57170 - DNA, 20 bp, synthetic construct
  source 1..20: mol_type = other DNA
ttatattgagcctgtactat

SEQ ID NO: 57171 - DNA, 20 bp, synthetic construct
  source 1..20: mol_type = other DNA
tttatattgagcctgtacta

SEQ ID NO: 57172 - DNA, 20 bp, synthetic construct
  source 1..20: mol_type = other DNA
atttatattgagcctgtact

SEQ ID NO: 57173 - DNA, 20 bp, synthetic construct
  source 1..20: mol_type = other DNA
catttatattgagcctgtac

SEQ ID NO: 57174 - DNA, 20 bp, synthetic construct
  source 1..20: mol_type = other DNA
acatttatattgagcctgta

SEQ ID NO: 57175 - DNA, 20 bp, synthetic construct
  source 1..20: mol_type = other DNA
cacatttatattgagcctgt

SEQ ID NO: 57176 - DNA, 20 bp, synthetic construct
  source 1..20: mol_type = other DNA
acacatttatattgagcctg

SEQ ID NO: 57177 - DNA, 20 bp, synthetic construct
  source 1..20: mol_type = other DNA
aacacatttatattgagcct

SEQ ID NO: 57178 - DNA, 20 bp, synthetic construct
  source 1..20: mol_type = other DNA
aaacacatttatattgagcc

SEQ ID NO: 57179 - DNA, 20 bp, synthetic construct
  source 1..20: mol_type = other DNA
caaacacatttatattgagc

SEQ ID NO: 57180 - DNA, 20 bp, synthetic construct
  source 1..20: mol_type = other DNA
tcaaacacatttatattgag

SEQ ID NO: 57181 - DNA, 20 bp, synthetic construct
  source 1..20: mol_type = other DNA
ttcaaacacatttatattga

SEQ ID NO: 57182 - DNA, 20 bp, synthetic construct
  source 1..20: mol_type = other DNA
attcaaacacatttatattg

SEQ ID NO: 57183 - DNA, 20 bp, synthetic construct
  source 1..20: mol_type = other DNA
tattcaaacacatttatatt

SEQ ID NO: 57184 - DNA, 20 bp, synthetic construct
  source 1..20: mol_type = other DNA
ttattcaaacacatttatat

SEQ ID NO: 57185 - DNA, 20 bp, synthetic construct
  source 1..20: mol_type = other DNA
tttattcaaacacatttata

SEQ ID NO: 57186 - DNA, 20 bp, synthetic construct
  source 1..20: mol_type = other DNA
atttattcaaacacatttat

SEQ ID NO: 57187 - DNA, 20 bp, synthetic construct
  source 1..20: mol_type = other DNA
catttattcaaacacattta

SEQ ID NO: 57188 - DNA, 20 bp, synthetic construct
  source 1..20: mol_type = other DNA
tcatttattcaaacacattt

SEQ ID NO: 57189 - DNA, 20 bp, synthetic construct
  source 1..20: mol_type = other DNA
ttcatttattcaaacacatt

SEQ ID NO: 57190 - DNA, 20 bp, synthetic construct
  source 1..20: mol_type = other DNA
tttcatttattcaaacacat

SEQ ID NO: 57191 - DNA, 20 bp, synthetic construct
  source 1..20: mol_type = other DNA
atttcatttattcaaacaca

SEQ ID NO: 57192 - DNA, 20 bp, synthetic construct
  source 1..20: mol_type = other DNA
aatttcatttattcaaacac

SEQ ID NO: 57193 - DNA, 20 bp, synthetic construct
  source 1..20: mol_type = other DNA
gaatttcatttattcaaaca

SEQ ID NO: 57194 - DNA, 20 bp, synthetic construct
  source 1..20: mol_type = other DNA
tgaatttcatttattcaaac

SEQ ID NO: 57195 - DNA, 20 bp, synthetic construct
  source 1..20: mol_type = other DNA
ctgaatttcatttattcaaa

SEQ ID NO: 57196 - DNA, 20 bp, synthetic construct
  source 1..20: mol_type = other DNA
actgaatttcatttattcaa

SEQ ID NO: 57197 - DNA, 20 bp, synthetic construct
  source 1..20: mol_type = other DNA
cactgaatttcatttattca

SEQ ID NO: 57198 - DNA, 20 bp, synthetic construct
  source 1..20: mol_type = other DNA
gcactgaatttcatttattc

SEQ ID NO: 57199 - DNA, 20 bp, synthetic construct
  source 1..20: mol_type = other DNA
ggcactgaatttcatttatt

SEQ ID NO: 57200 - DNA, 20 bp, synthetic construct
  source 1..20: mol_type = other DNA
aggcactgaatttcatttat

SEQ ID NO: 57201 - DNA, 20 bp, synthetic construct
  source 1..20: mol_type = other DNA
aaggcactgaatttcattta

SEQ ID NO: 57202 - DNA, 20 bp, synthetic construct
  source 1..20: mol_type = other DNA
taaggcactgaatttcattt

SEQ ID NO: 57203 - DNA, 20 bp, synthetic construct
  source 1..20: mol_type = other DNA
ttaaggcactgaatttcatt

SEQ ID NO: 57204 - DNA, 20 bp, synthetic construct
  source 1..20: mol_type = other DNA
attaaggcactgaatttcat

SEQ ID NO: 57205 - DNA, 20 bp, synthetic construct
  source 1..20: mol_type = other DNA
tattaaggcactgaatttca

SEQ ID NO: 57206 - DNA, 20 bp, synthetic construct
  source 1..20: mol_type = other DNA
gtattaaggcactgaatttc

SEQ ID NO: 57207 - DNA, 20 bp, synthetic construct
  source 1..20: mol_type = other DNA
tgtattaaggcactgaattt

SEQ ID NO: 57208 - DNA, 20 bp, synthetic construct
  source 1..20: mol_type = other DNA
gtgtattaaggcactgaatt

SEQ ID NO: 57209 - DNA, 20 bp, synthetic construct
  source 1..20: mol_type = other DNA
agtgtattaaggcactgaat

SEQ ID NO: 57210 - DNA, 20 bp, synthetic construct
  source 1..20: mol_type = other DNA
aagtgtattaaggcactgaa

SEQ ID NO: 57211 - DNA, 20 bp, synthetic construct
  source 1..20: mol_type = other DNA
aaagtgtattaaggcactga

SEQ ID NO: 57212 - DNA, 20 bp, synthetic construct
  source 1..20: mol_type = other DNA
aaaagtgtattaaggcactg

SEQ ID NO: 57213 - DNA, 20 bp, synthetic construct
  source 1..20: mol_type = other DNA
caaaagtgtattaaggcact

SEQ ID NO: 57214 - DNA, 20 bp, synthetic construct
  source 1..20: mol_type = other DNA
acaaaagtgtattaaggcac

SEQ ID NO: 57215 - DNA, 20 bp, synthetic construct
  source 1..20: mol_type = other DNA
tacaaaagtgtattaaggca

SEQ ID NO: 57216 - DNA, 20 bp, synthetic construct
  source 1..20: mol_type = other DNA
ctacaaaagtgtattaaggc

SEQ ID NO: 57217 - DNA, 20 bp, synthetic construct
  source 1..20: mol_type = other DNA
tctacaaaagtgtattaagg

SEQ ID NO: 57218 - DNA, 20 bp, synthetic construct
  source 1..20: mol_type = other DNA
ttctacaaaagtgtattaag

SEQ ID NO: 57219 - DNA, 20 bp, synthetic construct
  source 1..20: mol_type = other DNA
cttctacaaaagtgtattaa

SEQ ID NO: 57220 - DNA, 20 bp, synthetic construct
  source 1..20: mol_type = other DNA
gcttctacaaaagtgtatta

SEQ ID NO: 57221 - DNA, 20 bp, synthetic construct
  source 1..20: mol_type = other DNA
tgcttctacaaaagtgtatt

SEQ ID NO: 57222 - DNA, 20 bp, synthetic construct
  source 1..20: mol_type = other DNA
atgcttctacaaaagtgtat

SEQ ID NO: 57223 - DNA, 20 bp, synthetic construct
  source 1..20: mol_type = other DNA
aatgcttctacaaaagtgta

SEQ ID NO: 57224 - DNA, 20 bp, synthetic construct
  source 1..20: mol_type = other DNA
taatgcttctacaaaagtgt

SEQ ID NO: 57225 - DNA, 20 bp, synthetic construct
  source 1..20: mol_type = other DNA
ataatgcttctacaaaagtg

SEQ ID NO: 57226 - DNA, 20 bp, synthetic construct
  source 1..20: mol_type = other DNA
aataatgcttctacaaaagt

SEQ ID NO: 57227 - DNA, 20 bp, synthetic construct
  source 1..20: mol_type = other DNA
aaataatgcttctacaaaag

SEQ ID NO: 57228 - DNA, 20 bp, synthetic construct
  source 1..20: mol_type = other DNA
aaaataatgcttctacaaaa

SEQ ID NO: 57229 - DNA, 20 bp, synthetic construct
  source 1..20: mol_type = other DNA
taaaataatgcttctacaaa

SEQ ID NO: 57230 - DNA, 20 bp, synthetic construct
  source 1..20: mol_type = other DNA
ataaaataatgcttctacaa

SEQ ID NO: 57231 - DNA, 20 bp, synthetic construct
  source 1..20: mol_type = other DNA
cataaaataatgcttctaca

SEQ ID NO: 57232 - DNA, 20 bp, synthetic construct
  source 1..20: mol_type = other DNA
ccataaaataatgcttctac

SEQ ID NO: 57233 - DNA, 20 bp, synthetic construct
  source 1..20: mol_type = other DNA
tccataaaataatgcttcta

SEQ ID NO: 57234 - DNA, 20 bp, synthetic construct
  source 1..20: mol_type = other DNA
ttccataaaataatgcttct

SEQ ID NO: 57235 - DNA, 20 bp, synthetic construct
  source 1..20: mol_type = other DNA
tttccataaaataatgcttc

SEQ ID NO: 57236 - DNA, 20 bp, synthetic construct
  source 1..20: mol_type = other DNA
ctttccataaaataatgctt

SEQ ID NO: 57237 - DNA, 20 bp, synthetic construct
  source 1..20: mol_type = other DNA
tctttccataaaataatgct

SEQ ID NO: 57238 - DNA, 20 bp, synthetic construct
  source 1..20: mol_type = other DNA
ttctttccataaaataatgc

SEQ ID NO: 57239 - DNA, 20 bp, synthetic construct
  source 1..20: mol_type = other DNA
attctttccataaaataatg

SEQ ID NO: 57240 - DNA, 20 bp, synthetic construct
  source 1..20: mol_type = other DNA
cattctttccataaaataat

SEQ ID NO: 57241 - DNA, 20 bp, synthetic construct
  source 1..20: mol_type = other DNA
tcattctttccataaaataa

SEQ ID NO: 57242 - DNA, 20 bp, synthetic construct
  source 1..20: mol_type = other DNA
ttcattctttccataaaata

SEQ ID NO: 57243 - DNA, 20 bp, synthetic construct
  source 1..20: mol_type = other DNA
tttcattctttccataaaat

SEQ ID NO: 57244 - DNA, 20 bp, synthetic construct
  source 1..20: mol_type = other DNA
ttttcattctttccataaaa

SEQ ID NO: 57245 - DNA, 20 bp, synthetic construct
  source 1..20: mol_type = other DNA
tttttcattctttccataaa

SEQ ID NO: 57246 - DNA, 20 bp, synthetic construct
  source 1..20: mol_type = other DNA
ctttttcattctttccataa

SEQ ID NO: 57247 - DNA, 20 bp, synthetic construct
  source 1..20: mol_type = other DNA
gctttttcattctttccata

SEQ ID NO: 57248 - DNA, 20 bp, synthetic construct
  source 1..20: mol_type = other DNA
agctttttcattctttccat

SEQ ID NO: 57249 - DNA, 20 bp, synthetic construct
  source 1..20: mol_type = other DNA
cagctttttcattctttcca

SEQ ID NO: 57250 - DNA, 20 bp, synthetic construct
  source 1..20: mol_type = other DNA
acagctttttcattctttcc

SEQ ID NO: 57251 - DNA, 20 bp, synthetic construct
  source 1..20: mol_type = other DNA
tacagctttttcattctttc

SEQ ID NO: 57252 - DNA, 20 bp, synthetic construct
  source 1..20: mol_type = other DNA
ttacagctttttcattcttt

SEQ ID NO: 57253 - DNA, 20 bp, synthetic construct
  source 1..20: mol_type = other DNA
cttacagctttttcattctt

SEQ ID NO: 57254 - DNA, 20 bp, synthetic construct
  source 1..20: mol_type = other DNA
acttacagctttttcattct

SEQ ID NO: 57255 - DNA, 20 bp, synthetic construct
  source 1..20: mol_type = other DNA
cacttacagctttttcattc

SEQ ID NO: 57256 - DNA, 20 bp, synthetic construct
  source 1..20: mol_type = other DNA
ccacttacagctttttcatt

SEQ ID NO: 57257 - DNA, 20 bp, synthetic construct
  source 1..20: mol_type = other DNA
accacttacagctttttcat

SEQ ID NO: 57258 - DNA, 20 bp, synthetic construct
  source 1..20: mol_type = other DNA
gaccacttacagctttttca

SEQ ID NO: 57259 - DNA, 20 bp, synthetic construct
  source 1..20: mol_type = other DNA
agaccacttacagctttttc

SEQ ID NO: 57260 - DNA, 20 bp, synthetic construct
  source 1..20: mol_type = other DNA
aagaccacttacagcttttt

SEQ ID NO: 57261 - DNA, 20 bp, synthetic construct
  source 1..20: mol_type = other DNA
taagaccacttacagctttt

SEQ ID NO: 57262 - DNA, 20 bp, synthetic construct
  source 1..20: mol_type = other DNA
gtaagaccacttacagcttt

SEQ ID NO: 57263 - DNA, 20 bp, synthetic construct
  source 1..20: mol_type = other DNA
tgtaagaccacttacagctt

SEQ ID NO: 57264 - DNA, 20 bp, synthetic construct
  source 1..20: mol_type = other DNA
atgtaagaccacttacagct

SEQ ID NO: 57265 - DNA, 20 bp, synthetic construct
  source 1..20: mol_type = other DNA
tatgtaagaccacttacagc

SEQ ID NO: 57266 - DNA, 20 bp, synthetic construct
  source 1..20: mol_type = other DNA
atatgtaagaccacttacag

SEQ ID NO: 57267 - DNA, 20 bp, synthetic construct
  source 1..20: mol_type = other DNA
tatatgtaagaccacttaca

SEQ ID NO: 57268 - DNA, 20 bp, synthetic construct
  source 1..20: mol_type = other DNA
atatatgtaagaccacttac

SEQ ID NO: 57269 - DNA, 20 bp, synthetic construct
  source 1..20: mol_type = other DNA
tatatatgtaagaccactta

SEQ ID NO: 57270 - DNA, 20 bp, synthetic construct
  source 1..20: mol_type = other DNA
ctatatatgtaagaccactt

SEQ ID NO: 57271 - DNA, 20 bp, synthetic construct
  source 1..20: mol_type = other DNA
actatatatgtaagaccact

SEQ ID NO: 57272 - DNA, 20 bp, synthetic construct
  source 1..20: mol_type = other DNA
gactatatatgtaagaccac

SEQ ID NO: 57273 - DNA, 20 bp, synthetic construct
  source 1..20: mol_type = other DNA
tgactatatatgtaagacca

SEQ ID NO: 57274 - DNA, 20 bp, synthetic construct
  source 1..20: mol_type = other DNA
atgactatatatgtaagacc

SEQ ID NO: 57275 - DNA, 20 bp, synthetic construct
  source 1..20: mol_type = other DNA
gatgactatatatgtaagac

SEQ ID NO: 57276 - DNA, 20 bp, synthetic construct
  source 1..20: mol_type = other DNA
ggatgactatatatgtaaga

SEQ ID NO: 57277 - DNA, 20 bp, synthetic construct
  source 1..20: mol_type = other DNA
tggatgactatatatgtaag

SEQ ID NO: 57278 - DNA, 20 bp, synthetic construct
  source 1..20: mol_type = other DNA
ctggatgactatatatgtaa

SEQ ID NO: 57279 - DNA, 20 bp, synthetic construct
  source 1..20: mol_type = other DNA
gctggatgactatatatgta

SEQ ID NO: 57280 - DNA, 20 bp, synthetic construct
  source 1..20: mol_type = other DNA
tgctggatgactatatatgt

SEQ ID NO: 57281 - DNA, 20 bp, synthetic construct
  source 1..20: mol_type = other DNA
ctgctggatgactatatatg

SEQ ID NO: 57282 - DNA, 20 bp, synthetic construct
  source 1..20: mol_type = other DNA
tctgctggatgactatatat

SEQ ID NO: 57283 - DNA, 20 bp, synthetic construct
  source 1..20: mol_type = other DNA
atctgctggatgactatata

SEQ ID NO: 57284 - DNA, 20 bp, synthetic construct
  source 1..20: mol_type = other DNA
tatctgctggatgactatat

SEQ ID NO: 57285 - DNA, 20 bp, synthetic construct
  source 1..20: mol_type = other DNA
gtatctgctggatgactata

SEQ ID NO: 57286 - DNA, 20 bp, synthetic construct
  source 1..20: mol_type = other DNA
agtatctgctggatgactat

SEQ ID NO: 57287 - DNA, 20 bp, synthetic construct
  source 1..20: mol_type = other DNA
aagtatctgctggatgacta

SEQ ID NO: 57288 - DNA, 20 bp, synthetic construct
  source 1..20: mol_type = other DNA
taagtatctgctggatgact

SEQ ID NO: 57289 - DNA, 20 bp, synthetic construct
  source 1..20: mol_type = other DNA
ctaagtatctgctggatgac

SEQ ID NO: 57290 - DNA, 20 bp, synthetic construct
  source 1..20: mol_type = other DNA
tctaagtatctgctggatga

SEQ ID NO: 57291 - DNA, 20 bp, synthetic construct
  source 1..20: mol_type = other DNA
ctctaagtatctgctggatg

SEQ ID NO: 57292 - DNA, 20 bp, synthetic construct
  source 1..20: mol_type = other DNA
tctctaagtatctgctggat

SEQ ID NO: 57293 - DNA, 20 bp, synthetic construct
  source 1..20: mol_type = other DNA
ctctctaagtatctgctgga

SEQ ID NO: 57294 - DNA, 20 bp, synthetic construct
  source 1..20: mol_type = other DNA
gctctctaagtatctgctgg

SEQ ID NO: 57295 - DNA, 20 bp, synthetic construct
  source 1..20: mol_type = other DNA
agctctctaagtatctgctg

SEQ ID NO: 57296 - DNA, 20 bp, synthetic construct
  source 1..20: mol_type = other DNA
gagctctctaagtatctgct

SEQ ID NO: 57297 - DNA, 20 bp, synthetic construct
  source 1..20: mol_type = other DNA
agagctctctaagtatctgc

SEQ ID NO: 57298 - DNA, 20 bp, synthetic construct
  source 1..20: mol_type = other DNA
cagagctctctaagtatctg

SEQ ID NO: 57299 - DNA, 20 bp, synthetic construct
  source 1..20: mol_type = other DNA
ccagagctctctaagtatct

SEQ ID NO: 57300 - DNA, 20 bp, synthetic construct
  source 1..20: mol_type = other DNA
cccagagctctctaagtatc

SEQ ID NO: 57301 - DNA, 20 bp, synthetic construct
  source 1..20: mol_type = other DNA
tcccagagctctctaagtat

SEQ ID NO: 57302 - DNA, 20 bp, synthetic construct
  source 1..20: mol_type = other DNA
atcccagagctctctaagta

SEQ ID NO: 57303 - DNA, 20 bp, synthetic construct
  source 1..20: mol_type = other DNA
catcccagagctctctaagt

SEQ ID NO: 57304 - DNA, 20 bp, synthetic construct
  source 1..20: mol_type = other DNA
acatcccagagctctctaag

SEQ ID NO: 57305 - DNA, 20 bp, synthetic construct
  source 1..20: mol_type = other DNA
cacatcccagagctctctaa

SEQ ID NO: 57306 - DNA, 20 bp, synthetic construct
  source 1..20: mol_type = other DNA
acacatcccagagctctcta

SEQ ID NO: 57307 - DNA, 20 bp, synthetic construct
  source 1..20: mol_type = other DNA
aacacatcccagagctctct

SEQ ID NO: 57308 - DNA, 20 bp, synthetic construct
  source 1..20: mol_type = other DNA
gaacacatcccagagctctc

SEQ ID NO: 57309 - DNA, 20 bp, synthetic construct
  source 1..20: mol_type = other DNA
ggaacacatcccagagctct

SEQ ID NO: 57310 - DNA, 20 bp, synthetic construct
  source 1..20: mol_type = other DNA
aggaacacatcccagagctc

SEQ ID NO: 57311 - DNA, 20 bp, synthetic construct
  source 1..20: mol_type = other DNA
aaggaacacatcccagagct

SEQ ID NO: 57312 - DNA, 20 bp, synthetic construct
  source 1..20: mol_type = other DNA
caaggaacacatcccagagc

SEQ ID NO: 57313 - DNA, 20 bp, synthetic construct
  source 1..20: mol_type = other DNA
gcaaggaacacatcccagag

SEQ ID NO: 57314 - DNA, 20 bp, synthetic construct
  source 1..20: mol_type = other DNA
agcaaggaacacatcccaga

SEQ ID NO: 57315 - DNA, 20 bp, synthetic construct
  source 1..20: mol_type = other DNA
cagcaaggaacacatcccag

SEQ ID NO: 57316 - DNA, 20 bp, synthetic construct
  source 1..20: mol_type = other DNA
acagcaaggaacacatccca

SEQ ID NO: 57317 - DNA, 20 bp, synthetic construct
  source 1..20: mol_type = other DNA
cacagcaaggaacacatccc

SEQ ID NO: 57318 - DNA, 20 bp, synthetic construct
  source 1..20: mol_type = other DNA
gcacagcaaggaacacatcc

SEQ ID NO: 57319 - DNA, 20 bp, synthetic construct
  source 1..20: mol_type = other DNA
agcacagcaaggaacacatc

SEQ ID NO: 57320 - DNA, 20 bp, synthetic construct
  source 1..20: mol_type = other DNA
aagcacagcaaggaacacat

SEQ ID NO: 57321 - DNA, 20 bp, synthetic construct
  source 1..20: mol_type = other DNA
caagcacagcaaggaacaca

SEQ ID NO: 57322 - DNA, 20 bp, synthetic construct
  source 1..20: mol_type = other DNA
acaagcacagcaaggaacac

SEQ ID NO: 57323 - DNA, 20 bp, synthetic construct
  source 1..20: mol_type = other DNA
aacaagcacagcaaggaaca

SEQ ID NO: 57324 - DNA, 20 bp, synthetic construct
  source 1..20: mol_type = other DNA
caacaagcacagcaaggaac

SEQ ID NO: 57325 - DNA, 20 bp, synthetic construct
  source 1..20: mol_type = other DNA
gcaacaagcacagcaaggaa

SEQ ID NO: 57326 - DNA, 20 bp, synthetic construct
  source 1..20: mol_type = other DNA
agcaacaagcacagcaagga

SEQ ID NO: 57327 - DNA, 20 bp, synthetic construct
  source 1..20: mol_type = other DNA
tagcaacaagcacagcaagg

SEQ ID NO: 57328 - DNA, 20 bp, synthetic construct
  source 1..20: mol_type = other DNA
atagcaacaagcacagcaag

SEQ ID NO: 57329 - DNA, 20 bp, synthetic construct
  source 1..20: mol_type = other DNA
catagcaacaagcacagcaa

SEQ ID NO: 57330 - DNA, 20 bp, synthetic construct
  source 1..20: mol_type = other DNA
ccatagcaacaagcacagca

SEQ ID NO: 57331 - DNA, 20 bp, synthetic construct
  source 1..20: mol_type = other DNA
tccatagcaacaagcacagc

SEQ ID NO: 57332 - DNA, 20 bp, synthetic construct
  source 1..20: mol_type = other DNA
gtccatagcaacaagcacag

SEQ ID NO: 57333 - DNA, 20 bp, synthetic construct
  source 1..20: mol_type = other DNA
tgtccatagcaacaagcaca

SEQ ID NO: 57334 - DNA, 20 bp, synthetic construct
  source 1..20: mol_type = other DNA
ctgtccatagcaacaagcac

SEQ ID NO: 57335 - DNA, 20 bp, synthetic construct
  source 1..20: mol_type = other DNA
actgtccatagcaacaagca

SEQ ID NO: 57336 - DNA, 20 bp, synthetic construct
  source 1..20: mol_type = other DNA
tactgtccatagcaacaagc

SEQ ID NO: 57337 - DNA, 20 bp, synthetic construct
  source 1..20: mol_type = other DNA
gtactgtccatagcaacaag

SEQ ID NO: 57338 - DNA, 20 bp, synthetic construct
  source 1..20: mol_type = other DNA
cgtactgtccatagcaacaa

SEQ ID NO: 57339 - DNA, 20 bp, synthetic construct
  source 1..20: mol_type = other DNA
ccgtactgtccatagcaaca

SEQ ID NO: 57340 - DNA, 20 bp, synthetic construct
  source 1..20: mol_type = other DNA
tccgtactgtccatagcaac

SEQ ID NO: 57341 - DNA, 20 bp, synthetic construct
  source 1..20: mol_type = other DNA
ctccgtactgtccatagcaa

SEQ ID NO: 57342 - DNA, 20 bp, synthetic construct
  source 1..20: mol_type = other DNA
tctccgtactgtccatagca

SEQ ID NO: 57343 - DNA, 20 bp, synthetic construct
  source 1..20: mol_type = other DNA
ttctccgtactgtccatagc

SEQ ID NO: 57344 - DNA, 20 bp, synthetic construct
  source 1..20: mol_type = other DNA
tttctccgtactgtccatag

SEQ ID NO: 57345 - DNA, 20 bp, synthetic construct
  source 1..20: mol_type = other DNA
atttctccgtactgtccata

SEQ ID NO: 57346 - DNA, 20 bp, synthetic construct
  source 1..20: mol_type = other DNA
tatttctccgtactgtccat

SEQ ID NO: 57347 - DNA, 20 bp, synthetic construct
  source 1..20: mol_type = other DNA
gtatttctccgtactgtcca

SEQ ID NO: 57348 - DNA, 20 bp, synthetic construct
  source 1..20: mol_type = other DNA
tgtatttctccgtactgtcc

SEQ ID NO: 57349 - DNA, 20 bp, synthetic construct
  source 1..20: mol_type = other DNA
ttgtatttctccgtactgtc

SEQ ID NO: 57350 - DNA, 20 bp, synthetic construct
  source 1..20: mol_type = other DNA
cttgtatttctccgtactgt

SEQ ID NO: 57351 - DNA, 20 bp, synthetic construct
  source 1..20: mol_type = other DNA
tcttgtatttctccgtactg

SEQ ID NO: 57352 - DNA, 20 bp, synthetic construct
  source 1..20: mol_type = other DNA
ttcttgtatttctccgtact

SEQ ID NO: 57353 - DNA, 20 bp, synthetic construct
  source 1..20: mol_type = other DNA
attcttgtatttctccgtac

SEQ ID NO: 57354 - DNA, 20 bp, synthetic construct
  source 1..20: mol_type = other DNA
gattcttgtatttctccgta

SEQ ID NO: 57355 - DNA, 20 bp, synthetic construct
  source 1..20: mol_type = other DNA
agattcttgtatttctccgt

SEQ ID NO: 57356 - DNA, 20 bp, synthetic construct
  source 1..20: mol_type = other DNA
tagattcttgtatttctccg

SEQ ID NO: 57357 - DNA, 20 bp, synthetic construct
  source 1..20: mol_type = other DNA
atagattcttgtatttctcc

SEQ ID NO: 57358 - DNA, 20 bp, synthetic construct
  source 1..20: mol_type = other DNA
aatagattcttgtatttctc

SEQ ID NO: 57359 - DNA, 20 bp, synthetic construct
  source 1..20: mol_type = other DNA
aaatagattcttgtatttct

SEQ ID NO: 57360 - DNA, 20 bp, synthetic construct
  source 1..20: mol_type = other DNA
aaaatagattcttgtatttc

SEQ ID NO: 57361 - DNA, 20 bp, synthetic construct
  source 1..20: mol_type = other DNA
caaaatagattcttgtattt

SEQ ID NO: 57362 - DNA, 20 bp, synthetic construct
  source 1..20: mol_type = other DNA
ccaaaatagattcttgtatt

SEQ ID NO: 57363 - DNA, 20 bp, synthetic construct
  source 1..20: mol_type = other DNA
cccaaaatagattcttgtat

SEQ ID NO: 57364 - DNA, 20 bp, synthetic construct
  source 1..20: mol_type = other DNA
acccaaaatagattcttgta

SEQ ID NO: 57365 - DNA, 20 bp, synthetic construct
  source 1..20: mol_type = other DNA
gacccaaaatagattcttgt

SEQ ID NO: 57366 - DNA, 20 bp, synthetic construct
  source 1..20: mol_type = other DNA
ggacccaaaatagattcttg

SEQ ID NO: 57367 - DNA, 20 bp, synthetic construct
  source 1..20: mol_type = other DNA
gggacccaaaatagattctt

SEQ ID NO: 57368 - DNA, 20 bp, synthetic construct
  source 1..20: mol_type = other DNA
agggacccaaaatagattct

SEQ ID NO: 57369 - DNA, 20 bp, synthetic construct
  source 1..20: mol_type = other DNA
aagggacccaaaatagattc

SEQ ID NO: 57370 - DNA, 20 bp, synthetic construct
  source 1..20: mol_type = other DNA
aaagggacccaaaatagatt

SEQ ID NO: 57371 - DNA, 20 bp, synthetic construct
  source 1..20: mol_type = other DNA
aaaagggacccaaaatagat

SEQ ID NO: 57372 - DNA, 20 bp, synthetic construct
  source 1..20: mol_type = other DNA
caaaagggacccaaaataga

SEQ ID NO: 57373 - DNA, 20 bp, synthetic construct
  source 1..20: mol_type = other DNA
tcaaaagggacccaaaatag

SEQ ID NO: 57374 - DNA, 20 bp, synthetic construct
  source 1..20: mol_type = other DNA
ctcaaaagggacccaaaata

SEQ ID NO: 57375 - DNA, 20 bp, synthetic construct
  source 1..20: mol_type = other DNA
tctcaaaagggacccaaaat

SEQ ID NO: 57376 - DNA, 20 bp, synthetic construct
  source 1..20: mol_type = other DNA
ttctcaaaagggacccaaaa

SEQ ID NO: 57377 - DNA, 20 bp, synthetic construct
  source 1..20: mol_type = other DNA
gttctcaaaagggacccaaa

SEQ ID NO: 57378 - DNA, 20 bp, synthetic construct
  source 1..20: mol_type = other DNA
ggttctcaaaagggacccaa

SEQ ID NO: 57379 - DNA, 20 bp, synthetic construct
  source 1..20: mol_type = other DNA
aggttctcaaaagggaccca

SEQ ID NO: 57380 - DNA, 20 bp, synthetic construct
  source 1..20: mol_type = other DNA
taggttctcaaaagggaccc

SEQ ID NO: 57381 - DNA, 20 bp, synthetic construct
  source 1..20: mol_type = other DNA
ctaggttctcaaaagggacc

SEQ ID NO: 57382 - DNA, 20 bp, synthetic construct
  source 1..20: mol_type = other DNA
actaggttctcaaaagggac

SEQ ID NO: 57383 - DNA, 20 bp, synthetic construct
  source 1..20: mol_type = other DNA
cactaggttctcaaaaggga

SEQ ID NO: 57384 - DNA, 20 bp, synthetic construct
  source 1..20: mol_type = other DNA
tcactaggttctcaaaaggg

SEQ ID NO: 57385 - DNA, 20 bp, synthetic construct
  source 1..20: mol_type = other DNA
ttcactaggttctcaaaagg

SEQ ID NO: 57386 - DNA, 20 bp, synthetic construct
  source 1..20: mol_type = other DNA
tttcactaggttctcaaaag

SEQ ID NO: 57387 - DNA, 20 bp, synthetic construct
  source 1..20: mol_type = other DNA
gtttcactaggttctcaaaa

SEQ ID NO: 57388 - DNA, 20 bp, synthetic construct
  source 1..20: mol_type = other DNA
agtttcactaggttctcaaa

SEQ ID NO: 57389 - DNA, 20 bp, synthetic construct
  source 1..20: mol_type = other DNA
cagtttcactaggttctcaa

SEQ ID NO: 57390 - DNA, 20 bp, synthetic construct
  source 1..20: mol_type = other DNA
acagtttcactaggttctca

SEQ ID NO: 57391 - DNA, 20 bp, synthetic construct
  source 1..20: mol_type = other DNA
cacagtttcactaggttctc

SEQ ID NO: 57392 - DNA, 20 bp, synthetic construct
  source 1..20: mol_type = other DNA
acacagtttcactaggttct

SEQ ID NO: 57393 - DNA, 20 bp, synthetic construct
  source 1..20: mol_type = other DNA
tacacagtttcactaggttc

SEQ ID NO: 57394 - DNA, 20 bp, synthetic construct
  source 1..20: mol_type = other DNA
gtacacagtttcactaggtt

SEQ ID NO: 57395 - DNA, 20 bp, synthetic construct
  source 1..20: mol_type = other DNA
ggtacacagtttcactaggt

SEQ ID NO: 57396 - DNA, 20 bp, synthetic construct
  source 1..20: mol_type = other DNA
aggtacacagtttcactagg

SEQ ID NO: 57397 - DNA, 20 bp, synthetic construct
  source 1..20: mol_type = other DNA
taggtacacagtttcactag

SEQ ID NO: 57398 - DNA, 20 bp, synthetic construct
  source 1..20: mol_type = other DNA
ctaggtacacagtttcacta

SEQ ID NO: 57399 - DNA, 20 bp, synthetic construct
  source 1..20: mol_type = other DNA
actaggtacacagtttcact

SEQ ID NO: 57400 - DNA, 20 bp, synthetic construct
  source 1..20: mol_type = other DNA
cactaggtacacagtttcac

SEQ ID NO: 57401 - DNA, 20 bp, synthetic construct
  source 1..20: mol_type = other DNA
tcactaggtacacagtttca

SEQ ID NO: 57402 - DNA, 20 bp, synthetic construct
  source 1..20: mol_type = other DNA
ttcactaggtacacagtttc

SEQ ID NO: 57403 - DNA, 20 bp, synthetic construct
  source 1..20: mol_type = other DNA
tttcactaggtacacagttt

SEQ ID NO: 57404 - DNA, 20 bp, synthetic construct
  source 1..20: mol_type = other DNA
gtttcactaggtacacagtt

SEQ ID NO: 57405 - DNA, 20 bp, synthetic construct
  source 1..20: mol_type = other DNA
agtttcactaggtacacagt

SEQ ID NO: 57406 - DNA, 20 bp, synthetic construct
  source 1..20: mol_type = other DNA
cagtttcactaggtacacag

SEQ ID NO: 57407 - DNA, 20 bp, synthetic construct
  source 1..20: mol_type = other DNA
acagtttcactaggtacaca

SEQ ID NO: 57408 - DNA, 20 bp, synthetic construct
  source 1..20: mol_type = other DNA
tacagtttcactaggtacac

SEQ ID NO: 57409 - DNA, 20 bp, synthetic construct
  source 1..20: mol_type = other DNA
atacagtttcactaggtaca

SEQ ID NO: 57410 - DNA, 20 bp, synthetic construct
  source 1..20: mol_type = other DNA
tatacagtttcactaggtac

SEQ ID NO: 57411 - DNA, 20 bp, synthetic construct
  source 1..20: mol_type = other DNA
gtatacagtttcactaggta

SEQ ID NO: 57412 - DNA, 20 bp, synthetic construct
  source 1..20: mol_type = other DNA
ggtatacagtttcactaggt

SEQ ID NO: 57413 - DNA, 20 bp, synthetic construct
  source 1..20: mol_type = other DNA
gggtatacagtttcactagg

SEQ ID NO: 57414 - DNA, 20 bp, synthetic construct
  source 1..20: mol_type = other DNA
agggtatacagtttcactag

SEQ ID NO: 57415 - DNA, 20 bp, synthetic construct
  source 1..20: mol_type = other DNA
gagggtatacagtttcacta

SEQ ID NO: 57416 - DNA, 20 bp, synthetic construct
  source 1..20: mol_type = other DNA
tgagggtatacagtttcact

SEQ ID NO: 57417 - DNA, 20 bp, synthetic construct
  source 1..20: mol_type = other DNA
gtgagggtatacagtttcac

SEQ ID NO: 57418 - DNA, 20 bp, synthetic construct
  source 1..20: mol_type = other DNA
ggtgagggtatacagtttca

SEQ ID NO: 57419 - DNA, 20 bp, synthetic construct
  source 1..20: mol_type = other DNA
gggtgagggtatacagtttc

SEQ ID NO: 57420 - DNA, 20 bp, synthetic construct
  source 1..20: mol_type = other DNA
agggtgagggtatacagttt

SEQ ID NO: 57421 - DNA, 20 bp, synthetic construct
  source 1..20: mol_type = other DNA
tagggtgagggtatacagtt

SEQ ID NO: 57422 - DNA, 20 bp, synthetic construct
  source 1..20: mol_type = other DNA
ctagggtgagggtatacagt

SEQ ID NO: 57423 - DNA, 20 bp, synthetic construct
  source 1..20: mol_type = other DNA
tctagggtgagggtatacag

SEQ ID NO: 57424 - DNA, 20 bp, synthetic construct
  source 1..20: mol_type = other DNA
ttctagggtgagggtataca

SEQ ID NO: 57425 - DNA, 20 bp, synthetic construct
  source 1..20: mol_type = other DNA
tttctagggtgagggtatac

SEQ ID NO: 57426 - DNA, 20 bp, synthetic construct
  source 1..20: mol_type = other DNA
ttttctagggtgagggtata

SEQ ID NO: 57427 - DNA, 20 bp, synthetic construct
  source 1..20: mol_type = other DNA
tttttctagggtgagggtat

SEQ ID NO: 57428 - DNA, 20 bp, synthetic construct
  source 1..20: mol_type = other DNA
atttttctagggtgagggta

SEQ ID NO: 57429 - DNA, 20 bp, synthetic construct
  source 1..20: mol_type = other DNA
aatttttctagggtgagggt

SEQ ID NO: 57430 - DNA, 20 bp, synthetic construct
  source 1..20: mol_type = other DNA
aaatttttctagggtgaggg

SEQ ID NO: 57431 - DNA, 20 bp, synthetic construct
  source 1..20: mol_type = other DNA
taaatttttctagggtgagg

SEQ ID NO: 57432 - DNA, 20 bp, synthetic construct
  source 1..20: mol_type = other DNA
gtaaatttttctagggtgag

SEQ ID NO: 57433 - DNA, 20 bp, synthetic construct
  source 1..20: mol_type = other DNA
tgtaaatttttctagggtga

SEQ ID NO: 57434 - DNA, 20 bp, synthetic construct
  source 1..20: mol_type = other DNA
gtgtaaatttttctagggtg

SEQ ID NO: 57435 - DNA, 20 bp, synthetic construct
  source 1..20: mol_type = other DNA
tgtgtaaatttttctagggt

SEQ ID NO: 57436 - DNA, 20 bp, synthetic construct
  source 1..20: mol_type = other DNA
gtgtgtaaatttttctaggg

SEQ ID NO: 57437 - DNA, 20 bp, synthetic construct
  source 1..20: mol_type = other DNA
tgtgtgtaaatttttctagg

SEQ ID NO: 57438 - DNA, 20 bp, synthetic construct
  source 1..20: mol_type = other DNA
atgtgtgtaaatttttctag

SEQ ID NO: 57439 - DNA, 20 bp, synthetic construct
  source 1..20: mol_type = other DNA
catgtgtgtaaatttttcta

SEQ ID NO: 57440 - DNA, 20 bp, synthetic construct
  source 1..20: mol_type = other DNA
acatgtgtgtaaatttttct

SEQ ID NO: 57441 - DNA, 20 bp, synthetic construct
  source 1..20: mol_type = other DNA
tacatgtgtgtaaatttttc

SEQ ID NO: 57442 - DNA, 20 bp, synthetic construct
  source 1..20: mol_type = other DNA
ctacatgtgtgtaaattttt

SEQ ID NO: 57443 - DNA, 20 bp, synthetic construct
  source 1..20: mol_type = other DNA
tctacatgtgtgtaaatttt

SEQ ID NO: 57444 - DNA, 20 bp, synthetic construct
  source 1..20: mol_type = other DNA
atctacatgtgtgtaaattt

SEQ ID NO: 57445 - DNA, 20 bp, synthetic construct
  source 1..20: mol_type = other DNA
aatctacatgtgtgtaaatt

SEQ ID NO: 57446 - DNA, 20 bp, synthetic construct
  source 1..20: mol_type = other DNA
aaatctacatgtgtgtaaat

SEQ ID NO: 57447 - DNA, 20 bp, synthetic construct
  source 1..20: mol_type = other DNA
aaaatctacatgtgtgtaaa

SEQ ID NO: 57448 - DNA, 20 bp, synthetic construct
  source 1..20: mol_type = other DNA
taaaatctacatgtgtgtaa

SEQ ID NO: 57449 - DNA, 20 bp, synthetic construct
  source 1..20: mol_type = other DNA
gtaaaatctacatgtgtgta

SEQ ID NO: 57450 - DNA, 20 bp, synthetic construct
  source 1..20: mol_type = other DNA
tgtaaaatctacatgtgtgt

SEQ ID NO: 57451 - DNA, 20 bp, synthetic construct
  source 1..20: mol_type = other DNA
atgtaaaatctacatgtgtg

SEQ ID NO: 57452 - DNA, 20 bp, synthetic construct
  source 1..20: mol_type = other DNA
catgtaaaatctacatgtgt

SEQ ID NO: 57453 - DNA, 20 bp, synthetic construct
  source 1..20: mol_type = other DNA
acatgtaaaatctacatgtg

SEQ ID NO: 57454 - DNA, 20 bp, synthetic construct
  source 1..20: mol_type = other DNA
tacatgtaaaatctacatgt

SEQ ID NO: 57455 - DNA, 20 bp, synthetic construct
  source 1..20: mol_type = other DNA
ttacatgtaaaatctacatg

SEQ ID NO: 57456 - DNA, 20 bp, synthetic construct
  source 1..20: mol_type = other DNA
attacatgtaaaatctacat

SEQ ID NO: 57457 - DNA, 20 bp, synthetic construct
  source 1..20: mol_type = other DNA
aattacatgtaaaatctaca

SEQ ID NO: 57458 - DNA, 20 bp, synthetic construct
  source 1..20: mol_type = other DNA
gaattacatgtaaaatctac

SEQ ID NO: 57459 - DNA, 20 bp, synthetic construct
  source 1..20: mol_type = other DNA
agaattacatgtaaaatcta

SEQ ID NO: 57460 - DNA, 20 bp, synthetic construct
  source 1..20: mol_type = other DNA
aagaattacatgtaaaatct

SEQ ID NO: 57461 - DNA, 20 bp, synthetic construct
  source 1..20: mol_type = other DNA
aaagaattacatgtaaaatc

SEQ ID NO: 57462 - DNA, 20 bp, synthetic construct
  source 1..20: mol_type = other DNA
aaaagaattacatgtaaaat

SEQ ID NO: 57463 - DNA, 20 bp, synthetic construct
  source 1..20: mol_type = other DNA
taaaagaattacatgtaaaa

SEQ ID NO: 57464 - DNA, 20 bp, synthetic construct
  source 1..20: mol_type = other DNA
ttaaaagaattacatgtaaa

SEQ ID NO: 57465 - DNA, 20 bp, synthetic construct
  source 1..20: mol_type = other DNA
tttaaaagaattacatgtaa

SEQ ID NO: 57466 - DNA, 20 bp, synthetic construct
  source 1..20: mol_type = other DNA
ttttaaaagaattacatgta

SEQ ID NO: 57467 - DNA, 20 bp, synthetic construct
  source 1..20: mol_type = other DNA
tttttaaaagaattacatgt

SEQ ID NO: 57468 - DNA, 20 bp, synthetic construct
  source 1..20: mol_type = other DNA
atttttaaaagaattacatg

SEQ ID NO: 57469 - DNA, 20 bp, synthetic construct
  source 1..20: mol_type = other DNA
aatttttaaaagaattacat

SEQ ID NO: 57470 - DNA, 20 bp, synthetic construct
  source 1..20: mol_type = other DNA
taatttttaaaagaattaca

SEQ ID NO: 57471 - DNA, 20 bp, synthetic construct
  source 1..20: mol_type = other DNA
ttaatttttaaaagaattac

SEQ ID NO: 57472 - DNA, 20 bp, synthetic construct
  source 1..20: mol_type = other DNA
attaatttttaaaagaatta

SEQ ID NO: 57473 - DNA, 20 bp, synthetic construct
  source 1..20: mol_type = other DNA
aattaatttttaaaagaatt

SEQ ID NO: 57474 - DNA, 20 bp, synthetic construct
  source 1..20: mol_type = other DNA
aaattaatttttaaaagaat

SEQ ID NO: 57475 - DNA, 20 bp, synthetic construct
  source 1..20: mol_type = other DNA
aaaattaatttttaaaagaa

SEQ ID NO: 57476 - DNA, 20 bp, synthetic construct
  source 1..20: mol_type = other DNA
aaaaattaatttttaaaaga

SEQ ID NO: 57477 - DNA, 20 bp, synthetic construct
  source 1..20: mol_type = other DNA
aaaaaattaatttttaaaag

SEQ ID NO: 57478 - DNA, 20 bp, synthetic construct
  source 1..20: mol_type = other DNA
aaaaaaattaatttttaaaa

SEQ ID NO: 57479 - DNA, 20 bp, synthetic construct
  source 1..20: mol_type = other DNA
aaaaaaaattaatttttaaa

SEQ ID NO: 57480 - DNA, 20 bp, synthetic construct
  source 1..20: mol_type = other DNA
gaaaaaaaattaatttttaa

SEQ ID NO: 57481 - DNA, 20 bp, synthetic construct
  source 1..20: mol_type = other DNA
agaaaaaaaattaattttta

SEQ ID NO: 57482 - DNA, 20 bp, synthetic construct
  source 1..20: mol_type = other DNA
aagaaaaaaaattaattttt

SEQ ID NO: 57483 - DNA, 20 bp, synthetic construct
  source 1..20: mol_type = other DNA
aaagaaaaaaaattaatttt

SEQ ID NO: 57484 - DNA, 20 bp, synthetic construct
  source 1..20: mol_type = other DNA
aaaagaaaaaaaattaattt

SEQ ID NO: 57485 - DNA, 20 bp, synthetic construct
  source 1..20: mol_type = other DNA
aaaaagaaaaaaaattaatt

SEQ ID NO: 57486 - DNA, 20 bp, synthetic construct
  source 1..20: mol_type = other DNA
aaaaaagaaaaaaaattaat

SEQ ID NO: 57487 - DNA, 20 bp, synthetic construct
  source 1..20: mol_type = other DNA
aaaaaaagaaaaaaaattaa

SEQ ID NO: 57488 - DNA, 20 bp, synthetic construct
  source 1..20: mol_type = other DNA
aaaaaaaagaaaaaaaatta

SEQ ID NO: 57489 - DNA, 20 bp, synthetic construct
  source 1..20: mol_type = other DNA
taaaaaaaagaaaaaaaatt

SEQ ID NO: 57490 - DNA, 20 bp, synthetic construct
  source 1..20: mol_type = other DNA
ttaaaaaaaagaaaaaaaat

SEQ ID NO: 57491 - DNA, 20 bp, synthetic construct
  source 1..20: mol_type = other DNA
tttaaaaaaaagaaaaaaaa

SEQ ID NO: 57492 - DNA, 20 bp, synthetic construct
  source 1..20: mol_type = other DNA
ctttaaaaaaaagaaaaaaa

SEQ ID NO: 57493 - DNA, 20 bp, synthetic construct
  source 1..20: mol_type = other DNA
tctttaaaaaaaagaaaaaa

SEQ ID NO: 57494 - DNA, 20 bp, synthetic construct
  source 1..20: mol_type = other DNA
ttctttaaaaaaaagaaaaa

SEQ ID NO: 57495 - DNA, 20 bp, synthetic construct
  source 1..20: mol_type = other DNA
tttctttaaaaaaaagaaaa

SEQ ID NO: 57496 - DNA, 20 bp, synthetic construct
  source 1..20: mol_type = other DNA
gtttctttaaaaaaaagaaa

SEQ ID NO: 57497 - DNA, 20 bp, synthetic construct
  source 1..20: mol_type = other DNA
tgtttctttaaaaaaaagaa

SEQ ID NO: 57498 - DNA, 20 bp, synthetic construct
  source 1..20: mol_type = other DNA
ctgtttctttaaaaaaaaga

SEQ ID NO: 57499 - DNA, 20 bp, synthetic construct
  source 1..20: mol_type = other DNA
cctgtttctttaaaaaaaag

SEQ ID NO: 57500 - DNA, 20 bp, synthetic construct
  source 1..20: mol_type = other DNA
ccctgtttctttaaaaaaaa

SEQ ID NO: 57501 - DNA, 20 bp, synthetic construct
  source 1..20: mol_type = other DNA
accctgtttctttaaaaaaa

SEQ ID NO: 57502 - DNA, 20 bp, synthetic construct
  source 1..20: mol_type = other DNA
gaccctgtttctttaaaaaa

SEQ ID NO: 57503 - DNA, 20 bp, synthetic construct
  source 1..20: mol_type = other DNA
tgaccctgtttctttaaaaa

SEQ ID NO: 57504 - DNA, 20 bp, synthetic construct
  source 1..20: mol_type = other DNA
atgaccctgtttctttaaaa

SEQ ID NO: 57505 - DNA, 20 bp, synthetic construct
  source 1..20: mol_type = other DNA
catgaccctgtttctttaaa

SEQ ID NO: 57506 - DNA, 20 bp, synthetic construct
  source 1..20: mol_type = other DNA
gcatgaccctgtttctttaa

SEQ ID NO: 57507 - DNA, 20 bp, synthetic construct
  source 1..20: mol_type = other DNA
agcatgaccctgtttcttta

SEQ ID NO: 57508 - DNA, 20 bp, synthetic construct
  source 1..20: mol_type = other DNA
gagcatgaccctgtttcttt

SEQ ID NO: 57509 - DNA, 20 bp, synthetic construct
  source 1..20: mol_type = other DNA
agagcatgaccctgtttctt

SEQ ID NO: 57510 - DNA, 20 bp, synthetic construct
  source 1..20: mol_type = other DNA
cagagcatgaccctgtttct

SEQ ID NO: 57511 - DNA, 20 bp, synthetic construct
  source 1..20: mol_type = other DNA
acagagcatgaccctgtttc

SEQ ID NO: 57512 - DNA, 20 bp, synthetic construct
  source 1..20: mol_type = other DNA
gacagagcatgaccctgttt

SEQ ID NO: 57513 - DNA, 20 bp, synthetic construct
  source 1..20: mol_type = other DNA
tgacagagcatgaccctgtt

SEQ ID NO: 57514 - DNA, 20 bp, synthetic construct
  source 1..20: mol_type = other DNA
gtgacagagcatgaccctgt

SEQ ID NO: 57515 - DNA, 20 bp, synthetic construct
  source 1..20: mol_type = other DNA
agtgacagagcatgaccctg

SEQ ID NO: 57516 - DNA, 20 bp, synthetic construct
  source 1..20: mol_type = other DNA
gagtgacagagcatgaccct

SEQ ID NO: 57517 - DNA, 20 bp, synthetic construct
  source 1..20: mol_type = other DNA
tgagtgacagagcatgaccc

SEQ ID NO: 57518 - DNA, 20 bp, synthetic construct
  source 1..20: mol_type = other DNA
ctgagtgacagagcatgacc

SEQ ID NO: 57519 - DNA, 20 bp, synthetic construct
  source 1..20: mol_type = other DNA
cctgagtgacagagcatgac

SEQ ID NO: 57520 - DNA, 20 bp, synthetic construct
  source 1..20: mol_type = other DNA
gcctgagtgacagagcatga

SEQ ID NO: 57521 - DNA, 20 bp, synthetic construct
  source 1..20: mol_type = other DNA
agcctgagtgacagagcatg

SEQ ID NO: 57522 - DNA, 20 bp, synthetic construct
  source 1..20: mol_type = other DNA
cagcctgagtgacagagcat

SEQ ID NO: 57523 - DNA, 20 bp, synthetic construct
  source 1..20: mol_type = other DNA
ccagcctgagtgacagagca

SEQ ID NO: 57524 - DNA, 20 bp, synthetic construct
  source 1..20: mol_type = other DNA
tccagcctgagtgacagagc

SEQ ID NO: 57525 - DNA, 20 bp, synthetic construct
  source 1..20: mol_type = other DNA
ttccagcctgagtgacagag

SEQ ID NO: 57526 - DNA, 20 bp, synthetic construct
  source 1..20: mol_type = other DNA
attccagcctgagtgacaga

SEQ ID NO: 57527 - DNA, 20 bp, synthetic construct
  source 1..20: mol_type = other DNA
cattccagcctgagtgacag

SEQ ID NO: 57528 - DNA, 20 bp, synthetic construct
  source 1..20: mol_type = other DNA
gcattccagcctgagtgaca

SEQ ID NO: 57529 - DNA, 20 bp, synthetic construct
  source 1..20: mol_type = other DNA
tgcattccagcctgagtgac

SEQ ID NO: 57530 - DNA, 20 bp, synthetic construct
  source 1..20: mol_type = other DNA
ctgcattccagcctgagtga

SEQ ID NO: 57531 - DNA, 20 bp, synthetic construct
  source 1..20: mol_type = other DNA
actgcattccagcctgagtg

SEQ ID NO: 57532 - DNA, 20 bp, synthetic construct
  source 1..20: mol_type = other DNA
cactgcattccagcctgagt

SEQ ID NO: 57533 - DNA, 20 bp, synthetic construct
  source 1..20: mol_type = other DNA
ccactgcattccagcctgag

SEQ ID NO: 57534 - DNA, 20 bp, synthetic construct
  source 1..20: mol_type = other DNA
accactgcattccagcctga

SEQ ID NO: 57535 - DNA, 20 bp, synthetic construct
  source 1..20: mol_type = other DNA
caccactgcattccagcctg

SEQ ID NO: 57536 - DNA, 20 bp, synthetic construct
  source 1..20: mol_type = other DNA
acaccactgcattccagcct

SEQ ID NO: 57537 - DNA, 20 bp, synthetic construct
  source 1..20: mol_type = other DNA
cacaccactgcattccagcc

SEQ ID NO: 57538 - DNA, 20 bp, synthetic construct
  source 1..20: mol_type = other DNA
tcacaccactgcattccagc

SEQ ID NO: 57539 - DNA, 20 bp, synthetic construct
  source 1..20: mol_type = other DNA
atcacaccactgcattccag

SEQ ID NO: 57540 - DNA, 20 bp, synthetic construct
  source 1..20: mol_type = other DNA
gatcacaccactgcattcca

SEQ ID NO: 57541 - DNA, 20 bp, synthetic construct
  source 1..20: mol_type = other DNA
tgatcacaccactgcattcc

SEQ ID NO: 57542 - DNA, 20 bp, synthetic construct
  source 1..20: mol_type = other DNA
atgatcacaccactgcattc

SEQ ID NO: 57543 - DNA, 20 bp, synthetic construct
  source 1..20: mol_type = other DNA
catgatcacaccactgcatt

SEQ ID NO: 57544 - DNA, 20 bp, synthetic construct
  source 1..20: mol_type = other DNA
ccatgatcacaccactgcat

SEQ ID NO: 57545 - DNA, 20 bp, synthetic construct
  source 1..20: mol_type = other DNA
gccatgatcacaccactgca

SEQ ID NO: 57546 - DNA, 20 bp, synthetic construct
  source 1..20: mol_type = other DNA
agccatgatcacaccactgc

SEQ ID NO: 57547 - DNA, 20 bp, synthetic construct
  source 1..20: mol_type = other DNA
aagccatgatcacaccactg

SEQ ID NO: 57548 - DNA, 20 bp, synthetic construct
  source 1..20: mol_type = other DNA
taagccatgatcacaccact

SEQ ID NO: 57549 - DNA, 20 bp, synthetic construct
  source 1..20: mol_type = other DNA
gtaagccatgatcacaccac

SEQ ID NO: 57550 - DNA, 20 bp, synthetic construct
  source 1..20: mol_type = other DNA
agtaagccatgatcacacca

SEQ ID NO: 57551 - DNA, 20 bp, synthetic construct
  source 1..20: mol_type = other DNA
cagtaagccatgatcacacc

SEQ ID NO: 57552 - DNA, 20 bp, synthetic construct
  source 1..20: mol_type = other DNA
acagtaagccatgatcacac

SEQ ID NO: 57553 - DNA, 20 bp, synthetic construct
  source 1..20: mol_type = other DNA
tacagtaagccatgatcaca

SEQ ID NO: 57554 - DNA, 20 bp, synthetic construct
  source 1..20: mol_type = other DNA
ctacagtaagccatgatcac

SEQ ID NO: 57555 - DNA, 20 bp, synthetic construct
  source 1..20: mol_type = other DNA
gctacagtaagccatgatca

SEQ ID NO: 57556 - DNA, 20 bp, synthetic construct
  source 1..20: mol_type = other DNA
ggctacagtaagccatgatc

SEQ ID NO: 57557 - DNA, 20 bp, synthetic construct
  source 1..20: mol_type = other DNA
aggctacagtaagccatgat

SEQ ID NO: 57558 - DNA, 20 bp, synthetic construct
  source 1..20: mol_type = other DNA
gaggctacagtaagccatga

SEQ ID NO: 57559 - DNA, 20 bp, synthetic construct
  source 1..20: mol_type = other DNA
cgaggctacagtaagccatg

SEQ ID NO: 57560 - DNA, 20 bp, synthetic construct
  source 1..20: mol_type = other DNA
tcgaggctacagtaagccat

SEQ ID NO: 57561 - DNA, 20 bp, synthetic construct
  source 1..20: mol_type = other DNA
gtcgaggctacagtaagcca

SEQ ID NO: 57562 - DNA, 20 bp, synthetic construct
  source 1..20: mol_type = other DNA
ggtcgaggctacagtaagcc

SEQ ID NO: 57563 - DNA, 20 bp, synthetic construct
  source 1..20: mol_type = other DNA
aggtcgaggctacagtaagc

SEQ ID NO: 57564 - DNA, 20 bp, synthetic construct
  source 1..20: mol_type = other DNA
gaggtcgaggctacagtaag

SEQ ID NO: 57565 - DNA, 20 bp, synthetic construct
  source 1..20: mol_type = other DNA
ggaggtcgaggctacagtaa

SEQ ID NO: 57566 - DNA, 20 bp, synthetic construct
  source 1..20: mol_type = other DNA
aggaggtcgaggctacagta

SEQ ID NO: 57567 - DNA, 20 bp, synthetic construct
  source 1..20: mol_type = other DNA
caggaggtcgaggctacagt

SEQ ID NO: 57568 - DNA, 20 bp, synthetic construct
  source 1..20: mol_type = other DNA
ccaggaggtcgaggctacag

SEQ ID NO: 57569 - DNA, 20 bp, synthetic construct
  source 1..20: mol_type = other DNA
gccaggaggtcgaggctaca

SEQ ID NO: 57570 - DNA, 20 bp, synthetic construct
  source 1..20: mol_type = other DNA
agccaggaggtcgaggctac

SEQ ID NO: 57571 - DNA, 20 bp, synthetic construct
  source 1..20: mol_type = other DNA
gagccaggaggtcgaggcta

SEQ ID NO: 57572 - DNA, 20 bp, synthetic construct
  source 1..20: mol_type = other DNA
tgagccaggaggtcgaggct

SEQ ID NO: 57573 - DNA, 20 bp, synthetic construct
  source 1..20: mol_type = other DNA
ttgagccaggaggtcgaggc

SEQ ID NO: 57574 - DNA, 20 bp, synthetic construct
  source 1..20: mol_type = other DNA
cttgagccaggaggtcgagg

SEQ ID NO: 57575 - DNA, 20 bp, synthetic construct
  source 1..20: mol_type = other DNA
gcttgagccaggaggtcgag

SEQ ID NO: 57576 - DNA, 20 bp, synthetic construct
  source 1..20: mol_type = other DNA
cgcttgagccaggaggtcga

SEQ ID NO: 57577 - DNA, 20 bp, synthetic construct
  source 1..20: mol_type = other DNA
tcgcttgagccaggaggtcg

SEQ ID NO: 57578 - DNA, 20 bp, synthetic construct
  source 1..20: mol_type = other DNA
gtcgcttgagccaggaggtc

SEQ ID NO: 57579 - DNA, 20 bp, synthetic construct
  source 1..20: mol_type = other DNA
agtcgcttgagccaggaggt

SEQ ID NO: 57580 - DNA, 20 bp, synthetic construct
  source 1..20: mol_type = other DNA
gagtcgcttgagccaggagg

SEQ ID NO: 57581 - DNA, 20 bp, synthetic construct
  source 1..20: mol_type = other DNA
agagtcgcttgagccaggag

SEQ ID NO: 57582 - DNA, 20 bp, synthetic construct
  source 1..20: mol_type = other DNA
gagagtcgcttgagccagga

SEQ ID NO: 57583 - DNA, 20 bp, synthetic construct
  source 1..20: mol_type = other DNA
ggagagtcgcttgagccagg

SEQ ID NO: 57584 - DNA, 20 bp, synthetic construct
  source 1..20: mol_type = other DNA
gggagagtcgcttgagccag

SEQ ID NO: 57585 - DNA, 20 bp, synthetic construct
  source 1..20: mol_type = other DNA
tgggagagtcgcttgagcca

SEQ ID NO: 57586 - DNA, 20 bp, synthetic construct
  source 1..20: mol_type = other DNA
gtgggagagtcgcttgagcc

SEQ ID NO: 57587 - DNA, 20 bp, synthetic construct
  source 1..20: mol_type = other DNA
ggtgggagagtcgcttgagc

SEQ ID NO: 57588 - DNA, 20 bp, synthetic construct
  source 1..20: mol_type = other DNA
aggtgggagagtcgcttgag

SEQ ID NO: 57589 - DNA, 20 bp, synthetic construct
  source 1..20: mol_type = other DNA
gaggtgggagagtcgcttga

SEQ ID NO: 57590 - DNA, 20 bp, synthetic construct
  source 1..20: mol_type = other DNA
tgaggtgggagagtcgcttg

SEQ ID NO: 57591 - DNA, 20 bp, synthetic construct
  source 1..20: mol_type = other DNA
ctgaggtgggagagtcgctt

SEQ ID NO: 57592 - DNA, 20 bp, synthetic construct
  source 1..20: mol_type = other DNA
gctgaggtgggagagtcgct

SEQ ID NO: 57593 - DNA, 20 bp, synthetic construct
  source 1..20: mol_type = other DNA
ggctgaggtgggagagtcgc

SEQ ID NO: 57594 - DNA, 20 bp, synthetic construct
  source 1..20: mol_type = other DNA
aggctgaggtgggagagtcg

SEQ ID NO: 57595 - DNA, 20 bp, synthetic construct
  source 1..20: mol_type = other DNA
gaggctgaggtgggagagtc

SEQ ID NO: 57596 - DNA, 20 bp, synthetic construct
  source 1..20: mol_type = other DNA
ggaggctgaggtgggagagt

SEQ ID NO: 57597 - DNA, 20 bp, synthetic construct
  source 1..20: mol_type = other DNA
gggaggctgaggtgggagag

SEQ ID NO: 57598 - DNA, 20 bp, synthetic construct
  source 1..20: mol_type = other DNA
tgggaggctgaggtgggaga

SEQ ID NO: 57599 - DNA, 20 bp, synthetic construct
  source 1..20: mol_type = other DNA
ttgggaggctgaggtgggag

SEQ ID NO: 57600 - DNA, 20 bp, synthetic construct
  source 1..20: mol_type = other DNA
cttgggaggctgaggtggga

SEQ ID NO: 57601 - DNA, 20 bp, synthetic construct
  source 1..20: mol_type = other DNA
acttgggaggctgaggtggg

SEQ ID NO: 57602 - DNA, 20 bp, synthetic construct
  source 1..20: mol_type = other DNA
tacttgggaggctgaggtgg

SEQ ID NO: 57603 - DNA, 20 bp, synthetic construct
  source 1..20: mol_type = other DNA
ctacttgggaggctgaggtg

SEQ ID NO: 57604 - DNA, 20 bp, synthetic construct
  source 1..20: mol_type = other DNA
gctacttgggaggctgaggt

SEQ ID NO: 57605 - DNA, 20 bp, synthetic construct
  source 1..20: mol_type = other DNA
agctacttgggaggctgagg

SEQ ID NO: 57606 - DNA, 20 bp, synthetic construct
  source 1..20: mol_type = other DNA
cagctacttgggaggctgag

SEQ ID NO: 57607 - DNA, 20 bp, synthetic construct
  source 1..20: mol_type = other DNA
ccagctacttgggaggctga

SEQ ID NO: 57608 - DNA, 20 bp, synthetic construct
  source 1..20: mol_type = other DNA
cccagctacttgggaggctg

SEQ ID NO: 57609 - DNA, 20 bp, synthetic construct
  source 1..20: mol_type = other DNA
ccccagctacttgggaggct

SEQ ID NO: 57610 - DNA, 20 bp, synthetic construct
  source 1..20: mol_type = other DNA
gccccagctacttgggaggc

SEQ ID NO: 57611 - DNA, 20 bp, synthetic construct
  source 1..20: mol_type = other DNA
agccccagctacttgggagg

SEQ ID NO: 57612 - DNA, 20 bp, synthetic construct
  source 1..20: mol_type = other DNA
tagccccagctacttgggag

SEQ ID NO: 57613 - DNA, 20 bp, synthetic construct
  source 1..20: mol_type = other DNA
gtagccccagctacttggga

SEQ ID NO: 57614 - DNA, 20 bp, synthetic construct
  source 1..20: mol_type = other DNA
tgtagccccagctacttggg

SEQ ID NO: 57615 - DNA, 20 bp, synthetic construct
  source 1..20: mol_type = other DNA
ctgtagccccagctacttgg

SEQ ID NO: 57616 - DNA, 20 bp, synthetic construct
  source 1..20: mol_type = other DNA
cctgtagccccagctacttg

SEQ ID NO: 57617 - DNA, 20 bp, synthetic construct
  source 1..20: mol_type = other DNA
acctgtagccccagctactt

SEQ ID NO: 57618 - DNA, 20 bp, synthetic construct
  source 1..20: mol_type = other DNA
cacctgtagccccagctact

SEQ ID NO: 57619 - DNA, 20 bp, synthetic construct
  source 1..20: mol_type = other DNA
gcacctgtagccccagctac

SEQ ID NO: 57620 - DNA, 20 bp, synthetic construct
  source 1..20: mol_type = other DNA
tgcacctgtagccccagcta

SEQ ID NO: 57621 - DNA, 20 bp, synthetic construct
  source 1..20: mol_type = other DNA
gtgcacctgtagccccagct

SEQ ID NO: 57622 - DNA, 20 bp, synthetic construct
  source 1..20: mol_type = other DNA
cgtgcacctgtagccccagc

SEQ ID NO: 57623 - DNA, 20 bp, synthetic construct
  source 1..20: mol_type = other DNA
gcgtgcacctgtagccccag

SEQ ID NO: 57624 - DNA, 20 bp, synthetic construct
  source 1..20: mol_type = other DNA
ggcgtgcacctgtagcccca

SEQ ID NO: 57625 - DNA, 20 bp, synthetic construct
  source 1..20: mol_type = other DNA
cggcgtgcacctgtagcccc

SEQ ID NO: 57626 - DNA, 20 bp, synthetic construct
  source 1..20: mol_type = other DNA
gcggcgtgcacctgtagccc

SEQ ID NO: 57627 - DNA, 20 bp, synthetic construct
  source 1..20: mol_type = other DNA
agcggcgtgcacctgtagcc

SEQ ID NO: 57628 - DNA, 20 bp, synthetic construct
  source 1..20: mol_type = other DNA
tagcggcgtgcacctgtagc

SEQ ID NO: 57629 - DNA, 20 bp, synthetic construct
  source 1..20: mol_type = other DNA
atagcggcgtgcacctgtag

SEQ ID NO: 57630 - DNA, 20 bp, synthetic construct
  source 1..20: mol_type = other DNA
catagcggcgtgcacctgta

SEQ ID NO: 57631 - DNA, 20 bp, synthetic construct
  source 1..20: mol_type = other DNA
gcatagcggcgtgcacctgt

SEQ ID NO: 57632 - DNA, 20 bp, synthetic construct
  source 1..20: mol_type = other DNA
ggcatagcggcgtgcacctg

SEQ ID NO: 57633 - DNA, 20 bp, synthetic construct
  source 1..20: mol_type = other DNA
gggcatagcggcgtgcacct

SEQ ID NO: 57634 - DNA, 20 bp, synthetic construct
  source 1..20: mol_type = other DNA
cgggcatagcggcgtgcacc

SEQ ID NO: 57635 - DNA, 20 bp, synthetic construct
  source 1..20: mol_type = other DNA
ccgggcatagcggcgtgcac

SEQ ID NO: 57636 - DNA, 20 bp, synthetic construct
  source 1..20: mol_type = other DNA
gccgggcatagcggcgtgca

SEQ ID NO: 57637 - DNA, 20 bp, synthetic construct
  source 1..20: mol_type = other DNA
agccgggcatagcggcgtgc

SEQ ID NO: 57638 - DNA, 20 bp, synthetic construct
  source 1..20: mol_type = other DNA
tagccgggcatagcggcgtg

SEQ ID NO: 57639 - DNA, 20 bp, synthetic construct
  source 1..20: mol_type = other DNA
ttagccgggcatagcggcgt

SEQ ID NO: 57640 - DNA, 20 bp, synthetic construct
  source 1..20: mol_type = other DNA
attagccgggcatagcggcg

SEQ ID NO: 57641 - DNA, 20 bp, synthetic construct
  source 1..20: mol_type = other DNA
aattagccgggcatagcggc

SEQ ID NO: 57642 - DNA, 20 bp, synthetic construct
  source 1..20: mol_type = other DNA
aaattagccgggcatagcgg

SEQ ID NO: 57643 - DNA, 20 bp, synthetic construct
  source 1..20: mol_type = other DNA
aaaattagccgggcatagcg

SEQ ID NO: 57644 - DNA, 20 bp, synthetic construct
  source 1..20: mol_type = other DNA
aaaaattagccgggcatagc

SEQ ID NO: 57645 - DNA, 20 bp, synthetic construct
  source 1..20: mol_type = other DNA
taaaaattagccgggcatag

SEQ ID NO: 57646 - DNA, 20 bp, synthetic construct
  source 1..20: mol_type = other DNA
ttaaaaattagccgggcata

SEQ ID NO: 57647 - DNA, 20 bp, synthetic construct
  source 1..20: mol_type = other DNA
tttaaaaattagccgggcat

SEQ ID NO: 57648 - DNA, 20 bp, synthetic construct
  source 1..20: mol_type = other DNA
ttttaaaaattagccgggca

SEQ ID NO: 57649 - DNA, 20 bp, synthetic construct
  source 1..20: mol_type = other DNA
tttttaaaaattagccgggc

SEQ ID NO: 57650 - DNA, 20 bp, synthetic construct
  source 1..20: mol_type = other DNA
atttttaaaaattagccggg

SEQ ID NO: 57651 - DNA, 20 bp, synthetic construct
  source 1..20: mol_type = other DNA
tatttttaaaaattagccgg

SEQ ID NO: 57652 - DNA, 20 bp, synthetic construct
  source 1..20: mol_type = other DNA
atatttttaaaaattagccg

SEQ ID NO: 57653 - DNA, 20 bp, synthetic construct
  source 1..20: mol_type = other DNA
aatatttttaaaaattagcc

SEQ ID NO: 57654 - DNA, 20 bp, synthetic construct
  source 1..20: mol_type = other DNA
aaatatttttaaaaattagc

SEQ ID NO: 57655 - DNA, 20 bp, synthetic construct
  source 1..20: mol_type = other DNA
aaaatatttttaaaaattag

SEQ ID NO: 57656 - DNA, 20 bp, synthetic construct
  source 1..20: mol_type = other DNA
taaaatatttttaaaaatta

SEQ ID NO: 57657 - DNA, 20 bp, synthetic construct
  source 1..20: mol_type = other DNA
ataaaatatttttaaaaatt

SEQ ID NO: 57658 - DNA, 20 bp, synthetic construct
  source 1..20: mol_type = other DNA
tataaaatatttttaaaaat

SEQ ID NO: 57659 - DNA, 20 bp, synthetic construct
  source 1..20: mol_type = other DNA
ctataaaatatttttaaaaa

SEQ ID NO: 57660 - DNA, 20 bp, synthetic construct
  source 1..20: mol_type = other DNA
tctataaaatatttttaaaa

SEQ ID NO: 57661 - DNA, 20 bp, synthetic construct
  source 1..20: mol_type = other DNA
gtctataaaatatttttaaa

SEQ ID NO: 57662 - DNA, 20 bp, synthetic construct
  source 1..20: mol_type = other DNA
tgtctataaaatatttttaa

SEQ ID NO: 57663 - DNA, 20 bp, synthetic construct
  source 1..20: mol_type = other DNA
gtgtctataaaatattttta

SEQ ID NO: 57664 - DNA, 20 bp, synthetic construct
  source 1..20: mol_type = other DNA
agtgtctataaaatattttt

SEQ ID NO: 57665 - DNA, 20 bp, synthetic construct
  source 1..20: mol_type = other DNA
cagtgtctataaaatatttt

SEQ ID NO: 57666 - DNA, 20 bp, synthetic construct
  source 1..20: mol_type = other DNA
ccagtgtctataaaatattt

SEQ ID NO: 57667 - DNA, 20 bp, synthetic construct
  source 1..20: mol_type = other DNA
accagtgtctataaaatatt

SEQ ID NO: 57668 - DNA, 20 bp, synthetic construct
  source 1..20: mol_type = other DNA
aaccagtgtctataaaatat

SEQ ID NO: 57669 - DNA, 20 bp, synthetic construct
  source 1..20: mol_type = other DNA
gaaccagtgtctataaaata

SEQ ID NO: 57670 - DNA, 20 bp, synthetic construct
  source 1..20: mol_type = other DNA
agaaccagtgtctataaaat

SEQ ID NO: 57671 - DNA, 20 bp, synthetic construct
  source 1..20: mol_type = other DNA
gagaaccagtgtctataaaa

SEQ ID NO: 57672 - DNA, 20 bp, synthetic construct
  source 1..20: mol_type = other DNA
tgagaaccagtgtctataaa

SEQ ID NO: 57673 - DNA, 20 bp, synthetic construct
  source 1..20: mol_type = other DNA
gtgagaaccagtgtctataa

SEQ ID NO: 57674 - DNA, 20 bp, synthetic construct
  source 1..20: mol_type = other DNA
agtgagaaccagtgtctata

SEQ ID NO: 57675 - DNA, 20 bp, synthetic construct
  source 1..20: mol_type = other DNA
tagtgagaaccagtgtctat

SEQ ID NO: 57676 - DNA, 20 bp, synthetic construct
  source 1..20: mol_type = other DNA
atagtgagaaccagtgtcta

SEQ ID NO: 57677 - DNA, 20 bp, synthetic construct
  source 1..20: mol_type = other DNA
catagtgagaaccagtgtct

SEQ ID NO: 57678 - DNA, 20 bp, synthetic construct
  source 1..20: mol_type = other DNA
acatagtgagaaccagtgtc

SEQ ID NO: 57679 - DNA, 20 bp, synthetic construct
  source 1..20: mol_type = other DNA
aacatagtgagaaccagtgt

SEQ ID NO: 57680 - DNA, 20 bp, synthetic construct
  source 1..20: mol_type = other DNA
aaacatagtgagaaccagtg

SEQ ID NO: 57681 - DNA, 20 bp, synthetic construct
  source 1..20: mol_type = other DNA
gaaacatagtgagaaccagt

SEQ ID NO: 57682 - DNA, 20 bp, synthetic construct
  source 1..20: mol_type = other DNA
ggaaacatagtgagaaccag

SEQ ID NO: 57683 - DNA, 20 bp, synthetic construct
  source 1..20: mol_type = other DNA
gggaaacatagtgagaacca

SEQ ID NO: 57684 - DNA, 20 bp, synthetic construct
  source 1..20: mol_type = other DNA
tgggaaacatagtgagaacc

SEQ ID NO: 57685 - DNA, 20 bp, synthetic construct
  source 1..20: mol_type = other DNA
ctgggaaacatagtgagaac

SEQ ID NO: 57686 - DNA, 20 bp, synthetic construct
  source 1..20: mol_type = other DNA
cctgggaaacatagtgagaa

SEQ ID NO: 57687 - DNA, 20 bp, synthetic construct
  source 1..20: mol_type = other DNA
gcctgggaaacatagtgaga

SEQ ID NO: 57688 - DNA, 20 bp, synthetic construct
  source 1..20: mol_type = other DNA
agcctgggaaacatagtgag

SEQ ID NO: 57689 - DNA, 20 bp, synthetic construct
  source 1..20: mol_type = other DNA
cagcctgggaaacatagtga

SEQ ID NO: 57690 - DNA, 20 bp, synthetic construct
  source 1..20: mol_type = other DNA
ccagcctgggaaacatagtg

SEQ ID NO: 57691 - DNA, 20 bp, synthetic construct
  source 1..20: mol_type = other DNA
gccagcctgggaaacatagt

SEQ ID NO: 57692 - DNA, 20 bp, synthetic construct
  source 1..20: mol_type = other DNA
ggccagcctgggaaacatag

SEQ ID NO: 57693 - DNA, 20 bp, synthetic construct
  source 1..20: mol_type = other DNA
aggccagcctgggaaacata

SEQ ID NO: 57694 - DNA, 20 bp, synthetic construct
  source 1..20: mol_type = other DNA
aaggccagcctgggaaacat

SEQ ID NO: 57695 - DNA, 20 bp, synthetic construct
  source 1..20: mol_type = other DNA
aaaggccagcctgggaaaca

SEQ ID NO: 57696 - DNA, 20 bp, synthetic construct
  source 1..20: mol_type = other DNA
taaaggccagcctgggaaac

SEQ ID NO: 57697 - DNA, 20 bp, synthetic construct
  source 1..20: mol_type = other DNA
gtaaaggccagcctgggaaa

SEQ ID NO: 57698 - DNA, 20 bp, synthetic construct
  source 1..20: mol_type = other DNA
ggtaaaggccagcctgggaa

SEQ ID NO: 57699 - DNA, 20 bp, synthetic construct
  source 1..20: mol_type = other DNA
aggtaaaggccagcctggga

SEQ ID NO: 57700 - DNA, 20 bp, synthetic construct
  source 1..20: mol_type = other DNA
gaggtaaaggccagcctggg

SEQ ID NO: 57701 - DNA, 20 bp, synthetic construct
  source 1..20: mol_type = other DNA
ggaggtaaaggccagcctgg

SEQ ID NO: 57702 - DNA, 20 bp, synthetic construct
  source 1..20: mol_type = other DNA
aggaggtaaaggccagcctg

SEQ ID NO: 57703 - DNA, 20 bp, synthetic construct
  source 1..20: mol_type = other DNA
caggaggtaaaggccagcct

SEQ ID NO: 57704 - DNA, 20 bp, synthetic construct
  source 1..20: mol_type = other DNA
ccaggaggtaaaggccagcc

SEQ ID NO: 57705 - DNA, 20 bp, synthetic construct
  source 1..20: mol_type = other DNA
cccaggaggtaaaggccagc

SEQ ID NO: 57706 - DNA, 20 bp, synthetic construct
  source 1..20: mol_type = other DNA
acccaggaggtaaaggccag

SEQ ID NO: 57707 - DNA, 20 bp, synthetic construct
  source 1..20: mol_type = other DNA
aacccaggaggtaaaggcca

SEQ ID NO: 57708 - DNA, 20 bp, synthetic construct
  source 1..20: mol_type = other DNA
gaacccaggaggtaaaggcc

SEQ ID NO: 57709 - DNA, 20 bp, synthetic construct
  source 1..20: mol_type = other DNA
tgaacccaggaggtaaaggc

SEQ ID NO: 57710 - DNA, 20 bp, synthetic construct
  source 1..20: mol_type = other DNA
ttgaacccaggaggtaaagg

SEQ ID NO: 57711 - DNA, 20 bp, synthetic construct
  source 1..20: mol_type = other DNA
cttgaacccaggaggtaaag

SEQ ID NO: 57712 - DNA, 20 bp, synthetic construct
  source 1..20: mol_type = other DNA
gcttgaacccaggaggtaaa

SEQ ID NO: 57713 - DNA, 20 bp, synthetic construct
  source 1..20: mol_type = other DNA
tgcttgaacccaggaggtaa

SEQ ID NO: 57714 - DNA, 20 bp, synthetic construct
  source 1..20: mol_type = other DNA
ttgcttgaacccaggaggta

SEQ ID NO: 57715 - DNA, 20 bp, synthetic construct
  source 1..20: mol_type = other DNA
attgcttgaacccaggaggt

SEQ ID NO: 57716 - DNA, 20 bp, synthetic construct
  source 1..20: mol_type = other DNA
gattgcttgaacccaggagg

SEQ ID NO: 57717 - DNA, 20 bp, synthetic construct
  source 1..20: mol_type = other DNA
ggattgcttgaacccaggag

SEQ ID NO: 57718 - DNA, 20 bp, synthetic construct
  source 1..20: mol_type = other DNA
aggattgcttgaacccagga

SEQ ID NO: 57719 - DNA, 20 bp, synthetic construct
  source 1..20: mol_type = other DNA
gaggattgcttgaacccagg

SEQ ID NO: 57720 - DNA, 20 bp, synthetic construct
  source 1..20: mol_type = other DNA
agaggattgcttgaacccag

SEQ ID NO: 57721 - DNA, 20 bp, synthetic construct
  source 1..20: mol_type = other DNA
tagaggattgcttgaaccca

SEQ ID NO: 57722 - DNA, 20 bp, synthetic construct
  source 1..20: mol_type = other DNA
gtagaggattgcttgaaccc

SEQ ID NO: 57723 - DNA, 20 bp, synthetic construct
  source 1..20: mol_type = other DNA
ggtagaggattgcttgaacc

SEQ ID NO: 57724 - DNA, 20 bp, synthetic construct
  source 1..20: mol_type = other DNA
aggtagaggattgcttgaac

SEQ ID NO: 57725 - DNA, 20 bp, synthetic construct
  source 1..20: mol_type = other DNA
aaggtagaggattgcttgaa

SEQ ID NO: 57726 - DNA, 20 bp, synthetic construct
  source 1..20: mol_type = other DNA
caaggtagaggattgcttga

SEQ ID NO: 57727 - DNA, 20 bp, synthetic construct
  source 1..20: mol_type = other DNA
ccaaggtagaggattgcttg

SEQ ID NO: 57728 - DNA, 20 bp, synthetic construct
  source 1..20: mol_type = other DNA
gccaaggtagaggattgctt

SEQ ID NO: 57729 - DNA, 20 bp, synthetic construct
  source 1..20: mol_type = other DNA
ggccaaggtagaggattgct

SEQ ID NO: 57730 - DNA, 20 bp, synthetic construct
  source 1..20: mol_type = other DNA
aggccaaggtagaggattgc

SEQ ID NO: 57731 - DNA, 20 bp, synthetic construct
  source 1..20: mol_type = other DNA
aaggccaaggtagaggattg

SEQ ID NO: 57732 - DNA, 20 bp, synthetic construct
  source 1..20: mol_type = other DNA
gaaggccaaggtagaggatt

SEQ ID NO: 57733 - DNA, 20 bp, synthetic construct
  source 1..20: mol_type = other DNA
tgaaggccaaggtagaggat

SEQ ID NO: 57734 - DNA, 20 bp, synthetic construct
  source 1..20: mol_type = other DNA
ttgaaggccaaggtagagga

SEQ ID NO: 57735 - DNA, 20 bp, synthetic construct
  source 1..20: mol_type = other DNA
tttgaaggccaaggtagagg

SEQ ID NO: 57736 - DNA, 20 bp, synthetic construct
  source 1..20: mol_type = other DNA
ttttgaaggccaaggtagag

SEQ ID NO: 57737 - DNA, 20 bp, synthetic construct
  source 1..20: mol_type = other DNA
cttttgaaggccaaggtaga

SEQ ID NO: 57738 - DNA, 20 bp, synthetic construct
  source 1..20: mol_type = other DNA
acttttgaaggccaaggtag

SEQ ID NO: 57739 - DNA, 20 bp, synthetic construct
  source 1..20: mol_type = other DNA
cacttttgaaggccaaggta

SEQ ID NO: 57740 - DNA, 20 bp, synthetic construct
  source 1..20: mol_type = other DNA
tcacttttgaaggccaaggt

SEQ ID NO: 57741 - DNA, 20 bp, synthetic construct
  source 1..20: mol_type = other DNA
atcacttttgaaggccaagg

SEQ ID NO: 57742 - DNA, 20 bp, synthetic construct
  source 1..20: mol_type = other DNA
catcacttttgaaggccaag

SEQ ID NO: 57743 - DNA, 20 bp, synthetic construct
  source 1..20: mol_type = other DNA
ccatcacttttgaaggccaa

SEQ ID NO: 57744 - DNA, 20 bp, synthetic construct
  source 1..20: mol_type = other DNA
cccatcacttttgaaggcca

SEQ ID NO: 57745 - DNA, 20 bp, synthetic construct
  source 1..20: mol_type = other DNA
tcccatcacttttgaaggcc

SEQ ID NO: 57746 - DNA, 20 bp, synthetic construct
  source 1..20: mol_type = other DNA
atcccatcacttttgaaggc

SEQ ID NO: 57747 - DNA, 20 bp, synthetic construct
  source 1..20: mol_type = other DNA
aatcccatcacttttgaagg

SEQ ID NO: 57748 - DNA, 20 bp, synthetic construct
  source 1..20: mol_type = other DNA
taatcccatcacttttgaag

SEQ ID NO: 57749 - DNA, 20 bp, synthetic construct
  source 1..20: mol_type = other DNA
ataatcccatcacttttgaa

SEQ ID NO: 57750 - DNA, 20 bp, synthetic construct
  source 1..20: mol_type = other DNA
tataatcccatcacttttga

SEQ ID NO: 57751 - DNA, 20 bp, synthetic construct
  source 1..20: mol_type = other DNA
ctataatcccatcacttttg

SEQ ID NO: 57752 - DNA, 20 bp, synthetic construct
  source 1..20: mol_type = other DNA
cctataatcccatcactttt

SEQ ID NO: 57753 - DNA, 20 bp, synthetic construct
  source 1..20: mol_type = other DNA
acctataatcccatcacttt

SEQ ID NO: 57754 - DNA, 20 bp, synthetic construct
  source 1..20: mol_type = other DNA
cacctataatcccatcactt

SEQ ID NO: 57755 - DNA, 20 bp, synthetic construct
  source 1..20: mol_type = other DNA
gcacctataatcccatcact

SEQ ID NO: 57756 - DNA, 20 bp, synthetic construct
  source 1..20: mol_type = other DNA
tgcacctataatcccatcac

SEQ ID NO: 57757 - DNA, 20 bp, synthetic construct
  source 1..20: mol_type = other DNA
ttgcacctataatcccatca

SEQ ID NO: 57758 - DNA, 20 bp, synthetic construct
  source 1..20: mol_type = other DNA
cttgcacctataatcccatc

SEQ ID NO: 57759 - DNA, 20 bp, synthetic construct
  source 1..20: mol_type = other DNA
gcttgcacctataatcccat

SEQ ID NO: 57760 - DNA, 20 bp, synthetic construct
  source 1..20: mol_type = other DNA
ggcttgcacctataatccca

SEQ ID NO: 57761 - DNA, 20 bp, synthetic construct
  source 1..20: mol_type = other DNA
tggcttgcacctataatccc

SEQ ID NO: 57762 - DNA, 20 bp, synthetic construct
  source 1..20: mol_type = other DNA
gtggcttgcacctataatcc

SEQ ID NO: 57763 - DNA, 20 bp, synthetic construct
  source 1..20: mol_type = other DNA
agtggcttgcacctataatc

SEQ ID NO: 57764 - DNA, 20 bp, synthetic construct
  source 1..20: mol_type = other DNA
cagtggcttgcacctataat

SEQ ID NO: 57765 - DNA, 20 bp, synthetic construct
  source 1..20: mol_type = other DNA
acagtggcttgcacctataa

SEQ ID NO: 57766 - DNA, 20 bp, synthetic construct
  source 1..20: mol_type = other DNA
cacagtggcttgcacctata

SEQ ID NO: 57767 - DNA, 20 bp, synthetic construct
  source 1..20: mol_type = other DNA
gcacagtggcttgcacctat

SEQ ID NO: 57768 - DNA, 20 bp, synthetic construct
  source 1..20: mol_type = other DNA
ggcacagtggcttgcaccta

SEQ ID NO: 57769 - DNA, 20 bp, synthetic construct
  source 1..20: mol_type = other DNA
gggcacagtggcttgcacct

SEQ ID NO: 57770 - DNA, 20 bp, synthetic construct
  source 1..20: mol_type = other DNA
tgggcacagtggcttgcacc

SEQ ID NO: 57771 - DNA, 20 bp, synthetic construct
  source 1..20: mol_type = other DNA
gtgggcacagtggcttgcac

SEQ ID NO: 57772 - DNA, 20 bp, synthetic construct
  source 1..20: mol_type = other DNA
cgtgggcacagtggcttgca

SEQ ID NO: 57773 - DNA, 20 bp, synthetic construct
  source 1..20: mol_type = other DNA
gcgtgggcacagtggcttgc

SEQ ID NO: 57774 - DNA, 20 bp, synthetic construct
  source 1..20: mol_type = other DNA
agcgtgggcacagtggcttg

SEQ ID NO: 57775 - DNA, 20 bp, synthetic construct
  source 1..20: mol_type = other DNA
tagcgtgggcacagtggctt

SEQ ID NO: 57776 - DNA, 20 bp, synthetic construct
  source 1..20: mol_type = other DNA
ttagcgtgggcacagtggct

SEQ ID NO: 57777 - DNA, 20 bp, synthetic construct
  source 1..20: mol_type = other DNA
attagcgtgggcacagtggc

SEQ ID NO: 57778 - DNA, 20 bp, synthetic construct
  source 1..20: mol_type = other DNA
cattagcgtgggcacagtgg

SEQ ID NO: 57779 - DNA, 20 bp, synthetic construct
  source 1..20: mol_type = other DNA
acattagcgtgggcacagtg

SEQ ID NO: 57780 - DNA, 20 bp, synthetic construct
  source 1..20: mol_type = other DNA
tacattagcgtgggcacagt

SEQ ID NO: 57781 - DNA, 20 bp, synthetic construct
  source 1..20: mol_type = other DNA
ttacattagcgtgggcacag

SEQ ID NO: 57782 - DNA, 20 bp, synthetic construct
  source 1..20: mol_type = other DNA
attacattagcgtgggcaca

SEQ ID NO: 57783 - DNA, 20 bp, synthetic construct
  source 1..20: mol_type = other DNA
aattacattagcgtgggcac

SEQ ID NO: 57784 - DNA, 20 bp, synthetic construct
  source 1..20: mol_type = other DNA
aaattacattagcgtgggca

SEQ ID NO: 57785 - DNA, 20 bp, synthetic construct
  source 1..20: mol_type = other DNA
gaaattacattagcgtgggc

SEQ ID NO: 57786 - DNA, 20 bp, synthetic construct
  source 1..20: mol_type = other DNA
tgaaattacattagcgtggg

SEQ ID NO: 57787 - DNA, 20 bp, synthetic construct
  source 1..20: mol_type = other DNA
atgaaattacattagcgtgg

SEQ ID NO: 57788 - DNA, 20 bp, synthetic construct
  source 1..20: mol_type = other DNA
catgaaattacattagcgtg

SEQ ID NO: 57789 - DNA, 20 bp, synthetic construct
  source 1..20: mol_type = other DNA
ccatgaaattacattagcgt

SEQ ID NO: 57790 - DNA, 20 bp, synthetic construct
  source 1..20: mol_type = other DNA
accatgaaattacattagcg

SEQ ID NO: 57791 - DNA, 20 bp, synthetic construct
  source 1..20: mol_type = other DNA
caccatgaaattacattagc

SEQ ID NO: 57792 - DNA, 20 bp, synthetic construct
  source 1..20: mol_type = other DNA
acaccatgaaattacattag

SEQ ID NO: 57793 - DNA, 20 bp, synthetic construct
  source 1..20: mol_type = other DNA
aacaccatgaaattacatta

SEQ ID NO: 57794 - DNA, 20 bp, synthetic construct
  source 1..20: mol_type = other DNA
gaacaccatgaaattacatt

SEQ ID NO: 57795 - DNA, 20 bp, synthetic construct
  source 1..20: mol_type = other DNA
tgaacaccatgaaattacat

SEQ ID NO: 57796 - DNA, 20 bp, synthetic construct
  source 1..20: mol_type = other DNA
gtgaacaccatgaaattaca

SEQ ID NO: 57797 - DNA, 20 bp, synthetic construct
  source 1..20: mol_type = other DNA
tgtgaacaccatgaaattac

SEQ ID NO: 57798 - DNA, 20 bp, synthetic construct
  source 1..20: mol_type = other DNA
ctgtgaacaccatgaaatta

SEQ ID NO: 57799 - DNA, 20 bp, synthetic construct
  source 1..20: mol_type = other DNA
actgtgaacaccatgaaatt

SEQ ID NO: 57800 - DNA, 20 bp, synthetic construct
  source 1..20: mol_type = other DNA
aactgtgaacaccatgaaat

SEQ ID NO: 57801 - DNA, 20 bp, synthetic construct
  source 1..20: mol_type = other DNA
aaactgtgaacaccatgaaa

SEQ ID NO: 57802 - DNA, 20 bp, synthetic construct
  source 1..20: mol_type = other DNA
gaaactgtgaacaccatgaa

SEQ ID NO: 57803 - DNA, 20 bp, synthetic construct
  source 1..20: mol_type = other DNA
agaaactgtgaacaccatga

SEQ ID NO: 57804 - DNA, 20 bp, synthetic construct
  source 1..20: mol_type = other DNA
aagaaactgtgaacaccatg

SEQ ID NO: 57805 - DNA, 20 bp, synthetic construct
  source 1..20: mol_type = other DNA
gaagaaactgtgaacaccat

SEQ ID NO: 57806 - DNA, 20 bp, synthetic construct
  source 1..20: mol_type = other DNA
tgaagaaactgtgaacacca

SEQ ID NO: 57807 - DNA, 20 bp, synthetic construct
  source 1..20: mol_type = other DNA
ctgaagaaactgtgaacacc

SEQ ID NO: 57808 - DNA, 20 bp, synthetic construct
  source 1..20: mol_type = other DNA
cctgaagaaactgtgaacac

SEQ ID NO: 57809 - DNA, 20 bp, synthetic construct
  source 1..20: mol_type = other DNA
ccctgaagaaactgtgaaca

SEQ ID NO: 57810 - DNA, 20 bp, synthetic construct
  source 1..20: mol_type = other DNA
tccctgaagaaactgtgaac

SEQ ID NO: 57811 - DNA, 20 bp, synthetic construct
  source 1..20: mol_type = other DNA
ctccctgaagaaactgtgaa

SEQ ID NO: 57812 - DNA, 20 bp, synthetic construct
  source 1..20: mol_type = other DNA
actccctgaagaaactgtga

SEQ ID NO: 57813 - DNA, 20 bp, synthetic construct
  source 1..20: mol_type = other DNA
aactccctgaagaaactgtg

SEQ ID NO: 57814 - DNA, 20 bp, synthetic construct
  source 1..20: mol_type = other DNA
gaactccctgaagaaactgt

SEQ ID NO: 57815 - DNA, 20 bp, synthetic construct
  source 1..20: mol_type = other DNA
tgaactccctgaagaaactg

SEQ ID NO: 57816 - DNA, 20 bp, synthetic construct
  source 1..20: mol_type = other DNA
atgaactccctgaagaaact

SEQ ID NO: 57817 - DNA, 20 bp, synthetic construct
  source 1..20: mol_type = other DNA
tatgaactccctgaagaaac

SEQ ID NO: 57818 - DNA, 20 bp, synthetic construct
  source 1..20: mol_type = other DNA
atatgaactccctgaagaaa

SEQ ID NO: 57819 - DNA, 20 bp, synthetic construct
  source 1..20: mol_type = other DNA
tatatgaactccctgaagaa

SEQ ID NO: 57820 - DNA, 20 bp, synthetic construct
  source 1..20: mol_type = other DNA
gtatatgaactccctgaaga

SEQ ID NO: 57821 - DNA, 20 bp, synthetic construct
  source 1..20: mol_type = other DNA
cgtatatgaactccctgaag

SEQ ID NO: 57822 - DNA, 20 bp, synthetic construct
  source 1..20: mol_type = other DNA
gcgtatatgaactccctgaa

SEQ ID NO: 57823 - DNA, 20 bp, synthetic construct
  source 1..20: mol_type = other DNA
ggcgtatatgaactccctga

SEQ ID NO: 57824 - DNA, 20 bp, synthetic construct
  source 1..20: mol_type = other DNA
tggcgtatatgaactccctg

SEQ ID NO: 57825 - DNA, 20 bp, synthetic construct
  source 1..20: mol_type = other DNA
atggcgtatatgaactccct

SEQ ID NO: 57826 - DNA, 20 bp, synthetic construct
  source 1..20: mol_type = other DNA
catggcgtatatgaactccc

SEQ ID NO: 57827 - DNA, 20 bp, synthetic construct
  source 1..20: mol_type = other DNA
acatggcgtatatgaactcc

SEQ ID NO: 57828 - DNA, 20 bp, synthetic construct
  source 1..20: mol_type = other DNA
tacatggcgtatatgaactc

SEQ ID NO: 57829 - DNA, 20 bp, synthetic construct
  source 1..20: mol_type = other DNA
gtacatggcgtatatgaact

SEQ ID NO: 57830 - DNA, 20 bp, synthetic construct
  source 1..20: mol_type = other DNA
agtacatggcgtatatgaac

SEQ ID NO: 57831 - DNA, 20 bp, synthetic construct
  source 1..20: mol_type = other DNA
gagtacatggcgtatatgaa

SEQ ID NO: 57832 - DNA, 20 bp, synthetic construct
  source 1..20: mol_type = other DNA
agagtacatggcgtatatga

SEQ ID NO: 57833 - DNA, 20 bp, synthetic construct
  source 1..20: mol_type = other DNA
tagagtacatggcgtatatg

SEQ ID NO: 57834 - DNA, 20 bp, synthetic construct
  source 1..20: mol_type = other DNA
atagagtacatggcgtatat

SEQ ID NO: 57835 - DNA, 20 bp, synthetic construct
  source 1..20: mol_type = other DNA
aatagagtacatggcgtata

SEQ ID NO: 57836 - DNA, 20 bp, synthetic construct
  source 1..20: mol_type = other DNA
gaatagagtacatggcgtat

SEQ ID NO: 57837 - DNA, 20 bp, synthetic construct
  source 1..20: mol_type = other DNA
agaatagagtacatggcgta

SEQ ID NO: 57838 - DNA, 20 bp, synthetic construct
  source 1..20: mol_type = other DNA
tagaatagagtacatggcgt

SEQ ID NO: 57839 - DNA, 20 bp, synthetic construct
  source 1..20: mol_type = other DNA
ttagaatagagtacatggcg

SEQ ID NO: 57840 - DNA, 20 bp, synthetic construct
  source 1..20: mol_type = other DNA
cttagaatagagtacatggc

SEQ ID NO: 57841 - DNA, 20 bp, synthetic construct
  source 1..20: mol_type = other DNA
gcttagaatagagtacatgg

SEQ ID NO: 57842 - DNA, 20 bp, synthetic construct
  source 1..20: mol_type = other DNA
tgcttagaatagagtacatg

SEQ ID NO: 57843 - DNA, 20 bp, synthetic construct
  source 1..20: mol_type = other DNA
atgcttagaatagagtacat

SEQ ID NO: 57844 - DNA, 20 bp, synthetic construct
  source 1..20: mol_type = other DNA
aatgcttagaatagagtaca

SEQ ID NO: 57845 - DNA, 20 bp, synthetic construct
  source 1..20: mol_type = other DNA
aaatgcttagaatagagtac

SEQ ID NO: 57846 - DNA, 20 bp, synthetic construct
  source 1..20: mol_type = other DNA
aaaatgcttagaatagagta

SEQ ID NO: 57847 - DNA, 20 bp, synthetic construct
  source 1..20: mol_type = other DNA
aaaaatgcttagaatagagt

SEQ ID NO: 57848 - DNA, 20 bp, synthetic construct
  source 1..20: mol_type = other DNA
taaaaatgcttagaatagag

SEQ ID NO: 57849 - DNA, 20 bp, synthetic construct
  source 1..20: mol_type = other DNA
ctaaaaatgcttagaataga

SEQ ID NO: 57850 - DNA, 20 bp, synthetic construct
  source 1..20: mol_type = other DNA
tctaaaaatgcttagaatag

SEQ ID NO: 57851 - DNA, 20 bp, synthetic construct
  source 1..20: mol_type = other DNA
ctctaaaaatgcttagaata

SEQ ID NO: 57852 - DNA, 20 bp, synthetic construct
  source 1..20: mol_type = other DNA
actctaaaaatgcttagaat

SEQ ID NO: 57853 - DNA, 20 bp, synthetic construct
  source 1..20: mol_type = other DNA
aactctaaaaatgcttagaa

SEQ ID NO: 57854 - DNA, 20 bp, synthetic construct
  source 1..20: mol_type = other DNA
taactctaaaaatgcttaga

SEQ ID NO: 57855 - DNA, 20 bp, synthetic construct
  source 1..20: mol_type = other DNA
ctaactctaaaaatgcttag

SEQ ID NO: 57856 - DNA, 20 bp, synthetic construct
  source 1..20: mol_type = other DNA
tctaactctaaaaatgctta

SEQ ID NO: 57857 - DNA, 20 bp, synthetic construct
  source 1..20: mol_type = other DNA
ctctaactctaaaaatgctt

SEQ ID NO: 57858 - DNA, 20 bp, synthetic construct
  source 1..20: mol_type = other DNA
tctctaactctaaaaatgct

SEQ ID NO: 57859 - DNA, 20 bp, synthetic construct
  source 1..20: mol_type = other DNA
atctctaactctaaaaatgc

SEQ ID NO: 57860 - DNA, 20 bp, synthetic construct
  source 1..20: mol_type = other DNA
tatctctaactctaaaaatg

SEQ ID NO: 57861 - DNA, 20 bp, synthetic construct
  source 1..20: mol_type = other DNA
ctatctctaactctaaaaat

SEQ ID NO: 57862 - DNA, 20 bp, synthetic construct
  source 1..20: mol_type = other DNA
gctatctctaactctaaaaa

SEQ ID NO: 57863 - DNA, 20 bp, synthetic construct
  source 1..20: mol_type = other DNA
tgctatctctaactctaaaa

SEQ ID NO: 57864 - DNA, 20 bp, synthetic construct
  source 1..20: mol_type = other DNA
ttgctatctctaactctaaa

SEQ ID NO: 57865 - DNA, 20 bp, synthetic construct
  source 1..20: mol_type = other DNA
tttgctatctctaactctaa

SEQ ID NO: 57866 - DNA, 20 bp, synthetic construct
  source 1..20: mol_type = other DNA
ctttgctatctctaactcta

SEQ ID NO: 57867 - DNA, 20 bp, synthetic construct
  source 1..20: mol_type = other DNA
gctttgctatctctaactct

SEQ ID NO: 57868 - DNA, 20 bp, synthetic construct
  source 1..20: mol_type = other DNA
tgctttgctatctctaactc

SEQ ID NO: 57869 - DNA, 20 bp, synthetic construct
  source 1..20: mol_type = other DNA
gtgctttgctatctctaact

SEQ ID NO: 57870 - DNA, 20 bp, synthetic construct
  source 1..20: mol_type = other DNA
cgtgctttgctatctctaac

SEQ ID NO: 57871 - DNA, 20 bp, synthetic construct
  source 1..20: mol_type = other DNA
acgtgctttgctatctctaa

SEQ ID NO: 57872 - DNA, 20 bp, synthetic construct
  source 1..20: mol_type = other DNA
cacgtgctttgctatctcta

SEQ ID NO: 57873 - DNA, 20 bp, synthetic construct
  source 1..20: mol_type = other DNA
tcacgtgctttgctatctct

SEQ ID NO: 57874 - DNA, 20 bp, synthetic construct
  source 1..20: mol_type = other DNA
ttcacgtgctttgctatctc

SEQ ID NO: 57875 - DNA, 20 bp, synthetic construct
  source 1..20: mol_type = other DNA
attcacgtgctttgctatct

SEQ ID NO: 57876 - DNA, 20 bp, synthetic construct
  source 1..20: mol_type = other DNA
tattcacgtgctttgctatc

SEQ ID NO: 57877 - DNA, 20 bp, synthetic construct
  source 1..20: mol_type = other DNA
ttattcacgtgctttgctat

SEQ ID NO: 57878 - DNA, 20 bp, synthetic construct
  source 1..20: mol_type = other DNA
tttattcacgtgctttgcta

SEQ ID NO: 57879 - DNA, 20 bp, synthetic construct
  source 1..20: mol_type = other DNA
atttattcacgtgctttgct

SEQ ID NO: 57880 - DNA, 20 bp, synthetic construct
  source 1..20: mol_type = other DNA
aatttattcacgtgctttgc

SEQ ID NO: 57881 - DNA, 20 bp, synthetic construct
  source 1..20: mol_type = other DNA
gaatttattcacgtgctttg

SEQ ID NO: 57882 - DNA, 20 bp, synthetic construct
  source 1..20: mol_type = other DNA
tgaatttattcacgtgcttt

SEQ ID NO: 57883 - DNA, 20 bp, synthetic construct
  source 1..20: mol_type = other DNA
ttgaatttattcacgtgctt

SEQ ID NO: 57884 - DNA, 20 bp, synthetic construct
  source 1..20: mol_type = other DNA
cttgaatttattcacgtgct

SEQ ID NO: 57885 - DNA, 20 bp, synthetic construct
  source 1..20: mol_type = other DNA
tcttgaatttattcacgtgc

SEQ ID NO: 57886 - DNA, 20 bp, synthetic construct
  source 1..20: mol_type = other DNA
ttcttgaatttattcacgtg

SEQ ID NO: 57887 - DNA, 20 bp, synthetic construct
  source 1..20: mol_type = other DNA
tttcttgaatttattcacgt

SEQ ID NO: 57888 - DNA, 20 bp, synthetic construct
  source 1..20: mol_type = other DNA
ttttcttgaatttattcacg

SEQ ID NO: 57889 - DNA, 20 bp, synthetic construct
  source 1..20: mol_type = other DNA
tttttcttgaatttattcac

SEQ ID NO: 57890 - DNA, 20 bp, synthetic construct
  source 1..20: mol_type = other DNA
atttttcttgaatttattca

SEQ ID NO: 57891 - DNA, 20 bp, synthetic construct
  source 1..20: mol_type = other DNA
catttttcttgaatttattc

SEQ ID NO: 57892 - DNA, 20 bp, synthetic construct
  source 1..20: mol_type = other DNA
ccatttttcttgaatttatt

SEQ ID NO: 57893 - DNA, 20 bp, synthetic construct
  source 1..20: mol_type = other DNA
tccatttttcttgaatttat

SEQ ID NO: 57894 - DNA, 20 bp, synthetic construct
  source 1..20: mol_type = other DNA
ttccatttttcttgaattta

SEQ ID NO: 57895 - DNA, 20 bp, synthetic construct
  source 1..20: mol_type = other DNA
attccatttttcttgaattt

SEQ ID NO: 57896 - DNA, 20 bp, synthetic construct
  source 1..20: mol_type = other DNA
cattccatttttcttgaatt

SEQ ID NO: 57897 - DNA, 20 bp, synthetic construct
  source 1..20: mol_type = other DNA
acattccatttttcttgaat

SEQ ID NO: 57898 - DNA, 20 bp, synthetic construct
  source 1..20: mol_type = other DNA
aacattccatttttcttgaa

SEQ ID NO: 57899 - DNA, 20 bp, synthetic construct
  source 1..20: mol_type = other DNA
caacattccatttttcttga

SEQ ID NO: 57900 - DNA, 20 bp, synthetic construct
  source 1..20: mol_type = other DNA
acaacattccatttttcttg

SEQ ID NO: 57901 - DNA, 20 bp, synthetic construct
  source 1..20: mol_type = other DNA
tacaacattccatttttctt

SEQ ID NO: 57902 - DNA, 20 bp, synthetic construct
  source 1..20: mol_type = other DNA
gtacaacattccatttttct

SEQ ID NO: 57903 - DNA, 20 bp, synthetic construct
  source 1..20: mol_type = other DNA
agtacaacattccatttttc

SEQ ID NO: 57904 - DNA, 20 bp, synthetic construct
  source 1..20: mol_type = other DNA
cagtacaacattccattttt

SEQ ID NO: 57905 - DNA, 20 bp, synthetic construct
  source 1..20: mol_type = other DNA
gcagtacaacattccatttt

SEQ ID NO: 57906 - DNA, 20 bp, synthetic construct
  source 1..20: mol_type = other DNA
tgcagtacaacattccattt

SEQ ID NO: 57907 - DNA, 20 bp, synthetic construct
  source 1..20: mol_type = other DNA
atgcagtacaacattccatt

SEQ ID NO: 57908 - DNA, 20 bp, synthetic construct
  source 1..20: mol_type = other DNA
catgcagtacaacattccat

SEQ ID NO: 57909 - DNA, 20 bp, synthetic construct
  source 1..20: mol_type = other DNA
tcatgcagtacaacattcca

SEQ ID NO: 57910 - DNA, 20 bp, synthetic construct
  source 1..20: mol_type = other DNA
gtcatgcagtacaacattcc

SEQ ID NO: 57911 - DNA, 20 bp, synthetic construct
  source 1..20: mol_type = other DNA
tgtcatgcagtacaacattc

SEQ ID NO: 57912 - DNA, 20 bp, synthetic construct
  source 1..20: mol_type = other DNA
atgtcatgcagtacaacatt

SEQ ID NO: 57913 - DNA, 20 bp, synthetic construct
  source 1..20: mol_type = other DNA
aatgtcatgcagtacaacat

SEQ ID NO: 57914 - DNA, 20 bp, synthetic construct
  source 1..20: mol_type = other DNA
caatgtcatgcagtacaaca

SEQ ID NO: 57915 - DNA, 20 bp, synthetic construct
  source 1..20: mol_type = other DNA
tcaatgtcatgcagtacaac

SEQ ID NO: 57916 - DNA, 20 bp, synthetic construct
  source 1..20: mol_type = other DNA
ttcaatgtcatgcagtacaa

SEQ ID NO: 57917 - DNA, 20 bp, synthetic construct
  source 1..20: mol_type = other DNA
attcaatgtcatgcagtaca

SEQ ID NO: 57918 - DNA, 20 bp, synthetic construct
  source 1..20: mol_type = other DNA
tattcaatgtcatgcagtac

SEQ ID NO: 57919 - DNA, 20 bp, synthetic construct
  source 1..20: mol_type = other DNA
atattcaatgtcatgcagta

SEQ ID NO: 57920 - DNA, 20 bp, synthetic construct
  source 1..20: mol_type = other DNA
gatattcaatgtcatgcagt

SEQ ID NO: 57921 - DNA, 20 bp, synthetic construct
  source 1..20: mol_type = other DNA
tgatattcaatgtcatgcag

SEQ ID NO: 57922 - DNA, 20 bp, synthetic construct
  source 1..20: mol_type = other DNA
ttgatattcaatgtcatgca

SEQ ID NO: 57923 - DNA, 20 bp, synthetic construct
  source 1..20: mol_type = other DNA
tttgatattcaatgtcatgc

SEQ ID NO: 57924 - DNA, 20 bp, synthetic construct
  source 1..20: mol_type = other DNA
atttgatattcaatgtcatg

SEQ ID NO: 57925 - DNA, 20 bp, synthetic construct
  source 1..20: mol_type = other DNA
catttgatattcaatgtcat

SEQ ID NO: 57926 - DNA, 20 bp, synthetic construct
  source 1..20: mol_type = other DNA
ccatttgatattcaatgtca

SEQ ID NO: 57927 - DNA, 20 bp, synthetic construct
  source 1..20: mol_type = other DNA
tccatttgatattcaatgtc

SEQ ID NO: 57928 - DNA, 20 bp, synthetic construct
  source 1..20: mol_type = other DNA
ctccatttgatattcaatgt

SEQ ID NO: 57929 - DNA, 20 bp, synthetic construct
  source 1..20: mol_type = other DNA
actccatttgatattcaatg

SEQ ID NO: 57930 - DNA, 20 bp, synthetic construct
  source 1..20: mol_type = other DNA
gactccatttgatattcaat

SEQ ID NO: 57931 - DNA, 20 bp, synthetic construct
  source 1..20: mol_type = other DNA
tgactccatttgatattcaa

SEQ ID NO: 57932 - DNA, 20 bp, synthetic construct
  source 1..20: mol_type = other DNA
ctgactccatttgatattca

SEQ ID NO: 57933 - DNA, 20 bp, synthetic construct
  source 1..20: mol_type = other DNA
gctgactccatttgatattc

SEQ ID NO: 57934 - DNA, 20 bp, synthetic construct
  source 1..20: mol_type = other DNA
cgctgactccatttgatatt

SEQ ID NO: 57935 - DNA, 20 bp, synthetic construct
  source 1..20: mol_type = other DNA
tcgctgactccatttgatat

SEQ ID NO: 57936 - DNA, 20 bp, synthetic construct
  source 1..20: mol_type = other DNA
atcgctgactccatttgata

SEQ ID NO: 57937 - DNA, 20 bp, synthetic construct
  source 1..20: mol_type = other DNA
catcgctgactccatttgat

SEQ ID NO: 57938 - DNA, 20 bp, synthetic construct
  source 1..20: mol_type = other DNA
gcatcgctgactccatttga

SEQ ID NO: 57939 - DNA, 20 bp, synthetic construct
  source 1..20: mol_type = other DNA
tgcatcgctgactccatttg

SEQ ID NO: 57940 - DNA, 20 bp, synthetic construct
  source 1..20: mol_type = other DNA
ttgcatcgctgactccattt

SEQ ID NO: 57941 - DNA, 20 bp, synthetic construct
  source 1..20: mol_type = other DNA
tttgcatcgctgactccatt

SEQ ID NO: 57942 - DNA, 20 bp, synthetic construct
  source 1..20: mol_type = other DNA
atttgcatcgctgactccat

SEQ ID NO: 57943 - DNA, 20 bp, synthetic construct
  source 1..20: mol_type = other DNA
tatttgcatcgctgactcca

SEQ ID NO: 57944 - DNA, 20 bp, synthetic construct
  source 1..20: mol_type = other DNA
ttatttgcatcgctgactcc

SEQ ID NO: 57945 - DNA, 20 bp, synthetic construct
  source 1..20: mol_type = other DNA
attatttgcatcgctgactc

SEQ ID NO: 57946 - DNA, 20 bp, synthetic construct
  source 1..20: mol_type = other DNA
aattatttgcatcgctgact

SEQ ID NO: 57947 - DNA, 20 bp, synthetic construct
  source 1..20: mol_type = other DNA
caattatttgcatcgctgac

SEQ ID NO: 57948 - DNA, 20 bp, synthetic construct
  source 1..20: mol_type = other DNA
acaattatttgcatcgctga

SEQ ID NO: 57949 - DNA, 20 bp, synthetic construct
  source 1..20: mol_type = other DNA
gacaattatttgcatcgctg

SEQ ID NO: 57950 - DNA, 20 bp, synthetic construct
  source 1..20: mol_type = other DNA
agacaattatttgcatcgct

SEQ ID NO: 57951 - DNA, 20 bp, synthetic construct
  source 1..20: mol_type = other DNA
tagacaattatttgcatcgc

SEQ ID NO: 57952 - DNA, 20 bp, synthetic construct
  source 1..20: mol_type = other DNA
ctagacaattatttgcatcg

SEQ ID NO: 57953 - DNA, 20 bp, synthetic construct
  source 1..20: mol_type = other DNA
tctagacaattatttgcatc

SEQ ID NO: 57954 - DNA, 20 bp, synthetic construct
  source 1..20: mol_type = other DNA
atctagacaattatttgcat

SEQ ID NO: 57955 - DNA, 20 bp, synthetic construct
  source 1..20: mol_type = other DNA
aatctagacaattatttgca

SEQ ID NO: 57956 - DNA, 20 bp, synthetic construct
  source 1..20: mol_type = other DNA
aaatctagacaattatttgc

SEQ ID NO: 57957 - DNA, 20 bp, synthetic construct
  source 1..20: mol_type = other DNA
aaaatctagacaattatttg

SEQ ID NO: 57958 - DNA, 20 bp, synthetic construct
  source 1..20: mol_type = other DNA
taaaatctagacaattattt

SEQ ID NO: 57959 - DNA, 20 bp, synthetic construct
  source 1..20: mol_type = other DNA
gtaaaatctagacaattatt

SEQ ID NO: 57960 - DNA, 20 bp, synthetic construct
  source 1..20: mol_type = other DNA
tgtaaaatctagacaattat

SEQ ID NO: 57961 - DNA, 20 bp, synthetic construct
  source 1..20: mol_type = other DNA
ttgtaaaatctagacaatta

SEQ ID NO: 57962 - DNA, 20 bp, synthetic construct
  source 1..20: mol_type = other DNA
tttgtaaaatctagacaatt

SEQ ID NO: 57963 - DNA, 20 bp, synthetic construct
  source 1..20: mol_type = other DNA
ttttgtaaaatctagacaat

SEQ ID NO: 57964 - DNA, 20 bp, synthetic construct
  source 1..20: mol_type = other DNA
tttttgtaaaatctagacaa

SEQ ID NO: 57965 - DNA, 20 bp, synthetic construct
  source 1..20: mol_type = other DNA
ttttttgtaaaatctagaca

SEQ ID NO: 57966 - DNA, 20 bp, synthetic construct
  source 1..20: mol_type = other DNA
tttttttgtaaaatctagac

SEQ ID NO: 57967 - DNA, 20 bp, synthetic construct
  source 1..20: mol_type = other DNA
ttttttttgtaaaatctaga

SEQ ID NO: 57968 - DNA, 20 bp, synthetic construct
  source 1..20: mol_type = other DNA
attttttttgtaaaatctag

SEQ ID NO: 57969 - DNA, 20 bp, synthetic construct
  source 1..20: mol_type = other DNA
aattttttttgtaaaatcta

SEQ ID NO: 57970 - DNA, 20 bp, synthetic construct
  source 1..20: mol_type = other DNA
taattttttttgtaaaatct

SEQ ID NO: 57971 - DNA, 20 bp, synthetic construct
  source 1..20: mol_type = other DNA
ctaattttttttgtaaaatc

SEQ ID NO: 57972 - DNA, 20 bp, synthetic construct
  source 1..20: mol_type = other DNA
gctaattttttttgtaaaat

SEQ ID NO: 57973 - DNA, 20 bp, synthetic construct
  source 1..20: mol_type = other DNA
ggctaattttttttgtaaaa

SEQ ID NO: 57974 - DNA, 20 bp, synthetic construct
  source 1..20: mol_type = other DNA
aggctaattttttttgtaaa

SEQ ID NO: 57975 - DNA, 20 bp, synthetic construct
  source 1..20: mol_type = other DNA
caggctaattttttttgtaa

SEQ ID NO: 57976 - DNA, 20 bp, synthetic construct
  source 1..20: mol_type = other DNA
ccaggctaattttttttgta

SEQ ID NO: 57977 - DNA, 20 bp, synthetic construct
  source 1..20: mol_type = other DNA
accaggctaattttttttgt

SEQ ID NO: 57978 - DNA, 20 bp, synthetic construct
  source 1..20: mol_type = other DNA
caccaggctaattttttttg

SEQ ID NO: 57979 - DNA, 20 bp, synthetic construct
  source 1..20: mol_type = other DNA
acaccaggctaatttttttt

SEQ ID NO: 57980 - DNA, 20 bp, synthetic construct
  source 1..20: mol_type = other DNA
cacaccaggctaattttttt

SEQ ID NO: 57981 - DNA, 20 bp, synthetic construct
  source 1..20: mol_type = other DNA
gcacaccaggctaatttttt

SEQ ID NO: 57982 - DNA, 20 bp, synthetic construct
  source 1..20: mol_type = other DNA
agcacaccaggctaattttt

SEQ ID NO: 57983 - DNA, 20 bp, synthetic construct
  source 1..20: mol_type = other DNA
cagcacaccaggctaatttt

SEQ ID NO: 57984 - DNA, 20 bp, synthetic construct
  source 1..20: mol_type = other DNA
ccagcacaccaggctaattt

SEQ ID NO: 57985 - DNA, 20 bp, synthetic construct
  source 1..20: mol_type = other DNA
accagcacaccaggctaatt

SEQ ID NO: 57986 - DNA, 20 bp, synthetic construct
  source 1..20: mol_type = other DNA
caccagcacaccaggctaat

SEQ ID NO: 57987 - DNA, 20 bp, synthetic construct
  source 1..20: mol_type = other DNA
acaccagcacaccaggctaa

SEQ ID NO: 57988 - DNA, 20 bp, synthetic construct
  source 1..20: mol_type = other DNA
cacaccagcacaccaggcta

SEQ ID NO: 57989 - DNA, 20 bp, synthetic construct
  source 1..20: mol_type = other DNA
gcacaccagcacaccaggct

SEQ ID NO: 57990 - DNA, 20 bp, synthetic construct
  source 1..20: mol_type = other DNA
cgcacaccagcacaccaggc

SEQ ID NO: 57991 - DNA, 20 bp, synthetic construct
  source 1..20: mol_type = other DNA
gcgcacaccagcacaccagg

SEQ ID NO: 57992 - DNA, 20 bp, synthetic construct
  source 1..20: mol_type = other DNA
ggcgcacaccagcacaccag

SEQ ID NO: 57993 - DNA, 20 bp, synthetic construct
  source 1..20: mol_type = other DNA
aggcgcacaccagcacacca

SEQ ID NO: 57994 - DNA, 20 bp, synthetic construct
  source 1..20: mol_type = other DNA
gaggcgcacaccagcacacc

SEQ ID NO: 57995 - DNA, 20 bp, synthetic construct
  source 1..20: mol_type = other DNA
agaggcgcacaccagcacac

SEQ ID NO: 57996 - DNA, 20 bp, synthetic construct
  source 1..20: mol_type = other DNA
tagaggcgcacaccagcaca

SEQ ID NO: 57997 - DNA, 20 bp, synthetic construct
  source 1..20: mol_type = other DNA
ttagaggcgcacaccagcac

SEQ ID NO: 57998 - DNA, 20 bp, synthetic construct
  source 1..20: mol_type = other DNA
attagaggcgcacaccagca

SEQ ID NO: 57999 - DNA, 20 bp, synthetic construct
  source 1..20: mol_type = other DNA
gattagaggcgcacaccagc

SEQ ID NO: 58000 - DNA, 20 bp, synthetic construct
  source 1..20: mol_type = other DNA
ggattagaggcgcacaccag

SEQ ID NO: 58001 - DNA, 20 bp, synthetic construct
  source 1..20: mol_type = other DNA
gggattagaggcgcacacca

SEQ ID NO: 58002 - DNA, 20 bp, synthetic construct
  source 1..20: mol_type = other DNA
tgggattagaggcgcacacc

SEQ ID NO: 58003 - DNA, 20 bp, synthetic construct
  source 1..20: mol_type = other DNA
ctgggattagaggcgcacac

SEQ ID NO: 58004 - DNA, 20 bp, synthetic construct
  source 1..20: mol_type = other DNA
gctgggattagaggcgcaca

SEQ ID NO: 58005 - DNA, 20 bp, synthetic construct
  source 1..20: mol_type = other DNA
agctgggattagaggcgcac

SEQ ID NO: 58006 - DNA, 20 bp, synthetic construct
  source 1..20: mol_type = other DNA
tagctgggattagaggcgca

SEQ ID NO: 58007 - DNA, 20 bp, synthetic construct
  source 1..20: mol_type = other DNA
gtagctgggattagaggcgc

SEQ ID NO: 58008 - DNA, 20 bp, synthetic construct
  source 1..20: mol_type = other DNA
agtagctgggattagaggcg

SEQ ID NO: 58009 - DNA, 20 bp, synthetic construct
  source 1..20: mol_type = other DNA
gagtagctgggattagaggc

SEQ ID NO: 58010 - DNA, 20 bp, synthetic construct
  source 1..20: mol_type = other DNA
cgagtagctgggattagagg

SEQ ID NO: 58011 - DNA, 20 bp, synthetic construct
  source 1..20: mol_type = other DNA
ccgagtagctgggattagag

SEQ ID NO: 58012 - DNA, 20 bp, synthetic construct
  source 1..20: mol_type = other DNA
cccgagtagctgggattaga

SEQ ID NO: 58013 - DNA, 20 bp, synthetic construct
  source 1..20: mol_type = other DNA
tcccgagtagctgggattag

SEQ ID NO: 58014 - DNA, 20 bp, synthetic construct
  source 1..20: mol_type = other DNA
ctcccgagtagctgggatta

SEQ ID NO: 58015 - DNA, 20 bp, synthetic construct
  source 1..20: mol_type = other DNA
cctcccgagtagctgggatt

SEQ ID NO: 58016 - DNA, 20 bp, synthetic construct
  source 1..20: mol_type = other DNA
gcctcccgagtagctgggat

SEQ ID NO: 58017 - DNA, 20 bp, synthetic construct
  source 1..20: mol_type = other DNA
agcctcccgagtagctggga

SEQ ID NO: 58018 - DNA, 20 bp, synthetic construct
  source 1..20: mol_type = other DNA
cagcctcccgagtagctggg

SEQ ID NO: 58019 - DNA, 20 bp, synthetic construct
  source 1..20: mol_type = other DNA
tcagcctcccgagtagctgg

SEQ ID NO: 58020 - DNA, 20 bp, synthetic construct
  source 1..20: mol_type = other DNA
ctcagcctcccgagtagctg

SEQ ID NO: 58021 - DNA, 20 bp, synthetic construct
  source 1..20: mol_type = other DNA
tctcagcctcccgagtagct

SEQ ID NO: 58022 - DNA, 20 bp, synthetic construct
  source 1..20: mol_type = other DNA
gtctcagcctcccgagtagc

SEQ ID NO: 58023 - DNA, 20 bp, synthetic construct
  source 1..20: mol_type = other DNA
tgtctcagcctcccgagtag

SEQ ID NO: 58024 - DNA, 20 bp, synthetic construct
  source 1..20: mol_type = other DNA
ctgtctcagcctcccgagta

SEQ ID NO: 58025 - DNA, 20 bp, synthetic construct
  source 1..20: mol_type = other DNA
cctgtctcagcctcccgagt

SEQ ID NO: 58026 - DNA, 20 bp, synthetic construct
  source 1..20: mol_type = other DNA
tcctgtctcagcctcccgag

SEQ ID NO: 58027 - DNA, 20 bp, synthetic construct
  source 1..20: mol_type = other DNA
ctcctgtctcagcctcccga

SEQ ID NO: 58028 - DNA, 20 bp, synthetic construct
  source 1..20: mol_type = other DNA
tctcctgtctcagcctcccg

SEQ ID NO: 58029 - DNA, 20 bp, synthetic construct
  source 1..20: mol_type = other DNA
ttctcctgtctcagcctccc

SEQ ID NO: 58030 - DNA, 20 bp, synthetic construct
  source 1..20: mol_type = other DNA
attctcctgtctcagcctcc

SEQ ID NO: 58031 - DNA, 20 bp, synthetic construct
  source 1..20: mol_type = other DNA
gattctcctgtctcagcctc

SEQ ID NO: 58032 - DNA, 20 bp, synthetic construct
  source 1..20: mol_type = other DNA
tgattctcctgtctcagcct

SEQ ID NO: 58033 - DNA, 20 bp, synthetic construct
  source 1..20: mol_type = other DNA
atgattctcctgtctcagcc

SEQ ID NO: 58034 - DNA, 20 bp, synthetic construct
  source 1..20: mol_type = other DNA
aatgattctcctgtctcagc

SEQ ID NO: 58035 - DNA, 20 bp, synthetic construct
  source 1..20: mol_type = other DNA
aaatgattctcctgtctcag

SEQ ID NO: 58036 - DNA, 20 bp, synthetic construct
  source 1..20: mol_type = other DNA
caaatgattctcctgtctca

SEQ ID NO: 58037 - DNA, 20 bp, synthetic construct
  source 1..20: mol_type = other DNA
tcaaatgattctcctgtctc

SEQ ID NO: 58038 - DNA, 20 bp, synthetic construct
  source 1..20: mol_type = other DNA
ttcaaatgattctcctgtct

SEQ ID NO: 58039 - DNA, 20 bp, synthetic construct
  source 1..20: mol_type = other DNA
gttcaaatgattctcctgtc

SEQ ID NO: 58040 - DNA, 20 bp, synthetic construct
  source 1..20: mol_type = other DNA
ggttcaaatgattctcctgt

SEQ ID NO: 58041 - DNA, 20 bp, synthetic construct
  source 1..20: mol_type = other DNA
gggttcaaatgattctcctg

SEQ ID NO: 58042 - DNA, 20 bp, synthetic construct
  source 1..20: mol_type = other DNA
tgggttcaaatgattctcct

SEQ ID NO: 58043 - DNA, 20 bp, synthetic construct
  source 1..20: mol_type = other DNA
ctgggttcaaatgattctcc

SEQ ID NO: 58044 - DNA, 20 bp, synthetic construct
  source 1..20: mol_type = other DNA
tctgggttcaaatgattctc

SEQ ID NO: 58045 - DNA, 20 bp, synthetic construct
  source 1..20: mol_type = other DNA
ttctgggttcaaatgattct

SEQ ID NO: 58046 - DNA, 20 bp, synthetic construct
  source 1..20: mol_type = other DNA
cttctgggttcaaatgattc

SEQ ID NO: 58047 - DNA, 20 bp, synthetic construct
  source 1..20: mol_type = other DNA
ccttctgggttcaaatgatt

SEQ ID NO: 58048 - DNA, 20 bp, synthetic construct
  source 1..20: mol_type = other DNA
accttctgggttcaaatgat

SEQ ID NO: 58049 - DNA, 20 bp, synthetic construct
  source 1..20: mol_type = other DNA
caccttctgggttcaaatga

SEQ ID NO: 58050 - DNA, 20 bp, synthetic construct
  source 1..20: mol_type = other DNA
ccaccttctgggttcaaatg

SEQ ID NO: 58051 - DNA, 20 bp, synthetic construct
  source 1..20: mol_type = other DNA
tccaccttctgggttcaaat

SEQ ID NO: 58052 - DNA, 20 bp, synthetic construct
  source 1..20: mol_type = other DNA
ctccaccttctgggttcaaa

SEQ ID NO: 58053 - DNA, 20 bp, synthetic construct
  source 1..20: mol_type = other DNA
cctccaccttctgggttcaa

SEQ ID NO: 58054 - DNA, 20 bp, synthetic construct
  source 1..20: mol_type = other DNA
acctccaccttctgggttca

SEQ ID NO: 58055 - DNA, 20 bp, synthetic construct
  source 1..20: mol_type = other DNA
aacctccaccttctgggttc

SEQ ID NO: 58056 - DNA, 20 bp, synthetic construct
  source 1..20: mol_type = other DNA
caacctccaccttctgggtt

SEQ ID NO: 58057 - DNA, 20 bp, synthetic construct
  source 1..20: mol_type = other DNA
gcaacctccaccttctgggt

SEQ ID NO: 58058 - DNA, 20 bp, synthetic construct
  source 1..20: mol_type = other DNA
tgcaacctccaccttctggg

SEQ ID NO: 58059 - DNA, 20 bp, synthetic construct
  source 1..20: mol_type = other DNA
ttgcaacctccaccttctgg

SEQ ID NO: 58060 - DNA, 20 bp, synthetic construct
  source 1..20: mol_type = other DNA
attgcaacctccaccttctg

SEQ ID NO: 58061 - DNA, 20 bp, synthetic construct
  source 1..20: mol_type = other DNA
cattgcaacctccaccttct

SEQ ID NO: 58062 - DNA, 20 bp, synthetic construct
  source 1..20: mol_type = other DNA
tcattgcaacctccaccttc

SEQ ID NO: 58063 - DNA, 20 bp, synthetic construct
  source 1..20: mol_type = other DNA
ctcattgcaacctccacctt

SEQ ID NO: 58064 - DNA, 20 bp, synthetic construct
  source 1..20: mol_type = other DNA
gctcattgcaacctccacct

SEQ ID NO: 58065 - DNA, 20 bp, synthetic construct
  source 1..20: mol_type = other DNA
agctcattgcaacctccacc

SEQ ID NO: 58066 - DNA, 20 bp, synthetic construct
  source 1..20: mol_type = other DNA
cagctcattgcaacctccac

SEQ ID NO: 58067 - DNA, 20 bp, synthetic construct
  source 1..20: mol_type = other DNA
tcagctcattgcaacctcca

SEQ ID NO: 58068 - DNA, 20 bp, synthetic construct
  source 1..20: mol_type = other DNA
ctcagctcattgcaacctcc

SEQ ID NO: 58069 - DNA, 20 bp, synthetic construct
  source 1..20: mol_type = other DNA
tctcagctcattgcaacctc

SEQ ID NO: 58070 - DNA, 20 bp, synthetic construct
  source 1..20: mol_type = other DNA
atctcagctcattgcaacct

SEQ ID NO: 58071 - DNA, 20 bp, synthetic construct
  source 1..20: mol_type = other DNA
gatctcagctcattgcaacc

SEQ ID NO: 58072 - DNA, 20 bp, synthetic construct
  source 1..20: mol_type = other DNA
cgatctcagctcattgcaac

SEQ ID NO: 58073 - DNA, 20 bp, synthetic construct
  source 1..20: mol_type = other DNA
acgatctcagctcattgcaa

SEQ ID NO: 58074 - DNA, 20 bp, synthetic construct
  source 1..20: mol_type = other DNA
tacgatctcagctcattgca

SEQ ID NO: 58075 - DNA, 20 bp, synthetic construct
  source 1..20: mol_type = other DNA
gtacgatctcagctcattgc

SEQ ID NO: 58076 - DNA, 20 bp, synthetic construct
  source 1..20: mol_type = other DNA
ggtacgatctcagctcattg

SEQ ID NO: 58077 - DNA, 20 bp, synthetic construct
  source 1..20: mol_type = other DNA
tggtacgatctcagctcatt

SEQ ID NO: 58078 - DNA, 20 bp, synthetic construct
  source 1..20: mol_type = other DNA
gtggtacgatctcagctcat

SEQ ID NO: 58079 - DNA, 20 bp, synthetic construct
  source 1..20: mol_type = other DNA
agtggtacgatctcagctca

SEQ ID NO: 58080 - DNA, 20 bp, synthetic construct
  source 1..20: mol_type = other DNA
cagtggtacgatctcagctc

SEQ ID NO: 58081 - DNA, 20 bp, synthetic construct
  source 1..20: mol_type = other DNA
gcagtggtacgatctcagct

SEQ ID NO: 58082 - DNA, 20 bp, synthetic construct
  source 1..20: mol_type = other DNA
tgcagtggtacgatctcagc

SEQ ID NO: 58083 - DNA, 20 bp, synthetic construct
  source 1..20: mol_type = other DNA
gtgcagtggtacgatctcag

SEQ ID NO: 58084 - DNA, 20 bp, synthetic construct
  source 1..20: mol_type = other DNA
agtgcagtggtacgatctca

SEQ ID NO: 58085 - DNA, 20 bp, synthetic construct
  source 1..20: mol_type = other DNA
gagtgcagtggtacgatctc

SEQ ID NO: 58086 - DNA, 20 bp, synthetic construct
  source 1..20: mol_type = other DNA
ggagtgcagtggtacgatct

SEQ ID NO: 58087 - DNA, 20 bp, synthetic construct
  source 1..20: mol_type = other DNA
tggagtgcagtggtacgatc

SEQ ID NO: 58088 - DNA, 20 bp, synthetic construct
  source 1..20: mol_type = other DNA
ctggagtgcagtggtacgat

SEQ ID NO: 58089 - DNA, 20 bp, synthetic construct
  source 1..20: mol_type = other DNA
gctggagtgcagtggtacga

SEQ ID NO: 58090 - DNA, 20 bp, synthetic construct
  source 1..20: mol_type = other DNA
ggctggagtgcagtggtacg

SEQ ID NO: 58091 - DNA, 20 bp, synthetic construct
  source 1..20: mol_type = other DNA
aggctggagtgcagtggtac

SEQ ID NO: 58092 - DNA, 20 bp, synthetic construct
  source 1..20: mol_type = other DNA
caggctggagtgcagtggta

SEQ ID NO: 58093 - DNA, 20 bp, synthetic construct
  source 1..20: mol_type = other DNA
tcaggctggagtgcagtggt

SEQ ID NO: 58094 - DNA, 20 bp, synthetic construct
  source 1..20: mol_type = other DNA
ctcaggctggagtgcagtgg

SEQ ID NO: 58095 - DNA, 20 bp, synthetic construct
  source 1..20: mol_type = other DNA
actcaggctggagtgcagtg

SEQ ID NO: 58096 - DNA, 20 bp, synthetic construct
  source 1..20: mol_type = other DNA
cactcaggctggagtgcagt

SEQ ID NO: 58097 - DNA, 20 bp, synthetic construct
  source 1..20: mol_type = other DNA
tcactcaggctggagtgcag

SEQ ID NO: 58098 - DNA, 20 bp, synthetic construct
  source 1..20: mol_type = other DNA
gtcactcaggctggagtgca

SEQ ID NO: 58099 - DNA, 20 bp, synthetic construct
  source 1..20: mol_type = other DNA
tgtcactcaggctggagtgc

SEQ ID NO: 58100 - DNA, 20 bp, synthetic construct
  source 1..20: mol_type = other DNA
ctgtcactcaggctggagtg

SEQ ID NO: 58101 - DNA, 20 bp, synthetic construct
  source 1..20: mol_type = other DNA
tctgtcactcaggctggagt

SEQ ID NO: 58102 - DNA, 20 bp, synthetic construct
  source 1..20: mol_type = other DNA
ctctgtcactcaggctggag

SEQ ID NO: 58103 - DNA, 20 bp, synthetic construct
  source 1..20: mol_type = other DNA
gctctgtcactcaggctgga

SEQ ID NO: 58104 - DNA, 20 bp, synthetic construct
  source 1..20: mol_type = other DNA
cgctctgtcactcaggctgg

SEQ ID NO: 58105 - DNA, 20 bp, synthetic construct
  source 1..20: mol_type = other DNA
tcgctctgtcactcaggctg

SEQ ID NO: 58106 - DNA, 20 bp, synthetic construct
  source 1..20: mol_type = other DNA
ctcgctctgtcactcaggct

SEQ ID NO: 58107 - DNA, 20 bp, synthetic construct
  source 1..20: mol_type = other DNA
tctcgctctgtcactcaggc

SEQ ID NO: 58108 - DNA, 20 bp, synthetic construct
  source 1..20: mol_type = other DNA
gtctcgctctgtcactcagg

SEQ ID NO: 58109 - DNA, 20 bp, synthetic construct
  source 1..20: mol_type = other DNA
agtctcgctctgtcactcag

SEQ ID NO: 58110 - DNA, 20 bp, synthetic construct
  source 1..20: mol_type = other DNA
gagtctcgctctgtcactca

SEQ ID NO: 58111 - DNA, 20 bp, synthetic construct
  source 1..20: mol_type = other DNA
ggagtctcgctctgtcactc

SEQ ID NO: 58112 - DNA, 20 bp, synthetic construct
  source 1..20: mol_type = other DNA
tggagtctcgctctgtcact

SEQ ID NO: 58113 - DNA, 20 bp, synthetic construct
  source 1..20: mol_type = other DNA
atggagtctcgctctgtcac

SEQ ID NO: 58114 - DNA, 20 bp, synthetic construct
  source 1..20: mol_type = other DNA
gatggagtctcgctctgtca

SEQ ID NO: 58115 - DNA, 20 bp, synthetic construct
  source 1..20: mol_type = other DNA
agatggagtctcgctctgtc

SEQ ID NO: 58116 - DNA, 20 bp, synthetic construct
  source 1..20: mol_type = other DNA
gagatggagtctcgctctgt

SEQ ID NO: 58117 - DNA, 20 bp, synthetic construct
  source 1..20: mol_type = other DNA
tgagatggagtctcgctctg

SEQ ID NO: 58118 - DNA, 20 bp, synthetic construct
  source 1..20: mol_type = other DNA
ttgagatggagtctcgctct

SEQ ID NO: 58119 - DNA, 20 bp, synthetic construct
  source 1..20: mol_type = other DNA
tttgagatggagtctcgctc

SEQ ID NO: 58120 - DNA, 20 bp, synthetic construct
  source 1..20: mol_type = other DNA
ttttgagatggagtctcgct

SEQ ID NO: 58121 - DNA, 20 bp, synthetic construct
  source 1..20: mol_type = other DNA
tttttgagatggagtctcgc

SEQ ID NO: 58122 - DNA, 20 bp, synthetic construct
  source 1..20: mol_type = other DNA
atttttgagatggagtctcg

SEQ ID NO: 58123 - DNA, 20 bp, synthetic construct
  source 1..20: mol_type = other DNA
tatttttgagatggagtctc

SEQ ID NO: 58124 - DNA, 20 bp, synthetic construct
  source 1..20: mol_type = other DNA
ttatttttgagatggagtct

SEQ ID NO: 58125 - DNA, 20 bp, synthetic construct
  source 1..20: mol_type = other DNA
tttatttttgagatggagtc

SEQ ID NO: 58126 - DNA, 20 bp, synthetic construct
  source 1..20: mol_type = other DNA
ttttatttttgagatggagt

SEQ ID NO: 58127 - DNA, 20 bp, synthetic construct
  source 1..20: mol_type = other DNA
tttttatttttgagatggag

SEQ ID NO: 58128 - DNA, 20 bp, synthetic construct
  source 1..20: mol_type = other DNA
ttttttatttttgagatgga

SEQ ID NO: 58129 - DNA, 20 bp, synthetic construct
  source 1..20: mol_type = other DNA
attttttatttttgagatgg

SEQ ID NO: 58130 - DNA, 20 bp, synthetic construct
  source 1..20: mol_type = other DNA
tattttttatttttgagatg

SEQ ID NO: 58131 - DNA, 20 bp, synthetic construct
  source 1..20: mol_type = other DNA
ttattttttatttttgagat

SEQ ID NO: 58132 - DNA, 20 bp, synthetic construct
  source 1..20: mol_type = other DNA
tttattttttatttttgaga

SEQ ID NO: 58133 - DNA, 20 bp, synthetic construct
  source 1..20: mol_type = other DNA
ttttattttttatttttgag

SEQ ID NO: 58134 - DNA, 20 bp, synthetic construct
  source 1..20: mol_type = other DNA
cttttattttttatttttga

SEQ ID NO: 58135 - DNA, 20 bp, synthetic construct
  source 1..20: mol_type = other DNA
tcttttattttttatttttg

SEQ ID NO: 58136 - DNA, 20 bp, synthetic construct
  source 1..20: mol_type = other DNA
ttcttttattttttattttt

SEQ ID NO: 58137 - DNA, 20 bp, synthetic construct
  source 1..20: mol_type = other DNA
attcttttattttttatttt

SEQ ID NO: 58138 - DNA, 20 bp, synthetic construct
  source 1..20: mol_type = other DNA
aattcttttattttttattt

SEQ ID NO: 58139 - DNA, 20 bp, synthetic construct
  source 1..20: mol_type = other DNA
caattcttttattttttatt

SEQ ID NO: 58140 - DNA, 20 bp, synthetic construct
  source 1..20: mol_type = other DNA
acaattcttttattttttat

SEQ ID NO: 58141 - DNA, 20 bp, synthetic construct
  source 1..20: mol_type = other DNA
cacaattcttttatttttta

SEQ ID NO: 58142 - DNA, 20 bp, synthetic construct
  source 1..20: mol_type = other DNA
acacaattcttttatttttt

SEQ ID NO: 58143 - DNA, 20 bp, synthetic construct
  source 1..20: mol_type = other DNA
tacacaattcttttattttt

SEQ ID NO: 58144 - DNA, 20 bp, synthetic construct
  source 1..20: mol_type = other DNA
ctacacaattcttttatttt

SEQ ID NO: 58145 - DNA, 20 bp, synthetic construct
  source 1..20: mol_type = other DNA
tctacacaattcttttattt

SEQ ID NO: 58146 - DNA, 20 bp, synthetic construct
  source 1..20: mol_type = other DNA
atctacacaattcttttatt

SEQ ID NO: 58147 - DNA, 20 bp, synthetic construct
  source 1..20: mol_type = other DNA
aatctacacaattcttttat

SEQ ID NO: 58148 - DNA, 20 bp, synthetic construct
  source 1..20: mol_type = other DNA
aaatctacacaattctttta

SEQ ID NO: 58149 - DNA, 20 bp, synthetic construct
  source 1..20: mol_type = other DNA
aaaatctacacaattctttt

SEQ ID NO: 58150 - DNA, 20 bp, synthetic construct
  source 1..20: mol_type = other DNA
taaaatctacacaattcttt

SEQ ID NO: 58151 - DNA, 20 bp, synthetic construct
  source 1..20: mol_type = other DNA
ctaaaatctacacaattctt

SEQ ID NO: 58152 - DNA, 20 bp, synthetic construct
  source 1..20: mol_type = other DNA
actaaaatctacacaattct

SEQ ID NO: 58153 - DNA, 20 bp, synthetic construct
  source 1..20: mol_type = other DNA
tactaaaatctacacaattc

SEQ ID NO: 58154 - DNA, 20 bp, synthetic construct
  source 1..20: mol_type = other DNA
ctactaaaatctacacaatt

SEQ ID NO: 58155 - DNA, 20 bp, synthetic construct
  source 1..20: mol_type = other DNA
actactaaaatctacacaat

SEQ ID NO: 58156 - DNA, 20 bp, synthetic construct
  source 1..20: mol_type = other DNA
aactactaaaatctacacaa

SEQ ID NO: 58157 - DNA, 20 bp, synthetic construct
  source 1..20: mol_type = other DNA
caactactaaaatctacaca

SEQ ID NO: 58158 - DNA, 20 bp, synthetic construct
  source 1..20: mol_type = other DNA
ccaactactaaaatctacac

SEQ ID NO: 58159 - DNA, 20 bp, synthetic construct
  source 1..20: mol_type = other DNA
tccaactactaaaatctaca

SEQ ID NO: 58160 - DNA, 20 bp, synthetic construct
  source 1..20: mol_type = other DNA
ttccaactactaaaatctac

SEQ ID NO: 58161 - DNA, 20 bp, synthetic construct
  source 1..20: mol_type = other DNA
cttccaactactaaaatcta

SEQ ID NO: 58162 - DNA, 20 bp, synthetic construct
  source 1..20: mol_type = other DNA
tcttccaactactaaaatct

SEQ ID NO: 58163 - DNA, 20 bp, synthetic construct
  source 1..20: mol_type = other DNA
ttcttccaactactaaaatc

SEQ ID NO: 58164 - DNA, 20 bp, synthetic construct
  source 1..20: mol_type = other DNA
cttcttccaactactaaaat

SEQ ID NO: 58165 - DNA, 20 bp, synthetic construct
  source 1..20: mol_type = other DNA
acttcttccaactactaaaa

SEQ ID NO: 58166 - DNA, 20 bp, synthetic construct
  source 1..20: mol_type = other DNA
aacttcttccaactactaaa

SEQ ID NO: 58167 - DNA, 20 bp, synthetic construct
  source 1..20: mol_type = other DNA
caacttcttccaactactaa

SEQ ID NO: 58168 - DNA, 20 bp, synthetic construct
  source 1..20: mol_type = other DNA
ccaacttcttccaactacta

SEQ ID NO: 58169 - DNA, 20 bp, synthetic construct
  source 1..20: mol_type = other DNA
tccaacttcttccaactact

SEQ ID NO: 58170 - DNA, 20 bp, synthetic construct
  source 1..20: mol_type = other DNA
ctccaacttcttccaactac

SEQ ID NO: 58171 - DNA, 20 bp, synthetic construct
  source 1..20: mol_type = other DNA
actccaacttcttccaacta

SEQ ID NO: 58172 - DNA, 20 bp, synthetic construct
  source 1..20: mol_type = other DNA
cactccaacttcttccaact

SEQ ID NO: 58173 - DNA, 20 bp, synthetic construct
  source 1..20: mol_type = other DNA
acactccaacttcttccaac

SEQ ID NO: 58174 - DNA, 20 bp, synthetic construct
  source 1..20: mol_type = other DNA
aacactccaacttcttccaa

SEQ ID NO: 58175 - DNA, 20 bp, synthetic construct
  source 1..20: mol_type = other DNA
taacactccaacttcttcca

SEQ ID NO: 58176 - DNA, 20 bp, synthetic construct
  source 1..20: mol_type = other DNA
ttaacactccaacttcttcc

SEQ ID NO: 58177 - DNA, 20 bp, synthetic construct
  source 1..20: mol_type = other DNA
attaacactccaacttcttc

SEQ ID NO: 58178 - DNA, 20 bp, synthetic construct
  source 1..20: mol_type = other DNA
cattaacactccaacttctt

SEQ ID NO: 58179 - DNA, 20 bp, synthetic construct
  source 1..20: mol_type = other DNA
acattaacactccaacttct

SEQ ID NO: 58180 - DNA, 20 bp, synthetic construct
  source 1..20: mol_type = other DNA
cacattaacactccaacttc

SEQ ID NO: 58181 - DNA, 20 bp, synthetic construct
  source 1..20: mol_type = other DNA
acacattaacactccaactt

SEQ ID NO: 58182 - DNA, 20 bp, synthetic construct
  source 1..20: mol_type = other DNA
tacacattaacactccaact

SEQ ID NO: 58183 - DNA, 20 bp, synthetic construct
  source 1..20: mol_type = other DNA
ttacacattaacactccaac

SEQ ID NO: 58184 - DNA, 20 bp, synthetic construct
  source 1..20: mol_type = other DNA
attacacattaacactccaa

SEQ ID NO: 58185 - DNA, 20 bp, synthetic construct
  source 1..20: mol_type = other DNA
aattacacattaacactcca

SEQ ID NO: 58186 - DNA, 20 bp, synthetic construct
  source 1..20: mol_type = other DNA
taattacacattaacactcc

SEQ ID NO: 58187 - DNA, 20 bp, synthetic construct
  source 1..20: mol_type = other DNA
ctaattacacattaacactc

SEQ ID NO: 58188 - DNA, 20 bp, synthetic construct
  source 1..20: mol_type = other DNA
tctaattacacattaacact

SEQ ID NO: 58189 - DNA, 20 bp, synthetic construct
  source 1..20: mol_type = other DNA
ctctaattacacattaacac

SEQ ID NO: 58190 - DNA, 20 bp, synthetic construct
  source 1..20: mol_type = other DNA
tctctaattacacattaaca

SEQ ID NO: 58191 - DNA, 20 bp, synthetic construct
  source 1..20: mol_type = other DNA
ttctctaattacacattaac

SEQ ID NO: 58192 - DNA, 20 bp, synthetic construct
  source 1..20: mol_type = other DNA
gttctctaattacacattaa

SEQ ID NO: 58193 - DNA, 20 bp, synthetic construct
  source 1..20: mol_type = other DNA
tgttctctaattacacatta

SEQ ID NO: 58194 - DNA, 20 bp, synthetic construct
  source 1..20: mol_type = other DNA
ctgttctctaattacacatt

SEQ ID NO: 58195 - DNA, 20 bp, synthetic construct
  source 1..20: mol_type = other DNA
actgttctctaattacacat

SEQ ID NO: 58196 - DNA, 20 bp, synthetic construct
  source 1..20: mol_type = other DNA
cactgttctctaattacaca

SEQ ID NO: 58197 - DNA, 20 bp, synthetic construct
  source 1..20: mol_type = other DNA
tcactgttctctaattacac

SEQ ID NO: 58198 - DNA, 20 bp, synthetic construct
  source 1..20: mol_type = other DNA
ctcactgttctctaattaca

SEQ ID NO: 58199 - DNA, 20 bp, synthetic construct
  source 1..20: mol_type = other DNA
tctcactgttctctaattac

SEQ ID NO: 58200 - DNA, 20 bp, synthetic construct
  source 1..20: mol_type = other DNA
ttctcactgttctctaatta

SEQ ID NO: 58201 - DNA, 20 bp, synthetic construct
  source 1..20: mol_type = other DNA
tttctcactgttctctaatt

SEQ ID NO: 58202 - DNA, 20 bp, synthetic construct
  source 1..20: mol_type = other DNA
atttctcactgttctctaat

SEQ ID NO: 58203 - DNA, 20 bp, synthetic construct
  source 1..20: mol_type = other DNA
tatttctcactgttctctaa

SEQ ID NO: 58204 - DNA, 20 bp, synthetic construct
  source 1..20: mol_type = other DNA
ttatttctcactgttctcta

SEQ ID NO: 58205 - DNA, 20 bp, synthetic construct
  source 1..20: mol_type = other DNA
tttatttctcactgttctct

SEQ ID NO: 58206 - DNA, 20 bp, synthetic construct
  source 1..20: mol_type = other DNA
ttttatttctcactgttctc

SEQ ID NO: 58207 - DNA, 20 bp, synthetic construct
  source 1..20: mol_type = other DNA
attttatttctcactgttct

SEQ ID NO: 58208 - DNA, 20 bp, synthetic construct
  source 1..20: mol_type = other DNA
aattttatttctcactgttc

SEQ ID NO: 58209 - DNA, 20 bp, synthetic construct
  source 1..20: mol_type = other DNA
gaattttatttctcactgtt

SEQ ID NO: 58210 - DNA, 20 bp, synthetic construct
  source 1..20: mol_type = other DNA
agaattttatttctcactgt

SEQ ID NO: 58211 - DNA, 20 bp, synthetic construct
  source 1..20: mol_type = other DNA
tagaattttatttctcactg

SEQ ID NO: 58212 - DNA, 20 bp, synthetic construct
  source 1..20: mol_type = other DNA
gtagaattttatttctcact

SEQ ID NO: 58213 - DNA, 20 bp, synthetic construct
  source 1..20: mol_type = other DNA
tgtagaattttatttctcac

SEQ ID NO: 58214 - DNA, 20 bp, synthetic construct
  source 1..20: mol_type = other DNA
ctgtagaattttatttctca

SEQ ID NO: 58215 - DNA, 20 bp, synthetic construct
  source 1..20: mol_type = other DNA
tctgtagaattttatttctc

SEQ ID NO: 58216 - DNA, 20 bp, synthetic construct
  source 1..20: mol_type = other DNA
atctgtagaattttatttct

SEQ ID NO: 58217 - DNA, 20 bp, synthetic construct
  source 1..20: mol_type = other DNA
aatctgtagaattttatttc

SEQ ID NO: 58218 - DNA, 20 bp, synthetic construct
  source 1..20: mol_type = other DNA
caatctgtagaattttattt

SEQ ID NO: 58219 - DNA, 20 bp, synthetic construct
  source 1..20: mol_type = other DNA
acaatctgtagaattttatt

SEQ ID NO: 58220 - DNA, 20 bp, synthetic construct
  source 1..20: mol_type = other DNA
aacaatctgtagaattttat

SEQ ID NO: 58221 - DNA, 20 bp, synthetic construct
  source 1..20: mol_type = other DNA
aaacaatctgtagaatttta

SEQ ID NO: 58222 - DNA, 20 bp, synthetic construct
  source 1..20: mol_type = other DNA
aaaacaatctgtagaatttt

SEQ ID NO: 58223 - DNA, 20 bp, synthetic construct
  source 1..20: mol_type = other DNA
taaaacaatctgtagaattt

SEQ ID NO: 58224 - DNA, 20 bp, synthetic construct
  source 1..20: mol_type = other DNA
ataaaacaatctgtagaatt

SEQ ID NO: 58225 - DNA, 20 bp, synthetic construct
  source 1..20: mol_type = other DNA
aataaaacaatctgtagaat

SEQ ID NO: 58226 - DNA, 20 bp, synthetic construct
  source 1..20: mol_type = other DNA
gaataaaacaatctgtagaa

SEQ ID NO: 58227 - DNA, 20 bp, synthetic construct
  source 1..20: mol_type = other DNA
agaataaaacaatctgtaga

SEQ ID NO: 58228 - DNA, 20 bp, synthetic construct
  source 1..20: mol_type = other DNA
cagaataaaacaatctgtag

SEQ ID NO: 58229 - DNA, 20 bp, synthetic construct
  source 1..20: mol_type = other DNA
ccagaataaaacaatctgta

SEQ ID NO: 58230 - DNA, 20 bp, synthetic construct
  source 1..20: mol_type = other DNA
accagaataaaacaatctgt

SEQ ID NO: 58231 - DNA, 20 bp, synthetic construct
  source 1..20: mol_type = other DNA
caccagaataaaacaatctg

SEQ ID NO: 58232 - DNA, 20 bp, synthetic construct
  source 1..20: mol_type = other DNA
acaccagaataaaacaatct

SEQ ID NO: 58233 - DNA, 20 bp, synthetic construct
  source 1..20: mol_type = other DNA
cacaccagaataaaacaatc

SEQ ID NO: 58234 - DNA, 20 bp, synthetic construct
  source 1..20: mol_type = other DNA
gcacaccagaataaaacaat

SEQ ID NO: 58235 - DNA, 20 bp, synthetic construct
  source 1..20: mol_type = other DNA
agcacaccagaataaaacaa

SEQ ID NO: 58236 - DNA, 20 bp, synthetic construct
  source 1..20: mol_type = other DNA
cagcacaccagaataaaaca

SEQ ID NO: 58237 - DNA, 20 bp, synthetic construct
  source 1..20: mol_type = other DNA
acagcacaccagaataaaac

SEQ ID NO: 58238 - DNA, 20 bp, synthetic construct
  source 1..20: mol_type = other DNA
aacagcacaccagaataaaa

SEQ ID NO: 58239 - DNA, 20 bp, synthetic construct
  source 1..20: mol_type = other DNA
caacagcacaccagaataaa

SEQ ID NO: 58240 - DNA, 20 bp, synthetic construct
  source 1..20: mol_type = other DNA
acaacagcacaccagaataa

SEQ ID NO: 58241 - DNA, 20 bp, synthetic construct
  source 1..20: mol_type = other DNA
cacaacagcacaccagaata

SEQ ID NO: 58242 - DNA, 20 bp, synthetic construct
  source 1..20: mol_type = other DNA
acacaacagcacaccagaat

SEQ ID NO: 58243 - DNA, 20 bp, synthetic construct
  source 1..20: mol_type = other DNA
aacacaacagcacaccagaa

SEQ ID NO: 58244 - DNA, 20 bp, synthetic construct
  source 1..20: mol_type = other DNA
gaacacaacagcacaccaga

SEQ ID NO: 58245 - DNA, 20 bp, synthetic construct
  source 1..20: mol_type = other DNA
agaacacaacagcacaccag

SEQ ID NO: 58246 - DNA, 20 bp, synthetic construct
  source 1..20: mol_type = other DNA
gagaacacaacagcacacca

SEQ ID NO: 58247 - DNA, 20 bp, synthetic construct
  source 1..20: mol_type = other DNA
tgagaacacaacagcacacc

SEQ ID NO: 58248 - DNA, 20 bp, synthetic construct
  source 1..20: mol_type = other DNA
atgagaacacaacagcacac

SEQ ID NO: 58249 - DNA, 20 bp, synthetic construct
  source 1..20: mol_type = other DNA
tatgagaacacaacagcaca

SEQ ID NO: 58250 - DNA, 20 bp, synthetic construct
  source 1..20: mol_type = other DNA
atatgagaacacaacagcac

SEQ ID NO: 58251 - DNA, 20 bp, synthetic construct
  source 1..20: mol_type = other DNA
catatgagaacacaacagca

SEQ ID NO: 58252 - DNA, 20 bp, synthetic construct
  source 1..20: mol_type = other DNA
ccatatgagaacacaacagc

SEQ ID NO: 58253 - DNA, 20 bp, synthetic construct
  source 1..20: mol_type = other DNA
accatatgagaacacaacag

SEQ ID NO: 58254 - DNA, 20 bp, synthetic construct
  source 1..20: mol_type = other DNA
aaccatatgagaacacaaca

SEQ ID NO: 58255 - DNA, 20 bp, synthetic construct
  source 1..20: mol_type = other DNA
caaccatatgagaacacaac

SEQ ID NO: 58256 - DNA, 20 bp, synthetic construct
  source 1..20: mol_type = other DNA
acaaccatatgagaacacaa

SEQ ID NO: 58257 - DNA, 20 bp, synthetic construct
  source 1..20: mol_type = other DNA
gacaaccatatgagaacaca

SEQ ID NO: 58258 - DNA, 20 bp, synthetic construct
  source 1..20: mol_type = other DNA
agacaaccatatgagaacac

SEQ ID NO: 58259 - DNA, 20 bp, synthetic construct
  source 1..20: mol_type = other DNA
aagacaaccatatgagaaca

SEQ ID NO: 58260 - DNA, 20 bp, synthetic construct
  source 1..20: mol_type = other DNA
aaagacaaccatatgagaac

SEQ ID NO: 58261 - DNA, 20 bp, synthetic construct
  source 1..20: mol_type = other DNA
aaaagacaaccatatgagaa

SEQ ID NO: 58262 - DNA, 20 bp, synthetic construct
  source 1..20: mol_type = other DNA
aaaaagacaaccatatgaga

SEQ ID NO: 58263 - DNA, 20 bp, synthetic construct
  source 1..20: mol_type = other DNA
caaaaagacaaccatatgag

SEQ ID NO: 58264 - DNA, 20 bp, synthetic construct
  source 1..20: mol_type = other DNA
ccaaaaagacaaccatatga

SEQ ID NO: 58265 - DNA, 20 bp, synthetic construct
  source 1..20: mol_type = other DNA
accaaaaagacaaccatatg

SEQ ID NO: 58266 - DNA, 20 bp, synthetic construct
  source 1..20: mol_type = other DNA
gaccaaaaagacaaccatat

SEQ ID NO: 58267 - DNA, 20 bp, synthetic construct
  source 1..20: mol_type = other DNA
agaccaaaaagacaaccata

SEQ ID NO: 58268 - DNA, 20 bp, synthetic construct
  source 1..20: mol_type = other DNA
aagaccaaaaagacaaccat

SEQ ID NO: 58269 - DNA, 20 bp, synthetic construct
  source 1..20: mol_type = other DNA
caagaccaaaaagacaacca

SEQ ID NO: 58270 - DNA, 20 bp, synthetic construct
  source 1..20: mol_type = other DNA
tcaagaccaaaaagacaacc

SEQ ID NO: 58271 - DNA, 20 bp, synthetic construct
  source 1..20: mol_type = other DNA
atcaagaccaaaaagacaac

SEQ ID NO: 58272 - DNA, 20 bp, synthetic construct
  source 1..20: mol_type = other DNA
tatcaagaccaaaaagacaa

SEQ ID NO: 58273 - DNA, 20 bp, synthetic construct
  source 1..20: mol_type = other DNA
ctatcaagaccaaaaagaca

SEQ ID NO: 58274 - DNA, 20 bp, synthetic construct
  source 1..20: mol_type = other DNA
actatcaagaccaaaaagac

SEQ ID NO: 58275 - DNA, 20 bp, synthetic construct
  source 1..20: mol_type = other DNA
cactatcaagaccaaaaaga

SEQ ID NO: 58276 - DNA, 20 bp, synthetic construct
  source 1..20: mol_type = other DNA
acactatcaagaccaaaaag

SEQ ID NO: 58277 - DNA, 20 bp, synthetic construct
  source 1..20: mol_type = other DNA
tacactatcaagaccaaaaa

SEQ ID NO: 58278 - DNA, 20 bp, synthetic construct
  source 1..20: mol_type = other DNA
atacactatcaagaccaaaa

SEQ ID NO: 58279 - DNA, 20 bp, synthetic construct
  source 1..20: mol_type = other DNA
gatacactatcaagaccaaa

SEQ ID NO: 58280 - DNA, 20 bp, synthetic construct
  source 1..20: mol_type = other DNA
tgatacactatcaagaccaa

SEQ ID NO: 58281 - DNA, 20 bp, synthetic construct
  source 1..20: mol_type = other DNA
ctgatacactatcaagacca

SEQ ID NO: 58282 - DNA, 20 bp, synthetic construct
  source 1..20: mol_type = other DNA
actgatacactatcaagacc

SEQ ID NO: 58283 - DNA, 20 bp, synthetic construct
  source 1..20: mol_type = other DNA
tactgatacactatcaagac

SEQ ID NO: 58284 - DNA, 20 bp, synthetic construct
  source 1..20: mol_type = other DNA
ttactgatacactatcaaga

SEQ ID NO: 58285 - DNA, 20 bp, synthetic construct
  source 1..20: mol_type = other DNA
gttactgatacactatcaag

SEQ ID NO: 58286 - DNA, 20 bp, synthetic construct
  source 1..20: mol_type = other DNA
tgttactgatacactatcaa

SEQ ID NO: 58287 - DNA, 20 bp, synthetic construct
  source 1..20: mol_type = other DNA
ctgttactgatacactatca

SEQ ID NO: 58288 - DNA, 20 bp, synthetic construct
  source 1..20: mol_type = other DNA
tctgttactgatacactatc

SEQ ID NO: 58289 - DNA, 20 bp, synthetic construct
  source 1..20: mol_type = other DNA
ctctgttactgatacactat

SEQ ID NO: 58290 - DNA, 20 bp, synthetic construct
  source 1..20: mol_type = other DNA
actctgttactgatacacta

SEQ ID NO: 58291 - DNA, 20 bp, synthetic construct
  source 1..20: mol_type = other DNA
tactctgttactgatacact

SEQ ID NO: 58292 - DNA, 20 bp, synthetic construct
  source 1..20: mol_type = other DNA
gtactctgttactgatacac

SEQ ID NO: 58293 - DNA, 20 bp, synthetic construct
  source 1..20: mol_type = other DNA
cgtactctgttactgataca

SEQ ID NO: 58294 - DNA, 20 bp, synthetic construct
  source 1..20: mol_type = other DNA
tcgtactctgttactgatac

SEQ ID NO: 58295 - DNA, 20 bp, synthetic construct
  source 1..20: mol_type = other DNA
ctcgtactctgttactgata

SEQ ID NO: 58296 - DNA, 20 bp, synthetic construct
  source 1..20: mol_type = other DNA
actcgtactctgttactgat

SEQ ID NO: 58297 - DNA, 20 bp, synthetic construct
  source 1..20: mol_type = other DNA
tactcgtactctgttactga

SEQ ID NO: 58298 - DNA, 20 bp, synthetic construct
  source 1..20: mol_type = other DNA
ttactcgtactctgttactg

SEQ ID NO: 58299 - DNA, 20 bp, synthetic construct
  source 1..20: mol_type = other DNA
gttactcgtactctgttact

SEQ ID NO: 58300 - DNA, 20 bp, synthetic construct
  source 1..20: mol_type = other DNA
tgttactcgtactctgttac

SEQ ID NO: 58301 - DNA, 20 bp, synthetic construct
  source 1..20: mol_type = other DNA
ttgttactcgtactctgtta

SEQ ID NO: 58302 - DNA, 20 bp, synthetic construct
  source 1..20: mol_type = other DNA
tttgttactcgtactctgtt

SEQ ID NO: 58303 - DNA, 20 bp, synthetic construct
  source 1..20: mol_type = other DNA
gtttgttactcgtactctgt

SEQ ID NO: 58304 - DNA, 20 bp, synthetic construct
  source 1..20: mol_type = other DNA
tgtttgttactcgtactctg

SEQ ID NO: 58305 - DNA, 20 bp, synthetic construct
  source 1..20: mol_type = other DNA
ctgtttgttactcgtactct

SEQ ID NO: 58306 - DNA, 20 bp, synthetic construct
  source 1..20: mol_type = other DNA
cctgtttgttactcgtactc

SEQ ID NO: 58307 - DNA, 20 bp, synthetic construct
  source 1..20: mol_type = other DNA
ccctgtttgttactcgtact

SEQ ID NO: 58308 - DNA, 20 bp, synthetic construct
  source 1..20: mol_type = other DNA
tccctgtttgttactcgtac

SEQ ID NO: 58309 - DNA, 20 bp, synthetic construct
  source 1..20: mol_type = other DNA
atccctgtttgttactcgta

SEQ ID NO: 58310 - DNA, 20 bp, synthetic construct
  source 1..20: mol_type = other DNA
gatccctgtttgttactcgt

SEQ ID NO: 58311 - DNA, 20 bp, synthetic construct
  source 1..20: mol_type = other DNA
agatccctgtttgttactcg

SEQ ID NO: 58312 - DNA, 20 bp, synthetic construct
  source 1..20: mol_type = other DNA
gagatccctgtttgttactc

SEQ ID NO: 58313 - DNA, 20 bp, synthetic construct
  source 1..20: mol_type = other DNA
agagatccctgtttgttact

SEQ ID NO: 58314 - DNA, 20 bp, synthetic construct
  source 1..20: mol_type = other DNA
aagagatccctgtttgttac

SEQ ID NO: 58315 - DNA, 20 bp, synthetic construct
  source 1..20: mol_type = other DNA
gaagagatccctgtttgtta

SEQ ID NO: 58316 - DNA, 20 bp, synthetic construct
  source 1..20: mol_type = other DNA
agaagagatccctgtttgtt

SEQ ID NO: 58317 - DNA, 20 bp, synthetic construct
  source 1..20: mol_type = other DNA
cagaagagatccctgtttgt

SEQ ID NO: 58318 - DNA, 20 bp, synthetic construct
  source 1..20: mol_type = other DNA
tcagaagagatccctgtttg

SEQ ID NO: 58319 - DNA, 20 bp, synthetic construct
  source 1..20: mol_type = other DNA
ttcagaagagatccctgttt

SEQ ID NO: 58320 - DNA, 20 bp, synthetic construct
  source 1..20: mol_type = other DNA
gttcagaagagatccctgtt

SEQ ID NO: 58321 - DNA, 20 bp, synthetic construct
  source 1..20: mol_type = other DNA
cgttcagaagagatccctgt

SEQ ID NO: 58322 - DNA, 20 bp, synthetic construct
  source 1..20: mol_type = other DNA
ccgttcagaagagatccctg

SEQ ID NO: 58323 - DNA, 20 bp, synthetic construct
  source 1..20: mol_type = other DNA
gccgttcagaagagatccct

SEQ ID NO: 58324 - DNA, 20 bp, synthetic construct
  source 1..20: mol_type = other DNA
cgccgttcagaagagatccc

SEQ ID NO: 58325 - DNA, 20 bp, synthetic construct
  source 1..20: mol_type = other DNA
acgccgttcagaagagatcc

SEQ ID NO: 58326 - DNA, 20 bp, synthetic construct
  source 1..20: mol_type = other DNA
cacgccgttcagaagagatc

SEQ ID NO: 58327 - DNA, 20 bp, synthetic construct
  source 1..20: mol_type = other DNA
tcacgccgttcagaagagat

SEQ ID NO: 58328 - DNA, 20 bp, synthetic construct
  source 1..20: mol_type = other DNA
gtcacgccgttcagaagaga

SEQ ID NO: 58329 - DNA, 20 bp, synthetic construct
  source 1..20: mol_type = other DNA
tgtcacgccgttcagaagag

SEQ ID NO: 58330 - DNA, 20 bp, synthetic construct
  source 1..20: mol_type = other DNA
atgtcacgccgttcagaaga

SEQ ID NO: 58331 - DNA, 20 bp, synthetic construct
  source 1..20: mol_type = other DNA
aatgtcacgccgttcagaag

SEQ ID NO: 58332 - DNA, 20 bp, synthetic construct
  source 1..20: mol_type = other DNA
taatgtcacgccgttcagaa

SEQ ID NO: 58333 - DNA, 20 bp, synthetic construct
  source 1..20: mol_type = other DNA
ctaatgtcacgccgttcaga

SEQ ID NO: 58334 - DNA, 20 bp, synthetic construct
  source 1..20: mol_type = other DNA
tctaatgtcacgccgttcag

SEQ ID NO: 58335 - DNA, 20 bp, synthetic construct
  source 1..20: mol_type = other DNA
ttctaatgtcacgccgttca

SEQ ID NO: 58336 - DNA, 20 bp, synthetic construct
  source 1..20: mol_type = other DNA
tttctaatgtcacgccgttc

SEQ ID NO: 58337 - DNA, 20 bp, synthetic construct
  source 1..20: mol_type = other DNA
ttttctaatgtcacgccgtt

SEQ ID NO: 58338 - DNA, 20 bp, synthetic construct
  source 1..20: mol_type = other DNA
cttttctaatgtcacgccgt

SEQ ID NO: 58339 - DNA, 20 bp, synthetic construct
  source 1..20: mol_type = other DNA
gcttttctaatgtcacgccg

SEQ ID NO: 58340 - DNA, 20 bp, synthetic construct
  source 1..20: mol_type = other DNA
agcttttctaatgtcacgcc

SEQ ID NO: 58341 - DNA, 20 bp, synthetic construct
  source 1..20: mol_type = other DNA
cagcttttctaatgtcacgc

SEQ ID NO: 58342 - DNA, 20 bp, synthetic construct
  source 1..20: mol_type = other DNA
acagcttttctaatgtcacg

SEQ ID NO: 58343 - DNA, 20 bp, synthetic construct
  source 1..20: mol_type = other DNA
aacagcttttctaatgtcac

SEQ ID NO: 58344 - DNA, 20 bp, synthetic construct
  source 1..20: mol_type = other DNA
aaacagcttttctaatgtca

SEQ ID NO: 58345 - DNA, 20 bp, synthetic construct
  source 1..20: mol_type = other DNA
taaacagcttttctaatgtc

SEQ ID NO: 58346 - DNA, 20 bp, synthetic construct
  source 1..20: mol_type = other DNA
gtaaacagcttttctaatgt

SEQ ID NO: 58347 - DNA, 20 bp, synthetic construct
  source 1..20: mol_type = other DNA
cgtaaacagcttttctaatg

SEQ ID NO: 58348 - DNA, 20 bp, synthetic construct
  source 1..20: mol_type = other DNA
ccgtaaacagcttttctaat

SEQ ID NO: 58349 - DNA, 20 bp, synthetic construct
  source 1..20: mol_type = other DNA
gccgtaaacagcttttctaa

SEQ ID NO: 58350 - DNA, 20 bp, synthetic construct
  source 1..20: mol_type = other DNA
ggccgtaaacagcttttcta

SEQ ID NO: 58351 - DNA, 20 bp, synthetic construct
  source 1..20: mol_type = other DNA
aggccgtaaacagcttttct

SEQ ID NO: 58352 - DNA, 20 bp, synthetic construct
  source 1..20: mol_type = other DNA
gaggccgtaaacagcttttc

SEQ ID NO: 58353 - DNA, 20 bp, synthetic construct
  source 1..20: mol_type = other DNA
tgaggccgtaaacagctttt

SEQ ID NO: 58354 - DNA, 20 bp, synthetic construct
  source 1..20: mol_type = other DNA
ttgaggccgtaaacagcttt

SEQ ID NO: 58355 - DNA, 20 bp, synthetic construct
  source 1..20: mol_type = other DNA
gttgaggccgtaaacagctt

SEQ ID NO: 58356 - DNA, 20 bp, synthetic construct
  source 1..20: mol_type = other DNA
agttgaggccgtaaacagct

SEQ ID NO: 58357 - DNA, 20 bp, synthetic construct
  source 1..20: mol_type = other DNA
aagttgaggccgtaaacagc

SEQ ID NO: 58358 - DNA, 20 bp, synthetic construct
  source 1..20: mol_type = other DNA
aaagttgaggccgtaaacag

SEQ ID NO: 58359 - DNA, 20 bp, synthetic construct
  source 1..20: mol_type = other DNA
caaagttgaggccgtaaaca

SEQ ID NO: 58360 - DNA, 20 bp, synthetic construct
  source 1..20: mol_type = other DNA
gcaaagttgaggccgtaaac

SEQ ID NO: 58361 - DNA, 20 bp, synthetic construct
  source 1..20: mol_type = other DNA
agcaaagttgaggccgtaaa

SEQ ID NO: 58362 - DNA, 20 bp, synthetic construct
  source 1..20: mol_type = other DNA
cagcaaagttgaggccgtaa

SEQ ID NO: 58363 - DNA, 20 bp, synthetic construct
  source 1..20: mol_type = other DNA
acagcaaagttgaggccgta

SEQ ID NO: 58364 - DNA, 20 bp, synthetic construct
  source 1..20: mol_type = other DNA
cacagcaaagttgaggccgt

SEQ ID NO: 58365 - DNA, 20 bp, synthetic construct
  source 1..20: mol_type = other DNA
ccacagcaaagttgaggccg

SEQ ID NO: 58366 - DNA, 20 bp, synthetic construct
  source 1..20: mol_type = other DNA
accacagcaaagttgaggcc

SEQ ID NO: 58367 - DNA, 20 bp, synthetic construct
  source 1..20: mol_type = other DNA
aaccacagcaaagttgaggc

SEQ ID NO: 58368 - DNA, 20 bp, synthetic construct
  source 1..20: mol_type = other DNA
aaaccacagcaaagttgagg

SEQ ID NO: 58369 - DNA, 20 bp, synthetic construct
  source 1..20: mol_type = other DNA
taaaccacagcaaagttgag

SEQ ID NO: 58370 - DNA, 20 bp, synthetic construct
  source 1..20: mol_type = other DNA
ataaaccacagcaaagttga

SEQ ID NO: 58371 - DNA, 20 bp, synthetic construct
  source 1..20: mol_type = other DNA
aataaaccacagcaaagttg

SEQ ID NO: 58372 - DNA, 20 bp, synthetic construct
  source 1..20: mol_type = other DNA
taataaaccacagcaaagtt

SEQ ID NO: 58373 - DNA, 20 bp, synthetic construct
  source 1..20: mol_type = other DNA
ttaataaaccacagcaaagt

SEQ ID NO: 58374 - DNA, 20 bp, synthetic construct
  source 1..20: mol_type = other DNA
cttaataaaccacagcaaag

SEQ ID NO: 58375 - DNA, 20 bp, synthetic construct
  source 1..20: mol_type = other DNA
tcttaataaaccacagcaaa

SEQ ID NO: 58376 - DNA, 20 bp, synthetic construct
  source 1..20: mol_type = other DNA
gtcttaataaaccacagcaa

SEQ ID NO: 58377 - DNA, 20 bp, synthetic construct
  source 1..20: mol_type = other DNA
tgtcttaataaaccacagca

SEQ ID NO: 58378 - DNA, 20 bp, synthetic construct
  source 1..20: mol_type = other DNA
gtgtcttaataaaccacagc

SEQ ID NO: 58379 - DNA, 20 bp, synthetic construct
  source 1..20: mol_type = other DNA
tgtgtcttaataaaccacag

SEQ ID NO: 58380 - DNA, 20 bp, synthetic construct
  source 1..20: mol_type = other DNA
ctgtgtcttaataaaccaca

SEQ ID NO: 58381 - DNA, 20 bp, synthetic construct
  source 1..20: mol_type = other DNA
tctgtgtcttaataaaccac

SEQ ID NO: 58382 - DNA, 20 bp, synthetic construct
  source 1..20: mol_type = other DNA
atctgtgtcttaataaacca

SEQ ID NO: 58383 - DNA, 20 bp, synthetic construct
  source 1..20: mol_type = other DNA
tatctgtgtcttaataaacc

SEQ ID NO: 58384 - DNA, 20 bp, synthetic construct
  source 1..20: mol_type = other DNA
atatctgtgtcttaataaac

SEQ ID NO: 58385 - DNA, 20 bp, synthetic construct
  source 1..20: mol_type = other DNA
catatctgtgtcttaataaa

SEQ ID NO: 58386 - DNA, 20 bp, synthetic construct
  source 1..20: mol_type = other DNA
acatatctgtgtcttaataa

SEQ ID NO: 58387 - DNA, 20 bp, synthetic construct
  source 1..20: mol_type = other DNA
cacatatctgtgtcttaata

SEQ ID NO: 58388 - DNA, 20 bp, synthetic construct
  source 1..20: mol_type = other DNA
acacatatctgtgtcttaat

SEQ ID NO: 58389 - DNA, 20 bp, synthetic construct
  source 1..20: mol_type = other DNA
aacacatatctgtgtcttaa

SEQ ID NO: 58390 - DNA, 20 bp, synthetic construct
  source 1..20: mol_type = other DNA
gaacacatatctgtgtctta

SEQ ID NO: 58391 - DNA, 20 bp, synthetic construct
  source 1..20: mol_type = other DNA
tgaacacatatctgtgtctt

SEQ ID NO: 58392 - DNA, 20 bp, synthetic construct
  source 1..20: mol_type = other DNA
atgaacacatatctgtgtct

SEQ ID NO: 58393 - DNA, 20 bp, synthetic construct
  source 1..20: mol_type = other DNA
aatgaacacatatctgtgtc

SEQ ID NO: 58394 - DNA, 20 bp, synthetic construct
  source 1..20: mol_type = other DNA
gaatgaacacatatctgtgt

SEQ ID NO: 58395 - DNA, 20 bp, synthetic construct
  source 1..20: mol_type = other DNA
agaatgaacacatatctgtg

SEQ ID NO: 58396 - DNA, 20 bp, synthetic construct
  source 1..20: mol_type = other DNA
cagaatgaacacatatctgt

SEQ ID NO: 58397 - DNA, 20 bp, synthetic construct
  source 1..20: mol_type = other DNA
ccagaatgaacacatatctg

SEQ ID NO: 58398 - DNA, 20 bp, synthetic construct
  source 1..20: mol_type = other DNA
cccagaatgaacacatatct

SEQ ID NO: 58399 - DNA, 20 bp, synthetic construct
  source 1..20: mol_type = other DNA
ccccagaatgaacacatatc

SEQ ID NO: 58400 - DNA, 20 bp, synthetic construct
  source 1..20: mol_type = other DNA
gccccagaatgaacacatat

SEQ ID NO: 58401 - DNA, 20 bp, synthetic construct
  source 1..20: mol_type = other DNA
ggccccagaatgaacacata

SEQ ID NO: 58402 - DNA, 20 bp, synthetic construct
  source 1..20: mol_type = other DNA
tggccccagaatgaacacat

SEQ ID NO: 58403 - DNA, 20 bp, synthetic construct
  source 1..20: mol_type = other DNA
ttggccccagaatgaacaca

SEQ ID NO: 58404 - DNA, 20 bp, synthetic construct
  source 1..20: mol_type = other DNA
cttggccccagaatgaacac

SEQ ID NO: 58405 - DNA, 20 bp, synthetic construct
  source 1..20: mol_type = other DNA
gcttggccccagaatgaaca

SEQ ID NO: 58406 - DNA, 20 bp, synthetic construct
  source 1..20: mol_type = other DNA
tgcttggccccagaatgaac

SEQ ID NO: 58407 - DNA, 20 bp, synthetic construct
  source 1..20: mol_type = other DNA
ctgcttggccccagaatgaa

SEQ ID NO: 58408 - DNA, 20 bp, synthetic construct
  source 1..20: mol_type = other DNA
actgcttggccccagaatga

SEQ ID NO: 58409 - DNA, 20 bp, synthetic construct
  source 1..20: mol_type = other DNA
tactgcttggccccagaatg

SEQ ID NO: 58410 - DNA, 20 bp, synthetic construct
  source 1..20: mol_type = other DNA
ttactgcttggccccagaat

SEQ ID NO: 58411 - DNA, 20 bp, synthetic construct
  source 1..20: mol_type = other DNA
gttactgcttggccccagaa

SEQ ID NO: 58412 - DNA, 20 bp, synthetic construct
  source 1..20: mol_type = other DNA
agttactgcttggccccaga

SEQ ID NO: 58413 - DNA, 20 bp, synthetic construct
  source 1..20: mol_type = other DNA
cagttactgcttggccccag

SEQ ID NO: 58414 - DNA, 20 bp, synthetic construct
  source 1..20: mol_type = other DNA
ccagttactgcttggcccca

SEQ ID NO: 58415 - DNA, 20 bp, synthetic construct
  source 1..20: mol_type = other DNA
tccagttactgcttggcccc

SEQ ID NO: 58416 - DNA, 20 bp, synthetic construct
  source 1..20: mol_type = other DNA
ctccagttactgcttggccc

SEQ ID NO: 58417 - DNA, 20 bp, synthetic construct
  source 1..20: mol_type = other DNA
tctccagttactgcttggcc

SEQ ID NO: 58418 - DNA, 20 bp, synthetic construct
  source 1..20: mol_type = other DNA
ctctccagttactgcttggc

SEQ ID NO: 58419 - DNA, 20 bp, synthetic construct
  source 1..20: mol_type = other DNA
actctccagttactgcttgg

SEQ ID NO: 58420 - DNA, 20 bp, synthetic construct
  source 1..20: mol_type = other DNA
cactctccagttactgcttg

SEQ ID NO: 58421 - DNA, 20 bp, synthetic construct
  source 1..20: mol_type = other DNA
ccactctccagttactgctt

SEQ ID NO: 58422 - DNA, 20 bp, synthetic construct
  source 1..20: mol_type = other DNA
gccactctccagttactgct

SEQ ID NO: 58423 - DNA, 20 bp, synthetic construct
  source 1..20: mol_type = other DNA
tgccactctccagttactgc

SEQ ID NO: 58424 - DNA, 20 bp, synthetic construct
  source 1..20: mol_type = other DNA
gtgccactctccagttactg

SEQ ID NO: 58425 - DNA, 20 bp, synthetic construct
  source 1..20: mol_type = other DNA
agtgccactctccagttact

SEQ ID NO: 58426 - DNA, 20 bp, synthetic construct
  source 1..20: mol_type = other DNA
aagtgccactctccagttac

SEQ ID NO: 58427 - DNA, 20 bp, synthetic construct
  source 1..20: mol_type = other DNA
taagtgccactctccagtta

SEQ ID NO: 58428 - DNA, 20 bp, synthetic construct
  source 1..20: mol_type = other DNA
ataagtgccactctccagtt

SEQ ID NO: 58429 - DNA, 20 bp, synthetic construct
  source 1..20: mol_type = other DNA
aataagtgccactctccagt

SEQ ID NO: 58430 - DNA, 20 bp, synthetic construct
  source 1..20: mol_type = other DNA
caataagtgccactctccag

SEQ ID NO: 58431 - DNA, 20 bp, synthetic construct
  source 1..20: mol_type = other DNA
tcaataagtgccactctcca

SEQ ID NO: 58432 - DNA, 20 bp, synthetic construct
  source 1..20: mol_type = other DNA
ctcaataagtgccactctcc

SEQ ID NO: 58433 - DNA, 20 bp, synthetic construct
  source 1..20: mol_type = other DNA
cctcaataagtgccactctc

SEQ ID NO: 58434 - DNA, 20 bp, synthetic construct
  source 1..20: mol_type = other DNA
gcctcaataagtgccactct

SEQ ID NO: 58435 - DNA, 20 bp, synthetic construct
  source 1..20: mol_type = other DNA
ggcctcaataagtgccactc

SEQ ID NO: 58436 - DNA, 20 bp, synthetic construct
  source 1..20: mol_type = other DNA
tggcctcaataagtgccact

SEQ ID NO: 58437 - DNA, 20 bp, synthetic construct
  source 1..20: mol_type = other DNA
ctggcctcaataagtgccac

SEQ ID NO: 58438 - DNA, 20 bp, synthetic construct
  source 1..20: mol_type = other DNA
actggcctcaataagtgcca

SEQ ID NO: 58439 - DNA, 20 bp, synthetic construct
  source 1..20: mol_type = other DNA
tactggcctcaataagtgcc

SEQ ID NO: 58440 - DNA, 20 bp, synthetic construct
  source 1..20: mol_type = other DNA
atactggcctcaataagtgc

SEQ ID NO: 58441 - DNA, 20 bp, synthetic construct
  source 1..20: mol_type = other DNA
catactggcctcaataagtg

SEQ ID NO: 58442 - DNA, 20 bp, synthetic construct
  source 1..20: mol_type = other DNA
ccatactggcctcaataagt

SEQ ID NO: 58443 - DNA, 20 bp, synthetic construct
  source 1..20: mol_type = other DNA
tccatactggcctcaataag

SEQ ID NO: 58444 - DNA, 20 bp, synthetic construct
  source 1..20: mol_type = other DNA
ctccatactggcctcaataa

SEQ ID NO: 58445 - DNA, 20 bp, synthetic construct
  source 1..20: mol_type = other DNA
cctccatactggcctcaata

SEQ ID NO: 58446 - DNA, 20 bp, synthetic construct
  source 1..20: mol_type = other DNA
gcctccatactggcctcaat

SEQ ID NO: 58447 - DNA, 20 bp, synthetic construct
  source 1..20: mol_type = other DNA
tgcctccatactggcctcaa

SEQ ID NO: 58448 - DNA, 20 bp, synthetic construct
  source 1..20: mol_type = other DNA
ctgcctccatactggcctca

SEQ ID NO: 58449 - DNA, 20 bp, synthetic construct
  source 1..20: mol_type = other DNA
actgcctccatactggcctc

SEQ ID NO: 58450 - DNA, 20 bp, synthetic construct
  source 1..20: mol_type = other DNA
tactgcctccatactggcct

SEQ ID NO: 58451 - DNA, 20 bp, synthetic construct
  source 1..20: mol_type = other DNA
gtactgcctccatactggcc

SEQ ID NO: 58452 - DNA, 20 bp, synthetic construct
  source 1..20: mol_type = other DNA
tgtactgcctccatactggc

SEQ ID NO: 58453 - DNA, 20 bp, synthetic construct
  source 1..20: mol_type = other DNA
ctgtactgcctccatactgg

SEQ ID NO: 58454 - DNA, 20 bp, synthetic construct
  source 1..20: mol_type = other DNA
tctgtactgcctccatactg

SEQ ID NO: 58455 - DNA, 20 bp, synthetic construct
  source 1..20: mol_type = other DNA
ctctgtactgcctccatact

SEQ ID NO: 58456 - DNA, 20 bp, synthetic construct
  source 1..20: mol_type = other DNA
tctctgtactgcctccatac

SEQ ID NO: 58457 - DNA, 20 bp, synthetic construct
  source 1..20: mol_type = other DNA
atctctgtactgcctccata

SEQ ID NO: 58458 - DNA, 20 bp, synthetic construct
  source 1..20: mol_type = other DNA
aatctctgtactgcctccat

SEQ ID NO: 58459 - DNA, 20 bp, synthetic construct
  source 1..20: mol_type = other DNA
taatctctgtactgcctcca

SEQ ID NO: 58460 - DNA, 20 bp, synthetic construct
  source 1..20: mol_type = other DNA
ataatctctgtactgcctcc

SEQ ID NO: 58461 - DNA, 20 bp, synthetic construct
  source 1..20: mol_type = other DNA
aataatctctgtactgcctc

SEQ ID NO: 58462 - DNA, 20 bp, synthetic construct
  source 1..20: mol_type = other DNA
caataatctctgtactgcct

SEQ ID NO: 58463 - DNA, 20 bp, synthetic construct
  source 1..20: mol_type = other DNA
tcaataatctctgtactgcc

SEQ ID NO: 58464 - DNA, 20 bp, synthetic construct
  source 1..20: mol_type = other DNA
ctcaataatctctgtactgc

SEQ ID NO: 58465 - DNA, 20 bp, synthetic construct
  source 1..20: mol_type = other DNA
tctcaataatctctgtactg

SEQ ID NO: 58466 - DNA, 20 bp, synthetic construct
  source 1..20: mol_type = other DNA
atctcaataatctctgtact

SEQ ID NO: 58467 - DNA, 20 bp, synthetic construct
  source 1..20: mol_type = other DNA
aatctcaataatctctgtac

SEQ ID NO: 58468 - DNA, 20 bp, synthetic construct
  source 1..20: mol_type = other DNA
taatctcaataatctctgta

SEQ ID NO: 58469 - DNA, 20 bp, synthetic construct
  source 1..20: mol_type = other DNA
ttaatctcaataatctctgt

SEQ ID NO: 58470 - DNA, 20 bp, synthetic construct
  source 1..20: mol_type = other DNA
tttaatctcaataatctctg

SEQ ID NO: 58471 - DNA, 20 bp, synthetic construct
  source 1..20: mol_type = other DNA
ttttaatctcaataatctct

SEQ ID NO: 58472 - DNA, 20 bp, synthetic construct
  source 1..20: mol_type = other DNA
cttttaatctcaataatctc

SEQ ID NO: 58473 - DNA, 20 bp, synthetic construct
  source 1..20: mol_type = other DNA
tcttttaatctcaataatct

SEQ ID NO: 58474 - DNA, 20 bp, synthetic construct
  source 1..20: mol_type = other DNA
ttcttttaatctcaataatc

SEQ ID NO: 58475 - DNA, 20 bp, synthetic construct
  source 1..20: mol_type = other DNA
tttcttttaatctcaataat

SEQ ID NO: 58476 - DNA, 20 bp, synthetic construct
  source 1..20: mol_type = other DNA
ctttcttttaatctcaataa

SEQ ID NO: 58477 - DNA, 20 bp, synthetic construct
  source 1..20: mol_type = other DNA
tctttcttttaatctcaata

SEQ ID NO: 58478 - DNA, 20 bp, synthetic construct
  source 1..20: mol_type = other DNA
ttctttcttttaatctcaat

SEQ ID NO: 58479 - DNA, 20 bp, synthetic construct
  source 1..20: mol_type = other DNA
tttctttcttttaatctcaa

SEQ ID NO: 58480 - DNA, 20 bp, synthetic construct
  source 1..20: mol_type = other DNA
gtttctttcttttaatctca

SEQ ID NO: 58481 - DNA, 20 bp, synthetic construct
  source 1..20: mol_type = other DNA
tgtttctttcttttaatctc

SEQ ID NO: 58482 - DNA, 20 bp, synthetic construct
  source 1..20: mol_type = other DNA
ctgtttctttcttttaatct

SEQ ID NO: 58483 - DNA, 20 bp, synthetic construct
  source 1..20: mol_type = other DNA
cctgtttctttcttttaatc

SEQ ID NO: 58484 - DNA, 20 bp, synthetic construct
  source 1..20: mol_type = other DNA
acctgtttctttcttttaat

SEQ ID NO: 58485 - DNA, 20 bp, synthetic construct
  source 1..20: mol_type = other DNA
cacctgtttctttcttttaa

SEQ ID NO: 58486 - DNA, 20 bp, synthetic construct
  source 1..20: mol_type = other DNA
ccacctgtttctttctttta

SEQ ID NO: 58487 - DNA, 20 bp, synthetic construct
  source 1..20: mol_type = other DNA
tccacctgtttctttctttt

SEQ ID NO: 58488 - DNA, 20 bp, synthetic construct
  source 1..20: mol_type = other DNA
ttccacctgtttctttcttt

SEQ ID NO: 58489 - DNA, 20 bp, synthetic construct
  source 1..20: mol_type = other DNA
gttccacctgtttctttctt

SEQ ID NO: 58490 - DNA, 20 bp, synthetic construct
  source 1..20: mol_type = other DNA
cgttccacctgtttctttct

SEQ ID NO: 58491 - DNA, 20 bp, synthetic construct
  source 1..20: mol_type = other DNA
ccgttccacctgtttctttc

SEQ ID NO: 58492 - DNA, 20 bp, synthetic construct
  source 1..20: mol_type = other DNA
tccgttccacctgtttcttt

SEQ ID NO: 58493 - DNA, 20 bp, synthetic construct
  source 1..20: mol_type = other DNA
atccgttccacctgtttctt

SEQ ID NO: 58494 - DNA, 20 bp, synthetic construct
  source 1..20: mol_type = other DNA
gatccgttccacctgtttct

SEQ ID NO: 58495 - DNA, 20 bp, synthetic construct
  source 1..20: mol_type = other DNA
agatccgttccacctgtttc

SEQ ID NO: 58496 - DNA, 20 bp, synthetic construct
  source 1..20: mol_type = other DNA
tagatccgttccacctgttt

SEQ ID NO: 58497 - DNA, 20 bp, synthetic construct
  source 1..20: mol_type = other DNA
atagatccgttccacctgtt

SEQ ID NO: 58498 - DNA, 20 bp, synthetic construct
  source 1..20: mol_type = other DNA
catagatccgttccacctgt

SEQ ID NO: 58499 - DNA, 20 bp, synthetic construct
  source 1..20: mol_type = other DNA
acatagatccgttccacctg

SEQ ID NO: 58500 - DNA, 20 bp, synthetic construct
  source 1..20: mol_type = other DNA
tacatagatccgttccacct

SEQ ID NO: 58501 - DNA, 20 bp, synthetic construct
  source 1..20: mol_type = other DNA
ttacatagatccgttccacc

SEQ ID NO: 58502 - DNA, 20 bp, synthetic construct
  source 1..20: mol_type = other DNA
attacatagatccgttccac

SEQ ID NO: 58503 - DNA, 20 bp, synthetic construct
  source 1..20: mol_type = other DNA
cattacatagatccgttcca

SEQ ID NO: 58504 - DNA, 20 bp, synthetic construct
  source 1..20: mol_type = other DNA
ccattacatagatccgttcc

SEQ ID NO: 58505 - DNA, 20 bp, synthetic construct
  source 1..20: mol_type = other DNA
tccattacatagatccgttc

SEQ ID NO: 58506 - DNA, 20 bp, synthetic construct
  source 1..20: mol_type = other DNA
ttccattacatagatccgtt

SEQ ID NO: 58507 - DNA, 20 bp, synthetic construct
  source 1..20: mol_type = other DNA
tttccattacatagatccgt

SEQ ID NO: 58508 - DNA, 20 bp, synthetic construct
  source 1..20: mol_type = other DNA
ctttccattacatagatccg

SEQ ID NO: 58509 - DNA, 20 bp, synthetic construct
  source 1..20: mol_type = other DNA
gctttccattacatagatcc

SEQ ID NO: 58510 - DNA, 20 bp, synthetic construct
  source 1..20: mol_type = other DNA
agctttccattacatagatc

SEQ ID NO: 58511 - DNA, 20 bp, synthetic construct
  source 1..20: mol_type = other DNA
tagctttccattacatagat

SEQ ID NO: 58512 - DNA, 20 bp, synthetic construct
  source 1..20: mol_type = other DNA
ttagctttccattacataga

SEQ ID NO: 58513 - DNA, 20 bp, synthetic construct
  source 1..20: mol_type = other DNA
tttagctttccattacatag

SEQ ID NO: 58514 - DNA, 20 bp, synthetic construct
  source 1..20: mol_type = other DNA
gtttagctttccattacata

SEQ ID NO: 58515 - DNA, 20 bp, synthetic construct
  source 1..20: mol_type = other DNA
tgtttagctttccattacat

SEQ ID NO: 58516 - DNA, 20 bp, synthetic construct
  source 1..20: mol_type = other DNA
ctgtttagctttccattaca

SEQ ID NO: 58517 - DNA, 20 bp, synthetic construct
  source 1..20: mol_type = other DNA
tctgtttagctttccattac

SEQ ID NO: 58518 - DNA, 20 bp, synthetic construct
  source 1..20: mol_type = other DNA
ttctgtttagctttccatta

SEQ ID NO: 58519 - DNA, 20 bp, synthetic construct
  source 1..20: mol_type = other DNA
attctgtttagctttccatt

SEQ ID NO: 58520 - DNA, 20 bp, synthetic construct
  source 1..20: mol_type = other DNA
tattctgtttagctttccat

SEQ ID NO: 58521 - DNA, 20 bp, synthetic construct
  source 1..20: mol_type = other DNA
ctattctgtttagctttcca

SEQ ID NO: 58522 - DNA, 20 bp, synthetic construct
  source 1..20: mol_type = other DNA
actattctgtttagctttcc

SEQ ID NO: 58523 - DNA, 20 bp, synthetic construct
  source 1..20: mol_type = other DNA
aactattctgtttagctttc

SEQ ID NO: 58524 - DNA, 20 bp, synthetic construct
  source 1..20: mol_type = other DNA
gaactattctgtttagcttt

SEQ ID NO: 58525 - DNA, 20 bp, synthetic construct
  source 1..20: mol_type = other DNA
cgaactattctgtttagctt

SEQ ID NO: 58526 - DNA, 20 bp, synthetic construct
  source 1..20: mol_type = other DNA
acgaactattctgtttagct

SEQ ID NO: 58527 - DNA, 20 bp, synthetic construct
  source 1..20: mol_type = other DNA
cacgaactattctgtttagc

SEQ ID NO: 58528 - DNA, 20 bp, synthetic construct
  source 1..20: mol_type = other DNA
ccacgaactattctgtttag

SEQ ID NO: 58529 - DNA, 20 bp, synthetic construct
  source 1..20: mol_type = other DNA
accacgaactattctgttta

SEQ ID NO: 58530 - DNA, 20 bp, synthetic construct
  source 1..20: mol_type = other DNA
taccacgaactattctgttt

SEQ ID NO: 58531 - DNA, 20 bp, synthetic construct
  source 1..20: mol_type = other DNA
gtaccacgaactattctgtt

SEQ ID NO: 58532 - DNA, 20 bp, synthetic construct
  source 1..20: mol_type = other DNA
tgtaccacgaactattctgt

SEQ ID NO: 58533 - DNA, 20 bp, synthetic construct
  source 1..20: mol_type = other DNA
gtgtaccacgaactattctg

SEQ ID NO: 58534 - DNA, 20 bp, synthetic construct
  source 1..20: mol_type = other DNA
tgtgtaccacgaactattct

SEQ ID NO: 58535 - DNA, 20 bp, synthetic construct
  source 1..20: mol_type = other DNA
ctgtgtaccacgaactattc

SEQ ID NO: 58536 - DNA, 20 bp, synthetic construct
  source 1..20: mol_type = other DNA
actgtgtaccacgaactatt

SEQ ID NO: 58537 - DNA, 20 bp, synthetic construct
  source 1..20: mol_type = other DNA
tactgtgtaccacgaactat

SEQ ID NO: 58538 - DNA, 20 bp, synthetic construct
  source 1..20: mol_type = other DNA
ctactgtgtaccacgaacta

SEQ ID NO: 58539 - DNA, 20 bp, synthetic construct
  source 1..20: mol_type = other DNA
tctactgtgtaccacgaact

SEQ ID NO: 58540 - DNA, 20 bp, synthetic construct
  source 1..20: mol_type = other DNA
ttctactgtgtaccacgaac

SEQ ID NO: 58541 - DNA, 20 bp, synthetic construct
  source 1..20: mol_type = other DNA
tttctactgtgtaccacgaa

SEQ ID NO: 58542 - DNA, 20 bp, synthetic construct
  source 1..20: mol_type = other DNA
ttttctactgtgtaccacga

SEQ ID NO: 58543 - DNA, 20 bp, synthetic construct
  source 1..20: mol_type = other DNA
cttttctactgtgtaccacg

SEQ ID NO: 58544 - DNA, 20 bp, synthetic construct
  source 1..20: mol_type = other DNA
gcttttctactgtgtaccac

SEQ ID NO: 58545 - DNA, 20 bp, synthetic construct
  source 1..20: mol_type = other DNA
tgcttttctactgtgtacca

SEQ ID NO: 58546 - DNA, 20 bp, synthetic construct
  source 1..20: mol_type = other DNA
atgcttttctactgtgtacc

SEQ ID NO: 58547 - DNA, 20 bp, synthetic construct
  source 1..20: mol_type = other DNA
aatgcttttctactgtgtac

SEQ ID NO: 58548 - DNA, 20 bp, synthetic construct
  source 1..20: mol_type = other DNA
taatgcttttctactgtgta

SEQ ID NO: 58549 - DNA, 20 bp, synthetic construct
  source 1..20: mol_type = other DNA
gtaatgcttttctactgtgt

SEQ ID NO: 58550 - DNA, 20 bp, synthetic construct
  source 1..20: mol_type = other DNA
tgtaatgcttttctactgtg

SEQ ID NO: 58551 - DNA, 20 bp, synthetic construct
  source 1..20: mol_type = other DNA
atgtaatgcttttctactgt

SEQ ID NO: 58552 - DNA, 20 bp, synthetic construct
  source 1..20: mol_type = other DNA
catgtaatgcttttctactg

SEQ ID NO: 58553 - DNA, 20 bp, synthetic construct
  source 1..20: mol_type = other DNA
acatgtaatgcttttctact

SEQ ID NO: 58554 - DNA, 20 bp, synthetic construct
  source 1..20: mol_type = other DNA
aacatgtaatgcttttctac

SEQ ID NO: 58555 - DNA, 20 bp, synthetic construct
  source 1..20: mol_type = other DNA
aaacatgtaatgcttttcta

SEQ ID NO: 58556 - DNA, 20 bp, synthetic construct
  source 1..20: mol_type = other DNA
taaacatgtaatgcttttct

SEQ ID NO: 58557 - DNA, 20 bp, synthetic construct
  source 1..20: mol_type = other DNA
ataaacatgtaatgcttttc

SEQ ID NO: 58558 - DNA, 20 bp, synthetic construct
  source 1..20: mol_type = other DNA
aataaacatgtaatgctttt

SEQ ID NO: 58559 - DNA, 20 bp, synthetic construct
  source 1..20: mol_type = other DNA
taataaacatgtaatgcttt

SEQ ID NO: 58560 - DNA, 20 bp, synthetic construct
  source 1..20: mol_type = other DNA
ttaataaacatgtaatgctt

SEQ ID NO: 58561 - DNA, 20 bp, synthetic construct
  source 1..20: mol_type = other DNA
cttaataaacatgtaatgct

SEQ ID NO: 58562 - DNA, 20 bp, synthetic construct
  source 1..20: mol_type = other DNA
tcttaataaacatgtaatgc

SEQ ID NO: 58563 - DNA, 20 bp, synthetic construct
  source 1..20: mol_type = other DNA
atcttaataaacatgtaatg

SEQ ID NO: 58564 - DNA, 20 bp, synthetic construct
  source 1..20: mol_type = other DNA
tatcttaataaacatgtaat

SEQ ID NO: 58565 - DNA, 20 bp, synthetic construct
  source 1..20: mol_type = other DNA
atatcttaataaacatgtaa

SEQ ID NO: 58566 - DNA, 20 bp, synthetic construct
  source 1..20: mol_type = other DNA
catatcttaataaacatgta

SEQ ID NO: 58567 - DNA, 20 bp, synthetic construct
  source 1..20: mol_type = other DNA
ccatatcttaataaacatgt

SEQ ID NO: 58568 - DNA, 20 bp, synthetic construct
  source 1..20: mol_type = other DNA
accatatcttaataaacatg

SEQ ID NO: 58569 - DNA, 20 bp, synthetic construct
  source 1..20: mol_type = other DNA
gaccatatcttaataaacat

SEQ ID NO: 58570 - DNA, 20 bp, synthetic construct
  source 1..20: mol_type = other DNA
tgaccatatcttaataaaca

SEQ ID NO: 58571 - DNA, 20 bp, synthetic construct
  source 1..20: mol_type = other DNA
atgaccatatcttaataaac

SEQ ID NO: 58572 - DNA, 20 bp, synthetic construct
  source 1..20: mol_type = other DNA
gatgaccatatcttaataaa

SEQ ID NO: 58573 - DNA, 20 bp, synthetic construct
  source 1..20: mol_type = other DNA
agatgaccatatcttaataa

SEQ ID NO: 58574 - DNA, 20 bp, synthetic construct
  source 1..20: mol_type = other DNA
aagatgaccatatcttaata

SEQ ID NO: 58575 - DNA, 20 bp, synthetic construct
  source 1..20: mol_type = other DNA
gaagatgaccatatcttaat

SEQ ID NO: 58576 - DNA, 20 bp, synthetic construct
  source 1..20: mol_type = other DNA
ggaagatgaccatatcttaa

SEQ ID NO: 58577 - DNA, 20 bp, synthetic construct
  source 1..20: mol_type = other DNA
tggaagatgaccatatctta

SEQ ID NO: 58578 - DNA, 20 bp, synthetic construct
  source 1..20: mol_type = other DNA
atggaagatgaccatatctt

SEQ ID NO: 58579 - DNA, 20 bp, synthetic construct
  source 1..20: mol_type = other DNA
aatggaagatgaccatatct

SEQ ID NO: 58580 - DNA, 20 bp, synthetic construct
  source 1..20: mol_type = other DNA
aaatggaagatgaccatatc

SEQ ID NO: 58581 - DNA, 20 bp, synthetic construct
  source 1..20: mol_type = other DNA
taaatggaagatgaccatat

SEQ ID NO: 58582 - DNA, 20 bp, synthetic construct
  source 1..20: mol_type = other DNA
ataaatggaagatgaccata

SEQ ID NO: 58583 - DNA, 20 bp, synthetic construct
  source 1..20: mol_type = other DNA
aataaatggaagatgaccat

SEQ ID NO: 58584 - DNA, 20 bp, synthetic construct
  source 1..20: mol_type = other DNA
taataaatggaagatgacca

SEQ ID NO: 58585 - DNA, 20 bp, synthetic construct
  source 1..20: mol_type = other DNA
ttaataaatggaagatgacc

SEQ ID NO: 58586 - DNA, 20 bp, synthetic construct
  source 1..20: mol_type = other DNA
tttaataaatggaagatgac

SEQ ID NO: 58587 - DNA, 20 bp, synthetic construct
  source 1..20: mol_type = other DNA
ctttaataaatggaagatga

SEQ ID NO: 58588 - DNA, 20 bp, synthetic construct
  source 1..20: mol_type = other DNA
actttaataaatggaagatg

SEQ ID NO: 58589 - DNA, 20 bp, synthetic construct
  source 1..20: mol_type = other DNA
aactttaataaatggaagat

SEQ ID NO: 58590 - DNA, 20 bp, synthetic construct
  source 1..20: mol_type = other DNA
taactttaataaatggaaga

SEQ ID NO: 58591 - DNA, 20 bp, synthetic construct
  source 1..20: mol_type = other DNA
gtaactttaataaatggaag

SEQ ID NO: 58592 - DNA, 20 bp, synthetic construct
  source 1..20: mol_type = other DNA
tgtaactttaataaatggaa

SEQ ID NO: 58593 - DNA, 20 bp, synthetic construct
  source 1..20: mol_type = other DNA
atgtaactttaataaatgga

SEQ ID NO: 58594 - DNA, 20 bp, synthetic construct
  source 1..20: mol_type = other DNA
catgtaactttaataaatgg

SEQ ID NO: 58595 - DNA, 20 bp, synthetic construct
  source 1..20: mol_type = other DNA
acatgtaactttaataaatg

SEQ ID NO: 58596 - DNA, 20 bp, synthetic construct
  source 1..20: mol_type = other DNA
aacatgtaactttaataaat

SEQ ID NO: 58597 - DNA, 20 bp, synthetic construct
  source 1..20: mol_type = other DNA
aaacatgtaactttaataaa

SEQ ID NO: 58598 - DNA, 20 bp, synthetic construct
  source 1..20: mol_type = other DNA
aaaacatgtaactttaataa

SEQ ID NO: 58599 - DNA, 20 bp, synthetic construct
  source 1..20: mol_type = other DNA
taaaacatgtaactttaata

SEQ ID NO: 58600 - DNA, 20 bp, synthetic construct
  source 1..20: mol_type = other DNA
ataaaacatgtaactttaat

SEQ ID NO: 58601 - DNA, 20 bp, synthetic construct
  source 1..20: mol_type = other DNA
tataaaacatgtaactttaa

SEQ ID NO: 58602 - DNA, 20 bp, synthetic construct
  source 1..20: mol_type = other DNA
ttataaaacatgtaacttta

SEQ ID NO: 58603 - DNA, 20 bp, synthetic construct
  source 1..20: mol_type = other DNA
attataaaacatgtaacttt

SEQ ID NO: 58604 - DNA, 20 bp, synthetic construct
  source 1..20: mol_type = other DNA
aattataaaacatgtaactt

SEQ ID NO: 58605 - DNA, 20 bp, synthetic construct
  source 1..20: mol_type = other DNA
aaattataaaacatgtaact

SEQ ID NO: 58606 - DNA, 20 bp, synthetic construct
  source 1..20: mol_type = other DNA
aaaattataaaacatgtaac

SEQ ID NO: 58607 - DNA, 20 bp, synthetic construct
  source 1..20: mol_type = other DNA
aaaaattataaaacatgtaa

SEQ ID NO: 58608 - DNA, 20 bp, synthetic construct
  source 1..20: mol_type = other DNA
taaaaattataaaacatgta

SEQ ID NO: 58609 - DNA, 20 bp, synthetic construct
  source 1..20: mol_type = other DNA
ctaaaaattataaaacatgt

SEQ ID NO: 58610 - DNA, 20 bp, synthetic construct
  source 1..20: mol_type = other DNA
tctaaaaattataaaacatg

SEQ ID NO: 58611 - DNA, 20 bp, synthetic construct
  source 1..20: mol_type = other DNA
ctctaaaaattataaaacat

SEQ ID NO: 58612 - DNA, 20 bp, synthetic construct
  source 1..20: mol_type = other DNA
actctaaaaattataaaaca

SEQ ID NO: 58613 - DNA, 20 bp, synthetic construct
  source 1..20: mol_type = other DNA
tactctaaaaattataaaac

SEQ ID NO: 58614 - DNA, 20 bp, synthetic construct
  source 1..20: mol_type = other DNA
atactctaaaaattataaaa

SEQ ID NO: 58615 - DNA, 20 bp, synthetic construct
  source 1..20: mol_type = other DNA
tatactctaaaaattataaa

SEQ ID NO: 58616 - DNA, 20 bp, synthetic construct
  source 1..20: mol_type = other DNA
atatactctaaaaattataa

SEQ ID NO: 58617 - DNA, 20 bp, synthetic construct
  source 1..20: mol_type = other DNA
tatatactctaaaaattata

SEQ ID NO: 58618 - DNA, 20 bp, synthetic construct
  source 1..20: mol_type = other DNA
ctatatactctaaaaattat

SEQ ID NO: 58619 - DNA, 20 bp, synthetic construct
  source 1..20: mol_type = other DNA
tctatatactctaaaaatta

SEQ ID NO: 58620 - DNA, 20 bp, synthetic construct
  source 1..20: mol_type = other DNA
ttctatatactctaaaaatt

SEQ ID NO: 58621 - DNA, 20 bp, synthetic construct
  source 1..20: mol_type = other DNA
tttctatatactctaaaaat

SEQ ID NO: 58622 - DNA, 20 bp, synthetic construct
  source 1..20: mol_type = other DNA
atttctatatactctaaaaa

SEQ ID NO: 58623 - DNA, 20 bp, synthetic construct
  source 1..20: mol_type = other DNA
aatttctatatactctaaaa

SEQ ID NO: 58624 - DNA, 20 bp, synthetic construct
  source 1..20: mol_type = other DNA
gaatttctatatactctaaa

SEQ ID NO: 58625 - DNA, 20 bp, synthetic construct
  source 1..20: mol_type = other DNA
agaatttctatatactctaa

SEQ ID NO: 58626 - DNA, 20 bp, synthetic construct
  source 1..20: mol_type = other DNA
gagaatttctatatactcta

SEQ ID NO: 58627 - DNA, 20 bp, synthetic construct
  source 1..20: mol_type = other DNA
agagaatttctatatactct

SEQ ID NO: 58628 - DNA, 20 bp, synthetic construct
  source 1..20: mol_type = other DNA
tagagaatttctatatactc

SEQ ID NO: 58629 - DNA, 20 bp, synthetic construct
  source 1..20: mol_type = other DNA
gtagagaatttctatatact

SEQ ID NO: 58630 - DNA, 20 bp, synthetic construct
  source 1..20: mol_type = other DNA
ggtagagaatttctatatac

SEQ ID NO: 58631 - DNA, 20 bp, synthetic construct
  source 1..20: mol_type = other DNA
gggtagagaatttctatata

SEQ ID NO: 58632 - DNA, 20 bp, synthetic construct
  source 1..20: mol_type = other DNA
agggtagagaatttctatat

SEQ ID NO: 58633 - DNA, 20 bp, synthetic construct
  source 1..20: mol_type = other DNA
tagggtagagaatttctata

SEQ ID NO: 58634 - DNA, 20 bp, synthetic construct
  source 1..20: mol_type = other DNA
atagggtagagaatttctat

SEQ ID NO: 58635 - DNA, 20 bp, synthetic construct
  source 1..20: mol_type = other DNA
gatagggtagagaatttcta

SEQ ID NO: 58636 - DNA, 20 bp, synthetic construct
  source 1..20: mol_type = other DNA
tgatagggtagagaatttct

SEQ ID NO: 58637 - DNA, 20 bp, synthetic construct
  source 1..20: mol_type = other DNA
atgatagggtagagaatttc

SEQ ID NO: 58638 - DNA, 20 bp, synthetic construct
  source 1..20: mol_type = other DNA
catgatagggtagagaattt

SEQ ID NO: 58639 - DNA, 20 bp, synthetic construct
  source 1..20: mol_type = other DNA
acatgatagggtagagaatt

SEQ ID NO: 58640 - DNA, 20 bp, synthetic construct
  source 1..20: mol_type = other DNA
aacatgatagggtagagaat

SEQ ID NO: 58641 - DNA, 20 bp, synthetic construct
  source 1..20: mol_type = other DNA
aaacatgatagggtagagaa

SEQ ID NO: 58642 - DNA, 20 bp, synthetic construct
  source 1..20: mol_type = other DNA
caaacatgatagggtagaga

SEQ ID NO: 58643 - DNA, 20 bp, synthetic construct
  source 1..20: mol_type = other DNA
gcaaacatgatagggtagag

SEQ ID NO: 58644 - DNA, 20 bp, synthetic construct
  source 1..20: mol_type = other DNA
ggcaaacatgatagggtaga

SEQ ID NO: 58645 - DNA, 20 bp, synthetic construct
  source 1..20: mol_type = other DNA
tggcaaacatgatagggtag

SEQ ID NO: 58646 - DNA, 20 bp, synthetic construct
  source 1..20: mol_type = other DNA
ttggcaaacatgatagggta

SEQ ID NO: 58647 - DNA, 20 bp, synthetic construct
  source 1..20: mol_type = other DNA
tttggcaaacatgatagggt

SEQ ID NO: 58648 - DNA, 20 bp, synthetic construct
  source 1..20: mol_type = other DNA
ctttggcaaacatgataggg

SEQ ID NO: 58649 - DNA, 20 bp, synthetic construct
  source 1..20: mol_type = other DNA
actttggcaaacatgatagg

SEQ ID NO: 58650 - DNA, 20 bp, synthetic construct
  source 1..20: mol_type = other DNA
gactttggcaaacatgatag

SEQ ID NO: 58651 - DNA, 20 bp, synthetic construct
  source 1..20: mol_type = other DNA
tgactttggcaaacatgata

SEQ ID NO: 58652 - DNA, 20 bp, synthetic construct
  source 1..20: mol_type = other DNA
ctgactttggcaaacatgat

SEQ ID NO: 58653 - DNA, 20 bp, synthetic construct
  source 1..20: mol_type = other DNA
tctgactttggcaaacatga

SEQ ID NO: 58654 - DNA, 20 bp, synthetic construct
  source 1..20: mol_type = other DNA
ttctgactttggcaaacatg

SEQ ID NO: 58655 - DNA, 20 bp, synthetic construct
  source 1..20: mol_type = other DNA
gttctgactttggcaaacat

SEQ ID NO: 58656 - DNA, 20 bp, synthetic construct
  source 1..20: mol_type = other DNA
tgttctgactttggcaaaca

SEQ ID NO: 58657 - DNA, 20 bp, synthetic construct
  source 1..20: mol_type = other DNA
ttgttctgactttggcaaac

SEQ ID NO: 58658 - DNA, 20 bp, synthetic construct
  source 1..20: mol_type = other DNA
attgttctgactttggcaaa

SEQ ID NO: 58659 - DNA, 20 bp, synthetic construct
  source 1..20: mol_type = other DNA
tattgttctgactttggcaa

SEQ ID NO: 58660 - DNA, 20 bp, synthetic construct
  source 1..20: mol_type = other DNA
ttattgttctgactttggca

SEQ ID NO: 58661 - DNA, 20 bp, synthetic construct
  source 1..20: mol_type = other DNA
gttattgttctgactttggc

SEQ ID NO: 58662 - DNA, 20 bp, synthetic construct
  source 1..20: mol_type = other DNA
agttattgttctgactttgg

SEQ ID NO: 58663 - DNA, 20 bp, synthetic construct
  source 1..20: mol_type = other DNA
aagttattgttctgactttg

SEQ ID NO: 58664 - DNA, 20 bp, synthetic construct
  source 1..20: mol_type = other DNA
gaagttattgttctgacttt

SEQ ID NO: 58665 - DNA, 20 bp, synthetic construct
  source 1..20: mol_type = other DNA
tgaagttattgttctgactt

SEQ ID NO: 58666 - DNA, 20 bp, synthetic construct
  source 1..20: mol_type = other DNA
atgaagttattgttctgact

SEQ ID NO: 58667 - DNA, 20 bp, synthetic construct
  source 1..20: mol_type = other DNA
aatgaagttattgttctgac

SEQ ID NO: 58668 - DNA, 20 bp, synthetic construct
  source 1..20: mol_type = other DNA
aaatgaagttattgttctga

SEQ ID NO: 58669 - DNA, 20 bp, synthetic construct
  source 1..20: mol_type = other DNA
taaatgaagttattgttctg

SEQ ID NO: 58670 - DNA, 20 bp, synthetic construct
  source 1..20: mol_type = other DNA
ataaatgaagttattgttct

SEQ ID NO: 58671 - DNA, 20 bp, synthetic construct
  source 1..20: mol_type = other DNA
aataaatgaagttattgttc

SEQ ID NO: 58672 - DNA, 20 bp, synthetic construct
  source 1..20: mol_type = other DNA
taataaatgaagttattgtt

SEQ ID NO: 58673 - DNA, 20 bp, synthetic construct
  source 1..20: mol_type = other DNA
ttaataaatgaagttattgt

SEQ ID NO: 58674 - DNA, 20 bp, synthetic construct
  source 1..20: mol_type = other DNA
tttaataaatgaagttattg

SEQ ID NO: 58675 - DNA, 20 bp, synthetic construct
  source 1..20: mol_type = other DNA
atttaataaatgaagttatt

SEQ ID NO: 58676 - DNA, 20 bp, synthetic construct
  source 1..20: mol_type = other DNA
tatttaataaatgaagttat

SEQ ID NO: 58677 - DNA, 20 bp, synthetic construct
  source 1..20: mol_type = other DNA
atatttaataaatgaagtta

SEQ ID NO: 58678 - DNA, 20 bp, synthetic construct
  source 1..20: mol_type = other DNA
tatatttaataaatgaagtt

SEQ ID NO: 58679 - DNA, 20 bp, synthetic construct
  source 1..20: mol_type = other DNA
ttatatttaataaatgaagt

SEQ ID NO: 58680 - DNA, 20 bp, synthetic construct
  source 1..20: mol_type = other DNA
tttatatttaataaatgaag

SEQ ID NO: 58681 - DNA, 20 bp, synthetic construct
  source 1..20: mol_type = other DNA
ttttatatttaataaatgaa

SEQ ID NO: 58682 - DNA, 20 bp, synthetic construct
  source 1..20: mol_type = other DNA
tttttatatttaataaatga

SEQ ID NO: 58683 - DNA, 20 bp, synthetic construct
  source 1..20: mol_type = other DNA
ttttttatatttaataaatg

SEQ ID NO: 58684 - DNA, 20 bp, synthetic construct
  source 1..20: mol_type = other DNA
tttttttatatttaataaat

SEQ ID NO: 58685 - DNA, 20 bp, synthetic construct
  source 1..20: mol_type = other DNA
ttttttttatatttaataaa

SEQ ID NO: 58686 - DNA, 20 bp, synthetic construct
  source 1..20: mol_type = other DNA
attttttttatatttaataa

SEQ ID NO: 58687 - DNA, 20 bp, synthetic construct
  source 1..20: mol_type = other DNA
tattttttttatatttaata

SEQ ID NO: 58688 - DNA, 20 bp, synthetic construct
  source 1..20: mol_type = other DNA
ttattttttttatatttaat

SEQ ID NO: 58689 - DNA, 20 bp, synthetic construct
  source 1..20: mol_type = other DNA
tttattttttttatatttaa

SEQ ID NO: 58690 - DNA, 20 bp, synthetic construct
  source 1..20: mol_type = other DNA
ttttattttttttatattta

SEQ ID NO: 58691 - DNA, 20 bp, synthetic construct
  source 1..20: mol_type = other DNA
tttttattttttttatattt

SEQ ID NO: 58692 - DNA, 20 bp, synthetic construct
  source 1..20: mol_type = other DNA
gtttttattttttttatatt

SEQ ID NO: 58693 - DNA, 20 bp, synthetic construct
  source 1..20: mol_type = other DNA
ggtttttattttttttatat

SEQ ID NO: 58694 - DNA, 20 bp, synthetic construct
  source 1..20: mol_type = other DNA
aggtttttattttttttata

SEQ ID NO: 58695 - DNA, 20 bp, synthetic construct
  source 1..20: mol_type = other DNA
gaggtttttattttttttat

SEQ ID NO: 58696 - DNA, 20 bp, synthetic construct
  source 1..20: mol_type = other DNA
agaggtttttatttttttta

SEQ ID NO: 58697 - DNA, 20 bp, synthetic construct
  source 1..20: mol_type = other DNA
tagaggtttttatttttttt

SEQ ID NO: 58698 - DNA, 20 bp, synthetic construct
  source 1..20: mol_type = other DNA
ctagaggtttttattttttt

SEQ ID NO: 58699 - DNA, 20 bp, synthetic construct
  source 1..20: mol_type = other DNA
gctagaggtttttatttttt

SEQ ID NO: 58700 - DNA, 20 bp, synthetic construct
  source 1..20: mol_type = other DNA
tgctagaggtttttattttt

SEQ ID NO: 58701 - DNA, 20 bp, synthetic construct
  source 1..20: mol_type = other DNA
atgctagaggtttttatttt

SEQ ID NO: 58702 - DNA, 20 bp, synthetic construct
  source 1..20: mol_type = other DNA
tatgctagaggtttttattt

SEQ ID NO: 58703 - DNA, 20 bp, synthetic construct
  source 1..20: mol_type = other DNA
ttatgctagaggtttttatt

SEQ ID NO: 58704 - DNA, 20 bp, synthetic construct
  source 1..20: mol_type = other DNA
tttatgctagaggtttttat

SEQ ID NO: 58705 - DNA, 20 bp, synthetic construct
  source 1..20: mol_type = other DNA
ttttatgctagaggttttta

SEQ ID NO: 58706 - DNA, 20 bp, synthetic construct
  source 1..20: mol_type = other DNA
attttatgctagaggttttt

SEQ ID NO: 58707 - DNA, 20 bp, synthetic construct
  source 1..20: mol_type = other DNA
tattttatgctagaggtttt

SEQ ID NO: 58708 - DNA, 20 bp, synthetic construct
  source 1..20: mol_type = other DNA
ctattttatgctagaggttt

SEQ ID NO: 58709 - DNA, 20 bp, synthetic construct
  source 1..20: mol_type = other DNA
tctattttatgctagaggtt

SEQ ID NO: 58710 - DNA, 20 bp, synthetic construct
  source 1..20: mol_type = other DNA
ttctattttatgctagaggt

SEQ ID NO: 58711 - DNA, 20 bp, synthetic construct
  source 1..20: mol_type = other DNA
attctattttatgctagagg

SEQ ID NO: 58712 - DNA, 20 bp, synthetic construct
  source 1..20: mol_type = other DNA
aattctattttatgctagag

SEQ ID NO: 58713 - DNA, 20 bp, synthetic construct
  source 1..20: mol_type = other DNA
aaattctattttatgctaga

SEQ ID NO: 58714 - DNA, 20 bp, synthetic construct
  source 1..20: mol_type = other DNA
aaaattctattttatgctag

SEQ ID NO: 58715 - DNA, 20 bp, synthetic construct
  source 1..20: mol_type = other DNA
taaaattctattttatgcta

SEQ ID NO: 58716 - DNA, 20 bp, synthetic construct
  source 1..20: mol_type = other DNA
ataaaattctattttatgct

SEQ ID NO: 58717 - DNA, 20 bp, synthetic construct
  source 1..20: mol_type = other DNA
aataaaattctattttatgc

SEQ ID NO: 58718 - DNA, 20 bp, synthetic construct
  source 1..20: mol_type = other DNA
aaataaaattctattttatg

SEQ ID NO: 58719 - DNA, 20 bp, synthetic construct
  source 1..20: mol_type = other DNA
caaataaaattctattttat

SEQ ID NO: 58720 - DNA, 20 bp, synthetic construct
  source 1..20: mol_type = other DNA
ccaaataaaattctatttta

SEQ ID NO: 58721 - DNA, 20 bp, synthetic construct
  source 1..20: mol_type = other DNA
tccaaataaaattctatttt

SEQ ID NO: 58722 - DNA, 20 bp, synthetic construct
  source 1..20: mol_type = other DNA
gtccaaataaaattctattt

SEQ ID NO: 58723 - DNA, 20 bp, synthetic construct
  source 1..20: mol_type = other DNA
tgtccaaataaaattctatt

SEQ ID NO: 58724 - DNA, 20 bp, synthetic construct
  source 1..20: mol_type = other DNA
ttgtccaaataaaattctat

SEQ ID NO: 58725 - DNA, 20 bp, synthetic construct
  source 1..20: mol_type = other DNA
tttgtccaaataaaattcta

SEQ ID NO: 58726 - DNA, 20 bp, synthetic construct
  source 1..20: mol_type = other DNA
gtttgtccaaataaaattct

SEQ ID NO: 58727 - DNA, 20 bp, synthetic construct
  source 1..20: mol_type = other DNA
cgtttgtccaaataaaattc

SEQ ID NO: 58728 - DNA, 20 bp, synthetic construct
  source 1..20: mol_type = other DNA
tcgtttgtccaaataaaatt

SEQ ID NO: 58729 - DNA, 20 bp, synthetic construct
  source 1..20: mol_type = other DNA
atcgtttgtccaaataaaat

SEQ ID NO: 58730 - DNA, 20 bp, synthetic construct
  source 1..20: mol_type = other DNA
tatcgtttgtccaaataaaa

SEQ ID NO: 58731 - DNA, 20 bp, synthetic construct
  source 1..20: mol_type = other DNA
ttatcgtttgtccaaataaa

SEQ ID NO: 58732 - DNA, 20 bp, synthetic construct
  source 1..20: mol_type = other DNA
tttatcgtttgtccaaataa

SEQ ID NO: 58733 - DNA, 20 bp, synthetic construct
  source 1..20: mol_type = other DNA
ttttatcgtttgtccaaata

SEQ ID NO: 58734 - DNA, 20 bp, synthetic construct
  source 1..20: mol_type = other DNA
tttttatcgtttgtccaaat

SEQ ID NO: 58735 - DNA, 20 bp, synthetic construct
  source 1..20: mol_type = other DNA
ttttttatcgtttgtccaaa

SEQ ID NO: 58736 - DNA, 20 bp, synthetic construct
  source 1..20: mol_type = other DNA
tttttttatcgtttgtccaa

SEQ ID NO: 58737 - DNA, 20 bp, synthetic construct
  source 1..20: mol_type = other DNA
atttttttatcgtttgtcca

SEQ ID NO: 58738 - DNA, 20 bp, synthetic construct
  source 1..20: mol_type = other DNA
tatttttttatcgtttgtcc

SEQ ID NO: 58739 - DNA, 20 bp, synthetic construct
  source 1..20: mol_type = other DNA
gtatttttttatcgtttgtc

SEQ ID NO: 58740 - DNA, 20 bp, synthetic construct
  source 1..20: mol_type = other DNA
agtatttttttatcgtttgt

SEQ ID NO: 58741 - DNA, 20 bp, synthetic construct
  source 1..20: mol_type = other DNA
cagtatttttttatcgtttg

SEQ ID NO: 58742 - DNA, 20 bp, synthetic construct
  source 1..20: mol_type = other DNA
acagtatttttttatcgttt

SEQ ID NO: 58743 - DNA, 20 bp, synthetic construct
  source 1..20: mol_type = other DNA
cacagtatttttttatcgtt

SEQ ID NO: 58744 - DNA, 20 bp, synthetic construct
  source 1..20: mol_type = other DNA
acacagtatttttttatcgt

SEQ ID NO: 58745 - DNA, 20 bp, synthetic construct
  source 1..20: mol_type = other DNA
cacacagtatttttttatcg

SEQ ID NO: 58746 - DNA, 20 bp, synthetic construct
  source 1..20: mol_type = other DNA
ccacacagtatttttttatc

SEQ ID NO: 58747 - DNA, 20 bp, synthetic construct
  source 1..20: mol_type = other DNA
accacacagtatttttttat

SEQ ID NO: 58748 - DNA, 20 bp, synthetic construct
  source 1..20: mol_type = other DNA
taccacacagtattttttta

SEQ ID NO: 58749 - DNA, 20 bp, synthetic construct
  source 1..20: mol_type = other DNA
gtaccacacagtattttttt

SEQ ID NO: 58750 - DNA, 20 bp, synthetic construct
  source 1..20: mol_type = other DNA
agtaccacacagtatttttt

SEQ ID NO: 58751 - DNA, 20 bp, synthetic construct
  source 1..20: mol_type = other DNA
tagtaccacacagtattttt

SEQ ID NO: 58752 - DNA, 20 bp, synthetic construct
  source 1..20: mol_type = other DNA
ctagtaccacacagtatttt

SEQ ID NO: 58753 - DNA, 20 bp, synthetic construct
  source 1..20: mol_type = other DNA
actagtaccacacagtattt

SEQ ID NO: 58754 - DNA, 20 bp, synthetic construct
  source 1..20: mol_type = other DNA
tactagtaccacacagtatt

SEQ ID NO: 58755 - DNA, 20 bp, synthetic construct
  source 1..20: mol_type = other DNA
ttactagtaccacacagtat

SEQ ID NO: 58756 - DNA, 20 bp, synthetic construct
  source 1..20: mol_type = other DNA
cttactagtaccacacagta

SEQ ID NO: 58757 - DNA, 20 bp, synthetic construct
  source 1..20: mol_type = other DNA
tcttactagtaccacacagt

SEQ ID NO: 58758 - DNA, 20 bp, synthetic construct
  source 1..20: mol_type = other DNA
ctcttactagtaccacacag

SEQ ID NO: 58759 - DNA, 20 bp, synthetic construct
  source 1..20: mol_type = other DNA
actcttactagtaccacaca

SEQ ID NO: 58760 - DNA, 20 bp, synthetic construct
  source 1..20: mol_type = other DNA
tactcttactagtaccacac

SEQ ID NO: 58761 - DNA, 20 bp, synthetic construct
  source 1..20: mol_type = other DNA
ttactcttactagtaccaca

SEQ ID NO: 58762 - DNA, 20 bp, synthetic construct
  source 1..20: mol_type = other DNA
cttactcttactagtaccac

SEQ ID NO: 58763 - DNA, 20 bp, synthetic construct
  source 1..20: mol_type = other DNA
ccttactcttactagtacca

SEQ ID NO: 58764 - DNA, 20 bp, synthetic construct
  source 1..20: mol_type = other DNA
accttactcttactagtacc

SEQ ID NO: 58765 - DNA, 20 bp, synthetic construct
  source 1..20: mol_type = other DNA
aaccttactcttactagtac

SEQ ID NO: 58766 - DNA, 20 bp, synthetic construct
  source 1..20: mol_type = other DNA
caaccttactcttactagta

SEQ ID NO: 58767 - DNA, 20 bp, synthetic construct
  source 1..20: mol_type = other DNA
tcaaccttactcttactagt

SEQ ID NO: 58768 - DNA, 20 bp, synthetic construct
  source 1..20: mol_type = other DNA
atcaaccttactcttactag

SEQ ID NO: 58769 - DNA, 20 bp, synthetic construct
  source 1..20: mol_type = other DNA
aatcaaccttactcttacta

SEQ ID NO: 58770 - DNA, 20 bp, synthetic construct
  source 1..20: mol_type = other DNA
gaatcaaccttactcttact

SEQ ID NO: 58771 - DNA, 20 bp, synthetic construct
  source 1..20: mol_type = other DNA
tgaatcaaccttactcttac

SEQ ID NO: 58772 - DNA, 20 bp, synthetic construct
  source 1..20: mol_type = other DNA
ttgaatcaaccttactctta

SEQ ID NO: 58773 - DNA, 20 bp, synthetic construct
  source 1..20: mol_type = other DNA
cttgaatcaaccttactctt

SEQ ID NO: 58774 - DNA, 20 bp, synthetic construct
  source 1..20: mol_type = other DNA
tcttgaatcaaccttactct

SEQ ID NO: 58775 - DNA, 20 bp, synthetic construct
  source 1..20: mol_type = other DNA
atcttgaatcaaccttactc

SEQ ID NO: 58776 - DNA, 20 bp, synthetic construct
  source 1..20: mol_type = other DNA
tatcttgaatcaaccttact

SEQ ID NO: 58777 - DNA, 20 bp, synthetic construct
  source 1..20: mol_type = other DNA
gtatcttgaatcaaccttac

SEQ ID NO: 58778 - DNA, 20 bp, synthetic construct
  source 1..20: mol_type = other DNA
tgtatcttgaatcaacctta

SEQ ID NO: 58779 - DNA, 20 bp, synthetic construct
  source 1..20: mol_type = other DNA
atgtatcttgaatcaacctt

SEQ ID NO: 58780 - DNA, 20 bp, synthetic construct
  source 1..20: mol_type = other DNA
catgtatcttgaatcaacct

SEQ ID NO: 58781 - DNA, 20 bp, synthetic construct
  source 1..20: mol_type = other DNA
ccatgtatcttgaatcaacc

SEQ ID NO: 58782 - DNA, 20 bp, synthetic construct
  source 1..20: mol_type = other DNA
cccatgtatcttgaatcaac

SEQ ID NO: 58783 - DNA, 20 bp, synthetic construct
  source 1..20: mol_type = other DNA
tcccatgtatcttgaatcaa

SEQ ID NO: 58784 - DNA, 20 bp, synthetic construct
  source 1..20: mol_type = other DNA
ctcccatgtatcttgaatca

SEQ ID NO: 58785 - DNA, 20 bp, synthetic construct
  source 1..20: mol_type = other DNA
gctcccatgtatcttgaatc

SEQ ID NO: 58786 - DNA, 20 bp, synthetic construct
  source 1..20: mol_type = other DNA
tgctcccatgtatcttgaat

SEQ ID NO: 58787 - DNA, 20 bp, synthetic construct
  source 1..20: mol_type = other DNA
ctgctcccatgtatcttgaa

SEQ ID NO: 58788 - DNA, 20 bp, synthetic construct
  source 1..20: mol_type = other DNA
tctgctcccatgtatcttga

SEQ ID NO: 58789 - DNA, 20 bp, synthetic construct
  source 1..20: mol_type = other DNA
ttctgctcccatgtatcttg

SEQ ID NO: 58790 - DNA, 20 bp, synthetic construct
  source 1..20: mol_type = other DNA
attctgctcccatgtatctt

SEQ ID NO: 58791 - DNA, 20 bp, synthetic construct
  source 1..20: mol_type = other DNA
gattctgctcccatgtatct

SEQ ID NO: 58792 - DNA, 20 bp, synthetic construct
  source 1..20: mol_type = other DNA
ggattctgctcccatgtatc

SEQ ID NO: 58793 - DNA, 20 bp, synthetic construct
  source 1..20: mol_type = other DNA
tggattctgctcccatgtat

SEQ ID NO: 58794 - DNA, 20 bp, synthetic construct
  source 1..20: mol_type = other DNA
ttggattctgctcccatgta

SEQ ID NO: 58795 - DNA, 20 bp, synthetic construct
  source 1..20: mol_type = other DNA
tttggattctgctcccatgt

SEQ ID NO: 58796 - DNA, 20 bp, synthetic construct
  source 1..20: mol_type = other DNA
ctttggattctgctcccatg

SEQ ID NO: 58797 - DNA, 20 bp, synthetic construct
  source 1..20: mol_type = other DNA
actttggattctgctcccat

SEQ ID NO: 58798 - DNA, 20 bp, synthetic construct
  source 1..20: mol_type = other DNA
cactttggattctgctccca

SEQ ID NO: 58799 - DNA, 20 bp, synthetic construct
  source 1..20: mol_type = other DNA
acactttggattctgctccc

SEQ ID NO: 58800 - DNA, 20 bp, synthetic construct
  source 1..20: mol_type = other DNA
tacactttggattctgctcc

SEQ ID NO: 58801 - DNA, 20 bp, synthetic construct
  source 1..20: mol_type = other DNA
ctacactttggattctgctc

SEQ ID NO: 58802 - DNA, 20 bp, synthetic construct
  source 1..20: mol_type = other DNA
tctacactttggattctgct

SEQ ID NO: 58803 - DNA, 20 bp, synthetic construct
  source 1..20: mol_type = other DNA
ttctacactttggattctgc

SEQ ID NO: 58804 - DNA, 20 bp, synthetic construct
  source 1..20: mol_type = other DNA
tttctacactttggattctg

SEQ ID NO: 58805 - DNA, 20 bp, synthetic construct
  source 1..20: mol_type = other DNA
atttctacactttggattct

SEQ ID NO: 58806 - DNA, 20 bp, synthetic construct
  source 1..20: mol_type = other DNA
tatttctacactttggattc

SEQ ID NO: 58807 - DNA, 20 bp, synthetic construct
  source 1..20: mol_type = other DNA
ctatttctacactttggatt

SEQ ID NO: 58808 - DNA, 20 bp, synthetic construct
  source 1..20: mol_type = other DNA
cctatttctacactttggat

SEQ ID NO: 58809 - DNA, 20 bp, synthetic construct
  source 1..20: mol_type = other DNA
gcctatttctacactttgga

SEQ ID NO: 58810 - DNA, 20 bp, synthetic construct
  source 1..20: mol_type = other DNA
ggcctatttctacactttgg

SEQ ID NO: 58811 - DNA, 20 bp, synthetic construct
  source 1..20: mol_type = other DNA
tggcctatttctacactttg

SEQ ID NO: 58812 - DNA, 20 bp, synthetic construct
  source 1..20: mol_type = other DNA
ctggcctatttctacacttt

SEQ ID NO: 58813 - DNA, 20 bp, synthetic construct
  source 1..20: mol_type = other DNA
cctggcctatttctacactt

SEQ ID NO: 58814 - DNA, 20 bp, synthetic construct
  source 1..20: mol_type = other DNA
acctggcctatttctacact

SEQ ID NO: 58815 - DNA, 20 bp, synthetic construct
  source 1..20: mol_type = other DNA
cacctggcctatttctacac

SEQ ID NO: 58816 - DNA, 20 bp, synthetic construct
  source 1..20: mol_type = other DNA
gcacctggcctatttctaca

SEQ ID NO: 58817 - DNA, 20 bp, synthetic construct
  source 1..20: mol_type = other DNA
tgcacctggcctatttctac

SEQ ID NO: 58818 - DNA, 20 bp, synthetic construct
  source 1..20: mol_type = other DNA
ctgcacctggcctatttcta

SEQ ID NO: 58819 - DNA, 20 bp, synthetic construct
  source 1..20: mol_type = other DNA
actgcacctggcctatttct

SEQ ID NO: 58820 - DNA, 20 bp, synthetic construct
  source 1..20: mol_type = other DNA
cactgcacctggcctatttc

SEQ ID NO: 58821 - DNA, 20 bp, synthetic construct
  source 1..20: mol_type = other DNA
ccactgcacctggcctattt

SEQ ID NO: 58822 - DNA, 20 bp, synthetic construct
  source 1..20: mol_type = other DNA
gccactgcacctggcctatt

SEQ ID NO: 58823 - DNA, 20 bp, synthetic construct
  source 1..20: mol_type = other DNA
agccactgcacctggcctat

SEQ ID NO: 58824 - DNA, 20 bp, synthetic construct
  source 1..20: mol_type = other DNA
gagccactgcacctggccta

SEQ ID NO: 58825 - DNA, 20 bp, synthetic construct
  source 1..20: mol_type = other DNA
tgagccactgcacctggcct

SEQ ID NO: 58826 - DNA, 20 bp, synthetic construct
  source 1..20: mol_type = other DNA
atgagccactgcacctggcc

SEQ ID NO: 58827 - DNA, 20 bp, synthetic construct
  source 1..20: mol_type = other DNA
catgagccactgcacctggc

SEQ ID NO: 58828 - DNA, 20 bp, synthetic construct
  source 1..20: mol_type = other DNA
gcatgagccactgcacctgg

SEQ ID NO: 58829 - DNA, 20 bp, synthetic construct
  source 1..20: mol_type = other DNA
ggcatgagccactgcacctg

SEQ ID NO: 58830 - DNA, 20 bp, synthetic construct
  source 1..20: mol_type = other DNA
aggcatgagccactgcacct

SEQ ID NO: 58831 - DNA, 20 bp, synthetic construct
  source 1..20: mol_type = other DNA
caggcatgagccactgcacc

SEQ ID NO: 58832 - DNA, 20 bp, synthetic construct
  source 1..20: mol_type = other DNA
acaggcatgagccactgcac

SEQ ID NO: 58833 - DNA, 20 bp, synthetic construct
  source 1..20: mol_type = other DNA
tacaggcatgagccactgca

SEQ ID NO: 58834 - DNA, 20 bp, synthetic construct
  source 1..20: mol_type = other DNA
ttacaggcatgagccactgc

SEQ ID NO: 58835 - DNA, 20 bp, synthetic construct
  source 1..20: mol_type = other DNA
attacaggcatgagccactg

SEQ ID NO: 58836 - DNA, 20 bp, synthetic construct
  source 1..20: mol_type = other DNA
aattacaggcatgagccact

SEQ ID NO: 58837 - DNA, 20 bp, synthetic construct
  source 1..20: mol_type = other DNA
aaattacaggcatgagccac

SEQ ID NO: 58838 - DNA, 20 bp, synthetic construct
  source 1..20: mol_type = other DNA
gaaattacaggcatgagcca

SEQ ID NO: 58839 - DNA, 20 bp, synthetic construct
  source 1..20: mol_type = other DNA
tgaaattacaggcatgagcc

SEQ ID NO: 58840 - DNA, 20 bp, synthetic construct
  source 1..20: mol_type = other DNA
ttgaaattacaggcatgagc

SEQ ID NO: 58841 - DNA, 20 bp, synthetic construct
  source 1..20: mol_type = other DNA
gttgaaattacaggcatgag

SEQ ID NO: 58842 - DNA, 20 bp, synthetic construct
  source 1..20: mol_type = other DNA
tgttgaaattacaggcatga

SEQ ID NO: 58843 - DNA, 20 bp, synthetic construct
  source 1..20: mol_type = other DNA
gtgttgaaattacaggcatg

SEQ ID NO: 58844 - DNA, 20 bp, synthetic construct
  source 1..20: mol_type = other DNA
agtgttgaaattacaggcat

SEQ ID NO: 58845 - DNA, 20 bp, synthetic construct
  source 1..20: mol_type = other DNA
aagtgttgaaattacaggca

SEQ ID NO: 58846 - DNA, 20 bp, synthetic construct
  source 1..20: mol_type = other DNA
aaagtgttgaaattacaggc

SEQ ID NO: 58847 - DNA, 20 bp, synthetic construct
  source 1..20: mol_type = other DNA
aaaagtgttgaaattacagg

SEQ ID NO: 58848 - DNA, 20 bp, synthetic construct
  source 1..20: mol_type = other DNA
caaaagtgttgaaattacag

SEQ ID NO: 58849 - DNA, 20 bp, synthetic construct
  source 1..20: mol_type = other DNA
ccaaaagtgttgaaattaca

SEQ ID NO: 58850 - DNA, 20 bp, synthetic construct
  source 1..20: mol_type = other DNA
tccaaaagtgttgaaattac

SEQ ID NO: 58851 - DNA, 20 bp, synthetic construct
  source 1..20: mol_type = other DNA
ctccaaaagtgttgaaatta

SEQ ID NO: 58852 - DNA, 20 bp, synthetic construct
  source 1..20: mol_type = other DNA
cctccaaaagtgttgaaatt

SEQ ID NO: 58853 - DNA, 20 bp, synthetic construct
  source 1..20: mol_type = other DNA
gcctccaaaagtgttgaaat

SEQ ID NO: 58854 - DNA, 20 bp, synthetic construct
  source 1..20: mol_type = other DNA
agcctccaaaagtgttgaaa

SEQ ID NO: 58855 - DNA, 20 bp, synthetic construct
  source 1..20: mol_type = other DNA
cagcctccaaaagtgttgaa

SEQ ID NO: 58856 - DNA, 20 bp, synthetic construct
  source 1..20: mol_type = other DNA
tcagcctccaaaagtgttga

SEQ ID NO: 58857 - DNA, 20 bp, synthetic construct
  source 1..20: mol_type = other DNA
ctcagcctccaaaagtgttg

SEQ ID NO: 58858 - DNA, 20 bp, synthetic construct
  source 1..20: mol_type = other DNA
cctcagcctccaaaagtgtt

SEQ ID NO: 58859 - DNA, 20 bp, synthetic construct
  source 1..20: mol_type = other DNA
gcctcagcctccaaaagtgt

SEQ ID NO: 58860 - DNA, 20 bp, synthetic construct
  source 1..20: mol_type = other DNA
cgcctcagcctccaaaagtg

SEQ ID NO: 58861 - DNA, 20 bp, synthetic construct
  source 1..20: mol_type = other DNA
ccgcctcagcctccaaaagt

SEQ ID NO: 58862 - DNA, 20 bp, synthetic construct
  source 1..20: mol_type = other DNA
cccgcctcagcctccaaaag

SEQ ID NO: 58863 - DNA, 20 bp, synthetic construct
  source 1..20: mol_type = other DNA
tcccgcctcagcctccaaaa

SEQ ID NO: 58864 - DNA, 20 bp, synthetic construct
  source 1..20: mol_type = other DNA
ctcccgcctcagcctccaaa

SEQ ID NO: 58865 - DNA, 20 bp, synthetic construct
  source 1..20: mol_type = other DNA
cctcccgcctcagcctccaa

SEQ ID NO: 58866 - DNA, 20 bp, synthetic construct
  source 1..20: mol_type = other DNA
tcctcccgcctcagcctcca

SEQ ID NO: 58867 - DNA, 20 bp, synthetic construct
  source 1..20: mol_type = other DNA
atcctcccgcctcagcctcc

SEQ ID NO: 58868 - DNA, 20 bp, synthetic construct
  source 1..20: mol_type = other DNA
catcctcccgcctcagcctc

SEQ ID NO: 58869 - DNA, 20 bp, synthetic construct
  source 1..20: mol_type = other DNA
tcatcctcccgcctcagcct

SEQ ID NO: 58870 - DNA, 20 bp, synthetic construct
  source 1..20: mol_type = other DNA
ctcatcctcccgcctcagcc

SEQ ID NO: 58871 - DNA, 20 bp, synthetic construct
  source 1..20: mol_type = other DNA
actcatcctcccgcctcagc

SEQ ID NO: 58872 - DNA, 20 bp, synthetic construct
  source 1..20: mol_type = other DNA
aactcatcctcccgcctcag

SEQ ID NO: 58873 - DNA, 20 bp, synthetic construct
  source 1..20: mol_type = other DNA
gaactcatcctcccgcctca

SEQ ID NO: 58874 - DNA, 20 bp, synthetic construct
  source 1..20: mol_type = other DNA
tgaactcatcctcccgcctc

SEQ ID NO: 58875 - DNA, 20 bp, synthetic construct
  source 1..20: mol_type = other DNA
ctgaactcatcctcccgcct

SEQ ID NO: 58876 - DNA, 20 bp, synthetic construct
  source 1..20: mol_type = other DNA
cctgaactcatcctcccgcc

SEQ ID NO: 58877 - DNA, 20 bp, synthetic construct
  source 1..20: mol_type = other DNA
tcctgaactcatcctcccgc

SEQ ID NO: 58878 - DNA, 20 bp, synthetic construct
  source 1..20: mol_type = other DNA
ctcctgaactcatcctcccg

SEQ ID NO: 58879 - DNA, 20 bp, synthetic construct
  source 1..20: mol_type = other DNA
actcctgaactcatcctccc

SEQ ID NO: 58880 - DNA, 20 bp, synthetic construct
  source 1..20: mol_type = other DNA
aactcctgaactcatcctcc

SEQ ID NO: 58881 - DNA, 20 bp, synthetic construct
  source 1..20: mol_type = other DNA
gaactcctgaactcatcctc

SEQ ID NO: 58882 - DNA, 20 bp, synthetic construct
  source 1..20: mol_type = other DNA
tgaactcctgaactcatcct

SEQ ID NO: 58883 - DNA, 20 bp, synthetic construct
  source 1..20: mol_type = other DNA
ttgaactcctgaactcatcc

SEQ ID NO: 58884 - DNA, 20 bp, synthetic construct
  source 1..20: mol_type = other DNA
cttgaactcctgaactcatc

SEQ ID NO: 58885 - DNA, 20 bp, synthetic construct
  source 1..20: mol_type = other DNA
tcttgaactcctgaactcat

SEQ ID NO: 58886 - DNA, 20 bp, synthetic construct
  source 1..20: mol_type = other DNA
gtcttgaactcctgaactca

SEQ ID NO: 58887 - DNA, 20 bp, synthetic construct
  source 1..20: mol_type = other DNA
agtcttgaactcctgaactc

SEQ ID NO: 58888 - DNA, 20 bp, synthetic construct
  source 1..20: mol_type = other DNA
gagtcttgaactcctgaact

SEQ ID NO: 58889 - DNA, 20 bp, synthetic construct
  source 1..20: mol_type = other DNA
cgagtcttgaactcctgaac

SEQ ID NO: 58890 - DNA, 20 bp, synthetic construct
  source 1..20: mol_type = other DNA
gcgagtcttgaactcctgaa

SEQ ID NO: 58891 - DNA, 20 bp, synthetic construct
  source 1..20: mol_type = other DNA
ggcgagtcttgaactcctga

SEQ ID NO: 58892 - DNA, 20 bp, synthetic construct
  source 1..20: mol_type = other DNA
aggcgagtcttgaactcctg

SEQ ID NO: 58893 - DNA, 20 bp, synthetic construct
  source 1..20: mol_type = other DNA
aaggcgagtcttgaactcct

SEQ ID NO: 58894 - DNA, 20 bp, synthetic construct
  source 1..20: mol_type = other DNA
caaggcgagtcttgaactcc

SEQ ID NO: 58895 - DNA, 20 bp, synthetic construct
  source 1..20: mol_type = other DNA
ccaaggcgagtcttgaactc

SEQ ID NO: 58896 - DNA, 20 bp, synthetic construct
  source 1..20: mol_type = other DNA
gccaaggcgagtcttgaact

SEQ ID NO: 58897 - DNA, 20 bp, synthetic construct
  source 1..20: mol_type = other DNA
tgccaaggcgagtcttgaac

SEQ ID NO: 58898 - DNA, 20 bp, synthetic construct
  source 1..20: mol_type = other DNA
ttgccaaggcgagtcttgaa

SEQ ID NO: 58899 - DNA, 20 bp, synthetic construct
  source 1..20: mol_type = other DNA
gttgccaaggcgagtcttga

SEQ ID NO: 58900 - DNA, 20 bp, synthetic construct
  source 1..20: mol_type = other DNA
agttgccaaggcgagtcttg

SEQ ID NO: 58901 - DNA, 20 bp, synthetic construct
  source 1..20: mol_type = other DNA
aagttgccaaggcgagtctt

SEQ ID NO: 58902 - DNA, 20 bp, synthetic construct
  source 1..20: mol_type = other DNA
caagttgccaaggcgagtct

SEQ ID NO: 58903 - DNA, 20 bp, synthetic construct
  source 1..20: mol_type = other DNA
ccaagttgccaaggcgagtc

SEQ ID NO: 58904 - DNA, 20 bp, synthetic construct
  source 1..20: mol_type = other DNA
gccaagttgccaaggcgagt

SEQ ID NO: 58905 - DNA, 20 bp, synthetic construct
  source 1..20: mol_type = other DNA
tgccaagttgccaaggcgag

SEQ ID NO: 58906 - DNA, 20 bp, synthetic construct
  source 1..20: mol_type = other DNA
ttgccaagttgccaaggcga

SEQ ID NO: 58907 - DNA, 20 bp, synthetic construct
  source 1..20: mol_type = other DNA
tttgccaagttgccaaggcg

SEQ ID NO: 58908 - DNA, 20 bp, synthetic construct
  source 1..20: mol_type = other DNA
ttttgccaagttgccaaggc

SEQ ID NO: 58909 - DNA, 20 bp, synthetic construct
  source 1..20: mol_type = other DNA
gttttgccaagttgccaagg

SEQ ID NO: 58910 - DNA, 20 bp, synthetic construct
  source 1..20: mol_type = other DNA
ggttttgccaagttgccaag

SEQ ID NO: 58911 - DNA, 20 bp, synthetic construct
  source 1..20: mol_type = other DNA
gggttttgccaagttgccaa

SEQ ID NO: 58912 - DNA, 20 bp, synthetic construct
  source 1..20: mol_type = other DNA
ggggttttgccaagttgcca

SEQ ID NO: 58913 - DNA, 20 bp, synthetic construct
  source 1..20: mol_type = other DNA
tggggttttgccaagttgcc

SEQ ID NO: 58914 - DNA, 20 bp, synthetic construct
  source 1..20: mol_type = other DNA
atggggttttgccaagttgc

SEQ ID NO: 58915 - DNA, 20 bp, synthetic construct
  source 1..20: mol_type = other DNA
gatggggttttgccaagttg

SEQ ID NO: 58916 - DNA, 20 bp, synthetic construct
  source 1..20: mol_type = other DNA
agatggggttttgccaagtt

SEQ ID NO: 58917 - DNA, 20 bp, synthetic construct
  source 1..20: mol_type = other DNA
gagatggggttttgccaagt

SEQ ID NO: 58918 - DNA, 20 bp, synthetic construct
  source 1..20: mol_type = other DNA
agagatggggttttgccaag

SEQ ID NO: 58919 - DNA, 20 bp, synthetic construct
  source 1..20: mol_type = other DNA
tagagatggggttttgccaa

SEQ ID NO: 58920 - DNA, 20 bp, synthetic construct
  source 1..20: mol_type = other DNA
gtagagatggggttttgcca

SEQ ID NO: 58921 - DNA, 20 bp, synthetic construct
  source 1..20: mol_type = other DNA
tgtagagatggggttttgcc

SEQ ID NO: 58922 - DNA, 20 bp, synthetic construct
  source 1..20: mol_type = other DNA
ttgtagagatggggttttgc

SEQ ID NO: 58923 - DNA, 20 bp, synthetic construct
  source 1..20: mol_type = other DNA
tttgtagagatggggttttg

SEQ ID NO: 58924 - DNA, 20 bp, synthetic construct
  source 1..20: mol_type = other DNA
ttttgtagagatggggtttt

SEQ ID NO: 58925 - DNA, 20 bp, synthetic construct
  source 1..20: mol_type = other DNA
tttttgtagagatggggttt

SEQ ID NO: 58926 - DNA, 20 bp, synthetic construct
  source 1..20: mol_type = other DNA
ctttttgtagagatggggtt

SEQ ID NO: 58927 - DNA, 20 bp, synthetic construct
  source 1..20: mol_type = other DNA
actttttgtagagatggggt

SEQ ID NO: 58928 - DNA, 20 bp, synthetic construct
  source 1..20: mol_type = other DNA
tactttttgtagagatgggg

SEQ ID NO: 58929 - DNA, 20 bp, synthetic construct
  source 1..20: mol_type = other DNA
gtactttttgtagagatggg

SEQ ID NO: 58930 - DNA, 20 bp, synthetic construct
  source 1..20: mol_type = other DNA
tgtactttttgtagagatgg

SEQ ID NO: 58931 - DNA, 20 bp, synthetic construct
  source 1..20: mol_type = other DNA
ttgtactttttgtagagatg

SEQ ID NO: 58932 - DNA, 20 bp, synthetic construct
  source 1..20: mol_type = other DNA
tttgtactttttgtagagat

SEQ ID NO: 58933 - DNA, 20 bp, synthetic construct
  source 1..20: mol_type = other DNA
ttttgtactttttgtagaga

SEQ ID NO: 58934 - DNA, 20 bp, synthetic construct
  source 1..20: mol_type = other DNA
tttttgtactttttgtagag

SEQ ID NO: 58935 - DNA, 20 bp, synthetic construct
  source 1..20: mol_type = other DNA
atttttgtactttttgtaga

SEQ ID NO: 58936 - DNA, 20 bp, synthetic construct
  source 1..20: mol_type = other DNA
aatttttgtactttttgtag

SEQ ID NO: 58937 - DNA, 20 bp, synthetic construct
  source 1..20: mol_type = other DNA
taatttttgtactttttgta

SEQ ID NO: 58938 - DNA, 20 bp, synthetic construct
  source 1..20: mol_type = other DNA
ctaatttttgtactttttgt

SEQ ID NO: 58939 - DNA, 20 bp, synthetic construct
  source 1..20: mol_type = other DNA
gctaatttttgtactttttg

SEQ ID NO: 58940 - DNA, 20 bp, synthetic construct
  source 1..20: mol_type = other DNA
ggctaatttttgtacttttt

SEQ ID NO: 58941 - DNA, 20 bp, synthetic construct
  source 1..20: mol_type = other DNA
cggctaatttttgtactttt

SEQ ID NO: 58942 - DNA, 20 bp, synthetic construct
  source 1..20: mol_type = other DNA
ccggctaatttttgtacttt

SEQ ID NO: 58943 - DNA, 20 bp, synthetic construct
  source 1..20: mol_type = other DNA
cccggctaatttttgtactt

SEQ ID NO: 58944 - DNA, 20 bp, synthetic construct
  source 1..20: mol_type = other DNA
acccggctaatttttgtact

SEQ ID NO: 58945 - DNA, 20 bp, synthetic construct
  source 1..20: mol_type = other DNA
cacccggctaatttttgtac

SEQ ID NO: 58946 - DNA, 20 bp, synthetic construct
  source 1..20: mol_type = other DNA
acacccggctaatttttgta

SEQ ID NO: 58947 - DNA, 20 bp, synthetic construct
  source 1..20: mol_type = other DNA
cacacccggctaatttttgt

SEQ ID NO: 58948 - DNA, 20 bp, synthetic construct
  source 1..20: mol_type = other DNA
ccacacccggctaatttttg

SEQ ID NO: 58949 - DNA, 20 bp, synthetic construct
  source 1..20: mol_type = other DNA
accacacccggctaattttt

SEQ ID NO: 58950 - DNA, 20 bp, synthetic construct
  source 1..20: mol_type = other DNA
caccacacccggctaatttt

SEQ ID NO: 58951 - DNA, 20 bp, synthetic construct
  source 1..20: mol_type = other DNA
ccaccacacccggctaattt

SEQ ID NO: 58952 - DNA, 20 bp, synthetic construct
  source 1..20: mol_type = other DNA
accaccacacccggctaatt

SEQ ID NO: 58953 - DNA, 20 bp, synthetic construct
  source 1..20: mol_type = other DNA
caccaccacacccggctaat

SEQ ID NO: 58954 - DNA, 20 bp, synthetic construct
  source 1..20: mol_type = other DNA
acaccaccacacccggctaa

SEQ ID NO: 58955 - DNA, 20 bp, synthetic construct
  source 1..20: mol_type = other DNA
tacaccaccacacccggcta

SEQ ID NO: 58956 - DNA, 20 bp, synthetic construct
  source 1..20: mol_type = other DNA
gtacaccaccacacccggct

SEQ ID NO: 58957 - DNA, 20 bp, synthetic construct
  source 1..20: mol_type = other DNA
agtacaccaccacacccggc

SEQ ID NO: 58958 - DNA, 20 bp, synthetic construct
  source 1..20: mol_type = other DNA
gagtacaccaccacacccgg

SEQ ID NO: 58959 - DNA, 20 bp, synthetic construct
  source 1..20: mol_type = other DNA
ggagtacaccaccacacccg

SEQ ID NO: 58960 - DNA, 20 bp, synthetic construct
  source 1..20: mol_type = other DNA
aggagtacaccaccacaccc

SEQ ID NO: 58961 - DNA, 20 bp, synthetic construct
  source 1..20: mol_type = other DNA
caggagtacaccaccacacc

SEQ ID NO: 58962 - DNA, 20 bp, synthetic construct
  source 1..20: mol_type = other DNA
acaggagtacaccaccacac

SEQ ID NO: 58963 - DNA, 20 bp, synthetic construct
  source 1..20: mol_type = other DNA
tacaggagtacaccaccaca

SEQ ID NO: 58964 - DNA, 20 bp, synthetic construct
  source 1..20: mol_type = other DNA
ttacaggagtacaccaccac

SEQ ID NO: 58965 - DNA, 20 bp, synthetic construct
  source 1..20: mol_type = other DNA
tttacaggagtacaccacca

SEQ ID NO: 58966 - DNA, 20 bp, synthetic construct
  source 1..20: mol_type = other DNA
gtttacaggagtacaccacc

SEQ ID NO: 58967 - DNA, 20 bp, synthetic construct
  source 1..20: mol_type = other DNA
ggtttacaggagtacaccac

SEQ ID NO: 58968 - DNA, 20 bp, synthetic construct
  source 1..20: mol_type = other DNA
gggtttacaggagtacacca

SEQ ID NO: 58969 - DNA, 20 bp, synthetic construct
  source 1..20: mol_type = other DNA
tgggtttacaggagtacacc

SEQ ID NO: 58970 - DNA, 20 bp, synthetic construct
  source 1..20: mol_type = other DNA
ctgggtttacaggagtacac

SEQ ID NO: 58971 - DNA, 20 bp, synthetic construct
  source 1..20: mol_type = other DNA
gctgggtttacaggagtaca

SEQ ID NO: 58972 - DNA, 20 bp, synthetic construct
  source 1..20: mol_type = other DNA
agctgggtttacaggagtac

SEQ ID NO: 58973 - DNA, 20 bp, synthetic construct
  source 1..20: mol_type = other DNA
tagctgggtttacaggagta

SEQ ID NO: 58974 - DNA, 20 bp, synthetic construct
  source 1..20: mol_type = other DNA
gtagctgggtttacaggagt

SEQ ID NO: 58975 - DNA, 20 bp, synthetic construct
  source 1..20: mol_type = other DNA
agtagctgggtttacaggag

SEQ ID NO: 58976 - DNA, 20 bp, synthetic construct
  source 1..20: mol_type = other DNA
aagtagctgggtttacagga

SEQ ID NO: 58977 - DNA, 20 bp, synthetic construct
  source 1..20: mol_type = other DNA
caagtagctgggtttacagg

SEQ ID NO: 58978 - DNA, 20 bp, synthetic construct
  source 1..20: mol_type = other DNA
ccaagtagctgggtttacag

SEQ ID NO: 58979 - DNA, 20 bp, synthetic construct
  source 1..20: mol_type = other DNA
accaagtagctgggtttaca

SEQ ID NO: 58980 - DNA, 20 bp, synthetic construct
  source 1..20: mol_type = other DNA
caccaagtagctgggtttac

SEQ ID NO: 58981 - DNA, 20 bp, synthetic construct
  source 1..20: mol_type = other DNA
ccaccaagtagctgggttta

SEQ ID NO: 58982 - DNA, 20 bp, synthetic construct
  source 1..20: mol_type = other DNA
cccaccaagtagctgggttt

SEQ ID NO: 58983 - DNA, 20 bp, synthetic construct
  source 1..20: mol_type = other DNA
gcccaccaagtagctgggtt

SEQ ID NO: 58984 - DNA, 20 bp, synthetic construct
  source 1..20: mol_type = other DNA
agcccaccaagtagctgggt

SEQ ID NO: 58985 - DNA, 20 bp, synthetic construct
  source 1..20: mol_type = other DNA
cagcccaccaagtagctggg

SEQ ID NO: 58986 - DNA, 20 bp, synthetic construct
  source 1..20: mol_type = other DNA
tcagcccaccaagtagctgg

SEQ ID NO: 58987 - DNA, 20 bp, synthetic construct
  source 1..20: mol_type = other DNA
ctcagcccaccaagtagctg

SEQ ID NO: 58988 - DNA, 20 bp, synthetic construct
  source 1..20: mol_type = other DNA
cctcagcccaccaagtagct

SEQ ID NO: 58989 - DNA, 20 bp, synthetic construct
  source 1..20: mol_type = other DNA
acctcagcccaccaagtagc

SEQ ID NO: 58990 - DNA, 20 bp, synthetic construct
  source 1..20: mol_type = other DNA
cacctcagcccaccaagtag

SEQ ID NO: 58991 - DNA, 20 bp, synthetic construct
  source 1..20: mol_type = other DNA
tcacctcagcccaccaagta

SEQ ID NO: 58992 - DNA, 20 bp, synthetic construct
  source 1..20: mol_type = other DNA
ctcacctcagcccaccaagt

SEQ ID NO: 58993 - DNA, 20 bp, synthetic construct
  source 1..20: mol_type = other DNA
tctcacctcagcccaccaag

SEQ ID NO: 58994 - DNA, 20 bp, synthetic construct
  source 1..20: mol_type = other DNA
ctctcacctcagcccaccaa

SEQ ID NO: 58995 - DNA, 20 bp, synthetic construct
  source 1..20: mol_type = other DNA
cctctcacctcagcccacca

SEQ ID NO: 58996 - DNA, 20 bp, synthetic construct
  source 1..20: mol_type = other DNA
acctctcacctcagcccacc

SEQ ID NO: 58997 - DNA, 20 bp, synthetic construct
  source 1..20: mol_type = other DNA
aacctctcacctcagcccac

SEQ ID NO: 58998 - DNA, 20 bp, synthetic construct
  source 1..20: mol_type = other DNA
gaacctctcacctcagccca

SEQ ID NO: 58999 - DNA, 20 bp, synthetic construct
  source 1..20: mol_type = other DNA
tgaacctctcacctcagccc

SEQ ID NO: 59000 - DNA, 20 bp, synthetic construct
  source 1..20: mol_type = other DNA
gtgaacctctcacctcagcc

SEQ ID NO: 59001 - DNA, 20 bp, synthetic construct
  source 1..20: mol_type = other DNA
agtgaacctctcacctcagc

SEQ ID NO: 59002 - DNA, 20 bp, synthetic construct
  source 1..20: mol_type = other DNA
aagtgaacctctcacctcag

SEQ ID NO: 59003 - DNA, 20 bp, synthetic construct
  source 1..20: mol_type = other DNA
caagtgaacctctcacctca

SEQ ID NO: 59004 - DNA, 20 bp, synthetic construct
  source 1..20: mol_type = other DNA
gcaagtgaacctctcacctc

SEQ ID NO: 59005 - DNA, 20 bp, synthetic construct
  source 1..20: mol_type = other DNA
tgcaagtgaacctctcacct

SEQ ID NO: 59006 - DNA, 20 bp, synthetic construct
  source 1..20: mol_type = other DNA
ctgcaagtgaacctctcacc

SEQ ID NO: 59007 - DNA, 20 bp, synthetic construct
  source 1..20: mol_type = other DNA
gctgcaagtgaacctctcac

SEQ ID NO: 59008 - DNA, 20 bp, synthetic construct
  source 1..20: mol_type = other DNA
ggctgcaagtgaacctctca

SEQ ID NO: 59009 - DNA, 20 bp, synthetic construct
  source 1..20: mol_type = other DNA
tggctgcaagtgaacctctc

SEQ ID NO: 59010 - DNA, 20 bp, synthetic construct
  source 1..20: mol_type = other DNA
ctggctgcaagtgaacctct

SEQ ID NO: 59011 - DNA, 20 bp, synthetic construct
  source 1..20: mol_type = other DNA
actggctgcaagtgaacctc

SEQ ID NO: 59012 - DNA, 20 bp, synthetic construct
  source 1..20: mol_type = other DNA
tactggctgcaagtgaacct

SEQ ID NO: 59013 - DNA, 20 bp, synthetic construct
  source 1..20: mol_type = other DNA
ttactggctgcaagtgaacc

SEQ ID NO: 59014 - DNA, 20 bp, synthetic construct
  source 1..20: mol_type = other DNA
cttactggctgcaagtgaac

SEQ ID NO: 59015 - DNA, 20 bp, synthetic construct
  source 1..20: mol_type = other DNA
acttactggctgcaagtgaa

SEQ ID NO: 59016 - DNA, 20 bp, synthetic construct
  source 1..20: mol_type = other DNA
gacttactggctgcaagtga

SEQ ID NO: 59017 - DNA, 20 bp, synthetic construct
  source 1..20: mol_type = other DNA
tgacttactggctgcaagtg

SEQ ID NO: 59018 - DNA, 20 bp, synthetic construct
  source 1..20: mol_type = other DNA
ttgacttactggctgcaagt

SEQ ID NO: 59019 - DNA, 20 bp, synthetic construct
  source 1..20: mol_type = other DNA
cttgacttactggctgcaag

SEQ ID NO: 59020 - DNA, 20 bp, synthetic construct
  source 1..20: mol_type = other DNA
ccttgacttactggctgcaa

SEQ ID NO: 59021 - DNA, 20 bp, synthetic construct
  source 1..20: mol_type = other DNA
gccttgacttactggctgca

SEQ ID NO: 59022 - DNA, 20 bp, synthetic construct
  source 1..20: mol_type = other DNA
agccttgacttactggctgc

SEQ ID NO: 59023 - DNA, 20 bp, synthetic construct
  source 1..20: mol_type = other DNA
cagccttgacttactggctg

SEQ ID NO: 59024 - DNA, 20 bp, synthetic construct
  source 1..20: mol_type = other DNA
gcagccttgacttactggct

SEQ ID NO: 59025 - DNA, 20 bp, synthetic construct
  source 1..20: mol_type = other DNA
tgcagccttgacttactggc

SEQ ID NO: 59026 - DNA, 20 bp, synthetic construct
  source 1..20: mol_type = other DNA
ctgcagccttgacttactgg

SEQ ID NO: 59027 - DNA, 20 bp, synthetic construct
  source 1..20: mol_type = other DNA
actgcagccttgacttactg

SEQ ID NO: 59028 - DNA, 20 bp, synthetic construct
  source 1..20: mol_type = other DNA
cactgcagccttgacttact

SEQ ID NO: 59029 - DNA, 20 bp, synthetic construct
  source 1..20: mol_type = other DNA
tcactgcagccttgacttac

SEQ ID NO: 59030 - DNA, 20 bp, synthetic construct
  source 1..20: mol_type = other DNA
ctcactgcagccttgactta

SEQ ID NO: 59031 - DNA, 20 bp, synthetic construct
  source 1..20: mol_type = other DNA
gctcactgcagccttgactt

SEQ ID NO: 59032 - DNA, 20 bp, synthetic construct
  source 1..20: mol_type = other DNA
agctcactgcagccttgact

SEQ ID NO: 59033 - DNA, 20 bp, synthetic construct
  source 1..20: mol_type = other DNA
cagctcactgcagccttgac

SEQ ID NO: 59034 - DNA, 20 bp, synthetic construct
  source 1..20: mol_type = other DNA
acagctcactgcagccttga

SEQ ID NO: 59035 - DNA, 20 bp, synthetic construct
  source 1..20: mol_type = other DNA
cacagctcactgcagccttg

SEQ ID NO: 59036 - DNA, 20 bp, synthetic construct
  source 1..20: mol_type = other DNA
ccacagctcactgcagcctt

SEQ ID NO: 59037 - DNA, 20 bp, synthetic construct
  source 1..20: mol_type = other DNA
accacagctcactgcagcct

SEQ ID NO: 59038 - DNA, 20 bp, synthetic construct
  source 1..20: mol_type = other DNA
aaccacagctcactgcagcc

SEQ ID NO: 59039 - DNA, 20 bp, synthetic construct
  source 1..20: mol_type = other DNA
taaccacagctcactgcagc

SEQ ID NO: 59040 - DNA, 20 bp, synthetic construct
  source 1..20: mol_type = other DNA
ataaccacagctcactgcag

SEQ ID NO: 59041 - DNA, 20 bp, synthetic construct
  source 1..20: mol_type = other DNA
cataaccacagctcactgca

SEQ ID NO: 59042 - DNA, 20 bp, synthetic construct
  source 1..20: mol_type = other DNA
gcataaccacagctcactgc

SEQ ID NO: 59043 - DNA, 20 bp, synthetic construct
  source 1..20: mol_type = other DNA
ggcataaccacagctcactg

SEQ ID NO: 59044 - DNA, 20 bp, synthetic construct
  source 1..20: mol_type = other DNA
tggcataaccacagctcact

SEQ ID NO: 59045 - DNA, 20 bp, synthetic construct
  source 1..20: mol_type = other DNA
gtggcataaccacagctcac

SEQ ID NO: 59046 - DNA, 20 bp, synthetic construct
  source 1..20: mol_type = other DNA
cgtggcataaccacagctca

SEQ ID NO: 59047 - DNA, 20 bp, synthetic construct
  source 1..20: mol_type = other DNA
ccgtggcataaccacagctc

SEQ ID NO: 59048 - DNA, 20 bp, synthetic construct
  source 1..20: mol_type = other DNA
gccgtggcataaccacagct

SEQ ID NO: 59049 - DNA, 20 bp, synthetic construct
  source 1..20: mol_type = other DNA
tgccgtggcataaccacagc

SEQ ID NO: 59050 - DNA, 20 bp, synthetic construct
  source 1..20: mol_type = other DNA
gtgccgtggcataaccacag

SEQ ID NO: 59051 - DNA, 20 bp, synthetic construct
  source 1..20: mol_type = other DNA
agtgccgtggcataaccaca

SEQ ID NO: 59052 - DNA, 20 bp, synthetic construct
  source 1..20: mol_type = other DNA
gagtgccgtggcataaccac

SEQ ID NO: 59053 - DNA, 20 bp, synthetic construct
  source 1..20: mol_type = other DNA
ggagtgccgtggcataacca

SEQ ID NO: 59054 - DNA, 20 bp, synthetic construct
  source 1..20: mol_type = other DNA
tggagtgccgtggcataacc

SEQ ID NO: 59055 - DNA, 20 bp, synthetic construct
  source 1..20: mol_type = other DNA
ctggagtgccgtggcataac

SEQ ID NO: 59056 - DNA, 20 bp, synthetic construct
  source 1..20: mol_type = other DNA
gctggagtgccgtggcataa

SEQ ID NO: 59057 - DNA, 20 bp, synthetic construct
  source 1..20: mol_type = other DNA
agctggagtgccgtggcata

SEQ ID NO: 59058 - DNA, 20 bp, synthetic construct
  source 1..20: mol_type = other DNA
cagctggagtgccgtggcat

SEQ ID NO: 59059 - DNA, 20 bp, synthetic construct
  source 1..20: mol_type = other DNA
ccagctggagtgccgtggca

SEQ ID NO: 59060 - DNA, 20 bp, synthetic construct
  source 1..20: mol_type = other DNA
cccagctggagtgccgtggc

SEQ ID NO: 59061 - DNA, 20 bp, synthetic construct
  source 1..20: mol_type = other DNA
acccagctggagtgccgtgg

SEQ ID NO: 59062 - DNA, 20 bp, synthetic construct
  source 1..20: mol_type = other DNA
cacccagctggagtgccgtg

SEQ ID NO: 59063 - DNA, 20 bp, synthetic construct
  source 1..20: mol_type = other DNA
tcacccagctggagtgccgt

SEQ ID NO: 59064 - DNA, 20 bp, synthetic construct
  source 1..20: mol_type = other DNA
gtcacccagctggagtgccg

SEQ ID NO: 59065 - DNA, 20 bp, synthetic construct
  source 1..20: mol_type = other DNA
tgtcacccagctggagtgcc

SEQ ID NO: 59066 - DNA, 20 bp, synthetic construct
  source 1..20: mol_type = other DNA
ttgtcacccagctggagtgc

SEQ ID NO: 59067 - DNA, 20 bp, synthetic construct
  source 1..20: mol_type = other DNA
cttgtcacccagctggagtg

SEQ ID NO: 59068 - DNA, 20 bp, synthetic construct
  source 1..20: mol_type = other DNA
gcttgtcacccagctggagt

SEQ ID NO: 59069 - DNA, 20 bp, synthetic construct
  source 1..20: mol_type = other DNA
tgcttgtcacccagctggag

SEQ ID NO: 59070 - DNA, 20 bp, synthetic construct
  source 1..20: mol_type = other DNA
ttgcttgtcacccagctgga

SEQ ID NO: 59071 - DNA, 20 bp, synthetic construct
  source 1..20: mol_type = other DNA
cttgcttgtcacccagctgg

SEQ ID NO: 59072 - DNA, 20 bp, synthetic construct
  source 1..20: mol_type = other DNA
tcttgcttgtcacccagctg

SEQ ID NO: 59073 - DNA, 20 bp, synthetic construct
  source 1..20: mol_type = other DNA
gtcttgcttgtcacccagct

SEQ ID NO: 59074 - DNA, 20 bp, synthetic construct
  source 1..20: mol_type = other DNA
ggtcttgcttgtcacccagc

SEQ ID NO: 59075 - DNA, 20 bp, synthetic construct
  source 1..20: mol_type = other DNA
aggtcttgcttgtcacccag

SEQ ID NO: 59076 - DNA, 20 bp, synthetic construct
  source 1..20: mol_type = other DNA
aaggtcttgcttgtcaccca

SEQ ID NO: 59077 - DNA, 20 bp, synthetic construct
  source 1..20: mol_type = other DNA
caaggtcttgcttgtcaccc

SEQ ID NO: 59078 - DNA, 20 bp, synthetic construct
  source 1..20: mol_type = other DNA
acaaggtcttgcttgtcacc

SEQ ID NO: 59079 - DNA, 20 bp, synthetic construct
  source 1..20: mol_type = other DNA
gacaaggtcttgcttgtcac

SEQ ID NO: 59080 - DNA, 20 bp, synthetic construct
  source 1..20: mol_type = other DNA
agacaaggtcttgcttgtca

SEQ ID NO: 59081 - DNA, 20 bp, synthetic construct
  source 1..20: mol_type = other DNA
gagacaaggtcttgcttgtc

SEQ ID NO: 59082 - DNA, 20 bp, synthetic construct
  source 1..20: mol_type = other DNA
tgagacaaggtcttgcttgt

SEQ ID NO: 59083 - DNA, 20 bp, synthetic construct
  source 1..20: mol_type = other DNA
ttgagacaaggtcttgcttg

SEQ ID NO: 59084 - DNA, 20 bp, synthetic construct
  source 1..20: mol_type = other DNA
tttgagacaaggtcttgctt

SEQ ID NO: 59085 - DNA, 20 bp, synthetic construct
  source 1..20: mol_type = other DNA
ttttgagacaaggtcttgct

SEQ ID NO: 59086 - DNA, 20 bp, synthetic construct
  source 1..20: mol_type = other DNA
tttttgagacaaggtcttgc

SEQ ID NO: 59087 - DNA, 20 bp, synthetic construct
  source 1..20: mol_type = other DNA
gtttttgagacaaggtcttg

SEQ ID NO: 59088 - DNA, 20 bp, synthetic construct
  source 1..20: mol_type = other DNA
tgtttttgagacaaggtctt

SEQ ID NO: 59089 - DNA, 20 bp, synthetic construct
  source 1..20: mol_type = other DNA
ttgtttttgagacaaggtct

SEQ ID NO: 59090 - DNA, 20 bp, synthetic construct
  source 1..20: mol_type = other DNA
tttgtttttgagacaaggtc

SEQ ID NO: 59091 - DNA, 20 bp, synthetic construct
  source 1..20: mol_type = other DNA
gtttgtttttgagacaaggt

SEQ ID NO: 59092 - DNA, 20 bp, synthetic construct
  source 1..20: mol_type = other DNA
ggtttgtttttgagacaagg

SEQ ID NO: 59093 - DNA, 20 bp, synthetic construct
  source 1..20: mol_type = other DNA
tggtttgtttttgagacaag

SEQ ID NO: 59094 - DNA, 20 bp, synthetic construct
  source 1..20: mol_type = other DNA
ctggtttgtttttgagacaa

SEQ ID NO: 59095 - DNA, 20 bp, synthetic construct
  source 1..20: mol_type = other DNA
gctggtttgtttttgagaca

SEQ ID NO: 59096 - DNA, 20 bp, synthetic construct
  source 1..20: mol_type = other DNA
ggctggtttgtttttgagac

SEQ ID NO: 59097 - DNA, 20 bp, synthetic construct
  source 1..20: mol_type = other DNA
tggctggtttgtttttgaga

SEQ ID NO: 59098 - DNA, 20 bp, synthetic construct
  source 1..20: mol_type = other DNA
ctggctggtttgtttttgag

SEQ ID NO: 59099 - DNA, 20 bp, synthetic construct
  source 1..20: mol_type = other DNA
cctggctggtttgtttttga

SEQ ID NO: 59100 - DNA, 20 bp, synthetic construct
  source 1..20: mol_type = other DNA
gcctggctggtttgtttttg

SEQ ID NO: 59101 - DNA, 20 bp, synthetic construct
  source 1..20: mol_type = other DNA
cgcctggctggtttgttttt

SEQ ID NO: 59102 - DNA, 20 bp, synthetic construct
  source 1..20: mol_type = other DNA
acgcctggctggtttgtttt

SEQ ID NO: 59103 - DNA, 20 bp, synthetic construct
  source 1..20: mol_type = other DNA
cacgcctggctggtttgttt

SEQ ID NO: 59104 - DNA, 20 bp, synthetic construct
  source 1..20: mol_type = other DNA
ccacgcctggctggtttgtt

SEQ ID NO: 59105 - DNA, 20 bp, synthetic construct
  source 1..20: mol_type = other DNA
gccacgcctggctggtttgt

SEQ ID NO: 59106 - DNA, 20 bp, synthetic construct
  source 1..20: mol_type = other DNA
cgccacgcctggctggtttg

SEQ ID NO: 59107 - DNA, 20 bp, synthetic construct
  source 1..20: mol_type = other DNA
ccgccacgcctggctggttt

SEQ ID NO: 59108 - DNA, 20 bp, synthetic construct
  source 1..20: mol_type = other DNA
tccgccacgcctggctggtt

SEQ ID NO: 59109 - DNA, 20 bp, synthetic construct
  source 1..20: mol_type = other DNA
atccgccacgcctggctggt

SEQ ID NO: 59110 - DNA, 20 bp, synthetic construct
  source 1..20: mol_type = other DNA
gatccgccacgcctggctgg

SEQ ID NO: 59111 - DNA, 20 bp, synthetic construct
  source 1..20: mol_type = other DNA
tgatccgccacgcctggctg

SEQ ID NO: 59112 - DNA, 20 bp, synthetic construct
  source 1..20: mol_type = other DNA
gtgatccgccacgcctggct

SEQ ID NO: 59113 - DNA, 20 bp, synthetic construct
  source 1..20: mol_type = other DNA
ggtgatccgccacgcctggc

SEQ ID NO: 59114 - DNA, 20 bp, synthetic construct
  source 1..20: mol_type = other DNA
aggtgatccgccacgcctgg

SEQ ID NO: 59115 - DNA, 20 bp, synthetic construct
  source 1..20: mol_type = other DNA
caggtgatccgccacgcctg

SEQ ID NO: 59116 - DNA, 20 bp, synthetic construct
  source 1..20: mol_type = other DNA
tcaggtgatccgccacgcct

SEQ ID NO: 59117 - DNA, 20 bp, synthetic construct
  source 1..20: mol_type = other DNA
ctcaggtgatccgccacgcc

SEQ ID NO: 59118 - DNA, 20 bp, synthetic construct
  source 1..20: mol_type = other DNA
cctcaggtgatccgccacgc

SEQ ID NO: 59119 - DNA, 20 bp, synthetic construct
  source 1..20: mol_type = other DNA
acctcaggtgatccgccacg

SEQ ID NO: 59120 - DNA, 20 bp, synthetic construct
  source 1..20: mol_type = other DNA
tacctcaggtgatccgccac

SEQ ID NO: 59121 - DNA, 20 bp, synthetic construct
  source 1..20: mol_type = other DNA
ttacctcaggtgatccgcca

SEQ ID NO: 59122 - DNA, 20 bp, synthetic construct
  source 1..20: mol_type = other DNA
cttacctcaggtgatccgcc

SEQ ID NO: 59123 - DNA, 20 bp, synthetic construct
  source 1..20: mol_type = other DNA
ccttacctcaggtgatccgc

SEQ ID NO: 59124 - DNA, 20 bp, synthetic construct
  source 1..20: mol_type = other DNA
tccttacctcaggtgatccg

SEQ ID NO: 59125 - DNA, 20 bp, synthetic construct
  source 1..20: mol_type = other DNA
ctccttacctcaggtgatcc

SEQ ID NO: 59126 - DNA, 20 bp, synthetic construct
  source 1..20: mol_type = other DNA
actccttacctcaggtgatc

SEQ ID NO: 59127 - DNA, 20 bp, synthetic construct
  source 1..20: mol_type = other DNA
aactccttacctcaggtgat

SEQ ID NO: 59128 - DNA, 20 bp, synthetic construct
  source 1..20: mol_type = other DNA
caactccttacctcaggtga

SEQ ID NO: 59129 - DNA, 20 bp, synthetic construct
  source 1..20: mol_type = other DNA
ccaactccttacctcaggtg

SEQ ID NO: 59130 - DNA, 20 bp, synthetic construct
  source 1..20: mol_type = other DNA
tccaactccttacctcaggt

SEQ ID NO: 59131 - DNA, 20 bp, synthetic construct
  source 1..20: mol_type = other DNA
ctccaactccttacctcagg

SEQ ID NO: 59132 - DNA, 20 bp, synthetic construct
  source 1..20: mol_type = other DNA
tctccaactccttacctcag

SEQ ID NO: 59133 - DNA, 20 bp, synthetic construct
  source 1..20: mol_type = other DNA
gtctccaactccttacctca

SEQ ID NO: 59134 - DNA, 20 bp, synthetic construct
  source 1..20: mol_type = other DNA
ggtctccaactccttacctc

SEQ ID NO: 59135 - DNA, 20 bp, synthetic construct
  source 1..20: mol_type = other DNA
tggtctccaactccttacct

SEQ ID NO: 59136 - DNA, 20 bp, synthetic construct
  source 1..20: mol_type = other DNA
ctggtctccaactccttacc

SEQ ID NO: 59137 - DNA, 20 bp, synthetic construct
  source 1..20: mol_type = other DNA
gctggtctccaactccttac

SEQ ID NO: 59138 - DNA, 20 bp, synthetic construct
  source 1..20: mol_type = other DNA
ggctggtctccaactcctta

SEQ ID NO: 59139 - DNA, 20 bp, synthetic construct
  source 1..20: mol_type = other DNA
aggctggtctccaactcctt

SEQ ID NO: 59140 - DNA, 20 bp, synthetic construct
  source 1..20: mol_type = other DNA
caggctggtctccaactcct

SEQ ID NO: 59141 - DNA, 20 bp, synthetic construct
  source 1..20: mol_type = other DNA
ccaggctggtctccaactcc

SEQ ID NO: 59142 - DNA, 20 bp, synthetic construct
  source 1..20: mol_type = other DNA
gccaggctggtctccaactc

SEQ ID NO: 59143 - DNA, 20 bp, synthetic construct
  source 1..20: mol_type = other DNA
ggccaggctggtctccaact

SEQ ID NO: 59144 - DNA, 20 bp, synthetic construct
  source 1..20: mol_type = other DNA
cggccaggctggtctccaac

SEQ ID NO: 59145 - DNA, 20 bp, synthetic construct
  source 1..20: mol_type = other DNA
tcggccaggctggtctccaa

SEQ ID NO: 59146 - DNA, 20 bp, synthetic construct
  source 1..20: mol_type = other DNA
gtcggccaggctggtctcca

SEQ ID NO: 59147 - DNA, 20 bp, synthetic construct
  source 1..20: mol_type = other DNA
tgtcggccaggctggtctcc

SEQ ID NO: 59148 - DNA, 20 bp, synthetic construct
  source 1..20: mol_type = other DNA
atgtcggccaggctggtctc

SEQ ID NO: 59149 - DNA, 20 bp, synthetic construct
  source 1..20: mol_type = other DNA
catgtcggccaggctggtct

SEQ ID NO: 59150 - DNA, 20 bp, synthetic construct
  source 1..20: mol_type = other DNA
ccatgtcggccaggctggtc

SEQ ID NO: 59151 - DNA, 20 bp, synthetic construct
  source 1..20: mol_type = other DNA
gccatgtcggccaggctggt

SEQ ID NO: 59152 - DNA, 20 bp, synthetic construct
  source 1..20: mol_type = other DNA
agccatgtcggccaggctgg

SEQ ID NO: 59153 - DNA, 20 bp, synthetic construct
  source 1..20: mol_type = other DNA
gagccatgtcggccaggctg

SEQ ID NO: 59154 - DNA, 20 bp, synthetic construct
  source 1..20: mol_type = other DNA
agagccatgtcggccaggct

SEQ ID NO: 59155 - DNA, 20 bp, synthetic construct
  source 1..20: mol_type = other DNA
tagagccatgtcggccaggc

SEQ ID NO: 59156 - DNA, 20 bp, synthetic construct
  source 1..20: mol_type = other DNA
gtagagccatgtcggccagg

SEQ ID NO: 59157 - DNA, 20 bp, synthetic construct
  source 1..20: mol_type = other DNA
agtagagccatgtcggccag

SEQ ID NO: 59158 - DNA, 20 bp, synthetic construct
  source 1..20: mol_type = other DNA
tagtagagccatgtcggcca

SEQ ID NO: 59159 - DNA, 20 bp, synthetic construct
  source 1..20: mol_type = other DNA
ttagtagagccatgtcggcc

SEQ ID NO: 59160 - DNA, 20 bp, synthetic construct
  source 1..20: mol_type = other DNA
tttagtagagccatgtcggc

SEQ ID NO: 59161 - DNA, 20 bp, synthetic construct
  source 1..20: mol_type = other DNA
ttttagtagagccatgtcgg

SEQ ID NO: 59162 - DNA, 20 bp, synthetic construct
  source 1..20: mol_type = other DNA
tttttagtagagccatgtcg

SEQ ID NO: 59163 - DNA, 20 bp, synthetic construct
  source 1..20: mol_type = other DNA
atttttagtagagccatgtc

SEQ ID NO: 59164 - DNA, 20 bp, synthetic construct
  source 1..20: mol_type = other DNA
tatttttagtagagccatgt

SEQ ID NO: 59165 - DNA, 20 bp, synthetic construct
  source 1..20: mol_type = other DNA
gtatttttagtagagccatg

SEQ ID NO: 59166 - DNA, 20 bp, synthetic construct
  source 1..20: mol_type = other DNA
tgtatttttagtagagccat

SEQ ID NO: 59167 - DNA, 20 bp, synthetic construct
  source 1..20: mol_type = other DNA
ttgtatttttagtagagcca

SEQ ID NO: 59168 - DNA, 20 bp, synthetic construct
  source 1..20: mol_type = other DNA
tttgtatttttagtagagcc

SEQ ID NO: 59169 - DNA, 20 bp, synthetic construct
  source 1..20: mol_type = other DNA
ttttgtatttttagtagagc

SEQ ID NO: 59170 - DNA, 20 bp, synthetic construct
  source 1..20: mol_type = other DNA
tttttgtatttttagtagag

SEQ ID NO: 59171 - DNA, 20 bp, synthetic construct
  source 1..20: mol_type = other DNA
atttttgtatttttagtaga

SEQ ID NO: 59172 - DNA, 20 bp, synthetic construct
  source 1..20: mol_type = other DNA
aatttttgtatttttagtag

SEQ ID NO: 59173 - DNA, 20 bp, synthetic construct
  source 1..20: mol_type = other DNA
taatttttgtatttttagta

SEQ ID NO: 59174 - DNA, 20 bp, synthetic construct
  source 1..20: mol_type = other DNA
ctaatttttgtatttttagt

SEQ ID NO: 59175 - DNA, 20 bp, synthetic construct
  source 1..20: mol_type = other DNA
gctaatttttgtatttttag

SEQ ID NO: 59176 - DNA, 20 bp, synthetic construct
  source 1..20: mol_type = other DNA
agctaatttttgtattttta

SEQ ID NO: 59177 - DNA, 20 bp, synthetic construct
  source 1..20: mol_type = other DNA
cagctaatttttgtattttt

SEQ ID NO: 59178 - DNA, 20 bp, synthetic construct
  source 1..20: mol_type = other DNA
ccagctaatttttgtatttt

SEQ ID NO: 59179 - DNA, 20 bp, synthetic construct
  source 1..20: mol_type = other DNA
cccagctaatttttgtattt

SEQ ID NO: 59180 - DNA, 20 bp, synthetic construct
  source 1..20: mol_type = other DNA
gcccagctaatttttgtatt

SEQ ID NO: 59181 - DNA, 20 bp, synthetic construct
  source 1..20: mol_type = other DNA
cgcccagctaatttttgtat

SEQ ID NO: 59182 - DNA, 20 bp, synthetic construct
  source 1..20: mol_type = other DNA
tcgcccagctaatttttgta

SEQ ID NO: 59183 - DNA, 20 bp, synthetic construct
  source 1..20: mol_type = other DNA
ctcgcccagctaatttttgt

SEQ ID NO: 59184 - DNA, 20 bp, synthetic construct
  source 1..20: mol_type = other DNA
cctcgcccagctaatttttg

SEQ ID NO: 59185 - DNA, 20 bp, synthetic construct
  source 1..20: mol_type = other DNA
acctcgcccagctaattttt

SEQ ID NO: 59186 - DNA, 20 bp, synthetic construct
  source 1..20: mol_type = other DNA
cacctcgcccagctaatttt

SEQ ID NO: 59187 - DNA, 20 bp, synthetic construct
  source 1..20: mol_type = other DNA
tcacctcgcccagctaattt

SEQ ID NO: 59188 - DNA, 20 bp, synthetic construct
  source 1..20: mol_type = other DNA
gtcacctcgcccagctaatt

SEQ ID NO: 59189 - DNA, 20 bp, synthetic construct
  source 1..20: mol_type = other DNA
cgtcacctcgcccagctaat

SEQ ID NO: 59190 - DNA, 20 bp, synthetic construct
  source 1..20: mol_type = other DNA
ccgtcacctcgcccagctaa

SEQ ID NO: 59191 - DNA, 20 bp, synthetic construct
  source 1..20: mol_type = other DNA
cccgtcacctcgcccagcta

SEQ ID NO: 59192 - DNA, 20 bp, synthetic construct
  source 1..20: mol_type = other DNA
gcccgtcacctcgcccagct

SEQ ID NO: 59193 - DNA, 20 bp, synthetic construct
  source 1..20: mol_type = other DNA
tgcccgtcacctcgcccagc

SEQ ID NO: 59194 - DNA, 20 bp, synthetic construct
  source 1..20: mol_type = other DNA
gtgcccgtcacctcgcccag

SEQ ID NO: 59195 - DNA, 20 bp, synthetic construct
  source 1..20: mol_type = other DNA
ggtgcccgtcacctcgccca

SEQ ID NO: 59196 - DNA, 20 bp, synthetic construct
  source 1..20: mol_type = other DNA
aggtgcccgtcacctcgccc

SEQ ID NO: 59197 - DNA, 20 bp, synthetic construct
  source 1..20: mol_type = other DNA
caggtgcccgtcacctcgcc

SEQ ID NO: 59198 - DNA, 20 bp, synthetic construct
  source 1..20: mol_type = other DNA
acaggtgcccgtcacctcgc

SEQ ID NO: 59199 - DNA, 20 bp, synthetic construct
  source 1..20: mol_type = other DNA
tacaggtgcccgtcacctcg

SEQ ID NO: 59200 - DNA, 20 bp, synthetic construct
  source 1..20: mol_type = other DNA
ttacaggtgcccgtcacctc

SEQ ID NO: 59201 - DNA, 20 bp, synthetic construct
  source 1..20: mol_type = other DNA
attacaggtgcccgtcacct

SEQ ID NO: 59202 - DNA, 20 bp, synthetic construct
  source 1..20: mol_type = other DNA
gattacaggtgcccgtcacc

SEQ ID NO: 59203 - DNA, 20 bp, synthetic construct
  source 1..20: mol_type = other DNA
ggattacaggtgcccgtcac

SEQ ID NO: 59204 - DNA, 20 bp, synthetic construct
  source 1..20: mol_type = other DNA
gggattacaggtgcccgtca

SEQ ID NO: 59205 - DNA, 20 bp, synthetic construct
  source 1..20: mol_type = other DNA
tgggattacaggtgcccgtc

SEQ ID NO: 59206 - DNA, 20 bp, synthetic construct
  source 1..20: mol_type = other DNA
ctgggattacaggtgcccgt

SEQ ID NO: 59207 - DNA, 20 bp, synthetic construct
  source 1..20: mol_type = other DNA
gctgggattacaggtgcccg

SEQ ID NO: 59208 - DNA, 20 bp, synthetic construct
  source 1..20: mol_type = other DNA
agctgggattacaggtgccc

SEQ ID NO: 59209 - DNA, 20 bp, synthetic construct
  source 1..20: mol_type = other DNA
tagctgggattacaggtgcc

SEQ ID NO: 59210 - DNA, 20 bp, synthetic construct
  source 1..20: mol_type = other DNA
gtagctgggattacaggtgc

SEQ ID NO: 59211 - DNA, 20 bp, synthetic construct
  source 1..20: mol_type = other DNA
agtagctgggattacaggtg

SEQ ID NO: 59212 - DNA, 20 bp, synthetic construct
  source 1..20: mol_type = other DNA
aagtagctgggattacaggt

SEQ ID NO: 59213 - DNA, 20 bp, synthetic construct
  source 1..20: mol_type = other DNA
caagtagctgggattacagg

SEQ ID NO: 59214 - DNA, 20 bp, synthetic construct
  source 1..20: mol_type = other DNA
ccaagtagctgggattacag

SEQ ID NO: 59215 - DNA, 20 bp, synthetic construct
  source 1..20: mol_type = other DNA
cccaagtagctgggattaca

SEQ ID NO: 59216 - DNA, 20 bp, synthetic construct
  source 1..20: mol_type = other DNA
tcccaagtagctgggattac

SEQ ID NO: 59217 - DNA, 20 bp, synthetic construct
  source 1..20: mol_type = other DNA
ctcccaagtagctgggatta

SEQ ID NO: 59218 - DNA, 20 bp, synthetic construct
  source 1..20: mol_type = other DNA
cctcccaagtagctgggatt

SEQ ID NO: 59219 - DNA, 20 bp, synthetic construct
  source 1..20: mol_type = other DNA
gcctcccaagtagctgggat

SEQ ID NO: 59220 - DNA, 20 bp, synthetic construct
  source 1..20: mol_type = other DNA
agcctcccaagtagctggga

SEQ ID NO: 59221 - DNA, 20 bp, synthetic construct
  source 1..20: mol_type = other DNA
cagcctcccaagtagctggg

SEQ ID NO: 59222 - DNA, 20 bp, synthetic construct
  source 1..20: mol_type = other DNA
tcagcctcccaagtagctgg

SEQ ID NO: 59223 - DNA, 20 bp, synthetic construct
  source 1..20: mol_type = other DNA
ctcagcctcccaagtagctg

SEQ ID NO: 59224 - DNA, 20 bp, synthetic construct
  source 1..20: mol_type = other DNA
cctcagcctcccaagtagct

SEQ ID NO: 59225 - DNA, 20 bp, synthetic construct
  source 1..20: mol_type = other DNA
gcctcagcctcccaagtagc

SEQ ID NO: 59226 - DNA, 20 bp, synthetic construct
  source 1..20: mol_type = other DNA
tgcctcagcctcccaagtag

SEQ ID NO: 59227 - DNA, 20 bp, synthetic construct
  source 1..20: mol_type = other DNA
ctgcctcagcctcccaagta

SEQ ID NO: 59228 - DNA, 20 bp, synthetic construct
  source 1..20: mol_type = other DNA
cctgcctcagcctcccaagt

SEQ ID NO: 59229 - DNA, 20 bp, synthetic construct
  source 1..20: mol_type = other DNA
tcctgcctcagcctcccaag

SEQ ID NO: 59230 - DNA, 20 bp, synthetic construct
  source 1..20: mol_type = other DNA
ctcctgcctcagcctcccaa

SEQ ID NO: 59231 - DNA, 20 bp, synthetic construct
  source 1..20: mol_type = other DNA
tctcctgcctcagcctccca

SEQ ID NO: 59232 - DNA, 20 bp, synthetic construct
  source 1..20: mol_type = other DNA
ttctcctgcctcagcctccc

SEQ ID NO: 59233 - DNA, 20 bp, synthetic construct
  source 1..20: mol_type = other DNA
attctcctgcctcagcctcc

SEQ ID NO: 59234 - DNA, 20 bp, synthetic construct
  source 1..20: mol_type = other DNA
gattctcctgcctcagcctc

SEQ ID NO: 59235 - DNA, 20 bp, synthetic construct
  source 1..20: mol_type = other DNA
cgattctcctgcctcagcct

SEQ ID NO: 59236 - DNA, 20 bp, synthetic construct
  source 1..20: mol_type = other DNA
gcgattctcctgcctcagcc

SEQ ID NO: 59237 - DNA, 20 bp, synthetic construct
  source 1..20: mol_type = other DNA
agcgattctcctgcctcagc

SEQ ID NO: 59238 - DNA, 20 bp, synthetic construct
  source 1..20: mol_type = other DNA
aagcgattctcctgcctcag

SEQ ID NO: 59239 - DNA, 20 bp, synthetic construct
  source 1..20: mol_type = other DNA
caagcgattctcctgcctca

SEQ ID NO: 59240 - DNA, 20 bp, synthetic construct
  source 1..20: mol_type = other DNA
tcaagcgattctcctgcctc

SEQ ID NO: 59241 - DNA, 20 bp, synthetic construct
  source 1..20: mol_type = other DNA
ttcaagcgattctcctgcct

SEQ ID NO: 59242 - DNA, 20 bp, synthetic construct
  source 1..20: mol_type = other DNA
attcaagcgattctcctgcc

SEQ ID NO: 59243 - DNA, 20 bp, synthetic construct
  source 1..20: mol_type = other DNA
gattcaagcgattctcctgc

SEQ ID NO: 59244 - DNA, 20 bp, synthetic construct
  source 1..20: mol_type = other DNA
ggattcaagcgattctcctg

SEQ ID NO: 59245 - DNA, 20 bp, synthetic construct
  source 1..20: mol_type = other DNA
tggattcaagcgattctcct

SEQ ID NO: 59246 - DNA, 20 bp, synthetic construct
  source 1..20: mol_type = other DNA
ctggattcaagcgattctcc

SEQ ID NO: 59247 - DNA, 20 bp, synthetic construct
  source 1..20: mol_type = other DNA
cctggattcaagcgattctc

SEQ ID NO: 59248 - DNA, 20 bp, synthetic construct
  source 1..20: mol_type = other DNA
tcctggattcaagcgattct

SEQ ID NO: 59249 - DNA, 20 bp, synthetic construct
  source 1..20: mol_type = other DNA
ctcctggattcaagcgattc

SEQ ID NO: 59250 - DNA, 20 bp, synthetic construct
  source 1..20: mol_type = other DNA
tctcctggattcaagcgatt

SEQ ID NO: 59251 - DNA, 20 bp, synthetic construct
  source 1..20: mol_type = other DNA
gtctcctggattcaagcgat

SEQ ID NO: 59252 - DNA, 20 bp, synthetic construct
  source 1..20: mol_type = other DNA
cgtctcctggattcaagcga

SEQ ID NO: 59253 - DNA, 20 bp, synthetic construct
  source 1..20: mol_type = other DNA
ccgtctcctggattcaagcg

SEQ ID NO: 59254 - DNA, 20 bp, synthetic construct
  source 1..20: mol_type = other DNA
tccgtctcctggattcaagc

SEQ ID NO: 59255 - DNA, 20 bp, synthetic construct
  source 1..20: mol_type = other DNA
ctccgtctcctggattcaag

SEQ ID NO: 59256 - DNA, 20 bp, synthetic construct
  source 1..20: mol_type = other DNA
actccgtctcctggattcaa

SEQ ID NO: 59257 - DNA, 20 bp, synthetic construct
  source 1..20: mol_type = other DNA
aactccgtctcctggattca

SEQ ID NO: 59258 - DNA, 20 bp, synthetic construct
  source 1..20: mol_type = other DNA
aaactccgtctcctggattc

SEQ ID NO: 59259 - DNA, 20 bp, synthetic construct
  source 1..20: mol_type = other DNA
caaactccgtctcctggatt

SEQ ID NO: 59260 - DNA, 20 bp, synthetic construct
  source 1..20: mol_type = other DNA
gcaaactccgtctcctggat

SEQ ID NO: 59261 - DNA, 20 bp, synthetic construct
  source 1..20: mol_type = other DNA
tgcaaactccgtctcctgga

SEQ ID NO: 59262 - DNA, 20 bp, synthetic construct
  source 1..20: mol_type = other DNA
ttgcaaactccgtctcctgg

SEQ ID NO: 59263 - DNA, 20 bp, synthetic construct
  source 1..20: mol_type = other DNA
attgcaaactccgtctcctg

SEQ ID NO: 59264 - DNA, 20 bp, synthetic construct
  source 1..20: mol_type = other DNA
cattgcaaactccgtctcct

SEQ ID NO: 59265 - DNA, 20 bp, synthetic construct
  source 1..20: mol_type = other DNA
tcattgcaaactccgtctcc

SEQ ID NO: 59266 - DNA, 20 bp, synthetic construct
  source 1..20: mol_type = other DNA
ctcattgcaaactccgtctc

SEQ ID NO: 59267 - DNA, 20 bp, synthetic construct
  source 1..20: mol_type = other DNA
gctcattgcaaactccgtct

SEQ ID NO: 59268 - DNA, 20 bp, synthetic construct
  source 1..20: mol_type = other DNA
ggctcattgcaaactccgtc

SEQ ID NO: 59269 - DNA, 20 bp, synthetic construct
  source 1..20: mol_type = other DNA
cggctcattgcaaactccgt

SEQ ID NO: 59270 - DNA, 20 bp, synthetic construct
  source 1..20: mol_type = other DNA
tcggctcattgcaaactccg

SEQ ID NO: 59271 - DNA, 20 bp, synthetic construct
  source 1..20: mol_type = other DNA
ctcggctcattgcaaactcc

SEQ ID NO: 59272 - DNA, 20 bp, synthetic construct
  source 1..20: mol_type = other DNA
tctcggctcattgcaaactc

SEQ ID NO: 59273 - DNA, 20 bp, synthetic construct
  source 1..20: mol_type = other DNA
atctcggctcattgcaaact

SEQ ID NO: 59274 - DNA, 20 bp, synthetic construct
  source 1..20: mol_type = other DNA
catctcggctcattgcaaac

SEQ ID NO: 59275 - DNA, 20 bp, synthetic construct
  source 1..20: mol_type = other DNA
ccatctcggctcattgcaaa

SEQ ID NO: 59276 - DNA, 20 bp, synthetic construct
  source 1..20: mol_type = other DNA
accatctcggctcattgcaa

SEQ ID NO: 59277 - DNA, 20 bp, synthetic construct
  source 1..20: mol_type = other DNA
caccatctcggctcattgca

SEQ ID NO: 59278 - DNA, 20 bp, synthetic construct
  source 1..20: mol_type = other DNA
ccaccatctcggctcattgc

SEQ ID NO: 59279 - DNA, 20 bp, synthetic construct
  source 1..20: mol_type = other DNA
accaccatctcggctcattg

SEQ ID NO: 59280 - DNA, 20 bp, synthetic construct
  source 1..20: mol_type = other DNA
caccaccatctcggctcatt

SEQ ID NO: 59281 - DNA, 20 bp, synthetic construct
  source 1..20: mol_type = other DNA
gcaccaccatctcggctcat

SEQ ID NO: 59282 - DNA, 20 bp, synthetic construct
  source 1..20: mol_type = other DNA
agcaccaccatctcggctca

SEQ ID NO: 59283 - DNA, 20 bp, synthetic construct
  source 1..20: mol_type = other DNA
cagcaccaccatctcggctc

SEQ ID NO: 59284 - DNA, 20 bp, synthetic construct
  source 1..20: mol_type = other DNA
gcagcaccaccatctcggct

SEQ ID NO: 59285 - DNA, 20 bp, synthetic construct
  source 1..20: mol_type = other DNA
tgcagcaccaccatctcggc

SEQ ID NO: 59286 - DNA, 20 bp, synthetic construct
  source 1..20: mol_type = other DNA
gtgcagcaccaccatctcgg

SEQ ID NO: 59287 - DNA, 20 bp, synthetic construct
  source 1..20: mol_type = other DNA
agtgcagcaccaccatctcg

SEQ ID NO: 59288 - DNA, 20 bp, synthetic construct
  source 1..20: mol_type = other DNA
gagtgcagcaccaccatctc

SEQ ID NO: 59289 - DNA, 20 bp, synthetic construct
  source 1..20: mol_type = other DNA
ggagtgcagcaccaccatct

SEQ ID NO: 59290 - DNA, 20 bp, synthetic construct
  source 1..20: mol_type = other DNA
tggagtgcagcaccaccatc

SEQ ID NO: 59291 - DNA, 20 bp, synthetic construct
  source 1..20: mol_type = other DNA
ctggagtgcagcaccaccat

SEQ ID NO: 59292 - DNA, 20 bp, synthetic construct
  source 1..20: mol_type = other DNA
gctggagtgcagcaccacca

SEQ ID NO: 59293 - DNA, 20 bp, synthetic construct
  source 1..20: mol_type = other DNA
ggctggagtgcagcaccacc

SEQ ID NO: 59294 - DNA, 20 bp, synthetic construct
  source 1..20: mol_type = other DNA
aggctggagtgcagcaccac

SEQ ID NO: 59295 - DNA, 20 bp, synthetic construct
  source 1..20: mol_type = other DNA
caggctggagtgcagcacca

SEQ ID NO: 59296 - DNA, 20 bp, synthetic construct
  source 1..20: mol_type = other DNA
ccaggctggagtgcagcacc

SEQ ID NO: 59297 - DNA, 20 bp, synthetic construct
  source 1..20: mol_type = other DNA
cccaggctggagtgcagcac

SEQ ID NO: 59298 - DNA, 20 bp, synthetic construct
  source 1..20: mol_type = other DNA
acccaggctggagtgcagca

SEQ ID NO: 59299 - DNA, 20 bp, synthetic construct
  source 1..20: mol_type = other DNA
cacccaggctggagtgcagc

SEQ ID NO: 59300 - DNA, 20 bp, synthetic construct
  source 1..20: mol_type = other DNA
tcacccaggctggagtgcag

SEQ ID NO: 59301 - DNA, 20 bp, synthetic construct
  source 1..20: mol_type = other DNA
gtcacccaggctggagtgca

SEQ ID NO: 59302 - DNA, 20 bp, synthetic construct
  source 1..20: mol_type = other DNA
tgtcacccaggctggagtgc

SEQ ID NO: 59303 - DNA, 20 bp, synthetic construct
  source 1..20: mol_type = other DNA
ctgtcacccaggctggagtg

SEQ ID NO: 59304 - DNA, 20 bp, synthetic construct
  source 1..20: mol_type = other DNA
tctgtcacccaggctggagt

SEQ ID NO: 59305 - DNA, 20 bp, synthetic construct
  source 1..20: mol_type = other DNA
ctctgtcacccaggctggag

SEQ ID NO: 59306 - DNA, 20 bp, synthetic construct
  source 1..20: mol_type = other DNA
gctctgtcacccaggctgga

SEQ ID NO: 59307 - DNA, 20 bp, synthetic construct
  source 1..20: mol_type = other DNA
ggctctgtcacccaggctgg

SEQ ID NO: 59308 - DNA, 20 bp, synthetic construct
  source 1..20: mol_type = other DNA
tggctctgtcacccaggctg

SEQ ID NO: 59309 - DNA, 20 bp, synthetic construct
  source 1..20: mol_type = other DNA
ctggctctgtcacccaggct

SEQ ID NO: 59310 - DNA, 20 bp, synthetic construct
  source 1..20: mol_type = other DNA
tctggctctgtcacccaggc

SEQ ID NO: 59311 - DNA, 20 bp, synthetic construct
  source 1..20: mol_type = other DNA
gtctggctctgtcacccagg

SEQ ID NO: 59312 - DNA, 20 bp, synthetic construct
  source 1..20: mol_type = other DNA
agtctggctctgtcacccag

SEQ ID NO: 59313 - DNA, 20 bp, synthetic construct
  source 1..20: mol_type = other DNA
gagtctggctctgtcaccca

SEQ ID NO: 59314 - DNA, 20 bp, synthetic construct
  source 1..20: mol_type = other DNA
agagtctggctctgtcaccc

SEQ ID NO: 59315 - DNA, 20 bp, synthetic construct
  source 1..20: mol_type = other DNA
cagagtctggctctgtcacc

SEQ ID NO: 59316 - DNA, 20 bp, synthetic construct
  source 1..20: mol_type = other DNA
acagagtctggctctgtcac

SEQ ID NO: 59317 - DNA, 20 bp, synthetic construct
  source 1..20: mol_type = other DNA
gacagagtctggctctgtca

SEQ ID NO: 59318 - DNA, 20 bp, synthetic construct
  source 1..20: mol_type = other DNA
agacagagtctggctctgtc

SEQ ID NO: 59319 - DNA, 20 bp, synthetic construct
  source 1..20: mol_type = other DNA
gagacagagtctggctctgt

SEQ ID NO: 59320 - DNA, 20 bp, synthetic construct
  source 1..20: mol_type = other DNA
tgagacagagtctggctctg

SEQ ID NO: 59321 - DNA, 20 bp, synthetic construct
  source 1..20: mol_type = other DNA
ttgagacagagtctggctct

SEQ ID NO: 59322 - DNA, 20 bp, synthetic construct
  source 1..20: mol_type = other DNA
tttgagacagagtctggctc

SEQ ID NO: 59323 - DNA, 20 bp, synthetic construct
  source 1..20: mol_type = other DNA
ttttgagacagagtctggct

SEQ ID NO: 59324 - DNA, 20 bp, synthetic construct
  source 1..20: mol_type = other DNA
tttttgagacagagtctggc

SEQ ID NO: 59325 - DNA, 20 bp, synthetic construct
  source 1..20: mol_type = other DNA
gtttttgagacagagtctgg

SEQ ID NO: 59326 - DNA, 20 bp, synthetic construct
  source 1..20: mol_type = other DNA
tgtttttgagacagagtctg

SEQ ID NO: 59327 - DNA, 20 bp, synthetic construct
  source 1..20: mol_type = other DNA
ttgtttttgagacagagtct

SEQ ID NO: 59328 - DNA, 20 bp, synthetic construct
  source 1..20: mol_type = other DNA
tttgtttttgagacagagtc

SEQ ID NO: 59329 - DNA, 20 bp, synthetic construct
  source 1..20: mol_type = other DNA
ttttgtttttgagacagagt

SEQ ID NO: 59330 - DNA, 20 bp, synthetic construct
  source 1..20: mol_type = other DNA
tttttgtttttgagacagag

SEQ ID NO: 59331 - DNA, 20 bp, synthetic construct
  source 1..20: mol_type = other DNA
atttttgtttttgagacaga

SEQ ID NO: 59332 - DNA, 20 bp, synthetic construct
  source 1..20: mol_type = other DNA
tatttttgtttttgagacag

SEQ ID NO: 59333 - DNA, 20 bp, synthetic construct
  source 1..20: mol_type = other DNA
ttatttttgtttttgagaca

SEQ ID NO: 59334 - DNA, 20 bp, synthetic construct
  source 1..20: mol_type = other DNA
cttatttttgtttttgagac

SEQ ID NO: 59335 - DNA, 20 bp, synthetic construct
  source 1..20: mol_type = other DNA
gcttatttttgtttttgaga

SEQ ID NO: 59336 - DNA, 20 bp, synthetic construct
  source 1..20: mol_type = other DNA
tgcttatttttgtttttgag

SEQ ID NO: 59337 - DNA, 20 bp, synthetic construct
  source 1..20: mol_type = other DNA
atgcttatttttgtttttga

SEQ ID NO: 59338 - DNA, 20 bp, synthetic construct
  source 1..20: mol_type = other DNA
tatgcttatttttgtttttg

SEQ ID NO: 59339 - DNA, 20 bp, synthetic construct
  source 1..20: mol_type = other DNA
ctatgcttatttttgttttt

SEQ ID NO: 59340 - DNA, 20 bp, synthetic construct
  source 1..20: mol_type = other DNA
cctatgcttatttttgtttt

SEQ ID NO: 59341 - DNA, 20 bp, synthetic construct
  source 1..20: mol_type = other DNA
tcctatgcttatttttgttt

SEQ ID NO: 59342 - DNA, 20 bp, synthetic construct
  source 1..20: mol_type = other DNA
gtcctatgcttatttttgtt

SEQ ID NO: 59343 - DNA, 20 bp, synthetic construct
  source 1..20: mol_type = other DNA
tgtcctatgcttatttttgt

SEQ ID NO: 59344 - DNA, 20 bp, synthetic construct
  source 1..20: mol_type = other DNA
atgtcctatgcttatttttg

SEQ ID NO: 59345 - DNA, 20 bp, synthetic construct
  source 1..20: mol_type = other DNA
catgtcctatgcttattttt

SEQ ID NO: 59346 - DNA, 20 bp, synthetic construct
  source 1..20: mol_type = other DNA
ccatgtcctatgcttatttt

SEQ ID NO: 59347 - DNA, 20 bp, synthetic construct
  source 1..20: mol_type = other DNA
cccatgtcctatgcttattt

SEQ ID NO: 59348 - DNA, 20 bp, synthetic construct
  source 1..20: mol_type = other DNA
ccccatgtcctatgcttatt

SEQ ID NO: 59349 - DNA, 20 bp, synthetic construct
  source 1..20: mol_type = other DNA
tccccatgtcctatgcttat

SEQ ID NO: 59350 - DNA, 20 bp, synthetic construct
  source 1..20: mol_type = other DNA
atccccatgtcctatgctta

SEQ ID NO: 59351 - DNA, 20 bp, synthetic construct
  source 1..20: mol_type = other DNA
tatccccatgtcctatgctt

SEQ ID NO: 59352 - DNA, 20 bp, synthetic construct
  source 1..20: mol_type = other DNA
ttatccccatgtcctatgct

SEQ ID NO: 59353 - DNA, 20 bp, synthetic construct
  source 1..20: mol_type = other DNA
tttatccccatgtcctatgc

SEQ ID NO: 59354 - DNA, 20 bp, synthetic construct
  source 1..20: mol_type = other DNA
atttatccccatgtcctatg

SEQ ID NO: 59355 - DNA, 20 bp, synthetic construct
  source 1..20: mol_type = other DNA
aatttatccccatgtcctat

SEQ ID NO: 59356 - DNA, 20 bp, synthetic construct
  source 1..20: mol_type = other DNA
caatttatccccatgtccta

SEQ ID NO: 59357 - DNA, 20 bp, synthetic construct
  source 1..20: mol_type = other DNA
tcaatttatccccatgtcct

SEQ ID NO: 59358 - DNA, 20 bp, synthetic construct
  source 1..20: mol_type = other DNA
ttcaatttatccccatgtcc

SEQ ID NO: 59359 - DNA, 20 bp, synthetic construct
  source 1..20: mol_type = other DNA
cttcaatttatccccatgtc

SEQ ID NO: 59360 - DNA, 20 bp, synthetic construct
  source 1..20: mol_type = other DNA
tcttcaatttatccccatgt

SEQ ID NO: 59361 - DNA, 20 bp, synthetic construct
  source 1..20: mol_type = other DNA
atcttcaatttatccccatg

SEQ ID NO: 59362 - DNA, 20 bp, synthetic construct
  source 1..20: mol_type = other DNA
aatcttcaatttatccccat

SEQ ID NO: 59363 - DNA, 20 bp, synthetic construct
  source 1..20: mol_type = other DNA
aaatcttcaatttatcccca

SEQ ID NO: 59364 - DNA, 20 bp, synthetic construct
  source 1..20: mol_type = other DNA
taaatcttcaatttatcccc

SEQ ID NO: 59365 - DNA, 20 bp, synthetic construct
  source 1..20: mol_type = other DNA
ataaatcttcaatttatccc

SEQ ID NO: 59366 - DNA, 20 bp, synthetic construct
  source 1..20: mol_type = other DNA
cataaatcttcaatttatcc

SEQ ID NO: 59367 - DNA, 20 bp, synthetic construct
  source 1..20: mol_type = other DNA
tcataaatcttcaatttatc

SEQ ID NO: 59368 - DNA, 20 bp, synthetic construct
  source 1..20: mol_type = other DNA
ttcataaatcttcaatttat

SEQ ID NO: 59369 - DNA, 20 bp, synthetic construct
  source 1..20: mol_type = other DNA
cttcataaatcttcaattta

SEQ ID NO: 59370 - DNA, 20 bp, synthetic construct
  source 1..20: mol_type = other DNA
tcttcataaatcttcaattt

SEQ ID NO: 59371 - DNA, 20 bp, synthetic construct
  source 1..20: mol_type = other DNA
gtcttcataaatcttcaatt

SEQ ID NO: 59372 - DNA, 20 bp, synthetic construct
  source 1..20: mol_type = other DNA
tgtcttcataaatcttcaat

SEQ ID NO: 59373 - DNA, 20 bp, synthetic construct
  source 1..20: mol_type = other DNA
gtgtcttcataaatcttcaa

SEQ ID NO: 59374 - DNA, 20 bp, synthetic construct
  source 1..20: mol_type = other DNA
tgtgtcttcataaatcttca

SEQ ID NO: 59375 - DNA, 20 bp, synthetic construct
  source 1..20: mol_type = other DNA
ctgtgtcttcataaatcttc

SEQ ID NO: 59376 - DNA, 20 bp, synthetic construct
  source 1..20: mol_type = other DNA
gctgtgtcttcataaatctt

SEQ ID NO: 59377 - DNA, 20 bp, synthetic construct
  source 1..20: mol_type = other DNA
agctgtgtcttcataaatct

SEQ ID NO: 59378 - DNA, 20 bp, synthetic construct
  source 1..20: mol_type = other DNA
cagctgtgtcttcataaatc

SEQ ID NO: 59379 - DNA, 20 bp, synthetic construct
  source 1..20: mol_type = other DNA
tcagctgtgtcttcataaat

SEQ ID NO: 59380 - DNA, 20 bp, synthetic construct
  source 1..20: mol_type = other DNA
ttcagctgtgtcttcataaa

SEQ ID NO: 59381 - DNA, 20 bp, synthetic construct
  source 1..20: mol_type = other DNA
cttcagctgtgtcttcataa

SEQ ID NO: 59382 - DNA, 20 bp, synthetic construct
  source 1..20: mol_type = other DNA
ccttcagctgtgtcttcata

SEQ ID NO: 59383 - DNA, 20 bp, synthetic construct
  source 1..20: mol_type = other DNA
tccttcagctgtgtcttcat

SEQ ID NO: 59384 - DNA, 20 bp, synthetic construct
  source 1..20: mol_type = other DNA
ctccttcagctgtgtcttca

SEQ ID NO: 59385 - DNA, 20 bp, synthetic construct
  source 1..20: mol_type = other DNA
tctccttcagctgtgtcttc

SEQ ID NO: 59386 - DNA, 20 bp, synthetic construct
  source 1..20: mol_type = other DNA
gtctccttcagctgtgtctt

SEQ ID NO: 59387 - DNA, 20 bp, synthetic construct
  source 1..20: mol_type = other DNA
tgtctccttcagctgtgtct

SEQ ID NO: 59388 - DNA, 20 bp, synthetic construct
  source 1..20: mol_type = other DNA
atgtctccttcagctgtgtc

SEQ ID NO: 59389 - DNA, 20 bp, synthetic construct
  source 1..20: mol_type = other DNA
tatgtctccttcagctgtgt

SEQ ID NO: 59390 - DNA, 20 bp, synthetic construct
  source 1..20: mol_type = other DNA
ttatgtctccttcagctgtg

SEQ ID NO: 59391 - DNA, 20 bp, synthetic construct
  source 1..20: mol_type = other DNA
tttatgtctccttcagctgt

SEQ ID NO: 59392 - DNA, 20 bp, synthetic construct
  source 1..20: mol_type = other DNA
ttttatgtctccttcagctg

SEQ ID NO: 59393 - DNA, 20 bp, synthetic construct
  source 1..20: mol_type = other DNA
cttttatgtctccttcagct

SEQ ID NO: 59394 - DNA, 20 bp, synthetic construct
  source 1..20: mol_type = other DNA
acttttatgtctccttcagc

SEQ ID NO: 59395 - DNA, 20 bp, synthetic construct
  source 1..20: mol_type = other DNA
tacttttatgtctccttcag

SEQ ID NO: 59396 - DNA, 20 bp, synthetic construct
  source 1..20: mol_type = other DNA
ctacttttatgtctccttca

SEQ ID NO: 59397 - DNA, 20 bp, synthetic construct
  source 1..20: mol_type = other DNA
tctacttttatgtctccttc

SEQ ID NO: 59398 - DNA, 20 bp, synthetic construct
  source 1..20: mol_type = other DNA
atctacttttatgtctcctt

SEQ ID NO: 59399 - DNA, 20 bp, synthetic construct
  source 1..20: mol_type = other DNA
aatctacttttatgtctcct

SEQ ID NO: 59400 - DNA, 20 bp, synthetic construct
  source 1..20: mol_type = other DNA
aaatctacttttatgtctcc

SEQ ID NO: 59401 - DNA, 20 bp, synthetic construct
  source 1..20: mol_type = other DNA
caaatctacttttatgtctc

SEQ ID NO: 59402 - DNA, 20 bp, synthetic construct
  source 1..20: mol_type = other DNA
ccaaatctacttttatgtct

SEQ ID NO: 59403 - DNA, 20 bp, synthetic construct
  source 1..20: mol_type = other DNA
gccaaatctacttttatgtc

SEQ ID NO: 59404 - DNA, 20 bp, synthetic construct
  source 1..20: mol_type = other DNA
agccaaatctacttttatgt

SEQ ID NO: 59405 - DNA, 20 bp, synthetic construct
  source 1..20: mol_type = other DNA
tagccaaatctacttttatg

SEQ ID NO: 59406 - DNA, 20 bp, synthetic construct
  source 1..20: mol_type = other DNA
ttagccaaatctacttttat

SEQ ID NO: 59407 - DNA, 20 bp, synthetic construct
  source 1..20: mol_type = other DNA
tttagccaaatctactttta

SEQ ID NO: 59408 - DNA, 20 bp, synthetic construct
  source 1..20: mol_type = other DNA
atttagccaaatctactttt

SEQ ID NO: 59409 - DNA, 20 bp, synthetic construct
  source 1..20: mol_type = other DNA
catttagccaaatctacttt

SEQ ID NO: 59410 - DNA, 20 bp, synthetic construct
  source 1..20: mol_type = other DNA
ccatttagccaaatctactt

SEQ ID NO: 59411 - DNA, 20 bp, synthetic construct
  source 1..20: mol_type = other DNA
tccatttagccaaatctact

SEQ ID NO: 59412 - DNA, 20 bp, synthetic construct
  source 1..20: mol_type = other DNA
ttccatttagccaaatctac

SEQ ID NO: 59413 - DNA, 20 bp, synthetic construct
  source 1..20: mol_type = other DNA
tttccatttagccaaatcta

SEQ ID NO: 59414 - DNA, 20 bp, synthetic construct
  source 1..20: mol_type = other DNA
gtttccatttagccaaatct

SEQ ID NO: 59415 - DNA, 20 bp, synthetic construct
  source 1..20: mol_type = other DNA
tgtttccatttagccaaatc

SEQ ID NO: 59416 - DNA, 20 bp, synthetic construct
  source 1..20: mol_type = other DNA
atgtttccatttagccaaat

SEQ ID NO: 59417 - DNA, 20 bp, synthetic construct
  source 1..20: mol_type = other DNA
catgtttccatttagccaaa

SEQ ID NO: 59418 - DNA, 20 bp, synthetic construct
  source 1..20: mol_type = other DNA
gcatgtttccatttagccaa

SEQ ID NO: 59419 - DNA, 20 bp, synthetic construct
  source 1..20: mol_type = other DNA
ggcatgtttccatttagcca

SEQ ID NO: 59420 - DNA, 20 bp, synthetic construct
  source 1..20: mol_type = other DNA
tggcatgtttccatttagcc

SEQ ID NO: 59421 - DNA, 20 bp, synthetic construct
  source 1..20: mol_type = other DNA
atggcatgtttccatttagc

SEQ ID NO: 59422 - DNA, 20 bp, synthetic construct
  source 1..20: mol_type = other DNA
tatggcatgtttccatttag

SEQ ID NO: 59423 - DNA, 20 bp, synthetic construct
  source 1..20: mol_type = other DNA
gtatggcatgtttccattta

SEQ ID NO: 59424 - DNA, 20 bp, synthetic construct
  source 1..20: mol_type = other DNA
agtatggcatgtttccattt

SEQ ID NO: 59425 - DNA, 20 bp, synthetic construct
  source 1..20: mol_type = other DNA
aagtatggcatgtttccatt

SEQ ID NO: 59426 - DNA, 20 bp, synthetic construct
  source 1..20: mol_type = other DNA
aaagtatggcatgtttccat

SEQ ID NO: 59427 - DNA, 20 bp, synthetic construct
  source 1..20: mol_type = other DNA
caaagtatggcatgtttcca

SEQ ID NO: 59428 - DNA, 20 bp, synthetic construct
  source 1..20: mol_type = other DNA
tcaaagtatggcatgtttcc

SEQ ID NO: 59429 - DNA, 20 bp, synthetic construct
  source 1..20: mol_type = other DNA
ttcaaagtatggcatgtttc

SEQ ID NO: 59430 - DNA, 20 bp, synthetic construct
  source 1..20: mol_type = other DNA
attcaaagtatggcatgttt

SEQ ID NO: 59431 - DNA, 20 bp, synthetic construct
  source 1..20: mol_type = other DNA
cattcaaagtatggcatgtt

SEQ ID NO: 59432 - DNA, 20 bp, synthetic construct
  source 1..20: mol_type = other DNA
ccattcaaagtatggcatgt

SEQ ID NO: 59433 - DNA, 20 bp, synthetic construct
  source 1..20: mol_type = other DNA
tccattcaaagtatggcatg

SEQ ID NO: 59434 - DNA, 20 bp, synthetic construct
  source 1..20: mol_type = other DNA
ttccattcaaagtatggcat

SEQ ID NO: 59435 - DNA, 20 bp, synthetic construct
  source 1..20: mol_type = other DNA
attccattcaaagtatggca

SEQ ID NO: 59436 - DNA, 20 bp, synthetic construct
  source 1..20: mol_type = other DNA
aattccattcaaagtatggc

SEQ ID NO: 59437 - DNA, 20 bp, synthetic construct
  source 1..20: mol_type = other DNA
taattccattcaaagtatgg

SEQ ID NO: 59438 - DNA, 20 bp, synthetic construct
  source 1..20: mol_type = other DNA
ataattccattcaaagtatg

SEQ ID NO: 59439 - DNA, 20 bp, synthetic construct
  source 1..20: mol_type = other DNA
aataattccattcaaagtat

SEQ ID NO: 59440 - DNA, 20 bp, synthetic construct
  source 1..20: mol_type = other DNA
aaataattccattcaaagta

SEQ ID NO: 59441 - DNA, 20 bp, synthetic construct
  source 1..20: mol_type = other DNA
taaataattccattcaaagt

SEQ ID NO: 59442 - DNA, 20 bp, synthetic construct
  source 1..20: mol_type = other DNA
ttaaataattccattcaaag

SEQ ID NO: 59443 - DNA, 20 bp, synthetic construct
  source 1..20: mol_type = other DNA
attaaataattccattcaaa

SEQ ID NO: 59444 - DNA, 20 bp, synthetic construct
  source 1..20: mol_type = other DNA
tattaaataattccattcaa

SEQ ID NO: 59445 - DNA, 20 bp, synthetic construct
  source 1..20: mol_type = other DNA
gtattaaataattccattca

SEQ ID NO: 59446 - DNA, 20 bp, synthetic construct
  source 1..20: mol_type = other DNA
agtattaaataattccattc

SEQ ID NO: 59447 - DNA, 20 bp, synthetic construct
  source 1..20: mol_type = other DNA
tagtattaaataattccatt

SEQ ID NO: 59448 - DNA, 20 bp, synthetic construct
  source 1..20: mol_type = other DNA
gtagtattaaataattccat

SEQ ID NO: 59449 - DNA, 20 bp, synthetic construct
  source 1..20: mol_type = other DNA
tgtagtattaaataattcca

SEQ ID NO: 59450 - DNA, 20 bp, synthetic construct
  source 1..20: mol_type = other DNA
ttgtagtattaaataattcc

SEQ ID NO: 59451 - DNA, 20 bp, synthetic construct
  source 1..20: mol_type = other DNA
gttgtagtattaaataattc

SEQ ID NO: 59452 - DNA, 20 bp, synthetic construct
  source 1..20: mol_type = other DNA
cgttgtagtattaaataatt

SEQ ID NO: 59453 - DNA, 20 bp, synthetic construct
  source 1..20: mol_type = other DNA
acgttgtagtattaaataat

SEQ ID NO: 59454 - DNA, 20 bp, synthetic construct
  source 1..20: mol_type = other DNA
aacgttgtagtattaaataa

SEQ ID NO: 59455 - DNA, 20 bp, synthetic construct
  source 1..20: mol_type = other DNA
caacgttgtagtattaaata

SEQ ID NO: 59456 - DNA, 20 bp, synthetic construct
  source 1..20: mol_type = other DNA
acaacgttgtagtattaaat

SEQ ID NO: 59457 - DNA, 20 bp, synthetic construct
  source 1..20: mol_type = other DNA
gacaacgttgtagtattaaa

SEQ ID NO: 59458 - DNA, 20 bp, synthetic construct
  source 1..20: mol_type = other DNA
tgacaacgttgtagtattaa

SEQ ID NO: 59459 - DNA, 20 bp, synthetic construct
  source 1..20: mol_type = other DNA
ttgacaacgttgtagtatta

SEQ ID NO: 59460 - DNA, 20 bp, synthetic construct
  source 1..20: mol_type = other DNA
attgacaacgttgtagtatt

SEQ ID NO: 59461 - DNA, 20 bp, synthetic construct
  source 1..20: mol_type = other DNA
aattgacaacgttgtagtat

SEQ ID NO: 59462 - DNA, 20 bp, synthetic construct
  source 1..20: mol_type = other DNA
aaattgacaacgttgtagta

SEQ ID NO: 59463 - DNA, 20 bp, synthetic construct
  source 1..20: mol_type = other DNA
aaaattgacaacgttgtagt

SEQ ID NO: 59464 - DNA, 20 bp, synthetic construct
  source 1..20: mol_type = other DNA
gaaaattgacaacgttgtag

SEQ ID NO: 59465 - DNA, 20 bp, synthetic construct
  source 1..20: mol_type = other DNA
ggaaaattgacaacgttgta

SEQ ID NO: 59466 - DNA, 20 bp, synthetic construct
  source 1..20: mol_type = other DNA
aggaaaattgacaacgttgt

SEQ ID NO: 59467 - DNA, 20 bp, synthetic construct
  source 1..20: mol_type = other DNA
gaggaaaattgacaacgttg

SEQ ID NO: 59468 - DNA, 20 bp, synthetic construct
  source 1..20: mol_type = other DNA
tgaggaaaattgacaacgtt

SEQ ID NO: 59469 - DNA, 20 bp, synthetic construct
  source 1..20: mol_type = other DNA
ttgaggaaaattgacaacgt

SEQ ID NO: 59470 - DNA, 20 bp, synthetic construct
  source 1..20: mol_type = other DNA
tttgaggaaaattgacaacg

SEQ ID NO: 59471 - DNA, 20 bp, synthetic construct
  source 1..20: mol_type = other DNA
atttgaggaaaattgacaac

SEQ ID NO: 59472 - DNA, 20 bp, synthetic construct
  source 1..20: mol_type = other DNA
tatttgaggaaaattgacaa

SEQ ID NO: 59473 - DNA, 20 bp, synthetic construct
  source 1..20: mol_type = other DNA
ttatttgaggaaaattgaca

SEQ ID NO: 59474 - DNA, 20 bp, synthetic construct
  source 1..20: mol_type = other DNA
tttatttgaggaaaattgac

SEQ ID NO: 59475 - DNA, 20 bp, synthetic construct
  source 1..20: mol_type = other DNA
atttatttgaggaaaattga

SEQ ID NO: 59476 - DNA, 20 bp, synthetic construct
  source 1..20: mol_type = other DNA
gatttatttgaggaaaattg

SEQ ID NO: 59477 - DNA, 20 bp, synthetic construct
  source 1..20: mol_type = other DNA
agatttatttgaggaaaatt

SEQ ID NO: 59478 - DNA, 20 bp, synthetic construct
  source 1..20: mol_type = other DNA
gagatttatttgaggaaaat

SEQ ID NO: 59479 - DNA, 20 bp, synthetic construct
  source 1..20: mol_type = other DNA
agagatttatttgaggaaaa

SEQ ID NO: 59480 - DNA, 20 bp, synthetic construct
  source 1..20: mol_type = other DNA
tagagatttatttgaggaaa

SEQ ID NO: 59481 - DNA, 20 bp, synthetic construct
  source 1..20: mol_type = other DNA
ttagagatttatttgaggaa

SEQ ID NO: 59482 - DNA, 20 bp, synthetic construct
  source 1..20: mol_type = other DNA
tttagagatttatttgagga

SEQ ID NO: 59483 - DNA, 20 bp, synthetic construct
  source 1..20: mol_type = other DNA
ctttagagatttatttgagg

SEQ ID NO: 59484 - DNA, 20 bp, synthetic construct
  source 1..20: mol_type = other DNA
tctttagagatttatttgag

SEQ ID NO: 59485 - DNA, 20 bp, synthetic construct
  source 1..20: mol_type = other DNA
atctttagagatttatttga

SEQ ID NO: 59486 - DNA, 20 bp, synthetic construct
  source 1..20: mol_type = other DNA
tatctttagagatttatttg

SEQ ID NO: 59487 - DNA, 20 bp, synthetic construct
  source 1..20: mol_type = other DNA
ttatctttagagatttattt

SEQ ID NO: 59488 - DNA, 20 bp, synthetic construct
  source 1..20: mol_type = other DNA
attatctttagagatttatt

SEQ ID NO: 59489 - DNA, 20 bp, synthetic construct
  source 1..20: mol_type = other DNA
tattatctttagagatttat

SEQ ID NO: 59490 - DNA, 20 bp, synthetic construct
  source 1..20: mol_type = other DNA
atattatctttagagattta

SEQ ID NO: 59491 - DNA, 20 bp, synthetic construct
  source 1..20: mol_type = other DNA
tatattatctttagagattt

SEQ ID NO: 59492 - DNA, 20 bp, synthetic construct
  source 1..20: mol_type = other DNA
atatattatctttagagatt

SEQ ID NO: 59493 - DNA, 20 bp, synthetic construct
  source 1..20: mol_type = other DNA
aatatattatctttagagat

SEQ ID NO: 59494 - DNA, 20 bp, synthetic construct
  source 1..20: mol_type = other DNA
gaatatattatctttagaga

SEQ ID NO: 59495 - DNA, 20 bp, synthetic construct
  source 1..20: mol_type = other DNA
tgaatatattatctttagag

SEQ ID NO: 59496 - DNA, 20 bp, synthetic construct
  source 1..20: mol_type = other DNA
ctgaatatattatctttaga

SEQ ID NO: 59497 - DNA, 20 bp, synthetic construct
  source 1..20: mol_type = other DNA
actgaatatattatctttag

SEQ ID NO: 59498 - DNA, 20 bp, synthetic construct
  source 1..20: mol_type = other DNA
aactgaatatattatcttta

SEQ ID NO: 59499 - DNA, 20 bp, synthetic construct
  source 1..20: mol_type = other DNA
aaactgaatatattatcttt

SEQ ID NO: 59500 - DNA, 20 bp, synthetic construct
  source 1..20: mol_type = other DNA
aaaactgaatatattatctt

SEQ ID NO: 59501 - DNA, 20 bp, synthetic construct
  source 1..20: mol_type = other DNA
caaaactgaatatattatct

SEQ ID NO: 59502 - DNA, 20 bp, synthetic construct
  source 1..20: mol_type = other DNA
ccaaaactgaatatattatc

SEQ ID NO: 59503 - DNA, 20 bp, synthetic construct
  source 1..20: mol_type = other DNA
gccaaaactgaatatattat

SEQ ID NO: 59504 - DNA, 20 bp, synthetic construct
  source 1..20: mol_type = other DNA
ggccaaaactgaatatatta

SEQ ID NO: 59505 - DNA, 20 bp, synthetic construct
  source 1..20: mol_type = other DNA
cggccaaaactgaatatatt

SEQ ID NO: 59506 - DNA, 20 bp, synthetic construct
  source 1..20: mol_type = other DNA
ccggccaaaactgaatatat

SEQ ID NO: 59507 - DNA, 20 bp, synthetic construct
  source 1..20: mol_type = other DNA
cccggccaaaactgaatata

SEQ ID NO: 59508 - DNA, 20 bp, synthetic construct
  source 1..20: mol_type = other DNA
gcccggccaaaactgaatat

SEQ ID NO: 59509 - DNA, 20 bp, synthetic construct
  source 1..20: mol_type = other DNA
tgcccggccaaaactgaata

SEQ ID NO: 59510 - DNA, 20 bp, synthetic construct
  source 1..20: mol_type = other DNA
gtgcccggccaaaactgaat

SEQ ID NO: 59511 - DNA, 20 bp, synthetic construct
  source 1..20: mol_type = other DNA
cgtgcccggccaaaactgaa

SEQ ID NO: 59512 - DNA, 20 bp, synthetic construct
  source 1..20: mol_type = other DNA
acgtgcccggccaaaactga

SEQ ID NO: 59513 - DNA, 20 bp, synthetic construct
  source 1..20: mol_type = other DNA
aacgtgcccggccaaaactg

SEQ ID NO: 59514 - DNA, 20 bp, synthetic construct
  source 1..20: mol_type = other DNA
caacgtgcccggccaaaact

SEQ ID NO: 59515 - DNA, 20 bp, synthetic construct
  source 1..20: mol_type = other DNA
ccaacgtgcccggccaaaac

SEQ ID NO: 59516 - DNA, 20 bp, synthetic construct
  source 1..20: mol_type = other DNA
gccaacgtgcccggccaaaa

SEQ ID NO: 59517 - DNA, 20 bp, synthetic construct
  source 1..20: mol_type = other DNA
agccaacgtgcccggccaaa

SEQ ID NO: 59518 - DNA, 20 bp, synthetic construct
  source 1..20: mol_type = other DNA
gagccaacgtgcccggccaa

SEQ ID NO: 59519 - DNA, 20 bp, synthetic construct
  source 1..20: mol_type = other DNA
tgagccaacgtgcccggcca

SEQ ID NO: 59520 - DNA, 20 bp, synthetic construct
  source 1..20: mol_type = other DNA
gtgagccaacgtgcccggcc

SEQ ID NO: 59521 - DNA, 20 bp, synthetic construct
  source 1..20: mol_type = other DNA
cgtgagccaacgtgcccggc

SEQ ID NO: 59522 - DNA, 20 bp, synthetic construct
  source 1..20: mol_type = other DNA
gcgtgagccaacgtgcccgg

SEQ ID NO: 59523 - DNA, 20 bp, synthetic construct
  source 1..20: mol_type = other DNA
ggcgtgagccaacgtgcccg

SEQ ID NO: 59524 - DNA, 20 bp, synthetic construct
  source 1..20: mol_type = other DNA
aggcgtgagccaacgtgccc

SEQ ID NO: 59525 - DNA, 20 bp, synthetic construct
  source 1..20: mol_type = other DNA
caggcgtgagccaacgtgcc

SEQ ID NO: 59526 - DNA, 20 bp, synthetic construct
  source 1..20: mol_type = other DNA
acaggcgtgagccaacgtgc

SEQ ID NO: 59527 - DNA, 20 bp, synthetic construct
  source 1..20: mol_type = other DNA
tacaggcgtgagccaacgtg

SEQ ID NO: 59528 - DNA, 20 bp, synthetic construct
  source 1..20: mol_type = other DNA
ttacaggcgtgagccaacgt

SEQ ID NO: 59529 - DNA, 20 bp, synthetic construct
  source 1..20: mol_type = other DNA
attacaggcgtgagccaacg

SEQ ID NO: 59530 - DNA, 20 bp, synthetic construct
  source 1..20: mol_type = other DNA
gattacaggcgtgagccaac

SEQ ID NO: 59531 - DNA, 20 bp, synthetic construct
  source 1..20: mol_type = other DNA
ggattacaggcgtgagccaa

SEQ ID NO: 59532 - DNA, 20 bp, synthetic construct
  source 1..20: mol_type = other DNA
gggattacaggcgtgagcca

SEQ ID NO: 59533 - DNA, 20 bp, synthetic construct
  source 1..20: mol_type = other DNA
tgggattacaggcgtgagcc

SEQ ID NO: 59534 - DNA, 20 bp, synthetic construct
  source 1..20: mol_type = other DNA
ctgggattacaggcgtgagc

SEQ ID NO: 59535 - DNA, 20 bp, synthetic construct
  source 1..20: mol_type = other DNA
gctgggattacaggcgtgag

SEQ ID NO: 59536 - DNA, 20 bp, synthetic construct
  source 1..20: mol_type = other DNA
tgctgggattacaggcgtga

SEQ ID NO: 59537 - DNA, 20 bp, synthetic construct
  source 1..20: mol_type = other DNA
gtgctgggattacaggcgtg

SEQ ID NO: 59538 - DNA, 20 bp, synthetic construct
  source 1..20: mol_type = other DNA
agtgctgggattacaggcgt

SEQ ID NO: 59539 - DNA, 20 bp, synthetic construct
  source 1..20: mol_type = other DNA
aagtgctgggattacaggcg

SEQ ID NO: 59540 - DNA, 20 bp, synthetic construct
  source 1..20: mol_type = other DNA
aaagtgctgggattacaggc

SEQ ID NO: 59541 - DNA, 20 bp, synthetic construct
  source 1..20: mol_type = other DNA
caaagtgctgggattacagg

SEQ ID NO: 59542 - DNA, 20 bp, synthetic construct
  source 1..20: mol_type = other DNA
ccaaagtgctgggattacag

SEQ ID NO: 59543 - DNA, 20 bp, synthetic construct
  source 1..20: mol_type = other DNA
tccaaagtgctgggattaca

SEQ ID NO: 59544 - DNA, 20 bp, synthetic construct
  source 1..20: mol_type = other DNA
ttccaaagtgctgggattac

SEQ ID NO: 59545 - DNA, 20 bp, synthetic construct
  source 1..20: mol_type = other DNA
cttccaaagtgctgggatta

SEQ ID NO: 59546 - DNA, 20 bp, synthetic construct
  source 1..20: mol_type = other DNA
ccttccaaagtgctgggatt

SEQ ID NO: 59547 - DNA, 20 bp, synthetic construct
  source 1..20: mol_type = other DNA
gccttccaaagtgctgggat

SEQ ID NO: 59548 - DNA, 20 bp, synthetic construct
  source 1..20: mol_type = other DNA
agccttccaaagtgctggga

SEQ ID NO: 59549 - DNA, 20 bp, synthetic construct
  source 1..20: mol_type = other DNA
cagccttccaaagtgctggg

SEQ ID NO: 59550 - DNA, 20 bp, synthetic construct
  source 1..20: mol_type = other DNA
tcagccttccaaagtgctgg

SEQ ID NO: 59551 - DNA, 20 bp, synthetic construct
  source 1..20: mol_type = other DNA
ctcagccttccaaagtgctg

SEQ ID NO: 59552 - DNA, 20 bp, synthetic construct
  source 1..20: mol_type = other DNA
cctcagccttccaaagtgct

SEQ ID NO: 59553 - DNA, 20 bp, synthetic construct
  source 1..20: mol_type = other DNA
acctcagccttccaaagtgc

SEQ ID NO: 59554 - DNA, 20 bp, synthetic construct
  source 1..20: mol_type = other DNA
cacctcagccttccaaagtg

SEQ ID NO: 59555 - DNA, 20 bp, synthetic construct
  source 1..20: mol_type = other DNA
ccacctcagccttccaaagt

SEQ ID NO: 59556 - DNA, 20 bp, synthetic construct
  source 1..20: mol_type = other DNA
cccacctcagccttccaaag

SEQ ID NO: 59557 - DNA, 20 bp, synthetic construct
  source 1..20: mol_type = other DNA
gcccacctcagccttccaaa

SEQ ID NO: 59558 - DNA, 20 bp, synthetic construct
  source 1..20: mol_type = other DNA
ggcccacctcagccttccaa

SEQ ID NO: 59559 - DNA, 20 bp, synthetic construct
  source 1..20: mol_type = other DNA
cggcccacctcagccttcca

SEQ ID NO: 59560 - DNA, 20 bp, synthetic construct
  source 1..20: mol_type = other DNA
tcggcccacctcagccttcc

SEQ ID NO: 59561 - DNA, 20 bp, synthetic construct
  source 1..20: mol_type = other DNA
atcggcccacctcagccttc

SEQ ID NO: 59562 - DNA, 20 bp, synthetic construct
  source 1..20: mol_type = other DNA
gatcggcccacctcagcctt

SEQ ID NO: 59563 - DNA, 20 bp, synthetic construct
  source 1..20: mol_type = other DNA
tgatcggcccacctcagcct

SEQ ID NO: 59564 - DNA, 20 bp, synthetic construct
  source 1..20: mol_type = other DNA
gtgatcggcccacctcagcc

SEQ ID NO: 59565 - DNA, 20 bp, synthetic construct
  source 1..20: mol_type = other DNA
agtgatcggcccacctcagc

SEQ ID NO: 59566 - DNA, 20 bp, synthetic construct
  source 1..20: mol_type = other DNA
aagtgatcggcccacctcag

SEQ ID NO: 59567 - DNA, 20 bp, synthetic construct
  source 1..20: mol_type = other DNA
caagtgatcggcccacctca

SEQ ID NO: 59568 - DNA, 20 bp, synthetic construct
  source 1..20: mol_type = other DNA
tcaagtgatcggcccacctc

SEQ ID NO: 59569 - DNA, 20 bp, synthetic construct
  source 1..20: mol_type = other DNA
ctcaagtgatcggcccacct

SEQ ID NO: 59570 - DNA, 20 bp, synthetic construct
  source 1..20: mol_type = other DNA
cctcaagtgatcggcccacc

SEQ ID NO: 59571 - DNA, 20 bp, synthetic construct
  source 1..20: mol_type = other DNA
tcctcaagtgatcggcccac

SEQ ID NO: 59572 - DNA, 20 bp, synthetic construct
  source 1..20: mol_type = other DNA
gtcctcaagtgatcggccca

SEQ ID NO: 59573 - DNA, 20 bp, synthetic construct
  source 1..20: mol_type = other DNA
cgtcctcaagtgatcggccc

SEQ ID NO: 59574 - DNA, 20 bp, synthetic construct
  source 1..20: mol_type = other DNA
ccgtcctcaagtgatcggcc

SEQ ID NO: 59575 - DNA, 20 bp, synthetic construct
  source 1..20: mol_type = other DNA
cccgtcctcaagtgatcggc

SEQ ID NO: 59576 - DNA, 20 bp, synthetic construct
  source 1..20: mol_type = other DNA
tcccgtcctcaagtgatcgg

SEQ ID NO: 59577 - DNA, 20 bp, synthetic construct
  source 1..20: mol_type = other DNA
ctcccgtcctcaagtgatcg

SEQ ID NO: 59578 - DNA, 20 bp, synthetic construct
  source 1..20: mol_type = other DNA
actcccgtcctcaagtgatc

SEQ ID NO: 59579 - DNA, 20 bp, synthetic construct
  source 1..20: mol_type = other DNA
aactcccgtcctcaagtgat

SEQ ID NO: 59580 - DNA, 20 bp, synthetic construct
  source 1..20: mol_type = other DNA
aaactcccgtcctcaagtga

SEQ ID NO: 59581 - DNA, 20 bp, synthetic construct
  source 1..20: mol_type = other DNA
caaactcccgtcctcaagtg

SEQ ID NO: 59582 - DNA, 20 bp, synthetic construct
  source 1..20: mol_type = other DNA
tcaaactcccgtcctcaagt

SEQ ID NO: 59583 - DNA, 20 bp, synthetic construct
  source 1..20: mol_type = other DNA
ctcaaactcccgtcctcaag

SEQ ID NO: 59584 - DNA, 20 bp, synthetic construct
  source 1..20: mol_type = other DNA
tctcaaactcccgtcctcaa

SEQ ID NO: 59585 - DNA, 20 bp, synthetic construct
  source 1..20: mol_type = other DNA
gtctcaaactcccgtcctca

SEQ ID NO: 59586 - DNA, 20 bp, synthetic construct
  source 1..20: mol_type = other DNA
ggtctcaaactcccgtcctc

SEQ ID NO: 59587 - DNA, 20 bp, synthetic construct
  source 1..20: mol_type = other DNA
tggtctcaaactcccgtcct

SEQ ID NO: 59588 - DNA, 20 bp, synthetic construct
  source 1..20: mol_type = other DNA
ctggtctcaaactcccgtcc

SEQ ID NO: 59589 - DNA, 20 bp, synthetic construct
  source 1..20: mol_type = other DNA
gctggtctcaaactcccgtc

SEQ ID NO: 59590 - DNA, 20 bp, synthetic construct
  source 1..20: mol_type = other DNA
ggctggtctcaaactcccgt

SEQ ID NO: 59591 - DNA, 20 bp, synthetic construct
  source 1..20: mol_type = other DNA
aggctggtctcaaactcccg

SEQ ID NO: 59592 - DNA, 20 bp, synthetic construct
  source 1..20: mol_type = other DNA
caggctggtctcaaactccc

SEQ ID NO: 59593 - DNA, 20 bp, synthetic construct
  source 1..20: mol_type = other DNA
ccaggctggtctcaaactcc

SEQ ID NO: 59594 - DNA, 20 bp, synthetic construct
  source 1..20: mol_type = other DNA
gccaggctggtctcaaactc

SEQ ID NO: 59595 - DNA, 20 bp, synthetic construct
  source 1..20: mol_type = other DNA
ggccaggctggtctcaaact

SEQ ID NO: 59596 - DNA, 20 bp, synthetic construct
  source 1..20: mol_type = other DNA
tggccaggctggtctcaaac

SEQ ID NO: 59597 - DNA, 20 bp, synthetic construct
  source 1..20: mol_type = other DNA
ttggccaggctggtctcaaa

SEQ ID NO: 59598 - DNA, 20 bp, synthetic construct
  source 1..20: mol_type = other DNA
gttggccaggctggtctcaa

SEQ ID NO: 59599 - DNA, 20 bp, synthetic construct
  source 1..20: mol_type = other DNA
tgttggccaggctggtctca

SEQ ID NO: 59600 - DNA, 20 bp, synthetic construct
  source 1..20: mol_type = other DNA
atgttggccaggctggtctc

SEQ ID NO: 59601 - DNA, 20 bp, synthetic construct
  source 1..20: mol_type = other DNA
catgttggccaggctggtct

SEQ ID NO: 59602 - DNA, 20 bp, synthetic construct
  source 1..20: mol_type = other DNA
ccatgttggccaggctggtc

SEQ ID NO: 59603 - DNA, 20 bp, synthetic construct
  source 1..20: mol_type = other DNA
accatgttggccaggctggt

SEQ ID NO: 59604 - DNA, 20 bp, synthetic construct
  source 1..20: mol_type = other DNA
caccatgttggccaggctgg

SEQ ID NO: 59605 - DNA, 20 bp, synthetic construct
  source 1..20: mol_type = other DNA
tcaccatgttggccaggctg

SEQ ID NO: 59606 - DNA, 20 bp, synthetic construct
  source 1..20: mol_type = other DNA
ttcaccatgttggccaggct

SEQ ID NO: 59607 - DNA, 20 bp, synthetic construct
  source 1..20: mol_type = other DNA
tttcaccatgttggccaggc

SEQ ID NO: 59608 - DNA, 20 bp, synthetic construct
  source 1..20: mol_type = other DNA
gtttcaccatgttggccagg

SEQ ID NO: 59609 - DNA, 20 bp, synthetic construct
  source 1..20: mol_type = other DNA
ggtttcaccatgttggccag

SEQ ID NO: 59610 - DNA, 20 bp, synthetic construct
  source 1..20: mol_type = other DNA
gggtttcaccatgttggcca

SEQ ID NO: 59611 - DNA, 20 bp, synthetic construct
  source 1..20: mol_type = other DNA
agggtttcaccatgttggcc

SEQ ID NO: 59612 - DNA, 20 bp, synthetic construct
  source 1..20: mol_type = other DNA
cagggtttcaccatgttggc

SEQ ID NO: 59613 - DNA, 20 bp, synthetic construct
  source 1..20: mol_type = other DNA
acagggtttcaccatgttgg

SEQ ID NO: 59614 - DNA, 20 bp, synthetic construct
  source 1..20: mol_type = other DNA
gacagggtttcaccatgttg

SEQ ID NO: 59615 - DNA, 20 bp, synthetic construct
  source 1..20: mol_type = other DNA
agacagggtttcaccatgtt

SEQ ID NO: 59616 - DNA, 20 bp, synthetic construct
  source 1..20: mol_type = other DNA
gagacagggtttcaccatgt

SEQ ID NO: 59617 - DNA, 20 bp, synthetic construct
  source 1..20: mol_type = other DNA
agagacagggtttcaccatg

SEQ ID NO: 59618 - DNA, 20 bp, synthetic construct
  source 1..20: mol_type = other DNA
tagagacagggtttcaccat

SEQ ID NO: 59619 - DNA, 20 bp, synthetic construct
  source 1..20: mol_type = other DNA
gtagagacagggtttcacca

SEQ ID NO: 59620 - DNA, 20 bp, synthetic construct
  source 1..20: mol_type = other DNA
agtagagacagggtttcacc

SEQ ID NO: 59621 - DNA, 20 bp, synthetic construct
  source 1..20: mol_type = other DNA
tagtagagacagggtttcac

SEQ ID NO: 59622 - DNA, 20 bp, synthetic construct
  source 1..20: mol_type = other DNA
ttagtagagacagggtttca

SEQ ID NO: 59623 - DNA, 20 bp, synthetic construct
  source 1..20: mol_type = other DNA
tttagtagagacagggtttc

SEQ ID NO: 59624 - DNA, 20 bp, synthetic construct
  source 1..20: mol_type = other DNA
ttttagtagagacagggttt

SEQ ID NO: 59625 - DNA, 20 bp, synthetic construct
  source 1..20: mol_type = other DNA
tttttagtagagacagggtt

SEQ ID NO: 59626 - DNA, 20 bp, synthetic construct
  source 1..20: mol_type = other DNA
atttttagtagagacagggt

SEQ ID NO: 59627 - DNA, 20 bp, synthetic construct
  source 1..20: mol_type = other DNA
tatttttagtagagacaggg

SEQ ID NO: 59628 - DNA, 20 bp, synthetic construct
  source 1..20: mol_type = other DNA
gtatttttagtagagacagg

SEQ ID NO: 59629 - DNA, 20 bp, synthetic construct
  source 1..20: mol_type = other DNA
tgtatttttagtagagacag

SEQ ID NO: 59630 - DNA, 20 bp, synthetic construct
  source 1..20: mol_type = other DNA
ttgtatttttagtagagaca

SEQ ID NO: 59631 - DNA, 20 bp, synthetic construct
  source 1..20: mol_type = other DNA
tttgtatttttagtagagac

SEQ ID NO: 59632 - DNA, 20 bp, synthetic construct
  source 1..20: mol_type = other DNA
ttttgtatttttagtagaga

SEQ ID NO: 59633 - DNA, 20 bp, synthetic construct
  source 1..20: mol_type = other DNA
tttttgtatttttagtagag

SEQ ID NO: 59634 - DNA, 20 bp, synthetic construct
  source 1..20: mol_type = other DNA
atttttgtatttttagtaga

SEQ ID NO: 59635 - DNA, 20 bp, synthetic construct
  source 1..20: mol_type = other DNA
gatttttgtatttttagtag

SEQ ID NO: 59636 - DNA, 20 bp, synthetic construct
  source 1..20: mol_type = other DNA
tgatttttgtatttttagta

SEQ ID NO: 59637 - DNA, 20 bp, synthetic construct
  source 1..20: mol_type = other DNA
atgatttttgtatttttagt

SEQ ID NO: 59638 - DNA, 20 bp, synthetic construct
  source 1..20: mol_type = other DNA
gatgatttttgtatttttag

SEQ ID NO: 59639 - DNA, 20 bp, synthetic construct
  source 1..20: mol_type = other DNA
agatgatttttgtattttta

SEQ ID NO: 59640 - DNA, 20 bp, synthetic construct
  source 1..20: mol_type = other DNA
cagatgatttttgtattttt

SEQ ID NO: 59641 - DNA, 20 bp, synthetic construct
  source 1..20: mol_type = other DNA
ccagatgatttttgtatttt

SEQ ID NO: 59642 - DNA, 20 bp, synthetic construct
  source 1..20: mol_type = other DNA
tccagatgatttttgtattt

SEQ ID NO: 59643 - DNA, 20 bp, synthetic construct
  source 1..20: mol_type = other DNA
gtccagatgatttttgtatt

SEQ ID NO: 59644 - DNA, 20 bp, synthetic construct
  source 1..20: mol_type = other DNA
tgtccagatgatttttgtat

SEQ ID NO: 59645 - DNA, 20 bp, synthetic construct
  source 1..20: mol_type = other DNA
atgtccagatgatttttgta

SEQ ID NO: 59646 - DNA, 20 bp, synthetic construct
  source 1..20: mol_type = other DNA
catgtccagatgatttttgt

SEQ ID NO: 59647 - DNA, 20 bp, synthetic construct
  source 1..20: mol_type = other DNA
ccatgtccagatgatttttg

SEQ ID NO: 59648 - DNA, 20 bp, synthetic construct
  source 1..20: mol_type = other DNA
accatgtccagatgattttt

SEQ ID NO: 59649 - DNA, 20 bp, synthetic construct
  source 1..20: mol_type = other DNA
caccatgtccagatgatttt

SEQ ID NO: 59650 - DNA, 20 bp, synthetic construct
  source 1..20: mol_type = other DNA
ccaccatgtccagatgattt

SEQ ID NO: 59651 - DNA, 20 bp, synthetic construct
  source 1..20: mol_type = other DNA
gccaccatgtccagatgatt

SEQ ID NO: 59652 - DNA, 20 bp, synthetic construct
  source 1..20: mol_type = other DNA
tgccaccatgtccagatgat

SEQ ID NO: 59653 - DNA, 20 bp, synthetic construct
  source 1..20: mol_type = other DNA
ctgccaccatgtccagatga

SEQ ID NO: 59654 - DNA, 20 bp, synthetic construct
  source 1..20: mol_type = other DNA
cctgccaccatgtccagatg

SEQ ID NO: 59655 - DNA, 20 bp, synthetic construct
  source 1..20: mol_type = other DNA
acctgccaccatgtccagat

SEQ ID NO: 59656 - DNA, 20 bp, synthetic construct
  source 1..20: mol_type = other DNA
tacctgccaccatgtccaga

SEQ ID NO: 59657 - DNA, 20 bp, synthetic construct
  source 1..20: mol_type = other DNA
gtacctgccaccatgtccag

SEQ ID NO: 59658 - DNA, 20 bp, synthetic construct
  source 1..20: mol_type = other DNA
ggtacctgccaccatgtcca

SEQ ID NO: 59659 - DNA, 20 bp, synthetic construct
  source 1..20: mol_type = other DNA
tggtacctgccaccatgtcc

SEQ ID NO: 59660 - DNA, 20 bp, synthetic construct
  source 1..20: mol_type = other DNA
ctggtacctgccaccatgtc

SEQ ID NO: 59661 - DNA, 20 bp, synthetic construct
  source 1..20: mol_type = other DNA
gctggtacctgccaccatgt

SEQ ID NO: 59662 - DNA, 20 bp, synthetic construct
  source 1..20: mol_type = other DNA
agctggtacctgccaccatg

SEQ ID NO: 59663 - DNA, 20 bp, synthetic construct
  source 1..20: mol_type = other DNA
tagctggtacctgccaccat

SEQ ID NO: 59664 - DNA, 20 bp, synthetic construct
  source 1..20: mol_type = other DNA
gtagctggtacctgccacca

SEQ ID NO: 59665 - DNA, 20 bp, synthetic construct
  source 1..20: mol_type = other DNA
agtagctggtacctgccacc

SEQ ID NO: 59666 - DNA, 20 bp, synthetic construct
  source 1..20: mol_type = other DNA
aagtagctggtacctgccac

SEQ ID NO: 59667 - DNA, 20 bp, synthetic construct
  source 1..20: mol_type = other DNA
caagtagctggtacctgcca

SEQ ID NO: 59668 - DNA, 20 bp, synthetic construct
  source 1..20: mol_type = other DNA
ccaagtagctggtacctgcc

SEQ ID NO: 59669 - DNA, 20 bp, synthetic construct
  source 1..20: mol_type = other DNA
cccaagtagctggtacctgc

SEQ ID NO: 59670 - DNA, 20 bp, synthetic construct
  source 1..20: mol_type = other DNA
tcccaagtagctggtacctg

SEQ ID NO: 59671 - DNA, 20 bp, synthetic construct
  source 1..20: mol_type = other DNA
ttcccaagtagctggtacct

SEQ ID NO: 59672 - DNA, 20 bp, synthetic construct
  source 1..20: mol_type = other DNA
cttcccaagtagctggtacc

SEQ ID NO: 59673 - DNA, 20 bp, synthetic construct
  source 1..20: mol_type = other DNA
gcttcccaagtagctggtac

SEQ ID NO: 59674 - DNA, 20 bp, synthetic construct
  source 1..20: mol_type = other DNA
agcttcccaagtagctggta

SEQ ID NO: 59675 - DNA, 20 bp, synthetic construct
  source 1..20: mol_type = other DNA
cagcttcccaagtagctggt

SEQ ID NO: 59676 - DNA, 20 bp, synthetic construct
  source 1..20: mol_type = other DNA
tcagcttcccaagtagctgg

SEQ ID NO: 59677 - DNA, 20 bp, synthetic construct
  source 1..20: mol_type = other DNA
ctcagcttcccaagtagctg

SEQ ID NO: 59678 - DNA, 20 bp, synthetic construct
  source 1..20: mol_type = other DNA
cctcagcttcccaagtagct

SEQ ID NO: 59679 - DNA, 20 bp, synthetic construct
  source 1..20: mol_type = other DNA
gcctcagcttcccaagtagc

SEQ ID NO: 59680 - DNA, 20 bp, synthetic construct
  source 1..20: mol_type = other DNA
tgcctcagcttcccaagtag

SEQ ID NO: 59681 - DNA, 20 bp, synthetic construct
  source 1..20: mol_type = other DNA
ctgcctcagcttcccaagta

SEQ ID NO: 59682 - DNA, 20 bp, synthetic construct
  source 1..20: mol_type = other DNA
cctgcctcagcttcccaagt

SEQ ID NO: 59683 - DNA, 20 bp, synthetic construct
  source 1..20: mol_type = other DNA
tcctgcctcagcttcccaag

SEQ ID NO: 59684 - DNA, 20 bp, synthetic construct
  source 1..20: mol_type = other DNA
ctcctgcctcagcttcccaa

SEQ ID NO: 59685 - DNA, 20 bp, synthetic construct
  source 1..20: mol_type = other DNA
tctcctgcctcagcttccca

SEQ ID NO: 59686 - DNA, 20 bp, synthetic construct
  source 1..20: mol_type = other DNA
ttctcctgcctcagcttccc

SEQ ID NO: 59687 - DNA, 20 bp, synthetic construct
  source 1..20: mol_type = other DNA
attctcctgcctcagcttcc

SEQ ID NO: 59688 - DNA, 20 bp, synthetic construct
  source 1..20: mol_type = other DNA
aattctcctgcctcagcttc

SEQ ID NO: 59689 - DNA, 20 bp, synthetic construct
  source 1..20: mol_type = other DNA
taattctcctgcctcagctt

SEQ ID NO: 59690 - DNA, 20 bp, synthetic construct
  source 1..20: mol_type = other DNA
gtaattctcctgcctcagct

SEQ ID NO: 59691 - DNA, 20 bp, synthetic construct
  source 1..20: mol_type = other DNA
agtaattctcctgcctcagc

SEQ ID NO: 59692 - DNA, 20 bp, synthetic construct
  source 1..20: mol_type = other DNA
gagtaattctcctgcctcag

SEQ ID NO: 59693 - DNA, 20 bp, synthetic construct
  source 1..20: mol_type = other DNA
cgagtaattctcctgcctca

SEQ ID NO: 59694 - DNA, 20 bp, synthetic construct
  source 1..20: mol_type = other DNA
tcgagtaattctcctgcctc

SEQ ID NO: 59695 - DNA, 20 bp, synthetic construct
  source 1..20: mol_type = other DNA
ttcgagtaattctcctgcct

SEQ ID NO: 59696 - DNA, 20 bp, synthetic construct
  source 1..20: mol_type = other DNA
gttcgagtaattctcctgcc

SEQ ID NO: 59697 - DNA, 20 bp, synthetic construct
  source 1..20: mol_type = other DNA
ggttcgagtaattctcctgc

SEQ ID NO: 59698 - DNA, 20 bp, synthetic construct
  source 1..20: mol_type = other DNA
gggttcgagtaattctcctg

SEQ ID NO: 59699 - DNA, 20 bp, synthetic construct
  source 1..20: mol_type = other DNA
ggggttcgagtaattctcct

SEQ ID NO: 59700 - DNA, 20 bp, synthetic construct
  source 1..20: mol_type = other DNA
cggggttcgagtaattctcc

SEQ ID NO: 59701 - DNA, 20 bp, synthetic construct
  source 1..20: mol_type = other DNA
acggggttcgagtaattctc

SEQ ID NO: 59702 - DNA, 20 bp, synthetic construct
  source 1..20: mol_type = other DNA
tacggggttcgagtaattct

SEQ ID NO: 59703 - DNA, 20 bp, synthetic construct
  source 1..20: mol_type = other DNA
ctacggggttcgagtaattc

SEQ ID NO: 59704 - DNA, 20 bp, synthetic construct
  source 1..20: mol_type = other DNA
cctacggggttcgagtaatt

SEQ ID NO: 59705 - DNA, 20 bp, synthetic construct
  source 1..20: mol_type = other DNA
acctacggggttcgagtaat

SEQ ID NO: 59706 - DNA, 20 bp, synthetic construct
  source 1..20: mol_type = other DNA
cacctacggggttcgagtaa

SEQ ID NO: 59707 - DNA, 20 bp, synthetic construct
  source 1..20: mol_type = other DNA
ccacctacggggttcgagta

SEQ ID NO: 59708 - DNA, 20 bp, synthetic construct
  source 1..20: mol_type = other DNA
tccacctacggggttcgagt

SEQ ID NO: 59709 - DNA, 20 bp, synthetic construct
  source 1..20: mol_type = other DNA
ctccacctacggggttcgag

SEQ ID NO: 59710 - DNA, 20 bp, synthetic construct
  source 1..20: mol_type = other DNA
cctccacctacggggttcga

SEQ ID NO: 59711 - DNA, 20 bp, synthetic construct
  source 1..20: mol_type = other DNA
acctccacctacggggttcg

SEQ ID NO: 59712 - DNA, 20 bp, synthetic construct
  source 1..20: mol_type = other DNA
aacctccacctacggggttc

SEQ ID NO: 59713 - DNA, 20 bp, synthetic construct
  source 1..20: mol_type = other DNA
caacctccacctacggggtt

SEQ ID NO: 59714 - DNA, 20 bp, synthetic construct
  source 1..20: mol_type = other DNA
gcaacctccacctacggggt

SEQ ID NO: 59715 - DNA, 20 bp, synthetic construct
  source 1..20: mol_type = other DNA
tgcaacctccacctacgggg

SEQ ID NO: 59716 - DNA, 20 bp, synthetic construct
  source 1..20: mol_type = other DNA
ctgcaacctccacctacggg

SEQ ID NO: 59717 - DNA, 20 bp, synthetic construct
  source 1..20: mol_type = other DNA
actgcaacctccacctacgg

SEQ ID NO: 59718 - DNA, 20 bp, synthetic construct
  source 1..20: mol_type = other DNA
cactgcaacctccacctacg

SEQ ID NO: 59719 - DNA, 20 bp, synthetic construct
  source 1..20: mol_type = other DNA
tcactgcaacctccacctac

SEQ ID NO: 59720 - DNA, 20 bp, synthetic construct
  source 1..20: mol_type = other DNA
ctcactgcaacctccaccta

SEQ ID NO: 59721 - DNA, 20 bp, synthetic construct
  source 1..20: mol_type = other DNA
gctcactgcaacctccacct

SEQ ID NO: 59722 - DNA, 20 bp, synthetic construct
  source 1..20: mol_type = other DNA
agctcactgcaacctccacc

SEQ ID NO: 59723 - DNA, 20 bp, synthetic construct
  source 1..20: mol_type = other DNA
cagctcactgcaacctccac

SEQ ID NO: 59724 - DNA, 20 bp, synthetic construct
  source 1..20: mol_type = other DNA
tcagctcactgcaacctcca

SEQ ID NO: 59725 - DNA, 20 bp, synthetic construct
  source 1..20: mol_type = other DNA
ctcagctcactgcaacctcc

SEQ ID NO: 59726 - DNA, 20 bp, synthetic construct
  source 1..20: mol_type = other DNA
tctcagctcactgcaacctc

SEQ ID NO: 59727 - DNA, 20 bp, synthetic construct
  source 1..20: mol_type = other DNA
atctcagctcactgcaacct

SEQ ID NO: 59728 - DNA, 20 bp, synthetic construct
  source 1..20: mol_type = other DNA
aatctcagctcactgcaacc

SEQ ID NO: 59729 - DNA, 20 bp, synthetic construct
  source 1..20: mol_type = other DNA
caatctcagctcactgcaac

SEQ ID NO: 59730 - DNA, 20 bp, synthetic construct
  source 1..20: mol_type = other DNA
gcaatctcagctcactgcaa

SEQ ID NO: 59731 - DNA, 20 bp, synthetic construct
  source 1..20: mol_type = other DNA
tgcaatctcagctcactgca

SEQ ID NO: 59732 - DNA, 20 bp, synthetic construct
  source 1..20: mol_type = other DNA
gtgcaatctcagctcactgc

SEQ ID NO: 59733 - DNA, 20 bp, synthetic construct
  source 1..20: mol_type = other DNA
agtgcaatctcagctcactg

SEQ ID NO: 59734 - DNA, 20 bp, synthetic construct
  source 1..20: mol_type = other DNA
gagtgcaatctcagctcact

SEQ ID NO: 59735 - DNA, 20 bp, synthetic construct
  source 1..20: mol_type = other DNA
ggagtgcaatctcagctcac

SEQ ID NO: 59736 - DNA, 20 bp, synthetic construct
  source 1..20: mol_type = other DNA
tggagtgcaatctcagctca

SEQ ID NO: 59737 - DNA, 20 bp, synthetic construct
  source 1..20: mol_type = other DNA
ctggagtgcaatctcagctc

SEQ ID NO: 59738 - DNA, 20 bp, synthetic construct
  source 1..20: mol_type = other DNA
gctggagtgcaatctcagct

SEQ ID NO: 59739 - DNA, 20 bp, synthetic construct
  source 1..20: mol_type = other DNA
ggctggagtgcaatctcagc

SEQ ID NO: 59740 - DNA, 20 bp, synthetic construct
  source 1..20: mol_type = other DNA
cggctggagtgcaatctcag

SEQ ID NO: 59741 - DNA, 20 bp, synthetic construct
  source 1..20: mol_type = other DNA
ccggctggagtgcaatctca

SEQ ID NO: 59742 - DNA, 20 bp, synthetic construct
  source 1..20: mol_type = other DNA
cccggctggagtgcaatctc

SEQ ID NO: 59743 - DNA, 20 bp, synthetic construct
  source 1..20: mol_type = other DNA
acccggctggagtgcaatct

SEQ ID NO: 59744 - DNA, 20 bp, synthetic construct
  source 1..20: mol_type = other DNA
cacccggctggagtgcaatc

SEQ ID NO: 59745 - DNA, 20 bp, synthetic construct
  source 1..20: mol_type = other DNA
tcacccggctggagtgcaat

SEQ ID NO: 59746 - DNA, 20 bp, synthetic construct
  source 1..20: mol_type = other DNA
gtcacccggctggagtgcaa

SEQ ID NO: 59747 - DNA, 20 bp, synthetic construct
  source 1..20: mol_type = other DNA
agtcacccggctggagtgca

SEQ ID NO: 59748 - DNA, 20 bp, synthetic construct
  source 1..20: mol_type = other DNA
gagtcacccggctggagtgc

SEQ ID NO: 59749 - DNA, 20 bp, synthetic construct
  source 1..20: mol_type = other DNA
ggagtcacccggctggagtg

SEQ ID NO: 59750 - DNA, 20 bp, synthetic construct
  source 1..20: mol_type = other DNA
tggagtcacccggctggagt

SEQ ID NO: 59751 - DNA, 20 bp, synthetic construct
  source 1..20: mol_type = other DNA
atggagtcacccggctggag

SEQ ID NO: 59752 - DNA, 20 bp, synthetic construct
  source 1..20: mol_type = other DNA
gatggagtcacccggctgga

SEQ ID NO: 59753 - DNA, 20 bp, synthetic construct
  source 1..20: mol_type = other DNA
agatggagtcacccggctgg

SEQ ID NO: 59754 - DNA, 20 bp, synthetic construct
  source 1..20: mol_type = other DNA
gagatggagtcacccggctg

SEQ ID NO: 59755 - DNA, 20 bp, synthetic construct
  source 1..20: mol_type = other DNA
tgagatggagtcacccggct

SEQ ID NO: 59756 - DNA, 20 bp, synthetic construct
  source 1..20: mol_type = other DNA
ttgagatggagtcacccggc

SEQ ID NO: 59757 - DNA, 20 bp, synthetic construct
  source 1..20: mol_type = other DNA
tttgagatggagtcacccgg

SEQ ID NO: 59758 - DNA, 20 bp, synthetic construct
  source 1..20: mol_type = other DNA
ttttgagatggagtcacccg

SEQ ID NO: 59759 - DNA, 20 bp, synthetic construct
  source 1..20: mol_type = other DNA
tttttgagatggagtcaccc

SEQ ID NO: 59760 - DNA, 20 bp, synthetic construct
  source 1..20: mol_type = other DNA
ttttttgagatggagtcacc

SEQ ID NO: 59761 - DNA, 20 bp, synthetic construct
  source 1..20: mol_type = other DNA
tttttttgagatggagtcac

SEQ ID NO: 59762 - DNA, 20 bp, synthetic construct
  source 1..20: mol_type = other DNA
ttttttttgagatggagtca

SEQ ID NO: 59763 - DNA, 20 bp, synthetic construct
  source 1..20: mol_type = other DNA
tttttttttgagatggagtc

SEQ ID NO: 59764 - DNA, 20 bp, synthetic construct
  source 1..20: mol_type = other DNA
ttttttttttgagatggagt

SEQ ID NO: 59765 - DNA, 20 bp, synthetic construct
  source 1..20: mol_type = other DNA
tttttttttttgagatggag

SEQ ID NO: 59766 - DNA, 20 bp, synthetic construct
  source 1..20: mol_type = other DNA
ttttttttttttgagatgga

SEQ ID NO: 59767 - DNA, 20 bp, synthetic construct
  source 1..20: mol_type = other DNA
tttttttttttttgagatgg

SEQ ID NO: 59768 - DNA, 20 bp, synthetic construct
  source 1..20: mol_type = other DNA
atttttttttttttgagatg

SEQ ID NO: 59769 - DNA, 20 bp, synthetic construct
  source 1..20: mol_type = other DNA
aatttttttttttttgagat

SEQ ID NO: 59770 - DNA, 20 bp, synthetic construct
  source 1..20: mol_type = other DNA
aaatttttttttttttgaga

SEQ ID NO: 59771 - DNA, 20 bp, synthetic construct
  source 1..20: mol_type = other DNA
aaaatttttttttttttgag

SEQ ID NO: 59772 - DNA, 20 bp, synthetic construct
  source 1..20: mol_type = other DNA
aaaaatttttttttttttga

SEQ ID NO: 59773 - DNA, 20 bp, synthetic construct
  source 1..20: mol_type = other DNA
taaaaatttttttttttttg

SEQ ID NO: 59774 - DNA, 20 bp, synthetic construct
  source 1..20: mol_type = other DNA
ataaaaattttttttttttt

SEQ ID NO: 59775 - DNA, 20 bp, synthetic construct
  source 1..20: mol_type = other DNA
tataaaaatttttttttttt

SEQ ID NO: 59776 - DNA, 20 bp, synthetic construct
  source 1..20: mol_type = other DNA
ttataaaaattttttttttt

SEQ ID NO: 59777 - DNA, 20 bp, synthetic construct
  source 1..20: mol_type = other DNA
attataaaaatttttttttt

SEQ ID NO: 59778 - DNA, 20 bp, synthetic construct
  source 1..20: mol_type = other DNA
tattataaaaattttttttt

SEQ ID NO: 59779 - DNA, 20 bp, synthetic construct
  source 1..20: mol_type = other DNA
atattataaaaatttttttt

SEQ ID NO: 59780 - DNA, 20 bp, synthetic construct
  source 1..20: mol_type = other DNA
tatattataaaaattttttt

SEQ ID NO: 59781 - DNA, 20 bp, synthetic construct
  source 1..20: mol_type = other DNA
atatattataaaaatttttt

SEQ ID NO: 59782 - DNA, 20 bp, synthetic construct
  source 1..20: mol_type = other DNA
tatatattataaaaattttt

SEQ ID NO: 59783 - DNA, 20 bp, synthetic construct
  source 1..20: mol_type = other DNA
atatatattataaaaatttt

SEQ ID NO: 59784 - DNA, 20 bp, synthetic construct
  source 1..20: mol_type = other DNA
tatatatattataaaaattt

SEQ ID NO: 59785 - DNA, 20 bp, synthetic construct
  source 1..20: mol_type = other DNA
atatatatattataaaaatt

SEQ ID NO: 59786 - DNA, 20 bp, synthetic construct
  source 1..20: mol_type = other DNA
tatatatatattataaaaat

SEQ ID NO: 59787 - DNA, 20 bp, synthetic construct
  source 1..20: mol_type = other DNA
atatatatatattataaaaa

SEQ ID NO: 59788 - DNA, 20 bp, synthetic construct
  source 1..20: mol_type = other DNA
tatatatatatattataaaa

SEQ ID NO: 59789 - DNA, 20 bp, synthetic construct
  source 1..20: mol_type = other DNA
atatatatatatattataaa

SEQ ID NO: 59790 - DNA, 20 bp, synthetic construct
  source 1..20: mol_type = other DNA
tatatatatatatattataa

SEQ ID NO: 59791 - DNA, 20 bp, synthetic construct
  source 1..20: mol_type = other DNA
atatatatatatatattata

SEQ ID NO: 59792 - DNA, 20 bp, synthetic construct
  source 1..20: mol_type = other DNA
gatatatatatatatattat

SEQ ID NO: 59793 - DNA, 20 bp, synthetic construct
  source 1..20: mol_type = other DNA
ggatatatatatatatatta

SEQ ID NO: 59794 - DNA, 20 bp, synthetic construct
  source 1..20: mol_type = other DNA
cggatatatatatatatatt

SEQ ID NO: 59795 - DNA, 20 bp, synthetic construct
  source 1..20: mol_type = other DNA
acggatatatatatatatat

SEQ ID NO: 59796 - DNA, 20 bp, synthetic construct
  source 1..20: mol_type = other DNA
aacggatatatatatatata

SEQ ID NO: 59797 - DNA, 20 bp, synthetic construct
  source 1..20: mol_type = other DNA
aaacggatatatatatatat

SEQ ID NO: 59798 - DNA, 20 bp, synthetic construct
  source 1..20: mol_type = other DNA
aaaacggatatatatatata

SEQ ID NO: 59799 - DNA, 20 bp, synthetic construct
  source 1..20: mol_type = other DNA
aaaaacggatatatatatat

SEQ ID NO: 59800 - DNA, 20 bp, synthetic construct
  source 1..20: mol_type = other DNA
caaaaacggatatatatata

SEQ ID NO: 59801 - DNA, 20 bp, synthetic construct
  source 1..20: mol_type = other DNA
acaaaaacggatatatatat

SEQ ID NO: 59802 - DNA, 20 bp, synthetic construct
  source 1..20: mol_type = other DNA
tacaaaaacggatatatata

SEQ ID NO: 59803 - DNA, 20 bp, synthetic construct
  source 1..20: mol_type = other DNA
ctacaaaaacggatatatat

SEQ ID NO: 59804 - DNA, 20 bp, synthetic construct
  source 1..20: mol_type = other DNA
tctacaaaaacggatatata

SEQ ID NO: 59805 - DNA, 20 bp, synthetic construct
  source 1..20: mol_type = other DNA
ttctacaaaaacggatatat

SEQ ID NO: 59806 - DNA, 20 bp, synthetic construct
  source 1..20: mol_type = other DNA
tttctacaaaaacggatata

SEQ ID NO: 59807 - DNA, 20 bp, synthetic construct
  source 1..20: mol_type = other DNA
atttctacaaaaacggatat

SEQ ID NO: 59808 - DNA, 20 bp, synthetic construct
  source 1..20: mol_type = other DNA
aatttctacaaaaacggata

SEQ ID NO: 59809 - DNA, 20 bp, synthetic construct
  source 1..20: mol_type = other DNA
caatttctacaaaaacggat

SEQ ID NO: 59810 - DNA, 20 bp, synthetic construct
  source 1..20: mol_type = other DNA
tcaatttctacaaaaacgga

SEQ ID NO: 59811 - DNA, 20 bp, synthetic construct
  source 1..20: mol_type = other DNA
gtcaatttctacaaaaacgg

SEQ ID NO: 59812 - DNA, 20 bp, synthetic construct
  source 1..20: mol_type = other DNA
tgtcaatttctacaaaaacg

SEQ ID NO: 59813 - DNA, 20 bp, synthetic construct
  source 1..20: mol_type = other DNA
ttgtcaatttctacaaaaac

SEQ ID NO: 59814 - DNA, 20 bp, synthetic construct
  source 1..20: mol_type = other DNA
tttgtcaatttctacaaaaa

SEQ ID NO: 59815 - DNA, 20 bp, synthetic construct
  source 1..20: mol_type = other DNA
ttttgtcaatttctacaaaa

SEQ ID NO: 59816 - DNA, 20 bp, synthetic construct
  source 1..20: mol_type = other DNA
attttgtcaatttctacaaa

SEQ ID NO: 59817 - DNA, 20 bp, synthetic construct
  source 1..20: mol_type = other DNA
cattttgtcaatttctacaa

SEQ ID NO: 59818 - DNA, 20 bp, synthetic construct
  source 1..20: mol_type = other DNA
tcattttgtcaatttctaca

SEQ ID NO: 59819 - DNA, 20 bp, synthetic construct
  source 1..20: mol_type = other DNA
atcattttgtcaatttctac

SEQ ID NO: 59820 - DNA, 20 bp, synthetic construct
  source 1..20: mol_type = other DNA
aatcattttgtcaatttcta

SEQ ID NO: 59821 - DNA, 20 bp, synthetic construct
  source 1..20: mol_type = other DNA
gaatcattttgtcaatttct

SEQ ID NO: 59822 - DNA, 20 bp, synthetic construct
  source 1..20: mol_type = other DNA
agaatcattttgtcaatttc

SEQ ID NO: 59823 - DNA, 20 bp, synthetic construct
  source 1..20: mol_type = other DNA
tagaatcattttgtcaattt

SEQ ID NO: 59824 - DNA, 20 bp, synthetic construct
  source 1..20: mol_type = other DNA
ttagaatcattttgtcaatt

SEQ ID NO: 59825 - DNA, 20 bp, synthetic construct
  source 1..20: mol_type = other DNA
tttagaatcattttgtcaat

SEQ ID NO: 59826 - DNA, 20 bp, synthetic construct
  source 1..20: mol_type = other DNA
ctttagaatcattttgtcaa

SEQ ID NO: 59827 - DNA, 20 bp, synthetic construct
  source 1..20: mol_type = other DNA
gctttagaatcattttgtca

SEQ ID NO: 59828 - DNA, 20 bp, synthetic construct
  source 1..20: mol_type = other DNA
agctttagaatcattttgtc

SEQ ID NO: 59829 - DNA, 20 bp, synthetic construct
  source 1..20: mol_type = other DNA
aagctttagaatcattttgt

SEQ ID NO: 59830 - DNA, 20 bp, synthetic construct
  source 1..20: mol_type = other DNA
taagctttagaatcattttg

SEQ ID NO: 59831 - DNA, 20 bp, synthetic construct
  source 1..20: mol_type = other DNA
ataagctttagaatcatttt

SEQ ID NO: 59832 - DNA, 20 bp, synthetic construct
  source 1..20: mol_type = other DNA
aataagctttagaatcattt

SEQ ID NO: 59833 - DNA, 20 bp, synthetic construct
  source 1..20: mol_type = other DNA
taataagctttagaatcatt

SEQ ID NO: 59834 - DNA, 20 bp, synthetic construct
  source 1..20: mol_type = other DNA
ctaataagctttagaatcat

SEQ ID NO: 59835 - DNA, 20 bp, synthetic construct
  source 1..20: mol_type = other DNA
tctaataagctttagaatca

SEQ ID NO: 59836 - DNA, 20 bp, synthetic construct
  source 1..20: mol_type = other DNA
atctaataagctttagaatc

SEQ ID NO: 59837 - DNA, 20 bp, synthetic construct
  source 1..20: mol_type = other DNA
aatctaataagctttagaat

SEQ ID NO: 59838 - DNA, 20 bp, synthetic construct
  source 1..20: mol_type = other DNA
taatctaataagctttagaa

SEQ ID NO: 59839 - DNA, 20 bp, synthetic construct
  source 1..20: mol_type = other DNA
ataatctaataagctttaga

SEQ ID NO: 59840 - DNA, 20 bp, synthetic construct
  source 1..20: mol_type = other DNA
cataatctaataagctttag

SEQ ID NO: 59841 - DNA, 20 bp, synthetic construct
  source 1..20: mol_type = other DNA
acataatctaataagcttta

SEQ ID NO: 59842 - DNA, 20 bp, synthetic construct
  source 1..20: mol_type = other DNA
cacataatctaataagcttt

SEQ ID NO: 59843 - DNA, 20 bp, synthetic construct
  source 1..20: mol_type = other DNA
acacataatctaataagctt

SEQ ID NO: 59844 - DNA, 20 bp, synthetic construct
  source 1..20: mol_type = other DNA
tacacataatctaataagct

SEQ ID NO: 59845 - DNA, 20 bp, synthetic construct
  source 1..20: mol_type = other DNA
atacacataatctaataagc

SEQ ID NO: 59846 - DNA, 20 bp, synthetic construct
  source 1..20: mol_type = other DNA
aatacacataatctaataag

SEQ ID NO: 59847 - DNA, 20 bp, synthetic construct
  source 1..20: mol_type = other DNA
taatacacataatctaataa

SEQ ID NO: 59848 - DNA, 20 bp, synthetic construct
  source 1..20: mol_type = other DNA
ttaatacacataatctaata

SEQ ID NO: 59849 - DNA, 20 bp, synthetic construct
  source 1..20: mol_type = other DNA
gttaatacacataatctaat

SEQ ID NO: 59850 - DNA, 20 bp, synthetic construct
  source 1..20: mol_type = other DNA
tgttaatacacataatctaa

SEQ ID NO: 59851 - DNA, 20 bp, synthetic construct
  source 1..20: mol_type = other DNA
ctgttaatacacataatcta

SEQ ID NO: 59852 - DNA, 20 bp, synthetic construct
  source 1..20: mol_type = other DNA
tctgttaatacacataatct

SEQ ID NO: 59853 - DNA, 20 bp, synthetic construct
  source 1..20: mol_type = other DNA
ttctgttaatacacataatc

SEQ ID NO: 59854 - DNA, 20 bp, synthetic construct
  source 1..20: mol_type = other DNA
cttctgttaatacacataat

SEQ ID NO: 59855 - DNA, 20 bp, synthetic construct
  source 1..20: mol_type = other DNA
tcttctgttaatacacataa

SEQ ID NO: 59856 - DNA, 20 bp, synthetic construct
  source 1..20: mol_type = other DNA
ttcttctgttaatacacata

SEQ ID NO: 59857 - DNA, 20 bp, synthetic construct
  source 1..20: mol_type = other DNA
gttcttctgttaatacacat

SEQ ID NO: 59858 - DNA, 20 bp, synthetic construct
  source 1..20: mol_type = other DNA
agttcttctgttaatacaca

SEQ ID NO: 59859 - DNA, 20 bp, synthetic construct
  source 1..20: mol_type = other DNA
aagttcttctgttaatacac

SEQ ID NO: 59860 - DNA, 20 bp, synthetic construct
  source 1..20: mol_type = other DNA
aaagttcttctgttaataca

SEQ ID NO: 59861 - DNA, 20 bp, synthetic construct
  source 1..20: mol_type = other DNA
caaagttcttctgttaatac

SEQ ID NO: 59862 - DNA, 20 bp, synthetic construct
  source 1..20: mol_type = other DNA
ccaaagttcttctgttaata

SEQ ID NO: 59863 - DNA, 20 bp, synthetic construct
  source 1..20: mol_type = other DNA
tccaaagttcttctgttaat

SEQ ID NO: 59864 - DNA, 20 bp, synthetic construct
  source 1..20: mol_type = other DNA
ttccaaagttcttctgttaa

SEQ ID NO: 59865 - DNA, 20 bp, synthetic construct
  source 1..20: mol_type = other DNA
tttccaaagttcttctgtta

SEQ ID NO: 59866 - DNA, 20 bp, synthetic construct
  source 1..20: mol_type = other DNA
atttccaaagttcttctgtt

SEQ ID NO: 59867 - DNA, 20 bp, synthetic construct
  source 1..20: mol_type = other DNA
aatttccaaagttcttctgt

SEQ ID NO: 59868 - DNA, 20 bp, synthetic construct
  source 1..20: mol_type = other DNA
aaatttccaaagttcttctg

SEQ ID NO: 59869 - DNA, 20 bp, synthetic construct
  source 1..20: mol_type = other DNA
aaaatttccaaagttcttct

SEQ ID NO: 59870 - DNA, 20 bp, synthetic construct
  source 1..20: mol_type = other DNA
aaaaatttccaaagttcttc

SEQ ID NO: 59871 - DNA, 20 bp, synthetic construct
  source 1..20: mol_type = other DNA
aaaaaatttccaaagttctt

SEQ ID NO: 59872 - DNA, 20 bp, synthetic construct
  source 1..20: mol_type = other DNA
aaaaaaatttccaaagttct

SEQ ID NO: 59873 - DNA, 20 bp, synthetic construct
  source 1..20: mol_type = other DNA
gaaaaaaatttccaaagttc

SEQ ID NO: 59874 - DNA, 20 bp, synthetic construct
  source 1..20: mol_type = other DNA
ggaaaaaaatttccaaagtt

SEQ ID NO: 59875 - DNA, 20 bp, synthetic construct
  source 1..20: mol_type = other DNA
tggaaaaaaatttccaaagt

SEQ ID NO: 59876 - DNA, 20 bp, synthetic construct
  source 1..20: mol_type = other DNA
gtggaaaaaaatttccaaag

SEQ ID NO: 59877 - DNA, 20 bp, synthetic construct
  source 1..20: mol_type = other DNA
tgtggaaaaaaatttccaaa

SEQ ID NO: 59878 - DNA, 20 bp, synthetic construct
  source 1..20: mol_type = other DNA
ttgtggaaaaaaatttccaa

SEQ ID NO: 59879 - DNA, 20 bp, synthetic construct
  source 1..20: mol_type = other DNA
cttgtggaaaaaaatttcca

SEQ ID NO: 59880 - DNA, 20 bp, synthetic construct
  source 1..20: mol_type = other DNA
tcttgtggaaaaaaatttcc

SEQ ID NO: 59881 - DNA, 20 bp, synthetic construct
  source 1..20: mol_type = other DNA
ctcttgtggaaaaaaatttc

SEQ ID NO: 59882 - DNA, 20 bp, synthetic construct
  source 1..20: mol_type = other DNA
actcttgtggaaaaaaattt

SEQ ID NO: 59883 - DNA, 20 bp, synthetic construct
  source 1..20: mol_type = other DNA
gactcttgtggaaaaaaatt

SEQ ID NO: 59884 - DNA, 20 bp, synthetic construct
  source 1..20: mol_type = other DNA
tgactcttgtggaaaaaaat

SEQ ID NO: 59885 - DNA, 20 bp, synthetic construct
  source 1..20: mol_type = other DNA
atgactcttgtggaaaaaaa

SEQ ID NO: 59886 - DNA, 20 bp, synthetic construct
  source 1..20: mol_type = other DNA
tatgactcttgtggaaaaaa

SEQ ID NO: 59887 - DNA, 20 bp, synthetic construct
  source 1..20: mol_type = other DNA
ttatgactcttgtggaaaaa

SEQ ID NO: 59888 - DNA, 20 bp, synthetic construct
  source 1..20: mol_type = other DNA
tttatgactcttgtggaaaa

SEQ ID NO: 59889 - DNA, 20 bp, synthetic construct
  source 1..20: mol_type = other DNA
ctttatgactcttgtggaaa

SEQ ID NO: 59890 - DNA, 20 bp, synthetic construct
  source 1..20: mol_type = other DNA
cctttatgactcttgtggaa

SEQ ID NO: 59891 - DNA, 20 bp, synthetic construct
  source 1..20: mol_type = other DNA
tcctttatgactcttgtgga

SEQ ID NO: 59892 - DNA, 20 bp, synthetic construct
  source 1..20: mol_type = other DNA
ctcctttatgactcttgtgg

SEQ ID NO: 59893 - DNA, 20 bp, synthetic construct
  source 1..20: mol_type = other DNA
cctcctttatgactcttgtg

SEQ ID NO: 59894 - DNA, 20 bp, synthetic construct
  source 1..20: mol_type = other DNA
tcctcctttatgactcttgt

SEQ ID NO: 59895 - DNA, 20 bp, synthetic construct
  source 1..20: mol_type = other DNA
gtcctcctttatgactcttg

SEQ ID NO: 59896 - DNA, 20 bp, synthetic construct
  source 1..20: mol_type = other DNA
agtcctcctttatgactctt

SEQ ID NO: 59897 - DNA, 20 bp, synthetic construct
  source 1..20: mol_type = other DNA
aagtcctcctttatgactct

SEQ ID NO: 59898 - DNA, 20 bp, synthetic construct
  source 1..20: mol_type = other DNA
caagtcctcctttatgactc

SEQ ID NO: 59899 - DNA, 20 bp, synthetic construct
  source 1..20: mol_type = other DNA
gcaagtcctcctttatgact

SEQ ID NO: 59900 - DNA, 20 bp, synthetic construct
  source 1..20: mol_type = other DNA
ggcaagtcctcctttatgac

SEQ ID NO: 59901 - DNA, 20 bp, synthetic construct
  source 1..20: mol_type = other DNA
gggcaagtcctcctttatga

SEQ ID NO: 59902 - DNA, 20 bp, synthetic construct
  source 1..20: mol_type = other DNA
agggcaagtcctcctttatg

SEQ ID NO: 59903 - DNA, 20 bp, synthetic construct
  source 1..20: mol_type = other DNA
tagggcaagtcctcctttat

SEQ ID NO: 59904 - DNA, 20 bp, synthetic construct
  source 1..20: mol_type = other DNA
gtagggcaagtcctccttta

SEQ ID NO: 59905 - DNA, 20 bp, synthetic construct
  source 1..20: mol_type = other DNA
tgtagggcaagtcctccttt

SEQ ID NO: 59906 - DNA, 20 bp, synthetic construct
  source 1..20: mol_type = other DNA
ttgtagggcaagtcctcctt

SEQ ID NO: 59907 - DNA, 20 bp, synthetic construct
  source 1..20: mol_type = other DNA
tttgtagggcaagtcctcct

SEQ ID NO: 59908 - DNA, 20 bp, synthetic construct
  source 1..20: mol_type = other DNA
ttttgtagggcaagtcctcc

SEQ ID NO: 59909 - DNA, 20 bp, synthetic construct
  source 1..20: mol_type = other DNA
attttgtagggcaagtcctc

SEQ ID NO: 59910 - DNA, 20 bp, synthetic construct
  source 1..20: mol_type = other DNA
tattttgtagggcaagtcct

SEQ ID NO: 59911 - DNA, 20 bp, synthetic construct
  source 1..20: mol_type = other DNA
atattttgtagggcaagtcc

SEQ ID NO: 59912 - DNA, 20 bp, synthetic construct
  source 1..20: mol_type = other DNA
catattttgtagggcaagtc

SEQ ID NO: 59913 - DNA, 20 bp, synthetic construct
  source 1..20: mol_type = other DNA
acatattttgtagggcaagt

SEQ ID NO: 59914 - DNA, 20 bp, synthetic construct
  source 1..20: mol_type = other DNA
gacatattttgtagggcaag

SEQ ID NO: 59915 - DNA, 20 bp, synthetic construct
  source 1..20: mol_type = other DNA
tgacatattttgtagggcaa

SEQ ID NO: 59916 - DNA, 20 bp, synthetic construct
  source 1..20: mol_type = other DNA
ctgacatattttgtagggca

SEQ ID NO: 59917 - DNA, 20 bp, synthetic construct
  source 1..20: mol_type = other DNA
tctgacatattttgtagggc

SEQ ID NO: 59918 - DNA, 20 bp, synthetic construct
  source 1..20: mol_type = other DNA
ttctgacatattttgtaggg

SEQ ID NO: 59919 - DNA, 20 bp, synthetic construct
  source 1..20: mol_type = other DNA
attctgacatattttgtagg

SEQ ID NO: 59920 - DNA, 20 bp, synthetic construct
  source 1..20: mol_type = other DNA
aattctgacatattttgtag

SEQ ID NO: 59921 - DNA, 20 bp, synthetic construct
  source 1..20: mol_type = other DNA
taattctgacatattttgta

SEQ ID NO: 59922 - DNA, 20 bp, synthetic construct
  source 1..20: mol_type = other DNA
ttaattctgacatattttgt

SEQ ID NO: 59923 - DNA, 20 bp, synthetic construct
  source 1..20: mol_type = other DNA
tttaattctgacatattttg

SEQ ID NO: 59924 - DNA, 20 bp, synthetic construct
  source 1..20: mol_type = other DNA
ttttaattctgacatatttt

SEQ ID NO: 59925 - DNA, 20 bp, synthetic construct
  source 1..20: mol_type = other DNA
gttttaattctgacatattt

SEQ ID NO: 59926 - DNA, 20 bp, synthetic construct
  source 1..20: mol_type = other DNA
tgttttaattctgacatatt

SEQ ID NO: 59927 - DNA, 20 bp, synthetic construct
  source 1..20: mol_type = other DNA
atgttttaattctgacatat

SEQ ID NO: 59928 - DNA, 20 bp, synthetic construct
  source 1..20: mol_type = other DNA
tatgttttaattctgacata

SEQ ID NO: 59929 - DNA, 20 bp, synthetic construct
  source 1..20: mol_type = other DNA
ttatgttttaattctgacat

SEQ ID NO: 59930 - DNA, 20 bp, synthetic construct
  source 1..20: mol_type = other DNA
gttatgttttaattctgaca

SEQ ID NO: 59931 - DNA, 20 bp, synthetic construct
  source 1..20: mol_type = other DNA
agttatgttttaattctgac

SEQ ID NO: 59932 - DNA, 20 bp, synthetic construct
  source 1..20: mol_type = other DNA
aagttatgttttaattctga

SEQ ID NO: 59933 - DNA, 20 bp, synthetic construct
  source 1..20: mol_type = other DNA
caagttatgttttaattctg

SEQ ID NO: 59934 - DNA, 20 bp, synthetic construct
  source 1..20: mol_type = other DNA
acaagttatgttttaattct

SEQ ID NO: 59935 - DNA, 20 bp, synthetic construct
  source 1..20: mol_type = other DNA
gacaagttatgttttaattc

SEQ ID NO: 59936 - DNA, 20 bp, synthetic construct
  source 1..20: mol_type = other DNA
tgacaagttatgttttaatt

SEQ ID NO: 59937 - DNA, 20 bp, synthetic construct
  source 1..20: mol_type = other DNA
ctgacaagttatgttttaat

SEQ ID NO: 59938 - DNA, 20 bp, synthetic construct
  source 1..20: mol_type = other DNA
gctgacaagttatgttttaa

SEQ ID NO: 59939 - DNA, 20 bp, synthetic construct
  source 1..20: mol_type = other DNA
agctgacaagttatgtttta

SEQ ID NO: 59940 - DNA, 20 bp, synthetic construct
  source 1..20: mol_type = other DNA
cagctgacaagttatgtttt

SEQ ID NO: 59941 - DNA, 20 bp, synthetic construct
  source 1..20: mol_type = other DNA
ccagctgacaagttatgttt

SEQ ID NO: 59942 - DNA, 20 bp, synthetic construct
  source 1..20: mol_type = other DNA
cccagctgacaagttatgtt

SEQ ID NO: 59943 - DNA, 20 bp, synthetic construct
  source 1..20: mol_type = other DNA
acccagctgacaagttatgt

SEQ ID NO: 59944 - DNA, 20 bp, synthetic construct
  source 1..20: mol_type = other DNA
cacccagctgacaagttatg

SEQ ID NO: 59945 - DNA, 20 bp, synthetic construct
  source 1..20: mol_type = other DNA
gcacccagctgacaagttat

SEQ ID NO: 59946 - DNA, 20 bp, synthetic construct
  source 1..20: mol_type = other DNA
cgcacccagctgacaagtta

SEQ ID NO: 59947 - DNA, 20 bp, synthetic construct
  source 1..20: mol_type = other DNA
ccgcacccagctgacaagtt

SEQ ID NO: 59948 - DNA, 20 bp, synthetic construct
  source 1..20: mol_type = other DNA
accgcacccagctgacaagt

SEQ ID NO: 59949 - DNA, 20 bp, synthetic construct
  source 1..20: mol_type = other DNA
caccgcacccagctgacaag

SEQ ID NO: 59950 - DNA, 20 bp, synthetic construct
  source 1..20: mol_type = other DNA
ccaccgcacccagctgacaa

SEQ ID NO: 59951 - DNA, 20 bp, synthetic construct
  source 1..20: mol_type = other DNA
gccaccgcacccagctgaca

SEQ ID NO: 59952 - DNA, 20 bp, synthetic construct
  source 1..20: mol_type = other DNA
agccaccgcacccagctgac

SEQ ID NO: 59953 - DNA, 20 bp, synthetic construct
  source 1..20: mol_type = other DNA
gagccaccgcacccagctga

SEQ ID NO: 59954 - DNA, 20 bp, synthetic construct
  source 1..20: mol_type = other DNA
tgagccaccgcacccagctg

SEQ ID NO: 59955 - DNA, 20 bp, synthetic construct
  source 1..20: mol_type = other DNA
gtgagccaccgcacccagct

SEQ ID NO: 59956 - DNA, 20 bp, synthetic construct
  source 1..20: mol_type = other DNA
cgtgagccaccgcacccagc

SEQ ID NO: 59957 - DNA, 20 bp, synthetic construct
  source 1..20: mol_type = other DNA
gcgtgagccaccgcacccag

SEQ ID NO: 59958 - DNA, 20 bp, synthetic construct
  source 1..20: mol_type = other DNA
ggcgtgagccaccgcaccca

SEQ ID NO: 59959 - DNA, 20 bp, synthetic construct
  source 1..20: mol_type = other DNA
aggcgtgagccaccgcaccc

SEQ ID NO: 59960 - DNA, 20 bp, synthetic construct
  source 1..20: mol_type = other DNA
taggcgtgagccaccgcacc

SEQ ID NO: 59961 - DNA, 20 bp, synthetic construct
  source 1..20: mol_type = other DNA
ataggcgtgagccaccgcac

SEQ ID NO: 59962 - DNA, 20 bp, synthetic construct
  source 1..20: mol_type = other DNA
tataggcgtgagccaccgca

SEQ ID NO: 59963 - DNA, 20 bp, synthetic construct
  source 1..20: mol_type = other DNA
ttataggcgtgagccaccgc

SEQ ID NO: 59964 - DNA, 20 bp, synthetic construct
  source 1..20: mol_type = other DNA
attataggcgtgagccaccg

SEQ ID NO: 59965 - DNA, 20 bp, synthetic construct
  source 1..20: mol_type = other DNA
aattataggcgtgagccacc

SEQ ID NO: 59966 - DNA, 20 bp, synthetic construct
  source 1..20: mol_type = other DNA
gaattataggcgtgagccac

SEQ ID NO: 59967 - DNA, 20 bp, synthetic construct
  source 1..20: mol_type = other DNA
ggaattataggcgtgagcca

SEQ ID NO: 59968 - DNA, 20 bp, synthetic construct
  source 1..20: mol_type = other DNA
tggaattataggcgtgagcc

SEQ ID NO: 59969 - DNA, 20 bp, synthetic construct
  source 1..20: mol_type = other DNA
ctggaattataggcgtgagc

SEQ ID NO: 59970 - DNA, 20 bp, synthetic construct
  source 1..20: mol_type = other DNA
gctggaattataggcgtgag

SEQ ID NO: 59971 - DNA, 20 bp, synthetic construct
  source 1..20: mol_type = other DNA
tgctggaattataggcgtga

SEQ ID NO: 59972 - DNA, 20 bp, synthetic construct
  source 1..20: mol_type = other DNA
gtgctggaattataggcgtg

SEQ ID NO: 59973 - DNA, 20 bp, synthetic construct
  source 1..20: mol_type = other DNA
agtgctggaattataggcgt

SEQ ID NO: 59974 - DNA, 20 bp, synthetic construct
  source 1..20: mol_type = other DNA
aagtgctggaattataggcg

SEQ ID NO: 59975 - DNA, 20 bp, synthetic construct
  source 1..20: mol_type = other DNA
aaagtgctggaattataggc

SEQ ID NO: 59976 - DNA, 20 bp, synthetic construct
  source 1..20: mol_type = other DNA
caaagtgctggaattatagg

SEQ ID NO: 59977 - DNA, 20 bp, synthetic construct
  source 1..20: mol_type = other DNA
ccaaagtgctggaattatag

SEQ ID NO: 59978 - DNA, 20 bp, synthetic construct
  source 1..20: mol_type = other DNA
cccaaagtgctggaattata

SEQ ID NO: 59979 - DNA, 20 bp, synthetic construct
  source 1..20: mol_type = other DNA
tcccaaagtgctggaattat

SEQ ID NO: 59980 - DNA, 20 bp, synthetic construct
  source 1..20: mol_type = other DNA
ctcccaaagtgctggaatta

SEQ ID NO: 59981 - DNA, 20 bp, synthetic construct
  source 1..20: mol_type = other DNA
cctcccaaagtgctggaatt

SEQ ID NO: 59982 - DNA, 20 bp, synthetic construct
  source 1..20: mol_type = other DNA
gcctcccaaagtgctggaat

SEQ ID NO: 59983 - DNA, 20 bp, synthetic construct
  source 1..20: mol_type = other DNA
agcctcccaaagtgctggaa

SEQ ID NO: 59984 - DNA, 20 bp, synthetic construct
  source 1..20: mol_type = other DNA
cagcctcccaaagtgctgga

SEQ ID NO: 59985 - DNA, 20 bp, synthetic construct
  source 1..20: mol_type = other DNA
tcagcctcccaaagtgctgg

SEQ ID NO: 59986 - DNA, 20 bp, synthetic construct
  source 1..20: mol_type = other DNA
ctcagcctcccaaagtgctg

SEQ ID NO: 59987 - DNA, 20 bp, synthetic construct
  source 1..20: mol_type = other DNA
cctcagcctcccaaagtgct

SEQ ID NO: 59988 - DNA, 20 bp, synthetic construct
  source 1..20: mol_type = other DNA
gcctcagcctcccaaagtgc

SEQ ID NO: 59989 - DNA, 20 bp, synthetic construct
  source 1..20: mol_type = other DNA
tgcctcagcctcccaaagtg

SEQ ID NO: 59990 - DNA, 20 bp, synthetic construct
  source 1..20: mol_type = other DNA
ctgcctcagcctcccaaagt

SEQ ID NO: 59991 - DNA, 20 bp, synthetic construct
  source 1..20: mol_type = other DNA
cctgcctcagcctcccaaag

SEQ ID NO: 59992 - DNA, 20 bp, synthetic construct
  source 1..20: mol_type = other DNA
gcctgcctcagcctcccaaa

SEQ ID NO: 59993 - DNA, 20 bp, synthetic construct
  source 1..20: mol_type = other DNA
tgcctgcctcagcctcccaa

SEQ ID NO: 59994 - DNA, 20 bp, synthetic construct
  source 1..20: mol_type = other DNA
ctgcctgcctcagcctccca

SEQ ID NO: 59995 - DNA, 20 bp, synthetic construct
  source 1..20: mol_type = other DNA
tctgcctgcctcagcctccc

SEQ ID NO: 59996 - DNA, 20 bp, synthetic construct
  source 1..20: mol_type = other DNA
atctgcctgcctcagcctcc

SEQ ID NO: 59997 - DNA, 20 bp, synthetic construct
  source 1..20: mol_type = other DNA
gatctgcctgcctcagcctc

SEQ ID NO: 59998 - DNA, 20 bp, synthetic construct
  source 1..20: mol_type = other DNA
tgatctgcctgcctcagcct

SEQ ID NO: 59999 - DNA, 20 bp, synthetic construct
  source 1..20: mol_type = other DNA
atgatctgcctgcctcagcc

SEQ ID NO: 60000 - DNA, 20 bp, synthetic construct
  source 1..20: mol_type = other DNA
catgatctgcctgcctcagc

SEQ ID NO: 60001 - DNA, 20 bp, synthetic construct
  source 1..20: mol_type = other DNA
tcatgatctgcctgcctcag

SEQ ID NO: 60002 - DNA, 20 bp, synthetic construct
  source 1..20: mol_type = other DNA
gtcatgatctgcctgcctca

SEQ ID NO: 60003 - DNA, 20 bp, synthetic construct
  source 1..20: mol_type = other DNA
ggtcatgatctgcctgcctc

SEQ ID NO: 60004 - DNA, 20 bp, synthetic construct
  source 1..20: mol_type = other DNA
tggtcatgatctgcctgcct

SEQ ID NO: 60005 - DNA, 20 bp, synthetic construct
  source 1..20: mol_type = other DNA
ctggtcatgatctgcctgcc

SEQ ID NO: 60006 - DNA, 20 bp, synthetic construct
  source 1..20: mol_type = other DNA
gctggtcatgatctgcctgc

SEQ ID NO: 60007 - DNA, 20 bp, synthetic construct
  source 1..20: mol_type = other DNA
ggctggtcatgatctgcctg

SEQ ID NO: 60008 - DNA, 20 bp, synthetic construct
  source 1..20: mol_type = other DNA
aggctggtcatgatctgcct

SEQ ID NO: 60009 - DNA, 20 bp, synthetic construct
  source 1..20: mol_type = other DNA
caggctggtcatgatctgcc

SEQ ID NO: 60010 - DNA, 20 bp, synthetic construct
  source 1..20: mol_type = other DNA
tcaggctggtcatgatctgc

SEQ ID NO: 60011 - DNA, 20 bp, synthetic construct
  source 1..20: mol_type = other DNA
gtcaggctggtcatgatctg

SEQ ID NO: 60012 - DNA, 20 bp, synthetic construct
  source 1..20: mol_type = other DNA
ggtcaggctggtcatgatct

SEQ ID NO: 60013 - DNA, 20 bp, synthetic construct
  source 1..20: mol_type = other DNA
tggtcaggctggtcatgatc

SEQ ID NO: 60014 - DNA, 20 bp, synthetic construct
  source 1..20: mol_type = other DNA
ttggtcaggctggtcatgat

SEQ ID NO: 60015 - DNA, 20 bp, synthetic construct
  source 1..20: mol_type = other DNA
gttggtcaggctggtcatga

SEQ ID NO: 60016 - DNA, 20 bp, synthetic construct
  source 1..20: mol_type = other DNA
tgttggtcaggctggtcatg

SEQ ID NO: 60017 - DNA, 20 bp, synthetic construct
  source 1..20: mol_type = other DNA
atgttggtcaggctggtcat

SEQ ID NO: 60018 - DNA, 20 bp, synthetic construct
  source 1..20: mol_type = other DNA
catgttggtcaggctggtca

SEQ ID NO: 60019 - DNA, 20 bp, synthetic construct
  source 1..20: mol_type = other DNA
ccatgttggtcaggctggtc

SEQ ID NO: 60020 - DNA, 20 bp, synthetic construct
  source 1..20: mol_type = other DNA
tccatgttggtcaggctggt

SEQ ID NO: 60021 - DNA, 20 bp, synthetic construct
  source 1..20: mol_type = other DNA
ctccatgttggtcaggctgg

SEQ ID NO: 60022 - DNA, 20 bp, synthetic construct
  source 1..20: mol_type = other DNA
tctccatgttggtcaggctg

SEQ ID NO: 60023 - DNA, 20 bp, synthetic construct
  source 1..20: mol_type = other DNA
ttctccatgttggtcaggct

SEQ ID NO: 60024 - DNA, 20 bp, synthetic construct
  source 1..20: mol_type = other DNA
tttctccatgttggtcaggc

SEQ ID NO: 60025 - DNA, 20 bp, synthetic construct
  source 1..20: mol_type = other DNA
gtttctccatgttggtcagg

SEQ ID NO: 60026 - DNA, 20 bp, synthetic construct
  source 1..20: mol_type = other DNA
ggtttctccatgttggtcag

SEQ ID NO: 60027 - DNA, 20 bp, synthetic construct
  source 1..20: mol_type = other DNA
gggtttctccatgttggtca

SEQ ID NO: 60028 - DNA, 20 bp, synthetic construct
  source 1..20: mol_type = other DNA
ggggtttctccatgttggtc

SEQ ID NO: 60029 - DNA, 20 bp, synthetic construct
  source 1..20: mol_type = other DNA
cggggtttctccatgttggt

SEQ ID NO: 60030 - DNA, 20 bp, synthetic construct
  source 1..20: mol_type = other DNA
acggggtttctccatgttgg

SEQ ID NO: 60031 - DNA, 20 bp, synthetic construct
  source 1..20: mol_type = other DNA
gacggggtttctccatgttg

SEQ ID NO: 60032 - DNA, 20 bp, synthetic construct
  source 1..20: mol_type = other DNA
agacggggtttctccatgtt

SEQ ID NO: 60033 - DNA, 20 bp, synthetic construct
  source 1..20: mol_type = other DNA
gagacggggtttctccatgt

SEQ ID NO: 60034 - DNA, 20 bp, synthetic construct
  source 1..20: mol_type = other DNA
agagacggggtttctccatg

SEQ ID NO: 60035 - DNA, 20 bp, synthetic construct
  source 1..20: mol_type = other DNA
tagagacggggtttctccat

SEQ ID NO: 60036 - DNA, 20 bp, synthetic construct
  source 1..20: mol_type = other DNA
gtagagacggggtttctcca

SEQ ID NO: 60037 - DNA, 20 bp, synthetic construct
  source 1..20: mol_type = other DNA
agtagagacggggtttctcc

SEQ ID NO: 60038 - DNA, 20 bp, synthetic construct
  source 1..20: mol_type = other DNA
tagtagagacggggtttctc

SEQ ID NO: 60039 - DNA, 20 bp, synthetic construct
  source 1..20: mol_type = other DNA
ttagtagagacggggtttct

SEQ ID NO: 60040 - DNA, 20 bp, synthetic construct
  source 1..20: mol_type = other DNA
tttagtagagacggggtttc

SEQ ID NO: 60041 - DNA, 20 bp, synthetic construct
  source 1..20: mol_type = other DNA
ttttagtagagacggggttt

SEQ ID NO: 60042 - DNA, 20 bp, synthetic construct
  source 1..20: mol_type = other DNA
tttttagtagagacggggtt

SEQ ID NO: 60043 - DNA, 20 bp, synthetic construct
  source 1..20: mol_type = other DNA
atttttagtagagacggggt

SEQ ID NO: 60044 - DNA, 20 bp, synthetic construct
  source 1..20: mol_type = other DNA
tatttttagtagagacgggg

SEQ ID NO: 60045 - DNA, 20 bp, synthetic construct
  source 1..20: mol_type = other DNA
gtatttttagtagagacggg

SEQ ID NO: 60046 - DNA, 20 bp, synthetic construct
  source 1..20: mol_type = other DNA
tgtatttttagtagagacgg

SEQ ID NO: 60047 - DNA, 20 bp, synthetic construct
  source 1..20: mol_type = other DNA
ttgtatttttagtagagacg

SEQ ID NO: 60048 - DNA, 20 bp, synthetic construct
  source 1..20: mol_type = other DNA
tttgtatttttagtagagac

SEQ ID NO: 60049 - DNA, 20 bp, synthetic construct
  source 1..20: mol_type = other DNA
ttttgtatttttagtagaga

SEQ ID NO: 60050 - DNA, 20 bp, synthetic construct
  source 1..20: mol_type = other DNA
attttgtatttttagtagag

SEQ ID NO: 60051 - DNA, 20 bp, synthetic construct
  source 1..20: mol_type = other DNA
aattttgtatttttagtaga

SEQ ID NO: 60052 - DNA, 20 bp, synthetic construct
  source 1..20: mol_type = other DNA
taattttgtatttttagtag

SEQ ID NO: 60053 - DNA, 20 bp, synthetic construct
  source 1..20: mol_type = other DNA
ctaattttgtatttttagta

SEQ ID NO: 60054 - DNA, 20 bp, synthetic construct
  source 1..20: mol_type = other DNA
gctaattttgtatttttagt

SEQ ID NO: 60055 - DNA, 20 bp, synthetic construct
  source 1..20: mol_type = other DNA
ggctaattttgtatttttag

SEQ ID NO: 60056 - DNA, 20 bp, synthetic construct
  source 1..20: mol_type = other DNA
cggctaattttgtattttta

SEQ ID NO: 60057 - DNA, 20 bp, synthetic construct
  source 1..20: mol_type = other DNA
ccggctaattttgtattttt

SEQ ID NO: 60058 - DNA, 20 bp, synthetic construct
  source 1..20: mol_type = other DNA
accggctaattttgtatttt

SEQ ID NO: 60059 - DNA, 20 bp, synthetic construct
  source 1..20: mol_type = other DNA
gaccggctaattttgtattt

SEQ ID NO: 60060 - DNA, 20 bp, synthetic construct
  source 1..20: mol_type = other DNA
tgaccggctaattttgtatt

SEQ ID NO: 60061 - DNA, 20 bp, synthetic construct
  source 1..20: mol_type = other DNA
atgaccggctaattttgtat

SEQ ID NO: 60062 - DNA, 20 bp, synthetic construct
  source 1..20: mol_type = other DNA
catgaccggctaattttgta

SEQ ID NO: 60063 - DNA, 20 bp, synthetic construct
  source 1..20: mol_type = other DNA
ccatgaccggctaattttgt

SEQ ID NO: 60064 - DNA, 20 bp, synthetic construct
  source 1..20: mol_type = other DNA
accatgaccggctaattttg

SEQ ID NO: 60065 - DNA, 20 bp, synthetic construct
  source 1..20: mol_type = other DNA
caccatgaccggctaatttt

SEQ ID NO: 60066 - DNA, 20 bp, synthetic construct
  source 1..20: mol_type = other DNA
ccaccatgaccggctaattt

SEQ ID NO: 60067 - DNA, 20 bp, synthetic construct
  source 1..20: mol_type = other DNA
gccaccatgaccggctaatt

SEQ ID NO: 60068 - DNA, 20 bp, synthetic construct
  source 1..20: mol_type = other DNA
cgccaccatgaccggctaat

SEQ ID NO: 60069 - DNA, 20 bp, synthetic construct
  source 1..20: mol_type = other DNA
gcgccaccatgaccggctaa

SEQ ID NO: 60070 - DNA, 20 bp, synthetic construct
  source 1..20: mol_type = other DNA
tgcgccaccatgaccggcta

SEQ ID NO: 60071 - DNA, 20 bp, synthetic construct
  source 1..20: mol_type = other DNA
atgcgccaccatgaccggct

SEQ ID NO: 60072 - DNA, 20 bp, synthetic construct
  source 1..20: mol_type = other DNA
tatgcgccaccatgaccggc

SEQ ID NO: 60073 - DNA, 20 bp, synthetic construct
  source 1..20: mol_type = other DNA
gtatgcgccaccatgaccgg

SEQ ID NO: 60074 - DNA, 20 bp, synthetic construct
  source 1..20: mol_type = other DNA
ggtatgcgccaccatgaccg

SEQ ID NO: 60075 - DNA, 20 bp, synthetic construct
  source 1..20: mol_type = other DNA
aggtatgcgccaccatgacc

SEQ ID NO: 60076 - DNA, 20 bp, synthetic construct
  source 1..20: mol_type = other DNA
caggtatgcgccaccatgac

SEQ ID NO: 60077 - DNA, 20 bp, synthetic construct
  source 1..20: mol_type = other DNA
acaggtatgcgccaccatga

SEQ ID NO: 60078 - DNA, 20 bp, synthetic construct
  source 1..20: mol_type = other DNA
tacaggtatgcgccaccatg

SEQ ID NO: 60079 - DNA, 20 bp, synthetic construct
  source 1..20: mol_type = other DNA
ctacaggtatgcgccaccat

SEQ ID NO: 60080 - DNA, 20 bp, synthetic construct
  source 1..20: mol_type = other DNA
actacaggtatgcgccacca

SEQ ID NO: 60081 - DNA, 20 bp, synthetic construct
  source 1..20: mol_type = other DNA
gactacaggtatgcgccacc

SEQ ID NO: 60082 - DNA, 20 bp, synthetic construct
  source 1..20: mol_type = other DNA
ggactacaggtatgcgccac

SEQ ID NO: 60083 - DNA, 20 bp, synthetic construct
  source 1..20: mol_type = other DNA
gggactacaggtatgcgcca

SEQ ID NO: 60084 - DNA, 20 bp, synthetic construct
  source 1..20: mol_type = other DNA
tgggactacaggtatgcgcc

SEQ ID NO: 60085 - DNA, 20 bp, synthetic construct
  source 1..20: mol_type = other DNA
ctgggactacaggtatgcgc

SEQ ID NO: 60086 - DNA, 20 bp, synthetic construct
  source 1..20: mol_type = other DNA
gctgggactacaggtatgcg

SEQ ID NO: 60087 - DNA, 20 bp, synthetic construct
  source 1..20: mol_type = other DNA
agctgggactacaggtatgc

SEQ ID NO: 60088 - DNA, 20 bp, synthetic construct
  source 1..20: mol_type = other DNA
tagctgggactacaggtatg

SEQ ID NO: 60089 - DNA, 20 bp, synthetic construct
  source 1..20: mol_type = other DNA
gtagctgggactacaggtat

SEQ ID NO: 60090 - DNA, 20 bp, synthetic construct
  source 1..20: mol_type = other DNA
agtagctgggactacaggta

SEQ ID NO: 60091 - DNA, 20 bp, synthetic construct
  source 1..20: mol_type = other DNA
gagtagctgggactacaggt

SEQ ID NO: 60092 - DNA, 20 bp, synthetic construct
  source 1..20: mol_type = other DNA
cgagtagctgggactacagg

SEQ ID NO: 60093 - DNA, 20 bp, synthetic construct
  source 1..20: mol_type = other DNA
ccgagtagctgggactacag

SEQ ID NO: 60094 - DNA, 20 bp, synthetic construct
  source 1..20: mol_type = other DNA
cccgagtagctgggactaca

SEQ ID NO: 60095 - DNA, 20 bp, synthetic construct
  source 1..20: mol_type = other DNA
tcccgagtagctgggactac

SEQ ID NO: 60096 - DNA, 20 bp, synthetic construct
  source 1..20: mol_type = other DNA
ctcccgagtagctgggacta

SEQ ID NO: 60097 - DNA, 20 bp, synthetic construct
  source 1..20: mol_type = other DNA
cctcccgagtagctgggact

SEQ ID NO: 60098 - DNA, 20 bp, synthetic construct
  source 1..20: mol_type = other DNA
gcctcccgagtagctgggac

SEQ ID NO: 60099 - DNA, 20 bp, synthetic construct
  source 1..20: mol_type = other DNA
agcctcccgagtagctggga

SEQ ID NO: 60100 - DNA, 20 bp, synthetic construct
  source 1..20: mol_type = other DNA
cagcctcccgagtagctggg

SEQ ID NO: 60101 - DNA, 20 bp, synthetic construct
  source 1..20: mol_type = other DNA
tcagcctcccgagtagctgg

SEQ ID NO: 60102 - DNA, 20 bp, synthetic construct
  source 1..20: mol_type = other DNA
ctcagcctcccgagtagctg

SEQ ID NO: 60103 - DNA, 20 bp, synthetic construct
  source 1..20: mol_type = other DNA
cctcagcctcccgagtagct

SEQ ID NO: 60104 - DNA, 20 bp, synthetic construct
  source 1..20: mol_type = other DNA
gcctcagcctcccgagtagc

SEQ ID NO: 60105 - DNA, 20 bp, synthetic construct
  source 1..20: mol_type = other DNA
tgcctcagcctcccgagtag

SEQ ID NO: 60106 - DNA, 20 bp, synthetic construct
  source 1..20: mol_type = other DNA
ctgcctcagcctcccgagta

SEQ ID NO: 60107 - DNA, 20 bp, synthetic construct
  source 1..20: mol_type = other DNA
cctgcctcagcctcccgagt

SEQ ID NO: 60108 - DNA, 20 bp, synthetic construct
  source 1..20: mol_type = other DNA
tcctgcctcagcctcccgag

SEQ ID NO: 60109 - DNA, 20 bp, synthetic construct
  source 1..20: mol_type = other DNA
ctcctgcctcagcctcccga

SEQ ID NO: 60110 - DNA, 20 bp, synthetic construct
  source 1..20: mol_type = other DNA
tctcctgcctcagcctcccg

SEQ ID NO: 60111 - DNA, 20 bp, synthetic construct
  source 1..20: mol_type = other DNA
ttctcctgcctcagcctccc

SEQ ID NO: 60112 - DNA, 20 bp, synthetic construct
  source 1..20: mol_type = other DNA
attctcctgcctcagcctcc

SEQ ID NO: 60113 - DNA, 20 bp, synthetic construct
  source 1..20: mol_type = other DNA
gattctcctgcctcagcctc

SEQ ID NO: 60114 - DNA, 20 bp, synthetic construct
  source 1..20: mol_type = other DNA
cgattctcctgcctcagcct

SEQ ID NO: 60115 - DNA, 20 bp, synthetic construct
  source 1..20: mol_type = other DNA
gcgattctcctgcctcagcc

SEQ ID NO: 60116 - DNA, 20 bp, synthetic construct
  source 1..20: mol_type = other DNA
agcgattctcctgcctcagc

SEQ ID NO: 60117 - DNA, 20 bp, synthetic construct
  source 1..20: mol_type = other DNA
aagcgattctcctgcctcag

SEQ ID NO: 60118 - DNA, 20 bp, synthetic construct
  source 1..20: mol_type = other DNA
caagcgattctcctgcctca

SEQ ID NO: 60119 - DNA, 20 bp, synthetic construct
  source 1..20: mol_type = other DNA
tcaagcgattctcctgcctc

SEQ ID NO: 60120 - DNA, 20 bp, synthetic construct
  source 1..20: mol_type = other DNA
ttcaagcgattctcctgcct

SEQ ID NO: 60121 - DNA, 20 bp, synthetic construct
  source 1..20: mol_type = other DNA
gttcaagcgattctcctgcc

SEQ ID NO: 60122 - DNA, 20 bp, synthetic construct
  source 1..20: mol_type = other DNA
agttcaagcgattctcctgc

SEQ ID NO: 60123 - DNA, 20 bp, synthetic construct
  source 1..20: mol_type = other DNA
gagttcaagcgattctcctg

SEQ ID NO: 60124 - DNA, 20 bp, synthetic construct
  source 1..20: mol_type = other DNA
cgagttcaagcgattctcct

SEQ ID NO: 60125 - DNA, 20 bp, synthetic construct
  source 1..20: mol_type = other DNA
ccgagttcaagcgattctcc

SEQ ID NO: 60126 - DNA, 20 bp, synthetic construct
  source 1..20: mol_type = other DNA
cccgagttcaagcgattctc

SEQ ID NO: 60127 - DNA, 20 bp, synthetic construct
  source 1..20: mol_type = other DNA
tcccgagttcaagcgattct

SEQ ID NO: 60128 - DNA, 20 bp, synthetic construct
  source 1..20: mol_type = other DNA
ctcccgagttcaagcgattc

SEQ ID NO: 60129 - DNA, 20 bp, synthetic construct
  source 1..20: mol_type = other DNA
cctcccgagttcaagcgatt

SEQ ID NO: 60130 - DNA, 20 bp, synthetic construct
  source 1..20: mol_type = other DNA
acctcccgagttcaagcgat

SEQ ID NO: 60131 - DNA, 20 bp, synthetic construct
  source 1..20: mol_type = other DNA
cacctcccgagttcaagcga

SEQ ID NO: 60132 - DNA, 20 bp, synthetic construct
  source 1..20: mol_type = other DNA
ccacctcccgagttcaagcg

SEQ ID NO: 60133 - DNA, 20 bp, synthetic construct
  source 1..20: mol_type = other DNA
tccacctcccgagttcaagc

SEQ ID NO: 60134 - DNA, 20 bp, synthetic construct
  source 1..20: mol_type = other DNA
ctccacctcccgagttcaag

SEQ ID NO: 60135 - DNA, 20 bp, synthetic construct
  source 1..20: mol_type = other DNA
cctccacctcccgagttcaa

SEQ ID NO: 60136 - DNA, 20 bp, synthetic construct
  source 1..20: mol_type = other DNA
acctccacctcccgagttca

SEQ ID NO: 60137 - DNA, 20 bp, synthetic construct
  source 1..20: mol_type = other DNA
aacctccacctcccgagttc

SEQ ID NO: 60138 - DNA, 20 bp, synthetic construct
  source 1..20: mol_type = other DNA
caacctccacctcccgagtt

SEQ ID NO: 60139 - DNA, 20 bp, synthetic construct
  source 1..20: mol_type = other DNA
gcaacctccacctcccgagt

SEQ ID NO: 60140 - DNA, 20 bp, synthetic construct
  source 1..20: mol_type = other DNA
tgcaacctccacctcccgag

SEQ ID NO: 60141 - DNA, 20 bp, synthetic construct
  source 1..20: mol_type = other DNA
ctgcaacctccacctcccga

SEQ ID NO: 60142 - DNA, 20 bp, synthetic construct
  source 1..20: mol_type = other DNA
actgcaacctccacctcccg

SEQ ID NO: 60143 - DNA, 20 bp, synthetic construct
  source 1..20: mol_type = other DNA
cactgcaacctccacctccc

SEQ ID NO: 60144 - DNA, 20 bp, synthetic construct
  source 1..20: mol_type = other DNA
tcactgcaacctccacctcc

SEQ ID NO: 60145 - DNA, 20 bp, synthetic construct
  source 1..20: mol_type = other DNA
ctcactgcaacctccacctc

SEQ ID NO: 60146 - DNA, 20 bp, synthetic construct
  source 1..20: mol_type = other DNA
gctcactgcaacctccacct

SEQ ID NO: 60147 - DNA, 20 bp, synthetic construct
  source 1..20: mol_type = other DNA
ggctcactgcaacctccacc

SEQ ID NO: 60148 - DNA, 20 bp, synthetic construct
  source 1..20: mol_type = other DNA
cggctcactgcaacctccac

SEQ ID NO: 60149 - DNA, 20 bp, synthetic construct
  source 1..20: mol_type = other DNA
tcggctcactgcaacctcca

SEQ ID NO: 60150 - DNA, 20 bp, synthetic construct
  source 1..20: mol_type = other DNA
ctcggctcactgcaacctcc

SEQ ID NO: 60151 - DNA, 20 bp, synthetic construct
  source 1..20: mol_type = other DNA
tctcggctcactgcaacctc

SEQ ID NO: 60152 - DNA, 20 bp, synthetic construct
  source 1..20: mol_type = other DNA
atctcggctcactgcaacct

SEQ ID NO: 60153 - DNA, 20 bp, synthetic construct
  source 1..20: mol_type = other DNA
gatctcggctcactgcaacc

SEQ ID NO: 60154 - DNA, 20 bp, synthetic construct
  source 1..20: mol_type = other DNA
cgatctcggctcactgcaac

SEQ ID NO: 60155 - DNA, 20 bp, synthetic construct
  source 1..20: mol_type = other DNA
gcgatctcggctcactgcaa

SEQ ID NO: 60156 - DNA, 20 bp, synthetic construct
  source 1..20: mol_type = other DNA
cgcgatctcggctcactgca

SEQ ID NO: 60157 - DNA, 20 bp, synthetic construct
  source 1..20: mol_type = other DNA
gcgcgatctcggctcactgc

SEQ ID NO: 60158 - DNA, 20 bp, synthetic construct
  source 1..20: mol_type = other DNA
ggcgcgatctcggctcactg

SEQ ID NO: 60159 - DNA, 20 bp, synthetic construct
  source 1..20: mol_type = other DNA
tggcgcgatctcggctcact

SEQ ID NO: 60160 - DNA, 20 bp, synthetic construct
  source 1..20: mol_type = other DNA
atggcgcgatctcggctcac

SEQ ID NO: 60161 - DNA, 20 bp, synthetic construct
  source 1..20: mol_type = other DNA
aatggcgcgatctcggctca

SEQ ID NO: 60162 - DNA, 20 bp, synthetic construct
  source 1..20: mol_type = other DNA
caatggcgcgatctcggctc

SEQ ID NO: 60163 - DNA, 20 bp, synthetic construct
  source 1..20: mol_type = other DNA
gcaatggcgcgatctcggct

SEQ ID NO: 60164 - DNA, 20 bp, synthetic construct
  source 1..20: mol_type = other DNA
tgcaatggcgcgatctcggc

SEQ ID NO: 60165 - DNA, 20 bp, synthetic construct
  source 1..20: mol_type = other DNA
gtgcaatggcgcgatctcgg

SEQ ID NO: 60166 - DNA, 20 bp, synthetic construct
  source 1..20: mol_type = other DNA
agtgcaatggcgcgatctcg

SEQ ID NO: 60167 - DNA, 20 bp, synthetic construct
  source 1..20: mol_type = other DNA
gagtgcaatggcgcgatctc

SEQ ID NO: 60168 - DNA, 20 bp, synthetic construct
  source 1..20: mol_type = other DNA
ggagtgcaatggcgcgatct

SEQ ID NO: 60169 - DNA, 20 bp, synthetic construct
  source 1..20: mol_type = other DNA
tggagtgcaatggcgcgatc

SEQ ID NO: 60170 - DNA, 20 bp, synthetic construct
  source 1..20: mol_type = other DNA
ctggagtgcaatggcgcgat

SEQ ID NO: 60171 - DNA, 20 bp, synthetic construct
  source 1..20: mol_type = other DNA
gctggagtgcaatggcgcga

SEQ ID NO: 60172 - DNA, 20 bp, synthetic construct
  source 1..20: mol_type = other DNA
ggctggagtgcaatggcgcg

SEQ ID NO: 60173 - DNA, 20 bp, synthetic construct
  source 1..20: mol_type = other DNA
aggctggagtgcaatggcgc

SEQ ID NO: 60174 - DNA, 20 bp, synthetic construct
  source 1..20: mol_type = other DNA
caggctggagtgcaatggcg

SEQ ID NO: 60175 - DNA, 20 bp, synthetic construct
  source 1..20: mol_type = other DNA
ccaggctggagtgcaatggc

SEQ ID NO: 60176 - DNA, 20 bp, synthetic construct
  source 1..20: mol_type = other DNA
cccaggctggagtgcaatgg

SEQ ID NO: 60177 - DNA, 20 bp, synthetic construct
  source 1..20: mol_type = other DNA
gcccaggctggagtgcaatg

SEQ ID NO: 60178 - DNA, 20 bp, synthetic construct
  source 1..20: mol_type = other DNA
tgcccaggctggagtgcaat

SEQ ID NO: 60179 - DNA, 20 bp, synthetic construct
  source 1..20: mol_type = other DNA
ttgcccaggctggagtgcaa

SEQ ID NO: 60180 - DNA, 20 bp, synthetic construct
  source 1..20: mol_type = other DNA
gttgcccaggctggagtgca

SEQ ID NO: 60181 - DNA, 20 bp, synthetic construct
  source 1..20: mol_type = other DNA
tgttgcccaggctggagtgc

SEQ ID NO: 60182 - DNA, 20 bp, synthetic construct
  source 1..20: mol_type = other DNA
ttgttgcccaggctggagtg

SEQ ID NO: 60183 - DNA, 20 bp, synthetic construct
  source 1..20: mol_type = other DNA
cttgttgcccaggctggagt

SEQ ID NO: 60184 - DNA, 20 bp, synthetic construct
  source 1..20: mol_type = other DNA
tcttgttgcccaggctggag

SEQ ID NO: 60185 - DNA, 20 bp, synthetic construct
  source 1..20: mol_type = other DNA
ctcttgttgcccaggctgga

SEQ ID NO: 60186 - DNA, 20 bp, synthetic construct
  source 1..20: mol_type = other DNA
actcttgttgcccaggctgg

SEQ ID NO: 60187 - DNA, 20 bp, synthetic construct
  source 1..20: mol_type = other DNA
tactcttgttgcccaggctg

SEQ ID NO: 60188 - DNA, 20 bp, synthetic construct
  source 1..20: mol_type = other DNA
ttactcttgttgcccaggct

SEQ ID NO: 60189 - DNA, 20 bp, synthetic construct
  source 1..20: mol_type = other DNA
tttactcttgttgcccaggc

SEQ ID NO: 60190 - DNA, 20 bp, synthetic construct
  source 1..20: mol_type = other DNA
ttttactcttgttgcccagg

SEQ ID NO: 60191 - DNA, 20 bp, synthetic construct
  source 1..20: mol_type = other DNA
gttttactcttgttgcccag

SEQ ID NO: 60192 - DNA, 20 bp, synthetic construct
  source 1..20: mol_type = other DNA
agttttactcttgttgccca

SEQ ID NO: 60193 - DNA, 20 bp, synthetic construct
  source 1..20: mol_type = other DNA
gagttttactcttgttgccc

SEQ ID NO: 60194 - DNA, 20 bp, synthetic construct
  source 1..20: mol_type = other DNA
agagttttactcttgttgcc

SEQ ID NO: 60195 - DNA, 20 bp, synthetic construct
  source 1..20: mol_type = other DNA
cagagttttactcttgttgc

SEQ ID NO: 60196 - DNA, 20 bp, synthetic construct
  source 1..20: mol_type = other DNA
acagagttttactcttgttg

SEQ ID NO: 60197 - DNA, 20 bp, synthetic construct
  source 1..20: mol_type = other DNA
aacagagttttactcttgtt

SEQ ID NO: 60198 - DNA, 20 bp, synthetic construct
  source 1..20: mol_type = other DNA
aaacagagttttactcttgt

SEQ ID NO: 60199 - DNA, 20 bp, synthetic construct
  source 1..20: mol_type = other DNA
gaaacagagttttactcttg

SEQ ID NO: 60200 - DNA, 20 bp, synthetic construct
  source 1..20: mol_type = other DNA
tgaaacagagttttactctt

SEQ ID NO: 60201 - DNA, 20 bp, synthetic construct
  source 1..20: mol_type = other DNA
ttgaaacagagttttactct

SEQ ID NO: 60202 - DNA, 20 bp, synthetic construct
  source 1..20: mol_type = other DNA
tttgaaacagagttttactc

SEQ ID NO: 60203 - DNA, 20 bp, synthetic construct
  source 1..20: mol_type = other DNA
ttttgaaacagagttttact

SEQ ID NO: 60204 - DNA, 20 bp, synthetic construct
  source 1..20: mol_type = other DNA
tttttgaaacagagttttac

SEQ ID NO: 60205 - DNA, 20 bp, synthetic construct
  source 1..20: mol_type = other DNA
ttttttgaaacagagtttta

SEQ ID NO: 60206 - DNA, 20 bp, synthetic construct
  source 1..20: mol_type = other DNA
tttttttgaaacagagtttt

SEQ ID NO: 60207 - DNA, 20 bp, synthetic construct
  source 1..20: mol_type = other DNA
ttttttttgaaacagagttt

SEQ ID NO: 60208 - DNA, 20 bp, synthetic construct
  source 1..20: mol_type = other DNA
tttttttttgaaacagagtt

SEQ ID NO: 60209 - DNA, 20 bp, synthetic construct
  source 1..20: mol_type = other DNA
ttttttttttgaaacagagt

SEQ ID NO: 60210 - DNA, 20 bp, synthetic construct
  source 1..20: mol_type = other DNA
tttttttttttgaaacagag

SEQ ID NO: 60211 - DNA, 20 bp, synthetic construct
  source 1..20: mol_type = other DNA
ttttttttttttgaaacaga

SEQ ID NO: 60212 - DNA, 20 bp, synthetic construct
  source 1..20: mol_type = other DNA
tttttttttttttgaaacag

SEQ ID NO: 60213 - DNA, 20 bp, synthetic construct
  source 1..20: mol_type = other DNA
ttttttttttttttgaaaca

SEQ ID NO: 60214 - DNA, 20 bp, synthetic construct
  source 1..20: mol_type = other DNA
tttttttttttttttgaaac

SEQ ID NO: 60215 - DNA, 20 bp, synthetic construct
  source 1..20: mol_type = other DNA
ttttttttttttttttgaaa

SEQ ID NO: 60216 - DNA, 20 bp, synthetic construct
  source 1..20: mol_type = other DNA
tttttttttttttttttgaa

SEQ ID NO: 60217 - DNA, 20 bp, synthetic construct
  source 1..20: mol_type = other DNA
ttttttttttttttttttga

SEQ ID NO: 60218 - DNA, 20 bp, synthetic construct
  source 1..20: mol_type = other DNA
tttttttttttttttttttg

SEQ ID NO: 60219 - DNA, 20 bp, synthetic construct
  source 1..20: mol_type = other DNA
tttttttttttttttttttt

SEQ ID NO: 60220 - DNA, 20 bp, synthetic construct
  source 1..20: mol_type = other DNA
tttttttttttttttttttt

SEQ ID NO: 60221 - DNA, 20 bp, synthetic construct
  source 1..20: mol_type = other DNA
tttttttttttttttttttt

SEQ ID NO: 60222 - DNA, 20 bp, synthetic construct
  source 1..20: mol_type = other DNA
cttttttttttttttttttt

SEQ ID NO: 60223 - DNA, 20 bp, synthetic construct
  source 1..20: mol_type = other DNA
tctttttttttttttttttt

SEQ ID NO: 60224 - DNA, 20 bp, synthetic construct
  source 1..20: mol_type = other DNA
ttcttttttttttttttttt

SEQ ID NO: 60225 - DNA, 20 bp, synthetic construct
  source 1..20: mol_type = other DNA
attctttttttttttttttt

SEQ ID NO: 60226 - DNA, 20 bp, synthetic construct
  source 1..20: mol_type = other DNA
aattcttttttttttttttt

SEQ ID NO: 60227 - DNA, 20 bp, synthetic construct
  source 1..20: mol_type = other DNA
taattctttttttttttttt

SEQ ID NO: 60228 - DNA, 20 bp, synthetic construct
  source 1..20: mol_type = other DNA
ataattcttttttttttttt

SEQ ID NO: 60229 - DNA, 20 bp, synthetic construct
  source 1..20: mol_type = other DNA
tataattctttttttttttt

SEQ ID NO: 60230 - DNA, 20 bp, synthetic construct
  source 1..20: mol_type = other DNA
ttataattcttttttttttt

SEQ ID NO: 60231 - DNA, 20 bp, synthetic construct
  source 1..20: mol_type = other DNA
gttataattctttttttttt

SEQ ID NO: 60232 - DNA, 20 bp, synthetic construct
  source 1..20: mol_type = other DNA
agttataattcttttttttt

SEQ ID NO: 60233 - DNA, 20 bp, synthetic construct
  source 1..20: mol_type = other DNA
cagttataattctttttttt

SEQ ID NO: 60234 - DNA, 20 bp, synthetic construct
  source 1..20: mol_type = other DNA
acagttataattcttttttt

SEQ ID NO: 60235 - DNA, 20 bp, synthetic construct
  source 1..20: mol_type = other DNA
gacagttataattctttttt

SEQ ID NO: 60236 - DNA, 20 bp, synthetic construct
  source 1..20: mol_type = other DNA
tgacagttataattcttttt

SEQ ID NO: 60237 - DNA, 20 bp, synthetic construct
  source 1..20: mol_type = other DNA
gtgacagttataattctttt

SEQ ID NO: 60238 - DNA, 20 bp, synthetic construct
  source 1..20: mol_type = other DNA
tgtgacagttataattcttt

SEQ ID NO: 60239 - DNA, 20 bp, synthetic construct
  source 1..20: mol_type = other DNA
ctgtgacagttataattctt

SEQ ID NO: 60240 - DNA, 20 bp, synthetic construct
  source 1..20: mol_type = other DNA
actgtgacagttataattct

SEQ ID NO: 60241 - DNA, 20 bp, synthetic construct
  source 1..20: mol_type = other DNA
cactgtgacagttataattc

SEQ ID NO: 60242 - DNA, 20 bp, synthetic construct
  source 1..20: mol_type = other DNA
ccactgtgacagttataatt

SEQ ID NO: 60243 - DNA, 20 bp, synthetic construct
  source 1..20: mol_type = other DNA
gccactgtgacagttataat

SEQ ID NO: 60244 - DNA, 20 bp, synthetic construct
  source 1..20: mol_type = other DNA
agccactgtgacagttataa

SEQ ID NO: 60245 - DNA, 20 bp, synthetic construct
  source 1..20: mol_type = other DNA
tagccactgtgacagttata

SEQ ID NO: 60246 - DNA, 20 bp, synthetic construct
  source 1..20: mol_type = other DNA
gtagccactgtgacagttat

SEQ ID NO: 60247 - DNA, 20 bp, synthetic construct
  source 1..20: mol_type = other DNA
cgtagccactgtgacagtta

SEQ ID NO: 60248 - DNA, 20 bp, synthetic construct
  source 1..20: mol_type = other DNA
acgtagccactgtgacagtt

SEQ ID NO: 60249 - DNA, 20 bp, synthetic construct
  source 1..20: mol_type = other DNA
tacgtagccactgtgacagt

SEQ ID NO: 60250 - DNA, 20 bp, synthetic construct
  source 1..20: mol_type = other DNA
atacgtagccactgtgacag

SEQ ID NO: 60251 - DNA, 20 bp, synthetic construct
  source 1..20: mol_type = other DNA
catacgtagccactgtgaca

SEQ ID NO: 60252 - DNA, 20 bp, synthetic construct
  source 1..20: mol_type = other DNA
ccatacgtagccactgtgac

SEQ ID NO: 60253 - DNA, 20 bp, synthetic construct
  source 1..20: mol_type = other DNA
tccatacgtagccactgtga

SEQ ID NO: 60254 - DNA, 20 bp, synthetic construct
  source 1..20: mol_type = other DNA
ctccatacgtagccactgtg

SEQ ID NO: 60255 - DNA, 20 bp, synthetic construct
  source 1..20: mol_type = other DNA
gctccatacgtagccactgt

SEQ ID NO: 60256 - DNA, 20 bp, synthetic construct
  source 1..20: mol_type = other DNA
tgctccatacgtagccactg

SEQ ID NO: 60257 - DNA, 20 bp, synthetic construct
  source 1..20: mol_type = other DNA
atgctccatacgtagccact

SEQ ID NO: 60258 - DNA, 20 bp, synthetic construct
  source 1..20: mol_type = other DNA
gatgctccatacgtagccac

SEQ ID NO: 60259 - DNA, 20 bp, synthetic construct
  source 1..20: mol_type = other DNA
ggatgctccatacgtagcca

SEQ ID NO: 60260 - DNA, 20 bp, synthetic construct
  source 1..20: mol_type = other DNA
tggatgctccatacgtagcc

SEQ ID NO: 60261 - DNA, 20 bp, synthetic construct
  source 1..20: mol_type = other DNA
ttggatgctccatacgtagc

SEQ ID NO: 60262 - DNA, 20 bp, synthetic construct
  source 1..20: mol_type = other DNA
tttggatgctccatacgtag

SEQ ID NO: 60263 - DNA, 20 bp, synthetic construct
  source 1..20: mol_type = other DNA
ttttggatgctccatacgta

SEQ ID NO: 60264 - DNA, 20 bp, synthetic construct
  source 1..20: mol_type = other DNA
gttttggatgctccatacgt

SEQ ID NO: 60265 - DNA, 20 bp, synthetic construct
  source 1..20: mol_type = other DNA
agttttggatgctccatacg

SEQ ID NO: 60266 - DNA, 20 bp, synthetic construct
  source 1..20: mol_type = other DNA
cagttttggatgctccatac

SEQ ID NO: 60267 - DNA, 20 bp, synthetic construct
  source 1..20: mol_type = other DNA
tcagttttggatgctccata

SEQ ID NO: 60268 - DNA, 20 bp, synthetic construct
  source 1..20: mol_type = other DNA
ttcagttttggatgctccat

SEQ ID NO: 60269 - DNA, 20 bp, synthetic construct
  source 1..20: mol_type = other DNA
attcagttttggatgctcca

SEQ ID NO: 60270 - DNA, 20 bp, synthetic construct
  source 1..20: mol_type = other DNA
aattcagttttggatgctcc

SEQ ID NO: 60271 - DNA, 20 bp, synthetic construct
  source 1..20: mol_type = other DNA
aaattcagttttggatgctc

SEQ ID NO: 60272 - DNA, 20 bp, synthetic construct
  source 1..20: mol_type = other DNA
taaattcagttttggatgct

SEQ ID NO: 60273 - DNA, 20 bp, synthetic construct
  source 1..20: mol_type = other DNA
ataaattcagttttggatgc

SEQ ID NO: 60274 - DNA, 20 bp, synthetic construct
  source 1..20: mol_type = other DNA
cataaattcagttttggatg

SEQ ID NO: 60275 - DNA, 20 bp, synthetic construct
  source 1..20: mol_type = other DNA
acataaattcagttttggat

SEQ ID NO: 60276 - DNA, 20 bp, synthetic construct
  source 1..20: mol_type = other DNA
cacataaattcagttttgga

SEQ ID NO: 60277 - DNA, 20 bp, synthetic construct
  source 1..20: mol_type = other DNA
ccacataaattcagttttgg

SEQ ID NO: 60278 - DNA, 20 bp, synthetic construct
  source 1..20: mol_type = other DNA
cccacataaattcagttttg

SEQ ID NO: 60279 - DNA, 20 bp, synthetic construct
  source 1..20: mol_type = other DNA
acccacataaattcagtttt

SEQ ID NO: 60280 - DNA, 20 bp, synthetic construct
  source 1..20: mol_type = other DNA
tacccacataaattcagttt

SEQ ID NO: 60281 - DNA, 20 bp, synthetic construct
  source 1..20: mol_type = other DNA
atacccacataaattcagtt

SEQ ID NO: 60282 - DNA, 20 bp, synthetic construct
  source 1..20: mol_type = other DNA
aatacccacataaattcagt

SEQ ID NO: 60283 - DNA, 20 bp, synthetic construct
  source 1..20: mol_type = other DNA
aaatacccacataaattcag

SEQ ID NO: 60284 - DNA, 20 bp, synthetic construct
  source 1..20: mol_type = other DNA
aaaatacccacataaattca

SEQ ID NO: 60285 - DNA, 20 bp, synthetic construct
  source 1..20: mol_type = other DNA
taaaatacccacataaattc

SEQ ID NO: 60286 - DNA, 20 bp, synthetic construct
  source 1..20: mol_type = other DNA
ataaaatacccacataaatt

SEQ ID NO: 60287 - DNA, 20 bp, synthetic construct
  source 1..20: mol_type = other DNA
aataaaatacccacataaat

SEQ ID NO: 60288 - DNA, 20 bp, synthetic construct
  source 1..20: mol_type = other DNA
taataaaatacccacataaa

SEQ ID NO: 60289 - DNA, 20 bp, synthetic construct
  source 1..20: mol_type = other DNA
ttaataaaatacccacataa

SEQ ID NO: 60290 - DNA, 20 bp, synthetic construct
  source 1..20: mol_type = other DNA
attaataaaatacccacata

SEQ ID NO: 60291 - DNA, 20 bp, synthetic construct
  source 1..20: mol_type = other DNA
tattaataaaatacccacat

SEQ ID NO: 60292 - DNA, 20 bp, synthetic construct
  source 1..20: mol_type = other DNA
atattaataaaatacccaca

SEQ ID NO: 60293 - DNA, 20 bp, synthetic construct
  source 1..20: mol_type = other DNA
catattaataaaatacccac

SEQ ID NO: 60294 - DNA, 20 bp, synthetic construct
  source 1..20: mol_type = other DNA
gcatattaataaaataccca

SEQ ID NO: 60295 - DNA, 20 bp, synthetic construct
  source 1..20: mol_type = other DNA
tgcatattaataaaataccc

SEQ ID NO: 60296 - DNA, 20 bp, synthetic construct
  source 1..20: mol_type = other DNA
ttgcatattaataaaatacc

SEQ ID NO: 60297 - DNA, 20 bp, synthetic construct
  source 1..20: mol_type = other DNA
attgcatattaataaaatac

SEQ ID NO: 60298 - DNA, 20 bp, synthetic construct
  source 1..20: mol_type = other DNA
tattgcatattaataaaata

SEQ ID NO: 60299 - DNA, 20 bp, synthetic construct
  source 1..20: mol_type = other DNA
atattgcatattaataaaat

SEQ ID NO: 60300 - DNA, 20 bp, synthetic construct
  source 1..20: mol_type = other DNA
tatattgcatattaataaaa

SEQ ID NO: 60301 - DNA, 20 bp, synthetic construct
  source 1..20: mol_type = other DNA
ctatattgcatattaataaa

SEQ ID NO: 60302 - DNA, 20 bp, synthetic construct
  source 1..20: mol_type = other DNA
gctatattgcatattaataa

SEQ ID NO: 60303 - DNA, 20 bp, synthetic construct
  source 1..20: mol_type = other DNA
tgctatattgcatattaata

SEQ ID NO: 60304 - DNA, 20 bp, synthetic construct
  source 1..20: mol_type = other DNA
gtgctatattgcatattaat

SEQ ID NO: 60305 - DNA, 20 bp, synthetic construct
  source 1..20: mol_type = other DNA
agtgctatattgcatattaa

SEQ ID NO: 60306 - DNA, 20 bp, synthetic construct
  source 1..20: mol_type = other DNA
aagtgctatattgcatatta

SEQ ID NO: 60307 - DNA, 20 bp, synthetic construct
  source 1..20: mol_type = other DNA
aaagtgctatattgcatatt

SEQ ID NO: 60308 - DNA, 20 bp, synthetic construct
  source 1..20: mol_type = other DNA
taaagtgctatattgcatat

SEQ ID NO: 60309 - DNA, 20 bp, synthetic construct
  source 1..20: mol_type = other DNA
ttaaagtgctatattgcata

SEQ ID NO: 60310 - DNA, 20 bp, synthetic construct
  source 1..20: mol_type = other DNA
attaaagtgctatattgcat

SEQ ID NO: 60311 - DNA, 20 bp, synthetic construct
  source 1..20: mol_type = other DNA
aattaaagtgctatattgca

SEQ ID NO: 60312 - DNA, 20 bp, synthetic construct
  source 1..20: mol_type = other DNA
gaattaaagtgctatattgc

SEQ ID NO: 60313 - DNA, 20 bp, synthetic construct
  source 1..20: mol_type = other DNA
agaattaaagtgctatattg

SEQ ID NO: 60314 - DNA, 20 bp, synthetic construct
  source 1..20: mol_type = other DNA
cagaattaaagtgctatatt

SEQ ID NO: 60315 - DNA, 20 bp, synthetic construct
  source 1..20: mol_type = other DNA
ccagaattaaagtgctatat

SEQ ID NO: 60316 - DNA, 20 bp, synthetic construct
  source 1..20: mol_type = other DNA
tccagaattaaagtgctata

SEQ ID NO: 60317 - DNA, 20 bp, synthetic construct
  source 1..20: mol_type = other DNA
ctccagaattaaagtgctat

SEQ ID NO: 60318 - DNA, 20 bp, synthetic construct
  source 1..20: mol_type = other DNA
cctccagaattaaagtgcta

SEQ ID NO: 60319 - DNA, 20 bp, synthetic construct
  source 1..20: mol_type = other DNA
tcctccagaattaaagtgct

SEQ ID NO: 60320 - DNA, 20 bp, synthetic construct
  source 1..20: mol_type = other DNA
ttcctccagaattaaagtgc

SEQ ID NO: 60321 - DNA, 20 bp, synthetic construct
  source 1..20: mol_type = other DNA
tttcctccagaattaaagtg

SEQ ID NO: 60322 - DNA, 20 bp, synthetic construct
  source 1..20: mol_type = other DNA
ctttcctccagaattaaagt

SEQ ID NO: 60323 - DNA, 20 bp, synthetic construct
  source 1..20: mol_type = other DNA
cctttcctccagaattaaag

SEQ ID NO: 60324 - DNA, 20 bp, synthetic construct
  source 1..20: mol_type = other DNA
acctttcctccagaattaaa

SEQ ID NO: 60325 - DNA, 20 bp, synthetic construct
  source 1..20: mol_type = other DNA
cacctttcctccagaattaa

SEQ ID NO: 60326 - DNA, 20 bp, synthetic construct
  source 1..20: mol_type = other DNA
ccacctttcctccagaatta

SEQ ID NO: 60327 - DNA, 20 bp, synthetic construct
  source 1..20: mol_type = other DNA
tccacctttcctccagaatt

SEQ ID NO: 60328 - DNA, 20 bp, synthetic construct
  source 1..20: mol_type = other DNA
atccacctttcctccagaat

SEQ ID NO: 60329 - DNA, 20 bp, synthetic construct
  source 1..20: mol_type = other DNA
aatccacctttcctccagaa

SEQ ID NO: 60330 - DNA, 20 bp, synthetic construct
  source 1..20: mol_type = other DNA
taatccacctttcctccaga

SEQ ID NO: 60331 - DNA, 20 bp, synthetic construct
  source 1..20: mol_type = other DNA
ataatccacctttcctccag

SEQ ID NO: 60332 - DNA, 20 bp, synthetic construct
  source 1..20: mol_type = other DNA
aataatccacctttcctcca

SEQ ID NO: 60333 - DNA, 20 bp, synthetic construct
  source 1..20: mol_type = other DNA
gaataatccacctttcctcc

SEQ ID NO: 60334 - DNA, 20 bp, synthetic construct
  source 1..20: mol_type = other DNA
tgaataatccacctttcctc

SEQ ID NO: 60335 - DNA, 20 bp, synthetic construct
  source 1..20: mol_type = other DNA
ctgaataatccacctttcct

SEQ ID NO: 60336 - DNA, 20 bp, synthetic construct
  source 1..20: mol_type = other DNA
actgaataatccacctttcc

SEQ ID NO: 60337 - DNA, 20 bp, synthetic construct
  source 1..20: mol_type = other DNA
tactgaataatccacctttc

SEQ ID NO: 60338 - DNA, 20 bp, synthetic construct
  source 1..20: mol_type = other DNA
ttactgaataatccaccttt

SEQ ID NO: 60339 - DNA, 20 bp, synthetic construct
  source 1..20: mol_type = other DNA
tttactgaataatccacctt

SEQ ID NO: 60340 - DNA, 20 bp, synthetic construct
  source 1..20: mol_type = other DNA
atttactgaataatccacct

SEQ ID NO: 60341 - DNA, 20 bp, synthetic construct
  source 1..20: mol_type = other DNA
catttactgaataatccacc

SEQ ID NO: 60342 - DNA, 20 bp, synthetic construct
  source 1..20: mol_type = other DNA
tcatttactgaataatccac

SEQ ID NO: 60343 - DNA, 20 bp, synthetic construct
  source 1..20: mol_type = other DNA
atcatttactgaataatcca

SEQ ID NO: 60344 - DNA, 20 bp, synthetic construct
  source 1..20: mol_type = other DNA
aatcatttactgaataatcc

SEQ ID NO: 60345 - DNA, 20 bp, synthetic construct
  source 1..20: mol_type = other DNA
gaatcatttactgaataatc

SEQ ID NO: 60346 - DNA, 20 bp, synthetic construct
  source 1..20: mol_type = other DNA
agaatcatttactgaataat

SEQ ID NO: 60347 - DNA, 20 bp, synthetic construct
  source 1..20: mol_type = other DNA
cagaatcatttactgaataa

SEQ ID NO: 60348 - DNA, 20 bp, synthetic construct
  source 1..20: mol_type = other DNA
ccagaatcatttactgaata

SEQ ID NO: 60349 - DNA, 20 bp, synthetic construct
  source 1..20: mol_type = other DNA
cccagaatcatttactgaat

SEQ ID NO: 60350 - DNA, 20 bp, synthetic construct
  source 1..20: mol_type = other DNA
tcccagaatcatttactgaa

SEQ ID NO: 60351 - DNA, 20 bp, synthetic construct
  source 1..20: mol_type = other DNA
gtcccagaatcatttactga

SEQ ID NO: 60352 - DNA, 20 bp, synthetic construct
  source 1..20: mol_type = other DNA
tgtcccagaatcatttactg

SEQ ID NO: 60353 - DNA, 20 bp, synthetic construct
  source 1..20: mol_type = other DNA
atgtcccagaatcatttact

SEQ ID NO: 60354 - DNA, 20 bp, synthetic construct
  source 1..20: mol_type = other DNA
aatgtcccagaatcatttac

SEQ ID NO: 60355 - DNA, 20 bp, synthetic construct
  source 1..20: mol_type = other DNA
caatgtcccagaatcattta

SEQ ID NO: 60356 - DNA, 20 bp, synthetic construct
  source 1..20: mol_type = other DNA
ccaatgtcccagaatcattt

SEQ ID NO: 60357 - DNA, 20 bp, synthetic construct
  source 1..20: mol_type = other DNA
cccaatgtcccagaatcatt

SEQ ID NO: 60358 - DNA, 20 bp, synthetic construct
  source 1..20: mol_type = other DNA
ccccaatgtcccagaatcat

SEQ ID NO: 60359 - DNA, 20 bp, synthetic construct
  source 1..20: mol_type = other DNA
tccccaatgtcccagaatca

SEQ ID NO: 60360 - DNA, 20 bp, synthetic construct
  source 1..20: mol_type = other DNA
gtccccaatgtcccagaatc

SEQ ID NO: 60361 - DNA, 20 bp, synthetic construct
  source 1..20: mol_type = other DNA
tgtccccaatgtcccagaat

SEQ ID NO: 60362 - DNA, 20 bp, synthetic construct
  source 1..20: mol_type = other DNA
ttgtccccaatgtcccagaa

SEQ ID NO: 60363 - DNA, 20 bp, synthetic construct
  source 1..20: mol_type = other DNA
tttgtccccaatgtcccaga

SEQ ID NO: 60364 - DNA, 20 bp, synthetic construct
  source 1..20: mol_type = other DNA
atttgtccccaatgtcccag

SEQ ID NO: 60365 - DNA, 20 bp, synthetic construct
  source 1..20: mol_type = other DNA
aatttgtccccaatgtccca

SEQ ID NO: 60366 - DNA, 20 bp, synthetic construct
  source 1..20: mol_type = other DNA
taatttgtccccaatgtccc

SEQ ID NO: 60367 - DNA, 20 bp, synthetic construct
  source 1..20: mol_type = other DNA
ctaatttgtccccaatgtcc

SEQ ID NO: 60368 - DNA, 20 bp, synthetic construct
  source 1..20: mol_type = other DNA
tctaatttgtccccaatgtc

SEQ ID NO: 60369 - DNA, 20 bp, synthetic construct
  source 1..20: mol_type = other DNA
atctaatttgtccccaatgt

SEQ ID NO: 60370 - DNA, 20 bp, synthetic construct
  source 1..20: mol_type = other DNA
tatctaatttgtccccaatg

SEQ ID NO: 60371 - DNA, 20 bp, synthetic construct
  source 1..20: mol_type = other DNA
gtatctaatttgtccccaat

SEQ ID NO: 60372 - DNA, 20 bp, synthetic construct
  source 1..20: mol_type = other DNA
ggtatctaatttgtccccaa

SEQ ID NO: 60373 - DNA, 20 bp, synthetic construct
  source 1..20: mol_type = other DNA
aggtatctaatttgtcccca

SEQ ID NO: 60374 - DNA, 20 bp, synthetic construct
  source 1..20: mol_type = other DNA
taggtatctaatttgtcccc

SEQ ID NO: 60375 - DNA, 20 bp, synthetic construct
  source 1..20: mol_type = other DNA
gtaggtatctaatttgtccc

SEQ ID NO: 60376 - DNA, 20 bp, synthetic construct
  source 1..20: mol_type = other DNA
agtaggtatctaatttgtcc

SEQ ID NO: 60377 - DNA, 20 bp, synthetic construct
  source 1..20: mol_type = other DNA
aagtaggtatctaatttgtc

SEQ ID NO: 60378 - DNA, 20 bp, synthetic construct
  source 1..20: mol_type = other DNA
gaagtaggtatctaatttgt

SEQ ID NO: 60379 - DNA, 20 bp, synthetic construct
  source 1..20: mol_type = other DNA
tgaagtaggtatctaatttg

SEQ ID NO: 60380 - DNA, 20 bp, synthetic construct
  source 1..20: mol_type = other DNA
gtgaagtaggtatctaattt

SEQ ID NO: 60381 - DNA, 20 bp, synthetic construct
  source 1..20: mol_type = other DNA
tgtgaagtaggtatctaatt

SEQ ID NO: 60382 - DNA, 20 bp, synthetic construct
  source 1..20: mol_type = other DNA
gtgtgaagtaggtatctaat

SEQ ID NO: 60383 - DNA, 20 bp, synthetic construct
  source 1..20: mol_type = other DNA
agtgtgaagtaggtatctaa

SEQ ID NO: 60384 - DNA, 20 bp, synthetic construct
  source 1..20: mol_type = other DNA
cagtgtgaagtaggtatcta

SEQ ID NO: 60385 - DNA, 20 bp, synthetic construct
  source 1..20: mol_type = other DNA
tcagtgtgaagtaggtatct

SEQ ID NO: 60386 - DNA, 20 bp, synthetic construct
  source 1..20: mol_type = other DNA
atcagtgtgaagtaggtatc

SEQ ID NO: 60387 - DNA, 20 bp, synthetic construct
  source 1..20: mol_type = other DNA
tatcagtgtgaagtaggtat

SEQ ID NO: 60388 - DNA, 20 bp, synthetic construct
  source 1..20: mol_type = other DNA
ttatcagtgtgaagtaggta

SEQ ID NO: 60389 - DNA, 20 bp, synthetic construct
  source 1..20: mol_type = other DNA
tttatcagtgtgaagtaggt

SEQ ID NO: 60390 - DNA, 20 bp, synthetic construct
  source 1..20: mol_type = other DNA
atttatcagtgtgaagtagg

SEQ ID NO: 60391 - DNA, 20 bp, synthetic construct
  source 1..20: mol_type = other DNA
tatttatcagtgtgaagtag

SEQ ID NO: 60392 - DNA, 20 bp, synthetic construct
  source 1..20: mol_type = other DNA
ttatttatcagtgtgaagta

SEQ ID NO: 60393 - DNA, 20 bp, synthetic construct
  source 1..20: mol_type = other DNA
tttatttatcagtgtgaagt

SEQ ID NO: 60394 - DNA, 20 bp, synthetic construct
  source 1..20: mol_type = other DNA
ttttatttatcagtgtgaag

SEQ ID NO: 60395 - DNA, 20 bp, synthetic construct
  source 1..20: mol_type = other DNA
gttttatttatcagtgtgaa

SEQ ID NO: 60396 - DNA, 20 bp, synthetic construct
  source 1..20: mol_type = other DNA
ggttttatttatcagtgtga

SEQ ID NO: 60397 - DNA, 20 bp, synthetic construct
  source 1..20: mol_type = other DNA
tggttttatttatcagtgtg

SEQ ID NO: 60398 - DNA, 20 bp, synthetic construct
  source 1..20: mol_type = other DNA
ttggttttatttatcagtgt

SEQ ID NO: 60399 - DNA, 20 bp, synthetic construct
  source 1..20: mol_type = other DNA
tttggttttatttatcagtg

SEQ ID NO: 60400 - DNA, 20 bp, synthetic construct
  source 1..20: mol_type = other DNA
atttggttttatttatcagt

SEQ ID NO: 60401 - DNA, 20 bp, synthetic construct
  source 1..20: mol_type = other DNA
tatttggttttatttatcag

SEQ ID NO: 60402 - DNA, 20 bp, synthetic construct
  source 1..20: mol_type = other DNA
ctatttggttttatttatca

SEQ ID NO: 60403 - DNA, 20 bp, synthetic construct
  source 1..20: mol_type = other DNA
tctatttggttttatttatc

SEQ ID NO: 60404 - DNA, 20 bp, synthetic construct
  source 1..20: mol_type = other DNA
atctatttggttttatttat

SEQ ID NO: 60405 - DNA, 20 bp, synthetic construct
  source 1..20: mol_type = other DNA
aatctatttggttttattta

SEQ ID NO: 60406 - DNA, 20 bp, synthetic construct
  source 1..20: mol_type = other DNA
taatctatttggttttattt

SEQ ID NO: 60407 - DNA, 20 bp, synthetic construct
  source 1..20: mol_type = other DNA
ttaatctatttggttttatt

SEQ ID NO: 60408 - DNA, 20 bp, synthetic construct
  source 1..20: mol_type = other DNA
attaatctatttggttttat

SEQ ID NO: 60409 - DNA, 20 bp, synthetic construct
  source 1..20: mol_type = other DNA
cattaatctatttggtttta

SEQ ID NO: 60410 - DNA, 20 bp, synthetic construct
  source 1..20: mol_type = other DNA
tcattaatctatttggtttt

SEQ ID NO: 60411 - DNA, 20 bp, synthetic construct
  source 1..20: mol_type = other DNA
ctcattaatctatttggttt

SEQ ID NO: 60412 - DNA, 20 bp, synthetic construct
  source 1..20: mol_type = other DNA
tctcattaatctatttggtt

SEQ ID NO: 60413 - DNA, 20 bp, synthetic construct
  source 1..20: mol_type = other DNA
ttctcattaatctatttggt

SEQ ID NO: 60414 - DNA, 20 bp, synthetic construct
  source 1..20: mol_type = other DNA
tttctcattaatctatttgg

SEQ ID NO: 60415 - DNA, 20 bp, synthetic construct
  source 1..20: mol_type = other DNA
ttttctcattaatctatttg

SEQ ID NO: 60416 - DNA, 20 bp, synthetic construct
  source 1..20: mol_type = other DNA
gttttctcattaatctattt

SEQ ID NO: 60417 - DNA, 20 bp, synthetic construct
  source 1..20: mol_type = other DNA
agttttctcattaatctatt

SEQ ID NO: 60418 - DNA, 20 bp, synthetic construct
  source 1..20: mol_type = other DNA
cagttttctcattaatctat

SEQ ID NO: 60419 - DNA, 20 bp, synthetic construct
  source 1..20: mol_type = other DNA
acagttttctcattaatcta

SEQ ID NO: 60420 - DNA, 20 bp, synthetic construct
  source 1..20: mol_type = other DNA
cacagttttctcattaatct

SEQ ID NO: 60421 - DNA, 20 bp, synthetic construct
  source 1..20: mol_type = other DNA
tcacagttttctcattaatc

SEQ ID NO: 60422 - DNA, 20 bp, synthetic construct
  source 1..20: mol_type = other DNA
atcacagttttctcattaat

SEQ ID NO: 60423 - DNA, 20 bp, synthetic construct
  source 1..20: mol_type = other DNA
aatcacagttttctcattaa

SEQ ID NO: 60424 - DNA, 20 bp, synthetic construct
  source 1..20: mol_type = other DNA
taatcacagttttctcatta

SEQ ID NO: 60425 - DNA, 20 bp, synthetic construct
  source 1..20: mol_type = other DNA
ttaatcacagttttctcatt

SEQ ID NO: 60426 - DNA, 20 bp, synthetic construct
  source 1..20: mol_type = other DNA
tttaatcacagttttctcat

SEQ ID NO: 60427 - DNA, 20 bp, synthetic construct
  source 1..20: mol_type = other DNA
gtttaatcacagttttctca

SEQ ID NO: 60428 - DNA, 20 bp, synthetic construct
  source 1..20: mol_type = other DNA
tgtttaatcacagttttctc

SEQ ID NO: 60429 - DNA, 20 bp, synthetic construct
  source 1..20: mol_type = other DNA
ttgtttaatcacagttttct

SEQ ID NO: 60430 - DNA, 20 bp, synthetic construct
  source 1..20: mol_type = other DNA
tttgtttaatcacagttttc

SEQ ID NO: 60431 - DNA, 20 bp, synthetic construct
  source 1..20: mol_type = other DNA
ttttgtttaatcacagtttt

SEQ ID NO: 60432 - DNA, 20 bp, synthetic construct
  source 1..20: mol_type = other DNA
gttttgtttaatcacagttt

SEQ ID NO: 60433 - DNA, 20 bp, synthetic construct
  source 1..20: mol_type = other DNA
tgttttgtttaatcacagtt

SEQ ID NO: 60434 - DNA, 20 bp, synthetic construct
  source 1..20: mol_type = other DNA
ttgttttgtttaatcacagt

SEQ ID NO: 60435 - DNA, 20 bp, synthetic construct
  source 1..20: mol_type = other DNA
gttgttttgtttaatcacag

SEQ ID NO: 60436 - DNA, 20 bp, synthetic construct
  source 1..20: mol_type = other DNA
tgttgttttgtttaatcaca

SEQ ID NO: 60437 - DNA, 20 bp, synthetic construct
  source 1..20: mol_type = other DNA
gtgttgttttgtttaatcac

SEQ ID NO: 60438 - DNA, 20 bp, synthetic construct
  source 1..20: mol_type = other DNA
ggtgttgttttgtttaatca

SEQ ID NO: 60439 - DNA, 20 bp, synthetic construct
  source 1..20: mol_type = other DNA
gggtgttgttttgtttaatc

SEQ ID NO: 60440 - DNA, 20 bp, synthetic construct
  source 1..20: mol_type = other DNA
tgggtgttgttttgtttaat

SEQ ID NO: 60441 - DNA, 20 bp, synthetic construct
  source 1..20: mol_type = other DNA
ctgggtgttgttttgtttaa

SEQ ID NO: 60442 - DNA, 20 bp, synthetic construct
  source 1..20: mol_type = other DNA
tctgggtgttgttttgttta

SEQ ID NO: 60443 - DNA, 20 bp, synthetic construct
  source 1..20: mol_type = other DNA
gtctgggtgttgttttgttt

SEQ ID NO: 60444 - DNA, 20 bp, synthetic construct
  source 1..20: mol_type = other DNA
agtctgggtgttgttttgtt

SEQ ID NO: 60445 - DNA, 20 bp, synthetic construct
  source 1..20: mol_type = other DNA
tagtctgggtgttgttttgt

SEQ ID NO: 60446 - DNA, 20 bp, synthetic construct
  source 1..20: mol_type = other DNA
gtagtctgggtgttgttttg

SEQ ID NO: 60447 - DNA, 20 bp, synthetic construct
  source 1..20: mol_type = other DNA
tgtagtctgggtgttgtttt

SEQ ID NO: 60448 - DNA, 20 bp, synthetic construct
  source 1..20: mol_type = other DNA
gtgtagtctgggtgttgttt

SEQ ID NO: 60449 - DNA, 20 bp, synthetic construct
  source 1..20: mol_type = other DNA
agtgtagtctgggtgttgtt

SEQ ID NO: 60450 - DNA, 20 bp, synthetic construct
  source 1..20: mol_type = other DNA
cagtgtagtctgggtgttgt

SEQ ID NO: 60451 - DNA, 20 bp, synthetic construct
  source 1..20: mol_type = other DNA
ccagtgtagtctgggtgttg

SEQ ID NO: 60452 - DNA, 20 bp, synthetic construct
  source 1..20: mol_type = other DNA
tccagtgtagtctgggtgtt

SEQ ID NO: 60453 - DNA, 20 bp, synthetic construct
  source 1..20: mol_type = other DNA
ctccagtgtagtctgggtgt

SEQ ID NO: 60454 - DNA, 20 bp, synthetic construct
  source 1..20: mol_type = other DNA
gctccagtgtagtctgggtg

SEQ ID NO: 60455 - DNA, 20 bp, synthetic construct
  source 1..20: mol_type = other DNA
tgctccagtgtagtctgggt

SEQ ID NO: 60456 - DNA, 20 bp, synthetic construct
  source 1..20: mol_type = other DNA
ttgctccagtgtagtctggg

SEQ ID NO: 60457 - DNA, 20 bp, synthetic construct
  source 1..20: mol_type = other DNA
tttgctccagtgtagtctgg

SEQ ID NO: 60458 - DNA, 20 bp, synthetic construct
  source 1..20: mol_type = other DNA
atttgctccagtgtagtctg

SEQ ID NO: 60459 - DNA, 20 bp, synthetic construct
  source 1..20: mol_type = other DNA
gatttgctccagtgtagtct

SEQ ID NO: 60460 - DNA, 20 bp, synthetic construct
  source 1..20: mol_type = other DNA
agatttgctccagtgtagtc

SEQ ID NO: 60461 - DNA, 20 bp, synthetic construct
  source 1..20: mol_type = other DNA
cagatttgctccagtgtagt

SEQ ID NO: 60462 - DNA, 20 bp, synthetic construct
  source 1..20: mol_type = other DNA
acagatttgctccagtgtag

SEQ ID NO: 60463 - DNA, 20 bp, synthetic construct
  source 1..20: mol_type = other DNA
cacagatttgctccagtgta

SEQ ID NO: 60464 - DNA, 20 bp, synthetic construct
  source 1..20: mol_type = other DNA
tcacagatttgctccagtgt

SEQ ID NO: 60465 - DNA, 20 bp, synthetic construct
  source 1..20: mol_type = other DNA
ttcacagatttgctccagtg

SEQ ID NO: 60466 - DNA, 20 bp, synthetic construct
  source 1..20: mol_type = other DNA
attcacagatttgctccagt

SEQ ID NO: 60467 - DNA, 20 bp, synthetic construct
  source 1..20: mol_type = other DNA
aattcacagatttgctccag

SEQ ID NO: 60468 - DNA, 20 bp, synthetic construct
  source 1..20: mol_type = other DNA
aaattcacagatttgctcca

SEQ ID NO: 60469 - DNA, 20 bp, synthetic construct
  source 1..20: mol_type = other DNA
caaattcacagatttgctcc

SEQ ID NO: 60470 - DNA, 20 bp, synthetic construct
  source 1..20: mol_type = other DNA
acaaattcacagatttgctc

SEQ ID NO: 60471 - DNA, 20 bp, synthetic construct
  source 1..20: mol_type = other DNA
aacaaattcacagatttgct

SEQ ID NO: 60472 - DNA, 20 bp, synthetic construct
  source 1..20: mol_type = other DNA
aaacaaattcacagatttgc

SEQ ID NO: 60473 - DNA, 20 bp, synthetic construct
  source 1..20: mol_type = other DNA
taaacaaattcacagatttg

SEQ ID NO: 60474 - DNA, 20 bp, synthetic construct
  source 1..20: mol_type = other DNA
ttaaacaaattcacagattt

SEQ ID NO: 60475 - DNA, 20 bp, synthetic construct
  source 1..20: mol_type = other DNA
attaaacaaattcacagatt

SEQ ID NO: 60476 - DNA, 20 bp, synthetic construct
  source 1..20: mol_type = other DNA
aattaaacaaattcacagat

SEQ ID NO: 60477 - DNA, 20 bp, synthetic construct
  source 1..20: mol_type = other DNA
aaattaaacaaattcacaga

SEQ ID NO: 60478 - DNA, 20 bp, synthetic construct
  source 1..20: mol_type = other DNA
aaaattaaacaaattcacag

SEQ ID NO: 60479 - DNA, 20 bp, synthetic construct
  source 1..20: mol_type = other DNA
caaaattaaacaaattcaca

SEQ ID NO: 60480 - DNA, 20 bp, synthetic construct
  source 1..20: mol_type = other DNA
tcaaaattaaacaaattcac

SEQ ID NO: 60481 - DNA, 20 bp, synthetic construct
  source 1..20: mol_type = other DNA
ctcaaaattaaacaaattca

SEQ ID NO: 60482 - DNA, 20 bp, synthetic construct
  source 1..20: mol_type = other DNA
actcaaaattaaacaaattc

SEQ ID NO: 60483 - DNA, 20 bp, synthetic construct
  source 1..20: mol_type = other DNA
cactcaaaattaaacaaatt

SEQ ID NO: 60484 - DNA, 20 bp, synthetic construct
  source 1..20: mol_type = other DNA
ccactcaaaattaaacaaat

SEQ ID NO: 60485 - DNA, 20 bp, synthetic construct
  source 1..20: mol_type = other DNA
tccactcaaaattaaacaaa

SEQ ID NO: 60486 - DNA, 20 bp, synthetic construct
  source 1..20: mol_type = other DNA
ctccactcaaaattaaacaa

SEQ ID NO: 60487 - DNA, 20 bp, synthetic construct
  source 1..20: mol_type = other DNA
tctccactcaaaattaaaca

SEQ ID NO: 60488 - DNA, 20 bp, synthetic construct
  source 1..20: mol_type = other DNA
ttctccactcaaaattaaac

SEQ ID NO: 60489 - DNA, 20 bp, synthetic construct
  source 1..20: mol_type = other DNA
cttctccactcaaaattaaa

SEQ ID NO: 60490 - DNA, 20 bp, synthetic construct
  source 1..20: mol_type = other DNA
ccttctccactcaaaattaa

SEQ ID NO: 60491 - DNA, 20 bp, synthetic construct
  source 1..20: mol_type = other DNA
tccttctccactcaaaatta

SEQ ID NO: 60492 - DNA, 20 bp, synthetic construct
  source 1..20: mol_type = other DNA
gtccttctccactcaaaatt

SEQ ID NO: 60493 - DNA, 20 bp, synthetic construct
  source 1..20: mol_type = other DNA
agtccttctccactcaaaat

SEQ ID NO: 60494 - DNA, 20 bp, synthetic construct
  source 1..20: mol_type = other DNA
aagtccttctccactcaaaa

SEQ ID NO: 60495 - DNA, 20 bp, synthetic construct
  source 1..20: mol_type = other DNA
aaagtccttctccactcaaa

SEQ ID NO: 60496 - DNA, 20 bp, synthetic construct
  source 1..20: mol_type = other DNA
taaagtccttctccactcaa

SEQ ID NO: 60497 - DNA, 20 bp, synthetic construct
  source 1..20: mol_type = other DNA
ataaagtccttctccactca

SEQ ID NO: 60498 - DNA, 20 bp, synthetic construct
  source 1..20: mol_type = other DNA
tataaagtccttctccactc

SEQ ID NO: 60499 - DNA, 20 bp, synthetic construct
  source 1..20: mol_type = other DNA
ttataaagtccttctccact

SEQ ID NO: 60500 - DNA, 20 bp, synthetic construct
  source 1..20: mol_type = other DNA
cttataaagtccttctccac

SEQ ID NO: 60501 - DNA, 20 bp, synthetic construct
  source 1..20: mol_type = other DNA
gcttataaagtccttctcca

SEQ ID NO: 60502 - DNA, 20 bp, synthetic construct
  source 1..20: mol_type = other DNA
tgcttataaagtccttctcc

SEQ ID NO: 60503 - DNA, 20 bp, synthetic construct
  source 1..20: mol_type = other DNA
atgcttataaagtccttctc

SEQ ID NO: 60504 - DNA, 20 bp, synthetic construct
  source 1..20: mol_type = other DNA
catgcttataaagtccttct

SEQ ID NO: 60505 - DNA, 20 bp, synthetic construct
  source 1..20: mol_type = other DNA
tcatgcttataaagtccttc

SEQ ID NO: 60506 - DNA, 20 bp, synthetic construct
  source 1..20: mol_type = other DNA
gtcatgcttataaagtcctt

SEQ ID NO: 60507 - DNA, 20 bp, synthetic construct
  source 1..20: mol_type = other DNA
agtcatgcttataaagtcct

SEQ ID NO: 60508 - DNA, 20 bp, synthetic construct
  source 1..20: mol_type = other DNA
tagtcatgcttataaagtcc

SEQ ID NO: 60509 - DNA, 20 bp, synthetic construct
  source 1..20: mol_type = other DNA
gtagtcatgcttataaagtc

SEQ ID NO: 60510 - DNA, 20 bp, synthetic construct
  source 1..20: mol_type = other DNA
ggtagtcatgcttataaagt

SEQ ID NO: 60511 - DNA, 20 bp, synthetic construct
  source 1..20: mol_type = other DNA
tggtagtcatgcttataaag

SEQ ID NO: 60512 - DNA, 20 bp, synthetic construct
  source 1..20: mol_type = other DNA
ctggtagtcatgcttataaa

SEQ ID NO: 60513 - DNA, 20 bp, synthetic construct
  source 1..20: mol_type = other DNA
tctggtagtcatgcttataa

SEQ ID NO: 60514 - DNA, 20 bp, synthetic construct
  source 1..20: mol_type = other DNA
ctctggtagtcatgcttata

SEQ ID NO: 60515 - DNA, 20 bp, synthetic construct
  source 1..20: mol_type = other DNA
gctctggtagtcatgcttat

SEQ ID NO: 60516 - DNA, 20 bp, synthetic construct
  source 1..20: mol_type = other DNA
tgctctggtagtcatgctta

SEQ ID NO: 60517 - DNA, 20 bp, synthetic construct
  source 1..20: mol_type = other DNA
ttgctctggtagtcatgctt

SEQ ID NO: 60518 - DNA, 20 bp, synthetic construct
  source 1..20: mol_type = other DNA
tttgctctggtagtcatgct

SEQ ID NO: 60519 - DNA, 20 bp, synthetic construct
  source 1..20: mol_type = other DNA
ttttgctctggtagtcatgc

SEQ ID NO: 60520 - DNA, 20 bp, synthetic construct
  source 1..20: mol_type = other DNA
tttttgctctggtagtcatg

SEQ ID NO: 60521 - DNA, 20 bp, synthetic construct
  source 1..20: mol_type = other DNA
ttttttgctctggtagtcat

SEQ ID NO: 60522 - DNA, 20 bp, synthetic construct
  source 1..20: mol_type = other DNA
tttttttgctctggtagtca

SEQ ID NO: 60523 - DNA, 20 bp, synthetic construct
  source 1..20: mol_type = other DNA
atttttttgctctggtagtc

SEQ ID NO: 60524 - DNA, 20 bp, synthetic construct
  source 1..20: mol_type = other DNA
gatttttttgctctggtagt

SEQ ID NO: 60525 - DNA, 20 bp, synthetic construct
  source 1..20: mol_type = other DNA
tgatttttttgctctggtag

SEQ ID NO: 60526 - DNA, 20 bp, synthetic construct
  source 1..20: mol_type = other DNA
atgatttttttgctctggta

SEQ ID NO: 60527 - DNA, 20 bp, synthetic construct
  source 1..20: mol_type = other DNA
catgatttttttgctctggt

SEQ ID NO: 60528 - DNA, 20 bp, synthetic construct
  source 1..20: mol_type = other DNA
tcatgatttttttgctctgg

SEQ ID NO: 60529 - DNA, 20 bp, synthetic construct
  source 1..20: mol_type = other DNA
ttcatgatttttttgctctg

SEQ ID NO: 60530 - DNA, 20 bp, synthetic construct
  source 1..20: mol_type = other DNA
cttcatgatttttttgctct

SEQ ID NO: 60531 - DNA, 20 bp, synthetic construct
  source 1..20: mol_type = other DNA
acttcatgatttttttgctc

SEQ ID NO: 60532 - DNA, 20 bp, synthetic construct
  source 1..20: mol_type = other DNA
tacttcatgatttttttgct

SEQ ID NO: 60533 - DNA, 20 bp, synthetic construct
  source 1..20: mol_type = other DNA
ttacttcatgatttttttgc

SEQ ID NO: 60534 - DNA, 20 bp, synthetic construct
  source 1..20: mol_type = other DNA
tttacttcatgatttttttg

SEQ ID NO: 60535 - DNA, 20 bp, synthetic construct
  source 1..20: mol_type = other DNA
ttttacttcatgattttttt

SEQ ID NO: 60536 - DNA, 20 bp, synthetic construct
  source 1..20: mol_type = other DNA
cttttacttcatgatttttt

SEQ ID NO: 60537 - DNA, 20 bp, synthetic construct
  source 1..20: mol_type = other DNA
tcttttacttcatgattttt

SEQ ID NO: 60538 - DNA, 20 bp, synthetic construct
  source 1..20: mol_type = other DNA
atcttttacttcatgatttt

SEQ ID NO: 60539 - DNA, 20 bp, synthetic construct
  source 1..20: mol_type = other DNA
gatcttttacttcatgattt

SEQ ID NO: 60540 - DNA, 20 bp, synthetic construct
  source 1..20: mol_type = other DNA
cgatcttttacttcatgatt

SEQ ID NO: 60541 - DNA, 20 bp, synthetic construct
  source 1..20: mol_type = other DNA
tcgatcttttacttcatgat

SEQ ID NO: 60542 - DNA, 20 bp, synthetic construct
  source 1..20: mol_type = other DNA
atcgatcttttacttcatga

SEQ ID NO: 60543 - DNA, 20 bp, synthetic construct
  source 1..20: mol_type = other DNA
tatcgatcttttacttcatg

SEQ ID NO: 60544 - DNA, 20 bp, synthetic construct
  source 1..20: mol_type = other DNA
gtatcgatcttttacttcat

SEQ ID NO: 60545 - DNA, 20 bp, synthetic construct
  source 1..20: mol_type = other DNA
ggtatcgatcttttacttca

SEQ ID NO: 60546 - DNA, 20 bp, synthetic construct
  source 1..20: mol_type = other DNA
aggtatcgatcttttacttc

SEQ ID NO: 60547 - DNA, 20 bp, synthetic construct
  source 1..20: mol_type = other DNA
aaggtatcgatcttttactt

SEQ ID NO: 60548 - DNA, 20 bp, synthetic construct
  source 1..20: mol_type = other DNA
aaaggtatcgatcttttact

SEQ ID NO: 60549 - DNA, 20 bp, synthetic construct
  source 1..20: mol_type = other DNA
caaaggtatcgatcttttac

SEQ ID NO: 60550 - DNA, 20 bp, synthetic construct
  source 1..20: mol_type = other DNA
tcaaaggtatcgatctttta

SEQ ID NO: 60551 - DNA, 20 bp, synthetic construct
  source 1..20: mol_type = other DNA
atcaaaggtatcgatctttt

SEQ ID NO: 60552 - DNA, 20 bp, synthetic construct
  source 1..20: mol_type = other DNA
aatcaaaggtatcgatcttt

SEQ ID NO: 60553 - DNA, 20 bp, synthetic construct
  source 1..20: mol_type = other DNA
taatcaaaggtatcgatctt

SEQ ID NO: 60554 - DNA, 20 bp, synthetic construct
  source 1..20: mol_type = other DNA
ataatcaaaggtatcgatct

SEQ ID NO: 60555 - DNA, 20 bp, synthetic construct
  source 1..20: mol_type = other DNA
tataatcaaaggtatcgatc

SEQ ID NO: 60556 - DNA, 20 bp, synthetic construct
  source 1..20: mol_type = other DNA
ttataatcaaaggtatcgat

SEQ ID NO: 60557 - DNA, 20 bp, synthetic construct
  source 1..20: mol_type = other DNA
tttataatcaaaggtatcga

SEQ ID NO: 60558 - DNA, 20 bp, synthetic construct
  source 1..20: mol_type = other DNA
ctttataatcaaaggtatcg

SEQ ID NO: 60559 - DNA, 20 bp, synthetic construct
  source 1..20: mol_type = other DNA
tctttataatcaaaggtatc

SEQ ID NO: 60560 - DNA, 20 bp, synthetic construct
  source 1..20: mol_type = other DNA
ctctttataatcaaaggtat

SEQ ID NO: 60561 - DNA, 20 bp, synthetic construct
  source 1..20: mol_type = other DNA
tctctttataatcaaaggta

SEQ ID NO: 60562 - DNA, 20 bp, synthetic construct
  source 1..20: mol_type = other DNA
atctctttataatcaaaggt

SEQ ID NO: 60563 - DNA, 20 bp, synthetic construct
  source 1..20: mol_type = other DNA
aatctctttataatcaaagg

SEQ ID NO: 60564 - DNA, 20 bp, synthetic construct
  source 1..20: mol_type = other DNA
taatctctttataatcaaag

SEQ ID NO: 60565 - DNA, 20 bp, synthetic construct
  source 1..20: mol_type = other DNA
ttaatctctttataatcaaa

SEQ ID NO: 60566 - DNA, 20 bp, synthetic construct
  source 1..20: mol_type = other DNA
tttaatctctttataatcaa

SEQ ID NO: 60567 - DNA, 20 bp, synthetic construct
  source 1..20: mol_type = other DNA
ctttaatctctttataatca

SEQ ID NO: 60568 - DNA, 20 bp, synthetic construct
  source 1..20: mol_type = other DNA
tctttaatctctttataatc

SEQ ID NO: 60569 - DNA, 20 bp, synthetic construct
  source 1..20: mol_type = other DNA
atctttaatctctttataat

SEQ ID NO: 60570 - DNA, 20 bp, synthetic construct
  source 1..20: mol_type = other DNA
aatctttaatctctttataa

SEQ ID NO: 60571 - DNA, 20 bp, synthetic construct
  source 1..20: mol_type = other DNA
aaatctttaatctctttata

SEQ ID NO: 60572 - DNA, 20 bp, synthetic construct
  source 1..20: mol_type = other DNA
taaatctttaatctctttat

SEQ ID NO: 60573 - DNA, 20 bp, synthetic construct
  source 1..20: mol_type = other DNA
ctaaatctttaatctcttta

SEQ ID NO: 60574 - DNA, 20 bp, synthetic construct
  source 1..20: mol_type = other DNA
cctaaatctttaatctcttt

SEQ ID NO: 60575 - DNA, 20 bp, synthetic construct
  source 1..20: mol_type = other DNA
gcctaaatctttaatctctt

SEQ ID NO: 60576 - DNA, 20 bp, synthetic construct
  source 1..20: mol_type = other DNA
ggcctaaatctttaatctct

SEQ ID NO: 60577 - DNA, 20 bp, synthetic construct
  source 1..20: mol_type = other DNA
cggcctaaatctttaatctc

SEQ ID NO: 60578 - DNA, 20 bp, synthetic construct
  source 1..20: mol_type = other DNA
ccggcctaaatctttaatct

SEQ ID NO: 60579 - DNA, 20 bp, synthetic construct
  source 1..20: mol_type = other DNA
cccggcctaaatctttaatc

SEQ ID NO: 60580 - DNA, 20 bp, synthetic construct
  source 1..20: mol_type = other DNA
acccggcctaaatctttaat

SEQ ID NO: 60581 - DNA, 20 bp, synthetic construct
  source 1..20: mol_type = other DNA
cacccggcctaaatctttaa

SEQ ID NO: 60582 - DNA, 20 bp, synthetic construct
  source 1..20: mol_type = other DNA
acacccggcctaaatcttta

SEQ ID NO: 60583 - DNA, 20 bp, synthetic construct
  source 1..20: mol_type = other DNA
cacacccggcctaaatcttt

SEQ ID NO: 60584 - DNA, 20 bp, synthetic construct
  source 1..20: mol_type = other DNA
ccacacccggcctaaatctt

SEQ ID NO: 60585 - DNA, 20 bp, synthetic construct
  source 1..20: mol_type = other DNA
accacacccggcctaaatct

SEQ ID NO: 60586 - DNA, 20 bp, synthetic construct
  source 1..20: mol_type = other DNA
caccacacccggcctaaatc

SEQ ID NO: 60587 - DNA, 20 bp, synthetic construct
  source 1..20: mol_type = other DNA
gcaccacacccggcctaaat

SEQ ID NO: 60588 - DNA, 20 bp, synthetic construct
  source 1..20: mol_type = other DNA
agcaccacacccggcctaaa

SEQ ID NO: 60589 - DNA, 20 bp, synthetic construct
  source 1..20: mol_type = other DNA
gagcaccacacccggcctaa

SEQ ID NO: 60590 - DNA, 20 bp, synthetic construct
  source 1..20: mol_type = other DNA
tgagcaccacacccggccta

SEQ ID NO: 60591 - DNA, 20 bp, synthetic construct
  source 1..20: mol_type = other DNA
gtgagcaccacacccggcct

SEQ ID NO: 60592 - DNA, 20 bp, synthetic construct
  source 1..20: mol_type = other DNA
cgtgagcaccacacccggcc

SEQ ID NO: 60593 - DNA, 20 bp, synthetic construct
  source 1..20: mol_type = other DNA
gcgtgagcaccacacccggc

SEQ ID NO: 60594 - DNA, 20 bp, synthetic construct
  source 1..20: mol_type = other DNA
agcgtgagcaccacacccgg

SEQ ID NO: 60595 - DNA, 20 bp, synthetic construct
  source 1..20: mol_type = other DNA
aagcgtgagcaccacacccg

SEQ ID NO: 60596 - DNA, 20 bp, synthetic construct
  source 1..20: mol_type = other DNA
caagcgtgagcaccacaccc

SEQ ID NO: 60597 - DNA, 20 bp, synthetic construct
  source 1..20: mol_type = other DNA
acaagcgtgagcaccacacc

SEQ ID NO: 60598 - DNA, 20 bp, synthetic construct
  source 1..20: mol_type = other DNA
tacaagcgtgagcaccacac

SEQ ID NO: 60599 - DNA, 20 bp, synthetic construct
  source 1..20: mol_type = other DNA
ttacaagcgtgagcaccaca

SEQ ID NO: 60600 - DNA, 20 bp, synthetic construct
  source 1..20: mol_type = other DNA
attacaagcgtgagcaccac

SEQ ID NO: 60601 - DNA, 20 bp, synthetic construct
  source 1..20: mol_type = other DNA
gattacaagcgtgagcacca

SEQ ID NO: 60602 - DNA, 20 bp, synthetic construct
  source 1..20: mol_type = other DNA
ggattacaagcgtgagcacc

SEQ ID NO: 60603 - DNA, 20 bp, synthetic construct
  source 1..20: mol_type = other DNA
gggattacaagcgtgagcac

SEQ ID NO: 60604 - DNA, 20 bp, synthetic construct
  source 1..20: mol_type = other DNA
tgggattacaagcgtgagca

SEQ ID NO: 60605 - DNA, 20 bp, synthetic construct
  source 1..20: mol_type = other DNA
ctgggattacaagcgtgagc

SEQ ID NO: 60606 - DNA, 20 bp, synthetic construct
  source 1..20: mol_type = other DNA
gctgggattacaagcgtgag

SEQ ID NO: 60607 - DNA, 20 bp, synthetic construct
  source 1..20: mol_type = other DNA
tgctgggattacaagcgtga

SEQ ID NO: 60608 - DNA, 20 bp, synthetic construct
  source 1..20: mol_type = other DNA
gtgctgggattacaagcgtg

SEQ ID NO: 60609 - DNA, 20 bp, synthetic construct
  source 1..20: mol_type = other DNA
agtgctgggattacaagcgt

SEQ ID NO: 60610 - DNA, 20 bp, synthetic construct
  source 1..20: mol_type = other DNA
aagtgctgggattacaagcg

SEQ ID NO: 60611 - DNA, 20 bp, synthetic construct
  source 1..20: mol_type = other DNA
aaagtgctgggattacaagc

SEQ ID NO: 60612 - DNA, 20 bp, synthetic construct
  source 1..20: mol_type = other DNA
caaagtgctgggattacaag

SEQ ID NO: 60613 - DNA, 20 bp, synthetic construct
  source 1..20: mol_type = other DNA
ccaaagtgctgggattacaa

SEQ ID NO: 60614 - DNA, 20 bp, synthetic construct
  source 1..20: mol_type = other DNA
cccaaagtgctgggattaca

SEQ ID NO: 60615 - DNA, 20 bp, synthetic construct
  source 1..20: mol_type = other DNA
tcccaaagtgctgggattac

SEQ ID NO: 60616 - DNA, 20 bp, synthetic construct
  source 1..20: mol_type = other DNA
ctcccaaagtgctgggatta

SEQ ID NO: 60617 - DNA, 20 bp, synthetic construct
  source 1..20: mol_type = other DNA
cctcccaaagtgctgggatt

SEQ ID NO: 60618 - DNA, 20 bp, synthetic construct
  source 1..20: mol_type = other DNA
gcctcccaaagtgctgggat

SEQ ID NO: 60619 - DNA, 20 bp, synthetic construct
  source 1..20: mol_type = other DNA
ggcctcccaaagtgctggga

SEQ ID NO: 60620 - DNA, 20 bp, synthetic construct
  source 1..20: mol_type = other DNA
tggcctcccaaagtgctggg

SEQ ID NO: 60621 - DNA, 20 bp, synthetic construct
  source 1..20: mol_type = other DNA
ttggcctcccaaagtgctgg

SEQ ID NO: 60622 - DNA, 20 bp, synthetic construct
  source 1..20: mol_type = other DNA
tttggcctcccaaagtgctg

SEQ ID NO: 60623 - DNA, 20 bp, synthetic construct
  source 1..20: mol_type = other DNA
ctttggcctcccaaagtgct

SEQ ID NO: 60624 - DNA, 20 bp, synthetic construct
  source 1..20: mol_type = other DNA
gctttggcctcccaaagtgc

SEQ ID NO: 60625 - DNA, 20 bp, synthetic construct
  source 1..20: mol_type = other DNA
cgctttggcctcccaaagtg

SEQ ID NO: 60626 - DNA, 20 bp, synthetic construct
  source 1..20: mol_type = other DNA
ccgctttggcctcccaaagt

SEQ ID NO: 60627 - DNA, 20 bp, synthetic construct
  source 1..20: mol_type = other DNA
cccgctttggcctcccaaag

SEQ ID NO: 60628 - DNA, 20 bp, synthetic construct
  source 1..20: mol_type = other DNA
acccgctttggcctcccaaa

SEQ ID NO: 60629 - DNA, 20 bp, synthetic construct
  source 1..20: mol_type = other DNA
cacccgctttggcctcccaa

SEQ ID NO: 60630 - DNA, 20 bp, synthetic construct
  source 1..20: mol_type = other DNA
ccacccgctttggcctccca

SEQ ID NO: 60631 - DNA, 20 bp, synthetic construct
  source 1..20: mol_type = other DNA
tccacccgctttggcctccc

SEQ ID NO: 60632 - DNA, 20 bp, synthetic construct
  source 1..20: mol_type = other DNA
atccacccgctttggcctcc

SEQ ID NO: 60633 - DNA, 20 bp, synthetic construct
  source 1..20: mol_type = other DNA
gatccacccgctttggcctc

SEQ ID NO: 60634 - DNA, 20 bp, synthetic construct
  source 1..20: mol_type = other DNA
tgatccacccgctttggcct

SEQ ID NO: 60635 - DNA, 20 bp, synthetic construct
  source 1..20: mol_type = other DNA
gtgatccacccgctttggcc

SEQ ID NO: 60636 - DNA, 20 bp, synthetic construct
  source 1..20: mol_type = other DNA
agtgatccacccgctttggc

SEQ ID NO: 60637 - DNA, 20 bp, synthetic construct
  source 1..20: mol_type = other DNA
aagtgatccacccgctttgg

SEQ ID NO: 60638 - DNA, 20 bp, synthetic construct
  source 1..20: mol_type = other DNA
caagtgatccacccgctttg

SEQ ID NO: 60639 - DNA, 20 bp, synthetic construct
  source 1..20: mol_type = other DNA
tcaagtgatccacccgcttt

SEQ ID NO: 60640 - DNA, 20 bp, synthetic construct
  source 1..20: mol_type = other DNA
ctcaagtgatccacccgctt

SEQ ID NO: 60641 - DNA, 20 bp, synthetic construct
  source 1..20: mol_type = other DNA
cctcaagtgatccacccgct

SEQ ID NO: 60642 - DNA, 20 bp, synthetic construct
  source 1..20: mol_type = other DNA
acctcaagtgatccacccgc

SEQ ID NO: 60643 - DNA, 20 bp, synthetic construct
  source 1..20: mol_type = other DNA
gacctcaagtgatccacccg

SEQ ID NO: 60644 - DNA, 20 bp, synthetic construct
  source 1..20: mol_type = other DNA
tgacctcaagtgatccaccc

SEQ ID NO: 60645 - DNA, 20 bp, synthetic construct
  source 1..20: mol_type = other DNA
ctgacctcaagtgatccacc

SEQ ID NO: 60646 - DNA, 20 bp, synthetic construct
  source 1..20: mol_type = other DNA
cctgacctcaagtgatccac

SEQ ID NO: 60647 - DNA, 20 bp, synthetic construct
  source 1..20: mol_type = other DNA
tcctgacctcaagtgatcca

SEQ ID NO: 60648 - DNA, 20 bp, synthetic construct
  source 1..20: mol_type = other DNA
ctcctgacctcaagtgatcc

SEQ ID NO: 60649 - DNA, 20 bp, synthetic construct
  source 1..20: mol_type = other DNA
actcctgacctcaagtgatc

SEQ ID NO: 60650 - DNA, 20 bp, synthetic construct
  source 1..20: mol_type = other DNA
aactcctgacctcaagtgat

SEQ ID NO: 60651 - DNA, 20 bp, synthetic construct
  source 1..20: mol_type = other DNA
aaactcctgacctcaagtga

SEQ ID NO: 60652 - DNA, 20 bp, synthetic construct
  source 1..20: mol_type = other DNA
caaactcctgacctcaagtg

SEQ ID NO: 60653 - DNA, 20 bp, synthetic construct
  source 1..20: mol_type = other DNA
tcaaactcctgacctcaagt

SEQ ID NO: 60654 - DNA, 20 bp, synthetic construct
  source 1..20: mol_type = other DNA
ctcaaactcctgacctcaag

SEQ ID NO: 60655 - DNA, 20 bp, synthetic construct
  source 1..20: mol_type = other DNA
tctcaaactcctgacctcaa

SEQ ID NO: 60656 - DNA, 20 bp, synthetic construct
  source 1..20: mol_type = other DNA
gtctcaaactcctgacctca

SEQ ID NO: 60657 - DNA, 20 bp, synthetic construct
  source 1..20: mol_type = other DNA
ggtctcaaactcctgacctc

SEQ ID NO: 60658 - DNA, 20 bp, synthetic construct
  source 1..20: mol_type = other DNA
tggtctcaaactcctgacct

SEQ ID NO: 60659 - DNA, 20 bp, synthetic construct
  source 1..20: mol_type = other DNA
ttggtctcaaactcctgacc

SEQ ID NO: 60660 - DNA, 20 bp, synthetic construct
  source 1..20: mol_type = other DNA
gttggtctcaaactcctgac

SEQ ID NO: 60661 - DNA, 20 bp, synthetic construct
  source 1..20: mol_type = other DNA
ggttggtctcaaactcctga

SEQ ID NO: 60662 - DNA, 20 bp, synthetic construct
  source 1..20: mol_type = other DNA
aggttggtctcaaactcctg

SEQ ID NO: 60663 - DNA, 20 bp, synthetic construct
  source 1..20: mol_type = other DNA
caggttggtctcaaactcct

SEQ ID NO: 60664 - DNA, 20 bp, synthetic construct
  source 1..20: mol_type = other DNA
ccaggttggtctcaaactcc

SEQ ID NO: 60665 - DNA, 20 bp, synthetic construct
  source 1..20: mol_type = other DNA
accaggttggtctcaaactc

SEQ ID NO: 60666 - DNA, 20 bp, synthetic construct
  source 1..20: mol_type = other DNA
gaccaggttggtctcaaact

SEQ ID NO: 60667 - DNA, 20 bp, synthetic construct
  source 1..20: mol_type = other DNA
tgaccaggttggtctcaaac

SEQ ID NO: 60668 - DNA, 20 bp, synthetic construct
  source 1..20: mol_type = other DNA
ttgaccaggttggtctcaaa

SEQ ID NO: 60669 - DNA, 20 bp, synthetic construct
  source 1..20: mol_type = other DNA
gttgaccaggttggtctcaa

SEQ ID NO: 60670 - DNA, 20 bp, synthetic construct
  source 1..20: mol_type = other DNA
ggttgaccaggttggtctca

SEQ ID NO: 60671 - DNA, 20 bp, synthetic construct
  source 1..20: mol_type = other DNA
aggttgaccaggttggtctc

SEQ ID NO: 60672 - DNA, 20 bp, synthetic construct
  source 1..20: mol_type = other DNA
caggttgaccaggttggtct

SEQ ID NO: 60673 - DNA, 20 bp, synthetic construct
  source 1..20: mol_type = other DNA
ccaggttgaccaggttggtc

SEQ ID NO: 60674 - DNA, 20 bp, synthetic construct
  source 1..20: mol_type = other DNA
accaggttgaccaggttggt

SEQ ID NO: 60675 - DNA, 20 bp, synthetic construct
  source 1..20: mol_type = other DNA
caccaggttgaccaggttgg

SEQ ID NO: 60676 - DNA, 20 bp, synthetic construct
  source 1..20: mol_type = other DNA
tcaccaggttgaccaggttg

SEQ ID NO: 60677 - DNA, 20 bp, synthetic construct
  source 1..20: mol_type = other DNA
ttcaccaggttgaccaggtt

SEQ ID NO: 60678 - DNA, 20 bp, synthetic construct
  source 1..20: mol_type = other DNA
tttcaccaggttgaccaggt

SEQ ID NO: 60679 - DNA, 20 bp, synthetic construct
  source 1..20: mol_type = other DNA
gtttcaccaggttgaccagg

SEQ ID NO: 60680 - DNA, 20 bp, synthetic construct
  source 1..20: mol_type = other DNA
ggtttcaccaggttgaccag

SEQ ID NO: 60681 - DNA, 20 bp, synthetic construct
  source 1..20: mol_type = other DNA
gggtttcaccaggttgacca

SEQ ID NO: 60682 - DNA, 20 bp, synthetic construct
  source 1..20: mol_type = other DNA
ggggtttcaccaggttgacc

SEQ ID NO: 60683 - DNA, 20 bp, synthetic construct
  source 1..20: mol_type = other DNA
tggggtttcaccaggttgac

SEQ ID NO: 60684 - DNA, 20 bp, synthetic construct
  source 1..20: mol_type = other DNA
atggggtttcaccaggttga

SEQ ID NO: 60685 - DNA, 20 bp, synthetic construct
  source 1..20: mol_type = other DNA
gatggggtttcaccaggttg

SEQ ID NO: 60686 - DNA, 20 bp, synthetic construct
  source 1..20: mol_type = other DNA
agatggggtttcaccaggtt

SEQ ID NO: 60687 - DNA, 20 bp, synthetic construct
  source 1..20: mol_type = other DNA
gagatggggtttcaccaggt

SEQ ID NO: 60688 - DNA, 20 bp, synthetic construct
  source 1..20: mol_type = other DNA
agagatggggtttcaccagg

SEQ ID NO: 60689 - DNA, 20 bp, synthetic construct
  source 1..20: mol_type = other DNA
tagagatggggtttcaccag

SEQ ID NO: 60690 - DNA, 20 bp, synthetic construct
  source 1..20: mol_type = other DNA
gtagagatggggtttcacca

SEQ ID NO: 60691 - DNA, 20 bp, synthetic construct
  source 1..20: mol_type = other DNA
agtagagatggggtttcacc

SEQ ID NO: 60692 - DNA, 20 bp, synthetic construct
  source 1..20: mol_type = other DNA
tagtagagatggggtttcac

SEQ ID NO: 60693 - DNA, 20 bp, synthetic construct
  source 1..20: mol_type = other DNA
ttagtagagatggggtttca

SEQ ID NO: 60694 - DNA, 20 bp, synthetic construct
  source 1..20: mol_type = other DNA
tttagtagagatggggtttc

SEQ ID NO: 60695 - DNA, 20 bp, synthetic construct
  source 1..20: mol_type = other DNA
ttttagtagagatggggttt

SEQ ID NO: 60696 - DNA, 20 bp, synthetic construct
  source 1..20: mol_type = other DNA
tttttagtagagatggggtt

SEQ ID NO: 60697 - DNA, 20 bp, synthetic construct
  source 1..20: mol_type = other DNA
atttttagtagagatggggt

SEQ ID NO: 60698 - DNA, 20 bp, synthetic construct
  source 1..20: mol_type = other DNA
tatttttagtagagatgggg

SEQ ID NO: 60699 - DNA, 20 bp, synthetic construct
  source 1..20: mol_type = other DNA
gtatttttagtagagatggg

SEQ ID NO: 60700 - DNA, 20 bp, synthetic construct
  source 1..20: mol_type = other DNA
tgtatttttagtagagatgg

SEQ ID NO: 60701 - DNA, 20 bp, synthetic construct
  source 1..20: mol_type = other DNA
ttgtatttttagtagagatg

SEQ ID NO: 60702 - DNA, 20 bp, synthetic construct
  source 1..20: mol_type = other DNA
tttgtatttttagtagagat

SEQ ID NO: 60703 - DNA, 20 bp, synthetic construct
  source 1..20: mol_type = other DNA
ttttgtatttttagtagaga

SEQ ID NO: 60704 - DNA, 20 bp, synthetic construct
  source 1..20: mol_type = other DNA
tttttgtatttttagtagag

SEQ ID NO: 60705 - DNA, 20 bp, synthetic construct
  source 1..20: mol_type = other DNA
ttttttgtatttttagtaga

SEQ ID NO: 60706 - DNA, 20 bp, synthetic construct
  source 1..20: mol_type = other DNA
tttttttgtatttttagtag

SEQ ID NO: 60707 - DNA, 20 bp, synthetic construct
  source 1..20: mol_type = other DNA
atttttttgtatttttagta

SEQ ID NO: 60708 - DNA, 20 bp, synthetic construct
  source 1..20: mol_type = other DNA
aatttttttgtatttttagt

SEQ ID NO: 60709 - DNA, 20 bp, synthetic construct
  source 1..20: mol_type = other DNA
taatttttttgtatttttag

SEQ ID NO: 60710 - DNA, 20 bp, synthetic construct
  source 1..20: mol_type = other DNA
ctaatttttttgtattttta

SEQ ID NO: 60711 - DNA, 20 bp, synthetic construct
  source 1..20: mol_type = other DNA
actaatttttttgtattttt

SEQ ID NO: 60712 - DNA, 20 bp, synthetic construct
  source 1..20: mol_type = other DNA
gactaatttttttgtatttt

SEQ ID NO: 60713 - DNA, 20 bp, synthetic construct
  source 1..20: mol_type = other DNA
tgactaatttttttgtattt

SEQ ID NO: 60714 - DNA, 20 bp, synthetic construct
  source 1..20: mol_type = other DNA
ctgactaatttttttgtatt

SEQ ID NO: 60715 - DNA, 20 bp, synthetic construct
  source 1..20: mol_type = other DNA
cctgactaatttttttgtat

SEQ ID NO: 60716 - DNA, 20 bp, synthetic construct
  source 1..20: mol_type = other DNA
gcctgactaatttttttgta

SEQ ID NO: 60717 - DNA, 20 bp, synthetic construct
  source 1..20: mol_type = other DNA
tgcctgactaatttttttgt

SEQ ID NO: 60718 - DNA, 20 bp, synthetic construct
  source 1..20: mol_type = other DNA
atgcctgactaatttttttg

SEQ ID NO: 60719 - DNA, 20 bp, synthetic construct
  source 1..20: mol_type = other DNA
catgcctgactaattttttt

SEQ ID NO: 60720 - DNA, 20 bp, synthetic construct
  source 1..20: mol_type = other DNA
ccatgcctgactaatttttt

SEQ ID NO: 60721 - DNA, 20 bp, synthetic construct
  source 1..20: mol_type = other DNA
accatgcctgactaattttt

SEQ ID NO: 60722 - DNA, 20 bp, synthetic construct
  source 1..20: mol_type = other DNA
taccatgcctgactaatttt

SEQ ID NO: 60723 - DNA, 20 bp, synthetic construct
  source 1..20: mol_type = other DNA
ctaccatgcctgactaattt

SEQ ID NO: 60724 - DNA, 20 bp, synthetic construct
  source 1..20: mol_type = other DNA
gctaccatgcctgactaatt

SEQ ID NO: 60725 - DNA, 20 bp, synthetic construct
  source 1..20: mol_type = other DNA
tgctaccatgcctgactaat

SEQ ID NO: 60726 - DNA, 20 bp, synthetic construct
  source 1..20: mol_type = other DNA
gtgctaccatgcctgactaa

SEQ ID NO: 60727 - DNA, 20 bp, synthetic construct
  source 1..20: mol_type = other DNA
tgtgctaccatgcctgacta

SEQ ID NO: 60728 - DNA, 20 bp, synthetic construct
  source 1..20: mol_type = other DNA
atgtgctaccatgcctgact

SEQ ID NO: 60729 - DNA, 20 bp, synthetic construct
  source 1..20: mol_type = other DNA
catgtgctaccatgcctgac

SEQ ID NO: 60730 - DNA, 20 bp, synthetic construct
  source 1..20: mol_type = other DNA
gcatgtgctaccatgcctga

SEQ ID NO: 60731 - DNA, 20 bp, synthetic construct
  source 1..20: mol_type = other DNA
ggcatgtgctaccatgcctg

SEQ ID NO: 60732 - DNA, 20 bp, synthetic construct
  source 1..20: mol_type = other DNA
aggcatgtgctaccatgcct

SEQ ID NO: 60733 - DNA, 20 bp, synthetic construct
  source 1..20: mol_type = other DNA
caggcatgtgctaccatgcc

SEQ ID NO: 60734 - DNA, 20 bp, synthetic construct
  source 1..20: mol_type = other DNA
acaggcatgtgctaccatgc

SEQ ID NO: 60735 - DNA, 20 bp, synthetic construct
  source 1..20: mol_type = other DNA
tacaggcatgtgctaccatg

SEQ ID NO: 60736 - DNA, 20 bp, synthetic construct
  source 1..20: mol_type = other DNA
ttacaggcatgtgctaccat

SEQ ID NO: 60737 - DNA, 20 bp, synthetic construct
  source 1..20: mol_type = other DNA
attacaggcatgtgctacca

SEQ ID NO: 60738 - DNA, 20 bp, synthetic construct
  source 1..20: mol_type = other DNA
gattacaggcatgtgctacc

SEQ ID NO: 60739 - DNA, 20 bp, synthetic construct
  source 1..20: mol_type = other DNA
ggattacaggcatgtgctac

SEQ ID NO: 60740 - DNA, 20 bp, synthetic construct
  source 1..20: mol_type = other DNA
gggattacaggcatgtgcta

SEQ ID NO: 60741 - DNA, 20 bp, synthetic construct
  source 1..20: mol_type = other DNA
tgggattacaggcatgtgct

SEQ ID NO: 60742 - DNA, 20 bp, synthetic construct
  source 1..20: mol_type = other DNA
ctgggattacaggcatgtgc

SEQ ID NO: 60743 - DNA, 20 bp, synthetic construct
  source 1..20: mol_type = other DNA
gctgggattacaggcatgtg

SEQ ID NO: 60744 - DNA, 20 bp, synthetic construct
  source 1..20: mol_type = other DNA
agctgggattacaggcatgt

SEQ ID NO: 60745 - DNA, 20 bp, synthetic construct
  source 1..20: mol_type = other DNA
tagctgggattacaggcatg

SEQ ID NO: 60746 - DNA, 20 bp, synthetic construct
  source 1..20: mol_type = other DNA
gtagctgggattacaggcat

SEQ ID NO: 60747 - DNA, 20 bp, synthetic construct
  source 1..20: mol_type = other DNA
agtagctgggattacaggca

SEQ ID NO: 60748 - DNA, 20 bp, synthetic construct
  source 1..20: mol_type = other DNA
gagtagctgggattacaggc

SEQ ID NO: 60749 - DNA, 20 bp, synthetic construct
  source 1..20: mol_type = other DNA
tgagtagctgggattacagg

SEQ ID NO: 60750 - DNA, 20 bp, synthetic construct
  source 1..20: mol_type = other DNA
ctgagtagctgggattacag

SEQ ID NO: 60751 - DNA, 20 bp, synthetic construct
  source 1..20: mol_type = other DNA
cctgagtagctgggattaca

SEQ ID NO: 60752 - DNA, 20 bp, synthetic construct
  source 1..20: mol_type = other DNA
tcctgagtagctgggattac

SEQ ID NO: 60753 - DNA, 20 bp, synthetic construct
  source 1..20: mol_type = other DNA
ctcctgagtagctgggatta

SEQ ID NO: 60754 - DNA, 20 bp, synthetic construct
  source 1..20: mol_type = other DNA
cctcctgagtagctgggatt

SEQ ID NO: 60755 - DNA, 20 bp, synthetic construct
  source 1..20: mol_type = other DNA
gcctcctgagtagctgggat

SEQ ID NO: 60756 - DNA, 20 bp, synthetic construct
  source 1..20: mol_type = other DNA
agcctcctgagtagctggga

SEQ ID NO: 60757 - DNA, 20 bp, synthetic construct
  source 1..20: mol_type = other DNA
tagcctcctgagtagctggg

SEQ ID NO: 60758 - DNA, 20 bp, synthetic construct
  source 1..20: mol_type = other DNA
ttagcctcctgagtagctgg

SEQ ID NO: 60759 - DNA, 20 bp, synthetic construct
  source 1..20: mol_type = other DNA
cttagcctcctgagtagctg

SEQ ID NO: 60760 - DNA, 20 bp, synthetic construct
  source 1..20: mol_type = other DNA
ccttagcctcctgagtagct

SEQ ID NO: 60761 - DNA, 20 bp, synthetic construct
  source 1..20: mol_type = other DNA
gccttagcctcctgagtagc

SEQ ID NO: 60762 - DNA, 20 bp, synthetic construct
  source 1..20: mol_type = other DNA
tgccttagcctcctgagtag

SEQ ID NO: 60763 - DNA, 20 bp, synthetic construct
  source 1..20: mol_type = other DNA
ctgccttagcctcctgagta

SEQ ID NO: 60764 - DNA, 20 bp, synthetic construct
  source 1..20: mol_type = other DNA
cctgccttagcctcctgagt

SEQ ID NO: 60765 - DNA, 20 bp, synthetic construct
  source 1..20: mol_type = other DNA
tcctgccttagcctcctgag

SEQ ID NO: 60766 - DNA, 20 bp, synthetic construct
  source 1..20: mol_type = other DNA
ctcctgccttagcctcctga

SEQ ID NO: 60767 - DNA, 20 bp, synthetic construct
  source 1..20: mol_type = other DNA
tctcctgccttagcctcctg

SEQ ID NO: 60768 - DNA, 20 bp, synthetic construct
  source 1..20: mol_type = other DNA
ttctcctgccttagcctcct

SEQ ID NO: 60769 - DNA, 20 bp, synthetic construct
  source 1..20: mol_type = other DNA
attctcctgccttagcctcc

SEQ ID NO: 60770 - DNA, 20 bp, synthetic construct
  source 1..20: mol_type = other DNA
aattctcctgccttagcctc

SEQ ID NO: 60771 - DNA, 20 bp, synthetic construct
  source 1..20: mol_type = other DNA
caattctcctgccttagcct

SEQ ID NO: 60772 - DNA, 20 bp, synthetic construct
  source 1..20: mol_type = other DNA
gcaattctcctgccttagcc

SEQ ID NO: 60773 - DNA, 20 bp, synthetic construct
  source 1..20: mol_type = other DNA
agcaattctcctgccttagc

SEQ ID NO: 60774 - DNA, 20 bp, synthetic construct
  source 1..20: mol_type = other DNA
aagcaattctcctgccttag

SEQ ID NO: 60775 - DNA, 20 bp, synthetic construct
  source 1..20: mol_type = other DNA
caagcaattctcctgcctta

SEQ ID NO: 60776 - DNA, 20 bp, synthetic construct
  source 1..20: mol_type = other DNA
tcaagcaattctcctgcctt

SEQ ID NO: 60777 - DNA, 20 bp, synthetic construct
  source 1..20: mol_type = other DNA
ttcaagcaattctcctgcct

SEQ ID NO: 60778 - DNA, 20 bp, synthetic construct
  source 1..20: mol_type = other DNA
attcaagcaattctcctgcc

SEQ ID NO: 60779 - DNA, 20 bp, synthetic construct
  source 1..20: mol_type = other DNA
aattcaagcaattctcctgc

SEQ ID NO: 60780 - DNA, 20 bp, synthetic construct
  source 1..20: mol_type = other DNA
aaattcaagcaattctcctg

SEQ ID NO: 60781 - DNA, 20 bp, synthetic construct
  source 1..20: mol_type = other DNA
caaattcaagcaattctcct

SEQ ID NO: 60782 - DNA, 20 bp, synthetic construct
  source 1..20: mol_type = other DNA
ccaaattcaagcaattctcc

SEQ ID NO: 60783 - DNA, 20 bp, synthetic construct
  source 1..20: mol_type = other DNA
cccaaattcaagcaattctc

SEQ ID NO: 60784 - DNA, 20 bp, synthetic construct
  source 1..20: mol_type = other DNA
tcccaaattcaagcaattct

SEQ ID NO: 60785 - DNA, 20 bp, synthetic construct
  source 1..20: mol_type = other DNA
ttcccaaattcaagcaattc

SEQ ID NO: 60786 - DNA, 20 bp, synthetic construct
  source 1..20: mol_type = other DNA
cttcccaaattcaagcaatt

SEQ ID NO: 60787 - DNA, 20 bp, synthetic construct
  source 1..20: mol_type = other DNA
acttcccaaattcaagcaat

SEQ ID NO: 60788 - DNA, 20 bp, synthetic construct
  source 1..20: mol_type = other DNA
cacttcccaaattcaagcaa

SEQ ID NO: 60789 - DNA, 20 bp, synthetic construct
  source 1..20: mol_type = other DNA
ccacttcccaaattcaagca

SEQ ID NO: 60790 - DNA, 20 bp, synthetic construct
  source 1..20: mol_type = other DNA
tccacttcccaaattcaagc

SEQ ID NO: 60791 - DNA, 20 bp, synthetic construct
  source 1..20: mol_type = other DNA
ctccacttcccaaattcaag

SEQ ID NO: 60792 - DNA, 20 bp, synthetic construct
  source 1..20: mol_type = other DNA
cctccacttcccaaattcaa

SEQ ID NO: 60793 - DNA, 20 bp, synthetic construct
  source 1..20: mol_type = other DNA
acctccacttcccaaattca

SEQ ID NO: 60794 - DNA, 20 bp, synthetic construct
  source 1..20: mol_type = other DNA
aacctccacttcccaaattc

SEQ ID NO: 60795 - DNA, 20 bp, synthetic construct
  source 1..20: mol_type = other DNA
caacctccacttcccaaatt

SEQ ID NO: 60796 - DNA, 20 bp, synthetic construct
  source 1..20: mol_type = other DNA
gcaacctccacttcccaaat

SEQ ID NO: 60797 - DNA, 20 bp, synthetic construct
  source 1..20: mol_type = other DNA
tgcaacctccacttcccaaa

SEQ ID NO: 60798 - DNA, 20 bp, synthetic construct
  source 1..20: mol_type = other DNA
ctgcaacctccacttcccaa

SEQ ID NO: 60799 - DNA, 20 bp, synthetic construct
  source 1..20: mol_type = other DNA
actgcaacctccacttccca

SEQ ID NO: 60800 - DNA, 20 bp, synthetic construct
  source 1..20: mol_type = other DNA
cactgcaacctccacttccc

SEQ ID NO: 60801 - DNA, 20 bp, synthetic construct
  source 1..20: mol_type = other DNA
tcactgcaacctccacttcc

SEQ ID NO: 60802 - DNA, 20 bp, synthetic construct
  source 1..20: mol_type = other DNA
ctcactgcaacctccacttc

SEQ ID NO: 60803 - DNA, 20 bp, synthetic construct
  source 1..20: mol_type = other DNA
gctcactgcaacctccactt

SEQ ID NO: 60804 - DNA, 20 bp, synthetic construct
  source 1..20: mol_type = other DNA
ggctcactgcaacctccact

SEQ ID NO: 60805 - DNA, 20 bp, synthetic construct
  source 1..20: mol_type = other DNA
cggctcactgcaacctccac

SEQ ID NO: 60806 - DNA, 20 bp, synthetic construct
  source 1..20: mol_type = other DNA
tcggctcactgcaacctcca

SEQ ID NO: 60807 - DNA, 20 bp, synthetic construct
  source 1..20: mol_type = other DNA
ctcggctcactgcaacctcc

SEQ ID NO: 60808 - DNA, 20 bp, synthetic construct
  source 1..20: mol_type = other DNA
tctcggctcactgcaacctc

SEQ ID NO: 60809 - DNA, 20 bp, synthetic construct
  source 1..20: mol_type = other DNA
atctcggctcactgcaacct

SEQ ID NO: 60810 - DNA, 20 bp, synthetic construct
  source 1..20: mol_type = other DNA
aatctcggctcactgcaacc

SEQ ID NO: 60811 - DNA, 20 bp, synthetic construct
  source 1..20: mol_type = other DNA
caatctcggctcactgcaac

SEQ ID NO: 60812 - DNA, 20 bp, synthetic construct
  source 1..20: mol_type = other DNA
acaatctcggctcactgcaa

SEQ ID NO: 60813 - DNA, 20 bp, synthetic construct
  source 1..20: mol_type = other DNA
cacaatctcggctcactgca

SEQ ID NO: 60814 - DNA, 20 bp, synthetic construct
  source 1..20: mol_type = other DNA
gcacaatctcggctcactgc

SEQ ID NO: 60815 - DNA, 20 bp, synthetic construct
  source 1..20: mol_type = other DNA
ggcacaatctcggctcactg

SEQ ID NO: 60816 - DNA, 20 bp, synthetic construct
  source 1..20: mol_type = other DNA
tggcacaatctcggctcact

SEQ ID NO: 60817 - DNA, 20 bp, synthetic construct
  source 1..20: mol_type = other DNA
gtggcacaatctcggctcac

SEQ ID NO: 60818 - DNA, 20 bp, synthetic construct
  source 1..20: mol_type = other DNA
tgtggcacaatctcggctca

SEQ ID NO: 60819 - DNA, 20 bp, synthetic construct
  source 1..20: mol_type = other DNA
atgtggcacaatctcggctc

SEQ ID NO: 60820 - DNA, 20 bp, synthetic construct
  source 1..20: mol_type = other DNA
gatgtggcacaatctcggct

SEQ ID NO: 60821 - DNA, 20 bp, synthetic construct
  source 1..20: mol_type = other DNA
tgatgtggcacaatctcggc

SEQ ID NO: 60822 - DNA, 20 bp, synthetic construct
  source 1..20: mol_type = other DNA
gtgatgtggcacaatctcgg

SEQ ID NO: 60823 - DNA, 20 bp, synthetic construct
  source 1..20: mol_type = other DNA
agtgatgtggcacaatctcg

SEQ ID NO: 60824 - DNA, 20 bp, synthetic construct
  source 1..20: mol_type = other DNA
gagtgatgtggcacaatctc

SEQ ID NO: 60825 - DNA, 20 bp, synthetic construct
  source 1..20: mol_type = other DNA
ggagtgatgtggcacaatct

SEQ ID NO: 60826 - DNA, 20 bp, synthetic construct
  source 1..20: mol_type = other DNA
tggagtgatgtggcacaatc

SEQ ID NO: 60827 - DNA, 20 bp, synthetic construct
  source 1..20: mol_type = other DNA
ctggagtgatgtggcacaat

SEQ ID NO: 60828 - DNA, 20 bp, synthetic construct
  source 1..20: mol_type = other DNA
gctggagtgatgtggcacaa

SEQ ID NO: 60829 - DNA, 20 bp, synthetic construct
  source 1..20: mol_type = other DNA
agctggagtgatgtggcaca

SEQ ID NO: 60830 - DNA, 20 bp, synthetic construct
  source 1..20: mol_type = other DNA
aagctggagtgatgtggcac

SEQ ID NO: 60831 - DNA, 20 bp, synthetic construct
  source 1..20: mol_type = other DNA
caagctggagtgatgtggca

SEQ ID NO: 60832 - DNA, 20 bp, synthetic construct
  source 1..20: mol_type = other DNA
ccaagctggagtgatgtggc

SEQ ID NO: 60833 - DNA, 20 bp, synthetic construct
  source 1..20: mol_type = other DNA
cccaagctggagtgatgtgg

SEQ ID NO: 60834 - DNA, 20 bp, synthetic construct
  source 1..20: mol_type = other DNA
gcccaagctggagtgatgtg

SEQ ID NO: 60835 - DNA, 20 bp, synthetic construct
  source 1..20: mol_type = other DNA
cgcccaagctggagtgatgt

SEQ ID NO: 60836 - DNA, 20 bp, synthetic construct
  source 1..20: mol_type = other DNA
tcgcccaagctggagtgatg

SEQ ID NO: 60837 - DNA, 20 bp, synthetic construct
  source 1..20: mol_type = other DNA
gtcgcccaagctggagtgat

SEQ ID NO: 60838 - DNA, 20 bp, synthetic construct
  source 1..20: mol_type = other DNA
tgtcgcccaagctggagtga

SEQ ID NO: 60839 - DNA, 20 bp, synthetic construct
  source 1..20: mol_type = other DNA
ctgtcgcccaagctggagtg

SEQ ID NO: 60840 - DNA, 20 bp, synthetic construct
  source 1..20: mol_type = other DNA
tctgtcgcccaagctggagt

SEQ ID NO: 60841 - DNA, 20 bp, synthetic construct
  source 1..20: mol_type = other DNA
ctctgtcgcccaagctggag

SEQ ID NO: 60842 - DNA, 20 bp, synthetic construct
  source 1..20: mol_type = other DNA
actctgtcgcccaagctgga

SEQ ID NO: 60843 - DNA, 20 bp, synthetic construct
  source 1..20: mol_type = other DNA
cactctgtcgcccaagctgg

SEQ ID NO: 60844 - DNA, 20 bp, synthetic construct
  source 1..20: mol_type = other DNA
tcactctgtcgcccaagctg

SEQ ID NO: 60845 - DNA, 20 bp, synthetic construct
  source 1..20: mol_type = other DNA
gtcactctgtcgcccaagct

SEQ ID NO: 60846 - DNA, 20 bp, synthetic construct
  source 1..20: mol_type = other DNA
agtcactctgtcgcccaagc

SEQ ID NO: 60847 - DNA, 20 bp, synthetic construct
  source 1..20: mol_type = other DNA
gagtcactctgtcgcccaag

SEQ ID NO: 60848 - DNA, 20 bp, synthetic construct
  source 1..20: mol_type = other DNA
ggagtcactctgtcgcccaa

SEQ ID NO: 60849 - DNA, 20 bp, synthetic construct
  source 1..20: mol_type = other DNA
tggagtcactctgtcgccca

SEQ ID NO: 60850 - DNA, 20 bp, synthetic construct
  source 1..20: mol_type = other DNA
atggagtcactctgtcgccc

SEQ ID NO: 60851 - DNA, 20 bp, synthetic construct
  source 1..20: mol_type = other DNA
gatggagtcactctgtcgcc

SEQ ID NO: 60852 - DNA, 20 bp, synthetic construct
  source 1..20: mol_type = other DNA
agatggagtcactctgtcgc

SEQ ID NO: 60853 - DNA, 20 bp, synthetic construct
  source 1..20: mol_type = other DNA
gagatggagtcactctgtcg

SEQ ID NO: 60854 - DNA, 20 bp, synthetic construct
  source 1..20: mol_type = other DNA
tgagatggagtcactctgtc

SEQ ID NO: 60855 - DNA, 20 bp, synthetic construct
  source 1..20: mol_type = other DNA
ttgagatggagtcactctgt

SEQ ID NO: 60856 - DNA, 20 bp, synthetic construct
  source 1..20: mol_type = other DNA
tttgagatggagtcactctg

SEQ ID NO: 60857 - DNA, 20 bp, synthetic construct
  source 1..20: mol_type = other DNA
ttttgagatggagtcactct

SEQ ID NO: 60858 - DNA, 20 bp, synthetic construct
  source 1..20: mol_type = other DNA
tttttgagatggagtcactc

SEQ ID NO: 60859 - DNA, 20 bp, synthetic construct
  source 1..20: mol_type = other DNA
ttttttgagatggagtcact

SEQ ID NO: 60860 - DNA, 20 bp, synthetic construct
  source 1..20: mol_type = other DNA
tttttttgagatggagtcac

SEQ ID NO: 60861 - DNA, 20 bp, synthetic construct
  source 1..20: mol_type = other DNA
ttttttttgagatggagtca

SEQ ID NO: 60862 - DNA, 20 bp, synthetic construct
  source 1..20: mol_type = other DNA
tttttttttgagatggagtc

SEQ ID NO: 60863 - DNA, 20 bp, synthetic construct
  source 1..20: mol_type = other DNA
ttttttttttgagatggagt

SEQ ID NO: 60864 - DNA, 20 bp, synthetic construct
  source 1..20: mol_type = other DNA
tttttttttttgagatggag

SEQ ID NO: 60865 - DNA, 20 bp, synthetic construct
  source 1..20: mol_type = other DNA
ttttttttttttgagatgga

SEQ ID NO: 60866 - DNA, 20 bp, synthetic construct
  source 1..20: mol_type = other DNA
tttttttttttttgagatgg

SEQ ID NO: 60867 - DNA, 20 bp, synthetic construct
  source 1..20: mol_type = other DNA
ttttttttttttttgagatg

SEQ ID NO: 60868 - DNA, 20 bp, synthetic construct
  source 1..20: mol_type = other DNA
tttttttttttttttgagat

SEQ ID NO: 60869 - DNA, 20 bp, synthetic construct
  source 1..20: mol_type = other DNA
ttttttttttttttttgaga

SEQ ID NO: 60870 - DNA, 20 bp, synthetic construct
  source 1..20: mol_type = other DNA
tttttttttttttttttgag

SEQ ID NO: 60871 - DNA, 20 bp, synthetic construct
  source 1..20: mol_type = other DNA
ttttttttttttttttttga

SEQ ID NO: 60872 - DNA, 20 bp, synthetic construct
  source 1..20: mol_type = other DNA
cttttttttttttttttttg

SEQ ID NO: 60873 - DNA, 20 bp, synthetic construct
  source 1..20: mol_type = other DNA
tctttttttttttttttttt

SEQ ID NO: 60874 - DNA, 20 bp, synthetic construct
  source 1..20: mol_type = other DNA
gtcttttttttttttttttt

SEQ ID NO: 60875 - DNA, 20 bp, synthetic construct
  source 1..20: mol_type = other DNA
agtctttttttttttttttt

SEQ ID NO: 60876 - DNA, 20 bp, synthetic construct
  source 1..20: mol_type = other DNA
aagtcttttttttttttttt

SEQ ID NO: 60877 - DNA, 20 bp, synthetic construct
  source 1..20: mol_type = other DNA
taagtctttttttttttttt

SEQ ID NO: 60878 - DNA, 20 bp, synthetic construct
  source 1..20: mol_type = other DNA
ctaagtcttttttttttttt

SEQ ID NO: 60879 - DNA, 20 bp, synthetic construct
  source 1..20: mol_type = other DNA
tctaagtctttttttttttt

SEQ ID NO: 60880 - DNA, 20 bp, synthetic construct
  source 1..20: mol_type = other DNA
gtctaagtcttttttttttt

SEQ ID NO: 60881 - DNA, 20 bp, synthetic construct
  source 1..20: mol_type = other DNA
cgtctaagtctttttttttt

SEQ ID NO: 60882 - DNA, 20 bp, synthetic construct
  source 1..20: mol_type = other DNA
acgtctaagtcttttttttt

SEQ ID NO: 60883 - DNA, 20 bp, synthetic construct
  source 1..20: mol_type = other DNA
cacgtctaagtctttttttt

SEQ ID NO: 60884 - DNA, 20 bp, synthetic construct
  source 1..20: mol_type = other DNA
acacgtctaagtcttttttt

SEQ ID NO: 60885 - DNA, 20 bp, synthetic construct
  source 1..20: mol_type = other DNA
gacacgtctaagtctttttt

SEQ ID NO: 60886 - DNA, 20 bp, synthetic construct
  source 1..20: mol_type = other DNA
ggacacgtctaagtcttttt

SEQ ID NO: 60887 - DNA, 20 bp, synthetic construct
  source 1..20: mol_type = other DNA
tggacacgtctaagtctttt

SEQ ID NO: 60888 - DNA, 20 bp, synthetic construct
  source 1..20: mol_type = other DNA
ttggacacgtctaagtcttt

SEQ ID NO: 60889 - DNA, 20 bp, synthetic construct
  source 1..20: mol_type = other DNA
tttggacacgtctaagtctt

SEQ ID NO: 60890 - DNA, 20 bp, synthetic construct
  source 1..20: mol_type = other DNA
ttttggacacgtctaagtct

SEQ ID NO: 60891 - DNA, 20 bp, synthetic construct
  source 1..20: mol_type = other DNA
cttttggacacgtctaagtc

SEQ ID NO: 60892 - DNA, 20 bp, synthetic construct
  source 1..20: mol_type = other DNA
acttttggacacgtctaagt

SEQ ID NO: 60893 - DNA, 20 bp, synthetic construct
  source 1..20: mol_type = other DNA
tacttttggacacgtctaag

SEQ ID NO: 60894 - DNA, 20 bp, synthetic construct
  source 1..20: mol_type = other DNA
gtacttttggacacgtctaa

SEQ ID NO: 60895 - DNA, 20 bp, synthetic construct
  source 1..20: mol_type = other DNA
ggtacttttggacacgtcta

SEQ ID NO: 60896 - DNA, 20 bp, synthetic construct
  source 1..20: mol_type = other DNA
tggtacttttggacacgtct

SEQ ID NO: 60897 - DNA, 20 bp, synthetic construct
  source 1..20: mol_type = other DNA
atggtacttttggacacgtc

SEQ ID NO: 60898 - DNA, 20 bp, synthetic construct
  source 1..20: mol_type = other DNA
tatggtacttttggacacgt

SEQ ID NO: 60899 - DNA, 20 bp, synthetic construct
  source 1..20: mol_type = other DNA
gtatggtacttttggacacg

SEQ ID NO: 60900 - DNA, 20 bp, synthetic construct
  source 1..20: mol_type = other DNA
tgtatggtacttttggacac

SEQ ID NO: 60901 - DNA, 20 bp, synthetic construct
  source 1..20: mol_type = other DNA
atgtatggtacttttggaca

SEQ ID NO: 60902 - DNA, 20 bp, synthetic construct
  source 1..20: mol_type = other DNA
aatgtatggtacttttggac

SEQ ID NO: 60903 - DNA, 20 bp, synthetic construct
  source 1..20: mol_type = other DNA
aaatgtatggtacttttgga

SEQ ID NO: 60904 - DNA, 20 bp, synthetic construct
  source 1..20: mol_type = other DNA
taaatgtatggtacttttgg

SEQ ID NO: 60905 - DNA, 20 bp, synthetic construct
  source 1..20: mol_type = other DNA
ttaaatgtatggtacttttg

SEQ ID NO: 60906 - DNA, 20 bp, synthetic construct
  source 1..20: mol_type = other DNA
tttaaatgtatggtactttt

SEQ ID NO: 60907 - DNA, 20 bp, synthetic construct
  source 1..20: mol_type = other DNA
ttttaaatgtatggtacttt

SEQ ID NO: 60908 - DNA, 20 bp, synthetic construct
  source 1..20: mol_type = other DNA
tttttaaatgtatggtactt

SEQ ID NO: 60909 - DNA, 20 bp, synthetic construct
  source 1..20: mol_type = other DNA
ctttttaaatgtatggtact

SEQ ID NO: 60910 - DNA, 20 bp, synthetic construct
  source 1..20: mol_type = other DNA
tctttttaaatgtatggtac

SEQ ID NO: 60911 - DNA, 20 bp, synthetic construct
  source 1..20: mol_type = other DNA
gtctttttaaatgtatggta

SEQ ID NO: 60912 - DNA, 20 bp, synthetic construct
  source 1..20: mol_type = other DNA
tgtctttttaaatgtatggt

SEQ ID NO: 60913 - DNA, 20 bp, synthetic construct
  source 1..20: mol_type = other DNA
atgtctttttaaatgtatgg

SEQ ID NO: 60914 - DNA, 20 bp, synthetic construct
  source 1..20: mol_type = other DNA
catgtctttttaaatgtatg

SEQ ID NO: 60915 - DNA, 20 bp, synthetic construct
  source 1..20: mol_type = other DNA
gcatgtctttttaaatgtat

SEQ ID NO: 60916 - DNA, 20 bp, synthetic construct
  source 1..20: mol_type = other DNA
ggcatgtctttttaaatgta

SEQ ID NO: 60917 - DNA, 20 bp, synthetic construct
  source 1..20: mol_type = other DNA
tggcatgtctttttaaatgt

SEQ ID NO: 60918 - DNA, 20 bp, synthetic construct
  source 1..20: mol_type = other DNA
gtggcatgtctttttaaatg

SEQ ID NO: 60919 - DNA, 20 bp, synthetic construct
  source 1..20: mol_type = other DNA
tgtggcatgtctttttaaat

SEQ ID NO: 60920 - DNA, 20 bp, synthetic construct
  source 1..20: mol_type = other DNA
ttgtggcatgtctttttaaa

SEQ ID NO: 60921 - DNA, 20 bp, synthetic construct
  source 1..20: mol_type = other DNA
tttgtggcatgtctttttaa

SEQ ID NO: 60922 - DNA, 20 bp, synthetic construct
  source 1..20: mol_type = other DNA
gtttgtggcatgtcttttta

SEQ ID NO: 60923 - DNA, 20 bp, synthetic construct
  source 1..20: mol_type = other DNA
agtttgtggcatgtcttttt

SEQ ID NO: 60924 - DNA, 20 bp, synthetic construct
  source 1..20: mol_type = other DNA
cagtttgtggcatgtctttt

SEQ ID NO: 60925 - DNA, 20 bp, synthetic construct
  source 1..20: mol_type = other DNA
ccagtttgtggcatgtcttt

SEQ ID NO: 60926 - DNA, 20 bp, synthetic construct
  source 1..20: mol_type = other DNA
cccagtttgtggcatgtctt

SEQ ID NO: 60927 - DNA, 20 bp, synthetic construct
  source 1..20: mol_type = other DNA
tcccagtttgtggcatgtct

SEQ ID NO: 60928 - DNA, 20 bp, synthetic construct
  source 1..20: mol_type = other DNA
ttcccagtttgtggcatgtc

SEQ ID NO: 60929 - DNA, 20 bp, synthetic construct
  source 1..20: mol_type = other DNA
tttcccagtttgtggcatgt

SEQ ID NO: 60930 - DNA, 20 bp, synthetic construct
  source 1..20: mol_type = other DNA
ttttcccagtttgtggcatg

SEQ ID NO: 60931 - DNA, 20 bp, synthetic construct
  source 1..20: mol_type = other DNA
cttttcccagtttgtggcat

SEQ ID NO: 60932 - DNA, 20 bp, synthetic construct
  source 1..20: mol_type = other DNA
acttttcccagtttgtggca

SEQ ID NO: 60933 - DNA, 20 bp, synthetic construct
  source 1..20: mol_type = other DNA
tacttttcccagtttgtggc

SEQ ID NO: 60934 - DNA, 20 bp, synthetic construct
  source 1..20: mol_type = other DNA
ctacttttcccagtttgtgg

SEQ ID NO: 60935 - DNA, 20 bp, synthetic construct
  source 1..20: mol_type = other DNA
tctacttttcccagtttgtg

SEQ ID NO: 60936 - DNA, 20 bp, synthetic construct
  source 1..20: mol_type = other DNA
ttctacttttcccagtttgt

SEQ ID NO: 60937 - DNA, 20 bp, synthetic construct
  source 1..20: mol_type = other DNA
tttctacttttcccagtttg

SEQ ID NO: 60938 - DNA, 20 bp, synthetic construct
  source 1..20: mol_type = other DNA
ttttctacttttcccagttt

SEQ ID NO: 60939 - DNA, 20 bp, synthetic construct
  source 1..20: mol_type = other DNA
tttttctacttttcccagtt

SEQ ID NO: 60940 - DNA, 20 bp, synthetic construct
  source 1..20: mol_type = other DNA
atttttctacttttcccagt

SEQ ID NO: 60941 - DNA, 20 bp, synthetic construct
  source 1..20: mol_type = other DNA
tatttttctacttttcccag

SEQ ID NO: 60942 - DNA, 20 bp, synthetic construct
  source 1..20: mol_type = other DNA
ctatttttctacttttccca

SEQ ID NO: 60943 - DNA, 20 bp, synthetic construct
  source 1..20: mol_type = other DNA
actatttttctacttttccc

SEQ ID NO: 60944 - DNA, 20 bp, synthetic construct
  source 1..20: mol_type = other DNA
aactatttttctacttttcc

SEQ ID NO: 60945 - DNA, 20 bp, synthetic construct
  source 1..20: mol_type = other DNA
aaactatttttctacttttc

SEQ ID NO: 60946 - DNA, 20 bp, synthetic construct
  source 1..20: mol_type = other DNA
aaaactatttttctactttt

SEQ ID NO: 60947 - DNA, 20 bp, synthetic construct
  source 1..20: mol_type = other DNA
taaaactatttttctacttt

SEQ ID NO: 60948 - DNA, 20 bp, synthetic construct
  source 1..20: mol_type = other DNA
ttaaaactatttttctactt

SEQ ID NO: 60949 - DNA, 20 bp, synthetic construct
  source 1..20: mol_type = other DNA
tttaaaactatttttctact

SEQ ID NO: 60950 - DNA, 20 bp, synthetic construct
  source 1..20: mol_type = other DNA
ttttaaaactatttttctac

SEQ ID NO: 60951 - DNA, 20 bp, synthetic construct
  source 1..20: mol_type = other DNA
tttttaaaactatttttcta

SEQ ID NO: 60952 - DNA, 20 bp, synthetic construct
  source 1..20: mol_type = other DNA
atttttaaaactatttttct

SEQ ID NO: 60953 - DNA, 20 bp, synthetic construct
  source 1..20: mol_type = other DNA
catttttaaaactatttttc

SEQ ID NO: 60954 - DNA, 20 bp, synthetic construct
  source 1..20: mol_type = other DNA
tcatttttaaaactattttt

SEQ ID NO: 60955 - DNA, 20 bp, synthetic construct
  source 1..20: mol_type = other DNA
gtcatttttaaaactatttt

SEQ ID NO: 60956 - DNA, 20 bp, synthetic construct
  source 1..20: mol_type = other DNA
ggtcatttttaaaactattt

SEQ ID NO: 60957 - DNA, 20 bp, synthetic construct
  source 1..20: mol_type = other DNA
tggtcatttttaaaactatt

SEQ ID NO: 60958 - DNA, 20 bp, synthetic construct
  source 1..20: mol_type = other DNA
ctggtcatttttaaaactat

SEQ ID NO: 60959 - DNA, 20 bp, synthetic construct
  source 1..20: mol_type = other DNA
actggtcatttttaaaacta

SEQ ID NO: 60960 - DNA, 20 bp, synthetic construct
  source 1..20: mol_type = other DNA
cactggtcatttttaaaact

SEQ ID NO: 60961 - DNA, 20 bp, synthetic construct
  source 1..20: mol_type = other DNA
tcactggtcatttttaaaac

SEQ ID NO: 60962 - DNA, 20 bp, synthetic construct
  source 1..20: mol_type = other DNA
ttcactggtcatttttaaaa

SEQ ID NO: 60963 - DNA, 20 bp, synthetic construct
  source 1..20: mol_type = other DNA
attcactggtcatttttaaa

SEQ ID NO: 60964 - DNA, 20 bp, synthetic construct
  source 1..20: mol_type = other DNA
cattcactggtcatttttaa

SEQ ID NO: 60965 - DNA, 20 bp, synthetic construct
  source 1..20: mol_type = other DNA
acattcactggtcattttta

SEQ ID NO: 60966 - DNA, 20 bp, synthetic construct
  source 1..20: mol_type = other DNA
tacattcactggtcattttt

SEQ ID NO: 60967 - DNA, 20 bp, synthetic construct
  source 1..20: mol_type = other DNA
atacattcactggtcatttt

SEQ ID NO: 60968 - DNA, 20 bp, synthetic construct
  source 1..20: mol_type = other DNA
catacattcactggtcattt

SEQ ID NO: 60969 - DNA, 20 bp, synthetic construct
  source 1..20: mol_type = other DNA
tcatacattcactggtcatt

SEQ ID NO: 60970 - DNA, 20 bp, synthetic construct
  source 1..20: mol_type = other DNA
ttcatacattcactggtcat

SEQ ID NO: 60971 - DNA, 20 bp, synthetic construct
  source 1..20: mol_type = other DNA
tttcatacattcactggtca

SEQ ID NO: 60972 - DNA, 20 bp, synthetic construct
  source 1..20: mol_type = other DNA
ttttcatacattcactggtc

SEQ ID NO: 60973 - DNA, 20 bp, synthetic construct
  source 1..20: mol_type = other DNA
cttttcatacattcactggt

SEQ ID NO: 60974 - DNA, 20 bp, synthetic construct
  source 1..20: mol_type = other DNA
ccttttcatacattcactgg

SEQ ID NO: 60975 - DNA, 20 bp, synthetic construct
  source 1..20: mol_type = other DNA
accttttcatacattcactg

SEQ ID NO: 60976 - DNA, 20 bp, synthetic construct
  source 1..20: mol_type = other DNA
caccttttcatacattcact

SEQ ID NO: 60977 - DNA, 20 bp, synthetic construct
  source 1..20: mol_type = other DNA
ccaccttttcatacattcac

SEQ ID NO: 60978 - DNA, 20 bp, synthetic construct
  source 1..20: mol_type = other DNA
gccaccttttcatacattca

SEQ ID NO: 60979 - DNA, 20 bp, synthetic construct
  source 1..20: mol_type = other DNA
ggccaccttttcatacattc

SEQ ID NO: 60980 - DNA, 20 bp, synthetic construct
  source 1..20: mol_type = other DNA
gggccaccttttcatacatt

SEQ ID NO: 60981 - DNA, 20 bp, synthetic construct
  source 1..20: mol_type = other DNA
agggccaccttttcatacat

SEQ ID NO: 60982 - DNA, 20 bp, synthetic construct
  source 1..20: mol_type = other DNA
gagggccaccttttcataca

SEQ ID NO: 60983 - DNA, 20 bp, synthetic construct
  source 1..20: mol_type = other DNA
ggagggccaccttttcatac

SEQ ID NO: 60984 - DNA, 20 bp, synthetic construct
  source 1..20: mol_type = other DNA
aggagggccaccttttcata

SEQ ID NO: 60985 - DNA, 20 bp, synthetic construct
  source 1..20: mol_type = other DNA
gaggagggccaccttttcat

SEQ ID NO: 60986 - DNA, 20 bp, synthetic construct
  source 1..20: mol_type = other DNA
tgaggagggccaccttttca

SEQ ID NO: 60987 - DNA, 20 bp, synthetic construct
  source 1..20: mol_type = other DNA
gtgaggagggccaccttttc

SEQ ID NO: 60988 - DNA, 20 bp, synthetic construct
  source 1..20: mol_type = other DNA
agtgaggagggccacctttt

SEQ ID NO: 60989 - DNA, 20 bp, synthetic construct
  source 1..20: mol_type = other DNA
aagtgaggagggccaccttt

SEQ ID NO: 60990 - DNA, 20 bp, synthetic construct
  source 1..20: mol_type = other DNA
caagtgaggagggccacctt

SEQ ID NO: 60991 - DNA, 20 bp, synthetic construct
  source 1..20: mol_type = other DNA
acaagtgaggagggccacct

SEQ ID NO: 60992 - DNA, 20 bp, synthetic construct
  source 1..20: mol_type = other DNA
tacaagtgaggagggccacc

SEQ ID NO: 60993 - DNA, 20 bp, synthetic construct
  source 1..20: mol_type = other DNA
ttacaagtgaggagggccac

SEQ ID NO: 60994 - DNA, 20 bp, synthetic construct
  source 1..20: mol_type = other DNA
attacaagtgaggagggcca

SEQ ID NO: 60995 - DNA, 20 bp, synthetic construct
  source 1..20: mol_type = other DNA
cattacaagtgaggagggcc

SEQ ID NO: 60996 - DNA, 20 bp, synthetic construct
  source 1..20: mol_type = other DNA
tcattacaagtgaggagggc

SEQ ID NO: 60997 - DNA, 20 bp, synthetic construct
  source 1..20: mol_type = other DNA
atcattacaagtgaggaggg

SEQ ID NO: 60998 - DNA, 20 bp, synthetic construct
  source 1..20: mol_type = other DNA
aatcattacaagtgaggagg

SEQ ID NO: 60999 - DNA, 20 bp, synthetic construct
  source 1..20: mol_type = other DNA
aaatcattacaagtgaggag

SEQ ID NO: 61000 - DNA, 20 bp, synthetic construct
  source 1..20: mol_type = other DNA
taaatcattacaagtgagga

SEQ ID NO: 61001 - DNA, 20 bp, synthetic construct
  source 1..20: mol_type = other DNA
ttaaatcattacaagtgagg

SEQ ID NO: 61002 - DNA, 20 bp, synthetic construct
  source 1..20: mol_type = other DNA
cttaaatcattacaagtgag

SEQ ID NO: 61003 - DNA, 20 bp, synthetic construct
  source 1..20: mol_type = other DNA
tcttaaatcattacaagtga

SEQ ID NO: 61004 - DNA, 20 bp, synthetic construct
  source 1..20: mol_type = other DNA
ttcttaaatcattacaagtg

SEQ ID NO: 61005 - DNA, 20 bp, synthetic construct
  source 1..20: mol_type = other DNA
tttcttaaatcattacaagt

SEQ ID NO: 61006 - DNA, 20 bp, synthetic construct
  source 1..20: mol_type = other DNA
atttcttaaatcattacaag

SEQ ID NO: 61007 - DNA, 20 bp, synthetic construct
  source 1..20: mol_type = other DNA
catttcttaaatcattacaa

SEQ ID NO: 61008 - DNA, 20 bp, synthetic construct
  source 1..20: mol_type = other DNA
gcatttcttaaatcattaca

SEQ ID NO: 61009 - DNA, 20 bp, synthetic construct
  source 1..20: mol_type = other DNA
tgcatttcttaaatcattac

SEQ ID NO: 61010 - DNA, 20 bp, synthetic construct
  source 1..20: mol_type = other DNA
ctgcatttcttaaatcatta

SEQ ID NO: 61011 - DNA, 20 bp, synthetic construct
  source 1..20: mol_type = other DNA
actgcatttcttaaatcatt

SEQ ID NO: 61012 - DNA, 20 bp, synthetic construct
  source 1..20: mol_type = other DNA
aactgcatttcttaaatcat

SEQ ID NO: 61013 - DNA, 20 bp, synthetic construct
  source 1..20: mol_type = other DNA
aaactgcatttcttaaatca

SEQ ID NO: 61014 - DNA, 20 bp, synthetic construct
  source 1..20: mol_type = other DNA
taaactgcatttcttaaatc

SEQ ID NO: 61015 - DNA, 20 bp, synthetic construct
  source 1..20: mol_type = other DNA
ataaactgcatttcttaaat

SEQ ID NO: 61016 - DNA, 20 bp, synthetic construct
  source 1..20: mol_type = other DNA
aataaactgcatttcttaaa

SEQ ID NO: 61017 - DNA, 20 bp, synthetic construct
  source 1..20: mol_type = other DNA
aaataaactgcatttcttaa

SEQ ID NO: 61018 - DNA, 20 bp, synthetic construct
  source 1..20: mol_type = other DNA
aaaataaactgcatttctta

SEQ ID NO: 61019 - DNA, 20 bp, synthetic construct
  source 1..20: mol_type = other DNA
aaaaataaactgcatttctt

SEQ ID NO: 61020 - DNA, 20 bp, synthetic construct
  source 1..20: mol_type = other DNA
taaaaataaactgcatttct

SEQ ID NO: 61021 - DNA, 20 bp, synthetic construct
  source 1..20: mol_type = other DNA
ataaaaataaactgcatttc

SEQ ID NO: 61022 - DNA, 20 bp, synthetic construct
  source 1..20: mol_type = other DNA
aataaaaataaactgcattt

SEQ ID NO: 61023 - DNA, 20 bp, synthetic construct
  source 1..20: mol_type = other DNA
aaataaaaataaactgcatt

SEQ ID NO: 61024 - DNA, 20 bp, synthetic construct
  source 1..20: mol_type = other DNA
aaaataaaaataaactgcat

SEQ ID NO: 61025 - DNA, 20 bp, synthetic construct
  source 1..20: mol_type = other DNA
taaaataaaaataaactgca

SEQ ID NO: 61026 - DNA, 20 bp, synthetic construct
  source 1..20: mol_type = other DNA
ataaaataaaaataaactgc

SEQ ID NO: 61027 - DNA, 20 bp, synthetic construct
  source 1..20: mol_type = other DNA
aataaaataaaaataaactg

SEQ ID NO: 61028 - DNA, 20 bp, synthetic construct
  source 1..20: mol_type = other DNA
caataaaataaaaataaact

SEQ ID NO: 61029 - DNA, 20 bp, synthetic construct
  source 1..20: mol_type = other DNA
acaataaaataaaaataaac

SEQ ID NO: 61030 - DNA, 20 bp, synthetic construct
  source 1..20: mol_type = other DNA
tacaataaaataaaaataaa

SEQ ID NO: 61031 - DNA, 20 bp, synthetic construct
  source 1..20: mol_type = other DNA
atacaataaaataaaaataa

SEQ ID NO: 61032 - DNA, 20 bp, synthetic construct
  source 1..20: mol_type = other DNA
aatacaataaaataaaaata

SEQ ID NO: 61033 - DNA, 20 bp, synthetic construct
  source 1..20: mol_type = other DNA
aaatacaataaaataaaaat

SEQ ID NO: 61034 - DNA, 20 bp, synthetic construct
  source 1..20: mol_type = other DNA
aaaatacaataaaataaaaa

SEQ ID NO: 61035 - DNA, 20 bp, synthetic construct
  source 1..20: mol_type = other DNA
aaaaatacaataaaataaaa

SEQ ID NO: 61036 - DNA, 20 bp, synthetic construct
  source 1..20: mol_type = other DNA
taaaaatacaataaaataaa

SEQ ID NO: 61037 - DNA, 20 bp, synthetic construct
  source 1..20: mol_type = other DNA
ttaaaaatacaataaaataa

SEQ ID NO: 61038 - DNA, 20 bp, synthetic construct
  source 1..20: mol_type = other DNA
tttaaaaatacaataaaata

SEQ ID NO: 61039 - DNA, 20 bp, synthetic construct
  source 1..20: mol_type = other DNA
ctttaaaaatacaataaaat

SEQ ID NO: 61040 - DNA, 20 bp, synthetic construct
  source 1..20: mol_type = other DNA
tctttaaaaatacaataaaa

SEQ ID NO: 61041 - DNA, 20 bp, synthetic construct
  source 1..20: mol_type = other DNA
ttctttaaaaatacaataaa

SEQ ID NO: 61042 - DNA, 20 bp, synthetic construct
  source 1..20: mol_type = other DNA
tttctttaaaaatacaataa

SEQ ID NO: 61043 - DNA, 20 bp, synthetic construct
  source 1..20: mol_type = other DNA
atttctttaaaaatacaata

SEQ ID NO: 61044 - DNA, 20 bp, synthetic construct
  source 1..20: mol_type = other DNA
aatttctttaaaaatacaat

SEQ ID NO: 61045 - DNA, 20 bp, synthetic construct
  source 1..20: mol_type = other DNA
gaatttctttaaaaatacaa

SEQ ID NO: 61046 - DNA, 20 bp, synthetic construct
  source 1..20: mol_type = other DNA
tgaatttctttaaaaataca

SEQ ID NO: 61047 - DNA, 20 bp, synthetic construct
  source 1..20: mol_type = other DNA
ctgaatttctttaaaaatac

SEQ ID NO: 61048 - DNA, 20 bp, synthetic construct
  source 1..20: mol_type = other DNA
actgaatttctttaaaaata

SEQ ID NO: 61049 - DNA, 20 bp, synthetic construct
  source 1..20: mol_type = other DNA
aactgaatttctttaaaaat

SEQ ID NO: 61050 - DNA, 20 bp, synthetic construct
  source 1..20: mol_type = other DNA
aaactgaatttctttaaaaa

SEQ ID NO: 61051 - DNA, 20 bp, synthetic construct
  source 1..20: mol_type = other DNA
aaaactgaatttctttaaaa

SEQ ID NO: 61052 - DNA, 20 bp, synthetic construct
  source 1..20: mol_type = other DNA
taaaactgaatttctttaaa

SEQ ID NO: 61053 - DNA, 20 bp, synthetic construct
  source 1..20: mol_type = other DNA
ttaaaactgaatttctttaa

SEQ ID NO: 61054 - DNA, 20 bp, synthetic construct
  source 1..20: mol_type = other DNA
tttaaaactgaatttcttta

SEQ ID NO: 61055 - DNA, 20 bp, synthetic construct
  source 1..20: mol_type = other DNA
ctttaaaactgaatttcttt

SEQ ID NO: 61056 - DNA, 20 bp, synthetic construct
  source 1..20: mol_type = other DNA
gctttaaaactgaatttctt

SEQ ID NO: 61057 - DNA, 20 bp, synthetic construct
  source 1..20: mol_type = other DNA
tgctttaaaactgaatttct

SEQ ID NO: 61058 - DNA, 20 bp, synthetic construct
  source 1..20: mol_type = other DNA
ctgctttaaaactgaatttc

SEQ ID NO: 61059 - DNA, 20 bp, synthetic construct
  source 1..20: mol_type = other DNA
actgctttaaaactgaattt

SEQ ID NO: 61060 - DNA, 20 bp, synthetic construct
  source 1..20: mol_type = other DNA
cactgctttaaaactgaatt

SEQ ID NO: 61061 - DNA, 20 bp, synthetic construct
  source 1..20: mol_type = other DNA
ccactgctttaaaactgaat

SEQ ID NO: 61062 - DNA, 20 bp, synthetic construct
  source 1..20: mol_type = other DNA
tccactgctttaaaactgaa

SEQ ID NO: 61063 - DNA, 20 bp, synthetic construct
  source 1..20: mol_type = other DNA
ttccactgctttaaaactga

SEQ ID NO: 61064 - DNA, 20 bp, synthetic construct
  source 1..20: mol_type = other DNA
attccactgctttaaaactg

SEQ ID NO: 61065 - DNA, 20 bp, synthetic construct
  source 1..20: mol_type = other DNA
tattccactgctttaaaact

SEQ ID NO: 61066 - DNA, 20 bp, synthetic construct
  source 1..20: mol_type = other DNA
atattccactgctttaaaac

SEQ ID NO: 61067 - DNA, 20 bp, synthetic construct
  source 1..20: mol_type = other DNA
catattccactgctttaaaa

SEQ ID NO: 61068 - DNA, 20 bp, synthetic construct
  source 1..20: mol_type = other DNA
tcatattccactgctttaaa

SEQ ID NO: 61069 - DNA, 20 bp, synthetic construct
  source 1..20: mol_type = other DNA
atcatattccactgctttaa

SEQ ID NO: 61070 - DNA, 20 bp, synthetic construct
  source 1..20: mol_type = other DNA
aatcatattccactgcttta

SEQ ID NO: 61071 - DNA, 20 bp, synthetic construct
  source 1..20: mol_type = other DNA
caatcatattccactgcttt

SEQ ID NO: 61072 - DNA, 20 bp, synthetic construct
  source 1..20: mol_type = other DNA
acaatcatattccactgctt

SEQ ID NO: 61073 - DNA, 20 bp, synthetic construct
  source 1..20: mol_type = other DNA
gacaatcatattccactgct

SEQ ID NO: 61074 - DNA, 20 bp, synthetic construct
  source 1..20: mol_type = other DNA
agacaatcatattccactgc

SEQ ID NO: 61075 - DNA, 20 bp, synthetic construct
  source 1..20: mol_type = other DNA
tagacaatcatattccactg

SEQ ID NO: 61076 - DNA, 20 bp, synthetic construct
  source 1..20: mol_type = other DNA
atagacaatcatattccact

SEQ ID NO: 61077 - DNA, 20 bp, synthetic construct
  source 1..20: mol_type = other DNA
gatagacaatcatattccac

SEQ ID NO: 61078 - DNA, 20 bp, synthetic construct
  source 1..20: mol_type = other DNA
tgatagacaatcatattcca

SEQ ID NO: 61079 - DNA, 20 bp, synthetic construct
  source 1..20: mol_type = other DNA
ctgatagacaatcatattcc

SEQ ID NO: 61080 - DNA, 20 bp, synthetic construct
  source 1..20: mol_type = other DNA
gctgatagacaatcatattc

SEQ ID NO: 61081 - DNA, 20 bp, synthetic construct
  source 1..20: mol_type = other DNA
agctgatagacaatcatatt

SEQ ID NO: 61082 - DNA, 20 bp, synthetic construct
  source 1..20: mol_type = other DNA
aagctgatagacaatcatat

SEQ ID NO: 61083 - DNA, 20 bp, synthetic construct
  source 1..20: mol_type = other DNA
caagctgatagacaatcata

SEQ ID NO: 61084 - DNA, 20 bp, synthetic construct
  source 1..20: mol_type = other DNA
gcaagctgatagacaatcat

SEQ ID NO: 61085 - DNA, 20 bp, synthetic construct
  source 1..20: mol_type = other DNA
cgcaagctgatagacaatca

SEQ ID NO: 61086 - DNA, 20 bp, synthetic construct
  source 1..20: mol_type = other DNA
gcgcaagctgatagacaatc

SEQ ID NO: 61087 - DNA, 20 bp, synthetic construct
  source 1..20: mol_type = other DNA
agcgcaagctgatagacaat

SEQ ID NO: 61088 - DNA, 20 bp, synthetic construct
  source 1..20: mol_type = other DNA
cagcgcaagctgatagacaa

SEQ ID NO: 61089 - DNA, 20 bp, synthetic construct
  source 1..20: mol_type = other DNA
tcagcgcaagctgatagaca

SEQ ID NO: 61090 - DNA, 20 bp, synthetic construct
  source 1..20: mol_type = other DNA
ttcagcgcaagctgatagac

SEQ ID NO: 61091 - DNA, 20 bp, synthetic construct
  source 1..20: mol_type = other DNA
attcagcgcaagctgataga

SEQ ID NO: 61092 - DNA, 20 bp, synthetic construct
  source 1..20: mol_type = other DNA
cattcagcgcaagctgatag

SEQ ID NO: 61093 - DNA, 20 bp, synthetic construct
  source 1..20: mol_type = other DNA
ccattcagcgcaagctgata

SEQ ID NO: 61094 - DNA, 20 bp, synthetic construct
  source 1..20: mol_type = other DNA
accattcagcgcaagctgat

SEQ ID NO: 61095 - DNA, 20 bp, synthetic construct
  source 1..20: mol_type = other DNA
taccattcagcgcaagctga

SEQ ID NO: 61096 - DNA, 20 bp, synthetic construct
  source 1..20: mol_type = other DNA
ttaccattcagcgcaagctg

SEQ ID NO: 61097 - DNA, 20 bp, synthetic construct
  source 1..20: mol_type = other DNA
tttaccattcagcgcaagct

SEQ ID NO: 61098 - DNA, 20 bp, synthetic construct
  source 1..20: mol_type = other DNA
atttaccattcagcgcaagc

SEQ ID NO: 61099 - DNA, 20 bp, synthetic construct
  source 1..20: mol_type = other DNA
catttaccattcagcgcaag

SEQ ID NO: 61100 - DNA, 20 bp, synthetic construct
  source 1..20: mol_type = other DNA
acatttaccattcagcgcaa

SEQ ID NO: 61101 - DNA, 20 bp, synthetic construct
  source 1..20: mol_type = other DNA
cacatttaccattcagcgca

SEQ ID NO: 61102 - DNA, 20 bp, synthetic construct
  source 1..20: mol_type = other DNA
tcacatttaccattcagcgc

SEQ ID NO: 61103 - DNA, 20 bp, synthetic construct
  source 1..20: mol_type = other DNA
ctcacatttaccattcagcg

SEQ ID NO: 61104 - DNA, 20 bp, synthetic construct
  source 1..20: mol_type = other DNA
tctcacatttaccattcagc

SEQ ID NO: 61105 - DNA, 20 bp, synthetic construct
  source 1..20: mol_type = other DNA
ttctcacatttaccattcag

SEQ ID NO: 61106 - DNA, 20 bp, synthetic construct
  source 1..20: mol_type = other DNA
tttctcacatttaccattca

SEQ ID NO: 61107 - DNA, 20 bp, synthetic construct
  source 1..20: mol_type = other DNA
ctttctcacatttaccattc

SEQ ID NO: 61108 - DNA, 20 bp, synthetic construct
  source 1..20: mol_type = other DNA
tctttctcacatttaccatt

SEQ ID NO: 61109 - DNA, 20 bp, synthetic construct
  source 1..20: mol_type = other DNA
atctttctcacatttaccat

SEQ ID NO: 61110 - DNA, 20 bp, synthetic construct
  source 1..20: mol_type = other DNA
aatctttctcacatttacca

SEQ ID NO: 61111 - DNA, 20 bp, synthetic construct
  source 1..20: mol_type = other DNA
taatctttctcacatttacc

SEQ ID NO: 61112 - DNA, 20 bp, synthetic construct
  source 1..20: mol_type = other DNA
gtaatctttctcacatttac

SEQ ID NO: 61113 - DNA, 20 bp, synthetic construct
  source 1..20: mol_type = other DNA
agtaatctttctcacattta

SEQ ID NO: 61114 - DNA, 20 bp, synthetic construct
  source 1..20: mol_type = other DNA
tagtaatctttctcacattt

SEQ ID NO: 61115 - DNA, 20 bp, synthetic construct
  source 1..20: mol_type = other DNA
gtagtaatctttctcacatt

SEQ ID NO: 61116 - DNA, 20 bp, synthetic construct
  source 1..20: mol_type = other DNA
agtagtaatctttctcacat

SEQ ID NO: 61117 - DNA, 20 bp, synthetic construct
  source 1..20: mol_type = other DNA
tagtagtaatctttctcaca

SEQ ID NO: 61118 - DNA, 20 bp, synthetic construct
  source 1..20: mol_type = other DNA
gtagtagtaatctttctcac

SEQ ID NO: 61119 - DNA, 20 bp, synthetic construct
  source 1..20: mol_type = other DNA
agtagtagtaatctttctca

SEQ ID NO: 61120 - DNA, 20 bp, synthetic construct
  source 1..20: mol_type = other DNA
aagtagtagtaatctttctc

SEQ ID NO: 61121 - DNA, 20 bp, synthetic construct
  source 1..20: mol_type = other DNA
taagtagtagtaatctttct

SEQ ID NO: 61122 - DNA, 20 bp, synthetic construct
  source 1..20: mol_type = other DNA
ctaagtagtagtaatctttc

SEQ ID NO: 61123 - DNA, 20 bp, synthetic construct
  source 1..20: mol_type = other DNA
actaagtagtagtaatcttt

SEQ ID NO: 61124 - DNA, 20 bp, synthetic construct
  source 1..20: mol_type = other DNA
cactaagtagtagtaatctt

SEQ ID NO: 61125 - DNA, 20 bp, synthetic construct
  source 1..20: mol_type = other DNA
ccactaagtagtagtaatct

SEQ ID NO: 61126 - DNA, 20 bp, synthetic construct
  source 1..20: mol_type = other DNA
accactaagtagtagtaatc

SEQ ID NO: 61127 - DNA, 20 bp, synthetic construct
  source 1..20: mol_type = other DNA
taccactaagtagtagtaat

SEQ ID NO: 61128 - DNA, 20 bp, synthetic construct
  source 1..20: mol_type = other DNA
gtaccactaagtagtagtaa

SEQ ID NO: 61129 - DNA, 20 bp, synthetic construct
  source 1..20: mol_type = other DNA
agtaccactaagtagtagta

SEQ ID NO: 61130 - DNA, 20 bp, synthetic construct
  source 1..20: mol_type = other DNA
cagtaccactaagtagtagt

SEQ ID NO: 61131 - DNA, 20 bp, synthetic construct
  source 1..20: mol_type = other DNA
tcagtaccactaagtagtag

SEQ ID NO: 61132 - DNA, 20 bp, synthetic construct
  source 1..20: mol_type = other DNA
ctcagtaccactaagtagta

SEQ ID NO: 61133 - DNA, 20 bp, synthetic construct
  source 1..20: mol_type = other DNA
cctcagtaccactaagtagt

SEQ ID NO: 61134 - DNA, 20 bp, synthetic construct
  source 1..20: mol_type = other DNA
ccctcagtaccactaagtag

SEQ ID NO: 61135 - DNA, 20 bp, synthetic construct
  source 1..20: mol_type = other DNA
tccctcagtaccactaagta

SEQ ID NO: 61136 - DNA, 20 bp, synthetic construct
  source 1..20: mol_type = other DNA
ctccctcagtaccactaagt

SEQ ID NO: 61137 - DNA, 20 bp, synthetic construct
  source 1..20: mol_type = other DNA
actccctcagtaccactaag

SEQ ID NO: 61138 - DNA, 20 bp, synthetic construct
  source 1..20: mol_type = other DNA
aactccctcagtaccactaa

SEQ ID NO: 61139 - DNA, 20 bp, synthetic construct
  source 1..20: mol_type = other DNA
caactccctcagtaccacta

SEQ ID NO: 61140 - DNA, 20 bp, synthetic construct
  source 1..20: mol_type = other DNA
gcaactccctcagtaccact

SEQ ID NO: 61141 - DNA, 20 bp, synthetic construct
  source 1..20: mol_type = other DNA
tgcaactccctcagtaccac

SEQ ID NO: 61142 - DNA, 20 bp, synthetic construct
  source 1..20: mol_type = other DNA
ttgcaactccctcagtacca

SEQ ID NO: 61143 - DNA, 20 bp, synthetic construct
  source 1..20: mol_type = other DNA
tttgcaactccctcagtacc

SEQ ID NO: 61144 - DNA, 20 bp, synthetic construct
  source 1..20: mol_type = other DNA
ttttgcaactccctcagtac

SEQ ID NO: 61145 - DNA, 20 bp, synthetic construct
  source 1..20: mol_type = other DNA
gttttgcaactccctcagta

SEQ ID NO: 61146 - DNA, 20 bp, synthetic construct
  source 1..20: mol_type = other DNA
tgttttgcaactccctcagt

SEQ ID NO: 61147 - DNA, 20 bp, synthetic construct
  source 1..20: mol_type = other DNA
gtgttttgcaactccctcag

SEQ ID NO: 61148 - DNA, 20 bp, synthetic construct
  source 1..20: mol_type = other DNA
agtgttttgcaactccctca

SEQ ID NO: 61149 - DNA, 20 bp, synthetic construct
  source 1..20: mol_type = other DNA
aagtgttttgcaactccctc

SEQ ID NO: 61150 - DNA, 20 bp, synthetic construct
  source 1..20: mol_type = other DNA
taagtgttttgcaactccct

SEQ ID NO: 61151 - DNA, 20 bp, synthetic construct
  source 1..20: mol_type = other DNA
ttaagtgttttgcaactccc

SEQ ID NO: 61152 - DNA, 20 bp, synthetic construct
  source 1..20: mol_type = other DNA
gttaagtgttttgcaactcc

SEQ ID NO: 61153 - DNA, 20 bp, synthetic construct
  source 1..20: mol_type = other DNA
tgttaagtgttttgcaactc

SEQ ID NO: 61154 - DNA, 20 bp, synthetic construct
  source 1..20: mol_type = other DNA
gtgttaagtgttttgcaact

SEQ ID NO: 61155 - DNA, 20 bp, synthetic construct
  source 1..20: mol_type = other DNA
agtgttaagtgttttgcaac

SEQ ID NO: 61156 - DNA, 20 bp, synthetic construct
  source 1..20: mol_type = other DNA
cagtgttaagtgttttgcaa

SEQ ID NO: 61157 - DNA, 20 bp, synthetic construct
  source 1..20: mol_type = other DNA
gcagtgttaagtgttttgca

SEQ ID NO: 61158 - DNA, 20 bp, synthetic construct
  source 1..20: mol_type = other DNA
agcagtgttaagtgttttgc

SEQ ID NO: 61159 - DNA, 20 bp, synthetic construct
  source 1..20: mol_type = other DNA
tagcagtgttaagtgttttg

SEQ ID NO: 61160 - DNA, 20 bp, synthetic construct
  source 1..20: mol_type = other DNA
ctagcagtgttaagtgtttt

SEQ ID NO: 61161 - DNA, 20 bp, synthetic construct
  source 1..20: mol_type = other DNA
actagcagtgttaagtgttt

SEQ ID NO: 61162 - DNA, 20 bp, synthetic construct
  source 1..20: mol_type = other DNA
cactagcagtgttaagtgtt

SEQ ID NO: 61163 - DNA, 20 bp, synthetic construct
  source 1..20: mol_type = other DNA
ccactagcagtgttaagtgt

SEQ ID NO: 61164 - DNA, 20 bp, synthetic construct
  source 1..20: mol_type = other DNA
cccactagcagtgttaagtg

SEQ ID NO: 61165 - DNA, 20 bp, synthetic construct
  source 1..20: mol_type = other DNA
tcccactagcagtgttaagt

SEQ ID NO: 61166 - DNA, 20 bp, synthetic construct
  source 1..20: mol_type = other DNA
atcccactagcagtgttaag

SEQ ID NO: 61167 - DNA, 20 bp, synthetic construct
  source 1..20: mol_type = other DNA
catcccactagcagtgttaa

SEQ ID NO: 61168 - DNA, 20 bp, synthetic construct
  source 1..20: mol_type = other DNA
ccatcccactagcagtgtta

SEQ ID NO: 61169 - DNA, 20 bp, synthetic construct
  source 1..20: mol_type = other DNA
accatcccactagcagtgtt

SEQ ID NO: 61170 - DNA, 20 bp, synthetic construct
  source 1..20: mol_type = other DNA
aaccatcccactagcagtgt

SEQ ID NO: 61171 - DNA, 20 bp, synthetic construct
  source 1..20: mol_type = other DNA
aaaccatcccactagcagtg

SEQ ID NO: 61172 - DNA, 20 bp, synthetic construct
  source 1..20: mol_type = other DNA
taaaccatcccactagcagt

SEQ ID NO: 61173 - DNA, 20 bp, synthetic construct
  source 1..20: mol_type = other DNA
ttaaaccatcccactagcag

SEQ ID NO: 61174 - DNA, 20 bp, synthetic construct
  source 1..20: mol_type = other DNA
cttaaaccatcccactagca

SEQ ID NO: 61175 - DNA, 20 bp, synthetic construct
  source 1..20: mol_type = other DNA
acttaaaccatcccactagc

SEQ ID NO: 61176 - DNA, 20 bp, synthetic construct
  source 1..20: mol_type = other DNA
tacttaaaccatcccactag

SEQ ID NO: 61177 - DNA, 20 bp, synthetic construct
  source 1..20: mol_type = other DNA
ttacttaaaccatcccacta

SEQ ID NO: 61178 - DNA, 20 bp, synthetic construct
  source 1..20: mol_type = other DNA
tttacttaaaccatcccact

SEQ ID NO: 61179 - DNA, 20 bp, synthetic construct
  source 1..20: mol_type = other DNA
ttttacttaaaccatcccac

SEQ ID NO: 61180 - DNA, 20 bp, synthetic construct
  source 1..20: mol_type = other DNA
gttttacttaaaccatccca

SEQ ID NO: 61181 - DNA, 20 bp, synthetic construct
  source 1..20: mol_type = other DNA
tgttttacttaaaccatccc

SEQ ID NO: 61182 - DNA, 20 bp, synthetic construct
  source 1..20: mol_type = other DNA
ttgttttacttaaaccatcc

SEQ ID NO: 61183 - DNA, 20 bp, synthetic construct
  source 1..20: mol_type = other DNA
cttgttttacttaaaccatc

SEQ ID NO: 61184 - DNA, 20 bp, synthetic construct
  source 1..20: mol_type = other DNA
acttgttttacttaaaccat

SEQ ID NO: 61185 - DNA, 20 bp, synthetic construct
  source 1..20: mol_type = other DNA
tacttgttttacttaaacca

SEQ ID NO: 61186 - DNA, 20 bp, synthetic construct
  source 1..20: mol_type = other DNA
ctacttgttttacttaaacc

SEQ ID NO: 61187 - DNA, 20 bp, synthetic construct
  source 1..20: mol_type = other DNA
gctacttgttttacttaaac

SEQ ID NO: 61188 - DNA, 20 bp, synthetic construct
  source 1..20: mol_type = other DNA
tgctacttgttttacttaaa

SEQ ID NO: 61189 - DNA, 20 bp, synthetic construct
  source 1..20: mol_type = other DNA
atgctacttgttttacttaa

SEQ ID NO: 61190 - DNA, 20 bp, synthetic construct
  source 1..20: mol_type = other DNA
aatgctacttgttttactta

SEQ ID NO: 61191 - DNA, 20 bp, synthetic construct
  source 1..20: mol_type = other DNA
gaatgctacttgttttactt

SEQ ID NO: 61192 - DNA, 20 bp, synthetic construct
  source 1..20: mol_type = other DNA
agaatgctacttgttttact

SEQ ID NO: 61193 - DNA, 20 bp, synthetic construct
  source 1..20: mol_type = other DNA
aagaatgctacttgttttac

SEQ ID NO: 61194 - DNA, 20 bp, synthetic construct
  source 1..20: mol_type = other DNA
taagaatgctacttgtttta

SEQ ID NO: 61195 - DNA, 20 bp, synthetic construct
  source 1..20: mol_type = other DNA
ttaagaatgctacttgtttt

SEQ ID NO: 61196 - DNA, 20 bp, synthetic construct
  source 1..20: mol_type = other DNA
tttaagaatgctacttgttt

SEQ ID NO: 61197 - DNA, 20 bp, synthetic construct
  source 1..20: mol_type = other DNA
gtttaagaatgctacttgtt

SEQ ID NO: 61198 - DNA, 20 bp, synthetic construct
  source 1..20: mol_type = other DNA
agtttaagaatgctacttgt

SEQ ID NO: 61199 - DNA, 20 bp, synthetic construct
  source 1..20: mol_type = other DNA
gagtttaagaatgctacttg

SEQ ID NO: 61200 - DNA, 20 bp, synthetic construct
  source 1..20: mol_type = other DNA
agagtttaagaatgctactt

SEQ ID NO: 61201 - DNA, 20 bp, synthetic construct
  source 1..20: mol_type = other DNA
gagagtttaagaatgctact

SEQ ID NO: 61202 - DNA, 20 bp, synthetic construct
  source 1..20: mol_type = other DNA
agagagtttaagaatgctac

SEQ ID NO: 61203 - DNA, 20 bp, synthetic construct
  source 1..20: mol_type = other DNA
tagagagtttaagaatgcta

SEQ ID NO: 61204 - DNA, 20 bp, synthetic construct
  source 1..20: mol_type = other DNA
atagagagtttaagaatgct

SEQ ID NO: 61205 - DNA, 20 bp, synthetic construct
  source 1..20: mol_type = other DNA
aatagagagtttaagaatgc

SEQ ID NO: 61206 - DNA, 20 bp, synthetic construct
  source 1..20: mol_type = other DNA
taatagagagtttaagaatg

SEQ ID NO: 61207 - DNA, 20 bp, synthetic construct
  source 1..20: mol_type = other DNA
ctaatagagagtttaagaat

SEQ ID NO: 61208 - DNA, 20 bp, synthetic construct
  source 1..20: mol_type = other DNA
cctaatagagagtttaagaa

SEQ ID NO: 61209 - DNA, 20 bp, synthetic construct
  source 1..20: mol_type = other DNA
acctaatagagagtttaaga

SEQ ID NO: 61210 - DNA, 20 bp, synthetic construct
  source 1..20: mol_type = other DNA
tacctaatagagagtttaag

SEQ ID NO: 61211 - DNA, 20 bp, synthetic construct
  source 1..20: mol_type = other DNA
ttacctaatagagagtttaa

SEQ ID NO: 61212 - DNA, 20 bp, synthetic construct
  source 1..20: mol_type = other DNA
tttacctaatagagagttta

SEQ ID NO: 61213 - DNA, 20 bp, synthetic construct
  source 1..20: mol_type = other DNA
ctttacctaatagagagttt

SEQ ID NO: 61214 - DNA, 20 bp, synthetic construct
  source 1..20: mol_type = other DNA
tctttacctaatagagagtt

SEQ ID NO: 61215 - DNA, 20 bp, synthetic construct
  source 1..20: mol_type = other DNA
ttctttacctaatagagagt

SEQ ID NO: 61216 - DNA, 20 bp, synthetic construct
  source 1..20: mol_type = other DNA
attctttacctaatagagag

SEQ ID NO: 61217 - DNA, 20 bp, synthetic construct
  source 1..20: mol_type = other DNA
tattctttacctaatagaga

SEQ ID NO: 61218 - DNA, 20 bp, synthetic construct
  source 1..20: mol_type = other DNA
ctattctttacctaatagag

SEQ ID NO: 61219 - DNA, 20 bp, synthetic construct
  source 1..20: mol_type = other DNA
cctattctttacctaataga

SEQ ID NO: 61220 - DNA, 20 bp, synthetic construct
  source 1..20: mol_type = other DNA
acctattctttacctaatag

SEQ ID NO: 61221 - DNA, 20 bp, synthetic construct
  source 1..20: mol_type = other DNA
tacctattctttacctaata

SEQ ID NO: 61222 - DNA, 20 bp, synthetic construct
  source 1..20: mol_type = other DNA
ttacctattctttacctaat

SEQ ID NO: 61223 - DNA, 20 bp, synthetic construct
  source 1..20: mol_type = other DNA
cttacctattctttacctaa

SEQ ID NO: 61224 - DNA, 20 bp, synthetic construct
  source 1..20: mol_type = other DNA
acttacctattctttaccta

SEQ ID NO: 61225 - DNA, 20 bp, synthetic construct
  source 1..20: mol_type = other DNA
tacttacctattctttacct

SEQ ID NO: 61226 - DNA, 20 bp, synthetic construct
  source 1..20: mol_type = other DNA
ttacttacctattctttacc

SEQ ID NO: 61227 - DNA, 20 bp, synthetic construct
  source 1..20: mol_type = other DNA
attacttacctattctttac

SEQ ID NO: 61228 - DNA, 20 bp, synthetic construct
  source 1..20: mol_type = other DNA
cattacttacctattcttta

SEQ ID NO: 61229 - DNA, 20 bp, synthetic construct
  source 1..20: mol_type = other DNA
gcattacttacctattcttt

SEQ ID NO: 61230 - DNA, 20 bp, synthetic construct
  source 1..20: mol_type = other DNA
tgcattacttacctattctt

SEQ ID NO: 61231 - DNA, 20 bp, synthetic construct
  source 1..20: mol_type = other DNA
atgcattacttacctattct

SEQ ID NO: 61232 - DNA, 20 bp, synthetic construct
  source 1..20: mol_type = other DNA
tatgcattacttacctattc

SEQ ID NO: 61233 - DNA, 20 bp, synthetic construct
  source 1..20: mol_type = other DNA
atatgcattacttacctatt

SEQ ID NO: 61234 - DNA, 20 bp, synthetic construct
  source 1..20: mol_type = other DNA
catatgcattacttacctat

SEQ ID NO: 61235 - DNA, 20 bp, synthetic construct
  source 1..20: mol_type = other DNA
acatatgcattacttaccta

SEQ ID NO: 61236 - DNA, 20 bp, synthetic construct
  source 1..20: mol_type = other DNA
aacatatgcattacttacct

SEQ ID NO: 61237 - DNA, 20 bp, synthetic construct
  source 1..20: mol_type = other DNA
aaacatatgcattacttacc

SEQ ID NO: 61238 - DNA, 20 bp, synthetic construct
  source 1..20: mol_type = other DNA
gaaacatatgcattacttac

SEQ ID NO: 61239 - DNA, 20 bp, synthetic construct
  source 1..20: mol_type = other DNA
ggaaacatatgcattactta

SEQ ID NO: 61240 - DNA, 20 bp, synthetic construct
  source 1..20: mol_type = other DNA
tggaaacatatgcattactt

SEQ ID NO: 61241 - DNA, 20 bp, synthetic construct
  source 1..20: mol_type = other DNA
ctggaaacatatgcattact

SEQ ID NO: 61242 - DNA, 20 bp, synthetic construct
  source 1..20: mol_type = other DNA
cctggaaacatatgcattac

SEQ ID NO: 61243 - DNA, 20 bp, synthetic construct
  source 1..20: mol_type = other DNA
tcctggaaacatatgcatta

SEQ ID NO: 61244 - DNA, 20 bp, synthetic construct
  source 1..20: mol_type = other DNA
gtcctggaaacatatgcatt

SEQ ID NO: 61245 - DNA, 20 bp, synthetic construct
  source 1..20: mol_type = other DNA
tgtcctggaaacatatgcat

SEQ ID NO: 61246 - DNA, 20 bp, synthetic construct
  source 1..20: mol_type = other DNA
atgtcctggaaacatatgca

SEQ ID NO: 61247 - DNA, 20 bp, synthetic construct
  source 1..20: mol_type = other DNA
aatgtcctggaaacatatgc

SEQ ID NO: 61248 - DNA, 20 bp, synthetic construct
  source 1..20: mol_type = other DNA
aaatgtcctggaaacatatg

SEQ ID NO: 61249 - DNA, 20 bp, synthetic construct
  source 1..20: mol_type = other DNA
aaaatgtcctggaaacatat

SEQ ID NO: 61250 - DNA, 20 bp, synthetic construct
  source 1..20: mol_type = other DNA
gaaaatgtcctggaaacata

SEQ ID NO: 61251 - DNA, 20 bp, synthetic construct
  source 1..20: mol_type = other DNA
tgaaaatgtcctggaaacat

SEQ ID NO: 61252 - DNA, 20 bp, synthetic construct
  source 1..20: mol_type = other DNA
ctgaaaatgtcctggaaaca

SEQ ID NO: 61253 - DNA, 20 bp, synthetic construct
  source 1..20: mol_type = other DNA
actgaaaatgtcctggaaac

SEQ ID NO: 61254 - DNA, 20 bp, synthetic construct
  source 1..20: mol_type = other DNA
tactgaaaatgtcctggaaa

SEQ ID NO: 61255 - DNA, 20 bp, synthetic construct
  source 1..20: mol_type = other DNA
ttactgaaaatgtcctggaa

SEQ ID NO: 61256 - DNA, 20 bp, synthetic construct
  source 1..20: mol_type = other DNA
cttactgaaaatgtcctgga

SEQ ID NO: 61257 - DNA, 20 bp, synthetic construct
  source 1..20: mol_type = other DNA
tcttactgaaaatgtcctgg

SEQ ID NO: 61258 - DNA, 20 bp, synthetic construct
  source 1..20: mol_type = other DNA
gtcttactgaaaatgtcctg

SEQ ID NO: 61259 - DNA, 20 bp, synthetic construct
  source 1..20: mol_type = other DNA
agtcttactgaaaatgtcct

SEQ ID NO: 61260 - DNA, 20 bp, synthetic construct
  source 1..20: mol_type = other DNA
cagtcttactgaaaatgtcc

SEQ ID NO: 61261 - DNA, 20 bp, synthetic construct
  source 1..20: mol_type = other DNA
acagtcttactgaaaatgtc

SEQ ID NO: 61262 - DNA, 20 bp, synthetic construct
  source 1..20: mol_type = other DNA
aacagtcttactgaaaatgt

SEQ ID NO: 61263 - DNA, 20 bp, synthetic construct
  source 1..20: mol_type = other DNA
aaacagtcttactgaaaatg

SEQ ID NO: 61264 - DNA, 20 bp, synthetic construct
  source 1..20: mol_type = other DNA
taaacagtcttactgaaaat

SEQ ID NO: 61265 - DNA, 20 bp, synthetic construct
  source 1..20: mol_type = other DNA
gtaaacagtcttactgaaaa

SEQ ID NO: 61266 - DNA, 20 bp, synthetic construct
  source 1..20: mol_type = other DNA
agtaaacagtcttactgaaa

SEQ ID NO: 61267 - DNA, 20 bp, synthetic construct
  source 1..20: mol_type = other DNA
cagtaaacagtcttactgaa

SEQ ID NO: 61268 - DNA, 20 bp, synthetic construct
  source 1..20: mol_type = other DNA
tcagtaaacagtcttactga

SEQ ID NO: 61269 - DNA, 20 bp, synthetic construct
  source 1..20: mol_type = other DNA
atcagtaaacagtcttactg

SEQ ID NO: 61270 - DNA, 20 bp, synthetic construct
  source 1..20: mol_type = other DNA
tatcagtaaacagtcttact

SEQ ID NO: 61271 - DNA, 20 bp, synthetic construct
  source 1..20: mol_type = other DNA
ctatcagtaaacagtcttac

SEQ ID NO: 61272 - DNA, 20 bp, synthetic construct
  source 1..20: mol_type = other DNA
cctatcagtaaacagtctta

SEQ ID NO: 61273 - DNA, 20 bp, synthetic construct
  source 1..20: mol_type = other DNA
ccctatcagtaaacagtctt

SEQ ID NO: 61274 - DNA, 20 bp, synthetic construct
  source 1..20: mol_type = other DNA
accctatcagtaaacagtct

SEQ ID NO: 61275 - DNA, 20 bp, synthetic construct
  source 1..20: mol_type = other DNA
aaccctatcagtaaacagtc

SEQ ID NO: 61276 - DNA, 20 bp, synthetic construct
  source 1..20: mol_type = other DNA
caaccctatcagtaaacagt

SEQ ID NO: 61277 - DNA, 20 bp, synthetic construct
  source 1..20: mol_type = other DNA
acaaccctatcagtaaacag

SEQ ID NO: 61278 - DNA, 20 bp, synthetic construct
  source 1..20: mol_type = other DNA
cacaaccctatcagtaaaca

SEQ ID NO: 61279 - DNA, 20 bp, synthetic construct
  source 1..20: mol_type = other DNA
acacaaccctatcagtaaac

SEQ ID NO: 61280 - DNA, 20 bp, synthetic construct
  source 1..20: mol_type = other DNA
tacacaaccctatcagtaaa

SEQ ID NO: 61281 - DNA, 20 bp, synthetic construct
  source 1..20: mol_type = other DNA
ttacacaaccctatcagtaa

SEQ ID NO: 61282 - DNA, 20 bp, synthetic construct
  source 1..20: mol_type = other DNA
attacacaaccctatcagta

SEQ ID NO: 61283 - DNA, 20 bp, synthetic construct
  source 1..20: mol_type = other DNA
cattacacaaccctatcagt

SEQ ID NO: 61284 - DNA, 20 bp, synthetic construct
  source 1..20: mol_type = other DNA
gcattacacaaccctatcag

SEQ ID NO: 61285 - DNA, 20 bp, synthetic construct
  source 1..20: mol_type = other DNA
agcattacacaaccctatca

SEQ ID NO: 61286 - DNA, 20 bp, synthetic construct
  source 1..20: mol_type = other DNA
tagcattacacaaccctatc

SEQ ID NO: 61287 - DNA, 20 bp, synthetic construct
  source 1..20: mol_type = other DNA
ttagcattacacaaccctat

SEQ ID NO: 61288 - DNA, 20 bp, synthetic construct
  source 1..20: mol_type = other DNA
attagcattacacaacccta

SEQ ID NO: 61289 - DNA, 20 bp, synthetic construct
  source 1..20: mol_type = other DNA
tattagcattacacaaccct

SEQ ID NO: 61290 - DNA, 20 bp, synthetic construct
  source 1..20: mol_type = other DNA
atattagcattacacaaccc

SEQ ID NO: 61291 - DNA, 20 bp, synthetic construct
  source 1..20: mol_type = other DNA
tatattagcattacacaacc

SEQ ID NO: 61292 - DNA, 20 bp, synthetic construct
  source 1..20: mol_type = other DNA
gtatattagcattacacaac

SEQ ID NO: 61293 - DNA, 20 bp, synthetic construct
  source 1..20: mol_type = other DNA
agtatattagcattacacaa

SEQ ID NO: 61294 - DNA, 20 bp, synthetic construct
  source 1..20: mol_type = other DNA
aagtatattagcattacaca

SEQ ID NO: 61295 - DNA, 20 bp, synthetic construct
  source 1..20: mol_type = other DNA
taagtatattagcattacac

SEQ ID NO: 61296 - DNA, 20 bp, synthetic construct
  source 1..20: mol_type = other DNA
gtaagtatattagcattaca

SEQ ID NO: 61297 - DNA, 20 bp, synthetic construct
  source 1..20: mol_type = other DNA
agtaagtatattagcattac

SEQ ID NO: 61298 - DNA, 20 bp, synthetic construct
  source 1..20: mol_type = other DNA
tagtaagtatattagcatta

SEQ ID NO: 61299 - DNA, 20 bp, synthetic construct
  source 1..20: mol_type = other DNA
atagtaagtatattagcatt

SEQ ID NO: 61300 - DNA, 20 bp, synthetic construct
  source 1..20: mol_type = other DNA
gatagtaagtatattagcat

SEQ ID NO: 61301 - DNA, 20 bp, synthetic construct
  source 1..20: mol_type = other DNA
agatagtaagtatattagca

SEQ ID NO: 61302 - DNA, 20 bp, synthetic construct
  source 1..20: mol_type = other DNA
tagatagtaagtatattagc

SEQ ID NO: 61303 - DNA, 20 bp, synthetic construct
  source 1..20: mol_type = other DNA
ctagatagtaagtatattag

SEQ ID NO: 61304 - DNA, 20 bp, synthetic construct
  source 1..20: mol_type = other DNA
actagatagtaagtatatta

SEQ ID NO: 61305 - DNA, 20 bp, synthetic construct
  source 1..20: mol_type = other DNA
aactagatagtaagtatatt

SEQ ID NO: 61306 - DNA, 20 bp, synthetic construct
  source 1..20: mol_type = other DNA
aaactagatagtaagtatat

SEQ ID NO: 61307 - DNA, 20 bp, synthetic construct
  source 1..20: mol_type = other DNA
aaaactagatagtaagtata

SEQ ID NO: 61308 - DNA, 20 bp, synthetic construct
  source 1..20: mol_type = other DNA
taaaactagatagtaagtat

SEQ ID NO: 61309 - DNA, 20 bp, synthetic construct
  source 1..20: mol_type = other DNA
ctaaaactagatagtaagta

SEQ ID NO: 61310 - DNA, 20 bp, synthetic construct
  source 1..20: mol_type = other DNA
actaaaactagatagtaagt

SEQ ID NO: 61311 - DNA, 20 bp, synthetic construct
  source 1..20: mol_type = other DNA
tactaaaactagatagtaag

SEQ ID NO: 61312 - DNA, 20 bp, synthetic construct
  source 1..20: mol_type = other DNA
atactaaaactagatagtaa

SEQ ID NO: 61313 - DNA, 20 bp, synthetic construct
  source 1..20: mol_type = other DNA
aatactaaaactagatagta

SEQ ID NO: 61314 - DNA, 20 bp, synthetic construct
  source 1..20: mol_type = other DNA
taatactaaaactagatagt

SEQ ID NO: 61315 - DNA, 20 bp, synthetic construct
  source 1..20: mol_type = other DNA
ataatactaaaactagatag

SEQ ID NO: 61316 - DNA, 20 bp, synthetic construct
  source 1..20: mol_type = other DNA
aataatactaaaactagata

SEQ ID NO: 61317 - DNA, 20 bp, synthetic construct
  source 1..20: mol_type = other DNA
aaataatactaaaactagat

SEQ ID NO: 61318 - DNA, 20 bp, synthetic construct
  source 1..20: mol_type = other DNA
aaaataatactaaaactaga

SEQ ID NO: 61319 - DNA, 20 bp, synthetic construct
  source 1..20: mol_type = other DNA
aaaaataatactaaaactag

SEQ ID NO: 61320 - DNA, 20 bp, synthetic construct
  source 1..20: mol_type = other DNA
aaaaaataatactaaaacta

SEQ ID NO: 61321 - DNA, 20 bp, synthetic construct
  source 1..20: mol_type = other DNA
aaaaaaataatactaaaact

SEQ ID NO: 61322 - DNA, 20 bp, synthetic construct
  source 1..20: mol_type = other DNA
gaaaaaaataatactaaaac

SEQ ID NO: 61323 - DNA, 20 bp, synthetic construct
  source 1..20: mol_type = other DNA
agaaaaaaataatactaaaa

SEQ ID NO: 61324 - DNA, 20 bp, synthetic construct
  source 1..20: mol_type = other DNA
gagaaaaaaataatactaaa

SEQ ID NO: 61325 - DNA, 20 bp, synthetic construct
  source 1..20: mol_type = other DNA
agagaaaaaaataatactaa

SEQ ID NO: 61326 - DNA, 20 bp, synthetic construct
  source 1..20: mol_type = other DNA
aagagaaaaaaataatacta

SEQ ID NO: 61327 - DNA, 20 bp, synthetic construct
  source 1..20: mol_type = other DNA
caagagaaaaaaataatact

SEQ ID NO: 61328 - DNA, 20 bp, synthetic construct
  source 1..20: mol_type = other DNA
acaagagaaaaaaataatac

SEQ ID NO: 61329 - DNA, 20 bp, synthetic construct
  source 1..20: mol_type = other DNA
gacaagagaaaaaaataata

SEQ ID NO: 61330 - DNA, 20 bp, synthetic construct
  source 1..20: mol_type = other DNA
agacaagagaaaaaaataat

SEQ ID NO: 61331 - DNA, 20 bp, synthetic construct
  source 1..20: mol_type = other DNA
aagacaagagaaaaaaataa

SEQ ID NO: 61332 - DNA, 20 bp, synthetic construct
  source 1..20: mol_type = other DNA
caagacaagagaaaaaaata

SEQ ID NO: 61333 - DNA, 20 bp, synthetic construct
  source 1..20: mol_type = other DNA
ccaagacaagagaaaaaaat

SEQ ID NO: 61334 - DNA, 20 bp, synthetic construct
  source 1..20: mol_type = other DNA
tccaagacaagagaaaaaaa

SEQ ID NO: 61335 - DNA, 20 bp, synthetic construct
  source 1..20: mol_type = other DNA
atccaagacaagagaaaaaa

SEQ ID NO: 61336 - DNA, 20 bp, synthetic construct
  source 1..20: mol_type = other DNA
catccaagacaagagaaaaa

SEQ ID NO: 61337 - DNA, 20 bp, synthetic construct
  source 1..20: mol_type = other DNA
ccatccaagacaagagaaaa

SEQ ID NO: 61338 - DNA, 20 bp, synthetic construct
  source 1..20: mol_type = other DNA
accatccaagacaagagaaa

SEQ ID NO: 61339 - DNA, 20 bp, synthetic construct
  source 1..20: mol_type = other DNA
aaccatccaagacaagagaa

SEQ ID NO: 61340 - DNA, 20 bp, synthetic construct
  source 1..20: mol_type = other DNA
aaaccatccaagacaagaga

SEQ ID NO: 61341 - DNA, 20 bp, synthetic construct
  source 1..20: mol_type = other DNA
gaaaccatccaagacaagag

SEQ ID NO: 61342 - DNA, 20 bp, synthetic construct
  source 1..20: mol_type = other DNA
tgaaaccatccaagacaaga

SEQ ID NO: 61343 - DNA, 20 bp, synthetic construct
  source 1..20: mol_type = other DNA
ttgaaaccatccaagacaag

SEQ ID NO: 61344 - DNA, 20 bp, synthetic construct
  source 1..20: mol_type = other DNA
attgaaaccatccaagacaa
